(19) United States
(12) Patent Application Publication
(10) Pub. No.: US 2008/0113351 A1
(43) Pub. Date: May 15, 2008

(54) Polynucleotides for causing RNA interference and method for inhibiting gene expression using the same

(75) Inventors: Yuki Naito, Tokyo (JP); Masato Fujino, Tokyo (JP); Shinobu Oguchi, Tokyo (JP); Yukikazu Natori, Yokahama-Shi (JP)

Correspondence Address: BIRCH STEWART KOLASCH & BIRCH, PO BOX 747, FALLS CHURCH, VA, 22040-0747, US

(73) Assignee: alphaGEN Co., Ltd., Tokyo (JP)

(21) Appl. No.: 11/598,052

(22) Filed: Nov. 13, 2006

Related U.S. Application Data
(63) Continuation of application No. PCT/IB05/01647, filed on May 11, 2005.

(30) Foreign Application Priority Data
May 11, 2004 (JP) 232811/2004

(51) Int. Cl. A61K 48/00; C12Q 1/68; C07H 21/02

(52) U.S. Cl. 435/6; 514/44; 536/23.1

(57) ABSTRACT

The present invention provides a polynucleotide that not only has a high RNA interference effect on its target gene, but also has a very small risk of causing RNA interference against a gene unrelated to the target gene. A sequence segment conforming to the following rules (a) to (d) is searched from the base sequences of a target gene for RNA interference and, based on the search results, a polynucleotide capable of causing RNAi is designed, synthesized, etc.:
(a) The 3′ end base is adenine, thymine, or uracil,
(b) The 5′ end base is guanine or cytosine,
(c) A 7-base sequence from the 3′ end is rich in one or more types of bases selected from the group consisting of adenine, thymine, and uracil, and
(d) The number of bases is within a range that allows RNA interference to occur without causing cytotoxicity.

### TECHNICAL FIELD

[0001] The present invention relates to polynucleotides for causing RNA interference. Hereinafter, RNA interference may also be referred to as “RNAi.”

### BACKGROUND ART

[0002] RNA interference is a phenomenon of gene destruction wherein double-stranded RNA comprising sense RNA and anti-sense RNA (hereinafter also referred to as “dsRNA”) homologous to a specific region of a gene to be functionally inhibited, destructs the target gene by causing interference in the homologous portion of mRNA which is a transcript of the target gene. RNA interference was first proposed in 1998 following an experiment using nematodes. However, in mammals, when long dsRNA with about 30 or more base pairs is introduced into cells, an interferon response is induced, and cell death occurs due to apoptosis. Therefore, it was difficult to apply the RNAi method to mammals.

[0003] On the other hand, it was demonstrated that RNA interference could occur in early stage mouse embryos and cultured mammalian cells, and it was found that the induction mechanism of RNA interference also existed in the mammalian cells. At present, it has been demonstrated that short double-stranded RNA with about 21 to 23 base pairs (short interfering RNA, siRNA) can induce RNA interference without exhibiting cytotoxicity even in the mammalian cell system, and it has become possible to apply the RNAi method to mammals.

### DISCLOSURE OF THE INVENTION

[0004] The RNAi method is a technique which is expected to have various applications. However, while dsRNA or siRNA that is homologous to a specific region of a gene, exhibits an RNA interference effect in most of the sequences in drosophila and nematodes, 70% to 80% of randomly selected (21 base) siRNA do not exhibit an RNA interference effect in mammals. This poses a great problem when gene functional analysis is carried out using the RNAi method in mammals.

[0005] Conventional designing of siRNA has greatly depended on the experiences and sensory perceptions of the researcher or the like, and it has been difficult to design siRNA actually exhibiting an RNA interference effect with high probability. Other factors that prevent further research being conducted on RNA interference and its various applications are high costs and time consuming procedures required for carrying out an RNA synthesis resulting in part from the unwanted synthesis of siRNA.

[0006] In order to solve the above problems, the present invention aims to provide a polynucleotide capable of effectively acting as siRNA, a method for designing the same, a method for inhibiting gene expression using such a polynucleotide, a pharmaceutical composition comprising such a polynucleotide, and a composition for inhibiting gene expression.

### BRIEF DESCRIPTION OF THE DRAWINGS

[0007] FIG. 1 is a diagram which shows the designing of siRNA corresponding to sequences common to human and mice.

[0008] FIG. 2 is a diagram which shows the regularity of siRNA exhibiting an RNAi effect.

[0009] FIG. 3 is a diagram which shows common segments (shown in bold letters) having prescribed sequences in the base sequences of human FBP1 and mouse Fbp1.

[0010] FIG. 4 is a diagram listing prescribed sequences common to human FBP1 and mouse Fbp1.

[0011] FIG. 5 is a diagram in which the prescribed sequences common to human FBP1 and mouse Fbp1 are scored.

[0012] FIG. 6 is a diagram showing the results of BLAST searches on one of the prescribed sequences performed so that genes other than the target are not knocked out.

[0013] FIG. 7 is a diagram showing the results of BLAST searches on one of the prescribed sequences performed so that genes other than the target are not knocked out.

[0014] FIG. 8 is a diagram showing an output result of a program.

[0015] FIG. 9 is a diagram which shows the designing of RNA fragments (a to p).

[0016] FIG. 10 is a diagram showing the results of testing whether siRNA a to p exhibited an RNAi effect, in which “B” shows the results in drosophila cultured cells, and “C” shows the results in human cultured cells.

[0017] FIG. 11 is a diagram showing the analysis results concerning the characteristics of sequences of siRNA a to p.

[0018] FIG. 12 is a principle diagram showing the basic principle of the present invention.

[0019] FIG. 13 is a block diagram which shows an example of the configuration of a base sequence processing apparatus 100 of the system to which the present invention is applied.

[0020] FIG. 14 is a diagram which shows an example of information stored in a target gene base sequence file 106a.

[0021] FIG. 15 is a diagram which shows an example of information stored in a partial base sequence file 106b.

[0022] FIG. 16 is a diagram which shows an example of information stored in a determination result file 106c.

[0023] FIG. 17 is a diagram which shows an example of information stored in a prescribed sequence file 106d.

[0024] FIG. 18 is a diagram which shows an example of information stored in a reference sequence database 106e.

[0025] FIG. 19 is a diagram which shows an example of information stored in a degree of identity or similarity file 106f.

[0026] FIG. 20 is a diagram which shows an example of information stored in an evaluation result file 106g.

[0027] FIG. 21 is a block diagram which shows an example of the structure of a partial base sequence creation part 102a of the system to which the present invention is applied.

[0028] FIG. 22 is a block diagram which shows an example of the structure of an unrelated gene target evaluation part 102h of the system to which the present invention is applied.

[0029] FIG. 23 is a flowchart which shows an example of the main processing of the system in the embodiment.

[0030] FIG. 24 is a flowchart which shows an example of the unrelated gene evaluation process of the system in the embodiment.

[0031] FIG. 25 is a diagram which shows the structure of a target expression vector pTREC.

[0032] FIG. 26 is a diagram which shows the results of PCR in which one of the primers in Example 2, 2. (2) is designed such that no intron is inserted.

[0033] FIG. 27 is a diagram which shows the results of PCR in which one of the primers in Example 2, 2. (2) is designed such that an intron is inserted.

[0034] FIG. 28 is a diagram which shows the sequence and structure of siRNA; siVIM35.

[0035] FIG. 29 is a diagram which shows the sequence and structure of siRNA; siVIM812.

[0036] FIG. 30 is a diagram which shows the sequence and structure of siRNA; siControl.

[0037] FIG. 31 is a diagram which shows the results of assay of RNAi activity of siVIM812 and siVIM35.

[0038] FIG. 32 is a diagram which shows RNAi activity of siControl, siVIM812 and siVIM35 against vimentin.

[0039] FIG. 33 is a diagram which shows the results of antibody staining.

[0040] FIG. 34 is a diagram which shows the assay results of RNAi activity of siRNA designed by the program against the luciferase gene.

[0041] FIG. 35 is a diagram which shows the assay results of RNAi activity of siRNA designed by the program against the sequences of SARS virus.

[0042] FIG. 36 is a diagram which shows the assay results of RNAi activity of siRNA designed by the program against other genes containing sequences with a small number of mismatches to the siRNA.

[0043] FIG. 37 is a diagram which shows the relationship between apoptosis-related genes and GO_ID in Gene Ontology.

[0044] FIG. 38 is a diagram which shows the relationship between phosphatase or phosphatase activity-related genes and GO_ID in Gene Ontology.

[0045] FIG. 39 is a diagram which shows the relationship between cell cycle-related genes and GO_ID in Gene Ontology.

[0046] FIG. 40 is a diagram which shows the relationship between receptor-related genes and GO_ID in Gene Ontology.

[0047] FIG. 41 is a diagram which shows the relationship between ion channel-encoding genes and GO_ID in Gene Ontology.

[0048] FIG. 42 is a diagram which shows the relationship between signal transduction system-related genes and GO_ID in Gene Ontology.

[0049] FIG. 43 is a diagram which shows the relationship between kinase or kinase activity-related genes and GO_ID in Gene Ontology.

[0050] FIG. 44 is a diagram which shows the relationship between transcription regulation-related genes and GO_ID in Gene Ontology.

[0051] FIG. 45 is a diagram which shows the relationship between G protein-coupled receptor (GPCR) or GPCR-related genes and GO_ID in Gene Ontology.

[0052] FIG. 46 is a list of target sequences to be targeted by the polynucleotides of the present invention, along with their genes, biological function categories, reported biological functions and related diseases.

[0053] In FIG. 46, “Gene Name” and “refseq_NO.” correspond to the “RefSeq” database at NCBI (HYPERLINK “http://www.ncbi.nlm.nih.gov/” http://www.ncbi.nlm.nih.gov/), and information of each gene (including the sequence and function of the gene) can be obtained through access to the RefSeq database.

[0054] In FIG. 46, within the sequences listed in the column “Target Sequence,” actually targeted by RNAi is a portion covering the third base from the 5′ end to the third base from the 3′ end. Namely, the sequences listed in “Target Sequence” of FIG. 46 have, at both their 5′ and 3′ ends, additional 2 bases adjacent to the sequence targeted by RNAi. In the specification and claims of the present application, the term “prescribed sequence” in the narrow sense means a sequence actually targeted by RNAi and corresponds to, for example, a portion covering the third base from the 5′ end to the third base from the 3′ end of each “target sequence” in FIG. 46. For convenience sake, in the specification and claims of the present application, both terms “prescribed sequence” and “target sequence” are used, depending on the context, to mean the same sequence as the “prescribed sequence” in the narrow sense, or alternatively, to mean a sequence having additional 2 bases adjacent to the sequence targeted by RNAi, which are attached at both the 5′ and 3′ ends of the “prescribed sequence” in the narrow sense, as in the case of the “target sequences” in FIG. 46.

[0055] In the present specification and the claims, unless otherwise specified, the term “5′ end base” means the third base from the 5′ end of a sequence shown in the column “Target Sequence” of FIG. 46, while the term “3′ end base” means the third base from the 3′ end of a sequence shown in the column “Target Sequence” of FIG. 46. Thus, “Target Position” in FIG. 46 means a position in the sequence of each gene, which corresponds to the third base (for example, “g” in the case of the target sequence under Reference No. 1) from the 5′ end of each sequence shown in the column “Target Sequence” of FIG. 46.

[0056] In FIG. 46, “SEQ ID NO (human)” and “SEQ ID NO (mouse)” represent the sequence identification numbers (SEQ ID NOs) of individual target sequences shown in the sequence listing attached to this specification. Target sequences under the same reference number are identical between human and mouse.

### DETAILED DESCRIPTION OF THE INVENTION

[0057] In order to achieve the above object, the present inventors have studied a technique for easily obtaining siRNA, which is one of the steps requiring the greatest effort, time, and cost when the RNAi method is used. In view of the fact that preparation of siRNA is a problem especially in mammals, the present inventors have attempted to identify the sequence regularity of siRNA effective for RNA interference using mammalian cultured cell systems. As a result, it has been found that effective siRNA sequences have certain regularity, and thereby, the present invention has been completed. Namely, the present invention is as described below.

### [1] A polynucleotide for causing RNA interference against a target gene selected from the genes of a target organism, which has at least a double-stranded region,

[0058] wherein one strand in the double-stranded region consists of a base sequence homologous to a prescribed sequence which is contained in the base sequences of the target gene and which conforms to the following rules (a) to (d):

(a) The 3′ end base is adenine, thymine or uracil;
(b) The 5′ end base is guanine or cytosine;
(c) A 7-base sequence from the 3′ end is rich in one or more types of bases selected from the group consisting of adenine, thymine and uracil; and
(d) The number of bases is within a range that allows RNA interference to occur without causing cytotoxicity, and

[0059] wherein the other strand in the double-stranded region consists of a base sequence having a sequence complementary to the base sequence homologous to the prescribed sequence.

### [2] The polynucleotide according to [1], wherein at least 80% of bases in the base sequence homologous to the prescribed sequence corresponds to the base sequence of the prescribed sequence.

### [3] The polynucleotide according to [1] or [2], wherein, in the rule (c), at least three bases among the seven bases are one or more types of bases selected from the group consisting of adenine, thymine and uracil.

### [4] The polynucleotide according to any one of [1] to [3], wherein, in the rule (d), the number of bases is 13 to 28.

### [5] The polynucleotide according to any one of [1] to [4], wherein the prescribed sequence further conforms to the following rule (e):

[0060] (e) A sequence in which 10 or more bases of guanine or cytosine are continuously present is not contained.

### [6] The polynucleotide according to [5], wherein the prescribed sequence further conforms to the following rule (f):

[0061] (f) A sequence sharing at least 90% homology with the prescribed sequence is not contained in the base sequences of genes other than the target gene among all gene sequences of the target organism.

### [7] The polynucleotide according to [6], wherein the prescribed sequence consists of the base sequence shown in any of SEQ ID NOs: 47 to 817081.

### [8] The polynucleotide according to [6], wherein the prescribed sequence is any of the sequences listed in the column “Target Sequence” of FIG. 46.

### [9] The polynucleotide according to [6], which has any of the base sequences shown in SEQ ID NOs: 817102 to 817651.

### [10] The polynucleotide according to any one of [1] to [9], which is a double-stranded polynucleotide.

[0062] [11] The polynucleotide according to [10], wherein one strand of the double-stranded polynucleotide consists of a base sequence having an overhanging portion at the 3′ end of the base sequence homologous to the prescribed sequence, and the other strand of the double-stranded polynucleotide consists of a base sequence having an overhanging portion at the 3′ end of the sequence complementary to the base sequence homologous to the prescribed sequence.
[12] The polynucleotide according to any one of [1] to [9], which is a single-stranded polynucleotide having a hairpin structure, wherein the single-stranded polynucleotide has a loop segment linking the 3′ end of one strand in the double-stranded region and the 5′ end of the other strand in the double-stranded region.

### [13] A method for selecting a polynucleotide to be introduced into an expression system for a target gene whose expression is to be inhibited,

[0063] wherein the polynucleotide has at least a double-stranded region,

[0064] wherein one strand in the double-stranded region consists of a base sequence homologous to a prescribed sequence which is contained in the base sequences of the target gene and which conforms to the following rules (a) to (f):

(a) The 3′ end base is adenine, thymine or uracil;
(b) The 5′ end base is guanine or cytosine;
(c) A 7-base sequence from the 3′ end is rich in one or more types of bases selected from the group consisting of adenine, thymine and uracil;
(d) The number of bases is within a range that allows RNA interference to occur without causing cytotoxicity;
(e) A sequence in which 10 or more bases of guanine or cytosine are continuously present is not contained; and
(f) A sequence sharing at least 90% homology with the prescribed sequence is not contained in the base sequences of genes other than the target gene among all gene sequences of the target organism, and

[0065] wherein the other strand in the double-stranded region consists of a base sequence having a sequence complementary to the base sequence homologous to the prescribed sequence.

[14] The method for selecting a polynucleotide according to [13], wherein a polynucleotide having a sequence wherein the base sequence homologous to the prescribed sequence of the target gene contains mismatches of at least 3 bases against the base sequences of genes other than the target gene, and for which there is only a minimum number of other genes having a base sequence containing the mismatches of at least 3 bases, is further selected from the selected polynucleotides.
[15] A method for inhibiting gene expression, which comprises introducing the polynucleotide according to any one of [1] to [12] into an expression system for a target gene whose expression is to be inhibited, thereby inhibiting the expression of the target gene.
[16] A method for inhibiting gene expression, which comprises introducing a polynucleotide selected by the method according to [13] or [14] into an expression system for a target gene whose expression is to be inhibited, thereby inhibiting the expression of the target gene.

### [17] The method for inhibiting gene expression according to [15] or [16], wherein the expression is inhibited to 50% or below.

### [18] A pharmaceutical composition which comprises a pharmaceutically effective amount of the polynucleotide according to any one of [1] to [12].

### [19] The pharmaceutical composition according to [18], which is for use in treating or preventing the diseases listed in the column “Related Disease” of FIG. 46.

### [20] The pharmaceutical composition according to [18], which is for use in treating or preventing diseases related to the genes listed in the column “Gene Name” of FIG. 46.

[0066] [21] The pharmaceutical composition according to [18], which is for use in treating or preventing a disease in which a gene belonging to any of the following 1) to 9) is involved:
1) an apoptosis-related gene;
2) phosphatase or a phosphatase activity-related gene;
3) a cell cycle-related gene;
4) a receptor-related gene;
5) an ion channel-related gene;
6) a signal transduction system-related gene;
7) kinase or a kinase activity-related gene;
8) a transcription regulation-related gene; or

### 9) G protein-coupled receptor or a G protein-coupled receptor-related gene.

### [22] The pharmaceutical composition according to any one of [18] to [21], which comprises a polynucleotide targeting the base sequence shown in any of SEQ ID NOs listed in the column “SEQ ID NO (human)” or “SEQ ID NO (mouse)” of FIG. 46.

### [23] The pharmaceutical composition according to [18], which is for use in treating or preventing diseases related to the genes listed in the column “Gene Name” of Table 1.

[0067] [24] The pharmaceutical composition according to [18] or [23], which is for use in treating or preventing any cancer selected from bladder cancer, breast cancer, colorectal cancer, gastric cancer, hepatoma, lung cancer, melanoma, ovarian cancer, pancreas cancer, prostate cancer, oral cancer, skin cancer, and thyroid gland cancer.

### [25] The pharmaceutical composition according to any one of [18], [23] or [24], which comprises a polynucleotide having any of the base sequences shown in SEQ ID NOs: 817102 to 817651.

### [26] A composition for inhibiting gene expression to inhibit the expression of a target gene, which comprises the polynucleotide according to any one of [1] to [12].

### [27] The composition for inhibiting gene expression according to [26], wherein the target gene is related to any of the diseases listed in the column “Related Disease” of FIG. 46.

### [28] The composition for inhibiting gene expression according to [26], wherein the target gene is any of the genes listed in the column “Gene Name” of FIG. 46.

### [29] The composition for inhibiting gene expression according to [26], wherein the target gene is a gene belonging to any of the following 1) to 9):

[0068] 1) an apoptosis-related gene;
2) phosphatase or a phosphatase activity-related gene;
3) a cell cycle-related gene;
4) a receptor-related gene;
5) an ion channel-related gene;
6) a signal transduction system-related gene;
7) kinase or a kinase activity-related gene;
8) a transcription regulation-related gene; or

### 9) G protein-coupled receptor or a G protein-coupled receptor-related gene.

### [30] The composition for inhibiting gene expression according to [26], wherein the target gene is any of the genes listed in the column “Gene Name” of Table 1.

[0069] [31] The composition for inhibiting gene expression according to [26], wherein the target gene is related to any cancer selected from bladder cancer, breast cancer, colorectal cancer, gastric cancer, hepatoma, lung cancer, melanoma, ovarian cancer, pancreas cancer, prostate cancer, oral cancer, skin cancer, and thyroid gland cancer.

### [32] A method for treating or preventing the diseases listed in the column “Related Disease” of FIG. 46, which comprises administering a pharmaceutically effective amount of the polynucleotide according to any one of [1] to [12].

### ADVANTAGES OF THE INVENTION

[0070] The polynucleotide of the present invention not only has a high RNA interference effect on its target gene, but also has a very small risk of causing RNA interference against a gene unrelated to the target gene, so that the polynucleotide of the present invention can cause RNA interference specifically only to the target gene whose expression is to be inhibited. Thus, the polynucleotide of the present invention is preferred for use in, e.g., tests and therapies using RNA interference, and is particularly effective in performing RNA interference in higher animals such as mammals, especially humans.

### EMBODIMENTS FOR CARRYING OUT THE INVENTION

[0071] The embodiments of the present invention will be described below in the order of the columns <1> to <7>.

### <1> Method for searching target base sequence of RNA interference

### <2> Method for designing base sequence of polynucleotide for causing RNA interference

### <3> Method for producing polynucleotide

### <4> Method for inhibiting gene expression

[0072] <5> siRNA sequence design program
<6> siRNA sequence design business model system

### <7> Base sequence processing apparatus for running siRNA sequence design program, etc.

### <8> Pharmaceutical composition

### <9> Composition for inhibiting gene expression

### <10> Method for treating or preventing diseases

### <1> Method for Searching Target Base Sequence of RNA Interference

[0073] The search method of the present invention is a method for searching a base sequence, which causes RNA interference, from the base sequences of a target gene selected from the genes of a target organism. The target organism, to which RNA interference is to be caused, is not particularly limited and may be a microorganism such as a prokaryotic organism (including E. coli), yeast or a fungus, an animal (including a mammal), an insect, a plant or the like.

[0074] Specifically, in the search method of the present invention, a sequence segment conforming to the following rules (a) to (d) is searched from the base sequences of a target gene for RNA interference.

(a) The 3′ end base is adenine, thymine or uracil.
(b) The 5′ end base is guanine or cytosine.
(c) A 7-base sequence from the 3′ end is rich in one or more types of bases selected from the group consisting of adenine, thymine and uracil.
(d) The number of bases is within a range that allows RNA interference to occur without causing cytotoxicity.

[0075] The term “gene” in the term “target gene” means a medium which codes for genetic information. The “gene” consists of a substance, such as DNA, RNA, or a complex of DNA and RNA, which codes for genetic information. As the genetic information, instead of the substance itself, electronic data of base sequences can be handled in a computer or the like. The “target gene” may be set as one coding region, a plurality of coding regions, or all the polynucleotides whose sequences have been revealed. When a gene with a particular function is desired to be searched, by setting only the particular gene as the target, it is possible to efficiently search the base sequences which cause RNA interference specifically in the particular gene. Namely, RNA interference is known as a phenomenon which destructs mRNA by interference, and by selecting a particular coding region, search load can be reduced. Moreover, a group of transcription regions may be treated as the target region to be searched. Additionally, in the present specification, base sequences are shown on the basis of sense strands, i.e., sequences of mRNA, unless otherwise described. Furthermore, in the present specification, a base sequence which satisfies the rules (a) to (d) is referred to as a “prescribed sequence”. In the rules, thymine corresponds to a DNA base sequence, and uracil corresponds to an RNA base sequence.

[0076] The rule (c) regulates so that a sequence in the vicinity of the 3′ end contains a rich amount of type(s) of base(s) selected from the group consisting of adenine, thymine, and uracil, and more specifically, as an index for search, regulates so that a 7-base sequence from the 3′ end is rich in one or more types of bases selected from adenine, thymine, and uracil.

[0077] In the rule (c), the phrase “sequence rich in” means that the frequency of a given base appearing is high, and schematically, a 5 to 10-base sequence, preferably a 7-base sequence, from the 3′ end in the prescribed sequence contains one or more types of bases selected from adenine, thymine, and uracil in an amount of preferably at least 40% or more, and more preferably at least 50%. More specifically, for example, in a prescribed sequence of about 19 bases, among 7 bases from the 3′ end, preferably at least 3 bases, more preferably at least 4 bases, and particularly preferably at least 5 bases, are one or more types of bases selected from the group consisting of adenine, thymine, and uracil.

[0078] The means for confirming the correspondence to the rule (c) is not particularly limited as long as it can be confirmed that preferably at least 3 bases, more preferably at least 4 bases, and particularly preferably at least 5 bases, among 7 bases are adenine, thymine, or uracil. For example, a case, wherein inclusion of 3 or more bases which correspond to one or more types of bases selected from the group consisting of adenine, thymine, and uracil in a 7-base sequence from the 3′ end is defined as being rich, will be described below. Whether the base is any one of the three types of bases is checked from the first base at the 3′ end one after another, and when three corresponding bases appear by the seventh base, conformation to the rule (c) is determined. For example, if three corresponding bases appear by the third base, checking of three bases is sufficient. That is, in the search with respect to the rule (c), it is not always necessary to check all of the seven bases at the 3′ end. Conversely, non-appearance of three or more corresponding bases by the seventh base means being not rich, thus being determined that the rule (c) is not satisfied.

[0079] In a double-stranded polynucleotide, it is well-known that adenine complementarily forms hydrogen-bonds to thymine or uracil. In the complementary hydrogen bond between guanine and cytosine (G-C hydrogen bond), three hydrogen bonding sites are formed. On the other hand, the complementary hydrogen bond between adenine and thymine or uracil (A-(T/U) hydrogen bond) includes two hydrogen bonding sites. Generally speaking, the bonding strength of the A-(T/U) hydrogen bond is weaker than that of the G-C hydrogen bond.

[0080] In the rule (d), the number of bases of the base sequence to be searched is regulated. The number of bases of the base sequence to be searched corresponds to the number of bases capable of causing RNA interference. Depending on the conditions, for example the species of an organism, in cases of siRNA having an excessively large number of bases, cytotoxicity is known to occur. The upper limit of the number of bases varies depending on the species of organism to which RNA interference is desired to be caused. The number of bases of the single strand constituting siRNA is preferably 30 or less regardless of the species. Furthermore, in mammals, the number of bases is preferably 24 or less, and more preferably 22 or less. The lower limit, which is not particularly limited as long as RNA interference is caused, is preferably at least 15, more preferably at least 18, and still more preferably at least 20. With respect to the number of bases as a single strand constituting siRNA, searching with a number of 21 is particularly preferable.

[0081] Furthermore, although a description will be made below, in siRNA, an overhanging portion is provided at the 3′ end of the prescribed sequence. The number of bases in the overhanging portion is preferably 2. Consequently, the upper limit of the number of bases in the prescribed sequence only, excluding the overhanging portion, is preferably 28 or less, more preferably 22 or less, and still more preferably 20 or less, and the lower limit is preferably at least 13, more preferably at least 16, and still more preferably at least 18. In the prescribed sequence, the most preferable number of bases is 19. The target base sequence for RNAi may be searched either including or excluding the overhanging portion.

[0082] Base sequences conforming to the prescribed sequence have an extremely high probability of causing RNA interference. Consequently, in accordance with the search method of the present invention, it is possible to search sequences that cause RNA interference with extremely high probability, and designing of polynucleotides which cause RNA interference can be simplified.

[0083] In another preferred example, the prescribed sequence may be a sequence further conforming to the following rule (e). (e) A sequence in which 10 or more bases of guanine or cytosine are continuously present is not contained.

[0084] The rule (e) regulates so that the base sequence to be searched does not contain a sequence in which 10 or more bases of guanine (G) and/or cytosine (C) are continuously present. Examples of the sequence in which 10 or more bases of guanine and/or cytosine are continuously present include a sequence in which either guanine or cytosine is continuously present as well as a sequence in which a mixed sequence of guanine and cytosine is present. More specific examples include GGGGGGGGGG, CCCCCCCCCC, and a mixed sequence of GCGGCCCGCG.

[0085] In order to prevent RNA interference from occurring in genes not related to the target gene, preferably, a search is made to determine whether a sequence that is identical or similar to the designed sequence is included in the other genes. A search for the sequence that is identical or similar to the designed sequence may be performed using software capable of performing a general homology search, etc. In this case, in consideration of the RNAi effect caused by two strands (sense and antisense strands) of siRNA, a search is more preferably made on both the “designed sequence” and a “sequence having a base sequence complementary to the designed sequence (complementary sequence)” to determine whether an identical or similar sequence is included in the other genes. When sequences having a sequence that is identical/similar to the designed sequence or its complementary sequence are excluded from the designed sequences, it is possible to design a sequence which causes RNA interference specifically to the target gene only.

[0086] Thus, when sequences for which other genes have similar sequences containing a small number of mismatches in their base sequences are excluded from the designed sequences, it is possible to select a sequence with high specificity. For example, in the case of designing a base sequence of 19 bases, it is preferable to exclude sequences for which other genes have similar sequences containing mismatches of 2 or less bases. In this case, if the number of mismatches, a threshold for similarity determination, is set at a higher value, a sequence to be designed will have a higher specificity. In the case of designing a base sequence of 19 bases, it is more preferable to exclude sequences for which other genes have similar sequences containing mismatches of 3 or less bases, and it is still more preferable to exclude sequences for which other genes have similar sequences containing mismatches of 4 or less bases. Moreover, when sequences for which other genes have similar sequences containing a small number of mismatches in their base sequences are excluded with respect to both a sequence having the prescribed sequence and its complementary sequence, such exclusion is preferred because it is possible to design a sequence with a higher specificity.

[0087] The number of mismatches, a criterion for determining sequence similarity, will also vary depending on the number of bases in a sequence to be designed, and is therefore difficult to define sweepingly. Given that the number of mismatches in a base sequence is defined by homology, a search may be made to determine whether the base sequence conforms to the following rule (f). (f) A sequence sharing at least 90% homology with the prescribed sequence is not contained in the base sequences of genes other than the target gene among all gene sequences of the target organism.

[0088] In the rule (f), the base sequences of genes other than the target gene preferably do not contain a sequence sharing at least 85% homology with the prescribed sequence, more preferably do not contain a sequence sharing at least 80% homology with the prescribed sequence, and still more preferably do not contain a sequence sharing at least 75% homology with the prescribed sequence. Moreover, when sequences for which other genes have similar sequences with high base sequence homology are excluded with respect to both a sequence having the prescribed sequence and its complementary sequence, such exclusion is preferred because it is possible to design a sequence with a higher specificity.

[0089] Furthermore, in the search of the prescribed sequence, detection can be efficiently performed by using a computer installed with a program which allows a search of segments conforming to the rules (a) to (c), etc., after determining the number of bases. More specific embodiments will be described below in the columns <5> siRNA sequence design program and <7> Base sequence processing apparatus for running siRNA sequence design program.

[0090] The polynucleotides shown in the sequence listing of the present application under SEQ ID NOs: 47 to 817081 are human and mouse sequences that are selected as prescribed sequences conforming to the above rules (a) to (f) or that are selected as target sequences containing the prescribed sequences.

### <2> Method for Designing Base Sequence of Polynucleotide for Causing RNA Interference

[0091] In the method for designing a base sequence in accordance with the present invention, a base sequence of polynucleotide which causes RNA interference is designed on the basis of the base sequence searched by the search method described above. A polynucleotide for causing RNA interference is a polynucleotide having a double-stranded region designed on the basis of the prescribed sequence searched by the above search method. Such a polynucleotide is not particularly limited as long as it can cause RNA interference against a target gene.

[0092] Polynucleotides for causing RNA interference may be principally classified into a double-stranded type (e.g., siRNA) and a single-stranded type (e.g., RNA with a hairpin structure (short hairpin RNA: shRNA)).

[0093] Although siRNA and shRNA are mainly composed of RNA, they also include hybrid polynucleotides partially containing DNA. In the method for designing a base sequence in accordance with the present invention, a base sequence conforming to the rules (a) to (d) is searched from the base sequences of a target gene, and a base sequence homologous to the searched base sequence is designed. In another preferred design example, it may be possible to take into consideration the above rules (e) and (f), etc. The rules (a) to (d) and the search method are the same as those described above regarding the search method of the present invention.

[0094] With respect to the double-stranded region in the polynucleotide for causing RNA interference, one strand consists of a base sequence homologous to a prescribed sequence which is contained in the base sequences of a target gene and which conforms to the above rules (a) to (d), and the other strand consists of a base sequence having a sequence complementary to the base sequence homologous to the prescribed sequence. The term “homologous sequence” refers to the same sequence and a sequence in which mutations, such as deletions, substitutions, and additions, have occurred to the same sequence to an extent that the function of causing the RNA interference has not been lost. Although depending on the conditions, such as the type and sequence of the target gene, the range of the allowable mutation, in terms of homology, is preferably 80% or more, more preferably 90% or more, and still more preferably 95% or more. When homology in the range of the allowable mutation is calculated, desirably, the numerical values calculated using the same search algorithm are compared. The search algorithm is not particularly limited. A search algorithm suitable for searching for local sequences is preferable. More specifically, BLAST, ssearch, or the like is preferably used.

[0095] More specifically, the percent identity between nucleic acids (polynucleotides) can be determined by visual inspection and mathematical calculation. Alternatively, the percent identity of two nucleic acid sequences can be determined by visual inspection and mathematical calculation, or more preferably, the comparison is done by comparing sequence information using a computer program. An exemplary, preferred computer program is the Genetic Computer Group (GCG; Madison, Wis.) Wisconsin package version 10.0 program, “GAP” (Devereux et al., 1984, Nucl. Acids Res. 12:387). In addition to making a comparison between two nucleic acid sequences, this “GAP” program can be used for comparison between two amino acid sequences and between a nucleic acid sequence and an amino acid sequence. The preferred default parameters for the “GAP” program includes: (1) The GCG implementation of a unary comparison matrix (containing a value of 1 for identities and 0 for non-identities) for nucleotides, and the weighted amino acid comparison matrix of Gribskov and Burgess, Nucl. Acids Res. 14:6745, 1986, as described by Schwartz and Dayhoff, eds., Atlas of Polypeptide Sequence and Structure, National Biomedical Research Foundation, pp. 353-358, 1979; or other comparable comparison matrices; (2) a penalty of 30 for each gap and an additional penalty of 1 for each symbol in each gap for amino acid sequences, or penalty of 50 for each gap and an additional penalty of 3 for each symbol in each gap for nucleotide sequences; (3) no penalty for end gaps; and (4) no maximum penalty for long gaps. Other programs used by those skilled in the art of sequence comparison can also be used, such as, for example, the BLASTN program version 2.2.7, available for use via the National Library of Medicine website: http://www.ncbi.nlm.nih.gov/blast/bl2seq/bls.html, or the UW-BLAST 2.0 algorithm. Standard default parameter settings for UW-BLAST 2.0 are described at the following Internet site: http://blast.wustl.edu. In addition, the BLAST algorithm uses the BLOSUM62 amino acid scoring matrix, and optional parameters that can be used are as follows: (A) inclusion of a filter to mask segments of the query sequence that have low compositional complexity (as determined by the SEG program of Wootton and Federhen (Computers and Chemistry, 1993); also see Wootton and Federhen, 1996, Analysis of compositionally biased regions in sequence databases, Methods Enzymol. 266: 554-71) or segments consisting of short-periodicity internal repeats (as determined by the XNU program of Claverie and States (Computers and Chemistry, 1993)), and (B) a statistical significance threshold for reporting matches against database sequences, or E-score (the expected probability of matches being found merely by chance, according to the stochastic model of Karlin and Altschul, 1990; if the statistical significance ascribed to a match is greater than this E-score threshold, the match will not be reported.); preferred E-score threshold values are 0.5, or in order of increasing preference, 0.25, 0.1, 0.05, 0.01, 0.001, 0.0001, 1e-5, 1e-10, 1e-15, 1e-20, 1e-25, 1e-30, 1e-40, 1e-50, 1e-75, or 1e-100.

[0096] The polynucleotide of the present invention also includes a polynucleotide that is hybridizable, as a “base sequence homologous” to a prescribed sequence conforming to the above rules (a) to (d), to the prescribed sequence under stringent conditions (e.g., under moderately or highly stringent conditions) and that preferably has the ability to cause RNA interference.

[0097] The term “under stringent condition” means that two sequences can hybridize under moderately or highly stringent conditions. More specifically, moderately stringent conditions can be readily determined by those having ordinary skill in the art, e.g., depending on the length of DNA. The basic parameters affecting the choice of hybridization conditions are set forth by Sambrook et al., Molecular Cloning: A Laboratory Manual, third edition, chapters 6 and 7, Cold Spring Harbor Laboratory Press, 2001 and include the use of a prewashing solution for nitrocellulose filters 5×SSC, 0.5% SDS, 1.0 mM EDTA (pH 8.0), hybridization conditions of about 50% formamide, 2×SSC to 6×SSC at about 40-50° C. (or other similar hybridization solutions, such as Stark's solution, in about 50% formamide at about 42° C.) and washing conditions of about 60° C., 0.5×SSC, 0.1% SDS. Preferably, moderately stringent conditions may include hybridization at about 50° C. and 6×SSC. Highly stringent conditions can also be readily determined by those skilled in the art, e.g., depending on the length of DNA. Generally, such conditions include hybridization and/or washing at higher temperature and/or lower salt concentration (such as hybridization at about 65° C., 6×SCC-0.2×SSC, preferably 6×SCC, more preferably 2×SSC, most preferably 0.2×SSC), compared to the moderately stringent conditions. For example, highly stringent conditions may include hybridization as defined above, and washing at approximately 68° C., 0.2×SSC, 0.1% SDS. SSPE (1×SSPE is 0.15 M NaCl, 10 mM NaH₂PO₄, and 1.25 mM EDTA, pH 7.4) can be substituted for SSC (1×SSC is 0.15 M NaCl and 15 mM sodium citrate) in the hybridization and wash buffers; washes are performed for 15 minutes after hybridization is completed.

[0098] It should be understood that the wash temperature and wash salt concentration can be adjusted as necessary to achieve a desired degree of stringency by applying the basic principles that govern hybridization reactions and duplex stability, as known to those skilled in the art and described further below (see, e.g., Sambrook et al., 2001). When hybridizing a nucleic acid to a target nucleic acid of unknown sequence, the hybrid length is assumed to be that of the hybridizing nucleic acid. When nucleic acids of known sequence are hybridized, the hybrid length can be determined by aligning the sequences of the nucleic acids and identifying the region or regions of optimal sequence complementarity. The hybridization temperature for hybrids anticipated to be less than 50 base pairs in length should be 5° C. to 25° C. less than the melting temperature (Tm) of the hybrid, where Tm is determined according to the following equations. For hybrids less than 18 base pairs in length, Tm (° C.)=2(number of A+T bases)+4(number of G+C bases). For hybrids above 18 base pairs in length, Tm (° C.)=81.5° C.+16.6(log₁₀[Na⁺])+0.41(molar fraction [G+C])−0.63(% formamide−(500/N), where N is the number of bases in the hybrid, and [Na⁺] is the concentration of sodium ions in the hybridization buffer ([Na⁺] for 1×SSC=0.165 M).

[0099] As described above, although slight modification of the searched sequence is allowable, it is particularly preferred that the number of bases in the base sequence to be designed be the same as that of the searched sequence. For example, with respect to the allowance for change under the same number of bases, the bases of the base sequence to be designed correspond to those of the sequence searched at a rate of preferably 80% or more, more preferably 90% or more, and particularly preferably 95% or more. For example, when a base sequence having 19 bases is designed, preferably 16 or more bases, more preferably 18 or more bases, correspond to those of the searched base sequence. Furthermore, when a sequence homologous to the searched base sequence is designed, desirably, the 3′ end base of the base sequence searched is the same as the 3′ end base of the base sequence designed, and also desirably, the 5′ end base of the base sequence searched is the same as the 5′ end base of the base sequenced designed.

[0100] An overhanging portion is usually provided on a siRNA molecule. The overhanging portion is a protrusion provided on the 3′ end of each strand in a double-stranded RNA molecule. Although depending on the species of organism, the number of bases in the overhanging portion is preferably 2. Basically, any base sequence is acceptable in the overhanging portion. In some cases, the same base sequence as that of the target gene to be searched, TT, UU, or the like may be preferably used. As described above, by providing the overhanging portion at the 3′ end of the prescribed sequence which has been designed so as to be homologous to the base sequence searched, a sense strand constituting siRNA is designed.

[0101] Alternatively, it may be possible to search the prescribed sequence with the overhanging portion being included from the start to perform designing. The preferred number of bases in the overhanging portion is 2. Consequently, for example, in order to design a single strand constituting siRNA including a prescribed sequence having 19 bases and an overhanging portion having 2 bases, as the number of bases of siRNA including the overhanging portion, a sequence of 21 bases is searched from the target gene. Furthermore, when a double-stranded state is searched, a sequence of 23 bases may be searched.

[0102] shRNA is a single-stranded polynucleotide in which the 3′ end of one strand in the double-stranded region and the 5′ end of the other strand in the double-stranded region are linked through a loop segment. shRNA may have a protrusion in a single-stranded state at the 5′ end of the one strand and/or at the 3′ end of the other strand. Such shRNA can be designed according to known procedures as found in WO01/49844.

[0103] In the method for designing a base sequence in accordance with the present invention, as described above, a given sequence is searched from a desired target gene. The target to which RNA interference is intended to be caused does not necessarily correspond to the origin of the target gene, and is also applicable to an analogous species, etc. For example, it is possible to design siRNA used for a second species that is analogous to a first species using a gene isolated from the first species as a target gene. Furthermore, it is possible to design siRNA that can be widely applied to mammals, for example, by searching a common sequence from two or more species of mammals and searching a prescribed sequence from the common sequence to perform designing. The reason for this is that it is highly probable that the sequence common to two or more mammals exists in other mammals.

[0104] In the design method of the present invention, RNA molecules that cause RNA interference can be easily designed with high probability. Although synthesis of RNA still requires effort, time, and cost, the design method of the present invention can greatly minimize them.

### <3> Method for Producing Polynucleotide

[0105] By the method for producing a polynucleotide in accordance with the present invention, a polynucleotide that has a high probability of causing RNA interference can be produced. For the polynucleotide of the present invention, a base sequence of the polynucleotide is designed in accordance with the method for designing the base sequence of the present invention described above, and a polynucleotide is synthesized so as to follow the sequence design. Although, as described above, the polynucleotide of the present invention includes both double-stranded type (e.g., siRNA) and single-stranded type (e.g., shRNA), the following explanation will be made principally for double-stranded polynucleotides.

[0106] Preferred embodiments in the sequence design are the same as those described above regarding the method for designing the base sequence. Additionally, the double-stranded polynucleotide produced by the production method of the present invention is preferably composed of RNA, but a hybrid polynucleotide which partially contains DNA may be acceptable. In this specification, double-stranded polynucleotides partially containing DNA are also included in the concept of siRNA. Also, RNA and DNA constituting the polynucleotide may have chemical modifications such as methylation of sugar hydroxyl groups. For example, siRNA in this specification may have a hybrid structure composed of a DNA strand and an RNA strand. Although such a hybrid structure is not particularly limited as long as it provides the ability to inhibit the expression of a target gene when introduced into a recipient, it is desired that such a hybrid polynucleotide is a double-stranded polynucleotide having a sense strand composed of DNA and an antisense strand composed of RNA.

[0107] Alternatively, siRNA in this specification may also have a chimeric structure. The chimeric structure refers to a structure containing both DNA and RNA in a single-stranded polynucleotide. Such a chimeric structure is not particularly limited as long as it provides the ability to inhibit the expression of a target gene when introduced into a recipient. According to the research conducted by the present inventors, siRNA tends to have structural and functional asymmetry, and in view of the object of causing RNA interference, a half of the sense strand at the 5′ end side and a half of the antisense strand at the 3′ end side are desirably composed of RNA.

[0108] Incidentally, in siRNA having a chimeric structure, the content of RNA is preferably minimized in terms of in vivo stability in a recipient and production costs, etc. To this end, the inventors have made extensive and intensive efforts to study siRNA whose RNA content can be reduced while maintaining a high inhibitory effect on the expression of a target gene. As a result, the inventors have obtained the results indicating that a portion of 9 to 13 nucleotides from the 5′ end of the sense strand and a portion of 9 to 13 nucleotides from the 3′ end of the antisense strand (e.g., portions of 11 nucleotides, preferably 10 nucleotides, more preferably 9 nucleotides, from the above respective ends of the sense and antisense strands) are desirably composed of RNA and, in particularly, the 3′ end side of the antisense strand desirably has such a structure. The positions of RNA portions in the sense and antisense strands are not necessarily matched.

[0109] In a double-stranded polynucleotide, one strand is formed by providing an overhanging portion to the 3′ end of a base sequence homologous to the prescribed sequence conforming to the rules (a) to (d) contained in the base sequence of the target gene, and the other strand is formed by providing an overhanging portion to the 3′ end of a base sequence complementary to the base sequence homologous to the prescribed sequence. The number of bases in each strand, including the overhanging portion, is 18 to 24, more preferably 20 to 22, and particularly preferably 21. The number of bases in the overhanging portion is preferably 2. siRNA having 21 bases in total in which the overhanging portion is composed of 2 bases is suitable for causing RNA interference with high probability without causing cytotoxicity even in mammals.

[0110] RNA may be synthesized, for example, by chemical synthesis or by standard biotechnology. In one technique, a DNA strand having a predetermined sequence is produced, single-stranded RNA is synthesized using the produced DNA strand as a template in the presence of a transcriptase, and the synthesized single-stranded RNA is formed into double-stranded RNA.

[0111] With respect to the basic technique for molecular biology, there are many standard, experimental manuals, for example, BASIC METHODS IN MOLECULAR BIOLOGY (1986); Sambrook et al., MOLECULAR CLONING; A LABORATORY MANUAL, Second Edition, Cold Spring Harbor Laboratory Press, Cold Spring Harbor, N.Y. (1989); Saibo-Kogaku Handbook (Handbook for cell engineering), edited by Toshio Kuroki et al., Yodosha (1992); and Shin-Idenshi-Kogaku Handbook (New handbook for genetic engineering), edited by Muramatsu et al., Yodosha (1999).

[0112] One preferred embodiment of polynucleotide produced by the production method of the present invention is a double-stranded polynucleotide produced by a method in which a sequence segment including 13 to 28 bases conforming to the rules (a) to (d) is searched from a base sequence of a target gene for RNA interference, one strand is formed by providing an overhanging portion at the 3′ end of a base sequence homologous to the prescribed sequence following the rules (a) to (d), the other strand is formed by providing an overhanging portion at the 3′ end of a sequence complementary to the base sequence homologous to the prescribed sequence, and synthesis is performed so that the number of bases in each strand is 15 to 30. The resulting polynucleotide has a high probability of causing RNA interference.

[0113] It is also possible to prepare an expression vector which expresses siRNA. By placing a vector which expresses a sequence containing the prescribed sequence under a condition of a cell line or cell-free system in which expression is allowed to occur, it is possible to supply predetermined siRNA using the expression vector.

[0114] Since conventional designing of siRNA has depended on the experiences and intuition of the researcher, trial and error have often been repeated. However, by the double-stranded polynucleotide production method in accordance with the present invention, it is possible to produce a double-stranded polynucleotide which causes RNA interference with high probability. In accordance with the search method, sequence design method, or polynucleotide production method of the present invention, it is possible to greatly reduce effort, time, and cost required for various experiments, manufacturing, etc., which use RNA interference. Namely, the present invention greatly simplifies various experiments, research, development, manufacturing, etc., in which RNA interference is used, such as gene analysis, search for targets for new drug development, development of new drugs, gene therapy, and research on differences between species, and thus efficiency can be improved.

[0115] In one embodiment, the present invention also provides a method for selecting the polypeptide of the present invention described above. More specifically, the present invention provides a method for selecting a polynucleotide to be introduced into an expression system for a target gene whose expression is to be inhibited,

[0116] wherein the polynucleotide has at least a double-stranded region,

[0117] wherein one strand in the double-stranded region consists of a base sequence homologous to a prescribed sequence which is contained in the base sequences of the target gene and which conforms to the following rules (a) to (f):

(a) The 3′ end base is adenine, thymine or uracil;
(b) The 5′ end base is guanine or cytosine;
(c) A 7-base sequence from the 3′ end is rich in one or more types of bases selected from the group consisting of adenine, thymine and uracil;
(d) The number of bases is within a range that allows RNA interference to occur without causing cytotoxicity;
(e) A sequence in which 10 or more bases of guanine or cytosine are continuously present is not contained; and
(f) A sequence sharing at least 90% homology with the prescribed sequence is not contained in the base sequences of genes other than the target gene among all gene sequences of the target organism, and

[0118] wherein the other strand in the double-stranded region consists of a base sequence having a sequence complementary to the base sequence homologous to the prescribed sequence.

[0119] The sequence to be targeted by the polypeptide obtained by the selection method of the present invention is a sequence selected as a prescribed sequence conforming to the above rules (a) to (f). Preferably, such a sequence may be any of SEQ ID NOs: 47 to 817081.

[0120] In the selection method of the present invention, a polynucleotide having a sequence, wherein the base sequence homologous to the prescribed sequence of the target gene contains mismatches of at least 3 bases against the base sequences of genes other than the target gene, and for which there is only a minimum number of other genes having a base sequence containing the mismatches of at least 3 bases, may further be selected from the selected polynucleotides.

[0121] Namely, if the target sequence is a sequence highly specific to the target gene, the polynucleotide selectively produces an inhibitory effect only on the expression of the target gene containing the target sequence, but not on the other genes (i.e., the polynucleotide has less off-target effect), thus reducing influences of side effects, etc. It is therefore more preferred that the target sequence of the polynucleotide has high specificity to the target gene. Among the selected sequences (e.g., SEQ ID NOs: 47 to 817081), a sequence whose off-target effect can be further reduced is preferred as a prescribed sequence conforming to the above rules (a) to (f). As a preferred prescribed sequence of the target gene, it is possible to select a sequence which contains mismatches of at least 3 bases against the base sequences of other genes and for which there is a minimum number of other genes having a base sequence containing mismatches of at least 3 bases. The requirement “there is only a minimum number of other genes” means that “other genes having a base sequence containing mismatches of at least 3 bases” (i.e., similar genes) are as few in number as possible; for example, there are preferably 10 or less genes, more preferably 6 or less genes, still more preferably only one gene, or most preferably no gene.

[0122] For example, the 53998 sequences shown in FIG. 46 are obtained among SEQ ID NOs: 47 to 817081 by selecting sequences which contain mismatches of 3 bases against the base sequences of other genes (i.e., prescribed sequences of 19 bases (in the narrow sense) in which 16 bases other than these 3 mismatched bases are the same as those of other genes) and for which there is only a minimum number of other genes having a base sequence containing mismatches of 3 bases. Thus, the target sequence is particularly preferably any of these sequences.

### <4> Method for Inhibiting Gene Expression

[0123] The method for inhibiting gene expression in accordance with the present invention includes a step of searching a predetermined base sequence, a step of designing and synthesizing a base sequence of a polynucleotide based on the searched base sequence, and a step of introducing the resulting polynucleotide into an expression system containing a target gene.

[0124] The step of searching a predetermined base sequence follows the method for searching a target base sequence for RNA interference described above. Preferred embodiments are the same as those described above. The step of designing and synthesizing the base sequence of siRNA based on the searched base sequence can be carried out in accordance with the method for designing the base sequence of a polynucleotide for causing RNA interference and the method for producing a polynucleotide described above. Preferred embodiments are the same as those described above.

[0125] The resulting polynucleotide is added to an expression system for a target gene to inhibit the expression of the target gene. The expression system for a target gene means a system in which the target gene is expressed, and more specifically, a system provided with a reaction system in which at least mRNA of the target gene is formed. Examples of the expression system for a target gene include both in vitro and in vivo systems. In addition to cultured cells, cultured tissues, and living bodies, cell-free systems can also be used as expression systems for target genes. The target gene whose expression is intended to be inhibited (inhibition target gene) is not necessarily a gene of a species corresponding to the origin of the searched sequence. However, as the relationship between the origin of the search target gene and the origin of the inhibition target gene becomes closer, a predetermined gene can be more specifically and effectively inhibited.

[0126] Introduction into an expression system for a target gene means incorporation into the expression reaction system for the target gene. For example, in one method, a double-stranded nucleotide is transfected to a cultured cell including a target gene and incorporated into the cell. In another method, an expression vector having a base sequence comprising a prescribed sequence and an overhanging portion is formed, and the expression vector is introduced into a cell having a target gene (WO01/36646, WO01/49844).

[0127] In accordance with the gene inhibition method of the present invention, since polynucleotides which cause RNA interference can be efficiently produced, it is possible to inhibit genes efficiently and simply. Thus, for example, in a case where the target gene is a disease-related gene, siRNA (or shRNA) targeting the disease-related gene or a vector expressing such siRNA (or shRNA) may be introduced into cells which express the disease-related gene, so that the disease-related gene can be made inactive.

[0128] In Examples 2 to 5 described herein later, the RNAi effect of the polynucleotide of the present invention against the genes of human vimentin, luciferase, SARS virus and the like was examined as a relative expression level of mRNA compared to the control. FIGS. 31, 32 and 35 show the results of mRNA expression levels measured by quantitative PCR. In FIGS. 31, 32 and 35, the relative mRNA expression levels are respectively reduced to about 7-8% (Example 2, FIG. 31), about 12-13% (Example 3, FIG. 32), and a few % to less than about 15% (Example 5, FIG. 35); the polynucleotide of the present invention was confirmed to have an inhibitory effect on the expression of each gene. Likewise, FIG. 34 from Example 4 shows the results of mRNA expression levels (as RNAi effect) examined by luciferase activity. The luciferase activity was also reduced to a few % to less than about 20%, as compared to the control.

[0129] Moreover, in Example 8, among the genes shown in FIG. 46 whose related diseases and/or biological functions have been identified, about 300 genes selected at random were examined for the expression levels of their mRNA in human-derived HeLa cells, expressed as relative expression levels. As shown in Table 1, the RQ values (described later) that were calculated to evaluate an inhibitory effect on the expression of these genes, i.e., an RNAi effect were all less than 1, and almost all less than 0.5.

[0130] In the method for inhibiting gene expression in accordance with the present invention, the phrase “inhibiting the expression of the target gene” means that the mRNA expression level of the target gene is substantially reduced. If the mRNA expression level has been substantially reduced, inhibited expression has been achieved regardless of the degree of change in the mRNA expression level. In particular, since a larger amount of reduction means a higher inhibitory effect on expression, the criterion for inhibited expression may be, without being limited to, a case where the mRNA expression level is preferably reduced to about 80% or below, more preferably reduced to about 50% or below, still more preferably reduced to about 20% or below, still even more preferably reduced to about 15% or below, and further preferably reduced to about 8% or below. In accordance with the gene inhibition method of the present invention which uses a polynucleotide selected according to the rules of the present invention, it becomes possible to preferably cause at least a 50% or more reduction in the mRNA expression level of the target gene.

<5> siRNA Sequence Design Program

[0131] Embodiments of the siRNA sequence design program will be described below.

[0132] (5-1) Outline of the Program

[0133] When species whose genomes are not sequenced, for example, horse and swine, are subjected to RNA interference, this program calculates a sequence of siRNA usable in the target species based on published sequence information regarding human beings and mice. If siRNA is designed using this program, RNA interference can be carried out rapidly without sequencing the target gene. In the design (calculation) of siRNA, sequences having RNAi activity with high probability are selected in consideration of the rules of allocation of G or C (the rules (a) to (d) described above), and checking is performed by homology search so that RNA interference does not occur in genes that are not related to the target gene. In this specification, “G or C” may also be written as “G/C”, and “A or T” may also be written as “A/T”. Furthermore, “T(U)” in “A/T(U)” means T (thymine) in the case of sequences of deoxyribonucleic acid and U (uracil) in the case of sequences of ribonucleic acid.

[0134] (5-2) Policy of siRNA Design

[0135] Sequences of human gene X and mouse gene X which are homologous to the human gene are assumed to be known. This program reads the sequences and searches completely common sequences each having 23 or more bases from the coding regions (CDS). By designing siRNA from the common portions, the resulting siRNA can target both human and mouse gene X (FIG. 1).

[0136] Since the portions completely common to human beings and mice are believed to also exist in other mammals with high probability, the siRNA is expected to act not only on gene X of human beings and mice but also on gene X of other mammals. Namely, even if in an animal species in which the sequence of a target gene is not known, if sequence information is known regarding the corresponding homologues of human beings and mice, it is possible to design siRNA using this program.

[0137] Furthermore, in mammals, it is known that sequences of effective siRNA have regularity (FIG. 2). In this program, only sequences conforming to the rules are selected. FIG. 2 is a diagram which shows regularity of siRNA sequences exhibiting an RNAi effect (rules of G/C allocation of siRNA). In FIG. 2, with respect to siRNA in which two RNA strands, each having a length of 21 bases and having an overhang of 2 bases on the 3′ side, form base pairs between 19 bases at the 5′ side of the two strands, the sequence in the coding side among the 19 bases forming the base pairs must satisfy the following conditions: 1) The 3′ end is A/U; 2) the 5′ end is G/C, and 3) 7 characters on the 3′ side has a high ratio of A/U. In particular, the conditions 1) and 2) are important.

[0138] (5-3) Structure of Program

[0139] This program consists of three parts, i.e., (5-3-1) a part which searches sequences of sites common to human beings and mice (partial sequences), (5-3-2) a part which scores the sequences according to the rules of G/C allocation, and (5-3-3) a part which performs checking by homology search so that unrelated genes are not targeted.

[0140] (5-3-1) Part which Searches Common Sequences

[0141] This part reads a plurality of base sequence files (file 1, file 2, file 3, . . . ) and finds all sequences of 23 characters that commonly appear in all the files.

### CALCULATION EXAMPLE

[0142] As file 1, sequences of human gene FBP1 (HM_{—}000507: Homo sapiens fructose-1,6-bisphosphatase 1) and, as file 2, sequences of mouse gene Fbp1 (NM_{—}019395: Mus musculus fructose bisphosphatase 1) were inputted into the program. As a result, from the sequences of the two (FIG. 3), 15 sequences, each having 23 characters, that were common to the two (sequences common to human FBP1 and mouse Fbp1) were found (FIG. 4).

[0143] (5-3-2) Part which Scores Sequences

[0144] This part scores the sequences each having 23 characters in order to only select the sequences conforming to the rules of G/C allocation.

[0145] (Method)

[0146] The sequences each having 23 characters are scored in the following manner.

[0147] Score 1: Is the 21st character from the head A/U?
[0148] [no=0, yes=1]

[0149] Score 2: Is the third character from the head G/C?
[0150] [no=0, yes=1]

[0151] Score 3: The number of A/U among 7 characters between the 15th character and 21st character from the head
[0152] [0 to 7]

[0153] Total score: Product of scores 1 to 3. However, if the product is 3 or less, the total score is considered as zero.

### CALCULATION EXAMPLE

[0154] With respect to 15 sequences in FIG. 4, the results of calculation are shown in FIG. 5. FIG. 5 is a diagram in which the sequences common to human FBP1 and mouse Fbp1 are scored. Furthermore, score 1, score 2, score 3, and total score are described in this order after the sequences shown in FIG. 5.

[0155] (5-3-3) Part which Performs Checking so that Unrelated Genes are Not Targeted

[0156] In order to prevent the designed siRNA from acting on genes unrelated to the target gene, homology search is performed against all the published mRNA of human beings and mice, and the degree of unrelated genes being hit is evaluated. Various search algorithms can be used in the homology search. Herein, an example in which BLAST is used will be described. Additionally, when BLAST is used, in view that the sequences to be searched are as short as 23 bases, it is desirable that Word Size be decreased sufficiently.

[0157] After the Blast search, among the hits with an E-value of 10.0 or less, with respect to all the hits other than the target gene, the total sum of the reciprocals of the E-values are calculated (hereinafter, the value is referred to as a homology score). Namely, the homology score (X) is found in accordance with the following expression.

$$X = {\sum }_{all hits} \frac{1}{E}$$

[0158] Note: A lower E value of the hit indicates higher homology to 23 characters of the query and higher risk of being targeted by siRNA. A larger number of hits indicates a higher probability that more unrelated genes are targeted. In consideration of these two respects, the risk that siRNA targets genes unrelated to the target gene is evaluated using the above expression.

### CALCULATION EXAMPLE

[0159] The results of homology search against the sequences each having 23 characters and the homology scores are shown (FIGS. 6 and 7). FIG. 6 shows the results of BLAST searches of a sequence common to human FBP1 and mouse Fbp1, i.e., “caccctgacccgcttcgtcatgg”, and the first two lines are the results in which both mouse Fbp1 and human FBP1 are hit. The homology score is 5.9, and this is an example of a small number of hits. The risk that siRNA of this sequence targets other genes is low. Furthermore, FIG. 7 shows the results of BLAST searches of a sequence common to human FBP1 and mouse Fbp1, i.e., “gccttctgagaaggatgctctgc”. This is an example of a large number of hits, and the homology score is 170.8. Since the risk of targeting other genes is high, the sequence is not suitable as siRNA.

[0160] In practice, the parts (5-3-1), (5-3-2) and (5-3-3) may be integrated, and when the sequences of human beings and mice shown in FIG. 3 are inputted, an output as shown in FIG. 8 is directly obtained. Herein, after the sequences shown in FIG. 8, score 1, score 2, score 3, total score, and the tenfold value of homology score are described in this order. Additionally, in order to save processing time, the program may be designed so that the homology score is not calculated when the total score is zero. As a result, it is evident that the segment “36 caccctgacccgcttcgtcatgg” can be used as siRNA. Furthermore, one of the parts (5-3-1), (5-3-2) and (5-3-3) may be used independently.

[0161] (5-4) Actual Calculation

[0162] With respect to about 6,400 gene pairs among the homologues between human beings and mice, siRNA was actually designed using this program. As a result, regarding about 70% thereof, it was possible to design siRNA which had a sequence common to human beings and mice and which satisfied the rules of effective siRNA sequence regularity so that unrelated genes were not targeted.

[0163] These siRNA sequences are expected to effectively inhibit target genes not only in human beings and mice but also in a wide range of mammals, and are believed to have a high industrial value, such as applications to livestock and pet animals. Moreover, it is possible to design siRNA which simultaneously targets two or more genes of the same species, e.g., eIF2C1 and eIF2C2, using this program. Thus, the method for designing siRNA provided by this program has a wide range of application and is extremely strong. In further application, by designing a PCR primer using a sequence segment common to human beings and mice, target genes can be amplified in a wide range of mammals.

[0164] Additionally, embodiments of the apparatus which runs the siRNA sequence design program will be described in detail below in the column <7> Base sequence processing apparatus for running siRNA sequence design program.

<6> siRNA Sequence Design Business Model System

[0165] In the siRNA sequence design business model system of the present invention, when the siRNA sequence design program is applied, the system refers to a genome database, an EST database, and a phylogenetic tree database, alone or in combination, according to the logic of this program, and effective siRNA in response to availability of gene sequence information is proposed to the client. The term “availability” means a state in which information is available.

(1) In a case in which it is difficult to specify an ORF although genome information is available, siRNA candidates effective against assumed exon sites are extracted based on EST information, etc., and siRNA sequences in consideration of splicing variants and evaluation results thereof are displayed.

### (2) In a case in which a gene sequence and a gene name are known, after the input of the gene sequence or the gene name, effective siRNA candidates are extracted, and siRNA sequences and evaluation results thereof are displayed.

[0166] (3) In a case in which genome information is not available, using the gene sequences of a related species storing the same type of gene functions (congeneric or having the same origin) or gene sequences of two or more species which have a short distance in phylogenetic trees and of which genome sequences are available, effective siRNA candidates are extracted, and siRNA sequences and evaluation results thereof are displayed.
(4) In order to analyze functions of genes relating infectious diseases and search for targets for new drug development, a technique is effective in which the genome database and phylogenetic tree database of microorganisms are further combined with apoptosis induction site information and function expression site information of microorganisms to obtain exhaustive siRNA candidate sequences.

### <7> Base Sequence Processing Apparatus for Running siRNA Sequence Design Program, etc.

[0167] Embodiments of the base sequence processing apparatus which is an apparatus for running the siRNA sequence design program described above, the program for running a base sequence processing method on a computer, the recording medium, and the base sequence processing system in accordance with the present invention will be described in detail below with reference to the drawings. However, it is to be understood that the present invention is not restricted by the embodiments.

### [Summary of the Present Invention]

[0168] The summary of the present invention will be described below, and then the constitution, processing, etc., of the present invention will be described in detail. FIG. 12 is a principle diagram showing the basic principle of the present invention.

[0169] Overall, the present invention has the following basic features. That is, in the present invention, base sequence information of a target gene for RNA interference is obtained, and partial base sequence information corresponding to a sequence segment having a predetermined number of bases in the base sequence information is created (step S-1).

[0170] In step S-1, partial base sequence information having a predetermined number of bases may be created from a segment corresponding to a coding region or transcription region of the target gene in the base sequence information. Furthermore, partial base sequence information having a predetermined number of bases which is common in a plurality of base sequence information derived from different organisms (e.g., human base sequence information and mouse base sequence information) may be created. Furthermore, partial base sequence information having a predetermined number of bases which is common in a plurality of analogous base sequence information in the same species may be created. Furthermore, common partial base sequence information having a predetermined number of bases may be created from segments corresponding to coding regions or transcription regions of the target gene in a plurality of base sequence information derived from different species. Furthermore, common partial base sequence information having a predetermined number of bases may be created from segments corresponding to coding regions or transcription regions of the target gene in a plurality of analogous base sequence information in the same species. Consequently, a prescribed sequence which specifically causes RNA interference in the target gene can be efficiently selected, and calculation load can be reduced.

[0171] Furthermore, in step S-1, partial base sequence information including an overhanging portion may be created. Specifically, for example, partial base sequence information to which overhanging portion inclusion information, which shows that an overhanging portion is included, is added may be created. Namely, partial base sequence information and overhanging portion inclusion information may be correlated with each other. Thereby, it becomes possible to select the prescribed sequence with the overhanging portion being included from the start to perform designing.

[0172] The upper limit of the predetermined number of bases is, in the case of not including the overhanging portion, preferably 28 or less, more preferably 22 or less, and still more preferably 20 or less, and in the case of including the overhanging portion, preferably 32 or less, more preferably 26 or less, and still more preferably 24 or less. The lower limit of the predetermined number of bases is, in the case of not including the overhanging portion, preferably at least 13, more preferably at least 16, and still more preferably at least 18, and in the case of including the overhanging portion, preferably at least 17, more preferably at least 20, and still more preferably at least 22. Most preferably, the predetermined number of bases is, in the case of not including the overhanging portion, 19, and in the case of including the overhanging portion, 23. Thereby, it is possible to efficiently select the prescribed sequence which causes RNA interference without causing cytotoxicity even in mammals.

[0173] Subsequently, it is determined whether the 3′ end base in the partial base sequence information created in step S-1 is adenine, thymine, or uracil (step S-2). Specifically, for example, when the 3′ end base is adenine, thymine, or uracil, “1” may be outputted as the determination result, and when it is not, “0” may be outputted.

[0174] Subsequently, it is determined whether the 5′ end base in the partial base sequence information created in step S-1 is guanine or cytosine (step S-3). Specifically, for example, when the 5′ end base is guanine or cytosine, “1” may be outputted as the determination result, and when it is not, “0” may be outputted.

[0175] Subsequently, it is determined whether base sequence information comprising 7 bases at the 3′ end in the partial base sequence information created in step S-1 is rich in one or more types of bases selected from the group consisting of adenine, thymine, and uracil (step S-4). Specifically, for example, the number of bases of one or more types of bases selected from the group consisting of adenine, thymine, and uracil contained in the base sequence information comprising 7 bases at the 3′ end in the partial base sequence information may be outputted as the determination result. The rule of determination in step S-4 regulates that base sequence information in the vicinity of the 3′ end of the partial base sequence information created in step S-1 contains a rich amount of one or more types of bases selected from the group consisting of adenine, thymine, and uracil, and more specifically, as an index for search, regulates that the base sequence information in the range from the 3′ end base to the seventh base from the 3′ end is rich in one or more types of bases selected from the group consisting of adenine, thymine, and uracil.

[0176] In step S-4, the phrase “base sequence information rich in” corresponds to the phrase “sequence rich in” described in the column <1> Method for searching target base sequence for RNA interference. Specifically, for example, when the partial base sequence information created in step S-1 comprises about 19 bases, in the base sequence information comprising 7 bases in the partial base sequence information, preferably at least 3 bases, more preferably at least 4 bases, and particularly preferably at least 5 bases, are one or more types of bases selected from the group consisting of adenine, thymine, and uracil.

[0177] Furthermore, in steps S-2 to S-4, when partial base sequence information including the overhanging portion is determined, the sequence segment excluding the overhanging portion in the partial base sequence information is considered as the determination target.

[0178] Subsequently, based on the determination results in steps S-2, S-3, and S-4, prescribed sequence information which specifically causes RNA interference in the target gene is selected from the partial base sequence information created in step S-1 (Step S-5).

[0179] Specifically, for example, partial base sequence information in which the 3′ end base has been determined as adenine, thymine, or uracil in step S-2, the 5′ end base has been determined as guanine or cytosine in step S-3, and base sequence information comprising 7 bases at the 3′ end in the partial base sequence information has been determined as being rich in one or more types of bases selected from the group consisting of adenine, thymine, and uracil is selected as prescribed sequence information. Specifically, for example, a product of the values outputted in steps S-2, S-3, and S-4 may be calculated, and based on the product, prescribed sequence information may be selected from the partial base sequence information created in step S-1.

[0180] Consequently, it is possible to efficiently and easily produce a siRNA sequence which has an extremely high probability of causing RNA interference, i.e., which is effective for RNA interference, in mammals, etc.

[0181] Here, an overhanging portion may be added to at least one end of the prescribed sequence information selected in step S-5. Additionally, for example, when a target is searched, the overhanging portion may be added to both ends of the prescribed sequence information. Consequently, designing of a polynucleotide which causes RNA interference can be simplified.

[0182] Additionally, the number of bases in the overhanging portion corresponds to the number of bases described in the column <2> Method for designing base sequence of polynucleotide for causing RNA interference. Specifically, for example, 2 is particularly suitable as the number of bases.

[0183] Furthermore, base sequence information that is identical or similar to the prescribed sequence information selected in step S-5 may be searched from other base sequence information (e.g., base sequence information published in a public database, such as RefSeq (Reference Sequence project) of NCBI) using a known homology search method, such as BLAST, FASTA, or ssearch, and based on the searched identical or similar base sequence information, evaluation may be made whether the prescribed sequence information targets genes unrelated to the target gene.

[0184] Specifically, for example, base sequence information that is identical or similar to the prescribed sequence information selected in step S-5 is searched from other base sequence information (e.g., base sequence information published in a public database, such as RefSeq of NCBI) using a known homology search method, such as BLAST, FASTA, or ssearch. Based on the total amount of base sequence information on the genes unrelated to the target gene in the searched identical or similar base sequence information and the values showing the degree of identity or similarity (e.g., “E value” in BLAST, FASTA, or ssearch) attached to the base sequence information on the genes unrelated to the target gene, the total sum of the reciprocals of the values showing the degree of identity or similarity is calculated, and based on the calculated total sum (e.g., based on the size of the total sum calculated), evaluation may be made whether the prescribed sequence information targets genes unrelated to the target gene.

[0185] Consequently, it is possible to select a sequence which specifically causes RNA interference only to the target gene.

[0186] If RNA is synthesized based on the prescribed sequence information which is selected in accordance with the present invention and which does not cause RNA interference in genes unrelated to the target gene, it is possible to greatly reduce effort, time, and cost required compared with conventional techniques.

### [System Configuration]

[0187] First, the configuration of this system will be described. FIG. 13 is a block diagram which shows an example of the system to which the present invention is applied and which conceptually shows only the parts related to the present invention.

[0188] Schematically, in this system, a base sequence processing apparatus 100 which processes base sequence information of a target gene for RNA interference and an external system 200 which provides external databases regarding sequence information, structural information, etc., and external programs, such as homology search, are connected to each other via a network 300 in a communicable manner.

[0189] In FIG. 13, the network 300 has a function of interconnecting between the base sequence processing apparatus 100 and the external system 200, and is, for example, the Internet.

[0190] In FIG. 13, the external system 200 is connected to the base sequence processing apparatus 100 via the network 300, and has a function of providing the user with the external databases regarding sequence information, structural information, etc., and Web sites which execute external programs, such as homology search and motif search.

[0191] The external system 200 may be constructed as a WEB server, ASP server, or the like, and the hardware structure thereof may include a commercially available information processing apparatus, such as a workstation or a personal computer, and its accessories. Individual functions of the external system 200 are implemented by a CPU, a disk drive, a memory unit, an input unit, an output unit, a communication control unit, etc., and programs for controlling them in the hardware structure of the external system 200.

[0192] In FIG. 13, the base sequence processing apparatus 100 schematically includes a controller 102, such as a CPU, which controls the base sequence processing apparatus 100 overall; a communication control interface 104 which is connected to a communication device (not shown in the drawing), such as a router, connected to a communication line or the like; an input-output control interface 108 connected to an input unit 112 and an output unit 114; and a memory 106 which stores various databases and tables. These parts are connected via given communication channels in a communicable manner. Furthermore, the base sequence processing apparatus 100 is connected to the network 300 in a communicable manner via a communication device, such as a router, and a wired or radio communication line.

[0193] Various databases and tables (a target gene base sequence file 106a˜a target gene annotation database 106h) which are stored in the memory 106 are storage means, such as fixed disk drives, for storing various programs used for various processes, tables, files, databases, files for web pages, etc.

[0194] Among these components of the memory 106, the target gene base sequence file 106a is target gene base sequence storage means for storing base sequence information of the target gene for RNA interference. FIG. 14 is a diagram which shows an example of information stored in the target gene base sequence file 106a.

[0195] As shown in FIG. 14, the information stored in the target gene base sequence file 106a consists of base sequence identification information which uniquely identifies base sequence information of the target gene for RNA interference (e.g., “NM_{—}000507” in FIG. 14) and base sequence information (e.g., “ATGGCTGA . . . AGTGA” in FIG. 14), the base sequence identification information and the base sequence information being associated with each other.

[0196] Furthermore, a partial base sequence file 106b is partial base sequence storage means for storing partial base sequence information, i.e., a sequence segment having a predetermined number of bases in base sequence information of the target gene for RNA interference. FIG. 15 is a diagram which shows an example of information stored in the partial base sequence file 106b.

[0197] As shown in FIG. 15, the information stored in the partial base sequence file 106b consists of partial base sequence identification information which uniquely identifies partial base sequence information (e.g., “NM_{—}000507:36” in FIG. 15), partial base sequence information (e.g., “caccct . . . tcatgg” in FIG. 15), and information on inclusion of an overhanging portion which shows the inclusion of the overhanging portion (e.g., “included” in FIG. 15), the partial base sequence identification information, the partial base sequence information, and the information on inclusion of the overhanging portion being associated with each other.

[0198] A determination result file 106c is determination result storage means for storing the results determined by a 3′ end base determination part 102b, a 5′ end base determination part 102c, and a predetermined base inclusion determination part 102d, which will be described below. FIG. 16 is a diagram which shows an example of information stored in the determination result file 106c.

[0199] As shown in FIG. 16, the information stored in the determination result file 106c consists of partial base sequence identification information (e.g., “NM_{—}000507:36” in FIG. 16), determination result on 3′ end base corresponding to a result determined by the 3′ end base determination part 102b (e.g., “1” in FIG. 16), determination result on 5′ end base corresponding to a result determined by the 5′ end base determination part 102c (e.g., “1” in FIG. 16), determination result on inclusion of predetermined base corresponding to a result determined by the predetermined base inclusion determination part 102d (e.g., “4” in FIG. 16), and comprehensive determination result corresponding to a result obtained by putting together the results determined by the 3′ end base determination part 102b, the 5′ end base determination part 102c, and the predetermined base inclusion determination part 102d (e.g., “4” in FIG. 16), the partial base sequence identification information, the determination result on 3′ end base, the determination result on 5′ end base, the determination result on inclusion of predetermined base, and the comprehensive determination result being associated with each other.

[0200] Additionally, FIG. 16 shows an example of the case in which, with respect to the determination result on 3′ end base and the determination result on 5′ end base, “1” is set when determined as being “included” by each of the 3′ end base determination part 102b and the 5′ end base determination part 102c and “0” is set when determined as being “not included”. Furthermore, FIG. 16 shows an example of the case in which the determination result on inclusion of predetermined base is set as the number of bases corresponding to one or more types of bases selected from the group consisting of adenine, thymine, and uracil contained in the base sequence information comprising 7 bases at the 3′ end in the partial base sequence information. Furthermore, FIG. 16 shows an example of the case in which the comprehensive determination result is set as the product of the determination result on 3′ end base, the determination result on 5′ end base, and the determination result on inclusion of predetermined base. Specifically, for example, when the product is 3 or less, “0” may be set.

[0201] Furthermore, a prescribed sequence file 106d is prescribed sequence storage means for storing prescribed sequence information corresponding to partial base sequence information which specifically causes RNA interference in the target gene. FIG. 17 is a diagram which shows an example of information stored in the prescribed sequence file 106d.

[0202] As shown in FIG. 17, the information stored in the prescribed sequence file 106d consists of partial base sequence identification information (e.g., “NM_{—}000507:36” in FIG. 17) and prescribed sequence information corresponding to partial base sequence information which specifically causes RNA interference in the target gene (e.g., caccct . . . tcatgg” in FIG. 17), the partial base sequence identification information and the prescribed sequence information being associated with each other.

[0203] Furthermore, a reference sequence database 106e is a database which stores reference base sequence information corresponding to base sequence information to which reference is made to search base sequence information identical or similar to the prescribed sequence information by an identical/similar base sequence search part 102g, which will be described below. The reference sequence database 106e may be an external base sequence information database accessed via the Internet or may be an in-house database created by copying such a database, storing the original sequence information, or further adding unique annotation information to such a database. FIG. 18 is a diagram which shows an example of information stored in the reference sequence database 106e.

[0204] As shown in FIG. 18, the information stored in the reference sequence database 106e consists of reference sequence identification information (e.g., “ref|NM_{—}015820.1|” in FIG. 18) and reference base sequence information (e.g., “caccct . . . gcatgg” in FIG. 18), the reference sequence identification information and the reference base sequence information being associated with each other.

[0205] Furthermore, a degree of identity or similarity file 106f is degree of identity or similarity storage means for storing the degree of identity or similarity corresponding to a degree of identity or similarity of identical or similar base sequence information searched by an identical/similar base sequence search part 102g, which will be described below. FIG. 19 is a diagram which shows an example of information stored in the degree of identity or similarity file 106f.

[0206] As shown in FIG. 19, the information stored in the degree of identity or similarity file 106f consists of partial base sequence identification information (e.g., “NM_{—}000507:36” in FIG. 19), reference sequence identification information (e.g., “ref|NM_{—}015820.1|” and “ref|NM_{—}003837.1|” in FIG. 19), and degree of identity or similarity (e.g., “0.52” in FIG. 19), the partial base sequence identification information, the reference sequence identification information, and the degree of identity or similarity being associated with each other.

[0207] Furthermore, an evaluation result file 106g is evaluation result storage means for storing the result of evaluation on whether genes unrelated to the target gene are targeted by an unrelated gene target evaluation part 102h, which will be described below. FIG. 20 is a diagram which shows an example of information stored in the evaluation result file 106g.

[0208] As shown in FIG. 20, the information stored in the evaluation result file 106g consists of partial base sequence identification information (e.g., “NM_{—}000507:36” and “NM_{—}000507:441” in FIG. 20), total sum calculated by a total sum calculation part 102m, which will be described below, (e.g., “5.9” and “170.8” in FIG. 20), and evaluation result (e.g., “nontarget” and “target” in FIG. 20), the partial base sequence identification information, the total sum, and the evaluation result being associated with each other. Additionally, in FIG. 20, “nontarget” means that the prescribed sequence information does not target genes unrelated to the target gene, and “target” means that the prescribed sequence information targets genes unrelated to the target gene.

[0209] A target gene annotation database 106h is target gene annotation storage means for storing annotation information regarding the target gene. The target gene annotation database 106h may be an external annotation database which stores annotation information regarding genes and which is accessed via the Internet or may be an in-house database created by copying such a database, storing the original sequence information, or further adding unique annotation information to such a database.

[0210] The information stored in the target gene annotation database 106h consists of target gene identification information which identifies the target gene (e.g., the name of a gene to be targeted, and Accession number (e.g., “NM_{—}000507” and “FBP1” described on the top in FIG. 3)) and simplified information on the target gene (e.g., “Homo sapiens fructose-1,6-bisphosphatase 1” describe on the top in FIG. 3), the target gene identification information and the simplified information being associated with each other.

[0211] In FIG. 13, the communication control interface 104 controls communication between the base sequence processing apparatus 100 and the network 300 (or a communication device, such as a router). Namely, the communication control interface 104 performs data communication with other terminals via communication lines.

[0212] In FIG. 13, the input-output control interface 108 controls the input unit 112 and the output unit 114. Here, as the output unit 114, in addition to a monitor (including a home television), a speaker may be used (hereinafter, the output unit 114 may also be described as a monitor). As the input unit 112, a keyboard, a mouse, a microphone, or the like may be used. The monitor cooperates with a mouse to implement a pointing device function.

[0213] In FIG. 13, the controller 102 includes control programs, such as OS (Operating System), programs regulating various processing procedures, etc., and internal memories for storing required data, and performs information processing for implementing various processes using the programs, etc. The controller 102 functionally includes a partial base sequence creation part 102a, a 3′ end base determination part 102b, a 5′ end base determination part 102c, a predetermined base inclusion determination part 102d, a prescribed sequence selection part 102e, an overhanging portion-adding part 102f, an identical/similar base sequence search part 102g, and an unrelated gene target evaluation part 102h.

[0214] Among them, the partial base sequence creation part 102a is partial base sequence creation means for acquiring base sequence information of a target gene for RNA interference and creating partial base sequence information corresponding to a sequence segment having a predetermined number of bases in the base sequence information. As shown in FIG. 21, the partial base sequence creation part 102a includes a region-specific base sequence creation part 102i, a common base sequence creation part 102j, and an overhanging portion-containing base sequence creation part 102k.

[0215] FIG. 21 is a block diagram which shows an example of the structure of the partial base sequence creation part 102a of the system to which the present invention is applied and which shows only the parts related to the present invention.

[0216] In FIG. 21, the region-specific base sequence creation part 102i is region-specific base sequence creation means for creating partial base sequence information having a predetermined number of bases from a segment corresponding to a coding region or transcription region of the target gene in the base sequence information.

[0217] The common base sequence creation part 102j is common base sequence creation means for creating partial base sequence information having a predetermined number of bases which is common in a plurality of base sequence information derived from different organisms.

[0218] The overhanging portion-containing base sequence creation part 102k is overhanging portion-containing base sequence creation means for creating partial base sequence information containing an overhanging portion.

[0219] Referring back to FIG. 13, the 3′ end base determination part 102b is 3′ end base determination means for determining whether the 3′ end base in the partial base sequence information is adenine, thymine, or uracil.

[0220] Furthermore, the 5′ end base determination part 102c is 5′ end base determination means for determining whether the 5′ end base in the partial base sequence information is guanine or cytosine.

[0221] Furthermore, the predetermined base inclusion determination part 102d is predetermined base inclusion determination means for determining whether the base sequence information comprising 7 bases at the 3′ end in the partial base sequence information is rich in one or more types of bases selected from the group consisting of adenine, thymine, and uracil.

[0222] Furthermore, the prescribed sequence selection part 102e is prescribed sequence selection means for selecting prescribed sequence information, which specifically causes RNA interference in the target gene, from the partial base sequence information based on the results determined by the 3′ end base determination part 102b, the 5′ end base determination part 102c, and the predetermined base inclusion determination part 102c.

[0223] Furthermore, the overhanging portion-adding part 102f is overhanging portion addition means for adding an overhanging portion to at least one end of the prescribed sequence information.

[0224] Furthermore, the identical/similar base sequence search part 102g is identical/similar base sequence search means for searching base sequence information, identical or similar to the prescribed sequence information, from other base sequence information.

[0225] Furthermore, the unrelated gene target evaluation part 102h is unrelated gene target evaluation means for evaluating whether the prescribed sequence information targets genes unrelated to the target gene based on the identical or similar base sequence information. As shown in FIG. 22, the unrelated gene target evaluation part 102h further includes a total sum calculation part 102m and a total sum-based evaluation part 102n.

[0226] FIG. 22 is a block diagram which shows an example of the structure of the unrelated gene target evaluation part 102h of the system to which the present invention is applied and which schematically shows only the parts related to the present invention.

[0227] In FIG. 22, the total sum calculation part 102m is total sum calculation means for calculating the total sum of reciprocals of the values showing the degree of identity or similarity based on the total amount of base sequence information on the genes unrelated to the target gene in identical or similar base sequence information and the values showing the degree of identity or similarity attached to the base sequence information on the genes unrelated to the target gene (identity or similarity).

[0228] Furthermore, the total sum-based evaluation part 102n is total sum-based target evaluation means for evaluating whether the prescribed sequence information targets genes unrelated to the target gene based on the total sum calculated by the total sum calculation part 102m.

[0229] The details of processing of each part will be described later.

### [Processing of the System]

[0230] An example of processing of the system having the configuration described above in this embodiment will be described in detail with reference to FIGS. 23 and 24.

### [Main Processing]

[0231] First, the details of the main processing will be described with reference to FIG. 23, etc. FIG. 23 is a flowchart which shows an example of the main processing of the system in this embodiment.

[0232] The base sequence processing apparatus 100 acquires base sequence information of a target gene for RNA interference by the partial base sequence creation process performed by the partial base sequence creation part 102a, stores it in a predetermined memory region of the target gene base sequence file 106a, creates partial base sequence information corresponding to a sequence segment having a predetermined number of bases in the base sequence information, and stores the created partial base sequence information in a predetermined memory region of the partial base sequence file 106b (step SA-1).

[0233] In step SA-1, the partial base sequence creation part 102a may create partial base sequence information having a predetermined number of bases from a segment corresponding to a coding region or transcription region of the target gene in the base sequence information by the processing of the region-specific base sequence creation part 102i and may store the created partial base sequence information in a predetermined memory region of the partial base sequence file 106b.

[0234] In step SA-1, the partial base sequence creation part 102a may create partial base sequence information having a predetermined number of bases which is common in a plurality of base sequence information derived from different organisms (e.g., human base sequence information and mouse base sequence information) by the processing of the common base sequence creation part 102j and may store the created partial base sequence information in a predetermined memory region of the partial base sequence file 106b. Furthermore, common partial base sequence information having a predetermined number of bases which is common in a plurality of analogous base sequence information in the same species may be created.

[0235] In step SA-1, the partial base sequence creation part 102a may create partial base sequence information having a predetermined number of bases from segments corresponding to coding regions or transcription regions of the target gene in a plurality of base sequence information derived from different species by the processing of the region-specific base sequence creation part 102i and the common base sequence creation part 102j and may store the created partial base sequence information in a predetermined memory region of the partial base sequence file 106b. Furthermore, common partial base sequence information having a predetermined number of bases may be created from segments corresponding to coding regions or transcription regions of the target gene in a plurality of analogous base sequence information in the same species.

[0236] Furthermore, in step SA-1, the partial base sequence creation part 102a may create partial base sequence information containing an overhanging portion by the processing of the overhanging portion-containing base sequence creation part 102k. Specifically, for example, the partial base sequence creation part 102a may create partial base sequence information to which the overhanging portion inclusion information which shows the inclusion of the overhanging portion by the processing of the overhanging portion-containing base sequence creation part 102k and may store the created partial base sequence information and the overhanging portion inclusion information so as to be associated with each other in a predetermined memory region of the partial base sequence file 106b.

[0237] The upper limit of the predetermined number of bases is, in the case of not including the overhanging portion, preferably 28 or less, more preferably 22 or less, and still more preferably 20 or less, and in the case of including the overhanging portion, preferably 32 or less, more preferably 26 or less, and still more preferably 24 or less. The lower limit of the predetermined number of bases is, in the case of not including the overhanging portion, preferably at least 13, more preferably at least 16, and still more preferably at least 18, and in the case of including the overhanging portion, preferably at least 17, more preferably at least 20, and still more preferably at least 22. Most preferably, the predetermined number of bases is, in the case of not including the overhanging portion, 19, and in the case of including the overhanging portion, 23.

[0238] Subsequently, the base sequence processing apparatus 100 determines whether the 3′ end base in the partial base sequence information created in step SA-1 is adenine, thymine, or uracil by the processing of the 3′ end base determination part 102b and stores the determination result in a predetermined memory region of the determination result file 106c (step SA-2). Specifically, for example, the base sequence processing apparatus 100 may store “1” when the 3′ end base in the partial base sequence information created in step SA-1 is adenine, thymine, or uracil, by the processing of the 3′ end base determination part 102b, and “0” when it is not, in a predetermined memory region of the determination result file 106c.

[0239] Subsequently, the base sequence processing apparatus 100 determines whether the 5′ end base in the partial base sequence information created in step SA-1 is guanine or cytosine by the processing of the 5′ end base determination part 102c and stores the determination result in a predetermined memory region of the determination result file 106c (step SA-3). Specifically, for example, the base sequence processing apparatus 100 may store “1” when the 5′ end base in the partial base sequence information created in step SA-1 is guanine or cytosine, by the processing of the 5′ end base determination part 102c, and “0” when it is not, in a predetermined memory region of the determination result file 106c.

[0240] Subsequently, the base sequence processing apparatus 100 determines whether the base sequence information comprising 7 bases at the 3′ end in the partial base sequence information created in step SA-1 is rich in one or more types of bases selected from the group consisting of adenine, thymine, and uracil by the processing of the predetermined base inclusion determination part 102d and stores the determination result in a predetermined memory region of the determination result file 106c (step SA-4). Specifically, for example, the base sequence processing apparatus 100, by the processing of the predetermined base inclusion determination part 102d, may store the number of bases corresponding to one or more types of bases selected from the group consisting of adenine, thymine, and uracil contained in the base sequence information comprising 7 bases at the 3′ end in the partial base sequence information created in step SA-1 in a predetermined memory region of the determination result file 106c. The rule of determination in step SA-4 regulates that base sequence information in the vicinity of the 3′ end of the partial base sequence information created in step SA-1 contains a rich amount of one or more types of bases selected from the group consisting of adenine, thymine, and uracil, and more specifically, as an index for search, regulates that the base sequence information in the range from the 3′ end base to the seventh base from the 3′ end is rich in one or more types of bases selected from the group consisting of adenine, thymine, and uracil.

[0241] In step SA-4, the phrase “base sequence information rich in” corresponds to the phrase “sequence rich in” described in the column <1> Method for searching target base sequence for RNA interference. Specifically, for example, when the partial base sequence information created in step SA-1 comprises about 19 bases, in the base sequence information comprising 7 bases at the 3′ end in the partial base sequence information, preferably at least 3 bases, more preferably at least 4 bases, and particularly preferably at least 5 bases, are one or more types of bases selected from the group consisting of adenine, thymine, and uracil.

[0242] Furthermore, in steps SA-2 to SA-4, when partial base sequence information including the overhanging portion is determined, the sequence segment excluding the overhanging portion in the partial base sequence information is considered as the determination target.

[0243] Subsequently, based on the determination results in steps SA-2, SA-3, and SA-4, the base sequence processing apparatus 100, by the processing of the prescribed sequence selection part 102e, selects prescribed sequence information which specifically causes RNA interference in the target gene from the partial base sequence information created in step SA-1 and stores it in a predetermined memory region of the prescribed sequence file 106d (Step SA-5).

[0244] Specifically, for example, the base sequence processing apparatus 100, by the processing of the prescribed sequence selection part 102e, selects partial base sequence information, in which the 3′ end base has been determined as adenine, thymine, or uracil in step SA-2, the 5′ end base has been determined as guanine or cytosine in step SA-3, and base sequence information comprising 7 bases at the 3′ end in the partial base sequence information has been determined as being rich in one or more types of bases selected from the group consisting of adenine, thymine, and uracil, as prescribed sequence information, and stores it in a predetermined memory region of the prescribed sequence file 106d. Specifically, for example, the base sequence processing apparatus 100, by the processing of the prescribed sequence selection part 102e, may calculate a product of the values outputted in steps SA-2, SA-3, and SA-4 and, based on the product, select prescribed sequence information from the partial base sequence information created in step SA-1.

[0245] Here, the base sequence processing apparatus 100 may add an overhanging portion to at least one end of the prescribed sequence information selected in step SA-5 by the processing of the overhanging portion-adding part 102f, and may store it in a predetermined memory region of the prescribed sequence file 106d. Specifically, for example, by the processing of the overhanging portion-adding part 102f, the base sequence processing apparatus 100 may change the prescribed sequence information stored in the prescribed sequence information section in the prescribed sequence file 106d to prescribed sequence information in which an overhanging portion is added to at least one end. Additionally, for example, when a target is searched, the overhanging portion may be added to both ends of the prescribed sequence information.

[0246] Additionally, the number of bases in the overhanging portion corresponds to the number of bases described in the column <2> Method for designing base sequence of polynucleotide for causing RNA interference. Specifically, for example, 2 is particularly suitable as the number of bases.

[0247] Furthermore, the base sequence processing apparatus 100, by the processing of the identical/similar base sequence search part 102g, may search base sequence information that is identical or similar to the prescribed sequence information selected in step SA-5 from other base sequence information (e.g., base sequence information published in a public database, such as RefSeq of NCBI) using a known homology search method, such as BLAST, FASTA, or ssearch, and based on the searched identical or similar base sequence information, by the unrelated gene target evaluation process performed by the unrelated gene target evaluation part 102h, may evaluate whether the prescribed sequence information targets genes unrelated to the target gene.

[0248] Specifically, for example, the base sequence processing apparatus 100, by the processing of the identical/similar base sequence search part 102g, may search base sequence information that is identical or similar to the prescribed sequence information selected in step SA-5 from other base sequence information (e.g., base sequence information published in a public database, such as RefSeq of NCBI) using a known homology search method, such as BLAST, FASTA, or ssearch. The unrelated gene target evaluation part 102h, by the processing of the total sum calculation part 102m, may calculate the total sum of the reciprocals of the values showing the degree of identity or similarity based on the total amount of base sequence information on the genes unrelated to the target gene in the searched identical or similar base sequence information and the values showing the degree of identity or similarity (e.g., “E value” in BLAST, FASTA, or ssearch) attached to the base sequence information on the genes, unrelated to the target gene. The unrelated gene target evaluation part 102h, by the processing of the total sum-based evaluation part 102n, may evaluate whether the prescribed sequence information targets genes unrelated to the target gene based on the calculated total sum.

[0249] Here, the details of the unrelated gene target evaluation process performed by the unrelated gene target evaluation part 102h will be described with reference to FIG. 24.

[0250] FIG. 24 is a flowchart which shows an example of the unrelated gene evaluation process of the system in this embodiment.

[0251] First, the base sequence processing apparatus 100, by the processing of the identical/similar base sequence search part 102g, searches base sequence information that is identical or similar to the prescribed sequence information selected in step SA-5 from other base sequence information (e.g., base sequence information published in a public database, such as RefSeq of NCBI) using a known homology search method, such as BLAST, FASTA, or ssearch, and stores identification information of the prescribed sequence information (“partial base sequence identification information” in FIG. 19), identification information of the searched identical or similar base sequence information (“reference sequence identification information” in FIG. 19), and the value showing the degree of identity or similarity (e.g., “E value” in BLAST, FASTA, or ssearch) (“degree of identity or similarity” in FIG. 19) attached to the searched identical or similar base sequence information so as to be associated with each other in a predetermined memory region of the degree of identity or similarity file 106f.

[0252] Subsequently, the unrelated gene target evaluation part 102h, by the processing of the total sum calculation part 102m, calculates the total sum of reciprocals of the values showing the degree of identity or similarity based on the total amount of base sequence information on the genes unrelated to the target gene in the searched identical or similar base sequence information and the values showing the degree of identity or similarity (e.g., “E value” in BLAST, FASTA, or ssearch) attached to the base sequence information on the genes unrelated to the target gene, and stores identification information of the prescribed sequence information (“partial base sequence identification information” in FIG. 20) and the calculated total sum (“total sum” in FIG. 20) so as to be associated with each other in a predetermined memory region of the evaluation result file 106g (step SB-1).

[0253] Subsequently, the unrelated gene target evaluation part 102h, by the processing of the total sum-based evaluation part 102n, evaluates whether the prescribed sequence information targets genes unrelated to the target gene based on the total sum calculated in step SB-1 (e.g., based on the size of the total sum calculated in step SB-1), and stores the evaluation results (“nontarget” and “target” in FIG. 20) in a predetermined memory region of the evaluation result file 106g (Step SB-2).

[0254] The main process is thereby completed.

### <8> Pharmaceutical Composition

[0255] The present invention also provides a pharmaceutical composition comprising a pharmaceutically effective amount of the polynucleotide of the present invention. The use of the pharmaceutical composition of the present invention is not particularly limited. Since the pharmaceutical composition inhibits, through RNAi, the expression of a gene containing a target sequence of each polynucleotide, which is an active ingredient, it is useful in preventing and/or treating diseases in which such genes are involved.

[0256] The sequence to be targeted by the polynucleotide contained in the pharmaceutical composition of the present invention is a sequence selected as a prescribed sequence conforming to the above rules (a) to (f). Preferably, such a sequence may be any of SEQ ID NOs: 47 to 817081. In particular, if the target sequence is a sequence highly specific to the target gene, the polynucleotide selectively produces an inhibitory effect only on the expression of the target gene containing the target sequence, but not on the other genes (i.e., the polynucleotide has less off-target effect), thus reducing influences of side effects, etc. It is therefore more preferred that the target sequence of the polynucleotide has high specificity to the target gene. Among the selected sequences (e.g., SEQ ID NOs: 47 to 817081), a sequence whose off-target effect can be further reduced is preferred as a prescribed sequence conforming to the above rules (a) to (f). As a preferred prescribed sequence of the target gene, it is possible to select a sequence which contains mismatches of at least 3 bases against the base sequences of other genes and for which there is only a minimum number of other genes having a base sequence containing mismatches of at least 3 bases. The requirement “there is only a minimum number of other genes” means that “other genes having a base sequence containing mismatches of at least 3 bases” (i.e., similar genes) are as few in number as possible; for example, there are preferably 10 or less genes, more preferably 6 or less genes, still more preferably only one gene, or most preferably no gene.

[0257] For example, the 53998 sequences shown in FIG. 46 are obtained among SEQ ID NOs: 47 to 817081 by selecting sequences which contain mismatches of 3 bases against the base sequences of other genes (i.e., prescribed sequences of 19 bases in which 16 bases other than these 3 mismatched bases are the same as those of other genes) and for which there is only a minimum number of other genes having a base sequence containing mismatches of 3 bases. Thus, the target sequence is particularly preferably any of these sequences. With respect to these sequences, most of their relationships have been identified, such as genes containing these target sequences, disease names related to these genes, biological function categories according to GO_ID of these genes in Gene Ontology, and biological functions reported in documents. These relationships are shown in FIG. 46. The polynucleotide of the present invention inhibits the expression of a gene containing a target sequence through RNAi, and hence allows treatment and/or prevention of diseases related to the gene and control of its biological functions. Once a target sequence of the polynucleotide has been identified on the basis of the disclosures of the present specification, drawings and so on, those skilled in the art will readily understand diseases and/or biological functions on which the polynucleotide produces an effect.

[0258] Thus, the pharmaceutical composition of the present invention is preferably useful in treating and/or preventing the diseases listed in the column “Related Disease” of FIG. 46 or diseases associated with the gene-related biological functions listed in the columns “Biological Function Category” and/or “Reported Biological Function” of FIG. 46.

[0259] The pharmaceutical composition of the present invention is more preferably useful in treating and/or preventing a disease in which a gene belonging to any of the following 1) to 9) is involved:

1) an apoptosis-related gene;
2) phosphatase or a phosphatase activity-related gene;
3) a cell cycle-related gene;
4) a receptor-related gene;
5) an ion channel-related gene;
6) a signal transduction system-related gene;
7) kinase or a kinase activity-related gene;
8) a transcription regulation-related gene; or

### 9) G protein-coupled receptor or a G protein-coupled receptor-related gene.

[0260] The column “Biological Function Category” of FIG. 46 shows biological functions classified into the above 9 categories. To give more detailed information about what biological function is provided by genes belonging to each group of 1) to 9) above, the relationship with GO_ID in Gene Ontology is shown for each gene in FIGS. 37 to 45. The 7-digit numbers shown in FIGS. 37 to 45 each denote an attribute (more specifically an ID number) in Gene Ontology belonging to each group.

[0261] For details about Gene Ontology, refer to, e.g., the Gene Ontology Consortium, “Gene Ontology Consortium home page,” [online], 1999, the Gene Ontology Consortium, [searched on Oct. 25, 2004], Internet <URL: http://www.geneontology.org/>.

[0262] For example, Gene Ontology defines gene attributes such as “signal transducer activity (GO:0004871)” and “receptor activity (GO:0004872)” and further defines inherited relationships between attributes to describe, e.g., that “the attribute of receptor activity inherits the attribute of signal transducer activity.” The definitions of attributes and inherited relationships between attributes are available from the Gene Ontology Consortium (http://www.geneontology.org/). Likewise, corresponding relationships between individual human or mouse genes and Gene Ontology attributes are available from various databases including the Cancer genome Anatomy project (http://cgap.nci.nih.gov/). Gene Ontology data of genes, for example, indicate that the human ZYX gene (NM_{—}003461) has receptor activity and further lead to the fact that the ZYX gene also has signal transducer activity when using inherited relationships between attributes.

[0263] With respect to gene attributes (annotations), Gene Ontology provides a definition for each attribute and defines inherited relationships between attributes. These inherited relationships between attributes in the ontology of genes form directed acyclic graphs (DAGs). In Gene Ontology, genes are classified and organized by “molecular function”, “biological process” and “cellular component.” Moreover, each classification defines inherited relationships between attributes. Once the ID numbers of attributes in Gene Ontology have been identified, those skilled in the art will understand the details of each attribute from its ID number.

[0264] In addition to the above 9 biological function categories according to Gene Ontology, FIG. 46 shows biological functional information of each gene, which is obtained from the reported documents. More specifically, biological functional information of each gene reported in the documents obtained from PubMed is shown in the column “Reported Biological Function.”

[0265] In a more preferred embodiment, the pharmaceutical composition of the present invention more preferably comprises a polynucleotide targeting the base sequence shown in any of SEQ ID NOs listed in the column “SEQ ID NO (human)” or “SEQ ID NO (mouse)” of FIG. 46. Each polynucleotide is useful in treating and/or preventing a disease shown in the column “Related Disease” under the same reference number as that of its target sequence. Alternatively, each polynucleotide is useful in controlling a biological function(s) (e.g., inhibition and promotion) shown in the column “Biological Function Category” or “Reported Biological Function” under the same reference number, or in treating and/or preventing a disease(s) associated with the biological function(s).

[0266] Table 1 in Example 8 described herein later shows the polynucleotides of the present invention, more specifically, siRNA sense strands corresponding to these polynucleotides (whose base sequences are shown in the column “siRNA-sense” of Table 1), their antisense strands (whose base sequences are shown in the column “siRNA-antisense” of Table 1, provided that the sequences are shown in the direction from 3′ to 5′), target genes to be targeted by these siRNA sequences for RNAi (which are shown in the column “Gene Name” of Table 1) and the positions of target sequences in these genes. As shown in Table 1, the polynucleotides of the present invention served as siRNA-sense or siRNA-antisense strands to produce an RNAi effect against the genes listed in the column “Gene Name” of Table 1, thereby significantly inhibiting the expression of these genes. Thus, pharmaceutical compositions comprising the polynucleotides of the present invention are useful in treating or preventing diseases related to the genes listed in the column “Gene Name” of Table 1, more specifically, diseases corresponding to the genes, as listed in the column “Related Disease” of FIG. 46, as well as diseases associated with biological functions corresponding to the genes, as listed in the columns “Biological Function Category” and/or “Reported Biological Function” of FIG. 46.

[0267] In Example 8, the sequences used as targets of siRNA (see the column “Target Sequence” of Table 1) were selected at random from the 53998 target sequences shown in FIG. 46 among possible target sequences to be targeted by the polynucleotides of the present invention. As described later, all the selected target sequences were confirmed to have an RNAi effect. When the results thus obtained in Example 8 were statistically processed by the “population ratio estimation method,” it was found to be statistically reasonable that the polynucleotides of the present invention (more specifically, polynucleotides whose one strand in the double-stranded region is a sequence homologous to a prescribed sequence of a target gene shown in any of SEQ ID NOs: 47 to 817081) would produce an inhibitory effect on the expression of target genes, and that particularly when using polynucleotides in which the above prescribed sequence is any of the 53998 sequences shown in FIG. 46, almost all of them would produce an inhibitory effect on the expression of target genes.

[0268] Genes to be targeted by the polynucleotides of the present invention may be those related to any of the diseases shown in FIG. 46. Particularly when the target genes are those related to various cancers including bladder cancer, breast cancer, colorectal cancer, gastric cancer, hepatoma, lung cancer, melanoma, ovarian cancer, pancreas cancer, prostate cancer, oral cancer, skin cancer and thyroid gland cancer, it becomes possible to treat or prevent these various cancers through an inhibitory effect on the expression of the genes. Thus, without being limited thereto, the pharmaceutical composition of the present invention is useful in treating or preventing any cancer selected from those listed above.

[0269] The pharmaceutical composition of the present invention most preferably comprises a polynucleotide having any of the base sequences shown in SEQ ID NOs: 817102 to 817651. Each polynucleotide can inhibit the expression of its target gene (see the column “Gene Name” of Table 1) and hence is useful in treating and/or preventing a disease related to the gene (more specifically, see the column “Related Disease” of FIG. 46 with respect to the gene) or a disease associated with a biological function(s) of the gene (more specifically, see the columns “Biological Function Category” and/or “Reported Biological Function” of FIG. 46 with respect to the gene). It is also possible to use sequences having mutations (e.g., mismatches as described above) in the base sequences of these SEQ ID NOs, as long as their RNAi effect is not impaired.

[0270] In Examples 1 to 8 described later, a large number of polynucleotides selected according to the selection method of the present invention were demonstrated to produce a significant RNAi effect. Thus, those skilled in the art will easily understand that polynucleotides selected according to common rules produce the same RNAi effect. Moreover, the validity of these rules is also evident from the above statistically processed results. It is therefore easily understood that in the genes shown in Table 1, for example, when a sequence different from the disclosed target sequence is selected from the same gene according to the present invention from a different position than the actually disclosed target position of the target sequence, the same inhibitory effect on gene expression is obtained for the same gene. Moreover, once an inhibitory effect on the expression of a gene related to a certain disease has been identified, it will be easily understood that when its target sequence is selected according to the present invention to prepare a polynucleotide, treatment and/or prevention of the disease through an inhibitory effect on expression is also possible for other genes related to the same disease.

[0271] Moreover, Example 7 of the present invention has shown that even in the case of genes other than those containing a sequence completely homologous to a target sequence, when these other genes contain similar sequences having a small number (preferably 2 or less bases) of mismatches, these similar sequence portions may serve as targets for RNA interference. Thus, such genes containing similar sequences, which are other than those containing a sequence completely homologous to a target sequence, are also used as targets of the polynucleotide of the present invention and are expected to produce an RNA interference-based inhibitory effect on expression. The pharmaceutical composition of the present invention is therefore also useful in treating and/or preventing diseases in which these genes are involved.

[0272] In a case where a polynucleotide for causing RNAi is used for a pharmaceutical composition, a pharmaceutically acceptable carrier or diluent and the polynucleotide of the present invention may be blended into a pharmaceutical composition. In this case, the ratio of active ingredient to carrier or diluent ranges from about 0.01% to about 99.9% by weight.

[0273] The above carrier or diluent may be in gaseous, liquid or solid form. Examples of the carrier include aqueous or alcohol solutions or suspensions, oil solutions or suspensions, oil-in-water or water-in-oil emulsions, hydrophobic carriers, liquid vehicles, and microcrystals.

[0274] Moreover, the pharmaceutical composition of the present invention comprising the above polynucleotide may further comprise, for example, at least one of the following: other therapeutic agents, surfactants, fillers, buffers, dispersants, antioxidants and preservatives. Such a pharmaceutical composition may be a formulation for oral, intraoral, intrapulmonary, intrarectal, intrauterine, intratumoral, intracranial, nasal, intramuscular, subcutaneous, intravascular, intrathecal, percutaneous, intracutaneous, intraarticular, intracavitary, ocular, vaginal, ophthalmic, intravenous, intraglandular, interstitial, intralymphatic, implantable, inhalant or sustained release use, or an enteric-coated formulation.

[0275] For example, an oral formulation comprising a polynucleotide may be in a dosage form of powders, sugar-coated pills, tablets, capsules, syrups, aerosols, solutions, suspensions or emulsions (e.g., oil-in-water or water-in-oil emulsions). Alternatively, topical formulations are also acceptable, whose carrier is a cream, a gel, an ointment, a syrup, an aerosol, a patch, a solution, a suspension or an emulsion. Moreover, injectable formulations and percutaneous formulations are also acceptable, whose carrier is an aqueous or alcohol solution or suspension, an oil solution or suspension, or an oil-in-water or water-in-oil emulsion. Further, rectal formulations and suppositories are also acceptable. Furthermore, it is also possible to use formulations provided in the form of implants, capsules or cartridges, as well as respirable or inhalant formulations, and aerosols.

[0276] The dose of such a pharmaceutical composition comprising a polynucleotide will be selected as appropriate for the symptoms, age and body weight of a patient, etc. With respect to how to administer the pharmaceutical composition to a recipient, in a case where the recipient is a cell or tissue, administration may be accomplished by using techniques such as the calcium phosphate method, electroporation, lipofection, virus infection, and immersion in a polynucleotide solution. Likewise, when introducing into an embryo, it is possible to use microinjection, electroporation, virus infection, etc. For administration, conventionally used commercially available reagents, instruments, apparatuses, kits and the like may be used. For example, an introducing reagent such as TransIT®-In Vivo Gene Delivery System or TransIT®-QR Hydrodynamic Delivery Solution (both manufactured by Takara Bio Inc., Japan) may be used for administration to cells in living organisms. Likewise, for introduction by virus infection, retrovirus vectors (e.g., RNAi Ready pSIREN-RetroQ Vector, manufactured by BD Biosciences Clontech), adenovirus vectors (e.g., BD Knockout Adenoviral RNAi System, manufactured by BD Biosciences Clontech) or lentivirus vectors (e.g., RetroNectin, manufactured by Takara Bio Inc., Japan) may also be used.

[0277] In a case where the recipient is a plant, administration may be accomplished by using techniques for injection or spraying into a cavity or interstitial cells in the plant. Likewise, in a case where the recipient is an animal individual, administration may be accomplished, e.g., by oral, parenteral, transvaginal, transrectal, transnasal, transocular or intraperitoneal route. These techniques allow systemic or topical administration of one or more polynucleotides at the same time or at different times. By way of example for oral administration, a pharmaceutical agent or food incorporated with a polynucleotide(s) may be taken directly. Alternatively, by way of example for oral and transnasal routes, administration may be performed using an inhalator. Likewise, by way of example for parenteral route, syringes with or without needles may be used for, e.g., subcutaneous, intramuscular or intravenous administration.

### <9> Composition for Inhibiting Gene Expression

[0278] The present invention further provides a composition for inhibiting gene expression to inhibit the expression of a target gene, which comprises the polynucleotide of the present invention.

[0279] As has been shown in the present invention, the polynucleotide of the present invention produces an expression inhibitory effect against a gene containing each target sequence. Inhibited expression of the gene controls, preferably inhibits, biological functions of the gene.

[0280] Preferably, the target gene is related to any of the diseases listed in the column “Related Disease” of FIG. 46.

[0281] Preferably, the target gene is any of the genes listed in the column “Gene Name” of FIG. 46.

[0282] Alternatively, the target gene is a gene belonging to any of the following 1) to 9):

1) an apoptosis-related gene;
2) phosphatase or a phosphatase activity-related gene;
3) a cell cycle-related gene;
4) a receptor-related gene;
5) an ion channel-related gene;
6) a signal transduction system-related gene;
7) kinase or a kinase activity-related gene;
8) a transcription regulation-related gene; or

### 9) G protein-coupled receptor or a G protein-coupled receptor-related gene.

[0283] As described in the above section “Pharmaceutical composition,” the polynucleotide of the present invention (more specifically siRNA) has been found to produce an RNAi effect based on the results of Example 8 and their statistically processed results. In particular, in Example 8 described later, the polynucleotide of the present invention was confirmed to produce an inhibitory effect on mRNA expression (i.e., RNAi effect) against all the genes listed in the column “Gene Name” of Table 1. Thus, the composition for inhibiting gene expression, which comprises the polynucleotide of the present invention, may target any of the target genes shown in FIG. 46; the target gene is more preferably any of the genes listed in the column “Gene Name” of Table 1. With respect to each gene in Table 1, it is preferably desirable to use a sequence of siRNA-sense or siRNA-antisense shown in the same line as the gene. It is also possible to use sequences having mutations (e.g., mismatches as described above) in these base sequences, as long as their inhibitory effect on expression is not impaired.

[0284] If the target gene is any of the genes shown in Table 1, the composition is useful in treating and/or preventing a disease related to the gene (more specifically, see the column “Related Disease” of FIG. 46 with respect to the gene) or a disease associated with a biological function(s) of the gene (more specifically, see the columns “Biological Function Category” and/or “Reported Biological Function” of FIG. 46 with respect to the gene).

[0285] For example, genes to be targeted by the composition for inhibiting gene expression in accordance with the present invention may be those related to any of the diseases shown in FIG. 46. Particularly when the target genes are those related to various cancers including bladder cancer, breast cancer, colorectal cancer, gastric cancer, hepatoma, lung cancer, melanoma, ovarian cancer, pancreas cancer, prostate cancer, oral cancer, skin cancer and thyroid gland cancer, it becomes possible to treat or prevent these various cancers through an inhibitory effect on the expression of the genes. Thus, without being limited thereto, the pharmaceutical composition of the present invention is useful in treating or preventing any cancer selected from those listed above.

[0286] In Examples 2 to 5 described herein later, the RNAi effect of the polynucleotide of the present invention against the genes of human vimentin, luciferase, SARS virus and the like was examined as a relative expression level of mRNA compared to the control. FIGS. 31, 32 and 35 show the results of mRNA expression levels measured by quantitative PCR. In FIGS. 31, 32 and 35, the relative mRNA expression levels are respectively reduced to about 7-8% (Example 2, FIG. 31), about 12-13% (Example 3, FIG. 32), and a few % to less than about 15% (Example 5, FIG. 35); the polynucleotide of the present invention was confirmed to have an inhibitory effect on the expression of each gene. Likewise, FIG. 34 from Example 4 shows the results of mRNA expression levels (as RNAi effect) examined by luciferase activity. The luciferase activity was also reduced to a few % to less than about 20%, as compared to the control.

[0287] Moreover, in Example 8, among the genes shown in FIG. 46 whose related diseases and/or biological functions have been identified, about 300 genes selected at random were examined for the expression levels of their mRNA in human-derived HeLa cells, expressed as relative expression levels. As shown in Table 1, the RQ values (described later) that were calculated to evaluate an inhibitory effect on the expression of these genes, i.e., an RNAi effect were all less than 1, and almost all less than 0.5.

[0288] In the composition for inhibiting gene expression in accordance with the present invention, the phrase “inhibiting the expression of the target gene” means that the mRNA expression level of the target gene is substantially reduced. If the mRNA expression level has been substantially reduced, inhibited expression has been achieved regardless of the degree of change in the mRNA expression level. In light of the results from Examples 2-5 and 8 as described above, the composition for inhibiting gene expression in accordance with the present invention is identified to preferably cause at least a 50% or more reduction in the mRNA expression level of the target gene.

### <10> Method for Treating or Preventing Diseases

[0289] The present invention further provides a method for treating or preventing the diseases listed in the column “Related Disease” of FIG. 46, which comprises administering a pharmaceutically effective amount of the polynucleotide of the present invention.

### OTHER EMBODIMENTS

[0290] One preferred embodiment of the present invention has been described above. However, it is to be understood that the present invention can be carried out in various embodiments other than the embodiment described above within the scope of the technical idea described in the claims.

[0291] For example, although the case in which the base sequence processing apparatus 100 performs processing on a stand-alone mode has been described, construction may be made such that processing is performed in accordance with the request from a client terminal which is constructed separately from the base sequence processing apparatus 100, and the processing results are sent back to the client terminal. Specifically, for example, the client terminal transmits a name of the target gene for RNA interference (e.g., gene name or accession number) or base sequence information regarding the target gene to the base sequence processing apparatus 100, and the base sequence processing apparatus 100 performs the processes described above in the controller 102 on base sequence information corresponding to the name or the base sequence information transmitted from the client terminal to select prescribed sequence information which specifically causes RNA interference in the target gene and transmits it to the client terminal. In such a case, for example, by acquiring sequence information from a public database, siRNA against the gene in query may be selected. Alternatively, for example, siRNA for all the genes may be calculated and stored preliminarily, and siRNA may be immediately selected in response to the request from the client terminal (e.g., gene name or accession number) and the selected siRNA may be sent back to the client terminal.

[0292] Furthermore, the base sequence processing apparatus 100 may check the specificity of prescribed sequence information with respect to genes unrelated to the target gene. Thereby, it is possible to select prescribed sequence information which specifically causes RNA interference only in the target gene.

[0293] Furthermore, in the system comprising a client terminal and the base sequence processing apparatus 100, an interface function may be introduced in which, for example, the results of RNA interference effect of siRNA (e.g., “effective” or “not effective”) are fed back from the Web page users on the Web, and the experimental results fed back from the users are accumulated in the base sequence processing apparatus 100 so that the sequence regularity of siRNA effective for RNA interference is improved.

[0294] Furthermore, the base sequence processing apparatus 100 may calculate base sequence information of a sense strand of siRNA and base sequence information of an antisense strand complementary to the sense strand from the prescribed sequence information. Specifically, for example, when “caccctgacccgcttcgtcatgg” is selected as 23-base sequence information wherein 2-base overhanging portions are added to both ends of the prescribed sequence as a result of the processes described above, the base sequence processing apparatus 100 calculates the base sequence information of a sense strand “5′-CCCUGACCCGCUUCGUCAUGG-3” and the base sequence information of an antisense strand “5′-AUGACGAAGCGGGUCAGGGUG-3”. Consequently, it is not necessary to manually arrange the sense strand and the antisense strand when a polynucleotide is ordered, thus improving convenience.

[0295] Furthermore, in the processes described in the embodiment, the processes described as being automatically performed may be entirely or partially performed manually, or the processes described as being manually performed may be entirely or partially performed automatically by a known method.

[0296] In addition, processing procedures, control procedures, specific names, information including various registration data and parameters, such as search conditions, examples of display screen, and database structures may be changed in any manner except when otherwise described.

[0297] Furthermore, with respect to the base sequence processing apparatus 100, the components are shown in the drawings only based on the functional concept, and it is not always necessary to physically construct the components as shown in the drawings.

[0298] For example, the process functions of the individual parts or individual units of the base sequence processing apparatus 100, in particular, the process functions performed in the controller 102, may be entirely or partially carried out by a CPU (Central Processing Unit) or programs which are interpreted and executed by the CPU. Alternatively, it may be possible to realize the functions based on hardware according to a wired logic. Additionally, the program is recorded in a recording medium which will be described below and is mechanically read by the base sequence processing apparatus 100 as required.

[0299] Namely, the memory 106, such as a ROM or HD, records a computer program which, together with OS (Operating System), gives orders to the CPU to perform various types of processing. The computer program is executed by being loaded into a RAM or the like, and, together with the CPU, constitutes the controller 102. Furthermore, the computer program may be recorded in an application program server which is connected to the base sequence processing apparatus 100 via any network 300, and may be entirely or partially downloaded as required.

[0300] The program of the present invention may be stored in a computer-readable recording medium. Here, examples of the “recording medium” include any “portable physical medium”, such as a flexible disk, an optomagnetic disk, a ROM, an EPROM, an EEPROM, a CD-ROM, a MO, a DVD, or a flash disk; any “fixed physical medium”, such as a ROM, a RAM, or a HD which is incorporated into various types of computer system; and a “communication medium” which holds the program for a short period of time, such as a communication line or carrier wave, in the case when the program is transmitted via a network, such as a LAN, a WAN, or Internet.

[0301] Furthermore, the “program” means a data processing method described in any language or by any description method, and the program may have any format (e.g., source code or binary code). The “program” is not always limited to the one having a single system configuration, and may have a distributed system configuration including a plurality of modules or libraries, or may achieve its function together with another program, such as OS (Operating System). With respect to specific configurations and procedures for reading the recording medium in the individual units shown in the embodiment, or installation procedures after reading, etc., known configurations and procedures may be employed.

[0302] The various types of databases, etc. (target gene base sequence file 106a˜target gene annotation database 106h) stored in the memory 106 are storage means, such as memories (e.g., RAMs and ROMs), fixed disk drives (e.g., hard disks), flexible disks, and optical disks, which store various types of programs used for various processes and Web site provision, tables, files, databases, files for Web pages, etc.

[0303] Furthermore, the base sequence processing apparatus 100 may be produced by connecting peripheral apparatuses, such as a printer, a monitor, and an image scanner, to a known information processing apparatus, for example, an information processing terminal, such as a personal computer or a workstation, and installing software (including programs, data, etc.) which implements the method of the present invention into the information processing apparatus.

[0304] Furthermore, specific modes of distribution/integration of the base sequence processing apparatus 100, etc. are not limited to those shown in the specification and the drawings, and the base sequence processing apparatus 100, etc., may be entirely or partially distributed/integrated functionally or physically in any unit corresponding to various types of loading, etc. (e.g., grid computing). For example, the individual databases may be independently constructed as independent database units, or processing may be partially performed using CGI (Common Gateway Interface).

[0305] Furthermore, the network 300 has a function of interconnecting between the base sequence processing apparatus 100 and the external system 200, and for example, may include any one of the Internet, intranets, LANs (including both wired and radio), VANs, personal computer communication networks, public telephone networks (including both analog and digital), dedicated line networks (including both analog and digital), CATV networks, portable line exchange networks/portable packet exchange networks of the IMT2000 system, CSM system, or PDC/PDC-P system, radio paging networks, local radio networks, such as the Bluetooth, PHS networks, and satellite communication networks, such as CS, BS, and ISDB. Namely, the present system can transmit and receive various types of data via any network regardless of wired or radio.

### EXAMPLES

[0306] The present invention will be described in more detail with reference to the examples. However, it is to be understood that the present invention is not restricted by the examples.

### Example 1

### <1> Gene for Measuring RNAi Effect and Expression Vector

[0307] As a target gene for measuring an RNAi effect by siRNA, a firefly (Photinus pyralis, P. pyralis) luciferase (luc) gene (P. pyralis luc gene: accession number: U47296) was used, and as an expression vector containing this gene, a pGL3-Control Vector (manufactured by Promega Corporation) was used. The segment of the P. pyralis luc gene is located between an SV40 promoter and a poly A signal within the vector. As an internal control gene, a luc-gene of sea pansy (Renilla reniformis, R. reniformis) was used, and as an expression vector containing this gene, pRL-TK (manufactured by Promega Corporation) was used.

### <2> Synthesis of 21-Base Double-Stranded RNA (siRNA)

[0308] Synthesis of 21-base sense strand and 21-base antisense strand RNA (located as shown in FIG. 9; a to p) was entrusted to Genset Corporation through Hitachi Instrument Service Co., Ltd.

[0309] The double-stranded RNA used for inhibiting expression of the P. pyralis luc gene was prepared by associating sense and antisense strands. In the association process, the sense strand RNA and the antisense strand RNA were heated for 3 minutes in a reaction liquid of 10 mM Tris-HCl (pH 7.5) and 20 mM NaCl, incubated for one hour at 37° C., and left to stand until the temperature reached room temperature. Formation of double-stranded polynucleotides was assayed by electrophoresis on 2% agarose gel in a TBE buffer, and it was confirmed that almost all the single-stranded polynucleotides were associated to form double-stranded polynucleotides.

### <3> Mammalian Cell Cultivation

[0310] As mammalian cultured cells, human HeLa cells and HEK293 cells and Chinese hamster CHO-KI cells (RIKEN Cell bank) were used. As a medium, Dulbecco's modified Eagle's medium (manufactured by Gibco BRL) to which a 10% inactivated fetal bovine serum (manufactured by Mitsubishi Kasei) and as antibiotics, 10 units/ml of penicillin (manufactured by Meiji) and 50 μg/ml of streptomycin (manufactured by Meiji) had been added was used. Cultivation was performed at 37° C. in the presence of 5% CO₂.

### <4> Transfection of Target Gene, Internal Control Gene, and siRNA into Mammalian Cultured Cells

[0311] The mammalian cells were seeded at a concentration of 0.2 to 0.3×10⁶ cells/ml into a 24-well plate, and after one day, using a Ca-phosphate precipitation method (Saibo-Kogaku Handbook (Handbook for cell engineering), edited by Toshio Kuroki et al., Yodosha (1992)), 1.0 μg of pGL3-Control DNA, 0.5 or 1.0 μg of pRL-TK DNA, and 0.01, 0.1, 1, 10 or 100 nM of siRNA were introduced.

### <5> Drosophila Cell Cultivation

[0312] As drosophila cultured cells, S2 cells (Schneider, I., et al., J. Embryol. Exp. Morph., 27, 353-365 (1972)) were used. As a medium, Schneider's Drosophila medium (manufactured by Gibco BRL) to which a 10% inactivated fetal bovine serum (manufactured by Mitsubishi Kasei) and as antibiotics, 10 units/ml of penicillin (manufactured by Meiji) and 50 μg/ml of streptomycin (manufactured by Meiji) had been added was used. Cultivation was performed at 25° C. in the presence of 5% CO₂.

### <6> Transfection of Target Gene, Internal Control Gene, and siRNA into Drosophila Cultured Cells

[0313] The S2 cells were seeded at a concentration of 1.0×10⁶ cells/ml into a 24-well plate, and after one day, using a Ca-phosphate precipitation method (Saibo-Kogaku Handbook (Handbook for cell engineering), edited by Toshio Kuroki et al., Yodosha (1992)), 1.0 μg of pGL3-Control DNA, 0.1 μg of pRL-TK DNA, and 0.01, 0.1, 1, 10 or 100 nM of siRNA were introduced.

### <7> Measurement of RNAi Effect

[0314] The cells transfected with siRNA were recovered 20 hours after transfection, and using a Dual-Luciferase Reporter Assay System (manufactured by Promega Corporation), the levels of expression (luciferase activities) of two types of luciferase (P. pyralis luc and reniformis luc) protein were measured. The amount of luminescence was measured using a Lumat LB9507 luminometer (EG&G Berthold).

### <8> Results

[0315] The measurement results on the luciferase activities are shown in FIG. 10. Furthermore, the results of study on correspondence between the luciferase activities and the individual base sequences are shown in FIG. 11.

[0316] In FIG. 10, the graph represented by B shows the results in the drosophila cells, and the graph represented by C shows the results in the human cells. As shown in FIG. 10, in the drosophila cells, by creating RNA with a base number of 21, it was possible to inhibit the luciferase activities in almost all the sequences. On the other hand, in the human cells, it was evident that it was difficult to obtain sequences which could inhibit the luciferase activities simply by setting the base number at 21.

[0317] Analysis was then conducted on the regularity of base sequence with respect to RNA a to p. As shown in FIG. 11, with respect to 5 points of the double-stranded RNA, the base sequence was analyzed. With respect to siRNA a in the top row of the table shown in FIG. 11, the relative luciferase activity (RLA) is 0.03. In the antisense strand, from the 3′ end, the base sequence of the overhanging portion (OH) is UC; the G/C content (content of guanine or cytosine) in the subsequent 7 bases (3′-T in FIG. 11) is 57%; the G/C content in the further subsequent 5 bases (M in FIG. 11) is 20; the G/C content in the further subsequent 7 bases (5′-T in FIG. 11) is 14%; the 5′ end is U; and the G/C content in total is 32%. In the table, a lower RLA value indicates lower RLA activity, i.e., inhibition of the expression of luciferase.

[0318] As is evident from the results, in the base sequences of polynucleotides for causing RNA interference, it is highly probable that the 3′ end is adenine or uracil and that the 5′ end is guanine or cytosine. Furthermore, it has become clear that the 7-base sequence from the 3′ end is rich in adenine or uracil.

### Example 2

### 1. Construction of Target Expression Vector pTREC

[0319] A target expression vector was constructed as follows. A target expression molecule is a molecule which allows expression of RNA having a sequence to be targeted by RNAi (hereinafter, also referred to as a “target sequence”).

[0320] A target mRNA sequence was constructed downstream of the CMV enhancer/promoter of pCI-neo (GenBank Accession No. U47120, manufactured by Promega Corporation) (FIG. 25). That is, the following double-stranded oligomer was synthesized, the oligomer including a Kozak sequence (Kozak), an ATG sequence, a cloning site having a 23 base-pair sequence to be targeted (target), and an identification sequence for restriction enzyme (NheI, EcoRI, XhoI) for recombination. The double-stranded oligomer consists of a sequence shown in SEQ ID NO: 1 in the sequence listing and its complementary sequence. The synthesized double-stranded oligomer was inserted into the NheI/XbaI site of the pCI-neo to construct a target expression vector pTREC (FIG. 25). With respect to the intron, the intron site derived from P-globin originally incorporated in the pCI-neo was used.

[0321] 5′-gctagccaccatggaattcacgcgtctcgagtctaga-3′ (SEQ ID NO: 1)

[0322] The pTREC shown in FIG. 25 is provided with a promoter and an enhancer (pro/enh) and regions PAR(F) 1 and PAR(R) 1 corresponding to the PCR primers. An intron (Intron) is inserted into PAR(F) 1, and the expression vector is designed such that the expression vector itself does not become a template of PCR. After transcription of RNA, in an environment in which splicing is performed in eukaryotic cultured cells or the like, the intron site of the pTREC is removed to join two neighboring PAR(F) 1's. RNA produced from the pTREC can be amplified by RT-PCR. With respect to the intron, the intron site derived from β-globin originally incorporated in the pCI-neo was used.

[0323] The pTREC is incorporated with a neomycin-resistant gene (neo) as a control, and by preparing PCR primers corresponding to a part of the sequence in the neomycin-resistant gene and by subjecting the part of the neomycin-resistant gene to RT-PCR, the neomycin-resistant gene can be used as an internal standard control (internal control). PAR(F) 2 and PAR(R) 2 represent the regions corresponding to the PCR primers in the neomycin-resistant gene. Although not shown in the example of FIG. 25, an intron may be inserted into at least one of PAR(F) 2 and PAR(R) 2.

### 2. Effect of Primer for Detecting Target mRNA

### (1) Transfection into Cultured Cells

[0324] HeLa cells were seeded at 0.2 to 0.3×10⁶ cells per well of a 24-well plate, and after one day, using Lipofectamine 2000 (manufactured by Invitrogen Corp.), 0.5 μg of pTREC vector was transfected according to the manual.

### (2) Recovery of Cells and Quantification of mRNA

[0325] One day after the transfection, the cells were recovered and total RNA was extracted with Trizol (manufactured by Invitrogen Corp.). One hundred nanograms of the resulting RNA was reverse transcribed by SuperScript II RT (manufactured by Invitrogen Corp.), using oligo (dT) primers, to synthesize cDNA. A control to which no reverse transcriptase was added was prepared. Using one three hundred and twentieth of the amount of the resulting cDNA as a PCR template, quantitative PCR was carried out in a 50-μl reaction system using SYBR Green PCR Master Mix (manufactured by Applied Biosystems Corp.) to quantify target mRNA (referred to as mRNA (T)) and, as an internal control, mRNA derived from the neomycin-resistant gene in the pTREC (referred to as mRNA (C)). A real-time monitoring apparatus ABI PRIZM7000 (manufactured by Applied Biosystems) was used for the quantitative PCR. A primer pair T (SEQ ID NOs: 2 and 3 in the sequence listing) and a primer pair C (SEQ ID NOs: 4 and 5 in the sequence listing) were used for the quantification of mRNA (T) and mRNA (C), respectively.

### Primer Pair T:

(SEQ ID NO: 2)

aggcactgggcaggtgtc

(SEQ ID NO: 3)

tgctcgaagcattaaccctcacta

### Primer Pair C

(SEQ ID NO: 4)

atcaggatgatctggacgaag

(SEQ ID NO: 5)

ctcttcagcaatatcacgggt

[0328] FIGS. 26 and 27 show the results of PCR. Each of FIGS. 26 and 27 is a graph in which the PCR product is taken on the axis of ordinate and the number of cycles of PCR is taken on the axis of abscissa. In the neomycin-resistant gene, there is a small difference in the amplification of the PCR product between the case in which cDNA was synthesized by the reverse transcriptase (+RT) and the control case which no reverse transcriptase was added (−RT) (FIG. 26). This indicates that not only cDNA but also the vector remaining in the cells also acted as a template and was amplified. On the other hand, in target sequence mRNA, there is a large difference between the case in which the reverse transcriptase was added (+RT) and the case in which no transcriptase was added (−RT) (FIG. 27). This result indicates that since one member of the primer pair T is designed so as to sandwich the intron, cDNA derived from intron-free mRNA is efficiently amplified, while the remaining vector having the intron does not easily become a template.

### 3. Inhibition of Expression of Target mRNA by siRNA

### (1) Cloning of Evaluation Sequence to Target Expression Vector

[0329] Sequences corresponding to the coding regions 812-834 and 35-57 of a human vimentin (VIM) gene (RefSeq ID: NM_{—}003380) were targeted for evaluation. The following synthetic oligonucleotides (evaluation sequence fragments) of SEQ ID NOs: 6 and 7 in the sequence listing were produced, the synthetic oligonucleotides including these sequences and identification sequences for EcoRI and XhoI.

### Evaluation Sequence VIM35 (Corresponding to 35-57 of VIM)

(SEQ ID NO: 6)

5′-gaattcgcaggatgttcggcggcccgggcctcgag-3′

### Evaluation Sequence VIM812 (Corresponding to 812-834 of VIM)

(SEQ ID NO: 7)

5′-gaattcacgtacgtcagcaatatgaaagtctcgag-3′

[0332] Using the EcoRI and XhoI sites located on both ends of each of the evaluation sequence fragments, each fragment was cloned as a new target sequence between the EcoRI and XhoI sites of the pTREC, and thereby pTREC-VIM35 and pTREC-VIM812 were constructed.

### (2) Production of siRNA

[0333] siRNA fragments corresponding to the evaluation sequence VIM35 (SEQ ID NO: 8 in the sequence list, FIG. 28), the evaluation sequence VIM812 (SEQ ID NO: 9, FIG. 29), and a control sequence (siContorol, SEQ ID NO: 10, FIG. 30) were synthesized, followed by annealing. Each of the following siRNA sequences is provided with an overhanging portion on the 3′ end.

siVIM35

(SEQ ID NO: 8)

5′-aggauguucggcggcccgggc-3′
siVIM812

(SEQ ID NO: 9)

5′-guacgucagcaauaugaaagu-3′

[0334] As a control, siRNA for the luciferase gene was used.

siControl

(SEQ ID NO: 10)

5′-cauucuauccgcuggaagaug-3′

### (3) Transfection into Cultured Cells

[0335] HeLa cells were seeded at 0.2 to 0.3×10⁶ cells per well of a 24-well plate, and after one day, using Lipofectamine 2000 (manufactured by Invitrogen Corp.), 0.5 μg of pTREC-VIM35 or pTREC-VIM812, and 100 nM of siRNA corresponding to the sequence derived from each VIM (siVIM35, siVIM812) were simultaneously transfected according to the manual. Into the control cells, 0.5 μg of pTREC-VIM35 or pTREC-VIM812 and 100 nM of siRNA for the luciferase gene (siControl) were simultaneously transfected.

### (4) Recovery of Cells and Quantification of mRNA

[0336] One day after the transfection, the cells were recovered and total RNA was extracted with Trizol (Invitrogen). One hundred nanograms of the resulting RNA was reverse transcribed by SuperScript II RT (manufactured by Invitrogen Corp.), using oligo (dT) primers, to synthesize cDNA. Using one three hundred and twentieth of the amount of the resulting cDNA as a PCR template, quantitative PCR was carried out in a 50-μl reaction system using SYBR Green PCR Master Mix (manufactured by Applied Biosystems Corp.) to quantify mRNA (referred to as mRNA (T)) including the sequence derived from VIM to be evaluated and, as an internal control, mRNA derived from the neomycin-resistant gene in the pTREC (referred to as mRNA (C)).

[0337] A real-time monitoring apparatus ABI PRIZM7000 (manufactured by Applied Biosystems) was used for the quantitative PCR. The primer pair T (SEQ ID NOs: 2 and 3 in the sequence listing) and the primer pair C (SEQ ID NOs: 4 and 5 in the sequence listing) were used for the quantification of mRNA (T) and mRNA (C), respectively. The ratio (T/C) of the resulting values of mRNA was taken on the axis of ordinate (relative amount of target mRNA (%)) in a graph (FIG. 31).

[0338] In the control cells, since siRNA for the luciferase gene does not affect target mRNA, the ratio T/C is substantially 1. In VIM812 siRNA, the ratio T/C is extremely decreased. The reason for this is that VIM812 siRNA cut mRNA having the corresponding sequence, and it was shown that VIM812 siRNA has the RNAi effect. On the other hand, in VIM35 siRNA, the T/C ratio was substantially the same as that of the control, and thus it was shown that the sequence of VIM35 does not substantially have the RNAi effect.

### Example 3

### 1. Inhibition of Expression of Endogenous Vimentin by siRNA

### (1) Transfection into Cultured Cells

[0339] HeLa cells were seeded at 0.2 to 0.3×10⁶ cells per well of a 24-well plate, and after one day, using Lipofectamine 2000 (manufactured by Invitrogen Corp.), 100 nM of siRNA for VIM (siVIM35 or siVIM812) or control siRNA (siControl) and, as a control for transfection efficiency, 0.5 μg of pEGFP (manufactured by Clontech) were simultaneously transfected according to the manual. pEGFP is incorporated with EGFP.

### (2) Assay of Endogenous Vimentin mRNA

[0340] Three days after the transfection, the cells were recovered and total RNA was extracted with Trizol (manufactured by Invitrogen Corp.). One hundred nanograms of the resulting RNA was reverse transcribed by SuperScript II RT (manufactured by Invitrogen Corp.), using oligo (dT) primers, to synthesize cDNA. PCR was carried out using the cDNA product as a template and using primers for vimentin, VIM-F3-84 and VIM-R3-274 (SEQ ID NOs: 11 and 12).

VIM-F3-84;

(SEQ ID NO: 11)

gagctacgtgactacgtcca
VIM-R3-274;

(SEQ ID NO: 12)

gttcttgaactcggtgttgat

[0341] Furthermore, as a control, PCR was carried out using β-actin primers ACTB-F2-481 and ACTB-R2-664 (SEQ ID NOs: 13 and 14). The level of expression of vimentin was evaluated under the common quantitative value of β-actin for each sample.

ACTB-F2-481;

(SEQ ID NO: 13)

cacactgtgcccatctacga
ACTB-R2-664;

(SEQ ID NO: 14)

gccatctcttgctcgaagtc

[0342] The results are shown in FIG. 32. In FIG. 32, the case in which siControl (i.e., the sequence unrelated to the target) is incorporated is considered as 100% for comparison, and the degree of decrease in mRNA of VIM when siRNA is incorporated into VIM is shown. siVIM-812 was able to effectively inhibit VIM mRNA. In contrast, use of siVIM-35 did not substantially exhibit the RNAi effect.

### (3) Antibody Staining of Cells

[0343] Three days after the transfection, the cells were fixed with 3.7% formaldehyde, and blocking was performed in accordance with a conventional method. Subsequently, a rabbit anti-vimentin antibody (α-VIM) or, as an internal control, a rabbit anti-Yes antibody (α-Yes) was added thereto, and reaction was carried out at room temperature. Subsequently, the surfaces of the cells were washed with PBS (Phosphate Buffered Saline), and as a secondary antibody, a fluorescently-labeled anti-rabbit IgG antibody was added thereto. Reaction was carried out at room temperature. After the surfaces of the cells were washed with PBS, observation was performed using a fluorescence microscope.

[0344] The fluorescence microscope observation results are shown in FIG. 33. In the nine frames of FIG. 33, the parts appearing white correspond to fluorescent portions. In EGFP and Yes, substantially the same expression was confirmed in all the cells. In the cells into which siControl and siVIM35 were introduced, fluorescence due to antibody staining of vimentin was observed, and the presence of endogenous vimentin was confirmed. On the other hand, in the cells into which siVIM812 was introduced, fluorescence was significantly weaker than that of the cells into which siControl and siVIM35 were introduced. The results show that endogenous vimentin mRNA was interfered by siVIM812, and consequently, the level of expression of vimentin protein was decreased. It has become evident that siVIM812 also has the RNAi effect against endogenous vimentin mRNA.

[0345] The results obtained in the assay system of the present invention [Example 2] matched well with the results obtained in the cases in which endogenous genes were actually treated with corresponding siRNA [Example 3]. Consequently, it has been confirmed that the assay system is effective as a method for evaluating the RNAi activity of any siRNA.

### Example 4

[0346] Base sequences were designed based on the above predetermined rules (a) to (d). The base sequences were designed by a base sequence processing apparatus which runs the siRNA sequence design program. As the base sequences, 15 sequences (SEQ ID NOs: 15 to 29) which were expected to have RNAi activity and 5 sequences (SEQ ID NOs: 30 to 34) which were not expected to have RNAi activity were prepared.

[0347] RNAi activity was evaluated by measuring the luciferase activity as in Example 1 except that the target sequence and siRNA to be evaluated were prepared based on each of the designed sequences. The results are shown in FIG. 34. A low luciferase relative activity value indicates an effective state, i.e., siRNA provided with RNAi activity. All of the siRNA which was expected to have RNAi activity by the program effectively inhibited the expression of luciferase.

### [Sequences which Exhibited RNAi Activity; Prescribed Sequence Portions, Excluding Overhanging Portions]

| | |
|---|---|
| 5, gacgccaaaaacataaaga | (SEQ ID NO: 15) |
| 184, gttggcagaagctatgaaa | (SEQ ID NO: 16) |
| 272, gtgttgggcgcgttattta | (SEQ ID NO: 17) |
| 309, ccgcgaacgacatttataa | (SEQ ID NO: 18) |
| 428, ccaatcatccaaaaaatta | (SEQ ID NO: 19) |
| 515, cctcccggttttaatgaat | (SEQ ID NO: 20) |
| 658, gcatgccagagatcctatt | (SEQ ID NO: 21) |
| 695, ccggatactgcgattttaa | (SEQ ID NO: 22) |
| 734, ggttttggaatgtttacta | (SEQ ID NO: 23) |
| 774, gatttcgagtcgtcttaat | (SEQ ID NO: 24) |
| 891, gcactctgattgacaaata | (SEQ ID NO: 25) |
| 904, caaatacgatttatctaat | (SEQ ID NO: 26) |
| 1186, gattatgtccggttatgta | (SEQ ID NO: 27) |
| 1306, ccgcctgaagtctctgatt | (SEQ ID NO: 28) |
| 1586, ctcgacgcaagaaaaatca | (SEQ ID NO: 29) |

### [Sequences which Did Not Exhibit RNAi Activity; Prescribed Sequence Portions, Excluding Overhanging Portions]

| | |
|---|---|
| 14, aacataaagaaaggcccgg | (SEQ ID NO: 30) |
| 265, tatgccggtgttgggcgcg | (SEQ ID NO: 31) |
| 295, agttgcagttgcgcccgcg | (SEQ ID NO: 32) |
| 411, acgtgcaaaaaaagctccc | (SEQ ID NO: 33) |
| 1044, ttctgattacacccgaggg | (SEQ ID NO: 34) |

### Example 5

[0350] siRNA sequences against SARS virus were designed and examined for their RNAi activity. RNAi activity was evaluated by the same assay as used in Example 2, except that both the target sequence and the sequence to be evaluated were changed.

[0351] siRNA sequences were designed on the basis of the genome of SARS virus by using the above siRNA sequence design program, such that the resulting siRNA sequences satisfied a given regularity for 3CL-PRO, RdRp, Spike glycoprotein, Small envelope E protein, Membrane glycoprotein M, Nucleocapsid protein and s2m motif, respectively.

[0352] As a result of the assay shown in FIG. 35, 11 siRNA sequences designed to satisfy the regularity were found to effectively inhibit RNA into which the respective corresponding siRNA sequences were incorporated as targets. The case in which siControl (the sequence unrelated to SARS) is incorporated is considered as 100%, and the relative amount of target mRNA when each siRNA of SARS is incorporated is shown. In the case of incorporating each siRNA, target RNA was reduced to around 10% or below; each siRNA was confirmed to have RNAi activity.

### [Designed siRNA Sequences (Prescribed Sequence Portions, Excluding Overhanging Portions)]

siControl;

(SEQ ID NO: 35)

gggcgcggtcggtaaagtt
3CL-PRO; SARS-10754;

(SEQ ID NO: 36)

ggaattgccgtcttagata
3CL-PRO; SARS-10810;

(SEQ ID NO: 37)

gaatggtcgtactatcctt
RdRp; SARS-14841;

(SEQ ID NO: 38)

ccaagtaatcgttaacaat
Spike glycoprotein; SARS-23341;

(SEQ ID NO: 39)

gcttggcgcatatattcta
Spike glycoprotein; SARS-24375;

(SEQ ID NO: 40)

cctttcgcgacttgataaa
Small envelope E protein; SARS-26233;

(SEQ ID NO: 41)

gtgcgtactgctgcaatat
Small envelope E protein; SARS-26288;

(SEQ ID NO: 42)

ctactcgcgtgttaaaaat
Membrane glycoprotein M; SARS-26399;

(SEQ ID NO: 43)

gcagacaacggtactatta
Membrane glycoprotein M; SARS-27024;

(SEQ ID NO: 44)

ccggtagcaacgacaatat
Nucleocapsid protein; SARS-28685;

(SEQ ID NO: 45)

cgtagtcgcggtaattcaa
s2m motif; SARS-29606;

(SEQ ID NO: 46)

gatcgagggtacagtgaat

### Example 6

[0354] According to “<5> siRNA sequence design program” and “<7> Base sequence processing apparatus for running siRNA sequence design program, etc.” described above, the following siRNA sequences were designed. Setting conditions for running the program are as shown below.

### (Setting Conditions)

[0355] (a) The 3′ end base is adenine, thymine or uracil.
(b) The 5′ end base is guanine or cytosine.
(c) In a 7-base sequence from the 3′ end, 4 or more bases are one or more types of bases selected from the group consisting of adenine, thymine and uracil.
(d) The number of bases is 19.
(e) A sequence in which 10 or more bases of guanine or cytosine are continuously present is not contained.
(f) A similar sequence containing mismatches of 2 or less bases against the prescribed sequence is not contained in the base sequences of genes other than the target gene among all gene sequences of the target organism.

[0356] The designed siRNA sequences are shown in the sequence listing under SEQ ID NOs: 47 to 817081. The name of an organism targeted by each of the siRNA sequences shown in the sequence listing under SEQ ID NOs: 47 to 817081 is shown in <213> of the sequence listing. Likewise, the gene name of each target gene for RNAi, the accession of each target gene, and a prescribed sequence-corresponding portion in the base sequence of each target gene are shown in <223> (Other information) of the sequence listing. It should be noted that gene names and accession information in this context correspond to the “RefSeq” database at NCBI (HYPERLINK “http://www.ncbi.nlm.nih.gov/” http://www.ncbi.nlm.nih.gov/), and information of each gene (including the sequence and function of the gene) can be obtained through access to the RefSeq database.

[0357] An example will be given of siRNA shown in SEQ ID NO: 47. The target organism is Homo sapiens, the gene name of the target gene is ATBF1, the accession of the target gene is NM_{—}006885.2, and the portion corresponding to the prescribed sequence is composed of 19 bases between bases 908 and 926 in the base sequence of NM_{—}006885.2. Upon access to the RefSeq database, the target gene will be found to be a gene related to AT-binding transcription factor 1.

### Example 7

[0358] To examine influences on other genes containing sequences with a small number of mismatches to siRNA, the same procedure as used in Example 5 was repeated to design siRNA against firefly luciferase, and the resulting siRNA was examined for its RNAi effect on the similar sequences with a small number of mismatches.

### [Designed siRNA Sequence (Prescribed Sequence Portion, Including Overhanging Portions of 2 Bases)]

[0359] 3-36 gccattctatccgctggaagatg (SEQ ID NO: 817082)

### [Sequences Similar to Designed siRNA (Bases Indicated in Uppercase Letters Represent Mismatch Sites)]

3-36.R1

(SEQ ID NO: 817083)

gccattctatccgcGggCGgatg
3-36.R2

(SEQ ID NO: 817084)

gccattctatccgcCggGGgatg
3-36.R3

(SEQ ID NO: 817085)

gccattctatccgcGggaCgatg
3-36.R4

(SEQ ID NO: 817086)

gccattctatccgctggCGgatg
3-36.R5

(SEQ ID NO: 817087)

gccattctatccgctggaGgatg
3-36.R6

(SEQ ID NO: 817088)

gccattctatccgctgTaaTatg
3-36.R7

(SEQ ID NO: 817089)

gccattctatccgctAAaagatg
3-36.R8

(SEQ ID NO: 817090)

gccattctatccgctATaaAatg
3-36.L1

(SEQ ID NO: 817091)

gccGGCcCGtccgctggaagatg
3-36.L2

(SEQ ID NO: 817092)

gccCGtcCGtccgctggaagatg
3-36.L3

(SEQ ID NO: 817093)

gccGtCctGtccgctggaagatg
3-36.L4

(SEQ ID NO: 817094)

gccaCCcGatccgctggaagatg
3-36.L5

(SEQ ID NO: 817095)

gccattAtatccgctggaagatg
3-36.01A

(SEQ ID NO: 817096)

gcAattctatccgctggaagatg
3-36.01G

(SEQ ID NO: 817097)

gcGattctatccgctggaagatg
3-36.01U

(SEQ ID NO: 817098)

gcTattctatccgctggaagatg
3-36.19G

(SEQ ID NO: 817099)

gccattctatccgctggaagGtg
3-36.19C

(SEQ ID NO: 817100)

gccattctatccgctggaagCtg
3-36.19U

(SEQ ID NO: 817101)

gccattctatccgctggaagTtg

[0361] As a result of the assay shown in FIG. 36, in the case of designing base sequences of 19 bases, when genes other than the target gene contain similar sequences with mismatches of 2 or less bases, these similar sequence portions were confirmed to have a high probability of being targeted by RNA interference.

### Example 8

[0362] In this example, the siRNA sequences used were composed of 21-base sense strand RNA having the base sequences shown in Tables 1A to 1K (whose base sequences are shown in the column “siRNA-sense” of Table 1) and 21-base antisense strand RNA having the base sequences shown in Tables 1A to 1K (whose base sequences are shown in the column “siRNA-antisense” of Table 1, provided that the base sequences are shown in the direction from 3′ to 5′). As shown in Table 1, each siRNA was appropriately designed on the basis of each target sequence (see the column “Target Sequence”) located at a given position (see the column “Target Position”) in the coding region of each gene to be targeted by RNAi (see the column “Gene Name”; hereinafter also referred to as a target gene), particularly on the basis of the so-called prescribed sequence corresponding to a portion covering the third base from the 5′ end to the third base from the 3′ end of each target sequence. Each siRNA was then examined for its RNAi effect using human-derived HeLa cells. More specifically, even-numbered base sequences among SEQ ID NOs: 817102 to 817650 were examined as sense strands (siRNA-sense), while odd-numbered base sequences among SEQ ID NOs: 817102 to 817650 were examined as antisense strands (siRNA-antisense). Detailed procedures used in this example will be explained below.

### 1. Synthesis of siRNA

[0363] Double-stranded siRNA composed of sense and antisense strands was suitably designed according to the above rules of the present invention (the rules (a) to (d) described in [1], etc.) on the basis of the above prescribed sequence of each target gene. Based upon such design, the synthesis was entrusted to Proligo Japan for preparation. As to detailed synthetic procedures used here, sense and antisense strands having given base sequences as shown in the table were heated in a reaction liquid of 10 mM Tris-HCl (pH 7.5) and 20 mM NaCl at 90° C. for 3 minutes. Both strands were further incubated at 37° C. for 1 hour and then associated by standing until room temperature to form double-stranded siRNA. The double-stranded siRNA thus formed was subjected to electrophoresis using a 2% agarose gel in TBE buffer so as to confirm the association between sense and antisense strands.

### 2. Cell Cultivation

[0364] In this example, human-derived HeLa cells were used. The medium used for culturing HeLa cells (hereinafter also referred to as cell medium) was Dulbecco's Modified Eagle's medium (DMEM; manufactured by Invitrogen Corp.) which was supplemented with inactivated 10% fetal bovine serum (FBS; manufactured by Biomedicals, inc). In this medium, HeLa cells were cultured at 37° C. in the presence of 5% CO₂.

### 3. Target Gene to be Targeted by RNAi

[0365] Since HeLa cells which are uterine cervical cancer cells are used in this example, the individual genes shown in Table 1 which are endogenous genes in the HeLa cells and are highly expressed in these cells are targets for RNAi by siRNA, i.e., target genes for RNAi. In this example, HeLa cells were used to examine the RNAi effect of each siRNA on these genes, thereby studying the effect of siRNA on diseases and/or biological functions related to these genes (more specifically, see the columns “Related Disease”, “Biological Function Category” and/or “Reported Biological Function” of FIG. 46), i.e., a prophylactic/therapeutic effect on the diseases and/or a controlling effect on the biological functions. As an internal control gene, the endogenous GAPDH gene in HeLa cells was used in this study.

### 4. Introduction (Transfection) of siRNA into Cells

[0366] HeLa cells were first seeded at a density of 5×10⁴ cells/well into a 24-well plate and cultured for 24 hours under the cell culture conditions described above, followed by introducing 5 nM/well of siRNA. After the introduction, the HeLa cells were cultured at 37° C. for 24 hours. In this introduction process, Lipofectamine 2000 (manufactured by Invitrogen Corp.) was used as an introducing reagent, while DMEM was used as a medium for introduction. As to detailed procedures for introduction, Opti-MEM medium (manufactured by Invitrogen Corp.) containing Lipofectamine 2000 and siRNA was added to the cell medium, followed by culturing the HeLa cells to introduce siRNA into the cells. The HeLa cells thus introduced with siRNA are hereinafter referred to as an “evaluation sample.”

[0367] On the other hand, for correction of the level of target gene-derived mRNA in PCR described later, the following calibrator sample was prepared. The calibrator sample was prepared by the same treatment as used for the evaluation sample introduced with siRNA, except that Opti-MEM medium containing Lipofectamine 2000 but free from siRNA was added to the above cell medium to culture HeLa cells.

### 5. Measurement of RNAi Effect

[0368] After the above introduction was performed, HeLa cells were recovered for both evaluation and calibrator samples described above. The recovered cells were then provided for an ABI PRISM® 6700 Automated Nucleic Acid Workstation (manufactured by Applied Biosystems Corp.), and this apparatus was operated according to the manual to perform RNA extraction and cDNA synthesis by reverse transcription.

[0369] Subsequently, the resulting cDNA was used as a template to perform quantitative PCR in a 50-μl reaction system using SYBR Green PCR Master Mix (manufactured by Applied Biosystems Corp.). In this quantitative PCR, an ABI PRISM® 7900HT Sequence Detection System was used as a real-time monitoring apparatus and operated according to the manual. In addition, the PCR primers used were optimal primers obtained as a result of various studies.

[0370] In this example, the results obtained from PCR quantification were analyzed by a method called the “comparative Ct method.” With respect to this method, a detailed explanation is omitted here because an explanation of this method is disclosed in the home page of Applied Biosystems Corp. (http://www.appliedbiosystems.co.jp). The outline of this method is as follows: this method allows relative quantification by focusing on what number of cycles an evaluation sample reaches faster (or later) the Threshold Line, as compared to the calibrator sample.

[0371] More specifically, both evaluation and calibrator samples were first quantified by PCR to determine Ct1 that corresponds to a relative mRNA level including a target gene-derived base sequence(s) and Ct2 that corresponds to a relative mRNA level including an internal control gene-derived base sequence(s). In the following descriptions, the above Ct1 and Ct2 of an evaluation sample are referred to as “Ct1(E)” and “Ct2(E),” respectively. Likewise, the above Ct1 and Ct2 of the calibrator sample are referred to as “Ct1(C)” and “Ct2(C),” respectively.

[0372] As used herein, “Ct” denotes the number of cycles required before reaching the Threshold Line, and more specifically is defined by the following Equation (1). It should be noted that the amplification efficiency is set to 1 in this case. With respect to the numeric characters following Ct, “1” means a mRNA level derived from a target gene and “2” means a mRNA level derived from the internal control gene. With respect to the designations (E) and (C) following Ct, “E” means an evaluation sample and “C” means the calibration sample. Regardless of the designations “1”, “2”, “E” and “C”, “Ct” is defined as follows:

Ct=(log [DNA]t−log [DNA]0)/log 2 (1)

wherein [DNA]t represents the amount of DNA at the time of reaching the Threshold Line, and [DNA]0 represents the initial amount of cDNA reverse-transcribed from mRNA.

[0373] Ct1(E), Ct2(E), Ct1(C) and Ct2(C) thus obtained by PCR quantification were subjected to and analyzed by the comparative Ct method to obtain a RQ value used for evaluating the RNAi effect of siRNA. The RQ value is a relative mRNA level of a target gene in an evaluation sample when the mRNA level of the target gene in the calibration sample is set to 1. More specifically, the RQ value is defined by the following Equation (2):

RQ=2^{(-ΔΔCt)} (2)

[0374] wherein ΔΔCt is defined by the following Equation (3):

ΔΔCt=ΔCt(E)−ΔCt(C) (3)

wherein Δ [symbol] Ct(E) is defined by the following Equation (4) and ΔCt(C) is defined by the following Equation (5):

ΔCt(E)=Ct1(E)−Ct2(E) (4)

ΔCt(C)=Ct1(C)−Ct2(C) (5).

### It should be noted that the designations “1”, “2”, “E” and “C” in Equations (2) to (5) are as defined above.

### 6. Evaluation of RNAi Effect

[0375] The RQ values thus obtained are shown in Tables 1A to 1K. In Table 1, the data in the columns “Gene Name” and “refseq_NO.”, portions actually targeted by RNAi within the sequences listed in the column “Target Sequence” and the definition of “Target Position” are as described above for FIG. 46 in the section “BRIEF DESCRIPTION OF THE DRAWINGS” of this specification.

[0376] In this example, on the basis of the RQ values thus calculated (see the column “RQ value” of Table 1), each siRNA was evaluated for RNAi effect on its target gene. As is evident from the table, siRNA sequences composed of sense strands having even-numbered base sequences among SEQ ID NOs: 817102 to 817650 and antisense strands having odd-numbered base sequences among SEQ ID NOs: 817102 to 817650 were all found to have a RQ value less than 1 and almost all found to have a RQ value less than 0.5, thus indicating that these siRNA sequences caused a 50% or more inhibition of the expression of the target genes shown in Table 1. Such an RNAi effect of each siRNA was also achieved when repeating the same procedure as shown above with COS cells.

[0377] Moreover, in light of the results from Example 8 showing that all the 294 tested siRNA sequences falling within the present invention were found to produce an RNAi effect, it was indicated that the polynucleotides (siRNA) of the present invention effectively produced an RNAi effect against their target genes in mammalian cells and caused a 50% or more inhibition of gene expression.

[0378] In Examples 1 to 8, the cases using siRNA sequences whose sense and antisense strands are each composed of RNA were shown. The same results as in Examples 1 to 8 are also obtained in the case of using siRNA having a chimeric structure. Although the detailed explanation for the case of siRNA having a chimeric structure is omitted here, for example, when siRNA having a chimeric structure is used in Example 8, this siRNA structurally differs in the following point from the siRNA sequences of Example 8 which are composed of sense and antisense strands shown under SEQ ID NOs: 817102 to 817651.

[0379] Namely, siRNA sequences of chimeric structure have the same base sequences as siRNA sequences composed of sense and antisense strands shown in Table 1 under SEQ ID NOs: 817102 to 817651. However, a portion of 8 to 12 nucleotides (e.g., 10 nucleotides, preferably 11 nucleotides, more preferably 12 nucleotides) from the 3′ end of the sense strand (for example, “A” in the case of the sense strand shown in Table 1 under SEQ ID NO: 8102) and a portion of 8 to 12 nucleotides (e.g., 10 nucleotides, preferably 11 nucleotides, more preferably 12 nucleotides) from the 5′ end of the antisense strand (for example, “A” in the case of the antisense strand shown in Table 1 under SEQ ID NO: 8103) are both composed of DNA. Thus, siRNA sequences of chimeric structure differ from the siRNA sequences shown under SEQ ID NOs: 817102 to 817651 in that U in the above polynucleotide portions is replaced by T within the base sequences of the sense and antisense strands shown in Table 1.

TABLE 1

| | | | | | SEQ | | SEQ | | SEQ |
|---|---|---|---|---|---|---|---|---|---|
| Gane | | | Target | | ID | | ID | | ID |
| Name | refseq_ID | RQ | Position | Target sequence | NO | siRNA-sense | NO | siRNA-antisense | NO |
| PSEN1 | NM_000021.2 | 0.23 | 532 | tggtcgtggctaccattaagtca | 307985 | GUCGUGGCUACCAUUAAGUCA | 817102 | ACUUAAUGGUAGCCACGACCA | 817103 |
| JAG1 | NM_000214.1 | 0.28 | 794 | ctggccgaggtcctatacgttgc | 147021 | GGCCGAGGUCCUAUACGUUGC | 817104 | AACGUAUAGGACCUCGGCCAG | 817105 |
| POLR2A | NM_000937.2 | 0.34 | 2425 | tcctcatcgagggtcatactatt | 36223 | CUCAUCGAGGGUCAUACUAUU | 817106 | UAGUAUGACCCUCGAUGAGGA | 817107 |
| CDC6 | NM_001254.3 | 0.35 | 383 | gtctgggcgatgacaacctatgc | 76037 | CUGGGCGAUGACAACCUAUGC | 817108 | AUAGGUUGUCAUCGCCCAGAC | 817109 |
| CSE1L | NM_001316.2 | 0.15 | 393 | gccgatcgagtggccattaaagc | 128329 | CGAUCGAGUGGCCAUUAAAGC | 817110 | UUUAAUGGCCACUCGAUCGGC | 817111 |
| HDAC2 | NM_001527.1 | 0.15 | 1110 | tggctacacaatccgtaatgttg | 4714 | GCUACACAAUCCGUAAUGUUG | 817112 | ACAUUACGGAUUGUGUAGCCA | 817113 |
| HIF1A | NM_001530.2 | 0.2 | 809 | aactagccgaggaagaactatga | 237 | CUAGCCGAGGAAGAACUAUGA | 817114 | AUAGUUCUUCCUCGGCUAGUU | 817115 |
| IGFBP4 | NM_001552.1 | 0.064 | 706 | aagcacttcgccaaaattcgaga | 124916 | GCACUUCGCCAAAAUUCGAGA | 817116 | UCGAAUUUUGGCGAAGUGCUU | 817117 |
| CDC2 | NM_001786.2 | 0.18 | 656 | tggggtcagctcgttactcaact | 75723 | GGGUCAGCUCGUUACUCAACU | 817118 | UUGAGUAACGAGCUGACCCCA | 817119 |
| CDK2 | NM_001798.2 | 0.21 | 689 | tggagtccctgttcgtacttaca | 76134 | GAGUCCCUGUUCGUACUUACA | 817120 | UAAGUACGAACAGGGACUCCA | 817121 |
| CDK7 | NM_001799.2 | 0.3 | 575 | gggagccccaatagagcttatac | 76204 | GAGCCCCAAUAGAGCUUAUAC | 817122 | AUAAGCUCUAUUGGGGCUCCC | 817123 |
| CUTL1 | NM_001913.2 | 0.36 | 139 | gtccagaaagcggcttatcgaac | 2624 | CCAGAAAGCGGCUUAUCGAAC | 817124 | UCGAUAAGCCGCUUUCUGGAC | 817125 |
| E2F4 | NM_001950.3 | 0.2 | 1220 | cccgggagaccacgattatatct | 2910 | CGGGAGACCACGAUUAUAUCU | 817126 | AUAUAAUCGUGGUCUCCCGGG | 817127 |
| GNB1 | NM_002074.2 | 0.072 | 672 | tgcggtggcctggataacatttg | 192277 | CGGUGGCCUGGAUAACAUUUG | 817128 | AAUGUUAUCCAGGCCACCGCA | 817129 |
| HSPA4 | NM_002154.3 | 0.055 | 578 | aggtataaaggtgacatatatgg | 85169 | GUAUAAAGGUGACAUAUAUGG | 817130 | AUAUAUGUCACCUUUAUACCU | 817131 |
| KPNA1 | NM_002264.1 | 0.2 | 520 | ttctcttcagacccgaattgtga | 133261 | CUCUUCAGACCCGAAUUGUGA | 817132 | ACAAUUCGGGUCUGAAGAGAA | 817133 |
| KPNA3 | NM_002267.2 | 0.074 | 1921 | aggaggtacctacaattttgatc | 177084 | GAGGUACCUACAAUUUUGAUC | 817134 | UCAAAAUUGUAGGUACCUCCU | 817135 |
| KPNA4 | NM_002268.3 | 0.094 | 1595 | tagtactcgatggactaagtaat | 269352 | GUACUCGAUGGACUAAGUAAU | 817136 | UACUUAGUCCAUCGAGUACUA | 817137 |
| PAWR | NM_002583.2 | 0.21 | 984 | gtgggttccctagatataacagg | 113162 | GGGUUCCCUAGAUAUAACAGG | 817138 | UGUUAUAUCUAGGGAACCCAC | 817139 |
| POLD1 | NM_002691.1 | 0.29 | 2216 | ggggttcggacgtcagatgatcg | 35766 | GGUUCGGACGUCAGAUGAUCG | 817140 | AUCAUCUGACGUCCGAACCCC | 817141 |
| POLR2G | NM_002696.1 | 0.11 | 586 | tggctccctgatggacgattact | 53520 | GCUCCCUGAUGGACGAUUACU | 817142 | UAAUCGUCCAUCAGGGAGCCA | 817143 |
| PRKACB | NM_002731.1 | 0.1 | 944 | cacgacagattggattgctattt | 96985 | CGACAGAUUGGAUUGCUAUUU | 817144 | AUAGCAAUCCAAUCUGUCGUG | 817145 |
| PRKCA | NM_002737.2 | 0.19 | 429 | ctgcgatatgaacgttcacaagc | 97011 | GCGAUAUGAACGUUCACAAGC | 817146 | UUGUGAACGUUCAUAUCGCAG | 817147 |
| MAPK1 | NM_002745.2 | 0.086 | 383 | aagttcgagtagctatcaagaaa | 89815 | GUUCGAGUAGCUAUCAAGAAA | 817148 | UCUUGAUAGCUACUCGAACUU | 817149 |
| MAPK9 | NM_002752.3 | 0.22 | 261 | atcgtgaacttgtcctcttaaaa | 90069 | CGUGAACUUGUCCUCUUAAAA | 817150 | UUAAGAGGACAAGUUCACGAU | 817151 |
| MAP2K1 | NM_002755.2 | 0.21 | 114 | ccccgacggctctgcagttaacg | 88938 | CCGACGGCUCUGCAGUUAACG | 817152 | UUAACUGCAGAGCCGUCGGGG | 817153 |
| PSMA2 | NM_002787.3 | 0.022 | 56 | ttcagcccgtctggtaaacttgt | 185145 | CAGCCCGUCUGGUAAACUUGU | 817154 | AAGUUUACCAGACGGGCUGAA | 817155 |
| PSMA3 | NM_002788.2 | 0.074 | 599 | atgacctgccgtgatatcgttaa | 185178 | GACCUGCCGUGAUAUCGUUAA | 817156 | AACGAUAUCACGGCAGGUCAU | 817157 |
| PSMA4 | NM_002789.3 | 0.1 | 183 | gtcgcttataccaagttgaatat | 185191 | CGCUUAUACCAAGUUGAAUAU | 817158 | AUUCAACUUGGUAUAAGCGAC | 817159 |
| PSMA5 | NM_002790.2 | 0.39 | 107 | tacgacaggggcgtgaatacttt | 185211 | CGACAGGGGCGUGAAUACUUU | 817160 | AGUAUUCACGCCCCUGUCGUA | 817161 |
| PSMA6 | NM_002791.1 | 0.07 | 129 | ccggttttgaccgccacattacc | 53630 | GGUUUUGACCGCCACAUUACC | 817162 | UAAUGUGGCGGUCAAAACCGG | 817163 |
| PSMA7 | NM_002792.2 | 0.13 | 346 | cgccgatgcaaggatagtcatca | 185235 | CCGAUGCAAGGAUAGUCAUCA | 817164 | AUGACUAUCCUUGCAUCGGCG | 817165 |
| PSMB1 | NM_002793.2 | 0.035 | 130 | tgcgattttcgccctacgttttc | 185241 | CGAUUUUCGCCCUACGUUUUC | 817166 | AAACGUAGGGCGAAAAUCGCA | 817167 |
| PSMB2 | NM_002794.3 | 0.66 | 530 | cagtatcctcgaccgatactaca | 185279 | GUAUCCUCGACCGAUACUACA | 817168 | UAGUAUCGGUCGAGGAUACUG | 817169 |
| PSMB3 | NM_002795.2 | 0.063 | 312 | aggtcggcagatcaaaccttata | 185290 | GUCGGCAGAUCAAACCUUAUA | 817170 | UAAGGUUUGAUCUGCCGACCU | 817171 |
| PSMB4 | NM_002796.2 | 0.052 | 317 | ctctggcgactacgctgatttcc | 185302 | CUGGCGACUACGCUGAUUUCC | 817172 | AAAUCAGCGUAGUCGCCAGAG | 817173 |
| PSMB6 | NM_002798.1 | 0.067 | 683 | gggtagagcggcaagtacttttg | 185333 | GUAGAGCGGCAAGUACUUUUG | 817174 | AAGUACUUGCCGCUCUACCC | 817175 |
| PSMC3 | NM_002804.3 | 0.089 | 1197 | ccgccttgaccgcaagatagagt | 98373 | GCCUUGACCGCAAGAUAGAGU | 817176 | UCUAUCUUGCGGUCAAGGCGG | 817177 |
| PSMD7 | NM_002811.3 | 0.11 | 477 | ctgtcctaattccgtattggtca | 57203 | GUCCUAAUUCCGUAUUGGUCA | 817178 | ACCAAUACGGAAUUAGGACAG | 817179 |
| RAF1 | NM_002880.2 | 0.41 | 897 | gtcgacatccacacctaatgtcc | 98850 | CGACAUCCACACCUAAUGUCC | 817180 | ACAUUAGGUGUGGAUGUCGAC | 817181 |
| SHC1 | NM_003029.3 | 0.12 | 601 | gccgagtatgtcgcctatgttgc | 253033 | CGAGUAUGUCGCCUAUGUUGC | 817182 | AACAUAGGCGACAUACUCGGC | 817183 |
| SP3 | NM_003111.1 | 0.4 | 2324 | agctgcgcgagatgatactttga | 40777 | CUGCGCGAGAUGAUACUUUGA | 817184 | AAAGUAUCAUCUCGCGCAGCU | 817185 |
| TCF7 | NM_003202.1 | 0.23 | 92 | accgtctactccgccttcaatct | 41852 | CGUCUACUCCGCCUUCAAUCU | 817186 | AUUGAAGGCGGAGUAGACGGU | 817187 |
| TEAD4 | NM_003213.1 | 0.16 | 1386 | tgctgtgcattgcctatgtcttt | 13093 | CUGUGCAUUGCCUAUGUCUUU | 817188 | AGACAUAGGCAAUGCACAGCA | 817189 |
| TMPO | NM_003276.1 | 0.14 | 1609 | ctcactaccttaggtctagaagt | 127873 | CACUACCUUAGGUCUAGAAGU | 817190 | UUCUAGACCUAAGGUAGUGAG | 817191 |
| YWHAB | NM_003404.3 | 0.072 | 769 | cagcctacacacccaattcgtct | 126595 | GCCUACACACCCAAUUCGUCU | 817192 | ACGAAUUGGGUGUGUAGGCUG | 817193 |
| YWHAH | NM_003405.2 | 0.094 | 824 | cacactaaacgaggattcctata | 126608 | CACUAAACGAGGAUUCCUAUA | 817194 | UAGGAAUCCUCGUUUAGUGUG | 817195 |
| OGT | NM_003605.3 | 0.16 | 449 | ctggcagaagcttattcgaattt | 134296 | GGCAGAAGCUUAUUCGAAUUU | 817196 | AUUCGAAUAAGCUUCUGCCAG | 817197 |
| PPP2CB | NM_004156.1 | 0.23 | 801 | cagtgcacccaattactgttatc | 162283 | GUGCACCCAAUUACUGUUAUC | 817198 | UAACAGUAAUUGGGUGCACUG | 817199 |
| SCYE1 | NM_004757.2 | 0.11 | 305 | ctgcacgctaattctatggtttc | 49202 | GCACGCUAAUUCUAUGGUUUC | 817200 | AACCAUAGAAUUAGCGUGCAG | 817201 |
| HDAC1 | NM_004964.2 | 0.15 | 870 | tcggttaggttgcttcaatctaa | 4672 | GGUUAGGUUGCUUCAAUCUAA | 817202 | AGAUUGAAGCAACCUAACCGA | 817203 |
| PSMD5 | NM_005047.2 | 0.15 | 1476 | gtgaagggccatactatgtgaaa | 323491 | GAAGGGCCAUACUAUGUGAAA | 817204 | UCACAUAGUAUGGCCCUUCAC | 817205 |
| CEBPB | NM_005194.2 | 0.31 | 1001 | agcacagcgacgagtacaagatc | 2153 | CACAGCGACGAGUACAAGAUC | 811206 | UCUUGUACUCGUCGCUGUGCU | 817207 |
| EGFR | NM_005228.2 | 0.27 | 2387 | cccgtcgctatcaaggaattaag | 81171 | CGUCGCUAUCAAGGAAUUAAG | 817208 | UAAUUCCUUGAUAGCGACGGG | 817209 |
| ELK1 | NM_005229.2 | 0.22 | 419 | ggccttgcggtactactatgaca | 3142 | CCUUGCGGUACUACUAUGACA | 817210 | UCAUAGUAGUACCGCAAGGCC | 817211 |
| EWSR1 | NM_005243.1 | 0.22 | 631 | ctctacacagccgactagttatg | 51496 | CUACACAGCCGACUAGUUAUG | 817212 | UAACUAGUCGGCUGUGUAGAG | 817213 |
| HCFC1 | NM_005334.1 | 0.22 | 5339 | gggcaccgtccctgactataacc | 4624 | GCACCGUCCCUGACUAUAACC | 817214 | UUAUAGUCAGGGACGGUGCCC | 817215 |
| JUND | NM_005354.2 | 0.22 | 1053 | ctcgcgcctggaagagaaagtga | 5612 | CGCGCCUGGAAGAGAAAGUGA | 817216 | ACUUUCUCUUCCAGGCGCGAG | 817217 |
| YES1 | NM_005433.3 | 0.1 | 839 | ttgcgactagaggttaaactagg | 107693 | GCGACUAGAGGUUAAACUAGG | 817218 | UAGUUUAACCUCUAGUCGCAA | 817219 |
| TAF6 | NM_005641.2 | 0.13 | 748 | ttgactacgccttgaagctaaag | 41513 | GACUACGCCUUGAAGCUAAAG | 817220 | UUAGCUUCAAGGCGUAGUCAA | 817221 |
| TAF7 | NM_005642.2 | 0.39 | 1133 | ctggaaccacggaattactctgc | 112459 | GGAACCACGGAAUUACUCUGC | 817222 | AGAGUAAUUCCGUGGUUCCAG | 817223 |
| PRKCN | NM_005813.2 | 0.25 | 3090 | aactcgcattggagaacgttaca | 97488 | CUCGCAUUGGAGAACGUUACA | 817224 | UAACGUUCUCCAAUGCGAGUU | 817225 |
| PA2G4 | NM_006191.1 | 0.08 | 752 | gaggtacatgaagtatatgctgt | 186582 | GGUACAUGAAGUAUAUGCUGU | 817226 | AGCAUAUACUUCAUGUACCUC | 817227 |
| TAF10 | NM_006284.2 | 0.13 | 461 | gcctcagacccacgcataattcg | 12455 | CUCAGACCCACGCAUAAUUCG | 817228 | AAUUAUGCGUGGGUCUGAGGC | 817229 |
| COPS5 | NM_006837.2 | 0.22 | 726 | atgcaatcgggtggtatcatagc | 56199 | GCAAUCGGGUGGUAUCAUAGC | 817230 | UAUGAUACCACCCGAUUGCAU | 817231 |
| STAT1 | NM_007315.2 | 0.21 | 2177 | aaggggccatcacattcacatgg | 12048 | GGGGCCAUCACAUUCACAUGG | 817232 | AUGUGAAUGUGAUGGCCCCUU | 817233 |
| GALNT1 | NM_020474.2 | 0.092 | 1203 | tagattatggagatatatcgtca | 161846 | GAUUAUGGAGAUAUAUCGUCA | 817234 | ACGAUAUAUCUCCAUAAUCUA | 817235 |
| CDKN2A | NM_000077.3 | 0.16 | 677 | ggcaccagaggcagtaaccatgc | 219272 | CACCAGAGGCAGUAACCAUGC | 817236 | AUGGUUACUGCCUCUGGUGCC | 817237 |
| RB1 | NM_000321.1 | 0.094 | 2701 | agcgaccgtgtgctcaaaagaag | 10143 | CGACCGUGUGCUCAAAAGAAG | 817238 | UCUUUUGAGCACACGGUCGCU | 817239 |
| CD44 | NM_000610.2 | 0.16 | 233 | ctggcgcagatcgatttgaatat | 126722 | GGCGCAGAUCGAUUUGAAUAU | 817240 | AUUCAAAUCGAUCUGCGCCAG | 817241 |
| COMT | NM_000754.2 | 0.093 | 922 | gtgcacacactaccaatcgttcc | 165318 | GCACACACUACCAAUCGUUCC | 817242 | AACGAUUGGUAGUGUGUGCAC | 817243 |
| GSTP1 | NM_000852.2 | 0.14 | 624 | tacgtgaacctccccatcaatgg | 216683 | CGUGAACCUCCCCAUCAAUGG | 817244 | AUUGAUGGGGAGGUUCACGUA | 817245 |
| IGF1R | NM_000875.2 | 0.27 | 279 | cacggtcattaccgagtacttgc | 85645 | CGGUCAUUACCGAGUACUUGC | 817246 | AAGUACUCGGUAAUGACCGUG | 817247 |
| ARHA | NM_001664.2 | 0.098 | 371 | tacccagataccgatgttatact | 108327 | CCCAGAUACCGAUGUUAUACU | 817248 | UAUAACAUCGGUAUCUGGGUA | 817249 |
| CTSC | NM_001814.2 | 0.29 | 236 | cggttcccagcgcgatgtcaact | 188060 | GUUCCCAGCGCGAUGUCAACU | 817250 | UUGACAUCGCGCUGGGAACCG | 817251 |
| FN1 | NM_002026.1 | 0.13 | 473 | acctaggcaatgcgttggtttgt | 126771 | CUAGGCAAUGCGUUGGUUUGU | 817252 | AAACCAACGCAUUGCCUAGGU | 817253 |
| LGALS1 | NM_002305.2 | 0.047 | 367 | agctgccagatggatacgaattc | 174842 | CUGCCAGAUGGAUACGAAUUC | 817254 | AUUCGUAUCCAUCUGGCAGCU | 817255 |
| NRAS | NM_002524.2 | 0.11 | 445 | cagtgccatgagagaccaataca | 109675 | GUGCCAUGAGAGACCAAUACA | 817256 | UAUUGGUCUCUCAUGGCACUG | 817257 |
| PCNA | NM_002592.2 | 0.087 | 526 | cggataccttggcgctagtattt | 34625 | GAUACCUUGGCGCUAGUAUUU | 817258 | AUACUAGCGCCAAGGUAUCCG | 817259 |
| PKM2 | NM_002654.3 | 0.08 | 565 | tgctgtggctctagacactaaag | 166519 | CUGUGGCUCUAGACACUAAAG | 817260 | UUAGUGUCUAGAGCCACAGCA | 817261 |
| RXRA | NM_002957.3 | 0.47 | 1342 | tgcgctccatcgggctcaaatgc | 10866 | CGCUCCAUCGGGCUCAAAUGC | 817262 | AUUUGAGCCCGAUGGAGCGCA | 817263 |
| S100A4 | NM_002961.2 | 0.12 | 152 | agctcaacaagtcagaactaaag | 152374 | CUCAACAAGUCAGAACUAAAG | 817264 | UUAGUUCUGACUUGUUGAGCU | 817265 |
| TFAP2A | NM_003220.1 | 0.37 | 978 | tacgtgtgcgaaaccgaatttcc | 546 | CGUGUGCGAAACCGAAUUUCC | 817266 | AAAUUCGGUUUCGCACACGUA | 817267 |
| EIF3S10 | NM_003750.1 | 0.28 | 145 | ccctcaaacgcgccaacgaattt | 56509 | CUCAAACGCGCCAACGAAUUU | 817268 | AUUCGUUGGCGCGUUUGAGGG | 817269 |
| EIF3S9 | NM_003751.2 | 0.12 | 641 | gggacccgaccgacttgagaaac | 51229 | GACCCGACCGACUUGAGAAAC | 817270 | UUCUCAAGUCGGUCGGGUCCC | 817271 |
| EIF3S8 | NM_003752.2 | 0.1 | 417 | ctgacctagaggactatcttaat | 56770 | GACCUAGAGGACUAUCUUAAU | 817272 | UAAGAUAGUCCUCUAGGUCAG | 817273 |
| EIF3S7 | NM_003753.2 | 0.15 | 1729 | ctcggtaccacgtgaaagactcc | 56765 | CGGUACCACGUGAAAGACUCC | 817274 | AGUCUUUCACGUGGUACCGAG | 817275 |
| EIF3S4 | NM_003755.2 | 0.12 | 182 | aggtcatcaacggaaacataaag | 51220 | GUCAUCAACGGAAACAUAAAG | 817276 | UUAUGUUUCCGUUGAUGACCU | 817277 |
| EIF3S3 | NM_003756.1 | 0.19 | 601 | aagaagtgccgattgtaattaaa | 56655 | GAAGUGCCGAUUGUAAUUAAA | 817278 | UAAUUACAAUCGGCACUUCUU | 817279 |
| EIF3S2 | NM_003757.1 | 0.11 | 46 | agcggtccattacgcagattaag | 56617 | CGGUCCAUUACGCAGAUUAAG | 817280 | UAAUCUGCGUAAUGGACCGCU | 817281 |
| EIF3S1 | NM_003758.1 | 0.16 | 442 | gacctcgaattagcaaaggaaac | 56505 | CCUCGAAUUAGCAAAGGAAAC | 817282 | UUCCUUUGCUAAUUCGAGGUC | 817283 |
| BAG1 | NM_004323.2 | 0.25 | 697 | atggttgccgggtcatgttaatt | 129118 | GGUUGCCGGGUCAUGUUAAUU | 817284 | UUAACAUGACCCGGCAACCAU | 817285 |
| AKT1 | NM_005163.1 | 0.21 | 239 | aacgaggggagtacatcaagacc | 71961 | CGAGGGGAGUACAUCAAGACC | 817286 | UCUUGAUGUACUCCCCUCGUU | 817287 |
| NORG1 | NM_006096.2 | 0.074 | 567 | gcctacatcctaactcgatttgc | 236862 | CUACAUCCUAACUCGAUUUGC | 817288 | AAAUCGAGUUAGGAUGUAGGC | 817289 |
| TSG101 | NM_006292.2 | 0.13 | 943 | atggttacccgtttagatcaaga | 43049 | GGUUACCCGUUUAGAUCAAGA | 817290 | UUGAUCUAAACGGGUAACCAU | 817291 |
| BRCA1 | NM_007294.1 | 0.22 | 4329 | gagggataccatgcaacataacc | 16042 | GGGAUACCAUGCAACAUAACC | 817292 | UUAUGUUGCAUGGUAUCCCUC | 817293 |
| NOTCH2 | NM_024408.2 | 0.085 | 6047 | cgcaaccgagtaactgatctaga | 149219 | CAACCGAGUAACUGAUCUAGA | 817294 | UAGAUCAGUUACUCGGUUGCG | 817295 |
| ARHC | NM_175744.3 | 0.11 | 194 | gtctacgtccctactgtctttga | 108338 | CUACGUCCCUACUGUCUUUGA | 817296 | AAAGACAGUAGGGACGUAGAC | 817297 |
| BLM | NM_000057.1 | 0.35 | 1998 | gagcgtttccaaagtcttagttt | 22786 | GCGUUUCCAAAGUCUUAGUUU | 817298 | ACUAAGACUUUGGAAACGCUC | 817299 |
| GSN | NM_000177.3 | 0.13 | 740 | cagcaatcggtatgaaagactga | 113910 | GCAAUCGGUAUGAAAGACUGA | 817300 | AGUCUUUCAUACCGAUUGCUG | 817301 |
| MLH1 | NM_000249.2 | 0.19 | 847 | aaccatcgtctggtagaatcaac | 91691 | CCAUCGUCUGGUAGAAUCAAC | 817302 | UGAUUCUACCAGACGAUGGUU | 817303 |
| MSH2 | NM_000251.1 | 0.14 | 1282 | accgactctatcagggtataaat | 16366 | CGACUCUAUCAGGGUAUAAAU | 817304 | UUAUACCCUGAUAGAGUCGGU | 817305 |
| SOD1 | NM_000454.4 | 0.037 | 343 | tggtgtggccgatgtgtctattg | 167035 | GUGUGGCCGAUGUGUCUAUUG | 817306 | AUAGACACAUCGGCCACACCA | 817307 |
| TOP2A | NM_001067.2 | 0.24 | 2525 | ctgctagtccacgatacatcttt | 42581 | GCUAGUCCACGAUACAUCUUU | 817308 | AGAUGUAUCGUGGACUAGCAG | 817309 |
| TOP2B | NM_001068.2 | 0.11 | 1011 | aggtggacggcacgtggattatg | 42675 | GUGGACGGCACGUGGAUUAUG | 817310 | UAAUCCACGUGCCGUCCACCU | 817311 |
| TUBG1 | NM_001070.3 | 0.11 | 603 | gtggtggtccagccttacaattc | 111063 | GGUGGUCCAGCCUUACAAUUC | 817312 | AUUGUAAGGCUGGACCACCAC | 817313 |
| SLC25A5 | NM_001152.1 | 0.035 | 670 | tgcttccggatcccaagaacact | 181277 | CUUCCGGAUCCCAAGAACACU | 817314 | UGUUCUUGGGAUCCGGAAGCA | 817315 |
| ANXA11 | NM_001157.2 | 0.17 | 1685 | cacgacatctcgggagatacttc | 128933 | CGACAUCUCGGGAGAUACUUC | 817316 | AGUAUCUCCCGAGAUGUCGUG | 817317 |
| AP2B1 | NM_001282.1 | 0.19 | 714 | tgccgtagcggcattatctgaaa | 273115 | CCGUAGCGGCAUUAUCUGAAA | 817318 | UCAGAUAAUGCCGCUACGGCA | 817319 |
| GTF2I | NM_001518.2 | 0.37 | 978 | atgctgacaggtcaatactatct | 4585 | GCUGACAGGUCAAUACUAUCU | 817320 | AUAGUAUUGACCUGUCAGCAU | 817321 |
| IGFBP7 | NM_001553.1 | 0.045 | 488 | tgcgagcaaggtccttccatagt | 124925 | CGAGCAAGGUCCUUCCAUAGU | 817322 | UAUGGAAGGACCUUGCUCGCA | 817323 |
| AXL | NM_001699.3 | 0.14 | 1857 | aagaaggagacccgttatggaga | 73957 | GAAGGAGACCCGUUAUGGAGA | 817324 | UCCAUAACGGGUCUCCUUCUU | 817325 |
| CAPG | NM_001747.1 | 0.17 | 790 | ggccgcagctctgtataaggtct | 113927 | CCGCAGCUCUGUAUAAGGUCU | 817326 | ACCUUAUACAGAGCUGCGGCC | 817327 |
| DUT | NM_001948.2 | 0.16 | 419 | tgcgaacggattttttatccaga | 165338 | CGAACGGAUUUUUUAUCCAGA | 817328 | UGGAUAAAAAAUCCGUUCGCA | 817329 |
| JUP | NM_002230.1 | 0.18 | 1133 | atccgtgtgtcccagcaataagc | 120947 | CCGUGUGUCCCAGCAAUAAGC | 817330 | UUAUUGCUGGGACACACGGAU | 817331 |
| KPNB1 | NM_002265.4 | 0.043 | 2885 | ggcggagatcgaagactaacaaa | 157208 | CGGAGAUCGAAGACUAACAAA | 817332 | UGUUAGUCUUCGAUCUCCGCC | 817333 |
| MYH9 | NM_002473.3 | 0.12 | 465 | caccgcctacaggagtatgatgc | 92428 | CCGCCUACAGGAGUAUGAUGC | 817334 | AUCAUACUCCUGUAGGCGGUG | 817335 |
| PFN2 | NM_002628.2 | 0.08 | 82 | cggctactgcgacgccaaatacg | 118724 | GCUACUGCGACGCCAAAUACG | 817336 | UAUUUGGCGUCGCAGUAGCCG | 817337 |
| PPP1CA | NM_002708.2 | 0.081 | 239 | ctcaagatctgcggtgacataca | 162170 | CAAGAUCUGCGGUGACAUACA | 817338 | UAUGUCACCGCAGAUCUUGAG | 817339 |
| PPP1CB | NM_002709.1 | 0.15 | 1028 | ttgctaaacgacagttggtaacc | 162204 | GCUAAACGACAGUUGGUAACC | 817340 | UUACCAACUGUCGUUUAGCAA | 817341 |
| PPP1CC | NM_002710.1 | 0.32 | 1084 | aacgcctccaaggggtatgatca | 162234 | CGCCUCCAAGGGGUAUGAUCA | 817342 | AUCAUACCCCUUGGAGGCGUU | 817343 |
| THBS1 | NM_003246.2 | 0.28 | 3224 | caccgaaagggacgatgactatg | 153751 | CCGAAAGGGACGAUGACUAUG | 817344 | UAGUCAUCGUCCCUUUCGGUG | 817345 |
| TTC1 | NM_003314.1 | 0.16 | 879 | accggctcgtactccatcaattt | 136959 | CGGCUCGUACUCCAUCAAUUU | 817346 | AUUGAUGGAGUACGAGCCGGU | 817347 |
| TXNRD1 | NM_003330.2 | 0.15 | 1777 | gacgattccgtcaagagataaca | 167072 | CGAUUCCGUCAAGAGAUAACA | 817348 | UUAUCUCUUGACGGAAUCGUC | 817349 |
| VIL2 | NM_003379.3 | 0.078 | 458 | aggaatccttagcgatgagatct | 292759 | GAAUCCUUAGCGAUGAGAUCU | 817350 | AUCUCAUCGCUAAGGAUUCCU | 817351 |
| VIM | NM_003380.1 | 0.073 | 1447 | tcctgattaagacggttgaaact | 287581 | CUGAUUAAGACGGUUGAAACU | 817352 | UUUCAACCGUCUUAAUCAGGA | 817353 |
| EXO1 | NM_003686.3 | 0.25 | 1631 | tggaacgagtgattagtactaaa | 26320 | GAACGAGUGAUUAGUACUAAA | 817354 | UAGUACUAAUCACUCGUUCCA | 817355 |
| RUVBL1 | NM_003707.1 | 0.085 | 215 | gaggcatgtggcgtcatagtaga | 100083 | GGCAUGUGGCGUCAUAGUAGA | 817356 | UACUAUGACGCCACAUGCCUC | 817357 |
| ADAM9 | NM_003816.1 | 0.15 | 1051 | agccacgcaggcgggattaatgt | 155099 | CCACGCAGGCGGGAUUAAUGU | 817358 | AUUAAUCCCGCCUGCGUGGCU | 817359 |
| TNFRSF10B | NM_003842.3 | 0.41 | 945 | tgcagccgtagtcttgattgtgg | 127913 | CAGCCGUAGUCUUGAUUGUGG | 817360 | ACAAUCAAGACUACGGCUGCA | 817361 |
| SHMT1 | NM_004169.3 | 0.12 | 975 | gccgagctggcatgatcttctac | 214683 | CGAGCUGGCAUGAUCUUCUAC | 817362 | AGAAGAUCAUGCCAGCUCGGC | 817363 |
| CAD | NM_004341.2 | 0.36 | 5394 | ggggaggttgcctatatcgatgg | 74903 | GGAGGUUGCCUAUAUCGAUGG | 817364 | AUCGAUAUAGGCAACCUCCCC | 817365 |
| CSK | NM_004383.1 | 0.22 | 1132 | gacgcaactgcggcatagcaacc | 77629 | CGCAACUGCGGCAUAGCAACC | 817366 | UUGCUAUGCCGCAGUUGCGUC | 817367 |
| XPC | NM_004628.3 | 0.31 | 584 | ttcggagggcgatgaaacgtttc | 17754 | CGGAGGGCGAUGAAACGUUUC | 817368 | AACGUUUCAUCGCCCUCCGAA | 817369 |
| HGS | NM_004712.3 | 0.35 | 1883 | cccaatgcacggcgtgtacatga | 157053 | CAAUGCACGGCGUGUACAUGA | 817370 | AUGUACACGCCGUGCAUUGGG | 817371 |
| LRRFIP1 | NM_004735.2 | 0.093 | 1426 | gtgtcctttagggcatagtgatg | 48486 | GUCCUUUAGGGCAUAGUGAUG | 817372 | UCACUAUGCCCUAAAGGACAC | 817373 |
| CALM3 | NM_005184.1 | 0.16 | 538 | caggtcaattatgaagagtttgt | 129585 | GGUCAAUUAUGAAGAGUUUGU | 817374 | AAACUCUUCAUAAUUGACCUG | 817375 |
| DIAPH1 | NM_005219.2 | 0.2 | 885 | cagccgctgctggatggattaaa | 116504 | GCCGCUGCUGGAUGGAUUAAA | 817376 | UAAUCCAUCCAGCAGCGGCUG | 817377 |
| NCL | NM_005381.2 | 0.036 | 1276 | gagcgagatgcgagaacactttt | 33529 | GCGAGAUGCGAGAACACUUUU | 817378 | AAGUGUUCUCGCAUCUCGCUC | 817379 |
| TOB1 | NM_005749.2 | 0.097 | 588 | accaagttcggctctaccaaaat | 136820 | CAAGUUCGGCUCUACCAAAAU | 817380 | UUUGGUAGAGCCGAACUUGGU | 817381 |
| MADH2 | NM_005901.2 | 0.088 | 1456 | aagccgtctatcagctaactaga | 133708 | GCCGUCUAUCAGCUAACUAGA | 817382 | UAGUUAGCUGAUAGACGGCUU | 817383 |
| GNB2L1 | NM_006098.3 | 0.16 | 380 | caccaccacgaggcgatttgtgg | 125242 | CCACCACGAGGCGAUUUGUGG | 817384 | ACAAAUCGCCUCGUGGUGGUG | 817385 |
| PPP2R5A | NM_006243.2 | 0.18 | 890 | gagtatgtttcaactaatcgtgg | 298747 | GUAUGUUUCAACUAAUCGUGG | 817386 | ACGAUUAGUUGAAACAUACUC | 817387 |
| HYOU1 | NM_006389.2 | 0.1 | 427 | tccaaaggctacgctacgttact | 85421 | CAAAGGCUACGCUACGUUACU | 817388 | UAACGUAGCGUAGCCUUUGGA | 817389 |
| KHDRBS1 | NM_006559.1 | 0.15 | 1248 | aaggctacgaaggctattacagc | 19623 | GGCUACGAAGGCUAUUACAGC | 817390 | UGUAAUAGCCUUCGUAGCCUU | 817391 |
| METAP2 | NM_006838.2 | 0.084 | 738 | atgccggtgacacaacagtatta | 186558 | GCCGGUGACACAACAGUAUUA | 817392 | AUACUGUUGUGUCACCGGCAU | 817393 |
| CALM1 | NM_006888.2 | 0.4 | 519 | tacgtcacgtcatgacaaactta | 129581 | CGUCACGUCAUGACAAACUUA | 817394 | AGUUUGUCAUGACGUGACGUA | 817395 |
| TOPBP1 | NM_007027.2 | 0.3 | 1047 | atgcaagttgcgtaagtgaatca | 126366 | GCAAGUUGCGUAAGUGAAUCA | 817396 | AUUCACUUACGCAACUUGCAU | 817397 |
| PIAS1 | NM_016166.1 | 0.37 | 1704 | gccttacgacttacaaggattag | 35123 | CUUACGACUUACAAGGAUUAG | 817398 | AAUCCUUGUAAGUCGUAAGGC | 817399 |
| NMT1 | NM_021079.3 | 0.25 | 1025 | ctgggctgcgaccaatggaaaca | 215454 | GGGCUGCGACCAAUGGAAACA | 817400 | UUUCCAUUGGUCGCAGCCCAG | 817401 |
| PPP2R4 | NM_021131.3 | 0.28 | 332 | cgctgactacatcggattcatcc | 298444 | CUGACUACAUCGGAUUCAUCC | 817402 | AUGAAUCCGAUGUAGUCAGCG | 817403 |
| MSH6 | NM_000179.1 | 0.17 | 3185 | tgcggcgactgttctataacttt | 16779 | CGGCGACUGUUCUAUAACUUU | 817404 | AGUUAUAGAACAGUCGCCGCA | 817405 |
| EIF4A1 | NM_001416.1 | 0.16 | 493 | tggccgtgtgtttgatatgctta | 25763 | GCCGUGUGUUUGAUAUGCUUA | 817406 | AGCAUAUCAAACACACGGCCA | 817407 |
| ATP2A2 | NM_001681.2 | 0.2 | 2836 | atccccatacccgatgacaatgg | 72769 | CCCCAUACCCGAUGACAAUGG | 817408 | AUUGUCAUCGGGUAUGGGGAU | 817409 |
| HNRPK | NM_002140.2 | 0.24 | 458 | ccccgagcgcatattgagtatca | 28586 | CCGAGCGCAUAUUGAGUAUCA | 817410 | AUACUCAAUAUGCGCUCGGGG | 817411 |
| MSN | NM_002444.2 | 0.058 | 1806 | agcgcattgacgaatttgagtct | 287504 | CGCAUUGACGAAUUUGAGUCU | 817412 | ACUCAAAUUCGUCAAUGCGCU | 817413 |
| MAPK6 | NM_002748.2 | 0.16 | 1854 | ttggcctgtacataacaactttg | 89971 | GGCCUGUACAUAACAACUUUG | 817414 | AAGUUGUUAUGUACAGGCCAA | 817415 |
| MAP2K3 | NM_002756.2 | 0.26 | 626 | ttctacggggcactattcagaga | 88970 | CUACGGGGCACUAUUCAGAGA | 817416 | UCUGAAUAGUGCCCCGUAGAA | 817417 |
| RDX | NM_002906.2 | 0.049 | 43 | atcaacgtaagagtaactacaat | 118854 | CAACGUAAGAGUAACUACAAU | 817418 | UGUAGUUACUCUUACGUUGAU | 817419 |
| BHLHB2 | NM_003670.1 | 0.31 | 1011 | gagaaaggatcggcgcaattaag | 1511 | GAAAGGAUCGGCGCAAUUAAG | 817420 | UAAUUGCGCCGAUCCUUUCUC | 817421 |
| RIPK2 | NM_003821.4 | 0.38 | 1028 | acctcaccgagcacgtatgatct | 99178 | CUCACCGAGCACGUAUGAUCU | 817422 | AUCAUACGUGCUCGGUGAGGU | 817423 |
| HSF1 | NM_005526.1 | 0.1 | 1137 | ccccgaccgccctcattgactcc | 5332 | CCGACCGCCCUCAUUGACUCC | 817424 | AGUCAAUGAGGGCGGUCGGGG | 817425 |
| POP4 | NM_006627.1 | 0.099 | 639 | gtgaacggtctgcgaagaagttc | 53540 | GAACGGUCUGCGAAGAAGUUC | 817426 | ACUUCUUCGCAGACCGUUCAC | 817427 |
| DDX18 | NM_006773.3 | 0.28 | 196 | ctgaccctatcggaaactcaaaa | 50595 | GACCCUAUCGGAAACUCAAAA | 817428 | UUGAGUUUCCGAUAGGGUCAG | 817429 |
| DDX24 | NM_020414.3 | 0.24 | 2275 | aaggagcgaatccgtttagctcg | 50750 | GGAGCGAAUCCGUUUAGCUCG | 817430 | AGCUAAACGGAUUCGCUCCUU | 817431 |
| IFNGR1 | NM_000416.1 | 0.18 | 220 | taccgtagaggtaaagaactatg | 124614 | CCGUAGAGGUAAAGAACUAUG | 817432 | UAGUUCUUUACCUCUACGGUA | 817433 |
| AK1 | NM_000476.1 | 0.25 | 517 | agcggctggagacctattacaag | 71895 | CGGCUGGAGACCUAUUACAAG | 817434 | UGUAAUAGGUCUCCAGCCGCU | 817435 |
| SERPINE1 | NM_000602.1 | 0.4 | 786 | cacgcccgatggccattactacg | 183595 | CGCCCGAUGGCCAUUACUACG | 817436 | UAGUAAUGGCCAUCGGGCGUG | 817437 |
| IGF2R | NM_000876.1 | 0.14 | 6206 | acggagtctcgtactatataaat | 206285 | GGAGUCUCGUACUAUAUAAAU | 817438 | UUAUAUAGUACGAGACUCCGU | 817439 |
| RRM1 | NM_001033.2 | 0.25 | 1880 | cagggcccatacgaaacctatga | 226213 | GGGCCCAUACGAAACCUAUGA | 817440 | AUAGGUUUCGUAUGGGCCCUG | 817441 |
| CSNK1G2 | NM_001319.5 | 0.34 | 228 | gagctccgcctaggaaagaatct | 77703 | GCUCCGCCUAGGAAAGAAUCU | 817442 | AUUCUUUCCUAGGCGGAGCUC | 817443 |
| CDC42 | NM_001791.2 | 0.15 | 160 | tcctgatatcctacacaacaaac | 108667 | CUGAUAUCCUACACAACAAAC | 817444 | UUGUUGUGUAGGAUAUCAGGA | 817445 |
| CDH2 | NM_001792.2 | 0.23 | 1737 | atgccggtaccatgttgacaaca | 139854 | GCCGGUACCAUGUUGACAACA | 817446 | UUGUCAACAUGGUACCGGCAU | 817447 |
| CLU | NM_001831.1 | 0.14 | 161 | aagtaagtacgtcaataaggaaa | 303887 | GUAAGUACGUCAAUAAGGAAA | 817448 | UCCUUAUUGACGUACUUACUU | 817449 |
| CSNK1A1 | NM_001892.3 | 0.16 | 796 | agggctaaaggctgcaacaaaga | 77640 | GGCUAAAGGCUGCAACAAAGA | 817450 | UUUGUUGCAGCCUUUAGCCCU | 817451 |
| CSNK1D | NM_001893.3 | 0.29 | 657 | gtcgcatcgaatacattcattca | 77650 | CGCAUCGAAUACAUUCAUUCA | 817452 | AAUGAAUGUAUUCGAUGCGAC | 817453 |
| CTNNA1 | NM_001903.2 | 0.22 | 653 | aacgttccgatcctctatactgc | 290175 | CGUUCCGAUCCUCUAUACUGC | 817454 | AGUAUAGAGGAUCGGAACGUU | 817455 |
| DDR1 | NM_001954.3 | 0.32 | 1176 | ggctatgcaggtccactgtaaca | 78045 | CUAUGCAGGUCCACUGUAACA | 817456 | UUACAGUGGACCUGCAUAGCC | 817457 |
| PLAGL1 | NM_002656.2 | 0.31 | 2951 | ctcctgctacccaaaataccttt | 35406 | CCUGCUACCCAAAAUACCUUU | 817458 | AGGUAUUUUGGGUAGCAGGAG | 817459 |
| PPM1B | NM_002706.3 | 0.18 | 1479 | ttgctggcaagcgtaatgttatt | 162107 | GCUGGCAAGCGUAAUGUUAUU | 817460 | UAACAUUACGCUUGCCAGCAA | 817461 |
| PTPRF | NM_002840.2 | 0.14 | 3438 | aggttcccgactcctataagtca | 37154 | GUUCCCGACUCCUAUAAGUCA | 817462 | ACUUAUAGGAGUCGGGAACCU | 817463 |
| RPA1 | NM_002945.2 | 0.12 | 1784 | tacaacgacgagtctcgaattaa | 19815 | CAACGACGAGUCUCGAAUUAA | 817464 | AAUUCGAGACUCGUCGUUGUA | 817465 |
| SMARCA4 | NM_003072.2 | 0.18 | 3624 | tgcgtatcgcggctttaaatacc | 11695 | CGUAUCGCGGCUUUAAAUACC | 817466 | UAUUUAAAGCCGCGAUACGCA | 817467 |
| YY1 | NM_003403.3 | 0.15 | 904 | gacgacgactacattgaacaaac | 13964 | CGACGACUACAUUGAACAAAC | 817468 | UUGUUCAAUGUAGUCGUCGUC | 817469 |
| USP7 | NM_003470.1 | 0.25 | 1096 | ttgtcgagtgttgctcgataatg | 190309 | GUCGAGUGUUGCUCGAUAAUG | 817470 | UUAUCGAGCAACACUCGACAA | 817471 |
| IKBKG | NM_003639.2 | 0.44 | 1164 | aggcccaggcggatatctacaag | 254494 | GCCCAGGCGGAUAUCUACAAG | 817472 | UGUAGAUAUCCGCCUGGGCCU | 817473 |
| IQGAP1 | NM_003870.3 | 0.12 | 2335 | tcgctgccgtggatacttagttc | 121324 | GCUGCCGUGGAUACUUAGUUC | 817474 | ACUAAGUAUCCACGGCAGCGA | 817475 |
| CREBBP | NM_004380.1 | 0.19 | 2205 | gaggtcgcgtttacataaacaag | 2467 | GGUCGCGUUUACAUAAACAAG | 817476 | UGUUUAUGUAAACGCGACCUC | 817477 |
| CSNK1G3 | NM_004384.1 | 0.31 | 1252 | cccaccgcaggacgttcaaatgc | 77737 | CACCGCAGGACGUUCAAAUGC | 817478 | AUUUGAACGUCCUGCGGUGGG | 817479 |
| PPARBP | NM_004774.2 | 0.17 | 489 | atgttacatcacgtcagatatgt | 36486 | GUUACAUCACGUCAGAUAUGU | 817480 | AUAUCUGACGUGAUGUAACAU | 817481 |
| SFPQ | NM_005066.1 | 0.15 | 1533 | atggcacgtttgagtacgaatat | 39201 | GGCACGUUUGAGUACGAAUAU | 817482 | AUUCGUACUCAAACGUGCCAU | 817483 |
| ROCK1 | NM_005406.1 | 0.14 | 1201 | agcaatcgtagatacttatcttc | 99228 | CAAUCGUAGAUACUUAUCUUC | 817484 | AGAUAAGUAUCUACGAUUGCU | 817485 |
| TP53BP1 | NM_005657.1 | 0.28 | 396 | gacggtaatagtgggttcaatga | 20875 | CGGUAAUAGUGGGUUCAAUGA | 817486 | AUUGAACCCACUAUUACCGUC | 817487 |
| NCOR1 | NM_006311.2 | 0.36 | 6785 | cccgctcaccagggagtataagc | 33678 | CGCUCACCAGGGAGUAUAAGC | 817488 | UUAUACUCCCUGGUGAGCGGG | 817489 |
| TADA3L | NM_006354.2 | 0.1 | 1233 | ctgaccgaactggacactaaaga | 12451 | GACCGAACUGGACACUAAAGA | 817490 | UUUAGUGUCCAGUUCGGUCAG | 817491 |
| CTCF | NM_006565.1 | 0.25 | 1786 | cagtgtgattacgcttgtagaca | 2613 | GUGUGAUUACGCUUGUAGACA | 817492 | UCUACAAGCGUAAUCACACUG | 817493 |
| RUVBL2 | NM_006666.1 | 0.086 | 218 | gccggtcgggcagtccttattgc | 100117 | CGGUCGGGCAGUCCUUAUUGC | 817494 | AAUAAGGACUGCCCGACCGGC | 817495 |
| PRKDC | NM_006904.6 | 0.18 | 11629 | atgtataagggcgctaatcgtac | 205894 | GUAUAAGGGCGCUAAUCGUAC | 817496 | ACGAUUAGCGCCCUUAUACAU | 817497 |
| CNOT7 | NM_013354.4 | 0.12 | 844 | ttgagatccttcgattgtttttt | 2347 | GAGAUCCUUCGAUUGUUUUUU | 817498 | AAAACAAUCGAAGGAUCUCAA | 817499 |
| GSK3A | NM_019884.2 | 0.14 | 1477 | accccgtcctcacaagctttaac | 84369 | CCCGUCCUCACAAGCUUUAAC | 817500 | UAAAGCUUGUGAGGACGGGGU | 817501 |
| XRCC5 | NM_021141.2 | 0.83 | 1202 | tggccatagttcgatatgcttat | 20327 | GCCAUAGUUCGAUAUGCUUAU | 817502 | AAGCAUAUCGAACUAUGGCCA | 817503 |
| APP | NM_000484.1 | 0.14 | 1604 | ggcctcgtcacgtgttcaatatg | 128991 | CCUCGUCACGUGUUCAAUAUG | 817504 | UAUUGAACACGUGACGAGGCC | 817505 |
| ABCC5 | NM_005688.1 | 0.38 | 4297 | ttctaggctccgataggattatg | 70574 | CUAGGCUCCGAUAGGAUUAUG | 817506 | UAAUCCUAUCGGAGCCUAGAA | 817507 |
| NR2F2 | NM_021005.2 | 0.17 | 1106 | ctcgtacctgtccggatatattt | 8466 | CGUACCUGUCCGGAUAUAUUU | 817508 | AUAUAUCCGGACAGGUACGAG | 817509 |
| CDK4 | NM_000075.2 | 0.32 | 388 | ttcgtgaggtggctttactgagg | 76146 | CGUGAGGUGGCUUUACUGAGG | 817510 | UCAGUAAAGCCACCUCACGAA | 817511 |
| CLN2 | NM_000391.2 | 0.14 | 643 | tccgtaagcgatacaacttgacc | 183713 | CGUAAGCGAUACAACUUGACC | 817512 | UCAAGUUGUAUCGCUUACGGA | 817513 |
| AAMP | NM_001087.2 | 0.27 | 300 | tagcgaggtcacctttgcattgc | 177411 | GCGAGGUCACCUUUGCAUUGC | 817514 | AAUGCAAAGGUGACCUCGCUA | 817515 |
| ACLY | NM_001096.2 | 0.19 | 1229 | ggcatcgtgagagcaattcgaga | 71580 | CAUCGUGAGAGCAAUUCGAGA | 817516 | UCGAAUUGCUCUCACGAUGCC | 817517 |
| ADD1 | NM_001119.3 | 0.14 | 255 | aggtacttcgaccgagtagatga | 115154 | GUACUUCGACCGAGUAGAUGA | 817518 | AUCUACUCGGUCGAAGUACCU | 817519 |
| FLNA | NM_001456.1 | 0.13 | 4967 | aaccatgacggcacgtatacagt | 114101 | CCAUGACGGCACGUAUACAGU | 817520 | UGUAUACGUGCCGUCAUGGUU | 817521 |
| IL13RA1 | NM_001560.2 | 0.077 | 497 | accagtcccgacactaactatac | 244096 | CAGUCCCGACACUAACUAUAC | 817522 | AUAGUUAGUGUCGGGACUGGU | 817523 |
| IL18 | NM_001562.2 | 0.19 | 679 | ttcatcatacgaaggatactttc | 167828 | CAUCAUACGAAGGAUACUUUC | 817524 | AAGUAUCCUUCGUAUGAUGAA | 817525 |
| ARF6 | NM_001663.2 | 0.32 | 730 | gccgctctggcggcattactaca | 108231 | CGCUCUGGCGGCAUUACUACA | 817526 | UAGUAAUGCCGCCAGAGCGGC | 817527 |
| ITGB4BP | NM_002212.2 | 0.13 | 82 | gagcttcgttcgagaacaactgt | 56942 | GCUUCGUUCGAGAACAACUGU | 817528 | AGUUGUUCUCGAACGAAGCUC | 817529 |
| MYBL2 | NM_002466.2 | 0.093 | 975 | caggagcccatcggtacagatct | 7221 | GGAGCCCAUCGGUACAGAUCU | 817530 | AUCUGUACCGAUGGGCUCCUG | 817531 |
| NME2 | NM_002512.1 | 0.045 | 485 | aactggttgactacaagtcttgt | 8178 | CUGGUUGACUACAAGUCUUGU | 817532 | AAGACUUGUAGUCAACCAGUU | 817533 |
| RAP1A | NM_002884.1 | 0.072 | 529 | aagaacggccaaggttttgcact | 110570 | GAACGGCCAAGGUUUUGCACU | 817534 | UGCAAAACCUUGGCCGUUCUU | 817535 |
| RPA2 | NM_002946.3 | 0.15 | 289 | aacagtggattcgaaagctatgg | 19817 | CAGUGGAUUCGAAAGCUAUGG | 817536 | AUAGCUUUCGAAUCCACUGUU | 817537 |
| SDC2 | NM_002998.3 | 0.27 | 1182 | aggcacctactaaggagttttat | 121066 | GCACCUACUAAGGAGUUUUAU | 817538 | AAAACUCCUUAGUAGGUGCCU | 817539 |
| SDC4 | NM_002999.2 | 0.14 | 338 | cccaccgaacccaagaaactaga | 121072 | CACCGAACCCAAGAAACUAGA | 817540 | UAGUUUCUUGGGUUCGGUGGG | 817541 |
| TCF12 | NM_003205.2 | 0.17 | 1972 | cgcttacgcgtgcgggatattaa | 41688 | CUUACGCGUGCGGGAUAUUAA | 817542 | AAUAUCCCGCACGCGUAAGCG | 817543 |
| TIMP1 | NM_003254.1 | 0.12 | 364 | accgcagcgaggagtttctcatt | 186907 | CGCAGCGAGGAGUUUCUCAUU | 817544 | UGAGAAACUCCUCGCUGCGGU | 817545 |
| TRA1 | NM_003299.1 | 0.22 | 827 | taggacggggaacgacaattacc | 102862 | GGACGGGGAACGACAAUUACC | 817546 | UAAUUGUCGUUCCCCGUCCUA | 817547 |
| VCL | NM_003373.2 | 0.09 | 2111 | gtctcggctgctcgtatcttact | 120054 | CUCGGCUGCUCGUAUCUUACU | 817548 | UAAGAUACGAGCAGCCGAGAC | 817549 |
| CXCR4 | NM_003467.1 | 0.37 | 90 | tggaggggatcagtatatacact | 124591 | GAGGGGAUCAGUAUAUACACU | 817550 | UGUAUAUACUGAUCCCCUCCA | 817551 |
| SUCLG1 | NM_003849.1 | 0.5 | 127 | ttctcggcaacatctctatgttg | 110935 | CUCGGCAACAUCUCUAUGUUG | 817552 | ACAUAGAGAUGUUGCCGAGAA | 817553 |
| MBD2 | NM_003927.3 | 0.1 | 902 | ctgcgaaacgatcctctcaatca | 20354 | GCGAAACGAUCCUCUCAAUCA | 817554 | AUUGAGAGGAUCGUUUCGCAG | 817555 |
| USP13 | NM_003940 | 0.19 | 2338 | ggcactacgagcaacgaataata | 154317 | CACUACGAGCAACGAAUAAUA | 817556 | UUAUUCGUUGCUCGUAGUGCC | 817557 |
| OSMR | NM_003999.1 | 0.31 | 3240 | ctcccccgaccgagaatagcagc | 34501 | CCCCCGACCGAGAAUAGCAGC | 817558 | UGCUAUUCUCGGUCGGGGGAG | 817559 |
| GMFB | NM_004124.2 | 0.12 | 290 | gacaacctcgcttcattgtgtat | 117415 | CAACCUCGCUUCAUUGUGUAU | 817560 | ACACAAUGAAGCGAGGUUGUC | 817561 |
| EPHA2 | NM_004431.2 | 0.29 | 1535 | gtggaagtacgaggtcacttacc | 81348 | GGAAGUACGAGGUCACUUACC | 817562 | UAAGUGACCUCGUACUUCCAC | 817563 |
| USP11 | NM_004651.2 | 0.089 | 643 | ttcagccataccgattctattgg | 188785 | CAGCCAUACCGAUUCUAUUGG | 817564 | AAUAGAAUCGGUAUGGCUGAA | 817565 |
| USP9X | NM_004652.2 | 0.057 | 3790 | gtgggtcgttacagctagtattt | 190527 | GGGUCGUUACAGCUAGUAUUU | 817566 | AUACUAGCUGUAACGACCCAC | 817567 |
| USP14 | NM_005151.2 | 0.1 | 583 | tggcttcagcgcagtatattact | 188886 | GCUUCAGCGCAGUAUAUUACU | 817568 | UAAUAUACUGCGCUGAAGCCA | 817569 |
| USP10 | NM_005153.1 | 0.22 | 1353 | ccccgtgggctgatcaataaagg | 188770 | CCGUGGGCUGAUCAAUAAAGG | 817570 | UUUAUUGAUCAGCCCACGGGG | 817571 |
| USP8 | NM_005154.2 | 0.22 | 3283 | gagctcgacgggattctctaaaa | 190459 | GCUCGACGGGAUUCUCUAAAA | 817572 | UUAGAGAAUCCCGUCGAGCUC | 811573 |
| SDCBP | NM_005625.3 | 0.13 | 259 | tcctatccctcacgatggaaatc | 114865 | CUAUCCCUCACGAUGGAAAUC | 817574 | UUUCCAUCGUGAGGGAUAGGA | 817575 |
| CAPZA1 | NM_006135.1 | 0.16 | 101 | atgacgttcggctactacttaat | 113977 | GACGUUCGGCUACUACUUAAU | 817576 | UAAGUAGUAGCCGAACGUCAU | 817577 |
| CAPZA2 | NM_006136.2 | 0.15 | 762 | gacaatgtcggacactactttca | 114011 | CAAUGUCGGACACUACUUUCA | 817578 | AAAGUAGUGUCCGACAUUGUC | 817579 |
| NFE2L2 | NM_006164.2 | 0.21 | 324 | ttcgctcagttacaactagatga | 7735 | CGCUCAGUUACAACUAGAUGA | 817580 | AUCUAGUUGUAACUGAGCGAA | 817581 |
| USP16 | NM_006447.1 | 0.19 | 1205 | tggtggtgaactaactagtatga | 189070 | GUGGUGAACUAACUAGUAUGA | 817582 | AUACUAGUUAGUUCACCACCA | 817583 |
| LIM | NM_006457.1 | 0.19 | 1333 | ctccgatgtgcgcccattgtaac | 125275 | CCGAUGUGCGCCCAUUGUAAC | 817584 | UACAAUGGGCGCACAUCGGAG | 817585 |
| ADD3 | NM_016824.1 | 0.14 | 1732 | gacaatcgaacgtaaacaacaag | 121236 | CAAUCGAACGUAAACAACAAG | 817586 | UGUUGUUUACGUUCGAUUGUC | 817587 |
| MAP2K2 | NM_030662.2 | 0.16 | 670 | gtgacggggagatcagcatttgc | 88959 | GACGGGGAGAUCAGCAUUUGC | 817588 | AAAUGCUGAUCUCCCCGUCAC | 817589 |
| ADH5 | NM_000671.2 | 0.11 | 685 | ggcatttcaaccggttatggtgc | 155944 | CAUUUCAACCGGUUAUGGUGC | 817590 | ACCAUAACCGGUUGAAAUGCC | 817591 |
| ANXA1 | NM_000700.1 | 0.11 | 946 | ctcgccataaggcattgatcagg | 137873 | CGCCAUAAGGCAUUGAUCAGG | 817592 | UGAUCAAUGCCUUAUGGCGAG | 817593 |
| FOLR1 | NM_000802.2 | 0.32 | 259 | ttcctacctatatagattcaact | 179653 | CCUACCUAUAUAGAUUCAACU | 817594 | UUGAAUCUAUAUAGGUAGGAA | 817595 |
| POLR2B | NM_000938.1 | 0.16 | 2960 | ccctctcgtatgactattggtca | 36387 | CUCUCGUAUGACUAUUGGUCA | 817596 | ACCAAUAGUCAUACGAGAGGG | 817597 |
| CRIP2 | NM_001312.2 | 0.25 | 90 | gtgcgacaagaccgtgtacttcg | 156364 | GCGACAAGACCGUGUACUUCG | 817598 | AAGUACACGGUCUUGUCGCAC | 817599 |
| POLR2C | NM_002694.2 | 0.11 | 153 | ttcgattcggagggtcttcatcg | 36408 | CGAUUCGGAGGGUCUUCAUCG | 817600 | AUGAAGACCCUCCGAAUCGAA | 817601 |
| POLR2E | NM_002695.2 | 0.098 | 40 | gacgtaccggctctggaaaatcc | 36425 | CGUACCGGCUCUGGAAAAUCC | 817602 | AUUUUCCAGAGCCGGUACGUC | 817603 |
| RFC3 | NM_002915.2 | 0.38 | 120 | tgggacggctggactatcacaag | 38420 | GGACGGCUGGACUAUCACAAG | 817604 | UGUGAUAGUCCAGCCGUCCCA | 817605 |
| RFC4 | NM_002916.3 | 0.19 | 957 | ttcaaagcgctactcgattaaca | 38466 | CAAAGCGCUACUCGAUUAACA | 817606 | UUAAUCGAGUAGCGCUUUGAA | 817607 |
| SSB | NM_003142.2 | 0.1 | 276 | aggttgaaccgtctaacaacaga | 48020 | GUUGAACCGUCUAACAACAGA | 817608 | UGUUGUUAGACGGUUCAACCU | 817609 |
| HSPA9B | NM_004134.4 | 0.19 | 948 | ggccttgctacggcacattgtga | 85288 | CCUUGCUACGGCACAUUGUGA | 817610 | ACAAUGUGCCGUAGCAAGGCC | 817611 |
| FANCG | NM_004629.1 | 0.28 | 1405 | ctgctagttgaggccttgaatgt | 16276 | GCUAGUUGAGGCCUUGAAUGU | 817612 | AUUCAAGGCCUCAACUAGCAG | 817613 |
| POLR2K | NM_005034.2 | 0.17 | 182 | gtggatacagaataatgtacaag | 36435 | GGAUACAGAAUAAUGUACAAG | 817614 | UGUACAUUAUUCUGUAUCCAC | 817615 |
| PRCP | NM_005040.2 | 0.043 | 970 | tggcaatggtggactatccttat | 187207 | GCAAUGGUGGACUAUCCUUAU | 817616 | AAGGAUAGUCCACCAUUGCCA | 817617 |
| HSPA5 | NM_005347.2 | 0.21 | 1292 | gtggctcgactcgaattccaaag | 85234 | GGCUCGACUCGAAUUCCAAAG | 817618 | UUGGAAUUCGAGUCGAGCCAC | 817619 |
| POLR2H | NM_006232.2 | 0.099 | 262 | gtcatagctagtaccttgtatga | 159134 | CAUAGCUAGUACCUUGUAUGA | 817620 | AUACAAGGUACUAGCUAUGAC | 817621 |
| POLR2I | NM_006233.4 | 0.11 | 145 | acgcgtgccggaactgtgattac | 9602 | GCGUGCCGGAACUGUGAUUAC | 817622 | AAUCACAGUUCCGGCACGCGU | 817623 |
| POLR2J | NM_006234.3 | 0.15 | 359 | gcgctttcgggtggccataaaag | 36430 | GCUUUCGGGUGGCCAUAAAAG | 817624 | UUUAUGGCCACCCGAAAGCGC | 817625 |
| RFC5 | NM_007370.3 | 0.23 | 941 | aggggttggcactgcatgatatc | 38487 | GGGUUGGCACUGCAUGAUAUC | 817626 | UAUCAUGCAGUGCCAACCCCU | 817627 |
| TGFB1I1 | NM_015927.3 | 0.16 | 532 | gacttccgcgttcaaaaccatct | 112567 | CUUCCGCGUUCAAAACCAUCU | 817628 | AUGGUUUUGAACGCGGAAGUC | 817629 |
| PRKWNK1 | NM_018979.1 | 0.1 | 631 | gccgtgggaatgtctaacgatgg | 97669 | CGUGGGAAUGUCUAACGAUGG | 817630 | AUCGUUAGACAUUCCCACGGC | 817631 |
| POLR2F | NM_021974.2 | 0.052 | 105 | tggcgacgactttgatgatgtgg | 36427 | GCGACGACUUUGAUGAUGUGG | 817632 | ACAUCAUCAAAGUCGUCGCCA | 817633 |
| NME1 | NM_000269.2 | 0.045 | 185 | agcgttttgagcagaaaggattc | 94844 | CGUUUUGAGCAGAAAGGAUUC | 817634 | AUCCUUUCUGCUCAAAACGCU | 817635 |
| PEA15 | NM_003768.2 | 0.15 | 406 | ccgtcctgacctactcactatgg | 134551 | GUCCUGACCUACUCACUAUGG | 817636 | AUAGUGAGUAGGUCAGGACGG | 817637 |
| ARHGDIA | NM_004309.3 | 0.17 | 438 | ttccgggttaaccgagagatagt | 129087 | CCGGGUUAACCGAGAGAUAGU | 817638 | UAUCUCUCGGUUAACCCGGAA | 817639 |
| ESRRA | NM_004451.3 | 0.3 | 1029 | ggccttcgctgaggacttagtcc | 3459 | CCUUCGCUGAGGACUUAGUCC | 817640 | ACUAAGUCCUCAGCGAAGGCC | 817641 |
| CAV1 | NM_001753.3 | 0.13 | 702 | cagtgcatcagccgtgtctattc | 289819 | GUGCAUCAGCCGUGUCUAUUC | 817642 | AUAGACACGGCUGAUGCACUG | 817643 |
| MKI67 | NM_002417.2 | 0.17 | 558 | cacgtcgtgtctcaagatctagc | 91497 | CGUCGUGUCUCAAGAUCUAGC | 817644 | UAGAUCUUGAGACACGACGUG | 817645 |
| CDKN1B | NM_004064.2 | 0.41 | 929 | ctgcaaccgacgattcttctact | 219267 | GCAACCGACGAUUCUUCUACU | 817646 | UAGAAGAAUCGUCGGUUGCAG | 817647 |
| ERBB2 | NM_004448.1 | 0.17 | 3386 | aaggggctggctccgatgtattt | 81940 | GGGGCUGGCUCCGAUGUAUUU | 817648 | AUACAUCGGAGCCAGCCCCUU | 817649 |
| MXI1 | NM_005962.2 | 0.14 | 920 | cacagcagcctgccgagtattgg | 33013 | CAGCAGCCUGCCGAGUAUUGG | 817650 | AAUACUCGGCAGGCUGCUGUG | 817651 |

### INDUSTRIAL APPLICABILITY

[0380] In view of the foregoing, the polynucleotide of the present invention not only has a high RNA interference effect on its target gene, but also has a very small risk of causing RNA interference against a gene unrelated to the target gene, so that the polynucleotide of the present invention can cause RNA interference specifically only to the target gene whose expression is to be inhibited. Thus, the present invention is preferred for use in, e.g., tests and therapies using RNA interference, and is particularly effective in performing RNA interference in higher animals such as mammals, especially humans.

[0381] Incidentally, the sequence listing of the present application contains information on 817651 sequences. Its electronic file is too large in size (near 200 MB), making it difficult or impossible to handle the file depending on the computer environment used. Thus, the electric file was divided into two parts so that it became easier to handle. YCT1039 sequence listing (1) contains bibliographic data and information on SEQ ID NOs: 1 to 70000, while YCT1039 sequence listing (2) contains information on SEQ ID NOs: 700001 to 817651.

1. A polynucleotide for causing RNA interference against a target gene selected from the genes of a target organism, which has at least a double-stranded region, wherein one strand in the double-stranded region consists of a base sequence homologous to a prescribed sequence which is contained in the base sequences of the target gene and which conforms to the following rules (a) to (d):
(a) The 3′ end base is adenine, thymine or uracil;
(b) The 5′ end base is guanine or cytosine;
(c) A 7-base sequence from the 3′ end is rich in one or more types of bases selected from the group consisting of adenine, thymine and uracil; and
(d) The number of bases is within a range that allows RNA interference to occur without causing cytotoxicity, and
wherein the other strand in the double-stranded region consists of a base sequence having a sequence complementary to the base sequence homologous to the prescribed sequence.

2. The polynucleotide according to claim 1, wherein at least 80% of bases in the base sequence homologous to the prescribed sequence corresponds to the base sequence of the prescribed sequence.

3. The polynucleotide according to claim 1, wherein, in the rule (c), at least three bases among the seven bases are one or more types of bases selected from the group consisting of adenine, thymine and uracil.

4. The polynucleotide according to claim 1, wherein, in the rule (d), the number of bases is 13 to 28.

5. The polynucleotide according to claim 1, wherein the prescribed sequence further conforms to the following rule (e):
(e) A sequence in which 10 or more bases of guanine or cytosine are continuously present is not contained.

6. The polynucleotide according to claim 5, wherein the prescribed sequence further conforms to the following rule (f):
(f) A sequence sharing at least 90% homology with the prescribed sequence is not contained in the base sequences of genes other than the target gene among all gene sequences of the target organism.

7. The polynucleotide according to claim 6, wherein the prescribed sequence consists of the base sequence shown in any of SEQ ID NOs: 47 to 817081.

8. The polynucleotide according to claim 6, wherein the prescribed sequence is any of the sequences listed in the column “Target Sequence” of FIG. 46.

9. The polynucleotide according to claim 6, which has any of the base sequences shown in SEQ ID NOs: 817102 to 817651.

10. The polynucleotide according to claim 1, which is a double-stranded polynucleotide.

11. The polynucleotide according to claim 10, wherein
one strand of the double-stranded polynucleotide consists of a base sequence having an overhanging portion at the 3′ end of the base sequence homologous to the prescribed sequence, and the other strand of the double-stranded polynucleotide consists of a base sequence having an overhanging portion at the 3′ end of the sequence complementary to the base sequence homologous to the prescribed sequence.

12. The polynucleotide according to claim 1, which is a single-stranded polynucleotide having a hairpin structure, wherein the single-stranded polynucleotide has a loop segment linking the 3′ end of one strand in the double-stranded region and the 5′ end of the other strand in the double-stranded region.

13. A method for selecting a polynucleotide to be introduced into an expression system for a target gene whose expression is to be inhibited, wherein the polynucleotide has at least a double-stranded region, wherein one strand in the double-stranded region consists of a base sequence homologous to a prescribed sequence which is contained in the base sequences of the target gene and which conforms to the following rules (a) to (f):
(a) The 3′ end base is adenine, thymine or uracil;
(b) The 5′ end base is guanine or cytosine;
(c) A 7-base sequence from the 3′ end is rich in one or more types of bases selected from the group consisting of adenine, thymine and uracil;
(d) The number of bases is within a range that allows RNA interference to occur without causing cytotoxicity;
(e) A sequence in which 10 or more bases of guanine or cytosine are continuously present is not contained; and
(f) A sequence sharing at least 90% homology with the prescribed sequence is not contained in the base sequences of genes other than the target gene among all gene sequences of the target organism, and
wherein the other strand in the double-stranded region consists of a base sequence having a sequence complementary to the base sequence homologous to the prescribed sequence.

14. A method for selecting a polynucleotide according to claim 13, wherein a polynucleotide having a sequence, wherein the base sequence homologous to the prescribed sequence of the target gene contains mismatches of at least 3 bases against the base sequences of genes other than the target gene, and for which there is only a minimum number of other genes having a base sequence containing the mismatches of at least 3 bases, is further selected from the selected polynucleotides.

15. A method for inhibiting gene expression, which comprises introducing the polynucleotide according to claim 1 into an expression system for a target gene whose expression is to be inhibited, thereby inhibiting the expression of the target gene.

16. A method for inhibiting gene expression, which comprises introducing a polynucleotide selected by the method according to claim 13 into an expression system for a target gene whose expression is to be inhibited, thereby inhibiting the expression of the target gene.

17. The method for inhibiting gene expression according to claim 15, wherein the expression is inhibited to 50% or below.

18. A pharmaceutical composition which comprises a pharmaceutically effective amount of the polynucleotide according to claim 1.

19. The pharmaceutical composition according to claim 18, which is for use in treating or preventing the diseases listed in the column “Related Disease” of FIG. 46.

20. The pharmaceutical composition according to claim 18, which is for use in treating or preventing diseases related to the genes listed in the column “Gene Name” of FIG. 46.

21. The pharmaceutical composition according to claim 18, which is for use in treating or preventing a disease in which a gene belonging to any of the following 1) to 9) is involved:
1) an apoptosis-related gene;
2) phosphatase or a phosphatase activity-related gene;
3) a cell cycle-related gene;
4) a receptor-related gene;
5) an ion channel-related gene;
6) a signal transduction system-related gene;
7) kinase or a kinase activity-related gene;
8) a transcription regulation-related gene; or
9) G protein-coupled receptor or a G protein-coupled receptor-related gene.

22. The pharmaceutical composition according to claim 18, which comprises a polynucleotide targeting the base sequence shown in any of SEQ ID NOs listed in the column “SEQ ID NO (human)” or “SEQ ID NO (mouse)” of FIG. 46.

23. The pharmaceutical composition according to claim 18, which is for use in treating or preventing diseases related to the genes listed in the column “Gene Name” of Table 1.

24. The pharmaceutical composition according to claim 18, which is for use in treating or preventing any cancer selected from bladder cancer, breast cancer, colorectal cancer, gastric cancer, hepatoma, lung cancer, melanoma, ovarian cancer, pancreas cancer, prostate cancer, oral cancer, skin cancer, and thyroid gland cancer.

25. The pharmaceutical composition according to claim 18, which comprises a polynucleotide having any of the base sequences shown in SEQ ID NOs: 817102 to 817651.

26. A composition for inhibiting gene expression to inhibit the expression of a target gene, which comprises the polynucleotide according to claim 1.

27. The composition for inhibiting gene expression according to claim 26, wherein the target gene is related to any of the diseases listed in the column “Related Disease” of FIG. 46.

28. The composition for inhibiting gene expression according to claim 26, wherein the target gene is any of the genes listed in the column “Gene Name” of FIG. 46.

29. The composition for inhibiting gene expression according to claim 26, wherein the target gene is a gene belonging to any of the following 1) to 9):
1) an apoptosis-related gene;
2) phosphatase or a phosphatase activity-related gene;
3) a cell cycle-related gene;
4) a receptor-related gene;
5) an ion channel-related gene;
6) a signal transduction system-related gene;
7) kinase or a kinase activity-related gene;
8) a transcription regulation-related gene; or
9) G protein-coupled receptor or a G protein-coupled receptor-related gene.

30. The composition for inhibiting gene expression according to claim 26, wherein the target gene is any of the genes listed in the column “Gene Name” of Table 1.

31. The composition for inhibiting gene expression according to claim 26, wherein the target gene is related to any cancer selected from bladder cancer, breast cancer, colorectal cancer, gastric cancer, hepatoma, lung cancer, melanoma, ovarian cancer, pancreas cancer, prostate cancer, oral cancer, skin cancer, and thyroid gland cancer.

32. A method for treating or preventing the diseases listed in the column “Related Disease” of FIG. 46, which comprises administering a pharmaceutically effective amount of the polynucleotide according to claim 1.

The application's sequence listing, which the Patent Office published only in electronic form, follows.

SEQUENCE LISTING (817670 sequences)

SEQ ID NO: 1 - DNA, 37 bp, Artificial Sequence
  oligomer including Nhe I site, EcoRI site and Xho I site
gctagccaccatggaattcacgcgtctcgagtctaga

SEQ ID NO: 2 - DNA, 18 bp, Artificial Sequence
  PCR primer T
aggcactgggcaggtgtc

SEQ ID NO: 3 - DNA, 24 bp, Artificial Sequence
  PCR primer T
tgctcgaagcattaaccctcacta

SEQ ID NO: 4 - DNA, 21 bp, Artificial Sequence
  PCR primer C
atcaggatgatctggacgaag

SEQ ID NO: 5 - DNA, 21 bp, Artificial Sequence
  PCR primer C
ctcttcagcaatatcacgggt

SEQ ID NO: 6 - DNA, 35 bp, Artificial Sequence
  target sequence VIM35
gaattcgcaggatgttcggcggcccgggcctcgag

SEQ ID NO: 7 - DNA, 35 bp, Artificial Sequence
  target sequence VIM812
gaattcacgtacgtcagcaatatgaaagtctcgag

SEQ ID NO: 8 - RNA, 21 nt, Artificial Sequence
  siRNA as evaluation subject; siVIM35
aggauguucggcggcccgggc

SEQ ID NO: 9 - RNA, 21 nt, Artificial Sequence
  siRNA as evaluation subject; siVIM812
guacgucagcaauaugaaagu

SEQ ID NO: 10 - RNA, 21 nt, Artificial Sequence
  Control siRNA; siControl
cauucuauccgcuggaagaug

SEQ ID NO: 11 - DNA, 20 bp, Artificial Sequence
  PCR primer VIM-F3-84
gagctacgtgactacgtcca

SEQ ID NO: 12 - DNA, 21 bp, Artificial Sequence
  PCR primer VIM-R3-274
gttcttgaactcggtgttgat

SEQ ID NO: 13 - DNA, 20 bp, Artificial Sequence
  PCR primer ACTB-F2-481
cacactgtgcccatctacga

SEQ ID NO: 14 - DNA, 20 bp, Artificial Sequence
  PCR primer ACTB-R2-664
gccatctcttgctcgaagtc

SEQ ID NO: 15 - DNA, 19 bp, Artificial Sequence
  siRNA target sequence for Firefly luciferase.
gacgccaaaaacataaaga

SEQ ID NO: 16 - DNA, 19 bp, Artificial Sequence
  siRNA target sequence for Firefly luciferase.
gttggcagaagctatgaaa

SEQ ID NO: 17 - DNA, 19 bp, Artificial Sequence
  siRNA target sequence for Firefly luciferase.
gtgttgggcgcgttattta

SEQ ID NO: 18 - DNA, 19 bp, Artificial Sequence
  siRNA target sequence for Firefly luciferase.
ccgcgaacgacatttataa

SEQ ID NO: 19 - DNA, 19 bp, Artificial Sequence
  siRNA target sequence for Firefly luciferase.
ccaatcatccaaaaaatta

SEQ ID NO: 20 - DNA, 19 bp, Artificial Sequence
  siRNA target sequence for Firefly luciferase.
cctcccggttttaatgaat

SEQ ID NO: 21 - DNA, 19 bp, Artificial Sequence
  siRNA target sequence for Firefly luciferase.
gcatgccagagatcctatt

SEQ ID NO: 22 - DNA, 19 bp, Artificial Sequence
  siRNA target sequence for Firefly luciferase.
ccggatactgcgattttaa

SEQ ID NO: 23 - DNA, 19 bp, Artificial Sequence
  siRNA target sequence for Firefly luciferase.
ggttttggaatgtttacta

SEQ ID NO: 24 - DNA, 19 bp, Artificial Sequence
  siRNA target sequence for Firefly luciferase.
gatttcgagtcgtcttaat

SEQ ID NO: 25 - DNA, 19 bp, Artificial Sequence
  siRNA target sequence for Firefly luciferase.
gcactctgattgacaaata

SEQ ID NO: 26 - DNA, 19 bp, Artificial Sequence
  siRNA target sequence for Firefly luciferase.
caaatacgatttatctaat

SEQ ID NO: 27 - DNA, 19 bp, Artificial Sequence
  siRNA target sequence for Firefly luciferase.
gattatgtccggttatgta

SEQ ID NO: 28 - DNA, 19 bp, Artificial Sequence
  siRNA target sequence for Firefly luciferase.
ccgcctgaagtctctgatt

SEQ ID NO: 29 - DNA, 19 bp, Artificial Sequence
  siRNA target sequence for Firefly luciferase.
ctcgacgcaagaaaaatca

SEQ ID NO: 30 - DNA, 19 bp, Artificial Sequence
  siRNA target sequence for Firefly luciferase.
aacataaagaaaggcccgg

SEQ ID NO: 31 - DNA, 19 bp, Artificial Sequence
  siRNA target sequence for Firefly luciferase.
tatgccggtgttgggcgcg

SEQ ID NO: 32 - DNA, 19 bp, Artificial Sequence
  siRNA target sequence for Firefly luciferase.
agttgcagttgcgcccgcg

SEQ ID NO: 33 - DNA, 19 bp, Artificial Sequence
  siRNA target sequence for Firefly luciferase.
acgtgcaaaaaaagctccc

SEQ ID NO: 34 - DNA, 19 bp, Artificial Sequence
  siRNA target sequence for Firefly luciferase.
ttctgattacacccgaggg

SEQ ID NO: 35 - DNA, 19 bp, Artificial Sequence
  siRNA target sequence for SARS coronavirus.
gggcgcggtcggtaaagtt

SEQ ID NO: 36 - DNA, 19 bp, Artificial Sequence
  siRNA target sequence for SARS coronavirus.
ggaattgccgtcttagata

SEQ ID NO: 37 - DNA, 19 bp, Artificial Sequence
  siRNA target sequence for SARS coronavirus.
gaatggtcgtactatcctt

SEQ ID NO: 38 - DNA, 19 bp, Artificial Sequence
  siRNA target sequence for SARS coronavirus.
ccaagtaatcgttaacaat

SEQ ID NO: 39 - DNA, 19 bp, Artificial Sequence
  siRNA target sequence for SARS coronavirus.
gcttggcgcatatattcta

SEQ ID NO: 40 - DNA, 19 bp, Artificial Sequence
  siRNA target sequence for SARS coronavirus.
cctttcgcgacttgataaa

SEQ ID NO: 41 - DNA, 19 bp, Artificial Sequence
  siRNA target sequence for SARS coronavirus.
gtgcgtactgctgcaatat

SEQ ID NO: 42 - DNA, 19 bp, Artificial Sequence
  siRNA target sequence for SARS coronavirus.
ctactcgcgtgttaaaaat

SEQ ID NO: 43 - DNA, 19 bp, Artificial Sequence
  siRNA target sequence for SARS coronavirus.
gcagacaacggtactatta

SEQ ID NO: 44 - DNA, 19 bp, Artificial Sequence
  siRNA target sequence for SARS coronavirus.
ccggtagcaacgacaatat

SEQ ID NO: 45 - DNA, 19 bp, Artificial Sequence
  siRNA target sequence for SARS coronavirus.
cgtagtcgcggtaattcaa

SEQ ID NO: 46 - DNA, 19 bp, Artificial Sequence
  siRNA target sequence for SARS coronavirus.
gatcgagggtacagtgaat

SEQ ID NO: 47 - DNA, 19 bp, Homo sapiens
  siRNA target sequence for ATBF1 (NM_006885.2,908-926).
gtcacctgcaacgaatgtt

SEQ ID NO: 48 - DNA, 19 bp, Homo sapiens
  siRNA target sequence for ATBF1 (NM_006885.2,1241-1259).
gtgtacccgcagatcatca

SEQ ID NO: 49 - DNA, 19 bp, Homo sapiens
  siRNA target sequence for ATBF1 (NM_006885.2,1278-1296).
catccttcgggaaatggtt

SEQ ID NO: 50 - DNA, 19 bp, Homo sapiens
  siRNA target sequence for ATBF1 (NM_006885.2,1372-1390).
gtttgacgtgcgacacaaa

SEQ ID NO: 51 - DNA, 19 bp, Homo sapiens
  siRNA target sequence for ATBF1 (NM_006885.2,1376-1394).
gacgtgcgacacaaaagca

SEQ ID NO: 52 - DNA, 19 bp, Homo sapiens
  siRNA target sequence for ATBF1 (NM_006885.2,1415-1433).
gacggttctgccaaaagct

SEQ ID NO: 53 - DNA, 19 bp, Homo sapiens
  siRNA target sequence for ATBF1 (NM_006885.2,1435-1453).
ctgcgtatccaaagatgtt

SEQ ID NO: 54 - DNA, 19 bp, Homo sapiens
  siRNA target sequence for ATBF1 (NM_006885.2,1575-1593).
cggtgcatgaccatcgaat

SEQ ID NO: 55 - DNA, 19 bp, Homo sapiens
  siRNA target sequence for ATBF1 (NM_006885.2,1602-1620).
gcgaagacgagcggaaaat

SEQ ID NO: 56 - DNA, 19 bp, Homo sapiens
  siRNA target sequence for ATBF1 (NM_006885.2,1607-1625).
gacgagcggaaaattctta

SEQ ID NO: 57 - DNA, 19 bp, Homo sapiens
  siRNA target sequence for ATBF1 (NM_006885.2,1612-1630).
gcggaaaattcttagcaat

SEQ ID NO: 58 - DNA, 19 bp, Homo sapiens
  siRNA target sequence for ATBF1 (NM_006885.2,1613-1631).
cggaaaattcttagcaata

SEQ ID NO: 59 - DNA, 19 bp, Homo sapiens
  siRNA target sequence for ATBF1 (NM_006885.2,1667-1685).
gacaaggaaccccttgtaa

SEQ ID NO: 60 - DNA, 19 bp, Homo sapiens
  siRNA target sequence for ATBF1 (NM_006885.2,1669-1687).
caaggaaccccttgtaagt

SEQ ID NO: 61 - DNA, 19 bp, Homo sapiens
  siRNA target sequence for ATBF1 (NM_006885.2,1672-1690).
ggaaccccttgtaagtttt

SEQ ID NO: 62 - DNA, 19 bp, Homo sapiens
  siRNA target sequence for ATBF1 (NM_006885.2,1711-1729).
ctttcaacaccctttagtt

SEQ ID NO: 63 - DNA, 19 bp, Homo sapiens
  siRNA target sequence for ATBF1 (NM_006885.2,1942-1960).
ggcttccagtcctaccaaa

SEQ ID NO: 64 - DNA, 19 bp, Homo sapiens
  siRNA target sequence for ATBF1 (NM_006885.2,2216-2234).
gcaggtagtagcagcaaaa

SEQ ID NO: 65 - DNA, 19 bp, Homo sapiens
  siRNA target sequence for ATBF1 (NM_006885.2,2217-2235).
caggtagtagcagcaaaaa

SEQ ID NO: 66 - DNA, 19 bp, Homo sapiens
  siRNA target sequence for ATBF1 (NM_006885.2,2239-2257).
ccttgctctctcaaaccaa

SEQ ID NO: 67 - DNA, 19 bp, Homo sapiens
  siRNA target sequence for ATBF1 (NM_006885.2,2308-2326).
gggcacagcttctactagt

SEQ ID NO: 68 - DNA, 19 bp, Homo sapiens
  siRNA target sequence for ATBF1 (NM_006885.2,2313-2331).
cagcttctactagttctaa

SEQ ID NO: 69 - DNA, 19 bp, Homo sapiens
  siRNA target sequence for ATBF1 (NM_006885.2,2315-2333).
gcttctactagttctaatt

SEQ ID NO: 70 - DNA, 19 bp, Homo sapiens
  siRNA target sequence for ATBF1 (NM_006885.2,2363-2381).
gcgaacaggaggaatcgtt

SEQ ID NO: 71 - DNA, 19 bp, Homo sapiens
  siRNA target sequence for ATBF1 (NM_006885.2,2370-2388).
ggaggaatcgtttaagctt

SEQ ID NO: 72 - DNA, 19 bp, Homo sapiens
  siRNA target sequence for ATBF1 (NM_006885.2,2371-2389).
gaggaatcgtttaagcttt

SEQ ID NO: 73 - DNA, 19 bp, Homo sapiens
  siRNA target sequence for ATBF1 (NM_006885.2,2445-2463).
ctgacgaaagtgccaataa

SEQ ID NO: 74 - DNA, 19 bp, Homo sapiens
  siRNA target sequence for ATBF1 (NM_006885.2,2826-2844).
gctacacgtgtggttacaa

SEQ ID NO: 75 - DNA, 19 bp, Homo sapiens
  siRNA target sequence for ATBF1 (NM_006885.2,2852-2870).
cgctgcgaggtgtgtaact

SEQ ID NO: 76 - DNA, 19 bp, Homo sapiens
  siRNA target sequence for ATBF1 (NM_006885.2,2853-2871).
gctgcgaggtgtgtaacta

SEQ ID NO: 77 - DNA, 19 bp, Homo sapiens
  siRNA target sequence for ATBF1 (NM_006885.2,3086-3104).
cggtgcgaggtgtgtgatt

SEQ ID NO: 78 - DNA, 19 bp, Homo sapiens
  siRNA target sequence for ATBF1 (NM_006885.2,3087-3105).
ggtgcgaggtgtgtgatta

SEQ ID NO: 79 - DNA, 19 bp, Homo sapiens
  siRNA target sequence for ATBF1 (NM_006885.2,3088-3106).
gtgcgaggtgtgtgattat

SEQ ID NO: 80 - DNA, 19 bp, Homo sapiens
  siRNA target sequence for ATBF1 (NM_006885.2,3248-3266).
gccgagctctaccaatact

SEQ ID NO: 81 - DNA, 19 bp, Homo sapiens
  siRNA target sequence for ATBF1 (NM_006885.2,3249-3267).
ccgagctctaccaatacta

SEQ ID NO: 82 - DNA, 19 bp, Homo sapiens
  siRNA target sequence for ATBF1 (NM_006885.2,3318-3336).
cggacgcccagttcatgat

SEQ ID NO: 83 - DNA, 19 bp, Homo sapiens
  siRNA target sequence for ATBF1 (NM_006885.2,3399-3417).
gtgagatccccctagacat

SEQ ID NO: 84 - DNA, 19 bp, Homo sapiens
  siRNA target sequence for ATBF1 (NM_006885.2,3513-3531).
gcgccgtctgcaacaagtt

SEQ ID NO: 85 - DNA, 19 bp, Homo sapiens
  siRNA target sequence for ATBF1 (NM_006885.2,3606-3624).
cggtgatgggggactcata

SEQ ID NO: 86 - DNA, 19 bp, Homo sapiens
  siRNA target sequence for ATBF1 (NM_006885.2,3866-3884).
gaggccagcctgaagttgt

SEQ ID NO: 87 - DNA, 19 bp, Homo sapiens
  siRNA target sequence for ATBF1 (NM_006885.2,3901-3919).
gcatgagagtggtgtagaa

SEQ ID NO: 88 - DNA, 19 bp, Homo sapiens
  siRNA target sequence for ATBF1 (NM_006885.2,4108-4126).
ctccacggacccagaagaa

SEQ ID NO: 89 - DNA, 19 bp, Homo sapiens
  siRNA target sequence for ATBF1 (NM_006885.2,4515-4533).
gcgtggagaagctcattat

SEQ ID NO: 90 - DNA, 19 bp, Homo sapiens
  siRNA target sequence for ATBF1 (NM_006885.2,4686-4704).
cagagcaaagcggagattt

SEQ ID NO: 91 - DNA, 19 bp, Homo sapiens
  siRNA target sequence for ATBF1 (NM_006885.2,4688-4706).
gagcaaagcggagatttga

SEQ ID NO: 92 - DNA, 19 bp, Homo sapiens
  siRNA target sequence for ATBF1 (NM_006885.2,4690-4708).
gcaaagcggagatttgaaa

SEQ ID NO: 93 - DNA, 19 bp, Homo sapiens
  siRNA target sequence for ATBF1 (NM_006885.2,4739-4757).
gaagactcaggcttcatct

SEQ ID NO: 94 - DNA, 19 bp, Homo sapiens
  siRNA target sequence for ATBF1 (NM_006885.2,4799-4817).
gcccttcagacgcatttta

SEQ ID NO: 95 - DNA, 19 bp, Homo sapiens
  siRNA target sequence for ATBF1 (NM_006885.2,4801-4819).
ccttcagacgcattttaat

SEQ ID NO: 96 - DNA, 19 bp, Homo sapiens
  siRNA target sequence for ATBF1 (NM_006885.2,4856-4874).
gatcgccatgtgtacaagt

SEQ ID NO: 97 - DNA, 19 bp, Homo sapiens
  siRNA target sequence for ATBF1 (NM_006885.2,4867-4885).
gtacaagtaccgctgtaat

SEQ ID NO: 98 - DNA, 19 bp, Homo sapiens
  siRNA target sequence for ATBF1 (NM_006885.2,4957-4975).
caccatgtgctgtctttgt

SEQ ID NO: 99 - DNA, 19 bp, Homo sapiens
  siRNA target sequence for ATBF1 (NM_006885.2,5050-5068).
catccaacagctttatggt

SEQ ID NO: 100 - DNA, 19 bp, Homo sapiens
  siRNA target sequence for ATBF1 (NM_006885.2,5122-5140).
ggaccataccataattgtt

SEQ ID NO: 101 - DNA, 19 bp, Homo sapiens
  siRNA target sequence for ATBF1 (NM_006885.2,5200-5218).
ctctgggtcagtacaagaa

SEQ ID NO: 102 - DNA, 19 bp, Homo sapiens
  siRNA target sequence for ATBF1 (NM_006885.2,5202-5220).
ctgggtcagtacaagaaga

SEQ ID NO: 103 - DNA, 19 bp, Homo sapiens
  siRNA target sequence for ATBF1 (NM_006885.2,5224-5242).
gggctcagagccaaagaga

SEQ ID NO: 104 - DNA, 19 bp, Homo sapiens
  siRNA target sequence for ATBF1 (NM_006885.2,5294-5312).
ccttctcgcccttacaagt

SEQ ID NO: 105 - DNA, 19 bp, Homo sapiens
  siRNA target sequence for ATBF1 (NM_006885.2,5316-5334).
ccgtctgcaaggaatcttt

SEQ ID NO: 106 - DNA, 19 bp, Homo sapiens
  siRNA target sequence for ATBF1 (NM_006885.2,5327-5345).
gaatctttcactcaaaaga

SEQ ID NO: 107 - DNA, 19 bp, Homo sapiens
  siRNA target sequence for ATBF1 (NM_006885.2,5350-5368).
cctgctagtacactacaat

SEQ ID NO: 108 - DNA, 19 bp, Homo sapiens
  siRNA target sequence for ATBF1 (NM_006885.2,5351-5369).
ctgctagtacactacaatt

SEQ ID NO: 109 - DNA, 19 bp, Homo sapiens
  siRNA target sequence for ATBF1 (NM_006885.2,5372-5390).
gtctcccacctgcataagt

SEQ ID NO: 110 - DNA, 19 bp, Homo sapiens
  siRNA target sequence for ATBF1 (NM_006885.2,5374-5392).
ctcccacctgcataagtta

SEQ ID NO: 111 - DNA, 19 bp, Homo sapiens
  siRNA target sequence for ATBF1 (NM_006885.2,5376-5394).
cccacctgcataagttaaa

SEQ ID NO: 112 - DNA, 19 bp, Homo sapiens
  siRNA target sequence for ATBF1 (NM_006885.2,5378-5396).
cacctgcataagttaaaga

SEQ ID NO: 113 - DNA, 19 bp, Homo sapiens
  siRNA target sequence for ATBF1 (NM_006885.2,5380-5398).
cctgcataagttaaagaga

SEQ ID NO: 114 - DNA, 19 bp, Homo sapiens
  siRNA target sequence for ATBF1 (NM_006885.2,5523-5541).
ctgtgttacatcaaaccaa

SEQ ID NO: 115 - DNA, 19 bp, Homo sapiens
  siRNA target sequence for ATBF1 (NM_006885.2,5648-5666).
ggcagtaacacctttacca

SEQ ID NO: 116 - DNA, 19 bp, Homo sapiens
  siRNA target sequence for ATBF1 (NM_006885.2,5696-5714).
ccaagctctaacttactaa

SEQ ID NO: 117 - DNA, 19 bp, Homo sapiens
  siRNA target sequence for ATBF1 (NM_006885.2,5749-5767).
cctggggaatcctattggt

SEQ ID NO: 118 - DNA, 19 bp, Homo sapiens
  siRNA target sequence for ATBF1 (NM_006885.2,6381-6399).
ccggtccgaaggaaacact

SEQ ID NO: 119 - DNA, 19 bp, Homo sapiens
  siRNA target sequence for ATBF1 (NM_006885.2,6467-6485).
ctccctccacgcattgctt

SEQ ID NO: 120 - DNA, 19 bp, Homo sapiens
  siRNA target sequence for ATBF1 (NM_006885.2,6536-6554).
gagttggtcatccagtata

SEQ ID NO: 121 - DNA, 19 bp, Homo sapiens
  siRNA target sequence for ATBF1 (NM_006885.2,6542-6560).
gtcatccagtataatgaga

SEQ ID NO: 122 - DNA, 19 bp, Homo sapiens
  siRNA target sequence for ATBF1 (NM_006885.2,6629-6647).
gactcctgcggcaagttgt

SEQ ID NO: 123 - DNA, 19 bp, Homo sapiens
  siRNA target sequence for ATBF1 (NM_006885.2,6636-6654).
gcggcaagttgttttccaa

SEQ ID NO: 124 - DNA, 19 bp, Homo sapiens
  siRNA target sequence for ATBF1 (NM_006885.2,6680-6698).
gagcacgttcatcagaatt

SEQ ID NO: 125 - DNA, 19 bp, Homo sapiens
  siRNA target sequence for ATBF1 (NM_006885.2,6683-6701).
cacgttcatcagaattact

SEQ ID NO: 126 - DNA, 19 bp, Homo sapiens
  siRNA target sequence for ATBF1 (NM_006885.2,6741-6759).
gagaccactacgataaact

SEQ ID NO: 127 - DNA, 19 bp, Homo sapiens
  siRNA target sequence for ATBF1 (NM_006885.2,6743-6761).
gaccactacgataaactgt

SEQ ID NO: 128 - DNA, 19 bp, Homo sapiens
  siRNA target sequence for ATBF1 (NM_006885.2,7144-7162).
ccgagtcttgcggcaatat

SEQ ID NO: 129 - DNA, 19 bp, Homo sapiens
  siRNA target sequence for ATBF1 (NM_006885.2,7145-7163).
cgagtcttgcggcaatatt

SEQ ID NO: 130 - DNA, 19 bp, Homo sapiens
  siRNA target sequence for ATBF1 (NM_006885.2,7146-7164).
gagtcttgcggcaatattt

SEQ ID NO: 131 - DNA, 19 bp, Homo sapiens
  siRNA target sequence for ATBF1 (NM_006885.2,7154-7172).
cggcaatattttgacatta

SEQ ID NO: 132 - DNA, 19 bp, Homo sapiens
  siRNA target sequence for ATBF1 (NM_006885.2,7180-7198).
ccccagtgaagagcaaata

SEQ ID NO: 133 - DNA, 19 bp, Homo sapiens
  siRNA target sequence for ATBF1 (NM_006885.2,7181-7199).
cccagtgaagagcaaataa

SEQ ID NO: 134 - DNA, 19 bp, Homo sapiens
  siRNA target sequence for ATBF1 (NM_006885.2,7220-7238).
gggttgccccagaaagtga

SEQ ID NO: 135 - DNA, 19 bp, Homo sapiens
  siRNA target sequence for ATBF1 (NM_006885.2,7221-7239).
ggttgccccagaaagtgat

SEQ ID NO: 136 - DNA, 19 bp, Homo sapiens
  siRNA target sequence for ATBF1 (NM_006885.2,7289-7307).
gactccccttacaacttca

SEQ ID NO: 137 - DNA, 19 bp, Homo sapiens
  siRNA target sequence for ATBF1 (NM_006885.2,7294-7312).
cccttacaacttcagtaat

SEQ ID NO: 138 - DNA, 19 bp, Homo sapiens
  siRNA target sequence for ATBF1 (NM_006885.2,7604-7622).
gagcggcgtgagcttacaa

SEQ ID NO: 139 - DNA, 19 bp, Homo sapiens
  siRNA target sequence for ATBF1 (NM_006885.2,7606-7624).
gcggcgtgagcttacaaat

SEQ ID NO: 140 - DNA, 19 bp, Homo sapiens
  siRNA target sequence for ATBF1 (NM_006885.2,7608-7626).
ggcgtgagcttacaaatga

SEQ ID NO: 141 - DNA, 19 bp, Homo sapiens
  siRNA target sequence for ATBF1 (NM_006885.2,7609-7627).
gcgtgagcttacaaatgat

SEQ ID NO: 142 - DNA, 19 bp, Homo sapiens
  siRNA target sequence for ATBF1 (NM_006885.2,7610-7628).
cgtgagcttacaaatgata

SEQ ID NO: 143 - DNA, 19 bp, Homo sapiens
  siRNA target sequence for ATBF1 (NM_006885.2,7616-7634).
cttacaaatgatagataca

SEQ ID NO: 144 - DNA, 19 bp, Homo sapiens
  siRNA target sequence for ATBF1 (NM_006885.2,7637-7655).
cgaacaagcaacttgaact

SEQ ID NO: 145 - DNA, 19 bp, Homo sapiens
  siRNA target sequence for ATBF1 (NM_006885.2,7638-7656).
gaacaagcaacttgaacta

SEQ ID NO: 146 - DNA, 19 bp, Homo sapiens
  siRNA target sequence for ATBF1 (NM_006885.2,7750-7768).
gcaggacgacagccaaaat

SEQ ID NO: 147 - DNA, 19 bp, Homo sapiens
  siRNA target sequence for ATBF1 (NM_006885.2,7916-7934).
gaactggccaccttcaatt

SEQ ID NO: 148 - DNA, 19 bp, Homo sapiens
  siRNA target sequence for ATBF1 (NM_006885.2,7921-7939).
ggccaccttcaattcaaaa

SEQ ID NO: 149 - DNA, 19 bp, Homo sapiens
  siRNA target sequence for ATBF1 (NM_006885.2,7946-7964).
gcaggcgatgagaaaccaa

SEQ ID NO: 150 - DNA, 19 bp, Homo sapiens
  siRNA target sequence for ATBF1 (NM_006885.2,8281-8299).
gttggcatttccgtcattt

SEQ ID NO: 151 - DNA, 19 bp, Homo sapiens
  siRNA target sequence for ATBF1 (NM_006885.2,8337-8355).
gcgcgcagaaccagttcat

SEQ ID NO: 152 - DNA, 19 bp, Homo sapiens
  siRNA target sequence for ATBF1 (NM_006885.2,8379-8397).
ccctggatatgcctttcat

SEQ ID NO: 153 - DNA, 19 bp, Homo sapiens
  siRNA target sequence for ATBF1 (NM_006885.2,8490-8508).
ctccaacctccacaatgaa

SEQ ID NO: 154 - DNA, 19 bp, Homo sapiens
  siRNA target sequence for ATBF1 (NM_006885.2,8492-8510).
ccaacctccacaatgaaca

SEQ ID NO: 155 - DNA, 19 bp, Homo sapiens
  siRNA target sequence for ATBF1 (NM_006885.2,8590-8608).
gagagacaagcgtttgaga

SEQ ID NO: 156 - DNA, 19 bp, Homo sapiens
  siRNA target sequence for ATBF1 (NM_006885.2,8594-8612).
gacaagcgtttgagaacaa

SEQ ID NO: 157 - DNA, 19 bp, Homo sapiens
  siRNA target sequence for ATBF1 (NM_006885.2,8613-8631).
ccatcacaccggaacaact

SEQ ID NO: 158 - DNA, 19 bp, Homo sapiens
  siRNA target sequence for ATBF1 (NM_006885.2,8614-8632).
catcacaccggaacaacta

SEQ ID NO: 159 - DNA, 19 bp, Homo sapiens
  siRNA target sequence for ATBF1 (NM_006885.2,8617-8635).
cacaccggaacaactagaa

SEQ ID NO: 160 - DNA, 19 bp, Homo sapiens
  siRNA target sequence for ATBF1 (NM_006885.2,8619-8637).
caccggaacaactagaaat

SEQ ID NO: 161 - DNA, 19 bp, Homo sapiens
  siRNA target sequence for ATBF1 (NM_006885.2,8650-8668).
gtatctactggattccaat

SEQ ID NO: 162 - DNA, 19 bp, Homo sapiens
  siRNA target sequence for ATBF1 (NM_006885.2,8664-8682).
ccaatccgactcgaaagat

SEQ ID NO: 163 - DNA, 19 bp, Homo sapiens
  siRNA target sequence for ATBF1 (NM_006885.2,8748-8766).
cccgagctcgggaaaggaa

SEQ ID NO: 164 - DNA, 19 bp, Homo sapiens
  siRNA target sequence for ATBF1 (NM_006885.2,8749-8767).
ccgagctcgggaaaggaaa

SEQ ID NO: 165 - DNA, 19 bp, Homo sapiens
  siRNA target sequence for ATBF1 (NM_006885.2,8844-8862).
ctgctcttgaggctcatat

SEQ ID NO: 166 - DNA, 19 bp, Homo sapiens
  siRNA target sequence for ATBF1 (NM_006885.2,9024-9042).
ccctctcacctgtgagtaa

SEQ ID NO: 167 - DNA, 19 bp, Homo sapiens
  siRNA target sequence for ATBF1 (NM_006885.2,9025-9043).
cctctcacctgtgagtaaa

SEQ ID NO: 168 - DNA, 19 bp, Homo sapiens
  siRNA target sequence for ATBF1 (NM_006885.2,9026-9044).
ctctcacctgtgagtaaaa

SEQ ID NO: 169 - DNA, 19 bp, Homo sapiens
  siRNA target sequence for ATBF1 (NM_006885.2,9030-9048).
cacctgtgagtaaaaccat

SEQ ID NO: 170 - DNA, 19 bp, Homo sapiens
  siRNA target sequence for ATBF1 (NM_006885.2,9075-9093).
gcccttcctccattaaggt

SEQ ID NO: 171 - DNA, 19 bp, Homo sapiens
  siRNA target sequence for ATBF1 (NM_006885.2,9121-9139).
ctccatgtcctcagttaat

SEQ ID NO: 172 - DNA, 19 bp, Homo sapiens
  siRNA target sequence for ATBF1 (NM_006885.2,9124-9142).
catgtcctcagttaatcta

SEQ ID NO: 173 - DNA, 19 bp, Homo sapiens
  siRNA target sequence for ATBF1 (NM_006885.2,9129-9147).
cctcagttaatctaaactt

SEQ ID NO: 174 - DNA, 19 bp, Homo sapiens
  siRNA target sequence for ATBF1 (NM_006885.2,9130-9148).
ctcagttaatctaaacttt

SEQ ID NO: 175 - DNA, 19 bp, Homo sapiens
  siRNA target sequence for ATBF1 (NM_006885.2,9132-9150).
cagttaatctaaactttga

SEQ ID NO: 176 - DNA, 19 bp, Homo sapiens
  siRNA target sequence for ATBF1 (NM_006885.2,9502-9520).
gcctgggcagaaacgtttt

SEQ ID NO: 177 - DNA, 19 bp, Homo sapiens
  siRNA target sequence for ATBF1 (NM_006885.2,9553-9571).
cctcaagtcatgctttaat

SEQ ID NO: 178 - DNA, 19 bp, Homo sapiens
  siRNA target sequence for ATBF1 (NM_006885.2,9619-9637).
cattggactgccaaagaga

SEQ ID NO: 179 - DNA, 19 bp, Homo sapiens
  siRNA target sequence for ATBF1 (NM_006885.2,9788-9806).
gtacgtgaccatatctttt

SEQ ID NO: 180 - DNA, 19 bp, Homo sapiens
  siRNA target sequence for ATBF1 (NM_006885.2,9812-9830).
cagcatatctccaaagtta

SEQ ID NO: 181 - DNA, 19 bp, Homo sapiens
  siRNA target sequence for ATBF1 (NM_006885.2,9882-9900).
ccaccgtacgtcagttgat

SEQ ID NO: 182 - DNA, 19 bp, Homo sapiens
  siRNA target sequence for ATBF1 (NM_006885.2,9911-9929).
gagttggaccggattaaaa

SEQ ID NO: 183 - DNA, 19 bp, Homo sapiens
  siRNA target sequence for ATBF1 (NM_006885.2,9962-9980).
cagcaagggatgtttgaca

SEQ ID NO: 184 - DNA, 19 bp, Homo sapiens
  siRNA target sequence for ATBF1 (NM_006885.2,9987-10005).
ctcttcaggcccttaacct

SEQ ID NO: 185 - DNA, 19 bp, Homo sapiens
  siRNA target sequence for ATBF1 (NM_006885.2,10167-10185).
ccacttctggattaccaaa

SEQ ID NO: 186 - DNA, 19 bp, Homo sapiens
  siRNA target sequence for ATBF1 (NM_006885.2,10170-10188).
cttctggattaccaaataa

SEQ ID NO: 187 - DNA, 19 bp, Homo sapiens
  siRNA target sequence for ATBF1 (NM_006885.2,10364-10382).
caacgcaaggacaaagaca

SEQ ID NO: 188 - DNA, 19 bp, Homo sapiens
  siRNA target sequence for ATBF1 (NM_006885.2,10587-10605).
gccagttccttccttactt

SEQ ID NO: 189 - DNA, 19 bp, Homo sapiens
  siRNA target sequence for ATBF1 (NM_006885.2,10610-10628).
ccaggcttttctccttatt

SEQ ID NO: 190 - DNA, 19 bp, Homo sapiens
  siRNA target sequence for ATBF1 (NM_006885.2,10662-10680).
ggtacctgcagcctatgta

SEQ ID NO: 191 - DNA, 19 bp, Homo sapiens
  siRNA target sequence for ATBF1 (NM_006885.2,10663-10681).
gtacctgcagcctatgtat

SEQ ID NO: 192 - DNA, 19 bp, Homo sapiens
  siRNA target sequence for ATBF1 (NM_006885.2,10782-10800).
gtctgcaggaggcaattca

SEQ ID NO: 193 - DNA, 19 bp, Homo sapiens
  siRNA target sequence for ATBF1 (NM_006885.2,11029-11047).
ctacgaccccttcattgtt

SEQ ID NO: 194 - DNA, 19 bp, Homo sapiens
  siRNA target sequence for ATBF1 (NM_006885.2,11296-11314).
ggaagctctgagtcaacat

SEQ ID NO: 195 - DNA, 19 bp, Homo sapiens
  siRNA target sequence for ATBF1 (NM_006885.2,11367-11385).
ccaaagagcaccctagttt

SEQ ID NO: 196 - DNA, 19 bp, Homo sapiens
  siRNA target sequence for ATBF1 (NM_006885.2,11368-11386).
caaagagcaccctagttta

SEQ ID NO: 197 - DNA, 19 bp, Homo sapiens
  siRNA target sequence for ATBF1 (NM_006885.2,11374-11392).
gcaccctagtttattacct

SEQ ID NO: 198 - DNA, 19 bp, Homo sapiens
  siRNA target sequence for ATBF1 (NM_006885.2,11762-11780).
ggaacggacaccttcagat

SEQ ID NO: 199 - DNA, 19 bp, Homo sapiens
  siRNA target sequence for GTF2IRD1 (NM_005685.2,150-168).
cccgcaaagacgagatcat

SEQ ID NO: 200 - DNA, 19 bp, Homo sapiens
  siRNA target sequence for GTF2IRD1 (NM_005685.2,475-493).
ggaggtgtttgatgttctt

SEQ ID NO: 201 - DNA, 19 bp, Homo sapiens
  siRNA target sequence for GTF2IRD1 (NM_005685.2,603-621).
gaaggccagccgagtatga

SEQ ID NO: 202 - DNA, 19 bp, Homo sapiens
  siRNA target sequence for GTF2IRD1 (NM_005685.2,960-978).
ccaccggtgcccaagactt

SEQ ID NO: 203 - DNA, 19 bp, Homo sapiens
  siRNA target sequence for GTF2IRD1 (NM_005685.2,1040-1058).
gcctccaagcgcattctct

SEQ ID NO: 204 - DNA, 19 bp, Homo sapiens
  siRNA target sequence for GTF2IRD1 (NM_005685.2,1041-1059).
cctccaagcgcattctctt

SEQ ID NO: 205 - DNA, 19 bp, Homo sapiens
  siRNA target sequence for GTF2IRD1 (NM_005685.2,1084-1102).
gaagtgggacgccttcata

SEQ ID NO: 206 - DNA, 19 bp, Homo sapiens
  siRNA target sequence for GTF2IRD1 (NM_005685.2,1090-1108).
ggacgccttcataaaggaa

SEQ ID NO: 207 - DNA, 19 bp, Homo sapiens
  siRNA target sequence for GTF2IRD1 (NM_005685.2,1137-1155).
gtgtgcagatcctgtttaa

SEQ ID NO: 208 - DNA, 19 bp, Homo sapiens
  siRNA target sequence for GTF2IRD1 (NM_005685.2,1139-1157).
gtgcagatcctgtttaaca

SEQ ID NO: 209 - DNA, 19 bp, Homo sapiens
  siRNA target sequence for GTF2IRD1 (NM_005685.2,1198-1216).
cgtgccctaccggaagatt

SEQ ID NO: 210 - DNA, 19 bp, Homo sapiens
  siRNA target sequence for GTF2IRD1 (NM_005685.2,1313-1331).
ctggaggagcgccatagta

SEQ ID NO: 211 - DNA, 19 bp, Homo sapiens
  siRNA target sequence for GTF2IRD1 (NM_005685.2,1323-1341).
gccatagtatccacttcat

SEQ ID NO: 212 - DNA, 19 bp, Homo sapiens
  siRNA target sequence for GTF2IRD1 (NM_005685.2,1325-1343).
catagtatccacttcatca

SEQ ID NO: 213 - DNA, 19 bp, Homo sapiens
  siRNA target sequence for GTF2IRD1 (NM_005685.2,1342-1360).
cattaagaggatgtttgat

SEQ ID NO: 214 - DNA, 19 bp, Homo sapiens
  siRNA target sequence for GTF2IRD1 (NM_005685.2,2085-2103).
gacagggctttcaagaaaa

SEQ ID NO: 215 - DNA, 19 bp, Homo sapiens
  siRNA target sequence for GTF2IRD1 (NM_005685.2,2129-2147).
gacatcgccaacacactaa

SEQ ID NO: 216 - DNA, 19 bp, Homo sapiens
  siRNA target sequence for GTF2IRD1 (NM_005685.2,2156-2174).
gtccaggaccttttcaata

SEQ ID NO: 217 - DNA, 19 bp, Homo sapiens
  siRNA target sequence for GTF2IRD1 (NM_005685.2,2498-2516).
ccggtgctggtcccttata

SEQ ID NO: 218 - DNA, 19 bp, Homo sapiens
  siRNA target sequence for GTF2IRD1 (NM_005685.2,2499-2517).
cggtgctggtcccttataa

SEQ ID NO: 219 - DNA, 19 bp, Homo sapiens
  siRNA target sequence for GTF2IRD1 (NM_005685.2,2500-2518).
ggtgctggtcccttataaa

SEQ ID NO: 220 - DNA, 19 bp, Homo sapiens
  siRNA target sequence for GTF2IRD1 (NM_005685.2,2503-2521).
gctggtcccttataaacta

SEQ ID NO: 221 - DNA, 19 bp, Homo sapiens
  siRNA target sequence for GTF2IRD1 (NM_005685.2,2553-2571).
cgggtctgcctgatgacat

SEQ ID NO: 222 - DNA, 19 bp, Homo sapiens
  siRNA target sequence for GTF2IRD1 (NM_005685.2,2740-2758).
gcgggtctcggaaggaaat

SEQ ID NO: 223 - DNA, 19 bp, Homo sapiens
  siRNA target sequence for GTF2IRD1 (NM_005685.2,2840-2858).
gtgcaatggccaatgtaca

SEQ ID NO: 224 - DNA, 19 bp, Homo sapiens
  siRNA target sequence for HIF1A (NM_001530.2,308-326).
cgacaagaaaaagataagt

SEQ ID NO: 225 - DNA, 19 bp, Homo sapiens
  siRNA target sequence for HIF1A (NM_001530.2,325-343).
gttctgaacgtcgaaaaga

SEQ ID NO: 226 - DNA, 19 bp, Homo sapiens
  siRNA target sequence for HIF1A (NM_001530.2,330-348).
gaacgtcgaaaagaaaagt

SEQ ID NO: 227 - DNA, 19 bp, Homo sapiens
  siRNA target sequence for HIF1A (NM_001530.2,361-379).
ccagatctcggcgaagtaa

SEQ ID NO: 228 - DNA, 19 bp, Homo sapiens
  siRNA target sequence for HIF1A (NM_001530.2,362-380).
cagatctcggcgaagtaaa

SEQ ID NO: 229 - DNA, 19 bp, Homo sapiens
  siRNA target sequence for HIF1A (NM_001530.2,413-431).
gttgccacttccacataat

SEQ ID NO: 230 - DNA, 19 bp, Homo sapiens
  siRNA target sequence for HIF1A (NM_001530.2,432-450).
gtgagttcgcatcttgata

SEQ ID NO: 231 - DNA, 19 bp, Homo sapiens
  siRNA target sequence for HIF1A (NM_001530.2,457-475).
ctgtgatgaggcttaccat

SEQ ID NO: 232 - DNA, 19 bp, Homo sapiens
  siRNA target sequence for HIF1A (NM_001530.2,466-484).
ggcttaccatcagctattt

SEQ ID NO: 233 - DNA, 19 bp, Homo sapiens
  siRNA target sequence for HIF1A (NM_001530.2,600-618).
gatggtgacatgatttaca

SEQ ID NO: 234 - DNA, 19 bp, Homo sapiens
  siRNA target sequence for HIF1A (NM_001530.2,667-685).
ctggacacagtgtgtttga

SEQ ID NO: 235 - DNA, 19 bp, Homo sapiens
  siRNA target sequence for HIF1A (NM_001530.2,676-694).
gtgtgtttgattttactca

SEQ ID NO: 236 - DNA, 19 bp, Homo sapiens
  siRNA target sequence for HIF1A (NM_001530.2,774-792).
cagcgaagcttttttctca

SEQ ID NO: 237 - DNA, 19 bp, Homo sapiens
  siRNA target sequence for HIF1A (NM_001530.2,811-829).
ctagccgaggaagaactat

SEQ ID NO: 238 - DNA, 19 bp, Homo sapiens
  siRNA target sequence for HIF1A (NM_001530.2,816-834).
cgaggaagaactatgaaca

SEQ ID NO: 239 - DNA, 19 bp, Homo sapiens
  siRNA target sequence for HIF1A (NM_001530.2,819-837).
ggaagaactatgaacataa

SEQ ID NO: 240 - DNA, 19 bp, Homo sapiens
  siRNA target sequence for HIF1A (NM_001530.2,871-889).
gccacattcacgtatatga

SEQ ID NO: 241 - DNA, 19 bp, Homo sapiens
  siRNA target sequence for HIF1A (NM_001530.2,872-890).
ccacattcacgtatatgat

SEQ ID NO: 242 - DNA, 19 bp, Homo sapiens
  siRNA target sequence for HIF1A (NM_001530.2,873-891).
cacattcacgtatatgata

SEQ ID NO: 243 - DNA, 19 bp, Homo sapiens
  siRNA target sequence for HIF1A (NM_001530.2,882-900).
gtatatgataccaacagta

SEQ ID NO: 244 - DNA, 19 bp, Homo sapiens
  siRNA target sequence for HIF1A (NM_001530.2,906-924).
cctcagtgtgggtataaga

SEQ ID NO: 245 - DNA, 19 bp, Homo sapiens
  siRNA target sequence for HIF1A (NM_001530.2,907-925).
ctcagtgtgggtataagaa

SEQ ID NO: 246 - DNA, 19 bp, Homo sapiens
  siRNA target sequence for HIF1A (NM_001530.2,967-985).
ctcacccatcaaatattga

SEQ ID NO: 247 - DNA, 19 bp, Homo sapiens
  siRNA target sequence for HIF1A (NM_001530.2,990-1008).
cctttagatagcaagactt

SEQ ID NO: 248 - DNA, 19 bp, Homo sapiens
  siRNA target sequence for HIF1A (NM_001530.2,991-1009).
ctttagatagcaagacttt

SEQ ID NO: 249 - DNA, 19 bp, Homo sapiens
  siRNA target sequence for HIF1A (NM_001530.2,1075-1093).
gatatgagccagaagaact

SEQ ID NO: 250 - DNA, 19 bp, Homo sapiens
  siRNA target sequence for HIF1A (NM_001530.2,1092-1110).
cttttaggccgctcaattt

SEQ ID NO: 251 - DNA, 19 bp, Homo sapiens
  siRNA target sequence for HIF1A (NM_001530.2,1098-1116).
ggccgctcaatttatgaat

SEQ ID NO: 252 - DNA, 19 bp, Homo sapiens
  siRNA target sequence for HIF1A (NM_001530.2,1099-1117).
gccgctcaatttatgaata

SEQ ID NO: 253 - DNA, 19 bp, Homo sapiens
  siRNA target sequence for HIF1A (NM_001530.2,1100-1118).
ccgctcaatttatgaatat

SEQ ID NO: 254 - DNA, 19 bp, Homo sapiens
  siRNA target sequence for HIF1A (NM_001530.2,1145-1163).
gaccaaaactcatcatgat

SEQ ID NO: 255 - DNA, 19 bp, Homo sapiens
  siRNA target sequence for HIF1A (NM_001530.2,1155-1173).
catcatgatatgtttacta

SEQ ID NO: 256 - DNA, 19 bp, Homo sapiens
  siRNA target sequence for HIF1A (NM_001530.2,1210-1228).
ccaaaagaggtggatatgt

SEQ ID NO: 257 - DNA, 19 bp, Homo sapiens
  siRNA target sequence for HIF1A (NM_001530.2,1242-1260).
caagcaactgtcatatata

SEQ ID NO: 258 - DNA, 19 bp, Homo sapiens
  siRNA target sequence for HIF1A (NM_001530.2,1245-1263).
gcaactgtcatatataaca

SEQ ID NO: 259 - DNA, 19 bp, Homo sapiens
  siRNA target sequence for HIF1A (NM_001530.2,1304-1322).
cgttgtgagtggtattatt

SEQ ID NO: 260 - DNA, 19 bp, Homo sapiens
  siRNA target sequence for HIF1A (NM_001530.2,1340-1358).
ctcccttcaacaaacagaa

SEQ ID NO: 261 - DNA, 19 bp, Homo sapiens
  siRNA target sequence for HIF1A (NM_001530.2,1362-1380).
gtccttaaaccggttgaat

SEQ ID NO: 262 - DNA, 19 bp, Homo sapiens
  siRNA target sequence for HIF1A (NM_001530.2,1364-1382).
ccttaaaccggttgaatct

SEQ ID NO: 263 - DNA, 19 bp, Homo sapiens
  siRNA target sequence for HIF1A (NM_001530.2,1365-1383).
cttaaaccggttgaatctt

SEQ ID NO: 264 - DNA, 19 bp, Homo sapiens
  siRNA target sequence for HIF1A (NM_001530.2,1371-1389).
ccggttgaatcttcagata

SEQ ID NO: 265 - DNA, 19 bp, Homo sapiens
  siRNA target sequence for HIF1A (NM_001530.2,1409-1427).
caccaaagttgaatcagaa

SEQ ID NO: 266 - DNA, 19 bp, Homo sapiens
  siRNA target sequence for HIF1A (NM_001530.2,1412-1430).
caaagttgaatcagaagat

SEQ ID NO: 267 - DNA, 19 bp, Homo sapiens
  siRNA target sequence for HIF1A (NM_001530.2,1419-1437).
gaatcagaagatacaagta

SEQ ID NO: 268 - DNA, 19 bp, Homo sapiens
  siRNA target sequence for HIF1A (NM_001530.2,1435-1453).
gtagcctctttgacaaact

SEQ ID NO: 269 - DNA, 19 bp, Homo sapiens
  siRNA target sequence for HIF1A (NM_001530.2,1438-1456).
gcctctttgacaaacttaa

SEQ ID NO: 270 - DNA, 19 bp, Homo sapiens
  siRNA target sequence for HIF1A (NM_001530.2,1492-1510).
ccgctggagacacaatcat

SEQ ID NO: 271 - DNA, 19 bp, Homo sapiens
  siRNA target sequence for HIF1A (NM_001530.2,1493-1511).
cgctggagacacaatcata

SEQ ID NO: 272 - DNA, 19 bp, Homo sapiens
  siRNA target sequence for HIF1A (NM_001530.2,1494-1512).
gctggagacacaatcatat

SEQ ID NO: 273 - DNA, 19 bp, Homo sapiens
  siRNA target sequence for HIF1A (NM_001530.2,1504-1522).
caatcatatctttagattt

SEQ ID NO: 274 - DNA, 19 bp, Homo sapiens
  siRNA target sequence for HIF1A (NM_001530.2,1528-1546).
gcaacgacacagaaactga

SEQ ID NO: 275 - DNA, 19 bp, Homo sapiens
  siRNA target sequence for HIF1A (NM_001530.2,1529-1547).
caacgacacagaaactgat

SEQ ID NO: 276 - DNA, 19 bp, Homo sapiens
  siRNA target sequence for HIF1A (NM_001530.2,1562-1580).
ggaagtaccattatataat

SEQ ID NO: 277 - DNA, 19 bp, Homo sapiens
  siRNA target sequence for HIF1A (NM_001530.2,1597-1615).
cacccaacgaaaaattaca

SEQ ID NO: 278 - DNA, 19 bp, Homo sapiens
  siRNA target sequence for HIF1A (NM_001530.2,1790-1808).
cgatggaagcactagacaa

SEQ ID NO: 279 - DNA, 19 bp, Homo sapiens
  siRNA target sequence for HIF1A (NM_001530.2,1791-1809).
gatggaagcactagacaaa

SEQ ID NO: 280 - DNA, 19 bp, Homo sapiens
  siRNA target sequence for HIF1A (NM_001530.2,1822-1840).
ctaatagtcccagtgaata

SEQ ID NO: 281 - DNA, 19 bp, Homo sapiens
  siRNA target sequence for HIF1A (NM_001530.2,1828-1846).
gtcccagtgaatattgttt

SEQ ID NO: 282 - DNA, 19 bp, Homo sapiens
  siRNA target sequence for HIF1A (NM_001530.2,1889-1907).
ggtagaaaaactttttgct

SEQ ID NO: 283 - DNA, 19 bp, Homo sapiens
  siRNA target sequence for HIF1A (NM_001530.2,2015-2033).
cgatcagttgtcaccatta

SEQ ID NO: 284 - DNA, 19 bp, Homo sapiens
  siRNA target sequence for HIF1A (NM_001530.2,2068-2086).
ctcaaagcacagttacagt

SEQ ID NO: 285 - DNA, 19 bp, Homo sapiens
  siRNA target sequence for HIF1A (NM_001530.2,2137-2155).
ctgccaccactgatgaatt

SEQ ID NO: 286 - DNA, 19 bp, Homo sapiens
  siRNA target sequence for HIF1A (NM_001530.2,2139-2157).
gccaccactgatgaattaa

SEQ ID NO: 287 - DNA, 19 bp, Homo sapiens
  siRNA target sequence for HIF1A (NM_001530.2,2140-2158).
ccaccactgatgaattaaa

SEQ ID NO: 288 - DNA, 19 bp, Homo sapiens
  siRNA target sequence for HIF1A (NM_001530.2,2165-2183).
gacaaaagaccgtatggaa

SEQ ID NO: 289 - DNA, 19 bp, Homo sapiens
  siRNA target sequence for HIF1A (NM_001530.2,2174-2192).
ccgtatggaagacattaaa

SEQ ID NO: 290 - DNA, 19 bp, Homo sapiens
  siRNA target sequence for HIF1A (NM_001530.2,2209-2227).
catctcctacccacataca

SEQ ID NO: 291 - DNA, 19 bp, Homo sapiens
  siRNA target sequence for HIF1A (NM_001530.2,2246-2264).
cacatcatcaccatataga

SEQ ID NO: 292 - DNA, 19 bp, Homo sapiens
  siRNA target sequence for HIF1A (NM_001530.2,2248-2266).
catcatcaccatatagaga

SEQ ID NO: 293 - DNA, 19 bp, Homo sapiens
  siRNA target sequence for HIF1A (NM_001530.2,2344-2362).
gccctaacgtgttatctgt

SEQ ID NO: 294 - DNA, 19 bp, Homo sapiens
  siRNA target sequence for HIF1A (NM_001530.2,2354-2372).
gttatctgtcgctttgagt

SEQ ID NO: 295 - DNA, 19 bp, Homo sapiens
  siRNA target sequence for HIF1A (NM_001530.2,2363-2381).
cgctttgagtcaaagaact

SEQ ID NO: 296 - DNA, 19 bp, Homo sapiens
  siRNA target sequence for HIF1A (NM_001530.2,2364-2382).
gctttgagtcaaagaacta

SEQ ID NO: 297 - DNA, 19 bp, Homo sapiens
  siRNA target sequence for HIF1A (NM_001530.2,2369-2387).
gagtcaaagaactacagtt

SEQ ID NO: 298 - DNA, 19 bp, Homo sapiens
  siRNA target sequence for HIF1A (NM_001530.2,2510-2528).
cgatcatgcagctactaca

SEQ ID NO: 299 - DNA, 19 bp, Homo sapiens
  siRNA target sequence for HIF1A (NM_001530.2,2517-2535).
gcagctactacatcacttt

SEQ ID NO: 300 - DNA, 19 bp, Homo sapiens
  siRNA target sequence for HIF1A (NM_001530.2,2520-2538).
gctactacatcactttctt

SEQ ID NO: 301 - DNA, 19 bp, Homo sapiens
  siRNA target sequence for HIF1A (NM_001530.2,2544-2562).
cgtgtaaaaggatgcaaat

SEQ ID NO: 302 - DNA, 19 bp, Homo sapiens
  siRNA target sequence for HIF1A (NM_001530.2,2563-2581).
ctagtgaacagaatggaat

SEQ ID NO: 303 - DNA, 19 bp, Homo sapiens
  siRNA target sequence for HIF1A (NM_001530.2,2582-2600).
ggagcaaaagacaattatt

SEQ ID NO: 304 - DNA, 19 bp, Homo sapiens
  siRNA target sequence for HIF1A (NM_001530.2,2609-2627).
ctctgatttagcatgtaga

SEQ ID NO: 305 - DNA, 19 bp, Homo sapiens
  siRNA target sequence for HIF1A (NM_001530.2,2626-2644).
gactgctggggcaatcaat

SEQ ID NO: 306 - DNA, 19 bp, Homo sapiens
  siRNA target sequence for HIF1A (NM_001530.2,2636-2654).
gcaatcaatggatgaaagt

SEQ ID NO: 307 - DNA, 19 bp, Homo sapiens
  siRNA target sequence for HIF1A (NM_001530.2,2664-2682).
cagctgaccagttatgatt

SEQ ID NO: 308 - DNA, 19 bp, Homo sapiens
  siRNA target sequence for HIF1A (NM_001530.2,2672-2690).
cagttatgattgtgaagtt

SEQ ID NO: 309 - DNA, 19 bp, Homo sapiens
  siRNA target sequence for HIF1A (NM_001530.2,2674-2692).
gttatgattgtgaagttaa

SEQ ID NO: 310 - DNA, 19 bp, Homo sapiens
  siRNA target sequence for ICSBP1 (NM_002163.1,98-116).
gattgacagtagcatgtat

SEQ ID NO: 311 - DNA, 19 bp, Homo sapiens
  siRNA target sequence for ICSBP1 (NM_002163.1,173-191).
cgctggcaagcaagattat

SEQ ID NO: 312 - DNA, 19 bp, Homo sapiens
  siRNA target sequence for ICSBP1 (NM_002163.1,178-196).
gcaagcaagattataatca

SEQ ID NO: 313 - DNA, 19 bp, Homo sapiens
  siRNA target sequence for ICSBP1 (NM_002163.1,289-307).
ggttacgctgtgctttgaa

SEQ ID NO: 314 - DNA, 19 bp, Homo sapiens
  siRNA target sequence for ICSBP1 (NM_002163.1,339-357).
cggtcccaactggacattt

SEQ ID NO: 315 - DNA, 19 bp, Homo sapiens
  siRNA target sequence for ICSBP1 (NM_002163.1,368-386).
caaagtttaccgaattgtt

SEQ ID NO: 316 - DNA, 19 bp, Homo sapiens
  siRNA target sequence for ICSBP1 (NM_002163.1,429-447).
ggctgcgtgaatgaagtta

SEQ ID NO: 317 - DNA, 19 bp, Homo sapiens
  siRNA target sequence for ICSBP1 (NM_002163.1,431-449).
ctgcgtgaatgaagttaca

SEQ ID NO: 318 - DNA, 19 bp, Homo sapiens
  siRNA target sequence for ICSBP1 (NM_002163.1,456-474).
gagtgcggtcgctctgaaa

SEQ ID NO: 319 - DNA, 19 bp, Homo sapiens
  siRNA target sequence for ICSBP1 (NM_002163.1,460-478).
gcggtcgctctgaaatcga

SEQ ID NO: 320 - DNA, 19 bp, Homo sapiens
  siRNA target sequence for ICSBP1 (NM_002163.1,495-513).
ccttctgtggacgattaca

SEQ ID NO: 321 - DNA, 19 bp, Homo sapiens
  siRNA target sequence for ICSBP1 (NM_002163.1,496-514).
cttctgtggacgattacat

SEQ ID NO: 322 - DNA, 19 bp, Homo sapiens
  siRNA target sequence for ICSBP1 (NM_002163.1,1033-1051).
gagagctgcagcagttcta

SEQ ID NO: 323 - DNA, 19 bp, Homo sapiens
  siRNA target sequence for ICSBP1 (NM_002163.1,1122-1140).
cccttgcgctccaaactca

SEQ ID NO: 324 - DNA, 19 bp, Homo sapiens
  siRNA target sequence for ICSBP1 (NM_002163.1,1123-1141).
ccttgcgctccaaactcat

SEQ ID NO: 325 - DNA, 19 bp, Homo sapiens
  siRNA target sequence for ICSBP1 (NM_002163.1,1124-1142).
cttgcgctccaaactcatt

SEQ ID NO: 326 - DNA, 19 bp, Homo sapiens
  siRNA target sequence for ICSBP1 (NM_002163.1,1256-1274).
ccggatgtttccagatatt

SEQ ID NO: 327 - DNA, 19 bp, Homo sapiens
  siRNA target sequence for ICSBP1 (NM_002163.1,1257-1275).
cggatgtttccagatattt

SEQ ID NO: 328 - DNA, 19 bp, Homo sapiens
  siRNA target sequence for ICSBP1 (NM_002163.1,1259-1277).
gatgtttccagatatttgt

SEQ ID NO: 329 - DNA, 19 bp, Homo sapiens
  siRNA target sequence for MYEF2 (NM_016132.2,205-223).
gctccaatggcgttaaaat

SEQ ID NO: 330 - DNA, 19 bp, Homo sapiens
  siRNA target sequence for MYEF2 (NM_016132.2,214-232).
gcgttaaaatggagaatga

SEQ ID NO: 331 - DNA, 19 bp, Homo sapiens
  siRNA target sequence for MYEF2 (NM_016132.2,287-305).
gaaggccaatagatttcat

SEQ ID NO: 332 - DNA, 19 bp, Homo sapiens
  siRNA target sequence for MYEF2 (NM_016132.2,347-365).
gggtccaaatcgtaacaga

SEQ ID NO: 333 - DNA, 19 bp, Homo sapiens
  siRNA target sequence for MYEF2 (NM_016132.2,351-369).
ccaaatcgtaacagagttt

SEQ ID NO: 334 - DNA, 19 bp, Homo sapiens
  siRNA target sequence for MYEF2 (NM_016132.2,357-375).
cgtaacagagttttcatta

SEQ ID NO: 335 - DNA, 19 bp, Homo sapiens
  siRNA target sequence for MYEF2 (NM_016132.2,376-394).
gcaacatcccatatgacat

SEQ ID NO: 336 - DNA, 19 bp, Homo sapiens
  siRNA target sequence for MYEF2 (NM_016132.2,392-410).
catgaaatggcaagctatt

SEQ ID NO: 337 - DNA, 19 bp, Homo sapiens
  siRNA target sequence for MYEF2 (NM_016132.2,400-418).
ggcaagctattaaagatct

SEQ ID NO: 338 - DNA, 19 bp, Homo sapiens
  siRNA target sequence for MYEF2 (NM_016132.2,465-483).
gatgcggaaggaaaatcaa

SEQ ID NO: 339 - DNA, 19 bp, Homo sapiens
  siRNA target sequence for MYEF2 (NM_016132.2,541-559).
ctatgaacaaatatgatct

SEQ ID NO: 340 - DNA, 19 bp, Homo sapiens
  siRNA target sequence for MYEF2 (NM_016132.2,562-580).
gtggaagaccccttaatat

SEQ ID NO: 341 - DNA, 19 bp, Homo sapiens
  siRNA target sequence for MYEF2 (NM_016132.2,568-586).
gaccccttaatattaaaga

SEQ ID NO: 342 - DNA, 19 bp, Homo sapiens
  siRNA target sequence for MYEF2 (NM_016132.2,623-641).
gcgaacaggaggatcattt

SEQ ID NO: 343 - DNA, 19 bp, Homo sapiens
  siRNA target sequence for MYEF2 (NM_016132.2,646-664).
gaggacacgtccctgatat

SEQ ID NO: 344 - DNA, 19 bp, Homo sapiens
  siRNA target sequence for MYEF2 (NM_016132.2,665-683).
gggatcagggttgatgaat

SEQ ID NO: 345 - DNA, 19 bp, Homo sapiens
  siRNA target sequence for MYEF2 (NM_016132.2,666-684).
ggatcagggttgatgaatt

SEQ ID NO: 346 - DNA, 19 bp, Homo sapiens
  siRNA target sequence for MYEF2 (NM_016132.2,667-685).
gatcagggttgatgaattt

SEQ ID NO: 347 - DNA, 19 bp, Homo sapiens
  siRNA target sequence for MYEF2 (NM_016132.2,835-853).
ctgtgaagcgggcagatat

SEQ ID NO: 348 - DNA, 19 bp, Homo sapiens
  siRNA target sequence for MYEF2 (NM_016132.2,842-860).
gcgggcagatattaaagaa

SEQ ID NO: 349 - DNA, 19 bp, Homo sapiens
  siRNA target sequence for MYEF2 (NM_016132.2,918-936).
gcagttcaagcaatttcta

SEQ ID NO: 350 - DNA, 19 bp, Homo sapiens
  siRNA target sequence for MYEF2 (NM_016132.2,921-939).
gttcaagcaatttctatgt

SEQ ID NO: 351 - DNA, 19 bp, Homo sapiens
  siRNA target sequence for MYEF2 (NM_016132.2,994-1012).
ctgttcctcatgaagagta

SEQ ID NO: 352 - DNA, 19 bp, Homo sapiens
  siRNA target sequence for MYEF2 (NM_016132.2,1080-1098).
ccgggtggacagcctatta

SEQ ID NO: 353 - DNA, 19 bp, Homo sapiens
  siRNA target sequence for MYEF2 (NM_016132.2,1082-1100).
gggtggacagcctattagt

SEQ ID NO: 354 - DNA, 19 bp, Homo sapiens
  siRNA target sequence for MYEF2 (NM_016132.2,1099-1117).
gtgccagccagttgaacat

SEQ ID NO: 355 - DNA, 19 bp, Homo sapiens
  siRNA target sequence for MYEF2 (NM_016132.2,1119-1137).
ggtggagtaatgggaaatt

SEQ ID NO: 356 - DNA, 19 bp, Homo sapiens
  siRNA target sequence for MYEF2 (NM_016132.2,1170-1188).
ggttttggaggaatgaata

SEQ ID NO: 357 - DNA, 19 bp, Homo sapiens
  siRNA target sequence for MYEF2 (NM_016132.2,1229-1247).
gaatagcatgggaggattt

SEQ ID NO: 358 - DNA, 19 bp, Homo sapiens
  siRNA target sequence for MYEF2 (NM_016132.2,1278-1296).
cgtggtgcgatgactagta

SEQ ID NO: 359 - DNA, 19 bp, Homo sapiens
  siRNA target sequence for MYEF2 (NM_016132.2,1294-1312).
gtagcatggagcgagattt

SEQ ID NO: 360 - DNA, 19 bp, Homo sapiens
  siRNA target sequence for MYEF2 (NM_016132.2,1298-1316).
catggagcgagattttgga

SEQ ID NO: 361 - DNA, 19 bp, Homo sapiens
  siRNA target sequence for MYEF2 (NM_016132.2,1315-1333).
gacgtggtgatattggaat

SEQ ID NO: 362 - DNA, 19 bp, Homo sapiens
  siRNA target sequence for MYEF2 (NM_016132.2,1317-1335).
cgtggtgatattggaataa

SEQ ID NO: 363 - DNA, 19 bp, Homo sapiens
  siRNA target sequence for MYEF2 (NM_016132.2,1363-1381).
gacttggcagtgcaatgat

SEQ ID NO: 364 - DNA, 19 bp, Homo sapiens
  siRNA target sequence for MYEF2 (NM_016132.2,1388-1406).
gtttgcaggaagaatagga

SEQ ID NO: 365 - DNA, 19 bp, Homo sapiens
  siRNA target sequence for MYEF2 (NM_016132.2,1395-1413).
ggaagaataggatcttcta

SEQ ID NO: 366 - DNA, 19 bp, Homo sapiens
  siRNA target sequence for MYEF2 (NM_016132.2,1396-1414).
gaagaataggatcttctaa

SEQ ID NO: 367 - DNA, 19 bp, Homo sapiens
  siRNA target sequence for MYEF2 (NM_016132.2,1422-1440).
ccagtaggatctggaataa

SEQ ID NO: 368 - DNA, 19 bp, Homo sapiens
  siRNA target sequence for MYEF2 (NM_016132.2,1499-1517).
gatgagttccagctttgat

SEQ ID NO: 369 - DNA, 19 bp, Homo sapiens
  siRNA target sequence for MYEF2 (NM_016132.2,1502-1520).
gagttccagctttgataga

SEQ ID NO: 370 - DNA, 19 bp, Homo sapiens
  siRNA target sequence for MYEF2 (NM_016132.2,1504-1522).
gttccagctttgatagaat

SEQ ID NO: 371 - DNA, 19 bp, Homo sapiens
  siRNA target sequence for MYEF2 (NM_016132.2,1528-1546).
caggtataggagctatact

SEQ ID NO: 372 - DNA, 19 bp, Homo sapiens
  siRNA target sequence for MYEF2 (NM_016132.2,1559-1577).
cgatatggatcgaggattt

SEQ ID NO: 373 - DNA, 19 bp, Homo sapiens
  siRNA target sequence for MYEF2 (NM_016132.2,1560-1578).
gatatggatcgaggatttt

SEQ ID NO: 374 - DNA, 19 bp, Homo sapiens
  siRNA target sequence for MYEF2 (NM_016132.2,1650-1668).
ctaccttttgacttgactt

SEQ ID NO: 375 - DNA, 19 bp, Homo sapiens
  siRNA target sequence for MYEF2 (NM_016132.2,1661-1679).
cttgacttggcagaaacta

SEQ ID NO: 376 - DNA, 19 bp, Homo sapiens
  siRNA target sequence for MYEF2 (NM_016132.2,1664-1682).
gacttggcagaaactaaaa

SEQ ID NO: 377 - DNA, 19 bp, Homo sapiens
  siRNA target sequence for MYEF2 (NM_016132.2,1693-1711).
gtcagtgtggtcatgtaat

SEQ ID NO: 378 - DNA, 19 bp, Homo sapiens
  siRNA target sequence for MYEF2 (NM_016132.2,1695-1713).
cagtgtggtcatgtaatgt

SEQ ID NO: 379 - DNA, 19 bp, Homo sapiens
  siRNA target sequence for MYEF2 (NM_016132.2,1755-1773).
ggaacagtcagatttgact

SEQ ID NO: 380 - DNA, 19 bp, Homo sapiens
  siRNA target sequence for MYEF2 (NM_016132.2,1808-1826).
gaatggcataaaaatcagt

SEQ ID NO: 381 - DNA, 19 bp, Homo sapiens
  siRNA target sequence for MYF5 (NM_005593.1,107-125).
cgtcccccgagggtgaatt

SEQ ID NO: 382 - DNA, 19 bp, Homo sapiens
  siRNA target sequence for MYF5 (NM_005593.1,108-126).
gtcccccgagggtgaattt

SEQ ID NO: 383 - DNA, 19 bp, Homo sapiens
  siRNA target sequence for MYF5 (NM_005593.1,462-480).
gcaggtggagaactactat

SEQ ID NO: 384 - DNA, 19 bp, Homo sapiens
  siRNA target sequence for MYF5 (NM_005593.1,463-481).
caggtggagaactactata

SEQ ID NO: 385 - DNA, 19 bp, Homo sapiens
  siRNA target sequence for MYF5 (NM_005593.1,535-553).
gatggcatgcccgaatgta

SEQ ID NO: 386 - DNA, 19 bp, Homo sapiens
  siRNA target sequence for MYF5 (NM_005593.1,538-556).
ggcatgcccgaatgtaaca

SEQ ID NO: 387 - DNA, 19 bp, Homo sapiens
  siRNA target sequence for MYF5 (NM_005593.1,540-558).
catgcccgaatgtaacagt

SEQ ID NO: 388 - DNA, 19 bp, Homo sapiens
  siRNA target sequence for MYF5 (NM_005593.1,594-612).
catctactgtcctgatgta

SEQ ID NO: 389 - DNA, 19 bp, Homo sapiens
  siRNA target sequence for MYF5 (NM_005593.1,597-615).
ctactgtcctgatgtatca

SEQ ID NO: 390 - DNA, 19 bp, Homo sapiens
  siRNA target sequence for MYF5 (NM_005593.1,605-623).
ctgatgtatcaaatgtata

SEQ ID NO: 391 - DNA, 19 bp, Homo sapiens
  siRNA target sequence for MYF5 (NM_005593.1,654-672).
ggattgcttatccaacata

SEQ ID NO: 392 - DNA, 19 bp, Homo sapiens
  siRNA target sequence for MYF5 (NM_005593.1,779-797).
ctagttccaggcttatcta

SEQ ID NO: 393 - DNA, 19 bp, Homo sapiens
  siRNA target sequence for MYOD1 (NM_002478.3,242-260).
ccacaacggacgacttcta

SEQ ID NO: 394 - DNA, 19 bp, Homo sapiens
  siRNA target sequence for MYOD1 (NM_002478.3,243-261).
cacaacggacgacttctat

SEQ ID NO: 395 - DNA, 19 bp, Homo sapiens
  siRNA target sequence for MYOD1 (NM_002478.3,245-263).
caacggacgacttctatga

SEQ ID NO: 396 - DNA, 19 bp, Homo sapiens
  siRNA target sequence for MYOD1 (NM_002478.3,575-593).
gcacgtcgagcaatccaaa

SEQ ID NO: 397 - DNA, 19 bp, Homo sapiens
  siRNA target sequence for MYOD1 (NM_002478.3,623-641).
gcaacgccatccgctatat

SEQ ID NO: 398 - DNA, 19 bp, Homo sapiens
  siRNA target sequence for MYOD1 (NM_002478.3,1103-1121).
cgaaccccaacccgatata

SEQ ID NO: 399 - DNA, 19 bp, Homo sapiens
  siRNA target sequence for NFIX (NM_002501.1,542-560).
gagtcacaatcaaagaact

SEQ ID NO: 400 - DNA, 19 bp, Homo sapiens
  siRNA target sequence for NFIX (NM_002501.1,593-611).
cggaatccggacaatcaga

SEQ ID NO: 401 - DNA, 19 bp, Homo sapiens
  siRNA target sequence for NFIX (NM_002501.1,594-612).
ggaatccggacaatcagat

SEQ ID NO: 402 - DNA, 19 bp, Homo sapiens
  siRNA target sequence for NFIX (NM_002501.1,595-613).
gaatccggacaatcagata

SEQ ID NO: 403 - DNA, 19 bp, Homo sapiens
  siRNA target sequence for NFIX (NM_002501.1,748-766).
gcatcagggcccaacttct

SEQ ID NO: 404 - DNA, 19 bp, Homo sapiens
  siRNA target sequence for NFIX (NM_002501.1,902-920).
ctgttgatgacgtgttcta

SEQ ID NO: 405 - DNA, 19 bp, Homo sapiens
  siRNA target sequence for NFIX (NM_002501.1,1171-1189).
cagtcgagcccgtatttca

SEQ ID NO: 406 - DNA, 19 bp, Homo sapiens
  siRNA target sequence for NR5A2 (NM_003822.2,230-248).
gggatttacaagagtcttt

SEQ ID NO: 407 - DNA, 19 bp, Homo sapiens
  siRNA target sequence for NR5A2 (NM_003822.2,231-249).
ggatttacaagagtcttta

SEQ ID NO: 408 - DNA, 19 bp, Homo sapiens
  siRNA target sequence for NR5A2 (NM_003822.2,232-250).
gatttacaagagtctttaa

SEQ ID NO: 409 - DNA, 19 bp, Homo sapiens
  siRNA target sequence for NR5A2 (NM_003822.2,252-270).
gcacggacttacacctatt

SEQ ID NO: 410 - DNA, 19 bp, Homo sapiens
  siRNA target sequence for NR5A2 (NM_003822.2,256-274).
ggacttacacctattgtgt

SEQ ID NO: 411 - DNA, 19 bp, Homo sapiens
  siRNA target sequence for NR5A2 (NM_003822.2,265-283).
cctattgtgtctcaattta

SEQ ID NO: 412 - DNA, 19 bp, Homo sapiens
  siRNA target sequence for NR5A2 (NM_003822.2,288-306).
ggtgaattactcctatgat

SEQ ID NO: 413 - DNA, 19 bp, Homo sapiens
  siRNA target sequence for NR5A2 (NM_003822.2,326-344).
gtcccgtgtgtggagataa

SEQ ID NO: 414 - DNA, 19 bp, Homo sapiens
  siRNA target sequence for NR5A2 (NM_003822.2,329-347).
ccgtgtgtggagataaagt

SEQ ID NO: 415 - DNA, 19 bp, Homo sapiens
  siRNA target sequence for NR5A2 (NM_003822.2,331-349).
gtgtgtggagataaagtgt

SEQ ID NO: 416 - DNA, 19 bp, Homo sapiens
  siRNA target sequence for NR5A2 (NM_003822.2,402-420).
gcgaacagtccaaaataat

SEQ ID NO: 417 - DNA, 19 bp, Homo sapiens
  siRNA target sequence for NR5A2 (NM_003822.2,403-421).
cgaacagtccaaaataata

SEQ ID NO: 418 - DNA, 19 bp, Homo sapiens
  siRNA target sequence for NR5A2 (NM_003822.2,482-500).
gtccttactgtcgttttca

SEQ ID NO: 419 - DNA, 19 bp, Homo sapiens
  siRNA target sequence for NR5A2 (NM_003822.2,485-503).
cttactgtcgttttcaaaa

SEQ ID NO: 420 - DNA, 19 bp, Homo sapiens
  siRNA target sequence for NR5A2 (NM_003822.2,491-509).
gtcgttttcaaaaatgtct

SEQ ID NO: 421 - DNA, 19 bp, Homo sapiens
  siRNA target sequence for NR5A2 (NM_003822.2,553-571).
cgtggaggaaggaataagt

SEQ ID NO: 422 - DNA, 19 bp, Homo sapiens
  siRNA target sequence for NR5A2 (NM_003822.2,629-647).
gagccaatggacttaagct

SEQ ID NO: 423 - DNA, 19 bp, Homo sapiens
  siRNA target sequence for NR5A2 (NM_003822.2,777-795).
cagaagtccctttgtaaca

SEQ ID NO: 424 - DNA, 19 bp, Homo sapiens
  siRNA target sequence for NR5A2 (NM_003822.2,797-815).
cccccattagcatgacaat

SEQ ID NO: 425 - DNA, 19 bp, Homo sapiens
  siRNA target sequence for NR5A2 (NM_003822.2,834-852).
gcaaggttaccaaacatat

SEQ ID NO: 426 - DNA, 19 bp, Homo sapiens
  siRNA target sequence for NR5A2 (NM_003822.2,905-923).
gctcacccgagtccataat

SEQ ID NO: 427 - DNA, 19 bp, Homo sapiens
  siRNA target sequence for NR5A2 (NM_003822.2,915-933).
gtccataatgggctattca

SEQ ID NO: 428 - DNA, 19 bp, Homo sapiens
  siRNA target sequence for NR5A2 (NM_003822.2,924-942).
gggctattcatatatggat

SEQ ID NO: 429 - DNA, 19 bp, Homo sapiens
  siRNA target sequence for NR5A2 (NM_003822.2,965-983).
caagcatcccacatctgat

SEQ ID NO: 430 - DNA, 19 bp, Homo sapiens
  siRNA target sequence for NR5A2 (NM_003822.2,968-986).
gcatcccacatctgatact

SEQ ID NO: 431 - DNA, 19 bp, Homo sapiens
  siRNA target sequence for NR5A2 (NM_003822.2,1015-1033).
cctcaagtccaggctaaaa

SEQ ID NO: 432 - DNA, 19 bp, Homo sapiens
  siRNA target sequence for NR5A2 (NM_003822.2,1016-1034).
ctcaagtccaggctaaaat

SEQ ID NO: 433 - DNA, 19 bp, Homo sapiens
  siRNA target sequence for NR5A2 (NM_003822.2,1018-1036).
caagtccaggctaaaatca

SEQ ID NO: 434 - DNA, 19 bp, Homo sapiens
  siRNA target sequence for NR5A2 (NM_003822.2,1141-1159).
gagtgggccaggagtagta

SEQ ID NO: 435 - DNA, 19 bp, Homo sapiens
  siRNA target sequence for NR5A2 (NM_003822.2,1147-1165).
gccaggagtagtatcttct

SEQ ID NO: 436 - DNA, 19 bp, Homo sapiens
  siRNA target sequence for NR5A2 (NM_003822.2,1148-1166).
ccaggagtagtatcttctt

SEQ ID NO: 437 - DNA, 19 bp, Homo sapiens
  siRNA target sequence for NR5A2 (NM_003822.2,1211-1229).
gctggagtgagctcttaat

SEQ ID NO: 438 - DNA, 19 bp, Homo sapiens
  siRNA target sequence for NR5A2 (NM_003822.2,1214-1232).
ggagtgagctcttaatcct

SEQ ID NO: 439 - DNA, 19 bp, Homo sapiens
  siRNA target sequence for NR5A2 (NM_003822.2,1247-1265).
gacaagtggtacatggaaa

SEQ ID NO: 440 - DNA, 19 bp, Homo sapiens
  siRNA target sequence for NR5A2 (NM_003822.2,1291-1309).
gggcaacaagtggactatt

SEQ ID NO: 441 - DNA, 19 bp, Homo sapiens
  siRNA target sequence for NR5A2 (NM_003822.2,1297-1315).
caagtggactattccataa

SEQ ID NO: 442 - DNA, 19 bp, Homo sapiens
  siRNA target sequence for NR5A2 (NM_003822.2,1303-1321).
gactattccataatagcat

SEQ ID NO: 443 - DNA, 19 bp, Homo sapiens
  siRNA target sequence for NR5A2 (NM_003822.2,1385-1403).
gttctctccagtttgatca

SEQ ID NO: 444 - DNA, 19 bp, Homo sapiens
  siRNA target sequence for NR5A2 (NM_003822.2,1399-1417).
gatcaacgagagttcgtat

SEQ ID NO: 445 - DNA, 19 bp, Homo sapiens
  siRNA target sequence for NR5A2 (NM_003822.2,1408-1426).
gagttcgtatgtctgaaat

SEQ ID NO: 446 - DNA, 19 bp, Homo sapiens
  siRNA target sequence for NR5A2 (NM_003822.2,1428-1446).
cttggtgctctttagttta

SEQ ID NO: 447 - DNA, 19 bp, Homo sapiens
  siRNA target sequence for NR5A2 (NM_003822.2,1431-1449).
ggtgctctttagtttagat

SEQ ID NO: 448 - DNA, 19 bp, Homo sapiens
  siRNA target sequence for NR5A2 (NM_003822.2,1437-1455).
ctttagtttagatgtcaaa

SEQ ID NO: 449 - DNA, 19 bp, Homo sapiens
  siRNA target sequence for NR5A2 (NM_003822.2,1442-1460).
gtttagatgtcaaaaacct

SEQ ID NO: 450 - DNA, 19 bp, Homo sapiens
  siRNA target sequence for NR5A2 (NM_003822.2,1508-1526).
ccctgctggactacacaat

SEQ ID NO: 451 - DNA, 19 bp, Homo sapiens
  siRNA target sequence for NR5A2 (NM_003822.2,1513-1531).
ctggactacacaatgtgta

SEQ ID NO: 452 - DNA, 19 bp, Homo sapiens
  siRNA target sequence for NR5A2 (NM_003822.2,1538-1556).
cgcagcagacagagaaatt

SEQ ID NO: 453 - DNA, 19 bp, Homo sapiens
  siRNA target sequence for NR5A2 (NM_003822.2,1598-1616).
gtatgcaggctgaagaata

SEQ ID NO: 454 - DNA, 19 bp, Homo sapiens
  siRNA target sequence for NR5A2 (NM_003822.2,1638-1656).
cggggatgtgccctataat

SEQ ID NO: 455 - DNA, 19 bp, Homo sapiens
  siRNA target sequence for NR5A2 (NM_003822.2,1639-1657).
ggggatgtgccctataata

SEQ ID NO: 456 - DNA, 19 bp, Homo sapiens
  siRNA target sequence for NR5A2 (NM_003822.2,1640-1658).
gggatgtgccctataataa

SEQ ID NO: 457 - DNA, 19 bp, Homo sapiens
  siRNA target sequence for PURA (NM_005859.2,727-745).
ccttgactgtggacaacaa

SEQ ID NO: 458 - DNA, 19 bp, Homo sapiens
  siRNA target sequence for RFX1 (NM_002918.2,95-113).
ggcaacacaggcgtatact

SEQ ID NO: 459 - DNA, 19 bp, Homo sapiens
  siRNA target sequence for RFX1 (NM_002918.2,97-115).
caacacaggcgtatactga

SEQ ID NO: 460 - DNA, 19 bp, Homo sapiens
  siRNA target sequence for RFX1 (NM_002918.2,240-258).
cctcagccccaatatgtca

SEQ ID NO: 461 - DNA, 19 bp, Homo sapiens
  siRNA target sequence for RFX1 (NM_002918.2,1357-1375).
gcagtgccagccagtctta

SEQ ID NO: 462 - DNA, 19 bp, Homo sapiens
  siRNA target sequence for RFX1 (NM_002918.2,1412-1430).
gtggctcctggacaactat

SEQ ID NO: 463 - DNA, 19 bp, Homo sapiens
  siRNA target sequence for RFX1 (NM_002918.2,1416-1434).
ctcctggacaactatgaga

SEQ ID NO: 464 - DNA, 19 bp, Homo sapiens
  siRNA target sequence for RFX1 (NM_002918.2,1808-1826).
gtaccagcaatttttggat

SEQ ID NO: 465 - DNA, 19 bp, Homo sapiens
  siRNA target sequence for RFX1 (NM_002918.2,2039-2057).
gccaccgctggctgtacat

SEQ ID NO: 466 - DNA, 19 bp, Homo sapiens
  siRNA target sequence for RFX1 (NM_002918.2,2041-2059).
caccgctggctgtacatga

SEQ ID NO: 467 - DNA, 19 bp, Homo sapiens
  siRNA target sequence for RFX1 (NM_002918.2,2216-2234).
ccaagcgatccggaacttt

SEQ ID NO: 468 - DNA, 19 bp, Homo sapiens
  siRNA target sequence for RFX1 (NM_002918.2,2845-2863).
ccctggaccccgacaaaga

SEQ ID NO: 469 - DNA, 19 bp, Homo sapiens
  siRNA target sequence for RFX3 (NM_002919.2,408-426).
gcaagtaccagtacaacaa

SEQ ID NO: 470 - DNA, 19 bp, Homo sapiens
  siRNA target sequence for RFX3 (NM_002919.2,453-471).
gcaggtacaacatgtctat

SEQ ID NO: 471 - DNA, 19 bp, Homo sapiens
  siRNA target sequence for RFX3 (NM_002919.2,473-491).
ccgctcaggtgcagtatgt

SEQ ID NO: 472 - DNA, 19 bp, Homo sapiens
  siRNA target sequence for RFX3 (NM_002919.2,496-514).
ggaagcgatactgtctata

SEQ ID NO: 473 - DNA, 19 bp, Homo sapiens
  siRNA target sequence for RFX3 (NM_002919.2,501-519).
cgatactgtctataccaat

SEQ ID NO: 474 - DNA, 19 bp, Homo sapiens
  siRNA target sequence for RFX3 (NM_002919.2,520-538).
ggagcaatccgaacaacaa

SEQ ID NO: 475 - DNA, 19 bp, Homo sapiens
  siRNA target sequence for RFX3 (NM_002919.2,529-547).
cgaacaacaacgtatcctt

SEQ ID NO: 476 - DNA, 19 bp, Homo sapiens
  siRNA target sequence for RFX3 (NM_002919.2,530-548).
gaacaacaacgtatcctta

SEQ ID NO: 477 - DNA, 19 bp, Homo sapiens
  siRNA target sequence for RFX3 (NM_002919.2,561-579).
gatgtacagccaaaatact

SEQ ID NO: 478 - DNA, 19 bp, Homo sapiens
  siRNA target sequence for RFX3 (NM_002919.2,704-722).
ctggaggaacctatctgat

SEQ ID NO: 479 - DNA, 19 bp, Homo sapiens
  siRNA target sequence for RFX3 (NM_002919.2,771-789).
ggcctccccagcgacaatt

SEQ ID NO: 480 - DNA, 19 bp, Homo sapiens
  siRNA target sequence for RFX3 (NM_002919.2,774-792).
ctccccagcgacaattgaa

SEQ ID NO: 481 - DNA, 19 bp, Homo sapiens
  siRNA target sequence for RFX3 (NM_002919.2,776-794).
ccccagcgacaattgaaat

SEQ ID NO: 482 - DNA, 19 bp, Homo sapiens
  siRNA target sequence for RFX3 (NM_002919.2,797-815).
cgattgagacgctgcaaaa

SEQ ID NO: 483 - DNA, 19 bp, Homo sapiens
  siRNA target sequence for RFX3 (NM_002919.2,941-959).
gacactgtcaggaacacaa

SEQ ID NO: 484 - DNA, 19 bp, Homo sapiens
  siRNA target sequence for RFX3 (NM_002919.2,957-975).
caaactggacccagtcaat

SEQ ID NO: 485 - DNA, 19 bp, Homo sapiens
  siRNA target sequence for RFX3 (NM_002919.2,1040-1058).
ctagaggaaactccaaata

SEQ ID NO: 486 - DNA, 19 bp, Homo sapiens
  siRNA target sequence for RFX3 (NM_002919.2,1083-1101).
gccagattcccctcttaat

SEQ ID NO: 487 - DNA, 19 bp, Homo sapiens
  siRNA target sequence for RFX3 (NM_002919.2,1119-1137).
gcagtatatggctatgaga

SEQ ID NO: 488 - DNA, 19 bp, Homo sapiens
  siRNA target sequence for RFX3 (NM_002919.2,1232-1250).
catctgttgagcaaactgt

SEQ ID NO: 489 - DNA, 19 bp, Homo sapiens
  siRNA target sequence for RFX3 (NM_002919.2,1235-1253).
ctgttgagcaaactgtaat

SEQ ID NO: 490 - DNA, 19 bp, Homo sapiens
  siRNA target sequence for RFX3 (NM_002919.2,1335-1353).
gccagatggtactaccttt

SEQ ID NO: 491 - DNA, 19 bp, Homo sapiens
  siRNA target sequence for RFX3 (NM_002919.2,1343-1361).
gtactacctttgaggatat

SEQ ID NO: 492 - DNA, 19 bp, Homo sapiens
  siRNA target sequence for RFX3 (NM_002919.2,1346-1364).
ctacctttgaggatatcaa

SEQ ID NO: 493 - DNA, 19 bp, Homo sapiens
  siRNA target sequence for RFX3 (NM_002919.2,1365-1383).
gtcactgcagagtctttat

SEQ ID NO: 494 - DNA, 19 bp, Homo sapiens
  siRNA target sequence for RFX3 (NM_002919.2,1387-1405).
gagcactgtgaggcaatat

SEQ ID NO: 495 - DNA, 19 bp, Homo sapiens
  siRNA target sequence for RFX3 (NM_002919.2,1400-1418).
caatattggacgttgttgt

SEQ ID NO: 496 - DNA, 19 bp, Homo sapiens
  siRNA target sequence for RFX3 (NM_002919.2,1426-1444).
caatttagcctgatagaaa

SEQ ID NO: 497 - DNA, 19 bp, Homo sapiens
  siRNA target sequence for RFX3 (NM_002919.2,1511-1529).
cgagcaatctgagtgaaat

SEQ ID NO: 498 - DNA, 19 bp, Homo sapiens
  siRNA target sequence for RFX3 (NM_002919.2,1543-1561).
ccgaaagcaaagctgataa

SEQ ID NO: 499 - DNA, 19 bp, Homo sapiens
  siRNA target sequence for RFX3 (NM_002919.2,1573-1591).
catgagtctatcctgaaat

SEQ ID NO: 500 - DNA, 19 bp, Homo sapiens
  siRNA target sequence for RFX3 (NM_002919.2,1585-1603).
ctgaaatggatgtgtaact

SEQ ID NO: 501 - DNA, 19 bp, Homo sapiens
  siRNA target sequence for RFX3 (NM_002919.2,1647-1665).
cgacgtccttagacctatt

SEQ ID NO: 502 - DNA, 19 bp, Homo sapiens
  siRNA target sequence for RFX3 (NM_002919.2,1650-1668).
cgtccttagacctattcct

SEQ ID NO: 503 - DNA, 19 bp, Homo sapiens
  siRNA target sequence for RFX3 (NM_002919.2,1679-1697).
cccaagccattcgaaattt

SEQ ID NO: 504 - DNA, 19 bp, Homo sapiens
  siRNA target sequence for RFX3 (NM_002919.2,1684-1702).
gccattcgaaattttgcaa

SEQ ID NO: 505 - DNA, 19 bp, Homo sapiens
  siRNA target sequence for RFX3 (NM_002919.2,1685-1703).
ccattcgaaattttgcaaa

SEQ ID NO: 506 - DNA, 19 bp, Homo sapiens
  siRNA target sequence for RFX3 (NM_002919.2,1764-1782).
caaggttgccgctgtaagt

SEQ ID NO: 507 - DNA, 19 bp, Homo sapiens
  siRNA target sequence for RFX3 (NM_002919.2,1805-1823).
gatacacgtcgcttaatca

SEQ ID NO: 508 - DNA, 19 bp, Homo sapiens
  siRNA target sequence for RFX3 (NM_002919.2,1964-1982).
gactagaaacagacttcaa

SEQ ID NO: 509 - DNA, 19 bp, Homo sapiens
  siRNA target sequence for RFX3 (NM_002919.2,1966-1984).
ctagaaacagacttcaaga

SEQ ID NO: 510 - DNA, 19 bp, Homo sapiens
  siRNA target sequence for RFX3 (NM_002919.2,2018-2036).
gggctgcgtggcttgacaa

SEQ ID NO: 511 - DNA, 19 bp, Homo sapiens
  siRNA target sequence for RFX3 (NM_002919.2,2019-2037).
ggctgcgtggcttgacaat

SEQ ID NO: 512 - DNA, 19 bp, Homo sapiens
  siRNA target sequence for RFX3 (NM_002919.2,2021-2039).
ctgcgtggcttgacaatgt

SEQ ID NO: 513 - DNA, 19 bp, Homo sapiens
  siRNA target sequence for RFX3 (NM_002919.2,2024-2042).
cgtggcttgacaatgtgat

SEQ ID NO: 514 - DNA, 19 bp, Homo sapiens
  siRNA target sequence for RFX3 (NM_002919.2,2093-2111).
ccaggcagtttctgctaaa

SEQ ID NO: 515 - DNA, 19 bp, Homo sapiens
  siRNA target sequence for RFX3 (NM_002919.2,2094-2112).
caggcagtttctgctaaaa

SEQ ID NO: 516 - DNA, 19 bp, Homo sapiens
  siRNA target sequence for RFX3 (NM_002919.2,2104-2122).
ctgctaaaatggtctttct

SEQ ID NO: 517 - DNA, 19 bp, Homo sapiens
  siRNA target sequence for RFX3 (NM_002919.2,2107-2125).
ctaaaatggtctttctaca

SEQ ID NO: 518 - DNA, 19 bp, Homo sapiens
  siRNA target sequence for RFX3 (NM_002919.2,2134-2152).
gttattcgggacttaacct

SEQ ID NO: 519 - DNA, 19 bp, Homo sapiens
  siRNA target sequence for RFX3 (NM_002919.2,2192-2210).
gtctactctacgacgaata

SEQ ID NO: 520 - DNA, 19 bp, Homo sapiens
  siRNA target sequence for RFX3 (NM_002919.2,2194-2212).
ctactctacgacgaatata

SEQ ID NO: 521 - DNA, 19 bp, Homo sapiens
  siRNA target sequence for RFX3 (NM_002919.2,2199-2217).
ctacgacgaatatatgttt

SEQ ID NO: 522 - DNA, 19 bp, Homo sapiens
  siRNA target sequence for RFX3 (NM_002919.2,2214-2232).
gttttacttagtagaacat

SEQ ID NO: 523 - DNA, 19 bp, Homo sapiens
  siRNA target sequence for RFX3 (NM_134428.1,2274-2292).
gggcgagtttggtgattta

SEQ ID NO: 524 - DNA, 19 bp, Homo sapiens
  siRNA target sequence for RFX3 (NM_134428.1,2275-2293).
ggcgagtttggtgatttaa

SEQ ID NO: 525 - DNA, 19 bp, Homo sapiens
  siRNA target sequence for RFX3 (NM_134428.1,2276-2294).
gcgagtttggtgatttaaa

SEQ ID NO: 526 - DNA, 19 bp, Homo sapiens
  siRNA target sequence for RFX3 (NM_134428.1,2485-2503).
cacagcgagcacattgtca

SEQ ID NO: 527 - DNA, 19 bp, Homo sapiens
  siRNA target sequence for RFX3 (NM_134428.1,2491-2509).
gagcacattgtcacaagta

SEQ ID NO: 528 - DNA, 19 bp, Homo sapiens
  siRNA target sequence for RFX3 (NM_134428.1,2493-2511).
gcacattgtcacaagtact

SEQ ID NO: 529 - DNA, 19 bp, Homo sapiens
  siRNA target sequence for RFX3 (NM_134428.1,2526-2544).
gtgcagcgctacaggaaat

SEQ ID NO: 530 - DNA, 19 bp, Homo sapiens
  siRNA target sequence for RFX3 (NM_134428.1,2531-2549).
gcgctacaggaaataccta

SEQ ID NO: 531 - DNA, 19 bp, Homo sapiens
  siRNA target sequence for TFAP2A (NM_003220.1,155-173).
gggcactgtaggtcaatct

SEQ ID NO: 532 - DNA, 19 bp, Homo sapiens
  siRNA target sequence for TFAP2A (NM_003220.1,546-564).
gtagaagacccgggtatta

SEQ ID NO: 533 - DNA, 19 bp, Homo sapiens
  siRNA target sequence for TFAP2A (NM_003220.1,549-567).
gaagacccgggtattaaca

SEQ ID NO: 534 - DNA, 19 bp, Homo sapiens
  siRNA target sequence for TFAP2A (NM_003220.1,571-589).
cagatcaaactgtaattaa

SEQ ID NO: 535 - DNA, 19 bp, Homo sapiens
  siRNA target sequence for TFAP2A (NM_003220.1,630-648).
gtctccgccatccctatta

SEQ ID NO: 536 - DNA, 19 bp, Homo sapiens
  siRNA target sequence for TFAP2A (NM_003220.1,634-652).
ccgccatccctattaacaa

SEQ ID NO: 537 - DNA, 19 bp, Homo sapiens
  siRNA target sequence for TFAP2A (NM_003220.1,686-704).
cgaagtcttctgttcagtt

SEQ ID NO: 538 - DNA, 19 bp, Homo sapiens
  siRNA target sequence for TFAP2A (NM_003220.1,819-837).
ctccggagggcgaagtcta

SEQ ID NO: 539 - DNA, 19 bp, Homo sapiens
  siRNA target sequence for TFAP2A (NM_003220.1,821-839).
ccggagggcgaagtctaaa

SEQ ID NO: 540 - DNA, 19 bp, Homo sapiens
  siRNA target sequence for TFAP2A (NM_003220.1,822-840).
cggagggcgaagtctaaaa

SEQ ID NO: 541 - DNA, 19 bp, Homo sapiens
  siRNA target sequence for TFAP2A (NM_003220.1,823-841).
ggagggcgaagtctaaaaa

SEQ ID NO: 542 - DNA, 19 bp, Homo sapiens
  siRNA target sequence for TFAP2A (NM_003220.1,824-842).
gagggcgaagtctaaaaat

SEQ ID NO: 543 - DNA, 19 bp, Homo sapiens
  siRNA target sequence for TFAP2A (NM_003220.1,867-885).
ctggacaaaataggattaa

SEQ ID NO: 544 - DNA, 19 bp, Homo sapiens
  siRNA target sequence for TFAP2A (NM_003220.1,890-908).
gcctgcagggagacgtaaa

SEQ ID NO: 545 - DNA, 19 bp, Homo sapiens
  siRNA target sequence for TFAP2A (NM_003220.1,903-921).
cgtaaagctgccaacgtta

SEQ ID NO: 546 - DNA, 19 bp, Homo sapiens
  siRNA target sequence for TFAP2A (NM_003220.1,980-998).
cgtgtgcgaaaccgaattt

SEQ ID NO: 547 - DNA, 19 bp, Homo sapiens
  siRNA target sequence for TFAP2A (NM_003220.1,1070-1088).
catgctcctggctacaaaa

SEQ ID NO: 548 - DNA, 19 bp, Homo sapiens
  siRNA target sequence for TFAP4 (NM_003223.1,289-307).
gtgccctctttgcaacatt

SEQ ID NO: 549 - DNA, 19 bp, Homo sapiens
  siRNA target sequence for TFAP4 (NM_003223.1,292-310).
ccctctttgcaacatttca

SEQ ID NO: 550 - DNA, 19 bp, Homo sapiens
  siRNA target sequence for TFAP4 (NM_003223.1,529-547).
cagacagccgagtacatct

SEQ ID NO: 551 - DNA, 19 bp, Homo sapiens
  siRNA target sequence for TFAP4 (NM_003223.1,1046-1064).
ccacatcccggcaaaatct

SEQ ID NO: 552 - DNA, 19 bp, Homo sapiens
  siRNA target sequence for AATF (NM_012138.2,274-292).
ctgctgccagggtgattga

SEQ ID NO: 553 - DNA, 19 bp, Homo sapiens
  siRNA target sequence for AATF (NM_012138.2,329-347).
cctagtagtgggtagcatt

SEQ ID NO: 554 - DNA, 19 bp, Homo sapiens
  siRNA target sequence for AATF (NM_012138.2,330-348).
ctagtagtgggtagcatta

SEQ ID NO: 555 - DNA, 19 bp, Homo sapiens
  siRNA target sequence for AATF (NM_012138.2,333-351).
gtagtgggtagcattagaa

SEQ ID NO: 556 - DNA, 19 bp, Homo sapiens
  siRNA target sequence for AATF (NM_012138.2,369-387).
ctcttggacacggacaaaa

SEQ ID NO: 557 - DNA, 19 bp, Homo sapiens
  siRNA target sequence for AATF (NM_012138.2,374-392).
ggacacggacaaaaggtat

SEQ ID NO: 558 - DNA, 19 bp, Homo sapiens
  siRNA target sequence for AATF (NM_012138.2,375-393).
gacacggacaaaaggtatt

SEQ ID NO: 559 - DNA, 19 bp, Homo sapiens
  siRNA target sequence for AATF (NM_012138.2,396-414).
ggcaaaaccacctctagaa

SEQ ID NO: 560 - DNA, 19 bp, Homo sapiens
  siRNA target sequence for AATF (NM_012138.2,397-415).
gcaaaaccacctctagaaa

SEQ ID NO: 561 - DNA, 19 bp, Homo sapiens
  siRNA target sequence for AATF (NM_012138.2,626-644).
cagtgtccagagtatcagt

SEQ ID NO: 562 - DNA, 19 bp, Homo sapiens
  siRNA target sequence for AATF (NM_012138.2,637-655).
gtatcagtgactttgagaa

SEQ ID NO: 563 - DNA, 19 bp, Homo sapiens
  siRNA target sequence for AATF (NM_012138.2,801-819).
gtggtgatgaccttctcta

SEQ ID NO: 564 - DNA, 19 bp, Homo sapiens
  siRNA target sequence for AATF (NM_012138.2,817-835).
ctagtgtcaaagtttctga

SEQ ID NO: 565 - DNA, 19 bp, Homo sapiens
  siRNA target sequence for AATF (NM_012138.2,995-1013).
cagtgccctgaaaaatagt

SEQ ID NO: 566 - DNA, 19 bp, Homo sapiens
  siRNA target sequence for AATF (NM_012138.2,1074-1092).
cagtacccagacactagat

SEQ ID NO: 567 - DNA, 19 bp, Homo sapiens
  siRNA target sequence for AATF (NM_012138.2,1081-1099).
cagacactagatatctagt

SEQ ID NO: 568 - DNA, 19 bp, Homo sapiens
  siRNA target sequence for AATF (NM_012138.2,1085-1103).
cactagatatctagtagat

SEQ ID NO: 569 - DNA, 19 bp, Homo sapiens
  siRNA target sequence for AATF (NM_012138.2,1241-1259).
gcgctttgccgactttaca

SEQ ID NO: 570 - DNA, 19 bp, Homo sapiens
  siRNA target sequence for AATF (NM_012138.2,1243-1261).
gctttgccgactttacagt

SEQ ID NO: 571 - DNA, 19 bp, Homo sapiens
  siRNA target sequence for AATF (NM_012138.2,1267-1285).
ggaaccgcacacttcagaa

SEQ ID NO: 572 - DNA, 19 bp, Homo sapiens
  siRNA target sequence for AATF (NM_012138.2,1268-1286).
gaaccgcacacttcagaaa

SEQ ID NO: 573 - DNA, 19 bp, Homo sapiens
  siRNA target sequence for AATF (NM_012138.2,1338-1356).
gcctttgaacgctcaatct

SEQ ID NO: 574 - DNA, 19 bp, Homo sapiens
  siRNA target sequence for AATF (NM_012138.2,1339-1357).
cctttgaacgctcaatctt

SEQ ID NO: 575 - DNA, 19 bp, Homo sapiens
  siRNA target sequence for AATF (NM_012138.2,1360-1378).
ctcagatcgaccatattct

SEQ ID NO: 576 - DNA, 19 bp, Homo sapiens
  siRNA target sequence for AATF (NM_012138.2,1382-1400).
ggacaaagagagattactt

SEQ ID NO: 577 - DNA, 19 bp, Homo sapiens
  siRNA target sequence for AATF (NM_012138.2,1412-1430).
gaccaagcgctctgtctat

SEQ ID NO: 578 - DNA, 19 bp, Homo sapiens
  siRNA target sequence for AATF (NM_012138.2,1421-1439).
ctctgtctatcgagttctt

SEQ ID NO: 579 - DNA, 19 bp, Homo sapiens
  siRNA target sequence for AATF (NM_012138.2,1651-1669).
ggcttgcaatccagaagtt

SEQ ID NO: 580 - DNA, 19 bp, Homo sapiens
  siRNA target sequence for AATF (NM_012138.2,1652-1670).
gcttgcaatccagaagtta

SEQ ID NO: 581 - DNA, 19 bp, Homo sapiens
  siRNA target sequence for AATF (NM_012138.2,1656-1674).
gcaatccagaagttacgaa

SEQ ID NO: 582 - DNA, 19 bp, Homo sapiens
  siRNA target sequence for AATF (NM_012138.2,1662-1680).
cagaagttacgaagcaaaa

SEQ ID NO: 583 - DNA, 19 bp, Homo sapiens
  siRNA target sequence for AATF (NM_012138.2,1675-1693).
gcaaaatccacaaaaaagt

SEQ ID NO: 584 - DNA, 19 bp, Homo sapiens
  siRNA target sequence for AATF (NM_012138.2,1717-1735).
ggaaacttcggtttcatgt

SEQ ID NO: 585 - DNA, 19 bp, Homo sapiens
  siRNA target sequence for ADNP (NM_015339.2,363-381).
caacaatcttggcagttta

SEQ ID NO: 586 - DNA, 19 bp, Homo sapiens
  siRNA target sequence for ADNP (NM_015339.2,366-384).
caatcttggcagtttaaga

SEQ ID NO: 587 - DNA, 19 bp, Homo sapiens
  siRNA target sequence for ADNP (NM_015339.2,388-406).
gcccggaaaactgtgaaaa

SEQ ID NO: 588 - DNA, 19 bp, Homo sapiens
  siRNA target sequence for ADNP (NM_015339.2,390-408).
ccggaaaactgtgaaaaaa

SEQ ID NO: 589 - DNA, 19 bp, Homo sapiens
  siRNA target sequence for ADNP (NM_015339.2,420-438).
cattgggttggaatactgt

SEQ ID NO: 590 - DNA, 19 bp, Homo sapiens
  siRNA target sequence for ADNP (NM_015339.2,517-535).
ctgtgggacccatcactta

SEQ ID NO: 591 - DNA, 19 bp, Homo sapiens
  siRNA target sequence for ADNP (NM_015339.2,521-539).
gggacccatcacttacgaa

SEQ ID NO: 592 - DNA, 19 bp, Homo sapiens
  siRNA target sequence for ADNP (NM_015339.2,522-540).
ggacccatcacttacgaaa

SEQ ID NO: 593 - DNA, 19 bp, Homo sapiens
  siRNA target sequence for ADNP (NM_015339.2,527-545).
catcacttacgaaaaacca

SEQ ID NO: 594 - DNA, 19 bp, Homo sapiens
  siRNA target sequence for ADNP (NM_015339.2,546-564).
ggactatcggacaaaacct

SEQ ID NO: 595 - DNA, 19 bp, Homo sapiens
  siRNA target sequence for ADNP (NM_015339.2,547-565).
gactatcggacaaaacctt

SEQ ID NO: 596 - DNA, 19 bp, Homo sapiens
  siRNA target sequence for ADNP (NM_015339.2,570-588).
ctgcagcgcttgtccattt

SEQ ID NO: 597 - DNA, 19 bp, Homo sapiens
  siRNA target sequence for ADNP (NM_015339.2,603-621).
ctctgcctacaaaagtcat

SEQ ID NO: 598 - DNA, 19 bp, Homo sapiens
  siRNA target sequence for ADNP (NM_015339.2,624-642).
ccgcaatgtccatagtgaa

SEQ ID NO: 599 - DNA, 19 bp, Homo sapiens
  siRNA target sequence for ADNP (NM_015339.2,823-841).
gtagagcaagctgtttatt

SEQ ID NO: 600 - DNA, 19 bp, Homo sapiens
  siRNA target sequence for ADNP (NM_015339.2,861-879).
ccgagatcctctttatgaa

SEQ ID NO: 601 - DNA, 19 bp, Homo sapiens
  siRNA target sequence for ADNP (NM_015339.2,868-886).
cctctttatgaaatagtta

SEQ ID NO: 602 - DNA, 19 bp, Homo sapiens
  siRNA target sequence for ADNP (NM_015339.2,988-1006).
gcccgagaagagagtagta

SEQ ID NO: 603 - DNA, 19 bp, Homo sapiens
  siRNA target sequence for ADNP (NM_015339.2,989-1007).
cccgagaagagagtagtat

SEQ ID NO: 604 - DNA, 19 bp, Homo sapiens
  siRNA target sequence for ADNP (NM_015339.2,990-1008).
ccgagaagagagtagtatt

SEQ ID NO: 605 - DNA, 19 bp, Homo sapiens
  siRNA target sequence for ADNP (NM_015339.2,994-1012).
gaagagagtagtattcact

SEQ ID NO: 606 - DNA, 19 bp, Homo sapiens
  siRNA target sequence for ADNP (NM_015339.2,1038-1056).
gtcctatgaagctttggta

SEQ ID NO: 607 - DNA, 19 bp, Homo sapiens
  siRNA target sequence for ADNP (NM_015339.2,1068-1086).
cgaagaccatgaacgtata

SEQ ID NO: 608 - DNA, 19 bp, Homo sapiens
  siRNA target sequence for ADNP (NM_015339.2,1254-1272).
ggtgaatcgactctcaata

SEQ ID NO: 609 - DNA, 19 bp, Homo sapiens
  siRNA target sequence for ADNP (NM_015339.2,1257-1275).
gaatcgactctcaatacca

SEQ ID NO: 610 - DNA, 19 bp, Homo sapiens
  siRNA target sequence for ADNP (NM_015339.2,1332-1350).
gaacaactatggagtcaaa

SEQ ID NO: 611 - DNA, 19 bp, Homo sapiens
  siRNA target sequence for ADNP (NM_015339.2,1335-1353).
caactatggagtcaaatct

SEQ ID NO: 612 - DNA, 19 bp, Homo sapiens
  siRNA target sequence for ADNP (NM_015339.2,1338-1356).
ctatggagtcaaatctgta

SEQ ID NO: 613 - DNA, 19 bp, Homo sapiens
  siRNA target sequence for ADNP (NM_015339.2,1403-1421).
gcaacgcaccagtttccat

SEQ ID NO: 614 - DNA, 19 bp, Homo sapiens
  siRNA target sequence for ADNP (NM_015339.2,1404-1422).
caacgcaccagtttccatt

SEQ ID NO: 615 - DNA, 19 bp, Homo sapiens
  siRNA target sequence for ADNP (NM_015339.2,1504-1522).
caggcaccagcaagatact

SEQ ID NO: 616 - DNA, 19 bp, Homo sapiens
  siRNA target sequence for ADNP (NM_015339.2,1768-1786).
ccagcagtagccaactaca

SEQ ID NO: 617 - DNA, 19 bp, Homo sapiens
  siRNA target sequence for ADNP (NM_015339.2,1772-1790).
cagtagccaactacattat

SEQ ID NO: 618 - DNA, 19 bp, Homo sapiens
  siRNA target sequence for ADNP (NM_015339.2,1774-1792).
gtagccaactacattatga

SEQ ID NO: 619 - DNA, 19 bp, Homo sapiens
  siRNA target sequence for ADNP (NM_015339.2,1778-1796).
ccaactacattatgaaaat

SEQ ID NO: 620 - DNA, 19 bp, Homo sapiens
  siRNA target sequence for ADNP (NM_015339.2,1798-1816).
cacaattttactagcaaat

SEQ ID NO: 621 - DNA, 19 bp, Homo sapiens
  siRNA target sequence for ADNP (NM_015339.2,1811-1829).
gcaaatgcctctactgtaa

SEQ ID NO: 622 - DNA, 19 bp, Homo sapiens
  siRNA target sequence for ADNP (NM_015339.2,1812-1830).
caaatgcctctactgtaat

SEQ ID NO: 623 - DNA, 19 bp, Homo sapiens
  siRNA target sequence for ADNP (NM_015339.2,1831-1849).
cgctatttacccacagata

SEQ ID NO: 624 - DNA, 19 bp, Homo sapiens
  siRNA target sequence for ADNP (NM_015339.2,1833-1851).
ctatttacccacagatact

SEQ ID NO: 625 - DNA, 19 bp, Homo sapiens
  siRNA target sequence for ADNP (NM_015339.2,1850-1868).
ctctgctcaaccatatgtt

SEQ ID NO: 626 - DNA, 19 bp, Homo sapiens
  siRNA target sequence for ADNP (NM_015339.2,1852-1870).
ctgctcaaccatatgttaa

SEQ ID NO: 627 - DNA, 19 bp, Homo sapiens
  siRNA target sequence for ADNP (NM_015339.2,1854-1872).
gctcaaccatatgttaatt

SEQ ID NO: 628 - DNA, 19 bp, Homo sapiens
  siRNA target sequence for ADNP (NM_015339.2,1857-1875).
caaccatatgttaattcat

SEQ ID NO: 629 - DNA, 19 bp, Homo sapiens
  siRNA target sequence for ADNP (NM_015339.2,1888-1906).
ccatattgccgttcaactt

SEQ ID NO: 630 - DNA, 19 bp, Homo sapiens
  siRNA target sequence for ADNP (NM_015339.2,1889-1907).
catattgccgttcaacttt

SEQ ID NO: 631 - DNA, 19 bp, Homo sapiens
  siRNA target sequence for ADNP (NM_015339.2,1896-1914).
ccgttcaactttcaatgat

SEQ ID NO: 632 - DNA, 19 bp, Homo sapiens
  siRNA target sequence for ADNP (NM_015339.2,1935-1953).
catgcggatggttcacatt

SEQ ID NO: 633 - DNA, 19 bp, Homo sapiens
  siRNA target sequence for ADNP (NM_015339.2,1940-1958).
ggatggttcacattgatga

SEQ ID NO: 634 - DNA, 19 bp, Homo sapiens
  siRNA target sequence for ADNP (NM_015339.2,1957-1975).
gaagagatgggacctaaaa

SEQ ID NO: 635 - DNA, 19 bp, Homo sapiens
  siRNA target sequence for ADNP (NM_015339.2,1969-1987).
cctaaaacagattctactt

SEQ ID NO: 636 - DNA, 19 bp, Homo sapiens
  siRNA target sequence for ADNP (NM_015339.2,2011-2029).
cagggtagtcacactaaca

SEQ ID NO: 637 - DNA, 19 bp, Homo sapiens
  siRNA target sequence for ADNP (NM_015339.2,2031-2049).
ccatctcctggtaactaca

SEQ ID NO: 638 - DNA, 19 bp, Homo sapiens
  siRNA target sequence for ADNP (NM_015339.2,2032-2050).
catctcctggtaactacat

SEQ ID NO: 639 - DNA, 19 bp, Homo sapiens
  siRNA target sequence for ADNP (NM_015339.2,2061-2079).
ggatgccccagctgaatct

SEQ ID NO: 640 - DNA, 19 bp, Homo sapiens
  siRNA target sequence for ADNP (NM_015339.2,2149-2167).
gatatccctgtaaaaagtt

SEQ ID NO: 641 - DNA, 19 bp, Homo sapiens
  siRNA target sequence for ADNP (NM_015339.2,2177-2195).
ctgcagtgccctataaaaa

SEQ ID NO: 642 - DNA, 19 bp, Homo sapiens
  siRNA target sequence for ADNP (NM_015339.2,2184-2202).
gccctataaaaaagatgtt

SEQ ID NO: 643 - DNA, 19 bp, Homo sapiens
  siRNA target sequence for ADNP (NM_015339.2,2226-2244).
cttttcaatcctaaaagga

SEQ ID NO: 644 - DNA, 19 bp, Homo sapiens
  siRNA target sequence for ADNP (NM_015339.2,2275-2293).
cgagagaggcaccaagtta

SEQ ID NO: 645 - DNA, 19 bp, Homo sapiens
  siRNA target sequence for ADNP (NM_015339.2,2276-2294).
gagagaggcaccaagttat

SEQ ID NO: 646 - DNA, 19 bp, Homo sapiens
  siRNA target sequence for ADNP (NM_015339.2,2370-2388).
gaccgcctcaactatcact

SEQ ID NO: 647 - DNA, 19 bp, Homo sapiens
  siRNA target sequence for ADNP (NM_015339.2,2381-2399).
ctatcactctgcatctagt

SEQ ID NO: 648 - DNA, 19 bp, Homo sapiens
  siRNA target sequence for ADNP (NM_015339.2,2412-2430).
cgttggaaagacccaaaat

SEQ ID NO: 649 - DNA, 19 bp, Homo sapiens
  siRNA target sequence for ADNP (NM_015339.2,2450-2468).
caccctctcggcttaatca

SEQ ID NO: 650 - DNA, 19 bp, Homo sapiens
  siRNA target sequence for ADNP (NM_015339.2,2452-2470).
ccctctcggcttaatcagt

SEQ ID NO: 651 - DNA, 19 bp, Homo sapiens
  siRNA target sequence for ADNP (NM_015339.2,2495-2513).
gcacttacgagcaaatgga

SEQ ID NO: 652 - DNA, 19 bp, Homo sapiens
  siRNA target sequence for ADNP (NM_015339.2,2498-2516).
cttacgagcaaatggaatt

SEQ ID NO: 653 - DNA, 19 bp, Homo sapiens
  siRNA target sequence for ADNP (NM_015339.2,2518-2536).
cccttactgaaaaaacgaa

SEQ ID NO: 654 - DNA, 19 bp, Homo sapiens
  siRNA target sequence for ADNP (NM_015339.2,2533-2551).
cgaaagttagatgatgata

SEQ ID NO: 655 - DNA, 19 bp, Homo sapiens
  siRNA target sequence for ADNP (NM_015339.2,2591-2609).
ctgttgttttagctttaga

SEQ ID NO: 656 - DNA, 19 bp, Homo sapiens
  siRNA target sequence for ADNP (NM_015339.2,2618-2636).
gtcatgaagatgattccta

SEQ ID NO: 657 - DNA, 19 bp, Homo sapiens
  siRNA target sequence for ADNP (NM_015339.2,2713-2731).
gcagccagtttatggttat

SEQ ID NO: 658 - DNA, 19 bp, Homo sapiens
  siRNA target sequence for ADNP (NM_015339.2,2740-2758).
gacatcgcttcccatttta

SEQ ID NO: 659 - DNA, 19 bp, Homo sapiens
  siRNA target sequence for ADNP (NM_015339.2,2809-2827).
gtgttgctggggtttaaca

SEQ ID NO: 660 - DNA, 19 bp, Homo sapiens
  siRNA target sequence for ADNP (NM_015339.2,2870-2888).
ctgagtggctatttgaaaa

SEQ ID NO: 661 - DNA, 19 bp, Homo sapiens
  siRNA target sequence for ADNP (NM_015339.2,2902-2920).
gattccagagtcaatgcta

SEQ ID NO: 662 - DNA, 19 bp, Homo sapiens
  siRNA target sequence for ADNP (NM_015339.2,3037-3055).
gaagttgaacctaaaatct

SEQ ID NO: 663 - DNA, 19 bp, Homo sapiens
  siRNA target sequence for ADNP (NM_015339.2,3040-3058).
gttgaacctaaaatctcta

SEQ ID NO: 664 - DNA, 19 bp, Homo sapiens
  siRNA target sequence for ADNP (NM_015339.2,3047-3065).
ctaaaatctctaacgataa

SEQ ID NO: 665 - DNA, 19 bp, Homo sapiens
  siRNA target sequence for ADNP (NM_015339.2,3094-3112).
cctgaggatgcttcagaat

SEQ ID NO: 666 - DNA, 19 bp, Homo sapiens
  siRNA target sequence for ADNP (NM_015339.2,3142-3160).
ggttcaaaatacgaaacta

SEQ ID NO: 667 - DNA, 19 bp, Homo sapiens
  siRNA target sequence for ADNP (NM_015339.2,3143-3161).
gttcaaaatacgaaactat

SEQ ID NO: 668 - DNA, 19 bp, Homo sapiens
  siRNA target sequence for ADNP (NM_015339.2,3146-3164).
caaaatacgaaactattca

SEQ ID NO: 669 - DNA, 19 bp, Homo sapiens
  siRNA target sequence for ADNP (NM_015339.2,3153-3171).
cgaaactattcatttgact

SEQ ID NO: 670 - DNA, 19 bp, Homo sapiens
  siRNA target sequence for ADNP (NM_015339.2,3192-3210).
gcacaatgcatctgatagt

SEQ ID NO: 671 - DNA, 19 bp, Homo sapiens
  siRNA target sequence for ADNP (NM_015339.2,3292-3310).
gactttgaggacaatacct

SEQ ID NO: 672 - DNA, 19 bp, Homo sapiens
  siRNA target sequence for ADNP (NM_015339.2,3301-3319).
gacaatacctgcgaaatga

SEQ ID NO: 673 - DNA, 19 bp, Homo sapiens
  siRNA target sequence for ADNP (NM_015339.2,3371-3389).
gtaagccagctgccaaaaa

SEQ ID NO: 674 - DNA, 19 bp, Homo sapiens
  siRNA target sequence for ADNP (NM_015339.2,3538-3556).
cagaatagcacaattgaca

SEQ ID NO: 675 - DNA, 19 bp, Homo sapiens
  siRNA target sequence for ADNP (NM_015339.2,3614-3632).
gcagcttagccggagttaa

SEQ ID NO: 676 - DNA, 19 bp, Homo sapiens
  siRNA target sequence for ADNP (NM_015339.2,3615-3633).
cagcttagccggagttaaa

SEQ ID NO: 677 - DNA, 19 bp, Homo sapiens
  siRNA target sequence for ADNP (NM_015339.2,3617-3635).
gcttagccggagttaaact

SEQ ID NO: 678 - DNA, 19 bp, Homo sapiens
  siRNA target sequence for AEBP1 (NM_001129.2,1073-1091).
gatgacatggactattact

SEQ ID NO: 679 - DNA, 19 bp, Homo sapiens
  siRNA target sequence for AEBP1 (NM_001129.2,1269-1287).
ggacgcctacggagaaagt

SEQ ID NO: 680 - DNA, 19 bp, Homo sapiens
  siRNA target sequence for AEBP1 (NM_001129.2,1272-1290).
cgcctacggagaaagtcaa

SEQ ID NO: 681 - DNA, 19 bp, Homo sapiens
  siRNA target sequence for AEBP1 (NM_001129.2,1533-1551).
gcatccatgacgattttgt

SEQ ID NO: 682 - DNA, 19 bp, Homo sapiens
  siRNA target sequence for AEBP1 (NM_001129.2,1680-1698).
cggtggtggctcgtttcat

SEQ ID NO: 683 - DNA, 19 bp, Homo sapiens
  siRNA target sequence for AEBP1 (NM_001129.2,1920-1938).
cacgaggcctcaagatcta

SEQ ID NO: 684 - DNA, 19 bp, Homo sapiens
  siRNA target sequence for AEBP1 (NM_001129.2,2214-2232).
ctgaggagggctttgacat

SEQ ID NO: 685 - DNA, 19 bp, Homo sapiens
  siRNA target sequence for AEBP1 (NM_001129.2,2404-2422).
cttcgtgctgggagcaaat

SEQ ID NO: 686 - DNA, 19 bp, Homo sapiens
  siRNA target sequence for AEBP1 (NM_001129.2,2433-2451).
gcgagcggctagtatccta

SEQ ID NO: 687 - DNA, 19 bp, Homo sapiens
  siRNA target sequence for AEBP1 (NM_001129.2,2444-2462).
gtatcctacccctacgata

SEQ ID NO: 688 - DNA, 19 bp, Homo sapiens
  siRNA target sequence for AEBP1 (NM_001129.2,2703-2721).
ccgggactatcaatgactt

SEQ ID NO: 689 - DNA, 19 bp, Homo sapiens
  siRNA target sequence for AEBP1 (NM_001129.2,2914-2932).
ctctgtgagtggcattaat

SEQ ID NO: 690 - DNA, 19 bp, Homo sapiens
  siRNA target sequence for AEBP1 (NM_001129.2,2916-2934).
ctgtgagtggcattaatca

SEQ ID NO: 691 - DNA, 19 bp, Homo sapiens
  siRNA target sequence for AEBP1 (NM_001129.2,2946-2964).
cagccagtggtggtgatta

SEQ ID NO: 692 - DNA, 19 bp, Homo sapiens
  siRNA target sequence for AEBP1 (NM_001129.2,2948-2966).
gccagtggtggtgattact

SEQ ID NO: 693 - DNA, 19 bp, Homo sapiens
  siRNA target sequence for AEBP1 (NM_001129.2,2958-2976).
gtgattactggcgaatctt

SEQ ID NO: 694 - DNA, 19 bp, Homo sapiens
  siRNA target sequence for AEBP1 (NM_001129.2,2960-2978).
gattactggcgaatcttga

SEQ ID NO: 695 - DNA, 19 bp, Homo sapiens
  siRNA target sequence for AEBP1 (NM_001129.2,3030-3048).
ccaagacctgcaatgttga

SEQ ID NO: 696 - DNA, 19 bp, Homo sapiens
  siRNA target sequence for AEBP1 (NM_001129.2,3034-3052).
gacctgcaatgttgactat

SEQ ID NO: 697 - DNA, 19 bp, Homo sapiens
  siRNA target sequence for AEBP1 (NM_001129.2,3138-3156).
ggcctatcccacacataga

SEQ ID NO: 698 - DNA, 19 bp, Homo sapiens
  siRNA target sequence for AEBP1 (NM_001129.2,3316-3334).
caccctgagcactaccata

SEQ ID NO: 699 - DNA, 19 bp, Homo sapiens
  siRNA target sequence for AF5Q31 (NM_014423.1,354-372).
ggaatgtgctgcgtatgaa

SEQ ID NO: 700 - DNA, 19 bp, Homo sapiens
  siRNA target sequence for AF5Q31 (NM_014423.1,355-373).
gaatgtgctgcgtatgaaa

SEQ ID NO: 701 - DNA, 19 bp, Homo sapiens
  siRNA target sequence for AF5Q31 (NM_014423.1,384-402).
ggcggaatcaggaaattca

SEQ ID NO: 702 - DNA, 19 bp, Homo sapiens
  siRNA target sequence for AF5Q31 (NM_014423.1,483-501).
caagtcgtattcagagtat

SEQ ID NO: 703 - DNA, 19 bp, Homo sapiens
  siRNA target sequence for AF5Q31 (NM_014423.1,537-555).
gagacagatctataccaaa

SEQ ID NO: 704 - DNA, 19 bp, Homo sapiens
  siRNA target sequence for AF5Q31 (NM_014423.1,541-559).
cagatctataccaaagctt

SEQ ID NO: 705 - DNA, 19 bp, Homo sapiens
  siRNA target sequence for AF5Q31 (NM_014423.1,644-662).
catcagagtagcaaatgga

SEQ ID NO: 706 - DNA, 19 bp, Homo sapiens
  siRNA target sequence for AF5Q31 (NM_014423.1,704-722).
cggtcctcaggcttacaga

SEQ ID NO: 707 - DNA, 19 bp, Homo sapiens
  siRNA target sequence for AF5Q31 (NM_014423.1,786-804).
ggcacgaccgtgagtcata

SEQ ID NO: 708 - DNA, 19 bp, Homo sapiens
  siRNA target sequence for AF5Q31 (NM_014423.1,787-805).
gcacgaccgtgagtcatat

SEQ ID NO: 709 - DNA, 19 bp, Homo sapiens
  siRNA target sequence for AF5Q31 (NM_014423.1,788-806).
cacgaccgtgagtcatata

SEQ ID NO: 710 - DNA, 19 bp, Homo sapiens
  siRNA target sequence for AF5Q31 (NM_014423.1,793-811).
ccgtgagtcatataacaat

SEQ ID NO: 711 - DNA, 19 bp, Homo sapiens
  siRNA target sequence for AF5Q31 (NM_014423.1,794-812).
cgtgagtcatataacaata

SEQ ID NO: 712 - DNA, 19 bp, Homo sapiens
  siRNA target sequence for AF5Q31 (NM_014423.1,924-942).
ggtctcatgggaatgatca

SEQ ID NO: 713 - DNA, 19 bp, Homo sapiens
  siRNA target sequence for AF5Q31 (NM_014423.1,933-951).
ggaatgatcaccatagcaa

SEQ ID NO: 714 - DNA, 19 bp, Homo sapiens
  siRNA target sequence for AF5Q31 (NM_014423.1,953-971).
gaacatcaacgctccaaat

SEQ ID NO: 715 - DNA, 19 bp, Homo sapiens
  siRNA target sequence for AF5Q31 (NM_014423.1,975-993).
ctcgggaccctgatgcaaa

SEQ ID NO: 716 - DNA, 19 bp, Homo sapiens
  siRNA target sequence for AF5Q31 (NM_014423.1,1004-1022).
ccttcccgtgtaccttttt

SEQ ID NO: 717 - DNA, 19 bp, Homo sapiens
  siRNA target sequence for AF5Q31 (NM_014423.1,1074-1092).
ccaattcaatgttacagaa

SEQ ID NO: 718 - DNA, 19 bp, Homo sapiens
  siRNA target sequence for AF5Q31 (NM_014423.1,1324-1342).
ccctctaacggctattcat

SEQ ID NO: 719 - DNA, 19 bp, Homo sapiens
  siRNA target sequence for AF5Q31 (NM_014423.1,1388-1406).
gagtctcagcagtccaatt

SEQ ID NO: 720 - DNA, 19 bp, Homo sapiens
  siRNA target sequence for AF5Q31 (NM_014423.1,1390-1408).
gtctcagcagtccaatttt

SEQ ID NO: 721 - DNA, 19 bp, Homo sapiens
  siRNA target sequence for AF5Q31 (NM_014423.1,1449-1467).
caaatgggcaccagtctaa

SEQ ID NO: 722 - DNA, 19 bp, Homo sapiens
  siRNA target sequence for AF5Q31 (NM_014423.1,1454-1472).
gggcaccagtctaaatcta

SEQ ID NO: 723 - DNA, 19 bp, Homo sapiens
  siRNA target sequence for AF5Q31 (NM_014423.1,1455-1473).
ggcaccagtctaaatctat

SEQ ID NO: 724 - DNA, 19 bp, Homo sapiens
  siRNA target sequence for AF5Q31 (NM_014423.1,1457-1475).
caccagtctaaatctatgt

SEQ ID NO: 725 - DNA, 19 bp, Homo sapiens
  siRNA target sequence for AF5Q31 (NM_014423.1,1459-1477).
ccagtctaaatctatgtta

SEQ ID NO: 726 - DNA, 19 bp, Homo sapiens
  siRNA target sequence for AF5Q31 (NM_014423.1,1470-1488).
ctatgttaaaagatgactt

SEQ ID NO: 727 - DNA, 19 bp, Homo sapiens
  siRNA target sequence for AF5Q31 (NM_014423.1,1517-1535).
ggggaacaggattgtgata

SEQ ID NO: 728 - DNA, 19 bp, Homo sapiens
  siRNA target sequence for AF5Q31 (NM_014423.1,1518-1536).
gggaacaggattgtgataa

SEQ ID NO: 729 - DNA, 19 bp, Homo sapiens
  siRNA target sequence for AF5Q31 (NM_014423.1,1523-1541).
caggattgtgataagacaa

SEQ ID NO: 730 - DNA, 19 bp, Homo sapiens
  siRNA target sequence for AF5Q31 (NM_014423.1,1569-1587).
ctgaaccttcacaccataa

SEQ ID NO: 731 - DNA, 19 bp, Homo sapiens
  siRNA target sequence for AF5Q31 (NM_014423.1,1571-1589).
gaaccttcacaccataata

SEQ ID NO: 732 - DNA, 19 bp, Homo sapiens
  siRNA target sequence for AF5Q31 (NM_014423.1,1601-1619).
gataactccagggatgatt

SEQ ID NO: 733 - DNA, 19 bp, Homo sapiens
  siRNA target sequence for AF5Q31 (NM_014423.1,1658-1676).
gactcagagagtgaaagta

SEQ ID NO: 734 - DNA, 19 bp, Homo sapiens
  siRNA target sequence for AF5Q31 (NM_014423.1,1683-1701).
gtgacagtgaggcaaatga

SEQ ID NO: 735 - DNA, 19 bp, Homo sapiens
  siRNA target sequence for AF5Q31 (NM_014423.1,1757-1775).
cttgataattggctgaata

SEQ ID NO: 736 - DNA, 19 bp, Homo sapiens
  siRNA target sequence for AF5Q31 (NM_014423.1,1778-1796).
gtgaacccacataaagtgt

SEQ ID NO: 737 - DNA, 19 bp, Homo sapiens
  siRNA target sequence for AF5Q31 (NM_014423.1,1873-1891).
gaatagctacactgataca

SEQ ID NO: 738 - DNA, 19 bp, Homo sapiens
  siRNA target sequence for AF5Q31 (NM_014423.1,1922-1940).
ccgggacgagactccaaaa

SEQ ID NO: 739 - DNA, 19 bp, Homo sapiens
  siRNA target sequence for AF5Q31 (NM_014423.1,1925-1943).
ggacgagactccaaaacca

SEQ ID NO: 740 - DNA, 19 bp, Homo sapiens
  siRNA target sequence for AF5Q31 (NM_014423.1,1945-1963).
ccaaaagggatcagaaagt

SEQ ID NO: 741 - DNA, 19 bp, Homo sapiens
  siRNA target sequence for AF5Q31 (NM_014423.1,2013-2031).
gaagaactgtaggcaaaaa

SEQ ID NO: 742 - DNA, 19 bp, Homo sapiens
  siRNA target sequence for AF5Q31 (NM_014423.1,2070-2088).
ctcgtggaggcctgaagat

SEQ ID NO: 743 - DNA, 19 bp, Homo sapiens
  siRNA target sequence for AF5Q31 (NM_014423.1,2094-2112).
gtgaaacccctgtagactt

SEQ ID NO: 744 - DNA, 19 bp, Homo sapiens
  siRNA target sequence for AF5Q31 (NM_014423.1,2157-2175).
gctcaaggaaacccaatat

SEQ ID NO: 745 - DNA, 19 bp, Homo sapiens
  siRNA target sequence for AF5Q31 (NM_014423.1,2158-2176).
ctcaaggaaacccaatata

SEQ ID NO: 746 - DNA, 19 bp, Homo sapiens
  siRNA target sequence for AF5Q31 (NM_014423.1,2201-2219).
cgacctacagcagagaaaa

SEQ ID NO: 747 - DNA, 19 bp, Homo sapiens
  siRNA target sequence for AF5Q31 (NM_014423.1,2322-2340).
cctcacaaactcctaagta

SEQ ID NO: 748 - DNA, 19 bp, Homo sapiens
  siRNA target sequence for AF5Q31 (NM_014423.1,2350-2368).
caataggactcctgttaaa

SEQ ID NO: 749 - DNA, 19 bp, Homo sapiens
  siRNA target sequence for AF5Q31 (NM_014423.1,2485-2503).
gaagattgacctgaatctt

SEQ ID NO: 750 - DNA, 19 bp, Homo sapiens
  siRNA target sequence for AF5Q31 (NM_014423.1,2627-2645).
ggcaagaggaagcataaga

SEQ ID NO: 751 - DNA, 19 bp, Homo sapiens
  siRNA target sequence for AF5Q31 (NM_014423.1,2788-2806).
gcctgttccttcaaaagat

SEQ ID NO: 752 - DNA, 19 bp, Homo sapiens
  siRNA target sequence for AF5Q31 (NM_014423.1,2959-2977).
ctccaaggaggttaaggaa

SEQ ID NO: 753 - DNA, 19 bp, Homo sapiens
  siRNA target sequence for AF5Q31 (NM_014423.1,3033-3051).
ctaagcctcggagaacaaa

SEQ ID NO: 754 - DNA, 19 bp, Homo sapiens
  siRNA target sequence for AF5Q31 (NM_014423.1,3078-3096).
cagcagaccattatttaca

SEQ ID NO: 755 - DNA, 19 bp, Homo sapiens
  siRNA target sequence for AF5Q31 (NM_014423.1,3081-3099).
cagaccattatttacaaga

SEQ ID NO: 756 - DNA, 19 bp, Homo sapiens
  siRNA target sequence for AF5Q31 (NM_014423.1,3118-3136).
caatgcagatgcattgtct

SEQ ID NO: 757 - DNA, 19 bp, Homo sapiens
  siRNA target sequence for AF5Q31 (NM_014423.1,3122-3140).
gcagatgcattgtctgata

SEQ ID NO: 758 - DNA, 19 bp, Homo sapiens
  siRNA target sequence for AF5Q31 (NM_014423.1,3164-3182).
cttgatgctgtggtatctt

SEQ ID NO: 759 - DNA, 19 bp, Homo sapiens
  siRNA target sequence for AF5Q31 (NM_014423.1,3167-3185).
gatgctgtggtatctttca

SEQ ID NO: 760 - DNA, 19 bp, Homo sapiens
  siRNA target sequence for AF5Q31 (NM_014423.1,3364-3382).
gtacctgaggctgttcaaa

SEQ ID NO: 761 - DNA, 19 bp, Homo sapiens
  siRNA target sequence for AF5Q31 (NM_014423.1,3517-3535).
gctgtcaccaggcaattca

SEQ ID NO: 762 - DNA, 19 bp, Homo sapiens
  siRNA target sequence for AF5Q31 (NM_014423.1,3610-3628).
gatggcagccagctatgtt

SEQ ID NO: 763 - DNA, 19 bp, Homo sapiens
  siRNA target sequence for AF5Q31 (NM_014423.1,3646-3664).
cctctatgccaccgaaatt

SEQ ID NO: 764 - DNA, 19 bp, Homo sapiens
  siRNA target sequence for AF5Q31 (NM_014423.1,3734-3752).
cctctcatctttaatgcaa

SEQ ID NO: 765 - DNA, 19 bp, Homo sapiens
  siRNA target sequence for AF5Q31 (NM_014423.1,3753-3771).
gcatcatgacagatctagt

SEQ ID NO: 766 - DNA, 19 bp, Homo sapiens
  siRNA target sequence for AF5Q31 (NM_014423.1,3754-3772).
catcatgacagatctagtt

SEQ ID NO: 767 - DNA, 19 bp, Homo sapiens
  siRNA target sequence for AF5Q31 (NM_014423.1,3760-3778).
gacagatctagttcgttat

SEQ ID NO: 768 - DNA, 19 bp, Homo sapiens
  siRNA target sequence for AF5Q31 (NM_014423.1,3803-3821).
cgccaggatgccaagttga

SEQ ID NO: 769 - DNA, 19 bp, Homo sapiens
  siRNA target sequence for AF5Q31 (NM_014423.1,3805-3823).
ccaggatgccaagttgata

SEQ ID NO: 770 - DNA, 19 bp, Homo sapiens
  siRNA target sequence for AHR (NM_001621.2,691-709).
gaagccggtgcagaaaaca

SEQ ID NO: 771 - DNA, 19 bp, Homo sapiens
  siRNA target sequence for AHR (NM_001621.2,694-712).
gccggtgcagaaaacagta

SEQ ID NO: 772 - DNA, 19 bp, Homo sapiens
  siRNA target sequence for AHR (NM_001621.2,695-713).
ccggtgcagaaaacagtaa

SEQ ID NO: 773 - DNA, 19 bp, Homo sapiens
  siRNA target sequence for AHR (NM_001621.2,722-740).
ccagctgaaggaatcaagt

SEQ ID NO: 774 - DNA, 19 bp, Homo sapiens
  siRNA target sequence for AHR (NM_001621.2,725-743).
gctgaaggaatcaagtcaa

SEQ ID NO: 775 - DNA, 19 bp, Homo sapiens
  siRNA target sequence for AHR (NM_001621.2,726-744).
ctgaaggaatcaagtcaaa

SEQ ID NO: 776 - DNA, 19 bp, Homo sapiens
  siRNA target sequence for AHR (NM_001621.2,731-749).
ggaatcaagtcaaatcctt

SEQ ID NO: 777 - DNA, 19 bp, Homo sapiens
  siRNA target sequence for AHR (NM_001621.2,747-765).
cttccaagcggcatagaga

SEQ ID NO: 778 - DNA, 19 bp, Homo sapiens
  siRNA target sequence for AHR (NM_001621.2,756-774).
ggcatagagaccgacttaa

SEQ ID NO: 779 - DNA, 19 bp, Homo sapiens
  siRNA target sequence for AHR (NM_001621.2,758-776).
catagagaccgacttaata

SEQ ID NO: 780 - DNA, 19 bp, Homo sapiens
  siRNA target sequence for AHR (NM_001621.2,762-780).
gagaccgacttaatacaga

SEQ ID NO: 781 - DNA, 19 bp, Homo sapiens
  siRNA target sequence for AHR (NM_001621.2,806-824).
cctttcccacaagatgtta

SEQ ID NO: 782 - DNA, 19 bp, Homo sapiens
  siRNA target sequence for AHR (NM_001621.2,807-825).
ctttcccacaagatgttat

SEQ ID NO: 783 - DNA, 19 bp, Homo sapiens
  siRNA target sequence for AHR (NM_001621.2,811-829).
cccacaagatgttattaat

SEQ ID NO: 784 - DNA, 19 bp, Homo sapiens
  siRNA target sequence for AHR (NM_001621.2,812-830).
ccacaagatgttattaata

SEQ ID NO: 785 - DNA, 19 bp, Homo sapiens
  siRNA target sequence for AHR (NM_001621.2,880-898).
caagagcttctttgatgtt

SEQ ID NO: 786 - DNA, 19 bp, Homo sapiens
  siRNA target sequence for AHR (NM_001621.2,886-904).
cttctttgatgttgcatta

SEQ ID NO: 787 - DNA, 19 bp, Homo sapiens
  siRNA target sequence for AHR (NM_001621.2,928-946).
cggaggccaggataactgt

SEQ ID NO: 788 - DNA, 19 bp, Homo sapiens
  siRNA target sequence for AHR (NM_001621.2,980-998).
caagaaggagaattcttat

SEQ ID NO: 789 - DNA, 19 bp, Homo sapiens
  siRNA target sequence for AHR (NM_001621.2,1059-1077).
cttctactatacaagatta

SEQ ID NO: 790 - DNA, 19 bp, Homo sapiens
  siRNA target sequence for AHR (NM_001621.2,1062-1080).
ctactatacaagattatct

SEQ ID NO: 791 - DNA, 19 bp, Homo sapiens
  siRNA target sequence for AHR (NM_001621.2,1100-1118).
gtcatacatcagagtgtat

SEQ ID NO: 792 - DNA, 19 bp, Homo sapiens
  siRNA target sequence for AHR (NM_001621.2,1102-1120).
catacatcagagtgtatat

SEQ ID NO: 793 - DNA, 19 bp, Homo sapiens
  siRNA target sequence for AHR (NM_001621.2,1113-1131).
gtgtatatgaacttatcca

SEQ ID NO: 794 - DNA, 19 bp, Homo sapiens
  siRNA target sequence for AHR (NM_001621.2,1135-1153).
cgaagaccgagctgaattt

SEQ ID NO: 795 - DNA, 19 bp, Homo sapiens
  siRNA target sequence for AHR (NM_001621.2,1160-1178).
cagctacactgggcattaa

SEQ ID NO: 796 - DNA, 19 bp, Homo sapiens
  siRNA target sequence for AHR (NM_001621.2,1194-1212).
cagagtctggacaaggaat

SEQ ID NO: 797 - DNA, 19 bp, Homo sapiens
  siRNA target sequence for AHR (NM_001621.2,1233-1251).
cccagacagtagtctgtta

SEQ ID NO: 798 - DNA, 19 bp, Homo sapiens
  siRNA target sequence for AHR (NM_001621.2,1234-1252).
ccagacagtagtctgttat

SEQ ID NO: 799 - DNA, 19 bp, Homo sapiens
  siRNA target sequence for AHR (NM_001621.2,1318-1336).
gtgtctgctggataattca

SEQ ID NO: 800 - DNA, 19 bp, Homo sapiens
  siRNA target sequence for AHR (NM_001621.2,1340-1358).
ggttttctggcaatgaatt

SEQ ID NO: 801 - DNA, 19 bp, Homo sapiens
  siRNA target sequence for AHR (NM_001621.2,1365-1383).
ggaagttaaagtatcttca

SEQ ID NO: 802 - DNA, 19 bp, Homo sapiens
  siRNA target sequence for AHR (NM_001621.2,1401-1419).
ggaaagatggatcaatact

SEQ ID NO: 803 - DNA, 19 bp, Homo sapiens
  siRNA target sequence for AHR (NM_001621.2,1402-1420).
gaaagatggatcaatactt

SEQ ID NO: 804 - DNA, 19 bp, Homo sapiens
  siRNA target sequence for AHR (NM_001621.2,1433-1451).
gctttgtttgcgatagcta

SEQ ID NO: 805 - DNA, 19 bp, Homo sapiens
  siRNA target sequence for AHR (NM_001621.2,1462-1480).
gccaccatccatacttgaa

SEQ ID NO: 806 - DNA, 19 bp, Homo sapiens
  siRNA target sequence for AHR (NM_001621.2,1464-1482).
caccatccatacttgaaat

SEQ ID NO: 807 - DNA, 19 bp, Homo sapiens
  siRNA target sequence for AHR (NM_001621.2,1475-1493).
cttgaaatccggaccaaaa

SEQ ID NO: 808 - DNA, 19 bp, Homo sapiens
  siRNA target sequence for AHR (NM_001621.2,1478-1496).
gaaatccggaccaaaaatt

SEQ ID NO: 809 - DNA, 19 bp, Homo sapiens
  siRNA target sequence for AHR (NM_001621.2,1484-1502).
cggaccaaaaattttatct

SEQ ID NO: 810 - DNA, 19 bp, Homo sapiens
  siRNA target sequence for AHR (NM_001621.2,1485-1503).
ggaccaaaaattttatctt

SEQ ID NO: 811 - DNA, 19 bp, Homo sapiens
  siRNA target sequence for AHR (NM_001621.2,1591-1609).
cacgagaggctcaggttat

SEQ ID NO: 812 - DNA, 19 bp, Homo sapiens
  siRNA target sequence for AHR (NM_001621.2,1598-1616).
ggctcaggttatcagttta

SEQ ID NO: 813 - DNA, 19 bp, Homo sapiens
  siRNA target sequence for AHR (NM_001621.2,1600-1618).
ctcaggttatcagtttatt

SEQ ID NO: 814 - DNA, 19 bp, Homo sapiens
  siRNA target sequence for AHR (NM_001621.2,1602-1620).
caggttatcagtttattca

SEQ ID NO: 815 - DNA, 19 bp, Homo sapiens
  siRNA target sequence for AHR (NM_001621.2,1619-1637).
catgcagctgatatgcttt

SEQ ID NO: 816 - DNA, 19 bp, Homo sapiens
  siRNA target sequence for AHR (NM_001621.2,1648-1666).
gtcccatatccgaatgatt

SEQ ID NO: 817 - DNA, 19 bp, Homo sapiens
  siRNA target sequence for AHR (NM_001621.2,1650-1668).
cccatatccgaatgattaa

SEQ ID NO: 818 - DNA, 19 bp, Homo sapiens
  siRNA target sequence for AHR (NM_001621.2,1652-1670).
catatccgaatgattaaga

SEQ ID NO: 819 - DNA, 19 bp, Homo sapiens
  siRNA target sequence for AHR (NM_001621.2,1676-1694).
gaaagtggcatgatagttt

SEQ ID NO: 820 - DNA, 19 bp, Homo sapiens
  siRNA target sequence for AHR (NM_001621.2,1697-1715).
cggcttcttacaaaaaaca

SEQ ID NO: 821 - DNA, 19 bp, Homo sapiens
  siRNA target sequence for AHR (NM_001621.2,1722-1740).
ggacttgggtccagtctaa

SEQ ID NO: 822 - DNA, 19 bp, Homo sapiens
  siRNA target sequence for AHR (NM_001621.2,1723-1741).
gacttgggtccagtctaat

SEQ ID NO: 823 - DNA, 19 bp, Homo sapiens
  siRNA target sequence for AHR (NM_001621.2,1737-1755).
ctaatgcacgcctgcttta

SEQ ID NO: 824 - DNA, 19 bp, Homo sapiens
  siRNA target sequence for AHR (NM_001621.2,1763-1781).
ggaagaccagattatatca

SEQ ID NO: 825 - DNA, 19 bp, Homo sapiens
  siRNA target sequence for AHR (NM_001621.2,1814-1832).
ggaacagagcatttacgaa

SEQ ID NO: 826 - DNA, 19 bp, Homo sapiens
  siRNA target sequence for AHR (NM_001621.2,1815-1833).
gaacagagcatttacgaaa

SEQ ID NO: 827 - DNA, 19 bp, Homo sapiens
  siRNA target sequence for AHR (NM_001621.2,1820-1838).
gagcatttacgaaaacgaa

SEQ ID NO: 828 - DNA, 19 bp, Homo sapiens
  siRNA target sequence for AHR (NM_001621.2,2033-2051).
gatgagtctatttatctct

SEQ ID NO: 829 - DNA, 19 bp, Homo sapiens
  siRNA target sequence for AHR (NM_001621.2,2050-2068).
ctatcctgcttcaagtact

SEQ ID NO: 830 - DNA, 19 bp, Homo sapiens
  siRNA target sequence for AHR (NM_001621.2,2070-2088).
caagtactgcaccttttga

SEQ ID NO: 831 - DNA, 19 bp, Homo sapiens
  siRNA target sequence for AHR (NM_001621.2,2122-2140).
cagaaattggcaagataat

SEQ ID NO: 832 - DNA, 19 bp, Homo sapiens
  siRNA target sequence for AHR (NM_001621.2,2144-2162).
gcaccgatgggaaatgata

SEQ ID NO: 833 - DNA, 19 bp, Homo sapiens
  siRNA target sequence for AHR (NM_001621.2,2147-2165).
ccgatgggaaatgatacta

SEQ ID NO: 834 - DNA, 19 bp, Homo sapiens
  siRNA target sequence for AHR (NM_001621.2,2148-2166).
cgatgggaaatgatactat

SEQ ID NO: 835 - DNA, 19 bp, Homo sapiens
  siRNA target sequence for AHR (NM_001621.2,2229-2247).
ggctctttcaagatagtaa

SEQ ID NO: 836 - DNA, 19 bp, Homo sapiens
  siRNA target sequence for AHR (NM_001621.2,2255-2273).
gacttgtacagcataatga

SEQ ID NO: 837 - DNA, 19 bp, Homo sapiens
  siRNA target sequence for AHR (NM_001621.2,2263-2281).
cagcataatgaaaaaccta

SEQ ID NO: 838 - DNA, 19 bp, Homo sapiens
  siRNA target sequence for AHR (NM_001621.2,2272-2290).
gaaaaacctaggcattgat

SEQ ID NO: 839 - DNA, 19 bp, Homo sapiens
  siRNA target sequence for AHR (NM_001621.2,2278-2296).
cctaggcattgattttgaa

SEQ ID NO: 840 - DNA, 19 bp, Homo sapiens
  siRNA target sequence for AHR (NM_001621.2,2389-2407).
gacgtatgtccaagattct

SEQ ID NO: 841 - DNA, 19 bp, Homo sapiens
  siRNA target sequence for AHR (NM_001621.2,2391-2409).
cgtatgtccaagattcttt

SEQ ID NO: 842 - DNA, 19 bp, Homo sapiens
  siRNA target sequence for AHR (NM_001621.2,2396-2414).
gtccaagattctttaagta

SEQ ID NO: 843 - DNA, 19 bp, Homo sapiens
  siRNA target sequence for AHR (NM_001621.2,2422-2440).
cttcataccttcagattat

SEQ ID NO: 844 - DNA, 19 bp, Homo sapiens
  siRNA target sequence for AHR (NM_001621.2,2464-2482).
gaactcaagctgtatggta

SEQ ID NO: 845 - DNA, 19 bp, Homo sapiens
  siRNA target sequence for AHR (NM_001621.2,2485-2503).
ggaacacctacatctagaa

SEQ ID NO: 846 - DNA, 19 bp, Homo sapiens
  siRNA target sequence for AHR (NM_001621.2,2578-2596).
gcaagttaatggcatgttt

SEQ ID NO: 847 - DNA, 19 bp, Homo sapiens
  siRNA target sequence for AHR (NM_001621.2,2614-2632).
ccaattcgtgcctttcaat

SEQ ID NO: 848 - DNA, 19 bp, Homo sapiens
  siRNA target sequence for AHR (NM_001621.2,2641-2659).
gcaagacccacaacaatat

SEQ ID NO: 849 - DNA, 19 bp, Homo sapiens
  siRNA target sequence for AHR (NM_001621.2,2642-2660).
caagacccacaacaatata

SEQ ID NO: 850 - DNA, 19 bp, Homo sapiens
  siRNA target sequence for AHR (NM_001621.2,2648-2666).
ccacaacaatataatgtct

SEQ ID NO: 851 - DNA, 19 bp, Homo sapiens
  siRNA target sequence for AHR (NM_001621.2,2651-2669).
caacaatataatgtcttta

SEQ ID NO: 852 - DNA, 19 bp, Homo sapiens
  siRNA target sequence for AHR (NM_001621.2,2695-2713).
gttcccctacaaatctgaa

SEQ ID NO: 853 - DNA, 19 bp, Homo sapiens
  siRNA target sequence for AHR (NM_001621.2,2701-2719).
ctacaaatctgaaatggat

SEQ ID NO: 854 - DNA, 19 bp, Homo sapiens
  siRNA target sequence for AHR (NM_001621.2,2726-2744).
ccttatacacagaacttta

SEQ ID NO: 855 - DNA, 19 bp, Homo sapiens
  siRNA target sequence for AHR (NM_001621.2,2749-2767).
ctgtaatcagcctgtatta

SEQ ID NO: 856 - DNA, 19 bp, Homo sapiens
  siRNA target sequence for AHR (NM_001621.2,2800-2818).
ccctatggggagttttgaa

SEQ ID NO: 857 - DNA, 19 bp, Homo sapiens
  siRNA target sequence for AHR (NM_001621.2,2832-2850).
ccactacttctagtttaga

SEQ ID NO: 858 - DNA, 19 bp, Homo sapiens
  siRNA target sequence for AHR (NM_001621.2,2833-2851).
cactacttctagtttagaa

SEQ ID NO: 859 - DNA, 19 bp, Homo sapiens
  siRNA target sequence for AHR (NM_001621.2,2903-2921).
ccacagtcagccataataa

SEQ ID NO: 860 - DNA, 19 bp, Homo sapiens
  siRNA target sequence for AHR (NM_001621.2,2945-2963).
gccgtgtcgatgtatcagt

SEQ ID NO: 861 - DNA, 19 bp, Homo sapiens
  siRNA target sequence for AHR (NM_001621.2,2992-3010).
gggtcagatgcagtacaat

SEQ ID NO: 862 - DNA, 19 bp, Homo sapiens
  siRNA target sequence for AHR (NM_001621.2,3020-3038).
ccaggccaacaggcatttt

SEQ ID NO: 863 - DNA, 19 bp, Homo sapiens
  siRNA target sequence for AIRE (NM_000383.1,264-282).
cgcttcatctgaaggaaaa

SEQ ID NO: 864 - DNA, 19 bp, Homo sapiens
  siRNA target sequence for AIRE (NM_000383.1,478-496).
cgtccccaaggctttggta

SEQ ID NO: 865 - DNA, 19 bp, Homo sapiens
  siRNA target sequence for AIRE (NM_000383.1,585-603).
gcccaggctctcaactgaa

SEQ ID NO: 866 - DNA, 19 bp, Homo sapiens
  siRNA target sequence for AIRE (NM_000658.1,282-300).
gcaagaaaccgggttttct

SEQ ID NO: 867 - DNA, 19 bp, Homo sapiens
  siRNA target sequence for AIRE (NM_000658.1,283-301).
caagaaaccgggttttctt

SEQ ID NO: 868 - DNA, 19 bp, Homo sapiens
  siRNA target sequence for ALX3 (NM_006492.1,805-823).
ccatgcatgtctccatatt

SEQ ID NO: 869 - DNA, 19 bp, Homo sapiens
  siRNA target sequence for ALX3 (NM_006492.1,877-895).
gctcaccctggcatctact

SEQ ID NO: 870 - DNA, 19 bp, Homo sapiens
  siRNA target sequence for ALX3 (NM_006492.1,944-962).
cctcagatggtgactataa

SEQ ID NO: 871 - DNA, 19 bp, Homo sapiens
  siRNA target sequence for ALX4 (NM_021926.1,112-130).
ctgagacttgcgtctctta

SEQ ID NO: 872 - DNA, 19 bp, Homo sapiens
  siRNA target sequence for ALX4 (NM_021926.1,150-168).
gccatggacgcctactaca

SEQ ID NO: 873 - DNA, 19 bp, Homo sapiens
  siRNA target sequence for ALX4 (NM_021926.1,189-207).
gagggctcgtcgcctttta

SEQ ID NO: 874 - DNA, 19 bp, Homo sapiens
  siRNA target sequence for ALX4 (NM_021926.1,225-243).
gacaagttcggcacaactt

SEQ ID NO: 875 - DNA, 19 bp, Homo sapiens
  siRNA target sequence for ALX4 (NM_021926.1,457-475).
cgcaaccgcatctttactt

SEQ ID NO: 876 - DNA, 19 bp, Homo sapiens
  siRNA target sequence for ALX4 (NM_021926.1,561-579).
ccctgctacgctaaagaga

SEQ ID NO: 877 - DNA, 19 bp, Homo sapiens
  siRNA target sequence for ALX4 (NM_021926.1,953-971).
ccacttctccactgcatat

SEQ ID NO: 878 - DNA, 19 bp, Homo sapiens
  siRNA target sequence for AR (NM_000044.2,1642-1660).
gctgctccgctgaccttaa

SEQ ID NO: 879 - DNA, 19 bp, Homo sapiens
  siRNA target sequence for AR (NM_000044.2,1643-1661).
ctgctccgctgaccttaaa

SEQ ID NO: 880 - DNA, 19 bp, Homo sapiens
  siRNA target sequence for AR (NM_000044.2,1648-1666).
ccgctgaccttaaagacat

SEQ ID NO: 881 - DNA, 19 bp, Homo sapiens
  siRNA target sequence for AR (NM_000044.2,1775-1793).
ctccaaggacaattactta

SEQ ID NO: 882 - DNA, 19 bp, Homo sapiens
  siRNA target sequence for AR (NM_000044.2,1794-1812).
gggggcacttcgaccattt

SEQ ID NO: 883 - DNA, 19 bp, Homo sapiens
  siRNA target sequence for AR (NM_000044.2,1796-1814).
gggcacttcgaccatttct

SEQ ID NO: 884 - DNA, 19 bp, Homo sapiens
  siRNA target sequence for AR (NM_000044.2,1798-1816).
gcacttcgaccatttctga

SEQ ID NO: 885 - DNA, 19 bp, Homo sapiens
  siRNA target sequence for AR (NM_000044.2,1969-1987).
ccccattggccgaatgcaa

SEQ ID NO: 886 - DNA, 19 bp, Homo sapiens
  siRNA target sequence for AR (NM_000044.2,1970-1988).
cccattggccgaatgcaaa

SEQ ID NO: 887 - DNA, 19 bp, Homo sapiens
  siRNA target sequence for AR (NM_000044.2,2119-2137).
gctccgggacacttgaact

SEQ ID NO: 888 - DNA, 19 bp, Homo sapiens
  siRNA target sequence for AR (NM_000044.2,2143-2161).
ctaccctgtctctctacaa

SEQ ID NO: 889 - DNA, 19 bp, Homo sapiens
  siRNA target sequence for AR (NM_000044.2,2193-2211).
cagagtcgcgactactaca

SEQ ID NO: 890 - DNA, 19 bp, Homo sapiens
  siRNA target sequence for AR (NM_000044.2,2197-2215).
gtcgcgactactacaactt

SEQ ID NO: 891 - DNA, 19 bp, Homo sapiens
  siRNA target sequence for AR (NM_000044.2,2437-2455).
ccgaagaaggccagttgta

SEQ ID NO: 892 - DNA, 19 bp, Homo sapiens
  siRNA target sequence for AR (NM_000044.2,2438-2456).
cgaagaaggccagttgtat

SEQ ID NO: 893 - DNA, 19 bp, Homo sapiens
  siRNA target sequence for AR (NM_000044.2,2900-2918).
gtgcgccagcagaaatgat

SEQ ID NO: 894 - DNA, 19 bp, Homo sapiens
  siRNA target sequence for AR (NM_000044.2,2916-2934).
gattgcactattgataaat

SEQ ID NO: 895 - DNA, 19 bp, Homo sapiens
  siRNA target sequence for AR (NM_000044.2,2959-2977).
gtcgtcttcggaaatgtta

SEQ ID NO: 896 - DNA, 19 bp, Homo sapiens
  siRNA target sequence for AR (NM_000044.2,3092-3110).
gctgacagtgtcacacatt

SEQ ID NO: 897 - DNA, 19 bp, Homo sapiens
  siRNA target sequence for AR (NM_000044.2,3175-3193).
gtgctggacacgacaacaa

SEQ ID NO: 898 - DNA, 19 bp, Homo sapiens
  siRNA target sequence for AR (NM_000044.2,3218-3236).
gctctctagcctcaatgaa

SEQ ID NO: 899 - DNA, 19 bp, Homo sapiens
  siRNA target sequence for AR (NM_000044.2,3241-3259).
gagagagacagcttgtaca

SEQ ID NO: 900 - DNA, 19 bp, Homo sapiens
  siRNA target sequence for AR (NM_000044.2,3286-3304).
ctggcttccgcaacttaca

SEQ ID NO: 901 - DNA, 19 bp, Homo sapiens
  siRNA target sequence for AR (NM_000044.2,3311-3329).
cgaccagatggctgtcatt

SEQ ID NO: 902 - DNA, 19 bp, Homo sapiens
  siRNA target sequence for AR (NM_000044.2,3372-3390).
cgatccttcaccaatgtca

SEQ ID NO: 903 - DNA, 19 bp, Homo sapiens
  siRNA target sequence for AR (NM_000044.2,3411-3429).
gcccctgatctggttttca

SEQ ID NO: 904 - DNA, 19 bp, Homo sapiens
  siRNA target sequence for AR (NM_000044.2,3412-3430).
cccctgatctggttttcaa

SEQ ID NO: 905 - DNA, 19 bp, Homo sapiens
  siRNA target sequence for AR (NM_000044.2,3481-3499).
ggcacctctctcaagagtt

SEQ ID NO: 906 - DNA, 19 bp, Homo sapiens
  siRNA target sequence for AR (NM_000044.2,3548-3566).
gctactcttcagcattatt

SEQ ID NO: 907 - DNA, 19 bp, Homo sapiens
  siRNA target sequence for AR (NM_000044.2,3600-3618).
gatgaacttcgaatgaact

SEQ ID NO: 908 - DNA, 19 bp, Homo sapiens
  siRNA target sequence for AR (NM_000044.2,3603-3621).
gaacttcgaatgaactaca

SEQ ID NO: 909 - DNA, 19 bp, Homo sapiens
  siRNA target sequence for AR (NM_000044.2,3606-3624).
cttcgaatgaactacatca

SEQ ID NO: 910 - DNA, 19 bp, Homo sapiens
  siRNA target sequence for AR (NM_000044.2,3626-3644).
ggaactcgatcgtatcatt

SEQ ID NO: 911 - DNA, 19 bp, Homo sapiens
  siRNA target sequence for AR (NM_000044.2,3630-3648).
ctcgatcgtatcattgcat

SEQ ID NO: 912 - DNA, 19 bp, Homo sapiens
  siRNA target sequence for AR (NM_000044.2,3727-3745).
cgagagagctgcatcagtt

SEQ ID NO: 913 - DNA, 19 bp, Homo sapiens
  siRNA target sequence for AR (NM_000044.2,3845-3863).
gaaagtcaagcccatctat

SEQ ID NO: 914 - DNA, 19 bp, Homo sapiens
  siRNA target sequence for ARNT (NM_001668.2,159-177).
gccaaccccgaaatgacat

SEQ ID NO: 915 - DNA, 19 bp, Homo sapiens
  siRNA target sequence for ARNT (NM_001668.2,164-182).
ccccgaaatgacatcagat

SEQ ID NO: 916 - DNA, 19 bp, Homo sapiens
  siRNA target sequence for ARNT (NM_001668.2,167-185).
cgaaatgacatcagatgta

SEQ ID NO: 917 - DNA, 19 bp, Homo sapiens
  siRNA target sequence for ARNT (NM_001668.2,300-318).
ggagaagggaacagtaaat

SEQ ID NO: 918 - DNA, 19 bp, Homo sapiens
  siRNA target sequence for ARNT (NM_001668.2,336-354).
gatcagatgtctaacgata

SEQ ID NO: 919 - DNA, 19 bp, Homo sapiens
  siRNA target sequence for ARNT (NM_001668.2,383-401).
gcagagctctgcggataaa

SEQ ID NO: 920 - DNA, 19 bp, Homo sapiens
  siRNA target sequence for ARNT (NM_001668.2,513-531).
cgaaaaccagacaagctaa

SEQ ID NO: 921 - DNA, 19 bp, Homo sapiens
  siRNA target sequence for ARNT (NM_001668.2,536-554).
cttacgcatggcagtttct

SEQ ID NO: 922 - DNA, 19 bp, Homo sapiens
  siRNA target sequence for ARNT (NM_001668.2,693-711).
ggcagggtggtgtatgtgt

SEQ ID NO: 923 - DNA, 19 bp, Homo sapiens
  siRNA target sequence for ARNT (NM_001668.2,718-736).
ccgtgactcctgttttgaa

SEQ ID NO: 924 - DNA, 19 bp, Homo sapiens
  siRNA target sequence for ARNT (NM_001668.2,760-778).
gcagcacactctatgatca

SEQ ID NO: 925 - DNA, 19 bp, Homo sapiens
  siRNA target sequence for ARNT (NM_001668.2,843-861).
gggcgtatcctggatctaa

SEQ ID NO: 926 - DNA, 19 bp, Homo sapiens
  siRNA target sequence for ARNT (NM_001668.2,844-862).
ggcgtatcctggatctaaa

SEQ ID NO: 927 - DNA, 19 bp, Homo sapiens
  siRNA target sequence for ARNT (NM_001668.2,846-864).
cgtatcctggatctaaaga

SEQ ID NO: 928 - DNA, 19 bp, Homo sapiens
  siRNA target sequence for ARNT (NM_001668.2,893-911).
gtcttccatgagaatgtgt

SEQ ID NO: 929 - DNA, 19 bp, Homo sapiens
  siRNA target sequence for ARNT (NM_001668.2,914-932).
gggctcaaggagatcgttt

SEQ ID NO: 930 - DNA, 19 bp, Homo sapiens
  siRNA target sequence for ARNT (NM_001668.2,915-933).
ggctcaaggagatcgttta

SEQ ID NO: 931 - DNA, 19 bp, Homo sapiens
  siRNA target sequence for ARNT (NM_001668.2,916-934).
gctcaaggagatcgtttat

SEQ ID NO: 932 - DNA, 19 bp, Homo sapiens
  siRNA target sequence for ARNT (NM_001668.2,917-935).
ctcaaggagatcgtttatt

SEQ ID NO: 933 - DNA, 19 bp, Homo sapiens
  siRNA target sequence for ARNT (NM_001668.2,965-983).
ggacccagtttctgtgaat

SEQ ID NO: 934 - DNA, 19 bp, Homo sapiens
  siRNA target sequence for ARNT (NM_001668.2,1164-1182).
ggcagattgcaggtaacta

SEQ ID NO: 935 - DNA, 19 bp, Homo sapiens
  siRNA target sequence for ARNT (NM_001668.2,1166-1184).
cagattgcaggtaactagt

SEQ ID NO: 936 - DNA, 19 bp, Homo sapiens
  siRNA target sequence for ARNT (NM_001668.2,1193-1211).
ctgtacagacatgagtaat

SEQ ID NO: 937 - DNA, 19 bp, Homo sapiens
  siRNA target sequence for ARNT (NM_001668.2,1310-1328).
ggaactcttaggaaagaat

SEQ ID NO: 938 - DNA, 19 bp, Homo sapiens
  siRNA target sequence for ARNT (NM_001668.2,1375-1393).
gcttccaacaggtagtgaa

SEQ ID NO: 939 - DNA, 19 bp, Homo sapiens
  siRNA target sequence for ARNT (NM_001668.2,1376-1394).
cttccaacaggtagtgaaa

SEQ ID NO: 940 - DNA, 19 bp, Homo sapiens
  siRNA target sequence for ARNT (NM_001668.2,1431-1449).
cggtctaagaaccaagaat

SEQ ID NO: 941 - DNA, 19 bp, Homo sapiens
  siRNA target sequence for ARNT (NM_001668.2,1484-1502).
gaacccttactcagatgaa

SEQ ID NO: 942 - DNA, 19 bp, Homo sapiens
  siRNA target sequence for ARNT (NM_001668.2,1487-1505).
cccttactcagatgaaatt

SEQ ID NO: 943 - DNA, 19 bp, Homo sapiens
  siRNA target sequence for ARNT (NM_001668.2,1519-1537).
gtaccaacaccaatgtgaa

SEQ ID NO: 944 - DNA, 19 bp, Homo sapiens
  siRNA target sequence for ARNT (NM_001668.2,1772-1790).
gaagtcagatggtttattt

SEQ ID NO: 945 - DNA, 19 bp, Homo sapiens
  siRNA target sequence for ARNT (NM_001668.2,1835-1853).
caatgcggatcagagtaaa

SEQ ID NO: 946 - DNA, 19 bp, Homo sapiens
  siRNA target sequence for ARNT (NM_001668.2,2236-2254).
ccaatcgtggatctaactt

SEQ ID NO: 947 - DNA, 19 bp, Homo sapiens
  siRNA target sequence for ARNT (NM_001668.2,2237-2255).
caatcgtggatctaacttt

SEQ ID NO: 948 - DNA, 19 bp, Homo sapiens
  siRNA target sequence for ARNT (NM_001668.2,2346-2364).
catcatcgttcaagttcta

SEQ ID NO: 949 - DNA, 19 bp, Homo sapiens
  siRNA target sequence for ARNT (NM_001668.2,2359-2377).
gttctagtgagcaacatgt

SEQ ID NO: 950 - DNA, 19 bp, Homo sapiens
  siRNA target sequence for ARNT (NM_001668.2,2362-2380).
ctagtgagcaacatgttca

SEQ ID NO: 951 - DNA, 19 bp, Homo sapiens
  siRNA target sequence for ARNT (NM_001668.2,2469-2487).
gaagaattccctgatctaa

SEQ ID NO: 952 - DNA, 19 bp, Homo sapiens
  siRNA target sequence for ARNT (NM_001668.2,2472-2490).
gaattccctgatctaacta

SEQ ID NO: 953 - DNA, 19 bp, Homo sapiens
  siRNA target sequence for ARNT2 (NM_014862.1,356-374).
gccgtctcgcacatgaagt

SEQ ID NO: 954 - DNA, 19 bp, Homo sapiens
  siRNA target sequence for ARNT2 (NM_014862.1,497-515).
gagacagggcgagtgattt

SEQ ID NO: 955 - DNA, 19 bp, Homo sapiens
  siRNA target sequence for ARNT2 (NM_014862.1,501-519).
cagggcgagtgatttatgt

SEQ ID NO: 956 - DNA, 19 bp, Homo sapiens
  siRNA target sequence for ARNT2 (NM_014862.1,503-521).
gggcgagtgatttatgtgt

SEQ ID NO: 957 - DNA, 19 bp, Homo sapiens
  siRNA target sequence for ARNT2 (NM_014862.1,630-648).
gcacctcagaaaactcaat

SEQ ID NO: 958 - DNA, 19 bp, Homo sapiens
  siRNA target sequence for ARNT2 (NM_014862.1,634-652).
ctcagaaaactcaatgaca

SEQ ID NO: 959 - DNA, 19 bp, Homo sapiens
  siRNA target sequence for ARNT2 (NM_014862.1,673-691).
gactgggacggtcaagaaa

SEQ ID NO: 960 - DNA, 19 bp, Homo sapiens
  siRNA target sequence for ARNT2 (NM_014862.1,675-693).
ctgggacggtcaagaaaga

SEQ ID NO: 961 - DNA, 19 bp, Homo sapiens
  siRNA target sequence for ARNT2 (NM_014862.1,785-803).
cctctaaacagaataacca

SEQ ID NO: 962 - DNA, 19 bp, Homo sapiens
  siRNA target sequence for ARNT2 (NM_014862.1,828-846).
gccttggccctgtgaaaga

SEQ ID NO: 963 - DNA, 19 bp, Homo sapiens
  siRNA target sequence for ARNT2 (NM_014862.1,990-1008).
ccagctctcctgtatgcat

SEQ ID NO: 964 - DNA, 19 bp, Homo sapiens
  siRNA target sequence for ARNT2 (NM_014862.1,999-1017).
ctgtatgcatggacatgaa

SEQ ID NO: 965 - DNA, 19 bp, Homo sapiens
  siRNA target sequence for ARNT2 (NM_014862.1,1050-1068).
ggcataactccgatggaat

SEQ ID NO: 966 - DNA, 19 bp, Homo sapiens
  siRNA target sequence for ARNT2 (NM_014862.1,1059-1077).
ccgatggaatcatcacatt

SEQ ID NO: 967 - DNA, 19 bp, Homo sapiens
  siRNA target sequence for ARNT2 (NM_014862.1,1081-1099).
ggatccaagatgtatcagt

SEQ ID NO: 968 - DNA, 19 bp, Homo sapiens
  siRNA target sequence for ARNT2 (NM_014862.1,1220-1238).
ctgtcggtcatgtatcgat

SEQ ID NO: 969 - DNA, 19 bp, Homo sapiens
  siRNA target sequence for ARNT2 (NM_014862.1,1222-1240).
gtcggtcatgtatcgattt

SEQ ID NO: 970 - DNA, 19 bp, Homo sapiens
  siRNA target sequence for ARNT2 (NM_014862.1,1385-1403).
cagagagatggattgtcat

SEQ ID NO: 971 - DNA, 19 bp, Homo sapiens
  siRNA target sequence for ARNT2 (NM_014862.1,1394-1412).
ggattgtcatcgtatgact

SEQ ID NO: 972 - DNA, 19 bp, Homo sapiens
  siRNA target sequence for ARNT2 (NM_014862.1,1395-1413).
gattgtcatcgtatgactt

SEQ ID NO: 973 - DNA, 19 bp, Homo sapiens
  siRNA target sequence for ARNT2 (NM_014862.1,1539-1557).
gtgcatcggagaagaagat

SEQ ID NO: 974 - DNA, 19 bp, Homo sapiens
  siRNA target sequence for ARNT2 (NM_014862.1,1580-1598).
ggaacccagcagatctact

SEQ ID NO: 975 - DNA, 19 bp, Homo sapiens
  siRNA target sequence for ARNT2 (NM_014862.1,1661-1679).
gtgcctggagtgaatgata

SEQ ID NO: 976 - DNA, 19 bp, Homo sapiens
  siRNA target sequence for ARNT2 (NM_014862.1,2121-2139).
ggactggcaactataacat

SEQ ID NO: 977 - DNA, 19 bp, Homo sapiens
  siRNA target sequence for ARNT2 (NM_014862.1,2131-2149).
ctataacatcgaagacttt

SEQ ID NO: 978 - DNA, 19 bp, Homo sapiens
  siRNA target sequence for ARNTL (NM_001178.2,381-399).
gagaatggacatttcttca

SEQ ID NO: 979 - DNA, 19 bp, Homo sapiens
  siRNA target sequence for ARNTL (NM_001178.2,458-476).
ccagtggtgtggattgcaa

SEQ ID NO: 980 - DNA, 19 bp, Homo sapiens
  siRNA target sequence for ARNTL (NM_001178.2,500-518).
ctgactaccaagaaagcat

SEQ ID NO: 981 - DNA, 19 bp, Homo sapiens
  siRNA target sequence for ARNTL (NM_001178.2,537-555).
ccctcatggaaggttagaa

SEQ ID NO: 982 - DNA, 19 bp, Homo sapiens
  siRNA target sequence for ARNTL (NM_001178.2,538-556).
cctcatggaaggttagaat

SEQ ID NO: 983 - DNA, 19 bp, Homo sapiens
  siRNA target sequence for ARNTL (NM_001178.2,539-557).
ctcatggaaggttagaata

SEQ ID NO: 984 - DNA, 19 bp, Homo sapiens
  siRNA target sequence for ARNTL (NM_001178.2,541-559).
catggaaggttagaatata

SEQ ID NO: 985 - DNA, 19 bp, Homo sapiens
  siRNA target sequence for ARNTL (NM_001178.2,596-614).
ctcacagtcagattgaaaa

SEQ ID NO: 986 - DNA, 19 bp, Homo sapiens
  siRNA target sequence for ARNTL (NM_001178.2,616-634).
cggcgtcgggataaaatga

SEQ ID NO: 987 - DNA, 19 bp, Homo sapiens
  siRNA target sequence for ARNTL (NM_001178.2,617-635).
ggcgtcgggataaaatgaa

SEQ ID NO: 988 - DNA, 19 bp, Homo sapiens
  siRNA target sequence for ARNTL (NM_001178.2,678-696).
cgcaatgtccaggaaatta

SEQ ID NO: 989 - DNA, 19 bp, Homo sapiens
  siRNA target sequence for ARNTL (NM_001178.2,746-764).
gaggtgccaccaatccata

SEQ ID NO: 990 - DNA, 19 bp, Homo sapiens
  siRNA target sequence for ARNTL (NM_001178.2,777-795).
ctacaaaccaacttttcta

SEQ ID NO: 991 - DNA, 19 bp, Homo sapiens
  siRNA target sequence for ARNTL (NM_001178.2,780-798).
caaaccaacttttctatca

SEQ ID NO: 992 - DNA, 19 bp, Homo sapiens
  siRNA target sequence for ARNTL (NM_001178.2,797-815).
cagacgatgaattgaaaca

SEQ ID NO: 993 - DNA, 19 bp, Homo sapiens
  siRNA target sequence for ARNTL (NM_001178.2,860-878).
gtgaccgagggaagatact

SEQ ID NO: 994 - DNA, 19 bp, Homo sapiens
  siRNA target sequence for ARNTL (NM_001178.2,864-882).
ccgagggaagatactcttt

SEQ ID NO: 995 - DNA, 19 bp, Homo sapiens
  siRNA target sequence for ARNTL (NM_001178.2,866-884).
gagggaagatactctttgt

SEQ ID NO: 996 - DNA, 19 bp, Homo sapiens
  siRNA target sequence for ARNTL (NM_001178.2,928-946).
ctgattggtcagagtttgt

SEQ ID NO: 997 - DNA, 19 bp, Homo sapiens
  siRNA target sequence for ARNTL (NM_001178.2,1020-1038).
gcggctcatagatgcaaaa

SEQ ID NO: 998 - DNA, 19 bp, Homo sapiens
  siRNA target sequence for ARNTL (NM_001178.2,1069-1087).
cctgggccatctcgattat

SEQ ID NO: 999 - DNA, 19 bp, Homo sapiens
  siRNA target sequence for ARNTL (NM_001178.2,1072-1090).
gggccatctcgattatgtt

SEQ ID NO: 1000 - DNA, 19 bp, Homo sapiens
  siRNA target sequence for ARNTL (NM_001178.2,1074-1092).
gccatctcgattatgttct

SEQ ID NO: 1001 - DNA, 19 bp, Homo sapiens
  siRNA target sequence for ARNTL (NM_001178.2,1091-1109).
ctggagcacgacgttcttt

SEQ ID NO: 1002 - DNA, 19 bp, Homo sapiens
  siRNA target sequence for ARNTL (NM_001178.2,1093-1111).
ggagcacgacgttctttct

SEQ ID NO: 1003 - DNA, 19 bp, Homo sapiens
  siRNA target sequence for ARNTL (NM_001178.2,1094-1112).
gagcacgacgttctttctt

SEQ ID NO: 1004 - DNA, 19 bp, Homo sapiens
  siRNA target sequence for ARNTL (NM_001178.2,1096-1114).
gcacgacgttctttcttct

SEQ ID NO: 1005 - DNA, 19 bp, Homo sapiens
  siRNA target sequence for ARNTL (NM_001178.2,1136-1154).
cttcagtaaaggttgaaga

SEQ ID NO: 1006 - DNA, 19 bp, Homo sapiens
  siRNA target sequence for ARNTL (NM_001178.2,1166-1184).
cctctacctgctcaaagaa

SEQ ID NO: 1007 - DNA, 19 bp, Homo sapiens
  siRNA target sequence for ARNTL (NM_001178.2,1218-1236).
cagcacaggctatttgaaa

SEQ ID NO: 1008 - DNA, 19 bp, Homo sapiens
  siRNA target sequence for ARNTL (NM_001178.2,1305-1323).
ctgcctcgtcgcaattgga

SEQ ID NO: 1009 - DNA, 19 bp, Homo sapiens
  siRNA target sequence for ARNTL (NM_001178.2,1351-1369).
ccagtgaacggggaaatca

SEQ ID NO: 1010 - DNA, 19 bp, Homo sapiens
  siRNA target sequence for ARNTL (NM_001178.2,1397-1415).
ggcacgcgatagatggaaa

SEQ ID NO: 1011 - DNA, 19 bp, Homo sapiens
  siRNA target sequence for ARNTL (NM_001178.2,1401-1419).
cgcgatagatggaaagttt

SEQ ID NO: 1012 - DNA, 19 bp, Homo sapiens
  siRNA target sequence for ARNTL (NM_001178.2,1403-1421).
cgatagatggaaagtttgt

SEQ ID NO: 1013 - DNA, 19 bp, Homo sapiens
  siRNA target sequence for ARNTL (NM_001178.2,1454-1472).
catatttaccacaagaact

SEQ ID NO: 1014 - DNA, 19 bp, Homo sapiens
  siRNA target sequence for ARNTL (NM_001178.2,1479-1497).
cacatcgtgttatgaatat

SEQ ID NO: 1015 - DNA, 19 bp, Homo sapiens
  siRNA target sequence for ARNTL (NM_001178.2,1549-1567).
cagacgagagaaaaaatta

SEQ ID NO: 1016 - DNA, 19 bp, Homo sapiens
  siRNA target sequence for ARNTL (NM_001178.2,1622-1640).
gtcgatggttcagtttcat

SEQ ID NO: 1017 - DNA, 19 bp, Homo sapiens
  siRNA target sequence for ARNTL (NM_001178.2,1624-1642).
cgatggttcagtttcatga

SEQ ID NO: 1018 - DNA, 19 bp, Homo sapiens
  siRNA target sequence for ARNTL (NM_001178.2,1674-1692).
ctcaactaacactgttgtt

SEQ ID NO: 1019 - DNA, 19 bp, Homo sapiens
  siRNA target sequence for ARNTL (NM_001178.2,1921-1939).
ggctccagcccattgaaca

SEQ ID NO: 1020 - DNA, 19 bp, Homo sapiens
  siRNA target sequence for ARNTL (NM_001178.2,2047-2065).
gagaacccaggttatccat

SEQ ID NO: 1021 - DNA, 19 bp, Homo sapiens
  siRNA target sequence for ARNTL (NM_001178.2,2049-2067).
gaacccaggttatccatat

SEQ ID NO: 1022 - DNA, 19 bp, Homo sapiens
  siRNA target sequence for ARNTL (NM_001178.2,2052-2070).
cccaggttatccatattct

SEQ ID NO: 1023 - DNA, 19 bp, Homo sapiens
  siRNA target sequence for ARNTL (NM_001178.2,2092-2110).
gagaacccccacataggta

SEQ ID NO: 1024 - DNA, 19 bp, Homo sapiens
  siRNA target sequence for ARNTL (NM_001178.2,2098-2116).
ccccacataggtatagaca

SEQ ID NO: 1025 - DNA, 19 bp, Homo sapiens
  siRNA target sequence for ARNTL (NM_001178.2,2099-2117).
cccacataggtatagacat

SEQ ID NO: 1026 - DNA, 19 bp, Homo sapiens
  siRNA target sequence for ARNTL (NM_001178.2,2103-2121).
cataggtatagacatgatt

SEQ ID NO: 1027 - DNA, 19 bp, Homo sapiens
  siRNA target sequence for ARNTL (NM_001178.2,2107-2125).
ggtatagacatgattgaca

SEQ ID NO: 1028 - DNA, 19 bp, Homo sapiens
  siRNA target sequence for ARNTL (NM_001178.2,2108-2126).
gtatagacatgattgacaa

SEQ ID NO: 1029 - DNA, 19 bp, Homo sapiens
  siRNA target sequence for ARNTL (NM_001178.2,2124-2142).
caacgaccaaggatcaagt

SEQ ID NO: 1030 - DNA, 19 bp, Homo sapiens
  siRNA target sequence for ARNTL (NM_001178.2,2127-2145).
cgaccaaggatcaagtagt

SEQ ID NO: 1031 - DNA, 19 bp, Homo sapiens
  siRNA target sequence for ARNTL (NM_001178.2,2141-2159).
gtagtcccagtaatgatga

SEQ ID NO: 1032 - DNA, 19 bp, Homo sapiens
  siRNA target sequence for ARNTL (NM_001178.2,2209-2227).
ggtggccctgttgacttta

SEQ ID NO: 1033 - DNA, 19 bp, Homo sapiens
  siRNA target sequence for ARNTL (NM_001178.2,2213-2231).
gccctgttgactttagtga

SEQ ID NO: 1034 - DNA, 19 bp, Homo sapiens
  siRNA target sequence for ARNTL2 (NM_020183.3,144-162).
ctcacacatgacagagttt

SEQ ID NO: 1035 - DNA, 19 bp, Homo sapiens
  siRNA target sequence for ARNTL2 (NM_020183.3,153-171).
gacagagtttccacgaaaa

SEQ ID NO: 1036 - DNA, 19 bp, Homo sapiens
  siRNA target sequence for ARNTL2 (NM_020183.3,163-181).
ccacgaaaacgcaaaggaa

SEQ ID NO: 1037 - DNA, 19 bp, Homo sapiens
  siRNA target sequence for ARNTL2 (NM_020183.3,239-257).
ctcagaatccccttaccta

SEQ ID NO: 1038 - DNA, 19 bp, Homo sapiens
  siRNA target sequence for ARNTL2 (NM_020183.3,243-261).
gaatccccttacctatctt

SEQ ID NO: 1039 - DNA, 19 bp, Homo sapiens
  siRNA target sequence for ARNTL2 (NM_020183.3,249-267).
ccttacctatcttctttca

SEQ ID NO: 1040 - DNA, 19 bp, Homo sapiens
  siRNA target sequence for ARNTL2 (NM_020183.3,441-459).
gcgtaaactggacaaactt

SEQ ID NO: 1041 - DNA, 19 bp, Homo sapiens
  siRNA target sequence for ARNTL2 (NM_020183.3,442-460).
cgtaaactggacaaactta

SEQ ID NO: 1042 - DNA, 19 bp, Homo sapiens
  siRNA target sequence for ARNTL2 (NM_020183.3,448-466).
ctggacaaacttacagttt

SEQ ID NO: 1043 - DNA, 19 bp, Homo sapiens
  siRNA target sequence for ARNTL2 (NM_020183.3,450-468).
ggacaaacttacagtttta

SEQ ID NO: 1044 - DNA, 19 bp, Homo sapiens
  siRNA target sequence for ARNTL2 (NM_020183.3,451-469).
gacaaacttacagttttaa

SEQ ID NO: 1045 - DNA, 19 bp, Homo sapiens
  siRNA target sequence for ARNTL2 (NM_020183.3,470-488).
gaatggctgttcaacactt

SEQ ID NO: 1046 - DNA, 19 bp, Homo sapiens
  siRNA target sequence for ARNTL2 (NM_020183.3,481-499).
caacacttgagatctttaa

SEQ ID NO: 1047 - DNA, 19 bp, Homo sapiens
  siRNA target sequence for ARNTL2 (NM_020183.3,494-512).
ctttaaaaggcttgacaaa

SEQ ID NO: 1048 - DNA, 19 bp, Homo sapiens
  siRNA target sequence for ARNTL2 (NM_020183.3,561-579).
gctcagacatttaatcctt

SEQ ID NO: 1049 - DNA, 19 bp, Homo sapiens
  siRNA target sequence for ARNTL2 (NM_020183.3,587-605).
cagaaggcttcttatttgt

SEQ ID NO: 1050 - DNA, 19 bp, Homo sapiens
  siRNA target sequence for ARNTL2 (NM_020183.3,680-698).
gtttgactggacaaagctt

SEQ ID NO: 1051 - DNA, 19 bp, Homo sapiens
  siRNA target sequence for ARNTL2 (NM_020183.3,695-713).
gcttatttgacttcttaca

SEQ ID NO: 1052 - DNA, 19 bp, Homo sapiens
  siRNA target sequence for ARNTL2 (NM_020183.3,696-714).
cttatttgacttcttacat

SEQ ID NO: 1053 - DNA, 19 bp, Homo sapiens
  siRNA target sequence for ARNTL2 (NM_020183.3,728-746).
ccaaagtaaaggaacaact

SEQ ID NO: 1054 - DNA, 19 bp, Homo sapiens
  siRNA target sequence for ARNTL2 (NM_020183.3,797-815).
gtttgcaagttcacagtaa

SEQ ID NO: 1055 - DNA, 19 bp, Homo sapiens
  siRNA target sequence for ARNTL2 (NM_020183.3,826-844).
ggaaggacacgtgtgtatt

SEQ ID NO: 1056 - DNA, 19 bp, Homo sapiens
  siRNA target sequence for ARNTL2 (NM_020183.3,845-863).
ctggctcaagacgatcttt

SEQ ID NO: 1057 - DNA, 19 bp, Homo sapiens
  siRNA target sequence for ARNTL2 (NM_020183.3,847-865).
ggctcaagacgatcttttt

SEQ ID NO: 1058 - DNA, 19 bp, Homo sapiens
  siRNA target sequence for ARNTL2 (NM_020183.3,860-878).
cttttttctgtcggataaa

SEQ ID NO: 1059 - DNA, 19 bp, Homo sapiens
  siRNA target sequence for ARNTL2 (NM_020183.3,869-887).
gtcggataaagagttgtaa

SEQ ID NO: 1060 - DNA, 19 bp, Homo sapiens
  siRNA target sequence for ARNTL2 (NM_020183.3,910-928).
ggatgcttacccaactcaa

SEQ ID NO: 1061 - DNA, 19 bp, Homo sapiens
  siRNA target sequence for ARNTL2 (NM_020183.3,911-929).
gatgcttacccaactcaaa

SEQ ID NO: 1062 - DNA, 19 bp, Homo sapiens
  siRNA target sequence for ARNTL2 (NM_020183.3,961-979).
cattgcactggttacttga

SEQ ID NO: 1063 - DNA, 19 bp, Homo sapiens
  siRNA target sequence for ARNTL2 (NM_020183.3,983-1001).
gctggcctccaaatattgt

SEQ ID NO: 1064 - DNA, 19 bp, Homo sapiens
  siRNA target sequence for ARNTL2 (NM_020183.3,1066-1084).
ggaagattacagccatata

SEQ ID NO: 1065 - DNA, 19 bp, Homo sapiens
  siRNA target sequence for ARNTL2 (NM_020183.3,1067-1085).
gaagattacagccatatat

SEQ ID NO: 1066 - DNA, 19 bp, Homo sapiens
  siRNA target sequence for ARNTL2 (NM_020183.3,1114-1132).
gtgaaaccaactgaattta

SEQ ID NO: 1067 - DNA, 19 bp, Homo sapiens
  siRNA target sequence for ARNTL2 (NM_020183.3,1138-1156).
cggtttgcagtgaatggaa

SEQ ID NO: 1068 - DNA, 19 bp, Homo sapiens
  siRNA target sequence for ARNTL2 (NM_020183.3,1181-1199).
caacagcgattttaggata

SEQ ID NO: 1069 - DNA, 19 bp, Homo sapiens
  siRNA target sequence for ARNTL2 (NM_020183.3,1218-1236).
gggaacttcttgttatgaa

SEQ ID NO: 1070 - DNA, 19 bp, Homo sapiens
  siRNA target sequence for ARNTL2 (NM_020183.3,1219-1237).
ggaacttcttgttatgaat

SEQ ID NO: 1071 - DNA, 19 bp, Homo sapiens
  siRNA target sequence for ARNTL2 (NM_020183.3,1309-1327).
cttacagattcctacaaat

SEQ ID NO: 1072 - DNA, 19 bp, Homo sapiens
  siRNA target sequence for ARNTL2 (NM_020183.3,1365-1383).
ccaatggtttagtttcaca

SEQ ID NO: 1073 - DNA, 19 bp, Homo sapiens
  siRNA target sequence for ARNTL2 (NM_020183.3,1382-1400).
caaatccttggacaaaaga

SEQ ID NO: 1074 - DNA, 19 bp, Homo sapiens
  siRNA target sequence for ARNTL2 (NM_020183.3,1418-1436).
ctgtcaacactttagtttt

SEQ ID NO: 1075 - DNA, 19 bp, Homo sapiens
  siRNA target sequence for ARNTL2 (NM_020183.3,1471-1489).
ccttgtagctctcaatcat

SEQ ID NO: 1076 - DNA, 19 bp, Homo sapiens
  siRNA target sequence for ARNTL2 (NM_020183.3,1479-1497).
ctctcaatcatcagaagaa

SEQ ID NO: 1077 - DNA, 19 bp, Homo sapiens
  siRNA target sequence for ARNTL2 (NM_020183.3,1602-1620).
gaggttacagtcttcttca

SEQ ID NO: 1078 - DNA, 19 bp, Homo sapiens
  siRNA target sequence for ARNTL2 (NM_020183.3,1604-1622).
ggttacagtcttcttcata

SEQ ID NO: 1079 - DNA, 19 bp, Homo sapiens
  siRNA target sequence for ARNTL2 (NM_020183.3,1634-1652).
cgagtccaacaggtttaat

SEQ ID NO: 1080 - DNA, 19 bp, Homo sapiens
  siRNA target sequence for ARNTL2 (NM_020183.3,1653-1671).
gaaagatactcatactgta

SEQ ID NO: 1081 - DNA, 19 bp, Homo sapiens
  siRNA target sequence for ARNTL2 (NM_020183.3,1799-1817).
gtgcacagttggatttcga

SEQ ID NO: 1082 - DNA, 19 bp, Homo sapiens
  siRNA target sequence for ARNTL2 (NM_020183.3,1815-1833).
cgatgccctatgtgacaat

SEQ ID NO: 1083 - DNA, 19 bp, Homo sapiens
  siRNA target sequence for ARX (NM_139058.1,40-58).
cccgagtgcaaaagtaaat

SEQ ID NO: 1084 - DNA, 19 bp, Homo sapiens
  siRNA target sequence for ARX (NM_139058.1,464-482).
cctgggacacgctcaagat

SEQ ID NO: 1085 - DNA, 19 bp, Homo sapiens
  siRNA target sequence for ARX (NM_139058.1,967-985).
ctgctgaaacgcaaacaga

SEQ ID NO: 1086 - DNA, 19 bp, Homo sapiens
  siRNA target sequence for ARX (NM_139058.1,1438-1456).
gcattcggcaggctctttt

SEQ ID NO: 1087 - DNA, 19 bp, Homo sapiens
  siRNA target sequence for ARX (NM_139058.1,1578-1596).
cagacgcgcctctagcata

SEQ ID NO: 1088 - DNA, 19 bp, Homo sapiens
  siRNA target sequence for ASCL1 (NM_004316.1,710-728).
cgtcttcgcccgaactgat

SEQ ID NO: 1089 - DNA, 19 bp, Homo sapiens
  siRNA target sequence for ASCL1 (NM_004316.1,886-904).
gccaacaagaagatgagta

SEQ ID NO: 1090 - DNA, 19 bp, Homo sapiens
  siRNA target sequence for ASCL1 (NM_004316.1,920-938).
gctcggcggtcgagtacat

SEQ ID NO: 1091 - DNA, 19 bp, Homo sapiens
  siRNA target sequence for ASCL2 (NM_005170.1,614-632).
gctcagccgtggagtacat

SEQ ID NO: 1092 - DNA, 19 bp, Homo sapiens
  siRNA target sequence for ATF1 (NM_005171.2,240-258).
gaagattcccacaagagta

SEQ ID NO: 1093 - DNA, 19 bp, Homo sapiens
  siRNA target sequence for ATF1 (NM_005171.2,322-340).
ctcaacaggtatcatcttt

SEQ ID NO: 1094 - DNA, 19 bp, Homo sapiens
  siRNA target sequence for ATF1 (NM_005171.2,418-436).
gcccatcttacagaaaaat

SEQ ID NO: 1095 - DNA, 19 bp, Homo sapiens
  siRNA target sequence for ATF1 (NM_005171.2,528-546).
ccaactcccatctatcaga

SEQ ID NO: 1096 - DNA, 19 bp, Homo sapiens
  siRNA target sequence for ATF1 (NM_005171.2,625-643).
gacttcagacattaaccat

SEQ ID NO: 1097 - DNA, 19 bp, Homo sapiens
  siRNA target sequence for ATF1 (NM_005171.2,661-679).
ctcagcaaggtacaactat

SEQ ID NO: 1098 - DNA, 19 bp, Homo sapiens
  siRNA target sequence for ATF1 (NM_005171.2,665-683).
gcaaggtacaactattctt

SEQ ID NO: 1099 - DNA, 19 bp, Homo sapiens
  siRNA target sequence for ATF1 (NM_005171.2,670-688).
gtacaactattcttcagta

SEQ ID NO: 1100 - DNA, 19 bp, Homo sapiens
  siRNA target sequence for ATF1 (NM_005171.2,810-828).
caaactgtggtgatgacat

SEQ ID NO: 1101 - DNA, 19 bp, Homo sapiens
  siRNA target sequence for ATF1 (NM_005171.2,864-882).
gatgacccccaattgaaaa

SEQ ID NO: 1102 - DNA, 19 bp, Homo sapiens
  siRNA target sequence for ATF3 (NM_001674.1,252-270).
gtgtttgaggattttgcta

SEQ ID NO: 1103 - DNA, 19 bp, Homo sapiens
  siRNA target sequence for ATF3 (NM_001674.1,378-396).
ctcggggtgtccatcacaa

SEQ ID NO: 1104 - DNA, 19 bp, Homo sapiens
  siRNA target sequence for ATF3 (NM_001674.1,380-398).
cggggtgtccatcacaaaa

SEQ ID NO: 1105 - DNA, 19 bp, Homo sapiens
  siRNA target sequence for ATF3 (NM_001674.1,404-422).
ggtagcccctgaagaagat

SEQ ID NO: 1106 - DNA, 19 bp, Homo sapiens
  siRNA target sequence for ATF3 (NM_001674.1,436-454).
ggcgacgagaaagaaataa

SEQ ID NO: 1107 - DNA, 19 bp, Homo sapiens
  siRNA target sequence for ATF3 (NM_001674.1,575-593).
cgagaagcagcatttgata

SEQ ID NO: 1108 - DNA, 19 bp, Homo sapiens
  siRNA target sequence for ATF3 (NM_001674.1,662-680).
gagaaacctctttatccaa

SEQ ID NO: 1109 - DNA, 19 bp, Homo sapiens
  siRNA target sequence for ATF3 (NM_004024.2,500-518).
gtgcctgcagcttcagtat

SEQ ID NO: 1110 - DNA, 19 bp, Homo sapiens
  siRNA target sequence for ATF6 (NM_007348.1,69-87).
caccatggagtcacctttt

SEQ ID NO: 1111 - DNA, 19 bp, Homo sapiens
  siRNA target sequence for ATF6 (NM_007348.1,263-281).
gggacatcaacaaccaaat

SEQ ID NO: 1112 - DNA, 19 bp, Homo sapiens
  siRNA target sequence for ATF6 (NM_007348.1,323-341).
ctccagcctcctcaagtta

SEQ ID NO: 1113 - DNA, 19 bp, Homo sapiens
  siRNA target sequence for ATF6 (NM_007348.1,325-343).
ccagcctcctcaagttatt

SEQ ID NO: 1114 - DNA, 19 bp, Homo sapiens
  siRNA target sequence for ATF6 (NM_007348.1,329-347).
cctcctcaagttattcagt

SEQ ID NO: 1115 - DNA, 19 bp, Homo sapiens
  siRNA target sequence for ATF6 (NM_007348.1,356-374).
ctcggtcagtggactctta

SEQ ID NO: 1116 - DNA, 19 bp, Homo sapiens
  siRNA target sequence for ATF6 (NM_007348.1,358-376).
cggtcagtggactcttatt

SEQ ID NO: 1117 - DNA, 19 bp, Homo sapiens
  siRNA target sequence for ATF6 (NM_007348.1,366-384).
ggactcttattcttcaact

SEQ ID NO: 1118 - DNA, 19 bp, Homo sapiens
  siRNA target sequence for ATF6 (NM_007348.1,391-409).
gttcctgaggagttggatt

SEQ ID NO: 1119 - DNA, 19 bp, Homo sapiens
  siRNA target sequence for ATF6 (NM_007348.1,449-467).
gtgaaaactctaatagtct

SEQ ID NO: 1120 - DNA, 19 bp, Homo sapiens
  siRNA target sequence for ATF6 (NM_007348.1,604-622).
gcagcacccaagactcaaa

SEQ ID NO: 1121 - DNA, 19 bp, Homo sapiens
  siRNA target sequence for ATF6 (NM_007348.1,610-628).
cccaagactcaaacaaact

SEQ ID NO: 1122 - DNA, 19 bp, Homo sapiens
  siRNA target sequence for ATF6 (NM_007348.1,839-857).
ctaatcacgtggtgaatgt

SEQ ID NO: 1123 - DNA, 19 bp, Homo sapiens
  siRNA target sequence for ATF6 (NM_007348.1,881-899).
gcccagtgaatggaaaact

SEQ ID NO: 1124 - DNA, 19 bp, Homo sapiens
  siRNA target sequence for ATF6 (NM_007348.1,893-911).
gaaaactttccgtgactaa

SEQ ID NO: 1125 - DNA, 19 bp, Homo sapiens
  siRNA target sequence for ATF6 (NM_007348.1,966-984).
gagacagcaacgtatgata

SEQ ID NO: 1126 - DNA, 19 bp, Homo sapiens
  siRNA target sequence for ATF6 (NM_007348.1,972-990).
gcaacgtatgataaaaaat

SEQ ID NO: 1127 - DNA, 19 bp, Homo sapiens
  siRNA target sequence for ATF6 (NM_007348.1,1004-1022).
gtcagtctcgcaagaagaa

SEQ ID NO: 1128 - DNA, 19 bp, Homo sapiens
  siRNA target sequence for ATF6 (NM_007348.1,1039-1057).
gggttagaggcgagattaa

SEQ ID NO: 1129 - DNA, 19 bp, Homo sapiens
  siRNA target sequence for ATF6 (NM_007348.1,1040-1058).
ggttagaggcgagattaaa

SEQ ID NO: 1130 - DNA, 19 bp, Homo sapiens
  siRNA target sequence for ATF6 (NM_007348.1,1110-1128).
gcggcagctggatgaagtt

SEQ ID NO: 1131 - DNA, 19 bp, Homo sapiens
  siRNA target sequence for ATF6 (NM_007348.1,1112-1130).
ggcagctggatgaagttgt

SEQ ID NO: 1132 - DNA, 19 bp, Homo sapiens
  siRNA target sequence for ATF6 (NM_007348.1,1172-1190).
gagttgtctgtgtgatgat

SEQ ID NO: 1133 - DNA, 19 bp, Homo sapiens
  siRNA target sequence for ATF6 (NM_007348.1,1290-1308).
gcaccttctaggattttct

SEQ ID NO: 1134 - DNA, 19 bp, Homo sapiens
  siRNA target sequence for ATF6 (NM_007348.1,1323-1341).
ggacacatcagatggtatt

SEQ ID NO: 1135 - DNA, 19 bp, Homo sapiens
  siRNA target sequence for ATF6 (NM_007348.1,1324-1342).
gacacatcagatggtatta

SEQ ID NO: 1136 - DNA, 19 bp, Homo sapiens
  siRNA target sequence for ATF6 (NM_007348.1,1408-1426).
gaagaaccattgctttaca

SEQ ID NO: 1137 - DNA, 19 bp, Homo sapiens
  siRNA target sequence for ATF6 (NM_007348.1,1439-1457).
cttgtcagcccctaattaa

SEQ ID NO: 1138 - DNA, 19 bp, Homo sapiens
  siRNA target sequence for ATF6 (NM_007348.1,1469-1487).
ctctcaggttaaatcatga

SEQ ID NO: 1139 - DNA, 19 bp, Homo sapiens
  siRNA target sequence for ATF6 (NM_007348.1,1473-1491).
caggttaaatcatgaactt

SEQ ID NO: 1140 - DNA, 19 bp, Homo sapiens
  siRNA target sequence for ATF6 (NM_007348.1,1489-1507).
cttcgaggatgggttcata

SEQ ID NO: 1141 - DNA, 19 bp, Homo sapiens
  siRNA target sequence for ATF6 (NM_007348.1,1493-1511).
gaggatgggttcatagaca

SEQ ID NO: 1142 - DNA, 19 bp, Homo sapiens
  siRNA target sequence for ATF6 (NM_007348.1,1606-1624).
ctgatggctgttcaataca

SEQ ID NO: 1143 - DNA, 19 bp, Homo sapiens
  siRNA target sequence for ATF6 (NM_007348.1,1608-1626).
gatggctgttcaatacaca

SEQ ID NO: 1144 - DNA, 19 bp, Homo sapiens
  siRNA target sequence for ATF6 (NM_007348.1,1627-1645).
gaaaccactagtagtatca

SEQ ID NO: 1145 - DNA, 19 bp, Homo sapiens
  siRNA target sequence for ATF6 (NM_007348.1,1661-1679).
gtgagctacaagtgtatta

SEQ ID NO: 1146 - DNA, 19 bp, Homo sapiens
  siRNA target sequence for ATF6 (NM_007348.1,1780-1798).
gctaccacccataacaaga

SEQ ID NO: 1147 - DNA, 19 bp, Homo sapiens
  siRNA target sequence for ATF6 (NM_007348.1,1805-1823).
gaccaaaaatgtcaattgt

SEQ ID NO: 1148 - DNA, 19 bp, Homo sapiens
  siRNA target sequence for ATF6 (NM_007348.1,1862-1880).
ggcaggactacgaagtgat

SEQ ID NO: 1149 - DNA, 19 bp, Homo sapiens
  siRNA target sequence for ATF6 (NM_007348.1,1876-1894).
gtgatgatgcagattgact

SEQ ID NO: 1150 - DNA, 19 bp, Homo sapiens
  siRNA target sequence for ATF6 (NM_007348.1,1914-1932).
gatcctccatatcaaaagt

SEQ ID NO: 1151 - DNA, 19 bp, Homo sapiens
  siRNA target sequence for ATF6 (NM_007348.1,2030-2048).
gcaccatccctgagtcatt

SEQ ID NO: 1152 - DNA, 19 bp, Homo sapiens
  siRNA target sequence for ATF7 (NM_006856.1,142-160).
ctgtggacagagatttaca

SEQ ID NO: 1153 - DNA, 19 bp, Homo sapiens
  siRNA target sequence for ATF7 (NM_006856.1,188-206).
cacaagcatgagatgacat

SEQ ID NO: 1154 - DNA, 19 bp, Homo sapiens
  siRNA target sequence for ATF7 (NM_006856.1,236-254).
gtcatcattgcagatcaaa

SEQ ID NO: 1155 - DNA, 19 bp, Homo sapiens
  siRNA target sequence for ATF7 (NM_006856.1,255-273).
cgcctactccaactagatt

SEQ ID NO: 1156 - DNA, 19 bp, Homo sapiens
  siRNA target sequence for ATF7 (NM_006856.1,292-310).
ggtgggactcttcaatgaa

SEQ ID NO: 1157 - DNA, 19 bp, Homo sapiens
  siRNA target sequence for ATF7 (NM_006856.1,295-313).
gggactcttcaatgaacta

SEQ ID NO: 1158 - DNA, 19 bp, Homo sapiens
  siRNA target sequence for ATF7 (NM_006856.1,315-333).
ctagctcctttgaacatga

SEQ ID NO: 1159 - DNA, 19 bp, Homo sapiens
  siRNA target sequence for ATF7 (NM_006856.1,583-601).
gggctatgatccacttcat

SEQ ID NO: 1160 - DNA, 19 bp, Homo sapiens
  siRNA target sequence for ATF7 (NM_006856.1,740-758).
gtacagatgccgtctgtta

SEQ ID NO: 1161 - DNA, 19 bp, Homo sapiens
  siRNA target sequence for ATF7 (NM_006856.1,743-761).
cagatgccgtctgttatat

SEQ ID NO: 1162 - DNA, 19 bp, Homo sapiens
  siRNA target sequence for ATF7 (NM_006856.1,899-917).
caccaagtctcctcaatca

SEQ ID NO: 1163 - DNA, 19 bp, Homo sapiens
  siRNA target sequence for ATF7 (NM_006856.1,1075-1093).
gcgcacagtagatgaagat

SEQ ID NO: 1164 - DNA, 19 bp, Homo sapiens
  siRNA target sequence for ATF7 (NM_006856.1,1213-1231).
gaacattcagctgagtaat

SEQ ID NO: 1165 - DNA, 19 bp, Homo sapiens
  siRNA target sequence for ATF7 (NM_006856.1,1216-1234).
cattcagctgagtaatgaa

SEQ ID NO: 1166 - DNA, 19 bp, Homo sapiens
  siRNA target sequence for ATF7 (NM_006856.1,1277-1295).
ctgttagctcataaagact

SEQ ID NO: 1167 - DNA, 19 bp, Homo sapiens
  siRNA target sequence for ATF7 (NM_006856.1,1321-1339).
gactcaaggctatttagaa

SEQ ID NO: 1168 - DNA, 19 bp, Homo sapiens
  siRNA target sequence for ATF7 (NM_006856.1,1493-1511).
ctgagcatgccgatacaat

SEQ ID NO: 1169 - DNA, 19 bp, Homo sapiens
  siRNA target sequence for ATF7 (NM_006856.1,1503-1521).
cgatacaatcgcatgtaat

SEQ ID NO: 1170 - DNA, 19 bp, Homo sapiens
  siRNA target sequence for ATF7 (NM_006856.1,1508-1526).
caatcgcatgtaatcatga

SEQ ID NO: 1171 - DNA, 19 bp, Homo sapiens
  siRNA target sequence for ATOH1 (NM_005172.1,537-555).
cgaccagctgcgcaatgtt

SEQ ID NO: 1172 - DNA, 19 bp, Homo sapiens
  siRNA target sequence for ATOH1 (NM_005172.1,538-556).
gaccagctgcgcaatgtta

SEQ ID NO: 1173 - DNA, 19 bp, Homo sapiens
  siRNA target sequence for ATOH1 (NM_005172.1,553-571).
gttatcccgtcgttcaaca

SEQ ID NO: 1174 - DNA, 19 bp, Homo sapiens
  siRNA target sequence for ATOH1 (NM_005172.1,576-594).
caagaagctgtccaaatat

SEQ ID NO: 1175 - DNA, 19 bp, Homo sapiens
  siRNA target sequence for ATOH1 (NM_005172.1,601-619).
ctgcagatggcccaaatct

SEQ ID NO: 1176 - DNA, 19 bp, Homo sapiens
  siRNA target sequence for ATOH1 (NM_005172.1,910-928).
gcgatgatggcgcaaaaga

SEQ ID NO: 1177 - DNA, 19 bp, Homo sapiens
  siRNA target sequence for ATOH1 (NM_005172.1,918-936).
ggcgcaaaagaatttgtct

SEQ ID NO: 1178 - DNA, 19 bp, Homo sapiens
  siRNA target sequence for ATOH1 (NM_005172.1,1005-1023).
cagaagcgacggggaattt

SEQ ID NO: 1179 - DNA, 19 bp, Homo sapiens
  siRNA target sequence for ATRX (NM_000489.2,327-345).
cttgcaatgaatcaaaaca

SEQ ID NO: 1180 - DNA, 19 bp, Homo sapiens
  siRNA target sequence for ATRX (NM_000489.2,1521-1539).
gatgctaagtttgaaacaa

SEQ ID NO: 1181 - DNA, 19 bp, Homo sapiens
  siRNA target sequence for ATRX (NM_000489.2,1592-1610).
gtcagaagctaaactttca

SEQ ID NO: 1182 - DNA, 19 bp, Homo sapiens
  siRNA target sequence for ATRX (NM_000489.2,1612-1630).
gaaaacaggtagatagtga

SEQ ID NO: 1183 - DNA, 19 bp, Homo sapiens
  siRNA target sequence for ATRX (NM_000489.2,1678-1696).
gtaccggtggtgaacataa

SEQ ID NO: 1184 - DNA, 19 bp, Homo sapiens
  siRNA target sequence for ATRX (NM_000489.2,1681-1699).
ccggtggtgaacataagaa

SEQ ID NO: 1185 - DNA, 19 bp, Homo sapiens
  siRNA target sequence for ATRX (NM_000489.2,1683-1701).
ggtggtgaacataagaaat

SEQ ID NO: 1186 - DNA, 19 bp, Homo sapiens
  siRNA target sequence for ATRX (NM_000489.2,1689-1707).
gaacataagaaatctgata

SEQ ID NO: 1187 - DNA, 19 bp, Homo sapiens
  siRNA target sequence for ATRX (NM_000489.2,1736-1754).
caacacttctgaagattta

SEQ ID NO: 1188 - DNA, 19 bp, Homo sapiens
  siRNA target sequence for ATRX (NM_000489.2,1832-1850).
gagttcagttgatcatcaa

SEQ ID NO: 1189 - DNA, 19 bp, Homo sapiens
  siRNA target sequence for ATRX (NM_000489.2,1883-1901).
ggagagttcatctgtaaaa

SEQ ID NO: 1190 - DNA, 19 bp, Homo sapiens
  siRNA target sequence for ATRX (NM_000489.2,1929-1947).
ggaggtattaaatcaaaaa

SEQ ID NO: 1191 - DNA, 19 bp, Homo sapiens
  siRNA target sequence for ATRX (NM_000489.2,1951-1969).
cagctaaagtaacaaaaga

SEQ ID NO: 1192 - DNA, 19 bp, Homo sapiens
  siRNA target sequence for ATRX (NM_000489.2,2078-2096).
ccccaagttagagaaatgt

SEQ ID NO: 1193 - DNA, 19 bp, Homo sapiens
  siRNA target sequence for ATRX (NM_000489.2,2116-2134).
gtgataatgagcatttggt

SEQ ID NO: 1194 - DNA, 19 bp, Homo sapiens
  siRNA target sequence for ATRX (NM_000489.2,2133-2151).
gttgaaaatgaagtttcat

SEQ ID NO: 1195 - DNA, 19 bp, Homo sapiens
  siRNA target sequence for ATRX (NM_000489.2,2176-2194).
gaagatccccacgtgtaaa

SEQ ID NO: 1196 - DNA, 19 bp, Homo sapiens
  siRNA target sequence for ATRX (NM_000489.2,2207-2225).
gaggcgaccgacagaaact

SEQ ID NO: 1197 - DNA, 19 bp, Homo sapiens
  siRNA target sequence for ATRX (NM_000489.2,2209-2227).
ggcgaccgacagaaactaa

SEQ ID NO: 1198 - DNA, 19 bp, Homo sapiens
  siRNA target sequence for ATRX (NM_000489.2,2220-2238).
gaaactaaccctgtaacat

SEQ ID NO: 1199 - DNA, 19 bp, Homo sapiens
  siRNA target sequence for ATRX (NM_000489.2,2224-2242).
ctaaccctgtaacatctaa

SEQ ID NO: 1200 - DNA, 19 bp, Homo sapiens
  siRNA target sequence for ATRX (NM_000489.2,2228-2246).
ccctgtaacatctaattca

SEQ ID NO: 1201 - DNA, 19 bp, Homo sapiens
  siRNA target sequence for ATRX (NM_000489.2,2230-2248).
ctgtaacatctaattcaga

SEQ ID NO: 1202 - DNA, 19 bp, Homo sapiens
  siRNA target sequence for ATRX (NM_000489.2,2276-2294).
gaaacaaaaactatcagtt

SEQ ID NO: 1203 - DNA, 19 bp, Homo sapiens
  siRNA target sequence for ATRX (NM_000489.2,2332-2350).
gtgctatagataatcctaa

SEQ ID NO: 1204 - DNA, 19 bp, Homo sapiens
  siRNA target sequence for ATRX (NM_000489.2,2382-2400).
gagactgtggatcaaaatt

SEQ ID NO: 1205 - DNA, 19 bp, Homo sapiens
  siRNA target sequence for ATRX (NM_000489.2,2574-2592).
ggctcagattttgatacta

SEQ ID NO: 1206 - DNA, 19 bp, Homo sapiens
  siRNA target sequence for ATRX (NM_000489.2,2575-2593).
gctcagattttgatactaa

SEQ ID NO: 1207 - DNA, 19 bp, Homo sapiens
  siRNA target sequence for ATRX (NM_000489.2,2576-2594).
ctcagattttgatactaaa

SEQ ID NO: 1208 - DNA, 19 bp, Homo sapiens
  siRNA target sequence for ATRX (NM_000489.2,2607-2625).
gctaagagctctataattt

SEQ ID NO: 1209 - DNA, 19 bp, Homo sapiens
  siRNA target sequence for ATRX (NM_000489.2,2612-2630).
gagctctataatttctaaa

SEQ ID NO: 1210 - DNA, 19 bp, Homo sapiens
  siRNA target sequence for ATRX (NM_000489.2,2644-2662).
cccagtctgagtcttctaa

SEQ ID NO: 1211 - DNA, 19 bp, Homo sapiens
  siRNA target sequence for ATRX (NM_000489.2,2648-2666).
gtctgagtcttctaattat

SEQ ID NO: 1212 - DNA, 19 bp, Homo sapiens
  siRNA target sequence for ATRX (NM_000489.2,2685-2703).
gagataaagagcatgagta

SEQ ID NO: 1213 - DNA, 19 bp, Homo sapiens
  siRNA target sequence for ATRX (NM_000489.2,2693-2711).
gagcatgagtaaaattggt

SEQ ID NO: 1214 - DNA, 19 bp, Homo sapiens
  siRNA target sequence for ATRX (NM_000489.2,2802-2820).
caagggcacaaaaatttga

SEQ ID NO: 1215 - DNA, 19 bp, Homo sapiens
  siRNA target sequence for ATRX (NM_000489.2,2907-2925).
gacacgaccatcatggaat

SEQ ID NO: 1216 - DNA, 19 bp, Homo sapiens
  siRNA target sequence for ATRX (NM_000489.2,2909-2927).
cacgaccatcatggaatta

SEQ ID NO: 1217 - DNA, 19 bp, Homo sapiens
  siRNA target sequence for ATRX (NM_000489.2,2965-2983).
ccactgatggtgtcgataa

SEQ ID NO: 1218 - DNA, 19 bp, Homo sapiens
  siRNA target sequence for ATRX (NM_000489.2,2968-2986).
ctgatggtgtcgataagct

SEQ ID NO: 1219 - DNA, 19 bp, Homo sapiens
  siRNA target sequence for ATRX (NM_000489.2,2970-2988).
gatggtgtcgataagcttt

SEQ ID NO: 1220 - DNA, 19 bp, Homo sapiens
  siRNA target sequence for ATRX (NM_000489.2,2993-3011).
gaaagagcagagttttact

SEQ ID NO: 1221 - DNA, 19 bp, Homo sapiens
  siRNA target sequence for ATRX (NM_000489.2,3129-3147).
gaccagagcgatgaaactt

SEQ ID NO: 1222 - DNA, 19 bp, Homo sapiens
  siRNA target sequence for ATRX (NM_000489.2,3131-3149).
ccagagcgatgaaacttct

SEQ ID NO: 1223 - DNA, 19 bp, Homo sapiens
  siRNA target sequence for ATRX (NM_000489.2,3134-3152).
gagcgatgaaacttctgaa

SEQ ID NO: 1224 - DNA, 19 bp, Homo sapiens
  siRNA target sequence for ATRX (NM_000489.2,3239-3257).
gtatgaatcttcatctgat

SEQ ID NO: 1225 - DNA, 19 bp, Homo sapiens
  siRNA target sequence for ATRX (NM_000489.2,3278-3296).
gcgagaagaaatttgtcat

SEQ ID NO: 1226 - DNA, 19 bp, Homo sapiens
  siRNA target sequence for ATRX (NM_000489.2,3279-3297).
cgagaagaaatttgtcatt

SEQ ID NO: 1227 - DNA, 19 bp, Homo sapiens
  siRNA target sequence for ATRX (NM_000489.2,3399-3417).
gattatgctgagaagtcaa

SEQ ID NO: 1228 - DNA, 19 bp, Homo sapiens
  siRNA target sequence for ATRX (NM_000489.2,3493-3511).
ggtgcaagttgcttggaaa

SEQ ID NO: 1229 - DNA, 19 bp, Homo sapiens
  siRNA target sequence for ATRX (NM_000489.2,3576-3594).
ggttgtaactcttctgata

SEQ ID NO: 1230 - DNA, 19 bp, Homo sapiens
  siRNA target sequence for ATRX (NM_000489.2,3577-3595).
gttgtaactcttctgataa

SEQ ID NO: 1231 - DNA, 19 bp, Homo sapiens
  siRNA target sequence for ATRX (NM_000489.2,3874-3892).
gcagcgatgaacagaaaat

SEQ ID NO: 1232 - DNA, 19 bp, Homo sapiens
  siRNA target sequence for ATRX (NM_000489.2,3896-3914).
gcctgtgactgaaaattta

SEQ ID NO: 1233 - DNA, 19 bp, Homo sapiens
  siRNA target sequence for ATRX (NM_000489.2,3952-3970).
gagatgaagccttatctaa

SEQ ID NO: 1234 - DNA, 19 bp, Homo sapiens
  siRNA target sequence for ATRX (NM_000489.2,3954-3972).
gatgaagccttatctaaat

SEQ ID NO: 1235 - DNA, 19 bp, Homo sapiens
  siRNA target sequence for ATRX (NM_000489.2,4004-4022).
cgacaatgatcctgagaat

SEQ ID NO: 1236 - DNA, 19 bp, Homo sapiens
  siRNA target sequence for ATRX (NM_000489.2,4693-4711).
cacaaaatgctcttaagga

SEQ ID NO: 1237 - DNA, 19 bp, Homo sapiens
  siRNA target sequence for ATRX (NM_000489.2,4716-4734).
gaagagagacgaaaacgta

SEQ ID NO: 1238 - DNA, 19 bp, Homo sapiens
  siRNA target sequence for ATRX (NM_000489.2,4746-4764).
gagcgtgagcgagaaaaat

SEQ ID NO: 1239 - DNA, 19 bp, Homo sapiens
  siRNA target sequence for ATRX (NM_000489.2,4749-4767).
cgtgagcgagaaaaattga

SEQ ID NO: 1240 - DNA, 19 bp, Homo sapiens
  siRNA target sequence for ATRX (NM_000489.2,4797-4815).
cccaccaagtgtccaataa

SEQ ID NO: 1241 - DNA, 19 bp, Homo sapiens
  siRNA target sequence for ATRX (NM_000489.2,5259-5277).
ggctatgagatgtatagaa

SEQ ID NO: 1242 - DNA, 19 bp, Homo sapiens
  siRNA target sequence for ATRX (NM_000489.2,5260-5278).
gctatgagatgtatagaaa

SEQ ID NO: 1243 - DNA, 19 bp, Homo sapiens
  siRNA target sequence for ATRX (NM_000489.2,5303-5321).
gagtcggaaacttaaagaa

SEQ ID NO: 1244 - DNA, 19 bp, Homo sapiens
  siRNA target sequence for ATRX (NM_000489.2,5305-5323).
gtcggaaacttaaagaaat

SEQ ID NO: 1245 - DNA, 19 bp, Homo sapiens
  siRNA target sequence for ATRX (NM_000489.2,5410-5428).
ctaaagctatgaattctat

SEQ ID NO: 1246 - DNA, 19 bp, Homo sapiens
  siRNA target sequence for ATRX (NM_000489.2,5415-5433).
gctatgaattctatacgat

SEQ ID NO: 1247 - DNA, 19 bp, Homo sapiens
  siRNA target sequence for ATRX (NM_000489.2,5537-5555).
ggagttcaggaatagattt

SEQ ID NO: 1248 - DNA, 19 bp, Homo sapiens
  siRNA target sequence for ATRX (NM_000489.2,5538-5556).
gagttcaggaatagattta

SEQ ID NO: 1249 - DNA, 19 bp, Homo sapiens
  siRNA target sequence for ATRX (NM_000489.2,5606-5624).
cagagtgatgaaaaaacgt

SEQ ID NO: 1250 - DNA, 19 bp, Homo sapiens
  siRNA target sequence for ATRX (NM_000489.2,5642-5660).
gatgttagctggatgtgtt

SEQ ID NO: 1251 - DNA, 19 bp, Homo sapiens
  siRNA target sequence for ATRX (NM_000489.2,5677-5695).
cagcattaacaaaattctt

SEQ ID NO: 1252 - DNA, 19 bp, Homo sapiens
  siRNA target sequence for ATRX (NM_000489.2,5696-5714).
gcctccaaaacacgaatat

SEQ ID NO: 1253 - DNA, 19 bp, Homo sapiens
  siRNA target sequence for ATRX (NM_000489.2,5698-5716).
ctccaaaacacgaatatgt

SEQ ID NO: 1254 - DNA, 19 bp, Homo sapiens
  siRNA target sequence for ATRX (NM_000489.2,5700-5718).
ccaaaacacgaatatgtgt

SEQ ID NO: 1255 - DNA, 19 bp, Homo sapiens
  siRNA target sequence for ATRX (NM_000489.2,5701-5719).
caaaacacgaatatgtgtt

SEQ ID NO: 1256 - DNA, 19 bp, Homo sapiens
  siRNA target sequence for ATRX (NM_000489.2,5715-5733).
gtgttagctgtgagaatga

SEQ ID NO: 1257 - DNA, 19 bp, Homo sapiens
  siRNA target sequence for ATRX (NM_000489.2,5742-5760).
cagtgcaagctctatcagt

SEQ ID NO: 1258 - DNA, 19 bp, Homo sapiens
  siRNA target sequence for ATRX (NM_000489.2,5746-5764).
gcaagctctatcagtacta

SEQ ID NO: 1259 - DNA, 19 bp, Homo sapiens
  siRNA target sequence for ATRX (NM_000489.2,5753-5771).
ctatcagtactacttagat

SEQ ID NO: 1260 - DNA, 19 bp, Homo sapiens
  siRNA target sequence for ATRX (NM_000489.2,5875-5893).
ggtgtttgcagctagacta

SEQ ID NO: 1261 - DNA, 19 bp, Homo sapiens
  siRNA target sequence for ATRX (NM_000489.2,5883-5901).
cagctagactacattagca

SEQ ID NO: 1262 - DNA, 19 bp, Homo sapiens
  siRNA target sequence for ATRX (NM_000489.2,5930-5948).
cagtatggatgaatttata

SEQ ID NO: 1263 - DNA, 19 bp, Homo sapiens
  siRNA target sequence for ATRX (NM_000489.2,5983-6001).
gctccgatgattatacaaa

SEQ ID NO: 1264 - DNA, 19 bp, Homo sapiens
  siRNA target sequence for ATRX (NM_000489.2,6075-6093).
gtgattaaggtctggaatt

SEQ ID NO: 1265 - DNA, 19 bp, Homo sapiens
  siRNA target sequence for ATRX (NM_000489.2,6083-6101).
ggtctggaattcaagatct

SEQ ID NO: 1266 - DNA, 19 bp, Homo sapiens
  siRNA target sequence for ATRX (NM_000489.2,6140-6158).
caatccttctgtttcttta

SEQ ID NO: 1267 - DNA, 19 bp, Homo sapiens
  siRNA target sequence for ATRX (NM_000489.2,6208-6226).
ctccagactggtacaaaga

SEQ ID NO: 1268 - DNA, 19 bp, Homo sapiens
  siRNA target sequence for ATRX (NM_000489.2,6210-6228).
ccagactggtacaaagatt

SEQ ID NO: 1269 - DNA, 19 bp, Homo sapiens
  siRNA target sequence for ATRX (NM_000489.2,6211-6229).
cagactggtacaaagattt

SEQ ID NO: 1270 - DNA, 19 bp, Homo sapiens
  siRNA target sequence for ATRX (NM_000489.2,6215-6233).
ctggtacaaagattttgtt

SEQ ID NO: 1271 - DNA, 19 bp, Homo sapiens
  siRNA target sequence for ATRX (NM_000489.2,6221-6239).
caaagattttgttacagat

SEQ ID NO: 1272 - DNA, 19 bp, Homo sapiens
  siRNA target sequence for ATRX (NM_000489.2,6265-6283).
ctgggaaaatggtacttct

SEQ ID NO: 1273 - DNA, 19 bp, Homo sapiens
  siRNA target sequence for ATRX (NM_000489.2,6335-6353).
cagccagtccctcatatct

SEQ ID NO: 1274 - DNA, 19 bp, Homo sapiens
  siRNA target sequence for ATRX (NM_000489.2,6445-6463).
ggcttcgaaacattgacta

SEQ ID NO: 1275 - DNA, 19 bp, Homo sapiens
  siRNA target sequence for ATRX (NM_000489.2,6446-6464).
gcttcgaaacattgactat

SEQ ID NO: 1276 - DNA, 19 bp, Homo sapiens
  siRNA target sequence for ATRX (NM_000489.2,6447-6465).
cttcgaaacattgactatt

SEQ ID NO: 1277 - DNA, 19 bp, Homo sapiens
  siRNA target sequence for ATRX (NM_000489.2,6541-6559).
gaggacgattatttatcat

SEQ ID NO: 1278 - DNA, 19 bp, Homo sapiens
  siRNA target sequence for ATRX (NM_000489.2,6574-6592).
gatctctaggaattaatct

SEQ ID NO: 1279 - DNA, 19 bp, Homo sapiens
  siRNA target sequence for ATRX (NM_000489.2,6598-6616).
ctgctaatcgagtaattat

SEQ ID NO: 1280 - DNA, 19 bp, Homo sapiens
  siRNA target sequence for ATRX (NM_000489.2,6600-6618).
gctaatcgagtaattatat

SEQ ID NO: 1281 - DNA, 19 bp, Homo sapiens
  siRNA target sequence for ATRX (NM_000489.2,6621-6639).
gacgcttcttggaatccat

SEQ ID NO: 1282 - DNA, 19 bp, Homo sapiens
  siRNA target sequence for ATRX (NM_000489.2,6645-6663).
gacatccagagtatattca

SEQ ID NO: 1283 - DNA, 19 bp, Homo sapiens
  siRNA target sequence for ATRX (NM_000489.2,6651-6669).
cagagtatattcagagttt

SEQ ID NO: 1284 - DNA, 19 bp, Homo sapiens
  siRNA target sequence for ATRX (NM_000489.2,6653-6671).
gagtatattcagagtttat

SEQ ID NO: 1285 - DNA, 19 bp, Homo sapiens
  siRNA target sequence for ATRX (NM_000489.2,6679-6697).
gacaaactaagcctgttta

SEQ ID NO: 1286 - DNA, 19 bp, Homo sapiens
  siRNA target sequence for ATRX (NM_000489.2,6720-6738).
ggaaccatggaagataaga

SEQ ID NO: 1287 - DNA, 19 bp, Homo sapiens
  siRNA target sequence for ATRX (NM_000489.2,6721-6739).
gaaccatggaagataagat

SEQ ID NO: 1288 - DNA, 19 bp, Homo sapiens
  siRNA target sequence for ATRX (NM_000489.2,6724-6742).
ccatggaagataagattta

SEQ ID NO: 1289 - DNA, 19 bp, Homo sapiens
  siRNA target sequence for ATRX (NM_000489.2,6757-6775).
ctaagcagtcactgtcttt

SEQ ID NO: 1290 - DNA, 19 bp, Homo sapiens
  siRNA target sequence for ATRX (NM_000489.2,6798-6816).
gtggagcgtcattttacta

SEQ ID NO: 1291 - DNA, 19 bp, Homo sapiens
  siRNA target sequence for ATRX (NM_000489.2,6801-6819).
gagcgtcattttactatga

SEQ ID NO: 1292 - DNA, 19 bp, Homo sapiens
  siRNA target sequence for ATRX (NM_000489.2,6805-6823).
gtcattttactatgaatga

SEQ ID NO: 1293 - DNA, 19 bp, Homo sapiens
  siRNA target sequence for ATRX (NM_000489.2,6814-6832).
ctatgaatgagcttactga

SEQ ID NO: 1294 - DNA, 19 bp, Homo sapiens
  siRNA target sequence for ATRX (NM_000489.2,6841-6859).
cttttgagccagacttatt

SEQ ID NO: 1295 - DNA, 19 bp, Homo sapiens
  siRNA target sequence for ATRX (NM_000489.2,6905-6923).
gctgccaaaggataccata

SEQ ID NO: 1296 - DNA, 19 bp, Homo sapiens
  siRNA target sequence for ATRX (NM_000489.2,6930-6948).
gagctccttcagatacata

SEQ ID NO: 1297 - DNA, 19 bp, Homo sapiens
  siRNA target sequence for ATRX (NM_000489.2,6963-6981).
ggataccatgaacatgatt

SEQ ID NO: 1298 - DNA, 19 bp, Homo sapiens
  siRNA target sequence for ATRX (NM_000489.2,7068-7086).
ctgaccatgcgtttcaaca

SEQ ID NO: 1299 - DNA, 19 bp, Homo sapiens
  siRNA target sequence for ATRX (NM_000489.2,7107-7125).
ccccctgtcagtttcaact

SEQ ID NO: 1300 - DNA, 19 bp, Homo sapiens
  siRNA target sequence for ATRX (NM_000489.2,7113-7131).
gtcagtttcaactctcaaa

SEQ ID NO: 1301 - DNA, 19 bp, Homo sapiens
  siRNA target sequence for ATRX (NM_000489.2,7121-7139).
caactctcaaactccttat

SEQ ID NO: 1302 - DNA, 19 bp, Homo sapiens
  siRNA target sequence for ATRX (NM_000489.2,7257-7275).
caacctcttgaggatataa

SEQ ID NO: 1303 - DNA, 19 bp, Homo sapiens
  siRNA target sequence for ATRX (NM_000489.2,7325-7343).
ggcgttagcattaagtaga

SEQ ID NO: 1304 - DNA, 19 bp, Homo sapiens
  siRNA target sequence for ATRX (NM_000489.2,7328-7346).
gttagcattaagtagacaa

SEQ ID NO: 1305 - DNA, 19 bp, Homo sapiens
  siRNA target sequence for ATRX (NM_000489.2,7355-7373).
ggagcttgatgttaaacga

SEQ ID NO: 1306 - DNA, 19 bp, Homo sapiens
  siRNA target sequence for ATRX (NM_000489.2,7424-7442).
ctgtgttcagcgaatactt

SEQ ID NO: 1307 - DNA, 19 bp, Homo sapiens
  siRNA target sequence for ATRX (NM_000489.2,7428-7446).
gttcagcgaatacttatga

SEQ ID NO: 1308 - DNA, 19 bp, Homo sapiens
  siRNA target sequence for ATRX (NM_000489.2,7484-7502).
gcaacaaatgacttatcaa

SEQ ID NO: 1309 - DNA, 19 bp, Homo sapiens
  siRNA target sequence for ATRX (NM_000489.2,7510-7528).
cactgggtcacctcatgat

SEQ ID NO: 1310 - DNA, 19 bp, Homo sapiens
  siRNA target sequence for ATRX (NM_000489.2,7561-7579).
ctaactaccagcagattga

SEQ ID NO: 1311 - DNA, 19 bp, Homo sapiens
  siRNA target sequence for BACH1 (NM_001186.1,127-145).
gagtgagaactcggttttt

SEQ ID NO: 1312 - DNA, 19 bp, Homo sapiens
  siRNA target sequence for BACH1 (NM_001186.1,136-154).
ctcggtttttgcctatgaa

SEQ ID NO: 1313 - DNA, 19 bp, Homo sapiens
  siRNA target sequence for BACH1 (NM_001186.1,217-235).
gtgcgatgtcaccatcttt

SEQ ID NO: 1314 - DNA, 19 bp, Homo sapiens
  siRNA target sequence for BACH1 (NM_001186.1,276-294).
cggcatgcagcagttactt

SEQ ID NO: 1315 - DNA, 19 bp, Homo sapiens
  siRNA target sequence for BACH1 (NM_001186.1,320-338).
gatggagagctgaacatta

SEQ ID NO: 1316 - DNA, 19 bp, Homo sapiens
  siRNA target sequence for BACH1 (NM_001186.1,350-368).
gaggtgacagttaaaggat

SEQ ID NO: 1317 - DNA, 19 bp, Homo sapiens
  siRNA target sequence for BACH1 (NM_001186.1,389-407).
gcctacactgctaaactga

SEQ ID NO: 1318 - DNA, 19 bp, Homo sapiens
  siRNA target sequence for BACH1 (NM_001186.1,390-408).
cctacactgctaaactgat

SEQ ID NO: 1319 - DNA, 19 bp, Homo sapiens
  siRNA target sequence for BACH1 (NM_001186.1,604-622).
gagggatctagaaactgat

SEQ ID NO: 1320 - DNA, 19 bp, Homo sapiens
  siRNA target sequence for BACH1 (NM_001186.1,607-625).
ggatctagaaactgatgaa

SEQ ID NO: 1321 - DNA, 19 bp, Homo sapiens
  siRNA target sequence for BACH1 (NM_001186.1,725-743).
gccagtcagacatatgagt

SEQ ID NO: 1322 - DNA, 19 bp, Homo sapiens
  siRNA target sequence for BACH1 (NM_001186.1,740-758).
gagtccatgtgcttagaga

SEQ ID NO: 1323 - DNA, 19 bp, Homo sapiens
  siRNA target sequence for BACH1 (NM_001186.1,833-851).
gtccgtactggggaatcta

SEQ ID NO: 1324 - DNA, 19 bp, Homo sapiens
  siRNA target sequence for BACH1 (NM_001186.1,835-853).
ccgtactggggaatctagt

SEQ ID NO: 1325 - DNA, 19 bp, Homo sapiens
  siRNA target sequence for BACH1 (NM_001186.1,956-974).
gacgaaagtaaattagcaa

SEQ ID NO: 1326 - DNA, 19 bp, Homo sapiens
  siRNA target sequence for BACH1 (NM_001186.1,1064-1082).
gaccctcatggactttatt

SEQ ID NO: 1327 - DNA, 19 bp, Homo sapiens
  siRNA target sequence for BACH1 (NM_001186.1,1087-1105).
gtctcttttacacacatat

SEQ ID NO: 1328 - DNA, 19 bp, Homo sapiens
  siRNA target sequence for BACH1 (NM_001186.1,1089-1107).
ctcttttacacacatatga

SEQ ID NO: 1329 - DNA, 19 bp, Homo sapiens
  siRNA target sequence for BACH1 (NM_001186.1,1099-1117).
cacatatgaccaatatggt

SEQ ID NO: 1330 - DNA, 19 bp, Homo sapiens
  siRNA target sequence for BACH1 (NM_001186.1,1109-1127).
caatatggtgacttgaatt

SEQ ID NO: 1331 - DNA, 19 bp, Homo sapiens
  siRNA target sequence for BACH1 (NM_001186.1,1123-1141).
gaattttgctggtatgcaa

SEQ ID NO: 1332 - DNA, 19 bp, Homo sapiens
  siRNA target sequence for BACH1 (NM_001186.1,1130-1148).
gctggtatgcaaaacacaa

SEQ ID NO: 1333 - DNA, 19 bp, Homo sapiens
  siRNA target sequence for BACH1 (NM_001186.1,1175-1193).
ggtacagacgtccaagaaa

SEQ ID NO: 1334 - DNA, 19 bp, Homo sapiens
  siRNA target sequence for BACH1 (NM_001186.1,1176-1194).
gtacagacgtccaagaaaa

SEQ ID NO: 1335 - DNA, 19 bp, Homo sapiens
  siRNA target sequence for BACH1 (NM_001186.1,1181-1199).
gacgtccaagaaaaaacat

SEQ ID NO: 1336 - DNA, 19 bp, Homo sapiens
  siRNA target sequence for BACH1 (NM_001186.1,1183-1201).
cgtccaagaaaaaacattt

SEQ ID NO: 1337 - DNA, 19 bp, Homo sapiens
  siRNA target sequence for BACH1 (NM_001186.1,1211-1229).
caggatttacctttgaaat

SEQ ID NO: 1338 - DNA, 19 bp, Homo sapiens
  siRNA target sequence for BACH1 (NM_001186.1,1297-1315).
ggcagaacacctagcaaaa

SEQ ID NO: 1339 - DNA, 19 bp, Homo sapiens
  siRNA target sequence for BACH1 (NM_001186.1,1418-1436).
gagtgtccgtggttaggta

SEQ ID NO: 1340 - DNA, 19 bp, Homo sapiens
  siRNA target sequence for BACH1 (NM_001186.1,1429-1447).
gttaggtatcaggattagt

SEQ ID NO: 1341 - DNA, 19 bp, Homo sapiens
  siRNA target sequence for BACH1 (NM_001186.1,1493-1511).
gtcaactgcccttttataa

SEQ ID NO: 1342 - DNA, 19 bp, Homo sapiens
  siRNA target sequence for BACH1 (NM_001186.1,1495-1513).
caactgcccttttataagt

SEQ ID NO: 1343 - DNA, 19 bp, Homo sapiens
  siRNA target sequence for BACH1 (NM_001186.1,1530-1548).
gctgttcaagcaatttgga

SEQ ID NO: 1344 - DNA, 19 bp, Homo sapiens
  siRNA target sequence for BACH1 (NM_001186.1,1558-1576).
cgatgattatgtttcagaa

SEQ ID NO: 1345 - DNA, 19 bp, Homo sapiens
  siRNA target sequence for BACH1 (NM_001186.1,1586-1604).
gaaccttgcccatatgctt

SEQ ID NO: 1346 - DNA, 19 bp, Homo sapiens
  siRNA target sequence for BACH1 (NM_001186.1,1594-1612).
cccatatgcttgtgtcatt

SEQ ID NO: 1347 - DNA, 19 bp, Homo sapiens
  siRNA target sequence for BACH1 (NM_001186.1,1595-1613).
ccatatgcttgtgtcatta

SEQ ID NO: 1348 - DNA, 19 bp, Homo sapiens
  siRNA target sequence for BACH1 (NM_001186.1,1687-1705).
ggtaaaactgccattcaat

SEQ ID NO: 1349 - DNA, 19 bp, Homo sapiens
  siRNA target sequence for BACH1 (NM_001186.1,1702-1720).
caatgcacaacggataatt

SEQ ID NO: 1350 - DNA, 19 bp, Homo sapiens
  siRNA target sequence for BACH1 (NM_001186.1,1832-1850).
cagcgctgtcgcaagagaa

SEQ ID NO: 1351 - DNA, 19 bp, Homo sapiens
  siRNA target sequence for BACH1 (NM_001186.1,1834-1852).
gcgctgtcgcaagagaaaa

SEQ ID NO: 1352 - DNA, 19 bp, Homo sapiens
  siRNA target sequence for BACH1 (NM_001186.1,1836-1854).
gctgtcgcaagagaaaact

SEQ ID NO: 1353 - DNA, 19 bp, Homo sapiens
  siRNA target sequence for BACH1 (NM_001186.1,1837-1855).
ctgtcgcaagagaaaactt

SEQ ID NO: 1354 - DNA, 19 bp, Homo sapiens
  siRNA target sequence for BACH1 (NM_001186.1,1848-1866).
gaaaacttgactgtataca

SEQ ID NO: 1355 - DNA, 19 bp, Homo sapiens
  siRNA target sequence for BACH1 (NM_001186.1,2004-2022).
ctctgagtcaagaacaaat

SEQ ID NO: 1356 - DNA, 19 bp, Homo sapiens
  siRNA target sequence for BACH1 (NM_001186.1,2024-2042).
cagatactcgccaagtact

SEQ ID NO: 1357 - DNA, 19 bp, Homo sapiens
  siRNA target sequence for BACH1 (NM_001186.1,2048-2066).
gcagattgcccactttcat

SEQ ID NO: 1358 - DNA, 19 bp, Homo sapiens
  siRNA target sequence for BACH1 (NM_001186.1,2102-2120).
ggtgaactggcgttaccat

SEQ ID NO: 1359 - DNA, 19 bp, Homo sapiens
  siRNA target sequence for BACH1 (NM_001186.1,2108-2126).
ctggcgttaccatcaattt

SEQ ID NO: 1360 - DNA, 19 bp, Homo sapiens
  siRNA target sequence for BACH1 (NM_001186.1,2111-2129).
gcgttaccatcaattttca

SEQ ID NO: 1361 - DNA, 19 bp, Homo sapiens
  siRNA target sequence for BACH1 (NM_001186.1,2113-2131).
gttaccatcaattttcagt

SEQ ID NO: 1362 - DNA, 19 bp, Homo sapiens
  siRNA target sequence for BACH1 (NM_001186.1,2299-2317).
gatgactgataaatgtact

SEQ ID NO: 1363 - DNA, 19 bp, Homo sapiens
  siRNA target sequence for BAPX1 (NM_001189.2,43-61).
caggcgatcctcaacaaga

SEQ ID NO: 1364 - DNA, 19 bp, Homo sapiens
  siRNA target sequence for BAPX1 (NM_001189.2,859-877).
cgcgacgaccagagacaat

SEQ ID NO: 1365 - DNA, 19 bp, Homo sapiens
  siRNA target sequence for BAPX1 (NM_001189.2,860-878).
gcgacgaccagagacaata

SEQ ID NO: 1366 - DNA, 19 bp, Homo sapiens
  siRNA target sequence for BARHL1 (NM_020064.2,214-232).
gggatcgactccattctct

SEQ ID NO: 1367 - DNA, 19 bp, Homo sapiens
  siRNA target sequence for BARHL1 (NM_020064.2,520-538).
gcctgtgcaccctactcta

SEQ ID NO: 1368 - DNA, 19 bp, Homo sapiens
  siRNA target sequence for BARHL1 (NM_020064.2,638-656).
catcggactctgagtataa

SEQ ID NO: 1369 - DNA, 19 bp, Homo sapiens
  siRNA target sequence for BARHL1 (NM_020064.2,641-659).
cggactctgagtataaagt

SEQ ID NO: 1370 - DNA, 19 bp, Homo sapiens
  siRNA target sequence for BARHL1 (NM_020064.2,983-1001).
cgcagagtctggtttccaa

SEQ ID NO: 1371 - DNA, 19 bp, Homo sapiens
  siRNA target sequence for BARX1 (NM_021570.2,656-674).
gagaagcagaagtaccttt

SEQ ID NO: 1372 - DNA, 19 bp, Homo sapiens
  siRNA target sequence for BARX1 (NM_021570.2,675-693).
ccacgccggacagaataga

SEQ ID NO: 1373 - DNA, 19 bp, Homo sapiens
  siRNA target sequence for BARX1 (NM_021570.2,676-694).
cacgccggacagaatagat

SEQ ID NO: 1374 - DNA, 19 bp, Homo sapiens
  siRNA target sequence for BARX1 (NM_021570.2,843-861).
cgagcgagcagcttactga

SEQ ID NO: 1375 - DNA, 19 bp, Homo sapiens
  siRNA target sequence for BARX2 (NM_003658.3,157-175).
cgctacaagactttcatga

SEQ ID NO: 1376 - DNA, 19 bp, Homo sapiens
  siRNA target sequence for BARX2 (NM_003658.3,195-213).
ggagacctgcgattacttt

SEQ ID NO: 1377 - DNA, 19 bp, Homo sapiens
  siRNA target sequence for BARX2 (NM_003658.3,850-868).
cgtgatgtccccttagaga

SEQ ID NO: 1378 - DNA, 19 bp, Homo sapiens
  siRNA target sequence for BARX2 (NM_003658.3,851-869).
gtgatgtccccttagagat

SEQ ID NO: 1379 - DNA, 19 bp, Homo sapiens
  siRNA target sequence for BATF (NM_006399.2,298-316).
caaacaggactcatctgat

SEQ ID NO: 1380 - DNA, 19 bp, Homo sapiens
  siRNA target sequence for BATF (NM_006399.2,334-352).
gaggagggagaaaaatcgt

SEQ ID NO: 1381 - DNA, 19 bp, Homo sapiens
  siRNA target sequence for BATF (NM_006399.2,336-354).
ggagggagaaaaatcgtat

SEQ ID NO: 1382 - DNA, 19 bp, Homo sapiens
  siRNA target sequence for BATF (NM_006399.2,441-459).
ctctacgcaaggagatcaa

SEQ ID NO: 1383 - DNA, 19 bp, Homo sapiens
  siRNA target sequence for BAZ1B (NM_023005.2,643-661).
ctccttagagaagttagta

SEQ ID NO: 1384 - DNA, 19 bp, Homo sapiens
  siRNA target sequence for BAZ1B (NM_023005.2,646-664).
cttagagaagttagtagat

SEQ ID NO: 1385 - DNA, 19 bp, Homo sapiens
  siRNA target sequence for BAZ1B (NM_023005.2,666-684).
ctgcttggttggagatcat

SEQ ID NO: 1386 - DNA, 19 bp, Homo sapiens
  siRNA target sequence for BAZ1B (NM_023005.2,676-694).
ggagatcatgaccaaatat

SEQ ID NO: 1387 - DNA, 19 bp, Homo sapiens
  siRNA target sequence for BAZ1B (NM_023005.2,679-697).
gatcatgaccaaatatgct

SEQ ID NO: 1388 - DNA, 19 bp, Homo sapiens
  siRNA target sequence for BAZ1B (NM_023005.2,790-808).
ggccactgagaagaaatct

SEQ ID NO: 1389 - DNA, 19 bp, Homo sapiens
  siRNA target sequence for BAZ1B (NM_023005.2,792-810).
ccactgagaagaaatctga

SEQ ID NO: 1390 - DNA, 19 bp, Homo sapiens
  siRNA target sequence for BAZ1B (NM_023005.2,936-954).
gtagatcgccacgaaaact

SEQ ID NO: 1391 - DNA, 19 bp, Homo sapiens
  siRNA target sequence for BAZ1B (NM_023005.2,1012-1030).
caaatatgatgtgaaacta

SEQ ID NO: 1392 - DNA, 19 bp, Homo sapiens
  siRNA target sequence for BAZ1B (NM_023005.2,1037-1055).
gaagataagatcatcagta

SEQ ID NO: 1393 - DNA, 19 bp, Homo sapiens
  siRNA target sequence for BAZ1B (NM_023005.2,1060-1078).
gccagcagacagcttgatt

SEQ ID NO: 1394 - DNA, 19 bp, Homo sapiens
  siRNA target sequence for BAZ1B (NM_023005.2,1083-1101).
cagagcgcccaccaaataa

SEQ ID NO: 1395 - DNA, 19 bp, Homo sapiens
  siRNA target sequence for BAZ1B (NM_023005.2,1092-1110).
caccaaataaggagatagt

SEQ ID NO: 1396 - DNA, 19 bp, Homo sapiens
  siRNA target sequence for BAZ1B (NM_023005.2,1102-1120).
ggagatagttcgatacttt

SEQ ID NO: 1397 - DNA, 19 bp, Homo sapiens
  siRNA target sequence for BAZ1B (NM_023005.2,1103-1121).
gagatagttcgatacttta

SEQ ID NO: 1398 - DNA, 19 bp, Homo sapiens
  siRNA target sequence for BAZ1B (NM_023005.2,1117-1135).
ctttatacggcataatgca

SEQ ID NO: 1399 - DNA, 19 bp, Homo sapiens
  siRNA target sequence for BAZ1B (NM_023005.2,1161-1179).
caccttgggtcgtagaaga

SEQ ID NO: 1400 - DNA, 19 bp, Homo sapiens
  siRNA target sequence for BAZ1B (NM_023005.2,1164-1182).
cttgggtcgtagaagatga

SEQ ID NO: 1401 - DNA, 19 bp, Homo sapiens
  siRNA target sequence for BAZ1B (NM_023005.2,1167-1185).
gggtcgtagaagatgaatt

SEQ ID NO: 1402 - DNA, 19 bp, Homo sapiens
  siRNA target sequence for BAZ1B (NM_023005.2,1232-1250).
gatccatacaagtatatga

SEQ ID NO: 1403 - DNA, 19 bp, Homo sapiens
  siRNA target sequence for BAZ1B (NM_023005.2,1322-1340).
gacaactcttctcttagtt

SEQ ID NO: 1404 - DNA, 19 bp, Homo sapiens
  siRNA target sequence for BAZ1B (NM_023005.2,1332-1350).
ctcttagttcaccactaaa

SEQ ID NO: 1405 - DNA, 19 bp, Homo sapiens
  siRNA target sequence for BAZ1B (NM_023005.2,1343-1361).
ccactaaatcctaagttat

SEQ ID NO: 1406 - DNA, 19 bp, Homo sapiens
  siRNA target sequence for BAZ1B (NM_023005.2,1346-1364).
ctaaatcctaagttatggt

SEQ ID NO: 1407 - DNA, 19 bp, Homo sapiens
  siRNA target sequence for BAZ1B (NM_023005.2,1362-1380).
ggtgtcacgtacacttgaa

SEQ ID NO: 1408 - DNA, 19 bp, Homo sapiens
  siRNA target sequence for BAZ1B (NM_023005.2,1392-1410).
gtggctcgccactcaaagt

SEQ ID NO: 1409 - DNA, 19 bp, Homo sapiens
  siRNA target sequence for BAZ1B (NM_023005.2,1394-1412).
ggctcgccactcaaagtga

SEQ ID NO: 1410 - DNA, 19 bp, Homo sapiens
  siRNA target sequence for BAZ1B (NM_023005.2,1476-1494).
ccaataagctgcacactaa

SEQ ID NO: 1411 - DNA, 19 bp, Homo sapiens
  siRNA target sequence for BAZ1B (NM_023005.2,1484-1502).
ctgcacactaactttcaca

SEQ ID NO: 1412 - DNA, 19 bp, Homo sapiens
  siRNA target sequence for BAZ1B (NM_023005.2,1486-1504).
gcacactaactttcacatt

SEQ ID NO: 1413 - DNA, 19 bp, Homo sapiens
  siRNA target sequence for BAZ1B (NM_023005.2,1683-1701).
ccaaaggcacgcagaagat

SEQ ID NO: 1414 - DNA, 19 bp, Homo sapiens
  siRNA target sequence for BAZ1B (NM_023005.2,1731-1749).
cacctaggacctctagtaa

SEQ ID NO: 1415 - DNA, 19 bp, Homo sapiens
  siRNA target sequence for BAZ1B (NM_023005.2,1740-1758).
cctctagtaaacctcataa

SEQ ID NO: 1416 - DNA, 19 bp, Homo sapiens
  siRNA target sequence for BAZ1B (NM_023005.2,1741-1759).
ctctagtaaacctcataaa

SEQ ID NO: 1417 - DNA, 19 bp, Homo sapiens
  siRNA target sequence for BAZ1B (NM_023005.2,1743-1761).
ctagtaaacctcataaaca

SEQ ID NO: 1418 - DNA, 19 bp, Homo sapiens
  siRNA target sequence for BAZ1B (NM_023005.2,1775-1793).
gccctacacctcattgcat

SEQ ID NO: 1419 - DNA, 19 bp, Homo sapiens
  siRNA target sequence for BAZ1B (NM_023005.2,1776-1794).
ccctacacctcattgcata

SEQ ID NO: 1420 - DNA, 19 bp, Homo sapiens
  siRNA target sequence for BAZ1B (NM_023005.2,1783-1801).
cctcattgcatactacaaa

SEQ ID NO: 1421 - DNA, 19 bp, Homo sapiens
  siRNA target sequence for BAZ1B (NM_023005.2,1830-1848).
gcgccctgtcctgtgttat

SEQ ID NO: 1422 - DNA, 19 bp, Homo sapiens
  siRNA target sequence for BAZ1B (NM_023005.2,1840-1858).
ctgtgttatctccaaaaca

SEQ ID NO: 1423 - DNA, 19 bp, Homo sapiens
  siRNA target sequence for BAZ1B (NM_023005.2,1886-1904).
gctcgtctcccagaagaat

SEQ ID NO: 1424 - DNA, 19 bp, Homo sapiens
  siRNA target sequence for BAZ1B (NM_023005.2,1887-1905).
ctcgtctcccagaagaatt

SEQ ID NO: 1425 - DNA, 19 bp, Homo sapiens
  siRNA target sequence for BAZ1B (NM_023005.2,1906-1924).
gcgaagtcttgttcaaaaa

SEQ ID NO: 1426 - DNA, 19 bp, Homo sapiens
  siRNA target sequence for BAZ1B (NM_023005.2,1934-1952).
cttctagagcacaaaaaga

SEQ ID NO: 1427 - DNA, 19 bp, Homo sapiens
  siRNA target sequence for BAZ1B (NM_023005.2,1951-1969).
gaggtgggcttctatgtct

SEQ ID NO: 1428 - DNA, 19 bp, Homo sapiens
  siRNA target sequence for BAZ1B (NM_023005.2,1973-1991).
gaacaacggaaagaatatt

SEQ ID NO: 1429 - DNA, 19 bp, Homo sapiens
  siRNA target sequence for BAZ1B (NM_023005.2,1976-1994).
caacggaaagaatatttga

SEQ ID NO: 1430 - DNA, 19 bp, Homo sapiens
  siRNA target sequence for BAZ1B (NM_023005.2,2088-2106).
ggtatgaggaccaagagtt

SEQ ID NO: 1431 - DNA, 19 bp, Homo sapiens
  siRNA target sequence for BAZ1B (NM_023005.2,2089-2107).
gtatgaggaccaagagtta

SEQ ID NO: 1432 - DNA, 19 bp, Homo sapiens
  siRNA target sequence for BAZ1B (NM_023005.2,2104-2122).
gttaactggcaaaaacctt

SEQ ID NO: 1433 - DNA, 19 bp, Homo sapiens
  siRNA target sequence for BAZ1B (NM_023005.2,2194-2212).
ggaattcttgagctgttat

SEQ ID NO: 1434 - DNA, 19 bp, Homo sapiens
  siRNA target sequence for BAZ1B (NM_023005.2,2195-2213).
gaattcttgagctgttatt

SEQ ID NO: 1435 - DNA, 19 bp, Homo sapiens
  siRNA target sequence for BAZ1B (NM_023005.2,2231-2249).
gatgctcagtatcctatta

SEQ ID NO: 1436 - DNA, 19 bp, Homo sapiens
  siRNA target sequence for BAZ1B (NM_023005.2,2250-2268).
ctgctgtgtcccttatgga

SEQ ID NO: 1437 - DNA, 19 bp, Homo sapiens
  siRNA target sequence for BAZ1B (NM_023005.2,2282-2300).
gataagggtggctttttat

SEQ ID NO: 1438 - DNA, 19 bp, Homo sapiens
  siRNA target sequence for BAZ1B (NM_023005.2,2287-2305).
gggtggctttttatacctt

SEQ ID NO: 1439 - DNA, 19 bp, Homo sapiens
  siRNA target sequence for BAZ1B (NM_023005.2,2288-2306).
ggtggctttttatacctta

SEQ ID NO: 1440 - DNA, 19 bp, Homo sapiens
  siRNA target sequence for BAZ1B (NM_023005.2,2335-2353).
cctcctacaagatgagata

SEQ ID NO: 1441 - DNA, 19 bp, Homo sapiens
  siRNA target sequence for BAZ1B (NM_023005.2,2512-2530).
ggataatgaggtacaagat

SEQ ID NO: 1442 - DNA, 19 bp, Homo sapiens
  siRNA target sequence for BAZ1B (NM_023005.2,2612-2630).
caccggatcctcatgacat

SEQ ID NO: 1443 - DNA, 19 bp, Homo sapiens
  siRNA target sequence for BAZ1B (NM_023005.2,2792-2810).
gggttaggcaaaactgata

SEQ ID NO: 1444 - DNA, 19 bp, Homo sapiens
  siRNA target sequence for BAZ1B (NM_023005.2,2830-2848).
gtttgagccccaagtagat

SEQ ID NO: 1445 - DNA, 19 bp, Homo sapiens
  siRNA target sequence for BAZ1B (NM_023005.2,3043-3061).
catgcgcaggactcctatt

SEQ ID NO: 1446 - DNA, 19 bp, Homo sapiens
  siRNA target sequence for BAZ1B (NM_023005.2,3057-3075).
ctattggcacagatcgaaa

SEQ ID NO: 1447 - DNA, 19 bp, Homo sapiens
  siRNA target sequence for BAZ1B (NM_023005.2,3063-3081).
gcacagatcgaaaccataa

SEQ ID NO: 1448 - DNA, 19 bp, Homo sapiens
  siRNA target sequence for BAZ1B (NM_023005.2,3091-3109).
gctcttctcagatgaagtt

SEQ ID NO: 1449 - DNA, 19 bp, Homo sapiens
  siRNA target sequence for BAZ1B (NM_023005.2,3101-3119).
gatgaagttccaggattat

SEQ ID NO: 1450 - DNA, 19 bp, Homo sapiens
  siRNA target sequence for BAZ1B (NM_023005.2,3147-3165).
gcattgactaccgattcaa

SEQ ID NO: 1451 - DNA, 19 bp, Homo sapiens
  siRNA target sequence for BAZ1B (NM_023005.2,3208-3226).
ctgtcctcgcagtaagaaa

SEQ ID NO: 1452 - DNA, 19 bp, Homo sapiens
  siRNA target sequence for BAZ1B (NM_023005.2,3324-3342).
ggtttttatgtgatagtca

SEQ ID NO: 1453 - DNA, 19 bp, Homo sapiens
  siRNA target sequence for BAZ1B (NM_023005.2,3350-3368).
ctggatgagttgctaaact

SEQ ID NO: 1454 - DNA, 19 bp, Homo sapiens
  siRNA target sequence for BAZ1B (NM_023005.2,3352-3370).
ggatgagttgctaaactgt

SEQ ID NO: 1455 - DNA, 19 bp, Homo sapiens
  siRNA target sequence for BAZ1B (NM_023005.2,3430-3448).
ggacattattcactctatt

SEQ ID NO: 1456 - DNA, 19 bp, Homo sapiens
  siRNA target sequence for BAZ1B (NM_023005.2,3452-3470).
ctagcacggaagccaaatt

SEQ ID NO: 1457 - DNA, 19 bp, Homo sapiens
  siRNA target sequence for BAZ1B (NM_023005.2,3463-3481).
gccaaatttgggtctaaaa

SEQ ID NO: 1458 - DNA, 19 bp, Homo sapiens
  siRNA target sequence for BAZ1B (NM_023005.2,3514-3532).
ccttcgtagtgatctcatt

SEQ ID NO: 1459 - DNA, 19 bp, Homo sapiens
  siRNA target sequence for BAZ1B (NM_023005.2,3519-3537).
gtagtgatctcattgaagt

SEQ ID NO: 1460 - DNA, 19 bp, Homo sapiens
  siRNA target sequence for BAZ1B (NM_023005.2,3536-3554).
gttgcaacaaggttacaaa

SEQ ID NO: 1461 - DNA, 19 bp, Homo sapiens
  siRNA target sequence for BAZ1B (NM_023005.2,3599-3617).
cgggtcatttcattagaga

SEQ ID NO: 1462 - DNA, 19 bp, Homo sapiens
  siRNA target sequence for BAZ1B (NM_023005.2,3650-3668).
cttcaggccagtgtcataa

SEQ ID NO: 1463 - DNA, 19 bp, Homo sapiens
  siRNA target sequence for BAZ1B (NM_023005.2,3769-3787).
ggtagaggaagcaaaggtt

SEQ ID NO: 1464 - DNA, 19 bp, Homo sapiens
  siRNA target sequence for BAZ1B (NM_023005.2,3821-3839).
cgggaagctcagactttct

SEQ ID NO: 1465 - DNA, 19 bp, Homo sapiens
  siRNA target sequence for BAZ1B (NM_023005.2,3885-3903).
gggatatgtccgcagaaaa

SEQ ID NO: 1466 - DNA, 19 bp, Homo sapiens
  siRNA target sequence for BAZ1B (NM_023005.2,3886-3904).
ggatatgtccgcagaaaat

SEQ ID NO: 1467 - DNA, 19 bp, Homo sapiens
  siRNA target sequence for BAZ1B (NM_023005.2,3912-3930).
gcaaagtttgtcgaaagaa

SEQ ID NO: 1468 - DNA, 19 bp, Homo sapiens
  siRNA target sequence for BAZ1B (NM_023005.2,3933-3951).
gtgaggatgacaaattgat

SEQ ID NO: 1469 - DNA, 19 bp, Homo sapiens
  siRNA target sequence for BAZ1B (NM_023005.2,3952-3970).
cttgtgtgatgagtgtaat

SEQ ID NO: 1470 - DNA, 19 bp, Homo sapiens
  siRNA target sequence for BAZ1B (NM_023005.2,4069-4087).
ctcccgtggcaggaactat

SEQ ID NO: 1471 - DNA, 19 bp, Homo sapiens
  siRNA target sequence for BAZ1B (NM_023005.2,4074-4092).
gtggcaggaactatactga

SEQ ID NO: 1472 - DNA, 19 bp, Homo sapiens
  siRNA target sequence for BAZ1B (NM_023005.2,4183-4201).
ggctggtttgcgattgaga

SEQ ID NO: 1473 - DNA, 19 bp, Homo sapiens
  siRNA target sequence for BAZ1B (NM_023005.2,4468-4486).
ggccgaggactactatgat

SEQ ID NO: 1474 - DNA, 19 bp, Homo sapiens
  siRNA target sequence for BAZ1B (NM_023005.2,4470-4488).
ccgaggactactatgatgt

SEQ ID NO: 1475 - DNA, 19 bp, Homo sapiens
  siRNA target sequence for BCL6 (NM_001706.2,363-381).
ccgccatgccagtgatgtt

SEQ ID NO: 1476 - DNA, 19 bp, Homo sapiens
  siRNA target sequence for BCL6 (NM_001706.2,371-389).
ccagtgatgttcttctcaa

SEQ ID NO: 1477 - DNA, 19 bp, Homo sapiens
  siRNA target sequence for BCL6 (NM_001706.2,403-421).
cggagtcgagacatcttga

SEQ ID NO: 1478 - DNA, 19 bp, Homo sapiens
  siRNA target sequence for BCL6 (NM_001706.2,439-457).
gtgagccgtgagcagttta

SEQ ID NO: 1479 - DNA, 19 bp, Homo sapiens
  siRNA target sequence for BCL6 (NM_001706.2,441-459).
gagccgtgagcagtttaga

SEQ ID NO: 1480 - DNA, 19 bp, Homo sapiens
  siRNA target sequence for BCL6 (NM_001706.2,450-468).
gcagtttagagcccataaa

SEQ ID NO: 1481 - DNA, 19 bp, Homo sapiens
  siRNA target sequence for BCL6 (NM_001706.2,451-469).
cagtttagagcccataaaa

SEQ ID NO: 1482 - DNA, 19 bp, Homo sapiens
  siRNA target sequence for BCL6 (NM_001706.2,493-511).
ctgttctatagcatcttta

SEQ ID NO: 1483 - DNA, 19 bp, Homo sapiens
  siRNA target sequence for BCL6 (NM_001706.2,507-525).
ctttacagaccagttgaaa

SEQ ID NO: 1484 - DNA, 19 bp, Homo sapiens
  siRNA target sequence for BCL6 (NM_001706.2,512-530).
cagaccagttgaaatgcaa

SEQ ID NO: 1485 - DNA, 19 bp, Homo sapiens
  siRNA target sequence for BCL6 (NM_001706.2,527-545).
gcaaccttagtgtgatcaa

SEQ ID NO: 1486 - DNA, 19 bp, Homo sapiens
  siRNA target sequence for BCL6 (NM_001706.2,528-546).
caaccttagtgtgatcaat

SEQ ID NO: 1487 - DNA, 19 bp, Homo sapiens
  siRNA target sequence for BCL6 (NM_001706.2,531-549).
ccttagtgtgatcaatcta

SEQ ID NO: 1488 - DNA, 19 bp, Homo sapiens
  siRNA target sequence for BCL6 (NM_001706.2,681-699).
ggacacttgccggaagttt

SEQ ID NO: 1489 - DNA, 19 bp, Homo sapiens
  siRNA target sequence for BCL6 (NM_001706.2,682-700).
gacacttgccggaagttta

SEQ ID NO: 1490 - DNA, 19 bp, Homo sapiens
  siRNA target sequence for BCL6 (NM_001706.2,684-702).
cacttgccggaagtttatt

SEQ ID NO: 1491 - DNA, 19 bp, Homo sapiens
  siRNA target sequence for BCL6 (NM_001706.2,686-704).
cttgccggaagtttattaa

SEQ ID NO: 1492 - DNA, 19 bp, Homo sapiens
  siRNA target sequence for BCL6 (NM_001706.2,898-916).
ccgccagcctcttattcca

SEQ ID NO: 1493 - DNA, 19 bp, Homo sapiens
  siRNA target sequence for BCL6 (NM_001706.2,899-917).
cgccagcctcttattccat

SEQ ID NO: 1494 - DNA, 19 bp, Homo sapiens
  siRNA target sequence for BCL6 (NM_001706.2,1009-1027).
cgggcactcccatgtgata

SEQ ID NO: 1495 - DNA, 19 bp, Homo sapiens
  siRNA target sequence for BCL6 (NM_001706.2,1011-1029).
ggcactcccatgtgatagt

SEQ ID NO: 1496 - DNA, 19 bp, Homo sapiens
  siRNA target sequence for BCL6 (NM_001706.2,1084-1102).
gtgtgccacagcaatatct

SEQ ID NO: 1497 - DNA, 19 bp, Homo sapiens
  siRNA target sequence for BCL6 (NM_001706.2,1086-1104).
gtgccacagcaatatctat

SEQ ID NO: 1498 - DNA, 19 bp, Homo sapiens
  siRNA target sequence for BCL6 (NM_001706.2,1241-1259).
gaccctcctcggaagatga

SEQ ID NO: 1499 - DNA, 19 bp, Homo sapiens
  siRNA target sequence for BCL6 (NM_001706.2,1363-1381).
gagtcctgcagcagtaaga

SEQ ID NO: 1500 - DNA, 19 bp, Homo sapiens
  siRNA target sequence for BCL6 (NM_001706.2,1654-1672).
gccagccggctcaataaca

SEQ ID NO: 1501 - DNA, 19 bp, Homo sapiens
  siRNA target sequence for BCL6 (NM_001706.2,2044-2062).
ccctatcgttgcaacatct

SEQ ID NO: 1502 - DNA, 19 bp, Homo sapiens
  siRNA target sequence for BCL6 (NM_001706.2,2147-2165).
gcggagccagatttgtaca

SEQ ID NO: 1503 - DNA, 19 bp, Homo sapiens
  siRNA target sequence for BCL6 (NM_001706.2,2339-2357).
gccagctgcgacttcactt

SEQ ID NO: 1504 - DNA, 19 bp, Homo sapiens
  siRNA target sequence for BHLHB2 (NM_003670.1,387-405).
gacgtgaccggattaacga

SEQ ID NO: 1505 - DNA, 19 bp, Homo sapiens
  siRNA target sequence for BHLHB2 (NM_003670.1,430-448).
cctacccgaacatctcaaa

SEQ ID NO: 1506 - DNA, 19 bp, Homo sapiens
  siRNA target sequence for BHLHB2 (NM_003670.1,434-452).
cccgaacatctcaaactta

SEQ ID NO: 1507 - DNA, 19 bp, Homo sapiens
  siRNA target sequence for BHLHB2 (NM_003670.1,436-454).
cgaacatctcaaacttaca

SEQ ID NO: 1508 - DNA, 19 bp, Homo sapiens
  siRNA target sequence for BHLHB2 (NM_003670.1,437-455).
gaacatctcaaacttacaa

SEQ ID NO: 1509 - DNA, 19 bp, Homo sapiens
  siRNA target sequence for BHLHB2 (NM_003670.1,476-494).
gcagtggttcttgaactta

SEQ ID NO: 1510 - DNA, 19 bp, Homo sapiens
  siRNA target sequence for BHLHB2 (NM_003670.1,508-526).
gaaagcactaacaaaccta

SEQ ID NO: 1511 - DNA, 19 bp, Homo sapiens
  siRNA target sequence for BHLHB2 (NM_003670.1,1013-1031).
gaaaggatcggcgcaatta

SEQ ID NO: 1512 - DNA, 19 bp, Homo sapiens
  siRNA target sequence for BHLHB2 (NM_003670.1,1017-1035).
ggatcggcgcaattaagca

SEQ ID NO: 1513 - DNA, 19 bp, Homo sapiens
  siRNA target sequence for BHLHB2 (NM_003670.1,1072-1090).
gcagctttcggatgatgaa

SEQ ID NO: 1514 - DNA, 19 bp, Homo sapiens
  siRNA target sequence for BHLHB2 (NM_003670.1,1082-1100).
gatgatgaaggccatttca

SEQ ID NO: 1515 - DNA, 19 bp, Homo sapiens
  siRNA target sequence for BHLHB2 (NM_003670.1,1085-1103).
gatgaaggccatttcacta

SEQ ID NO: 1516 - DNA, 19 bp, Homo sapiens
  siRNA target sequence for BHLHB2 (NM_003670.1,1277-1295).
gccctctctagcttcatga

SEQ ID NO: 1517 - DNA, 19 bp, Homo sapiens
  siRNA target sequence for BHLHB2 (NM_003670.1,1405-1423).
cccccctttaaacttagaa

SEQ ID NO: 1518 - DNA, 19 bp, Homo sapiens
  siRNA target sequence for BHLHB2 (NM_003670.1,1406-1424).
ccccctttaaacttagaaa

SEQ ID NO: 1519 - DNA, 19 bp, Homo sapiens
  siRNA target sequence for BHLHB3 (NM_030762.1,198-216).
ctggactattcctctttgt

SEQ ID NO: 1520 - DNA, 19 bp, Homo sapiens
  siRNA target sequence for BHLHB3 (NM_030762.1,200-218).
ggactattcctctttgtat

SEQ ID NO: 1521 - DNA, 19 bp, Homo sapiens
  siRNA target sequence for BHLHB3 (NM_030762.1,201-219).
gactattcctctttgtata

SEQ ID NO: 1522 - DNA, 19 bp, Homo sapiens
  siRNA target sequence for BHLHB3 (NM_030762.1,246-264).
cgagacgacaccaaggata

SEQ ID NO: 1523 - DNA, 19 bp, Homo sapiens
  siRNA target sequence for BHLHB3 (NM_030762.1,269-287).
caaattaccgcacagatta

SEQ ID NO: 1524 - DNA, 19 bp, Homo sapiens
  siRNA target sequence for BHLHB3 (NM_030762.1,276-294).
ccgcacagattaatagaaa

SEQ ID NO: 1525 - DNA, 19 bp, Homo sapiens
  siRNA target sequence for BHLHB3 (NM_030762.1,277-295).
cgcacagattaatagaaaa

SEQ ID NO: 1526 - DNA, 19 bp, Homo sapiens
  siRNA target sequence for BHLHB3 (NM_030762.1,301-319).
gaagagaccgaattaatga

SEQ ID NO: 1527 - DNA, 19 bp, Homo sapiens
  siRNA target sequence for BHLHB3 (NM_030762.1,308-326).
ccgaattaatgaatgcatt

SEQ ID NO: 1528 - DNA, 19 bp, Homo sapiens
  siRNA target sequence for BHLHB3 (NM_030762.1,348-366).
cctgaacatctgaaattga

SEQ ID NO: 1529 - DNA, 19 bp, Homo sapiens
  siRNA target sequence for BHLHB3 (NM_030762.1,452-470).
gcatcagaagataattgct

SEQ ID NO: 1530 - DNA, 19 bp, Homo sapiens
  siRNA target sequence for BHLHB3 (NM_030762.1,523-541).
cgttccactcgggatttca

SEQ ID NO: 1531 - DNA, 19 bp, Homo sapiens
  siRNA target sequence for BHLHB3 (NM_030762.1,524-542).
gttccactcgggatttcaa

SEQ ID NO: 1532 - DNA, 19 bp, Homo sapiens
  siRNA target sequence for BHLHB3 (NM_030762.1,550-568).
ccaaagaagtcttgcaata

SEQ ID NO: 1533 - DNA, 19 bp, Homo sapiens
  siRNA target sequence for BHLHB3 (NM_030762.1,637-655).
ccgtggccacccagttctt

SEQ ID NO: 1534 - DNA, 19 bp, Homo sapiens
  siRNA target sequence for BHLHB3 (NM_030762.1,1556-1574).
ctcgcagccaggaaaggaa

SEQ ID NO: 1535 - DNA, 19 bp, Homo sapiens
  siRNA target sequence for BNC (NM_001717.2,222-240).
gtttcaaacccgggaaaat

SEQ ID NO: 1536 - DNA, 19 bp, Homo sapiens
  siRNA target sequence for BNC (NM_001717.2,277-295).
ggtggcccacgctctaagt

SEQ ID NO: 1537 - DNA, 19 bp, Homo sapiens
  siRNA target sequence for BNC (NM_001717.2,283-301).
ccacgctctaagtaagcta

SEQ ID NO: 1538 - DNA, 19 bp, Homo sapiens
  siRNA target sequence for BNC (NM_001717.2,284-302).
cacgctctaagtaagctaa

SEQ ID NO: 1539 - DNA, 19 bp, Homo sapiens
  siRNA target sequence for BNC (NM_001717.2,288-306).
ctctaagtaagctaaggat

SEQ ID NO: 1540 - DNA, 19 bp, Homo sapiens
  siRNA target sequence for BNC (NM_001717.2,337-355).
gattgtccagtccaatgta

SEQ ID NO: 1541 - DNA, 19 bp, Homo sapiens
  siRNA target sequence for BNC (NM_001717.2,343-361).
ccagtccaatgtagtgttt

SEQ ID NO: 1542 - DNA, 19 bp, Homo sapiens
  siRNA target sequence for BNC (NM_001717.2,397-415).
catccccgttcgcctaaaa

SEQ ID NO: 1543 - DNA, 19 bp, Homo sapiens
  siRNA target sequence for BNC (NM_001717.2,438-456).
gtgtgttgaagcaagatga

SEQ ID NO: 1544 - DNA, 19 bp, Homo sapiens
  siRNA target sequence for BNC (NM_001717.2,592-610).
gcagttccttcgttttgga

SEQ ID NO: 1545 - DNA, 19 bp, Homo sapiens
  siRNA target sequence for BNC (NM_001717.2,860-878).
gggtcattgcccgaacaat

SEQ ID NO: 1546 - DNA, 19 bp, Homo sapiens
  siRNA target sequence for BNC (NM_001717.2,861-879).
ggtcattgcccgaacaata

SEQ ID NO: 1547 - DNA, 19 bp, Homo sapiens
  siRNA target sequence for BNC (NM_001717.2,862-880).
gtcattgcccgaacaatat

SEQ ID NO: 1548 - DNA, 19 bp, Homo sapiens
  siRNA target sequence for BNC (NM_001717.2,864-882).
cattgcccgaacaatatat

SEQ ID NO: 1549 - DNA, 19 bp, Homo sapiens
  siRNA target sequence for BNC (NM_001717.2,1008-1026).
gtccggatgctattactaa

SEQ ID NO: 1550 - DNA, 19 bp, Homo sapiens
  siRNA target sequence for BNC (NM_001717.2,1056-1074).
ccagctcatacaacattgt

SEQ ID NO: 1551 - DNA, 19 bp, Homo sapiens
  siRNA target sequence for BNC (NM_001717.2,1062-1080).
catacaacattgtcactaa

SEQ ID NO: 1552 - DNA, 19 bp, Homo sapiens
  siRNA target sequence for BNC (NM_001717.2,1066-1084).
caacattgtcactaagttt

SEQ ID NO: 1553 - DNA, 19 bp, Homo sapiens
  siRNA target sequence for BNC (NM_001717.2,1128-1146).
ggaatagccttggtacaaa

SEQ ID NO: 1554 - DNA, 19 bp, Homo sapiens
  siRNA target sequence for BNC (NM_001717.2,1220-1238).
gccgtccacttgaagatca

SEQ ID NO: 1555 - DNA, 19 bp, Homo sapiens
  siRNA target sequence for BNC (NM_001717.2,1221-1239).
ccgtccacttgaagatcaa

SEQ ID NO: 1556 - DNA, 19 bp, Homo sapiens
  siRNA target sequence for BNC (NM_001717.2,1495-1513).
cccaaacattgggcaaaat

SEQ ID NO: 1557 - DNA, 19 bp, Homo sapiens
  siRNA target sequence for BNC (NM_001717.2,1520-1538).
ctttttcccaacctaaaga

SEQ ID NO: 1558 - DNA, 19 bp, Homo sapiens
  siRNA target sequence for BNC (NM_001717.2,1578-1596).
cgcctgccgaggtagcaaa

SEQ ID NO: 1559 - DNA, 19 bp, Homo sapiens
  siRNA target sequence for BNC (NM_001717.2,1705-1723).
gtccagtatgcctatcaaa

SEQ ID NO: 1560 - DNA, 19 bp, Homo sapiens
  siRNA target sequence for BNC (NM_001717.2,1707-1725).
ccagtatgcctatcaaaat

SEQ ID NO: 1561 - DNA, 19 bp, Homo sapiens
  siRNA target sequence for BNC (NM_001717.2,1710-1728).
gtatgcctatcaaaataga

SEQ ID NO: 1562 - DNA, 19 bp, Homo sapiens
  siRNA target sequence for BNC (NM_001717.2,1911-1929).
cctgccatcgtgaatcagt

SEQ ID NO: 1563 - DNA, 19 bp, Homo sapiens
  siRNA target sequence for BNC (NM_001717.2,1914-1932).
gccatcgtgaatcagtaat

SEQ ID NO: 1564 - DNA, 19 bp, Homo sapiens
  siRNA target sequence for BNC (NM_001717.2,1915-1933).
ccatcgtgaatcagtaatt

SEQ ID NO: 1565 - DNA, 19 bp, Homo sapiens
  siRNA target sequence for BNC (NM_001717.2,1919-1937).
cgtgaatcagtaattgagt

SEQ ID NO: 1566 - DNA, 19 bp, Homo sapiens
  siRNA target sequence for BNC (NM_001717.2,2175-2193).
gtcttgaagattctaaaga

SEQ ID NO: 1567 - DNA, 19 bp, Homo sapiens
  siRNA target sequence for BNC (NM_001717.2,2203-2221).
cgtgggtcagcatgcatta

SEQ ID NO: 1568 - DNA, 19 bp, Homo sapiens
  siRNA target sequence for BNC (NM_001717.2,2206-2224).
gggtcagcatgcattagca

SEQ ID NO: 1569 - DNA, 19 bp, Homo sapiens
  siRNA target sequence for BNC (NM_001717.2,2217-2235).
cattagcaaggcagataga

SEQ ID NO: 1570 - DNA, 19 bp, Homo sapiens
  siRNA target sequence for BNC (NM_001717.2,2286-2304).
gtagtgtgaaaattcatca

SEQ ID NO: 1571 - DNA, 19 bp, Homo sapiens
  siRNA target sequence for BNC (NM_001717.2,2338-2356).
cacagtggagggctgtaat

SEQ ID NO: 1572 - DNA, 19 bp, Homo sapiens
  siRNA target sequence for BNC (NM_001717.2,2342-2360).
gtggagggctgtaatgcta

SEQ ID NO: 1573 - DNA, 19 bp, Homo sapiens
  siRNA target sequence for BNC (NM_001717.2,2401-2419).
cctaaacctccaccaaaaa

SEQ ID NO: 1574 - DNA, 19 bp, Homo sapiens
  siRNA target sequence for BNC (NM_001717.2,2479-2497).
gaaagatgtggctaaggaa

SEQ ID NO: 1575 - DNA, 19 bp, Homo sapiens
  siRNA target sequence for BNC (NM_001717.2,2913-2931).
cctttagggcccactacaa

SEQ ID NO: 1576 - DNA, 19 bp, Homo sapiens
  siRNA target sequence for BNC (NM_001717.2,2914-2932).
ctttagggcccactacaaa

SEQ ID NO: 1577 - DNA, 19 bp, Homo sapiens
  siRNA target sequence for BRD8 (NM_006696.3,63-81).
cgggaacgggcaaacacaa

SEQ ID NO: 1578 - DNA, 19 bp, Homo sapiens
  siRNA target sequence for BRD8 (NM_006696.3,118-136).
ccgagagaagctatgttta

SEQ ID NO: 1579 - DNA, 19 bp, Homo sapiens
  siRNA target sequence for BRD8 (NM_006696.3,252-270).
cccagtactcggagctttt

SEQ ID NO: 1580 - DNA, 19 bp, Homo sapiens
  siRNA target sequence for BRD8 (NM_006696.3,274-292).
gaccactgagacaccaaaa

SEQ ID NO: 1581 - DNA, 19 bp, Homo sapiens
  siRNA target sequence for BRD8 (NM_006696.3,312-330).
gagaagtggtggaaactgt

SEQ ID NO: 1582 - DNA, 19 bp, Homo sapiens
  siRNA target sequence for BRD8 (NM_006696.3,338-356).
gttattgttcggaaattga

SEQ ID NO: 1583 - DNA, 19 bp, Homo sapiens
  siRNA target sequence for BRD8 (NM_006696.3,355-373).
gactgctgagcgagttgaa

SEQ ID NO: 1584 - DNA, 19 bp, Homo sapiens
  siRNA target sequence for BRD8 (NM_006696.3,481-499).
caatgacattgcaacgaaa

SEQ ID NO: 1585 - DNA, 19 bp, Homo sapiens
  siRNA target sequence for BRD8 (NM_006696.3,604-622).
gatggttcgctctcctata

SEQ ID NO: 1586 - DNA, 19 bp, Homo sapiens
  siRNA target sequence for BRD8 (NM_006696.3,607-625).
ggttcgctctcctatagat

SEQ ID NO: 1587 - DNA, 19 bp, Homo sapiens
  siRNA target sequence for BRD8 (NM_006696.3,608-626).
gttcgctctcctatagatt

SEQ ID NO: 1588 - DNA, 19 bp, Homo sapiens
  siRNA target sequence for BRD8 (NM_006696.3,630-648).
cctccccaggaggtgatta

SEQ ID NO: 1589 - DNA, 19 bp, Homo sapiens
  siRNA target sequence for BRD8 (NM_006696.3,796-814).
cccagtaacagatgattca

SEQ ID NO: 1590 - DNA, 19 bp, Homo sapiens
  siRNA target sequence for BRD8 (NM_006696.3,1069-1087).
cactctttcccggctttta

SEQ ID NO: 1591 - DNA, 19 bp, Homo sapiens
  siRNA target sequence for BRD8 (NM_006696.3,1141-1159).
cagtgagcctccagttaaa

SEQ ID NO: 1592 - DNA, 19 bp, Homo sapiens
  siRNA target sequence for BRD8 (NM_006696.3,1188-1206).
cccaagctaccattgtcat

SEQ ID NO: 1593 - DNA, 19 bp, Homo sapiens
  siRNA target sequence for BRD8 (NM_006696.3,1246-1264).
ctccactactgaaagtgta

SEQ ID NO: 1594 - DNA, 19 bp, Homo sapiens
  siRNA target sequence for BRD8 (NM_006696.3,1347-1365).
gtgaaatatccatgatcat

SEQ ID NO: 1595 - DNA, 19 bp, Homo sapiens
  siRNA target sequence for BRD8 (NM_006696.3,1349-1367).
gaaatatccatgatcatca

SEQ ID NO: 1596 - DNA, 19 bp, Homo sapiens
  siRNA target sequence for BRD8 (NM_006696.3,1516-1534).
gactgttggagacatcatt

SEQ ID NO: 1597 - DNA, 19 bp, Homo sapiens
  siRNA target sequence for BRD8 (NM_006696.3,1691-1709).
ctccctgcaccagaaatga

SEQ ID NO: 1598 - DNA, 19 bp, Homo sapiens
  siRNA target sequence for BRD8 (NM_006696.3,1743-1761).
cggaaaacaagggaataca

SEQ ID NO: 1599 - DNA, 19 bp, Homo sapiens
  siRNA target sequence for BRD8 (NM_006696.3,1814-1832).
gaaccagagccagtcattt

SEQ ID NO: 1600 - DNA, 19 bp, Homo sapiens
  siRNA target sequence for BRD8 (NM_006696.3,1828-1846).
catttcaggagccgaaata

SEQ ID NO: 1601 - DNA, 19 bp, Homo sapiens
  siRNA target sequence for BRD8 (NM_006696.3,1856-1874).
gttgttccagccacaagta

SEQ ID NO: 1602 - DNA, 19 bp, Homo sapiens
  siRNA target sequence for BRD8 (NM_006696.3,1973-1991).
gatgagactccacttacaa

SEQ ID NO: 1603 - DNA, 19 bp, Homo sapiens
  siRNA target sequence for BRD8 (NM_006696.3,2040-2058).
gctcaaatcccattgaaga

SEQ ID NO: 1604 - DNA, 19 bp, Homo sapiens
  siRNA target sequence for BRD8 (NM_006696.3,2076-2094).
ctcagcacaagtttgaaat

SEQ ID NO: 1605 - DNA, 19 bp, Homo sapiens
  siRNA target sequence for BRD8 (NM_006696.3,2080-2098).
gcacaagtttgaaatgtca

SEQ ID NO: 1606 - DNA, 19 bp, Homo sapiens
  siRNA target sequence for BRD8 (NM_006696.3,2111-2129).
gaagaatcagggactattt

SEQ ID NO: 1607 - DNA, 19 bp, Homo sapiens
  siRNA target sequence for BRD8 (NM_006696.3,2197-2215).
cctagaggagcctaaggaa

SEQ ID NO: 1608 - DNA, 19 bp, Homo sapiens
  siRNA target sequence for BRD8 (NM_006696.3,2232-2250).
gctacttgtcagaaatgga

SEQ ID NO: 1609 - DNA, 19 bp, Homo sapiens
  siRNA target sequence for BRD8 (NM_006696.3,2279-2297).
gatggcttcagcatacaca

SEQ ID NO: 1610 - DNA, 19 bp, Homo sapiens
  siRNA target sequence for BRD8 (NM_006696.3,2387-2405).
gctattcaggcacagaaaa

SEQ ID NO: 1611 - DNA, 19 bp, Homo sapiens
  siRNA target sequence for BRD8 (NM_006696.3,2388-2406).
ctattcaggcacagaaaat

SEQ ID NO: 1612 - DNA, 19 bp, Homo sapiens
  siRNA target sequence for BRD8 (NM_006696.3,2434-2452).
gagagctgcagctaatcat

SEQ ID NO: 1613 - DNA, 19 bp, Homo sapiens
  siRNA target sequence for BRD8 (NM_006696.3,2585-2603).
gaatttcagcgtgacatta

SEQ ID NO: 1614 - DNA, 19 bp, Homo sapiens
  siRNA target sequence for BRD8 (NM_006696.3,2638-2656).
ctcagaccatgatgtctat

SEQ ID NO: 1615 - DNA, 19 bp, Homo sapiens
  siRNA target sequence for BRD8 (NM_006696.3,2640-2658).
cagaccatgatgtctatca

SEQ ID NO: 1616 - DNA, 19 bp, Homo sapiens
  siRNA target sequence for BRD8 (NM_006696.3,2679-2697).
gagatgtcttggaacagat

SEQ ID NO: 1617 - DNA, 19 bp, Homo sapiens
  siRNA target sequence for BRD8 (NM_006696.3,2690-2708).
gaacagatccagcaattct

SEQ ID NO: 1618 - DNA, 19 bp, Homo sapiens
  siRNA target sequence for BRD8 (NM_006696.3,2707-2725).
cttggccacgcagttgatt

SEQ ID NO: 1619 - DNA, 19 bp, Homo sapiens
  siRNA target sequence for BRD8 (NM_006696.3,2713-2731).
cacgcagttgattatgcaa

SEQ ID NO: 1620 - DNA, 19 bp, Homo sapiens
  siRNA target sequence for BRD8 (NM_006696.3,2717-2735).
cagttgattatgcaaacat

SEQ ID NO: 1621 - DNA, 19 bp, Homo sapiens
  siRNA target sequence for BRD8 (NM_006696.3,2740-2758).
gtctgggatcagtgctaaa

SEQ ID NO: 1622 - DNA, 19 bp, Homo sapiens
  siRNA target sequence for BRD8 (NM_006696.3,2762-2780).
cttcgagggagagattcta

SEQ ID NO: 1623 - DNA, 19 bp, Homo sapiens
  siRNA target sequence for BRD8 (NM_139199.1,687-705).
ctacctctggggtcaatga

SEQ ID NO: 1624 - DNA, 19 bp, Homo sapiens
  siRNA target sequence for BRD8 (NM_139199.1,2646-2664).
gggtttggctggattctga

SEQ ID NO: 1625 - DNA, 19 bp, Homo sapiens
  siRNA target sequence for BRD8 (NM_139199.1,2905-2923).
ctctgaggtagcttattta

SEQ ID NO: 1626 - DNA, 19 bp, Homo sapiens
  siRNA target sequence for BRD8 (NM_139199.1,2941-2959).
cagcagcaacgaatcaagt

SEQ ID NO: 1627 - DNA, 19 bp, Homo sapiens
  siRNA target sequence for BRD8 (NM_139199.1,2944-2962).
cagcaacgaatcaagtgaa

SEQ ID NO: 1628 - DNA, 19 bp, Homo sapiens
  siRNA target sequence for BRD8 (NM_139199.1,3130-3148).
ctcagttatttgtacagtt

SEQ ID NO: 1629 - DNA, 19 bp, Homo sapiens
  siRNA target sequence for BRD8 (NM_139199.1,3202-3220).
ggaggaccagggtgaagta

SEQ ID NO: 1630 - DNA, 19 bp, Homo sapiens
  siRNA target sequence for BRD8 (NM_139199.1,3205-3223).
ggaccagggtgaagtatat

SEQ ID NO: 1631 - DNA, 19 bp, Homo sapiens
  siRNA target sequence for BRD8 (NM_139199.1,3209-3227).
cagggtgaagtatatgtgt

SEQ ID NO: 1632 - DNA, 19 bp, Homo sapiens
  siRNA target sequence for BRD8 (NM_139199.1,3290-3308).
cccttggtggatacacttt

SEQ ID NO: 1633 - DNA, 19 bp, Homo sapiens
  siRNA target sequence for BRD8 (NM_139199.1,3291-3309).
ccttggtggatacactttt

SEQ ID NO: 1634 - DNA, 19 bp, Homo sapiens
  siRNA target sequence for BRD8 (NM_139199.1,3365-3383).
gatcatttgctatttaaga

SEQ ID NO: 1635 - DNA, 19 bp, Homo sapiens
  siRNA target sequence for BRD8 (NM_139199.1,3394-3412).
gccagtctggaagatgatt

SEQ ID NO: 1636 - DNA, 19 bp, Homo sapiens
  siRNA target sequence for BRD8 (NM_139199.1,3421-3439).
caggttcagcagtccattt

SEQ ID NO: 1637 - DNA, 19 bp, Homo sapiens
  siRNA target sequence for BRD8 (NM_139199.1,3507-3525).
ctagcctgaagagaaatct

SEQ ID NO: 1638 - DNA, 19 bp, Homo sapiens
  siRNA target sequence for BRD8 (NM_139199.1,3598-3616).
gtacaatgactctgatcat

SEQ ID NO: 1639 - DNA, 19 bp, Homo sapiens
  siRNA target sequence for BRD8 (NM_139199.1,3611-3629).
gatcatcatgtataccata

SEQ ID NO: 1640 - DNA, 19 bp, Homo sapiens
  siRNA target sequence for BRD8 (NM_139199.1,3674-3692).
ctgaatatctggttagaca

SEQ ID NO: 1641 - DNA, 19 bp, Homo sapiens
  siRNA target sequence for BRD8 (NM_139199.1,3676-3694).
gaatatctggttagacaaa

SEQ ID NO: 1642 - DNA, 19 bp, Homo sapiens
  siRNA target sequence for BRF1 (NM_001519.2,575-593).
gcggcttccacgtgaatct

SEQ ID NO: 1643 - DNA, 19 bp, Homo sapiens
  siRNA target sequence for BRF1 (NM_001519.2,909-927).
cccgtgcctgtatattcca

SEQ ID NO: 1644 - DNA, 19 bp, Homo sapiens
  siRNA target sequence for BRF1 (NM_001519.2,1151-1169).
ggctcacggaatttgaaga

SEQ ID NO: 1645 - DNA, 19 bp, Homo sapiens
  siRNA target sequence for BRF1 (NM_001519.2,1190-1208).
ccattgatgagttcatgaa

SEQ ID NO: 1646 - DNA, 19 bp, Homo sapiens
  siRNA target sequence for BRF1 (NM_001519.2,1338-1356).
ggatgcaattgagattgaa

SEQ ID NO: 1647 - DNA, 19 bp, Homo sapiens
  siRNA target sequence for BRF1 (NM_001519.2,1665-1683).
gagcagcgaccccaaagat

SEQ ID NO: 1648 - DNA, 19 bp, Homo sapiens
  siRNA target sequence for BRF1 (NM_001519.2,2153-2171).
ctacgcagccagcaaagaa

SEQ ID NO: 1649 - DNA, 19 bp, Homo sapiens
  siRNA target sequence for BTAF1 (NM_003972.1,129-147).
caggctagatcgccttttt

SEQ ID NO: 1650 - DNA, 19 bp, Homo sapiens
  siRNA target sequence for BTAF1 (NM_003972.1,131-149).
ggctagatcgcctttttat

SEQ ID NO: 1651 - DNA, 19 bp, Homo sapiens
  siRNA target sequence for BTAF1 (NM_003972.1,132-150).
gctagatcgcctttttatt

SEQ ID NO: 1652 - DNA, 19 bp, Homo sapiens
  siRNA target sequence for BTAF1 (NM_003972.1,163-181).
ggcactactcctgttacaa

SEQ ID NO: 1653 - DNA, 19 bp, Homo sapiens
  siRNA target sequence for BTAF1 (NM_003972.1,220-238).
cttcatccccatgaactaa

SEQ ID NO: 1654 - DNA, 19 bp, Homo sapiens
  siRNA target sequence for BTAF1 (NM_003972.1,310-328).
gctgttgaagctatagtga

SEQ ID NO: 1655 - DNA, 19 bp, Homo sapiens
  siRNA target sequence for BTAF1 (NM_003972.1,313-331).
gttgaagctatagtgaaaa

SEQ ID NO: 1656 - DNA, 19 bp, Homo sapiens
  siRNA target sequence for BTAF1 (NM_003972.1,370-388).
gaacctacttccgaaagtt

SEQ ID NO: 1657 - DNA, 19 bp, Homo sapiens
  siRNA target sequence for BTAF1 (NM_003972.1,407-425).
ctacagagcgattgaattt

SEQ ID NO: 1658 - DNA, 19 bp, Homo sapiens
  siRNA target sequence for BTAF1 (NM_003972.1,412-430).
gagcgattgaattttgaca

SEQ ID NO: 1659 - DNA, 19 bp, Homo sapiens
  siRNA target sequence for BTAF1 (NM_003972.1,420-438).
gaattttgacagatttgat

SEQ ID NO: 1660 - DNA, 19 bp, Homo sapiens
  siRNA target sequence for BTAF1 (NM_003972.1,429-447).
cagatttgatatatgtaga

SEQ ID NO: 1661 - DNA, 19 bp, Homo sapiens
  siRNA target sequence for BTAF1 (NM_003972.1,479-497).
ctgctggtgccgaatttga

SEQ ID NO: 1662 - DNA, 19 bp, Homo sapiens
  siRNA target sequence for BTAF1 (NM_003972.1,515-533).
caggtgaagtggatcctaa

SEQ ID NO: 1663 - DNA, 19 bp, Homo sapiens
  siRNA target sequence for BTAF1 (NM_003972.1,539-557).
ggatagcacgccaacgaaa

SEQ ID NO: 1664 - DNA, 19 bp, Homo sapiens
  siRNA target sequence for BTAF1 (NM_003972.1,540-558).
gatagcacgccaacgaaaa

SEQ ID NO: 1665 - DNA, 19 bp, Homo sapiens
  siRNA target sequence for BTAF1 (NM_003972.1,544-562).
gcacgccaacgaaaattat

SEQ ID NO: 1666 - DNA, 19 bp, Homo sapiens
  siRNA target sequence for BTAF1 (NM_003972.1,545-563).
cacgccaacgaaaattatt

SEQ ID NO: 1667 - DNA, 19 bp, Homo sapiens
  siRNA target sequence for BTAF1 (NM_003972.1,567-585).
gaagaaacttggccttaat

SEQ ID NO: 1668 - DNA, 19 bp, Homo sapiens
  siRNA target sequence for BTAF1 (NM_003972.1,718-736).
cgagcaggaatgagcaata

SEQ ID NO: 1669 - DNA, 19 bp, Homo sapiens
  siRNA target sequence for BTAF1 (NM_003972.1,722-740).
caggaatgagcaatagaca

SEQ ID NO: 1670 - DNA, 19 bp, Homo sapiens
  siRNA target sequence for BTAF1 (NM_003972.1,764-782).
ccaagttatttgcaaaaca

SEQ ID NO: 1671 - DNA, 19 bp, Homo sapiens
  siRNA target sequence for BTAF1 (NM_003972.1,796-814).
gcagtggaaactaatgaga

SEQ ID NO: 1672 - DNA, 19 bp, Homo sapiens
  siRNA target sequence for BTAF1 (NM_003972.1,797-815).
cagtggaaactaatgagaa

SEQ ID NO: 1673 - DNA, 19 bp, Homo sapiens
  siRNA target sequence for BTAF1 (NM_003972.1,852-870).
gagacggaaaatagcaaat

SEQ ID NO: 1674 - DNA, 19 bp, Homo sapiens
  siRNA target sequence for BTAF1 (NM_003972.1,900-918).
caaagtcttgattgataat

SEQ ID NO: 1675 - DNA, 19 bp, Homo sapiens
  siRNA target sequence for BTAF1 (NM_003972.1,1130-1148).
ggttggaagacttggttat

SEQ ID NO: 1676 - DNA, 19 bp, Homo sapiens
  siRNA target sequence for BTAF1 (NM_003972.1,1131-1149).
gttggaagacttggttatt

SEQ ID NO: 1677 - DNA, 19 bp, Homo sapiens
  siRNA target sequence for BTAF1 (NM_003972.1,1209-1227).
ggcaccagttcgtgaaact

SEQ ID NO: 1678 - DNA, 19 bp, Homo sapiens
  siRNA target sequence for BTAF1 (NM_003972.1,1210-1228).
gcaccagttcgtgaaactt

SEQ ID NO: 1679 - DNA, 19 bp, Homo sapiens
  siRNA target sequence for BTAF1 (NM_003972.1,1222-1240).
gaaacttgtgctcaaacat

SEQ ID NO: 1680 - DNA, 19 bp, Homo sapiens
  siRNA target sequence for BTAF1 (NM_003972.1,1288-1306).
gtggatgtgctgctaaaat

SEQ ID NO: 1681 - DNA, 19 bp, Homo sapiens
  siRNA target sequence for BTAF1 (NM_003972.1,1296-1314).
gctgctaaaattacttaca

SEQ ID NO: 1682 - DNA, 19 bp, Homo sapiens
  siRNA target sequence for BTAF1 (NM_003972.1,1369-1387).
gcagtccgtcaggatgtaa

SEQ ID NO: 1683 - DNA, 19 bp, Homo sapiens
  siRNA target sequence for BTAF1 (NM_003972.1,1370-1388).
cagtccgtcaggatgtaat

SEQ ID NO: 1684 - DNA, 19 bp, Homo sapiens
  siRNA target sequence for BTAF1 (NM_003972.1,1372-1390).
gtccgtcaggatgtaatta

SEQ ID NO: 1685 - DNA, 19 bp, Homo sapiens
  siRNA target sequence for BTAF1 (NM_003972.1,1374-1392).
ccgtcaggatgtaattaat

SEQ ID NO: 1686 - DNA, 19 bp, Homo sapiens
  siRNA target sequence for BTAF1 (NM_003972.1,1375-1393).
cgtcaggatgtaattaata

SEQ ID NO: 1687 - DNA, 19 bp, Homo sapiens
  siRNA target sequence for BTAF1 (NM_003972.1,1378-1396).
caggatgtaattaatactt

SEQ ID NO: 1688 - DNA, 19 bp, Homo sapiens
  siRNA target sequence for BTAF1 (NM_003972.1,1521-1539).
ggtgcccttcattataaat

SEQ ID NO: 1689 - DNA, 19 bp, Homo sapiens
  siRNA target sequence for BTAF1 (NM_003972.1,1606-1624).
ctttcatccttgttaactt

SEQ ID NO: 1690 - DNA, 19 bp, Homo sapiens
  siRNA target sequence for BTAF1 (NM_003972.1,1632-1650).
ggtccaacaatgcagtatt

SEQ ID NO: 1691 - DNA, 19 bp, Homo sapiens
  siRNA target sequence for BTAF1 (NM_003972.1,1695-1713).
gcatcacactatatcatca

SEQ ID NO: 1692 - DNA, 19 bp, Homo sapiens
  siRNA target sequence for BTAF1 (NM_003972.1,1721-1739).
gagcagcattggaaactct

SEQ ID NO: 1693 - DNA, 19 bp, Homo sapiens
  siRNA target sequence for BTAF1 (NM_003972.1,1731-1749).
ggaaactctgtttacgtta

SEQ ID NO: 1694 - DNA, 19 bp, Homo sapiens
  siRNA target sequence for BTAF1 (NM_003972.1,1732-1750).
gaaactctgtttacgttat

SEQ ID NO: 1695 - DNA, 19 bp, Homo sapiens
  siRNA target sequence for BTAF1 (NM_003972.1,1738-1756).
ctgtttacgttattatcaa

SEQ ID NO: 1696 - DNA, 19 bp, Homo sapiens
  siRNA target sequence for BTAF1 (NM_003972.1,1761-1779).
ggaccagaactcttcatct

SEQ ID NO: 1697 - DNA, 19 bp, Homo sapiens
  siRNA target sequence for BTAF1 (NM_003972.1,1775-1793).
catcttggcttatacctat

SEQ ID NO: 1698 - DNA, 19 bp, Homo sapiens
  siRNA target sequence for BTAF1 (NM_003972.1,1858-1876).
gaccttattcacaaggttt

SEQ ID NO: 1699 - DNA, 19 bp, Homo sapiens
  siRNA target sequence for BTAF1 (NM_003972.1,1887-1905).
gttgagtaaggcttcagtt

SEQ ID NO: 1700 - DNA, 19 bp, Homo sapiens
  siRNA target sequence for BTAF1 (NM_003972.1,1892-1910).
gtaaggcttcagttcagta

SEQ ID NO: 1701 - DNA, 19 bp, Homo sapiens
  siRNA target sequence for BTAF1 (NM_003972.1,1959-1977).
gatgcagccttctcattta

SEQ ID NO: 1702 - DNA, 19 bp, Homo sapiens
  siRNA target sequence for BTAF1 (NM_003972.1,1963-1981).
cagccttctcatttaccta

SEQ ID NO: 1703 - DNA, 19 bp, Homo sapiens
  siRNA target sequence for BTAF1 (NM_003972.1,1970-1988).
ctcatttacctatcgattt

SEQ ID NO: 1704 - DNA, 19 bp, Homo sapiens
  siRNA target sequence for BTAF1 (NM_003972.1,1972-1990).
catttacctatcgatttaa

SEQ ID NO: 1705 - DNA, 19 bp, Homo sapiens
  siRNA target sequence for BTAF1 (NM_003972.1,1978-1996).
cctatcgatttaaatatgt

SEQ ID NO: 1706 - DNA, 19 bp, Homo sapiens
  siRNA target sequence for BTAF1 (NM_003972.1,1979-1997).
ctatcgatttaaatatgtt

SEQ ID NO: 1707 - DNA, 19 bp, Homo sapiens
  siRNA target sequence for BTAF1 (NM_003972.1,2115-2133).
cccagccaccagggatttt

SEQ ID NO: 1708 - DNA, 19 bp, Homo sapiens
  siRNA target sequence for BTAF1 (NM_003972.1,2117-2135).
cagccaccagggattttgt

SEQ ID NO: 1709 - DNA, 19 bp, Homo sapiens
  siRNA target sequence for BTAF1 (NM_003972.1,2121-2139).
caccagggattttgtagtt

SEQ ID NO: 1710 - DNA, 19 bp, Homo sapiens
  siRNA target sequence for BTAF1 (NM_003972.1,2123-2141).
ccagggattttgtagttat

SEQ ID NO: 1711 - DNA, 19 bp, Homo sapiens
  siRNA target sequence for BTAF1 (NM_003972.1,2166-2184).
gttgttaggagcactttgt

SEQ ID NO: 1712 - DNA, 19 bp, Homo sapiens
  siRNA target sequence for BTAF1 (NM_003972.1,2257-2275).
ctactcttccatttgaact

SEQ ID NO: 1713 - DNA, 19 bp, Homo sapiens
  siRNA target sequence for BTAF1 (NM_003972.1,2295-2313).
gattagtgtagctttggta

SEQ ID NO: 1714 - DNA, 19 bp, Homo sapiens
  siRNA target sequence for BTAF1 (NM_003972.1,2367-2385).
gcagccgcgtttacttgat

SEQ ID NO: 1715 - DNA, 19 bp, Homo sapiens
  siRNA target sequence for BTAF1 (NM_003972.1,2368-2386).
cagccgcgtttacttgata

SEQ ID NO: 1716 - DNA, 19 bp, Homo sapiens
  siRNA target sequence for BTAF1 (NM_003972.1,2372-2390).
cgcgtttacttgatatcct

SEQ ID NO: 1717 - DNA, 19 bp, Homo sapiens
  siRNA target sequence for BTAF1 (NM_003972.1,2374-2392).
cgtttacttgatatccttt

SEQ ID NO: 1718 - DNA, 19 bp, Homo sapiens
  siRNA target sequence for BTAF1 (NM_003972.1,2465-2483).
catcattagctgatgtaca

SEQ ID NO: 1719 - DNA, 19 bp, Homo sapiens
  siRNA target sequence for BTAF1 (NM_003972.1,2491-2509).
gttggtaatcgagtaaaca

SEQ ID NO: 1720 - DNA, 19 bp, Homo sapiens
  siRNA target sequence for BTAF1 (NM_003972.1,2494-2512).
ggtaatcgagtaaacaaca

SEQ ID NO: 1721 - DNA, 19 bp, Homo sapiens
  siRNA target sequence for BTAF1 (NM_003972.1,2500-2518).
cgagtaaacaacaatgttt

SEQ ID NO: 1722 - DNA, 19 bp, Homo sapiens
  siRNA target sequence for BTAF1 (NM_003972.1,2566-2584).
gccacatcatctttcgatt

SEQ ID NO: 1723 - DNA, 19 bp, Homo sapiens
  siRNA target sequence for BTAF1 (NM_003972.1,2567-2585).
ccacatcatctttcgattt

SEQ ID NO: 1724 - DNA, 19 bp, Homo sapiens
  siRNA target sequence for BTAF1 (NM_003972.1,2568-2586).
cacatcatctttcgattta

SEQ ID NO: 1725 - DNA, 19 bp, Homo sapiens
  siRNA target sequence for BTAF1 (NM_003972.1,2596-2614).
gtgttacaacagttagata

SEQ ID NO: 1726 - DNA, 19 bp, Homo sapiens
  siRNA target sequence for BTAF1 (NM_003972.1,2598-2616).
gttacaacagttagatagt

SEQ ID NO: 1727 - DNA, 19 bp, Homo sapiens
  siRNA target sequence for BTAF1 (NM_003972.1,2626-2644).
caggtccaaatgacagtta

SEQ ID NO: 1728 - DNA, 19 bp, Homo sapiens
  siRNA target sequence for BTAF1 (NM_003972.1,2679-2697).
gagagtgcatacttttgct

SEQ ID NO: 1729 - DNA, 19 bp, Homo sapiens
  siRNA target sequence for BTAF1 (NM_003972.1,2721-2739).
gcagcttccggagaaatta

SEQ ID NO: 1730 - DNA, 19 bp, Homo sapiens
  siRNA target sequence for BTAF1 (NM_003972.1,2729-2747).
cggagaaattaaatcctat

SEQ ID NO: 1731 - DNA, 19 bp, Homo sapiens
  siRNA target sequence for BTAF1 (NM_003972.1,2755-2773).
ccattaatggagacaatta

SEQ ID NO: 1732 - DNA, 19 bp, Homo sapiens
  siRNA target sequence for BTAF1 (NM_003972.1,2756-2774).
cattaatggagacaattaa

SEQ ID NO: 1733 - DNA, 19 bp, Homo sapiens
  siRNA target sequence for BTAF1 (NM_003972.1,2806-2824).
gcagctcagtgcatagcta

SEQ ID NO: 1734 - DNA, 19 bp, Homo sapiens
  siRNA target sequence for BTAF1 (NM_003972.1,2807-2825).
cagctcagtgcatagctaa

SEQ ID NO: 1735 - DNA, 19 bp, Homo sapiens
  siRNA target sequence for BTAF1 (NM_003972.1,2810-2828).
ctcagtgcatagctaaact

SEQ ID NO: 1736 - DNA, 19 bp, Homo sapiens
  siRNA target sequence for BTAF1 (NM_003972.1,2830-2848).
cttcagcagtgcacaacaa

SEQ ID NO: 1737 - DNA, 19 bp, Homo sapiens
  siRNA target sequence for BTAF1 (NM_003972.1,2850-2868).
gacgccctgtcccaattca

SEQ ID NO: 1738 - DNA, 19 bp, Homo sapiens
  siRNA target sequence for BTAF1 (NM_003972.1,2852-2870).
cgccctgtcccaattcaaa

SEQ ID NO: 1739 - DNA, 19 bp, Homo sapiens
  siRNA target sequence for BTAF1 (NM_003972.1,2853-2871).
gccctgtcccaattcaaaa

SEQ ID NO: 1740 - DNA, 19 bp, Homo sapiens
  siRNA target sequence for BTAF1 (NM_003972.1,2856-2874).
ctgtcccaattcaaaaatt

SEQ ID NO: 1741 - DNA, 19 bp, Homo sapiens
  siRNA target sequence for BTAF1 (NM_003972.1,2883-2901).
cctctgtagctcactttgt

SEQ ID NO: 1742 - DNA, 19 bp, Homo sapiens
  siRNA target sequence for BTAF1 (NM_003972.1,3015-3033).
gcacagaggtataattaca

SEQ ID NO: 1743 - DNA, 19 bp, Homo sapiens
  siRNA target sequence for BTAF1 (NM_003972.1,3205-3223).
gctttgacaactatagtaa

SEQ ID NO: 1744 - DNA, 19 bp, Homo sapiens
  siRNA target sequence for BTAF1 (NM_003972.1,3257-3275).
cacatctctgggatgctat

SEQ ID NO: 1745 - DNA, 19 bp, Homo sapiens
  siRNA target sequence for BTAF1 (NM_003972.1,3277-3295).
gttggcccattgaggaata

SEQ ID NO: 1746 - DNA, 19 bp, Homo sapiens
  siRNA target sequence for BTAF1 (NM_003972.1,3281-3299).
gcccattgaggaatacaat

SEQ ID NO: 1747 - DNA, 19 bp, Homo sapiens
  siRNA target sequence for BTAF1 (NM_003972.1,3300-3318).
cgacataaataattttgat

SEQ ID NO: 1748 - DNA, 19 bp, Homo sapiens
  siRNA target sequence for BTAF1 (NM_003972.1,3347-3365).
gccctgctcaagaattggt

SEQ ID NO: 1749 - DNA, 19 bp, Homo sapiens
  siRNA target sequence for BTAF1 (NM_003972.1,3432-3450).
ccagcatttgccacatctt

SEQ ID NO: 1750 - DNA, 19 bp, Homo sapiens
  siRNA target sequence for BTAF1 (NM_003972.1,3435-3453).
gcatttgccacatctttat

SEQ ID NO: 1751 - DNA, 19 bp, Homo sapiens
  siRNA target sequence for BTAF1 (NM_003972.1,3436-3454).
catttgccacatctttata

SEQ ID NO: 1752 - DNA, 19 bp, Homo sapiens
  siRNA target sequence for BTAF1 (NM_003972.1,3489-3507).
catggctgctcgttgtgta

SEQ ID NO: 1753 - DNA, 19 bp, Homo sapiens
  siRNA target sequence for BTAF1 (NM_003972.1,3511-3529).
gtcatgagcaaaatagcta

SEQ ID NO: 1754 - DNA, 19 bp, Homo sapiens
  siRNA target sequence for BTAF1 (NM_003972.1,3530-3548).
ccatggaaacaatgaatat

SEQ ID NO: 1755 - DNA, 19 bp, Homo sapiens
  siRNA target sequence for BTAF1 (NM_003972.1,3569-3587).
cgtggctgggagcaattga

SEQ ID NO: 1756 - DNA, 19 bp, Homo sapiens
  siRNA target sequence for BTAF1 (NM_003972.1,3572-3590).
ggctgggagcaattgatga

SEQ ID NO: 1757 - DNA, 19 bp, Homo sapiens
  siRNA target sequence for BTAF1 (NM_003972.1,3627-3645).
ctgtgtaatggaacaacta

SEQ ID NO: 1758 - DNA, 19 bp, Homo sapiens
  siRNA target sequence for BTAF1 (NM_003972.1,3629-3647).
gtgtaatggaacaactaga

SEQ ID NO: 1759 - DNA, 19 bp, Homo sapiens
  siRNA target sequence for BTAF1 (NM_003972.1,3649-3667).
gttggtattgttccatata

SEQ ID NO: 1760 - DNA, 19 bp, Homo sapiens
  siRNA target sequence for BTAF1 (NM_003972.1,3733-3751).
gccacgcagtgctttgcaa

SEQ ID NO: 1761 - DNA, 19 bp, Homo sapiens
  siRNA target sequence for BTAF1 (NM_003972.1,3741-3759).
gtgctttgcaacgctaatt

SEQ ID NO: 1762 - DNA, 19 bp, Homo sapiens
  siRNA target sequence for BTAF1 (NM_003972.1,3744-3762).
ctttgcaacgctaattaga

SEQ ID NO: 1763 - DNA, 19 bp, Homo sapiens
  siRNA target sequence for BTAF1 (NM_003972.1,3806-3824).
cagcagaattaatccaatt

SEQ ID NO: 1764 - DNA, 19 bp, Homo sapiens
  siRNA target sequence for BTAF1 (NM_003972.1,3808-3826).
gcagaattaatccaattga

SEQ ID NO: 1765 - DNA, 19 bp, Homo sapiens
  siRNA target sequence for BTAF1 (NM_003972.1,3934-3952).
ggtgtgaactggttagcat

SEQ ID NO: 1766 - DNA, 19 bp, Homo sapiens
  siRNA target sequence for BTAF1 (NM_003972.1,4026-4044).
cattctagcaggagatcat

SEQ ID NO: 1767 - DNA, 19 bp, Homo sapiens
  siRNA target sequence for BTAF1 (NM_003972.1,4033-4051).
gcaggagatcattgtcata

SEQ ID NO: 1768 - DNA, 19 bp, Homo sapiens
  siRNA target sequence for BTAF1 (NM_003972.1,4110-4128).
ggtttgtccgccaacatta

SEQ ID NO: 1769 - DNA, 19 bp, Homo sapiens
  siRNA target sequence for BTAF1 (NM_003972.1,4139-4157).
gggtggatgaagtaggtaa

SEQ ID NO: 1770 - DNA, 19 bp, Homo sapiens
  siRNA target sequence for BTAF1 (NM_003972.1,4163-4181).
gctctagagaatatctcaa

SEQ ID NO: 1771 - DNA, 19 bp, Homo sapiens
  siRNA target sequence for BTAF1 (NM_003972.1,4179-4197).
caacccgttgcattacact

SEQ ID NO: 1772 - DNA, 19 bp, Homo sapiens
  siRNA target sequence for BTAF1 (NM_003972.1,4199-4217).
gacctcccactgaaagaat

SEQ ID NO: 1773 - DNA, 19 bp, Homo sapiens
  siRNA target sequence for BTAF1 (NM_003972.1,4201-4219).
cctcccactgaaagaataa

SEQ ID NO: 1774 - DNA, 19 bp, Homo sapiens
  siRNA target sequence for BTAF1 (NM_003972.1,4282-4300).
gacatagatttctttagaa

SEQ ID NO: 1775 - DNA, 19 bp, Homo sapiens
  siRNA target sequence for BTAF1 (NM_003972.1,4314-4332).
ctactgcattcttgatgaa

SEQ ID NO: 1776 - DNA, 19 bp, Homo sapiens
  siRNA target sequence for BTAF1 (NM_003972.1,4367-4385).
caaaagcagtaaaacaact

SEQ ID NO: 1777 - DNA, 19 bp, Homo sapiens
  siRNA target sequence for BTAF1 (NM_003972.1,4391-4409).
ctaattataggattattct

SEQ ID NO: 1778 - DNA, 19 bp, Homo sapiens
  siRNA target sequence for BTAF1 (NM_003972.1,4443-4461).
gctgtggtcattatttgat

SEQ ID NO: 1779 - DNA, 19 bp, Homo sapiens
  siRNA target sequence for BTAF1 (NM_003972.1,4444-4462).
ctgtggtcattatttgatt

SEQ ID NO: 1780 - DNA, 19 bp, Homo sapiens
  siRNA target sequence for BTAF1 (NM_003972.1,4494-4512).
ccagtttgctgctcgatat

SEQ ID NO: 1781 - DNA, 19 bp, Homo sapiens
  siRNA target sequence for BTAF1 (NM_003972.1,4504-4522).
gctcgatatggtaaaccta

SEQ ID NO: 1782 - DNA, 19 bp, Homo sapiens
  siRNA target sequence for BTAF1 (NM_003972.1,4507-4525).
cgatatggtaaacctatat

SEQ ID NO: 1783 - DNA, 19 bp, Homo sapiens
  siRNA target sequence for BTAF1 (NM_003972.1,4589-4607).
cgctgcaccgccaagtact

SEQ ID NO: 1784 - DNA, 19 bp, Homo sapiens
  siRNA target sequence for BTAF1 (NM_003972.1,4590-4608).
gctgcaccgccaagtacta

SEQ ID NO: 1785 - DNA, 19 bp, Homo sapiens
  siRNA target sequence for BTAF1 (NM_003972.1,4599-4617).
ccaagtactaccgtttctt

SEQ ID NO: 1786 - DNA, 19 bp, Homo sapiens
  siRNA target sequence for BTAF1 (NM_003972.1,4603-4621).
gtactaccgtttcttttga

SEQ ID NO: 1787 - DNA, 19 bp, Homo sapiens
  siRNA target sequence for BTAF1 (NM_003972.1,4606-4624).
ctaccgtttcttttgagaa

SEQ ID NO: 1788 - DNA, 19 bp, Homo sapiens
  siRNA target sequence for BTAF1 (NM_003972.1,4733-4751).
gtgccaagtgtgatgttga

SEQ ID NO: 1789 - DNA, 19 bp, Homo sapiens
  siRNA target sequence for BTAF1 (NM_003972.1,4740-4758).
gtgtgatgttgatgaaaca

SEQ ID NO: 1790 - DNA, 19 bp, Homo sapiens
  siRNA target sequence for BTAF1 (NM_003972.1,4819-4837).
gtattccaggcattacagt

SEQ ID NO: 1791 - DNA, 19 bp, Homo sapiens
  siRNA target sequence for BTAF1 (NM_003972.1,4828-4846).
gcattacagtacttacgta

SEQ ID NO: 1792 - DNA, 19 bp, Homo sapiens
  siRNA target sequence for BTAF1 (NM_003972.1,4829-4847).
cattacagtacttacgtaa

SEQ ID NO: 1793 - DNA, 19 bp, Homo sapiens
  siRNA target sequence for BTAF1 (NM_003972.1,4834-4852).
cagtacttacgtaaactgt

SEQ ID NO: 1794 - DNA, 19 bp, Homo sapiens
  siRNA target sequence for BTAF1 (NM_003972.1,4851-4869).
gtgcaaccatccagcatta

SEQ ID NO: 1795 - DNA, 19 bp, Homo sapiens
  siRNA target sequence for BTAF1 (NM_003972.1,4853-4871).
gcaaccatccagcattagt

SEQ ID NO: 1796 - DNA, 19 bp, Homo sapiens
  siRNA target sequence for BTAF1 (NM_003972.1,4857-4875).
ccatccagcattagtctta

SEQ ID NO: 1797 - DNA, 19 bp, Homo sapiens
  siRNA target sequence for BTAF1 (NM_003972.1,4896-4914).
caagaccactgccgaaaaa

SEQ ID NO: 1798 - DNA, 19 bp, Homo sapiens
  siRNA target sequence for BTAF1 (NM_003972.1,4958-4976).
ctaagctctcagctttgaa

SEQ ID NO: 1799 - DNA, 19 bp, Homo sapiens
  siRNA target sequence for BTAF1 (NM_003972.1,5050-5068).
cacaggatactgatattct

SEQ ID NO: 1800 - DNA, 19 bp, Homo sapiens
  siRNA target sequence for BTAF1 (NM_003972.1,5076-5094).
gaaaagcatgcttgatata

SEQ ID NO: 1801 - DNA, 19 bp, Homo sapiens
  siRNA target sequence for BTAF1 (NM_003972.1,5125-5143).
ccctctgtcacttatttga

SEQ ID NO: 1802 - DNA, 19 bp, Homo sapiens
  siRNA target sequence for BTAF1 (NM_003972.1,5180-5198).
ccattgtttcccggtttaa

SEQ ID NO: 1803 - DNA, 19 bp, Homo sapiens
  siRNA target sequence for BTAF1 (NM_003972.1,5207-5225).
catctatagacgttctgtt

SEQ ID NO: 1804 - DNA, 19 bp, Homo sapiens
  siRNA target sequence for BTAF1 (NM_003972.1,5210-5228).
ctatagacgttctgttact

SEQ ID NO: 1805 - DNA, 19 bp, Homo sapiens
  siRNA target sequence for BTAF1 (NM_003972.1,5266-5284).
ggcgctgacacagtagtat

SEQ ID NO: 1806 - DNA, 19 bp, Homo sapiens
  siRNA target sequence for BTAF1 (NM_003972.1,5267-5285).
gcgctgacacagtagtatt

SEQ ID NO: 1807 - DNA, 19 bp, Homo sapiens
  siRNA target sequence for BTAF1 (NM_003972.1,5301-5319).
gaatcctatgcgagatcta

SEQ ID NO: 1808 - DNA, 19 bp, Homo sapiens
  siRNA target sequence for BTAF1 (NM_003972.1,5348-5366).
ggcagaaacgtgtggttaa

SEQ ID NO: 1809 - DNA, 19 bp, Homo sapiens
  siRNA target sequence for BTAF1 (NM_003972.1,5352-5370).
gaaacgtgtggttaacgta

SEQ ID NO: 1810 - DNA, 19 bp, Homo sapiens
  siRNA target sequence for BTAF1 (NM_003972.1,5368-5386).
gtataccgattgataacca

SEQ ID NO: 1811 - DNA, 19 bp, Homo sapiens
  siRNA target sequence for BTAF1 (NM_003972.1,5436-5454).
catagcgaatactgttatt

SEQ ID NO: 1812 - DNA, 19 bp, Homo sapiens
  siRNA target sequence for BTAF1 (NM_003972.1,5486-5504).
ggactgatcagcttcttga

SEQ ID NO: 1813 - DNA, 19 bp, Homo sapiens
  siRNA target sequence for BTAF1 (NM_003972.1,5487-5505).
gactgatcagcttcttgat

SEQ ID NO: 1814 - DNA, 19 bp, Homo sapiens
  siRNA target sequence for BTAF1 (NM_003972.1,5508-5526).
gtttactcttgataaggat

SEQ ID NO: 1815 - DNA, 19 bp, Homo sapiens
  siRNA target sequence for BTAF1 (NM_003972.1,5567-5585).
caagtatgaaatcaattct

SEQ ID NO: 1816 - DNA, 19 bp, Homo sapiens
  siRNA target sequence for BTAF1 (NM_003972.1,5597-5615).
gtgatctttgggatcaaga

SEQ ID NO: 1817 - DNA, 19 bp, Homo sapiens
  siRNA target sequence for BTAF1 (NM_003972.1,5608-5626).
gatcaagagcagtatgatt

SEQ ID NO: 1818 - DNA, 19 bp, Homo sapiens
  siRNA target sequence for BTAF1 (NM_003972.1,5629-5647).
gagtacagcctggaaaatt

SEQ ID NO: 1819 - DNA, 19 bp, Homo sapiens
  siRNA target sequence for BTAF1 (NM_003972.1,5631-5649).
gtacagcctggaaaatttt

SEQ ID NO: 1820 - DNA, 19 bp, Homo sapiens
  siRNA target sequence for BTEB1 (NM_001206.1,1796-1814).
ccagactgccttaaaaagt

SEQ ID NO: 1821 - DNA, 19 bp, Homo sapiens
  siRNA target sequence for BTF3L1 (NM_001208.1,11-29).
caatcatgaaccaaaaact

SEQ ID NO: 1822 - DNA, 19 bp, Homo sapiens
  siRNA target sequence for BTF3L1 (NM_001208.1,295-313).
ctactcagcatcgatcata

SEQ ID NO: 1823 - DNA, 19 bp, Homo sapiens
  siRNA target sequence for BTG2 (NM_006763.2,163-181).
gcgagcagaggcttaaggt

SEQ ID NO: 1824 - DNA, 19 bp, Homo sapiens
  siRNA target sequence for BTG2 (NM_006763.2,421-439).
gctccatctgcgtcttgta

SEQ ID NO: 1825 - DNA, 19 bp, Homo sapiens
  siRNA target sequence for BTG2 (NM_006763.2,508-526).
gcagcccctccaagaacta

SEQ ID NO: 1826 - DNA, 19 bp, Homo sapiens
  siRNA target sequence for C10orf1 (NM_020527.1,17-35).
gccaggagccccactgtaa

SEQ ID NO: 1827 - DNA, 19 bp, Homo sapiens
  siRNA target sequence for C10orf1 (NM_020527.1,18-36).
ccaggagccccactgtaaa

SEQ ID NO: 1828 - DNA, 19 bp, Homo sapiens
  siRNA target sequence for C10orf1 (NM_020527.1,191-209).
gagcttggtctccttacaa

SEQ ID NO: 1829 - DNA, 19 bp, Homo sapiens
  siRNA target sequence for C10orf1 (NM_020527.1,217-235).
ccatgcgtcactacaaaca

SEQ ID NO: 1830 - DNA, 19 bp, Homo sapiens
  siRNA target sequence for C10orf1 (NM_020527.1,227-245).
ctacaaacagctctaataa

SEQ ID NO: 1831 - DNA, 19 bp, Homo sapiens
  siRNA target sequence for C10orf1 (NM_020527.1,259-277).
gtacctgtgcactttacca

SEQ ID NO: 1832 - DNA, 19 bp, Homo sapiens
  siRNA target sequence for C10orf1 (NM_020527.1,265-283).
gtgcactttaccatatcca

SEQ ID NO: 1833 - DNA, 19 bp, Homo sapiens
  siRNA target sequence for C10orf1 (NM_020527.1,373-391).
cgctcatctcagactcata

SEQ ID NO: 1834 - DNA, 19 bp, Homo sapiens
  siRNA target sequence for C10orf1 (NM_020527.1,406-424).
gcccctaactggtctaatt

SEQ ID NO: 1835 - DNA, 19 bp, Homo sapiens
  siRNA target sequence for C10orf1 (NM_020527.1,568-586).
ctcgccgcagtcccattaa

SEQ ID NO: 1836 - DNA, 19 bp, Homo sapiens
  siRNA target sequence for C10orf1 (NM_020527.1,571-589).
gccgcagtcccattaatca

SEQ ID NO: 1837 - DNA, 19 bp, Homo sapiens
  siRNA target sequence for C10orf1 (NM_020527.1,573-591).
cgcagtcccattaatcaca

SEQ ID NO: 1838 - DNA, 19 bp, Homo sapiens
  siRNA target sequence for C10orf1 (NM_020527.1,799-817).
gggcctggccgacctaatt

SEQ ID NO: 1839 - DNA, 19 bp, Homo sapiens
  siRNA target sequence for C10orf1 (NM_020527.1,801-819).
gcctggccgacctaattca

SEQ ID NO: 1840 - DNA, 19 bp, Homo sapiens
  siRNA target sequence for C10orf1 (NM_020527.1,802-820).
cctggccgacctaattcaa

SEQ ID NO: 1841 - DNA, 19 bp, Homo sapiens
  siRNA target sequence for C10orf1 (NM_020527.1,803-821).
ctggccgacctaattcaat

SEQ ID NO: 1842 - DNA, 19 bp, Homo sapiens
  siRNA target sequence for C10orf1 (NM_020527.1,805-823).
ggccgacctaattcaatta

SEQ ID NO: 1843 - DNA, 19 bp, Homo sapiens
  siRNA target sequence for C10orf1 (NM_020527.1,808-826).
cgacctaattcaattagct

SEQ ID NO: 1844 - DNA, 19 bp, Homo sapiens
  siRNA target sequence for C10orf1 (NM_020527.1,894-912).
gcacgaagaccatgcatat

SEQ ID NO: 1845 - DNA, 19 bp, Homo sapiens
  siRNA target sequence for C10orf1 (NM_020527.1,897-915).
cgaagaccatgcatatgga

SEQ ID NO: 1846 - DNA, 19 bp, Homo sapiens
  siRNA target sequence for C10orf1 (NM_020527.1,1065-1083).
gtggccgtcttcagagtat

SEQ ID NO: 1847 - DNA, 19 bp, Homo sapiens
  siRNA target sequence for C10orf1 (NM_020527.1,1067-1085).
ggccgtcttcagagtatgt

SEQ ID NO: 1848 - DNA, 19 bp, Homo sapiens
  siRNA target sequence for C10orf1 (NM_020527.1,1069-1087).
ccgtcttcagagtatgtgt

SEQ ID NO: 1849 - DNA, 19 bp, Homo sapiens
  siRNA target sequence for C10orf48 (NM_173576.1,444-462).
ctcaagcagtggctttaca

SEQ ID NO: 1850 - DNA, 19 bp, Homo sapiens
  siRNA target sequence for C10orf48 (NM_173576.1,487-505).
ccaagaccgagaagatact

SEQ ID NO: 1851 - DNA, 19 bp, Homo sapiens
  siRNA target sequence for C10orf48 (NM_173576.1,529-547).
cgctagtgcaggtgtcaaa

SEQ ID NO: 1852 - DNA, 19 bp, Homo sapiens
  siRNA target sequence for C10orf48 (NM_173576.1,530-548).
gctagtgcaggtgtcaaat

SEQ ID NO: 1853 - DNA, 19 bp, Homo sapiens
  siRNA target sequence for C10orf48 (NM_173576.1,531-549).
ctagtgcaggtgtcaaatt

SEQ ID NO: 1854 - DNA, 19 bp, Homo sapiens
  siRNA target sequence for C10orf48 (NM_173576.1,540-558).
gtgtcaaattggtttgcta

SEQ ID NO: 1855 - DNA, 19 bp, Homo sapiens
  siRNA target sequence for C10orf48 (NM_173576.1,542-560).
gtcaaattggtttgctaat

SEQ ID NO: 1856 - DNA, 19 bp, Homo sapiens
  siRNA target sequence for C10orf48 (NM_173576.1,561-579).
gcaagacgtcggcttaaga

SEQ ID NO: 1857 - DNA, 19 bp, Homo sapiens
  siRNA target sequence for C10orf48 (NM_173576.1,562-580).
caagacgtcggcttaagaa

SEQ ID NO: 1858 - DNA, 19 bp, Homo sapiens
  siRNA target sequence for C10orf48 (NM_173576.1,584-602).
cgttcgacagccagattta

SEQ ID NO: 1859 - DNA, 19 bp, Homo sapiens
  siRNA target sequence for C10orf48 (NM_173576.1,585-603).
gttcgacagccagatttaa

SEQ ID NO: 1860 - DNA, 19 bp, Homo sapiens
  siRNA target sequence for C10orf48 (NM_173576.1,588-606).
cgacagccagatttaagct

SEQ ID NO: 1861 - DNA, 19 bp, Homo sapiens
  siRNA target sequence for C10orf48 (NM_173576.1,623-641).
gttatacaacaagtatgtt

SEQ ID NO: 1862 - DNA, 19 bp, Homo sapiens
  siRNA target sequence for C10orf48 (NM_173576.1,671-689).
cagtgatgactcatgttct

SEQ ID NO: 1863 - DNA, 19 bp, Homo sapiens
  siRNA target sequence for C10orf48 (NM_173576.1,722-740).
gaacgaagggggctataat

SEQ ID NO: 1864 - DNA, 19 bp, Homo sapiens
  siRNA target sequence for C10orf48 (NM_173576.1,769-787).
gtgagaattcggtcatcaa

SEQ ID NO: 1865 - DNA, 19 bp, Homo sapiens
  siRNA target sequence for C10orf48 (NM_173576.1,828-846).
gtggcaccccccaaataca

SEQ ID NO: 1866 - DNA, 19 bp, Homo sapiens
  siRNA target sequence for C10orf48 (NM_173576.1,831-849).
gcaccccccaaatacaaga

SEQ ID NO: 1867 - DNA, 19 bp, Homo sapiens
  siRNA target sequence for C10orf48 (NM_173576.1,854-872).
cttgttgaaccgttacctt

SEQ ID NO: 1868 - DNA, 19 bp, Homo sapiens
  siRNA target sequence for C10orf48 (NM_173576.1,865-883).
gttaccttaatgactcttt

SEQ ID NO: 1869 - DNA, 19 bp, Homo sapiens
  siRNA target sequence for C10orf48 (NM_173576.1,891-909).
gtcatggccacgaacacta

SEQ ID NO: 1870 - DNA, 19 bp, Homo sapiens
  siRNA target sequence for C10orf48 (NM_173576.1,934-952).
gaaaccactcgggatcttt

SEQ ID NO: 1871 - DNA, 19 bp, Homo sapiens
  siRNA target sequence for C10orf48 (NM_173576.1,939-957).
cactcgggatcttttagct

SEQ ID NO: 1872 - DNA, 19 bp, Homo sapiens
  siRNA target sequence for C10orf48 (NM_173576.1,983-1001).
gtctccatcgtcatcagaa

SEQ ID NO: 1873 - DNA, 19 bp, Homo sapiens
  siRNA target sequence for C10orf48 (NM_173576.1,1099-1117).
cgtattggaaggagatcaa

SEQ ID NO: 1874 - DNA, 19 bp, Homo sapiens
  siRNA target sequence for C10orf48 (NM_173576.1,1118-1136).
cgcagctatggccttaaca

SEQ ID NO: 1875 - DNA, 19 bp, Homo sapiens
  siRNA target sequence for C10orf48 (NM_173576.1,1119-1137).
gcagctatggccttaacaa

SEQ ID NO: 1876 - DNA, 19 bp, Homo sapiens
  siRNA target sequence for C10orf48 (NM_173576.1,1123-1141).
ctatggccttaacaaatct

SEQ ID NO: 1877 - DNA, 19 bp, Homo sapiens
  siRNA target sequence for C10orf48 (NM_173576.1,1187-1205).
ccagaagtcgtcccatata

SEQ ID NO: 1878 - DNA, 19 bp, Homo sapiens
  siRNA target sequence for C10orf48 (NM_173576.1,1190-1208).
gaagtcgtcccatatagca

SEQ ID NO: 1879 - DNA, 19 bp, Homo sapiens
  siRNA target sequence for C10orf48 (NM_173576.1,1200-1218).
catatagcagaagtaaaga

SEQ ID NO: 1880 - DNA, 19 bp, Homo sapiens
  siRNA target sequence for C20orf17 (NM_173485.2,986-1004).
ggaggacagcggttcagta

SEQ ID NO: 1881 - DNA, 19 bp, Homo sapiens
  siRNA target sequence for C20orf17 (NM_173485.2,1088-1106).
gaactctccaggaagtcat

SEQ ID NO: 1882 - DNA, 19 bp, Homo sapiens
  siRNA target sequence for C20orf17 (NM_173485.2,1230-1248).
ccaaacgaagcacacaatt

SEQ ID NO: 1883 - DNA, 19 bp, Homo sapiens
  siRNA target sequence for C20orf17 (NM_173485.2,1317-1335).
ggcttcaagctgtccaata

SEQ ID NO: 1884 - DNA, 19 bp, Homo sapiens
  siRNA target sequence for C20orf17 (NM_173485.2,1319-1337).
cttcaagctgtccaatagt

SEQ ID NO: 1885 - DNA, 19 bp, Homo sapiens
  siRNA target sequence for C20orf17 (NM_173485.2,1365-1383).
ggcagcaacaagagtgatt

SEQ ID NO: 1886 - DNA, 19 bp, Homo sapiens
  siRNA target sequence for C20orf17 (NM_173485.2,1369-1387).
gcaacaagagtgattttga

SEQ ID NO: 1887 - DNA, 19 bp, Homo sapiens
  siRNA target sequence for C20orf17 (NM_173485.2,1597-1615).
cgggccactatcaagatga

SEQ ID NO: 1888 - DNA, 19 bp, Homo sapiens
  siRNA target sequence for C20orf17 (NM_173485.2,1635-1653).
ctcagacccacgagctatt

SEQ ID NO: 1889 - DNA, 19 bp, Homo sapiens
  siRNA target sequence for C20orf17 (NM_173485.2,1637-1655).
cagacccacgagctattca

SEQ ID NO: 1890 - DNA, 19 bp, Homo sapiens
  siRNA target sequence for C20orf17 (NM_173485.2,1639-1657).
gacccacgagctattcaaa

SEQ ID NO: 1891 - DNA, 19 bp, Homo sapiens
  siRNA target sequence for C20orf17 (NM_173485.2,1806-1824).
gagccagtcccaaccattt

SEQ ID NO: 1892 - DNA, 19 bp, Homo sapiens
  siRNA target sequence for C20orf17 (NM_173485.2,1816-1834).
caaccatttcctcgaaaat

SEQ ID NO: 1893 - DNA, 19 bp, Homo sapiens
  siRNA target sequence for C20orf17 (NM_173485.2,1819-1837).
ccatttcctcgaaaatggt

SEQ ID NO: 1894 - DNA, 19 bp, Homo sapiens
  siRNA target sequence for C20orf17 (NM_173485.2,1844-1862).
ggctaagaaacgcgttttt

SEQ ID NO: 1895 - DNA, 19 bp, Homo sapiens
  siRNA target sequence for C20orf17 (NM_173485.2,1846-1864).
ctaagaaacgcgtttttga

SEQ ID NO: 1896 - DNA, 19 bp, Homo sapiens
  siRNA target sequence for C20orf17 (NM_173485.2,1875-1893).
ccgtgttcccccgattcaa

SEQ ID NO: 1897 - DNA, 19 bp, Homo sapiens
  siRNA target sequence for C20orf17 (NM_173485.2,2009-2027).
ctgcaagtcccagatctta

SEQ ID NO: 1898 - DNA, 19 bp, Homo sapiens
  siRNA target sequence for C20orf17 (NM_173485.2,2011-2029).
gcaagtcccagatcttaaa

SEQ ID NO: 1899 - DNA, 19 bp, Homo sapiens
  siRNA target sequence for C20orf17 (NM_173485.2,2154-2172).
ccgttagcagtggagaaaa

SEQ ID NO: 1900 - DNA, 19 bp, Homo sapiens
  siRNA target sequence for C20orf17 (NM_173485.2,2155-2173).
cgttagcagtggagaaaat

SEQ ID NO: 1901 - DNA, 19 bp, Homo sapiens
  siRNA target sequence for C20orf17 (NM_173485.2,2187-2205).
gaggccccaaacagtgatt

SEQ ID NO: 1902 - DNA, 19 bp, Homo sapiens
  siRNA target sequence for C20orf17 (NM_173485.2,2191-2209).
ccccaaacagtgattctct

SEQ ID NO: 1903 - DNA, 19 bp, Homo sapiens
  siRNA target sequence for C20orf17 (NM_173485.2,2241-2259).
gattgtacagcctctacaa

SEQ ID NO: 1904 - DNA, 19 bp, Homo sapiens
  siRNA target sequence for C20orf17 (NM_173485.2,2343-2361).
gatcctctacaaaaacctt

SEQ ID NO: 1905 - DNA, 19 bp, Homo sapiens
  siRNA target sequence for C20orf17 (NM_173485.2,2358-2376).
cctttagaccctacaatca

SEQ ID NO: 1906 - DNA, 19 bp, Homo sapiens
  siRNA target sequence for C20orf17 (NM_173485.2,2366-2384).
ccctacaatcaaatatcaa

SEQ ID NO: 1907 - DNA, 19 bp, Homo sapiens
  siRNA target sequence for C20orf17 (NM_173485.2,2583-2601).
cagatccggcctaatctca

SEQ ID NO: 1908 - DNA, 19 bp, Homo sapiens
  siRNA target sequence for C20orf17 (NM_173485.2,2622-2640).
gcaccaaagtggaaagtga

SEQ ID NO: 1909 - DNA, 19 bp, Homo sapiens
  siRNA target sequence for C20orf17 (NM_173485.2,2637-2655).
gtgatgccactggtttcta

SEQ ID NO: 1910 - DNA, 19 bp, Homo sapiens
  siRNA target sequence for C20orf17 (NM_173485.2,2674-2692).
cttacactcaagtcaagaa

SEQ ID NO: 1911 - DNA, 19 bp, Homo sapiens
  siRNA target sequence for C20orf17 (NM_173485.2,2780-2798).
cgattctttccgcaaaagt

SEQ ID NO: 1912 - DNA, 19 bp, Homo sapiens
  siRNA target sequence for C20orf17 (NM_173485.2,2981-2999).
gcagtccgtcctgaacaat

SEQ ID NO: 1913 - DNA, 19 bp, Homo sapiens
  siRNA target sequence for C20orf17 (NM_173485.2,3047-3065).
cccaagttcaagcacaatt

SEQ ID NO: 1914 - DNA, 19 bp, Homo sapiens
  siRNA target sequence for C20orf17 (NM_173485.2,3074-3092).
ccacaagtcgaatctcaat

SEQ ID NO: 1915 - DNA, 19 bp, Homo sapiens
  siRNA target sequence for C20orf17 (NM_173485.2,3148-3166).
ggcgctacctgtttgagaa

SEQ ID NO: 1916 - DNA, 19 bp, Homo sapiens
  siRNA target sequence for C20orf17 (NM_173485.2,3218-3236).
ctcgcaagcacaatcttgt

SEQ ID NO: 1917 - DNA, 19 bp, Homo sapiens
  siRNA target sequence for C20orf17 (NM_173485.2,3487-3505).
catcagagggcaaatacct

SEQ ID NO: 1918 - DNA, 19 bp, Homo sapiens
  siRNA target sequence for C20orf17 (NM_173485.2,3521-3539).
cccacaagagcgtatgcaa

SEQ ID NO: 1919 - DNA, 19 bp, Homo sapiens
  siRNA target sequence for C20orf17 (NM_173485.2,3522-3540).
ccacaagagcgtatgcaaa

SEQ ID NO: 1920 - DNA, 19 bp, Homo sapiens
  siRNA target sequence for C20orf17 (NM_173485.2,3525-3543).
caagagcgtatgcaaatct

SEQ ID NO: 1921 - DNA, 19 bp, Homo sapiens
  siRNA target sequence for C20orf17 (NM_173485.2,3528-3546).
gagcgtatgcaaatctcta

SEQ ID NO: 1922 - DNA, 19 bp, Homo sapiens
  siRNA target sequence for C20orf17 (NM_173485.2,3531-3549).
cgtatgcaaatctctaagt

SEQ ID NO: 1923 - DNA, 19 bp, Homo sapiens
  siRNA target sequence for C20orf17 (NM_173485.2,3532-3550).
gtatgcaaatctctaagtt

SEQ ID NO: 1924 - DNA, 19 bp, Homo sapiens
  siRNA target sequence for C20orf17 (NM_173485.2,3654-3672).
caccccatcttttattgca

SEQ ID NO: 1925 - DNA, 19 bp, Homo sapiens
  siRNA target sequence for C20orf17 (NM_173485.2,3727-3745).
ctcacctgggtttccaaat

SEQ ID NO: 1926 - DNA, 19 bp, Homo sapiens
  siRNA target sequence for C20orf17 (NM_173485.2,3824-3842).
gtctccagaaacaatagct

SEQ ID NO: 1927 - DNA, 19 bp, Homo sapiens
  siRNA target sequence for C20orf17 (NM_173485.2,3858-3876).
gactctaaattcaagtgta

SEQ ID NO: 1928 - DNA, 19 bp, Homo sapiens
  siRNA target sequence for C20orf17 (NM_173485.2,3878-3896).
gttgtgctgtcggacattt

SEQ ID NO: 1929 - DNA, 19 bp, Homo sapiens
  siRNA target sequence for C20orf17 (NM_173485.2,3899-3917).
gagcaaacatgcggtaaaa

SEQ ID NO: 1930 - DNA, 19 bp, Homo sapiens
  siRNA target sequence for C20orf17 (NM_173485.2,3946-3964).
cacccgaacaccattcaca

SEQ ID NO: 1931 - DNA, 19 bp, Homo sapiens
  siRNA target sequence for C20orf17 (NM_173485.2,3954-3972).
caccattcacagtttgtaa

SEQ ID NO: 1932 - DNA, 19 bp, Homo sapiens
  siRNA target sequence for C20orf17 (NM_173485.2,3956-3974).
ccattcacagtttgtaaca

SEQ ID NO: 1933 - DNA, 19 bp, Homo sapiens
  siRNA target sequence for CART1 (NM_006982.1,185-203).
caagagccctccgagtaaa

SEQ ID NO: 1934 - DNA, 19 bp, Homo sapiens
  siRNA target sequence for CART1 (NM_006982.1,191-209).
ccctccgagtaaaaacagt

SEQ ID NO: 1935 - DNA, 19 bp, Homo sapiens
  siRNA target sequence for CART1 (NM_006982.1,232-250).
gtcctctggagcacgttat

SEQ ID NO: 1936 - DNA, 19 bp, Homo sapiens
  siRNA target sequence for CART1 (NM_006982.1,235-253).
ctctggagcacgttatgga

SEQ ID NO: 1937 - DNA, 19 bp, Homo sapiens
  siRNA target sequence for CART1 (NM_006982.1,371-389).
ggacagcagcgtgaactat

SEQ ID NO: 1938 - DNA, 19 bp, Homo sapiens
  siRNA target sequence for CART1 (NM_006982.1,383-401).
gaactatgggatcactaaa

SEQ ID NO: 1939 - DNA, 19 bp, Homo sapiens
  siRNA target sequence for CART1 (NM_006982.1,386-404).
ctatgggatcactaaagta

SEQ ID NO: 1940 - DNA, 19 bp, Homo sapiens
  siRNA target sequence for CART1 (NM_006982.1,415-433).
cccttcacaccgaactgaa

SEQ ID NO: 1941 - DNA, 19 bp, Homo sapiens
  siRNA target sequence for CART1 (NM_006982.1,416-434).
ccttcacaccgaactgaat

SEQ ID NO: 1942 - DNA, 19 bp, Homo sapiens
  siRNA target sequence for CART1 (NM_006982.1,417-435).
cttcacaccgaactgaata

SEQ ID NO: 1943 - DNA, 19 bp, Homo sapiens
  siRNA target sequence for CART1 (NM_006982.1,503-521).
ggatgaacttggggataaa

SEQ ID NO: 1944 - DNA, 19 bp, Homo sapiens
  siRNA target sequence for CART1 (NM_006982.1,504-522).
gatgaacttggggataaat

SEQ ID NO: 1945 - DNA, 19 bp, Homo sapiens
  siRNA target sequence for CART1 (NM_006982.1,715-733).
ggagaaaaagggaacgtta

SEQ ID NO: 1946 - DNA, 19 bp, Homo sapiens
  siRNA target sequence for CART1 (NM_006982.1,716-734).
gagaaaaagggaacgttat

SEQ ID NO: 1947 - DNA, 19 bp, Homo sapiens
  siRNA target sequence for CART1 (NM_006982.1,725-743).
ggaacgttatggccaaata

SEQ ID NO: 1948 - DNA, 19 bp, Homo sapiens
  siRNA target sequence for CART1 (NM_006982.1,730-748).
gttatggccaaatacaaca

SEQ ID NO: 1949 - DNA, 19 bp, Homo sapiens
  siRNA target sequence for CART1 (NM_006982.1,765-783).
gctgccacctatgatatat

SEQ ID NO: 1950 - DNA, 19 bp, Homo sapiens
  siRNA target sequence for CART1 (NM_006982.1,769-787).
ccacctatgatatatcagt

SEQ ID NO: 1951 - DNA, 19 bp, Homo sapiens
  siRNA target sequence for CART1 (NM_006982.1,772-790).
cctatgatatatcagtttt

SEQ ID NO: 1952 - DNA, 19 bp, Homo sapiens
  siRNA target sequence for CART1 (NM_006982.1,852-870).
ggttctgtggttacttcat

SEQ ID NO: 1953 - DNA, 19 bp, Homo sapiens
  siRNA target sequence for CART1 (NM_006982.1,860-878).
ggttacttcatgcatgtta

SEQ ID NO: 1954 - DNA, 19 bp, Homo sapiens
  siRNA target sequence for CART1 (NM_006982.1,898-916).
gtatgacaccttattctca

SEQ ID NO: 1955 - DNA, 19 bp, Homo sapiens
  siRNA target sequence for CART1 (NM_006982.1,924-942).
cggacagattccagttaca

SEQ ID NO: 1956 - DNA, 19 bp, Homo sapiens
  siRNA target sequence for CART1 (NM_006982.1,937-955).
gttacacggggttttcaaa

SEQ ID NO: 1957 - DNA, 19 bp, Homo sapiens
  siRNA target sequence for CART1 (NM_006982.1,975-993).
cacgtgcccctcaacaatt

SEQ ID NO: 1958 - DNA, 19 bp, Homo sapiens
  siRNA target sequence for CART1 (NM_006982.1,977-995).
cgtgcccctcaacaatttt

SEQ ID NO: 1959 - DNA, 19 bp, Homo sapiens
  siRNA target sequence for CART1 (NM_006982.1,1024-1042).
ccaatggacatgcatttga

SEQ ID NO: 1960 - DNA, 19 bp, Homo sapiens
  siRNA target sequence for CART1 (NM_006982.1,1079-1097).
cgcagttcttcgaatgaaa

SEQ ID NO: 1961 - DNA, 19 bp, Homo sapiens
  siRNA target sequence for CART1 (NM_006982.1,1103-1121).
ggagcacaccgccaatatt

SEQ ID NO: 1962 - DNA, 19 bp, Homo sapiens
  siRNA target sequence for CART1 (NM_006982.1,1106-1124).
gcacaccgccaatatttca

SEQ ID NO: 1963 - DNA, 19 bp, Homo sapiens
  siRNA target sequence for CART1 (NM_006982.1,1107-1125).
cacaccgccaatatttcat

SEQ ID NO: 1964 - DNA, 19 bp, Homo sapiens
  siRNA target sequence for CBFA2T1 (NM_004349.2,460-478).
gatgtgaagacgcaatcta

SEQ ID NO: 1965 - DNA, 19 bp, Homo sapiens
  siRNA target sequence for CBFA2T1 (NM_004349.2,545-563).
caccgacaacgttaactaa

SEQ ID NO: 1966 - DNA, 19 bp, Homo sapiens
  siRNA target sequence for CBFA2T1 (NM_004349.2,648-666).
ctcctctctggctaatcaa

SEQ ID NO: 1967 - DNA, 19 bp, Homo sapiens
  siRNA target sequence for CBFA2T1 (NM_004349.2,650-668).
cctctctggctaatcaaca

SEQ ID NO: 1968 - DNA, 19 bp, Homo sapiens
  siRNA target sequence for CBFA2T1 (NM_004349.2,697-715).
ctcagcaagctgaaaaggt

SEQ ID NO: 1969 - DNA, 19 bp, Homo sapiens
  siRNA target sequence for CBFA2T1 (NM_004349.2,755-773).
ccgagataggagaaagagt

SEQ ID NO: 1970 - DNA, 19 bp, Homo sapiens
  siRNA target sequence for CBFA2T1 (NM_004349.2,756-774).
cgagataggagaaagagtt

SEQ ID NO: 1971 - DNA, 19 bp, Homo sapiens
  siRNA target sequence for CBFA2T1 (NM_004349.2,793-811).
ctagtgaactccactttga

SEQ ID NO: 1972 - DNA, 19 bp, Homo sapiens
  siRNA target sequence for CBFA2T1 (NM_004349.2,801-819).
ctccactttgacaattgaa

SEQ ID NO: 1973 - DNA, 19 bp, Homo sapiens
  siRNA target sequence for CBFA2T1 (NM_004349.2,852-870).
cttcccactgagacctttt

SEQ ID NO: 1974 - DNA, 19 bp, Homo sapiens
  siRNA target sequence for CBFA2T1 (NM_004349.2,857-875).
cactgagaccttttgtcat

SEQ ID NO: 1975 - DNA, 19 bp, Homo sapiens
  siRNA target sequence for CBFA2T1 (NM_004349.2,1027-1045).
cttctcgatgtgaacgaaa

SEQ ID NO: 1976 - DNA, 19 bp, Homo sapiens
  siRNA target sequence for CBFA2T1 (NM_004349.2,1122-1140).
caagcgaccatgcactatt

SEQ ID NO: 1977 - DNA, 19 bp, Homo sapiens
  siRNA target sequence for CBFA2T1 (NM_004349.2,1149-1167).
ccagcggtacagtccaaat

SEQ ID NO: 1978 - DNA, 19 bp, Homo sapiens
  siRNA target sequence for CBFA2T1 (NM_004349.2,1150-1168).
cagcggtacagtccaaata

SEQ ID NO: 1979 - DNA, 19 bp, Homo sapiens
  siRNA target sequence for CBFA2T1 (NM_004349.2,1162-1180).
ccaaataacggcttatcct

SEQ ID NO: 1980 - DNA, 19 bp, Homo sapiens
  siRNA target sequence for CBFA2T1 (NM_004349.2,1163-1181).
caaataacggcttatccta

SEQ ID NO: 1981 - DNA, 19 bp, Homo sapiens
  siRNA target sequence for CBFA2T1 (NM_004349.2,1225-1243).
cattaccgtttggatgata

SEQ ID NO: 1982 - DNA, 19 bp, Homo sapiens
  siRNA target sequence for CBFA2T1 (NM_004349.2,1330-1348).
ggcacacgtcaagaagaaa

SEQ ID NO: 1983 - DNA, 19 bp, Homo sapiens
  siRNA target sequence for CBFA2T1 (NM_004349.2,1331-1349).
gcacacgtcaagaagaaat

SEQ ID NO: 1984 - DNA, 19 bp, Homo sapiens
  siRNA target sequence for CBFA2T1 (NM_004349.2,1350-1368).
gattgatcacagactaaca

SEQ ID NO: 1985 - DNA, 19 bp, Homo sapiens
  siRNA target sequence for CBFA2T1 (NM_004349.2,1399-1417).
cttgaccatctgttaaact

SEQ ID NO: 1986 - DNA, 19 bp, Homo sapiens
  siRNA target sequence for CBFA2T1 (NM_004349.2,1447-1465).
cgatctctcaccgtactaa

SEQ ID NO: 1987 - DNA, 19 bp, Homo sapiens
  siRNA target sequence for CBFA2T1 (NM_004349.2,1480-1498).
gcagaccgggaagaattga

SEQ ID NO: 1988 - DNA, 19 bp, Homo sapiens
  siRNA target sequence for CBFA2T1 (NM_004349.2,1520-1538).
gtgacgccgaggacttaaa

SEQ ID NO: 1989 - DNA, 19 bp, Homo sapiens
  siRNA target sequence for CBFA2T1 (NM_004349.2,1611-1629).
cgcgcatcgggaattcctt

SEQ ID NO: 1990 - DNA, 19 bp, Homo sapiens
  siRNA target sequence for CBFA2T1 (NM_004349.2,1828-1846).
gacgcactggcagttatca

SEQ ID NO: 1991 - DNA, 19 bp, Homo sapiens
  siRNA target sequence for CBFA2T1 (NM_004349.2,1832-1850).
cactggcagttatcaatca

SEQ ID NO: 1992 - DNA, 19 bp, Homo sapiens
  siRNA target sequence for CBFA2T1 (NM_004349.2,1866-1884).
cgagagttgctggaattgt

SEQ ID NO: 1993 - DNA, 19 bp, Homo sapiens
  siRNA target sequence for CBFA2T1 (NM_004349.2,1885-1903).
ggccgtaaagcgagtgaaa

SEQ ID NO: 1994 - DNA, 19 bp, Homo sapiens
  siRNA target sequence for CBFA2T1 (NM_004349.2,1926-1944).
ccgatactgtggctcattt

SEQ ID NO: 1995 - DNA, 19 bp, Homo sapiens
  siRNA target sequence for CBFA2T2 (NM_005093.2,525-543).
ggctaaagaatctggaata

SEQ ID NO: 1996 - DNA, 19 bp, Homo sapiens
  siRNA target sequence for CBFA2T2 (NM_005093.2,536-554).
ctggaataagcttgaaaga

SEQ ID NO: 1997 - DNA, 19 bp, Homo sapiens
  siRNA target sequence for CBFA2T2 (NM_005093.2,617-635).
gatcgcctgtggaagtgaa

SEQ ID NO: 1998 - DNA, 19 bp, Homo sapiens
  siRNA target sequence for CBFA2T2 (NM_005093.2,666-684).
gccacccctcccaccaata

SEQ ID NO: 1999 - DNA, 19 bp, Homo sapiens
  siRNA target sequence for CBFA2T2 (NM_005093.2,672-690).
cctcccaccaataaatcct

SEQ ID NO: 2000 - DNA, 19 bp, Homo sapiens
  siRNA target sequence for CBFA2T2 (NM_005093.2,716-734).
ctcctactgcattaagcaa

SEQ ID NO: 2001 - DNA, 19 bp, Homo sapiens
  siRNA target sequence for CBFA2T2 (NM_005093.2,802-820).
cctgcctcctccacatcat

SEQ ID NO: 2002 - DNA, 19 bp, Homo sapiens
  siRNA target sequence for CBFA2T2 (NM_005093.2,862-880).
cgacaactcagcaagttga

SEQ ID NO: 2003 - DNA, 19 bp, Homo sapiens
  siRNA target sequence for CBFA2T2 (NM_005093.2,873-891).
caagttgaaacgctttctt

SEQ ID NO: 2004 - DNA, 19 bp, Homo sapiens
  siRNA target sequence for CBFA2T2 (NM_005093.2,939-957).
gaaggtgcggactcttgtt

SEQ ID NO: 2005 - DNA, 19 bp, Homo sapiens
  siRNA target sequence for CBFA2T2 (NM_005093.2,942-960).
ggtgcggactcttgttctt

SEQ ID NO: 2006 - DNA, 19 bp, Homo sapiens
  siRNA target sequence for CBFA2T2 (NM_005093.2,1008-1026).
ccaagaagccacaaacttt

SEQ ID NO: 2007 - DNA, 19 bp, Homo sapiens
  siRNA target sequence for CBFA2T2 (NM_005093.2,1033-1051).
cgtccttttgtgattccat

SEQ ID NO: 2008 - DNA, 19 bp, Homo sapiens
  siRNA target sequence for CBFA2T2 (NM_005093.2,1285-1303).
cctcctgccaagagagtat

SEQ ID NO: 2009 - DNA, 19 bp, Homo sapiens
  siRNA target sequence for CBFA2T2 (NM_005093.2,1341-1359).
cactgtgcccctcatgaat

SEQ ID NO: 2010 - DNA, 19 bp, Homo sapiens
  siRNA target sequence for CBFA2T2 (NM_005093.2,1387-1405).
ccacctcttcagcattaca

SEQ ID NO: 2011 - DNA, 19 bp, Homo sapiens
  siRNA target sequence for CBFA2T2 (NM_005093.2,1466-1484).
gagaagttcgtgatagaca

SEQ ID NO: 2012 - DNA, 19 bp, Homo sapiens
  siRNA target sequence for CBFA2T2 (NM_005093.2,1528-1546).
gatcatcgtttgacagaaa

SEQ ID NO: 2013 - DNA, 19 bp, Homo sapiens
  siRNA target sequence for CBFA2T2 (NM_005093.2,1573-1591).
cttgaccatgcgctgaatt

SEQ ID NO: 2014 - DNA, 19 bp, Homo sapiens
  siRNA target sequence for CBFA2T2 (NM_005093.2,1576-1594).
gaccatgcgctgaattgca

SEQ ID NO: 2015 - DNA, 19 bp, Homo sapiens
  siRNA target sequence for CBFA2T2 (NM_005093.2,1578-1596).
ccatgcgctgaattgcatt

SEQ ID NO: 2016 - DNA, 19 bp, Homo sapiens
  siRNA target sequence for CBFA2T2 (NM_005093.2,1579-1597).
catgcgctgaattgcatta

SEQ ID NO: 2017 - DNA, 19 bp, Homo sapiens
  siRNA target sequence for CBFA2T2 (NM_005093.2,1583-1601).
cgctgaattgcattatgga

SEQ ID NO: 2018 - DNA, 19 bp, Homo sapiens
  siRNA target sequence for CBFA2T2 (NM_005093.2,1584-1602).
gctgaattgcattatggaa

SEQ ID NO: 2019 - DNA, 19 bp, Homo sapiens
  siRNA target sequence for CBFA2T2 (NM_005093.2,1585-1603).
ctgaattgcattatggaaa

SEQ ID NO: 2020 - DNA, 19 bp, Homo sapiens
  siRNA target sequence for CBFA2T2 (NM_005093.2,1641-1659).
gcgctgtcaggaatcagat

SEQ ID NO: 2021 - DNA, 19 bp, Homo sapiens
  siRNA target sequence for CBFA2T2 (NM_005093.2,1751-1769).
ctgggagtgcagattctct

SEQ ID NO: 2022 - DNA, 19 bp, Homo sapiens
  siRNA target sequence for CBFA2T2 (NM_005093.2,1762-1780).
gattctctcagcaatgatt

SEQ ID NO: 2023 - DNA, 19 bp, Homo sapiens
  siRNA target sequence for CBFA2T2 (NM_005093.2,1803-1821).
gccaggtacaggatacgta

SEQ ID NO: 2024 - DNA, 19 bp, Homo sapiens
  siRNA target sequence for CBFA2T2 (NM_005093.2,1819-1837).
gtacctgtggagttttgga

SEQ ID NO: 2025 - DNA, 19 bp, Homo sapiens
  siRNA target sequence for CBFA2T2 (NM_005093.2,1852-1870).
gctgtgaataaggtgaaaa

SEQ ID NO: 2026 - DNA, 19 bp, Homo sapiens
  siRNA target sequence for CBFA2T2 (NM_005093.2,1949-1967).
cacgaatggagcaaaccat

SEQ ID NO: 2027 - DNA, 19 bp, Homo sapiens
  siRNA target sequence for CBFA2T2 (NM_005093.2,2072-2090).
catgcagtggctgcaatat

SEQ ID NO: 2028 - DNA, 19 bp, Homo sapiens
  siRNA target sequence for CBFA2T2 (NM_005093.2,2085-2103).
caatatcgcgcgatactgt

SEQ ID NO: 2029 - DNA, 19 bp, Homo sapiens
  siRNA target sequence for CBFA2T3 (NM_005187.4,516-534).
gccccacggccgttttcat

SEQ ID NO: 2030 - DNA, 19 bp, Homo sapiens
  siRNA target sequence for CBFA2T3 (NM_005187.4,527-545).
gttttcatggctgcttaaa

SEQ ID NO: 2031 - DNA, 19 bp, Homo sapiens
  siRNA target sequence for CBFA2T3 (NM_005187.4,551-569).
ctatggtctgtctcttgat

SEQ ID NO: 2032 - DNA, 19 bp, Homo sapiens
  siRNA target sequence for CBFA2T3 (NM_005187.4,819-837).
gacgatcgaggagtttcat

SEQ ID NO: 2033 - DNA, 19 bp, Homo sapiens
  siRNA target sequence for CBFA2T3 (NM_005187.4,1072-1090).
cccgacaggaccaaagaga

SEQ ID NO: 2034 - DNA, 19 bp, Homo sapiens
  siRNA target sequence for CBFB (NM_001755.1,76-94).
gccgcgagtgtgagattaa

SEQ ID NO: 2035 - DNA, 19 bp, Homo sapiens
  siRNA target sequence for CBFB (NM_001755.1,78-96).
cgcgagtgtgagattaagt

SEQ ID NO: 2036 - DNA, 19 bp, Homo sapiens
  siRNA target sequence for CBFB (NM_001755.1,79-97).
gcgagtgtgagattaagta

SEQ ID NO: 2037 - DNA, 19 bp, Homo sapiens
  siRNA target sequence for CBFB (NM_001755.1,81-99).
gagtgtgagattaagtaca

SEQ ID NO: 2038 - DNA, 19 bp, Homo sapiens
  siRNA target sequence for CBFB (NM_001755.1,186-204).
gccacaggaaccaatctgt

SEQ ID NO: 2039 - DNA, 19 bp, Homo sapiens
  siRNA target sequence for CBFB (NM_001755.1,250-268).
cacctagccgagagtatgt

SEQ ID NO: 2040 - DNA, 19 bp, Homo sapiens
  siRNA target sequence for CBFB (NM_001755.1,261-279).
gagtatgtcgacttagaaa

SEQ ID NO: 2041 - DNA, 19 bp, Homo sapiens
  siRNA target sequence for CBFB (NM_001755.1,282-300).
gaagcaggcaaggtatatt

SEQ ID NO: 2042 - DNA, 19 bp, Homo sapiens
  siRNA target sequence for CBFB (NM_001755.1,285-303).
gcaggcaaggtatatttga

SEQ ID NO: 2043 - DNA, 19 bp, Homo sapiens
  siRNA target sequence for CBFB (NM_001755.1,410-428).
gcaggaggatgcattagca

SEQ ID NO: 2044 - DNA, 19 bp, Homo sapiens
  siRNA target sequence for CBFB (NM_001755.1,452-470).
gagaaggacacgcgaattt

SEQ ID NO: 2045 - DNA, 19 bp, Homo sapiens
  siRNA target sequence for CBFB (NM_001755.1,454-472).
gaaggacacgcgaatttga

SEQ ID NO: 2046 - DNA, 19 bp, Homo sapiens
  siRNA target sequence for CBFB (NM_001755.1,458-476).
gacacgcgaatttgaagat

SEQ ID NO: 2047 - DNA, 19 bp, Homo sapiens
  siRNA target sequence for CBFB (NM_001755.1,463-481).
gcgaatttgaagatagaga

SEQ ID NO: 2048 - DNA, 19 bp, Homo sapiens
  siRNA target sequence for CBFB (NM_001755.1,484-502).
ggtctcatcgggaggaaat

SEQ ID NO: 2049 - DNA, 19 bp, Homo sapiens
  siRNA target sequence for CBFB (NM_022845.1,526-544).
ctagtcctggttccaattt

SEQ ID NO: 2050 - DNA, 19 bp, Homo sapiens
  siRNA target sequence for CBL (NM_005188.1,293-311).
gggacggtggacaagaaga

SEQ ID NO: 2051 - DNA, 19 bp, Homo sapiens
  siRNA target sequence for CBL (NM_005188.1,294-312).
ggacggtggacaagaagat

SEQ ID NO: 2052 - DNA, 19 bp, Homo sapiens
  siRNA target sequence for CBL (NM_005188.1,365-383).
ccaaagctggcgctaaaga

SEQ ID NO: 2053 - DNA, 19 bp, Homo sapiens
  siRNA target sequence for CBL (NM_005188.1,366-384).
caaagctggcgctaaagaa

SEQ ID NO: 2054 - DNA, 19 bp, Homo sapiens
  siRNA target sequence for CBL (NM_005188.1,387-405).
gcccaccttatatcttaga

SEQ ID NO: 2055 - DNA, 19 bp, Homo sapiens
  siRNA target sequence for CBL (NM_005188.1,425-443).
cagcatctccgtactatct

SEQ ID NO: 2056 - DNA, 19 bp, Homo sapiens
  siRNA target sequence for CBL (NM_005188.1,435-453).
gtactatcttgtcaagata

SEQ ID NO: 2057 - DNA, 19 bp, Homo sapiens
  siRNA target sequence for CBL (NM_005188.1,584-602).
cagcctaggcgaaacctaa

SEQ ID NO: 2058 - DNA, 19 bp, Homo sapiens
  siRNA target sequence for CBL (NM_005188.1,588-606).
ctaggcgaaacctaaccaa

SEQ ID NO: 2059 - DNA, 19 bp, Homo sapiens
  siRNA target sequence for CBL (NM_005188.1,593-611).
cgaaacctaaccaaactgt

SEQ ID NO: 2060 - DNA, 19 bp, Homo sapiens
  siRNA target sequence for CBL (NM_005188.1,677-695).
gacacatttcggattacta

SEQ ID NO: 2061 - DNA, 19 bp, Homo sapiens
  siRNA target sequence for CBL (NM_005188.1,679-697).
cacatttcggattactaaa

SEQ ID NO: 2062 - DNA, 19 bp, Homo sapiens
  siRNA target sequence for CBL (NM_005188.1,760-778).
ctttcgacaggctctacat

SEQ ID NO: 2063 - DNA, 19 bp, Homo sapiens
  siRNA target sequence for CBL (NM_005188.1,765-783).
gacaggctctacatgaagt

SEQ ID NO: 2064 - DNA, 19 bp, Homo sapiens
  siRNA target sequence for CBL (NM_005188.1,833-851).
gatctgacctgcaatgatt

SEQ ID NO: 2065 - DNA, 19 bp, Homo sapiens
  siRNA target sequence for CBL (NM_005188.1,836-854).
ctgacctgcaatgattata

SEQ ID NO: 2066 - DNA, 19 bp, Homo sapiens
  siRNA target sequence for CBL (NM_005188.1,947-965).
ggctacatggcttttttga

SEQ ID NO: 2067 - DNA, 19 bp, Homo sapiens
  siRNA target sequence for CBL (NM_005188.1,983-1001).
gctcggctccagaaattca

SEQ ID NO: 2068 - DNA, 19 bp, Homo sapiens
  siRNA target sequence for CBL (NM_005188.1,984-1002).
ctcggctccagaaattcat

SEQ ID NO: 2069 - DNA, 19 bp, Homo sapiens
  siRNA target sequence for CBL (NM_005188.1,987-1005).
ggctccagaaattcattca

SEQ ID NO: 2070 - DNA, 19 bp, Homo sapiens
  siRNA target sequence for CBL (NM_005188.1,989-1007).
ctccagaaattcattcaca

SEQ ID NO: 2071 - DNA, 19 bp, Homo sapiens
  siRNA target sequence for CBL (NM_005188.1,1141-1159).
cttcagggaaggcttctat

SEQ ID NO: 2072 - DNA, 19 bp, Homo sapiens
  siRNA target sequence for CBL (NM_005188.1,1162-1180).
gtttcctgatggacgaaat

SEQ ID NO: 2073 - DNA, 19 bp, Homo sapiens
  siRNA target sequence for CBL (NM_005188.1,1212-1230).
caactccccaagaccatat

SEQ ID NO: 2074 - DNA, 19 bp, Homo sapiens
  siRNA target sequence for CBL (NM_005188.1,1218-1236).
cccaagaccatatcaaagt

SEQ ID NO: 2075 - DNA, 19 bp, Homo sapiens
  siRNA target sequence for CBL (NM_005188.1,1271-1289).
ggctccacattccaactat

SEQ ID NO: 2076 - DNA, 19 bp, Homo sapiens
  siRNA target sequence for CBL (NM_005188.1,1273-1291).
ctccacattccaactatgt

SEQ ID NO: 2077 - DNA, 19 bp, Homo sapiens
  siRNA target sequence for CBL (NM_005188.1,1365-1383).
catcctggcaggaatcaga

SEQ ID NO: 2078 - DNA, 19 bp, Homo sapiens
  siRNA target sequence for CBL (NM_005188.1,1405-1423).
ccgatgtgaaattaaaggt

SEQ ID NO: 2079 - DNA, 19 bp, Homo sapiens
  siRNA target sequence for CBL (NM_005188.1,1435-1453).
cgtggtagatccgtttgat

SEQ ID NO: 2080 - DNA, 19 bp, Homo sapiens
  siRNA target sequence for CBL (NM_005188.1,1503-1521).
ccccaaattatgatgatga

SEQ ID NO: 2081 - DNA, 19 bp, Homo sapiens
  siRNA target sequence for CBL (NM_005188.1,1526-1544).
gatgaacgagctgatgata

SEQ ID NO: 2082 - DNA, 19 bp, Homo sapiens
  siRNA target sequence for CBL (NM_005188.1,1541-1559).
gatactctcttcatgatga

SEQ ID NO: 2083 - DNA, 19 bp, Homo sapiens
  siRNA target sequence for CBL (NM_005188.1,1657-1675).
gccgcagcgagtatgtgtt

SEQ ID NO: 2084 - DNA, 19 bp, Homo sapiens
  siRNA target sequence for CBL (NM_005188.1,1715-1733).
gcttctggctcccttcata

SEQ ID NO: 2085 - DNA, 19 bp, Homo sapiens
  siRNA target sequence for CBL (NM_005188.1,1722-1740).
gctcccttcataaagacaa

SEQ ID NO: 2086 - DNA, 19 bp, Homo sapiens
  siRNA target sequence for CBL (NM_005188.1,1787-1805).
cctccagaccggccatatt

SEQ ID NO: 2087 - DNA, 19 bp, Homo sapiens
  siRNA target sequence for CBL (NM_005188.1,1791-1809).
cagaccggccatattctgt

SEQ ID NO: 2088 - DNA, 19 bp, Homo sapiens
  siRNA target sequence for CBL (NM_005188.1,1863-1881).
gtccctccagagacaaact

SEQ ID NO: 2089 - DNA, 19 bp, Homo sapiens
  siRNA target sequence for CBL (NM_005188.1,1977-1995).
caggaagagaattaaccaa

SEQ ID NO: 2090 - DNA, 19 bp, Homo sapiens
  siRNA target sequence for CBL (NM_005188.1,1996-2014).
ccggcactcacttccattt

SEQ ID NO: 2091 - DNA, 19 bp, Homo sapiens
  siRNA target sequence for CBL (NM_005188.1,2000-2018).
cactcacttccattttcat

SEQ ID NO: 2092 - DNA, 19 bp, Homo sapiens
  siRNA target sequence for CBL (NM_005188.1,2016-2034).
cattgccctcacaaatgga

SEQ ID NO: 2093 - DNA, 19 bp, Homo sapiens
  siRNA target sequence for CBL (NM_005188.1,2124-2142).
gtgaccaccccaaaatcaa

SEQ ID NO: 2094 - DNA, 19 bp, Homo sapiens
  siRNA target sequence for CBL (NM_005188.1,2151-2169).
catctgccaatgccattta

SEQ ID NO: 2095 - DNA, 19 bp, Homo sapiens
  siRNA target sequence for CBL (NM_005188.1,2234-2252).
gaggacacagagtacatga

SEQ ID NO: 2096 - DNA, 19 bp, Homo sapiens
  siRNA target sequence for CBL (NM_005188.1,2293-2311).
gagttcacgagcatgtgat

SEQ ID NO: 2097 - DNA, 19 bp, Homo sapiens
  siRNA target sequence for CBL (NM_005188.1,2323-2341).
gattgatagctgtacgtat

SEQ ID NO: 2098 - DNA, 19 bp, Homo sapiens
  siRNA target sequence for CBL (NM_005188.1,2334-2352).
gtacgtatgaagcaatgta

SEQ ID NO: 2099 - DNA, 19 bp, Homo sapiens
  siRNA target sequence for CBL (NM_005188.1,2435-2453).
ggtcccgaggagtcagaaa

SEQ ID NO: 2100 - DNA, 19 bp, Homo sapiens
  siRNA target sequence for CBL (NM_005188.1,2510-2528).
cgaactctctcagatatct

SEQ ID NO: 2101 - DNA, 19 bp, Homo sapiens
  siRNA target sequence for CBL (NM_005188.1,2514-2532).
ctctctcagatatctctaa

SEQ ID NO: 2102 - DNA, 19 bp, Homo sapiens
  siRNA target sequence for CBL (NM_005188.1,2563-2581).
ggatggtgatcctacaaca

SEQ ID NO: 2103 - DNA, 19 bp, Homo sapiens
  siRNA target sequence for CBL (NM_005188.1,2564-2582).
gatggtgatcctacaacaa

SEQ ID NO: 2104 - DNA, 19 bp, Homo sapiens
  siRNA target sequence for CBL (NM_005188.1,2608-2626).
cgagaggcctccaaaacca

SEQ ID NO: 2105 - DNA, 19 bp, Homo sapiens
  siRNA target sequence for CBL (NM_005188.1,2818-2836).
catcctccgggaatttgtt

SEQ ID NO: 2106 - DNA, 19 bp, Homo sapiens
  siRNA target sequence for CBL (NM_005188.1,2824-2842).
ccgggaatttgtttccatt

SEQ ID NO: 2107 - DNA, 19 bp, Homo sapiens
  siRNA target sequence for CCRN4L (NM_012118.2,400-418).
cggtacaagcagactctat

SEQ ID NO: 2108 - DNA, 19 bp, Homo sapiens
  siRNA target sequence for CCRN4L (NM_012118.2,499-517).
ggagcccattgatcctaaa

SEQ ID NO: 2109 - DNA, 19 bp, Homo sapiens
  siRNA target sequence for CCRN4L (NM_012118.2,562-580).
ccggttccagagggatttt

SEQ ID NO: 2110 - DNA, 19 bp, Homo sapiens
  siRNA target sequence for CCRN4L (NM_012118.2,615-633).
cacctatcagggttatgca

SEQ ID NO: 2111 - DNA, 19 bp, Homo sapiens
  siRNA target sequence for CCRN4L (NM_012118.2,617-635).
cctatcagggttatgcaat

SEQ ID NO: 2112 - DNA, 19 bp, Homo sapiens
  siRNA target sequence for CCRN4L (NM_012118.2,666-684).
gcaaagacaactttgtaca

SEQ ID NO: 2113 - DNA, 19 bp, Homo sapiens
  siRNA target sequence for CCRN4L (NM_012118.2,745-763).
ggcctaccagcctgatata

SEQ ID NO: 2114 - DNA, 19 bp, Homo sapiens
  siRNA target sequence for CCRN4L (NM_012118.2,747-765).
cctaccagcctgatatatt

SEQ ID NO: 2115 - DNA, 19 bp, Homo sapiens
  siRNA target sequence for CCRN4L (NM_012118.2,779-797).
gtggaccactattttgaca

SEQ ID NO: 2116 - DNA, 19 bp, Homo sapiens
  siRNA target sequence for CCRN4L (NM_012118.2,805-823).
gccactcctcagtagacta

SEQ ID NO: 2117 - DNA, 19 bp, Homo sapiens
  siRNA target sequence for CCRN4L (NM_012118.2,814-832).
cagtagactaggctatcaa

SEQ ID NO: 2118 - DNA, 19 bp, Homo sapiens
  siRNA target sequence for CCRN4L (NM_012118.2,824-842).
ggctatcaaggcacgtttt

SEQ ID NO: 2119 - DNA, 19 bp, Homo sapiens
  siRNA target sequence for CCRN4L (NM_012118.2,825-843).
gctatcaaggcacgttttt

SEQ ID NO: 2120 - DNA, 19 bp, Homo sapiens
  siRNA target sequence for CCRN4L (NM_012118.2,853-871).
ctggtcaccttgtctagat

SEQ ID NO: 2121 - DNA, 19 bp, Homo sapiens
  siRNA target sequence for CCRN4L (NM_012118.2,856-874).
gtcaccttgtctagatgta

SEQ ID NO: 2122 - DNA, 19 bp, Homo sapiens
  siRNA target sequence for CCRN4L (NM_012118.2,861-879).
cttgtctagatgtagaaca

SEQ ID NO: 2123 - DNA, 19 bp, Homo sapiens
  siRNA target sequence for CCRN4L (NM_012118.2,954-972).
ggctgacagccatgacatt

SEQ ID NO: 2124 - DNA, 19 bp, Homo sapiens
  siRNA target sequence for CCRN4L (NM_012118.2,1039-1057).
cgctgttacccatctaaaa

SEQ ID NO: 2125 - DNA, 19 bp, Homo sapiens
  siRNA target sequence for CCRN4L (NM_012118.2,1067-1085).
ggctgggagcggtttcgat

SEQ ID NO: 2126 - DNA, 19 bp, Homo sapiens
  siRNA target sequence for CCRN4L (NM_012118.2,1126-1144).
cacccaaggagccaagatt

SEQ ID NO: 2127 - DNA, 19 bp, Homo sapiens
  siRNA target sequence for CCRN4L (NM_012118.2,1179-1197).
caacagaagaggtctacaa

SEQ ID NO: 2128 - DNA, 19 bp, Homo sapiens
  siRNA target sequence for CCRN4L (NM_012118.2,1182-1200).
cagaagaggtctacaaaca

SEQ ID NO: 2129 - DNA, 19 bp, Homo sapiens
  siRNA target sequence for CCRN4L (NM_012118.2,1184-1202).
gaagaggtctacaaacact

SEQ ID NO: 2130 - DNA, 19 bp, Homo sapiens
  siRNA target sequence for CCRN4L (NM_012118.2,1313-1331).
cacaccctggattacatct

SEQ ID NO: 2131 - DNA, 19 bp, Homo sapiens
  siRNA target sequence for CCRN4L (NM_012118.2,1394-1412).
ggacccaacaggttacctt

SEQ ID NO: 2132 - DNA, 19 bp, Homo sapiens
  siRNA target sequence for CCRN4L (NM_012118.2,1402-1420).
caggttaccttccttcaat

SEQ ID NO: 2133 - DNA, 19 bp, Homo sapiens
  siRNA target sequence for CCRN4L (NM_012118.2,1404-1422).
ggttaccttccttcaatta

SEQ ID NO: 2134 - DNA, 19 bp, Homo sapiens
  siRNA target sequence for CCRN4L (NM_012118.2,1405-1423).
gttaccttccttcaattat

SEQ ID NO: 2135 - DNA, 19 bp, Homo sapiens
  siRNA target sequence for CCRN4L (NM_012118.2,1468-1486).
ggaatctgatggactttca

SEQ ID NO: 2136 - DNA, 19 bp, Homo sapiens
  siRNA target sequence for CDX1 (NM_001804.1,516-534).
cggtggcagcggtaagact

SEQ ID NO: 2137 - DNA, 19 bp, Homo sapiens
  siRNA target sequence for CDX1 (NM_001804.1,845-863).
ctccaatgcctgtgaaaga

SEQ ID NO: 2138 - DNA, 19 bp, Homo sapiens
  siRNA target sequence for CDX2 (NM_001265.2,706-724).
ggcagccaagtgaaaacca

SEQ ID NO: 2139 - DNA, 19 bp, Homo sapiens
  siRNA target sequence for CDX2 (NM_001265.2,726-744).
gacgaaagacaaatatcga

SEQ ID NO: 2140 - DNA, 19 bp, Homo sapiens
  siRNA target sequence for CDX4 (NM_005193.1,112-130).
ccgatgccagcctccaatt

SEQ ID NO: 2141 - DNA, 19 bp, Homo sapiens
  siRNA target sequence for CDX4 (NM_005193.1,142-160).
ccggctttctcgcactata

SEQ ID NO: 2142 - DNA, 19 bp, Homo sapiens
  siRNA target sequence for CDX4 (NM_005193.1,143-161).
cggctttctcgcactatat

SEQ ID NO: 2143 - DNA, 19 bp, Homo sapiens
  siRNA target sequence for CDX4 (NM_005193.1,259-277).
cctgggccgtctagtacaa

SEQ ID NO: 2144 - DNA, 19 bp, Homo sapiens
  siRNA target sequence for CDX4 (NM_005193.1,260-278).
ctgggccgtctagtacaat

SEQ ID NO: 2145 - DNA, 19 bp, Homo sapiens
  siRNA target sequence for CDX4 (NM_005193.1,457-475).
cgccacagcccctatgcat

SEQ ID NO: 2146 - DNA, 19 bp, Homo sapiens
  siRNA target sequence for CDX4 (NM_005193.1,570-588).
ggaattccattgcaataga

SEQ ID NO: 2147 - DNA, 19 bp, Homo sapiens
  siRNA target sequence for CDX4 (NM_005193.1,611-629).
cagagctggcagttaacct

SEQ ID NO: 2148 - DNA, 19 bp, Homo sapiens
  siRNA target sequence for CDX4 (NM_005193.1,728-746).
gaggctcggtgcaaagtga

SEQ ID NO: 2149 - DNA, 19 bp, Homo sapiens
  siRNA target sequence for CDX4 (NM_005193.1,761-779).
gccctggggaactacctaa

SEQ ID NO: 2150 - DNA, 19 bp, Homo sapiens
  siRNA target sequence for CDX4 (NM_005193.1,767-785).
gggaactacctaacacttt

SEQ ID NO: 2151 - DNA, 19 bp, Homo sapiens
  siRNA target sequence for CDX4 (NM_005193.1,772-790).
ctacctaacacttttttca

SEQ ID NO: 2152 - DNA, 19 bp, Homo sapiens
  siRNA target sequence for CDX4 (NM_005193.1,812-830).
gatttcaacctattgagat

SEQ ID NO: 2153 - DNA, 19 bp, Homo sapiens
  siRNA target sequence for CEBPB (NM_005194.2,1003-1021).
cacagcgacgagtacaaga

SEQ ID NO: 2154 - DNA, 19 bp, Homo sapiens
  siRNA target sequence for CEBPB (NM_005194.2,1169-1187).
gcaccctgcggaacttgtt

SEQ ID NO: 2155 - DNA, 19 bp, Homo sapiens
  siRNA target sequence for CEBPB (NM_005194.2,1172-1190).
ccctgcggaacttgttcaa

SEQ ID NO: 2156 - DNA, 19 bp, Homo sapiens
  siRNA target sequence for CHD4 (NM_001273.1,144-162).
gatatggatgcacttttga

SEQ ID NO: 2157 - DNA, 19 bp, Homo sapiens
  siRNA target sequence for CHD4 (NM_001273.1,519-537).
gattcaaaggagcctaaat

SEQ ID NO: 2158 - DNA, 19 bp, Homo sapiens
  siRNA target sequence for CHD4 (NM_001273.1,606-624).
cgaaccctcaccaactaca

SEQ ID NO: 2159 - DNA, 19 bp, Homo sapiens
  siRNA target sequence for CHD4 (NM_001273.1,716-734).
gcgggagttcagtaccaat

SEQ ID NO: 2160 - DNA, 19 bp, Homo sapiens
  siRNA target sequence for CHD4 (NM_001273.1,717-735).
cgggagttcagtaccaata

SEQ ID NO: 2161 - DNA, 19 bp, Homo sapiens
  siRNA target sequence for CHD4 (NM_001273.1,718-736).
gggagttcagtaccaataa

SEQ ID NO: 2162 - DNA, 19 bp, Homo sapiens
  siRNA target sequence for CHD4 (NM_001273.1,944-962).
gcctaaacccaagaaagta

SEQ ID NO: 2163 - DNA, 19 bp, Homo sapiens
  siRNA target sequence for CHD4 (NM_001273.1,993-1011).
ggttccaagcgtaagagat

SEQ ID NO: 2164 - DNA, 19 bp, Homo sapiens
  siRNA target sequence for CHD4 (NM_001273.1,1053-1071).
gatgatgccagtatcaata

SEQ ID NO: 2165 - DNA, 19 bp, Homo sapiens
  siRNA target sequence for CHD4 (NM_001273.1,1056-1074).
gatgccagtatcaatagct

SEQ ID NO: 2166 - DNA, 19 bp, Homo sapiens
  siRNA target sequence for CHD4 (NM_001273.1,1061-1079).
cagtatcaatagctattct

SEQ ID NO: 2167 - DNA, 19 bp, Homo sapiens
  siRNA target sequence for CHD4 (NM_001273.1,1063-1081).
gtatcaatagctattctgt

SEQ ID NO: 2168 - DNA, 19 bp, Homo sapiens
  siRNA target sequence for CHD4 (NM_001273.1,1067-1085).
caatagctattctgtttct

SEQ ID NO: 2169 - DNA, 19 bp, Homo sapiens
  siRNA target sequence for CHD4 (NM_001273.1,1121-1139).
gaaactccgaaccactaaa

SEQ ID NO: 2170 - DNA, 19 bp, Homo sapiens
  siRNA target sequence for CHD4 (NM_001273.1,1125-1143).
ctccgaaccactaaaaaga

SEQ ID NO: 2171 - DNA, 19 bp, Homo sapiens
  siRNA target sequence for CHD4 (NM_001273.1,1342-1360).
gcatccagtgggaagctaa

SEQ ID NO: 2172 - DNA, 19 bp, Homo sapiens
  siRNA target sequence for CHD4 (NM_001273.1,1343-1361).
catccagtgggaagctaaa

SEQ ID NO: 2173 - DNA, 19 bp, Homo sapiens
  siRNA target sequence for CHD4 (NM_001273.1,1593-1611).
gtgcagaagatcctaatct

SEQ ID NO: 2174 - DNA, 19 bp, Homo sapiens
  siRNA target sequence for CHD4 (NM_001273.1,1703-1721).
gccagagcggcagttcttt

SEQ ID NO: 2175 - DNA, 19 bp, Homo sapiens
  siRNA target sequence for CHD4 (NM_001273.1,1707-1725).
gagcggcagttctttgtga

SEQ ID NO: 2176 - DNA, 19 bp, Homo sapiens
  siRNA target sequence for CHD4 (NM_001273.1,1793-1811).
ggtgatgttccgaaactat

SEQ ID NO: 2177 - DNA, 19 bp, Homo sapiens
  siRNA target sequence for CHD4 (NM_001273.1,1925-1943).
ctatcgctatgggataaaa

SEQ ID NO: 2178 - DNA, 19 bp, Homo sapiens
  siRNA target sequence for CHD4 (NM_001273.1,1995-2013).
ggccacgtccactacttga

SEQ ID NO: 2179 - DNA, 19 bp, Homo sapiens
  siRNA target sequence for CHD4 (NM_001273.1,1996-2014).
gccacgtccactacttgat

SEQ ID NO: 2180 - DNA, 19 bp, Homo sapiens
  siRNA target sequence for CHD4 (NM_001273.1,1998-2016).
cacgtccactacttgatca

SEQ ID NO: 2181 - DNA, 19 bp, Homo sapiens
  siRNA target sequence for CHD4 (NM_001273.1,2021-2039).
gcgggacttaccttacgat

SEQ ID NO: 2182 - DNA, 19 bp, Homo sapiens
  siRNA target sequence for CHD4 (NM_001273.1,2085-2103).
ctgttcaagcagagctatt

SEQ ID NO: 2183 - DNA, 19 bp, Homo sapiens
  siRNA target sequence for CHD4 (NM_001273.1,2094-2112).
cagagctattggaatcaca

SEQ ID NO: 2184 - DNA, 19 bp, Homo sapiens
  siRNA target sequence for CHD4 (NM_001273.1,2460-2478).
gagcgggagtttgaaatgt

SEQ ID NO: 2185 - DNA, 19 bp, Homo sapiens
  siRNA target sequence for CHD4 (NM_001273.1,2489-2507).
catgtatgtcgtaacctat

SEQ ID NO: 2186 - DNA, 19 bp, Homo sapiens
  siRNA target sequence for CHD4 (NM_001273.1,2634-2652).
ctgacatcctatgaattga

SEQ ID NO: 2187 - DNA, 19 bp, Homo sapiens
  siRNA target sequence for CHD4 (NM_001273.1,2668-2686).
ctattttgggctctattga

SEQ ID NO: 2188 - DNA, 19 bp, Homo sapiens
  siRNA target sequence for CHD4 (NM_001273.1,2741-2759).
gttcttccgggtattgaat

SEQ ID NO: 2189 - DNA, 19 bp, Homo sapiens
  siRNA target sequence for CHD4 (NM_001273.1,2750-2768).
ggtattgaatggttactca

SEQ ID NO: 2190 - DNA, 19 bp, Homo sapiens
  siRNA target sequence for CHD4 (NM_001273.1,2786-2804).
gctgactgggacaccatta

SEQ ID NO: 2191 - DNA, 19 bp, Homo sapiens
  siRNA target sequence for CHD4 (NM_001273.1,2850-2868).
cccgagaggttccacaatt

SEQ ID NO: 2192 - DNA, 19 bp, Homo sapiens
  siRNA target sequence for CHD4 (NM_001273.1,2851-2869).
ccgagaggttccacaattt

SEQ ID NO: 2193 - DNA, 19 bp, Homo sapiens
  siRNA target sequence for CHD4 (NM_001273.1,2959-2977).
ggctcaaagccgatgtgtt

SEQ ID NO: 2194 - DNA, 19 bp, Homo sapiens
  siRNA target sequence for CHD4 (NM_001273.1,2989-3007).
cctccaagacagaactaat

SEQ ID NO: 2195 - DNA, 19 bp, Homo sapiens
  siRNA target sequence for CHD4 (NM_001273.1,2990-3008).
ctccaagacagaactaatt

SEQ ID NO: 2196 - DNA, 19 bp, Homo sapiens
  siRNA target sequence for CHD4 (NM_001273.1,3191-3209).
gatgcctaatggcatgtat

SEQ ID NO: 2197 - DNA, 19 bp, Homo sapiens
  siRNA target sequence for CHD4 (NM_001273.1,3227-3245).
cagagcatctgggaaatta

SEQ ID NO: 2198 - DNA, 19 bp, Homo sapiens
  siRNA target sequence for CHD4 (NM_001273.1,3232-3250).
catctgggaaattattgct

SEQ ID NO: 2199 - DNA, 19 bp, Homo sapiens
  siRNA target sequence for CHD4 (NM_001273.1,3283-3301).
gtgggcatcgtgtactcat

SEQ ID NO: 2200 - DNA, 19 bp, Homo sapiens
  siRNA target sequence for CHD4 (NM_001273.1,3287-3305).
gcatcgtgtactcatcttt

SEQ ID NO: 2201 - DNA, 19 bp, Homo sapiens
  siRNA target sequence for CHD4 (NM_001273.1,3338-3356).
ggatttcttggaacatgaa

SEQ ID NO: 2202 - DNA, 19 bp, Homo sapiens
  siRNA target sequence for CHD4 (NM_001273.1,3410-3428).
ggccattgaccgcttcaat

SEQ ID NO: 2203 - DNA, 19 bp, Homo sapiens
  siRNA target sequence for CHD4 (NM_001273.1,3501-3519).
gctgacacagttattatct

SEQ ID NO: 2204 - DNA, 19 bp, Homo sapiens
  siRNA target sequence for CHD4 (NM_001273.1,3502-3520).
ctgacacagttattatcta

SEQ ID NO: 2205 - DNA, 19 bp, Homo sapiens
  siRNA target sequence for CHD4 (NM_001273.1,3570-3588).
caccggattgggcaaaata

SEQ ID NO: 2206 - DNA, 19 bp, Homo sapiens
  siRNA target sequence for CHD4 (NM_001273.1,3579-3597).
gggcaaaataaaaaggtaa

SEQ ID NO: 2207 - DNA, 19 bp, Homo sapiens
  siRNA target sequence for CHD4 (NM_001273.1,3580-3598).
ggcaaaataaaaaggtaat

SEQ ID NO: 2208 - DNA, 19 bp, Homo sapiens
  siRNA target sequence for CHD4 (NM_001273.1,3825-3843).
gttatccactacgatgata

SEQ ID NO: 2209 - DNA, 19 bp, Homo sapiens
  siRNA target sequence for CHD4 (NM_001273.1,3836-3854).
cgatgataaggccattgaa

SEQ ID NO: 2210 - DNA, 19 bp, Homo sapiens
  siRNA target sequence for CHD4 (NM_001273.1,3903-3921).
ggcatgaatgaatatttga

SEQ ID NO: 2211 - DNA, 19 bp, Homo sapiens
  siRNA target sequence for CHD4 (NM_001273.1,3912-3930).
gaatatttgagctcattca

SEQ ID NO: 2212 - DNA, 19 bp, Homo sapiens
  siRNA target sequence for CHD4 (NM_001273.1,3980-3998).
ggtagaacgggaaatcatt

SEQ ID NO: 2213 - DNA, 19 bp, Homo sapiens
  siRNA target sequence for CHD4 (NM_001273.1,4172-4190).
caaccagtccgattactca

SEQ ID NO: 2214 - DNA, 19 bp, Homo sapiens
  siRNA target sequence for CHD4 (NM_001273.1,4259-4277).
gggcctgcggaatgataaa

SEQ ID NO: 2215 - DNA, 19 bp, Homo sapiens
  siRNA target sequence for CHD4 (NM_001273.1,4349-4367).
gcgaaaagcctttcttaat

SEQ ID NO: 2216 - DNA, 19 bp, Homo sapiens
  siRNA target sequence for CHD4 (NM_001273.1,4357-4375).
cctttcttaatgcaattat

SEQ ID NO: 2217 - DNA, 19 bp, Homo sapiens
  siRNA target sequence for CHD4 (NM_001273.1,4369-4387).
caattatgcgatatggtat

SEQ ID NO: 2218 - DNA, 19 bp, Homo sapiens
  siRNA target sequence for CHD4 (NM_001273.1,4389-4407).
ccacctcaggatgctttta

SEQ ID NO: 2219 - DNA, 19 bp, Homo sapiens
  siRNA target sequence for CHD4 (NM_001273.1,4473-4491).
cttttcatgcggcatttat

SEQ ID NO: 2220 - DNA, 19 bp, Homo sapiens
  siRNA target sequence for CHD4 (NM_001273.1,4554-4572).
cgccagcatgtccttacta

SEQ ID NO: 2221 - DNA, 19 bp, Homo sapiens
  siRNA target sequence for CHD4 (NM_001273.1,4556-4574).
ccagcatgtccttactaga

SEQ ID NO: 2222 - DNA, 19 bp, Homo sapiens
  siRNA target sequence for CHD4 (NM_001273.1,4559-4577).
gcatgtccttactagaatt

SEQ ID NO: 2223 - DNA, 19 bp, Homo sapiens
  siRNA target sequence for CHD4 (NM_001273.1,4610-4628).
ggagtttgaacatgttaat

SEQ ID NO: 2224 - DNA, 19 bp, Homo sapiens
  siRNA target sequence for CHD4 (NM_001273.1,4999-5017).
gtgctgctgatgtagagaa

SEQ ID NO: 2225 - DNA, 19 bp, Homo sapiens
  siRNA target sequence for CHD4 (NM_001273.1,5024-5042).
ggaaaagtcagcaatagat

SEQ ID NO: 2226 - DNA, 19 bp, Homo sapiens
  siRNA target sequence for CHD4 (NM_001273.1,5169-5187).
caacgtttcatgtttaaca

SEQ ID NO: 2227 - DNA, 19 bp, Homo sapiens
  siRNA target sequence for CHD4 (NM_001273.1,5297-5315).
gctgctagccggcattata

SEQ ID NO: 2228 - DNA, 19 bp, Homo sapiens
  siRNA target sequence for CHD4 (NM_001273.1,5298-5316).
ctgctagccggcattataa

SEQ ID NO: 2229 - DNA, 19 bp, Homo sapiens
  siRNA target sequence for CHD4 (NM_001273.1,5400-5418).
cgtggcaatttcttagaga

SEQ ID NO: 2230 - DNA, 19 bp, Homo sapiens
  siRNA target sequence for CHD4 (NM_001273.1,5401-5419).
gtggcaatttcttagagat

SEQ ID NO: 2231 - DNA, 19 bp, Homo sapiens
  siRNA target sequence for CHD4 (NM_001273.1,5404-5422).
gcaatttcttagagatcaa

SEQ ID NO: 2232 - DNA, 19 bp, Homo sapiens
  siRNA target sequence for CHD4 (NM_001273.1,5440-5458).
gaaggtttaagctcttaga

SEQ ID NO: 2233 - DNA, 19 bp, Homo sapiens
  siRNA target sequence for CHD4 (NM_001273.1,5443-5461).
ggtttaagctcttagaaca

SEQ ID NO: 2234 - DNA, 19 bp, Homo sapiens
  siRNA target sequence for CHD4 (NM_001273.1,5491-5509).
gggctgcttacttgaacat

SEQ ID NO: 2235 - DNA, 19 bp, Homo sapiens
  siRNA target sequence for CHD4 (NM_001273.1,5493-5511).
gctgcttacttgaacatgt

SEQ ID NO: 2236 - DNA, 19 bp, Homo sapiens
  siRNA target sequence for CHD4 (NM_001273.1,5747-5765).
gatgtcagagcgtaacatt

SEQ ID NO: 2237 - DNA, 19 bp, Homo sapiens
  siRNA target sequence for CHES1 (NM_005197.1,142-160).
gtcatgcctcccagtaaga

SEQ ID NO: 2238 - DNA, 19 bp, Homo sapiens
  siRNA target sequence for CHES1 (NM_005197.1,244-262).
gacgatgacctcgactttt

SEQ ID NO: 2239 - DNA, 19 bp, Homo sapiens
  siRNA target sequence for CHES1 (NM_005197.1,246-264).
cgatgacctcgacttttct

SEQ ID NO: 2240 - DNA, 19 bp, Homo sapiens
  siRNA target sequence for CHES1 (NM_005197.1,267-285).
gcctgacatccgattagaa

SEQ ID NO: 2241 - DNA, 19 bp, Homo sapiens
  siRNA target sequence for CHES1 (NM_005197.1,328-346).
ctgcacgagagcaagaact

SEQ ID NO: 2242 - DNA, 19 bp, Homo sapiens
  siRNA target sequence for CHES1 (NM_005197.1,535-553).
ctgccagtgaaggatatct

SEQ ID NO: 2243 - DNA, 19 bp, Homo sapiens
  siRNA target sequence for CHES1 (NM_005197.1,541-559).
gtgaaggatatctacaact

SEQ ID NO: 2244 - DNA, 19 bp, Homo sapiens
  siRNA target sequence for CHES1 (NM_005197.1,699-717).
gtgcatagacccagagtat

SEQ ID NO: 2245 - DNA, 19 bp, Homo sapiens
  siRNA target sequence for CHES1 (NM_005197.1,702-720).
catagacccagagtataga

SEQ ID NO: 2246 - DNA, 19 bp, Homo sapiens
  siRNA target sequence for CHES1 (NM_005197.1,761-779).
cacacccacacgtgttcaa

SEQ ID NO: 2247 - DNA, 19 bp, Homo sapiens
  siRNA target sequence for CHES1 (NM_005197.1,763-781).
cacccacacgtgttcaata

SEQ ID NO: 2248 - DNA, 19 bp, Homo sapiens
  siRNA target sequence for CHES1 (NM_005197.1,765-783).
cccacacgtgttcaataca

SEQ ID NO: 2249 - DNA, 19 bp, Homo sapiens
  siRNA target sequence for CHES1 (NM_005197.1,842-860).
gtaccttcttcaagagaaa

SEQ ID NO: 2250 - DNA, 19 bp, Homo sapiens
  siRNA target sequence for CHES1 (NM_005197.1,899-917).
gtgccatgatgcttttgaa

SEQ ID NO: 2251 - DNA, 19 bp, Homo sapiens
  siRNA target sequence for CHES1 (NM_005197.1,915-933).
gaatactccccctgagata

SEQ ID NO: 2252 - DNA, 19 bp, Homo sapiens
  siRNA target sequence for CHES1 (NM_005197.1,1124-1142).
ccaaggaggatcacaacta

SEQ ID NO: 2253 - DNA, 19 bp, Homo sapiens
  siRNA target sequence for CHES1 (NM_005197.1,1214-1232).
cagccgacgaccactatga

SEQ ID NO: 2254 - DNA, 19 bp, Homo sapiens
  siRNA target sequence for CHES1 (NM_005197.1,1216-1234).
gccgacgaccactatgagt

SEQ ID NO: 2255 - DNA, 19 bp, Homo sapiens
  siRNA target sequence for CHES1 (NM_005197.1,1475-1493).
gcgatgatgaggagatgaa

SEQ ID NO: 2256 - DNA, 19 bp, Homo sapiens
  siRNA target sequence for CHES1 (NM_005197.1,1525-1543).
gggatccggtcctgtttga

SEQ ID NO: 2257 - DNA, 19 bp, Homo sapiens
  siRNA target sequence for CHES1 (NM_005197.1,1527-1545).
gatccggtcctgtttgaat

SEQ ID NO: 2258 - DNA, 19 bp, Homo sapiens
  siRNA target sequence for CHES1 (NM_005197.1,1532-1550).
ggtcctgtttgaataacat

SEQ ID NO: 2259 - DNA, 19 bp, Homo sapiens
  siRNA target sequence for CHX10 (NM_182894.1,455-473).
gctcggattctgaagatgt

SEQ ID NO: 2260 - DNA, 19 bp, Homo sapiens
  siRNA target sequence for CHX10 (NM_182894.1,484-502).
gatcgaaaaatgtccaaat

SEQ ID NO: 2261 - DNA, 19 bp, Homo sapiens
  siRNA target sequence for CHX10 (NM_182894.1,535-553).
cggcgacacaggacaatct

SEQ ID NO: 2262 - DNA, 19 bp, Homo sapiens
  siRNA target sequence for CHX10 (NM_182894.1,538-556).
cgacacaggacaatcttta

SEQ ID NO: 2263 - DNA, 19 bp, Homo sapiens
  siRNA target sequence for CHX10 (NM_182894.1,541-559).
cacaggacaatctttacct

SEQ ID NO: 2264 - DNA, 19 bp, Homo sapiens
  siRNA target sequence for CITED1 (NM_004143.2,541-559).
gtcgaggcctgcacttgat

SEQ ID NO: 2265 - DNA, 19 bp, Homo sapiens
  siRNA target sequence for CITED1 (NM_004143.2,624-642).
ccaaccttgcggtgaaaga

SEQ ID NO: 2266 - DNA, 19 bp, Homo sapiens
  siRNA target sequence for CITED1 (NM_004143.2,625-643).
caaccttgcggtgaaagat

SEQ ID NO: 2267 - DNA, 19 bp, Homo sapiens
  siRNA target sequence for CITED1 (NM_004143.2,674-692).
ggggtagcctcaaatggaa

SEQ ID NO: 2268 - DNA, 19 bp, Homo sapiens
  siRNA target sequence for CITED1 (NM_004143.2,795-813).
ctcacttgctggctagtat

SEQ ID NO: 2269 - DNA, 19 bp, Homo sapiens
  siRNA target sequence for CITED1 (NM_004143.2,918-936).
cgggaggggcagaatcact

SEQ ID NO: 2270 - DNA, 19 bp, Homo sapiens
  siRNA target sequence for CITED1 (NM_004143.2,954-972).
cccagagccctgctatcat

SEQ ID NO: 2271 - DNA, 19 bp, Homo sapiens
  siRNA target sequence for CITED2 (NM_006079.2,554-572).
ctcaacaaccagtatttca

SEQ ID NO: 2272 - DNA, 19 bp, Homo sapiens
  siRNA target sequence for CITED2 (NM_006079.2,865-883).
catcgacgaggaagttctt

SEQ ID NO: 2273 - DNA, 19 bp, Homo sapiens
  siRNA target sequence for CITED2 (NM_006079.2,869-887).
gacgaggaagttcttatgt

SEQ ID NO: 2274 - DNA, 19 bp, Homo sapiens
  siRNA target sequence for CITED2 (NM_006079.2,943-961).
ggggcaaaacgagtttgat

SEQ ID NO: 2275 - DNA, 19 bp, Homo sapiens
  siRNA target sequence for CITED2 (NM_006079.2,944-962).
gggcaaaacgagtttgatt

SEQ ID NO: 2276 - DNA, 19 bp, Homo sapiens
  siRNA target sequence for CLOCK (NM_004898.2,431-449).
ggacaaagcgaaaagagta

SEQ ID NO: 2277 - DNA, 19 bp, Homo sapiens
  siRNA target sequence for CLOCK (NM_004898.2,432-450).
gacaaagcgaaaagagtat

SEQ ID NO: 2278 - DNA, 19 bp, Homo sapiens
  siRNA target sequence for CLOCK (NM_004898.2,434-452).
caaagcgaaaagagtatct

SEQ ID NO: 2279 - DNA, 19 bp, Homo sapiens
  siRNA target sequence for CLOCK (NM_004898.2,438-456).
gcgaaaagagtatctagaa

SEQ ID NO: 2280 - DNA, 19 bp, Homo sapiens
  siRNA target sequence for CLOCK (NM_004898.2,439-457).
cgaaaagagtatctagaaa

SEQ ID NO: 2281 - DNA, 19 bp, Homo sapiens
  siRNA target sequence for CLOCK (NM_004898.2,470-488).
gaaacgtagagatcaattt

SEQ ID NO: 2282 - DNA, 19 bp, Homo sapiens
  siRNA target sequence for CLOCK (NM_004898.2,553-571).
ctgttctgcagaaaagcat

SEQ ID NO: 2283 - DNA, 19 bp, Homo sapiens
  siRNA target sequence for CLOCK (NM_004898.2,569-587).
cattgattttttacgaaaa

SEQ ID NO: 2284 - DNA, 19 bp, Homo sapiens
  siRNA target sequence for CLOCK (NM_004898.2,627-645).
cgacaggactggaaaccta

SEQ ID NO: 2285 - DNA, 19 bp, Homo sapiens
  siRNA target sequence for CLOCK (NM_004898.2,660-678).
gaagagtttacacaattaa

SEQ ID NO: 2286 - DNA, 19 bp, Homo sapiens
  siRNA target sequence for CLOCK (NM_004898.2,663-681).
gagtttacacaattaatgt

SEQ ID NO: 2287 - DNA, 19 bp, Homo sapiens
  siRNA target sequence for CLOCK (NM_004898.2,684-702).
gaggctcttgatggttttt

SEQ ID NO: 2288 - DNA, 19 bp, Homo sapiens
  siRNA target sequence for CLOCK (NM_004898.2,693-711).
gatggtttttttttagcaa

SEQ ID NO: 2289 - DNA, 19 bp, Homo sapiens
  siRNA target sequence for CLOCK (NM_004898.2,746-764).
gagtgtaacttcattactt

SEQ ID NO: 2290 - DNA, 19 bp, Homo sapiens
  siRNA target sequence for CLOCK (NM_004898.2,748-766).
gtgtaacttcattacttga

SEQ ID NO: 2291 - DNA, 19 bp, Homo sapiens
  siRNA target sequence for CLOCK (NM_004898.2,783-801).
cttgtggatcaaagtatat

SEQ ID NO: 2292 - DNA, 19 bp, Homo sapiens
  siRNA target sequence for CLOCK (NM_004898.2,786-804).
gtggatcaaagtatattta

SEQ ID NO: 2293 - DNA, 19 bp, Homo sapiens
  siRNA target sequence for CLOCK (NM_004898.2,812-830).
cccagaaggggaacattca

SEQ ID NO: 2294 - DNA, 19 bp, Homo sapiens
  siRNA target sequence for CLOCK (NM_004898.2,926-944).
catgctgcgaggaacaata

SEQ ID NO: 2295 - DNA, 19 bp, Homo sapiens
  siRNA target sequence for CLOCK (NM_004898.2,953-971).
ggagccatctacctatgaa

SEQ ID NO: 2296 - DNA, 19 bp, Homo sapiens
  siRNA target sequence for CLOCK (NM_004898.2,954-972).
gagccatctacctatgaat

SEQ ID NO: 2297 - DNA, 19 bp, Homo sapiens
  siRNA target sequence for CLOCK (NM_004898.2,1161-1179).
gagtttacatctagacata

SEQ ID NO: 2298 - DNA, 19 bp, Homo sapiens
  siRNA target sequence for CLOCK (NM_004898.2,1211-1229).
cagggcaccacccataata

SEQ ID NO: 2299 - DNA, 19 bp, Homo sapiens
  siRNA target sequence for CLOCK (NM_004898.2,1278-1296).
catgtggatgacctagaaa

SEQ ID NO: 2300 - DNA, 19 bp, Homo sapiens
  siRNA target sequence for CLOCK (NM_004898.2,1332-1350).
gggaaaggcaaatcatgtt

SEQ ID NO: 2301 - DNA, 19 bp, Homo sapiens
  siRNA target sequence for CLOCK (NM_004898.2,1333-1351).
ggaaaggcaaatcatgtta

SEQ ID NO: 2302 - DNA, 19 bp, Homo sapiens
  siRNA target sequence for CLOCK (NM_004898.2,1334-1352).
gaaaggcaaatcatgttat

SEQ ID NO: 2303 - DNA, 19 bp, Homo sapiens
  siRNA target sequence for CLOCK (NM_004898.2,1338-1356).
ggcaaatcatgttattata

SEQ ID NO: 2304 - DNA, 19 bp, Homo sapiens
  siRNA target sequence for CLOCK (NM_004898.2,1388-1406).
gcttcagactcattattat

SEQ ID NO: 2305 - DNA, 19 bp, Homo sapiens
  siRNA target sequence for CLOCK (NM_004898.2,1389-1407).
cttcagactcattattata

SEQ ID NO: 2306 - DNA, 19 bp, Homo sapiens
  siRNA target sequence for CLOCK (NM_004898.2,1392-1410).
cagactcattattatatca

SEQ ID NO: 2307 - DNA, 19 bp, Homo sapiens
  siRNA target sequence for CLOCK (NM_004898.2,1394-1412).
gactcattattatatcact

SEQ ID NO: 2308 - DNA, 19 bp, Homo sapiens
  siRNA target sequence for CLOCK (NM_004898.2,1429-1447).
caaggccagagtttattgt

SEQ ID NO: 2309 - DNA, 19 bp, Homo sapiens
  siRNA target sequence for CLOCK (NM_004898.2,1453-1471).
ctcacactgtagtaagtta

SEQ ID NO: 2310 - DNA, 19 bp, Homo sapiens
  siRNA target sequence for CLOCK (NM_004898.2,1498-1516).
gagaacttggcattgaaga

SEQ ID NO: 2311 - DNA, 19 bp, Homo sapiens
  siRNA target sequence for CLOCK (NM_004898.2,1536-1554).
gctgacaaaagccaagatt

SEQ ID NO: 2312 - DNA, 19 bp, Homo sapiens
  siRNA target sequence for CLOCK (NM_004898.2,1548-1566).
caagattctgggtcagata

SEQ ID NO: 2313 - DNA, 19 bp, Homo sapiens
  siRNA target sequence for CLOCK (NM_004898.2,1555-1573).
ctgggtcagataatcgtat

SEQ ID NO: 2314 - DNA, 19 bp, Homo sapiens
  siRNA target sequence for CLOCK (NM_004898.2,1597-1615).
cattggaaaggtttgatca

SEQ ID NO: 2315 - DNA, 19 bp, Homo sapiens
  siRNA target sequence for CLOCK (NM_004898.2,1632-1650).
gcctcttctcggagttcaa

SEQ ID NO: 2316 - DNA, 19 bp, Homo sapiens
  siRNA target sequence for CLOCK (NM_004898.2,1641-1659).
cggagttcaagaaaatcat

SEQ ID NO: 2317 - DNA, 19 bp, Homo sapiens
  siRNA target sequence for CLOCK (NM_004898.2,1799-1817).
ccagtctgttggttcatca

SEQ ID NO: 2318 - DNA, 19 bp, Homo sapiens
  siRNA target sequence for CLOCK (NM_004898.2,1800-1818).
cagtctgttggttcatcat

SEQ ID NO: 2319 - DNA, 19 bp, Homo sapiens
  siRNA target sequence for CLOCK (NM_004898.2,1839-1857).
caagctacaaatttaccaa

SEQ ID NO: 2320 - DNA, 19 bp, Homo sapiens
  siRNA target sequence for CLOCK (NM_004898.2,1866-1884).
ggcatgtcccagtttcagt

SEQ ID NO: 2321 - DNA, 19 bp, Homo sapiens
  siRNA target sequence for CLOCK (NM_004898.2,1867-1885).
gcatgtcccagtttcagtt

SEQ ID NO: 2322 - DNA, 19 bp, Homo sapiens
  siRNA target sequence for CLOCK (NM_004898.2,1871-1889).
gtcccagtttcagttttca

SEQ ID NO: 2323 - DNA, 19 bp, Homo sapiens
  siRNA target sequence for CLOCK (NM_004898.2,1939-1957).
cacgcatgatagaagcaaa

SEQ ID NO: 2324 - DNA, 19 bp, Homo sapiens
  siRNA target sequence for CLOCK (NM_004898.2,1965-1983).
cggcaacaagaagaactaa

SEQ ID NO: 2325 - DNA, 19 bp, Homo sapiens
  siRNA target sequence for CLOCK (NM_004898.2,2047-2065).
caaatcctgggttgaattt

SEQ ID NO: 2326 - DNA, 19 bp, Homo sapiens
  siRNA target sequence for CLOCK (NM_004898.2,2067-2085).
ggttccgttcaactttctt

SEQ ID NO: 2327 - DNA, 19 bp, Homo sapiens
  siRNA target sequence for CLOCK (NM_004898.2,2106-2124).
cagcaacttgcacctataa

SEQ ID NO: 2328 - DNA, 19 bp, Homo sapiens
  siRNA target sequence for CLOCK (NM_004898.2,2109-2127).
caacttgcacctataaata

SEQ ID NO: 2329 - DNA, 19 bp, Homo sapiens
  siRNA target sequence for CLOCK (NM_004898.2,2188-2206).
gcacaactcagcacatgat

SEQ ID NO: 2330 - DNA, 19 bp, Homo sapiens
  siRNA target sequence for CLOCK (NM_004898.2,2204-2222).
gatacaacaacagacttta

SEQ ID NO: 2331 - DNA, 19 bp, Homo sapiens
  siRNA target sequence for CLOCK (NM_004898.2,2208-2226).
caacaacagactttacaga

SEQ ID NO: 2332 - DNA, 19 bp, Homo sapiens
  siRNA target sequence for CLOCK (NM_004898.2,2264-2282).
gcacagtcagcaaacatct

SEQ ID NO: 2333 - DNA, 19 bp, Homo sapiens
  siRNA target sequence for CLOCK (NM_004898.2,2363-2381).
ggtccagattccatctagt

SEQ ID NO: 2334 - DNA, 19 bp, Homo sapiens
  siRNA target sequence for CLOCK (NM_004898.2,2406-2424).
gctgcagtaactacattca

SEQ ID NO: 2335 - DNA, 19 bp, Homo sapiens
  siRNA target sequence for CLOCK (NM_004898.2,2429-2447).
ggacaggcagataagattt

SEQ ID NO: 2336 - DNA, 19 bp, Homo sapiens
  siRNA target sequence for CLOCK (NM_004898.2,2505-2523).
gtcatggtacctagtacta

SEQ ID NO: 2337 - DNA, 19 bp, Homo sapiens
  siRNA target sequence for CLOCK (NM_004898.2,2510-2528).
ggtacctagtactatgctt

SEQ ID NO: 2338 - DNA, 19 bp, Homo sapiens
  siRNA target sequence for CLOCK (NM_004898.2,2534-2552).
ccaggtggtgactgcatat

SEQ ID NO: 2339 - DNA, 19 bp, Homo sapiens
  siRNA target sequence for CLOCK (NM_004898.2,2538-2556).
gtggtgactgcatatccta

SEQ ID NO: 2340 - DNA, 19 bp, Homo sapiens
  siRNA target sequence for CLOCK (NM_004898.2,2543-2561).
gactgcatatcctactttt

SEQ ID NO: 2341 - DNA, 19 bp, Homo sapiens
  siRNA target sequence for CLOCK (NM_004898.2,2547-2565).
gcatatcctacttttgcta

SEQ ID NO: 2342 - DNA, 19 bp, Homo sapiens
  siRNA target sequence for CLOCK (NM_004898.2,2675-2693).
ccagccaccgcaacaattt

SEQ ID NO: 2343 - DNA, 19 bp, Homo sapiens
  siRNA target sequence for CLOCK (NM_004898.2,2676-2694).
cagccaccgcaacaatttt

SEQ ID NO: 2344 - DNA, 19 bp, Homo sapiens
  siRNA target sequence for CLOCK (NM_004898.2,2678-2696).
gccaccgcaacaattttta

SEQ ID NO: 2345 - DNA, 19 bp, Homo sapiens
  siRNA target sequence for CLOCK (NM_004898.2,2680-2698).
caccgcaacaatttttaca

SEQ ID NO: 2346 - DNA, 19 bp, Homo sapiens
  siRNA target sequence for CLOCK (NM_004898.2,2682-2700).
ccgcaacaatttttacaga

SEQ ID NO: 2347 - DNA, 19 bp, Homo sapiens
  siRNA target sequence for CNOT7 (NM_013354.4,846-864).
gagatccttcgattgtttt

SEQ ID NO: 2348 - DNA, 19 bp, Homo sapiens
  siRNA target sequence for CNOT7 (NM_013354.4,958-976).
ggataggaccacaacatca

SEQ ID NO: 2349 - DNA, 19 bp, Homo sapiens
  siRNA target sequence for CNOT7 (NM_013354.4,1090-1108).
ctggttcatcctatgtaca

SEQ ID NO: 2350 - DNA, 19 bp, Homo sapiens
  siRNA target sequence for CNOT8 (NM_004779.4,270-288).
gagaatagccaggttatct

SEQ ID NO: 2351 - DNA, 19 bp, Homo sapiens
  siRNA target sequence for CNOT8 (NM_004779.4,272-290).
gaatagccaggttatctgt

SEQ ID NO: 2352 - DNA, 19 bp, Homo sapiens
  siRNA target sequence for CNOT8 (NM_004779.4,296-314).
gtgggccagtaatctagaa

SEQ ID NO: 2353 - DNA, 19 bp, Homo sapiens
  siRNA target sequence for CNOT8 (NM_004779.4,298-316).
gggccagtaatctagaaga

SEQ ID NO: 2354 - DNA, 19 bp, Homo sapiens
  siRNA target sequence for CNOT8 (NM_004779.4,299-317).
ggccagtaatctagaagaa

SEQ ID NO: 2355 - DNA, 19 bp, Homo sapiens
  siRNA target sequence for CNOT8 (NM_004779.4,301-319).
ccagtaatctagaagaaga

SEQ ID NO: 2356 - DNA, 19 bp, Homo sapiens
  siRNA target sequence for CNOT8 (NM_004779.4,334-352).
gagaaatcgtgctcagtta

SEQ ID NO: 2357 - DNA, 19 bp, Homo sapiens
  siRNA target sequence for CNOT8 (NM_004779.4,336-354).
gaaatcgtgctcagttaca

SEQ ID NO: 2358 - DNA, 19 bp, Homo sapiens
  siRNA target sequence for CNOT8 (NM_004779.4,341-359).
cgtgctcagttacagttat

SEQ ID NO: 2359 - DNA, 19 bp, Homo sapiens
  siRNA target sequence for CNOT8 (NM_004779.4,342-360).
gtgctcagttacagttata

SEQ ID NO: 2360 - DNA, 19 bp, Homo sapiens
  siRNA target sequence for CNOT8 (NM_004779.4,344-362).
gctcagttacagttatatt

SEQ ID NO: 2361 - DNA, 19 bp, Homo sapiens
  siRNA target sequence for CNOT8 (NM_004779.4,395-413).
gcgaccaattggtgaattt

SEQ ID NO: 2362 - DNA, 19 bp, Homo sapiens
  siRNA target sequence for CNOT8 (NM_004779.4,399-417).
ccaattggtgaatttcgta

SEQ ID NO: 2363 - DNA, 19 bp, Homo sapiens
  siRNA target sequence for CNOT8 (NM_004779.4,415-433).
gtagttccatagattacca

SEQ ID NO: 2364 - DNA, 19 bp, Homo sapiens
  siRNA target sequence for CNOT8 (NM_004779.4,448-466).
ggtgcaatgttgacctttt

SEQ ID NO: 2365 - DNA, 19 bp, Homo sapiens
  siRNA target sequence for CNOT8 (NM_004779.4,449-467).
gtgcaatgttgacctttta

SEQ ID NO: 2366 - DNA, 19 bp, Homo sapiens
  siRNA target sequence for CNOT8 (NM_004779.4,482-500).
gggccttacattcacaaat

SEQ ID NO: 2367 - DNA, 19 bp, Homo sapiens
  siRNA target sequence for CNOT8 (NM_004779.4,484-502).
gccttacattcacaaatga

SEQ ID NO: 2368 - DNA, 19 bp, Homo sapiens
  siRNA target sequence for CNOT8 (NM_004779.4,527-545).
caatacttggcagttcaat

SEQ ID NO: 2369 - DNA, 19 bp, Homo sapiens
  siRNA target sequence for CNOT8 (NM_004779.4,558-576).
cttacagaggacatgtact

SEQ ID NO: 2370 - DNA, 19 bp, Homo sapiens
  siRNA target sequence for CNOT8 (NM_004779.4,572-590).
gtactcccaggattccata

SEQ ID NO: 2371 - DNA, 19 bp, Homo sapiens
  siRNA target sequence for CNOT8 (NM_004779.4,575-593).
ctcccaggattccatagat

SEQ ID NO: 2372 - DNA, 19 bp, Homo sapiens
  siRNA target sequence for CNOT8 (NM_004779.4,586-604).
ccatagatctccttgctaa

SEQ ID NO: 2373 - DNA, 19 bp, Homo sapiens
  siRNA target sequence for CNOT8 (NM_004779.4,601-619).
ctaactcaggactacagtt

SEQ ID NO: 2374 - DNA, 19 bp, Homo sapiens
  siRNA target sequence for CNOT8 (NM_004779.4,690-708).
ctctgtgacaatgtcaaat

SEQ ID NO: 2375 - DNA, 19 bp, Homo sapiens
  siRNA target sequence for CNOT8 (NM_004779.4,774-792).
ccagaagaggaacatgaat

SEQ ID NO: 2376 - DNA, 19 bp, Homo sapiens
  siRNA target sequence for CNOT8 (NM_004779.4,783-801).
gaacatgaattctttcata

SEQ ID NO: 2377 - DNA, 19 bp, Homo sapiens
  siRNA target sequence for CNOT8 (NM_004779.4,815-833).
cttcccatccatttatgat

SEQ ID NO: 2378 - DNA, 19 bp, Homo sapiens
  siRNA target sequence for CNOT8 (NM_004779.4,885-903).
gttgctgatcagttggatt

SEQ ID NO: 2379 - DNA, 19 bp, Homo sapiens
  siRNA target sequence for CNOT8 (NM_004779.4,889-907).
ctgatcagttggatttgca

SEQ ID NO: 2380 - DNA, 19 bp, Homo sapiens
  siRNA target sequence for CNOT8 (NM_004779.4,954-972).
ggaatggctttctttagga

SEQ ID NO: 2381 - DNA, 19 bp, Homo sapiens
  siRNA target sequence for CNOT8 (NM_004779.4,1096-1114).
gcatcctggcgattatcaa

SEQ ID NO: 2382 - DNA, 19 bp, Homo sapiens
  siRNA target sequence for CNOT8 (NM_004779.4,1101-1119).
ctggcgattatcaacaaca

SEQ ID NO: 2383 - DNA, 19 bp, Homo sapiens
  siRNA target sequence for CREB1 (NM_004379.2,271-289).
gccacagattgccacatta

SEQ ID NO: 2384 - DNA, 19 bp, Homo sapiens
  siRNA target sequence for CREB1 (NM_004379.2,285-303).
cattagcccaggtatctat

SEQ ID NO: 2385 - DNA, 19 bp, Homo sapiens
  siRNA target sequence for CREB1 (NM_004379.2,327-345).
ctgctcccaccgtaactct

SEQ ID NO: 2386 - DNA, 19 bp, Homo sapiens
  siRNA target sequence for CREB1 (NM_004379.2,333-351).
ccaccgtaactctagtaca

SEQ ID NO: 2387 - DNA, 19 bp, Homo sapiens
  siRNA target sequence for CREB1 (NM_004379.2,399-417).
cccagccatcagttattca

SEQ ID NO: 2388 - DNA, 19 bp, Homo sapiens
  siRNA target sequence for CREB1 (NM_004379.2,475-493).
ggagtcagtggatagtgta

SEQ ID NO: 2389 - DNA, 19 bp, Homo sapiens
  siRNA target sequence for CREB1 (NM_004379.2,478-496).
gtcagtggatagtgtaact

SEQ ID NO: 2390 - DNA, 19 bp, Homo sapiens
  siRNA target sequence for CREB1 (NM_004379.2,480-498).
cagtggatagtgtaactga

SEQ ID NO: 2391 - DNA, 19 bp, Homo sapiens
  siRNA target sequence for CREB1 (NM_004379.2,482-500).
gtggatagtgtaactgatt

SEQ ID NO: 2392 - DNA, 19 bp, Homo sapiens
  siRNA target sequence for CREB1 (NM_004379.2,509-527).
cgaagggaaattctttcaa

SEQ ID NO: 2393 - DNA, 19 bp, Homo sapiens
  siRNA target sequence for CREB1 (NM_004379.2,645-663).
cggtgccaactccaattta

SEQ ID NO: 2394 - DNA, 19 bp, Homo sapiens
  siRNA target sequence for CREB1 (NM_004379.2,650-668).
ccaactccaatttaccaaa

SEQ ID NO: 2395 - DNA, 19 bp, Homo sapiens
  siRNA target sequence for CREB1 (NM_004379.2,740-758).
gtacagggcctgcaaacat

SEQ ID NO: 2396 - DNA, 19 bp, Homo sapiens
  siRNA target sequence for CREB1 (NM_004379.2,743-761).
cagggcctgcaaacattaa

SEQ ID NO: 2397 - DNA, 19 bp, Homo sapiens
  siRNA target sequence for CREB1 (NM_004379.2,746-764).
ggcctgcaaacattaacca

SEQ ID NO: 2398 - DNA, 19 bp, Homo sapiens
  siRNA target sequence for CREB1 (NM_004379.2,747-765).
gcctgcaaacattaaccat

SEQ ID NO: 2399 - DNA, 19 bp, Homo sapiens
  siRNA target sequence for CREB1 (NM_004379.2,787-805).
gccgggtactaccattcta

SEQ ID NO: 2400 - DNA, 19 bp, Homo sapiens
  siRNA target sequence for CREB1 (NM_004379.2,789-807).
cgggtactaccattctaca

SEQ ID NO: 2401 - DNA, 19 bp, Homo sapiens
  siRNA target sequence for CREB1 (NM_004379.2,844-862).
gcccagcaaccaagttgtt

SEQ ID NO: 2402 - DNA, 19 bp, Homo sapiens
  siRNA target sequence for CREB1 (NM_004379.2,846-864).
ccagcaaccaagttgttgt

SEQ ID NO: 2403 - DNA, 19 bp, Homo sapiens
  siRNA target sequence for CREB1 (NM_004379.2,847-865).
cagcaaccaagttgttgtt

SEQ ID NO: 2404 - DNA, 19 bp, Homo sapiens
  siRNA target sequence for CREB1 (NM_004379.2,874-892).
ctctggagacgtacaaaca

SEQ ID NO: 2405 - DNA, 19 bp, Homo sapiens
  siRNA target sequence for CREB1 (NM_004379.2,876-894).
ctggagacgtacaaacata

SEQ ID NO: 2406 - DNA, 19 bp, Homo sapiens
  siRNA target sequence for CREB1 (NM_004379.2,996-1014).
gagaggtccgtctaatgaa

SEQ ID NO: 2407 - DNA, 19 bp, Homo sapiens
  siRNA target sequence for CREB1 (NM_134442.2,450-468).
gtaaggacttaaaaagact

SEQ ID NO: 2408 - DNA, 19 bp, Homo sapiens
  siRNA target sequence for CREB1 (NM_134442.2,475-493).
cggaacacagatttcaact

SEQ ID NO: 2409 - DNA, 19 bp, Homo sapiens
  siRNA target sequence for CREB1 (NM_134442.2,476-494).
ggaacacagatttcaacta

SEQ ID NO: 2410 - DNA, 19 bp, Homo sapiens
  siRNA target sequence for CREB3L1 (NM_052854.1,184-202).
gtcggacttcctcaacaat

SEQ ID NO: 2411 - DNA, 19 bp, Homo sapiens
  siRNA target sequence for CREB3L1 (NM_052854.1,215-233).
gagcacctggaccacttta

SEQ ID NO: 2412 - DNA, 19 bp, Homo sapiens
  siRNA target sequence for CREB3L1 (NM_052854.1,399-417).
cccttgtgcccatcaagat

SEQ ID NO: 2413 - DNA, 19 bp, Homo sapiens
  siRNA target sequence for CREB3L1 (NM_052854.1,453-471).
gggcgctgggacacaaact

SEQ ID NO: 2414 - DNA, 19 bp, Homo sapiens
  siRNA target sequence for CREB3L1 (NM_052854.1,636-654).
ctcagctgccagtgatcaa

SEQ ID NO: 2415 - DNA, 19 bp, Homo sapiens
  siRNA target sequence for CREB3L1 (NM_052854.1,981-999).
gagtccggaggaaaatcaa

SEQ ID NO: 2416 - DNA, 19 bp, Homo sapiens
  siRNA target sequence for CREB3L1 (NM_052854.1,1019-1037).
gagagccgtcgtaagaaga

SEQ ID NO: 2417 - DNA, 19 bp, Homo sapiens
  siRNA target sequence for CREB3L1 (NM_052854.1,1063-1081).
gaaggtggagacatttaca

SEQ ID NO: 2418 - DNA, 19 bp, Homo sapiens
  siRNA target sequence for CREB3L1 (NM_052854.1,1365-1383).
cctcccgaagcctcctatt

SEQ ID NO: 2419 - DNA, 19 bp, Homo sapiens
  siRNA target sequence for CREB3L1 (NM_052854.1,1368-1386).
cccgaagcctcctattcta

SEQ ID NO: 2420 - DNA, 19 bp, Homo sapiens
  siRNA target sequence for CREBBP (NM_004380.1,259-277).
ggtttctcggcgaatgaca

SEQ ID NO: 2421 - DNA, 19 bp, Homo sapiens
  siRNA target sequence for CREBBP (NM_004380.1,274-292).
gacagcacagattttggat

SEQ ID NO: 2422 - DNA, 19 bp, Homo sapiens
  siRNA target sequence for CREBBP (NM_004380.1,428-446).
gcagcggctctagtatcaa

SEQ ID NO: 2423 - DNA, 19 bp, Homo sapiens
  siRNA target sequence for CREBBP (NM_004380.1,565-583).
ctgagccagggagattctt

SEQ ID NO: 2424 - DNA, 19 bp, Homo sapiens
  siRNA target sequence for CREBBP (NM_004380.1,567-585).
gagccagggagattcttca

SEQ ID NO: 2425 - DNA, 19 bp, Homo sapiens
  siRNA target sequence for CREBBP (NM_004380.1,587-605).
cccccagcctgcctaaaca

SEQ ID NO: 2426 - DNA, 19 bp, Homo sapiens
  siRNA target sequence for CREBBP (NM_004380.1,719-737).
gtatctgcatgaatgctaa

SEQ ID NO: 2427 - DNA, 19 bp, Homo sapiens
  siRNA target sequence for CREBBP (NM_004380.1,725-743).
gcatgaatgctaactttaa

SEQ ID NO: 2428 - DNA, 19 bp, Homo sapiens
  siRNA target sequence for CREBBP (NM_004380.1,751-769).
cacccaggcctcctcaata

SEQ ID NO: 2429 - DNA, 19 bp, Homo sapiens
  siRNA target sequence for CREBBP (NM_004380.1,753-771).
cccaggcctcctcaatagt

SEQ ID NO: 2430 - DNA, 19 bp, Homo sapiens
  siRNA target sequence for CREBBP (NM_004380.1,754-772).
ccaggcctcctcaatagta

SEQ ID NO: 2431 - DNA, 19 bp, Homo sapiens
  siRNA target sequence for CREBBP (NM_004380.1,755-773).
caggcctcctcaatagtaa

SEQ ID NO: 2432 - DNA, 19 bp, Homo sapiens
  siRNA target sequence for CREBBP (NM_004380.1,757-775).
ggcctcctcaatagtaact

SEQ ID NO: 2433 - DNA, 19 bp, Homo sapiens
  siRNA target sequence for CREBBP (NM_004380.1,770-788).
gtaactctggccatagctt

SEQ ID NO: 2434 - DNA, 19 bp, Homo sapiens
  siRNA target sequence for CREBBP (NM_004380.1,774-792).
ctctggccatagcttaatt

SEQ ID NO: 2435 - DNA, 19 bp, Homo sapiens
  siRNA target sequence for CREBBP (NM_004380.1,776-794).
ctggccatagcttaattaa

SEQ ID NO: 2436 - DNA, 19 bp, Homo sapiens
  siRNA target sequence for CREBBP (NM_004380.1,810-828).
gcaggcgcaagtcatgaat

SEQ ID NO: 2437 - DNA, 19 bp, Homo sapiens
  siRNA target sequence for CREBBP (NM_004380.1,814-832).
gcgcaagtcatgaatggat

SEQ ID NO: 2438 - DNA, 19 bp, Homo sapiens
  siRNA target sequence for CREBBP (NM_004380.1,990-1008).
ggccaagatgggaataact

SEQ ID NO: 2439 - DNA, 19 bp, Homo sapiens
  siRNA target sequence for CREBBP (NM_004380.1,1000-1018).
ggaataactgggaacacaa

SEQ ID NO: 2440 - DNA, 19 bp, Homo sapiens
  siRNA target sequence for CREBBP (NM_004380.1,1099-1117).
cagagcatggtcaacagtt

SEQ ID NO: 2441 - DNA, 19 bp, Homo sapiens
  siRNA target sequence for CREBBP (NM_004380.1,1121-1139).
ccaccttccctacagatat

SEQ ID NO: 2442 - DNA, 19 bp, Homo sapiens
  siRNA target sequence for CREBBP (NM_004380.1,1153-1171).
gtcaccaacgtgccaaata

SEQ ID NO: 2443 - DNA, 19 bp, Homo sapiens
  siRNA target sequence for CREBBP (NM_004380.1,1158-1176).
caacgtgccaaatatgtct

SEQ ID NO: 2444 - DNA, 19 bp, Homo sapiens
  siRNA target sequence for CREBBP (NM_004380.1,1204-1222).
cccacacaagcaattgcaa

SEQ ID NO: 2445 - DNA, 19 bp, Homo sapiens
  siRNA target sequence for CREBBP (NM_004380.1,1281-1299).
gcttcatgctcataagtgt

SEQ ID NO: 2446 - DNA, 19 bp, Homo sapiens
  siRNA target sequence for CREBBP (NM_004380.1,1347-1365).
gcattgtcgaaccatgaaa

SEQ ID NO: 2447 - DNA, 19 bp, Homo sapiens
  siRNA target sequence for CREBBP (NM_004380.1,1352-1370).
gtcgaaccatgaaaaacgt

SEQ ID NO: 2448 - DNA, 19 bp, Homo sapiens
  siRNA target sequence for CREBBP (NM_004380.1,1354-1372).
cgaaccatgaaaaacgttt

SEQ ID NO: 2449 - DNA, 19 bp, Homo sapiens
  siRNA target sequence for CREBBP (NM_004380.1,1435-1453).
cgacaaatcatctctcatt

SEQ ID NO: 2450 - DNA, 19 bp, Homo sapiens
  siRNA target sequence for CREBBP (NM_004380.1,1539-1557).
gtctccagctagtggaatt

SEQ ID NO: 2451 - DNA, 19 bp, Homo sapiens
  siRNA target sequence for CREBBP (NM_004380.1,1541-1559).
ctccagctagtggaattca

SEQ ID NO: 2452 - DNA, 19 bp, Homo sapiens
  siRNA target sequence for CREBBP (NM_004380.1,1759-1777).
ctcaaccccctgggaaata

SEQ ID NO: 2453 - DNA, 19 bp, Homo sapiens
  siRNA target sequence for CREBBP (NM_004380.1,1764-1782).
ccccctgggaaataatcca

SEQ ID NO: 2454 - DNA, 19 bp, Homo sapiens
  siRNA target sequence for CREBBP (NM_004380.1,1818-1836).
gcagcccccaaacttgatt

SEQ ID NO: 2455 - DNA, 19 bp, Homo sapiens
  siRNA target sequence for CREBBP (NM_004380.1,1819-1837).
cagcccccaaacttgattt

SEQ ID NO: 2456 - DNA, 19 bp, Homo sapiens
  siRNA target sequence for CREBBP (NM_004380.1,1823-1841).
ccccaaacttgatttcaga

SEQ ID NO: 2457 - DNA, 19 bp, Homo sapiens
  siRNA target sequence for CREBBP (NM_004380.1,1949-1967).
ctagcaccggtgtaaggaa

SEQ ID NO: 2458 - DNA, 19 bp, Homo sapiens
  siRNA target sequence for CREBBP (NM_004380.1,2000-2018).
ggagccatctagtgcataa

SEQ ID NO: 2459 - DNA, 19 bp, Homo sapiens
  siRNA target sequence for CREBBP (NM_004380.1,2001-2019).
gagccatctagtgcataaa

SEQ ID NO: 2460 - DNA, 19 bp, Homo sapiens
  siRNA target sequence for CREBBP (NM_004380.1,2045-2063).
ctgatcccgcagctctaaa

SEQ ID NO: 2461 - DNA, 19 bp, Homo sapiens
  siRNA target sequence for CREBBP (NM_004380.1,2128-2146).
gccaacagcagggatgaat

SEQ ID NO: 2462 - DNA, 19 bp, Homo sapiens
  siRNA target sequence for CREBBP (NM_004380.1,2129-2147).
ccaacagcagggatgaata

SEQ ID NO: 2463 - DNA, 19 bp, Homo sapiens
  siRNA target sequence for CREBBP (NM_004380.1,2140-2158).
gatgaatattatcacttat

SEQ ID NO: 2464 - DNA, 19 bp, Homo sapiens
  siRNA target sequence for CREBBP (NM_004380.1,2203-2221).
cggaggtcgcgtttacata

SEQ ID NO: 2465 - DNA, 19 bp, Homo sapiens
  siRNA target sequence for CREBBP (NM_004380.1,2204-2222).
ggaggtcgcgtttacataa

SEQ ID NO: 2466 - DNA, 19 bp, Homo sapiens
  siRNA target sequence for CREBBP (NM_004380.1,2205-2223).
gaggtcgcgtttacataaa

SEQ ID NO: 2467 - DNA, 19 bp, Homo sapiens
  siRNA target sequence for CREBBP (NM_004380.1,2207-2225).
ggtcgcgtttacataaaca

SEQ ID NO: 2468 - DNA, 19 bp, Homo sapiens
  siRNA target sequence for CREBBP (NM_004380.1,2208-2226).
gtcgcgtttacataaacaa

SEQ ID NO: 2469 - DNA, 19 bp, Homo sapiens
  siRNA target sequence for CREBBP (NM_004380.1,2332-2350).
gtgaatcgcatgcaagttt

SEQ ID NO: 2470 - DNA, 19 bp, Homo sapiens
  siRNA target sequence for CREBBP (NM_004380.1,2334-2352).
gaatcgcatgcaagtttct

SEQ ID NO: 2471 - DNA, 19 bp, Homo sapiens
  siRNA target sequence for CREBBP (NM_004380.1,2443-2461).
cactctgtccagatgaaca

SEQ ID NO: 2472 - DNA, 19 bp, Homo sapiens
  siRNA target sequence for CREBBP (NM_004380.1,2531-2549).
cacacaccaacaacatgat

SEQ ID NO: 2473 - DNA, 19 bp, Homo sapiens
  siRNA target sequence for CREBBP (NM_004380.1,2561-2579).
ccgctcagagccagtttct

SEQ ID NO: 2474 - DNA, 19 bp, Homo sapiens
  siRNA target sequence for CREBBP (NM_004380.1,3088-3106).
gcagcagccagcattgata

SEQ ID NO: 2475 - DNA, 19 bp, Homo sapiens
  siRNA target sequence for CREBBP (NM_004380.1,3172-3190).
gtacctgtgctggaaatga

SEQ ID NO: 2476 - DNA, 19 bp, Homo sapiens
  siRNA target sequence for CREBBP (NM_004380.1,3221-3239).
ccgatcctggtgaatccaa

SEQ ID NO: 2477 - DNA, 19 bp, Homo sapiens
  siRNA target sequence for CREBBP (NM_004380.1,3222-3240).
cgatcctggtgaatccaaa

SEQ ID NO: 2478 - DNA, 19 bp, Homo sapiens
  siRNA target sequence for CREBBP (NM_004380.1,3331-3349).
ccaatggaagtggatgaaa

SEQ ID NO: 2479 - DNA, 19 bp, Homo sapiens
  siRNA target sequence for CREBBP (NM_004380.1,3438-3456).
gcgcaaaaaaatctttaaa

SEQ ID NO: 2480 - DNA, 19 bp, Homo sapiens
  siRNA target sequence for CREBBP (NM_004380.1,3555-3573).
cctcggaattccagactat

SEQ ID NO: 2481 - DNA, 19 bp, Homo sapiens
  siRNA target sequence for CREBBP (NM_004380.1,3556-3574).
ctcggaattccagactatt

SEQ ID NO: 2482 - DNA, 19 bp, Homo sapiens
  siRNA target sequence for CREBBP (NM_004380.1,3568-3586).
gactattttgacatcgtaa

SEQ ID NO: 2483 - DNA, 19 bp, Homo sapiens
  siRNA target sequence for CREBBP (NM_004380.1,3694-3712).
ctctataatcgcaagacat

SEQ ID NO: 2484 - DNA, 19 bp, Homo sapiens
  siRNA target sequence for CREBBP (NM_004380.1,3705-3723).
caagacatcccgagtctat

SEQ ID NO: 2485 - DNA, 19 bp, Homo sapiens
  siRNA target sequence for CREBBP (NM_004380.1,3710-3728).
catcccgagtctataagtt

SEQ ID NO: 2486 - DNA, 19 bp, Homo sapiens
  siRNA target sequence for CREBBP (NM_004380.1,3715-3733).
cgagtctataagttttgca

SEQ ID NO: 2487 - DNA, 19 bp, Homo sapiens
  siRNA target sequence for CREBBP (NM_004380.1,3794-3812).
gctgtggacgcaagtatga

SEQ ID NO: 2488 - DNA, 19 bp, Homo sapiens
  siRNA target sequence for CREBBP (NM_004380.1,3797-3815).
gtggacgcaagtatgagtt

SEQ ID NO: 2489 - DNA, 19 bp, Homo sapiens
  siRNA target sequence for CREBBP (NM_004380.1,3799-3817).
ggacgcaagtatgagtttt

SEQ ID NO: 2490 - DNA, 19 bp, Homo sapiens
  siRNA target sequence for CREBBP (NM_004380.1,3865-3883).
cgcgatgctgcctactaca

SEQ ID NO: 2491 - DNA, 19 bp, Homo sapiens
  siRNA target sequence for CREBBP (NM_004380.1,3874-3892).
gcctactacagctatcaga

SEQ ID NO: 2492 - DNA, 19 bp, Homo sapiens
  siRNA target sequence for CREBBP (NM_004380.1,3876-3894).
ctactacagctatcagaat

SEQ ID NO: 2493 - DNA, 19 bp, Homo sapiens
  siRNA target sequence for CREBBP (NM_004380.1,3882-3900).
cagctatcagaataggtat

SEQ ID NO: 2494 - DNA, 19 bp, Homo sapiens
  siRNA target sequence for CREBBP (NM_004380.1,3885-3903).
ctatcagaataggtatcat

SEQ ID NO: 2495 - DNA, 19 bp, Homo sapiens
  siRNA target sequence for CREBBP (NM_004380.1,3967-3985).
cagccccagacgacaattt

SEQ ID NO: 2496 - DNA, 19 bp, Homo sapiens
  siRNA target sequence for CREBBP (NM_004380.1,4019-4037).
ccttagaccccgaaccttt

SEQ ID NO: 2497 - DNA, 19 bp, Homo sapiens
  siRNA target sequence for CREBBP (NM_004380.1,4027-4045).
cccgaacctttcgttgatt

SEQ ID NO: 2498 - DNA, 19 bp, Homo sapiens
  siRNA target sequence for CREBBP (NM_004380.1,4058-4076).
gccggaagatgcatcagat

SEQ ID NO: 2499 - DNA, 19 bp, Homo sapiens
  siRNA target sequence for CREBBP (NM_004380.1,4059-4077).
ccggaagatgcatcagatt

SEQ ID NO: 2500 - DNA, 19 bp, Homo sapiens
  siRNA target sequence for CREBBP (NM_004380.1,4060-4078).
cggaagatgcatcagattt

SEQ ID NO: 2501 - DNA, 19 bp, Homo sapiens
  siRNA target sequence for CREBBP (NM_004380.1,4079-4097).
gcgttctgcactatgacat

SEQ ID NO: 2502 - DNA, 19 bp, Homo sapiens
  siRNA target sequence for CREBBP (NM_004380.1,4084-4102).
ctgcactatgacatcattt

SEQ ID NO: 2503 - DNA, 19 bp, Homo sapiens
  siRNA target sequence for CREBBP (NM_004380.1,4098-4116).
catttggccttcaggtttt

SEQ ID NO: 2504 - DNA, 19 bp, Homo sapiens
  siRNA target sequence for CREBBP (NM_004380.1,4121-4139).
gcgacaactgcttgaagaa

SEQ ID NO: 2505 - DNA, 19 bp, Homo sapiens
  siRNA target sequence for CREBBP (NM_004380.1,4408-4426).
ggcgtggatgtctgctttt

SEQ ID NO: 2506 - DNA, 19 bp, Homo sapiens
  siRNA target sequence for CREBBP (NM_004380.1,4409-4427).
gcgtggatgtctgcttttt

SEQ ID NO: 2507 - DNA, 19 bp, Homo sapiens
  siRNA target sequence for CREBBP (NM_004380.1,4429-4447).
ggaatgcacgtccaagaat

SEQ ID NO: 2508 - DNA, 19 bp, Homo sapiens
  siRNA target sequence for CREBBP (NM_004380.1,4430-4448).
gaatgcacgtccaagaata

SEQ ID NO: 2509 - DNA, 19 bp, Homo sapiens
  siRNA target sequence for CREBBP (NM_004380.1,4473-4491).
cacgaggcgtgtgtacatt

SEQ ID NO: 2510 - DNA, 19 bp, Homo sapiens
  siRNA target sequence for CREBBP (NM_004380.1,4493-4511).
cttatctggatagtattca

SEQ ID NO: 2511 - DNA, 19 bp, Homo sapiens
  siRNA target sequence for CREBBP (NM_004380.1,4533-4551).
ccgcacagccgtttaccat

SEQ ID NO: 2512 - DNA, 19 bp, Homo sapiens
  siRNA target sequence for CREBBP (NM_004380.1,4543-4561).
gtttaccatgagatcctta

SEQ ID NO: 2513 - DNA, 19 bp, Homo sapiens
  siRNA target sequence for CREBBP (NM_004380.1,4739-4757).
ggatcatccatgactacaa

SEQ ID NO: 2514 - DNA, 19 bp, Homo sapiens
  siRNA target sequence for CREBBP (NM_004380.1,4799-4817).
ccaaggaactgccctattt

SEQ ID NO: 2515 - DNA, 19 bp, Homo sapiens
  siRNA target sequence for CREBBP (NM_004380.1,4830-4848).
ctggcccaatgtgttagaa

SEQ ID NO: 2516 - DNA, 19 bp, Homo sapiens
  siRNA target sequence for CREBBP (NM_004380.1,4832-4850).
ggcccaatgtgttagaaga

SEQ ID NO: 2517 - DNA, 19 bp, Homo sapiens
  siRNA target sequence for CREBBP (NM_004380.1,6300-6318).
cttgcccaggcctgtgata

SEQ ID NO: 2518 - DNA, 19 bp, Homo sapiens
  siRNA target sequence for CREBBP (NM_004380.1,6305-6323).
ccaggcctgtgatatccat

SEQ ID NO: 2519 - DNA, 19 bp, Homo sapiens
  siRNA target sequence for CREBBP (NM_004380.1,6737-6755).
ccaacatggcgagtatgaa

SEQ ID NO: 2520 - DNA, 19 bp, Homo sapiens
  siRNA target sequence for CREBBP (NM_004380.1,6738-6756).
caacatggcgagtatgaat

SEQ ID NO: 2521 - DNA, 19 bp, Homo sapiens
  siRNA target sequence for CREBBP (NM_004380.1,7490-7508).
cgggggacacgctagagaa

SEQ ID NO: 2522 - DNA, 19 bp, Homo sapiens
  siRNA target sequence for CREBL2 (NM_001310.2,291-309).
ggtggttggaggcaaagta

SEQ ID NO: 2523 - DNA, 19 bp, Homo sapiens
  siRNA target sequence for CREBL2 (NM_001310.2,292-310).
gtggttggaggcaaagtaa

SEQ ID NO: 2524 - DNA, 19 bp, Homo sapiens
  siRNA target sequence for CREBL2 (NM_001310.2,295-313).
gttggaggcaaagtaaaga

SEQ ID NO: 2525 - DNA, 19 bp, Homo sapiens
  siRNA target sequence for CREBL2 (NM_001310.2,329-347).
gtcggaagccagccaaaat

SEQ ID NO: 2526 - DNA, 19 bp, Homo sapiens
  siRNA target sequence for CREBL2 (NM_001310.2,375-393).
ccggcagagtgcaagagaa

SEQ ID NO: 2527 - DNA, 19 bp, Homo sapiens
  siRNA target sequence for CREBL2 (NM_001310.2,391-409).
gaatgccgagcccgaaaaa

SEQ ID NO: 2528 - DNA, 19 bp, Homo sapiens
  siRNA target sequence for CREBL2 (NM_001310.2,395-413).
gccgagcccgaaaaaagct

SEQ ID NO: 2529 - DNA, 19 bp, Homo sapiens
  siRNA target sequence for CREBL2 (NM_001310.2,401-419).
cccgaaaaaagctgagata

SEQ ID NO: 2530 - DNA, 19 bp, Homo sapiens
  siRNA target sequence for CREBL2 (NM_001310.2,404-422).
gaaaaaagctgagatatca

SEQ ID NO: 2531 - DNA, 19 bp, Homo sapiens
  siRNA target sequence for CREBL2 (NM_001310.2,444-462).
cagtcgagaaagagctata

SEQ ID NO: 2532 - DNA, 19 bp, Homo sapiens
  siRNA target sequence for CREM (NM_001881.2,348-366).
cccagcatgatggaagtat

SEQ ID NO: 2533 - DNA, 19 bp, Homo sapiens
  siRNA target sequence for CREM (NM_001881.2,501-519).
ctcataaacgtagagaaat

SEQ ID NO: 2534 - DNA, 19 bp, Homo sapiens
  siRNA target sequence for CREM (NM_001881.2,527-545).
cgaagaccctcttatagga

SEQ ID NO: 2535 - DNA, 19 bp, Homo sapiens
  siRNA target sequence for CREM (NM_001881.2,528-546).
gaagaccctcttataggaa

SEQ ID NO: 2536 - DNA, 19 bp, Homo sapiens
  siRNA target sequence for CREM (NM_001881.2,534-552).
cctcttataggaaaatact

SEQ ID NO: 2537 - DNA, 19 bp, Homo sapiens
  siRNA target sequence for CREM (NM_001881.2,574-592).
gcctggtgttcccaagatt

SEQ ID NO: 2538 - DNA, 19 bp, Homo sapiens
  siRNA target sequence for CREM (NM_001881.2,576-594).
ctggtgttcccaagattga

SEQ ID NO: 2539 - DNA, 19 bp, Homo sapiens
  siRNA target sequence for CREM (NM_001881.2,643-661).
ggcagtaccaactagcata

SEQ ID NO: 2540 - DNA, 19 bp, Homo sapiens
  siRNA target sequence for CREM (NM_001881.2,644-662).
gcagtaccaactagcatat

SEQ ID NO: 2541 - DNA, 19 bp, Homo sapiens
  siRNA target sequence for CREM (NM_001881.2,645-663).
cagtaccaactagcatata

SEQ ID NO: 2542 - DNA, 19 bp, Homo sapiens
  siRNA target sequence for CREM (NM_001881.2,672-690).
gcacggggcaatacagtat

SEQ ID NO: 2543 - DNA, 19 bp, Homo sapiens
  siRNA target sequence for CREM (NM_001881.2,675-693).
cggggcaatacagtatgta

SEQ ID NO: 2544 - DNA, 19 bp, Homo sapiens
  siRNA target sequence for CREM (NM_001881.2,676-694).
ggggcaatacagtatgtat

SEQ ID NO: 2545 - DNA, 19 bp, Homo sapiens
  siRNA target sequence for CREM (NM_001881.2,685-703).
cagtatgtatgctgcaatt

SEQ ID NO: 2546 - DNA, 19 bp, Homo sapiens
  siRNA target sequence for CREM (NM_001881.2,691-709).
gtatgctgcaattcgatat

SEQ ID NO: 2547 - DNA, 19 bp, Homo sapiens
  siRNA target sequence for CREM (NM_001881.2,695-713).
gctgcaattcgatatgata

SEQ ID NO: 2548 - DNA, 19 bp, Homo sapiens
  siRNA target sequence for CREM (NM_001881.2,699-717).
caattcgatatgatacagt

SEQ ID NO: 2549 - DNA, 19 bp, Homo sapiens
  siRNA target sequence for CREM (NM_001881.2,714-732).
cagtgctagctttaagtct

SEQ ID NO: 2550 - DNA, 19 bp, Homo sapiens
  siRNA target sequence for CREM (NM_181571.1,560-578).
cggggcaatacattgctat

SEQ ID NO: 2551 - DNA, 19 bp, Homo sapiens
  siRNA target sequence for CREM (NM_181571.1,630-648).
gggactgcaggcattaaca

SEQ ID NO: 2552 - DNA, 19 bp, Homo sapiens
  siRNA target sequence for CREM (NM_181571.1,671-689).
caccaggtgctacaattgt

SEQ ID NO: 2553 - DNA, 19 bp, Homo sapiens
  siRNA target sequence for CREM (NM_181571.1,674-692).
caggtgctacaattgtaca

SEQ ID NO: 2554 - DNA, 19 bp, Homo sapiens
  siRNA target sequence for CREM (NM_181571.1,737-755).
caggcagccaggttgttgt

SEQ ID NO: 2555 - DNA, 19 bp, Homo sapiens
  siRNA target sequence for CREM (NM_181571.1,767-785).
ctggtgacatgccaactta

SEQ ID NO: 2556 - DNA, 19 bp, Homo sapiens
  siRNA target sequence for CREM (NM_181571.1,892-910).
cgagagctgaggctaatga

SEQ ID NO: 2557 - DNA, 19 bp, Homo sapiens
  siRNA target sequence for CREM (NM_181571.1,935-953).
gtcgacgtcgaaagaaaga

SEQ ID NO: 2558 - DNA, 19 bp, Homo sapiens
  siRNA target sequence for CREM (NM_181571.1,937-955).
cgacgtcgaaagaaagaat

SEQ ID NO: 2559 - DNA, 19 bp, Homo sapiens
  siRNA target sequence for CREM (NM_181571.1,996-1014).
ccagaacaagaagcttata

SEQ ID NO: 2560 - DNA, 19 bp, Homo sapiens
  siRNA target sequence for CREM (NM_181571.1,1021-1039).
cttgaaaccttgaaagaca

SEQ ID NO: 2561 - DNA, 19 bp, Homo sapiens
  siRNA target sequence for CREM (NM_182717.1,340-358).
cgtgtggctgtgcttgaaa

SEQ ID NO: 2562 - DNA, 19 bp, Homo sapiens
  siRNA target sequence for CREM (NM_182717.1,391-409).
gccctcaaagatctttatt

SEQ ID NO: 2563 - DNA, 19 bp, Homo sapiens
  siRNA target sequence for CREM (NM_182771.1,190-208).
gtggtggcatcagcataat

SEQ ID NO: 2564 - DNA, 19 bp, Homo sapiens
  siRNA target sequence for CREM (NM_182771.1,193-211).
gtggcatcagcataatcta

SEQ ID NO: 2565 - DNA, 19 bp, Homo sapiens
  siRNA target sequence for CREM (NM_182771.1,196-214).
gcatcagcataatctatgt

SEQ ID NO: 2566 - DNA, 19 bp, Homo sapiens
  siRNA target sequence for CREM (NM_182771.1,200-218).
cagcataatctatgtttca

SEQ ID NO: 2567 - DNA, 19 bp, Homo sapiens
  siRNA target sequence for CREM (NM_182771.1,213-231).
gtttcaggcgtcctataga

SEQ ID NO: 2568 - DNA, 19 bp, Homo sapiens
  siRNA target sequence for CREM (NM_182771.1,222-240).
gtcctatagaagaggatta

SEQ ID NO: 2569 - DNA, 19 bp, Homo sapiens
  siRNA target sequence for CRX (NM_000554.2,764-782).
gggtctccgagctcctatt

SEQ ID NO: 2570 - DNA, 19 bp, Homo sapiens
  siRNA target sequence for CRX (NM_000554.2,926-944).
cccgtggatagcttggaat

SEQ ID NO: 2571 - DNA, 19 bp, Homo sapiens
  siRNA target sequence for CRX (NM_000554.2,927-945).
ccgtggatagcttggaatt

SEQ ID NO: 2572 - DNA, 19 bp, Homo sapiens
  siRNA target sequence for CRX (NM_000554.2,964-982).
ctggaaattcacctacaat

SEQ ID NO: 2573 - DNA, 19 bp, Homo sapiens
  siRNA target sequence for CSDA (NM_003651.3,430-448).
gcgaagacgcggagaaaaa

SEQ ID NO: 2574 - DNA, 19 bp, Homo sapiens
  siRNA target sequence for CSDA (NM_003651.3,431-449).
cgaagacgcggagaaaaaa

SEQ ID NO: 2575 - DNA, 19 bp, Homo sapiens
  siRNA target sequence for CSDA (NM_003651.3,485-503).
gttcaacgtcagaaatgga

SEQ ID NO: 2576 - DNA, 19 bp, Homo sapiens
  siRNA target sequence for CSDA (NM_003651.3,488-506).
caacgtcagaaatggatat

SEQ ID NO: 2577 - DNA, 19 bp, Homo sapiens
  siRNA target sequence for CSDA (NM_003651.3,569-587).
gaataacccacggaaatat

SEQ ID NO: 2578 - DNA, 19 bp, Homo sapiens
  siRNA target sequence for CSDA (NM_003651.3,648-666).
gcagaagctgccaatgtga

SEQ ID NO: 2579 - DNA, 19 bp, Homo sapiens
  siRNA target sequence for CSDA (NM_003651.3,751-769).
gtggccctccccggaatta

SEQ ID NO: 2580 - DNA, 19 bp, Homo sapiens
  siRNA target sequence for CSDA (NM_003651.3,1032-1050).
ccggttcatcgaaatccaa

SEQ ID NO: 2581 - DNA, 19 bp, Homo sapiens
  siRNA target sequence for CTCF (NM_006565.1,319-337).
gtggaggagtccgaaactt

SEQ ID NO: 2582 - DNA, 19 bp, Homo sapiens
  siRNA target sequence for CTCF (NM_006565.1,321-339).
ggaggagtccgaaactttt

SEQ ID NO: 2583 - DNA, 19 bp, Homo sapiens
  siRNA target sequence for CTCF (NM_006565.1,322-340).
gaggagtccgaaactttta

SEQ ID NO: 2584 - DNA, 19 bp, Homo sapiens
  siRNA target sequence for CTCF (NM_006565.1,324-342).
ggagtccgaaacttttatt

SEQ ID NO: 2585 - DNA, 19 bp, Homo sapiens
  siRNA target sequence for CTCF (NM_006565.1,494-512).
ccacccttcttcagatgaa

SEQ ID NO: 2586 - DNA, 19 bp, Homo sapiens
  siRNA target sequence for CTCF (NM_006565.1,505-523).
cagatgaagactgaagtaa

SEQ ID NO: 2587 - DNA, 19 bp, Homo sapiens
  siRNA target sequence for CTCF (NM_006565.1,559-577).
gtggacgatacccagatta

SEQ ID NO: 2588 - DNA, 19 bp, Homo sapiens
  siRNA target sequence for CTCF (NM_006565.1,561-579).
ggacgatacccagattata

SEQ ID NO: 2589 - DNA, 19 bp, Homo sapiens
  siRNA target sequence for CTCF (NM_006565.1,562-580).
gacgatacccagattataa

SEQ ID NO: 2590 - DNA, 19 bp, Homo sapiens
  siRNA target sequence for CTCF (NM_006565.1,569-587).
cccagattataactttaca

SEQ ID NO: 2591 - DNA, 19 bp, Homo sapiens
  siRNA target sequence for CTCF (NM_006565.1,603-621).
ggaacagcccataaacata

SEQ ID NO: 2592 - DNA, 19 bp, Homo sapiens
  siRNA target sequence for CTCF (NM_006565.1,671-689).
ctaccacttcagtagaaga

SEQ ID NO: 2593 - DNA, 19 bp, Homo sapiens
  siRNA target sequence for CTCF (NM_006565.1,735-753).
ggaaagtgaacccatgata

SEQ ID NO: 2594 - DNA, 19 bp, Homo sapiens
  siRNA target sequence for CTCF (NM_006565.1,779-797).
ggtttcaggtggttaaagt

SEQ ID NO: 2595 - DNA, 19 bp, Homo sapiens
  siRNA target sequence for CTCF (NM_006565.1,918-936).
gagcaaactgcgttataca

SEQ ID NO: 2596 - DNA, 19 bp, Homo sapiens
  siRNA target sequence for CTCF (NM_006565.1,955-973).
gatgtgtctgtctacgatt

SEQ ID NO: 2597 - DNA, 19 bp, Homo sapiens
  siRNA target sequence for CTCF (NM_006565.1,995-1013).
gtctgctatcagaggttaa

SEQ ID NO: 2598 - DNA, 19 bp, Homo sapiens
  siRNA target sequence for CTCF (NM_006565.1,1018-1036).
gagaaagtggttggtaata

SEQ ID NO: 2599 - DNA, 19 bp, Homo sapiens
  siRNA target sequence for CTCF (NM_006565.1,1112-1130).
cgtgtccacggcgttcaaa

SEQ ID NO: 2600 - DNA, 19 bp, Homo sapiens
  siRNA target sequence for CTCF (NM_006565.1,1113-1131).
gtgtccacggcgttcaaat

SEQ ID NO: 2601 - DNA, 19 bp, Homo sapiens
  siRNA target sequence for CTCF (NM_006565.1,1115-1133).
gtccacggcgttcaaattt

SEQ ID NO: 2602 - DNA, 19 bp, Homo sapiens
  siRNA target sequence for CTCF (NM_006565.1,1118-1136).
cacggcgttcaaatttgga

SEQ ID NO: 2603 - DNA, 19 bp, Homo sapiens
  siRNA target sequence for CTCF (NM_006565.1,1307-1325).
ggcatcgtcgttacaaaca

SEQ ID NO: 2604 - DNA, 19 bp, Homo sapiens
  siRNA target sequence for CTCF (NM_006565.1,1309-1327).
catcgtcgttacaaacaca

SEQ ID NO: 2605 - DNA, 19 bp, Homo sapiens
  siRNA target sequence for CTCF (NM_006565.1,1359-1377).
cgattacgccagtgtagaa

SEQ ID NO: 2606 - DNA, 19 bp, Homo sapiens
  siRNA target sequence for CTCF (NM_006565.1,1372-1390).
gtagaagtcagcaaattaa

SEQ ID NO: 2607 - DNA, 19 bp, Homo sapiens
  siRNA target sequence for CTCF (NM_006565.1,1383-1401).
caaattaaaacgtcacatt

SEQ ID NO: 2608 - DNA, 19 bp, Homo sapiens
  siRNA target sequence for CTCF (NM_006565.1,1393-1411).
cgtcacattcgctctcata

SEQ ID NO: 2609 - DNA, 19 bp, Homo sapiens
  siRNA target sequence for CTCF (NM_006565.1,1450-1468).
gccagcagggacacataca

SEQ ID NO: 2610 - DNA, 19 bp, Homo sapiens
  siRNA target sequence for CTCF (NM_006565.1,1611-1629).
ccactgtgacacagtcata

SEQ ID NO: 2611 - DNA, 19 bp, Homo sapiens
  siRNA target sequence for CTCF (NM_006565.1,1626-1644).
catagcccgaaaaagtgat

SEQ ID NO: 2612 - DNA, 19 bp, Homo sapiens
  siRNA target sequence for CTCF (NM_006565.1,1660-1678).
cgaaagcagcattcctata

SEQ ID NO: 2613 - DNA, 19 bp, Homo sapiens
  siRNA target sequence for CTCF (NM_006565.1,1788-1806).
gtgtgattacgcttgtaga

SEQ ID NO: 2614 - DNA, 19 bp, Homo sapiens
  siRNA target sequence for CTCF (NM_006565.1,1948-1966).
gcggcttttgtctgttcta

SEQ ID NO: 2615 - DNA, 19 bp, Homo sapiens
  siRNA target sequence for CTCF (NM_006565.1,1949-1967).
cggcttttgtctgttctaa

SEQ ID NO: 2616 - DNA, 19 bp, Homo sapiens
  siRNA target sequence for CTCF (NM_006565.1,1951-1969).
gcttttgtctgttctaagt

SEQ ID NO: 2617 - DNA, 19 bp, Homo sapiens
  siRNA target sequence for CTCF (NM_006565.1,2169-2187).
ggagcctgccgtagaaatt

SEQ ID NO: 2618 - DNA, 19 bp, Homo sapiens
  siRNA target sequence for CTCF (NM_006565.1,2267-2285).
ccaaccagcccaaacagaa

SEQ ID NO: 2619 - DNA, 19 bp, Homo sapiens
  siRNA target sequence for CTCF (NM_006565.1,2326-2344).
ggtgcaattgagaacatta

SEQ ID NO: 2620 - DNA, 19 bp, Homo sapiens
  siRNA target sequence for CUTL1 (NM_001913.2,28-46).
caatgtgggatcgatgttt

SEQ ID NO: 2621 - DNA, 19 bp, Homo sapiens
  siRNA target sequence for CUTL1 (NM_001913.2,34-52).
gggatcgatgtttcaatat

SEQ ID NO: 2622 - DNA, 19 bp, Homo sapiens
  siRNA target sequence for CUTL1 (NM_001913.2,35-53).
ggatcgatgtttcaatatt

SEQ ID NO: 2623 - DNA, 19 bp, Homo sapiens
  siRNA target sequence for CUTL1 (NM_001913.2,113-131).
gcgaaccggcaggatgaaa

SEQ ID NO: 2624 - DNA, 19 bp, Homo sapiens
  siRNA target sequence for CUTL1 (NM_001913.2,141-159).
ccagaaagcggcttatcga

SEQ ID NO: 2625 - DNA, 19 bp, Homo sapiens
  siRNA target sequence for CUTL1 (NM_001913.2,142-160).
cagaaagcggcttatcgaa

SEQ ID NO: 2626 - DNA, 19 bp, Homo sapiens
  siRNA target sequence for CUTL1 (NM_001913.2,226-244).
gagtttccaaggagagatt

SEQ ID NO: 2627 - DNA, 19 bp, Homo sapiens
  siRNA target sequence for CUTL1 (NM_001913.2,241-259).
gattgatgcactgagtaaa

SEQ ID NO: 2628 - DNA, 19 bp, Homo sapiens
  siRNA target sequence for CUTL1 (NM_001913.2,245-263).
gatgcactgagtaaaagaa

SEQ ID NO: 2629 - DNA, 19 bp, Homo sapiens
  siRNA target sequence for CUTL1 (NM_001913.2,367-385).
gcagcgcctgcacgatatt

SEQ ID NO: 2630 - DNA, 19 bp, Homo sapiens
  siRNA target sequence for CUTL1 (NM_001913.2,370-388).
gcgcctgcacgatattgaa

SEQ ID NO: 2631 - DNA, 19 bp, Homo sapiens
  siRNA target sequence for CUTL1 (NM_001913.2,373-391).
cctgcacgatattgaaaca

SEQ ID NO: 2632 - DNA, 19 bp, Homo sapiens
  siRNA target sequence for CUTL1 (NM_001913.2,514-532).
gaaccaagccgaaaccata

SEQ ID NO: 2633 - DNA, 19 bp, Homo sapiens
  siRNA target sequence for CUTL1 (NM_001913.2,723-741).
caaaggccgacgagattga

SEQ ID NO: 2634 - DNA, 19 bp, Homo sapiens
  siRNA target sequence for CUTL1 (NM_001913.2,728-746).
gccgacgagattgaaatga

SEQ ID NO: 2635 - DNA, 19 bp, Homo sapiens
  siRNA target sequence for CUTL1 (NM_001913.2,729-747).
ccgacgagattgaaatgat

SEQ ID NO: 2636 - DNA, 19 bp, Homo sapiens
  siRNA target sequence for CUTL1 (NM_001913.2,821-839).
ctctcatcggccaatcact

SEQ ID NO: 2637 - DNA, 19 bp, Homo sapiens
  siRNA target sequence for CUTL1 (NM_001913.2,904-922).
ccgctccagcctagaagtt

SEQ ID NO: 2638 - DNA, 19 bp, Homo sapiens
  siRNA target sequence for CUTL1 (NM_001913.2,909-927).
ccagcctagaagttgagtt

SEQ ID NO: 2639 - DNA, 19 bp, Homo sapiens
  siRNA target sequence for CUTL1 (NM_001913.2,1429-1447).
gatcccagagcccatcaaa

SEQ ID NO: 2640 - DNA, 19 bp, Homo sapiens
  siRNA target sequence for CUTL1 (NM_001913.2,1448-1466).
gaggccactgccctattct

SEQ ID NO: 2641 - DNA, 19 bp, Homo sapiens
  siRNA target sequence for CUTL1 (NM_181552.1,1358-1376).
ggggagcaggcttccaata

SEQ ID NO: 2642 - DNA, 19 bp, Homo sapiens
  siRNA target sequence for CUTL1 (NM_181552.1,1396-1414).
ctcaccagcggggttaagt

SEQ ID NO: 2643 - DNA, 19 bp, Homo sapiens
  siRNA target sequence for CUTL1 (NM_181552.1,1398-1416).
caccagcggggttaagtca

SEQ ID NO: 2644 - DNA, 19 bp, Homo sapiens
  siRNA target sequence for CUTL1 (NM_181552.1,1404-1422).
cggggttaagtcaagactt

SEQ ID NO: 2645 - DNA, 19 bp, Homo sapiens
  siRNA target sequence for CUTL1 (NM_181552.1,1405-1423).
ggggttaagtcaagacttt

SEQ ID NO: 2646 - DNA, 19 bp, Homo sapiens
  siRNA target sequence for CUTL1 (NM_181552.1,1406-1424).
gggttaagtcaagactttt

SEQ ID NO: 2647 - DNA, 19 bp, Homo sapiens
  siRNA target sequence for CUTL1 (NM_181552.1,1407-1425).
ggttaagtcaagacttttt

SEQ ID NO: 2648 - DNA, 19 bp, Homo sapiens
  siRNA target sequence for CUTL1 (NM_181552.1,1543-1561).
cggaagcacaagcatgatt

SEQ ID NO: 2649 - DNA, 19 bp, Homo sapiens
  siRNA target sequence for CUTL1 (NM_181552.1,1544-1562).
ggaagcacaagcatgattt

SEQ ID NO: 2650 - DNA, 19 bp, Homo sapiens
  siRNA target sequence for CUTL1 (NM_181552.1,1545-1563).
gaagcacaagcatgatttt

SEQ ID NO: 2651 - DNA, 19 bp, Homo sapiens
  siRNA target sequence for CUTL1 (NM_181552.1,1744-1762).
caatatcggacaacgtatt

SEQ ID NO: 2652 - DNA, 19 bp, Homo sapiens
  siRNA target sequence for CUTL1 (NM_181552.1,1794-1812).
ggtccgtgagcgagattct

SEQ ID NO: 2653 - DNA, 19 bp, Homo sapiens
  siRNA target sequence for CUTL1 (NM_181552.1,1821-1839).
ccaagccatggaataaact

SEQ ID NO: 2654 - DNA, 19 bp, Homo sapiens
  siRNA target sequence for CUTL1 (NM_181552.1,1851-1869).
gcaaggagccatttcacaa

SEQ ID NO: 2655 - DNA, 19 bp, Homo sapiens
  siRNA target sequence for CUTL1 (NM_181552.1,1953-1971).
gcctgaacagactatttca

SEQ ID NO: 2656 - DNA, 19 bp, Homo sapiens
  siRNA target sequence for CUTL1 (NM_181552.1,1994-2012).
gggtctgaaggtaacatca

SEQ ID NO: 2657 - DNA, 19 bp, Homo sapiens
  siRNA target sequence for CUTL1 (NM_181552.1,2887-2905).
cacccggcaggttaaggaa

SEQ ID NO: 2658 - DNA, 19 bp, Homo sapiens
  siRNA target sequence for CUTL1 (NM_181552.1,2889-2907).
cccggcaggttaaggaaaa

SEQ ID NO: 2659 - DNA, 19 bp, Homo sapiens
  siRNA target sequence for CUTL1 (NM_181552.1,2892-2910).
ggcaggttaaggaaaagct

SEQ ID NO: 2660 - DNA, 19 bp, Homo sapiens
  siRNA target sequence for CUTL1 (NM_181552.1,3070-3088).
gctaggccagggtgttcta

SEQ ID NO: 2661 - DNA, 19 bp, Homo sapiens
  siRNA target sequence for CUTL1 (NM_181552.1,3212-3230).
cctgagtccccgatgagtt

SEQ ID NO: 2662 - DNA, 19 bp, Homo sapiens
  siRNA target sequence for CUTL1 (NM_181552.1,3385-3403).
cagcatccaagaattagta

SEQ ID NO: 2663 - DNA, 19 bp, Homo sapiens
  siRNA target sequence for CUTL1 (NM_181552.1,3422-3440).
gacacctacggcataacca

SEQ ID NO: 2664 - DNA, 19 bp, Homo sapiens
  siRNA target sequence for CUTL1 (NM_181552.1,3607-3625).
gctgaacgaccccaacaat

SEQ ID NO: 2665 - DNA, 19 bp, Homo sapiens
  siRNA target sequence for CUTL1 (NM_181552.1,3841-3859).
gccatacccgtcaccaaaa

SEQ ID NO: 2666 - DNA, 19 bp, Homo sapiens
  siRNA target sequence for CUTL1 (NM_181552.1,3842-3860).
ccatacccgtcaccaaaaa

SEQ ID NO: 2667 - DNA, 19 bp, Homo sapiens
  siRNA target sequence for CUTL1 (NM_181552.1,3936-3954).
ggatccgcagagaactgtt

SEQ ID NO: 2668 - DNA, 19 bp, Homo sapiens
  siRNA target sequence for CUTL1 (NM_181552.1,4527-4545).
ccagccgggaggaacctat

SEQ ID NO: 2669 - DNA, 19 bp, Homo sapiens
  siRNA target sequence for CUTL1 (NM_181552.1,4531-4549).
ccgggaggaacctatcgaa

SEQ ID NO: 2670 - DNA, 19 bp, Homo sapiens
  siRNA target sequence for DLX1 (NM_178120.2,281-299).
ctactccatgcactgttta

SEQ ID NO: 2671 - DNA, 19 bp, Homo sapiens
  siRNA target sequence for DLX1 (NM_178120.2,399-417).
gcatccagcccctacatca

SEQ ID NO: 2672 - DNA, 19 bp, Homo sapiens
  siRNA target sequence for DLX1 (NM_178120.2,512-530).
cggtgaagtgcgcttcaat

SEQ ID NO: 2673 - DNA, 19 bp, Homo sapiens
  siRNA target sequence for DLX1 (NM_178120.2,806-824).
cggctggaaccctaactct

SEQ ID NO: 2674 - DNA, 19 bp, Homo sapiens
  siRNA target sequence for DLX1 (NM_178120.2,807-825).
ggctggaaccctaactctt

SEQ ID NO: 2675 - DNA, 19 bp, Homo sapiens
  siRNA target sequence for DLX2 (NM_004405.2,20-38).
gtctagtggctgatatgca

SEQ ID NO: 2676 - DNA, 19 bp, Homo sapiens
  siRNA target sequence for DLX2 (NM_004405.2,499-517).
cttcagcggcgtttccaaa

SEQ ID NO: 2677 - DNA, 19 bp, Homo sapiens
  siRNA target sequence for DLX2 (NM_004405.2,502-520).
cagcggcgtttccaaaaga

SEQ ID NO: 2678 - DNA, 19 bp, Homo sapiens
  siRNA target sequence for DLX3 (NM_005220.2,357-375).
gcgctccccagcacgatta

SEQ ID NO: 2679 - DNA, 19 bp, Homo sapiens
  siRNA target sequence for DLX3 (NM_005220.2,359-377).
gctccccagcacgattact

SEQ ID NO: 2680 - DNA, 19 bp, Homo sapiens
  siRNA target sequence for DLX3 (NM_005220.2,360-378).
ctccccagcacgattacta

SEQ ID NO: 2681 - DNA, 19 bp, Homo sapiens
  siRNA target sequence for DLX3 (NM_005220.2,362-380).
ccccagcacgattactact

SEQ ID NO: 2682 - DNA, 19 bp, Homo sapiens
  siRNA target sequence for DLX3 (NM_005220.2,417-435).
cctaccaccaccaattcaa

SEQ ID NO: 2683 - DNA, 19 bp, Homo sapiens
  siRNA target sequence for DLX3 (NM_005220.2,422-440).
caccaccaattcaatctca

SEQ ID NO: 2684 - DNA, 19 bp, Homo sapiens
  siRNA target sequence for DLX3 (NM_005220.2,424-442).
ccaccaattcaatctcaat

SEQ ID NO: 2685 - DNA, 19 bp, Homo sapiens
  siRNA target sequence for DLX3 (NM_005220.2,466-484).
ctcgcccaagtcggaatat

SEQ ID NO: 2686 - DNA, 19 bp, Homo sapiens
  siRNA target sequence for DLX3 (NM_005220.2,812-830).
gagcacagtcccaataaca

SEQ ID NO: 2687 - DNA, 19 bp, Homo sapiens
  siRNA target sequence for DLX3 (NM_005220.2,814-832).
gcacagtcccaataacagt

SEQ ID NO: 2688 - DNA, 19 bp, Homo sapiens
  siRNA target sequence for DLX4 (NM_138281.1,400-418).
ccgcagcctcccccaattt

SEQ ID NO: 2689 - DNA, 19 bp, Homo sapiens
  siRNA target sequence for DLX5 (NM_005221.3,257-275).
gctacccagccaaagctta

SEQ ID NO: 2690 - DNA, 19 bp, Homo sapiens
  siRNA target sequence for DLX5 (NM_005221.3,271-289).
gcttatgccgactatagct

SEQ ID NO: 2691 - DNA, 19 bp, Homo sapiens
  siRNA target sequence for DLX5 (NM_005221.3,272-290).
cttatgccgactatagcta

SEQ ID NO: 2692 - DNA, 19 bp, Homo sapiens
  siRNA target sequence for DLX5 (NM_005221.3,368-386).
ccgagcccgaggtgagaat

SEQ ID NO: 2693 - DNA, 19 bp, Homo sapiens
  siRNA target sequence for DLX5 (NM_005221.3,513-531).
cgcctcgctgggattgaca

SEQ ID NO: 2694 - DNA, 19 bp, Homo sapiens
  siRNA target sequence for DLX5 (NM_005221.3,631-649).
gacccaatggcgtgtaact

SEQ ID NO: 2695 - DNA, 19 bp, Homo sapiens
  siRNA target sequence for DLX5 (NM_005221.3,850-868).
gcctccgggacactctatt

SEQ ID NO: 2696 - DNA, 19 bp, Homo sapiens
  siRNA target sequence for DMRT1 (NM_021951.1,698-716).
ggtcatccaggatattcct

SEQ ID NO: 2697 - DNA, 19 bp, Homo sapiens
  siRNA target sequence for DMRT1 (NM_021951.1,748-766).
cacctgacctggtttcaga

SEQ ID NO: 2698 - DNA, 19 bp, Homo sapiens
  siRNA target sequence for DMRT1 (NM_021951.1,795-813).
ccgtctctgtttccttatt

SEQ ID NO: 2699 - DNA, 19 bp, Homo sapiens
  siRNA target sequence for DMRT1 (NM_021951.1,796-814).
cgtctctgtttccttatta

SEQ ID NO: 2700 - DNA, 19 bp, Homo sapiens
  siRNA target sequence for DMRT1 (NM_021951.1,925-943).
gcctccccggaccttatgt

SEQ ID NO: 2701 - DNA, 19 bp, Homo sapiens
  siRNA target sequence for DMRT1 (NM_021951.1,1168-1186).
gctctcctattagtaacaa

SEQ ID NO: 2702 - DNA, 19 bp, Homo sapiens
  siRNA target sequence for DMRT2 (NM_006557.3,536-554).
ggctttccgggaaacagaa

SEQ ID NO: 2703 - DNA, 19 bp, Homo sapiens
  siRNA target sequence for DMRT2 (NM_006557.3,537-555).
gctttccgggaaacagaat

SEQ ID NO: 2704 - DNA, 19 bp, Homo sapiens
  siRNA target sequence for DMRT2 (NM_006557.3,538-556).
ctttccgggaaacagaata

SEQ ID NO: 2705 - DNA, 19 bp, Homo sapiens
  siRNA target sequence for DMRT2 (NM_006557.3,631-649).
ctccttggattattctaca

SEQ ID NO: 2706 - DNA, 19 bp, Homo sapiens
  siRNA target sequence for DMRT2 (NM_006557.3,638-656).
gattattctacagctatta

SEQ ID NO: 2707 - DNA, 19 bp, Homo sapiens
  siRNA target sequence for DMRT2 (NM_006557.3,648-666).
cagctattatgtgtacata

SEQ ID NO: 2708 - DNA, 19 bp, Homo sapiens
  siRNA target sequence for DMRT2 (NM_181872.1,710-728).
gaagagcctttgctgataa

SEQ ID NO: 2709 - DNA, 19 bp, Homo sapiens
  siRNA target sequence for DMRT2 (NM_181872.1,715-733).
gcctttgctgataaagagt

SEQ ID NO: 2710 - DNA, 19 bp, Homo sapiens
  siRNA target sequence for DMRT2 (NM_181872.1,716-734).
cctttgctgataaagagtt

SEQ ID NO: 2711 - DNA, 19 bp, Homo sapiens
  siRNA target sequence for DMRT2 (NM_181872.1,771-789).
ggagatgttggaaacttct

SEQ ID NO: 2712 - DNA, 19 bp, Homo sapiens
  siRNA target sequence for DMRT2 (NM_181872.1,774-792).
gatgttggaaacttctcaa

SEQ ID NO: 2713 - DNA, 19 bp, Homo sapiens
  siRNA target sequence for DMRT2 (NM_181872.1,825-843).
gcctggacctgactacaat

SEQ ID NO: 2714 - DNA, 19 bp, Homo sapiens
  siRNA target sequence for DMRT2 (NM_181872.1,829-847).
ggacctgactacaattcct

SEQ ID NO: 2715 - DNA, 19 bp, Homo sapiens
  siRNA target sequence for DMRT2 (NM_181872.1,884-902).
caagcaaggacttctgtaa

SEQ ID NO: 2716 - DNA, 19 bp, Homo sapiens
  siRNA target sequence for DMRT2 (NM_181872.1,909-927).
gcccacctgccttgattta

SEQ ID NO: 2717 - DNA, 19 bp, Homo sapiens
  siRNA target sequence for DMRT2 (NM_181872.1,910-928).
cccacctgccttgatttaa

SEQ ID NO: 2718 - DNA, 19 bp, Homo sapiens
  siRNA target sequence for DMRT2 (NM_181872.1,949-967).
gggaatatggaactaattt

SEQ ID NO: 2719 - DNA, 19 bp, Homo sapiens
  siRNA target sequence for DMRT2 (NM_181872.1,987-1005).
cacaacttatagacagtat

SEQ ID NO: 2720 - DNA, 19 bp, Homo sapiens
  siRNA target sequence for DMRT2 (NM_181872.1,1174-1192).
gacatgatgccatcgaaat

SEQ ID NO: 2721 - DNA, 19 bp, Homo sapiens
  siRNA target sequence for DMRT2 (NM_181872.1,1289-1307).
ccccaccccgacggaattt

SEQ ID NO: 2722 - DNA, 19 bp, Homo sapiens
  siRNA target sequence for DMRT2 (NM_181872.1,1337-1355).
cagctcaagggcatgtctt

SEQ ID NO: 2723 - DNA, 19 bp, Homo sapiens
  siRNA target sequence for DMRT2 (NM_181872.1,1339-1357).
gctcaagggcatgtcttaa

SEQ ID NO: 2724 - DNA, 19 bp, Homo sapiens
  siRNA target sequence for DMRT2 (NM_181872.1,1342-1360).
caagggcatgtcttaacga

SEQ ID NO: 2725 - DNA, 19 bp, Homo sapiens
  siRNA target sequence for DMRT2 (NM_181872.1,1348-1366).
catgtcttaacgaagatca

SEQ ID NO: 2726 - DNA, 19 bp, Homo sapiens
  siRNA target sequence for DMRT2 (NM_181872.1,1428-1446).
gcaaacacttactgacaaa

SEQ ID NO: 2727 - DNA, 19 bp, Homo sapiens
  siRNA target sequence for DMRT2 (NM_181872.1,1449-1467).
gggtcctgagttgaaaaca

SEQ ID NO: 2728 - DNA, 19 bp, Homo sapiens
  siRNA target sequence for DMRT2 (NM_181872.1,1507-1525).
cacagagagtgtttagtta

SEQ ID NO: 2729 - DNA, 19 bp, Homo sapiens
  siRNA target sequence for DMRT2 (NM_181872.1,1533-1551).
ccagaagtacacatttaca

SEQ ID NO: 2730 - DNA, 19 bp, Homo sapiens
  siRNA target sequence for DMRT2 (NM_181872.1,1588-1606).
caagttggaacaaaactct

SEQ ID NO: 2731 - DNA, 19 bp, Homo sapiens
  siRNA target sequence for DMRT2 (NM_181872.1,1598-1616).
caaaactctcggtgaatga

SEQ ID NO: 2732 - DNA, 19 bp, Homo sapiens
  siRNA target sequence for DMRT3 (NM_021240.2,480-498).
ctcgccaagccagatttga

SEQ ID NO: 2733 - DNA, 19 bp, Homo sapiens
  siRNA target sequence for DMRT3 (NM_021240.2,518-536).
cggcaagtcggcagacaat

SEQ ID NO: 2734 - DNA, 19 bp, Homo sapiens
  siRNA target sequence for DMRT3 (NM_021240.2,519-537).
ggcaagtcggcagacaata

SEQ ID NO: 2735 - DNA, 19 bp, Homo sapiens
  siRNA target sequence for DMRT3 (NM_021240.2,521-539).
caagtcggcagacaataca

SEQ ID NO: 2736 - DNA, 19 bp, Homo sapiens
  siRNA target sequence for DMRT3 (NM_021240.2,579-597).
ccagatgtggcaaagagta

SEQ ID NO: 2737 - DNA, 19 bp, Homo sapiens
  siRNA target sequence for DMRT3 (NM_021240.2,611-629).
ccctgagagccctgagata

SEQ ID NO: 2738 - DNA, 19 bp, Homo sapiens
  siRNA target sequence for DMRT3 (NM_021240.2,648-666).
ggatacgctgtccagaaaa

SEQ ID NO: 2739 - DNA, 19 bp, Homo sapiens
  siRNA target sequence for DMRT3 (NM_021240.2,706-724).
gtcacgcggagcagaatca

SEQ ID NO: 2740 - DNA, 19 bp, Homo sapiens
  siRNA target sequence for DMRT3 (NM_021240.2,1001-1019).
ccccatctcgtcttccaaa

SEQ ID NO: 2741 - DNA, 19 bp, Homo sapiens
  siRNA target sequence for DMRT3 (NM_021240.2,1047-1065).
ccagacacgttgaggtttt

SEQ ID NO: 2742 - DNA, 19 bp, Homo sapiens
  siRNA target sequence for DMRT3 (NM_021240.2,1143-1161).
ccgctgatgctgaggaata

SEQ ID NO: 2743 - DNA, 19 bp, Homo sapiens
  siRNA target sequence for DMRT3 (NM_021240.2,1174-1192).
gccagtcgagccccttttt

SEQ ID NO: 2744 - DNA, 19 bp, Homo sapiens
  siRNA target sequence for DMRT3 (NM_021240.2,1186-1204).
cctttttgcccaatgatgt

SEQ ID NO: 2745 - DNA, 19 bp, Homo sapiens
  siRNA target sequence for DMRT3 (NM_021240.2,1329-1347).
gaagaccctcggatttcca

SEQ ID NO: 2746 - DNA, 19 bp, Homo sapiens
  siRNA target sequence for DMRT3 (NM_021240.2,1421-1439).
ctcctcagactctagaaca

SEQ ID NO: 2747 - DNA, 19 bp, Homo sapiens
  siRNA target sequence for DMRTB1 (NM_033067.1,186-204).
ccgagcgccagaagatcat

SEQ ID NO: 2748 - DNA, 19 bp, Homo sapiens
  siRNA target sequence for DMRTB1 (NM_033067.1,615-633).
cactgttcaccgactttgt

SEQ ID NO: 2749 - DNA, 19 bp, Homo sapiens
  siRNA target sequence for DMRTB1 (NM_033067.1,978-996).
cactgaccgtcctgtttga

SEQ ID NO: 2750 - DNA, 19 bp, Homo sapiens
  siRNA target sequence for DMRTB1 (NM_033067.1,980-998).
ctgaccgtcctgtttgata

SEQ ID NO: 2751 - DNA, 19 bp, Homo sapiens
  siRNA target sequence for DMRTB1 (NM_033067.1,982-1000).
gaccgtcctgtttgatact

SEQ ID NO: 2752 - DNA, 19 bp, Homo sapiens
  siRNA target sequence for DMRTC2 (NM_033052.1,239-257).
ggcttgcgagtgtcacaaa

SEQ ID NO: 2753 - DNA, 19 bp, Homo sapiens
  siRNA target sequence for DMRTC2 (NM_033052.1,244-262).
gcgagtgtcacaaatgtgt

SEQ ID NO: 2754 - DNA, 19 bp, Homo sapiens
  siRNA target sequence for DMRTC2 (NM_033052.1,318-336).
caggaggcgcagctaaaga

SEQ ID NO: 2755 - DNA, 19 bp, Homo sapiens
  siRNA target sequence for DMRTC2 (NM_033052.1,372-390).
gctcccaaccacttcagaa

SEQ ID NO: 2756 - DNA, 19 bp, Homo sapiens
  siRNA target sequence for DMTF1 (NM_021145.1,291-309).
gaggattctgacacagtaa

SEQ ID NO: 2757 - DNA, 19 bp, Homo sapiens
  siRNA target sequence for DMTF1 (NM_021145.1,293-311).
ggattctgacacagtaaca

SEQ ID NO: 2758 - DNA, 19 bp, Homo sapiens
  siRNA target sequence for DMTF1 (NM_021145.1,380-398).
gaatgaagcggatgaaata

SEQ ID NO: 2759 - DNA, 19 bp, Homo sapiens
  siRNA target sequence for DMTF1 (NM_021145.1,412-430).
gtattgaacctccacataa

SEQ ID NO: 2760 - DNA, 19 bp, Homo sapiens
  siRNA target sequence for DMTF1 (NM_021145.1,505-523).
cactttcagaaaatgatca

SEQ ID NO: 2761 - DNA, 19 bp, Homo sapiens
  siRNA target sequence for DMTF1 (NM_021145.1,592-610).
cacagatacagattttgca

SEQ ID NO: 2762 - DNA, 19 bp, Homo sapiens
  siRNA target sequence for DMTF1 (NM_021145.1,617-635).
gcaactagatgaaatatct

SEQ ID NO: 2763 - DNA, 19 bp, Homo sapiens
  siRNA target sequence for DMTF1 (NM_021145.1,641-659).
gggtaacgaggaagtttca

SEQ ID NO: 2764 - DNA, 19 bp, Homo sapiens
  siRNA target sequence for DMTF1 (NM_021145.1,668-686).
ccaagcatggtttacaact

SEQ ID NO: 2765 - DNA, 19 bp, Homo sapiens
  siRNA target sequence for DMTF1 (NM_021145.1,669-687).
caagcatggtttacaacta

SEQ ID NO: 2766 - DNA, 19 bp, Homo sapiens
  siRNA target sequence for DMTF1 (NM_021145.1,773-791).
caatattgaacgctatctt

SEQ ID NO: 2767 - DNA, 19 bp, Homo sapiens
  siRNA target sequence for DMTF1 (NM_021145.1,789-807).
cttaaggcacgcggaataa

SEQ ID NO: 2768 - DNA, 19 bp, Homo sapiens
  siRNA target sequence for DMTF1 (NM_021145.1,794-812).
ggcacgcggaataaaagat

SEQ ID NO: 2769 - DNA, 19 bp, Homo sapiens
  siRNA target sequence for DMTF1 (NM_021145.1,824-842).
catctttgagatgtcaaaa

SEQ ID NO: 2770 - DNA, 19 bp, Homo sapiens
  siRNA target sequence for DMTF1 (NM_021145.1,880-898).
gtctgaaccggcctttgtt

SEQ ID NO: 2771 - DNA, 19 bp, Homo sapiens
  siRNA target sequence for DMTF1 (NM_021145.1,889-907).
ggcctttgtttgcagttta

SEQ ID NO: 2772 - DNA, 19 bp, Homo sapiens
  siRNA target sequence for DMTF1 (NM_021145.1,890-908).
gcctttgtttgcagtttat

SEQ ID NO: 2773 - DNA, 19 bp, Homo sapiens
  siRNA target sequence for DMTF1 (NM_021145.1,891-909).
cctttgtttgcagtttata

SEQ ID NO: 2774 - DNA, 19 bp, Homo sapiens
  siRNA target sequence for DMTF1 (NM_021145.1,926-944).
gtatgatgacagaaaccat

SEQ ID NO: 2775 - DNA, 19 bp, Homo sapiens
  siRNA target sequence for DMTF1 (NM_021145.1,1068-1086).
cgactgatgaaggatactt

SEQ ID NO: 2776 - DNA, 19 bp, Homo sapiens
  siRNA target sequence for DMTF1 (NM_021145.1,1134-1152).
gtggttcatgagttgacaa

SEQ ID NO: 2777 - DNA, 19 bp, Homo sapiens
  siRNA target sequence for DMTF1 (NM_021145.1,1156-1174).
ctgagccaggtgacatagt

SEQ ID NO: 2778 - DNA, 19 bp, Homo sapiens
  siRNA target sequence for DMTF1 (NM_021145.1,1212-1230).
gtcggtacccgctcagaaa

SEQ ID NO: 2779 - DNA, 19 bp, Homo sapiens
  siRNA target sequence for DMTF1 (NM_021145.1,1216-1234).
gtacccgctcagaaaagca

SEQ ID NO: 2780 - DNA, 19 bp, Homo sapiens
  siRNA target sequence for DMTF1 (NM_021145.1,1240-1258).
gttctaaatggctcaacta

SEQ ID NO: 2781 - DNA, 19 bp, Homo sapiens
  siRNA target sequence for DMTF1 (NM_021145.1,1253-1271).
caactacctgaattggaaa

SEQ ID NO: 2782 - DNA, 19 bp, Homo sapiens
  siRNA target sequence for DMTF1 (NM_021145.1,1272-1290).
cagagtgggggtactgaat

SEQ ID NO: 2783 - DNA, 19 bp, Homo sapiens
  siRNA target sequence for DMTF1 (NM_021145.1,1405-1423).
cacaatggctacgaagtaa

SEQ ID NO: 2784 - DNA, 19 bp, Homo sapiens
  siRNA target sequence for DMTF1 (NM_021145.1,1449-1467).
gcaaaccataaggatgttt

SEQ ID NO: 2785 - DNA, 19 bp, Homo sapiens
  siRNA target sequence for DMTF1 (NM_021145.1,1464-1482).
gtttcgttccctgtcttaa

SEQ ID NO: 2786 - DNA, 19 bp, Homo sapiens
  siRNA target sequence for DMTF1 (NM_021145.1,1499-1517).
gttacatgagaaccaaaaa

SEQ ID NO: 2787 - DNA, 19 bp, Homo sapiens
  siRNA target sequence for DMTF1 (NM_021145.1,1557-1575).
gttccaaacagtaatacca

SEQ ID NO: 2788 - DNA, 19 bp, Homo sapiens
  siRNA target sequence for DMTF1 (NM_021145.1,1560-1578).
ccaaacagtaataccaatt

SEQ ID NO: 2789 - DNA, 19 bp, Homo sapiens
  siRNA target sequence for DMTF1 (NM_021145.1,1589-1607).
gcatgttcagataagagtt

SEQ ID NO: 2790 - DNA, 19 bp, Homo sapiens
  siRNA target sequence for DMTF1 (NM_021145.1,1605-1623).
gttgcccgcttggaagata

SEQ ID NO: 2791 - DNA, 19 bp, Homo sapiens
  siRNA target sequence for DMTF1 (NM_021145.1,1608-1626).
gcccgcttggaagataata

SEQ ID NO: 2792 - DNA, 19 bp, Homo sapiens
  siRNA target sequence for DMTF1 (NM_021145.1,1610-1628).
ccgcttggaagataataca

SEQ ID NO: 2793 - DNA, 19 bp, Homo sapiens
  siRNA target sequence for DMTF1 (NM_021145.1,1620-1638).
gataatacagccatctctt

SEQ ID NO: 2794 - DNA, 19 bp, Homo sapiens
  siRNA target sequence for DMTF1 (NM_021145.1,1668-1686).
gtccagatcacccatgttt

SEQ ID NO: 2795 - DNA, 19 bp, Homo sapiens
  siRNA target sequence for DMTF1 (NM_021145.1,1670-1688).
ccagatcacccatgtttct

SEQ ID NO: 2796 - DNA, 19 bp, Homo sapiens
  siRNA target sequence for DMTF1 (NM_021145.1,1673-1691).
gatcacccatgtttcttca

SEQ ID NO: 2797 - DNA, 19 bp, Homo sapiens
  siRNA target sequence for DMTF1 (NM_021145.1,1704-1722).
gctaccgttgactcagaaa

SEQ ID NO: 2798 - DNA, 19 bp, Homo sapiens
  siRNA target sequence for DMTF1 (NM_021145.1,1709-1727).
cgttgactcagaaacaata

SEQ ID NO: 2799 - DNA, 19 bp, Homo sapiens
  siRNA target sequence for DMTF1 (NM_021145.1,1738-1756).
gtggaacactacagacatt

SEQ ID NO: 2800 - DNA, 19 bp, Homo sapiens
  siRNA target sequence for DMTF1 (NM_021145.1,1744-1762).
cactacagacatttgagat

SEQ ID NO: 2801 - DNA, 19 bp, Homo sapiens
  siRNA target sequence for DMTF1 (NM_021145.1,1798-1816).
caggcacctacctacttca

SEQ ID NO: 2802 - DNA, 19 bp, Homo sapiens
  siRNA target sequence for DMTF1 (NM_021145.1,1800-1818).
ggcacctacctacttcaaa

SEQ ID NO: 2803 - DNA, 19 bp, Homo sapiens
  siRNA target sequence for DMTF1 (NM_021145.1,1890-1908).
gcttctcctgaacagatta

SEQ ID NO: 2804 - DNA, 19 bp, Homo sapiens
  siRNA target sequence for DMTF1 (NM_021145.1,1894-1912).
ctcctgaacagattattgt

SEQ ID NO: 2805 - DNA, 19 bp, Homo sapiens
  siRNA target sequence for DMTF1 (NM_021145.1,1917-1935).
gctttatccccagaacatt

SEQ ID NO: 2806 - DNA, 19 bp, Homo sapiens
  siRNA target sequence for DMTF1 (NM_021145.1,1918-1936).
ctttatccccagaacattt

SEQ ID NO: 2807 - DNA, 19 bp, Homo sapiens
  siRNA target sequence for DMTF1 (NM_021145.1,1924-1942).
ccccagaacatttgttgaa

SEQ ID NO: 2808 - DNA, 19 bp, Homo sapiens
  siRNA target sequence for DMTF1 (NM_021145.1,1940-1958).
gaacacaagtgataatgtt

SEQ ID NO: 2809 - DNA, 19 bp, Homo sapiens
  siRNA target sequence for DMTF1 (NM_021145.1,1973-1991).
cacaccaagagtcatcatt

SEQ ID NO: 2810 - DNA, 19 bp, Homo sapiens
  siRNA target sequence for DMTF1 (NM_021145.1,1975-1993).
caccaagagtcatcattca

SEQ ID NO: 2811 - DNA, 19 bp, Homo sapiens
  siRNA target sequence for DMTF1 (NM_021145.1,2040-2058).
ctgacagtcgatagtgata

SEQ ID NO: 2812 - DNA, 19 bp, Homo sapiens
  siRNA target sequence for DMTF1 (NM_021145.1,2042-2060).
gacagtcgatagtgatatt

SEQ ID NO: 2813 - DNA, 19 bp, Homo sapiens
  siRNA target sequence for DMTF1 (NM_021145.1,2044-2062).
cagtcgatagtgatattca

SEQ ID NO: 2814 - DNA, 19 bp, Homo sapiens
  siRNA target sequence for DMTF1 (NM_021145.1,2046-2064).
gtcgatagtgatattcagt

SEQ ID NO: 2815 - DNA, 19 bp, Homo sapiens
  siRNA target sequence for DMTF1 (NM_021145.1,2140-2158).
ctgtggagccatcatttaa

SEQ ID NO: 2816 - DNA, 19 bp, Homo sapiens
  siRNA target sequence for DMTF1 (NM_021145.1,2144-2162).
ggagccatcatttaatgat

SEQ ID NO: 2817 - DNA, 19 bp, Homo sapiens
  siRNA target sequence for DMTF1 (NM_021145.1,2174-2192).
caaattcagtgaccaaaat

SEQ ID NO: 2818 - DNA, 19 bp, Homo sapiens
  siRNA target sequence for DMTF1 (NM_021145.1,2195-2213).
cacagaactgatgaatagt

SEQ ID NO: 2819 - DNA, 19 bp, Homo sapiens
  siRNA target sequence for DMTF1 (NM_021145.1,2240-2258).
ctctgacaccgaccttaaa

SEQ ID NO: 2820 - DNA, 19 bp, Homo sapiens
  siRNA target sequence for DMTF1 (NM_021145.1,2262-2280).
gaggaatcaccctctgatt

SEQ ID NO: 2821 - DNA, 19 bp, Homo sapiens
  siRNA target sequence for DMTF1 (NM_021145.1,2264-2282).
ggaatcaccctctgattta

SEQ ID NO: 2822 - DNA, 19 bp, Homo sapiens
  siRNA target sequence for DMTF1 (NM_021145.1,2284-2302).
ccagtgcttatgttactga

SEQ ID NO: 2823 - DNA, 19 bp, Homo sapiens
  siRNA target sequence for DMTF1 (NM_021145.1,2312-2330).
gtctcccactatagaagaa

SEQ ID NO: 2824 - DNA, 19 bp, Homo sapiens
  siRNA target sequence for DMTF1 (NM_021145.1,2318-2336).
cactatagaagaacaagtt

SEQ ID NO: 2825 - DNA, 19 bp, Homo sapiens
  siRNA target sequence for DMTF1 (NM_021145.1,2374-2392).
cttcaccacatggctttat

SEQ ID NO: 2826 - DNA, 19 bp, Homo sapiens
  siRNA target sequence for DMTF1 (NM_021145.1,2377-2395).
caccacatggctttatcca

SEQ ID NO: 2827 - DNA, 19 bp, Homo sapiens
  siRNA target sequence for DMTF1 (NM_021145.1,2393-2411).
ccaggcatctgatgttata

SEQ ID NO: 2828 - DNA, 19 bp, Homo sapiens
  siRNA target sequence for DMTF1 (NM_021145.1,2475-2493).
gaatcaaatatcattggat

SEQ ID NO: 2829 - DNA, 19 bp, Homo sapiens
  siRNA target sequence for DMTF1 (NM_021145.1,2528-2546).
ggatgtcgaagatttggta

SEQ ID NO: 2830 - DNA, 19 bp, Homo sapiens
  siRNA target sequence for DMTF1 (NM_021145.1,2529-2547).
gatgtcgaagatttggtaa

SEQ ID NO: 2831 - DNA, 19 bp, Homo sapiens
  siRNA target sequence for DMTF1 (NM_021145.1,2532-2550).
gtcgaagatttggtaaact

SEQ ID NO: 2832 - DNA, 19 bp, Homo sapiens
  siRNA target sequence for DMTF1 (NM_021145.1,2534-2552).
cgaagatttggtaaactgt

SEQ ID NO: 2833 - DNA, 19 bp, Homo sapiens
  siRNA target sequence for DMTF1 (NM_021145.1,2538-2556).
gatttggtaaactgtcatt

SEQ ID NO: 2834 - DNA, 19 bp, Homo sapiens
  siRNA target sequence for DRIL1 (NM_005224.1,553-571).
cctccgacgaggacatgaa

SEQ ID NO: 2835 - DNA, 19 bp, Homo sapiens
  siRNA target sequence for DRIL1 (NM_005224.1,871-889).
cttacgaggagcagtttaa

SEQ ID NO: 2836 - DNA, 19 bp, Homo sapiens
  siRNA target sequence for DRIL1 (NM_005224.1,1138-1156).
ccctgcggacccaatacat

SEQ ID NO: 2837 - DNA, 19 bp, Homo sapiens
  siRNA target sequence for DRIL1 (NM_005224.1,1140-1158).
ctgcggacccaatacatga

SEQ ID NO: 2838 - DNA, 19 bp, Homo sapiens
  siRNA target sequence for DRIL1 (NM_005224.1,1627-1645).
gtgcactccagcagaactt

SEQ ID NO: 2839 - DNA, 19 bp, Homo sapiens
  siRNA target sequence for DRIL1 (NM_005224.1,1770-1788).
gagatcaacggcatcatgt

SEQ ID NO: 2840 - DNA, 19 bp, Homo sapiens
  siRNA target sequence for DSCR1 (NM_004414.4,263-281).
gcgactggagcttcattga

SEQ ID NO: 2841 - DNA, 19 bp, Homo sapiens
  siRNA target sequence for DSCR1 (NM_004414.4,265-283).
gactggagcttcattgact

SEQ ID NO: 2842 - DNA, 19 bp, Homo sapiens
  siRNA target sequence for DSCR1 (NM_004414.4,391-409).
ctctttaggacgtatgaca

SEQ ID NO: 2843 - DNA, 19 bp, Homo sapiens
  siRNA target sequence for DSCR1 (NM_004414.4,437-455).
gcttcaaacgagtcagaat

SEQ ID NO: 2844 - DNA, 19 bp, Homo sapiens
  siRNA target sequence for DSCR1 (NM_004414.4,547-565).
cagaccttacacataggaa

SEQ ID NO: 2845 - DNA, 19 bp, Homo sapiens
  siRNA target sequence for DSCR1 (NM_004414.4,573-591).
cctggctccgccaaatcca

SEQ ID NO: 2846 - DNA, 19 bp, Homo sapiens
  siRNA target sequence for DSCR1 (NM_004414.4,652-670).
gatgcgaccccagtcataa

SEQ ID NO: 2847 - DNA, 19 bp, Homo sapiens
  siRNA target sequence for DSCR1 (NM_004414.4,655-673).
gcgaccccagtcataaact

SEQ ID NO: 2848 - DNA, 19 bp, Homo sapiens
  siRNA target sequence for DSCR1 (NM_004414.4,656-674).
cgaccccagtcataaacta

SEQ ID NO: 2849 - DNA, 19 bp, Homo sapiens
  siRNA target sequence for DSCR1 (NM_004414.4,662-680).
cagtcataaactatgatct

SEQ ID NO: 2850 - DNA, 19 bp, Homo sapiens
  siRNA target sequence for DSCR1 (NM_004414.4,666-684).
cataaactatgatctctta

SEQ ID NO: 2851 - DNA, 19 bp, Homo sapiens
  siRNA target sequence for DSCR1 (NM_004414.4,819-837).
gagacctaagccaaaaatt

SEQ ID NO: 2852 - DNA, 19 bp, Homo sapiens
  siRNA target sequence for DSIPI (NM_004089.2,525-543).
gtgagaacaccctgttgaa

SEQ ID NO: 2853 - DNA, 19 bp, Homo sapiens
  siRNA target sequence for DSIPI (NM_004089.2,527-545).
gagaacaccctgttgaaga

SEQ ID NO: 2854 - DNA, 19 bp, Homo sapiens
  siRNA target sequence for DSIPI (NM_198057.1,555-573).
gacaagctcaacagcataa

SEQ ID NO: 2855 - DNA, 19 bp, Homo sapiens
  siRNA target sequence for DUX4 (NM_033178.1,574-592).
ctgcggcacccggaaacat

SEQ ID NO: 2856 - DNA, 19 bp, Homo sapiens
  siRNA target sequence for E2F1 (NM_005225.1,655-673).
cagctcattgccaagaagt

SEQ ID NO: 2857 - DNA, 19 bp, Homo sapiens
  siRNA target sequence for E2F1 (NM_005225.1,784-802).
gaccacctgatgaatatct

SEQ ID NO: 2858 - DNA, 19 bp, Homo sapiens
  siRNA target sequence for E2F1 (NM_005225.1,790-808).
ctgatgaatatctgtacta

SEQ ID NO: 2859 - DNA, 19 bp, Homo sapiens
  siRNA target sequence for E2F1 (NM_005225.1,893-911).
ctgcagagcagatggttat

SEQ ID NO: 2860 - DNA, 19 bp, Homo sapiens
  siRNA target sequence for E2F1 (NM_005225.1,951-969).
ggactcttcggagaacttt

SEQ ID NO: 2861 - DNA, 19 bp, Homo sapiens
  siRNA target sequence for E2F1 (NM_005225.1,991-1009).
caaggcccgatcgatgttt

SEQ ID NO: 2862 - DNA, 19 bp, Homo sapiens
  siRNA target sequence for E2F1 (NM_005225.1,995-1013).
gcccgatcgatgttttcct

SEQ ID NO: 2863 - DNA, 19 bp, Homo sapiens
  siRNA target sequence for E2F1 (NM_005225.1,1099-1117).
gactctgccaccatagtgt

SEQ ID NO: 2864 - DNA, 19 bp, Homo sapiens
  siRNA target sequence for E2F1 (NM_005225.1,1392-1410).
cctcttcgactgtgacttt

SEQ ID NO: 2865 - DNA, 19 bp, Homo sapiens
  siRNA target sequence for E2F1 (NM_005225.1,1417-1435).
ctcacccccctggatttct

SEQ ID NO: 2866 - DNA, 19 bp, Homo sapiens
  siRNA target sequence for E2F2 (NM_004091.2,634-652).
gacccgagggccaagttgt

SEQ ID NO: 2867 - DNA, 19 bp, Homo sapiens
  siRNA target sequence for E2F2 (NM_004091.2,804-822).
gagaagactcggtatgaca

SEQ ID NO: 2868 - DNA, 19 bp, Homo sapiens
  siRNA target sequence for E2F2 (NM_004091.2,1165-1183).
ggctggcctatgtgactta

SEQ ID NO: 2869 - DNA, 19 bp, Homo sapiens
  siRNA target sequence for E2F2 (NM_004091.2,1193-1211).
ccgtgctgttggcaacttt

SEQ ID NO: 2870 - DNA, 19 bp, Homo sapiens
  siRNA target sequence for E2F2 (NM_004091.2,1278-1296).
gaggacaacctgcagatat

SEQ ID NO: 2871 - DNA, 19 bp, Homo sapiens
  siRNA target sequence for E2F2 (NM_004091.2,1718-1736).
ccttggggacctgttgatt

SEQ ID NO: 2872 - DNA, 19 bp, Homo sapiens
  siRNA target sequence for E2F2 (NM_004091.2,1719-1737).
cttggggacctgttgatta

SEQ ID NO: 2873 - DNA, 19 bp, Homo sapiens
  siRNA target sequence for E2F3 (NM_001949.2,575-593).
caaaatctccctcagaaaa

SEQ ID NO: 2874 - DNA, 19 bp, Homo sapiens
  siRNA target sequence for E2F3 (NM_001949.2,589-607).
gaaaaaacgcggtatgata

SEQ ID NO: 2875 - DNA, 19 bp, Homo sapiens
  siRNA target sequence for E2F3 (NM_001949.2,656-674).
cacccgatggggtattgga

SEQ ID NO: 2876 - DNA, 19 bp, Homo sapiens
  siRNA target sequence for E2F3 (NM_001949.2,658-676).
cccgatggggtattggatt

SEQ ID NO: 2877 - DNA, 19 bp, Homo sapiens
  siRNA target sequence for E2F3 (NM_001949.2,659-677).
ccgatggggtattggattt

SEQ ID NO: 2878 - DNA, 19 bp, Homo sapiens
  siRNA target sequence for E2F3 (NM_001949.2,661-679).
gatggggtattggatttga

SEQ ID NO: 2879 - DNA, 19 bp, Homo sapiens
  siRNA target sequence for E2F3 (NM_001949.2,665-683).
gggtattggatttgaacaa

SEQ ID NO: 2880 - DNA, 19 bp, Homo sapiens
  siRNA target sequence for E2F3 (NM_001949.2,745-763).
ggcatccacctcattaaga

SEQ ID NO: 2881 - DNA, 19 bp, Homo sapiens
  siRNA target sequence for E2F3 (NM_001949.2,831-849).
gtgtcaaggcctgtcaaaa

SEQ ID NO: 2882 - DNA, 19 bp, Homo sapiens
  siRNA target sequence for E2F3 (NM_001949.2,833-851).
gtcaaggcctgtcaaaaga

SEQ ID NO: 2883 - DNA, 19 bp, Homo sapiens
  siRNA target sequence for E2F3 (NM_001949.2,909-927).
cctggacctcaaactgtta

SEQ ID NO: 2884 - DNA, 19 bp, Homo sapiens
  siRNA target sequence for E2F3 (NM_001949.2,940-958).
gagaatcaaaggttagctt

SEQ ID NO: 2885 - DNA, 19 bp, Homo sapiens
  siRNA target sequence for E2F3 (NM_001949.2,942-960).
gaatcaaaggttagcttat

SEQ ID NO: 2886 - DNA, 19 bp, Homo sapiens
  siRNA target sequence for E2F3 (NM_001949.2,946-964).
caaaggttagcttatgtta

SEQ ID NO: 2887 - DNA, 19 bp, Homo sapiens
  siRNA target sequence for E2F3 (NM_001949.2,950-968).
ggttagcttatgttacata

SEQ ID NO: 2888 - DNA, 19 bp, Homo sapiens
  siRNA target sequence for E2F3 (NM_001949.2,951-969).
gttagcttatgttacatat

SEQ ID NO: 2889 - DNA, 19 bp, Homo sapiens
  siRNA target sequence for E2F3 (NM_001949.2,965-983).
catatcaagatattcgaaa

SEQ ID NO: 2890 - DNA, 19 bp, Homo sapiens
  siRNA target sequence for E2F3 (NM_001949.2,993-1011).
ccttaaagaccaaactgtt

SEQ ID NO: 2891 - DNA, 19 bp, Homo sapiens
  siRNA target sequence for E2F3 (NM_001949.2,994-1012).
cttaaagaccaaactgtta

SEQ ID NO: 2892 - DNA, 19 bp, Homo sapiens
  siRNA target sequence for E2F3 (NM_001949.2,1020-1038).
gaaagcccctccagaaaca

SEQ ID NO: 2893 - DNA, 19 bp, Homo sapiens
  siRNA target sequence for E2F3 (NM_001949.2,1048-1066).
gtgcctgactcaatagaga

SEQ ID NO: 2894 - DNA, 19 bp, Homo sapiens
  siRNA target sequence for E2F3 (NM_001949.2,1096-1114).
gggcccattgaggtttact

SEQ ID NO: 2895 - DNA, 19 bp, Homo sapiens
  siRNA target sequence for E2F3 (NM_001949.2,1101-1119).
cattgaggtttacttatgt

SEQ ID NO: 2896 - DNA, 19 bp, Homo sapiens
  siRNA target sequence for E2F3 (NM_001949.2,1229-1247).
gcgattgctcagtttctat

SEQ ID NO: 2897 - DNA, 19 bp, Homo sapiens
  siRNA target sequence for E2F3 (NM_001949.2,1293-1311).
gactgaggaccaaattcct

SEQ ID NO: 2898 - DNA, 19 bp, Homo sapiens
  siRNA target sequence for E2F3 (NM_001949.2,1318-1336).
ctagaaggaccgtttgtga

SEQ ID NO: 2899 - DNA, 19 bp, Homo sapiens
  siRNA target sequence for E2F3 (NM_001949.2,1400-1418).
gcgatctcttcgatgctta

SEQ ID NO: 2900 - DNA, 19 bp, Homo sapiens
  siRNA target sequence for E2F3 (NM_001949.2,1410-1428).
cgatgcttacgatttggaa

SEQ ID NO: 2901 - DNA, 19 bp, Homo sapiens
  siRNA target sequence for E2F3 (NM_001949.2,1415-1433).
cttacgatttggaaaagct

SEQ ID NO: 2902 - DNA, 19 bp, Homo sapiens
  siRNA target sequence for E2F4 (NM_001950.2,103-121).
ctccaagccggcacgaaaa

SEQ ID NO: 2903 - DNA, 19 bp, Homo sapiens
  siRNA target sequence for E2F4 (NM_001950.2,105-123).
ccaagccggcacgaaaaga

SEQ ID NO: 2904 - DNA, 19 bp, Homo sapiens
  siRNA target sequence for E2F4 (NM_001950.2,231-249).
cggatttacgacattacca

SEQ ID NO: 2905 - DNA, 19 bp, Homo sapiens
  siRNA target sequence for E2F4 (NM_001950.2,232-250).
ggatttacgacattaccaa

SEQ ID NO: 2906 - DNA, 19 bp, Homo sapiens
  siRNA target sequence for E2F4 (NM_001950.2,242-260).
cattaccaatgttttggaa

SEQ ID NO: 2907 - DNA, 19 bp, Homo sapiens
  siRNA target sequence for E2F4 (NM_001950.2,773-791).
ggaagcctcacgtccaaat

SEQ ID NO: 2908 - DNA, 19 bp, Homo sapiens
  siRNA target sequence for E2F4 (NM_001950.2,774-792).
gaagcctcacgtccaaata

SEQ ID NO: 2909 - DNA, 19 bp, Homo sapiens
  siRNA target sequence for E2F4 (NM_001950.2,1175-1193).
gatgtcctcagaagtgttt

SEQ ID NO: 2910 - DNA, 19 bp, Homo sapiens
  siRNA target sequence for E2F4 (NM_001950.2,1222-1240).
cgggagaccacgattatat

SEQ ID NO: 2911 - DNA, 19 bp, Homo sapiens
  siRNA target sequence for E2F4 (NM_001950.2,1225-1243).
gagaccacgattatatcta

SEQ ID NO: 2912 - DNA, 19 bp, Homo sapiens
  siRNA target sequence for E2F4 (NM_001950.2,1227-1245).
gaccacgattatatctaca

SEQ ID NO: 2913 - DNA, 19 bp, Homo sapiens
  siRNA target sequence for E2F5 (NM_001951.2,247-265).
cggcgttctggatctcaaa

SEQ ID NO: 2914 - DNA, 19 bp, Homo sapiens
  siRNA target sequence for E2F5 (NM_001951.2,323-341).
gtcttagagggaattgact

SEQ ID NO: 2915 - DNA, 19 bp, Homo sapiens
  siRNA target sequence for E2F5 (NM_001951.2,333-351).
gaattgacttgattgaaaa

SEQ ID NO: 2916 - DNA, 19 bp, Homo sapiens
  siRNA target sequence for E2F5 (NM_001951.2,386-404).
ggtgctggctgtaatacta

SEQ ID NO: 2917 - DNA, 19 bp, Homo sapiens
  siRNA target sequence for E2F5 (NM_001951.2,393-411).
gctgtaatactaaagaagt

SEQ ID NO: 2918 - DNA, 19 bp, Homo sapiens
  siRNA target sequence for E2F5 (NM_001951.2,396-414).
gtaatactaaagaagtcat

SEQ ID NO: 2919 - DNA, 19 bp, Homo sapiens
  siRNA target sequence for E2F5 (NM_001951.2,407-425).
gaagtcatagatagattaa

SEQ ID NO: 2920 - DNA, 19 bp, Homo sapiens
  siRNA target sequence for E2F5 (NM_001951.2,416-434).
gatagattaagatatctta

SEQ ID NO: 2921 - DNA, 19 bp, Homo sapiens
  siRNA target sequence for E2F5 (NM_001951.2,500-518).
caaagcatcaaaaatgtga

SEQ ID NO: 2922 - DNA, 19 bp, Homo sapiens
  siRNA target sequence for E2F5 (NM_001951.2,521-539).
gacgattccattaataata

SEQ ID NO: 2923 - DNA, 19 bp, Homo sapiens
  siRNA target sequence for E2F5 (NM_001951.2,523-541).
cgattccattaataataga

SEQ ID NO: 2924 - DNA, 19 bp, Homo sapiens
  siRNA target sequence for E2F5 (NM_001951.2,524-542).
gattccattaataatagat

SEQ ID NO: 2925 - DNA, 19 bp, Homo sapiens
  siRNA target sequence for E2F5 (NM_001951.2,540-558).
gattttcctatgtaactca

SEQ ID NO: 2926 - DNA, 19 bp, Homo sapiens
  siRNA target sequence for E2F5 (NM_001951.2,546-564).
cctatgtaactcatgaaga

SEQ ID NO: 2927 - DNA, 19 bp, Homo sapiens
  siRNA target sequence for E2F5 (NM_001951.2,560-578).
gaagacatctgtaattgct

SEQ ID NO: 2928 - DNA, 19 bp, Homo sapiens
  siRNA target sequence for E2F5 (NM_001951.2,679-697).
caatctaaagagtcattca

SEQ ID NO: 2929 - DNA, 19 bp, Homo sapiens
  siRNA target sequence for E2F5 (NM_001951.2,702-720).
ctatccatgtgctgcttat

SEQ ID NO: 2930 - DNA, 19 bp, Homo sapiens
  siRNA target sequence for E2F5 (NM_001951.2,706-724).
ccatgtgctgcttataaat

SEQ ID NO: 2931 - DNA, 19 bp, Homo sapiens
  siRNA target sequence for E2F5 (NM_001951.2,707-725).
catgtgctgcttataaata

SEQ ID NO: 2932 - DNA, 19 bp, Homo sapiens
  siRNA target sequence for E2F5 (NM_001951.2,738-756).
catctaagcccgtggtttt

SEQ ID NO: 2933 - DNA, 19 bp, Homo sapiens
  siRNA target sequence for E2F5 (NM_001951.2,829-847).
cagcatggcaactcaaaat

SEQ ID NO: 2934 - DNA, 19 bp, Homo sapiens
  siRNA target sequence for E2F5 (NM_001951.2,831-849).
gcatggcaactcaaaatct

SEQ ID NO: 2935 - DNA, 19 bp, Homo sapiens
  siRNA target sequence for E2F5 (NM_001951.2,854-872).
gagcaacatgtctctgaaa

SEQ ID NO: 2936 - DNA, 19 bp, Homo sapiens
  siRNA target sequence for E2F5 (NM_001951.2,892-910).
gacatcagctacagatata

SEQ ID NO: 2937 - DNA, 19 bp, Homo sapiens
  siRNA target sequence for E2F5 (NM_001951.2,921-939).
gatctattagtggagatat

SEQ ID NO: 2938 - DNA, 19 bp, Homo sapiens
  siRNA target sequence for E2F5 (NM_001951.2,924-942).
ctattagtggagatatcat

SEQ ID NO: 2939 - DNA, 19 bp, Homo sapiens
  siRNA target sequence for E2F5 (NM_001951.2,933-951).
gagatatcattgatgagtt

SEQ ID NO: 2940 - DNA, 19 bp, Homo sapiens
  siRNA target sequence for E2F5 (NM_001951.2,962-980).
gacgtgtttcctctcttaa

SEQ ID NO: 2941 - DNA, 19 bp, Homo sapiens
  siRNA target sequence for E2F5 (NM_001951.2,996-1014).
cggcagatgactacaactt

SEQ ID NO: 2942 - DNA, 19 bp, Homo sapiens
  siRNA target sequence for E2F5 (NM_001951.2,997-1015).
ggcagatgactacaacttt

SEQ ID NO: 2943 - DNA, 19 bp, Homo sapiens
  siRNA target sequence for E2F5 (NM_001951.2,998-1016).
gcagatgactacaacttta

SEQ ID NO: 2944 - DNA, 19 bp, Homo sapiens
  siRNA target sequence for E2F5 (NM_001951.2,1006-1024).
ctacaactttaatttagat

SEQ ID NO: 2945 - DNA, 19 bp, Homo sapiens
  siRNA target sequence for E2F6 (NM_001952.3,393-411).
gcctgctgccatcaaaaat

SEQ ID NO: 2946 - DNA, 19 bp, Homo sapiens
  siRNA target sequence for E2F6 (NM_001952.3,394-412).
cctgctgccatcaaaaata

SEQ ID NO: 2947 - DNA, 19 bp, Homo sapiens
  siRNA target sequence for E2F6 (NM_001952.3,472-490).
gagacctcgttttgatgta

SEQ ID NO: 2948 - DNA, 19 bp, Homo sapiens
  siRNA target sequence for E2F6 (NM_001952.3,485-503).
gatgtatcgctggtttatt

SEQ ID NO: 2949 - DNA, 19 bp, Homo sapiens
  siRNA target sequence for E2F6 (NM_001952.3,488-506).
gtatcgctggtttatttaa

SEQ ID NO: 2950 - DNA, 19 bp, Homo sapiens
  siRNA target sequence for E2F6 (NM_001952.3,496-514).
ggtttatttaactcgaaaa

SEQ ID NO: 2951 - DNA, 19 bp, Homo sapiens
  siRNA target sequence for E2F6 (NM_001952.3,497-515).
gtttatttaactcgaaaat

SEQ ID NO: 2952 - DNA, 19 bp, Homo sapiens
  siRNA target sequence for E2F6 (NM_001952.3,510-528).
gaaaatttatggatcttgt

SEQ ID NO: 2953 - DNA, 19 bp, Homo sapiens
  siRNA target sequence for E4F1 (NM_004424.2,225-243).
caccgccttggaggatttt

SEQ ID NO: 2954 - DNA, 19 bp, Homo sapiens
  siRNA target sequence for E4F1 (NM_004424.2,244-262).
gttcagcacaagattcaga

SEQ ID NO: 2955 - DNA, 19 bp, Homo sapiens
  siRNA target sequence for E4F1 (NM_004424.2,1597-1615).
ggcaagcgctacaagacta

SEQ ID NO: 2956 - DNA, 19 bp, Homo sapiens
  siRNA target sequence for E4F1 (NM_004424.2,1598-1616).
gcaagcgctacaagactaa

SEQ ID NO: 2957 - DNA, 19 bp, Homo sapiens
  siRNA target sequence for E4F1 (NM_004424.2,1744-1762).
ccgttcaagtgctacaagt

SEQ ID NO: 2958 - DNA, 19 bp, Homo sapiens
  siRNA target sequence for EGR1 (NM_001964.2,567-585).
cctgaccgcagagtctttt

SEQ ID NO: 2959 - DNA, 19 bp, Homo sapiens
  siRNA target sequence for EGR1 (NM_001964.2,1879-1897).
cccaggacaattgaaattt

SEQ ID NO: 2960 - DNA, 19 bp, Homo sapiens
  siRNA target sequence for EGR3 (NM_004430.2,413-431).
caactgcctgacaatctgt

SEQ ID NO: 2961 - DNA, 19 bp, Homo sapiens
  siRNA target sequence for EGR3 (NM_004430.2,477-495).
gcgactcggtagtccatta

SEQ ID NO: 2962 - DNA, 19 bp, Homo sapiens
  siRNA target sequence for EGR3 (NM_004430.2,479-497).
gactcggtagtccattaca

SEQ ID NO: 2963 - DNA, 19 bp, Homo sapiens
  siRNA target sequence for EGR3 (NM_004430.2,481-499).
ctcggtagtccattacaat

SEQ ID NO: 2964 - DNA, 19 bp, Homo sapiens
  siRNA target sequence for EGR3 (NM_004430.2,483-501).
cggtagtccattacaatca

SEQ ID NO: 2965 - DNA, 19 bp, Homo sapiens
  siRNA target sequence for EGR3 (NM_004430.2,485-503).
gtagtccattacaatcaga

SEQ ID NO: 2966 - DNA, 19 bp, Homo sapiens
  siRNA target sequence for EGR3 (NM_004430.2,549-567).
ccaacccggaactctctta

SEQ ID NO: 2967 - DNA, 19 bp, Homo sapiens
  siRNA target sequence for EGR3 (NM_004430.2,867-885).
cctattccccccaggatta

SEQ ID NO: 2968 - DNA, 19 bp, Homo sapiens
  siRNA target sequence for EGR3 (NM_004430.2,902-920).
gcgttggacagcaatctct

SEQ ID NO: 2969 - DNA, 19 bp, Homo sapiens
  siRNA target sequence for EGR4 (NM_001965.1,170-188).
ctccaccttagcgagtttt

SEQ ID NO: 2970 - DNA, 19 bp, Homo sapiens
  siRNA target sequence for EGR4 (NM_001965.1,297-315).
ctggagcaggcgacttctt

SEQ ID NO: 2971 - DNA, 19 bp, Homo sapiens
  siRNA target sequence for EGR4 (NM_001965.1,412-430).
cagcggtagcttcttcatt

SEQ ID NO: 2972 - DNA, 19 bp, Homo sapiens
  siRNA target sequence for EGR4 (NM_001965.1,856-874).
ggctcgttttcccgtaata

SEQ ID NO: 2973 - DNA, 19 bp, Homo sapiens
  siRNA target sequence for EGR4 (NM_001965.1,868-886).
cgtaatagggaccaagatt

SEQ ID NO: 2974 - DNA, 19 bp, Homo sapiens
  siRNA target sequence for EGR4 (NM_001965.1,1057-1075).
cggcgacggcggagagttt

SEQ ID NO: 2975 - DNA, 19 bp, Homo sapiens
  siRNA target sequence for EGR4 (NM_001965.1,1059-1077).
gcgacggcggagagtttct

SEQ ID NO: 2976 - DNA, 19 bp, Homo sapiens
  siRNA target sequence for EGR4 (NM_001965.1,1510-1528).
gcgcagcgatgagaagaaa

SEQ ID NO: 2977 - DNA, 19 bp, Homo sapiens
  siRNA target sequence for EHF (NM_012153.2,168-186).
gaaggaggtggtgtaatga

SEQ ID NO: 2978 - DNA, 19 bp, Homo sapiens
  siRNA target sequence for EHF (NM_012153.2,172-190).
gaggtggtgtaatgaatct

SEQ ID NO: 2979 - DNA, 19 bp, Homo sapiens
  siRNA target sequence for EHF (NM_012153.2,175-193).
gtggtgtaatgaatctcaa

SEQ ID NO: 2980 - DNA, 19 bp, Homo sapiens
  siRNA target sequence for EHF (NM_012153.2,274-292).
gaggccagtggcatgaaat

SEQ ID NO: 2981 - DNA, 19 bp, Homo sapiens
  siRNA target sequence for EHF (NM_012153.2,368-386).
caattgtatccctttccaa

SEQ ID NO: 2982 - DNA, 19 bp, Homo sapiens
  siRNA target sequence for EHF (NM_012153.2,521-539).
gttccagtccacacacaat

SEQ ID NO: 2983 - DNA, 19 bp, Homo sapiens
  siRNA target sequence for EHF (NM_012153.2,586-604).
ggaaagacgagaactattt

SEQ ID NO: 2984 - DNA, 19 bp, Homo sapiens
  siRNA target sequence for EHF (NM_012153.2,594-612).
gagaactatttatatgaca

SEQ ID NO: 2985 - DNA, 19 bp, Homo sapiens
  siRNA target sequence for EHF (NM_012153.2,663-681).
gctcagatctccatgacaa

SEQ ID NO: 2986 - DNA, 19 bp, Homo sapiens
  siRNA target sequence for EHF (NM_012153.2,705-723).
gagtcacctgatatgaaaa

SEQ ID NO: 2987 - DNA, 19 bp, Homo sapiens
  siRNA target sequence for EHF (NM_012153.2,767-785).
cccgagagggactcactta

SEQ ID NO: 2988 - DNA, 19 bp, Homo sapiens
  siRNA target sequence for EHF (NM_012153.2,819-837).
gacaagaacccaggattaa

SEQ ID NO: 2989 - DNA, 19 bp, Homo sapiens
  siRNA target sequence for EHF (NM_012153.2,821-839).
caagaacccaggattaata

SEQ ID NO: 2990 - DNA, 19 bp, Homo sapiens
  siRNA target sequence for EHF (NM_012153.2,824-842).
gaacccaggattaataaaa

SEQ ID NO: 2991 - DNA, 19 bp, Homo sapiens
  siRNA target sequence for EHF (NM_012153.2,897-915).
cagctatggggtaaaaaga

SEQ ID NO: 2992 - DNA, 19 bp, Homo sapiens
  siRNA target sequence for EHF (NM_012153.2,923-941).
cagcagcatgacctatgaa

SEQ ID NO: 2993 - DNA, 19 bp, Homo sapiens
  siRNA target sequence for EHF (NM_012153.2,925-943).
gcagcatgacctatgaaaa

SEQ ID NO: 2994 - DNA, 19 bp, Homo sapiens
  siRNA target sequence for EHF (NM_012153.2,945-963).
ctcagccgagctatgagat

SEQ ID NO: 2995 - DNA, 19 bp, Homo sapiens
  siRNA target sequence for EHF (NM_012153.2,947-965).
cagccgagctatgagatat

SEQ ID NO: 2996 - DNA, 19 bp, Homo sapiens
  siRNA target sequence for EHF (NM_012153.2,949-967).
gccgagctatgagatatta

SEQ ID NO: 2997 - DNA, 19 bp, Homo sapiens
  siRNA target sequence for EHF (NM_012153.2,955-973).
ctatgagatattactacaa

SEQ ID NO: 2998 - DNA, 19 bp, Homo sapiens
  siRNA target sequence for EHF (NM_012153.2,959-977).
gagatattactacaaaaga

SEQ ID NO: 2999 - DNA, 19 bp, Homo sapiens
  siRNA target sequence for EHF (NM_012153.2,961-979).
gatattactacaaaagaga

SEQ ID NO: 3000 - DNA, 19 bp, Homo sapiens
  siRNA target sequence for EHF (NM_012153.2,999-1017).
ggacgaagactggtatata

SEQ ID NO: 3001 - DNA, 19 bp, Homo sapiens
  siRNA target sequence for EHF (NM_012153.2,1002-1020).
cgaagactggtatataaat

SEQ ID NO: 3002 - DNA, 19 bp, Homo sapiens
  siRNA target sequence for ELF1 (NM_172373.2,244-262).
caacagaacgacctagtat

SEQ ID NO: 3003 - DNA, 19 bp, Homo sapiens
  siRNA target sequence for ELF1 (NM_172373.2,252-270).
cgacctagtatttgaattt

SEQ ID NO: 3004 - DNA, 19 bp, Homo sapiens
  siRNA target sequence for ELF1 (NM_172373.2,300-318).
gcttggtgatccagctatt

SEQ ID NO: 3005 - DNA, 19 bp, Homo sapiens
  siRNA target sequence for ELF1 (NM_172373.2,326-344).
ccgtaattgtggaacatgt

SEQ ID NO: 3006 - DNA, 19 bp, Homo sapiens
  siRNA target sequence for ELF1 (NM_172373.2,327-345).
cgtaattgtggaacatgtt

SEQ ID NO: 3007 - DNA, 19 bp, Homo sapiens
  siRNA target sequence for ELF1 (NM_172373.2,346-364).
cctggtgctgatattctca

SEQ ID NO: 3008 - DNA, 19 bp, Homo sapiens
  siRNA target sequence for ELF1 (NM_172373.2,396-414).
gcccaatgacatgattact

SEQ ID NO: 3009 - DNA, 19 bp, Homo sapiens
  siRNA target sequence for ELF1 (NM_172373.2,398-416).
ccaatgacatgattactga

SEQ ID NO: 3010 - DNA, 19 bp, Homo sapiens
  siRNA target sequence for ELF1 (NM_172373.2,496-514).
catgacggggatgaaacaa

SEQ ID NO: 3011 - DNA, 19 bp, Homo sapiens
  siRNA target sequence for ELF1 (NM_172373.2,501-519).
cggggatgaaacaattgaa

SEQ ID NO: 3012 - DNA, 19 bp, Homo sapiens
  siRNA target sequence for ELF1 (NM_172373.2,533-551).
ctgaggcactcctcaatat

SEQ ID NO: 3013 - DNA, 19 bp, Homo sapiens
  siRNA target sequence for ELF1 (NM_172373.2,537-555).
ggcactcctcaatatggat

SEQ ID NO: 3014 - DNA, 19 bp, Homo sapiens
  siRNA target sequence for ELF1 (NM_172373.2,538-556).
gcactcctcaatatggatt

SEQ ID NO: 3015 - DNA, 19 bp, Homo sapiens
  siRNA target sequence for ELF1 (NM_172373.2,563-581).
gccctatgctggatgaaaa

SEQ ID NO: 3016 - DNA, 19 bp, Homo sapiens
  siRNA target sequence for ELF1 (NM_172373.2,570-588).
gctggatgaaaaacgaata

SEQ ID NO: 3017 - DNA, 19 bp, Homo sapiens
  siRNA target sequence for ELF1 (NM_172373.2,573-591).
ggatgaaaaacgaataaat

SEQ ID NO: 3018 - DNA, 19 bp, Homo sapiens
  siRNA target sequence for ELF1 (NM_172373.2,641-659).
cccatgtgtccgtcacatt

SEQ ID NO: 3019 - DNA, 19 bp, Homo sapiens
  siRNA target sequence for ELF1 (NM_172373.2,642-660).
ccatgtgtccgtcacatta

SEQ ID NO: 3020 - DNA, 19 bp, Homo sapiens
  siRNA target sequence for ELF1 (NM_172373.2,790-808).
ccagccactacgccaaata

SEQ ID NO: 3021 - DNA, 19 bp, Homo sapiens
  siRNA target sequence for ELF1 (NM_172373.2,791-809).
cagccactacgccaaatat

SEQ ID NO: 3022 - DNA, 19 bp, Homo sapiens
  siRNA target sequence for ELF1 (NM_172373.2,795-813).
cactacgccaaatatatct

SEQ ID NO: 3023 - DNA, 19 bp, Homo sapiens
  siRNA target sequence for ELF1 (NM_172373.2,797-815).
ctacgccaaatatatctgt

SEQ ID NO: 3024 - DNA, 19 bp, Homo sapiens
  siRNA target sequence for ELF1 (NM_172373.2,888-906).
caaggctacttgtcctaaa

SEQ ID NO: 3025 - DNA, 19 bp, Homo sapiens
  siRNA target sequence for ELF1 (NM_172373.2,892-910).
gctacttgtcctaaataca

SEQ ID NO: 3026 - DNA, 19 bp, Homo sapiens
  siRNA target sequence for ELF1 (NM_172373.2,893-911).
ctacttgtcctaaatacat

SEQ ID NO: 3027 - DNA, 19 bp, Homo sapiens
  siRNA target sequence for ELF1 (NM_172373.2,896-914).
cttgtcctaaatacatcaa

SEQ ID NO: 3028 - DNA, 19 bp, Homo sapiens
  siRNA target sequence for ELF1 (NM_172373.2,1028-1046).
cactcaggtactattacca

SEQ ID NO: 3029 - DNA, 19 bp, Homo sapiens
  siRNA target sequence for ELF1 (NM_172373.2,1078-1096).
cgcttggtgtatcagttta

SEQ ID NO: 3030 - DNA, 19 bp, Homo sapiens
  siRNA target sequence for ELF1 (NM_172373.2,1079-1097).
gcttggtgtatcagtttaa

SEQ ID NO: 3031 - DNA, 19 bp, Homo sapiens
  siRNA target sequence for ELF1 (NM_172373.2,1146-1164).
cagcatagagtcttcagat

SEQ ID NO: 3032 - DNA, 19 bp, Homo sapiens
  siRNA target sequence for ELF1 (NM_172373.2,1206-1224).
cagccggtcgagagtatct

SEQ ID NO: 3033 - DNA, 19 bp, Homo sapiens
  siRNA target sequence for ELF1 (NM_172373.2,1209-1227).
ccggtcgagagtatcttca

SEQ ID NO: 3034 - DNA, 19 bp, Homo sapiens
  siRNA target sequence for ELF1 (NM_172373.2,1210-1228).
cggtcgagagtatcttcaa

SEQ ID NO: 3035 - DNA, 19 bp, Homo sapiens
  siRNA target sequence for ELF1 (NM_172373.2,1212-1230).
gtcgagagtatcttcaagt

SEQ ID NO: 3036 - DNA, 19 bp, Homo sapiens
  siRNA target sequence for ELF1 (NM_172373.2,1247-1265).
gagccactacagttctaaa

SEQ ID NO: 3037 - DNA, 19 bp, Homo sapiens
  siRNA target sequence for ELF1 (NM_172373.2,1312-1330).
gcacaaccatcagaagttt

SEQ ID NO: 3038 - DNA, 19 bp, Homo sapiens
  siRNA target sequence for ELF1 (NM_172373.2,1313-1331).
cacaaccatcagaagtttt

SEQ ID NO: 3039 - DNA, 19 bp, Homo sapiens
  siRNA target sequence for ELF1 (NM_172373.2,1344-1362).
gcccacgcagtctccatat

SEQ ID NO: 3040 - DNA, 19 bp, Homo sapiens
  siRNA target sequence for ELF1 (NM_172373.2,1347-1365).
cacgcagtctccatatcct

SEQ ID NO: 3041 - DNA, 19 bp, Homo sapiens
  siRNA target sequence for ELF1 (NM_172373.2,1371-1389).
gctcttccggactgttcat

SEQ ID NO: 3042 - DNA, 19 bp, Homo sapiens
  siRNA target sequence for ELF1 (NM_172373.2,1374-1392).
cttccggactgttcatgta

SEQ ID NO: 3043 - DNA, 19 bp, Homo sapiens
  siRNA target sequence for ELF1 (NM_172373.2,1377-1395).
ccggactgttcatgtagta

SEQ ID NO: 3044 - DNA, 19 bp, Homo sapiens
  siRNA target sequence for ELF1 (NM_172373.2,1379-1397).
ggactgttcatgtagtaca

SEQ ID NO: 3045 - DNA, 19 bp, Homo sapiens
  siRNA target sequence for ELF1 (NM_172373.2,1566-1584).
gccactcacaacagttata

SEQ ID NO: 3046 - DNA, 19 bp, Homo sapiens
  siRNA target sequence for ELF1 (NM_172373.2,1701-1719).
gggctctcctccttcaatt

SEQ ID NO: 3047 - DNA, 19 bp, Homo sapiens
  siRNA target sequence for ELF1 (NM_172373.2,1703-1721).
gctctcctccttcaattgt

SEQ ID NO: 3048 - DNA, 19 bp, Homo sapiens
  siRNA target sequence for ELF1 (NM_172373.2,1743-1761).
gcaggtccttactagcaat

SEQ ID NO: 3049 - DNA, 19 bp, Homo sapiens
  siRNA target sequence for ELF1 (NM_172373.2,1746-1764).
ggtccttactagcaatgtt

SEQ ID NO: 3050 - DNA, 19 bp, Homo sapiens
  siRNA target sequence for ELF1 (NM_172373.2,2010-2028).
ggtagtgtccagttccaat

SEQ ID NO: 3051 - DNA, 19 bp, Homo sapiens
  siRNA target sequence for ELF1 (NM_172373.2,2014-2032).
gtgtccagttccaatggat

SEQ ID NO: 3052 - DNA, 19 bp, Homo sapiens
  siRNA target sequence for ELF1 (NM_172373.2,2016-2034).
gtccagttccaatggattt

SEQ ID NO: 3053 - DNA, 19 bp, Homo sapiens
  siRNA target sequence for ELF1 (NM_172373.2,2036-2054).
cttctcaggtagctatgaa

SEQ ID NO: 3054 - DNA, 19 bp, Homo sapiens
  siRNA target sequence for ELF1 (NM_172373.2,2065-2083).
ctgctggaacccaactctt

SEQ ID NO: 3055 - DNA, 19 bp, Homo sapiens
  siRNA target sequence for ELF1 (NM_172373.2,2067-2085).
gctggaacccaactctttt

SEQ ID NO: 3056 - DNA, 19 bp, Homo sapiens
  siRNA target sequence for ELF2 (NM_006874.1,211-229).
ctgtacagataagacaatt

SEQ ID NO: 3057 - DNA, 19 bp, Homo sapiens
  siRNA target sequence for ELF2 (NM_006874.1,213-231).
gtacagataagacaattga

SEQ ID NO: 3058 - DNA, 19 bp, Homo sapiens
  siRNA target sequence for ELF2 (NM_006874.1,242-260).
gccctgcttcatatggaat

SEQ ID NO: 3059 - DNA, 19 bp, Homo sapiens
  siRNA target sequence for ELF2 (NM_006874.1,305-323).
gttcctccttgtgtatcaa

SEQ ID NO: 3060 - DNA, 19 bp, Homo sapiens
  siRNA target sequence for ELF2 (NM_006874.1,352-370).
gccagatgtcattacagaa

SEQ ID NO: 3061 - DNA, 19 bp, Homo sapiens
  siRNA target sequence for ELF2 (NM_006874.1,415-433).
ctctcctattccaacatca

SEQ ID NO: 3062 - DNA, 19 bp, Homo sapiens
  siRNA target sequence for ELF2 (NM_006874.1,435-453).
cagatagccatgaaccaat

SEQ ID NO: 3063 - DNA, 19 bp, Homo sapiens
  siRNA target sequence for ELF2 (NM_006874.1,484-502).
gacccagcaatcaccaatt

SEQ ID NO: 3064 - DNA, 19 bp, Homo sapiens
  siRNA target sequence for ELF2 (NM_006874.1,490-508).
gcaatcaccaatttccaat

SEQ ID NO: 3065 - DNA, 19 bp, Homo sapiens
  siRNA target sequence for ELF2 (NM_006874.1,505-523).
caatgggtctcctgagtta

SEQ ID NO: 3066 - DNA, 19 bp, Homo sapiens
  siRNA target sequence for ELF2 (NM_006874.1,510-528).
ggtctcctgagttaggtat

SEQ ID NO: 3067 - DNA, 19 bp, Homo sapiens
  siRNA target sequence for ELF2 (NM_006874.1,511-529).
gtctcctgagttaggtata

SEQ ID NO: 3068 - DNA, 19 bp, Homo sapiens
  siRNA target sequence for ELF2 (NM_006874.1,513-531).
ctcctgagttaggtataaa

SEQ ID NO: 3069 - DNA, 19 bp, Homo sapiens
  siRNA target sequence for ELF2 (NM_006874.1,565-583).
ctatttgtgggagtttctt

SEQ ID NO: 3070 - DNA, 19 bp, Homo sapiens
  siRNA target sequence for ELF2 (NM_006874.1,571-589).
gtgggagtttcttttagat

SEQ ID NO: 3071 - DNA, 19 bp, Homo sapiens
  siRNA target sequence for ELF2 (NM_006874.1,573-591).
gggagtttcttttagatct

SEQ ID NO: 3072 - DNA, 19 bp, Homo sapiens
  siRNA target sequence for ELF2 (NM_006874.1,587-605).
gatctacttcaagataaaa

SEQ ID NO: 3073 - DNA, 19 bp, Homo sapiens
  siRNA target sequence for ELF2 (NM_006874.1,609-627).
cttgtcccaggtatattaa

SEQ ID NO: 3074 - DNA, 19 bp, Homo sapiens
  siRNA target sequence for ELF2 (NM_006874.1,730-748).
catgggacgagctttgaga

SEQ ID NO: 3075 - DNA, 19 bp, Homo sapiens
  siRNA target sequence for ELF2 (NM_006874.1,734-752).
ggacgagctttgagatact

SEQ ID NO: 3076 - DNA, 19 bp, Homo sapiens
  siRNA target sequence for ELF2 (NM_006874.1,735-753).
gacgagctttgagatacta

SEQ ID NO: 3077 - DNA, 19 bp, Homo sapiens
  siRNA target sequence for ELF2 (NM_006874.1,786-804).
gacagaggcttgtatatca

SEQ ID NO: 3078 - DNA, 19 bp, Homo sapiens
  siRNA target sequence for ELF2 (NM_006874.1,792-810).
ggcttgtatatcagttcaa

SEQ ID NO: 3079 - DNA, 19 bp, Homo sapiens
  siRNA target sequence for ELF2 (NM_006874.1,797-815).
gtatatcagttcaaggata

SEQ ID NO: 3080 - DNA, 19 bp, Homo sapiens
  siRNA target sequence for ELF2 (NM_006874.1,811-829).
ggatatgccgaaaaacata

SEQ ID NO: 3081 - DNA, 19 bp, Homo sapiens
  siRNA target sequence for ELF2 (NM_006874.1,826-844).
catagtggtcatagatgat

SEQ ID NO: 3082 - DNA, 19 bp, Homo sapiens
  siRNA target sequence for ELF2 (NM_006874.1,878-896).
ggaactactgatgaaaaat

SEQ ID NO: 3083 - DNA, 19 bp, Homo sapiens
  siRNA target sequence for ELF2 (NM_006874.1,997-1015).
gaagggtgtagctagagtt

SEQ ID NO: 3084 - DNA, 19 bp, Homo sapiens
  siRNA target sequence for ELF3 (NM_004433.3,3193-3211).
ggctgcaacctgtgagatt

SEQ ID NO: 3085 - DNA, 19 bp, Homo sapiens
  siRNA target sequence for ELF3 (NM_004433.3,3197-3215).
gcaacctgtgagattagca

SEQ ID NO: 3086 - DNA, 19 bp, Homo sapiens
  siRNA target sequence for ELF3 (NM_004433.3,3198-3216).
caacctgtgagattagcaa

SEQ ID NO: 3087 - DNA, 19 bp, Homo sapiens
  siRNA target sequence for ELF3 (NM_004433.3,4083-4101).
ggcatgaaggcgtcttcaa

SEQ ID NO: 3088 - DNA, 19 bp, Homo sapiens
  siRNA target sequence for ELF3 (NM_004433.3,4085-4103).
catgaaggcgtcttcaagt

SEQ ID NO: 3089 - DNA, 19 bp, Homo sapiens
  siRNA target sequence for ELF3 (NM_004433.3,4127-4145).
caactatggggccaaaaga

SEQ ID NO: 3090 - DNA, 19 bp, Homo sapiens
  siRNA target sequence for ELF3 (NM_004433.3,4185-4203).
ccatgaggtactactacaa

SEQ ID NO: 3091 - DNA, 19 bp, Homo sapiens
  siRNA target sequence for ELF3 (NM_004433.3,4233-4251).
ggcgactcgtctacaagtt

SEQ ID NO: 3092 - DNA, 19 bp, Homo sapiens
  siRNA target sequence for ELF3 (NM_004433.3,4234-4252).
gcgactcgtctacaagttt

SEQ ID NO: 3093 - DNA, 19 bp, Homo sapiens
  siRNA target sequence for ELF4 (NM_001421.1,499-517).
ggtaccctaccctgattta

SEQ ID NO: 3094 - DNA, 19 bp, Homo sapiens
  siRNA target sequence for ELF4 (NM_001421.1,541-559).
gttggacgacgttcacaat

SEQ ID NO: 3095 - DNA, 19 bp, Homo sapiens
  siRNA target sequence for ELF4 (NM_001421.1,658-676).
gtcaaccgcggaagtctta

SEQ ID NO: 3096 - DNA, 19 bp, Homo sapiens
  siRNA target sequence for ELF4 (NM_001421.1,660-678).
caaccgcggaagtcttact

SEQ ID NO: 3097 - DNA, 19 bp, Homo sapiens
  siRNA target sequence for ELF4 (NM_001421.1,663-681).
ccgcggaagtcttactcaa

SEQ ID NO: 3098 - DNA, 19 bp, Homo sapiens
  siRNA target sequence for ELF4 (NM_001421.1,664-682).
cgcggaagtcttactcaat

SEQ ID NO: 3099 - DNA, 19 bp, Homo sapiens
  siRNA target sequence for ELF4 (NM_001421.1,665-683).
gcggaagtcttactcaata

SEQ ID NO: 3100 - DNA, 19 bp, Homo sapiens
  siRNA target sequence for ELF4 (NM_001421.1,666-684).
cggaagtcttactcaatat

SEQ ID NO: 3101 - DNA, 19 bp, Homo sapiens
  siRNA target sequence for ELF4 (NM_001421.1,724-742).
cagtacctccgaaatgctt

SEQ ID NO: 3102 - DNA, 19 bp, Homo sapiens
  siRNA target sequence for ELF4 (NM_001421.1,959-977).
cccagcatccccattagga

SEQ ID NO: 3103 - DNA, 19 bp, Homo sapiens
  siRNA target sequence for ELF4 (NM_001421.1,960-978).
ccagcatccccattaggaa

SEQ ID NO: 3104 - DNA, 19 bp, Homo sapiens
  siRNA target sequence for ELF4 (NM_001421.1,964-982).
catccccattaggaagaaa

SEQ ID NO: 3105 - DNA, 19 bp, Homo sapiens
  siRNA target sequence for ELF4 (NM_001421.1,968-986).
cccattaggaagaaatcaa

SEQ ID NO: 3106 - DNA, 19 bp, Homo sapiens
  siRNA target sequence for ELF4 (NM_001421.1,998-1016).
ggcagcaccatctatctgt

SEQ ID NO: 3107 - DNA, 19 bp, Homo sapiens
  siRNA target sequence for ELF4 (NM_001421.1,1053-1071).
cctgtcccaagtacatcaa

SEQ ID NO: 3108 - DNA, 19 bp, Homo sapiens
  siRNA target sequence for ELF4 (NM_001421.1,1182-1200).
gggcactaagatactacta

SEQ ID NO: 3109 - DNA, 19 bp, Homo sapiens
  siRNA target sequence for ELF4 (NM_001421.1,1673-1691).
gggcctcctgccagtacta

SEQ ID NO: 3110 - DNA, 19 bp, Homo sapiens
  siRNA target sequence for ELF4 (NM_001421.1,1721-1739).
gttccagcggcctctactt

SEQ ID NO: 3111 - DNA, 19 bp, Homo sapiens
  siRNA target sequence for ELF4 (NM_001421.1,1814-1832).
ggggctccactgattctca

SEQ ID NO: 3112 - DNA, 19 bp, Homo sapiens
  siRNA target sequence for ELF4 (NM_001421.1,1927-1945).
gccccctgggactgtcatt

SEQ ID NO: 3113 - DNA, 19 bp, Homo sapiens
  siRNA target sequence for ELF4 (NM_001421.1,2005-2023).
gaggtcctcctcctatgtt

SEQ ID NO: 3114 - DNA, 19 bp, Homo sapiens
  siRNA target sequence for ELF4 (NM_001421.1,2007-2025).
ggtcctcctcctatgttca

SEQ ID NO: 3115 - DNA, 19 bp, Homo sapiens
  siRNA target sequence for ELF4 (NM_001421.1,2285-2303).
gggagccttctgacaagat

SEQ ID NO: 3116 - DNA, 19 bp, Homo sapiens
  siRNA target sequence for ELF4 (NM_001421.1,2337-2355).
ctacttccctcattaagat

SEQ ID NO: 3117 - DNA, 19 bp, Homo sapiens
  siRNA target sequence for ELF4 (NM_001421.1,2353-2371).
gatggagccccatgacata

SEQ ID NO: 3118 - DNA, 19 bp, Homo sapiens
  siRNA target sequence for ELF5 (NM_001422.2,251-269).
catcagtccaccctgaata

SEQ ID NO: 3119 - DNA, 19 bp, Homo sapiens
  siRNA target sequence for ELF5 (NM_001422.2,308-326).
gctgcgaccagtacaagtt

SEQ ID NO: 3120 - DNA, 19 bp, Homo sapiens
  siRNA target sequence for ELF5 (NM_001422.2,422-440).
gcggcgagtacctgtactt

SEQ ID NO: 3121 - DNA, 19 bp, Homo sapiens
  siRNA target sequence for ELF5 (NM_001422.2,425-443).
gcgagtacctgtacttcat

SEQ ID NO: 3122 - DNA, 19 bp, Homo sapiens
  siRNA target sequence for ELF5 (NM_001422.2,463-481).
caaggttactcctttttta

SEQ ID NO: 3123 - DNA, 19 bp, Homo sapiens
  siRNA target sequence for ELF5 (NM_001422.2,501-519).
ggccaccatcaaagactat

SEQ ID NO: 3124 - DNA, 19 bp, Homo sapiens
  siRNA target sequence for ELF5 (NM_001422.2,523-541).
gattccaactgcttgaaaa

SEQ ID NO: 3125 - DNA, 19 bp, Homo sapiens
  siRNA target sequence for ELF5 (NM_001422.2,562-580).
gactgtcacagtcatagta

SEQ ID NO: 3126 - DNA, 19 bp, Homo sapiens
  siRNA target sequence for ELF5 (NM_001422.2,568-586).
cacagtcatagtagaacaa

SEQ ID NO: 3127 - DNA, 19 bp, Homo sapiens
  siRNA target sequence for ELF5 (NM_001422.2,599-617).
ctcatctatgggaatttgt

SEQ ID NO: 3128 - DNA, 19 bp, Homo sapiens
  siRNA target sequence for ELF5 (NM_001422.2,616-634).
gtacgagacctgcttctat

SEQ ID NO: 3129 - DNA, 19 bp, Homo sapiens
  siRNA target sequence for ELF5 (NM_001422.2,670-688).
gatagggaacaaggaattt

SEQ ID NO: 3130 - DNA, 19 bp, Homo sapiens
  siRNA target sequence for ELF5 (NM_001422.2,683-701).
gaatttttcgggtggttaa

SEQ ID NO: 3131 - DNA, 19 bp, Homo sapiens
  siRNA target sequence for ELF5 (NM_001422.2,749-767).
gaatgacatatgaaaagtt

SEQ ID NO: 3132 - DNA, 19 bp, Homo sapiens
  siRNA target sequence for ELF5 (NM_001422.2,775-793).
gccctgagatactactata

SEQ ID NO: 3133 - DNA, 19 bp, Homo sapiens
  siRNA target sequence for ELF5 (NM_001422.2,780-798).
gagatactactataaaaca

SEQ ID NO: 3134 - DNA, 19 bp, Homo sapiens
  siRNA target sequence for ELF5 (NM_001422.2,810-828).
gcgggttgaccgaaggtta

SEQ ID NO: 3135 - DNA, 19 bp, Homo sapiens
  siRNA target sequence for ELF5 (NM_001422.2,814-832).
gttgaccgaaggttagtgt

SEQ ID NO: 3136 - DNA, 19 bp, Homo sapiens
  siRNA target sequence for ELF5 (NM_001422.2,819-837).
ccgaaggttagtgtacaaa

SEQ ID NO: 3137 - DNA, 19 bp, Homo sapiens
  siRNA target sequence for ELF5 (NM_001422.2,820-838).
cgaaggttagtgtacaaat

SEQ ID NO: 3138 - DNA, 19 bp, Homo sapiens
  siRNA target sequence for ELF5 (NM_001422.2,821-839).
gaaggttagtgtacaaatt

SEQ ID NO: 3139 - DNA, 19 bp, Homo sapiens
  siRNA target sequence for ELF5 (NM_198381.1,246-264).
cactcccacagggtaatgt

SEQ ID NO: 3140 - DNA, 19 bp, Homo sapiens
  siRNA target sequence for ELK1 (NM_005229.2,316-334).
cacgggatggtggtgaatt

SEQ ID NO: 3141 - DNA, 19 bp, Homo sapiens
  siRNA target sequence for ELK1 (NM_005229.2,318-336).
cgggatggtggtgaattca

SEQ ID NO: 3142 - DNA, 19 bp, Homo sapiens
  siRNA target sequence for ELK1 (NM_005229.2,421-439).
ccttgcggtactactatga

SEQ ID NO: 3143 - DNA, 19 bp, Homo sapiens
  siRNA target sequence for ELK1 (NM_005229.2,466-484).
gccagaagttcgtctacaa

SEQ ID NO: 3144 - DNA, 19 bp, Homo sapiens
  siRNA target sequence for ELK1 (NM_005229.2,575-593).
ggcccctgctgctatacat

SEQ ID NO: 3145 - DNA, 19 bp, Homo sapiens
  siRNA target sequence for ELK3 (NM_005230.1,359-377).
cctcgaacgatggtgaatt

SEQ ID NO: 3146 - DNA, 19 bp, Homo sapiens
  siRNA target sequence for ELK3 (NM_005230.1,362-380).
cgaacgatggtgaattcaa

SEQ ID NO: 3147 - DNA, 19 bp, Homo sapiens
  siRNA target sequence for ELK3 (NM_005230.1,409-427).
ctgtggggactccgaaaaa

SEQ ID NO: 3148 - DNA, 19 bp, Homo sapiens
  siRNA target sequence for ELK3 (NM_005230.1,501-519).
ggtgatcgggcagaagttt

SEQ ID NO: 3149 - DNA, 19 bp, Homo sapiens
  siRNA target sequence for ELK3 (NM_005230.1,671-689).
gcacgagccgcaacgaata

SEQ ID NO: 3150 - DNA, 19 bp, Homo sapiens
  siRNA target sequence for ELK3 (NM_005230.1,674-692).
cgagccgcaacgaatacat

SEQ ID NO: 3151 - DNA, 19 bp, Homo sapiens
  siRNA target sequence for ELK3 (NM_005230.1,708-726).
ctcgtccttcaccattaat

SEQ ID NO: 3152 - DNA, 19 bp, Homo sapiens
  siRNA target sequence for ELK3 (NM_005230.1,960-978).
gccaaacgctgccagtatt

SEQ ID NO: 3153 - DNA, 19 bp, Homo sapiens
  siRNA target sequence for ELK3 (NM_005230.1,1275-1293).
cgcacagacaccaaatgga

SEQ ID NO: 3154 - DNA, 19 bp, Homo sapiens
  siRNA target sequence for ELK3 (NM_005230.1,1277-1295).
cacagacaccaaatggatt

SEQ ID NO: 3155 - DNA, 19 bp, Homo sapiens
  siRNA target sequence for ELK3 (NM_005230.1,1281-1299).
gacaccaaatggattgctt

SEQ ID NO: 3156 - DNA, 19 bp, Homo sapiens
  siRNA target sequence for ELK4 (NM_001973.1,218-236).
gatctgttggacctctaat

SEQ ID NO: 3157 - DNA, 19 bp, Homo sapiens
  siRNA target sequence for ELK4 (NM_001973.1,221-239).
ctgttggacctctaatgat

SEQ ID NO: 3158 - DNA, 19 bp, Homo sapiens
  siRNA target sequence for ELK4 (NM_001973.1,553-571).
cctctagccgcaatgacta

SEQ ID NO: 3159 - DNA, 19 bp, Homo sapiens
  siRNA target sequence for ELK4 (NM_001973.1,556-574).
ctagccgcaatgactacat

SEQ ID NO: 3160 - DNA, 19 bp, Homo sapiens
  siRNA target sequence for ELK4 (NM_001973.1,559-577).
gccgcaatgactacataca

SEQ ID NO: 3161 - DNA, 19 bp, Homo sapiens
  siRNA target sequence for ELK4 (NM_001973.1,561-579).
cgcaatgactacatacact

SEQ ID NO: 3162 - DNA, 19 bp, Homo sapiens
  siRNA target sequence for ELK4 (NM_001973.1,723-741).
gtcacgacaccttccaaaa

SEQ ID NO: 3163 - DNA, 19 bp, Homo sapiens
  siRNA target sequence for ELK4 (NM_001973.1,980-998).
catcgacacagacattgat

SEQ ID NO: 3164 - DNA, 19 bp, Homo sapiens
  siRNA target sequence for ELK4 (NM_001973.1,1048-1066).
ctaaagaccaggattcagt

SEQ ID NO: 3165 - DNA, 19 bp, Homo sapiens
  siRNA target sequence for ELK4 (NM_001973.1,1070-1088).
gctagaaaaggacaaagta

SEQ ID NO: 3166 - DNA, 19 bp, Homo sapiens
  siRNA target sequence for ELK4 (NM_001973.1,1191-1209).
ctccctacagcttctctta

SEQ ID NO: 3167 - DNA, 19 bp, Homo sapiens
  siRNA target sequence for ELK4 (NM_021795.1,1234-1252).
cttgctcgctctttatggt

SEQ ID NO: 3168 - DNA, 19 bp, Homo sapiens
  siRNA target sequence for ELK4 (NM_021795.1,1255-1273).
caccattgctttcatttat

SEQ ID NO: 3169 - DNA, 19 bp, Homo sapiens
  siRNA target sequence for ELK4 (NM_021795.1,1276-1294).
gcccttttaagcaaatcca

SEQ ID NO: 3170 - DNA, 19 bp, Homo sapiens
  siRNA target sequence for ELK4 (NM_021795.1,1315-1333).
gctttctgttacttaggtt

SEQ ID NO: 3171 - DNA, 19 bp, Homo sapiens
  siRNA target sequence for ELK4 (NM_021795.1,1316-1334).
ctttctgttacttaggttt

SEQ ID NO: 3172 - DNA, 19 bp, Homo sapiens
  siRNA target sequence for EMX2 (NM_004098.2,1402-1420).
cacggaaactcaggtaaaa

SEQ ID NO: 3173 - DNA, 19 bp, Homo sapiens
  siRNA target sequence for EMX2 (NM_004098.2,1404-1422).
cggaaactcaggtaaaagt

SEQ ID NO: 3174 - DNA, 19 bp, Homo sapiens
  siRNA target sequence for EMX2 (NM_004098.2,1405-1423).
ggaaactcaggtaaaagta

SEQ ID NO: 3175 - DNA, 19 bp, Homo sapiens
  siRNA target sequence for EMX2 (NM_004098.2,1475-1493).
ggctcagattcgcaacaaa

SEQ ID NO: 3176 - DNA, 19 bp, Homo sapiens
  siRNA target sequence for EMX2 (NM_004098.2,1476-1494).
gctcagattcgcaacaaaa

SEQ ID NO: 3177 - DNA, 19 bp, Homo sapiens
  siRNA target sequence for EMX2 (NM_004098.2,1543-1561).
ggcgagtccggaggaaata

SEQ ID NO: 3178 - DNA, 19 bp, Homo sapiens
  siRNA target sequence for EMX2 (NM_004098.2,1545-1563).
cgagtccggaggaaataga

SEQ ID NO: 3179 - DNA, 19 bp, Homo sapiens
  siRNA target sequence for EMX2 (NM_004098.2,1562-1580).
gacgtgacctcagatgatt

SEQ ID NO: 3180 - DNA, 19 bp, Homo sapiens
  siRNA target sequence for EN1 (NM_001426.2,1025-1043).
cagcagccggaacctaaaa

SEQ ID NO: 3181 - DNA, 19 bp, Homo sapiens
  siRNA target sequence for EN1 (NM_001426.2,1027-1045).
gcagccggaacctaaaagt

SEQ ID NO: 3182 - DNA, 19 bp, Homo sapiens
  siRNA target sequence for EN1 (NM_001426.2,1352-1370).
ccggacttcggctgcaaaa

SEQ ID NO: 3183 - DNA, 19 bp, Homo sapiens
  siRNA target sequence for EN1 (NM_001426.2,1721-1739).
ggagcgcagggcaccaaat

SEQ ID NO: 3184 - DNA, 19 bp, Homo sapiens
  siRNA target sequence for EN1 (NM_001426.2,1722-1740).
gagcgcagggcaccaaata

SEQ ID NO: 3185 - DNA, 19 bp, Homo sapiens
  siRNA target sequence for EN1 (NM_001426.2,1750-1768).
cggcaacccggctatccta

SEQ ID NO: 3186 - DNA, 19 bp, Homo sapiens
  siRNA target sequence for EN1 (NM_001426.2,1840-1858).
ggtgtactgcacacgttat

SEQ ID NO: 3187 - DNA, 19 bp, Homo sapiens
  siRNA target sequence for EN1 (NM_001426.2,1841-1859).
gtgtactgcacacgttatt

SEQ ID NO: 3188 - DNA, 19 bp, Homo sapiens
  siRNA target sequence for EN2 (NM_001427.2,2356-2374).
cccaggtctcgaaaaccaa

SEQ ID NO: 3189 - DNA, 19 bp, Homo sapiens
  siRNA target sequence for EN2 (NM_001427.2,2357-2375).
ccaggtctcgaaaaccaaa

SEQ ID NO: 3190 - DNA, 19 bp, Homo sapiens
  siRNA target sequence for EN2 (NM_001427.2,2360-2378).
ggtctcgaaaaccaaagaa

SEQ ID NO: 3191 - DNA, 19 bp, Homo sapiens
  siRNA target sequence for EOMES (NM_005442.2,128-146).
ctcagaagttggacttaga

SEQ ID NO: 3192 - DNA, 19 bp, Homo sapiens
  siRNA target sequence for EOMES (NM_005442.2,820-838).
cggcctctgtggctcaaat

SEQ ID NO: 3193 - DNA, 19 bp, Homo sapiens
  siRNA target sequence for EOMES (NM_005442.2,821-839).
ggcctctgtggctcaaatt

SEQ ID NO: 3194 - DNA, 19 bp, Homo sapiens
  siRNA target sequence for EOMES (NM_005442.2,892-910).
cctttcttgagcttcaaca

SEQ ID NO: 3195 - DNA, 19 bp, Homo sapiens
  siRNA target sequence for EOMES (NM_005442.2,893-911).
ctttcttgagcttcaacat

SEQ ID NO: 3196 - DNA, 19 bp, Homo sapiens
  siRNA target sequence for EOMES (NM_005442.2,926-944).
ccactgcccactacaatgt

SEQ ID NO: 3197 - DNA, 19 bp, Homo sapiens
  siRNA target sequence for EOMES (NM_005442.2,929-947).
ctgcccactacaatgtgtt

SEQ ID NO: 3198 - DNA, 19 bp, Homo sapiens
  siRNA target sequence for EOMES (NM_005442.2,1012-1030).
ggcaaagccgacaataaca

SEQ ID NO: 3199 - DNA, 19 bp, Homo sapiens
  siRNA target sequence for EOMES (NM_005442.2,1013-1031).
gcaaagccgacaataacat

SEQ ID NO: 3200 - DNA, 19 bp, Homo sapiens
  siRNA target sequence for EOMES (NM_005442.2,1098-1116).
gatttcattcgggaaatta

SEQ ID NO: 3201 - DNA, 19 bp, Homo sapiens
  siRNA target sequence for EOMES (NM_005442.2,1154-1172).
cccagatgatagtcttaca

SEQ ID NO: 3202 - DNA, 19 bp, Homo sapiens
  siRNA target sequence for EOMES (NM_005442.2,1155-1173).
ccagatgatagtcttacaa

SEQ ID NO: 3203 - DNA, 19 bp, Homo sapiens
  siRNA target sequence for EOMES (NM_005442.2,1156-1174).
cagatgatagtcttacaat

SEQ ID NO: 3204 - DNA, 19 bp, Homo sapiens
  siRNA target sequence for EOMES (NM_005442.2,1161-1179).
gatagtcttacaatcctta

SEQ ID NO: 3205 - DNA, 19 bp, Homo sapiens
  siRNA target sequence for EOMES (NM_005442.2,1194-1212).
ccgactgcatattgttgaa

SEQ ID NO: 3206 - DNA, 19 bp, Homo sapiens
  siRNA target sequence for EOMES (NM_005442.2,1198-1216).
ctgcatattgttgaagtta

SEQ ID NO: 3207 - DNA, 19 bp, Homo sapiens
  siRNA target sequence for EOMES (NM_005442.2,1226-1244).
gcgtggaggacttgaatga

SEQ ID NO: 3208 - DNA, 19 bp, Homo sapiens
  siRNA target sequence for EOMES (NM_005442.2,1272-1290).
ctcagaaacgcaattcatt

SEQ ID NO: 3209 - DNA, 19 bp, Homo sapiens
  siRNA target sequence for EOMES (NM_005442.2,1294-1312).
gtgactgcctaccaaaaca

SEQ ID NO: 3210 - DNA, 19 bp, Homo sapiens
  siRNA target sequence for EOMES (NM_005442.2,1305-1323).
ccaaaacaccgatattact

SEQ ID NO: 3211 - DNA, 19 bp, Homo sapiens
  siRNA target sequence for EOMES (NM_005442.2,1313-1331).
ccgatattactcaactaaa

SEQ ID NO: 3212 - DNA, 19 bp, Homo sapiens
  siRNA target sequence for EOMES (NM_005442.2,1315-1333).
gatattactcaactaaaga

SEQ ID NO: 3213 - DNA, 19 bp, Homo sapiens
  siRNA target sequence for EOMES (NM_005442.2,1324-1342).
caactaaagattgatcata

SEQ ID NO: 3214 - DNA, 19 bp, Homo sapiens
  siRNA target sequence for EOMES (NM_005442.2,1362-1380).
cagagacaactatgattca

SEQ ID NO: 3215 - DNA, 19 bp, Homo sapiens
  siRNA target sequence for EOMES (NM_005442.2,1402-1420).
ggtcggtacggcgttcaat

SEQ ID NO: 3216 - DNA, 19 bp, Homo sapiens
  siRNA target sequence for EOMES (NM_005442.2,1406-1424).
ggtacggcgttcaatcctt

SEQ ID NO: 3217 - DNA, 19 bp, Homo sapiens
  siRNA target sequence for EOMES (NM_005442.2,1432-1450).
gagccctttgtcaacactt

SEQ ID NO: 3218 - DNA, 19 bp, Homo sapiens
  siRNA target sequence for EOMES (NM_005442.2,1437-1455).
ctttgtcaacactttacct

SEQ ID NO: 3219 - DNA, 19 bp, Homo sapiens
  siRNA target sequence for EOMES (NM_005442.2,1453-1471).
cctcaagcccgctattata

SEQ ID NO: 3220 - DNA, 19 bp, Homo sapiens
  siRNA target sequence for EOMES (NM_005442.2,1454-1472).
ctcaagcccgctattataa

SEQ ID NO: 3221 - DNA, 19 bp, Homo sapiens
  siRNA target sequence for EOMES (NM_005442.2,1572-1590).
gcaacctgggaccaacaaa

SEQ ID NO: 3222 - DNA, 19 bp, Homo sapiens
  siRNA target sequence for EOMES (NM_005442.2,1596-1614).
catcagttcctatgaatct

SEQ ID NO: 3223 - DNA, 19 bp, Homo sapiens
  siRNA target sequence for EOMES (NM_005442.2,1636-1654).
ctcccatatggcattaaat

SEQ ID NO: 3224 - DNA, 19 bp, Homo sapiens
  siRNA target sequence for EOMES (NM_005442.2,1639-1657).
ccatatggcattaaatcct

SEQ ID NO: 3225 - DNA, 19 bp, Homo sapiens
  siRNA target sequence for EOMES (NM_005442.2,1673-1691).
cccatgccctggggtatta

SEQ ID NO: 3226 - DNA, 19 bp, Homo sapiens
  siRNA target sequence for EOMES (NM_005442.2,1724-1742).
ggggaggtcgaggttctta

SEQ ID NO: 3227 - DNA, 19 bp, Homo sapiens
  siRNA target sequence for EOMES (NM_005442.2,1866-1884).
cccttccatcaaatctcta

SEQ ID NO: 3228 - DNA, 19 bp, Homo sapiens
  siRNA target sequence for EOMES (NM_005442.2,1889-1907).
ccaatgattcaggagtata

SEQ ID NO: 3229 - DNA, 19 bp, Homo sapiens
  siRNA target sequence for EOMES (NM_005442.2,1940-1958).
ctagcaactccagtaatga

SEQ ID NO: 3230 - DNA, 19 bp, Homo sapiens
  siRNA target sequence for EOMES (NM_005442.2,1957-1975).
gaaaattcaccctccataa

SEQ ID NO: 3231 - DNA, 19 bp, Homo sapiens
  siRNA target sequence for EOMES (NM_005442.2,1996-2014).
gaagagtatagtaaagaca

SEQ ID NO: 3232 - DNA, 19 bp, Homo sapiens
  siRNA target sequence for EOMES (NM_005442.2,2025-2043).
catgggagggtattatgct

SEQ ID NO: 3233 - DNA, 19 bp, Homo sapiens
  siRNA target sequence for EOMES (NM_005442.2,2028-2046).
gggagggtattatgctttt

SEQ ID NO: 3234 - DNA, 19 bp, Homo sapiens
  siRNA target sequence for EOMES (NM_005442.2,2029-2047).
ggagggtattatgcttttt

SEQ ID NO: 3235 - DNA, 19 bp, Homo sapiens
  siRNA target sequence for EP300 (NM_001429.1,1236-1254).
gccaagcggcctaaactct

SEQ ID NO: 3236 - DNA, 19 bp, Homo sapiens
  siRNA target sequence for EP300 (NM_001429.1,1279-1297).
ccagcgatggcacagattt

SEQ ID NO: 3237 - DNA, 19 bp, Homo sapiens
  siRNA target sequence for EP300 (NM_001429.1,1280-1298).
cagcgatggcacagatttt

SEQ ID NO: 3238 - DNA, 19 bp, Homo sapiens
  siRNA target sequence for EP300 (NM_001429.1,1319-1337).
gcacgacttaccagatgaa

SEQ ID NO: 3239 - DNA, 19 bp, Homo sapiens
  siRNA target sequence for EP300 (NM_001429.1,1320-1338).
cacgacttaccagatgaat

SEQ ID NO: 3240 - DNA, 19 bp, Homo sapiens
  siRNA target sequence for EP300 (NM_001429.1,1329-1347).
ccagatgaattaatcaact

SEQ ID NO: 3241 - DNA, 19 bp, Homo sapiens
  siRNA target sequence for EP300 (NM_001429.1,1332-1350).
gatgaattaatcaactcta

SEQ ID NO: 3242 - DNA, 19 bp, Homo sapiens
  siRNA target sequence for EP300 (NM_001429.1,1399-1417).
gtcttggcatggtacaaga

SEQ ID NO: 3243 - DNA, 19 bp, Homo sapiens
  siRNA target sequence for EP300 (NM_001429.1,1431-1449).
cataaacagctgtcagaat

SEQ ID NO: 3244 - DNA, 19 bp, Homo sapiens
  siRNA target sequence for EP300 (NM_001429.1,1531-1549).
gcagtcctggattaggttt

SEQ ID NO: 3245 - DNA, 19 bp, Homo sapiens
  siRNA target sequence for EP300 (NM_001429.1,1534-1552).
gtcctggattaggtttgat

SEQ ID NO: 3246 - DNA, 19 bp, Homo sapiens
  siRNA target sequence for EP300 (NM_001429.1,1536-1554).
cctggattaggtttgataa

SEQ ID NO: 3247 - DNA, 19 bp, Homo sapiens
  siRNA target sequence for EP300 (NM_001429.1,1539-1557).
ggattaggtttgataaata

SEQ ID NO: 3248 - DNA, 19 bp, Homo sapiens
  siRNA target sequence for EP300 (NM_001429.1,1562-1580).
ggtcaaaagcccaatgaca

SEQ ID NO: 3249 - DNA, 19 bp, Homo sapiens
  siRNA target sequence for EP300 (NM_001429.1,1615-1633).
gcactagtggaccaaatca

SEQ ID NO: 3250 - DNA, 19 bp, Homo sapiens
  siRNA target sequence for EP300 (NM_001429.1,1642-1660).
cgcagtcaacaggtatgat

SEQ ID NO: 3251 - DNA, 19 bp, Homo sapiens
  siRNA target sequence for EP300 (NM_001429.1,1741-1759).
gcaatggacaagggataat

SEQ ID NO: 3252 - DNA, 19 bp, Homo sapiens
  siRNA target sequence for EP300 (NM_001429.1,1772-1790).
catgaacggttcaattgga

SEQ ID NO: 3253 - DNA, 19 bp, Homo sapiens
  siRNA target sequence for EP300 (NM_001429.1,1837-1855).
gaagtgctggcaacttact

SEQ ID NO: 3254 - DNA, 19 bp, Homo sapiens
  siRNA target sequence for EP300 (NM_001429.1,1940-1958).
gaacaaccccaatccttat

SEQ ID NO: 3255 - DNA, 19 bp, Homo sapiens
  siRNA target sequence for EP300 (NM_001429.1,1943-1961).
caaccccaatccttatggt

SEQ ID NO: 3256 - DNA, 19 bp, Homo sapiens
  siRNA target sequence for EP300 (NM_001429.1,2005-2023).
gccttggtctccagattca

SEQ ID NO: 3257 - DNA, 19 bp, Homo sapiens
  siRNA target sequence for EP300 (NM_001429.1,2022-2040).
cagacaaaaactgtactat

SEQ ID NO: 3258 - DNA, 19 bp, Homo sapiens
  siRNA target sequence for EP300 (NM_001429.1,2026-2044).
caaaaactgtactatcaaa

SEQ ID NO: 3259 - DNA, 19 bp, Homo sapiens
  siRNA target sequence for EP300 (NM_001429.1,2055-2073).
ccatttgctatggacaaaa

SEQ ID NO: 3260 - DNA, 19 bp, Homo sapiens
  siRNA target sequence for EP300 (NM_001429.1,2298-2316).
ccccactgtcgcacaatga

SEQ ID NO: 3261 - DNA, 19 bp, Homo sapiens
  siRNA target sequence for EP300 (NM_001429.1,2305-2323).
gtcgcacaatgaagaatgt

SEQ ID NO: 3262 - DNA, 19 bp, Homo sapiens
  siRNA target sequence for EP300 (NM_001429.1,2408-2426).
gaagaattgtacaagacat

SEQ ID NO: 3263 - DNA, 19 bp, Homo sapiens
  siRNA target sequence for EP300 (NM_001429.1,2461-2479).
gtgataagagaaatcaaca

SEQ ID NO: 3264 - DNA, 19 bp, Homo sapiens
  siRNA target sequence for EP300 (NM_001429.1,2502-2520).
gttggacttggaaatccta

SEQ ID NO: 3265 - DNA, 19 bp, Homo sapiens
  siRNA target sequence for EP300 (NM_001429.1,2550-2568).
cccaacctaagcactgtta

SEQ ID NO: 3266 - DNA, 19 bp, Homo sapiens
  siRNA target sequence for EP300 (NM_001429.1,2552-2570).
caacctaagcactgttagt

SEQ ID NO: 3267 - DNA, 19 bp, Homo sapiens
  siRNA target sequence for EP300 (NM_001429.1,2561-2579).
cactgttagtcagattgat

SEQ ID NO: 3268 - DNA, 19 bp, Homo sapiens
  siRNA target sequence for EP300 (NM_001429.1,2613-2631).
ggactaccctatcaagtaa

SEQ ID NO: 3269 - DNA, 19 bp, Homo sapiens
  siRNA target sequence for EP300 (NM_001429.1,2614-2632).
gactaccctatcaagtaaa

SEQ ID NO: 3270 - DNA, 19 bp, Homo sapiens
  siRNA target sequence for EP300 (NM_001429.1,2619-2637).
ccctatcaagtaaatcaga

SEQ ID NO: 3271 - DNA, 19 bp, Homo sapiens
  siRNA target sequence for EP300 (NM_001429.1,2731-2749).
ctagtcctatgggagtaaa

SEQ ID NO: 3272 - DNA, 19 bp, Homo sapiens
  siRNA target sequence for EP300 (NM_001429.1,2770-2788).
cgccgagtcttctttctga

SEQ ID NO: 3273 - DNA, 19 bp, Homo sapiens
  siRNA target sequence for EP300 (NM_001429.1,2778-2796).
cttctttctgactcaatgt

SEQ ID NO: 3274 - DNA, 19 bp, Homo sapiens
  siRNA target sequence for EP300 (NM_001429.1,2795-2813).
gttgcattcagccataaat

SEQ ID NO: 3275 - DNA, 19 bp, Homo sapiens
  siRNA target sequence for EP300 (NM_001429.1,2907-2925).
cagtggcacgaagatatta

SEQ ID NO: 3276 - DNA, 19 bp, Homo sapiens
  siRNA target sequence for EP300 (NM_001429.1,2909-2927).
gtggcacgaagatattact

SEQ ID NO: 3277 - DNA, 19 bp, Homo sapiens
  siRNA target sequence for EP300 (NM_001429.1,2911-2929).
ggcacgaagatattactca

SEQ ID NO: 3278 - DNA, 19 bp, Homo sapiens
  siRNA target sequence for EP300 (NM_001429.1,2960-2978).
cgtccaagccatatttcct

SEQ ID NO: 3279 - DNA, 19 bp, Homo sapiens
  siRNA target sequence for EP300 (NM_001429.1,2961-2979).
gtccaagccatatttccta

SEQ ID NO: 3280 - DNA, 19 bp, Homo sapiens
  siRNA target sequence for EP300 (NM_001429.1,2981-2999).
gccggatcctgctgcttta

SEQ ID NO: 3281 - DNA, 19 bp, Homo sapiens
  siRNA target sequence for EP300 (NM_001429.1,2988-3006).
cctgctgctttaaaagaca

SEQ ID NO: 3282 - DNA, 19 bp, Homo sapiens
  siRNA target sequence for EP300 (NM_001429.1,3005-3023).
cagacggatggaaaaccta

SEQ ID NO: 3283 - DNA, 19 bp, Homo sapiens
  siRNA target sequence for EP300 (NM_001429.1,3014-3032).
ggaaaacctagttgcatat

SEQ ID NO: 3284 - DNA, 19 bp, Homo sapiens
  siRNA target sequence for EP300 (NM_001429.1,3028-3046).
catatgctcggaaagttga

SEQ ID NO: 3285 - DNA, 19 bp, Homo sapiens
  siRNA target sequence for EP300 (NM_001429.1,3056-3074).
gtatgaatctgcaaacaat

SEQ ID NO: 3286 - DNA, 19 bp, Homo sapiens
  siRNA target sequence for EP300 (NM_001429.1,3096-3114).
ctagctgagaaaatctata

SEQ ID NO: 3287 - DNA, 19 bp, Homo sapiens
  siRNA target sequence for EP300 (NM_001429.1,3161-3179).
gcagaacatgctaccaaat

SEQ ID NO: 3288 - DNA, 19 bp, Homo sapiens
  siRNA target sequence for EP300 (NM_001429.1,3187-3205).
gcatggttccagtttccat

SEQ ID NO: 3289 - DNA, 19 bp, Homo sapiens
  siRNA target sequence for EP300 (NM_001429.1,3191-3209).
ggttccagtttccatgaat

SEQ ID NO: 3290 - DNA, 19 bp, Homo sapiens
  siRNA target sequence for EP300 (NM_001429.1,3234-3252).
caaccaggaatgacttcta

SEQ ID NO: 3291 - DNA, 19 bp, Homo sapiens
  siRNA target sequence for EP300 (NM_001429.1,3261-3279).
ctacctgacccaagtatga

SEQ ID NO: 3292 - DNA, 19 bp, Homo sapiens
  siRNA target sequence for EP300 (NM_001429.1,3289-3307).
gtgtgccaaaccagatgat

SEQ ID NO: 3293 - DNA, 19 bp, Homo sapiens
  siRNA target sequence for EP300 (NM_001429.1,3299-3317).
ccagatgatgcctcgaata

SEQ ID NO: 3294 - DNA, 19 bp, Homo sapiens
  siRNA target sequence for EP300 (NM_001429.1,3300-3318).
cagatgatgcctcgaataa

SEQ ID NO: 3295 - DNA, 19 bp, Homo sapiens
  siRNA target sequence for EP300 (NM_001429.1,3302-3320).
gatgatgcctcgaataact

SEQ ID NO: 3296 - DNA, 19 bp, Homo sapiens
  siRNA target sequence for EP300 (NM_001429.1,3319-3337).
ctccacaatctggtttgaa

SEQ ID NO: 3297 - DNA, 19 bp, Homo sapiens
  siRNA target sequence for EP300 (NM_001429.1,3449-3467).
ctatgggcctcgtatgcaa

SEQ ID NO: 3298 - DNA, 19 bp, Homo sapiens
  siRNA target sequence for EP300 (NM_001429.1,3509-3527).
cccatcacagggaatgaat

SEQ ID NO: 3299 - DNA, 19 bp, Homo sapiens
  siRNA target sequence for EP300 (NM_001429.1,3516-3534).
cagggaatgaatgtaacaa

SEQ ID NO: 3300 - DNA, 19 bp, Homo sapiens
  siRNA target sequence for EP300 (NM_001429.1,3570-3588).
gtgtctcaagcacaaatgt

SEQ ID NO: 3301 - DNA, 19 bp, Homo sapiens
  siRNA target sequence for EP300 (NM_001429.1,3579-3597).
gcacaaatgtctagttctt

SEQ ID NO: 3302 - DNA, 19 bp, Homo sapiens
  siRNA target sequence for EP300 (NM_001429.1,3602-3620).
cccggtgaactctcctata

SEQ ID NO: 3303 - DNA, 19 bp, Homo sapiens
  siRNA target sequence for EP300 (NM_001429.1,3603-3621).
ccggtgaactctcctataa

SEQ ID NO: 3304 - DNA, 19 bp, Homo sapiens
  siRNA target sequence for EP300 (NM_001429.1,3604-3622).
cggtgaactctcctataat

SEQ ID NO: 3305 - DNA, 19 bp, Homo sapiens
  siRNA target sequence for EP300 (NM_001429.1,4069-4087).
ctagtagcacagaagtgaa

SEQ ID NO: 3306 - DNA, 19 bp, Homo sapiens
  siRNA target sequence for EP300 (NM_001429.1,4184-4202).
ggatatttcagagtctaaa

SEQ ID NO: 3307 - DNA, 19 bp, Homo sapiens
  siRNA target sequence for EP300 (NM_001429.1,4205-4223).
ggaagactgtaaaatggaa

SEQ ID NO: 3308 - DNA, 19 bp, Homo sapiens
  siRNA target sequence for EP300 (NM_001429.1,4209-4227).
gactgtaaaatggaatcta

SEQ ID NO: 3309 - DNA, 19 bp, Homo sapiens
  siRNA target sequence for EP300 (NM_001429.1,4220-4238).
ggaatctaccgaaacagaa

SEQ ID NO: 3310 - DNA, 19 bp, Homo sapiens
  siRNA target sequence for EP300 (NM_001429.1,4277-4295).
ggaagaccagccaagtact

SEQ ID NO: 3311 - DNA, 19 bp, Homo sapiens
  siRNA target sequence for EP300 (NM_001429.1,4278-4296).
gaagaccagccaagtactt

SEQ ID NO: 3312 - DNA, 19 bp, Homo sapiens
  siRNA target sequence for EP300 (NM_001429.1,4315-4333).
cggctccaggacagtcaaa

SEQ ID NO: 3313 - DNA, 19 bp, Homo sapiens
  siRNA target sequence for EP300 (NM_001429.1,4481-4499).
gagccccatggatctttct

SEQ ID NO: 3314 - DNA, 19 bp, Homo sapiens
  siRNA target sequence for EP300 (NM_001429.1,4491-4509).
gatctttctaccattaaga

SEQ ID NO: 3315 - DNA, 19 bp, Homo sapiens
  siRNA target sequence for EP300 (NM_001429.1,4501-4519).
ccattaagaggaagttaga

SEQ ID NO: 3316 - DNA, 19 bp, Homo sapiens
  siRNA target sequence for EP300 (NM_001429.1,4543-4561).
ggcagtatgtcgatgatat

SEQ ID NO: 3317 - DNA, 19 bp, Homo sapiens
  siRNA target sequence for EP300 (NM_001429.1,4574-4592).
caataatgcctggttatat

SEQ ID NO: 3318 - DNA, 19 bp, Homo sapiens
  siRNA target sequence for EP300 (NM_001429.1,4603-4621).
catcacgggtatacaaata

SEQ ID NO: 3319 - DNA, 19 bp, Homo sapiens
  siRNA target sequence for EP300 (NM_001429.1,4726-4744).
gttgctacggcaaacagtt

SEQ ID NO: 3320 - DNA, 19 bp, Homo sapiens
  siRNA target sequence for EP300 (NM_001429.1,4736-4754).
caaacagttgtgcacaata

SEQ ID NO: 3321 - DNA, 19 bp, Homo sapiens
  siRNA target sequence for EP300 (NM_001429.1,4758-4776).
cgtgatgccacttattaca

SEQ ID NO: 3322 - DNA, 19 bp, Homo sapiens
  siRNA target sequence for EP300 (NM_001429.1,4824-4842).
caaggggagagcgtttctt

SEQ ID NO: 3323 - DNA, 19 bp, Homo sapiens
  siRNA target sequence for EP300 (NM_001429.1,4862-4880).
gcctcaaactacaataaat

SEQ ID NO: 3324 - DNA, 19 bp, Homo sapiens
  siRNA target sequence for EP300 (NM_001429.1,4916-4934).
ggatcctgaactgtttgtt

SEQ ID NO: 3325 - DNA, 19 bp, Homo sapiens
  siRNA target sequence for EP300 (NM_001429.1,5010-5028).
gtctgtgatggctgtttaa

SEQ ID NO: 3326 - DNA, 19 bp, Homo sapiens
  siRNA target sequence for EP300 (NM_001429.1,5040-5058).
cgaactaggaaagaaaata

SEQ ID NO: 3327 - DNA, 19 bp, Homo sapiens
  siRNA target sequence for EP300 (NM_001429.1,5106-5124).
gagaatcgtgtgaatgact

SEQ ID NO: 3328 - DNA, 19 bp, Homo sapiens
  siRNA target sequence for EP300 (NM_001429.1,5123-5141).
ctttctgaggcgacagaat

SEQ ID NO: 3329 - DNA, 19 bp, Homo sapiens
  siRNA target sequence for EP300 (NM_001429.1,5155-5173).
gagaggtcactgttagagt

SEQ ID NO: 3330 - DNA, 19 bp, Homo sapiens
  siRNA target sequence for EP300 (NM_001429.1,5159-5177).
ggtcactgttagagtagtt

SEQ ID NO: 3331 - DNA, 19 bp, Homo sapiens
  siRNA target sequence for EP300 (NM_001429.1,5255-5273).
ctttccataccgaaccaaa

SEQ ID NO: 3332 - DNA, 19 bp, Homo sapiens
  siRNA target sequence for EP300 (NM_001429.1,5323-5341).
gcatgcatgttcaagagta

SEQ ID NO: 3333 - DNA, 19 bp, Homo sapiens
  siRNA target sequence for EP300 (NM_001429.1,5367-5385).
cagaggagagtatacatat

SEQ ID NO: 3334 - DNA, 19 bp, Homo sapiens
  siRNA target sequence for EP300 (NM_001429.1,5371-5389).
ggagagtatacatatctta

SEQ ID NO: 3335 - DNA, 19 bp, Homo sapiens
  siRNA target sequence for EP300 (NM_001429.1,5403-5421).
catttcttccgtcctaaat

SEQ ID NO: 3336 - DNA, 19 bp, Homo sapiens
  siRNA target sequence for EP300 (NM_001429.1,5426-5444).
gaggactgcagtctatcat

SEQ ID NO: 3337 - DNA, 19 bp, Homo sapiens
  siRNA target sequence for EP300 (NM_001429.1,5428-5446).
ggactgcagtctatcatga

SEQ ID NO: 3338 - DNA, 19 bp, Homo sapiens
  siRNA target sequence for EP300 (NM_001429.1,5429-5447).
gactgcagtctatcatgaa

SEQ ID NO: 3339 - DNA, 19 bp, Homo sapiens
  siRNA target sequence for EP300 (NM_001429.1,5474-5492).
caagaaattaggttacaca

SEQ ID NO: 3340 - DNA, 19 bp, Homo sapiens
  siRNA target sequence for EP300 (NM_001429.1,5609-5627).
gcttgacaaggctgtatca

SEQ ID NO: 3341 - DNA, 19 bp, Homo sapiens
  siRNA target sequence for EP300 (NM_001429.1,5620-5638).
ctgtatcagagcgtattgt

SEQ ID NO: 3342 - DNA, 19 bp, Homo sapiens
  siRNA target sequence for EP300 (NM_001429.1,5664-5682).
caagctactgaagatagat

SEQ ID NO: 3343 - DNA, 19 bp, Homo sapiens
  siRNA target sequence for EP300 (NM_001429.1,5704-5722).
cttatttcgagggtgattt

SEQ ID NO: 3344 - DNA, 19 bp, Homo sapiens
  siRNA target sequence for EP300 (NM_001429.1,5825-5843).
gggagacagcaaaaatgct

SEQ ID NO: 3345 - DNA, 19 bp, Homo sapiens
  siRNA target sequence for EP300 (NM_001429.1,5827-5845).
gagacagcaaaaatgctaa

SEQ ID NO: 3346 - DNA, 19 bp, Homo sapiens
  siRNA target sequence for EP300 (NM_001429.1,5886-5904).
ctgagtaggggcaacaaga

SEQ ID NO: 3347 - DNA, 19 bp, Homo sapiens
  siRNA target sequence for EP300 (NM_001429.1,5910-5928).
cccgggatgcccaatgtat

SEQ ID NO: 3348 - DNA, 19 bp, Homo sapiens
  siRNA target sequence for EP300 (NM_001429.1,5913-5931).
gggatgcccaatgtatcta

SEQ ID NO: 3349 - DNA, 19 bp, Homo sapiens
  siRNA target sequence for EP300 (NM_001429.1,5914-5932).
ggatgcccaatgtatctaa

SEQ ID NO: 3350 - DNA, 19 bp, Homo sapiens
  siRNA target sequence for EP300 (NM_001429.1,5933-5951).
cgacctctcacagaaacta

SEQ ID NO: 3351 - DNA, 19 bp, Homo sapiens
  siRNA target sequence for EP300 (NM_001429.1,5934-5952).
gacctctcacagaaactat

SEQ ID NO: 3352 - DNA, 19 bp, Homo sapiens
  siRNA target sequence for EP300 (NM_001429.1,6075-6093).
ggtcgggatgcgtttctca

SEQ ID NO: 3353 - DNA, 19 bp, Homo sapiens
  siRNA target sequence for EP300 (NM_001429.1,6247-6265).
gtactgtctgtgaggatta

SEQ ID NO: 3354 - DNA, 19 bp, Homo sapiens
  siRNA target sequence for EP300 (NM_001429.1,6278-6296).
cacctgctataacactaaa

SEQ ID NO: 3355 - DNA, 19 bp, Homo sapiens
  siRNA target sequence for EP300 (NM_001429.1,6507-6525).
ggttgcaaacggaaaacca

SEQ ID NO: 3356 - DNA, 19 bp, Homo sapiens
  siRNA target sequence for EP300 (NM_001429.1,6829-6847).
ctacccctcccaatagcat

SEQ ID NO: 3357 - DNA, 19 bp, Homo sapiens
  siRNA target sequence for EP300 (NM_001429.1,7022-7040).
gatggcccacgtgcaaatt

SEQ ID NO: 3358 - DNA, 19 bp, Homo sapiens
  siRNA target sequence for EP300 (NM_001429.1,7025-7043).
ggcccacgtgcaaattttt

SEQ ID NO: 3359 - DNA, 19 bp, Homo sapiens
  siRNA target sequence for EP300 (NM_001429.1,7027-7045).
cccacgtgcaaatttttca

SEQ ID NO: 3360 - DNA, 19 bp, Homo sapiens
  siRNA target sequence for EP300 (NM_001429.1,7029-7047).
cacgtgcaaatttttcaaa

SEQ ID NO: 3361 - DNA, 19 bp, Homo sapiens
  siRNA target sequence for EP300 (NM_001429.1,7294-7312).
gattgggccaggtaggtat

SEQ ID NO: 3362 - DNA, 19 bp, Homo sapiens
  siRNA target sequence for EP300 (NM_001429.1,7337-7355).
gtctcaacaagccttacaa

SEQ ID NO: 3363 - DNA, 19 bp, Homo sapiens
  siRNA target sequence for EP300 (NM_001429.1,7398-7416).
cagcaacaggtgcttagta

SEQ ID NO: 3364 - DNA, 19 bp, Homo sapiens
  siRNA target sequence for EP300 (NM_001429.1,7467-7485).
gccaagtatgccaactcta

SEQ ID NO: 3365 - DNA, 19 bp, Homo sapiens
  siRNA target sequence for EP300 (NM_001429.1,7468-7486).
ccaagtatgccaactctaa

SEQ ID NO: 3366 - DNA, 19 bp, Homo sapiens
  siRNA target sequence for EP300 (NM_001429.1,7472-7490).
gtatgccaactctaatcca

SEQ ID NO: 3367 - DNA, 19 bp, Homo sapiens
  siRNA target sequence for EP300 (NM_001429.1,7715-7733).
caacaccatgccttcacaa

SEQ ID NO: 3368 - DNA, 19 bp, Homo sapiens
  siRNA target sequence for EP300 (NM_001429.1,7806-7824).
cctggaatggccaaccata

SEQ ID NO: 3369 - DNA, 19 bp, Homo sapiens
  siRNA target sequence for EP300 (NM_001429.1,7807-7825).
ctggaatggccaaccataa

SEQ ID NO: 3370 - DNA, 19 bp, Homo sapiens
  siRNA target sequence for EP300 (NM_001429.1,7810-7828).
gaatggccaaccataacca

SEQ ID NO: 3371 - DNA, 19 bp, Homo sapiens
  siRNA target sequence for EP300 (NM_001429.1,7896-7914).
cagatgcaacaaggaaata

SEQ ID NO: 3372 - DNA, 19 bp, Homo sapiens
  siRNA target sequence for EP300 (NM_001429.1,7987-8005).
gactccttcagcaacagat

SEQ ID NO: 3373 - DNA, 19 bp, Homo sapiens
  siRNA target sequence for EP300 (NM_001429.1,8273-8291).
catggaacaagggcatttt

SEQ ID NO: 3374 - DNA, 19 bp, Homo sapiens
  siRNA target sequence for EP300 (NM_001429.1,8294-8312).
cagcccggaccagaattca

SEQ ID NO: 3375 - DNA, 19 bp, Homo sapiens
  siRNA target sequence for EP300 (NM_001429.1,8296-8314).
gcccggaccagaattcaat

SEQ ID NO: 3376 - DNA, 19 bp, Homo sapiens
  siRNA target sequence for EP300 (NM_001429.1,8301-8319).
gaccagaattcaatgcttt

SEQ ID NO: 3377 - DNA, 19 bp, Homo sapiens
  siRNA target sequence for EP300 (NM_001429.1,8379-8397).
ggactcagcaccgataact

SEQ ID NO: 3378 - DNA, 19 bp, Homo sapiens
  siRNA target sequence for EP300 (NM_001429.1,8389-8407).
ccgataactcagacttgaa

SEQ ID NO: 3379 - DNA, 19 bp, Homo sapiens
  siRNA target sequence for EP300 (NM_001429.1,8390-8408).
cgataactcagacttgaat

SEQ ID NO: 3380 - DNA, 19 bp, Homo sapiens
  siRNA target sequence for EP300 (NM_001429.1,8391-8409).
gataactcagacttgaatt

SEQ ID NO: 3381 - DNA, 19 bp, Homo sapiens
  siRNA target sequence for EP300 (NM_001429.1,8419-8437).
cacagagtacactagacat

SEQ ID NO: 3382 - DNA, 19 bp, Homo sapiens
  siRNA target sequence for ERF (NM_006494.1,372-390).
gccctgcgctattactata

SEQ ID NO: 3383 - DNA, 19 bp, Homo sapiens
  siRNA target sequence for ERF (NM_006494.1,373-391).
ccctgcgctattactataa

SEQ ID NO: 3384 - DNA, 19 bp, Homo sapiens
  siRNA target sequence for ERF (NM_006494.1,375-393).
ctgcgctattactataaca

SEQ ID NO: 3385 - DNA, 19 bp, Homo sapiens
  siRNA target sequence for ERF (NM_006494.1,461-479).
ggtcaattacccattcatt

SEQ ID NO: 3386 - DNA, 19 bp, Homo sapiens
  siRNA target sequence for ERF (NM_006494.1,464-482).
caattacccattcattgat

SEQ ID NO: 3387 - DNA, 19 bp, Homo sapiens
  siRNA target sequence for ERF (NM_006494.1,1075-1093).
cccaaagcgtctacaacta

SEQ ID NO: 3388 - DNA, 19 bp, Homo sapiens
  siRNA target sequence for ERF (NM_006494.1,1237-1255).
cctccccattcaagtttaa

SEQ ID NO: 3389 - DNA, 19 bp, Homo sapiens
  siRNA target sequence for ERF (NM_006494.1,1558-1576).
ccctcaagctacgctttaa

SEQ ID NO: 3390 - DNA, 19 bp, Homo sapiens
  siRNA target sequence for ERG (NM_004449.2,17-35).
cggacccagcagctcatat

SEQ ID NO: 3391 - DNA, 19 bp, Homo sapiens
  siRNA target sequence for ERG (NM_004449.2,64-82).
gaccagtcgttgtttgagt

SEQ ID NO: 3392 - DNA, 19 bp, Homo sapiens
  siRNA target sequence for ERG (NM_004449.2,209-227).
gggtcaccatcaaaatgga

SEQ ID NO: 3393 - DNA, 19 bp, Homo sapiens
  siRNA target sequence for ERG (NM_004449.2,215-233).
ccatcaaaatggaatgtaa

SEQ ID NO: 3394 - DNA, 19 bp, Homo sapiens
  siRNA target sequence for ERG (NM_004449.2,380-398).
cgaacgagcgcagagttat

SEQ ID NO: 3395 - DNA, 19 bp, Homo sapiens
  siRNA target sequence for ERG (NM_004449.2,450-468).
ggagtgggcggtgaaagaa

SEQ ID NO: 3396 - DNA, 19 bp, Homo sapiens
  siRNA target sequence for ERG (NM_004449.2,451-469).
gagtgggcggtgaaagaat

SEQ ID NO: 3397 - DNA, 19 bp, Homo sapiens
  siRNA target sequence for ERG (NM_004449.2,453-471).
gtgggcggtgaaagaatat

SEQ ID NO: 3398 - DNA, 19 bp, Homo sapiens
  siRNA target sequence for ERG (NM_004449.2,478-496).
ccagacgtcaacatcttgt

SEQ ID NO: 3399 - DNA, 19 bp, Homo sapiens
  siRNA target sequence for ERG (NM_004449.2,616-634).
cctcttccacatttgactt

SEQ ID NO: 3400 - DNA, 19 bp, Homo sapiens
  siRNA target sequence for ERG (NM_004449.2,646-664).
gataaagccttacaaaact

SEQ ID NO: 3401 - DNA, 19 bp, Homo sapiens
  siRNA target sequence for ERG (NM_004449.2,663-681).
ctctccacggttaatgcat

SEQ ID NO: 3402 - DNA, 19 bp, Homo sapiens
  siRNA target sequence for ERG (NM_004449.2,812-830).
ctcagttagatccttatca

SEQ ID NO: 3403 - DNA, 19 bp, Homo sapiens
  siRNA target sequence for ERG (NM_004449.2,814-832).
cagttagatccttatcaga

SEQ ID NO: 3404 - DNA, 19 bp, Homo sapiens
  siRNA target sequence for ERG (NM_004449.2,845-863).
caagtagccgccttgcaaa

SEQ ID NO: 3405 - DNA, 19 bp, Homo sapiens
  siRNA target sequence for ERG (NM_004449.2,1219-1237).
cacccacagaagatgaact

SEQ ID NO: 3406 - DNA, 19 bp, Homo sapiens
  siRNA target sequence for ERG (NM_004449.2,1258-1276).
gccctccccgtgacatctt

SEQ ID NO: 3407 - DNA, 19 bp, Homo sapiens
  siRNA target sequence for ERG (NM_004449.2,1266-1284).
cgtgacatcttccagtttt

SEQ ID NO: 3408 - DNA, 19 bp, Homo sapiens
  siRNA target sequence for ERG (NM_004449.2,1313-1331).
caccaactgggggtatata

SEQ ID NO: 3409 - DNA, 19 bp, Homo sapiens
  siRNA target sequence for ERG (NM_004449.2,1324-1342).
ggtatataccccaacacta

SEQ ID NO: 3410 - DNA, 19 bp, Homo sapiens
  siRNA target sequence for ERG (NM_004449.2,1367-1385).
ctcatctgggcacttacta

SEQ ID NO: 3411 - DNA, 19 bp, Homo sapiens
  siRNA target sequence for ERG (NM_004449.2,1369-1387).
catctgggcacttactact

SEQ ID NO: 3412 - DNA, 19 bp, Homo sapiens
  siRNA target sequence for ERG (NM_182918.1,106-124).
ggccagcactattaaggaa

SEQ ID NO: 3413 - DNA, 19 bp, Homo sapiens
  siRNA target sequence for ERG (NM_182918.1,772-790).
cacagggggtgcagctttt

SEQ ID NO: 3414 - DNA, 19 bp, Homo sapiens
  siRNA target sequence for ERG (NM_182918.1,774-792).
cagggggtgcagcttttat

SEQ ID NO: 3415 - DNA, 19 bp, Homo sapiens
  siRNA target sequence for ERG (NM_182918.1,815-833).
cctgaagctacgcaaagaa

SEQ ID NO: 3416 - DNA, 19 bp, Homo sapiens
  siRNA target sequence for ERG (NM_182918.1,818-836).
gaagctacgcaaagaatta

SEQ ID NO: 3417 - DNA, 19 bp, Homo sapiens
  siRNA target sequence for ERG (NM_182918.1,821-839).
gctacgcaaagaattacaa

SEQ ID NO: 3418 - DNA, 19 bp, Homo sapiens
  siRNA target sequence for ESR1 (NM_000125.1,807-825).
ctacaggccaaattcagat

SEQ ID NO: 3419 - DNA, 19 bp, Homo sapiens
  siRNA target sequence for ESR1 (NM_000125.1,813-831).
gccaaattcagataatcga

SEQ ID NO: 3420 - DNA, 19 bp, Homo sapiens
  siRNA target sequence for ESR1 (NM_000125.1,919-937).
gtgtgcaatgactatgctt

SEQ ID NO: 3421 - DNA, 19 bp, Homo sapiens
  siRNA target sequence for ESR1 (NM_000125.1,1003-1021).
ggacataacgactatatgt

SEQ ID NO: 3422 - DNA, 19 bp, Homo sapiens
  siRNA target sequence for ESR1 (NM_000125.1,1113-1131).
gaaaggtgggatacgaaaa

SEQ ID NO: 3423 - DNA, 19 bp, Homo sapiens
  siRNA target sequence for ESR1 (NM_000125.1,1235-1253).
ggccaagcccgctcatgat

SEQ ID NO: 3424 - DNA, 19 bp, Homo sapiens
  siRNA target sequence for ESR1 (NM_000125.1,1237-1255).
ccaagcccgctcatgatca

SEQ ID NO: 3425 - DNA, 19 bp, Homo sapiens
  siRNA target sequence for ESR1 (NM_000125.1,1238-1256).
caagcccgctcatgatcaa

SEQ ID NO: 3426 - DNA, 19 bp, Homo sapiens
  siRNA target sequence for ESR1 (NM_000125.1,1420-1438).
ctggttcacatgatcaact

SEQ ID NO: 3427 - DNA, 19 bp, Homo sapiens
  siRNA target sequence for ESR1 (NM_000125.1,1658-1676).
ctcggttccgcatgatgaa

SEQ ID NO: 3428 - DNA, 19 bp, Homo sapiens
  siRNA target sequence for ESR1 (NM_000125.1,1661-1679).
ggttccgcatgatgaatct

SEQ ID NO: 3429 - DNA, 19 bp, Homo sapiens
  siRNA target sequence for ESR1 (NM_000125.1,1698-1716).
gtgcctcaaatctattatt

SEQ ID NO: 3430 - DNA, 19 bp, Homo sapiens
  siRNA target sequence for ESR1 (NM_000125.1,1727-1745).
ctggagtgtacacatttct

SEQ ID NO: 3431 - DNA, 19 bp, Homo sapiens
  siRNA target sequence for ESR1 (NM_000125.1,2078-2096).
ctacttcatcgcattcctt

SEQ ID NO: 3432 - DNA, 19 bp, Homo sapiens
  siRNA target sequence for ESR1 (NM_000125.1,2084-2102).
catcgcattccttgcaaaa

SEQ ID NO: 3433 - DNA, 19 bp, Homo sapiens
  siRNA target sequence for ESR1 (NM_000125.1,2087-2105).
cgcattccttgcaaaagta

SEQ ID NO: 3434 - DNA, 19 bp, Homo sapiens
  siRNA target sequence for ESR1 (NM_000125.1,2088-2106).
gcattccttgcaaaagtat

SEQ ID NO: 3435 - DNA, 19 bp, Homo sapiens
  siRNA target sequence for ESR2 (NM_001437.1,433-451).
ctcaccatctagccttaat

SEQ ID NO: 3436 - DNA, 19 bp, Homo sapiens
  siRNA target sequence for ESR2 (NM_001437.1,494-512).
gagcacggctccatataca

SEQ ID NO: 3437 - DNA, 19 bp, Homo sapiens
  siRNA target sequence for ESR2 (NM_001437.1,496-514).
gcacggctccatatacata

SEQ ID NO: 3438 - DNA, 19 bp, Homo sapiens
  siRNA target sequence for ESR2 (NM_001437.1,500-518).
ggctccatatacatacctt

SEQ ID NO: 3439 - DNA, 19 bp, Homo sapiens
  siRNA target sequence for ESR2 (NM_001437.1,569-587).
cctgctgtgatgaattaca

SEQ ID NO: 3440 - DNA, 19 bp, Homo sapiens
  siRNA target sequence for ESR2 (NM_001437.1,594-612).
ccagcaatgtcactaactt

SEQ ID NO: 3441 - DNA, 19 bp, Homo sapiens
  siRNA target sequence for ESR2 (NM_001437.1,636-654).
ccacaagcccaaatgtgtt

SEQ ID NO: 3442 - DNA, 19 bp, Homo sapiens
  siRNA target sequence for ESR2 (NM_001437.1,691-709).
ccatcgccagttatcacat

SEQ ID NO: 3443 - DNA, 19 bp, Homo sapiens
  siRNA target sequence for ESR2 (NM_001437.1,763-781).
caccttacctgtaaacaga

SEQ ID NO: 3444 - DNA, 19 bp, Homo sapiens
  siRNA target sequence for ESR2 (NM_001437.1,883-901).
cgcatcgggatatcactat

SEQ ID NO: 3445 - DNA, 19 bp, Homo sapiens
  siRNA target sequence for ESR2 (NM_001437.1,920-938).
ggatgtaaggcctttttta

SEQ ID NO: 3446 - DNA, 19 bp, Homo sapiens
  siRNA target sequence for ESR2 (NM_001437.1,921-939).
gatgtaaggccttttttaa

SEQ ID NO: 3447 - DNA, 19 bp, Homo sapiens
  siRNA target sequence for ESR2 (NM_001437.1,946-964).
cattcaaggacataatgat

SEQ ID NO: 3448 - DNA, 19 bp, Homo sapiens
  siRNA target sequence for ESR2 (NM_001437.1,978-996).
ctacaaatcagtgtacaat

SEQ ID NO: 3449 - DNA, 19 bp, Homo sapiens
  siRNA target sequence for ESR2 (NM_001437.1,986-1004).
cagtgtacaatcgataaaa

SEQ ID NO: 3450 - DNA, 19 bp, Homo sapiens
  siRNA target sequence for ESR2 (NM_001437.1,1029-1047).
gccgacttcggaagtgtta

SEQ ID NO: 3451 - DNA, 19 bp, Homo sapiens
  siRNA target sequence for ESR2 (NM_001437.1,1444-1462).
gctgatgtggcgctcaatt

SEQ ID NO: 3452 - DNA, 19 bp, Homo sapiens
  siRNA target sequence for ESR2 (NM_001437.1,1518-1536).
ggaaatgcgtagaaggaat

SEQ ID NO: 3453 - DNA, 19 bp, Homo sapiens
  siRNA target sequence for ESR2 (NM_001437.1,1519-1537).
gaaatgcgtagaaggaatt

SEQ ID NO: 3454 - DNA, 19 bp, Homo sapiens
  siRNA target sequence for ESR2 (NM_001437.1,1575-1593).
ggtttcgagagttaaaact

SEQ ID NO: 3455 - DNA, 19 bp, Homo sapiens
  siRNA target sequence for ESR2 (NM_001437.1,1622-1640).
gccatgatcctgctcaatt

SEQ ID NO: 3456 - DNA, 19 bp, Homo sapiens
  siRNA target sequence for ESR2 (NM_001437.1,1714-1732).
cgtgaccgatgctttggtt

SEQ ID NO: 3457 - DNA, 19 bp, Homo sapiens
  siRNA target sequence for ESR2 (NM_001437.1,1811-1829).
gtcaggcatgcgagtaaca

SEQ ID NO: 3458 - DNA, 19 bp, Homo sapiens
  siRNA target sequence for ESR2 (NM_001437.1,1838-1856).
gaacatctgctcaacatga

SEQ ID NO: 3459 - DNA, 19 bp, Homo sapiens
  siRNA target sequence for ESRRA (NM_004451.3,1031-1049).
ccttcgctgaggacttagt

SEQ ID NO: 3460 - DNA, 19 bp, Homo sapiens
  siRNA target sequence for ESRRB (NM_004452.2,367-385).
gctgcggctccttcatcaa

SEQ ID NO: 3461 - DNA, 19 bp, Homo sapiens
  siRNA target sequence for ESRRB (NM_004452.2,503-521).
ggactcgccacccatgttt

SEQ ID NO: 3462 - DNA, 19 bp, Homo sapiens
  siRNA target sequence for ESRRB (NM_004452.2,598-616).
ccatcaagtgcgagtacat

SEQ ID NO: 3463 - DNA, 19 bp, Homo sapiens
  siRNA target sequence for ESRRB (NM_004452.2,722-740).
gactatccaagggaacatt

SEQ ID NO: 3464 - DNA, 19 bp, Homo sapiens
  siRNA target sequence for ESRRB (NM_004452.2,724-742).
ctatccaagggaacattga

SEQ ID NO: 3465 - DNA, 19 bp, Homo sapiens
  siRNA target sequence for ESRRB (NM_004452.2,869-887).
gcgtggaggccgtcagaaa

SEQ ID NO: 3466 - DNA, 19 bp, Homo sapiens
  siRNA target sequence for ESRRB (NM_004452.2,870-888).
cgtggaggccgtcagaaat

SEQ ID NO: 3467 - DNA, 19 bp, Homo sapiens
  siRNA target sequence for ESRRB (NM_004452.2,871-889).
gtggaggccgtcagaaata

SEQ ID NO: 3468 - DNA, 19 bp, Homo sapiens
  siRNA target sequence for ESRRB (NM_004452.2,873-891).
ggaggccgtcagaaataca

SEQ ID NO: 3469 - DNA, 19 bp, Homo sapiens
  siRNA target sequence for ESRRB (NM_004452.2,917-935).
cccatacctgagcttacaa

SEQ ID NO: 3470 - DNA, 19 bp, Homo sapiens
  siRNA target sequence for ESRRB (NM_004452.2,918-936).
ccatacctgagcttacaaa

SEQ ID NO: 3471 - DNA, 19 bp, Homo sapiens
  siRNA target sequence for ESRRB (NM_004452.2,919-937).
catacctgagcttacaaat

SEQ ID NO: 3472 - DNA, 19 bp, Homo sapiens
  siRNA target sequence for ESRRB (NM_004452.2,923-941).
cctgagcttacaaatttct

SEQ ID NO: 3473 - DNA, 19 bp, Homo sapiens
  siRNA target sequence for ESRRB (NM_004452.2,1314-1332).
ctggtacgcaggtacaaga

SEQ ID NO: 3474 - DNA, 19 bp, Homo sapiens
  siRNA target sequence for ESRRG (NM_001438.1,432-450).
gggcctgtcaggaaactgt

SEQ ID NO: 3475 - DNA, 19 bp, Homo sapiens
  siRNA target sequence for ESRRG (NM_001438.1,433-451).
ggcctgtcaggaaactgta

SEQ ID NO: 3476 - DNA, 19 bp, Homo sapiens
  siRNA target sequence for ESRRG (NM_001438.1,434-452).
gcctgtcaggaaactgtat

SEQ ID NO: 3477 - DNA, 19 bp, Homo sapiens
  siRNA target sequence for ESRRG (NM_001438.1,460-478).
gctccagcaccattgttga

SEQ ID NO: 3478 - DNA, 19 bp, Homo sapiens
  siRNA target sequence for ESRRG (NM_001438.1,461-479).
ctccagcaccattgttgaa

SEQ ID NO: 3479 - DNA, 19 bp, Homo sapiens
  siRNA target sequence for ESRRG (NM_001438.1,566-584).
ctatggggtagcatcatgt

SEQ ID NO: 3480 - DNA, 19 bp, Homo sapiens
  siRNA target sequence for ESRRG (NM_001438.1,638-656).
ctgccctgccacgaatgaa

SEQ ID NO: 3481 - DNA, 19 bp, Homo sapiens
  siRNA target sequence for ESRRG (NM_001438.1,641-659).
ccctgccacgaatgaatgt

SEQ ID NO: 3482 - DNA, 19 bp, Homo sapiens
  siRNA target sequence for ESRRG (NM_001438.1,646-664).
ccacgaatgaatgtgaaat

SEQ ID NO: 3483 - DNA, 19 bp, Homo sapiens
  siRNA target sequence for ESRRG (NM_001438.1,665-683).
cacaaagcgcagacgtaaa

SEQ ID NO: 3484 - DNA, 19 bp, Homo sapiens
  siRNA target sequence for ESRRG (NM_001438.1,697-715).
gccgcttcatgaagtgttt

SEQ ID NO: 3485 - DNA, 19 bp, Homo sapiens
  siRNA target sequence for ESRRG (NM_001438.1,698-716).
ccgcttcatgaagtgttta

SEQ ID NO: 3486 - DNA, 19 bp, Homo sapiens
  siRNA target sequence for ESRRG (NM_001438.1,776-794).
gtacaagcgcaggatagat

SEQ ID NO: 3487 - DNA, 19 bp, Homo sapiens
  siRNA target sequence for ESRRG (NM_001438.1,837-855).
gccaaaaagccatataaca

SEQ ID NO: 3488 - DNA, 19 bp, Homo sapiens
  siRNA target sequence for ESRRG (NM_001438.1,920-938).
ccccgacagtgacatcaaa

SEQ ID NO: 3489 - DNA, 19 bp, Homo sapiens
  siRNA target sequence for ESRRG (NM_001438.1,969-987).
cgagagttggtggttatca

SEQ ID NO: 3490 - DNA, 19 bp, Homo sapiens
  siRNA target sequence for ESRRG (NM_001438.1,970-988).
gagagttggtggttatcat

SEQ ID NO: 3491 - DNA, 19 bp, Homo sapiens
  siRNA target sequence for ESRRG (NM_001438.1,1122-1140).
gtctatgcagacgattata

SEQ ID NO: 3492 - DNA, 19 bp, Homo sapiens
  siRNA target sequence for ESRRG (NM_001438.1,1124-1142).
ctatgcagacgattatata

SEQ ID NO: 3493 - DNA, 19 bp, Homo sapiens
  siRNA target sequence for ESRRG (NM_001438.1,1146-1164).
gacgaagaccagtccaaat

SEQ ID NO: 3494 - DNA, 19 bp, Homo sapiens
  siRNA target sequence for ESRRG (NM_001438.1,1148-1166).
cgaagaccagtccaaatta

SEQ ID NO: 3495 - DNA, 19 bp, Homo sapiens
  siRNA target sequence for ESRRG (NM_001438.1,1167-1185).
gcaggccttcttgatctaa

SEQ ID NO: 3496 - DNA, 19 bp, Homo sapiens
  siRNA target sequence for ESRRG (NM_001438.1,1168-1186).
caggccttcttgatctaaa

SEQ ID NO: 3497 - DNA, 19 bp, Homo sapiens
  siRNA target sequence for ESRRG (NM_001438.1,1170-1188).
ggccttcttgatctaaata

SEQ ID NO: 3498 - DNA, 19 bp, Homo sapiens
  siRNA target sequence for ESRRG (NM_001438.1,1171-1189).
gccttcttgatctaaataa

SEQ ID NO: 3499 - DNA, 19 bp, Homo sapiens
  siRNA target sequence for ESRRG (NM_001438.1,1250-1268).
caccctcaaagctatagct

SEQ ID NO: 3500 - DNA, 19 bp, Homo sapiens
  siRNA target sequence for ESRRG (NM_001438.1,1260-1278).
gctatagctcttgctaatt

SEQ ID NO: 3501 - DNA, 19 bp, Homo sapiens
  siRNA target sequence for ESX1L (NM_153448.2,489-507).
ccgcgttcacgcagtttca

SEQ ID NO: 3502 - DNA, 19 bp, Homo sapiens
  siRNA target sequence for ESX1L (NM_153448.2,517-535).
gctagagaactttttcgat

SEQ ID NO: 3503 - DNA, 19 bp, Homo sapiens
  siRNA target sequence for ESX1L (NM_153448.2,523-541).
gaactttttcgatgaatct

SEQ ID NO: 3504 - DNA, 19 bp, Homo sapiens
  siRNA target sequence for ESX1L (NM_153448.2,526-544).
ctttttcgatgaatctcaa

SEQ ID NO: 3505 - DNA, 19 bp, Homo sapiens
  siRNA target sequence for ESX1L (NM_153448.2,572-590).
cttgcagcacgcctgaatt

SEQ ID NO: 3506 - DNA, 19 bp, Homo sapiens
  siRNA target sequence for ESX1L (NM_153448.2,654-672).
gggtgctaatgttgagaaa

SEQ ID NO: 3507 - DNA, 19 bp, Homo sapiens
  siRNA target sequence for ESX1L (NM_153448.2,656-674).
gtgctaatgttgagaaaca

SEQ ID NO: 3508 - DNA, 19 bp, Homo sapiens
  siRNA target sequence for ESX1L (NM_153448.2,658-676).
gctaatgttgagaaacact

SEQ ID NO: 3509 - DNA, 19 bp, Homo sapiens
  siRNA target sequence for ESX1L (NM_153448.2,693-711).
cccaccctttggacatgtt

SEQ ID NO: 3510 - DNA, 19 bp, Homo sapiens
  siRNA target sequence for ESX1L (NM_153448.2,715-733).
gggtggggcctattatgct

SEQ ID NO: 3511 - DNA, 19 bp, Homo sapiens
  siRNA target sequence for ESX1L (NM_153448.2,1239-1257).
cccctgtcatcaacagtta

SEQ ID NO: 3512 - DNA, 19 bp, Homo sapiens
  siRNA target sequence for ESX1L (NM_153448.2,1240-1258).
ccctgtcatcaacagttat

SEQ ID NO: 3513 - DNA, 19 bp, Homo sapiens
  siRNA target sequence for ESX1L (NM_153448.2,1241-1259).
cctgtcatcaacagttatt

SEQ ID NO: 3514 - DNA, 19 bp, Homo sapiens
  siRNA target sequence for ESX1L (NM_153448.2,1246-1264).
catcaacagttattatgca

SEQ ID NO: 3515 - DNA, 19 bp, Homo sapiens
  siRNA target sequence for ETS1 (NM_005238.1,304-322).
cgactctcaccatcatcaa

SEQ ID NO: 3516 - DNA, 19 bp, Homo sapiens
  siRNA target sequence for ETS1 (NM_005238.1,350-368).
cccctccccggatatggaa

SEQ ID NO: 3517 - DNA, 19 bp, Homo sapiens
  siRNA target sequence for ETS1 (NM_005238.1,351-369).
ccctccccggatatggaat

SEQ ID NO: 3518 - DNA, 19 bp, Homo sapiens
  siRNA target sequence for ETS1 (NM_005238.1,391-409).
ctccaagcagcaaagaaat

SEQ ID NO: 3519 - DNA, 19 bp, Homo sapiens
  siRNA target sequence for ETS1 (NM_005238.1,410-428).
gatgtctcaagcattaaaa

SEQ ID NO: 3520 - DNA, 19 bp, Homo sapiens
  siRNA target sequence for ETS1 (NM_005238.1,413-431).
gtctcaagcattaaaagct

SEQ ID NO: 3521 - DNA, 19 bp, Homo sapiens
  siRNA target sequence for ETS1 (NM_005238.1,439-457).
gtggtttcactaaagaaca

SEQ ID NO: 3522 - DNA, 19 bp, Homo sapiens
  siRNA target sequence for ETS1 (NM_005238.1,463-481).
gactggggatcccaaaaga

SEQ ID NO: 3523 - DNA, 19 bp, Homo sapiens
  siRNA target sequence for ETS1 (NM_005238.1,544-562).
gcctgaaaggtgtagactt

SEQ ID NO: 3524 - DNA, 19 bp, Homo sapiens
  siRNA target sequence for ETS1 (NM_005238.1,558-576).
gacttccagaagttctgta

SEQ ID NO: 3525 - DNA, 19 bp, Homo sapiens
  siRNA target sequence for ETS1 (NM_005238.1,647-665).
catcttatgggaacatcta

SEQ ID NO: 3526 - DNA, 19 bp, Homo sapiens
  siRNA target sequence for ETS1 (NM_005238.1,683-701).
ggatgtgaaaccatatcaa

SEQ ID NO: 3527 - DNA, 19 bp, Homo sapiens
  siRNA target sequence for ETS1 (NM_005238.1,726-744).
ccagaatcccgctatacct

SEQ ID NO: 3528 - DNA, 19 bp, Homo sapiens
  siRNA target sequence for ETS1 (NM_005238.1,735-753).
cgctatacctcggattact

SEQ ID NO: 3529 - DNA, 19 bp, Homo sapiens
  siRNA target sequence for ETS1 (NM_005238.1,736-754).
gctatacctcggattactt

SEQ ID NO: 3530 - DNA, 19 bp, Homo sapiens
  siRNA target sequence for ETS1 (NM_005238.1,752-770).
cttcattagctatggtatt

SEQ ID NO: 3531 - DNA, 19 bp, Homo sapiens
  siRNA target sequence for ETS1 (NM_005238.1,925-943).
cagacaccttgcagaatga

SEQ ID NO: 3532 - DNA, 19 bp, Homo sapiens
  siRNA target sequence for ETS1 (NM_005238.1,1046-1064).
gagctacgatagttgtgat

SEQ ID NO: 3533 - DNA, 19 bp, Homo sapiens
  siRNA target sequence for ETS1 (NM_005238.1,1081-1099).
ggagcagccagtcatcttt

SEQ ID NO: 3534 - DNA, 19 bp, Homo sapiens
  siRNA target sequence for ETS1 (NM_005238.1,1206-1224).
gaccgtgctgacctcaata

SEQ ID NO: 3535 - DNA, 19 bp, Homo sapiens
  siRNA target sequence for ETS1 (NM_005238.1,1360-1378).
gggaattcaaactttctga

SEQ ID NO: 3536 - DNA, 19 bp, Homo sapiens
  siRNA target sequence for ETS2 (NM_005239.2,316-334).
gtgccaacaggcttggatt

SEQ ID NO: 3537 - DNA, 19 bp, Homo sapiens
  siRNA target sequence for ETS2 (NM_005239.2,320-338).
caacaggcttggattccat

SEQ ID NO: 3538 - DNA, 19 bp, Homo sapiens
  siRNA target sequence for ETS2 (NM_005239.2,346-364).
gactccgccaactgtgaat

SEQ ID NO: 3539 - DNA, 19 bp, Homo sapiens
  siRNA target sequence for ETS2 (NM_005239.2,396-414).
gatgagtcaagccttaaaa

SEQ ID NO: 3540 - DNA, 19 bp, Homo sapiens
  siRNA target sequence for ETS2 (NM_005239.2,549-567).
gcagaggttcggcatgaat

SEQ ID NO: 3541 - DNA, 19 bp, Homo sapiens
  siRNA target sequence for ETS2 (NM_005239.2,716-734).
cctccgttcctcattggat

SEQ ID NO: 3542 - DNA, 19 bp, Homo sapiens
  siRNA target sequence for ETS2 (NM_005239.2,717-735).
ctccgttcctcattggatt

SEQ ID NO: 3543 - DNA, 19 bp, Homo sapiens
  siRNA target sequence for ETS2 (NM_005239.2,719-737).
ccgttcctcattggattaa

SEQ ID NO: 3544 - DNA, 19 bp, Homo sapiens
  siRNA target sequence for ETS2 (NM_005239.2,732-750).
gattaacagcaatacatta

SEQ ID NO: 3545 - DNA, 19 bp, Homo sapiens
  siRNA target sequence for ETS2 (NM_005239.2,941-959).
gcagcaacttgaatttgct

SEQ ID NO: 3546 - DNA, 19 bp, Homo sapiens
  siRNA target sequence for ETS2 (NM_005239.2,951-969).
gaatttgctcaccaacaat

SEQ ID NO: 3547 - DNA, 19 bp, Homo sapiens
  siRNA target sequence for ETS2 (NM_005239.2,1145-1163).
ccatgtctttcaaggatta

SEQ ID NO: 3548 - DNA, 19 bp, Homo sapiens
  siRNA target sequence for ETS2 (NM_005239.2,1191-1209).
gcaaggcaaaccagttata

SEQ ID NO: 3549 - DNA, 19 bp, Homo sapiens
  siRNA target sequence for ETS2 (NM_005239.2,1276-1294).
ctgctatcagacaaatcct

SEQ ID NO: 3550 - DNA, 19 bp, Homo sapiens
  siRNA target sequence for ETS2 (NM_005239.2,1319-1337).
gagacggatgggagtttaa

SEQ ID NO: 3551 - DNA, 19 bp, Homo sapiens
  siRNA target sequence for ETV1 (NM_004956.2,470-488).
cagcgtgggagaaattgta

SEQ ID NO: 3552 - DNA, 19 bp, Homo sapiens
  siRNA target sequence for ETV1 (NM_004956.2,486-504).
gtaacgagaaaccaacaaa

SEQ ID NO: 3553 - DNA, 19 bp, Homo sapiens
  siRNA target sequence for ETV1 (NM_004956.2,540-558).
ctcatgattcagaagaact

SEQ ID NO: 3554 - DNA, 19 bp, Homo sapiens
  siRNA target sequence for ETV1 (NM_004956.2,625-643).
gcagtttgtaccagactat

SEQ ID NO: 3555 - DNA, 19 bp, Homo sapiens
  siRNA target sequence for ETV1 (NM_004956.2,723-741).
ctgcctgcagtcaagaaca

SEQ ID NO: 3556 - DNA, 19 bp, Homo sapiens
  siRNA target sequence for ETV1 (NM_004956.2,732-750).
gtcaagaacagccctttaa

SEQ ID NO: 3557 - DNA, 19 bp, Homo sapiens
  siRNA target sequence for ETV1 (NM_004956.2,869-887).
catgcatctccaaactcaa

SEQ ID NO: 3558 - DNA, 19 bp, Homo sapiens
  siRNA target sequence for ETV1 (NM_004956.2,1035-1053).
gggaaggacgtcctatgta

SEQ ID NO: 3559 - DNA, 19 bp, Homo sapiens
  siRNA target sequence for ETV1 (NM_004956.2,1089-1107).
caccacaaggctttaagca

SEQ ID NO: 3560 - DNA, 19 bp, Homo sapiens
  siRNA target sequence for ETV1 (NM_004956.2,1111-1129).
gtaccacgacccagtgtat

SEQ ID NO: 3561 - DNA, 19 bp, Homo sapiens
  siRNA target sequence for ETV1 (NM_004956.2,1152-1170).
gtgcggccagccaaagctt

SEQ ID NO: 3562 - DNA, 19 bp, Homo sapiens
  siRNA target sequence for ETV1 (NM_004956.2,1229-1247).
cctagctgccactccattt

SEQ ID NO: 3563 - DNA, 19 bp, Homo sapiens
  siRNA target sequence for ETV1 (NM_004956.2,1284-1302).
gaacagaaggctgtatgtt

SEQ ID NO: 3564 - DNA, 19 bp, Homo sapiens
  siRNA target sequence for ETV1 (NM_004956.2,1312-1330).
ccccaggcagttttatgat

SEQ ID NO: 3565 - DNA, 19 bp, Homo sapiens
  siRNA target sequence for ETV1 (NM_004956.2,1335-1353).
cctgtgttgtcccagaaaa

SEQ ID NO: 3566 - DNA, 19 bp, Homo sapiens
  siRNA target sequence for ETV1 (NM_004956.2,1357-1375).
cgatggagacatcaaacaa

SEQ ID NO: 3567 - DNA, 19 bp, Homo sapiens
  siRNA target sequence for ETV1 (NM_004956.2,1393-1411).
ggaaggacccacataccaa

SEQ ID NO: 3568 - DNA, 19 bp, Homo sapiens
  siRNA target sequence for ETV1 (NM_004956.2,1429-1447).
gctctggcagtttttggta

SEQ ID NO: 3569 - DNA, 19 bp, Homo sapiens
  siRNA target sequence for ETV1 (NM_004956.2,1456-1474).
ggatgacccttcaaattct

SEQ ID NO: 3570 - DNA, 19 bp, Homo sapiens
  siRNA target sequence for ETV1 (NM_004956.2,1500-1518).
gcatggaatttaaactgat

SEQ ID NO: 3571 - DNA, 19 bp, Homo sapiens
  siRNA target sequence for ETV1 (NM_004956.2,1538-1556).
cgacgttggggcattcaga

SEQ ID NO: 3572 - DNA, 19 bp, Homo sapiens
  siRNA target sequence for ETV1 (NM_004956.2,1643-1661).
gagagatatgtctacaagt

SEQ ID NO: 3573 - DNA, 19 bp, Homo sapiens
  siRNA target sequence for ETV1 (NM_004956.2,1670-1688).
gatccagaagcccttttct

SEQ ID NO: 3574 - DNA, 19 bp, Homo sapiens
  siRNA target sequence for ETV3 (NM_005240.1,98-116).
gctgtagcatcgtggaaaa

SEQ ID NO: 3575 - DNA, 19 bp, Homo sapiens
  siRNA target sequence for ETV3 (NM_005240.1,261-279).
gggagagtacggggaattt

SEQ ID NO: 3576 - DNA, 19 bp, Homo sapiens
  siRNA target sequence for ETV3 (NM_005240.1,454-472).
cccaactacccattcatca

SEQ ID NO: 3577 - DNA, 19 bp, Homo sapiens
  siRNA target sequence for ETV3 (NM_005240.1,479-497).
ggtcaagtggtaagataca

SEQ ID NO: 3578 - DNA, 19 bp, Homo sapiens
  siRNA target sequence for ETV4 (NM_001986.1,81-99).
ggatgaaagccggatactt

SEQ ID NO: 3579 - DNA, 19 bp, Homo sapiens
  siRNA target sequence for ETV4 (NM_001986.1,210-228).
ccctcgactctgaagatct

SEQ ID NO: 3580 - DNA, 19 bp, Homo sapiens
  siRNA target sequence for ETV4 (NM_001986.1,224-242).
gatctcttccaggatctaa

SEQ ID NO: 3581 - DNA, 19 bp, Homo sapiens
  siRNA target sequence for ETV4 (NM_001986.1,431-449).
ggcgagcagtgcctttact

SEQ ID NO: 3582 - DNA, 19 bp, Homo sapiens
  siRNA target sequence for ETV4 (NM_001986.1,537-555).
gggcagagcaacggaattt

SEQ ID NO: 3583 - DNA, 19 bp, Homo sapiens
  siRNA target sequence for ETV4 (NM_001986.1,742-760).
ctttaagcaagaataccat

SEQ ID NO: 3584 - DNA, 19 bp, Homo sapiens
  siRNA target sequence for ETV4 (NM_001986.1,757-775).
ccatgatcccctgtatgaa

SEQ ID NO: 3585 - DNA, 19 bp, Homo sapiens
  siRNA target sequence for ETV4 (NM_001986.1,888-906).
ccgggtgcgcatcaatgta

SEQ ID NO: 3586 - DNA, 19 bp, Homo sapiens
  siRNA target sequence for ETV4 (NM_001986.1,955-973).
gggctatggctatgagaaa

SEQ ID NO: 3587 - DNA, 19 bp, Homo sapiens
  siRNA target sequence for ETV4 (NM_001986.1,979-997).
gcgaccattcccagatgat

SEQ ID NO: 3588 - DNA, 19 bp, Homo sapiens
  siRNA target sequence for ETV4 (NM_001986.1,1002-1020).
gcgttgtccctgagaaatt

SEQ ID NO: 3589 - DNA, 19 bp, Homo sapiens
  siRNA target sequence for ETV4 (NM_001986.1,1003-1021).
cgttgtccctgagaaattt

SEQ ID NO: 3590 - DNA, 19 bp, Homo sapiens
  siRNA target sequence for ETV4 (NM_001986.1,1039-1057).
ggaaggggtcggtgcattt

SEQ ID NO: 3591 - DNA, 19 bp, Homo sapiens
  siRNA target sequence for ETV4 (NM_001986.1,1120-1138).
gctggatgacccaacaaat

SEQ ID NO: 3592 - DNA, 19 bp, Homo sapiens
  siRNA target sequence for ETV4 (NM_001986.1,1257-1275).
gccgctcgctccgatacta

SEQ ID NO: 3593 - DNA, 19 bp, Homo sapiens
  siRNA target sequence for ETV4 (NM_001986.1,1258-1276).
ccgctcgctccgatactat

SEQ ID NO: 3594 - DNA, 19 bp, Homo sapiens
  siRNA target sequence for ETV4 (NM_001986.1,1259-1277).
cgctcgctccgatactatt

SEQ ID NO: 3595 - DNA, 19 bp, Homo sapiens
  siRNA target sequence for ETV4 (NM_001986.1,1260-1278).
gctcgctccgatactatta

SEQ ID NO: 3596 - DNA, 19 bp, Homo sapiens
  siRNA target sequence for ETV4 (NM_001986.1,1261-1279).
ctcgctccgatactattat

SEQ ID NO: 3597 - DNA, 19 bp, Homo sapiens
  siRNA target sequence for ETV4 (NM_001986.1,1267-1285).
ccgatactattatgagaaa

SEQ ID NO: 3598 - DNA, 19 bp, Homo sapiens
  siRNA target sequence for ETV4 (NM_001986.1,1314-1332).
gttacgtgtacaagtttgt

SEQ ID NO: 3599 - DNA, 19 bp, Homo sapiens
  siRNA target sequence for ETV5 (NM_004454.1,434-452).
ccagattttcagtctgata

SEQ ID NO: 3600 - DNA, 19 bp, Homo sapiens
  siRNA target sequence for ETV5 (NM_004454.1,549-567).
gtgctaactatggagaaaa

SEQ ID NO: 3601 - DNA, 19 bp, Homo sapiens
  siRNA target sequence for ETV5 (NM_004454.1,551-569).
gctaactatggagaaaagt

SEQ ID NO: 3602 - DNA, 19 bp, Homo sapiens
  siRNA target sequence for ETV5 (NM_004454.1,646-664).
ctcacccacccatcagaat

SEQ ID NO: 3603 - DNA, 19 bp, Homo sapiens
  siRNA target sequence for ETV5 (NM_004454.1,776-794).
ggaccacagcagcaaacat

SEQ ID NO: 3604 - DNA, 19 bp, Homo sapiens
  siRNA target sequence for ETV5 (NM_004454.1,845-863).
cctgaaaaccagtatccat

SEQ ID NO: 3605 - DNA, 19 bp, Homo sapiens
  siRNA target sequence for ETV5 (NM_004454.1,957-975).
ggcaaatgtcagaacctat

SEQ ID NO: 3606 - DNA, 19 bp, Homo sapiens
  siRNA target sequence for ETV5 (NM_004454.1,997-1015).
ccctcagggattcaaacaa

SEQ ID NO: 3607 - DNA, 19 bp, Homo sapiens
  siRNA target sequence for ETV5 (NM_004454.1,1103-1121).
caggagcctcgggattact

SEQ ID NO: 3608 - DNA, 19 bp, Homo sapiens
  siRNA target sequence for ETV5 (NM_004454.1,1179-1197).
ccagcagccatgaaggttt

SEQ ID NO: 3609 - DNA, 19 bp, Homo sapiens
  siRNA target sequence for ETV5 (NM_004454.1,1225-1243).
ctttgacgacacttgtgtt

SEQ ID NO: 3610 - DNA, 19 bp, Homo sapiens
  siRNA target sequence for ETV5 (NM_004454.1,1342-1360).
cctggtcacccttcttgat

SEQ ID NO: 3611 - DNA, 19 bp, Homo sapiens
  siRNA target sequence for ETV5 (NM_004454.1,1544-1562).
gagcgatacgtctacaaat

SEQ ID NO: 3612 - DNA, 19 bp, Homo sapiens
  siRNA target sequence for ETV5 (NM_004454.1,1546-1564).
gcgatacgtctacaaattt

SEQ ID NO: 3613 - DNA, 19 bp, Homo sapiens
  siRNA target sequence for ETV5 (NM_004454.1,1666-1684).
gccgctgacccactttgaa

SEQ ID NO: 3614 - DNA, 19 bp, Homo sapiens
  siRNA target sequence for ETV6 (NM_001987.2,58-76).
caggaacgaatttcatata

SEQ ID NO: 3615 - DNA, 19 bp, Homo sapiens
  siRNA target sequence for ETV6 (NM_001987.2,110-128).
cctcgacgccacttcatgt

SEQ ID NO: 3616 - DNA, 19 bp, Homo sapiens
  siRNA target sequence for ETV6 (NM_001987.2,111-129).
ctcgacgccacttcatgtt

SEQ ID NO: 3617 - DNA, 19 bp, Homo sapiens
  siRNA target sequence for ETV6 (NM_001987.2,184-202).
ctgcgcttgcagccaattt

SEQ ID NO: 3618 - DNA, 19 bp, Homo sapiens
  siRNA target sequence for ETV6 (NM_001987.2,187-205).
cgcttgcagccaatttact

SEQ ID NO: 3619 - DNA, 19 bp, Homo sapiens
  siRNA target sequence for ETV6 (NM_001987.2,231-249).
gctcaagtgggctgaaaat

SEQ ID NO: 3620 - DNA, 19 bp, Homo sapiens
  siRNA target sequence for ETV6 (NM_001987.2,271-289).
gacagcaacacgtttgaaa

SEQ ID NO: 3621 - DNA, 19 bp, Homo sapiens
  siRNA target sequence for ETV6 (NM_001987.2,322-340).
gaggactttcgctatcgat

SEQ ID NO: 3622 - DNA, 19 bp, Homo sapiens
  siRNA target sequence for ETV6 (NM_001987.2,333-351).
ctatcgatctcctcattca

SEQ ID NO: 3623 - DNA, 19 bp, Homo sapiens
  siRNA target sequence for ETV6 (NM_001987.2,353-371).
gtgatgtgctctatgaact

SEQ ID NO: 3624 - DNA, 19 bp, Homo sapiens
  siRNA target sequence for ETV6 (NM_001987.2,430-448).
cctggaaactctatacaca

SEQ ID NO: 3625 - DNA, 19 bp, Homo sapiens
  siRNA target sequence for ETV6 (NM_001987.2,449-467).
cacagccggaggtcatact

SEQ ID NO: 3626 - DNA, 19 bp, Homo sapiens
  siRNA target sequence for ETV6 (NM_001987.2,509-527).
ccaggccatccgtggataa

SEQ ID NO: 3627 - DNA, 19 bp, Homo sapiens
  siRNA target sequence for ETV6 (NM_001987.2,512-530).
ggccatccgtggataatgt

SEQ ID NO: 3628 - DNA, 19 bp, Homo sapiens
  siRNA target sequence for ETV6 (NM_001987.2,573-591).
gtcacctatcacgacaaat

SEQ ID NO: 3629 - DNA, 19 bp, Homo sapiens
  siRNA target sequence for ETV6 (NM_001987.2,575-593).
cacctatcacgacaaatca

SEQ ID NO: 3630 - DNA, 19 bp, Homo sapiens
  siRNA target sequence for ETV6 (NM_001987.2,733-751).
gtgtctcccatggagaata

SEQ ID NO: 3631 - DNA, 19 bp, Homo sapiens
  siRNA target sequence for ETV6 (NM_001987.2,739-757).
cccatggagaataatcact

SEQ ID NO: 3632 - DNA, 19 bp, Homo sapiens
  siRNA target sequence for ETV6 (NM_001987.2,868-886).
cggcactccgtggatttca

SEQ ID NO: 3633 - DNA, 19 bp, Homo sapiens
  siRNA target sequence for ETV6 (NM_001987.2,869-887).
ggcactccgtggatttcaa

SEQ ID NO: 3634 - DNA, 19 bp, Homo sapiens
  siRNA target sequence for ETV6 (NM_001987.2,870-888).
gcactccgtggatttcaaa

SEQ ID NO: 3635 - DNA, 19 bp, Homo sapiens
  siRNA target sequence for ETV6 (NM_001987.2,1073-1091).
ctgacagccggtacgaaaa

SEQ ID NO: 3636 - DNA, 19 bp, Homo sapiens
  siRNA target sequence for ETV6 (NM_001987.2,1075-1093).
gacagccggtacgaaaact

SEQ ID NO: 3637 - DNA, 19 bp, Homo sapiens
  siRNA target sequence for ETV6 (NM_001987.2,1079-1097).
gccggtacgaaaacttcat

SEQ ID NO: 3638 - DNA, 19 bp, Homo sapiens
  siRNA target sequence for ETV6 (NM_001987.2,1156-1174).
cgactgtggggaaaccata

SEQ ID NO: 3639 - DNA, 19 bp, Homo sapiens
  siRNA target sequence for ETV6 (NM_001987.2,1219-1237).
cgccactactacaaactaa

SEQ ID NO: 3640 - DNA, 19 bp, Homo sapiens
  siRNA target sequence for ETV6 (NM_001987.2,1220-1238).
gccactactacaaactaaa

SEQ ID NO: 3641 - DNA, 19 bp, Homo sapiens
  siRNA target sequence for ETV6 (NM_001987.2,1224-1242).
ctactacaaactaaacatt

SEQ ID NO: 3642 - DNA, 19 bp, Homo sapiens
  siRNA target sequence for ETV7 (NM_016135.2,218-236).
cgtgcaagccagatgtgaa

SEQ ID NO: 3643 - DNA, 19 bp, Homo sapiens
  siRNA target sequence for ETV7 (NM_016135.2,226-244).
ccagatgtgaagctcaaat

SEQ ID NO: 3644 - DNA, 19 bp, Homo sapiens
  siRNA target sequence for ETV7 (NM_016135.2,454-472).
caggtgacgtcctgtatga

SEQ ID NO: 3645 - DNA, 19 bp, Homo sapiens
  siRNA target sequence for ETV7 (NM_016135.2,710-728).
ggagtccctcaacttatgt

SEQ ID NO: 3646 - DNA, 19 bp, Homo sapiens
  siRNA target sequence for ETV7 (NM_016135.2,861-879).
cgatatgagccctacatca

SEQ ID NO: 3647 - DNA, 19 bp, Homo sapiens
  siRNA target sequence for ETV7 (NM_016135.2,990-1008).
cgtgccctgcgccactatt

SEQ ID NO: 3648 - DNA, 19 bp, Homo sapiens
  siRNA target sequence for ETV7 (NM_016135.2,998-1016).
gcgccactattataagctt

SEQ ID NO: 3649 - DNA, 19 bp, Homo sapiens
  siRNA target sequence for ETV7 (NM_016135.2,999-1017).
cgccactattataagctta

SEQ ID NO: 3650 - DNA, 19 bp, Homo sapiens
  siRNA target sequence for ETV7 (NM_016135.2,1000-1018).
gccactattataagcttaa

SEQ ID NO: 3651 - DNA, 19 bp, Homo sapiens
  siRNA target sequence for ETV7 (NM_016135.2,1001-1019).
ccactattataagcttaat

SEQ ID NO: 3652 - DNA, 19 bp, Homo sapiens
  siRNA target sequence for ETV7 (NM_016135.2,1052-1070).
gttcagatttctaaagact

SEQ ID NO: 3653 - DNA, 19 bp, Homo sapiens
  siRNA target sequence for ETV7 (NM_016135.2,1151-1169).
caagaggccagaaatctct

SEQ ID NO: 3654 - DNA, 19 bp, Homo sapiens
  siRNA target sequence for EVX1 (NM_001989.2,569-587).
gacaccgagtcggatttct

SEQ ID NO: 3655 - DNA, 19 bp, Homo sapiens
  siRNA target sequence for EVX1 (NM_001989.2,573-591).
ccgagtcggatttctatga

SEQ ID NO: 3656 - DNA, 19 bp, Homo sapiens
  siRNA target sequence for EVX1 (NM_001989.2,574-592).
cgagtcggatttctatgaa

SEQ ID NO: 3657 - DNA, 19 bp, Homo sapiens
  siRNA target sequence for EVX1 (NM_001989.2,989-1007).
gccttctacacttacatga

SEQ ID NO: 3658 - DNA, 19 bp, Homo sapiens
  siRNA target sequence for EVX1 (NM_001989.2,1433-1451).
gaggtgcccctcactagat

SEQ ID NO: 3659 - DNA, 19 bp, Homo sapiens
  siRNA target sequence for FHX (NM_018416.2,1139-1157).
gaccctccgagctaccatt

SEQ ID NO: 3660 - DNA, 19 bp, Homo sapiens
  siRNA target sequence for FHX (NM_018416.2,1143-1161).
ctccgagctaccattgaga

SEQ ID NO: 3661 - DNA, 19 bp, Homo sapiens
  siRNA target sequence for FHX (NM_018416.2,1194-1212).
gggagcagccgcaagtgtt

SEQ ID NO: 3662 - DNA, 19 bp, Homo sapiens
  siRNA target sequence for FHX (NM_018416.2,1219-1237).
ggtcacccacagatcctaa

SEQ ID NO: 3663 - DNA, 19 bp, Homo sapiens
  siRNA target sequence for FHX (NM_018416.2,1220-1238).
gtcacccacagatcctaat

SEQ ID NO: 3664 - DNA, 19 bp, Homo sapiens
  siRNA target sequence for FHX (NM_018416.2,1366-1384).
gctggatctgtgataactt

SEQ ID NO: 3665 - DNA, 19 bp, Homo sapiens
  siRNA target sequence for FHX (NM_018416.2,1382-1400).
cttcccctattacaagaat

SEQ ID NO: 3666 - DNA, 19 bp, Homo sapiens
  siRNA target sequence for FHX (NM_018416.2,1484-1502).
ccctgggaagggttcctat

SEQ ID NO: 3667 - DNA, 19 bp, Homo sapiens
  siRNA target sequence for FHX (NM_018416.2,1493-1511).
gggttcctattggacaatt

SEQ ID NO: 3668 - DNA, 19 bp, Homo sapiens
  siRNA target sequence for FHX (NM_018416.2,1524-1542).
gacatttcccgaaagagaa

SEQ ID NO: 3669 - DNA, 19 bp, Homo sapiens
  siRNA target sequence for FHX (NM_018416.2,1543-1561).
gacaccctccagatgatga

SEQ ID NO: 3670 - DNA, 19 bp, Homo sapiens
  siRNA target sequence for FHX (NM_018416.2,1668-1686).
cttcagagccccacatcta

SEQ ID NO: 3671 - DNA, 19 bp, Homo sapiens
  siRNA target sequence for FHX (NM_018416.2,1742-1760).
ggcttcaggccgagaaagt

SEQ ID NO: 3672 - DNA, 19 bp, Homo sapiens
  siRNA target sequence for FHX (NM_018416.2,1929-1947).
ccaccctcgaacaactact

SEQ ID NO: 3673 - DNA, 19 bp, Homo sapiens
  siRNA target sequence for FHX (NM_018416.2,1930-1948).
caccctcgaacaactacta

SEQ ID NO: 3674 - DNA, 19 bp, Homo sapiens
  siRNA target sequence for FHX (NM_018416.2,1932-1950).
ccctcgaacaactactaca

SEQ ID NO: 3675 - DNA, 19 bp, Homo sapiens
  siRNA target sequence for FHX (NM_018416.2,2320-2338).
ctgactggtgctctaatat

SEQ ID NO: 3676 - DNA, 19 bp, Homo sapiens
  siRNA target sequence for FHX (NM_018416.2,2329-2347).
gctctaatattgactcttt

SEQ ID NO: 3677 - DNA, 19 bp, Homo sapiens
  siRNA target sequence for FHX (NM_018416.2,2330-2348).
ctctaatattgactcttta

SEQ ID NO: 3678 - DNA, 19 bp, Homo sapiens
  siRNA target sequence for FHX (NM_018416.2,2367-2385).
gtgaatcggctcaattggt

SEQ ID NO: 3679 - DNA, 19 bp, Homo sapiens
  siRNA target sequence for FHX (NM_018416.2,2389-2407).
gcattgagcagtcacaatt

SEQ ID NO: 3680 - DNA, 19 bp, Homo sapiens
  siRNA target sequence for FHX (NM_018416.2,2455-2473).
ccctcgaccagcatcacat

SEQ ID NO: 3681 - DNA, 19 bp, Homo sapiens
  siRNA target sequence for FHX (NM_018416.2,2466-2484).
catcacattgccaatctgt

SEQ ID NO: 3682 - DNA, 19 bp, Homo sapiens
  siRNA target sequence for FHX (NM_018416.2,2608-2626).
cagccatgagccaagtgaa

SEQ ID NO: 3683 - DNA, 19 bp, Homo sapiens
  siRNA target sequence for FHX (NM_018416.2,2615-2633).
gagccaagtgaactcttat

SEQ ID NO: 3684 - DNA, 19 bp, Homo sapiens
  siRNA target sequence for FHX (NM_018416.2,2716-2734).
gcccagcacaccatatggt

SEQ ID NO: 3685 - DNA, 19 bp, Homo sapiens
  siRNA target sequence for FKHL18 (NM_004118.3,138-156).
cagctacatcgcccttatt

SEQ ID NO: 3686 - DNA, 19 bp, Homo sapiens
  siRNA target sequence for FKHL18 (NM_004118.3,362-380).
ctgactgccacgacatgtt

SEQ ID NO: 3687 - DNA, 19 bp, Homo sapiens
  siRNA target sequence for FKHL18 (NM_004118.3,646-664).
gagcccaaagagatttcca

SEQ ID NO: 3688 - DNA, 19 bp, Homo sapiens
  siRNA target sequence for FKHL18 (NM_004118.3,749-767).
cagaggctgagagttttaa

SEQ ID NO: 3689 - DNA, 19 bp, Homo sapiens
  siRNA target sequence for FKHL18 (NM_004118.3,751-769).
gaggctgagagttttaata

SEQ ID NO: 3690 - DNA, 19 bp, Homo sapiens
  siRNA target sequence for FKHL18 (NM_004118.3,826-844).
cggctgcaggcactgaatt

SEQ ID NO: 3691 - DNA, 19 bp, Homo sapiens
  siRNA target sequence for FKHL18 (NM_004118.3,827-845).
ggctgcaggcactgaattt

SEQ ID NO: 3692 - DNA, 19 bp, Homo sapiens
  siRNA target sequence for FKHL18 (NM_004118.3,1040-1058).
ggacgccaggaatgttctt

SEQ ID NO: 3693 - DNA, 19 bp, Homo sapiens
  siRNA target sequence for FLI1 (NM_002017.2,300-318).
ggcagccccacaagatcaa

SEQ ID NO: 3694 - DNA, 19 bp, Homo sapiens
  siRNA target sequence for FLI1 (NM_002017.2,415-433).
ggactgcagcgttagcaaa

SEQ ID NO: 3695 - DNA, 19 bp, Homo sapiens
  siRNA target sequence for FLI1 (NM_002017.2,416-434).
gactgcagcgttagcaaat

SEQ ID NO: 3696 - DNA, 19 bp, Homo sapiens
  siRNA target sequence for FLI1 (NM_002017.2,458-476).
gagtccaaccccatgaact

SEQ ID NO: 3697 - DNA, 19 bp, Homo sapiens
  siRNA target sequence for FLI1 (NM_002017.2,483-501).
gctatatggacgagaagaa

SEQ ID NO: 3698 - DNA, 19 bp, Homo sapiens
  siRNA target sequence for FLI1 (NM_002017.2,484-502).
ctatatggacgagaagaat

SEQ ID NO: 3699 - DNA, 19 bp, Homo sapiens
  siRNA target sequence for FLI1 (NM_002017.2,628-646).
ggagatcgacacatccttt

SEQ ID NO: 3700 - DNA, 19 bp, Homo sapiens
  siRNA target sequence for FLI1 (NM_002017.2,762-780).
gttcactgctggcctataa

SEQ ID NO: 3701 - DNA, 19 bp, Homo sapiens
  siRNA target sequence for FLI1 (NM_002017.2,767-785).
ctgctggcctataatacaa

SEQ ID NO: 3702 - DNA, 19 bp, Homo sapiens
  siRNA target sequence for FLI1 (NM_002017.2,799-817).
ccaatcctcacgattgagt

SEQ ID NO: 3703 - DNA, 19 bp, Homo sapiens
  siRNA target sequence for FLI1 (NM_002017.2,805-823).
ctcacgattgagtgtcaaa

SEQ ID NO: 3704 - DNA, 19 bp, Homo sapiens
  siRNA target sequence for FLI1 (NM_002017.2,820-838).
caaagaagacccttcttat

SEQ ID NO: 3705 - DNA, 19 bp, Homo sapiens
  siRNA target sequence for FLI1 (NM_002017.2,852-870).
gaggagcttggggcaataa

SEQ ID NO: 3706 - DNA, 19 bp, Homo sapiens
  siRNA target sequence for FLI1 (NM_002017.2,854-872).
ggagcttggggcaataaca

SEQ ID NO: 3707 - DNA, 19 bp, Homo sapiens
  siRNA target sequence for FLI1 (NM_002017.2,855-873).
gagcttggggcaataacat

SEQ ID NO: 3708 - DNA, 19 bp, Homo sapiens
  siRNA target sequence for FLI1 (NM_002017.2,857-875).
gcttggggcaataacatga

SEQ ID NO: 3709 - DNA, 19 bp, Homo sapiens
  siRNA target sequence for FLI1 (NM_002017.2,858-876).
cttggggcaataacatgaa

SEQ ID NO: 3710 - DNA, 19 bp, Homo sapiens
  siRNA target sequence for FLI1 (NM_002017.2,908-926).
ggggcacaaacgatcagta

SEQ ID NO: 3711 - DNA, 19 bp, Homo sapiens
  siRNA target sequence for FLI1 (NM_002017.2,909-927).
gggcacaaacgatcagtaa

SEQ ID NO: 3712 - DNA, 19 bp, Homo sapiens
  siRNA target sequence for FLI1 (NM_002017.2,911-929).
gcacaaacgatcagtaaga

SEQ ID NO: 3713 - DNA, 19 bp, Homo sapiens
  siRNA target sequence for FLI1 (NM_002017.2,912-930).
cacaaacgatcagtaagaa

SEQ ID NO: 3714 - DNA, 19 bp, Homo sapiens
  siRNA target sequence for FLI1 (NM_002017.2,918-936).
cgatcagtaagaatacaga

SEQ ID NO: 3715 - DNA, 19 bp, Homo sapiens
  siRNA target sequence for FLI1 (NM_002017.2,1055-1073).
gccaacgccagctgtatca

SEQ ID NO: 3716 - DNA, 19 bp, Homo sapiens
  siRNA target sequence for FLI1 (NM_002017.2,1190-1208).
cgttattactatgataaaa

SEQ ID NO: 3717 - DNA, 19 bp, Homo sapiens
  siRNA target sequence for FLI1 (NM_002017.2,1225-1243).
gcacggcaaaagatatgct

SEQ ID NO: 3718 - DNA, 19 bp, Homo sapiens
  siRNA target sequence for FLI1 (NM_002017.2,1226-1244).
cacggcaaaagatatgctt

SEQ ID NO: 3719 - DNA, 19 bp, Homo sapiens
  siRNA target sequence for FLI1 (NM_002017.2,1293-1311).
ccgagtcgtccatgtacaa

SEQ ID NO: 3720 - DNA, 19 bp, Homo sapiens
  siRNA target sequence for FLI1 (NM_002017.2,1295-1313).
gagtcgtccatgtacaagt

SEQ ID NO: 3721 - DNA, 19 bp, Homo sapiens
  siRNA target sequence for FLI1 (NM_002017.2,1354-1372).
ccagcagaaggtgaacttt

SEQ ID NO: 3722 - DNA, 19 bp, Homo sapiens
  siRNA target sequence for FLI1 (NM_002017.2,1417-1435).
ctttggagccgcatcacaa

SEQ ID NO: 3723 - DNA, 19 bp, Homo sapiens
  siRNA target sequence for FLI1 (NM_002017.2,1421-1439).
ggagccgcatcacaatact

SEQ ID NO: 3724 - DNA, 19 bp, Homo sapiens
  siRNA target sequence for FLI1 (NM_002017.2,1498-1516).
ccacgtgccttcacactta

SEQ ID NO: 3725 - DNA, 19 bp, Homo sapiens
  siRNA target sequence for FLJ12287 (NM_022367.2,474-492).
ggggtccccaggctaaaga

SEQ ID NO: 3726 - DNA, 19 bp, Homo sapiens
  siRNA target sequence for FLJ12287 (NM_022367.2,477-495).
gtccccaggctaaagaaca

SEQ ID NO: 3727 - DNA, 19 bp, Homo sapiens
  siRNA target sequence for FLJ12287 (NM_022367.2,529-547).
gtgaatgtgcctttaagaa

SEQ ID NO: 3728 - DNA, 19 bp, Homo sapiens
  siRNA target sequence for FLJ12287 (NM_022367.2,558-576).
gagacacagtgtttcaact

SEQ ID NO: 3729 - DNA, 19 bp, Homo sapiens
  siRNA target sequence for FLJ12287 (NM_022367.2,583-601).
gtgtcctggtttcttacaa

SEQ ID NO: 3730 - DNA, 19 bp, Homo sapiens
  siRNA target sequence for FLJ12287 (NM_022367.2,774-792).
ctctattctggtactatga

SEQ ID NO: 3731 - DNA, 19 bp, Homo sapiens
  siRNA target sequence for FLJ12287 (NM_022367.2,913-931).
cgacccaggtcgtctactt

SEQ ID NO: 3732 - DNA, 19 bp, Homo sapiens
  siRNA target sequence for FLJ12287 (NM_022367.2,916-934).
cccaggtcgtctacttctt

SEQ ID NO: 3733 - DNA, 19 bp, Homo sapiens
  siRNA target sequence for FLJ12287 (NM_022367.2,946-964).
cagccagcgagtttgactt

SEQ ID NO: 3734 - DNA, 19 bp, Homo sapiens
  siRNA target sequence for FLJ12287 (NM_022367.2,1229-1247).
ggacattgaacgtgtcttt

SEQ ID NO: 3735 - DNA, 19 bp, Homo sapiens
  siRNA target sequence for FLJ12287 (NM_022367.2,1230-1248).
gacattgaacgtgtcttta

SEQ ID NO: 3736 - DNA, 19 bp, Homo sapiens
  siRNA target sequence for FLJ12287 (NM_022367.2,1242-1260).
gtctttaaggggaaataca

SEQ ID NO: 3737 - DNA, 19 bp, Homo sapiens
  siRNA target sequence for FLJ12287 (NM_022367.2,1279-1297).
cttcacgctggactactta

SEQ ID NO: 3738 - DNA, 19 bp, Homo sapiens
  siRNA target sequence for FLJ12287 (NM_022367.2,1412-1430).
gcccctgctggtgaaatct

SEQ ID NO: 3739 - DNA, 19 bp, Homo sapiens
  siRNA target sequence for FLJ12287 (NM_022367.2,1480-1498).
ggcacagccatcttgtcat

SEQ ID NO: 3740 - DNA, 19 bp, Homo sapiens
  siRNA target sequence for FLJ12287 (NM_022367.2,1628-1646).
ccagggtgcagtgtttgta

SEQ ID NO: 3741 - DNA, 19 bp, Homo sapiens
  siRNA target sequence for FLJ12287 (NM_022367.2,1671-1689).
gtgccccgagccaactgta

SEQ ID NO: 3742 - DNA, 19 bp, Homo sapiens
  siRNA target sequence for FLJ12287 (NM_022367.2,1882-1900).
cgcaaatcattaaagaagt

SEQ ID NO: 3743 - DNA, 19 bp, Homo sapiens
  siRNA target sequence for FLJ12287 (NM_022367.2,2000-2018).
ctcttccactgtctacaat

SEQ ID NO: 3744 - DNA, 19 bp, Homo sapiens
  siRNA target sequence for FLJ12895 (NM_023926.3,547-565).
cctgcgtttccgggaattt

SEQ ID NO: 3745 - DNA, 19 bp, Homo sapiens
  siRNA target sequence for FLJ12895 (NM_023926.3,696-714).
gcatcctgcctgataaggt

SEQ ID NO: 3746 - DNA, 19 bp, Homo sapiens
  siRNA target sequence for FLJ12895 (NM_023926.3,825-843).
cgggctcatcctcaattct

SEQ ID NO: 3747 - DNA, 19 bp, Homo sapiens
  siRNA target sequence for FLJ12895 (NM_023926.3,963-981).
ctccggaccccctgtttct

SEQ ID NO: 3748 - DNA, 19 bp, Homo sapiens
  siRNA target sequence for FLJ12895 (NM_023926.3,1198-1216).
ccggttggtggaaagagat

SEQ ID NO: 3749 - DNA, 19 bp, Homo sapiens
  siRNA target sequence for FLJ20626 (NM_017908.1,913-931).
ctgcgctcgggaaatgaga

SEQ ID NO: 3750 - DNA, 19 bp, Homo sapiens
  siRNA target sequence for FLJ21616 (NM_024567.1,128-146).
gtcacctagcaacagttat

SEQ ID NO: 3751 - DNA, 19 bp, Homo sapiens
  siRNA target sequence for FLJ21616 (NM_024567.1,130-148).
cacctagcaacagttatga

SEQ ID NO: 3752 - DNA, 19 bp, Homo sapiens
  siRNA target sequence for FLJ21616 (NM_024567.1,161-179).
gccttgcactaccaatcaa

SEQ ID NO: 3753 - DNA, 19 bp, Homo sapiens
  siRNA target sequence for FLJ21616 (NM_024567.1,162-180).
ccttgcactaccaatcaaa

SEQ ID NO: 3754 - DNA, 19 bp, Homo sapiens
  siRNA target sequence for FLJ21616 (NM_024567.1,163-181).
cttgcactaccaatcaaaa

SEQ ID NO: 3755 - DNA, 19 bp, Homo sapiens
  siRNA target sequence for FLJ21616 (NM_024567.1,294-312).
gacctagatgtagatgata

SEQ ID NO: 3756 - DNA, 19 bp, Homo sapiens
  siRNA target sequence for FLJ21616 (NM_024567.1,309-327).
gataaagtggaagaattaa

SEQ ID NO: 3757 - DNA, 19 bp, Homo sapiens
  siRNA target sequence for FLJ21616 (NM_024567.1,334-352).
gggacagcagtgtgataaa

SEQ ID NO: 3758 - DNA, 19 bp, Homo sapiens
  siRNA target sequence for FLJ21616 (NM_024567.1,372-390).
cttgccaatcggaggattt

SEQ ID NO: 3759 - DNA, 19 bp, Homo sapiens
  siRNA target sequence for FLJ21616 (NM_024567.1,426-444).
cagagccggatctctcatt

SEQ ID NO: 3760 - DNA, 19 bp, Homo sapiens
  siRNA target sequence for FLJ21616 (NM_024567.1,499-517).
gatggtatcaacttgagaa

SEQ ID NO: 3761 - DNA, 19 bp, Homo sapiens
  siRNA target sequence for FLJ21616 (NM_024567.1,524-542).
ccctggcgctacactaagt

SEQ ID NO: 3762 - DNA, 19 bp, Homo sapiens
  siRNA target sequence for FLJ21616 (NM_024567.1,525-543).
cctggcgctacactaagta

SEQ ID NO: 3763 - DNA, 19 bp, Homo sapiens
  siRNA target sequence for FLJ21616 (NM_024567.1,526-544).
ctggcgctacactaagtat

SEQ ID NO: 3764 - DNA, 19 bp, Homo sapiens
  siRNA target sequence for FLJ21616 (NM_024567.1,528-546).
ggcgctacactaagtatga

SEQ ID NO: 3765 - DNA, 19 bp, Homo sapiens
  siRNA target sequence for FLJ21616 (NM_024567.1,530-548).
cgctacactaagtatgaga

SEQ ID NO: 3766 - DNA, 19 bp, Homo sapiens
  siRNA target sequence for FLJ21616 (NM_024567.1,570-588).
gaccctgaatggagacaaa

SEQ ID NO: 3767 - DNA, 19 bp, Homo sapiens
  siRNA target sequence for FLJ21616 (NM_024567.1,604-622).
ctgccacatctggtacttt

SEQ ID NO: 3768 - DNA, 19 bp, Homo sapiens
  siRNA target sequence for FLJ21616 (NM_024567.1,629-647).
gcgacgagggagtcgattt

SEQ ID NO: 3769 - DNA, 19 bp, Homo sapiens
  siRNA target sequence for FLJ21616 (NM_024567.1,633-651).
cgagggagtcgatttacct

SEQ ID NO: 3770 - DNA, 19 bp, Homo sapiens
  siRNA target sequence for FLJ21616 (NM_024567.1,682-700).
gttacttcaatgagaatca

SEQ ID NO: 3771 - DNA, 19 bp, Homo sapiens
  siRNA target sequence for FLJ21616 (NM_024567.1,737-755).
cgcttgcaatgcagttata

SEQ ID NO: 3772 - DNA, 19 bp, Homo sapiens
  siRNA target sequence for FLJ21616 (NM_024567.1,801-819).
ctgaaagtatataattggt

SEQ ID NO: 3773 - DNA, 19 bp, Homo sapiens
  siRNA target sequence for FLJ21616 (NM_024567.1,803-821).
gaaagtatataattggttt

SEQ ID NO: 3774 - DNA, 19 bp, Homo sapiens
  siRNA target sequence for FLJ21616 (NM_024567.1,807-825).
gtatataattggtttgcta

SEQ ID NO: 3775 - DNA, 19 bp, Homo sapiens
  siRNA target sequence for FLJ21616 (NM_024567.1,927-945).
gatgtcgacgggaatgact

SEQ ID NO: 3776 - DNA, 19 bp, Homo sapiens
  siRNA target sequence for FLJ21616 (NM_024567.1,1018-1036).
cagtcaaccacactatctt

SEQ ID NO: 3777 - DNA, 19 bp, Homo sapiens
  siRNA target sequence for FLJ21616 (NM_024567.1,1048-1066).
gacaaggagccaacgaaat

SEQ ID NO: 3778 - DNA, 19 bp, Homo sapiens
  siRNA target sequence for FLJ21616 (NM_024567.1,1050-1068).
caaggagccaacgaaatca

SEQ ID NO: 3779 - DNA, 19 bp, Homo sapiens
  siRNA target sequence for FLJ23614 (NM_152695.2,268-286).
gggcctcatgaagcattta

SEQ ID NO: 3780 - DNA, 19 bp, Homo sapiens
  siRNA target sequence for FLJ23614 (NM_152695.2,415-433).
gagcactgcccagagaata

SEQ ID NO: 3781 - DNA, 19 bp, Homo sapiens
  siRNA target sequence for FLJ23614 (NM_152695.2,420-438).
ctgcccagagaatagagaa

SEQ ID NO: 3782 - DNA, 19 bp, Homo sapiens
  siRNA target sequence for FLJ23614 (NM_152695.2,440-458).
gagttgtgtcactgataga

SEQ ID NO: 3783 - DNA, 19 bp, Homo sapiens
  siRNA target sequence for FLJ23614 (NM_152695.2,451-469).
ctgatagaagacttacaga

SEQ ID NO: 3784 - DNA, 19 bp, Homo sapiens
  siRNA target sequence for FLJ23614 (NM_152695.2,489-507).
gcagcaggttgatatgcat

SEQ ID NO: 3785 - DNA, 19 bp, Homo sapiens
  siRNA target sequence for FLJ23614 (NM_152695.2,644-662).
ggccaccggagctgaacta

SEQ ID NO: 3786 - DNA, 19 bp, Homo sapiens
  siRNA target sequence for FLJ23614 (NM_152695.2,645-663).
gccaccggagctgaactat

SEQ ID NO: 3787 - DNA, 19 bp, Homo sapiens
  siRNA target sequence for FLJ23614 (NM_152695.2,713-731).
caaaacttgacatgaactt

SEQ ID NO: 3788 - DNA, 19 bp, Homo sapiens
  siRNA target sequence for FLJ23614 (NM_152695.2,765-783).
ggaattacaggattctaaa

SEQ ID NO: 3789 - DNA, 19 bp, Homo sapiens
  siRNA target sequence for FLJ23614 (NM_152695.2,822-840).
gatcgggatagaaaatgaa

SEQ ID NO: 3790 - DNA, 19 bp, Homo sapiens
  siRNA target sequence for FLJ23614 (NM_152695.2,867-885).
ggagactatgtatccattt

SEQ ID NO: 3791 - DNA, 19 bp, Homo sapiens
  siRNA target sequence for FLJ23614 (NM_152695.2,912-930).
ccagggtcccattttgcaa

SEQ ID NO: 3792 - DNA, 19 bp, Homo sapiens
  siRNA target sequence for FLJ23614 (NM_152695.2,919-937).
cccattttgcaaaaagact

SEQ ID NO: 3793 - DNA, 19 bp, Homo sapiens
  siRNA target sequence for FLJ23614 (NM_152695.2,934-952).
gactatgtacagttagaaa

SEQ ID NO: 3794 - DNA, 19 bp, Homo sapiens
  siRNA target sequence for FLJ23614 (NM_152695.2,1225-1243).
cgtagttcagacctttata

SEQ ID NO: 3795 - DNA, 19 bp, Homo sapiens
  siRNA target sequence for FLJ23614 (NM_152695.2,1307-1325).
ctcggcggtcacatcttat

SEQ ID NO: 3796 - DNA, 19 bp, Homo sapiens
  siRNA target sequence for FLJ23614 (NM_152695.2,1563-1581).
gagaccaagcctcgttatt

SEQ ID NO: 3797 - DNA, 19 bp, Homo sapiens
  siRNA target sequence for FLJ23614 (NM_152695.2,1572-1590).
cctcgttattcatttaaga

SEQ ID NO: 3798 - DNA, 19 bp, Homo sapiens
  siRNA target sequence for FLJ23614 (NM_152695.2,1608-1626).
gccatacaagtgtactcat

SEQ ID NO: 3799 - DNA, 19 bp, Homo sapiens
  siRNA target sequence for FLJ23614 (NM_152695.2,1666-1684).
caccaggtcactcacttta

SEQ ID NO: 3800 - DNA, 19 bp, Homo sapiens
  siRNA target sequence for FLJ23614 (NM_152695.2,1668-1686).
ccaggtcactcactttaga

SEQ ID NO: 3801 - DNA, 19 bp, Homo sapiens
  siRNA target sequence for FLJ23614 (NM_152695.2,1678-1696).
cactttagaggacttattt

SEQ ID NO: 3802 - DNA, 19 bp, Homo sapiens
  siRNA target sequence for FLJ25169 (NM_152568.1,137-155).
gacactcctgcatgtcttt

SEQ ID NO: 3803 - DNA, 19 bp, Homo sapiens
  siRNA target sequence for FLJ25680 (NM_153216.1,237-255).
gtcccctgccacacgaatt

SEQ ID NO: 3804 - DNA, 19 bp, Homo sapiens
  siRNA target sequence for FLJ25680 (NM_153216.1,394-412).
catctcgggcatactgaaa

SEQ ID NO: 3805 - DNA, 19 bp, Homo sapiens
  siRNA target sequence for FLJ25680 (NM_153216.1,399-417).
cgggcatactgaaagagtt

SEQ ID NO: 3806 - DNA, 19 bp, Homo sapiens
  siRNA target sequence for FLJ25680 (NM_153216.1,578-596).
ctgcgaccactgctgaaaa

SEQ ID NO: 3807 - DNA, 19 bp, Homo sapiens
  siRNA target sequence for FLJ25680 (NM_153216.1,581-599).
cgaccactgctgaaaaagt

SEQ ID NO: 3808 - DNA, 19 bp, Homo sapiens
  siRNA target sequence for FLJ25680 (NM_153216.1,625-643).
ccttctgggcttatgcaaa

SEQ ID NO: 3809 - DNA, 19 bp, Homo sapiens
  siRNA target sequence for FLJ25680 (NM_153216.1,626-644).
cttctgggcttatgcaaaa

SEQ ID NO: 3810 - DNA, 19 bp, Homo sapiens
  siRNA target sequence for FLJ25680 (NM_153216.1,799-817).
ggttcgagtttggttctat

SEQ ID NO: 3811 - DNA, 19 bp, Homo sapiens
  siRNA target sequence for FLJ25680 (NM_153216.1,800-818).
gttcgagtttggttctata

SEQ ID NO: 3812 - DNA, 19 bp, Homo sapiens
  siRNA target sequence for FLJ25680 (NM_153216.1,832-850).
gggcagtcgaccaaccaat

SEQ ID NO: 3813 - DNA, 19 bp, Homo sapiens
  siRNA target sequence for FLJ25680 (NM_153216.1,835-853).
cagtcgaccaaccaatgat

SEQ ID NO: 3814 - DNA, 19 bp, Homo sapiens
  siRNA target sequence for FLJ25680 (NM_153216.1,855-873).
cttccccacgggagattgt

SEQ ID NO: 3815 - DNA, 19 bp, Homo sapiens
  siRNA target sequence for FLJ25680 (NM_153216.1,938-956).
gtggatatcccccactata

SEQ ID NO: 3816 - DNA, 19 bp, Homo sapiens
  siRNA target sequence for FLJ30678 (NM_144657.1,387-405).
gtcattgtaactggtatat

SEQ ID NO: 3817 - DNA, 19 bp, Homo sapiens
  siRNA target sequence for FLJ30678 (NM_144657.1,427-445).
gtaggcaaggaacaaacaa

SEQ ID NO: 3818 - DNA, 19 bp, Homo sapiens
  siRNA target sequence for FLJ30678 (NM_144657.1,472-490).
cacataaaatccctattca

SEQ ID NO: 3819 - DNA, 19 bp, Homo sapiens
  siRNA target sequence for FLJ30678 (NM_144657.1,474-492).
cataaaatccctattcaga

SEQ ID NO: 3820 - DNA, 19 bp, Homo sapiens
  siRNA target sequence for FLJ30678 (NM_144657.1,544-562).
gacaagtagcacactgtaa

SEQ ID NO: 3821 - DNA, 19 bp, Homo sapiens
  siRNA target sequence for FLJ30678 (NM_144657.1,571-589).
ccctactcctaggtgaaaa

SEQ ID NO: 3822 - DNA, 19 bp, Homo sapiens
  siRNA target sequence for FLJ30678 (NM_144657.1,572-590).
cctactcctaggtgaaaaa

SEQ ID NO: 3823 - DNA, 19 bp, Homo sapiens
  siRNA target sequence for FLJ30678 (NM_144657.1,573-591).
ctactcctaggtgaaaaaa

SEQ ID NO: 3824 - DNA, 19 bp, Homo sapiens
  siRNA target sequence for FLJ30678 (NM_144657.1,631-649).
gaaactcagtattcaatca

SEQ ID NO: 3825 - DNA, 19 bp, Homo sapiens
  siRNA target sequence for FLJ30678 (NM_144657.1,719-737).
gtgccaccgaccttgtaaa

SEQ ID NO: 3826 - DNA, 19 bp, Homo sapiens
  siRNA target sequence for FLJ30678 (NM_144657.1,721-739).
gccaccgaccttgtaaaat

SEQ ID NO: 3827 - DNA, 19 bp, Homo sapiens
  siRNA target sequence for FLJ30678 (NM_144657.1,722-740).
ccaccgaccttgtaaaatt

SEQ ID NO: 3828 - DNA, 19 bp, Homo sapiens
  siRNA target sequence for FLJ30678 (NM_144657.1,725-743).
ccgaccttgtaaaattgaa

SEQ ID NO: 3829 - DNA, 19 bp, Homo sapiens
  siRNA target sequence for FLJ30678 (NM_144657.1,784-802).
gcccagcattacataactt

SEQ ID NO: 3830 - DNA, 19 bp, Homo sapiens
  siRNA target sequence for FLJ30678 (NM_144657.1,785-803).
cccagcattacataactta

SEQ ID NO: 3831 - DNA, 19 bp, Homo sapiens
  siRNA target sequence for FLJ30678 (NM_144657.1,786-804).
ccagcattacataacttat

SEQ ID NO: 3832 - DNA, 19 bp, Homo sapiens
  siRNA target sequence for FLJ30678 (NM_144657.1,887-905).
cgattacccccagagaatt

SEQ ID NO: 3833 - DNA, 19 bp, Homo sapiens
  siRNA target sequence for FLJ30678 (NM_144657.1,939-957).
gcagaaggaaattgtttgt

SEQ ID NO: 3834 - DNA, 19 bp, Homo sapiens
  siRNA target sequence for FLJ30678 (NM_144657.1,976-994).
gagatgctgaggatgaata

SEQ ID NO: 3835 - DNA, 19 bp, Homo sapiens
  siRNA target sequence for FLJ30678 (NM_144657.1,1026-1044).
gcacagataccaagctatt

SEQ ID NO: 3836 - DNA, 19 bp, Homo sapiens
  siRNA target sequence for FLJ30678 (NM_144657.1,1029-1047).
cagataccaagctattcga

SEQ ID NO: 3837 - DNA, 19 bp, Homo sapiens
  siRNA target sequence for FLJ30678 (NM_144657.1,1036-1054).
caagctattcgagatttta

SEQ ID NO: 3838 - DNA, 19 bp, Homo sapiens
  siRNA target sequence for FLJ30678 (NM_144657.1,1040-1058).
ctattcgagattttatgaa

SEQ ID NO: 3839 - DNA, 19 bp, Homo sapiens
  siRNA target sequence for FLJ30678 (NM_144657.1,1071-1089).
cttcgagctgagaaccaaa

SEQ ID NO: 3840 - DNA, 19 bp, Homo sapiens
  siRNA target sequence for FLJ30678 (NM_144657.1,1100-1118).
gcccggaccaggaagaaat

SEQ ID NO: 3841 - DNA, 19 bp, Homo sapiens
  siRNA target sequence for FLJ30678 (NM_144657.1,1101-1119).
cccggaccaggaagaaata

SEQ ID NO: 3842 - DNA, 19 bp, Homo sapiens
  siRNA target sequence for FLJ30678 (NM_144657.1,1102-1120).
ccggaccaggaagaaatat

SEQ ID NO: 3843 - DNA, 19 bp, Homo sapiens
  siRNA target sequence for FLJ30678 (NM_144657.1,1156-1174).
cagacaatgtactgtatca

SEQ ID NO: 3844 - DNA, 19 bp, Homo sapiens
  siRNA target sequence for FLJ30678 (NM_144657.1,1158-1176).
gacaatgtactgtatcaaa

SEQ ID NO: 3845 - DNA, 19 bp, Homo sapiens
  siRNA target sequence for FLJ30678 (NM_144657.1,1197-1215).
ccacggacctcattacata

SEQ ID NO: 3846 - DNA, 19 bp, Homo sapiens
  siRNA target sequence for FLJ30678 (NM_144657.1,1212-1230).
catacagcatctagtacaa

SEQ ID NO: 3847 - DNA, 19 bp, Homo sapiens
  siRNA target sequence for FLJ30678 (NM_144657.1,1222-1240).
ctagtacaatgtacagtaa

SEQ ID NO: 3848 - DNA, 19 bp, Homo sapiens
  siRNA target sequence for FLJ30678 (NM_144657.1,1228-1246).
caatgtacagtaataccaa

SEQ ID NO: 3849 - DNA, 19 bp, Homo sapiens
  siRNA target sequence for FLJ30678 (NM_144657.1,1244-1262).
caatccattacggagtaat

SEQ ID NO: 3850 - DNA, 19 bp, Homo sapiens
  siRNA target sequence for FLJ30678 (NM_144657.1,1269-1287).
cctcattttgcatcatcaa

SEQ ID NO: 3851 - DNA, 19 bp, Homo sapiens
  siRNA target sequence for FLJ30678 (NM_144657.1,1270-1288).
ctcattttgcatcatcaaa

SEQ ID NO: 3852 - DNA, 19 bp, Homo sapiens
  siRNA target sequence for FLJ30678 (NM_144657.1,1297-1315).
gattatcacaaaaccaaaa

SEQ ID NO: 3853 - DNA, 19 bp, Homo sapiens
  siRNA target sequence for FLJ30678 (NM_144657.1,1410-1428).
gacttagccacccttaaga

SEQ ID NO: 3854 - DNA, 19 bp, Homo sapiens
  siRNA target sequence for FLJ30678 (NM_144657.1,1492-1510).
caactgaattaaatgttga

SEQ ID NO: 3855 - DNA, 19 bp, Homo sapiens
  siRNA target sequence for FLJ30678 (NM_144657.1,1542-1560).
cgaagaaggaaatatcgtt

SEQ ID NO: 3856 - DNA, 19 bp, Homo sapiens
  siRNA target sequence for FLJ30678 (NM_144657.1,1558-1576).
gtttaatggggattgaagt

SEQ ID NO: 3857 - DNA, 19 bp, Homo sapiens
  siRNA target sequence for FLJ30678 (NM_144657.1,1797-1815).
gtaaccacagataatgtga

SEQ ID NO: 3858 - DNA, 19 bp, Homo sapiens
  siRNA target sequence for FLJ30678 (NM_144657.1,1839-1857).
gaaagtgacatgataagta

SEQ ID NO: 3859 - DNA, 19 bp, Homo sapiens
  siRNA target sequence for FLJ30678 (NM_144657.1,1863-1881).
gaagtagaacaagtaaact

SEQ ID NO: 3860 - DNA, 19 bp, Homo sapiens
  siRNA target sequence for FLJ30678 (NM_144657.1,1866-1884).
gtagaacaagtaaactctt

SEQ ID NO: 3861 - DNA, 19 bp, Homo sapiens
  siRNA target sequence for FLJ30678 (NM_144657.1,1975-1993).
gaagcttgatattagcaat

SEQ ID NO: 3862 - DNA, 19 bp, Homo sapiens
  siRNA target sequence for FLJ30678 (NM_144657.1,1978-1996).
gcttgatattagcaatgaa

SEQ ID NO: 3863 - DNA, 19 bp, Homo sapiens
  siRNA target sequence for FLJ30678 (NM_144657.1,1989-2007).
gcaatgaaagctgatgata

SEQ ID NO: 3864 - DNA, 19 bp, Homo sapiens
  siRNA target sequence for FLJ30678 (NM_144657.1,2021-2039).
ggcactgctgtcagattta

SEQ ID NO: 3865 - DNA, 19 bp, Homo sapiens
  siRNA target sequence for FLJ30678 (NM_144657.1,2041-2059).
ctcctgaattagaggaaat

SEQ ID NO: 3866 - DNA, 19 bp, Homo sapiens
  siRNA target sequence for FLJ30678 (NM_144657.1,2091-2109).
gatacctcattcagtgtat

SEQ ID NO: 3867 - DNA, 19 bp, Homo sapiens
  siRNA target sequence for FLJ33779 (NM_182572.2,753-771).
cactccccgaggaaagtga

SEQ ID NO: 3868 - DNA, 19 bp, Homo sapiens
  siRNA target sequence for FLJ33779 (NM_182572.2,1419-1437).
ggatggtccacctcattga

SEQ ID NO: 3869 - DNA, 19 bp, Homo sapiens
  siRNA target sequence for FLJ35867 (NM_152455.2,3-21).
ggccaaatcagctctaaga

SEQ ID NO: 3870 - DNA, 19 bp, Homo sapiens
  siRNA target sequence for FLJ35867 (NM_152455.2,5-23).
ccaaatcagctctaagaga

SEQ ID NO: 3871 - DNA, 19 bp, Homo sapiens
  siRNA target sequence for FLJ35867 (NM_152455.2,54-72).
gcgtttcaggagattccat

SEQ ID NO: 3872 - DNA, 19 bp, Homo sapiens
  siRNA target sequence for FLJ35867 (NM_152455.2,55-73).
cgtttcaggagattccatt

SEQ ID NO: 3873 - DNA, 19 bp, Homo sapiens
  siRNA target sequence for FLJ35867 (NM_152455.2,271-289).
ctcgtggaagatttagaaa

SEQ ID NO: 3874 - DNA, 19 bp, Homo sapiens
  siRNA target sequence for FLJ35867 (NM_152455.2,273-291).
cgtggaagatttagaaaga

SEQ ID NO: 3875 - DNA, 19 bp, Homo sapiens
  siRNA target sequence for FLJ35867 (NM_152455.2,368-386).
cgaaatcatcacaagagtt

SEQ ID NO: 3876 - DNA, 19 bp, Homo sapiens
  siRNA target sequence for FLJ35867 (NM_152455.2,516-534).
gagcggattgccatttcct

SEQ ID NO: 3877 - DNA, 19 bp, Homo sapiens
  siRNA target sequence for FLJ35867 (NM_152455.2,591-609).
gggctctaaggagaaagaa

SEQ ID NO: 3878 - DNA, 19 bp, Homo sapiens
  siRNA target sequence for FLJ35867 (NM_152455.2,641-659).
gagtgcatgctgatctgtt

SEQ ID NO: 3879 - DNA, 19 bp, Homo sapiens
  siRNA target sequence for FLJ35867 (NM_152455.2,704-722).
ggagctttgaagatgagaa

SEQ ID NO: 3880 - DNA, 19 bp, Homo sapiens
  siRNA target sequence for FLJ35867 (NM_152455.2,1192-1210).
gcacctgttgtgttcagaa

SEQ ID NO: 3881 - DNA, 19 bp, Homo sapiens
  siRNA target sequence for FLJ35867 (NM_152455.2,1248-1266).
gacttaccttgcaattctt

SEQ ID NO: 3882 - DNA, 19 bp, Homo sapiens
  siRNA target sequence for FLJ35867 (NM_152455.2,1406-1424).
ccagctatcggaaagttaa

SEQ ID NO: 3883 - DNA, 19 bp, Homo sapiens
  siRNA target sequence for FLJ35867 (NM_152455.2,1655-1673).
cccgtgctccagtgttatt

SEQ ID NO: 3884 - DNA, 19 bp, Homo sapiens
  siRNA target sequence for FLJ35867 (NM_152455.2,1658-1676).
gtgctccagtgttattcca

SEQ ID NO: 3885 - DNA, 19 bp, Homo sapiens
  siRNA target sequence for FLJ35867 (NM_152455.2,1660-1678).
gctccagtgttattccaaa

SEQ ID NO: 3886 - DNA, 19 bp, Homo sapiens
  siRNA target sequence for FLJ35867 (NM_152455.2,1804-1822).
cagggtaaaggcaatgaga

SEQ ID NO: 3887 - DNA, 19 bp, Homo sapiens
  siRNA target sequence for FLJ35867 (NM_152455.2,1885-1903).
ctcccggagaagagcttaa

SEQ ID NO: 3888 - DNA, 19 bp, Homo sapiens
  siRNA target sequence for FLJ35867 (NM_152455.2,1889-1907).
cggagaagagcttaagtga

SEQ ID NO: 3889 - DNA, 19 bp, Homo sapiens
  siRNA target sequence for FLJ35867 (NM_152455.2,1943-1961).
gaccctataaatatctcaa

SEQ ID NO: 3890 - DNA, 19 bp, Homo sapiens
  siRNA target sequence for FLJ35867 (NM_152455.2,2062-2080).
cggagtgcacgactcatta

SEQ ID NO: 3891 - DNA, 19 bp, Homo sapiens
  siRNA target sequence for FLJ35867 (NM_152455.2,2064-2082).
gagtgcacgactcattaga

SEQ ID NO: 3892 - DNA, 19 bp, Homo sapiens
  siRNA target sequence for FLJ35867 (NM_152455.2,2066-2084).
gtgcacgactcattagaca

SEQ ID NO: 3893 - DNA, 19 bp, Homo sapiens
  siRNA target sequence for FLJ35867 (NM_152455.2,2138-2156).
gtttccgtgacagttcaaa

SEQ ID NO: 3894 - DNA, 19 bp, Homo sapiens
  siRNA target sequence for FLJ35867 (NM_152455.2,2144-2162).
gtgacagttcaaatttcat

SEQ ID NO: 3895 - DNA, 19 bp, Homo sapiens
  siRNA target sequence for FLJ35867 (NM_152455.2,2407-2425).
gacttacgtgcacatcata

SEQ ID NO: 3896 - DNA, 19 bp, Homo sapiens
  siRNA target sequence for FLJ35867 (NM_152455.2,2409-2427).
cttacgtgcacatcataga

SEQ ID NO: 3897 - DNA, 19 bp, Homo sapiens
  siRNA target sequence for FLJ35867 (NM_152455.2,2514-2532).
ccatgcacgggaaaagctt

SEQ ID NO: 3898 - DNA, 19 bp, Homo sapiens
  siRNA target sequence for FLJ35936 (NM_173464.1,389-407).
gcacctgttgagctgtttt

SEQ ID NO: 3899 - DNA, 19 bp, Homo sapiens
  siRNA target sequence for FLJ35936 (NM_173464.1,479-497).
cgacatccatcggtattct

SEQ ID NO: 3900 - DNA, 19 bp, Homo sapiens
  siRNA target sequence for FLJ35936 (NM_173464.1,529-547).
ccgtctaagacttcatttt

SEQ ID NO: 3901 - DNA, 19 bp, Homo sapiens
  siRNA target sequence for FLJ35936 (NM_173464.1,641-659).
cacatccctaagggttata

SEQ ID NO: 3902 - DNA, 19 bp, Homo sapiens
  siRNA target sequence for FLJ35936 (NM_173464.1,643-661).
catccctaagggttataga

SEQ ID NO: 3903 - DNA, 19 bp, Homo sapiens
  siRNA target sequence for FLJ35936 (NM_173464.1,646-664).
ccctaagggttatagaaaa

SEQ ID NO: 3904 - DNA, 19 bp, Homo sapiens
  siRNA target sequence for FLJ35936 (NM_173464.1,648-666).
ctaagggttatagaaaaga

SEQ ID NO: 3905 - DNA, 19 bp, Homo sapiens
  siRNA target sequence for FLJ35936 (NM_173464.1,691-709).
gaaggcctgcaaattgcaa

SEQ ID NO: 3906 - DNA, 19 bp, Homo sapiens
  siRNA target sequence for FLJ35936 (NM_173464.1,743-761).
cctaatgggccaatgtcta

SEQ ID NO: 3907 - DNA, 19 bp, Homo sapiens
  siRNA target sequence for FLJ35936 (NM_173464.1,749-767).
gggccaatgtctaaagaat

SEQ ID NO: 3908 - DNA, 19 bp, Homo sapiens
  siRNA target sequence for FLJ35936 (NM_173464.1,750-768).
ggccaatgtctaaagaatt

SEQ ID NO: 3909 - DNA, 19 bp, Homo sapiens
  siRNA target sequence for FLJ35936 (NM_173464.1,828-846).
cgaccatagcagatattgt

SEQ ID NO: 3910 - DNA, 19 bp, Homo sapiens
  siRNA target sequence for FLJ35936 (NM_173464.1,829-847).
gaccatagcagatattgtt

SEQ ID NO: 3911 - DNA, 19 bp, Homo sapiens
  siRNA target sequence for FLJ35936 (NM_173464.1,831-849).
ccatagcagatattgttga

SEQ ID NO: 3912 - DNA, 19 bp, Homo sapiens
  siRNA target sequence for FLJ35936 (NM_173464.1,855-873).
gcttactagtgcattttga

SEQ ID NO: 3913 - DNA, 19 bp, Homo sapiens
  siRNA target sequence for FLJ35936 (NM_173464.1,879-897).
gggatgatagttacgatta

SEQ ID NO: 3914 - DNA, 19 bp, Homo sapiens
  siRNA target sequence for FLJ35936 (NM_173464.1,893-911).
gattactggtgcgatgtta

SEQ ID NO: 3915 - DNA, 19 bp, Homo sapiens
  siRNA target sequence for FLJ35936 (NM_173464.1,964-982).
gatagcaccccaaggttat

SEQ ID NO: 3916 - DNA, 19 bp, Homo sapiens
  siRNA target sequence for FLJ35936 (NM_173464.1,1046-1064).
gccaaagtttttaaaatga

SEQ ID NO: 3917 - DNA, 19 bp, Homo sapiens
  siRNA target sequence for FLJ35936 (NM_173464.1,1065-1083).
ggttgcctcatggttttct

SEQ ID NO: 3918 - DNA, 19 bp, Homo sapiens
  siRNA target sequence for FLJ35936 (NM_173464.1,1073-1091).
catggttttctgccaaata

SEQ ID NO: 3919 - DNA, 19 bp, Homo sapiens
  siRNA target sequence for FLJ35936 (NM_173464.1,1117-1135).
gaaccccaggttaattcgt

SEQ ID NO: 3920 - DNA, 19 bp, Homo sapiens
  siRNA target sequence for FLJ35936 (NM_173464.1,1140-1158).
ctacgattgtagatgttga

SEQ ID NO: 3921 - DNA, 19 bp, Homo sapiens
  siRNA target sequence for FLJ35936 (NM_173464.1,1154-1172).
gttgatgaccaaagagtaa

SEQ ID NO: 3922 - DNA, 19 bp, Homo sapiens
  siRNA target sequence for FLJ35936 (NM_173464.1,1163-1181).
caaagagtaaaggttcatt

SEQ ID NO: 3923 - DNA, 19 bp, Homo sapiens
  siRNA target sequence for FLJ35936 (NM_173464.1,1167-1185).
gagtaaaggttcattttga

SEQ ID NO: 3924 - DNA, 19 bp, Homo sapiens
  siRNA target sequence for FLJ35936 (NM_173464.1,1188-1206).
gttgggaccataagtatga

SEQ ID NO: 3925 - DNA, 19 bp, Homo sapiens
  siRNA target sequence for FLJ35936 (NM_173464.1,1290-1308).
gaacgaatgacctgaagat

SEQ ID NO: 3926 - DNA, 19 bp, Homo sapiens
  siRNA target sequence for FLJ35936 (NM_173464.1,1404-1422).
gcccgtattcagacatgaa

SEQ ID NO: 3927 - DNA, 19 bp, Homo sapiens
  siRNA target sequence for FLJ35936 (NM_173464.1,1406-1424).
ccgtattcagacatgaact

SEQ ID NO: 3928 - DNA, 19 bp, Homo sapiens
  siRNA target sequence for FLJ35936 (NM_173464.1,1437-1455).
caacacttcacgatcgttt

SEQ ID NO: 3929 - DNA, 19 bp, Homo sapiens
  siRNA target sequence for FLJ35936 (NM_173464.1,1447-1465).
cgatcgtttgagagaacaa

SEQ ID NO: 3930 - DNA, 19 bp, Homo sapiens
  siRNA target sequence for FLJ35936 (NM_173464.1,1448-1466).
gatcgtttgagagaacaaa

SEQ ID NO: 3931 - DNA, 19 bp, Homo sapiens
  siRNA target sequence for FLJ35936 (NM_173464.1,1460-1478).
gaacaaacacaggcaaatt

SEQ ID NO: 3932 - DNA, 19 bp, Homo sapiens
  siRNA target sequence for FLJ35936 (NM_173464.1,1512-1530).
gcctctgtagtttgaactt

SEQ ID NO: 3933 - DNA, 19 bp, Homo sapiens
  siRNA target sequence for FLJ35936 (NM_173464.1,1571-1589).
gtacagcaggcaaagtgtt

SEQ ID NO: 3934 - DNA, 19 bp, Homo sapiens
  siRNA target sequence for FLJ35936 (NM_173464.1,1576-1594).
gcaggcaaagtgtttgaaa

SEQ ID NO: 3935 - DNA, 19 bp, Homo sapiens
  siRNA target sequence for FMNL2 (NM_052905.1,182-200).
cgcacaacgtgcctttgaa

SEQ ID NO: 3936 - DNA, 19 bp, Homo sapiens
  siRNA target sequence for FMNL2 (NM_052905.1,261-279).
gaacctacctcctgacaaa

SEQ ID NO: 3937 - DNA, 19 bp, Homo sapiens
  siRNA target sequence for FMNL2 (NM_052905.1,285-303).
gttactgcggcagtatgat

SEQ ID NO: 3938 - DNA, 19 bp, Homo sapiens
  siRNA target sequence for FMNL2 (NM_052905.1,361-379).
ccccatacatacattcaaa

SEQ ID NO: 3939 - DNA, 19 bp, Homo sapiens
  siRNA target sequence for FMNL2 (NM_052905.1,423-441).
cagacggcgtgttcaagaa

SEQ ID NO: 3940 - DNA, 19 bp, Homo sapiens
  siRNA target sequence for FMNL2 (NM_052905.1,427-445).
cggcgtgttcaagaatcta

SEQ ID NO: 3941 - DNA, 19 bp, Homo sapiens
  siRNA target sequence for FMNL2 (NM_052905.1,498-516).
ggtcagagaatttctgaat

SEQ ID NO: 3942 - DNA, 19 bp, Homo sapiens
  siRNA target sequence for FMNL2 (NM_052905.1,562-580).
gcacagtacgcggtaactt

SEQ ID NO: 3943 - DNA, 19 bp, Homo sapiens
  siRNA target sequence for FMNL2 (NM_052905.1,563-581).
cacagtacgcggtaacttt

SEQ ID NO: 3944 - DNA, 19 bp, Homo sapiens
  siRNA target sequence for FMNL2 (NM_052905.1,570-588).
cgcggtaacttttgacttt

SEQ ID NO: 3945 - DNA, 19 bp, Homo sapiens
  siRNA target sequence for FMNL2 (NM_052905.1,612-630).
gagctcggtggacaaatca

SEQ ID NO: 3946 - DNA, 19 bp, Homo sapiens
  siRNA target sequence for FMNL2 (NM_052905.1,614-632).
gctcggtggacaaatcaaa

SEQ ID NO: 3947 - DNA, 19 bp, Homo sapiens
  siRNA target sequence for FMNL2 (NM_052905.1,718-736).
cattctgcactgcgatata

SEQ ID NO: 3948 - DNA, 19 bp, Homo sapiens
  siRNA target sequence for FMNL2 (NM_052905.1,724-742).
gcactgcgatataatacat

SEQ ID NO: 3949 - DNA, 19 bp, Homo sapiens
  siRNA target sequence for FMNL2 (NM_052905.1,725-743).
cactgcgatataatacatt

SEQ ID NO: 3950 - DNA, 19 bp, Homo sapiens
  siRNA target sequence for FMNL2 (NM_052905.1,770-788).
caagattagtgagtaagaa

SEQ ID NO: 3951 - DNA, 19 bp, Homo sapiens
  siRNA target sequence for FMNL2 (NM_052905.1,793-811).
gatgtgcatgtctgtatca

SEQ ID NO: 3952 - DNA, 19 bp, Homo sapiens
  siRNA target sequence for FMNL2 (NM_052905.1,799-817).
catgtctgtatcatgtgtt

SEQ ID NO: 3953 - DNA, 19 bp, Homo sapiens
  siRNA target sequence for FMNL2 (NM_052905.1,804-822).
ctgtatcatgtgtttacgt

SEQ ID NO: 3954 - DNA, 19 bp, Homo sapiens
  siRNA target sequence for FMNL2 (NM_052905.1,815-833).
gtttacgtgccatcatgaa

SEQ ID NO: 3955 - DNA, 19 bp, Homo sapiens
  siRNA target sequence for FMNL2 (NM_052905.1,942-960).
gttggcagccgtttgtctt

SEQ ID NO: 3956 - DNA, 19 bp, Homo sapiens
  siRNA target sequence for FMNL2 (NM_052905.1,1058-1076).
ggaatgaagacaataacat

SEQ ID NO: 3957 - DNA, 19 bp, Homo sapiens
  siRNA target sequence for FMNL2 (NM_052905.1,1090-1108).
gcttctatgcagtttatta

SEQ ID NO: 3958 - DNA, 19 bp, Homo sapiens
  siRNA target sequence for FMNL2 (NM_052905.1,1438-1456).
gatgtcgttcgggaaatct

SEQ ID NO: 3959 - DNA, 19 bp, Homo sapiens
  siRNA target sequence for FMNL2 (NM_052905.1,1441-1459).
gtcgttcgggaaatctaca

SEQ ID NO: 3960 - DNA, 19 bp, Homo sapiens
  siRNA target sequence for FMNL2 (NM_052905.1,1474-1492).
caagttcacacattaagaa

SEQ ID NO: 3961 - DNA, 19 bp, Homo sapiens
  siRNA target sequence for FMNL2 (NM_052905.1,1526-1544).
gacagtctaccctggaaaa

SEQ ID NO: 3962 - DNA, 19 bp, Homo sapiens
  siRNA target sequence for FMNL2 (NM_052905.1,1563-1581).
gaaacaagggaccattaaa

SEQ ID NO: 3963 - DNA, 19 bp, Homo sapiens
  siRNA target sequence for FMNL2 (NM_052905.1,1571-1589).
ggaccattaaaattcagaa

SEQ ID NO: 3964 - DNA, 19 bp, Homo sapiens
  siRNA target sequence for FMNL2 (NM_052905.1,1751-1769).
cacctgaaacagtgcaaaa

SEQ ID NO: 3965 - DNA, 19 bp, Homo sapiens
  siRNA target sequence for FMNL2 (NM_052905.1,1764-1782).
gcaaaatggtccagtaaca

SEQ ID NO: 3966 - DNA, 19 bp, Homo sapiens
  siRNA target sequence for FMNL2 (NM_052905.1,1940-1958).
cttcacccacagtggtttt

SEQ ID NO: 3967 - DNA, 19 bp, Homo sapiens
  siRNA target sequence for FMNL2 (NM_052905.1,1993-2011).
ccaatcaagacgaagttca

SEQ ID NO: 3968 - DNA, 19 bp, Homo sapiens
  siRNA target sequence for FMNL2 (NM_052905.1,2007-2025).
gttcagaatgccagtgttt

SEQ ID NO: 3969 - DNA, 19 bp, Homo sapiens
  siRNA target sequence for FMNL2 (NM_052905.1,2040-2058).
gaagcccaatcagatcaat

SEQ ID NO: 3970 - DNA, 19 bp, Homo sapiens
  siRNA target sequence for FMNL2 (NM_052905.1,2149-2167).
ggacctgccattgatcttt

SEQ ID NO: 3971 - DNA, 19 bp, Homo sapiens
  siRNA target sequence for FMNL2 (NM_052905.1,2152-2170).
cctgccattgatctttctt

SEQ ID NO: 3972 - DNA, 19 bp, Homo sapiens
  siRNA target sequence for FMNL2 (NM_052905.1,2155-2173).
gccattgatctttcttcaa

SEQ ID NO: 3973 - DNA, 19 bp, Homo sapiens
  siRNA target sequence for FMNL2 (NM_052905.1,2164-2182).
ctttcttcaagcaaacaga

SEQ ID NO: 3974 - DNA, 19 bp, Homo sapiens
  siRNA target sequence for FMNL2 (NM_052905.1,2189-2207).
cacagaagggatcaaacaa

SEQ ID NO: 3975 - DNA, 19 bp, Homo sapiens
  siRNA target sequence for FMNL2 (NM_052905.1,2205-2223).
caaagtgacattactagaa

SEQ ID NO: 3976 - DNA, 19 bp, Homo sapiens
  siRNA target sequence for FMNL2 (NM_052905.1,2242-2260).
cttgccataactttaagga

SEQ ID NO: 3977 - DNA, 19 bp, Homo sapiens
  siRNA target sequence for FMNL2 (NM_052905.1,2293-2311).
gctattcatgtatttgact

SEQ ID NO: 3978 - DNA, 19 bp, Homo sapiens
  siRNA target sequence for FMNL2 (NM_052905.1,2352-2370).
gttcctaccaactgagaat

SEQ ID NO: 3979 - DNA, 19 bp, Homo sapiens
  siRNA target sequence for FMNL2 (NM_052905.1,2437-2455).
cggttcatgatgcagttta

SEQ ID NO: 3980 - DNA, 19 bp, Homo sapiens
  siRNA target sequence for FMNL2 (NM_052905.1,2439-2457).
gttcatgatgcagtttagt

SEQ ID NO: 3981 - DNA, 19 bp, Homo sapiens
  siRNA target sequence for FMNL2 (NM_052905.1,2526-2544).
gatgctgactcctcaacta

SEQ ID NO: 3982 - DNA, 19 bp, Homo sapiens
  siRNA target sequence for FMNL2 (NM_052905.1,2537-2555).
ctcaactacatgcgattat

SEQ ID NO: 3983 - DNA, 19 bp, Homo sapiens
  siRNA target sequence for FMNL2 (NM_052905.1,2678-2696).
gtttagatctgctcttaga

SEQ ID NO: 3984 - DNA, 19 bp, Homo sapiens
  siRNA target sequence for FMNL2 (NM_052905.1,2689-2707).
ctcttagatacaaagtcaa

SEQ ID NO: 3985 - DNA, 19 bp, Homo sapiens
  siRNA target sequence for FMNL2 (NM_052905.1,2725-2743).
ctgttgcactatatatcca

SEQ ID NO: 3986 - DNA, 19 bp, Homo sapiens
  siRNA target sequence for FMNL2 (NM_052905.1,2727-2745).
gttgcactatatatccaat

SEQ ID NO: 3987 - DNA, 19 bp, Homo sapiens
  siRNA target sequence for FMNL2 (NM_052905.1,2822-2840).
cccttgagaatgttttgct

SEQ ID NO: 3988 - DNA, 19 bp, Homo sapiens
  siRNA target sequence for FMNL2 (NM_052905.1,3219-3237).
gttaattgcagaattaaga

SEQ ID NO: 3989 - DNA, 19 bp, Homo sapiens
  siRNA target sequence for FMNL2 (NM_052905.1,3236-3254).
gaagacgacaagttaaaga

SEQ ID NO: 3990 - DNA, 19 bp, Homo sapiens
  siRNA target sequence for FMNL2 (NM_052905.1,3239-3257).
gacgacaagttaaagataa

SEQ ID NO: 3991 - DNA, 19 bp, Homo sapiens
  siRNA target sequence for FMNL2 (NM_052905.1,3241-3259).
cgacaagttaaagataaca

SEQ ID NO: 3992 - DNA, 19 bp, Homo sapiens
  siRNA target sequence for FMNL2 (NM_052905.1,3283-3301).
ggtgccattgaagatatta

SEQ ID NO: 3993 - DNA, 19 bp, Homo sapiens
  siRNA target sequence for FMNL2 (NM_052905.1,3284-3302).
gtgccattgaagatattat

SEQ ID NO: 3994 - DNA, 19 bp, Homo sapiens
  siRNA target sequence for FMNL2 (NM_052905.1,3376-3394).
cagaacttgcgttctgtta

SEQ ID NO: 3995 - DNA, 19 bp, Homo sapiens
  siRNA target sequence for FMNL2 (NM_052905.1,3378-3396).
gaacttgcgttctgttaat

SEQ ID NO: 3996 - DNA, 19 bp, Homo sapiens
  siRNA target sequence for FMNL2 (NM_052905.1,3381-3399).
cttgcgttctgttaatggt

SEQ ID NO: 3997 - DNA, 19 bp, Homo sapiens
  siRNA target sequence for FMNL2 (NM_052905.1,3397-3415).
ggtgccgaaataacaatgt

SEQ ID NO: 3998 - DNA, 19 bp, Homo sapiens
  siRNA target sequence for FOSL2 (NM_005253.2,872-890).
ggattatcccgggaacttt

SEQ ID NO: 3999 - DNA, 19 bp, Homo sapiens
  siRNA target sequence for FOSL2 (NM_005253.2,963-981).
cagaaattccgggtagata

SEQ ID NO: 4000 - DNA, 19 bp, Homo sapiens
  siRNA target sequence for FOSL2 (NM_005253.2,1424-1442).
cggcccagtgtgcaagatt

SEQ ID NO: 4001 - DNA, 19 bp, Homo sapiens
  siRNA target sequence for FOSL2 (NM_005253.2,1425-1443).
ggcccagtgtgcaagatta

SEQ ID NO: 4002 - DNA, 19 bp, Homo sapiens
  siRNA target sequence for FOSL2 (NM_005253.2,1513-1531).
gcgctgtagtggtgaaaca

SEQ ID NO: 4003 - DNA, 19 bp, Homo sapiens
  siRNA target sequence for FOSL2 (NM_005253.2,1585-1603).
cccagcgctctgtcatcaa

SEQ ID NO: 4004 - DNA, 19 bp, Homo sapiens
  siRNA target sequence for FOSL2 (NM_005253.2,1701-1719).
ctcgtcttcacctatccta

SEQ ID NO: 4005 - DNA, 19 bp, Homo sapiens
  siRNA target sequence for FOSL2 (NM_005253.2,1790-1808).
cagcggggaccaatcatca

SEQ ID NO: 4006 - DNA, 19 bp, Homo sapiens
  siRNA target sequence for FOXA1 (NM_004496.2,397-415).
gtcccggtcagcaacatga

SEQ ID NO: 4007 - DNA, 19 bp, Homo sapiens
  siRNA target sequence for FOXA1 (NM_004496.2,400-418).
ccggtcagcaacatgaact

SEQ ID NO: 4008 - DNA, 19 bp, Homo sapiens
  siRNA target sequence for FOXA1 (NM_004496.2,1573-1591).
gaacaggcactgcaatact

SEQ ID NO: 4009 - DNA, 19 bp, Homo sapiens
  siRNA target sequence for FOXA1 (NM_004496.2,1707-1725).
cagacccgtcctaaacact

SEQ ID NO: 4010 - DNA, 19 bp, Homo sapiens
  siRNA target sequence for FOXA2 (NM_021784.3,280-298).
cctccgtgagcaacatgaa

SEQ ID NO: 4011 - DNA, 19 bp, Homo sapiens
  siRNA target sequence for FOXA2 (NM_021784.3,318-336).
ggcatgaacacgtacatga

SEQ ID NO: 4012 - DNA, 19 bp, Homo sapiens
  siRNA target sequence for FOXA2 (NM_021784.3,579-597).
ccctacgccaacatgaact

SEQ ID NO: 4013 - DNA, 19 bp, Homo sapiens
  siRNA target sequence for FOXA3 (NM_004497.2,544-562).
ccaagccaccgtattccta

SEQ ID NO: 4014 - DNA, 19 bp, Homo sapiens
  siRNA target sequence for FOXA3 (NM_004497.2,545-563).
caagccaccgtattcctat

SEQ ID NO: 4015 - DNA, 19 bp, Homo sapiens
  siRNA target sequence for FOXA3 (NM_004497.2,652-670).
cttactaccgggagaatca

SEQ ID NO: 4016 - DNA, 19 bp, Homo sapiens
  siRNA target sequence for FOXA3 (NM_004497.2,780-798).
cccagctcagggaacatgt

SEQ ID NO: 4017 - DNA, 19 bp, Homo sapiens
  siRNA target sequence for FOXA3 (NM_004497.2,784-802).
gctcagggaacatgtttga

SEQ ID NO: 4018 - DNA, 19 bp, Homo sapiens
  siRNA target sequence for FOXA3 (NM_004497.2,1192-1210).
gggagcctggagtctacta

SEQ ID NO: 4019 - DNA, 19 bp, Homo sapiens
  siRNA target sequence for FOXA3 (NM_004497.2,1226-1244).
ccgctctttgcttaatgca

SEQ ID NO: 4020 - DNA, 19 bp, Homo sapiens
  siRNA target sequence for FOXA3 (NM_004497.2,1227-1245).
cgctctttgcttaatgcat

SEQ ID NO: 4021 - DNA, 19 bp, Homo sapiens
  siRNA target sequence for FOXB1 (NM_012182.1,299-317).
caagctgcggggacatgtt

SEQ ID NO: 4022 - DNA, 19 bp, Homo sapiens
  siRNA target sequence for FOXB1 (NM_012182.1,622-640).
ctccccaaccagttgacta

SEQ ID NO: 4023 - DNA, 19 bp, Homo sapiens
  siRNA target sequence for FOXB1 (NM_012182.1,797-815).
ccatccccgtgcccattaa

SEQ ID NO: 4024 - DNA, 19 bp, Homo sapiens
  siRNA target sequence for FOXC1 (NM_001453.1,1564-1582).
ccagtgaacgggaatagta

SEQ ID NO: 4025 - DNA, 19 bp, Homo sapiens
  siRNA target sequence for FOXC1 (NM_001453.1,1573-1591).
gggaatagtagctgtcaaa

SEQ ID NO: 4026 - DNA, 19 bp, Homo sapiens
  siRNA target sequence for FOXC1 (NM_001453.1,1574-1592).
ggaatagtagctgtcaaat

SEQ ID NO: 4027 - DNA, 19 bp, Homo sapiens
  siRNA target sequence for FOXC1 (NM_001453.1,1641-1659).
ctacgactgtagcaagttt

SEQ ID NO: 4028 - DNA, 19 bp, Homo sapiens
  siRNA target sequence for FOXC2 (NM_005251.1,1369-1387).
caccggctggggattgaga

SEQ ID NO: 4029 - DNA, 19 bp, Homo sapiens
  siRNA target sequence for FOXC2 (NM_005251.1,1484-1502).
cctacgactgcacgaaata

SEQ ID NO: 4030 - DNA, 19 bp, Homo sapiens
  siRNA target sequence for FOXD1 (NM_004472.1,1768-1786).
gtccagtgtcgagaacttt

SEQ ID NO: 4031 - DNA, 19 bp, Homo sapiens
  siRNA target sequence for FOXD1 (NM_004472.1,1771-1789).
cagtgtcgagaactttact

SEQ ID NO: 4032 - DNA, 19 bp, Homo sapiens
  siRNA target sequence for FOXD2 (NM_004474.1,2190-2208).
cgaggccgacgcagacata

SEQ ID NO: 4033 - DNA, 19 bp, Homo sapiens
  siRNA target sequence for FOXD2 (NM_004474.1,3359-3377).
ggccttccttctctataga

SEQ ID NO: 4034 - DNA, 19 bp, Homo sapiens
  siRNA target sequence for FOXD3 (NM_012183.1,394-412).
ccgagcaagcccaagaaca

SEQ ID NO: 4035 - DNA, 19 bp, Homo sapiens
  siRNA target sequence for FOXD3 (NM_012183.1,1088-1106).
ccaccgcgtcgctcatcaa

SEQ ID NO: 4036 - DNA, 19 bp, Homo sapiens
  siRNA target sequence for FOXD3 (NM_012183.1,1350-1368).
gccactctccggacagttt

SEQ ID NO: 4037 - DNA, 19 bp, Homo sapiens
  siRNA target sequence for FOXE1 (NM_004473.3,931-949).
cgcgacaaccccaaaaagt

SEQ ID NO: 4038 - DNA, 19 bp, Homo sapiens
  siRNA target sequence for FOXE1 (NM_004473.3,1052-1070).
ccaacgcggaggacatgtt

SEQ ID NO: 4039 - DNA, 19 bp, Homo sapiens
  siRNA target sequence for FOXF2 (NM_001452.1,1325-1343).
gtgacagaaaagatttcgt

SEQ ID NO: 4040 - DNA, 19 bp, Homo sapiens
  siRNA target sequence for FOXF2 (NM_001452.1,1336-1354).
gatttcgtcctcaacttca

SEQ ID NO: 4041 - DNA, 19 bp, Homo sapiens
  siRNA target sequence for FOXF2 (NM_001452.1,1379-1397).
cagctagcgggtcgtatta

SEQ ID NO: 4042 - DNA, 19 bp, Homo sapiens
  siRNA target sequence for FOXF2 (NM_001452.1,1382-1400).
ctagcgggtcgtattatca

SEQ ID NO: 4043 - DNA, 19 bp, Homo sapiens
  siRNA target sequence for FOXF2 (NM_001452.1,1413-1431).
gagcgtctgtcaggatatt

SEQ ID NO: 4044 - DNA, 19 bp, Homo sapiens
  siRNA target sequence for FOXF2 (NM_001452.1,1415-1433).
gcgtctgtcaggatattaa

SEQ ID NO: 4045 - DNA, 19 bp, Homo sapiens
  siRNA target sequence for FOXG1B (NM_005249.3,824-842).
gagttcatcatgaagaact

SEQ ID NO: 4046 - DNA, 19 bp, Homo sapiens
  siRNA target sequence for FOXG1B (NM_005249.3,1164-1182).
gcagcactttgagttacaa

SEQ ID NO: 4047 - DNA, 19 bp, Homo sapiens
  siRNA target sequence for FOXG1B (NM_005249.3,1433-1451).
ggccagaccagttactttt

SEQ ID NO: 4048 - DNA, 19 bp, Homo sapiens
  siRNA target sequence for FOXG1B (NM_005249.3,1434-1452).
gccagaccagttacttttt

SEQ ID NO: 4049 - DNA, 19 bp, Homo sapiens
  siRNA target sequence for FOXG1B (NM_005249.3,1460-1478).
gtcccgcacccgtcaatga

SEQ ID NO: 4050 - DNA, 19 bp, Homo sapiens
  siRNA target sequence for FOXG1B (NM_005249.3,1462-1480).
cccgcacccgtcaatgact

SEQ ID NO: 4051 - DNA, 19 bp, Homo sapiens
  siRNA target sequence for FOXG1B (NM_005249.3,1463-1481).
ccgcacccgtcaatgactt

SEQ ID NO: 4052 - DNA, 19 bp, Homo sapiens
  siRNA target sequence for FOXG1B (NM_005249.3,1549-1567).
cctgccctgtgagtcttta

SEQ ID NO: 4053 - DNA, 19 bp, Homo sapiens
  siRNA target sequence for FOXG1B (NM_005249.3,1552-1570).
gccctgtgagtctttaaga

SEQ ID NO: 4054 - DNA, 19 bp, Homo sapiens
  siRNA target sequence for FOXG1B (NM_005249.3,1602-1620).
ctgggggactgtctgatta

SEQ ID NO: 4055 - DNA, 19 bp, Homo sapiens
  siRNA target sequence for FOXG1B (NM_005249.3,1604-1622).
gggggactgtctgattatt

SEQ ID NO: 4056 - DNA, 19 bp, Homo sapiens
  siRNA target sequence for FOXG1B (NM_005249.3,1605-1623).
ggggactgtctgattattt

SEQ ID NO: 4057 - DNA, 19 bp, Homo sapiens
  siRNA target sequence for FOXG1B (NM_005249.3,1607-1625).
ggactgtctgattatttca

SEQ ID NO: 4058 - DNA, 19 bp, Homo sapiens
  siRNA target sequence for FOXG1B (NM_005249.3,1647-1665).
cttccaaccctttaataca

SEQ ID NO: 4059 - DNA, 19 bp, Homo sapiens
  siRNA target sequence for FOXH1 (NM_003923.1,772-790).
gccgtgttccccttcttca

SEQ ID NO: 4060 - DNA, 19 bp, Homo sapiens
  siRNA target sequence for FOXH1 (NM_003923.1,883-901).
caggccaagggcaacttct

SEQ ID NO: 4061 - DNA, 19 bp, Homo sapiens
  siRNA target sequence for FOXH1 (NM_003923.1,1415-1433).
cctcctacttgcctatcta

SEQ ID NO: 4062 - DNA, 19 bp, Homo sapiens
  siRNA target sequence for FOXH1 (NM_003923.1,1544-1562).
ggctgctctgcgatctaga

SEQ ID NO: 4063 - DNA, 19 bp, Homo sapiens
  siRNA target sequence for FOXH1 (NM_003923.1,1579-1597).
gtgccacccaacaaaagca

SEQ ID NO: 4064 - DNA, 19 bp, Homo sapiens
  siRNA target sequence for FOXJ1 (NM_001454.1,641-659).
ccctgtcggccatctacaa

SEQ ID NO: 4065 - DNA, 19 bp, Homo sapiens
  siRNA target sequence for FOXJ1 (NM_001454.1,697-715).
gatcccacctggcagaatt

SEQ ID NO: 4066 - DNA, 19 bp, Homo sapiens
  siRNA target sequence for FOXJ1 (NM_001454.1,700-718).
cccacctggcagaattcaa

SEQ ID NO: 4067 - DNA, 19 bp, Homo sapiens
  siRNA target sequence for FOXL1 (NM_005250.1,41-59).
cctcgcccatgctgtatct

SEQ ID NO: 4068 - DNA, 19 bp, Homo sapiens
  siRNA target sequence for FOXL1 (NM_005250.1,44-62).
cgcccatgctgtatctgta

SEQ ID NO: 4069 - DNA, 19 bp, Homo sapiens
  siRNA target sequence for FOXL1 (NM_005250.1,908-926).
gcctccgtccgcctttcaa

SEQ ID NO: 4070 - DNA, 19 bp, Homo sapiens
  siRNA target sequence for FOXL1 (NM_005250.1,977-995).
ggatccccttcctctctta

SEQ ID NO: 4071 - DNA, 19 bp, Homo sapiens
  siRNA target sequence for FOXL2 (NM_023067.1,1044-1062).
cgtagtgaactcgtacaat

SEQ ID NO: 4072 - DNA, 19 bp, Homo sapiens
  siRNA target sequence for FOXM1 (NM_021953.1,83-101).
cccgtcggccactgattct

SEQ ID NO: 4073 - DNA, 19 bp, Homo sapiens
  siRNA target sequence for FOXM1 (NM_021953.1,90-108).
gccactgattctcaaaaga

SEQ ID NO: 4074 - DNA, 19 bp, Homo sapiens
  siRNA target sequence for FOXM1 (NM_021953.1,114-132).
gctgccccttcctgttcaa

SEQ ID NO: 4075 - DNA, 19 bp, Homo sapiens
  siRNA target sequence for FOXM1 (NM_021953.1,115-133).
ctgccccttcctgttcaaa

SEQ ID NO: 4076 - DNA, 19 bp, Homo sapiens
  siRNA target sequence for FOXM1 (NM_021953.1,117-135).
gccccttcctgttcaaaat

SEQ ID NO: 4077 - DNA, 19 bp, Homo sapiens
  siRNA target sequence for FOXM1 (NM_021953.1,149-167).
catcagaggaggaacctaa

SEQ ID NO: 4078 - DNA, 19 bp, Homo sapiens
  siRNA target sequence for FOXM1 (NM_021953.1,179-197).
cccaacaggagtctaatca

SEQ ID NO: 4079 - DNA, 19 bp, Homo sapiens
  siRNA target sequence for FOXM1 (NM_021953.1,180-198).
ccaacaggagtctaatcaa

SEQ ID NO: 4080 - DNA, 19 bp, Homo sapiens
  siRNA target sequence for FOXM1 (NM_021953.1,225-243).
gtccaactcttgcaagttt

SEQ ID NO: 4081 - DNA, 19 bp, Homo sapiens
  siRNA target sequence for FOXM1 (NM_021953.1,248-266).
ctgggatcaagattattaa

SEQ ID NO: 4082 - DNA, 19 bp, Homo sapiens
  siRNA target sequence for FOXM1 (NM_021953.1,299-317).
ccatccccaacaatgctaa

SEQ ID NO: 4083 - DNA, 19 bp, Homo sapiens
  siRNA target sequence for FOXM1 (NM_021953.1,300-318).
catccccaacaatgctaat

SEQ ID NO: 4084 - DNA, 19 bp, Homo sapiens
  siRNA target sequence for FOXM1 (NM_021953.1,303-321).
ccccaacaatgctaatatt

SEQ ID NO: 4085 - DNA, 19 bp, Homo sapiens
  siRNA target sequence for FOXM1 (NM_021953.1,486-504).
gaccttgggaccaaaacct

SEQ ID NO: 4086 - DNA, 19 bp, Homo sapiens
  siRNA target sequence for FOXM1 (NM_021953.1,503-521).
ctgcagctagggatgtgaa

SEQ ID NO: 4087 - DNA, 19 bp, Homo sapiens
  siRNA target sequence for FOXM1 (NM_021953.1,506-524).
cagctagggatgtgaatct

SEQ ID NO: 4088 - DNA, 19 bp, Homo sapiens
  siRNA target sequence for FOXM1 (NM_021953.1,586-604).
gcaggctgcactatcaaca

SEQ ID NO: 4089 - DNA, 19 bp, Homo sapiens
  siRNA target sequence for FOXM1 (NM_021953.1,589-607).
ggctgcactatcaacaata

SEQ ID NO: 4090 - DNA, 19 bp, Homo sapiens
  siRNA target sequence for FOXM1 (NM_021953.1,708-726).
gcagcgacaggttaaggtt

SEQ ID NO: 4091 - DNA, 19 bp, Homo sapiens
  siRNA target sequence for FOXM1 (NM_021953.1,772-790).
gagcggccaccctactctt

SEQ ID NO: 4092 - DNA, 19 bp, Homo sapiens
  siRNA target sequence for FOXM1 (NM_021953.1,786-804).
ctcttacatggccatgata

SEQ ID NO: 4093 - DNA, 19 bp, Homo sapiens
  siRNA target sequence for FOXM1 (NM_021953.1,788-806).
cttacatggccatgataca

SEQ ID NO: 4094 - DNA, 19 bp, Homo sapiens
  siRNA target sequence for FOXM1 (NM_021953.1,826-844).
gagaggaagcgcatgactt

SEQ ID NO: 4095 - DNA, 19 bp, Homo sapiens
  siRNA target sequence for FOXM1 (NM_021953.1,871-889).
gaccactttccctacttta

SEQ ID NO: 4096 - DNA, 19 bp, Homo sapiens
  siRNA target sequence for FOXM1 (NM_021953.1,1009-1027).
gccaaccgctacttgacat

SEQ ID NO: 4097 - DNA, 19 bp, Homo sapiens
  siRNA target sequence for FOXM1 (NM_021953.1,1073-1091).
ccgagcacttggaatcaca

SEQ ID NO: 4098 - DNA, 19 bp, Homo sapiens
  siRNA target sequence for FOXM1 (NM_021953.1,1120-1138).
cggaacatgaccatcaaaa

SEQ ID NO: 4099 - DNA, 19 bp, Homo sapiens
  siRNA target sequence for FOXM1 (NM_021953.1,1153-1171).
ggcgcacggcggaagatga

SEQ ID NO: 4100 - DNA, 19 bp, Homo sapiens
  siRNA target sequence for FOXM1 (NM_021953.1,1154-1172).
gcgcacggcggaagatgaa

SEQ ID NO: 4101 - DNA, 19 bp, Homo sapiens
  siRNA target sequence for FOXM1 (NM_021953.1,1193-1211).
gctcatacctggtacctat

SEQ ID NO: 4102 - DNA, 19 bp, Homo sapiens
  siRNA target sequence for FOXM1 (NM_021953.1,1429-1447).
cttccagttcagactatca

SEQ ID NO: 4103 - DNA, 19 bp, Homo sapiens
  siRNA target sequence for FOXM1 (NM_021953.1,1485-1503).
cttagcgagacccatcaaa

SEQ ID NO: 4104 - DNA, 19 bp, Homo sapiens
  siRNA target sequence for FOXM1 (NM_021953.1,1859-1877).
cttttaagacacccattaa

SEQ ID NO: 4105 - DNA, 19 bp, Homo sapiens
  siRNA target sequence for FOXM1 (NM_021953.1,1898-1916).
ccaccccgagcaaatctgt

SEQ ID NO: 4106 - DNA, 19 bp, Homo sapiens
  siRNA target sequence for FOXM1 (NM_021953.1,1974-1992).
ggatttcagcccagtacaa

SEQ ID NO: 4107 - DNA, 19 bp, Homo sapiens
  siRNA target sequence for FOXM1 (NM_021953.1,1975-1993).
gatttcagcccagtacaaa

SEQ ID NO: 4108 - DNA, 19 bp, Homo sapiens
  siRNA target sequence for FOXM1 (NM_021953.1,2128-2146).
gtcccctttggcaactctt

SEQ ID NO: 4109 - DNA, 19 bp, Homo sapiens
  siRNA target sequence for FOXM1 (NM_021953.1,2200-2218).
ggccttgcagccaatcgtt

SEQ ID NO: 4110 - DNA, 19 bp, Homo sapiens
  siRNA target sequence for FOXM1 (NM_021953.1,2233-2251).
ctggtcctggacacaatga

SEQ ID NO: 4111 - DNA, 19 bp, Homo sapiens
  siRNA target sequence for FOXN1 (NM_003593.2,164-182).
cttcagctgctcgtcattt

SEQ ID NO: 4112 - DNA, 19 bp, Homo sapiens
  siRNA target sequence for FOXN1 (NM_003593.2,404-422).
gtacaagcggcctttccat

SEQ ID NO: 4113 - DNA, 19 bp, Homo sapiens
  siRNA target sequence for FOXN1 (NM_003593.2,459-477).
ctcaaaggacactccttta

SEQ ID NO: 4114 - DNA, 19 bp, Homo sapiens
  siRNA target sequence for FOXN1 (NM_003593.2,681-699).
cctcccttgcagcatatgt

SEQ ID NO: 4115 - DNA, 19 bp, Homo sapiens
  siRNA target sequence for FOXN1 (NM_003593.2,682-700).
ctcccttgcagcatatgta

SEQ ID NO: 4116 - DNA, 19 bp, Homo sapiens
  siRNA target sequence for FOXN1 (NM_003593.2,768-786).
ggctcctcacactatcagt

SEQ ID NO: 4117 - DNA, 19 bp, Homo sapiens
  siRNA target sequence for FOXN1 (NM_003593.2,769-787).
gctcctcacactatcagta

SEQ ID NO: 4118 - DNA, 19 bp, Homo sapiens
  siRNA target sequence for FOXN1 (NM_003593.2,833-851).
cttcccaaaacccatctat

SEQ ID NO: 4119 - DNA, 19 bp, Homo sapiens
  siRNA target sequence for FOXN1 (NM_003593.2,876-894).
gcccttaagaacagtaaaa

SEQ ID NO: 4120 - DNA, 19 bp, Homo sapiens
  siRNA target sequence for FOXN1 (NM_003593.2,907-925).
ccgtcagcgagatctacaa

SEQ ID NO: 4121 - DNA, 19 bp, Homo sapiens
  siRNA target sequence for FOXN1 (NM_003593.2,908-926).
cgtcagcgagatctacaat

SEQ ID NO: 4122 - DNA, 19 bp, Homo sapiens
  siRNA target sequence for FOXN1 (NM_003593.2,909-927).
gtcagcgagatctacaatt

SEQ ID NO: 4123 - DNA, 19 bp, Homo sapiens
  siRNA target sequence for FOXN1 (NM_003593.2,911-929).
cagcgagatctacaatttt

SEQ ID NO: 4124 - DNA, 19 bp, Homo sapiens
  siRNA target sequence for FOXN1 (NM_003593.2,1078-1096).
cggccaagatcgacaagat

SEQ ID NO: 4125 - DNA, 19 bp, Homo sapiens
  siRNA target sequence for FOXN1 (NM_003593.2,1341-1359).
cccctgcaggacctactta

SEQ ID NO: 4126 - DNA, 19 bp, Homo sapiens
  siRNA target sequence for FOXN1 (NM_003593.2,1342-1360).
ccctgcaggacctacttat

SEQ ID NO: 4127 - DNA, 19 bp, Homo sapiens
  siRNA target sequence for FOXN1 (NM_003593.2,1375-1393).
cctgctatgggcagacata

SEQ ID NO: 4128 - DNA, 19 bp, Homo sapiens
  siRNA target sequence for FOXN1 (NM_003593.2,1378-1396).
gctatgggcagacatactt

SEQ ID NO: 4129 - DNA, 19 bp, Homo sapiens
  siRNA target sequence for FOXO1A (NM_002015.2,464-482).
ctgcccaggccggagttta

SEQ ID NO: 4130 - DNA, 19 bp, Homo sapiens
  siRNA target sequence for FOXO1A (NM_002015.2,579-597).
ctgtcagcgccgacttcat

SEQ ID NO: 4131 - DNA, 19 bp, Homo sapiens
  siRNA target sequence for FOXO1A (NM_002015.2,1054-1072).
cattcgtgtgcagaatgaa

SEQ ID NO: 4132 - DNA, 19 bp, Homo sapiens
  siRNA target sequence for FOXO1A (NM_002015.2,1156-1174).
ggacaacaacagtaaattt

SEQ ID NO: 4133 - DNA, 19 bp, Homo sapiens
  siRNA target sequence for FOXO1A (NM_002015.2,1331-1349).
cgaactagctcaaatgcta

SEQ ID NO: 4134 - DNA, 19 bp, Homo sapiens
  siRNA target sequence for FOXO1A (NM_002015.2,1362-1380).
ggagactctcacccattat

SEQ ID NO: 4135 - DNA, 19 bp, Homo sapiens
  siRNA target sequence for FOXO1A (NM_002015.2,1381-1399).
gaccgaacaggatgatctt

SEQ ID NO: 4136 - DNA, 19 bp, Homo sapiens
  siRNA target sequence for FOXO1A (NM_002015.2,1403-1421).
gaaggggatgtgcattcta

SEQ ID NO: 4137 - DNA, 19 bp, Homo sapiens
  siRNA target sequence for FOXO1A (NM_002015.2,1431-1449).
cgccatctgccgcaaagat

SEQ ID NO: 4138 - DNA, 19 bp, Homo sapiens
  siRNA target sequence for FOXO1A (NM_002015.2,1442-1460).
gcaaagatggcctctactt

SEQ ID NO: 4139 - DNA, 19 bp, Homo sapiens
  siRNA target sequence for FOXO1A (NM_002015.2,1443-1461).
caaagatggcctctacttt

SEQ ID NO: 4140 - DNA, 19 bp, Homo sapiens
  siRNA target sequence for FOXO1A (NM_002015.2,1467-1485).
gtctgtctgagataagcaa

SEQ ID NO: 4141 - DNA, 19 bp, Homo sapiens
  siRNA target sequence for FOXO1A (NM_002015.2,1488-1506).
ccgaaaacatggaaaatct

SEQ ID NO: 4142 - DNA, 19 bp, Homo sapiens
  siRNA target sequence for FOXO1A (NM_002015.2,1489-1507).
cgaaaacatggaaaatctt

SEQ ID NO: 4143 - DNA, 19 bp, Homo sapiens
  siRNA target sequence for FOXO1A (NM_002015.2,1613-1631).
ccaaacaccagtttgaatt

SEQ ID NO: 4144 - DNA, 19 bp, Homo sapiens
  siRNA target sequence for FOXO1A (NM_002015.2,1635-1653).
ccagcccaaactaccaaaa

SEQ ID NO: 4145 - DNA, 19 bp, Homo sapiens
  siRNA target sequence for FOXO1A (NM_002015.2,1638-1656).
gcccaaactaccaaaaata

SEQ ID NO: 4146 - DNA, 19 bp, Homo sapiens
  siRNA target sequence for FOXO1A (NM_002015.2,1687-1705).
gccccagatgcctatacaa

SEQ ID NO: 4147 - DNA, 19 bp, Homo sapiens
  siRNA target sequence for FOXO1A (NM_002015.2,1693-1711).
gatgcctatacaaacactt

SEQ ID NO: 4148 - DNA, 19 bp, Homo sapiens
  siRNA target sequence for FOXO1A (NM_002015.2,1703-1721).
caaacacttcaggacaata

SEQ ID NO: 4149 - DNA, 19 bp, Homo sapiens
  siRNA target sequence for FOXO1A (NM_002015.2,1714-1732).
ggacaataagtcgagttat

SEQ ID NO: 4150 - DNA, 19 bp, Homo sapiens
  siRNA target sequence for FOXO1A (NM_002015.2,1717-1735).
caataagtcgagttatgga

SEQ ID NO: 4151 - DNA, 19 bp, Homo sapiens
  siRNA target sequence for FOXO1A (NM_002015.2,1726-1744).
gagttatggaggtatgagt

SEQ ID NO: 4152 - DNA, 19 bp, Homo sapiens
  siRNA target sequence for FOXO1A (NM_002015.2,1736-1754).
ggtatgagtcagtataact

SEQ ID NO: 4153 - DNA, 19 bp, Homo sapiens
  siRNA target sequence for FOXO1A (NM_002015.2,1801-1819).
ccataatgacattatgaca

SEQ ID NO: 4154 - DNA, 19 bp, Homo sapiens
  siRNA target sequence for FOXO1A (NM_002015.2,1883-1901).
cctaattcggtcatgtcaa

SEQ ID NO: 4155 - DNA, 19 bp, Homo sapiens
  siRNA target sequence for FOXO1A (NM_002015.2,1907-1925).
ggcagccaggcatctcata

SEQ ID NO: 4156 - DNA, 19 bp, Homo sapiens
  siRNA target sequence for FOXO1A (NM_002015.2,1908-1926).
gcagccaggcatctcataa

SEQ ID NO: 4157 - DNA, 19 bp, Homo sapiens
  siRNA target sequence for FOXO1A (NM_002015.2,1911-1929).
gccaggcatctcataacaa

SEQ ID NO: 4158 - DNA, 19 bp, Homo sapiens
  siRNA target sequence for FOXO1A (NM_002015.2,1916-1934).
gcatctcataacaaaatga

SEQ ID NO: 4159 - DNA, 19 bp, Homo sapiens
  siRNA target sequence for FOXO1A (NM_002015.2,2025-2043).
cccacacctcgggtatgaa

SEQ ID NO: 4160 - DNA, 19 bp, Homo sapiens
  siRNA target sequence for FOXO1A (NM_002015.2,2188-2206).
cttggatggcatgttcatt

SEQ ID NO: 4161 - DNA, 19 bp, Homo sapiens
  siRNA target sequence for FOXO1A (NM_002015.2,2309-2327).
ccacacagtgtcaagacaa

SEQ ID NO: 4162 - DNA, 19 bp, Homo sapiens
  siRNA target sequence for FOXO1A (NM_002015.2,2318-2336).
gtcaagacaacgacacata

SEQ ID NO: 4163 - DNA, 19 bp, Homo sapiens
  siRNA target sequence for FOXO3A (NM_001455.1,1356-1374).
cgggcagccgaggaaatgt

SEQ ID NO: 4164 - DNA, 19 bp, Homo sapiens
  siRNA target sequence for FOXO3A (NM_001455.1,1568-1586).
cactgcatagtcgattcat

SEQ ID NO: 4165 - DNA, 19 bp, Homo sapiens
  siRNA target sequence for FOXO3A (NM_001455.1,1675-1693).
gctgtctccatggacaata

SEQ ID NO: 4166 - DNA, 19 bp, Homo sapiens
  siRNA target sequence for FOXO3A (NM_001455.1,1852-1870).
cgttcacgcaccaattcta

SEQ ID NO: 4167 - DNA, 19 bp, Homo sapiens
  siRNA target sequence for FOXO3A (NM_001455.1,1853-1871).
gttcacgcaccaattctaa

SEQ ID NO: 4168 - DNA, 19 bp, Homo sapiens
  siRNA target sequence for FOXO3A (NM_001455.1,2020-2038).
ctgccacggctgactgata

SEQ ID NO: 4169 - DNA, 19 bp, Homo sapiens
  siRNA target sequence for FOXO3A (NM_001455.1,2042-2060).
caggcaccatgaatctgaa

SEQ ID NO: 4170 - DNA, 19 bp, Homo sapiens
  siRNA target sequence for FOXO3A (NM_001455.1,2198-2216).
ccccaaccagctcctttaa

SEQ ID NO: 4171 - DNA, 19 bp, Homo sapiens
  siRNA target sequence for FOXO3A (NM_001455.1,2223-2241).
ggtgttcggaccttcatct

SEQ ID NO: 4172 - DNA, 19 bp, Homo sapiens
  siRNA target sequence for FOXO3A (NM_001455.1,2306-2324).
ccatgtcacactatggtaa

SEQ ID NO: 4173 - DNA, 19 bp, Homo sapiens
  siRNA target sequence for FOXO3A (NM_001455.1,2344-2362).
ctcacttcggactcactta

SEQ ID NO: 4174 - DNA, 19 bp, Homo sapiens
  siRNA target sequence for FOXO3A (NM_001455.1,2386-2404).
cagtcggaccccttgatgt

SEQ ID NO: 4175 - DNA, 19 bp, Homo sapiens
  siRNA target sequence for FOXO3A (NM_001455.1,2448-2466).
cgtgatgcttcgcaatgat

SEQ ID NO: 4176 - DNA, 19 bp, Homo sapiens
  siRNA target sequence for FOXO3A (NM_001455.1,2458-2476).
cgcaatgatccgatgatgt

SEQ ID NO: 4177 - DNA, 19 bp, Homo sapiens
  siRNA target sequence for FOXO3A (NM_001455.1,2500-2518).
ggaagtttggtcaatcaga

SEQ ID NO: 4178 - DNA, 19 bp, Homo sapiens
  siRNA target sequence for FOXO3A (NM_001455.1,2501-2519).
gaagtttggtcaatcagaa

SEQ ID NO: 4179 - DNA, 19 bp, Homo sapiens
  siRNA target sequence for FOXO3A (NM_001455.1,2565-2583).
ccgtgccttgtcgaattct

SEQ ID NO: 4180 - DNA, 19 bp, Homo sapiens
  siRNA target sequence for FOXO3A (NM_001455.1,2567-2585).
gtgccttgtcgaattctgt

SEQ ID NO: 4181 - DNA, 19 bp, Homo sapiens
  siRNA target sequence for FOXO3A (NM_001455.1,2650-2668).
gtcagccagtctatgcaaa

SEQ ID NO: 4182 - DNA, 19 bp, Homo sapiens
  siRNA target sequence for FOXO3A (NM_001455.1,2694-2712).
ctccttgtactcaactagt

SEQ ID NO: 4183 - DNA, 19 bp, Homo sapiens
  siRNA target sequence for FOXO3A (NM_001455.1,2723-2741).
ccgtcatgggccatgagaa

SEQ ID NO: 4184 - DNA, 19 bp, Homo sapiens
  siRNA target sequence for FOXO3A (NM_001455.1,2827-2845).
gctgatgggttggatttta

SEQ ID NO: 4185 - DNA, 19 bp, Homo sapiens
  siRNA target sequence for FOXO3A (NM_001455.1,2828-2846).
ctgatgggttggattttaa

SEQ ID NO: 4186 - DNA, 19 bp, Homo sapiens
  siRNA target sequence for FOXP1 (NM_032682.3,447-465).
gggactgagacaaaaagta

SEQ ID NO: 4187 - DNA, 19 bp, Homo sapiens
  siRNA target sequence for FOXP1 (NM_032682.3,659-677).
gcaagttagtggattaaaa

SEQ ID NO: 4188 - DNA, 19 bp, Homo sapiens
  siRNA target sequence for FOXP1 (NM_032682.3,660-678).
caagttagtggattaaaat

SEQ ID NO: 4189 - DNA, 19 bp, Homo sapiens
  siRNA target sequence for FOXP1 (NM_032682.3,737-755).
gacacctcaagttatcact

SEQ ID NO: 4190 - DNA, 19 bp, Homo sapiens
  siRNA target sequence for FOXP1 (NM_032682.3,922-940).
ctggaaaacagcctaaaga

SEQ ID NO: 4191 - DNA, 19 bp, Homo sapiens
  siRNA target sequence for FOXP1 (NM_032682.3,1033-1051).
gccaaggccttctgacaat

SEQ ID NO: 4192 - DNA, 19 bp, Homo sapiens
  siRNA target sequence for FOXP1 (NM_032682.3,1034-1052).
ccaaggccttctgacaatt

SEQ ID NO: 4193 - DNA, 19 bp, Homo sapiens
  siRNA target sequence for FOXP1 (NM_032682.3,1172-1190).
caatcacagcagtttggat

SEQ ID NO: 4194 - DNA, 19 bp, Homo sapiens
  siRNA target sequence for FOXP1 (NM_032682.3,1225-1243).
ccaagacctccttaataat

SEQ ID NO: 4195 - DNA, 19 bp, Homo sapiens
  siRNA target sequence for FOXP1 (NM_032682.3,1322-1340).
ccatagccatcctctctat

SEQ ID NO: 4196 - DNA, 19 bp, Homo sapiens
  siRNA target sequence for FOXP1 (NM_032682.3,1371-1389).
gaagcagtgtgcgaagatt

SEQ ID NO: 4197 - DNA, 19 bp, Homo sapiens
  siRNA target sequence for FOXP1 (NM_032682.3,1377-1395).
gtgtgcgaagatttccaat

SEQ ID NO: 4198 - DNA, 19 bp, Homo sapiens
  siRNA target sequence for FOXP1 (NM_032682.3,1386-1404).
gatttccaatcatttctaa

SEQ ID NO: 4199 - DNA, 19 bp, Homo sapiens
  siRNA target sequence for FOXP1 (NM_032682.3,1422-1440).
catgcgctggacgatagaa

SEQ ID NO: 4200 - DNA, 19 bp, Homo sapiens
  siRNA target sequence for FOXP1 (NM_032682.3,1425-1443).
gcgctggacgatagaagta

SEQ ID NO: 4201 - DNA, 19 bp, Homo sapiens
  siRNA target sequence for FOXP1 (NM_032682.3,1427-1445).
gctggacgatagaagtaca

SEQ ID NO: 4202 - DNA, 19 bp, Homo sapiens
  siRNA target sequence for FOXP1 (NM_032682.3,1488-1506).
ctacagcttgcaaaagaca

SEQ ID NO: 4203 - DNA, 19 bp, Homo sapiens
  siRNA target sequence for FOXP1 (NM_032682.3,1533-1551).
cacctgcatgtgaagtcta

SEQ ID NO: 4204 - DNA, 19 bp, Homo sapiens
  siRNA target sequence for FOXP1 (NM_032682.3,1538-1556).
gcatgtgaagtctacagaa

SEQ ID NO: 4205 - DNA, 19 bp, Homo sapiens
  siRNA target sequence for FOXP1 (NM_032682.3,1741-1759).
ggcggtactcagacaaata

SEQ ID NO: 4206 - DNA, 19 bp, Homo sapiens
  siRNA target sequence for FOXP1 (NM_032682.3,1791-1809).
cagaaccaagaattttata

SEQ ID NO: 4207 - DNA, 19 bp, Homo sapiens
  siRNA target sequence for FOXP1 (NM_032682.3,1818-1836).
gaagttagaccaccattta

SEQ ID NO: 4208 - DNA, 19 bp, Homo sapiens
  siRNA target sequence for FOXP1 (NM_032682.3,1821-1839).
gttagaccaccatttacat

SEQ ID NO: 4209 - DNA, 19 bp, Homo sapiens
  siRNA target sequence for FOXP1 (NM_032682.3,1827-1845).
ccaccatttacatatgcat

SEQ ID NO: 4210 - DNA, 19 bp, Homo sapiens
  siRNA target sequence for FOXP1 (NM_032682.3,1884-1902).
cagctaacactaaatgaga

SEQ ID NO: 4211 - DNA, 19 bp, Homo sapiens
  siRNA target sequence for FOXP1 (NM_032682.3,1918-1936).
cacgaatgtttgcttactt

SEQ ID NO: 4212 - DNA, 19 bp, Homo sapiens
  siRNA target sequence for FOXP1 (NM_032682.3,1970-1988).
gcgtcataatcttagtctt

SEQ ID NO: 4213 - DNA, 19 bp, Homo sapiens
  siRNA target sequence for FOXP1 (NM_032682.3,2046-2064).
gtagaattccaaaaacgaa

SEQ ID NO: 4214 - DNA, 19 bp, Homo sapiens
  siRNA target sequence for FOXP1 (NM_032682.3,2083-2101).
gtaacccttcccttattaa

SEQ ID NO: 4215 - DNA, 19 bp, Homo sapiens
  siRNA target sequence for FOXP1 (NM_032682.3,2123-2141).
ctactgcacacctctcaat

SEQ ID NO: 4216 - DNA, 19 bp, Homo sapiens
  siRNA target sequence for FOXP1 (NM_032682.3,2154-2172).
gcttcaatggctgagaata

SEQ ID NO: 4217 - DNA, 19 bp, Homo sapiens
  siRNA target sequence for FOXP1 (NM_032682.3,2158-2176).
caatggctgagaatagtat

SEQ ID NO: 4218 - DNA, 19 bp, Homo sapiens
  siRNA target sequence for FOXP1 (NM_032682.3,2254-2272).
gggcaatggagcataccaa

SEQ ID NO: 4219 - DNA, 19 bp, Homo sapiens
  siRNA target sequence for FOXP1 (NM_032682.3,2417-2435).
ccatgacagagattacgaa

SEQ ID NO: 4220 - DNA, 19 bp, Homo sapiens
  siRNA target sequence for FOXP2 (NM_014491.1,215-233).
ctctaagcagccaattaga

SEQ ID NO: 4221 - DNA, 19 bp, Homo sapiens
  siRNA target sequence for FOXP2 (NM_014491.1,343-361).
cttttacagcagcaaacaa

SEQ ID NO: 4222 - DNA, 19 bp, Homo sapiens
  siRNA target sequence for FOXP2 (NM_014491.1,546-564).
gcaacaactacaagagttt

SEQ ID NO: 4223 - DNA, 19 bp, Homo sapiens
  siRNA target sequence for FOXP2 (NM_014491.1,550-568).
caactacaagagttttaca

SEQ ID NO: 4224 - DNA, 19 bp, Homo sapiens
  siRNA target sequence for FOXP2 (NM_014491.1,943-961).
gagattcagcagttatgga

SEQ ID NO: 4225 - DNA, 19 bp, Homo sapiens
  siRNA target sequence for FOXP2 (NM_014491.1,1012-1030).
gggctagacctcactacta

SEQ ID NO: 4226 - DNA, 19 bp, Homo sapiens
  siRNA target sequence for FOXP2 (NM_014491.1,1013-1031).
ggctagacctcactactaa

SEQ ID NO: 4227 - DNA, 19 bp, Homo sapiens
  siRNA target sequence for FOXP2 (NM_014491.1,1015-1033).
ctagacctcactactaaca

SEQ ID NO: 4228 - DNA, 19 bp, Homo sapiens
  siRNA target sequence for FOXP2 (NM_014491.1,1018-1036).
gacctcactactaacaatt

SEQ ID NO: 4229 - DNA, 19 bp, Homo sapiens
  siRNA target sequence for FOXP2 (NM_014491.1,1021-1039).
ctcactactaacaattcct

SEQ ID NO: 4230 - DNA, 19 bp, Homo sapiens
  siRNA target sequence for FOXP2 (NM_014491.1,1105-1123).
ggacagtcttcagttctaa

SEQ ID NO: 4231 - DNA, 19 bp, Homo sapiens
  siRNA target sequence for FOXP2 (NM_014491.1,1286-1304).
ctcagtgtcgagtgcaaat

SEQ ID NO: 4232 - DNA, 19 bp, Homo sapiens
  siRNA target sequence for FOXP2 (NM_014491.1,1305-1323).
gcaggtggtgcaacagtta

SEQ ID NO: 4233 - DNA, 19 bp, Homo sapiens
  siRNA target sequence for FOXP2 (NM_014491.1,1309-1327).
gtggtgcaacagttagaaa

SEQ ID NO: 4234 - DNA, 19 bp, Homo sapiens
  siRNA target sequence for FOXP2 (NM_014491.1,1311-1329).
ggtgcaacagttagaaata

SEQ ID NO: 4235 - DNA, 19 bp, Homo sapiens
  siRNA target sequence for FOXP2 (NM_014491.1,1351-1369).
cgtcttcaagcaatgatga

SEQ ID NO: 4236 - DNA, 19 bp, Homo sapiens
  siRNA target sequence for FOXP2 (NM_014491.1,1525-1543).
cagggaccctcagtaatca

SEQ ID NO: 4237 - DNA, 19 bp, Homo sapiens
  siRNA target sequence for FOXP2 (NM_014491.1,1572-1590).
catacgaaggcgacattca

SEQ ID NO: 4238 - DNA, 19 bp, Homo sapiens
  siRNA target sequence for FOXP2 (NM_014491.1,1582-1600).
cgacattcagacaaataca

SEQ ID NO: 4239 - DNA, 19 bp, Homo sapiens
  siRNA target sequence for FOXP2 (NM_014491.1,1625-1643).
ccccaaactatgaatttta

SEQ ID NO: 4240 - DNA, 19 bp, Homo sapiens
  siRNA target sequence for FOXP2 (NM_014491.1,1746-1764).
ctggtttacacggacattt

SEQ ID NO: 4241 - DNA, 19 bp, Homo sapiens
  siRNA target sequence for FOXP2 (NM_014491.1,1749-1767).
gtttacacggacatttgct

SEQ ID NO: 4242 - DNA, 19 bp, Homo sapiens
  siRNA target sequence for FOXP2 (NM_014491.1,1896-1914).
gcgaaggtcacaaaagata

SEQ ID NO: 4243 - DNA, 19 bp, Homo sapiens
  siRNA target sequence for FOXP2 (NM_014491.1,1924-1942).
ccaaccttagtaaaaaata

SEQ ID NO: 4244 - DNA, 19 bp, Homo sapiens
  siRNA target sequence for FOXP2 (NM_014491.1,2024-2042).
gtaatcctggactgataaa

SEQ ID NO: 4245 - DNA, 19 bp, Homo sapiens
  siRNA target sequence for FOXP3 (NM_014009.2,320-338).
cttccagggccgagatctt

SEQ ID NO: 4246 - DNA, 19 bp, Homo sapiens
  siRNA target sequence for FOXP3 (NM_014009.2,477-495).
caggacaggccacatttca

SEQ ID NO: 4247 - DNA, 19 bp, Homo sapiens
  siRNA target sequence for FOXP3 (NM_014009.2,866-884).
gaagggcagggcacaatgt

SEQ ID NO: 4248 - DNA, 19 bp, Homo sapiens
  siRNA target sequence for FOXP3 (NM_014009.2,1164-1182).
cacaacatggactacttca

SEQ ID NO: 4249 - DNA, 19 bp, Homo sapiens
  siRNA target sequence for FOXP4 (NM_138457.1,879-897).
cagctacaggagtactaca

SEQ ID NO: 4250 - DNA, 19 bp, Homo sapiens
  siRNA target sequence for FOXP4 (NM_138457.1,1783-1801).
cccagaatcatgagttcta

SEQ ID NO: 4251 - DNA, 19 bp, Homo sapiens
  siRNA target sequence for FOXP4 (NM_138457.1,1878-1896).
cagctgaccctgaatgaga

SEQ ID NO: 4252 - DNA, 19 bp, Homo sapiens
  siRNA target sequence for FOXP4 (NM_138457.1,1912-1930).
ccaggatgttcgcctattt

SEQ ID NO: 4253 - DNA, 19 bp, Homo sapiens
  siRNA target sequence for FOXP4 (NM_138457.1,1923-1941).
gcctatttccgcagaaaca

SEQ ID NO: 4254 - DNA, 19 bp, Homo sapiens
  siRNA target sequence for FOXP4 (NM_138457.1,1925-1943).
ctatttccgcagaaacact

SEQ ID NO: 4255 - DNA, 19 bp, Homo sapiens
  siRNA target sequence for FOXP4 (NM_138457.1,2034-2052).
gacgagcgggagtatcaga

SEQ ID NO: 4256 - DNA, 19 bp, Homo sapiens
  siRNA target sequence for FOXP4 (NM_138457.1,2055-2073).
cggagaccgccaaagatga

SEQ ID NO: 4257 - DNA, 19 bp, Homo sapiens
  siRNA target sequence for FOXQ1 (NM_033260.2,590-608).
gcacgcagcaagccatata

SEQ ID NO: 4258 - DNA, 19 bp, Homo sapiens
  siRNA target sequence for FUBP1 (NM_003902.2,94-112).
gtggtggaggagttaacga

SEQ ID NO: 4259 - DNA, 19 bp, Homo sapiens
  siRNA target sequence for FUBP1 (NM_003902.2,103-121).
gagttaacgacgctttcaa

SEQ ID NO: 4260 - DNA, 19 bp, Homo sapiens
  siRNA target sequence for FUBP1 (NM_003902.2,174-192).
gggacatcactgaattcaa

SEQ ID NO: 4261 - DNA, 19 bp, Homo sapiens
  siRNA target sequence for FUBP1 (NM_003902.2,209-227).
gggacaaaaaagaccttta

SEQ ID NO: 4262 - DNA, 19 bp, Homo sapiens
  siRNA target sequence for FUBP1 (NM_003902.2,262-280).
ctcctcaaaatgactcttt

SEQ ID NO: 4263 - DNA, 19 bp, Homo sapiens
  siRNA target sequence for FUBP1 (NM_003902.2,309-327).
cagcaaagcagatctgtaa

SEQ ID NO: 4264 - DNA, 19 bp, Homo sapiens
  siRNA target sequence for FUBP1 (NM_003902.2,408-426).
caggaatctggatgcaaaa

SEQ ID NO: 4265 - DNA, 19 bp, Homo sapiens
  siRNA target sequence for FUBP1 (NM_003902.2,459-477).
gaaaggtcctgtatgttaa

SEQ ID NO: 4266 - DNA, 19 bp, Homo sapiens
  siRNA target sequence for FUBP1 (NM_003902.2,478-496).
ctggaacacctgaatctgt

SEQ ID NO: 4267 - DNA, 19 bp, Homo sapiens
  siRNA target sequence for FUBP1 (NM_003902.2,511-529).
ggttactggaccagattgt

SEQ ID NO: 4268 - DNA, 19 bp, Homo sapiens
  siRNA target sequence for FUBP1 (NM_003902.2,518-536).
ggaccagattgttgaaaaa

SEQ ID NO: 4269 - DNA, 19 bp, Homo sapiens
  siRNA target sequence for FUBP1 (NM_003902.2,566-584).
cgatggaccgggaaatgca

SEQ ID NO: 4270 - DNA, 19 bp, Homo sapiens
  siRNA target sequence for FUBP1 (NM_003902.2,574-592).
cgggaaatgcagttcaaga

SEQ ID NO: 4271 - DNA, 19 bp, Homo sapiens
  siRNA target sequence for FUBP1 (NM_003902.2,575-593).
gggaaatgcagttcaagaa

SEQ ID NO: 4272 - DNA, 19 bp, Homo sapiens
  siRNA target sequence for FUBP1 (NM_003902.2,582-600).
gcagttcaagaaatcatga

SEQ ID NO: 4273 - DNA, 19 bp, Homo sapiens
  siRNA target sequence for FUBP1 (NM_003902.2,607-625).
ctagcaaggcaggattagt

SEQ ID NO: 4274 - DNA, 19 bp, Homo sapiens
  siRNA target sequence for FUBP1 (NM_003902.2,610-628).
gcaaggcaggattagtcat

SEQ ID NO: 4275 - DNA, 19 bp, Homo sapiens
  siRNA target sequence for FUBP1 (NM_003902.2,611-629).
caaggcaggattagtcatt

SEQ ID NO: 4276 - DNA, 19 bp, Homo sapiens
  siRNA target sequence for FUBP1 (NM_003902.2,615-633).
gcaggattagtcattggaa

SEQ ID NO: 4277 - DNA, 19 bp, Homo sapiens
  siRNA target sequence for FUBP1 (NM_003902.2,637-655).
ggggagaaactattaaaca

SEQ ID NO: 4278 - DNA, 19 bp, Homo sapiens
  siRNA target sequence for FUBP1 (NM_003902.2,663-681).
gaacgggctggagttaaaa

SEQ ID NO: 4279 - DNA, 19 bp, Homo sapiens
  siRNA target sequence for FUBP1 (NM_003902.2,669-687).
gctggagttaaaatggtta

SEQ ID NO: 4280 - DNA, 19 bp, Homo sapiens
  siRNA target sequence for FUBP1 (NM_003902.2,720-738).
gacaaacctcttaggatta

SEQ ID NO: 4281 - DNA, 19 bp, Homo sapiens
  siRNA target sequence for FUBP1 (NM_003902.2,722-740).
caaacctcttaggattaca

SEQ ID NO: 4282 - DNA, 19 bp, Homo sapiens
  siRNA target sequence for FUBP1 (NM_003902.2,746-764).
cccatataaagttcaacaa

SEQ ID NO: 4283 - DNA, 19 bp, Homo sapiens
  siRNA target sequence for FUBP1 (NM_003902.2,771-789).
gaaatggtgttagagttaa

SEQ ID NO: 4284 - DNA, 19 bp, Homo sapiens
  siRNA target sequence for FUBP1 (NM_003902.2,776-794).
ggtgttagagttaattcgt

SEQ ID NO: 4285 - DNA, 19 bp, Homo sapiens
  siRNA target sequence for FUBP1 (NM_003902.2,811-829).
gagaagttcggaatgagta

SEQ ID NO: 4286 - DNA, 19 bp, Homo sapiens
  siRNA target sequence for FUBP1 (NM_003902.2,827-845).
gtatgggtcaagaatagga

SEQ ID NO: 4287 - DNA, 19 bp, Homo sapiens
  siRNA target sequence for FUBP1 (NM_003902.2,942-960).
ggtgttcgcattcagttta

SEQ ID NO: 4288 - DNA, 19 bp, Homo sapiens
  siRNA target sequence for FUBP1 (NM_003902.2,943-961).
gtgttcgcattcagtttaa

SEQ ID NO: 4289 - DNA, 19 bp, Homo sapiens
  siRNA target sequence for FUBP1 (NM_003902.2,973-991).
ggacaacacccgaaaggat

SEQ ID NO: 4290 - DNA, 19 bp, Homo sapiens
  siRNA target sequence for FUBP1 (NM_003902.2,974-992).
gacaacacccgaaaggata

SEQ ID NO: 4291 - DNA, 19 bp, Homo sapiens
  siRNA target sequence for FUBP1 (NM_003902.2,982-1000).
ccgaaaggatagcacaaat

SEQ ID NO: 4292 - DNA, 19 bp, Homo sapiens
  siRNA target sequence for FUBP1 (NM_003902.2,983-1001).
cgaaaggatagcacaaata

SEQ ID NO: 4293 - DNA, 19 bp, Homo sapiens
  siRNA target sequence for FUBP1 (NM_003902.2,1023-1041).
caacatgctgcagaaatta

SEQ ID NO: 4294 - DNA, 19 bp, Homo sapiens
  siRNA target sequence for FUBP1 (NM_003902.2,1144-1162).
ctggtggactacaggaatt

SEQ ID NO: 4295 - DNA, 19 bp, Homo sapiens
  siRNA target sequence for FUBP1 (NM_003902.2,1146-1164).
ggtggactacaggaattta

SEQ ID NO: 4296 - DNA, 19 bp, Homo sapiens
  siRNA target sequence for FUBP1 (NM_003902.2,1149-1167).
ggactacaggaatttaatt

SEQ ID NO: 4297 - DNA, 19 bp, Homo sapiens
  siRNA target sequence for FUBP1 (NM_003902.2,1150-1168).
gactacaggaatttaattt

SEQ ID NO: 4298 - DNA, 19 bp, Homo sapiens
  siRNA target sequence for FUBP1 (NM_003902.2,1189-1207).
ctggattaataataggaaa

SEQ ID NO: 4299 - DNA, 19 bp, Homo sapiens
  siRNA target sequence for FUBP1 (NM_003902.2,1243-1261).
ctggtgcaagaatagaact

SEQ ID NO: 4300 - DNA, 19 bp, Homo sapiens
  siRNA target sequence for FUBP1 (NM_003902.2,1265-1283).
gagaaatcctccaccaaat

SEQ ID NO: 4301 - DNA, 19 bp, Homo sapiens
  siRNA target sequence for FUBP1 (NM_003902.2,1276-1294).
caccaaatgcagatcctaa

SEQ ID NO: 4302 - DNA, 19 bp, Homo sapiens
  siRNA target sequence for FUBP1 (NM_003902.2,1279-1297).
caaatgcagatcctaatat

SEQ ID NO: 4303 - DNA, 19 bp, Homo sapiens
  siRNA target sequence for FUBP1 (NM_003902.2,1285-1303).
cagatcctaatatgaagtt

SEQ ID NO: 4304 - DNA, 19 bp, Homo sapiens
  siRNA target sequence for FUBP1 (NM_003902.2,1287-1305).
gatcctaatatgaagttat

SEQ ID NO: 4305 - DNA, 19 bp, Homo sapiens
  siRNA target sequence for FUBP1 (NM_003902.2,1315-1333).
gtggcactccacaacagat

SEQ ID NO: 4306 - DNA, 19 bp, Homo sapiens
  siRNA target sequence for FUBP1 (NM_003902.2,1318-1336).
gcactccacaacagataga

SEQ ID NO: 4307 - DNA, 19 bp, Homo sapiens
  siRNA target sequence for FUBP1 (NM_003902.2,1337-1355).
ctatgctcggcaactcata

SEQ ID NO: 4308 - DNA, 19 bp, Homo sapiens
  siRNA target sequence for FUBP1 (NM_003902.2,1342-1360).
ctcggcaactcatagaaga

SEQ ID NO: 4309 - DNA, 19 bp, Homo sapiens
  siRNA target sequence for FUBP1 (NM_003902.2,1364-1382).
gattggtggcccagtaaat

SEQ ID NO: 4310 - DNA, 19 bp, Homo sapiens
  siRNA target sequence for FUBP1 (NM_003902.2,1478-1496).
caaccctgcaccttataat

SEQ ID NO: 4311 - DNA, 19 bp, Homo sapiens
  siRNA target sequence for FUBP1 (NM_003902.2,1548-1566).
cagggatggggaaatgcat

SEQ ID NO: 4312 - DNA, 19 bp, Homo sapiens
  siRNA target sequence for FUBP1 (NM_003902.2,1607-1625).
ggcaggaacggatccaaat

SEQ ID NO: 4313 - DNA, 19 bp, Homo sapiens
  siRNA target sequence for FUBP1 (NM_003902.2,1608-1626).
gcaggaacggatccaaatt

SEQ ID NO: 4314 - DNA, 19 bp, Homo sapiens
  siRNA target sequence for FUBP1 (NM_003902.2,1641-1659).
gcttattacgctcactatt

SEQ ID NO: 4315 - DNA, 19 bp, Homo sapiens
  siRNA target sequence for FUBP1 (NM_003902.2,1642-1660).
cttattacgctcactatta

SEQ ID NO: 4316 - DNA, 19 bp, Homo sapiens
  siRNA target sequence for FUBP1 (NM_003902.2,1701-1719).
gcaccaactacaactcaaa

SEQ ID NO: 4317 - DNA, 19 bp, Homo sapiens
  siRNA target sequence for FUBP1 (NM_003902.2,1704-1722).
ccaactacaactcaaacta

SEQ ID NO: 4318 - DNA, 19 bp, Homo sapiens
  siRNA target sequence for FUBP1 (NM_003902.2,1705-1723).
caactacaactcaaactaa

SEQ ID NO: 4319 - DNA, 19 bp, Homo sapiens
  siRNA target sequence for FUBP1 (NM_003902.2,1752-1770).
ccagctggacaggttgatt

SEQ ID NO: 4320 - DNA, 19 bp, Homo sapiens
  siRNA target sequence for FUBP1 (NM_003902.2,1753-1771).
cagctggacaggttgatta

SEQ ID NO: 4321 - DNA, 19 bp, Homo sapiens
  siRNA target sequence for FUBP1 (NM_003902.2,1755-1773).
gctggacaggttgattata

SEQ ID NO: 4322 - DNA, 19 bp, Homo sapiens
  siRNA target sequence for FUBP1 (NM_003902.2,1758-1776).
ggacaggttgattatacca

SEQ ID NO: 4323 - DNA, 19 bp, Homo sapiens
  siRNA target sequence for FUBP1 (NM_003902.2,1759-1777).
gacaggttgattataccaa

SEQ ID NO: 4324 - DNA, 19 bp, Homo sapiens
  siRNA target sequence for FUBP1 (NM_003902.2,1785-1803).
gaagagtactacaagaaaa

SEQ ID NO: 4325 - DNA, 19 bp, Homo sapiens
  siRNA target sequence for FUBP1 (NM_003902.2,1842-1860).
ggtggtcagccagattata

SEQ ID NO: 4326 - DNA, 19 bp, Homo sapiens
  siRNA target sequence for FUBP1 (NM_003902.2,1870-1888).
gggctgagtattatagaca

SEQ ID NO: 4327 - DNA, 19 bp, Homo sapiens
  siRNA target sequence for FUBP1 (NM_003902.2,1871-1889).
ggctgagtattatagacaa

SEQ ID NO: 4328 - DNA, 19 bp, Homo sapiens
  siRNA target sequence for FUBP1 (NM_003902.2,1885-1903).
gacaacaagcagcctatta

SEQ ID NO: 4329 - DNA, 19 bp, Homo sapiens
  siRNA target sequence for G10 (NM_003910.2,457-475).
cagatggctgggagttgat

SEQ ID NO: 4330 - DNA, 19 bp, Homo sapiens
  siRNA target sequence for G10 (NM_003910.2,585-603).
cagaaaacccgctacatct

SEQ ID NO: 4331 - DNA, 19 bp, Homo sapiens
  siRNA target sequence for G10 (NM_003910.2,628-646).
ccatcagcagagaactcta

SEQ ID NO: 4332 - DNA, 19 bp, Homo sapiens
  siRNA target sequence for G10 (NM_003910.2,629-647).
catcagcagagaactctat

SEQ ID NO: 4333 - DNA, 19 bp, Homo sapiens
  siRNA target sequence for G10 (NM_003910.2,634-652).
gcagagaactctatgaata

SEQ ID NO: 4334 - DNA, 19 bp, Homo sapiens
  siRNA target sequence for G10 (NM_003910.2,667-685).
gctatgcagacaaaaacct

SEQ ID NO: 4335 - DNA, 19 bp, Homo sapiens
  siRNA target sequence for G10 (NM_003910.2,705-723).
caaggatatgagaacttgt

SEQ ID NO: 4336 - DNA, 19 bp, Homo sapiens
  siRNA target sequence for G10 (NM_003910.2,778-796).
gccgcgtgcccaaaagcaa

SEQ ID NO: 4337 - DNA, 19 bp, Homo sapiens
  siRNA target sequence for GABPB2 (NM_002041.2,224-242).
gatgatgaagttcgtattt

SEQ ID NO: 4338 - DNA, 19 bp, Homo sapiens
  siRNA target sequence for GABPB2 (NM_002041.2,379-397).
ggaccgaacaccattacat

SEQ ID NO: 4339 - DNA, 19 bp, Homo sapiens
  siRNA target sequence for GABPB2 (NM_002041.2,380-398).
gaccgaacaccattacata

SEQ ID NO: 4340 - DNA, 19 bp, Homo sapiens
  siRNA target sequence for GABPB2 (NM_002041.2,421-439).
cagcatagtagaggtttta

SEQ ID NO: 4341 - DNA, 19 bp, Homo sapiens
  siRNA target sequence for GABPB2 (NM_002041.2,464-482).
gcaaaggacatgttaaaga

SEQ ID NO: 4342 - DNA, 19 bp, Homo sapiens
  siRNA target sequence for GABPB2 (NM_002041.2,502-520).
cacagaacacaatcatcaa

SEQ ID NO: 4343 - DNA, 19 bp, Homo sapiens
  siRNA target sequence for GABPB2 (NM_002041.2,518-536).
caagaggtggtggaacttt

SEQ ID NO: 4344 - DNA, 19 bp, Homo sapiens
  siRNA target sequence for GABPB2 (NM_002041.2,554-572).
gatgtacacacgcaaagta

SEQ ID NO: 4345 - DNA, 19 bp, Homo sapiens
  siRNA target sequence for GABPB2 (NM_002041.2,557-575).
gtacacacgcaaagtaaat

SEQ ID NO: 4346 - DNA, 19 bp, Homo sapiens
  siRNA target sequence for GABPB2 (NM_002041.2,617-635).
gaagatttagcagagatat

SEQ ID NO: 4347 - DNA, 19 bp, Homo sapiens
  siRNA target sequence for GABPB2 (NM_002041.2,629-647).
gagatattacagattgcta

SEQ ID NO: 4348 - DNA, 19 bp, Homo sapiens
  siRNA target sequence for GABPB2 (NM_002041.2,650-668).
cagaaccaaatcaacacaa

SEQ ID NO: 4349 - DNA, 19 bp, Homo sapiens
  siRNA target sequence for GABPB2 (NM_002041.2,681-699).
ctgacactgtgacaataca

SEQ ID NO: 4350 - DNA, 19 bp, Homo sapiens
  siRNA target sequence for GABPB2 (NM_002041.2,704-722).
gcaacaccacagtttatca

SEQ ID NO: 4351 - DNA, 19 bp, Homo sapiens
  siRNA target sequence for GABPB2 (NM_002041.2,757-775).
ggtatcttcagaaaattca

SEQ ID NO: 4352 - DNA, 19 bp, Homo sapiens
  siRNA target sequence for GABPB2 (NM_002041.2,823-841).
ctcttctacatcagtatta

SEQ ID NO: 4353 - DNA, 19 bp, Homo sapiens
  siRNA target sequence for GABPB2 (NM_002041.2,831-849).
catcagtattagctacatt

SEQ ID NO: 4354 - DNA, 19 bp, Homo sapiens
  siRNA target sequence for GABPB2 (NM_002041.2,880-898).
gtccaattcttcagaaact

SEQ ID NO: 4355 - DNA, 19 bp, Homo sapiens
  siRNA target sequence for GABPB2 (NM_002041.2,945-963).
gtgccattcagcaagtagt

SEQ ID NO: 4356 - DNA, 19 bp, Homo sapiens
  siRNA target sequence for GABPB2 (NM_002041.2,974-992).
ggtcagcaagtcatcacaa

SEQ ID NO: 4357 - DNA, 19 bp, Homo sapiens
  siRNA target sequence for GABPB2 (NM_002041.2,979-997).
gcaagtcatcacaatagtt

SEQ ID NO: 4358 - DNA, 19 bp, Homo sapiens
  siRNA target sequence for GABPB2 (NM_002041.2,1072-1090).
gccagatggacaacaagta

SEQ ID NO: 4359 - DNA, 19 bp, Homo sapiens
  siRNA target sequence for GABPB2 (NM_002041.2,1073-1091).
ccagatggacaacaagtat

SEQ ID NO: 4360 - DNA, 19 bp, Homo sapiens
  siRNA target sequence for GABPB2 (NM_002041.2,1074-1092).
cagatggacaacaagtatt

SEQ ID NO: 4361 - DNA, 19 bp, Homo sapiens
  siRNA target sequence for GABPB2 (NM_002041.2,1115-1133).
gctgaagaaactgttataa

SEQ ID NO: 4362 - DNA, 19 bp, Homo sapiens
  siRNA target sequence for GABPB2 (NM_002041.2,1145-1163).
ccagctaagagacaatgta

SEQ ID NO: 4363 - DNA, 19 bp, Homo sapiens
  siRNA target sequence for GABPB2 (NM_002041.2,1146-1164).
cagctaagagacaatgtat

SEQ ID NO: 4364 - DNA, 19 bp, Homo sapiens
  siRNA target sequence for GABPB2 (NM_002041.2,1155-1173).
gacaatgtatcgaaataat

SEQ ID NO: 4365 - DNA, 19 bp, Homo sapiens
  siRNA target sequence for GABPB2 (NM_005254.3,1228-1246).
gctggatgaagcaaatcga

SEQ ID NO: 4366 - DNA, 19 bp, Homo sapiens
  siRNA target sequence for GABPB2 (NM_005254.3,1324-1342).
gactcgtcttcagactaat

SEQ ID NO: 4367 - DNA, 19 bp, Homo sapiens
  siRNA target sequence for GAS41 (NM_006530.2,227-245).
caagagaatggccgaattt

SEQ ID NO: 4368 - DNA, 19 bp, Homo sapiens
  siRNA target sequence for GAS41 (NM_006530.2,263-281).
gagagtaaagggtgttact

SEQ ID NO: 4369 - DNA, 19 bp, Homo sapiens
  siRNA target sequence for GAS41 (NM_006530.2,272-290).
gggtgttactatcgttaaa

SEQ ID NO: 4370 - DNA, 19 bp, Homo sapiens
  siRNA target sequence for GAS41 (NM_006530.2,276-294).
gttactatcgttaaaccaa

SEQ ID NO: 4371 - DNA, 19 bp, Homo sapiens
  siRNA target sequence for GAS41 (NM_006530.2,280-298).
ctatcgttaaaccaatagt

SEQ ID NO: 4372 - DNA, 19 bp, Homo sapiens
  siRNA target sequence for GAS41 (NM_006530.2,292-310).
caatagtttacggtaatgt

SEQ ID NO: 4373 - DNA, 19 bp, Homo sapiens
  siRNA target sequence for GAS41 (NM_006530.2,304-322).
gtaatgttgctcggtattt

SEQ ID NO: 4374 - DNA, 19 bp, Homo sapiens
  siRNA target sequence for GAS41 (NM_006530.2,309-327).
gttgctcggtattttggaa

SEQ ID NO: 4375 - DNA, 19 bp, Homo sapiens
  siRNA target sequence for GAS41 (NM_006530.2,352-370).
ctcatcagtggacagtata

SEQ ID NO: 4376 - DNA, 19 bp, Homo sapiens
  siRNA target sequence for GAS41 (NM_006530.2,435-453).
gaaagctatggcaatcctt

SEQ ID NO: 4377 - DNA, 19 bp, Homo sapiens
  siRNA target sequence for GAS41 (NM_006530.2,450-468).
cctttaagagttgttacta

SEQ ID NO: 4378 - DNA, 19 bp, Homo sapiens
  siRNA target sequence for GAS41 (NM_006530.2,451-469).
ctttaagagttgttactaa

SEQ ID NO: 4379 - DNA, 19 bp, Homo sapiens
  siRNA target sequence for GAS41 (NM_006530.2,466-484).
ctaaacctccatatgaaat

SEQ ID NO: 4380 - DNA, 19 bp, Homo sapiens
  siRNA target sequence for GAS41 (NM_006530.2,493-511).
caggatggggtgaattcga

SEQ ID NO: 4381 - DNA, 19 bp, Homo sapiens
  siRNA target sequence for GAS41 (NM_006530.2,495-513).
ggatggggtgaattcgaaa

SEQ ID NO: 4382 - DNA, 19 bp, Homo sapiens
  siRNA target sequence for GAS41 (NM_006530.2,496-514).
gatggggtgaattcgaaat

SEQ ID NO: 4383 - DNA, 19 bp, Homo sapiens
  siRNA target sequence for GAS41 (NM_006530.2,499-517).
ggggtgaattcgaaataat

SEQ ID NO: 4384 - DNA, 19 bp, Homo sapiens
  siRNA target sequence for GAS41 (NM_006530.2,501-519).
ggtgaattcgaaataatca

SEQ ID NO: 4385 - DNA, 19 bp, Homo sapiens
  siRNA target sequence for GAS41 (NM_006530.2,502-520).
gtgaattcgaaataatcat

SEQ ID NO: 4386 - DNA, 19 bp, Homo sapiens
  siRNA target sequence for GAS41 (NM_006530.2,533-551).
cattgaccctaatgaaaga

SEQ ID NO: 4387 - DNA, 19 bp, Homo sapiens
  siRNA target sequence for GAS41 (NM_006530.2,550-568).
gacctgtaaccctgtatca

SEQ ID NO: 4388 - DNA, 19 bp, Homo sapiens
  siRNA target sequence for GAS41 (NM_006530.2,691-709).
catctcgtcagctaacatt

SEQ ID NO: 4389 - DNA, 19 bp, Homo sapiens
  siRNA target sequence for GAS41 (NM_006530.2,706-724).
cattaggagcctataagca

SEQ ID NO: 4390 - DNA, 19 bp, Homo sapiens
  siRNA target sequence for GAS41 (NM_006530.2,711-729).
ggagcctataagcatgaaa

SEQ ID NO: 4391 - DNA, 19 bp, Homo sapiens
  siRNA target sequence for GAS41 (NM_006530.2,715-733).
cctataagcatgaaacaga

SEQ ID NO: 4392 - DNA, 19 bp, Homo sapiens
  siRNA target sequence for GAS41 (NM_006530.2,828-846).
gcaagtcgtgaaactataa

SEQ ID NO: 4393 - DNA, 19 bp, Homo sapiens
  siRNA target sequence for GAS41 (NM_006530.2,829-847).
caagtcgtgaaactataaa

SEQ ID NO: 4394 - DNA, 19 bp, Homo sapiens
  siRNA target sequence for GAS41 (NM_006530.2,834-852).
cgtgaaactataaattgtt

SEQ ID NO: 4395 - DNA, 19 bp, Homo sapiens
  siRNA target sequence for GAS41 (NM_006530.2,885-903).
gaccaagcaaaagacatat

SEQ ID NO: 4396 - DNA, 19 bp, Homo sapiens
  siRNA target sequence for GAS7 (NM_003644.1,228-246).
cctcatcgccaagcaaaaa

SEQ ID NO: 4397 - DNA, 19 bp, Homo sapiens
  siRNA target sequence for GAS7 (NM_003644.1,262-280).
caccatcacaataaactgt

SEQ ID NO: 4398 - DNA, 19 bp, Homo sapiens
  siRNA target sequence for GAS7 (NM_003644.1,391-409).
caccgtggctgggtttgaa

SEQ ID NO: 4399 - DNA, 19 bp, Homo sapiens
  siRNA target sequence for GAS7 (NM_003644.1,394-412).
cgtggctgggtttgaacta

SEQ ID NO: 4400 - DNA, 19 bp, Homo sapiens
  siRNA target sequence for GAS7 (NM_003644.1,491-509).
gaagactatgcgaagaact

SEQ ID NO: 4401 - DNA, 19 bp, Homo sapiens
  siRNA target sequence for GAS7 (NM_003644.1,592-610).
ggcggacgaagcagaagtt

SEQ ID NO: 4402 - DNA, 19 bp, Homo sapiens
  siRNA target sequence for GAS7 (NM_003644.1,594-612).
cggacgaagcagaagttca

SEQ ID NO: 4403 - DNA, 19 bp, Homo sapiens
  siRNA target sequence for GAS7 (NM_003644.1,603-621).
cagaagttcacctcaagtt

SEQ ID NO: 4404 - DNA, 19 bp, Homo sapiens
  siRNA target sequence for GAS7 (NM_003644.1,669-687).
gtgagaacttcaagaaaga

SEQ ID NO: 4405 - DNA, 19 bp, Homo sapiens
  siRNA target sequence for GAS7 (NM_003644.1,922-940).
ggcccagtccaaatggttt

SEQ ID NO: 4406 - DNA, 19 bp, Homo sapiens
  siRNA target sequence for GAS7 (NM_003644.1,930-948).
ccaaatggtttgaagagat

SEQ ID NO: 4407 - DNA, 19 bp, Homo sapiens
  siRNA target sequence for GAS7 (NM_003644.1,1078-1096).
ggatcagctgcttcgaaaa

SEQ ID NO: 4408 - DNA, 19 bp, Homo sapiens
  siRNA target sequence for GAS7 (NM_005890.1,306-324).
ctccaacagtgaatggata

SEQ ID NO: 4409 - DNA, 19 bp, Homo sapiens
  siRNA target sequence for GATA1 (NM_002049.2,184-202).
gtcctccacaccagaatca

SEQ ID NO: 4410 - DNA, 19 bp, Homo sapiens
  siRNA target sequence for GATA1 (NM_002049.2,284-302).
gcggcactggcctactaca

SEQ ID NO: 4411 - DNA, 19 bp, Homo sapiens
  siRNA target sequence for GATA1 (NM_002049.2,319-337).
cagacactccccagtcttt

SEQ ID NO: 4412 - DNA, 19 bp, Homo sapiens
  siRNA target sequence for GATA1 (NM_002049.2,321-339).
gacactccccagtctttca

SEQ ID NO: 4413 - DNA, 19 bp, Homo sapiens
  siRNA target sequence for GATA1 (NM_002049.2,843-861).
ccaagaagcgcctgattgt

SEQ ID NO: 4414 - DNA, 19 bp, Homo sapiens
  siRNA target sequence for GATA1 (NM_002049.2,850-868).
gcgcctgattgtcagtaaa

SEQ ID NO: 4415 - DNA, 19 bp, Homo sapiens
  siRNA target sequence for GATA1 (NM_002049.2,999-1017).
ccatgcggaaggatggtat

SEQ ID NO: 4416 - DNA, 19 bp, Homo sapiens
  siRNA target sequence for GATA1 (NM_002049.2,1000-1018).
catgcggaaggatggtatt

SEQ ID NO: 4417 - DNA, 19 bp, Homo sapiens
  siRNA target sequence for GATA1 (NM_002049.2,1004-1022).
cggaaggatggtattcaga

SEQ ID NO: 4418 - DNA, 19 bp, Homo sapiens
  siRNA target sequence for GATA1 (NM_002049.2,1030-1048).
ccgcaaggcatctggaaaa

SEQ ID NO: 4419 - DNA, 19 bp, Homo sapiens
  siRNA target sequence for GATA1 (NM_002049.2,1132-1150).
cagcggtagcgggaattgt

SEQ ID NO: 4420 - DNA, 19 bp, Homo sapiens
  siRNA target sequence for GATA2 (NM_032638.3,856-874).
ccacgccacccaaagaagt

SEQ ID NO: 4421 - DNA, 19 bp, Homo sapiens
  siRNA target sequence for GATA2 (NM_032638.3,1367-1385).
cggcacctgttgtgcaaat

SEQ ID NO: 4422 - DNA, 19 bp, Homo sapiens
  siRNA target sequence for GATA2 (NM_032638.3,1368-1386).
ggcacctgttgtgcaaatt

SEQ ID NO: 4423 - DNA, 19 bp, Homo sapiens
  siRNA target sequence for GATA2 (NM_032638.3,1370-1388).
cacctgttgtgcaaattgt

SEQ ID NO: 4424 - DNA, 19 bp, Homo sapiens
  siRNA target sequence for GATA2 (NM_032638.3,1524-1542).
cggaagatgtccaacaagt

SEQ ID NO: 4425 - DNA, 19 bp, Homo sapiens
  siRNA target sequence for GATA2 (NM_032638.3,1570-1588).
gcttcgaggagctgtcaaa

SEQ ID NO: 4426 - DNA, 19 bp, Homo sapiens
  siRNA target sequence for GATA3 (NM_002051.1,286-304).
ggaggtggatgtgcttttt

SEQ ID NO: 4427 - DNA, 19 bp, Homo sapiens
  siRNA target sequence for GATA3 (NM_002051.1,1206-1224).
gacccctgactatgaagaa

SEQ ID NO: 4428 - DNA, 19 bp, Homo sapiens
  siRNA target sequence for GATA3 (NM_002051.1,1266-1284).
ccaaaaagtgcaaaaaagt

SEQ ID NO: 4429 - DNA, 19 bp, Homo sapiens
  siRNA target sequence for GATA3 (NM_002051.1,1307-1325).
cccaagaacagctcgttta

SEQ ID NO: 4430 - DNA, 19 bp, Homo sapiens
  siRNA target sequence for GATA4 (NM_002052.2,1120-1138).
gacaccccaatctcgatat

SEQ ID NO: 4431 - DNA, 19 bp, Homo sapiens
  siRNA target sequence for GATA4 (NM_002052.2,1124-1142).
ccccaatctcgatatgttt

SEQ ID NO: 4432 - DNA, 19 bp, Homo sapiens
  siRNA target sequence for GATA4 (NM_002052.2,1126-1144).
ccaatctcgatatgtttga

SEQ ID NO: 4433 - DNA, 19 bp, Homo sapiens
  siRNA target sequence for GATA4 (NM_002052.2,1449-1467).
cggaaagaggggatccaaa

SEQ ID NO: 4434 - DNA, 19 bp, Homo sapiens
  siRNA target sequence for GATA4 (NM_002052.2,1596-1614).
gagatgcgtcccatcaaga

SEQ ID NO: 4435 - DNA, 19 bp, Homo sapiens
  siRNA target sequence for GATA5 (NM_080473.3,580-598).
ccttcgtgtccgacttctt

SEQ ID NO: 4436 - DNA, 19 bp, Homo sapiens
  siRNA target sequence for GATA5 (NM_080473.3,895-913).
ggcctctggctatgaagaa

SEQ ID NO: 4437 - DNA, 19 bp, Homo sapiens
  siRNA target sequence for GATA6 (NM_005257.3,1558-1576).
gaagcgcgtgccttcatca

SEQ ID NO: 4438 - DNA, 19 bp, Homo sapiens
  siRNA target sequence for GATA6 (NM_005257.3,1664-1682).
gcttgtggactctacatga

SEQ ID NO: 4439 - DNA, 19 bp, Homo sapiens
  siRNA target sequence for GATA6 (NM_005257.3,1668-1686).
gtggactctacatgaaact

SEQ ID NO: 4440 - DNA, 19 bp, Homo sapiens
  siRNA target sequence for GATA6 (NM_005257.3,1698-1716).
ccagaccacttgctatgaa

SEQ ID NO: 4441 - DNA, 19 bp, Homo sapiens
  siRNA target sequence for GATA6 (NM_005257.3,1701-1719).
gaccacttgctatgaaaaa

SEQ ID NO: 4442 - DNA, 19 bp, Homo sapiens
  siRNA target sequence for GATA6 (NM_005257.3,1742-1760).
cgaaaacctaagaacataa

SEQ ID NO: 4443 - DNA, 19 bp, Homo sapiens
  siRNA target sequence for GATA6 (NM_005257.3,1822-1840).
ctcttctaactcagatgat

SEQ ID NO: 4444 - DNA, 19 bp, Homo sapiens
  siRNA target sequence for GATA6 (NM_005257.3,1933-1951).
gaacagcgagctcaagtat

SEQ ID NO: 4445 - DNA, 19 bp, Homo sapiens
  siRNA target sequence for GATA6 (NM_005257.3,1945-1963).
caagtattcgggtcaagat

SEQ ID NO: 4446 - DNA, 19 bp, Homo sapiens
  siRNA target sequence for GLI2 (NM_005270.2,476-494).
ggccctcacctccatcaat

SEQ ID NO: 4447 - DNA, 19 bp, Homo sapiens
  siRNA target sequence for GLI2 (NM_005270.2,725-743).
ggctgaggtggtcatctat

SEQ ID NO: 4448 - DNA, 19 bp, Homo sapiens
  siRNA target sequence for GLI2 (NM_005270.2,1148-1166).
ctgcaccaagagatacaca

SEQ ID NO: 4449 - DNA, 19 bp, Homo sapiens
  siRNA target sequence for GLI2 (NM_005270.2,1255-1273).
gcacaccgctgctcaaaga

SEQ ID NO: 4450 - DNA, 19 bp, Homo sapiens
  siRNA target sequence for GLI2 (NM_005270.2,1258-1276).
caccgctgctcaaagagaa

SEQ ID NO: 4451 - DNA, 19 bp, Homo sapiens
  siRNA target sequence for GLI2 (NM_005270.2,1453-1471).
gcagtgcccccaacaatga

SEQ ID NO: 4452 - DNA, 19 bp, Homo sapiens
  siRNA target sequence for GLI2 (NM_005270.2,1621-1639).
ggttcgagcagctcaagaa

SEQ ID NO: 4453 - DNA, 19 bp, Homo sapiens
  siRNA target sequence for GLI2 (NM_005270.2,1911-1929).
ggcatctccccctacttct

SEQ ID NO: 4454 - DNA, 19 bp, Homo sapiens
  siRNA target sequence for GLI3 (NM_000168.2,78-96).
cacgaccactgaaaagaaa

SEQ ID NO: 4455 - DNA, 19 bp, Homo sapiens
  siRNA target sequence for GLI3 (NM_000168.2,120-138).
gtgctccactcgaacagat

SEQ ID NO: 4456 - DNA, 19 bp, Homo sapiens
  siRNA target sequence for GLI3 (NM_000168.2,188-206).
gtcctggacagacttatca

SEQ ID NO: 4457 - DNA, 19 bp, Homo sapiens
  siRNA target sequence for GLI3 (NM_000168.2,190-208).
cctggacagacttatcaca

SEQ ID NO: 4458 - DNA, 19 bp, Homo sapiens
  siRNA target sequence for GLI3 (NM_000168.2,215-233).
gaagaaacgcaatcactat

SEQ ID NO: 4459 - DNA, 19 bp, Homo sapiens
  siRNA target sequence for GLI3 (NM_000168.2,228-246).
cactatgcagccacagaat

SEQ ID NO: 4460 - DNA, 19 bp, Homo sapiens
  siRNA target sequence for GLI3 (NM_000168.2,300-318).
ggcctcattgatcaagaaa

SEQ ID NO: 4461 - DNA, 19 bp, Homo sapiens
  siRNA target sequence for GLI3 (NM_000168.2,483-501).
gggccgttaccattacgat

SEQ ID NO: 4462 - DNA, 19 bp, Homo sapiens
  siRNA target sequence for GLI3 (NM_000168.2,508-526).
ccgattcctccattgcata

SEQ ID NO: 4463 - DNA, 19 bp, Homo sapiens
  siRNA target sequence for GLI3 (NM_000168.2,528-546).
gacttccgccttatctagt

SEQ ID NO: 4464 - DNA, 19 bp, Homo sapiens
  siRNA target sequence for GLI3 (NM_000168.2,562-580).
gacctgcccttcattagga

SEQ ID NO: 4465 - DNA, 19 bp, Homo sapiens
  siRNA target sequence for GLI3 (NM_000168.2,798-816).
cagcccctatgcagacatt

SEQ ID NO: 4466 - DNA, 19 bp, Homo sapiens
  siRNA target sequence for GLI3 (NM_000168.2,800-818).
gcccctatgcagacattat

SEQ ID NO: 4467 - DNA, 19 bp, Homo sapiens
  siRNA target sequence for GLI3 (NM_000168.2,801-819).
cccctatgcagacattatt

SEQ ID NO: 4468 - DNA, 19 bp, Homo sapiens
  siRNA target sequence for GLI3 (NM_000168.2,947-965).
cactctccgatcatagctt

SEQ ID NO: 4469 - DNA, 19 bp, Homo sapiens
  siRNA target sequence for GLI3 (NM_000168.2,967-985).
gaccttcagaccatgataa

SEQ ID NO: 4470 - DNA, 19 bp, Homo sapiens
  siRNA target sequence for GLI3 (NM_000168.2,1001-1019).
ccttggtcacgattctcaa

SEQ ID NO: 4471 - DNA, 19 bp, Homo sapiens
  siRNA target sequence for GLI3 (NM_000168.2,1002-1020).
cttggtcacgattctcaat

SEQ ID NO: 4472 - DNA, 19 bp, Homo sapiens
  siRNA target sequence for GLI3 (NM_000168.2,1005-1023).
ggtcacgattctcaataat

SEQ ID NO: 4473 - DNA, 19 bp, Homo sapiens
  siRNA target sequence for GLI3 (NM_000168.2,1006-1024).
gtcacgattctcaataatt

SEQ ID NO: 4474 - DNA, 19 bp, Homo sapiens
  siRNA target sequence for GLI3 (NM_000168.2,1150-1168).
cgacaacagagcttaggtt

SEQ ID NO: 4475 - DNA, 19 bp, Homo sapiens
  siRNA target sequence for GLI3 (NM_000168.2,1334-1352).
gtgacccgatgcacaacaa

SEQ ID NO: 4476 - DNA, 19 bp, Homo sapiens
  siRNA target sequence for GLI3 (NM_000168.2,1470-1488).
ggagcctgaagtcatctat

SEQ ID NO: 4477 - DNA, 19 bp, Homo sapiens
  siRNA target sequence for GLI3 (NM_000168.2,1539-1557).
gcagcttgtgcaccatata

SEQ ID NO: 4478 - DNA, 19 bp, Homo sapiens
  siRNA target sequence for GLI3 (NM_000168.2,1540-1558).
cagcttgtgcaccatataa

SEQ ID NO: 4479 - DNA, 19 bp, Homo sapiens
  siRNA target sequence for GLI3 (NM_000168.2,1542-1560).
gcttgtgcaccatataaat

SEQ ID NO: 4480 - DNA, 19 bp, Homo sapiens
  siRNA target sequence for GLI3 (NM_000168.2,1543-1561).
cttgtgcaccatataaata

SEQ ID NO: 4481 - DNA, 19 bp, Homo sapiens
  siRNA target sequence for GLI3 (NM_000168.2,1650-1668).
gttggtagtgcatatgaga

SEQ ID NO: 4482 - DNA, 19 bp, Homo sapiens
  siRNA target sequence for GLI3 (NM_000168.2,1719-1737).
ggcctactcgagactagaa

SEQ ID NO: 4483 - DNA, 19 bp, Homo sapiens
  siRNA target sequence for GLI3 (NM_000168.2,1720-1738).
gcctactcgagactagaaa

SEQ ID NO: 4484 - DNA, 19 bp, Homo sapiens
  siRNA target sequence for GLI3 (NM_000168.2,1721-1739).
cctactcgagactagaaaa

SEQ ID NO: 4485 - DNA, 19 bp, Homo sapiens
  siRNA target sequence for GLI3 (NM_000168.2,1831-1849).
cgcgccaaacaccaaaaca

SEQ ID NO: 4486 - DNA, 19 bp, Homo sapiens
  siRNA target sequence for GLI3 (NM_000168.2,1833-1851).
cgccaaacaccaaaacaga

SEQ ID NO: 4487 - DNA, 19 bp, Homo sapiens
  siRNA target sequence for GLI3 (NM_000168.2,2173-2191).
cctggtggtcagtcttcat

SEQ ID NO: 4488 - DNA, 19 bp, Homo sapiens
  siRNA target sequence for GLI3 (NM_000168.2,2210-2228).
ccatcagcaactattccaa

SEQ ID NO: 4489 - DNA, 19 bp, Homo sapiens
  siRNA target sequence for GLI3 (NM_000168.2,2250-2268).
gaccgatggaggtagtata

SEQ ID NO: 4490 - DNA, 19 bp, Homo sapiens
  siRNA target sequence for GLI3 (NM_000168.2,2253-2271).
cgatggaggtagtatagga

SEQ ID NO: 4491 - DNA, 19 bp, Homo sapiens
  siRNA target sequence for GLI3 (NM_000168.2,2328-2346).
cacagcccttgctttgcaa

SEQ ID NO: 4492 - DNA, 19 bp, Homo sapiens
  siRNA target sequence for GLI3 (NM_000168.2,2359-2377).
ccggcagggaccaaatgga

SEQ ID NO: 4493 - DNA, 19 bp, Homo sapiens
  siRNA target sequence for GLI3 (NM_000168.2,2379-2397).
ggagcacgtaaaactagaa

SEQ ID NO: 4494 - DNA, 19 bp, Homo sapiens
  siRNA target sequence for GLI3 (NM_000168.2,2380-2398).
gagcacgtaaaactagaaa

SEQ ID NO: 4495 - DNA, 19 bp, Homo sapiens
  siRNA target sequence for GLI3 (NM_000168.2,2427-2445).
gcgactgaaccccattcta

SEQ ID NO: 4496 - DNA, 19 bp, Homo sapiens
  siRNA target sequence for GLI3 (NM_000168.2,3180-3198).
cagtctcgtgcttcagaat

SEQ ID NO: 4497 - DNA, 19 bp, Homo sapiens
  siRNA target sequence for GLI3 (NM_000168.2,3182-3200).
gtctcgtgcttcagaatta

SEQ ID NO: 4498 - DNA, 19 bp, Homo sapiens
  siRNA target sequence for GLI3 (NM_000168.2,3336-3354).
cgacgtggtgcagtattta

SEQ ID NO: 4499 - DNA, 19 bp, Homo sapiens
  siRNA target sequence for GLI3 (NM_000168.2,3337-3355).
gacgtggtgcagtatttaa

SEQ ID NO: 4500 - DNA, 19 bp, Homo sapiens
  siRNA target sequence for GLI3 (NM_000168.2,3339-3357).
cgtggtgcagtatttaaat

SEQ ID NO: 4501 - DNA, 19 bp, Homo sapiens
  siRNA target sequence for GLI3 (NM_000168.2,3679-3697).
cctgctgggggctatcaga

SEQ ID NO: 4502 - DNA, 19 bp, Homo sapiens
  siRNA target sequence for GLI3 (NM_000168.2,3725-3743).
gtggcccagagcacttgat

SEQ ID NO: 4503 - DNA, 19 bp, Homo sapiens
  siRNA target sequence for GLI3 (NM_000168.2,3867-3885).
ctgtggtgccgggattcaa

SEQ ID NO: 4504 - DNA, 19 bp, Homo sapiens
  siRNA target sequence for GLI3 (NM_000168.2,3946-3964).
ccggtagcgccaaatgagt

SEQ ID NO: 4505 - DNA, 19 bp, Homo sapiens
  siRNA target sequence for GLI3 (NM_000168.2,4083-4101).
gatgcttgggcagattagt

SEQ ID NO: 4506 - DNA, 19 bp, Homo sapiens
  siRNA target sequence for GLI3 (NM_000168.2,4100-4118).
gtgctacctcacacatcaa

SEQ ID NO: 4507 - DNA, 19 bp, Homo sapiens
  siRNA target sequence for GLI3 (NM_000168.2,4102-4120).
gctacctcacacatcaaca

SEQ ID NO: 4508 - DNA, 19 bp, Homo sapiens
  siRNA target sequence for GLI3 (NM_000168.2,4103-4121).
ctacctcacacatcaacat

SEQ ID NO: 4509 - DNA, 19 bp, Homo sapiens
  siRNA target sequence for GLI3 (NM_000168.2,4298-4316).
cctgcagggtgaatggtat

SEQ ID NO: 4510 - DNA, 19 bp, Homo sapiens
  siRNA target sequence for GLI3 (NM_000168.2,4304-4322).
gggtgaatggtatcaagat

SEQ ID NO: 4511 - DNA, 19 bp, Homo sapiens
  siRNA target sequence for GLI3 (NM_000168.2,4465-4483).
gggaccagcgccaaaaact

SEQ ID NO: 4512 - DNA, 19 bp, Homo sapiens
  siRNA target sequence for GLI3 (NM_000168.2,4467-4485).
gaccagcgccaaaaactct

SEQ ID NO: 4513 - DNA, 19 bp, Homo sapiens
  siRNA target sequence for GLI3 (NM_000168.2,4473-4491).
cgccaaaaactctgagtta

SEQ ID NO: 4514 - DNA, 19 bp, Homo sapiens
  siRNA target sequence for GLI3 (NM_000168.2,4476-4494).
caaaaactctgagttactt

SEQ ID NO: 4515 - DNA, 19 bp, Homo sapiens
  siRNA target sequence for GLI3 (NM_000168.2,4552-4570).
gaaggggtacagattgact

SEQ ID NO: 4516 - DNA, 19 bp, Homo sapiens
  siRNA target sequence for GLI3 (NM_000168.2,4759-4777).
ctagcggaagaaagcaaat

SEQ ID NO: 4517 - DNA, 19 bp, Homo sapiens
  siRNA target sequence for GLI3 (NM_000168.2,4763-4781).
cggaagaaagcaaattcct

SEQ ID NO: 4518 - DNA, 19 bp, Homo sapiens
  siRNA target sequence for GSC (NM_173849.2,374-392).
cccgcctcggctacaacaa

SEQ ID NO: 4519 - DNA, 19 bp, Homo sapiens
  siRNA target sequence for GSCL (NM_005315.1,419-437).
cgctcgaggcgcttttcgt

SEQ ID NO: 4520 - DNA, 19 bp, Homo sapiens
  siRNA target sequence for GSH-2 (NM_133267.1,651-669).
cctggggacgcgcagtttt

SEQ ID NO: 4521 - DNA, 19 bp, Homo sapiens
  siRNA target sequence for GSH-2 (NM_133267.1,972-990).
gaattctcttccaacatgt

SEQ ID NO: 4522 - DNA, 19 bp, Homo sapiens
  siRNA target sequence for GSH-2 (NM_133267.1,999-1017).
cgactccggaggattgaaa

SEQ ID NO: 4523 - DNA, 19 bp, Homo sapiens
  siRNA target sequence for GSH-2 (NM_133267.1,1000-1018).
gactccggaggattgaaat

SEQ ID NO: 4524 - DNA, 19 bp, Homo sapiens
  siRNA target sequence for GSH-2 (NM_133267.1,1192-1210).
cctcagccaacgatgacaa

SEQ ID NO: 4525 - DNA, 19 bp, Homo sapiens
  siRNA target sequence for GSH1 (NM_145657.1,537-555).
gcgcgagttcgcttctaat

SEQ ID NO: 4526 - DNA, 19 bp, Homo sapiens
  siRNA target sequence for GSH1 (NM_145657.1,538-556).
cgcgagttcgcttctaata

SEQ ID NO: 4527 - DNA, 19 bp, Homo sapiens
  siRNA target sequence for GSH1 (NM_145657.1,539-557).
gcgagttcgcttctaatat

SEQ ID NO: 4528 - DNA, 19 bp, Homo sapiens
  siRNA target sequence for GSH1 (NM_145657.1,541-559).
gagttcgcttctaatatgt

SEQ ID NO: 4529 - DNA, 19 bp, Homo sapiens
  siRNA target sequence for GSH1 (NM_145657.1,767-785).
ccgaggatgacgacgaatt

SEQ ID NO: 4530 - DNA, 19 bp, Homo sapiens
  siRNA target sequence for GTF2A2 (NM_004492.1,247-265).
gttctacttcagtttgata

SEQ ID NO: 4531 - DNA, 19 bp, Homo sapiens
  siRNA target sequence for GTF2A2 (NM_004492.1,317-335).
ggggctctctaaatacgta

SEQ ID NO: 4532 - DNA, 19 bp, Homo sapiens
  siRNA target sequence for GTF2A2 (NM_004492.1,323-341).
ctctaaatacgtacagatt

SEQ ID NO: 4533 - DNA, 19 bp, Homo sapiens
  siRNA target sequence for GTF2A2 (NM_004492.1,325-343).
ctaaatacgtacagattct

SEQ ID NO: 4534 - DNA, 19 bp, Homo sapiens
  siRNA target sequence for GTF2A2 (NM_004492.1,333-351).
gtacagattctgcgataat

SEQ ID NO: 4535 - DNA, 19 bp, Homo sapiens
  siRNA target sequence for GTF2A2 (NM_004492.1,357-375).
gacttttgtactgaatgat

SEQ ID NO: 4536 - DNA, 19 bp, Homo sapiens
  siRNA target sequence for GTF2A2 (NM_004492.1,386-404).
gagaggtgacagaacttat

SEQ ID NO: 4537 - DNA, 19 bp, Homo sapiens
  siRNA target sequence for GTF2A2 (NM_004492.1,388-406).
gaggtgacagaacttatta

SEQ ID NO: 4538 - DNA, 19 bp, Homo sapiens
  siRNA target sequence for GTF2H3 (NM_001516.3,30-48).
gtttcagacgaagatgaat

SEQ ID NO: 4539 - DNA, 19 bp, Homo sapiens
  siRNA target sequence for GTF2H3 (NM_001516.3,38-56).
cgaagatgaattgaatctt

SEQ ID NO: 4540 - DNA, 19 bp, Homo sapiens
  siRNA target sequence for GTF2H3 (NM_001516.3,50-68).
gaatcttctggttattgta

SEQ ID NO: 4541 - DNA, 19 bp, Homo sapiens
  siRNA target sequence for GTF2H3 (NM_001516.3,89-107).
gtggggaaagcaagcatta

SEQ ID NO: 4542 - DNA, 19 bp, Homo sapiens
  siRNA target sequence for GTF2H3 (NM_001516.3,159-177).
ggaaattcgcatttattca

SEQ ID NO: 4543 - DNA, 19 bp, Homo sapiens
  siRNA target sequence for GTF2H3 (NM_001516.3,188-206).
caacaaacttgctgtgata

SEQ ID NO: 4544 - DNA, 19 bp, Homo sapiens
  siRNA target sequence for GTF2H3 (NM_001516.3,219-237).
caagaaagccgattcttat

SEQ ID NO: 4545 - DNA, 19 bp, Homo sapiens
  siRNA target sequence for GTF2H3 (NM_001516.3,280-298).
ctggcaaccctcctgaatt

SEQ ID NO: 4546 - DNA, 19 bp, Homo sapiens
  siRNA target sequence for GTF2H3 (NM_001516.3,282-300).
ggcaaccctcctgaattta

SEQ ID NO: 4547 - DNA, 19 bp, Homo sapiens
  siRNA target sequence for GTF2H3 (NM_001516.3,283-301).
gcaaccctcctgaatttaa

SEQ ID NO: 4548 - DNA, 19 bp, Homo sapiens
  siRNA target sequence for GTF2H3 (NM_001516.3,284-302).
caaccctcctgaatttaat

SEQ ID NO: 4549 - DNA, 19 bp, Homo sapiens
  siRNA target sequence for GTF2H3 (NM_001516.3,340-358).
cctcagcaaatgaagttat

SEQ ID NO: 4550 - DNA, 19 bp, Homo sapiens
  siRNA target sequence for GTF2H3 (NM_001516.3,401-419).
gggtcaacatacagaaact

SEQ ID NO: 4551 - DNA, 19 bp, Homo sapiens
  siRNA target sequence for GTF2H3 (NM_001516.3,402-420).
ggtcaacatacagaaactt

SEQ ID NO: 4552 - DNA, 19 bp, Homo sapiens
  siRNA target sequence for GTF2H3 (NM_001516.3,444-462).
gccctttgctacattcata

SEQ ID NO: 4553 - DNA, 19 bp, Homo sapiens
  siRNA target sequence for GTF2H3 (NM_001516.3,446-464).
cctttgctacattcataga

SEQ ID NO: 4554 - DNA, 19 bp, Homo sapiens
  siRNA target sequence for GTF2H3 (NM_001516.3,447-465).
ctttgctacattcatagaa

SEQ ID NO: 4555 - DNA, 19 bp, Homo sapiens
  siRNA target sequence for GTF2H3 (NM_001516.3,451-469).
gctacattcatagaatgaa

SEQ ID NO: 4556 - DNA, 19 bp, Homo sapiens
  siRNA target sequence for GTF2H3 (NM_001516.3,502-520).
caaggatattggtgattaa

SEQ ID NO: 4557 - DNA, 19 bp, Homo sapiens
  siRNA target sequence for GTF2H3 (NM_001516.3,531-549).
gacagtgcgttgcagtata

SEQ ID NO: 4558 - DNA, 19 bp, Homo sapiens
  siRNA target sequence for GTF2H3 (NM_001516.3,535-553).
gtgcgttgcagtatatgaa

SEQ ID NO: 4559 - DNA, 19 bp, Homo sapiens
  siRNA target sequence for GTF2H3 (NM_001516.3,537-555).
gcgttgcagtatatgaact

SEQ ID NO: 4560 - DNA, 19 bp, Homo sapiens
  siRNA target sequence for GTF2H3 (NM_001516.3,538-556).
cgttgcagtatatgaactt

SEQ ID NO: 4561 - DNA, 19 bp, Homo sapiens
  siRNA target sequence for GTF2H3 (NM_001516.3,543-561).
cagtatatgaacttcatga

SEQ ID NO: 4562 - DNA, 19 bp, Homo sapiens
  siRNA target sequence for GTF2H3 (NM_001516.3,757-775).
cacccccagttcatgttga

SEQ ID NO: 4563 - DNA, 19 bp, Homo sapiens
  siRNA target sequence for GTF2H3 (NM_001516.3,790-808).
gcttctgtcatcgaaatct

SEQ ID NO: 4564 - DNA, 19 bp, Homo sapiens
  siRNA target sequence for GTF2H3 (NM_001516.3,796-814).
gtcatcgaaatctcattga

SEQ ID NO: 4565 - DNA, 19 bp, Homo sapiens
  siRNA target sequence for GTF2H3 (NM_001516.3,798-816).
catcgaaatctcattgaaa

SEQ ID NO: 4566 - DNA, 19 bp, Homo sapiens
  siRNA target sequence for GTF2H3 (NM_001516.3,877-895).
cgtgcgagacagcctttaa

SEQ ID NO: 4567 - DNA, 19 bp, Homo sapiens
  siRNA target sequence for GTF2H3 (NM_001516.3,878-896).
gtgcgagacagcctttaaa

SEQ ID NO: 4568 - DNA, 19 bp, Homo sapiens
  siRNA target sequence for GTF2H4 (NM_001517.3,265-283).
gggtattggaccgattgta

SEQ ID NO: 4569 - DNA, 19 bp, Homo sapiens
  siRNA target sequence for GTF2H4 (NM_001517.3,266-284).
ggtattggaccgattgtat

SEQ ID NO: 4570 - DNA, 19 bp, Homo sapiens
  siRNA target sequence for GTF2H4 (NM_001517.3,807-825).
gctcagctctggtacttta

SEQ ID NO: 4571 - DNA, 19 bp, Homo sapiens
  siRNA target sequence for GTF2H4 (NM_001517.3,808-826).
ctcagctctggtactttat

SEQ ID NO: 4572 - DNA, 19 bp, Homo sapiens
  siRNA target sequence for GTF2H4 (NM_001517.3,810-828).
cagctctggtactttatgt

SEQ ID NO: 4573 - DNA, 19 bp, Homo sapiens
  siRNA target sequence for GTF2H4 (NM_001517.3,860-878).
catggacctggtagagatt

SEQ ID NO: 4574 - DNA, 19 bp, Homo sapiens
  siRNA target sequence for GTF2H4 (NM_001517.3,864-882).
gacctggtagagattctct

SEQ ID NO: 4575 - DNA, 19 bp, Homo sapiens
  siRNA target sequence for GTF2H4 (NM_001517.3,907-925).
ctactctgggcaaggatta

SEQ ID NO: 4576 - DNA, 19 bp, Homo sapiens
  siRNA target sequence for GTF2H4 (NM_001517.3,1006-1024).
ggaaatctcggcgttacta

SEQ ID NO: 4577 - DNA, 19 bp, Homo sapiens
  siRNA target sequence for GTF2H4 (NM_001517.3,1028-1046).
cacacgcctggccatcaat

SEQ ID NO: 4578 - DNA, 19 bp, Homo sapiens
  siRNA target sequence for GTF2H4 (NM_001517.3,1032-1050).
cgcctggccatcaatctct

SEQ ID NO: 4579 - DNA, 19 bp, Homo sapiens
  siRNA target sequence for GTF2H4 (NM_001517.3,1097-1115).
cattgtcgtggaaaccaat

SEQ ID NO: 4580 - DNA, 19 bp, Homo sapiens
  siRNA target sequence for GTF2H4 (NM_001517.3,1260-1278).
gcccagcagataatccatt

SEQ ID NO: 4581 - DNA, 19 bp, Homo sapiens
  siRNA target sequence for GTF2H4 (NM_001517.3,1527-1545).
gacgtcaagcgcttttgga

SEQ ID NO: 4582 - DNA, 19 bp, Homo sapiens
  siRNA target sequence for GTF2I (NM_001518.2,557-575).
cgtgcttttgtcaatacca

SEQ ID NO: 4583 - DNA, 19 bp, Homo sapiens
  siRNA target sequence for GTF2I (NM_001518.2,566-584).
gtcaataccagaaaggatt

SEQ ID NO: 4584 - DNA, 19 bp, Homo sapiens
  siRNA target sequence for GTF2I (NM_001518.2,956-974).
ggtggtcgtgtgatggtaa

SEQ ID NO: 4585 - DNA, 19 bp, Homo sapiens
  siRNA target sequence for GTF2I (NM_001518.2,980-998).
gctgacaggtcaatactat

SEQ ID NO: 4586 - DNA, 19 bp, Homo sapiens
  siRNA target sequence for GTF2I (NM_001518.2,1011-1029).
gttgtggccccatcaaagt

SEQ ID NO: 4587 - DNA, 19 bp, Homo sapiens
  siRNA target sequence for GTF2I (NM_001518.2,1053-1071).
ctggcatttccctggaaat

SEQ ID NO: 4588 - DNA, 19 bp, Homo sapiens
  siRNA target sequence for GTF2I (NM_032999.1,1174-1192).
cctatcgaagcctttgcaa

SEQ ID NO: 4589 - DNA, 19 bp, Homo sapiens
  siRNA target sequence for GTF2I (NM_032999.1,1238-1256).
gtaccagcagaagattcta

SEQ ID NO: 4590 - DNA, 19 bp, Homo sapiens
  siRNA target sequence for GTF2I (NM_032999.1,1290-1308).
ctgaagttgaggtgactat

SEQ ID NO: 4591 - DNA, 19 bp, Homo sapiens
  siRNA target sequence for HAND1 (NM_004821.1,570-588).
gacgcactgagagcattaa

SEQ ID NO: 4592 - DNA, 19 bp, Homo sapiens
  siRNA target sequence for HAND1 (NM_004821.1,572-590).
cgcactgagagcattaaca

SEQ ID NO: 4593 - DNA, 19 bp, Homo sapiens
  siRNA target sequence for HAND1 (NM_004821.1,799-817).
gcagcagcacgaaggtttt

SEQ ID NO: 4594 - DNA, 19 bp, Homo sapiens
  siRNA target sequence for HAND1 (NM_004821.1,802-820).
gcagcacgaaggttttcct

SEQ ID NO: 4595 - DNA, 19 bp, Homo sapiens
  siRNA target sequence for HAND1 (NM_004821.1,833-851).
ccagtcgagaagaggatta

SEQ ID NO: 4596 - DNA, 19 bp, Homo sapiens
  siRNA target sequence for HAND1 (NM_004821.1,838-856).
cgagaagaggattaaagga

SEQ ID NO: 4597 - DNA, 19 bp, Homo sapiens
  siRNA target sequence for HCFC1 (NM_005334.1,264-282).
gggggtctggccaatgata

SEQ ID NO: 4598 - DNA, 19 bp, Homo sapiens
  siRNA target sequence for HCFC1 (NM_005334.1,311-329).
gtacctgaatgacttatat

SEQ ID NO: 4599 - DNA, 19 bp, Homo sapiens
  siRNA target sequence for HCFC1 (NM_005334.1,367-385).
gggacattcccatcactta

SEQ ID NO: 4600 - DNA, 19 bp, Homo sapiens
  siRNA target sequence for HCFC1 (NM_005334.1,422-440).
cgtggtctacaccgaaaaa

SEQ ID NO: 4601 - DNA, 19 bp, Homo sapiens
  siRNA target sequence for HCFC1 (NM_005334.1,426-444).
gtctacaccgaaaaagaca

SEQ ID NO: 4602 - DNA, 19 bp, Homo sapiens
  siRNA target sequence for HCFC1 (NM_005334.1,498-516).
gacctgtggaccctagata

SEQ ID NO: 4603 - DNA, 19 bp, Homo sapiens
  siRNA target sequence for HCFC1 (NM_005334.1,500-518).
cctgtggaccctagatatt

SEQ ID NO: 4604 - DNA, 19 bp, Homo sapiens
  siRNA target sequence for HCFC1 (NM_005334.1,519-537).
gacaccctgacgtggaata

SEQ ID NO: 4605 - DNA, 19 bp, Homo sapiens
  siRNA target sequence for HCFC1 (NM_005334.1,797-815).
caacacccgcctgtacatt

SEQ ID NO: 4606 - DNA, 19 bp, Homo sapiens
  siRNA target sequence for HCFC1 (NM_005334.1,877-895).
ggtacctagagacagaaaa

SEQ ID NO: 4607 - DNA, 19 bp, Homo sapiens
  siRNA target sequence for HCFC1 (NM_005334.1,1465-1483).
ccgctgccacccagaagat

SEQ ID NO: 4608 - DNA, 19 bp, Homo sapiens
  siRNA target sequence for HCFC1 (NM_005334.1,1957-1975).
ccctgccagcgggaacaat

SEQ ID NO: 4609 - DNA, 19 bp, Homo sapiens
  siRNA target sequence for HCFC1 (NM_005334.1,2241-2259).
gcacctgcgaaaatcatca

SEQ ID NO: 4610 - DNA, 19 bp, Homo sapiens
  siRNA target sequence for HCFC1 (NM_005334.1,2420-2438).
caccacgttggttgtgaaa

SEQ ID NO: 4611 - DNA, 19 bp, Homo sapiens
  siRNA target sequence for HCFC1 (NM_005334.1,2759-2777).
ggcctccccgactacagaa

SEQ ID NO: 4612 - DNA, 19 bp, Homo sapiens
  siRNA target sequence for HCFC1 (NM_005334.1,2778-2796).
cagcccaccgccacagtta

SEQ ID NO: 4613 - DNA, 19 bp, Homo sapiens
  siRNA target sequence for HCFC1 (NM_005334.1,3003-3021).
gtgggccagcagaatggta

SEQ ID NO: 4614 - DNA, 19 bp, Homo sapiens
  siRNA target sequence for HCFC1 (NM_005334.1,3942-3960).
cttcccgacgccacttctt

SEQ ID NO: 4615 - DNA, 19 bp, Homo sapiens
  siRNA target sequence for HCFC1 (NM_005334.1,4194-4212).
ggcgacagcgtgaacatca

SEQ ID NO: 4616 - DNA, 19 bp, Homo sapiens
  siRNA target sequence for HCFC1 (NM_005334.1,4543-4561).
ccacacagtccgaagtaga

SEQ ID NO: 4617 - DNA, 19 bp, Homo sapiens
  siRNA target sequence for HCFC1 (NM_005334.1,4553-4571).
cgaagtagaccagttatca

SEQ ID NO: 4618 - DNA, 19 bp, Homo sapiens
  siRNA target sequence for HCFC1 (NM_005334.1,4989-5007).
ccagccattgagagcaatt

SEQ ID NO: 4619 - DNA, 19 bp, Homo sapiens
  siRNA target sequence for HCFC1 (NM_005334.1,5078-5096).
ggctccatccaacacattt

SEQ ID NO: 4620 - DNA, 19 bp, Homo sapiens
  siRNA target sequence for HCFC1 (NM_005334.1,5249-5267).
gtttgatgtgggagtcatt

SEQ ID NO: 4621 - DNA, 19 bp, Homo sapiens
  siRNA target sequence for HCFC1 (NM_005334.1,5264-5282).
cattaagggcaccaatgta

SEQ ID NO: 4622 - DNA, 19 bp, Homo sapiens
  siRNA target sequence for HCFC1 (NM_005334.1,5339-5357).
gggcaccgtccctgactat

SEQ ID NO: 4623 - DNA, 19 bp, Homo sapiens
  siRNA target sequence for HCFC1 (NM_005334.1,5340-5358).
ggcaccgtccctgactata

SEQ ID NO: 4624 - DNA, 19 bp, Homo sapiens
  siRNA target sequence for HCFC1 (NM_005334.1,5341-5359).
gcaccgtccctgactataa

SEQ ID NO: 4625 - DNA, 19 bp, Homo sapiens
  siRNA target sequence for HCFC1 (NM_005334.1,5344-5362).
ccgtccctgactataacca

SEQ ID NO: 4626 - DNA, 19 bp, Homo sapiens
  siRNA target sequence for HCFC1 (NM_005334.1,5385-5403).
ccaggcacagcctataagt

SEQ ID NO: 4627 - DNA, 19 bp, Homo sapiens
  siRNA target sequence for HCFC1 (NM_005334.1,5438-5456).
gcccttcagcgaaatctca

SEQ ID NO: 4628 - DNA, 19 bp, Homo sapiens
  siRNA target sequence for HCFC1 (NM_005334.1,5446-5464).
gcgaaatctcagcctttaa

SEQ ID NO: 4629 - DNA, 19 bp, Homo sapiens
  siRNA target sequence for HCFC1 (NM_005334.1,5491-5509).
ccccttgtgccattaaaat

SEQ ID NO: 4630 - DNA, 19 bp, Homo sapiens
  siRNA target sequence for HCFC1 (NM_005334.1,5556-5574).
gtgacctccggcaagatta

SEQ ID NO: 4631 - DNA, 19 bp, Homo sapiens
  siRNA target sequence for HCFC1 (NM_005334.1,5560-5578).
cctccggcaagattatcga

SEQ ID NO: 4632 - DNA, 19 bp, Homo sapiens
  siRNA target sequence for HCLS1 (NM_005335.3,189-207).
gacgcacagaacacatcaa

SEQ ID NO: 4633 - DNA, 19 bp, Homo sapiens
  siRNA target sequence for HCLS1 (NM_005335.3,269-287).
gagtcagggcccaaagcat

SEQ ID NO: 4634 - DNA, 19 bp, Homo sapiens
  siRNA target sequence for HCLS1 (NM_005335.3,448-466).
gtcagcagtcggctttgat

SEQ ID NO: 4635 - DNA, 19 bp, Homo sapiens
  siRNA target sequence for HCLS1 (NM_005335.3,453-471).
cagtcggctttgattataa

SEQ ID NO: 4636 - DNA, 19 bp, Homo sapiens
  siRNA target sequence for HCLS1 (NM_005335.3,457-475).
cggctttgattataaagga

SEQ ID NO: 4637 - DNA, 19 bp, Homo sapiens
  siRNA target sequence for HCLS1 (NM_005335.3,532-550).
cggggtggagaaggataaa

SEQ ID NO: 4638 - DNA, 19 bp, Homo sapiens
  siRNA target sequence for HCLS1 (NM_005335.3,670-688).
gagcgctgtcggcttcaat

SEQ ID NO: 4639 - DNA, 19 bp, Homo sapiens
  siRNA target sequence for HCLS1 (NM_005335.3,674-692).
gctgtcggcttcaatgaaa

SEQ ID NO: 4640 - DNA, 19 bp, Homo sapiens
  siRNA target sequence for HCLS1 (NM_005335.3,675-693).
ctgtcggcttcaatgaaat

SEQ ID NO: 4641 - DNA, 19 bp, Homo sapiens
  siRNA target sequence for HCLS1 (NM_005335.3,718-736).
gaagacgacgcccatagaa

SEQ ID NO: 4642 - DNA, 19 bp, Homo sapiens
  siRNA target sequence for HCLS1 (NM_005335.3,730-748).
catagaagccgcttctagt

SEQ ID NO: 4643 - DNA, 19 bp, Homo sapiens
  siRNA target sequence for HCLS1 (NM_005335.3,756-774).
gtgggctgaaggcgaaatt

SEQ ID NO: 4644 - DNA, 19 bp, Homo sapiens
  siRNA target sequence for HCLS1 (NM_005335.3,759-777).
ggctgaaggcgaaatttga

SEQ ID NO: 4645 - DNA, 19 bp, Homo sapiens
  siRNA target sequence for HCLS1 (NM_005335.3,851-869).
cgaaaggctgtgacaaaga

SEQ ID NO: 4646 - DNA, 19 bp, Homo sapiens
  siRNA target sequence for HCLS1 (NM_005335.3,884-902).
ccacagccagtgatagcta

SEQ ID NO: 4647 - DNA, 19 bp, Homo sapiens
  siRNA target sequence for HCLS1 (NM_005335.3,885-903).
cacagccagtgatagctat

SEQ ID NO: 4648 - DNA, 19 bp, Homo sapiens
  siRNA target sequence for HCLS1 (NM_005335.3,889-907).
gccagtgatagctatggaa

SEQ ID NO: 4649 - DNA, 19 bp, Homo sapiens
  siRNA target sequence for HCLS1 (NM_005335.3,1164-1182).
ccgagcctgagaatgacta

SEQ ID NO: 4650 - DNA, 19 bp, Homo sapiens
  siRNA target sequence for HCLS1 (NM_005335.3,1165-1183).
cgagcctgagaatgactat

SEQ ID NO: 4651 - DNA, 19 bp, Homo sapiens
  siRNA target sequence for HCLS1 (NM_005335.3,1246-1264).
ggtgctcgagcctgaagat

SEQ ID NO: 4652 - DNA, 19 bp, Homo sapiens
  siRNA target sequence for HCLS1 (NM_005335.3,1247-1265).
gtgctcgagcctgaagatt

SEQ ID NO: 4653 - DNA, 19 bp, Homo sapiens
  siRNA target sequence for HCLS1 (NM_005335.3,1397-1415).
gatccggacgacgtaatca

SEQ ID NO: 4654 - DNA, 19 bp, Homo sapiens
  siRNA target sequence for HDAC1 (NM_004964.2,79-97).
ggcacccggaggaaagtct

SEQ ID NO: 4655 - DNA, 19 bp, Homo sapiens
  siRNA target sequence for HDAC1 (NM_004964.2,83-101).
cccggaggaaagtctgtta

SEQ ID NO: 4656 - DNA, 19 bp, Homo sapiens
  siRNA target sequence for HDAC1 (NM_004964.2,112-130).
ggggatgttggaaattact

SEQ ID NO: 4657 - DNA, 19 bp, Homo sapiens
  siRNA target sequence for HDAC1 (NM_004964.2,113-131).
gggatgttggaaattacta

SEQ ID NO: 4658 - DNA, 19 bp, Homo sapiens
  siRNA target sequence for HDAC1 (NM_004964.2,114-132).
ggatgttggaaattactat

SEQ ID NO: 4659 - DNA, 19 bp, Homo sapiens
  siRNA target sequence for HDAC1 (NM_004964.2,264-282).
ccacagcgatgactacatt

SEQ ID NO: 4660 - DNA, 19 bp, Homo sapiens
  siRNA target sequence for HDAC1 (NM_004964.2,267-285).
cagcgatgactacattaaa

SEQ ID NO: 4661 - DNA, 19 bp, Homo sapiens
  siRNA target sequence for HDAC1 (NM_004964.2,357-375).
ggactgtccagtattcgat

SEQ ID NO: 4662 - DNA, 19 bp, Homo sapiens
  siRNA target sequence for HDAC1 (NM_004964.2,418-436).
gcaagtgctgtgaaactta

SEQ ID NO: 4663 - DNA, 19 bp, Homo sapiens
  siRNA target sequence for HDAC1 (NM_004964.2,419-437).
caagtgctgtgaaacttaa

SEQ ID NO: 4664 - DNA, 19 bp, Homo sapiens
  siRNA target sequence for HDAC1 (NM_004964.2,576-594).
gtacattgacattgatatt

SEQ ID NO: 4665 - DNA, 19 bp, Homo sapiens
  siRNA target sequence for HDAC1 (NM_004964.2,647-665).
ctgtgtcctttcataagta

SEQ ID NO: 4666 - DNA, 19 bp, Homo sapiens
  siRNA target sequence for HDAC1 (NM_004964.2,710-728).
ctggcaaaggcaagtatta

SEQ ID NO: 4667 - DNA, 19 bp, Homo sapiens
  siRNA target sequence for HDAC1 (NM_004964.2,719-737).
gcaagtattatgctgttaa

SEQ ID NO: 4668 - DNA, 19 bp, Homo sapiens
  siRNA target sequence for HDAC1 (NM_004964.2,744-762).
gctccgagacgggattgat

SEQ ID NO: 4669 - DNA, 19 bp, Homo sapiens
  siRNA target sequence for HDAC1 (NM_004964.2,789-807).
gccggtcatgtccaaagta

SEQ ID NO: 4670 - DNA, 19 bp, Homo sapiens
  siRNA target sequence for HDAC1 (NM_004964.2,790-808).
ccggtcatgtccaaagtaa

SEQ ID NO: 4671 - DNA, 19 bp, Homo sapiens
  siRNA target sequence for HDAC1 (NM_004964.2,791-809).
cggtcatgtccaaagtaat

SEQ ID NO: 4672 - DNA, 19 bp, Homo sapiens
  siRNA target sequence for HDAC1 (NM_004964.2,872-890).
ggttaggttgcttcaatct

SEQ ID NO: 4673 - DNA, 19 bp, Homo sapiens
  siRNA target sequence for HDAC1 (NM_004964.2,873-891).
gttaggttgcttcaatcta

SEQ ID NO: 4674 - DNA, 19 bp, Homo sapiens
  siRNA target sequence for HDAC1 (NM_004964.2,877-895).
ggttgcttcaatctaacta

SEQ ID NO: 4675 - DNA, 19 bp, Homo sapiens
  siRNA target sequence for HDAC1 (NM_004964.2,878-896).
gttgcttcaatctaactat

SEQ ID NO: 4676 - DNA, 19 bp, Homo sapiens
  siRNA target sequence for HDAC1 (NM_004964.2,881-899).
gcttcaatctaactatcaa

SEQ ID NO: 4677 - DNA, 19 bp, Homo sapiens
  siRNA target sequence for HDAC1 (NM_004964.2,882-900).
cttcaatctaactatcaaa

SEQ ID NO: 4678 - DNA, 19 bp, Homo sapiens
  siRNA target sequence for HDAC1 (NM_004964.2,906-924).
cgccaagtgtgtggaattt

SEQ ID NO: 4679 - DNA, 19 bp, Homo sapiens
  siRNA target sequence for HDAC1 (NM_004964.2,964-982).
ggtggttacaccattcgta

SEQ ID NO: 4680 - DNA, 19 bp, Homo sapiens
  siRNA target sequence for HDAC1 (NM_004964.2,965-983).
gtggttacaccattcgtaa

SEQ ID NO: 4681 - DNA, 19 bp, Homo sapiens
  siRNA target sequence for HDAC1 (NM_004964.2,1042-1060).
gagcttccatacaatgact

SEQ ID NO: 4682 - DNA, 19 bp, Homo sapiens
  siRNA target sequence for HDAC1 (NM_004964.2,1093-1111).
cacatcagtccttccaata

SEQ ID NO: 4683 - DNA, 19 bp, Homo sapiens
  siRNA target sequence for HDAC1 (NM_004964.2,1098-1116).
cagtccttccaatatgact

SEQ ID NO: 4684 - DNA, 19 bp, Homo sapiens
  siRNA target sequence for HDAC1 (NM_004964.2,1159-1177).
ctgtttgagaaccttagaa

SEQ ID NO: 4685 - DNA, 19 bp, Homo sapiens
  siRNA target sequence for HDAC1 (NM_004964.2,1286-1304).
gctcctctgacaaacgaat

SEQ ID NO: 4686 - DNA, 19 bp, Homo sapiens
  siRNA target sequence for HDAC1 (NM_004964.2,1287-1305).
ctcctctgacaaacgaatt

SEQ ID NO: 4687 - DNA, 19 bp, Homo sapiens
  siRNA target sequence for HDAC1 (NM_004964.2,1442-1460).
ccgaagaggagaaaaccaa

SEQ ID NO: 4688 - DNA, 19 bp, Homo sapiens
  siRNA target sequence for HDAC2 (NM_001527.1,217-235).
caaggaggcggcaaaaaaa

SEQ ID NO: 4689 - DNA, 19 bp, Homo sapiens
  siRNA target sequence for HDAC2 (NM_001527.1,223-241).
ggcggcaaaaaaaaagtct

SEQ ID NO: 4690 - DNA, 19 bp, Homo sapiens
  siRNA target sequence for HDAC2 (NM_001527.1,321-339).
ccataacttgctgttaaat

SEQ ID NO: 4691 - DNA, 19 bp, Homo sapiens
  siRNA target sequence for HDAC2 (NM_001527.1,322-340).
cataacttgctgttaaatt

SEQ ID NO: 4692 - DNA, 19 bp, Homo sapiens
  siRNA target sequence for HDAC2 (NM_001527.1,382-400).
gccactgccgaagaaatga

SEQ ID NO: 4693 - DNA, 19 bp, Homo sapiens
  siRNA target sequence for HDAC2 (NM_001527.1,437-455).
ggtcaataagaccagataa

SEQ ID NO: 4694 - DNA, 19 bp, Homo sapiens
  siRNA target sequence for HDAC2 (NM_001527.1,543-561).
ctcaactggcggttcagtt

SEQ ID NO: 4695 - DNA, 19 bp, Homo sapiens
  siRNA target sequence for HDAC2 (NM_001527.1,643-661).
gaagcatcaggattctgtt

SEQ ID NO: 4696 - DNA, 19 bp, Homo sapiens
  siRNA target sequence for HDAC2 (NM_001527.1,678-696).
gcttgccatccttgaatta

SEQ ID NO: 4697 - DNA, 19 bp, Homo sapiens
  siRNA target sequence for HDAC2 (NM_001527.1,702-720).
gtatcatcagagagtctta

SEQ ID NO: 4698 - DNA, 19 bp, Homo sapiens
  siRNA target sequence for HDAC2 (NM_001527.1,781-799).
cgtgtaatgacggtatcat

SEQ ID NO: 4699 - DNA, 19 bp, Homo sapiens
  siRNA target sequence for HDAC2 (NM_001527.1,782-800).
gtgtaatgacggtatcatt

SEQ ID NO: 4700 - DNA, 19 bp, Homo sapiens
  siRNA target sequence for HDAC2 (NM_001527.1,789-807).
gacggtatcattccataaa

SEQ ID NO: 4701 - DNA, 19 bp, Homo sapiens
  siRNA target sequence for HDAC2 (NM_001527.1,791-809).
cggtatcattccataaata

SEQ ID NO: 4702 - DNA, 19 bp, Homo sapiens
  siRNA target sequence for HDAC2 (NM_001527.1,899-917).
gtatagatgatgagtcata

SEQ ID NO: 4703 - DNA, 19 bp, Homo sapiens
  siRNA target sequence for HDAC2 (NM_001527.1,910-928).
gagtcatatgggcagatat

SEQ ID NO: 4704 - DNA, 19 bp, Homo sapiens
  siRNA target sequence for HDAC2 (NM_001527.1,922-940).
cagatatttaagcctatta

SEQ ID NO: 4705 - DNA, 19 bp, Homo sapiens
  siRNA target sequence for HDAC2 (NM_001527.1,987-1005).
gtgtggtgcagactcatta

SEQ ID NO: 4706 - DNA, 19 bp, Homo sapiens
  siRNA target sequence for HDAC2 (NM_001527.1,1001-1019).
cattatctggtgatagact

SEQ ID NO: 4707 - DNA, 19 bp, Homo sapiens
  siRNA target sequence for HDAC2 (NM_001527.1,1012-1030).
gatagactgggttgtttca

SEQ ID NO: 4708 - DNA, 19 bp, Homo sapiens
  siRNA target sequence for HDAC2 (NM_001527.1,1016-1034).
gactgggttgtttcaatct

SEQ ID NO: 4709 - DNA, 19 bp, Homo sapiens
  siRNA target sequence for HDAC2 (NM_001527.1,1018-1036).
ctgggttgtttcaatctaa

SEQ ID NO: 4710 - DNA, 19 bp, Homo sapiens
  siRNA target sequence for HDAC2 (NM_001527.1,1020-1038).
gggttgtttcaatctaaca

SEQ ID NO: 4711 - DNA, 19 bp, Homo sapiens
  siRNA target sequence for HDAC2 (NM_001527.1,1022-1040).
gttgtttcaatctaacagt

SEQ ID NO: 4712 - DNA, 19 bp, Homo sapiens
  siRNA target sequence for HDAC2 (NM_001527.1,1037-1055).
cagtcaaaggtcatgctaa

SEQ ID NO: 4713 - DNA, 19 bp, Homo sapiens
  siRNA target sequence for HDAC2 (NM_001527.1,1039-1057).
gtcaaaggtcatgctaaat

SEQ ID NO: 4714 - DNA, 19 bp, Homo sapiens
  siRNA target sequence for HDAC2 (NM_001527.1,1112-1130).
gctacacaatccgtaatgt

SEQ ID NO: 4715 - DNA, 19 bp, Homo sapiens
  siRNA target sequence for HDAC2 (NM_001527.1,1113-1131).
ctacacaatccgtaatgtt

SEQ ID NO: 4716 - DNA, 19 bp, Homo sapiens
  siRNA target sequence for HDAC2 (NM_001527.1,1133-1151).
ctcgatgttggacatatga

SEQ ID NO: 4717 - DNA, 19 bp, Homo sapiens
  siRNA target sequence for HDAC2 (NM_001527.1,1172-1190).
gtgagattcccaatgagtt

SEQ ID NO: 4718 - DNA, 19 bp, Homo sapiens
  siRNA target sequence for HDAC2 (NM_001527.1,1186-1204).
gagttgccatataatgatt

SEQ ID NO: 4719 - DNA, 19 bp, Homo sapiens
  siRNA target sequence for HDAC2 (NM_001527.1,1227-1245).
cttcaaactgcatattagt

SEQ ID NO: 4720 - DNA, 19 bp, Homo sapiens
  siRNA target sequence for HDAC2 (NM_001527.1,1263-1281).
ccagaacactccagaatat

SEQ ID NO: 4721 - DNA, 19 bp, Homo sapiens
  siRNA target sequence for HDAC2 (NM_001527.1,1440-1458).
caagcggatagcttgtgat

SEQ ID NO: 4722 - DNA, 19 bp, Homo sapiens
  siRNA target sequence for HDAC2 (NM_001527.1,1445-1463).
ggatagcttgtgatgaaga

SEQ ID NO: 4723 - DNA, 19 bp, Homo sapiens
  siRNA target sequence for HDAC2 (NM_001527.1,1619-1637).
gtgaaaaaacagataccaa

SEQ ID NO: 4724 - DNA, 19 bp, Homo sapiens
  siRNA target sequence for HES6 (NM_018645.3,754-772).
cctgaccacagcccaaatt

SEQ ID NO: 4725 - DNA, 19 bp, Homo sapiens
  siRNA target sequence for HESX1 (NM_003865.1,434-452).
gactgtgttccattaatga

SEQ ID NO: 4726 - DNA, 19 bp, Homo sapiens
  siRNA target sequence for HESX1 (NM_003865.1,491-509).
gggaaagatggtaacttat

SEQ ID NO: 4727 - DNA, 19 bp, Homo sapiens
  siRNA target sequence for HESX1 (NM_003865.1,582-600).
gagcttcgaaatatgaaaa

SEQ ID NO: 4728 - DNA, 19 bp, Homo sapiens
  siRNA target sequence for HESX1 (NM_003865.1,724-742).
ctgctatcctggtatcgat

SEQ ID NO: 4729 - DNA, 19 bp, Homo sapiens
  siRNA target sequence for HESX1 (NM_003865.1,726-744).
gctatcctggtatcgatat

SEQ ID NO: 4730 - DNA, 19 bp, Homo sapiens
  siRNA target sequence for HESX1 (NM_003865.1,727-745).
ctatcctggtatcgatatt

SEQ ID NO: 4731 - DNA, 19 bp, Homo sapiens
  siRNA target sequence for HESX1 (NM_003865.1,749-767).
gaagacttagctcaaaaat

SEQ ID NO: 4732 - DNA, 19 bp, Homo sapiens
  siRNA target sequence for HESX1 (NM_003865.1,752-770).
gacttagctcaaaaattga

SEQ ID NO: 4733 - DNA, 19 bp, Homo sapiens
  siRNA target sequence for HESX1 (NM_003865.1,809-827).
cggcgtgcaaaactgaaaa

SEQ ID NO: 4734 - DNA, 19 bp, Homo sapiens
  siRNA target sequence for HESX1 (NM_003865.1,812-830).
cgtgcaaaactgaaaaggt

SEQ ID NO: 4735 - DNA, 19 bp, Homo sapiens
  siRNA target sequence for HEY1 (NM_012258.2,180-198).
gtgcggacgagaatggaaa

SEQ ID NO: 4736 - DNA, 19 bp, Homo sapiens
  siRNA target sequence for HEY1 (NM_012258.2,183-201).
cggacgagaatggaaactt

SEQ ID NO: 4737 - DNA, 19 bp, Homo sapiens
  siRNA target sequence for HEY1 (NM_012258.2,185-203).
gacgagaatggaaacttga

SEQ ID NO: 4738 - DNA, 19 bp, Homo sapiens
  siRNA target sequence for HEY1 (NM_012258.2,220-238).
catgtccccaactacatct

SEQ ID NO: 4739 - DNA, 19 bp, Homo sapiens
  siRNA target sequence for HEY1 (NM_012258.2,261-279).
gacggagaggaataattga

SEQ ID NO: 4740 - DNA, 19 bp, Homo sapiens
  siRNA target sequence for HEY1 (NM_012258.2,263-281).
cggagaggaataattgaga

SEQ ID NO: 4741 - DNA, 19 bp, Homo sapiens
  siRNA target sequence for HEY1 (NM_012258.2,286-304).
ccgacgagaccggatcaat

SEQ ID NO: 4742 - DNA, 19 bp, Homo sapiens
  siRNA target sequence for HEY1 (NM_012258.2,287-305).
cgacgagaccggatcaata

SEQ ID NO: 4743 - DNA, 19 bp, Homo sapiens
  siRNA target sequence for HEY1 (NM_012258.2,288-306).
gacgagaccggatcaataa

SEQ ID NO: 4744 - DNA, 19 bp, Homo sapiens
  siRNA target sequence for HEY1 (NM_012258.2,290-308).
cgagaccggatcaataaca

SEQ ID NO: 4745 - DNA, 19 bp, Homo sapiens
  siRNA target sequence for HEY1 (NM_012258.2,328-346).
gctggtacccagtgctttt

SEQ ID NO: 4746 - DNA, 19 bp, Homo sapiens
  siRNA target sequence for HEY1 (NM_012258.2,423-441).
cggcaggagggaaaggtta

SEQ ID NO: 4747 - DNA, 19 bp, Homo sapiens
  siRNA target sequence for HEY1 (NM_012258.2,490-508).
ggaatgcctggcagaagtt

SEQ ID NO: 4748 - DNA, 19 bp, Homo sapiens
  siRNA target sequence for HEY1 (NM_012258.2,513-531).
gttatctgagcatcattga

SEQ ID NO: 4749 - DNA, 19 bp, Homo sapiens
  siRNA target sequence for HEY1 (NM_012258.2,569-587).
gtttcgcatctcaacaact

SEQ ID NO: 4750 - DNA, 19 bp, Homo sapiens
  siRNA target sequence for HEY1 (NM_012258.2,911-929).
ggctccttccacttactgt

SEQ ID NO: 4751 - DNA, 19 bp, Homo sapiens
  siRNA target sequence for HEY1 (NM_012258.2,973-991).
ccttggcaagccctataga

SEQ ID NO: 4752 - DNA, 19 bp, Homo sapiens
  siRNA target sequence for HEY1 (NM_012258.2,1000-1018).
gacggagatcggagctttt

SEQ ID NO: 4753 - DNA, 19 bp, Homo sapiens
  siRNA target sequence for HEY2 (NM_012259.1,107-125).
cgtggggagcgagaacaat

SEQ ID NO: 4754 - DNA, 19 bp, Homo sapiens
  siRNA target sequence for HEY2 (NM_012259.1,108-126).
gtggggagcgagaacaatt

SEQ ID NO: 4755 - DNA, 19 bp, Homo sapiens
  siRNA target sequence for HEY2 (NM_012259.1,111-129).
gggagcgagaacaattact

SEQ ID NO: 4756 - DNA, 19 bp, Homo sapiens
  siRNA target sequence for HEY2 (NM_012259.1,142-160).
ctagctctgtgattagatt

SEQ ID NO: 4757 - DNA, 19 bp, Homo sapiens
  siRNA target sequence for HEY2 (NM_012259.1,226-244).
ggcgtcgggatcggataaa

SEQ ID NO: 4758 - DNA, 19 bp, Homo sapiens
  siRNA target sequence for HEY2 (NM_012259.1,227-245).
gcgtcgggatcggataaat

SEQ ID NO: 4759 - DNA, 19 bp, Homo sapiens
  siRNA target sequence for HEY2 (NM_012259.1,228-246).
cgtcgggatcggataaata

SEQ ID NO: 4760 - DNA, 19 bp, Homo sapiens
  siRNA target sequence for HEY2 (NM_012259.1,229-247).
gtcgggatcggataaataa

SEQ ID NO: 4761 - DNA, 19 bp, Homo sapiens
  siRNA target sequence for HEY2 (NM_012259.1,231-249).
cgggatcggataaataaca

SEQ ID NO: 4762 - DNA, 19 bp, Homo sapiens
  siRNA target sequence for HEY2 (NM_012259.1,330-348).
caaatgacagtggatcatt

SEQ ID NO: 4763 - DNA, 19 bp, Homo sapiens
  siRNA target sequence for HEY2 (NM_012259.1,337-355).
cagtggatcatttgaagat

SEQ ID NO: 4764 - DNA, 19 bp, Homo sapiens
  siRNA target sequence for HEY2 (NM_012259.1,370-388).
ggggtaaaggctactttga

SEQ ID NO: 4765 - DNA, 19 bp, Homo sapiens
  siRNA target sequence for HEY2 (NM_012259.1,408-426).
gacttcatgagcataggat

SEQ ID NO: 4766 - DNA, 19 bp, Homo sapiens
  siRNA target sequence for HEY2 (NM_012259.1,1004-1022).
cagcagtggaacaaacaat

SEQ ID NO: 4767 - DNA, 19 bp, Homo sapiens
  siRNA target sequence for HEYL (NM_014571.2,323-341).
ctggtgggacaggattctt

SEQ ID NO: 4768 - DNA, 19 bp, Homo sapiens
  siRNA target sequence for HEYL (NM_014571.2,350-368).
gagccctggcagttgactt

SEQ ID NO: 4769 - DNA, 19 bp, Homo sapiens
  siRNA target sequence for HEYL (NM_014571.2,364-382).
gacttccggagcattggtt

SEQ ID NO: 4770 - DNA, 19 bp, Homo sapiens
  siRNA target sequence for HEYL (NM_014571.2,366-384).
cttccggagcattggtttt

SEQ ID NO: 4771 - DNA, 19 bp, Homo sapiens
  siRNA target sequence for HHEX (NM_002729.2,112-130).
cacacccgacgccctttta

SEQ ID NO: 4772 - DNA, 19 bp, Homo sapiens
  siRNA target sequence for HHEX (NM_002729.2,114-132).
cacccgacgcccttttaca

SEQ ID NO: 4773 - DNA, 19 bp, Homo sapiens
  siRNA target sequence for HHEX (NM_002729.2,588-606).
cagaatcgacgcgctaaat

SEQ ID NO: 4774 - DNA, 19 bp, Homo sapiens
  siRNA target sequence for HHEX (NM_002729.2,600-618).
gctaaatggaggagactaa

SEQ ID NO: 4775 - DNA, 19 bp, Homo sapiens
  siRNA target sequence for HHEX (NM_002729.2,601-619).
ctaaatggaggagactaaa

SEQ ID NO: 4776 - DNA, 19 bp, Homo sapiens
  siRNA target sequence for HHEX (NM_002729.2,623-641).
ggagaaccctcaaagcaat

SEQ ID NO: 4777 - DNA, 19 bp, Homo sapiens
  siRNA target sequence for HHEX (NM_002729.2,624-642).
gagaaccctcaaagcaata

SEQ ID NO: 4778 - DNA, 19 bp, Homo sapiens
  siRNA target sequence for HHEX (NM_002729.2,813-831).
gagggcgataaaagctatt

SEQ ID NO: 4779 - DNA, 19 bp, Homo sapiens
  siRNA target sequence for HHEX (NM_002729.2,815-833).
gggcgataaaagctatttt

SEQ ID NO: 4780 - DNA, 19 bp, Homo sapiens
  siRNA target sequence for HHEX (NM_002729.2,816-834).
ggcgataaaagctatttta

SEQ ID NO: 4781 - DNA, 19 bp, Homo sapiens
  siRNA target sequence for HHEX (NM_002729.2,817-835).
gcgataaaagctattttaa

SEQ ID NO: 4782 - DNA, 19 bp, Homo sapiens
  siRNA target sequence for HHEX (NM_002729.2,818-836).
cgataaaagctattttaat

SEQ ID NO: 4783 - DNA, 19 bp, Homo sapiens
  siRNA target sequence for HIF3A (NM_022462.2,463-481).
ggacacagcatctttgatt

SEQ ID NO: 4784 - DNA, 19 bp, Homo sapiens
  siRNA target sequence for HIF3A (NM_022462.2,464-482).
gacacagcatctttgattt

SEQ ID NO: 4785 - DNA, 19 bp, Homo sapiens
  siRNA target sequence for HIF3A (NM_022462.2,902-920).
gttccgcctacgagtacat

SEQ ID NO: 4786 - DNA, 19 bp, Homo sapiens
  siRNA target sequence for HIF3A (NM_022462.2,972-990).
caagggccaggcagtaaca

SEQ ID NO: 4787 - DNA, 19 bp, Homo sapiens
  siRNA target sequence for HIF3A (NM_022462.2,1085-1103).
gtatcgtctgtgtccattt

SEQ ID NO: 4788 - DNA, 19 bp, Homo sapiens
  siRNA target sequence for HIF3A (NM_022462.2,1350-1368).
cctggatggggcttcagta

SEQ ID NO: 4789 - DNA, 19 bp, Homo sapiens
  siRNA target sequence for HIF3A (NM_022462.2,1497-1515).
ggcagtggagacagattta

SEQ ID NO: 4790 - DNA, 19 bp, Homo sapiens
  siRNA target sequence for HIF3A (NM_022462.2,1499-1517).
cagtggagacagatttaga

SEQ ID NO: 4791 - DNA, 19 bp, Homo sapiens
  siRNA target sequence for HIF3A (NM_022462.2,1501-1519).
gtggagacagatttagata

SEQ ID NO: 4792 - DNA, 19 bp, Homo sapiens
  siRNA target sequence for HIF3A (NM_022462.2,1503-1521).
ggagacagatttagatata

SEQ ID NO: 4793 - DNA, 19 bp, Homo sapiens
  siRNA target sequence for HIF3A (NM_022462.2,1852-1870).
gtgagacctcccaaaaggt

SEQ ID NO: 4794 - DNA, 19 bp, Homo sapiens
  siRNA target sequence for HIF3A (NM_022462.2,1877-1895).
gcccagaacacgaaaactt

SEQ ID NO: 4795 - DNA, 19 bp, Homo sapiens
  siRNA target sequence for HIF3A (NM_022462.2,1878-1896).
cccagaacacgaaaacttt

SEQ ID NO: 4796 - DNA, 19 bp, Homo sapiens
  siRNA target sequence for HIF3A (NM_022462.2,1967-1985).
ctgaacttacccaattcct

SEQ ID NO: 4797 - DNA, 19 bp, Homo sapiens
  siRNA target sequence for HIF3A (NM_022462.2,1995-2013).
cttaagttttcccattcta

SEQ ID NO: 4798 - DNA, 19 bp, Homo sapiens
  siRNA target sequence for HIF3A (NM_022462.2,2050-2068).
catgcctctccattctcat

SEQ ID NO: 4799 - DNA, 19 bp, Homo sapiens
  siRNA target sequence for HIF3A (NM_022462.2,2120-2138).
ccagacatgcacttacctt

SEQ ID NO: 4800 - DNA, 19 bp, Homo sapiens
  siRNA target sequence for HIF3A (NM_022462.2,2139-2157).
gactttaccccacatgttt

SEQ ID NO: 4801 - DNA, 19 bp, Homo sapiens
  siRNA target sequence for HIF3A (NM_022462.2,2179-2197).
ccccttgggtggtttgcaa

SEQ ID NO: 4802 - DNA, 19 bp, Homo sapiens
  siRNA target sequence for HIF3A (NM_152795.1,1860-1878).
gggattaatgggattctct

SEQ ID NO: 4803 - DNA, 19 bp, Homo sapiens
  siRNA target sequence for HIF3A (NM_152795.1,1871-1889).
gattctctggccctcatta

SEQ ID NO: 4804 - DNA, 19 bp, Homo sapiens
  siRNA target sequence for HIRA (NM_003325.3,253-271).
caatggcaagccgattttt

SEQ ID NO: 4805 - DNA, 19 bp, Homo sapiens
  siRNA target sequence for HIRA (NM_003325.3,258-276).
gcaagccgattttttcagt

SEQ ID NO: 4806 - DNA, 19 bp, Homo sapiens
  siRNA target sequence for HIRA (NM_003325.3,262-280).
gccgattttttcagttgat

SEQ ID NO: 4807 - DNA, 19 bp, Homo sapiens
  siRNA target sequence for HIRA (NM_003325.3,263-281).
ccgattttttcagttgata

SEQ ID NO: 4808 - DNA, 19 bp, Homo sapiens
  siRNA target sequence for HIRA (NM_003325.3,264-282).
cgattttttcagttgatat

SEQ ID NO: 4809 - DNA, 19 bp, Homo sapiens
  siRNA target sequence for HIRA (NM_003325.3,456-474).
caaacagtgggatgtattt

SEQ ID NO: 4810 - DNA, 19 bp, Homo sapiens
  siRNA target sequence for HIRA (NM_003325.3,460-478).
cagtgggatgtatttagct

SEQ ID NO: 4811 - DNA, 19 bp, Homo sapiens
  siRNA target sequence for HIRA (NM_003325.3,483-501).
ggggagatgacaaactgat

SEQ ID NO: 4812 - DNA, 19 bp, Homo sapiens
  siRNA target sequence for HIRA (NM_003325.3,485-503).
ggagatgacaaactgatta

SEQ ID NO: 4813 - DNA, 19 bp, Homo sapiens
  siRNA target sequence for HIRA (NM_003325.3,486-504).
gagatgacaaactgattat

SEQ ID NO: 4814 - DNA, 19 bp, Homo sapiens
  siRNA target sequence for HIRA (NM_003325.3,547-565).
cggctccagtggtaagctt

SEQ ID NO: 4815 - DNA, 19 bp, Homo sapiens
  siRNA target sequence for HIRA (NM_003325.3,660-678).
cctcatgcagcgtggataa

SEQ ID NO: 4816 - DNA, 19 bp, Homo sapiens
  siRNA target sequence for HIRA (NM_003325.3,765-783).
gggaccctgttggtaaata

SEQ ID NO: 4817 - DNA, 19 bp, Homo sapiens
  siRNA target sequence for HIRA (NM_003325.3,879-897).
gaggaacgacccatgtgtt

SEQ ID NO: 4818 - DNA, 19 bp, Homo sapiens
  siRNA target sequence for HIRA (NM_003325.3,912-930).
cacctgatgggcattacct

SEQ ID NO: 4819 - DNA, 19 bp, Homo sapiens
  siRNA target sequence for HIRA (NM_003325.3,936-954).
ctgcccatgccatgaacaa

SEQ ID NO: 4820 - DNA, 19 bp, Homo sapiens
  siRNA target sequence for HIRA (NM_003325.3,1028-1046).
gctgtgactgtcgtgaaat

SEQ ID NO: 4821 - DNA, 19 bp, Homo sapiens
  siRNA target sequence for HIRA (NM_003325.3,1031-1049).
gtgactgtcgtgaaattca

SEQ ID NO: 4822 - DNA, 19 bp, Homo sapiens
  siRNA target sequence for HIRA (NM_003325.3,1189-1207).
ccatgaactgtttgacaaa

SEQ ID NO: 4823 - DNA, 19 bp, Homo sapiens
  siRNA target sequence for HIRA (NM_003325.3,1190-1208).
catgaactgtttgacaaat

SEQ ID NO: 4824 - DNA, 19 bp, Homo sapiens
  siRNA target sequence for HIRA (NM_003325.3,1204-1222).
caaatccatcatggatatt

SEQ ID NO: 4825 - DNA, 19 bp, Homo sapiens
  siRNA target sequence for HIRA (NM_003325.3,1503-1521).
cagtcgcaggcgttgtcaa

SEQ ID NO: 4826 - DNA, 19 bp, Homo sapiens
  siRNA target sequence for HIRA (NM_003325.3,1522-1540).
cggggagagtcttgaagat

SEQ ID NO: 4827 - DNA, 19 bp, Homo sapiens
  siRNA target sequence for HIRA (NM_003325.3,1639-1657).
cttctccacggcattcttt

SEQ ID NO: 4828 - DNA, 19 bp, Homo sapiens
  siRNA target sequence for HIRA (NM_003325.3,1803-1821).
gacctgcaggcgattctgt

SEQ ID NO: 4829 - DNA, 19 bp, Homo sapiens
  siRNA target sequence for HIRA (NM_003325.3,1808-1826).
gcaggcgattctgtcaata

SEQ ID NO: 4830 - DNA, 19 bp, Homo sapiens
  siRNA target sequence for HIRA (NM_003325.3,1809-1827).
caggcgattctgtcaataa

SEQ ID NO: 4831 - DNA, 19 bp, Homo sapiens
  siRNA target sequence for HIRA (NM_003325.3,1901-1919).
cccatgaaagcgtttgact

SEQ ID NO: 4832 - DNA, 19 bp, Homo sapiens
  siRNA target sequence for HIRA (NM_003325.3,2094-2112).
cactgtccaagcgaaaact

SEQ ID NO: 4833 - DNA, 19 bp, Homo sapiens
  siRNA target sequence for HIRA (NM_003325.3,2468-2486).
gtcgcctgtgaaaaaagga

SEQ ID NO: 4834 - DNA, 19 bp, Homo sapiens
  siRNA target sequence for HIRA (NM_003325.3,2545-2563).
cccgatctctactttgcat

SEQ ID NO: 4835 - DNA, 19 bp, Homo sapiens
  siRNA target sequence for HIRA (NM_003325.3,2546-2564).
ccgatctctactttgcatt

SEQ ID NO: 4836 - DNA, 19 bp, Homo sapiens
  siRNA target sequence for HIRA (NM_003325.3,2669-2687).
ctggcaggaagtgatatga

SEQ ID NO: 4837 - DNA, 19 bp, Homo sapiens
  siRNA target sequence for HIRA (NM_003325.3,2679-2697).
gtgatatgacggtatcaca

SEQ ID NO: 4838 - DNA, 19 bp, Homo sapiens
  siRNA target sequence for HIRA (NM_003325.3,2744-2762).
gggaaggcgtactgcttta

SEQ ID NO: 4839 - DNA, 19 bp, Homo sapiens
  siRNA target sequence for HIRA (NM_003325.3,2745-2763).
ggaaggcgtactgctttaa

SEQ ID NO: 4840 - DNA, 19 bp, Homo sapiens
  siRNA target sequence for HIRA (NM_003325.3,2746-2764).
gaaggcgtactgctttaat

SEQ ID NO: 4841 - DNA, 19 bp, Homo sapiens
  siRNA target sequence for HIRA (NM_003325.3,2812-2830).
ggctcagtgtgcagacttt

SEQ ID NO: 4842 - DNA, 19 bp, Homo sapiens
  siRNA target sequence for HIRA (NM_003325.3,2868-2886).
caggaccgttagccataat

SEQ ID NO: 4843 - DNA, 19 bp, Homo sapiens
  siRNA target sequence for HIRA (NM_003325.3,2871-2889).
gaccgttagccataatcca

SEQ ID NO: 4844 - DNA, 19 bp, Homo sapiens
  siRNA target sequence for HIRA (NM_003325.3,3048-3066).
cacggtacctcgtaaacga

SEQ ID NO: 4845 - DNA, 19 bp, Homo sapiens
  siRNA target sequence for HIRA (NM_003325.3,3080-3098).
cgacttcgagaaatatgca

SEQ ID NO: 4846 - DNA, 19 bp, Homo sapiens
  siRNA target sequence for HIRA (NM_003325.3,3136-3154).
ccagtgggagtcaacagta

SEQ ID NO: 4847 - DNA, 19 bp, Homo sapiens
  siRNA target sequence for HIVEP3 (NM_024503.1,1611-1629).
ccatgcccaccgcatcaaa

SEQ ID NO: 4848 - DNA, 19 bp, Homo sapiens
  siRNA target sequence for HIVEP3 (NM_024503.1,1646-1664).
gcatgggtggcgagatgta

SEQ ID NO: 4849 - DNA, 19 bp, Homo sapiens
  siRNA target sequence for HIVEP3 (NM_024503.1,1807-1825).
ctctccagcgggctataca

SEQ ID NO: 4850 - DNA, 19 bp, Homo sapiens
  siRNA target sequence for HIVEP3 (NM_024503.1,1893-1911).
cgaagacccccctccattt

SEQ ID NO: 4851 - DNA, 19 bp, Homo sapiens
  siRNA target sequence for HIVEP3 (NM_024503.1,1951-1969).
gaagacacccacacgatta

SEQ ID NO: 4852 - DNA, 19 bp, Homo sapiens
  siRNA target sequence for HIVEP3 (NM_024503.1,2148-2166).
caagtgtgggcgaatagga

SEQ ID NO: 4853 - DNA, 19 bp, Homo sapiens
  siRNA target sequence for HIVEP3 (NM_024503.1,2415-2433).
gtcatcccacagtgagaaa

SEQ ID NO: 4854 - DNA, 19 bp, Homo sapiens
  siRNA target sequence for HIVEP3 (NM_024503.1,2658-2676).
gccggcaatcgaattacct

SEQ ID NO: 4855 - DNA, 19 bp, Homo sapiens
  siRNA target sequence for HIVEP3 (NM_024503.1,2659-2677).
ccggcaatcgaattacctt

SEQ ID NO: 4856 - DNA, 19 bp, Homo sapiens
  siRNA target sequence for HIVEP3 (NM_024503.1,2760-2778).
ggaaagcgagcttaccaaa

SEQ ID NO: 4857 - DNA, 19 bp, Homo sapiens
  siRNA target sequence for HIVEP3 (NM_024503.1,2761-2779).
gaaagcgagcttaccaaaa

SEQ ID NO: 4858 - DNA, 19 bp, Homo sapiens
  siRNA target sequence for HIVEP3 (NM_024503.1,2806-2824).
ggggtgatctacgaatgta

SEQ ID NO: 4859 - DNA, 19 bp, Homo sapiens
  siRNA target sequence for HIVEP3 (NM_024503.1,2807-2825).
gggtgatctacgaatgtaa

SEQ ID NO: 4860 - DNA, 19 bp, Homo sapiens
  siRNA target sequence for HIVEP3 (NM_024503.1,2809-2827).
gtgatctacgaatgtaaca

SEQ ID NO: 4861 - DNA, 19 bp, Homo sapiens
  siRNA target sequence for HIVEP3 (NM_024503.1,2811-2829).
gatctacgaatgtaacata

SEQ ID NO: 4862 - DNA, 19 bp, Homo sapiens
  siRNA target sequence for HIVEP3 (NM_024503.1,2831-2849).
gtggtgctcggtacaagaa

SEQ ID NO: 4863 - DNA, 19 bp, Homo sapiens
  siRNA target sequence for HIVEP3 (NM_024503.1,2833-2851).
ggtgctcggtacaagaaaa

SEQ ID NO: 4864 - DNA, 19 bp, Homo sapiens
  siRNA target sequence for HIVEP3 (NM_024503.1,2866-2884).
gcccacaaaaaatactact

SEQ ID NO: 4865 - DNA, 19 bp, Homo sapiens
  siRNA target sequence for HIVEP3 (NM_024503.1,2965-2983).
gagccgtggtcccaaatga

SEQ ID NO: 4866 - DNA, 19 bp, Homo sapiens
  siRNA target sequence for HIVEP3 (NM_024503.1,2972-2990).
ggtcccaaatgatgcatta

SEQ ID NO: 4867 - DNA, 19 bp, Homo sapiens
  siRNA target sequence for HIVEP3 (NM_024503.1,3073-3091).
gcctttgagtccacaaaaa

SEQ ID NO: 4868 - DNA, 19 bp, Homo sapiens
  siRNA target sequence for HIVEP3 (NM_024503.1,3161-3179).
cagaaccaagtaaatcagt

SEQ ID NO: 4869 - DNA, 19 bp, Homo sapiens
  siRNA target sequence for HIVEP3 (NM_024503.1,3225-3243).
gccagggtccggttcagaa

SEQ ID NO: 4870 - DNA, 19 bp, Homo sapiens
  siRNA target sequence for HIVEP3 (NM_024503.1,3226-3244).
ccagggtccggttcagaat

SEQ ID NO: 4871 - DNA, 19 bp, Homo sapiens
  siRNA target sequence for HIVEP3 (NM_024503.1,3266-3284).
cgtccaaagaaatttctgt

SEQ ID NO: 4872 - DNA, 19 bp, Homo sapiens
  siRNA target sequence for HIVEP3 (NM_024503.1,3429-3447).
ggtccgccagcccaacatt

SEQ ID NO: 4873 - DNA, 19 bp, Homo sapiens
  siRNA target sequence for HIVEP3 (NM_024503.1,3451-3469).
gttcctgagatcctagtaa

SEQ ID NO: 4874 - DNA, 19 bp, Homo sapiens
  siRNA target sequence for HIVEP3 (NM_024503.1,3455-3473).
ctgagatcctagtaactga

SEQ ID NO: 4875 - DNA, 19 bp, Homo sapiens
  siRNA target sequence for HIVEP3 (NM_024503.1,3909-3927).
gacacgcagcaaatccttt

SEQ ID NO: 4876 - DNA, 19 bp, Homo sapiens
  siRNA target sequence for HIVEP3 (NM_024503.1,3913-3931).
cgcagcaaatcctttgact

SEQ ID NO: 4877 - DNA, 19 bp, Homo sapiens
  siRNA target sequence for HIVEP3 (NM_024503.1,3914-3932).
gcagcaaatcctttgacta

SEQ ID NO: 4878 - DNA, 19 bp, Homo sapiens
  siRNA target sequence for HIVEP3 (NM_024503.1,3915-3933).
cagcaaatcctttgactat

SEQ ID NO: 4879 - DNA, 19 bp, Homo sapiens
  siRNA target sequence for HIVEP3 (NM_024503.1,4426-4444).
ccacttcctccctccttat

SEQ ID NO: 4880 - DNA, 19 bp, Homo sapiens
  siRNA target sequence for HIVEP3 (NM_024503.1,4655-4673).
gccatctgccccagatcaa

SEQ ID NO: 4881 - DNA, 19 bp, Homo sapiens
  siRNA target sequence for HIVEP3 (NM_024503.1,4657-4675).
catctgccccagatcaaaa

SEQ ID NO: 4882 - DNA, 19 bp, Homo sapiens
  siRNA target sequence for HIVEP3 (NM_024503.1,4660-4678).
ctgccccagatcaaaacca

SEQ ID NO: 4883 - DNA, 19 bp, Homo sapiens
  siRNA target sequence for HIVEP3 (NM_024503.1,4849-4867).
gtccgtgttcagaccaata

SEQ ID NO: 4884 - DNA, 19 bp, Homo sapiens
  siRNA target sequence for HIVEP3 (NM_024503.1,4874-4892).
cctatgggagcgcaatgta

SEQ ID NO: 4885 - DNA, 19 bp, Homo sapiens
  siRNA target sequence for HIVEP3 (NM_024503.1,5024-5042).
gcccttctgggttaagtga

SEQ ID NO: 4886 - DNA, 19 bp, Homo sapiens
  siRNA target sequence for HIVEP3 (NM_024503.1,5025-5043).
cccttctgggttaagtgaa

SEQ ID NO: 4887 - DNA, 19 bp, Homo sapiens
  siRNA target sequence for HIVEP3 (NM_024503.1,5086-5104).
gtgacattacctgaaagaa

SEQ ID NO: 4888 - DNA, 19 bp, Homo sapiens
  siRNA target sequence for HIVEP3 (NM_024503.1,5142-5160).
ggaggggagttcatcaaca

SEQ ID NO: 4889 - DNA, 19 bp, Homo sapiens
  siRNA target sequence for HIVEP3 (NM_024503.1,5191-5209).
gctggcagccttgaactta

SEQ ID NO: 4890 - DNA, 19 bp, Homo sapiens
  siRNA target sequence for HIVEP3 (NM_024503.1,5200-5218).
cttgaacttaccatggaaa

SEQ ID NO: 4891 - DNA, 19 bp, Homo sapiens
  siRNA target sequence for HIVEP3 (NM_024503.1,5366-5384).
ggagggagctagaaatgct

SEQ ID NO: 4892 - DNA, 19 bp, Homo sapiens
  siRNA target sequence for HIVEP3 (NM_024503.1,5465-5483).
caggctcagaagctttgaa

SEQ ID NO: 4893 - DNA, 19 bp, Homo sapiens
  siRNA target sequence for HIVEP3 (NM_024503.1,5531-5549).
cactgagcgtgaagaaaga

SEQ ID NO: 4894 - DNA, 19 bp, Homo sapiens
  siRNA target sequence for HIVEP3 (NM_024503.1,5679-5697).
cctccacacaaccactaat

SEQ ID NO: 4895 - DNA, 19 bp, Homo sapiens
  siRNA target sequence for HIVEP3 (NM_024503.1,5698-5716).
gtcagttggtgctatttaa

SEQ ID NO: 4896 - DNA, 19 bp, Homo sapiens
  siRNA target sequence for HIVEP3 (NM_024503.1,5705-5723).
ggtgctatttaaactacat

SEQ ID NO: 4897 - DNA, 19 bp, Homo sapiens
  siRNA target sequence for HIVEP3 (NM_024503.1,5706-5724).
gtgctatttaaactacatt

SEQ ID NO: 4898 - DNA, 19 bp, Homo sapiens
  siRNA target sequence for HIVEP3 (NM_024503.1,5708-5726).
gctatttaaactacattaa

SEQ ID NO: 4899 - DNA, 19 bp, Homo sapiens
  siRNA target sequence for HIVEP3 (NM_024503.1,5749-5767).
gataggaggtcctctgttt

SEQ ID NO: 4900 - DNA, 19 bp, Homo sapiens
  siRNA target sequence for HIVEP3 (NM_024503.1,5769-5787).
cgctggttggtgcataagt

SEQ ID NO: 4901 - DNA, 19 bp, Homo sapiens
  siRNA target sequence for HIVEP3 (NM_024503.1,5777-5795).
ggtgcataagtttgtacaa

SEQ ID NO: 4902 - DNA, 19 bp, Homo sapiens
  siRNA target sequence for HIVEP3 (NM_024503.1,5851-5869).
cagaaagtgagcaaagaga

SEQ ID NO: 4903 - DNA, 19 bp, Homo sapiens
  siRNA target sequence for HIVEP3 (NM_024503.1,5857-5875).
gtgagcaaagagacataca

SEQ ID NO: 4904 - DNA, 19 bp, Homo sapiens
  siRNA target sequence for HIVEP3 (NM_024503.1,5975-5993).
cggaaggccagaaagatct

SEQ ID NO: 4905 - DNA, 19 bp, Homo sapiens
  siRNA target sequence for HIVEP3 (NM_024503.1,5976-5994).
ggaaggccagaaagatcta

SEQ ID NO: 4906 - DNA, 19 bp, Homo sapiens
  siRNA target sequence for HIVEP3 (NM_024503.1,6099-6117).
caaatcaaacgaagagtat

SEQ ID NO: 4907 - DNA, 19 bp, Homo sapiens
  siRNA target sequence for HIVEP3 (NM_024503.1,6412-6430).
gtggaggagcaccagtttt

SEQ ID NO: 4908 - DNA, 19 bp, Homo sapiens
  siRNA target sequence for HIVEP3 (NM_024503.1,6826-6844).
ccactagcccgcaaacact

SEQ ID NO: 4909 - DNA, 19 bp, Homo sapiens
  siRNA target sequence for HIVEP3 (NM_024503.1,6836-6854).
gcaaacactcgctaaccaa

SEQ ID NO: 4910 - DNA, 19 bp, Homo sapiens
  siRNA target sequence for HIVEP3 (NM_024503.1,6837-6855).
caaacactcgctaaccaaa

SEQ ID NO: 4911 - DNA, 19 bp, Homo sapiens
  siRNA target sequence for HIVEP3 (NM_024503.1,7657-7675).
gtggctaaggtctccaaat

SEQ ID NO: 4912 - DNA, 19 bp, Homo sapiens
  siRNA target sequence for HIVEP3 (NM_024503.1,7660-7678).
gctaaggtctccaaattca

SEQ ID NO: 4913 - DNA, 19 bp, Homo sapiens
  siRNA target sequence for HKR3 (NM_005341.1,355-373).
ctggcttcgctgagatctt

SEQ ID NO: 4914 - DNA, 19 bp, Homo sapiens
  siRNA target sequence for HKR3 (NM_005341.1,873-891).
gatggggatggcgattaca

SEQ ID NO: 4915 - DNA, 19 bp, Homo sapiens
  siRNA target sequence for HKR3 (NM_005341.1,876-894).
ggggatggcgattacatgt

SEQ ID NO: 4916 - DNA, 19 bp, Homo sapiens
  siRNA target sequence for HKR3 (NM_005341.1,917-935).
caggaggaagtcaaatgta

SEQ ID NO: 4917 - DNA, 19 bp, Homo sapiens
  siRNA target sequence for HKR3 (NM_005341.1,919-937).
ggaggaagtcaaatgtaat

SEQ ID NO: 4918 - DNA, 19 bp, Homo sapiens
  siRNA target sequence for HKR3 (NM_005341.1,1028-1046).
cgaatgccccacatgtcat

SEQ ID NO: 4919 - DNA, 19 bp, Homo sapiens
  siRNA target sequence for HKR3 (NM_005341.1,1029-1047).
gaatgccccacatgtcata

SEQ ID NO: 4920 - DNA, 19 bp, Homo sapiens
  siRNA target sequence for HKR3 (NM_005341.1,1036-1054).
ccacatgtcataaaaagtt

SEQ ID NO: 4921 - DNA, 19 bp, Homo sapiens
  siRNA target sequence for HKR3 (NM_005341.1,1060-1078).
gcaaatattatctaaaagt

SEQ ID NO: 4922 - DNA, 19 bp, Homo sapiens
  siRNA target sequence for HKR3 (NM_005341.1,1164-1182).
catgaagcccggaattgca

SEQ ID NO: 4923 - DNA, 19 bp, Homo sapiens
  siRNA target sequence for HKR3 (NM_005341.1,1339-1357).
gccacatgatcaaacttca

SEQ ID NO: 4924 - DNA, 19 bp, Homo sapiens
  siRNA target sequence for HKR3 (NM_005341.1,1871-1889).
caagggggtgaggaagttt

SEQ ID NO: 4925 - DNA, 19 bp, Homo sapiens
  siRNA target sequence for HKR3 (NM_005341.1,1898-1916).
cgagtgtggctacaagttt

SEQ ID NO: 4926 - DNA, 19 bp, Homo sapiens
  siRNA target sequence for HKR3 (NM_005341.1,1956-1974).
gaccgggtagagaactaca

SEQ ID NO: 4927 - DNA, 19 bp, Homo sapiens
  siRNA target sequence for HKR3 (NM_005341.1,2065-2083).
gctcggcggaggtcattgt

SEQ ID NO: 4928 - DNA, 19 bp, Homo sapiens
  siRNA target sequence for HLX1 (NM_021958.2,571-589).
cttctgcatcgcagacatt

SEQ ID NO: 4929 - DNA, 19 bp, Homo sapiens
  siRNA target sequence for HLX1 (NM_021958.2,1108-1126).
gttcttcgcatctctagat

SEQ ID NO: 4930 - DNA, 19 bp, Homo sapiens
  siRNA target sequence for HLX1 (NM_021958.2,1119-1137).
ctctagatcccattaacga

SEQ ID NO: 4931 - DNA, 19 bp, Homo sapiens
  siRNA target sequence for HLX1 (NM_021958.2,1165-1183).
ctcgaacccaagaaattca

SEQ ID NO: 4932 - DNA, 19 bp, Homo sapiens
  siRNA target sequence for HLX1 (NM_021958.2,1168-1186).
gaacccaagaaattcagtt

SEQ ID NO: 4933 - DNA, 19 bp, Homo sapiens
  siRNA target sequence for HLX1 (NM_021958.2,1243-1261).
catgccgcagacgtacaaa

SEQ ID NO: 4934 - DNA, 19 bp, Homo sapiens
  siRNA target sequence for HLX1 (NM_021958.2,1247-1265).
ccgcagacgtacaaaagga

SEQ ID NO: 4935 - DNA, 19 bp, Homo sapiens
  siRNA target sequence for HLX1 (NM_021958.2,1248-1266).
cgcagacgtacaaaaggaa

SEQ ID NO: 4936 - DNA, 19 bp, Homo sapiens
  siRNA target sequence for HLX1 (NM_021958.2,1323-1341).
ggtttgagattcagaagta

SEQ ID NO: 4937 - DNA, 19 bp, Homo sapiens
  siRNA target sequence for HLX1 (NM_021958.2,1637-1655).
cgttctctgcaccaaacaa

SEQ ID NO: 4938 - DNA, 19 bp, Homo sapiens
  siRNA target sequence for HLX1 (NM_021958.2,1643-1661).
ctgcaccaaacaacagtta

SEQ ID NO: 4939 - DNA, 19 bp, Homo sapiens
  siRNA target sequence for HLX1 (NM_021958.2,1753-1771).
cagcgccagcagtcttagt

SEQ ID NO: 4940 - DNA, 19 bp, Homo sapiens
  siRNA target sequence for HLXB9 (NM_005515.2,846-864).
gcatgatcctgcctaagat

SEQ ID NO: 4941 - DNA, 19 bp, Homo sapiens
  siRNA target sequence for HLXB9 (NM_005515.2,858-876).
ctaagatgcccgacttcaa

SEQ ID NO: 4942 - DNA, 19 bp, Homo sapiens
  siRNA target sequence for HMG20A (NM_018200.2,255-273).
cggttccaaggagagtaat

SEQ ID NO: 4943 - DNA, 19 bp, Homo sapiens
  siRNA target sequence for HMG20A (NM_018200.2,279-297).
ggctaccactgggttaaat

SEQ ID NO: 4944 - DNA, 19 bp, Homo sapiens
  siRNA target sequence for HMG20A (NM_018200.2,300-318).
cccagaggttccatacagt

SEQ ID NO: 4945 - DNA, 19 bp, Homo sapiens
  siRNA target sequence for HMG20A (NM_018200.2,327-345).
cacatcatccaccaacaat

SEQ ID NO: 4946 - DNA, 19 bp, Homo sapiens
  siRNA target sequence for HMG20A (NM_018200.2,335-353).
ccaccaacaatccagaatt

SEQ ID NO: 4947 - DNA, 19 bp, Homo sapiens
  siRNA target sequence for HMG20A (NM_018200.2,336-354).
caccaacaatccagaattt

SEQ ID NO: 4948 - DNA, 19 bp, Homo sapiens
  siRNA target sequence for HMG20A (NM_018200.2,338-356).
ccaacaatccagaatttgt

SEQ ID NO: 4949 - DNA, 19 bp, Homo sapiens
  siRNA target sequence for HMG20A (NM_018200.2,382-400).
cttcagagtgagtcttcaa

SEQ ID NO: 4950 - DNA, 19 bp, Homo sapiens
  siRNA target sequence for HMG20A (NM_018200.2,454-472).
ggaggttggtccaaaggaa

SEQ ID NO: 4951 - DNA, 19 bp, Homo sapiens
  siRNA target sequence for HMG20A (NM_018200.2,515-533).
ccccccttacaggatatgt

SEQ ID NO: 4952 - DNA, 19 bp, Homo sapiens
  siRNA target sequence for HMG20A (NM_018200.2,516-534).
cccccttacaggatatgtt

SEQ ID NO: 4953 - DNA, 19 bp, Homo sapiens
  siRNA target sequence for HMG20A (NM_018200.2,527-545).
gatatgttcggttcatgaa

SEQ ID NO: 4954 - DNA, 19 bp, Homo sapiens
  siRNA target sequence for HMG20A (NM_018200.2,614-632).
gcaatgaatggagtaaact

SEQ ID NO: 4955 - DNA, 19 bp, Homo sapiens
  siRNA target sequence for HMG20A (NM_018200.2,674-692).
gagataaggagcgttacat

SEQ ID NO: 4956 - DNA, 19 bp, Homo sapiens
  siRNA target sequence for HMG20A (NM_018200.2,676-694).
gataaggagcgttacatga

SEQ ID NO: 4957 - DNA, 19 bp, Homo sapiens
  siRNA target sequence for HMG20A (NM_018200.2,756-774).
ccgtcagaaaggcaaatct

SEQ ID NO: 4958 - DNA, 19 bp, Homo sapiens
  siRNA target sequence for HMG20A (NM_018200.2,794-812).
ggcaggccactcatgatca

SEQ ID NO: 4959 - DNA, 19 bp, Homo sapiens
  siRNA target sequence for HMG20A (NM_018200.2,795-813).
gcaggccactcatgatcat

SEQ ID NO: 4960 - DNA, 19 bp, Homo sapiens
  siRNA target sequence for HMG20A (NM_018200.2,844-862).
gtttttgacatccctatat

SEQ ID NO: 4961 - DNA, 19 bp, Homo sapiens
  siRNA target sequence for HMG20A (NM_018200.2,910-928).
cgccagcttcgcaaatcca

SEQ ID NO: 4962 - DNA, 19 bp, Homo sapiens
  siRNA target sequence for HMG20A (NM_018200.2,911-929).
gccagcttcgcaaatccaa

SEQ ID NO: 4963 - DNA, 19 bp, Homo sapiens
  siRNA target sequence for HMG20A (NM_018200.2,1026-1044).
gagccgcaacacagtctta

SEQ ID NO: 4964 - DNA, 19 bp, Homo sapiens
  siRNA target sequence for HMG20A (NM_018200.2,1136-1154).
ccattgactcatatatgaa

SEQ ID NO: 4965 - DNA, 19 bp, Homo sapiens
  siRNA target sequence for HMG20A (NM_018200.2,1161-1179).
gcacagtattattttagct

SEQ ID NO: 4966 - DNA, 19 bp, Homo sapiens
  siRNA target sequence for HMG20A (NM_018200.2,1162-1180).
cacagtattattttagcta

SEQ ID NO: 4967 - DNA, 19 bp, Homo sapiens
  siRNA target sequence for HMG20B (NM_006339.1,285-303).
gttcttggaccaaaacaaa

SEQ ID NO: 4968 - DNA, 19 bp, Homo sapiens
  siRNA target sequence for HMG20B (NM_006339.1,322-340).
cggcgcttgcggaagatga

SEQ ID NO: 4969 - DNA, 19 bp, Homo sapiens
  siRNA target sequence for HMG20B (NM_006339.1,546-564).
gcactctggacttctacat

SEQ ID NO: 4970 - DNA, 19 bp, Homo sapiens
  siRNA target sequence for HMG20B (NM_006339.1,818-836).
gcagcatccctttagcttt

SEQ ID NO: 4971 - DNA, 19 bp, Homo sapiens
  siRNA target sequence for HMG20B (NM_006339.1,821-839).
gcatccctttagctttcaa

SEQ ID NO: 4972 - DNA, 19 bp, Homo sapiens
  siRNA target sequence for HMG20B (NM_006339.1,852-870).
cctgaacccggaaaaagca

SEQ ID NO: 4973 - DNA, 19 bp, Homo sapiens
  siRNA target sequence for HMG20B (NM_006339.1,878-896).
cgcgatacacccagaagaa

SEQ ID NO: 4974 - DNA, 19 bp, Homo sapiens
  siRNA target sequence for HMGB2 (NM_002129.2,284-302).
ccggactcttccgtcaatt

SEQ ID NO: 4975 - DNA, 19 bp, Homo sapiens
  siRNA target sequence for HMGB2 (NM_002129.2,285-303).
cggactcttccgtcaattt

SEQ ID NO: 4976 - DNA, 19 bp, Homo sapiens
  siRNA target sequence for HMGB2 (NM_002129.2,355-373).
ggagaagtcgaagtttgaa

SEQ ID NO: 4977 - DNA, 19 bp, Homo sapiens
  siRNA target sequence for HMGB2 (NM_002129.2,399-417).
gctatgacagggagatgaa

SEQ ID NO: 4978 - DNA, 19 bp, Homo sapiens
  siRNA target sequence for HMGB2 (NM_002129.2,408-426).
gggagatgaaaaattacgt

SEQ ID NO: 4979 - DNA, 19 bp, Homo sapiens
  siRNA target sequence for HMGB2 (NM_002129.2,460-478).
ggaccccaatgctcctaaa

SEQ ID NO: 4980 - DNA, 19 bp, Homo sapiens
  siRNA target sequence for HMGB2 (NM_002129.2,461-479).
gaccccaatgctcctaaaa

SEQ ID NO: 4981 - DNA, 19 bp, Homo sapiens
  siRNA target sequence for HMGB2 (NM_002129.2,558-576).
gggatactgcaaagaaatt

SEQ ID NO: 4982 - DNA, 19 bp, Homo sapiens
  siRNA target sequence for HMGB2 (NM_002129.2,603-621).
ccaaagataaacaaccata

SEQ ID NO: 4983 - DNA, 19 bp, Homo sapiens
  siRNA target sequence for HNF4A (NM_000457.3,354-372).
cggaagaaccacatgtact

SEQ ID NO: 4984 - DNA, 19 bp, Homo sapiens
  siRNA target sequence for HNF4A (NM_000457.3,503-521).
cactcgaaggtcaagctat

SEQ ID NO: 4985 - DNA, 19 bp, Homo sapiens
  siRNA target sequence for HNF4A (NM_000457.3,612-630).
gacattcgggcgaagaaga

SEQ ID NO: 4986 - DNA, 19 bp, Homo sapiens
  siRNA target sequence for HNF4A (NM_000457.3,614-632).
cattcgggcgaagaagatt

SEQ ID NO: 4987 - DNA, 19 bp, Homo sapiens
  siRNA target sequence for HNF4A (NM_000457.3,1169-1187).
cttcggcatggccaagatt

SEQ ID NO: 4988 - DNA, 19 bp, Homo sapiens
  siRNA target sequence for HNF4A (NM_000457.3,1411-1429).
cagggtctgagccctataa

SEQ ID NO: 4989 - DNA, 19 bp, Homo sapiens
  siRNA target sequence for HNF4A (NM_000457.3,1414-1432).
ggtctgagccctataagct

SEQ ID NO: 4990 - DNA, 19 bp, Homo sapiens
  siRNA target sequence for HOXA1 (NM_005522.3,90-108).
cctggaataccccatactt

SEQ ID NO: 4991 - DNA, 19 bp, Homo sapiens
  siRNA target sequence for HOXA1 (NM_005522.3,91-109).
ctggaataccccatactta

SEQ ID NO: 4992 - DNA, 19 bp, Homo sapiens
  siRNA target sequence for HOXA1 (NM_005522.3,147-165).
cccctcggaccataggatt

SEQ ID NO: 4993 - DNA, 19 bp, Homo sapiens
  siRNA target sequence for HOXA1 (NM_005522.3,148-166).
ccctcggaccataggatta

SEQ ID NO: 4994 - DNA, 19 bp, Homo sapiens
  siRNA target sequence for HOXA1 (NM_005522.3,150-168).
ctcggaccataggattaca

SEQ ID NO: 4995 - DNA, 19 bp, Homo sapiens
  siRNA target sequence for HOXA1 (NM_005522.3,153-171).
ggaccataggattacaact

SEQ ID NO: 4996 - DNA, 19 bp, Homo sapiens
  siRNA target sequence for HOXA1 (NM_005522.3,154-172).
gaccataggattacaactt

SEQ ID NO: 4997 - DNA, 19 bp, Homo sapiens
  siRNA target sequence for HOXA1 (NM_005522.3,184-202).
gcggtcagcgccaacagtt

SEQ ID NO: 4998 - DNA, 19 bp, Homo sapiens
  siRNA target sequence for HOXA1 (NM_005522.3,330-348).
ctactcccactcaagttgt

SEQ ID NO: 4999 - DNA, 19 bp, Homo sapiens
  siRNA target sequence for HOXA1 (NM_005522.3,356-374).
gctatggctcacagaactt

SEQ ID NO: 5000 - DNA, 19 bp, Homo sapiens
  siRNA target sequence for HOXA1 (NM_005522.3,387-405).
cagcccctacgcgttaaat

SEQ ID NO: 5001 - DNA, 19 bp, Homo sapiens
  siRNA target sequence for HOXA1 (NM_005522.3,389-407).
gcccctacgcgttaaatca

SEQ ID NO: 5002 - DNA, 19 bp, Homo sapiens
  siRNA target sequence for HOXA1 (NM_005522.3,441-459).
cgctcccgctgtttactct

SEQ ID NO: 5003 - DNA, 19 bp, Homo sapiens
  siRNA target sequence for HOXA1 (NM_005522.3,451-469).
gtttactctggaaatctct

SEQ ID NO: 5004 - DNA, 19 bp, Homo sapiens
  siRNA target sequence for HOXA1 (NM_005522.3,495-513).
ccaccaccagggttatgct

SEQ ID NO: 5005 - DNA, 19 bp, Homo sapiens
  siRNA target sequence for HOXA1 (NM_005522.3,521-539).
cggtgggctcgcctcaata

SEQ ID NO: 5006 - DNA, 19 bp, Homo sapiens
  siRNA target sequence for HOXA1 (NM_005522.3,523-541).
gtgggctcgcctcaataca

SEQ ID NO: 5007 - DNA, 19 bp, Homo sapiens
  siRNA target sequence for HOXA1 (NM_005522.3,525-543).
gggctcgcctcaatacatt

SEQ ID NO: 5008 - DNA, 19 bp, Homo sapiens
  siRNA target sequence for HOXA1 (NM_005522.3,576-594).
ggccctggctacgtataat

SEQ ID NO: 5009 - DNA, 19 bp, Homo sapiens
  siRNA target sequence for HOXA1 (NM_005522.3,577-595).
gccctggctacgtataata

SEQ ID NO: 5010 - DNA, 19 bp, Homo sapiens
  siRNA target sequence for HOXA1 (NM_005522.3,578-596).
ccctggctacgtataataa

SEQ ID NO: 5011 - DNA, 19 bp, Homo sapiens
  siRNA target sequence for HOXA1 (NM_005522.3,580-598).
ctggctacgtataataact

SEQ ID NO: 5012 - DNA, 19 bp, Homo sapiens
  siRNA target sequence for HOXA1 (NM_005522.3,645-663).
cgcatcggagacatcttct

SEQ ID NO: 5013 - DNA, 19 bp, Homo sapiens
  siRNA target sequence for HOXA1 (NM_005522.3,659-677).
cttctccagcgcagacttt

SEQ ID NO: 5014 - DNA, 19 bp, Homo sapiens
  siRNA target sequence for HOXA1 (NM_005522.3,664-682).
ccagcgcagacttttgact

SEQ ID NO: 5015 - DNA, 19 bp, Homo sapiens
  siRNA target sequence for HOXA1 (NM_005522.3,754-772).
gcggtgcgcaccaacttca

SEQ ID NO: 5016 - DNA, 19 bp, Homo sapiens
  siRNA target sequence for HOXA10 (NM_018951.2,468-486).
gctctttcgcgcagaacat

SEQ ID NO: 5017 - DNA, 19 bp, Homo sapiens
  siRNA target sequence for HOXA10 (NM_018951.2,471-489).
ctttcgcgcagaacatcaa

SEQ ID NO: 5018 - DNA, 19 bp, Homo sapiens
  siRNA target sequence for HOXA10 (NM_018951.2,932-950).
gcctcgccggagaaggatt

SEQ ID NO: 5019 - DNA, 19 bp, Homo sapiens
  siRNA target sequence for HOXA10 (NM_018951.2,947-965).
gattccctgggcaattcca

SEQ ID NO: 5020 - DNA, 19 bp, Homo sapiens
  siRNA target sequence for HOXA10 (NM_018951.2,1201-1219).
ggagctcacagccaacttt

SEQ ID NO: 5021 - DNA, 19 bp, Homo sapiens
  siRNA target sequence for HOXA10 (NM_018951.2,1202-1220).
gagctcacagccaacttta

SEQ ID NO: 5022 - DNA, 19 bp, Homo sapiens
  siRNA target sequence for HOXA10 (NM_018951.2,1204-1222).
gctcacagccaactttaat

SEQ ID NO: 5023 - DNA, 19 bp, Homo sapiens
  siRNA target sequence for HOXA11 (NM_005523.4,87-105).
gtccctgctcctctaacat

SEQ ID NO: 5024 - DNA, 19 bp, Homo sapiens
  siRNA target sequence for HOXA11 (NM_005523.4,89-107).
ccctgctcctctaacatgt

SEQ ID NO: 5025 - DNA, 19 bp, Homo sapiens
  siRNA target sequence for HOXA11 (NM_005523.4,93-111).
gctcctctaacatgtattt

SEQ ID NO: 5026 - DNA, 19 bp, Homo sapiens
  siRNA target sequence for HOXA11 (NM_005523.4,131-149).
gtctcgggtccagatttct

SEQ ID NO: 5027 - DNA, 19 bp, Homo sapiens
  siRNA target sequence for HOXA11 (NM_005523.4,426-444).
ccgcagtctcgtccaattt

SEQ ID NO: 5028 - DNA, 19 bp, Homo sapiens
  siRNA target sequence for HOXA11 (NM_005523.4,428-446).
gcagtctcgtccaatttct

SEQ ID NO: 5029 - DNA, 19 bp, Homo sapiens
  siRNA target sequence for HOXA11 (NM_005523.4,429-447).
cagtctcgtccaatttcta

SEQ ID NO: 5030 - DNA, 19 bp, Homo sapiens
  siRNA target sequence for HOXA11 (NM_005523.4,431-449).
gtctcgtccaatttctata

SEQ ID NO: 5031 - DNA, 19 bp, Homo sapiens
  siRNA target sequence for HOXA11 (NM_005523.4,483-501).
ctttcgaccagtttttcga

SEQ ID NO: 5032 - DNA, 19 bp, Homo sapiens
  siRNA target sequence for HOXA11 (NM_005523.4,780-798).
gccaacgcacccgcaaaaa

SEQ ID NO: 5033 - DNA, 19 bp, Homo sapiens
  siRNA target sequence for HOXA11 (NM_005523.4,836-854).
gaacgggagttcttcttca

SEQ ID NO: 5034 - DNA, 19 bp, Homo sapiens
  siRNA target sequence for HOXA11 (NM_005523.4,853-871).
cagcgtctacattaacaaa

SEQ ID NO: 5035 - DNA, 19 bp, Homo sapiens
  siRNA target sequence for HOXA11 (NM_005523.4,855-873).
gcgtctacattaacaaaga

SEQ ID NO: 5036 - DNA, 19 bp, Homo sapiens
  siRNA target sequence for HOXA11 (NM_005523.4,969-987).
gagaccgtttacagtacta

SEQ ID NO: 5037 - DNA, 19 bp, Homo sapiens
  siRNA target sequence for HOXA2 (NM_006735.3,284-302).
cgaatttgagcgagagatt

SEQ ID NO: 5038 - DNA, 19 bp, Homo sapiens
  siRNA target sequence for HOXA2 (NM_006735.3,351-369).
ccccctgtcgctgatacat

SEQ ID NO: 5039 - DNA, 19 bp, Homo sapiens
  siRNA target sequence for HOXA2 (NM_006735.3,352-370).
cccctgtcgctgatacatt

SEQ ID NO: 5040 - DNA, 19 bp, Homo sapiens
  siRNA target sequence for HOXA2 (NM_006735.3,727-745).
ccaacacacagcttctaga

SEQ ID NO: 5041 - DNA, 19 bp, Homo sapiens
  siRNA target sequence for HOXA2 (NM_006735.3,1008-1026).
gagagggaaggctacactt

SEQ ID NO: 5042 - DNA, 19 bp, Homo sapiens
  siRNA target sequence for HOXA2 (NM_006735.3,1012-1030).
gggaaggctacacttttca

SEQ ID NO: 5043 - DNA, 19 bp, Homo sapiens
  siRNA target sequence for HOXA2 (NM_006735.3,1055-1073).
ggctcccaatggacacaat

SEQ ID NO: 5044 - DNA, 19 bp, Homo sapiens
  siRNA target sequence for HOXA2 (NM_006735.3,1101-1119).
cctttaaccagcaatgaga

SEQ ID NO: 5045 - DNA, 19 bp, Homo sapiens
  siRNA target sequence for HOXA2 (NM_006735.3,1155-1173).
gttcccaactgcttgtcaa

SEQ ID NO: 5046 - DNA, 19 bp, Homo sapiens
  siRNA target sequence for HOXA2 (NM_006735.3,1192-1210).
gagctggcctaaacaatga

SEQ ID NO: 5047 - DNA, 19 bp, Homo sapiens
  siRNA target sequence for HOXA2 (NM_006735.3,1194-1212).
gctggcctaaacaatgaca

SEQ ID NO: 5048 - DNA, 19 bp, Homo sapiens
  siRNA target sequence for HOXA2 (NM_006735.3,1233-1251).
ccctctttgcaggacttta

SEQ ID NO: 5049 - DNA, 19 bp, Homo sapiens
  siRNA target sequence for HOXA2 (NM_006735.3,1317-1335).
ctcgacagtcccgtagata

SEQ ID NO: 5050 - DNA, 19 bp, Homo sapiens
  siRNA target sequence for HOXA2 (NM_006735.3,1319-1337).
cgacagtcccgtagatatt

SEQ ID NO: 5051 - DNA, 19 bp, Homo sapiens
  siRNA target sequence for HOXA2 (NM_006735.3,1322-1340).
cagtcccgtagatatttca

SEQ ID NO: 5052 - DNA, 19 bp, Homo sapiens
  siRNA target sequence for HOXA2 (NM_006735.3,1339-1357).
cagctgacagcttagactt

SEQ ID NO: 5053 - DNA, 19 bp, Homo sapiens
  siRNA target sequence for HOXA2 (NM_006735.3,1348-1366).
gcttagacttttttacaga

SEQ ID NO: 5054 - DNA, 19 bp, Homo sapiens
  siRNA target sequence for HOXA3 (NM_030661.3,261-279).
gccaacgggttcgcttata

SEQ ID NO: 5055 - DNA, 19 bp, Homo sapiens
  siRNA target sequence for HOXA3 (NM_030661.3,262-280).
ccaacgggttcgcttataa

SEQ ID NO: 5056 - DNA, 19 bp, Homo sapiens
  siRNA target sequence for HOXA3 (NM_030661.3,263-281).
caacgggttcgcttataat

SEQ ID NO: 5057 - DNA, 19 bp, Homo sapiens
  siRNA target sequence for HOXA3 (NM_030661.3,1014-1032).
ggagccggtggctatctga

SEQ ID NO: 5058 - DNA, 19 bp, Homo sapiens
  siRNA target sequence for HOXA3 (NM_030661.3,1015-1033).
gagccggtggctatctgaa

SEQ ID NO: 5059 - DNA, 19 bp, Homo sapiens
  siRNA target sequence for HOXA3 (NM_030661.3,1025-1043).
ctatctgaactctatgcat

SEQ ID NO: 5060 - DNA, 19 bp, Homo sapiens
  siRNA target sequence for HOXA3 (NM_030661.3,1210-1228).
ggggcacccccgactatga

SEQ ID NO: 5061 - DNA, 19 bp, Homo sapiens
  siRNA target sequence for HOXA3 (NM_030661.3,1342-1360).
ccctctttggtctaactca

SEQ ID NO: 5062 - DNA, 19 bp, Homo sapiens
  siRNA target sequence for HOXA4 (NM_002141.2,659-677).
cgccgttaaccccagttat

SEQ ID NO: 5063 - DNA, 19 bp, Homo sapiens
  siRNA target sequence for HOXA4 (NM_002141.2,660-678).
gccgttaaccccagttata

SEQ ID NO: 5064 - DNA, 19 bp, Homo sapiens
  siRNA target sequence for HOXA4 (NM_002141.2,661-679).
ccgttaaccccagttataa

SEQ ID NO: 5065 - DNA, 19 bp, Homo sapiens
  siRNA target sequence for HOXA4 (NM_002141.2,792-810).
gcccacacgctctgtttgt

SEQ ID NO: 5066 - DNA, 19 bp, Homo sapiens
  siRNA target sequence for HOXA4 (NM_002141.2,794-812).
ccacacgctctgtttgtct

SEQ ID NO: 5067 - DNA, 19 bp, Homo sapiens
  siRNA target sequence for HOXA5 (NM_019102.2,69-87).
cttattttgtaaactcatt

SEQ ID NO: 5068 - DNA, 19 bp, Homo sapiens
  siRNA target sequence for HOXA5 (NM_019102.2,110-128).
ccggactaccagttgcata

SEQ ID NO: 5069 - DNA, 19 bp, Homo sapiens
  siRNA target sequence for HOXA5 (NM_019102.2,111-129).
cggactaccagttgcataa

SEQ ID NO: 5070 - DNA, 19 bp, Homo sapiens
  siRNA target sequence for HOXA5 (NM_019102.2,144-162).
gttccgtgagcgagcaatt

SEQ ID NO: 5071 - DNA, 19 bp, Homo sapiens
  siRNA target sequence for HOXA5 (NM_019102.2,414-432).
ggaaaaactccctaagcaa

SEQ ID NO: 5072 - DNA, 19 bp, Homo sapiens
  siRNA target sequence for HOXA5 (NM_019102.2,601-619).
gcgcaagctgcacataagt

SEQ ID NO: 5073 - DNA, 19 bp, Homo sapiens
  siRNA target sequence for HOXA5 (NM_019102.2,603-621).
gcaagctgcacataagtca

SEQ ID NO: 5074 - DNA, 19 bp, Homo sapiens
  siRNA target sequence for HOXA5 (NM_019102.2,613-631).
cataagtcatgacaacata

SEQ ID NO: 5075 - DNA, 19 bp, Homo sapiens
  siRNA target sequence for HOXA5 (NM_019102.2,724-742).
ccgcagaaggaggattgaa

SEQ ID NO: 5076 - DNA, 19 bp, Homo sapiens
  siRNA target sequence for HOXA5 (NM_019102.2,763-781).
ctccgagagacaaattaaa

SEQ ID NO: 5077 - DNA, 19 bp, Homo sapiens
  siRNA target sequence for HOXA5 (NM_019102.2,765-783).
ccgagagacaaattaaaat

SEQ ID NO: 5078 - DNA, 19 bp, Homo sapiens
  siRNA target sequence for HOXA5 (NM_019102.2,818-836).
gataataagctgaaaagca

SEQ ID NO: 5079 - DNA, 19 bp, Homo sapiens
  siRNA target sequence for HOXA6 (NM_024014.2,152-170).
cgtacacctcaccttgttt

SEQ ID NO: 5080 - DNA, 19 bp, Homo sapiens
  siRNA target sequence for HOXA7 (NM_006896.2,153-171).
gaacgcgctttttagcaaa

SEQ ID NO: 5081 - DNA, 19 bp, Homo sapiens
  siRNA target sequence for HOXA7 (NM_006896.2,156-174).
cgcgctttttagcaaatat

SEQ ID NO: 5082 - DNA, 19 bp, Homo sapiens
  siRNA target sequence for HOXA7 (NM_006896.2,157-175).
gcgctttttagcaaatata

SEQ ID NO: 5083 - DNA, 19 bp, Homo sapiens
  siRNA target sequence for HOXA7 (NM_006896.2,281-299).
ccgttccgggcttatacaa

SEQ ID NO: 5084 - DNA, 19 bp, Homo sapiens
  siRNA target sequence for HOXA7 (NM_006896.2,286-304).
ccgggcttatacaatgtca

SEQ ID NO: 5085 - DNA, 19 bp, Homo sapiens
  siRNA target sequence for HOXA7 (NM_006896.2,377-395).
gcgcctcctacgaccaaaa

SEQ ID NO: 5086 - DNA, 19 bp, Homo sapiens
  siRNA target sequence for HOXA9 (NM_152739.2,457-475).
gccttatggcattaaacct

SEQ ID NO: 5087 - DNA, 19 bp, Homo sapiens
  siRNA target sequence for HOXA9 (NM_152739.2,551-569).
ggttctcctccagttgata

SEQ ID NO: 5088 - DNA, 19 bp, Homo sapiens
  siRNA target sequence for HOXA9 (NM_152739.2,557-575).
cctccagttgatagagaaa

SEQ ID NO: 5089 - DNA, 19 bp, Homo sapiens
  siRNA target sequence for HOXA9 (NM_152739.2,587-605).
gaaggcgccttctctgaaa

SEQ ID NO: 5090 - DNA, 19 bp, Homo sapiens
  siRNA target sequence for HOXA9 (NM_152739.2,591-609).
gcgccttctctgaaaacaa

SEQ ID NO: 5091 - DNA, 19 bp, Homo sapiens
  siRNA target sequence for HOXA9 (NM_152739.2,592-610).
cgccttctctgaaaacaat

SEQ ID NO: 5092 - DNA, 19 bp, Homo sapiens
  siRNA target sequence for HOXB1 (NM_002144.2,10-28).
gactataataggatgaact

SEQ ID NO: 5093 - DNA, 19 bp, Homo sapiens
  siRNA target sequence for HOXB1 (NM_002144.2,20-38).
ggatgaactccttcttaga

SEQ ID NO: 5094 - DNA, 19 bp, Homo sapiens
  siRNA target sequence for HOXB1 (NM_002144.2,118-136).
gcggttgacagctatgcaa

SEQ ID NO: 5095 - DNA, 19 bp, Homo sapiens
  siRNA target sequence for HOXB1 (NM_002144.2,484-502).
ctctccgaggacaaggaaa

SEQ ID NO: 5096 - DNA, 19 bp, Homo sapiens
  siRNA target sequence for HOXB1 (NM_002144.2,547-565).
gactggatgaaggttaaga

SEQ ID NO: 5097 - DNA, 19 bp, Homo sapiens
  siRNA target sequence for HOXB13 (NM_006361.2,299-317).
gcggagccgccaaagcaat

SEQ ID NO: 5098 - DNA, 19 bp, Homo sapiens
  siRNA target sequence for HOXB13 (NM_006361.2,356-374).
gctcccgtgccttatggtt

SEQ ID NO: 5099 - DNA, 19 bp, Homo sapiens
  siRNA target sequence for HOXB13 (NM_006361.2,357-375).
ctcccgtgccttatggtta

SEQ ID NO: 5100 - DNA, 19 bp, Homo sapiens
  siRNA target sequence for HOXB13 (NM_006361.2,698-716).
ccaccaggtcccttttgga

SEQ ID NO: 5101 - DNA, 19 bp, Homo sapiens
  siRNA target sequence for HOXB13 (NM_006361.2,828-846).
gggagtatgcggctaacaa

SEQ ID NO: 5102 - DNA, 19 bp, Homo sapiens
  siRNA target sequence for HOXB13 (NM_006361.2,830-848).
gagtatgcggctaacaagt

SEQ ID NO: 5103 - DNA, 19 bp, Homo sapiens
  siRNA target sequence for HOXB13 (NM_006361.2,860-878).
gacaagaggcgcaagatct

SEQ ID NO: 5104 - DNA, 19 bp, Homo sapiens
  siRNA target sequence for HOXB13 (NM_006361.2,897-915).
cggagcgccagattaccat

SEQ ID NO: 5105 - DNA, 19 bp, Homo sapiens
  siRNA target sequence for HOXB2 (NM_002145.2,140-158).
gggagattgggtttataaa

SEQ ID NO: 5106 - DNA, 19 bp, Homo sapiens
  siRNA target sequence for HOXB2 (NM_002145.2,207-225).
ggagacatttcaaacttca

SEQ ID NO: 5107 - DNA, 19 bp, Homo sapiens
  siRNA target sequence for HOXB2 (NM_002145.2,231-249).
caaggagtcgacattaatt

SEQ ID NO: 5108 - DNA, 19 bp, Homo sapiens
  siRNA target sequence for HOXB2 (NM_002145.2,234-252).
ggagtcgacattaattcct

SEQ ID NO: 5109 - DNA, 19 bp, Homo sapiens
  siRNA target sequence for HOXB2 (NM_002145.2,260-278).
ctcctttcgagcaaacctt

SEQ ID NO: 5110 - DNA, 19 bp, Homo sapiens
  siRNA target sequence for HOXB2 (NM_002145.2,399-417).
cgagttcccttggatgaaa

SEQ ID NO: 5111 - DNA, 19 bp, Homo sapiens
  siRNA target sequence for HOXB2 (NM_002145.2,601-619).
gaattccactttaataagt

SEQ ID NO: 5112 - DNA, 19 bp, Homo sapiens
  siRNA target sequence for HOXB2 (NM_002145.2,1111-1129).
gacagcccggtcccttttt

SEQ ID NO: 5113 - DNA, 19 bp, Homo sapiens
  siRNA target sequence for HOXB3 (NM_002146.3,899-917).
ctcttcggaggctattcct

SEQ ID NO: 5114 - DNA, 19 bp, Homo sapiens
  siRNA target sequence for HOXB3 (NM_002146.3,1271-1289).
caaacgtccaagctgaaaa

SEQ ID NO: 5115 - DNA, 19 bp, Homo sapiens
  siRNA target sequence for HOXB3 (NM_002146.3,1275-1293).
cgtccaagctgaaaaacaa

SEQ ID NO: 5116 - DNA, 19 bp, Homo sapiens
  siRNA target sequence for HOXB3 (NM_002146.3,1503-1521).
ggcctcgccgtgtagagat

SEQ ID NO: 5117 - DNA, 19 bp, Homo sapiens
  siRNA target sequence for HOXB3 (NM_002146.3,2125-2143).
ccaagaagcgcccaaatta

SEQ ID NO: 5118 - DNA, 19 bp, Homo sapiens
  siRNA target sequence for HOXB3 (NM_002146.3,2126-2144).
caagaagcgcccaaattaa

SEQ ID NO: 5119 - DNA, 19 bp, Homo sapiens
  siRNA target sequence for HOXB4 (NM_024015.2,77-95).
ctatgagttcttttttgat

SEQ ID NO: 5120 - DNA, 19 bp, Homo sapiens
  siRNA target sequence for HOXB4 (NM_024015.2,498-516).
cccctggatgcgcaaagtt

SEQ ID NO: 5121 - DNA, 19 bp, Homo sapiens
  siRNA target sequence for HOXB5 (NM_002147.2,123-141).
ccggactatcagttgctaa

SEQ ID NO: 5122 - DNA, 19 bp, Homo sapiens
  siRNA target sequence for HOXB5 (NM_002147.2,124-142).
cggactatcagttgctaaa

SEQ ID NO: 5123 - DNA, 19 bp, Homo sapiens
  siRNA target sequence for HOXB5 (NM_002147.2,125-143).
ggactatcagttgctaaat

SEQ ID NO: 5124 - DNA, 19 bp, Homo sapiens
  siRNA target sequence for HOXB5 (NM_002147.2,126-144).
gactatcagttgctaaatt

SEQ ID NO: 5125 - DNA, 19 bp, Homo sapiens
  siRNA target sequence for HOXB5 (NM_002147.2,200-218).
cggctcttacggctacaat

SEQ ID NO: 5126 - DNA, 19 bp, Homo sapiens
  siRNA target sequence for HOXB5 (NM_002147.2,201-219).
ggctcttacggctacaatt

SEQ ID NO: 5127 - DNA, 19 bp, Homo sapiens
  siRNA target sequence for HOXB5 (NM_002147.2,202-220).
gctcttacggctacaatta

SEQ ID NO: 5128 - DNA, 19 bp, Homo sapiens
  siRNA target sequence for HOXB5 (NM_002147.2,205-223).
cttacggctacaattacaa

SEQ ID NO: 5129 - DNA, 19 bp, Homo sapiens
  siRNA target sequence for HOXB5 (NM_002147.2,455-473).
cgccaatttcaccgaaata

SEQ ID NO: 5130 - DNA, 19 bp, Homo sapiens
  siRNA target sequence for HOXB6 (NM_018952.3,395-413).
cagctaccgctctattcgt

SEQ ID NO: 5131 - DNA, 19 bp, Homo sapiens
  siRNA target sequence for HOXB6 (NM_018952.3,422-440).
gcggacccgctgagacatt

SEQ ID NO: 5132 - DNA, 19 bp, Homo sapiens
  siRNA target sequence for HOXB6 (NM_018952.3,423-441).
cggacccgctgagacatta

SEQ ID NO: 5133 - DNA, 19 bp, Homo sapiens
  siRNA target sequence for HOXB7 (NM_004502.2,340-358).
gagccgagttccttcaaca

SEQ ID NO: 5134 - DNA, 19 bp, Homo sapiens
  siRNA target sequence for HOXB8 (NM_024016.2,390-408).
cgcaaatccaggagttcta

SEQ ID NO: 5135 - DNA, 19 bp, Homo sapiens
  siRNA target sequence for HOXB9 (NM_024017.3,99-117).
gggacgcttagcagctatt

SEQ ID NO: 5136 - DNA, 19 bp, Homo sapiens
  siRNA target sequence for HOXB9 (NM_024017.3,100-118).
ggacgcttagcagctatta

SEQ ID NO: 5137 - DNA, 19 bp, Homo sapiens
  siRNA target sequence for HOXB9 (NM_024017.3,103-121).
cgcttagcagctattatgt

SEQ ID NO: 5138 - DNA, 19 bp, Homo sapiens
  siRNA target sequence for HOXB9 (NM_024017.3,152-170).
cgcgcctccagccaagttt

SEQ ID NO: 5139 - DNA, 19 bp, Homo sapiens
  siRNA target sequence for HOXB9 (NM_024017.3,313-331).
ccgtctaccacccttacat

SEQ ID NO: 5140 - DNA, 19 bp, Homo sapiens
  siRNA target sequence for HOXB9 (NM_024017.3,480-498).
ggcacgcccgagtacagtt

SEQ ID NO: 5141 - DNA, 19 bp, Homo sapiens
  siRNA target sequence for HOXB9 (NM_024017.3,481-499).
gcacgcccgagtacagttt

SEQ ID NO: 5142 - DNA, 19 bp, Homo sapiens
  siRNA target sequence for HOXB9 (NM_024017.3,485-503).
gcccgagtacagtttggaa

SEQ ID NO: 5143 - DNA, 19 bp, Homo sapiens
  siRNA target sequence for HOXB9 (NM_024017.3,486-504).
cccgagtacagtttggaaa

SEQ ID NO: 5144 - DNA, 19 bp, Homo sapiens
  siRNA target sequence for HOXB9 (NM_024017.3,517-535).
gggaggccgtgctgtctaa

SEQ ID NO: 5145 - DNA, 19 bp, Homo sapiens
  siRNA target sequence for HOXB9 (NM_024017.3,518-536).
ggaggccgtgctgtctaat

SEQ ID NO: 5146 - DNA, 19 bp, Homo sapiens
  siRNA target sequence for HOXB9 (NM_024017.3,521-539).
ggccgtgctgtctaatcaa

SEQ ID NO: 5147 - DNA, 19 bp, Homo sapiens
  siRNA target sequence for HOXB9 (NM_024017.3,524-542).
cgtgctgtctaatcaaaga

SEQ ID NO: 5148 - DNA, 19 bp, Homo sapiens
  siRNA target sequence for HOXB9 (NM_024017.3,543-561).
cccggctacggggacaata

SEQ ID NO: 5149 - DNA, 19 bp, Homo sapiens
  siRNA target sequence for HOXB9 (NM_024017.3,544-562).
ccggctacggggacaataa

SEQ ID NO: 5150 - DNA, 19 bp, Homo sapiens
  siRNA target sequence for HOXB9 (NM_024017.3,546-564).
ggctacggggacaataaaa

SEQ ID NO: 5151 - DNA, 19 bp, Homo sapiens
  siRNA target sequence for HOXB9 (NM_024017.3,547-565).
gctacggggacaataaaat

SEQ ID NO: 5152 - DNA, 19 bp, Homo sapiens
  siRNA target sequence for HOXB9 (NM_024017.3,548-566).
ctacggggacaataaaatt

SEQ ID NO: 5153 - DNA, 19 bp, Homo sapiens
  siRNA target sequence for HOXC10 (NM_017409.2,93-111).
gacatgccctcgcaatgta

SEQ ID NO: 5154 - DNA, 19 bp, Homo sapiens
  siRNA target sequence for HOXC10 (NM_017409.2,168-186).
ccggagcgcaggcatgtat

SEQ ID NO: 5155 - DNA, 19 bp, Homo sapiens
  siRNA target sequence for HOXC10 (NM_017409.2,169-187).
cggagcgcaggcatgtata

SEQ ID NO: 5156 - DNA, 19 bp, Homo sapiens
  siRNA target sequence for HOXC10 (NM_017409.2,170-188).
ggagcgcaggcatgtatat

SEQ ID NO: 5157 - DNA, 19 bp, Homo sapiens
  siRNA target sequence for HOXC10 (NM_017409.2,192-210).
gtctgggagtgacttcaat

SEQ ID NO: 5158 - DNA, 19 bp, Homo sapiens
  siRNA target sequence for HOXC10 (NM_017409.2,715-733).
cccagccccaatgaaatca

SEQ ID NO: 5159 - DNA, 19 bp, Homo sapiens
  siRNA target sequence for HOXC10 (NM_017409.2,770-788).
cctcggagagcgaaaagga

SEQ ID NO: 5160 - DNA, 19 bp, Homo sapiens
  siRNA target sequence for HOXC10 (NM_017409.2,815-833).
cagacacctcggataacga

SEQ ID NO: 5161 - DNA, 19 bp, Homo sapiens
  siRNA target sequence for HOXC10 (NM_017409.2,1087-1105).
cgggaactgacctccaatt

SEQ ID NO: 5162 - DNA, 19 bp, Homo sapiens
  siRNA target sequence for HOXC10 (NM_017409.2,1088-1106).
gggaactgacctccaattt

SEQ ID NO: 5163 - DNA, 19 bp, Homo sapiens
  siRNA target sequence for HOXC10 (NM_017409.2,1090-1108).
gaactgacctccaatttta

SEQ ID NO: 5164 - DNA, 19 bp, Homo sapiens
  siRNA target sequence for HOXC10 (NM_017409.2,1093-1111).
ctgacctccaattttaatt

SEQ ID NO: 5165 - DNA, 19 bp, Homo sapiens
  siRNA target sequence for HOXC11 (NM_014212.2,180-198).
gcgcctccaacctctatct

SEQ ID NO: 5166 - DNA, 19 bp, Homo sapiens
  siRNA target sequence for HOXC11 (NM_014212.2,200-218).
cccagttgcacttactaca

SEQ ID NO: 5167 - DNA, 19 bp, Homo sapiens
  siRNA target sequence for HOXC11 (NM_014212.2,433-451).
gatcctcatgaaaaacgaa

SEQ ID NO: 5168 - DNA, 19 bp, Homo sapiens
  siRNA target sequence for HOXC11 (NM_014212.2,802-820).
gcgctgcccttattcgaaa

SEQ ID NO: 5169 - DNA, 19 bp, Homo sapiens
  siRNA target sequence for HOXC11 (NM_014212.2,803-821).
cgctgcccttattcgaaat

SEQ ID NO: 5170 - DNA, 19 bp, Homo sapiens
  siRNA target sequence for HOXC11 (NM_014212.2,804-822).
gctgcccttattcgaaatt

SEQ ID NO: 5171 - DNA, 19 bp, Homo sapiens
  siRNA target sequence for HOXC11 (NM_014212.2,807-825).
gcccttattcgaaattcca

SEQ ID NO: 5172 - DNA, 19 bp, Homo sapiens
  siRNA target sequence for HOXC11 (NM_014212.2,856-874).
caacgtgtatatcaacaaa

SEQ ID NO: 5173 - DNA, 19 bp, Homo sapiens
  siRNA target sequence for HOXC12 (NM_173860.1,397-415).
cctgcgctcggcttcaagt

SEQ ID NO: 5174 - DNA, 19 bp, Homo sapiens
  siRNA target sequence for HOXC12 (NM_173860.1,616-634).
ccctggtacccgatcaaca

SEQ ID NO: 5175 - DNA, 19 bp, Homo sapiens
  siRNA target sequence for HOXC12 (NM_173860.1,741-759).
ctcagaccgcttgaatctt

SEQ ID NO: 5176 - DNA, 19 bp, Homo sapiens
  siRNA target sequence for HOXC12 (NM_173860.1,828-846).
gcaagctctctccttcttt

SEQ ID NO: 5177 - DNA, 19 bp, Homo sapiens
  siRNA target sequence for HOXC13 (NM_017410.2,147-165).
ggccggagagccttatgta

SEQ ID NO: 5178 - DNA, 19 bp, Homo sapiens
  siRNA target sequence for HOXC13 (NM_017410.2,156-174).
gccttatgtacgtctatga

SEQ ID NO: 5179 - DNA, 19 bp, Homo sapiens
  siRNA target sequence for HOXC13 (NM_017410.2,1014-1032).
ctgagcgccaggtaaccat

SEQ ID NO: 5180 - DNA, 19 bp, Homo sapiens
  siRNA target sequence for HOXC6 (NM_004503.2,124-142).
cttcactaacccttcctta

SEQ ID NO: 5181 - DNA, 19 bp, Homo sapiens
  siRNA target sequence for HOXC6 (NM_004503.2,176-194).
cccaacgtcgccctcaatt

SEQ ID NO: 5182 - DNA, 19 bp, Homo sapiens
  siRNA target sequence for HOXC6 (NM_004503.2,245-263).
gcccagaaccggatctact

SEQ ID NO: 5183 - DNA, 19 bp, Homo sapiens
  siRNA target sequence for HOXC6 (NM_004503.2,259-277).
ctactcgactcccttttat

SEQ ID NO: 5184 - DNA, 19 bp, Homo sapiens
  siRNA target sequence for HOXC6 (NM_004503.2,319-337).
gtatgactatggatctaat

SEQ ID NO: 5185 - DNA, 19 bp, Homo sapiens
  siRNA target sequence for HOXC6 (NM_004503.2,330-348).
gatctaattccttttacca

SEQ ID NO: 5186 - DNA, 19 bp, Homo sapiens
  siRNA target sequence for HOXC6 (NM_004503.2,406-424).
ctcaatcgctcaggatttt

SEQ ID NO: 5187 - DNA, 19 bp, Homo sapiens
  siRNA target sequence for HOXC8 (NM_022658.2,236-254).
ccctggaaccggcctatta

SEQ ID NO: 5188 - DNA, 19 bp, Homo sapiens
  siRNA target sequence for HOXC8 (NM_022658.2,338-356).
cttcgcaccacgttcaaga

SEQ ID NO: 5189 - DNA, 19 bp, Homo sapiens
  siRNA target sequence for HOXC8 (NM_022658.2,341-359).
cgcaccacgttcaagactt

SEQ ID NO: 5190 - DNA, 19 bp, Homo sapiens
  siRNA target sequence for HOXC8 (NM_022658.2,431-449).
gagacgcctccaaattcta

SEQ ID NO: 5191 - DNA, 19 bp, Homo sapiens
  siRNA target sequence for HOXC8 (NM_022658.2,498-516).
ggcgagcgtggtgcaatat

SEQ ID NO: 5192 - DNA, 19 bp, Homo sapiens
  siRNA target sequence for HOXC8 (NM_022658.2,531-549).
ctccgccaacactaacagt

SEQ ID NO: 5193 - DNA, 19 bp, Homo sapiens
  siRNA target sequence for HOXC8 (NM_022658.2,557-575).
gacaaggccacttaaatca

SEQ ID NO: 5194 - DNA, 19 bp, Homo sapiens
  siRNA target sequence for HOXC8 (NM_022658.2,631-649).
cgcagtggacggcaaactt

SEQ ID NO: 5195 - DNA, 19 bp, Homo sapiens
  siRNA target sequence for HOXC8 (NM_022658.2,710-728).
gaaaacgtcggattgaagt

SEQ ID NO: 5196 - DNA, 19 bp, Homo sapiens
  siRNA target sequence for HOXC9 (NM_006897.1,113-131).
ccatcagtaactattacgt

SEQ ID NO: 5197 - DNA, 19 bp, Homo sapiens
  siRNA target sequence for HOXC9 (NM_006897.1,141-159).
catctctcacgacaatgaa

SEQ ID NO: 5198 - DNA, 19 bp, Homo sapiens
  siRNA target sequence for HOXC9 (NM_006897.1,228-246).
gccggactgtagcgatttt

SEQ ID NO: 5199 - DNA, 19 bp, Homo sapiens
  siRNA target sequence for HOXC9 (NM_006897.1,308-326).
ctcagtcgtccgtggtata

SEQ ID NO: 5200 - DNA, 19 bp, Homo sapiens
  siRNA target sequence for HOXC9 (NM_006897.1,503-521).
gcagctacccggactacat

SEQ ID NO: 5201 - DNA, 19 bp, Homo sapiens
  siRNA target sequence for HOXC9 (NM_006897.1,506-524).
gctacccggactacatgta

SEQ ID NO: 5202 - DNA, 19 bp, Homo sapiens
  siRNA target sequence for HOXD1 (NM_024501.1,832-850).
cacgttcgagtggatgaaa

SEQ ID NO: 5203 - DNA, 19 bp, Homo sapiens
  siRNA target sequence for HOXD1 (NM_024501.1,834-852).
cgttcgagtggatgaaagt

SEQ ID NO: 5204 - DNA, 19 bp, Homo sapiens
  siRNA target sequence for HOXD1 (NM_024501.1,912-930).
gcgcgatccgcacgaattt

SEQ ID NO: 5205 - DNA, 19 bp, Homo sapiens
  siRNA target sequence for HOXD1 (NM_024501.1,914-932).
gcgatccgcacgaatttca

SEQ ID NO: 5206 - DNA, 19 bp, Homo sapiens
  siRNA target sequence for HOXD1 (NM_024501.1,1145-1163).
ggaacaacccccactaagt

SEQ ID NO: 5207 - DNA, 19 bp, Homo sapiens
  siRNA target sequence for HOXD1 (NM_024501.1,1146-1164).
gaacaacccccactaagtt

SEQ ID NO: 5208 - DNA, 19 bp, Homo sapiens
  siRNA target sequence for HOXD1 (NM_024501.1,1149-1167).
caacccccactaagtttat

SEQ ID NO: 5209 - DNA, 19 bp, Homo sapiens
  siRNA target sequence for HOXD1 (NM_024501.1,1152-1170).
cccccactaagtttatcaa

SEQ ID NO: 5210 - DNA, 19 bp, Homo sapiens
  siRNA target sequence for HOXD1 (NM_024501.1,1154-1172).
cccactaagtttatcaaga

SEQ ID NO: 5211 - DNA, 19 bp, Homo sapiens
  siRNA target sequence for HOXD10 (NM_002148.2,125-143).
ctgcaggagtgacagtttt

SEQ ID NO: 5212 - DNA, 19 bp, Homo sapiens
  siRNA target sequence for HOXD10 (NM_002148.2,191-209).
ggggacctatggaatgcaa

SEQ ID NO: 5213 - DNA, 19 bp, Homo sapiens
  siRNA target sequence for HOXD10 (NM_002148.2,192-210).
gggacctatggaatgcaaa

SEQ ID NO: 5214 - DNA, 19 bp, Homo sapiens
  siRNA target sequence for HOXD10 (NM_002148.2,224-242).
cccgtctctggccaaaaga

SEQ ID NO: 5215 - DNA, 19 bp, Homo sapiens
  siRNA target sequence for HOXD10 (NM_002148.2,226-244).
cgtctctggccaaaagaga

SEQ ID NO: 5216 - DNA, 19 bp, Homo sapiens
  siRNA target sequence for HOXD10 (NM_002148.2,227-245).
gtctctggccaaaagagaa

SEQ ID NO: 5217 - DNA, 19 bp, Homo sapiens
  siRNA target sequence for HOXD10 (NM_002148.2,269-287).
gaatgtgcatccttatata

SEQ ID NO: 5218 - DNA, 19 bp, Homo sapiens
  siRNA target sequence for HOXD10 (NM_002148.2,280-298).
cttatatacctcaagtaga

SEQ ID NO: 5219 - DNA, 19 bp, Homo sapiens
  siRNA target sequence for HOXD10 (NM_002148.2,314-332).
gaacagatcttgtcgaata

SEQ ID NO: 5220 - DNA, 19 bp, Homo sapiens
  siRNA target sequence for HOXD10 (NM_002148.2,367-385).
ccttcaccaccaacattaa

SEQ ID NO: 5221 - DNA, 19 bp, Homo sapiens
  siRNA target sequence for HOXD10 (NM_002148.2,400-418).
gctgcatgtattctgataa

SEQ ID NO: 5222 - DNA, 19 bp, Homo sapiens
  siRNA target sequence for HOXD10 (NM_002148.2,412-430).
ctgataagcgcaacaaact

SEQ ID NO: 5223 - DNA, 19 bp, Homo sapiens
  siRNA target sequence for HOXD10 (NM_002148.2,414-432).
gataagcgcaacaaactca

SEQ ID NO: 5224 - DNA, 19 bp, Homo sapiens
  siRNA target sequence for HOXD10 (NM_002148.2,497-515).
ggttcccgtccctggatat

SEQ ID NO: 5225 - DNA, 19 bp, Homo sapiens
  siRNA target sequence for HOXD10 (NM_002148.2,498-516).
gttcccgtccctggatatt

SEQ ID NO: 5226 - DNA, 19 bp, Homo sapiens
  siRNA target sequence for HOXD10 (NM_002148.2,503-521).
cgtccctggatattttaga

SEQ ID NO: 5227 - DNA, 19 bp, Homo sapiens
  siRNA target sequence for HOXD10 (NM_002148.2,541-559).
ccgggaaaacccaagagta

SEQ ID NO: 5228 - DNA, 19 bp, Homo sapiens
  siRNA target sequence for HOXD10 (NM_002148.2,906-924).
gaaaaagagttcttgttca

SEQ ID NO: 5229 - DNA, 19 bp, Homo sapiens
  siRNA target sequence for HOXD13 (NM_000523.2,388-406).
gctcccccagccaaagagt

SEQ ID NO: 5230 - DNA, 19 bp, Homo sapiens
  siRNA target sequence for HOXD13 (NM_000523.2,835-853).
caggggtcccacttttgga

SEQ ID NO: 5231 - DNA, 19 bp, Homo sapiens
  siRNA target sequence for HOXD13 (NM_000523.2,837-855).
ggggtcccacttttggaaa

SEQ ID NO: 5232 - DNA, 19 bp, Homo sapiens
  siRNA target sequence for HOXD13 (NM_000523.2,838-856).
gggtcccacttttggaaat

SEQ ID NO: 5233 - DNA, 19 bp, Homo sapiens
  siRNA target sequence for HOXD13 (NM_000523.2,869-887).
gggatgtggctctaaatca

SEQ ID NO: 5234 - DNA, 19 bp, Homo sapiens
  siRNA target sequence for HOXD13 (NM_000523.2,966-984).
cgagtatgccattaacaaa

SEQ ID NO: 5235 - DNA, 19 bp, Homo sapiens
  siRNA target sequence for HOXD3 (NM_006898.4,227-245).
gcagaaggctgcttactat

SEQ ID NO: 5236 - DNA, 19 bp, Homo sapiens
  siRNA target sequence for HOXD3 (NM_006898.4,230-248).
gaaggctgcttactatgaa

SEQ ID NO: 5237 - DNA, 19 bp, Homo sapiens
  siRNA target sequence for HOXD3 (NM_006898.4,269-287).
ctatggctacagcaaaact

SEQ ID NO: 5238 - DNA, 19 bp, Homo sapiens
  siRNA target sequence for HOXD3 (NM_006898.4,1446-1464).
ccggaggctcccaaactga

SEQ ID NO: 5239 - DNA, 19 bp, Homo sapiens
  siRNA target sequence for HOXD4 (NM_014621.2,302-320).
ctccgtgcgaggagtattt

SEQ ID NO: 5240 - DNA, 19 bp, Homo sapiens
  siRNA target sequence for HOXD4 (NM_014621.2,305-323).
cgtgcgaggagtatttgca

SEQ ID NO: 5241 - DNA, 19 bp, Homo sapiens
  siRNA target sequence for HOXD8 (NM_019558.2,640-658).
ccgctgtactccaagtaca

SEQ ID NO: 5242 - DNA, 19 bp, Homo sapiens
  siRNA target sequence for HOXD8 (NM_019558.2,1020-1038).
gaagttttacggatacgat

SEQ ID NO: 5243 - DNA, 19 bp, Homo sapiens
  siRNA target sequence for HOXD8 (NM_019558.2,1030-1048).
ggatacgataacttacaga

SEQ ID NO: 5244 - DNA, 19 bp, Homo sapiens
  siRNA target sequence for HOXD8 (NM_019558.2,1075-1093).
gaggccgagctggtacaat

SEQ ID NO: 5245 - DNA, 19 bp, Homo sapiens
  siRNA target sequence for HOXD8 (NM_019558.2,1077-1095).
ggccgagctggtacaatat

SEQ ID NO: 5246 - DNA, 19 bp, Homo sapiens
  siRNA target sequence for HOXD8 (NM_019558.2,1080-1098).
cgagctggtacaatatcct

SEQ ID NO: 5247 - DNA, 19 bp, Homo sapiens
  siRNA target sequence for HOXD8 (NM_019558.2,1129-1147).
gaggacccagaccacttaa

SEQ ID NO: 5248 - DNA, 19 bp, Homo sapiens
  siRNA target sequence for HOXD8 (NM_019558.2,1131-1149).
ggacccagaccacttaaat

SEQ ID NO: 5249 - DNA, 19 bp, Homo sapiens
  siRNA target sequence for HOXD8 (NM_019558.2,1152-1170).
gagctcgtctccttctcaa

SEQ ID NO: 5250 - DNA, 19 bp, Homo sapiens
  siRNA target sequence for HOXD8 (NM_019558.2,1154-1172).
gctcgtctccttctcaaat

SEQ ID NO: 5251 - DNA, 19 bp, Homo sapiens
  siRNA target sequence for HOXD8 (NM_019558.2,1157-1175).
cgtctccttctcaaatgtt

SEQ ID NO: 5252 - DNA, 19 bp, Homo sapiens
  siRNA target sequence for HOXD8 (NM_019558.2,1278-1296).
ctatctgaccaggaaaaga

SEQ ID NO: 5253 - DNA, 19 bp, Homo sapiens
  siRNA target sequence for HOXD8 (NM_019558.2,1422-1440).
gaaggacggggaaacgaaa

SEQ ID NO: 5254 - DNA, 19 bp, Homo sapiens
  siRNA target sequence for HOXD8 (NM_019558.2,1471-1489).
gccgaaggcctgacaaatt

SEQ ID NO: 5255 - DNA, 19 bp, Homo sapiens
  siRNA target sequence for HOXD9 (NM_014213.2,469-487).
ctacgtggactcgcttata

SEQ ID NO: 5256 - DNA, 19 bp, Homo sapiens
  siRNA target sequence for HOXD9 (NM_014213.2,593-611).
gagttcgcctcgtgtagtt

SEQ ID NO: 5257 - DNA, 19 bp, Homo sapiens
  siRNA target sequence for HOXD9 (NM_014213.2,595-613).
gttcgcctcgtgtagtttt

SEQ ID NO: 5258 - DNA, 19 bp, Homo sapiens
  siRNA target sequence for HOZFP (NM_152995.3,252-270).
ccgcagccagcgagctaat

SEQ ID NO: 5259 - DNA, 19 bp, Homo sapiens
  siRNA target sequence for HOZFP (NM_152995.3,262-280).
cgagctaatgtctcagaaa

SEQ ID NO: 5260 - DNA, 19 bp, Homo sapiens
  siRNA target sequence for HOZFP (NM_152995.3,315-333).
cagccagaaaacttgttga

SEQ ID NO: 5261 - DNA, 19 bp, Homo sapiens
  siRNA target sequence for HOZFP (NM_152995.3,326-344).
cttgttgaagaacagttta

SEQ ID NO: 5262 - DNA, 19 bp, Homo sapiens
  siRNA target sequence for HOZFP (NM_152995.3,340-358).
gtttagctcttcatctgaa

SEQ ID NO: 5263 - DNA, 19 bp, Homo sapiens
  siRNA target sequence for HOZFP (NM_152995.3,447-465).
gtgaattagagcgaacaaa

SEQ ID NO: 5264 - DNA, 19 bp, Homo sapiens
  siRNA target sequence for HOZFP (NM_152995.3,457-475).
gcgaacaaaacaatatgta

SEQ ID NO: 5265 - DNA, 19 bp, Homo sapiens
  siRNA target sequence for HOZFP (NM_152995.3,458-476).
cgaacaaaacaatatgtaa

SEQ ID NO: 5266 - DNA, 19 bp, Homo sapiens
  siRNA target sequence for HOZFP (NM_152995.3,497-515).
gctatgacatgcctaattt

SEQ ID NO: 5267 - DNA, 19 bp, Homo sapiens
  siRNA target sequence for HOZFP (NM_152995.3,549-567).
ggagctgttcgggatgttt

SEQ ID NO: 5268 - DNA, 19 bp, Homo sapiens
  siRNA target sequence for HOZFP (NM_152995.3,555-573).
gttcgggatgtttctgtat

SEQ ID NO: 5269 - DNA, 19 bp, Homo sapiens
  siRNA target sequence for HOZFP (NM_152995.3,558-576).
cgggatgtttctgtatatt

SEQ ID NO: 5270 - DNA, 19 bp, Homo sapiens
  siRNA target sequence for HOZFP (NM_152995.3,603-621).
ctaaagacagccagtttct

SEQ ID NO: 5271 - DNA, 19 bp, Homo sapiens
  siRNA target sequence for HOZFP (NM_152995.3,613-631).
ccagtttcttgtatcttct

SEQ ID NO: 5272 - DNA, 19 bp, Homo sapiens
  siRNA target sequence for HOZFP (NM_152995.3,667-685).
ctggccttgtccaaaatgt

SEQ ID NO: 5273 - DNA, 19 bp, Homo sapiens
  siRNA target sequence for HOZFP (NM_152995.3,713-731).
cctagtaggtactattgct

SEQ ID NO: 5274 - DNA, 19 bp, Homo sapiens
  siRNA target sequence for HOZFP (NM_152995.3,714-732).
ctagtaggtactattgcta

SEQ ID NO: 5275 - DNA, 19 bp, Homo sapiens
  siRNA target sequence for HOZFP (NM_152995.3,769-787).
gcttgtgcctcattcatgt

SEQ ID NO: 5276 - DNA, 19 bp, Homo sapiens
  siRNA target sequence for HOZFP (NM_152995.3,794-812).
gtatgtgagcgtgaattta

SEQ ID NO: 5277 - DNA, 19 bp, Homo sapiens
  siRNA target sequence for HOZFP (NM_152995.3,818-836).
ccttgtggccataaatgtt

SEQ ID NO: 5278 - DNA, 19 bp, Homo sapiens
  siRNA target sequence for HOZFP (NM_152995.3,822-840).
gtggccataaatgtttact

SEQ ID NO: 5279 - DNA, 19 bp, Homo sapiens
  siRNA target sequence for HOZFP (NM_152995.3,877-895).
gatggtcacaactacttgt

SEQ ID NO: 5280 - DNA, 19 bp, Homo sapiens
  siRNA target sequence for HOZFP (NM_152995.3,883-901).
cacaactacttgttactgt

SEQ ID NO: 5281 - DNA, 19 bp, Homo sapiens
  siRNA target sequence for HOZFP (NM_152995.3,888-906).
ctacttgttactgtaagaa

SEQ ID NO: 5282 - DNA, 19 bp, Homo sapiens
  siRNA target sequence for HOZFP (NM_152995.3,1056-1074).
gtgtctgtggcaaaaaagt

SEQ ID NO: 5283 - DNA, 19 bp, Homo sapiens
  siRNA target sequence for HOZFP (NM_152995.3,1133-1151).
ctgccatgtggtaatcaca

SEQ ID NO: 5284 - DNA, 19 bp, Homo sapiens
  siRNA target sequence for HOZFP (NM_152995.3,1193-1211).
cctcgatctgggaaaaggt

SEQ ID NO: 5285 - DNA, 19 bp, Homo sapiens
  siRNA target sequence for HOZFP (NM_152995.3,1194-1212).
ctcgatctgggaaaaggtt

SEQ ID NO: 5286 - DNA, 19 bp, Homo sapiens
  siRNA target sequence for HOZFP (NM_152995.3,1276-1294).
cagttgtgacaaagtactt

SEQ ID NO: 5287 - DNA, 19 bp, Homo sapiens
  siRNA target sequence for HOZFP (NM_152995.3,1330-1348).
ccgaggtccctgtgaaaca

SEQ ID NO: 5288 - DNA, 19 bp, Homo sapiens
  siRNA target sequence for HOZFP (NM_152995.3,1331-1349).
cgaggtccctgtgaaacat

SEQ ID NO: 5289 - DNA, 19 bp, Homo sapiens
  siRNA target sequence for HOZFP (NM_152995.3,1376-1394).
cgctgtggaaagcatacaa

SEQ ID NO: 5290 - DNA, 19 bp, Homo sapiens
  siRNA target sequence for HOZFP (NM_152995.3,1377-1395).
gctgtggaaagcatacaaa

SEQ ID NO: 5291 - DNA, 19 bp, Homo sapiens
  siRNA target sequence for HOZFP (NM_152995.3,1402-1420).
gccttgtcataaaccttat

SEQ ID NO: 5292 - DNA, 19 bp, Homo sapiens
  siRNA target sequence for HOZFP (NM_152995.3,1415-1433).
ccttatctgtgtgaaacta

SEQ ID NO: 5293 - DNA, 19 bp, Homo sapiens
  siRNA target sequence for HOZFP (NM_152995.3,1416-1434).
cttatctgtgtgaaactaa

SEQ ID NO: 5294 - DNA, 19 bp, Homo sapiens
  siRNA target sequence for HOZFP (NM_152995.3,1425-1443).
gtgaaactaagtgtgttaa

SEQ ID NO: 5295 - DNA, 19 bp, Homo sapiens
  siRNA target sequence for HOZFP (NM_152995.3,1427-1445).
gaaactaagtgtgttaaga

SEQ ID NO: 5296 - DNA, 19 bp, Homo sapiens
  siRNA target sequence for HOZFP (NM_152995.3,1457-1475).
cagaagcatcaatgtagaa

SEQ ID NO: 5297 - DNA, 19 bp, Homo sapiens
  siRNA target sequence for HOZFP (NM_152995.3,1463-1481).
catcaatgtagaagaaagt

SEQ ID NO: 5298 - DNA, 19 bp, Homo sapiens
  siRNA target sequence for HOZFP (NM_152995.3,1480-1498).
gtgttgccctggaaactgt

SEQ ID NO: 5299 - DNA, 19 bp, Homo sapiens
  siRNA target sequence for HOZFP (NM_152995.3,1499-1517).
ccaccttgtgatcaaaact

SEQ ID NO: 5300 - DNA, 19 bp, Homo sapiens
  siRNA target sequence for HOZFP (NM_152995.3,1523-1541).
cggactttaggatgtagaa

SEQ ID NO: 5301 - DNA, 19 bp, Homo sapiens
  siRNA target sequence for HOZFP (NM_152995.3,1690-1708).
cagtcgaccaccaacttgt

SEQ ID NO: 5302 - DNA, 19 bp, Homo sapiens
  siRNA target sequence for HOZFP (NM_152995.3,1697-1715).
ccaccaacttgtcatcata

SEQ ID NO: 5303 - DNA, 19 bp, Homo sapiens
  siRNA target sequence for HOZFP (NM_152995.3,1886-1904).
gagccagcatttattcaga

SEQ ID NO: 5304 - DNA, 19 bp, Homo sapiens
  siRNA target sequence for HOZFP (NM_152995.3,1926-1944).
gtcaagttcctattcctat

SEQ ID NO: 5305 - DNA, 19 bp, Homo sapiens
  siRNA target sequence for HOZFP (NM_152995.3,1931-1949).
gttcctattcctatggaat

SEQ ID NO: 5306 - DNA, 19 bp, Homo sapiens
  siRNA target sequence for HOZFP (NM_152995.3,1935-1953).
ctattcctatggaatgtct

SEQ ID NO: 5307 - DNA, 19 bp, Homo sapiens
  siRNA target sequence for HOZFP (NM_152995.3,1988-2006).
gctgtaggaccctactctt

SEQ ID NO: 5308 - DNA, 19 bp, Homo sapiens
  siRNA target sequence for HOZFP (NM_152995.3,1991-2009).
gtaggaccctactcttgta

SEQ ID NO: 5309 - DNA, 19 bp, Homo sapiens
  siRNA target sequence for HOZFP (NM_152995.3,1994-2012).
ggaccctactcttgtaaaa

SEQ ID NO: 5310 - DNA, 19 bp, Homo sapiens
  siRNA target sequence for HOZFP (NM_152995.3,1999-2017).
ctactcttgtaaaagagtt

SEQ ID NO: 5311 - DNA, 19 bp, Homo sapiens
  siRNA target sequence for HOZFP (NM_152995.3,2037-2055).
gtcagaatcacacatgtat

SEQ ID NO: 5312 - DNA, 19 bp, Homo sapiens
  siRNA target sequence for HOZFP (NM_152995.3,2039-2057).
cagaatcacacatgtatga

SEQ ID NO: 5313 - DNA, 19 bp, Homo sapiens
  siRNA target sequence for HOZFP (NM_152995.3,2127-2145).
gtgatttgtccatgattct

SEQ ID NO: 5314 - DNA, 19 bp, Homo sapiens
  siRNA target sequence for HOZFP (NM_152995.3,2172-2190).
gtactgtgcctgatctttt

SEQ ID NO: 5315 - DNA, 19 bp, Homo sapiens
  siRNA target sequence for HOZFP (NM_152995.3,2209-2227).
ctcttctactcatgttatt

SEQ ID NO: 5316 - DNA, 19 bp, Homo sapiens
  siRNA target sequence for HR (NM_005144.2,1614-1632).
gagcctgctcccttttgga

SEQ ID NO: 5317 - DNA, 19 bp, Homo sapiens
  siRNA target sequence for HR (NM_005144.2,2089-2107).
gcaagggcttttactacaa

SEQ ID NO: 5318 - DNA, 19 bp, Homo sapiens
  siRNA target sequence for HR (NM_005144.2,2158-2176).
ctgggttgtttggcttaaa

SEQ ID NO: 5319 - DNA, 19 bp, Homo sapiens
  siRNA target sequence for HR (NM_005144.2,2160-2178).
gggttgtttggcttaaact

SEQ ID NO: 5320 - DNA, 19 bp, Homo sapiens
  siRNA target sequence for HR (NM_005144.2,2468-2486).
ctacccacccactaaaggt

SEQ ID NO: 5321 - DNA, 19 bp, Homo sapiens
  siRNA target sequence for HR (NM_005144.2,2639-2657).
gcactcggagcagtttgaa

SEQ ID NO: 5322 - DNA, 19 bp, Homo sapiens
  siRNA target sequence for HR (NM_005144.2,2642-2660).
ctcggagcagtttgaatgt

SEQ ID NO: 5323 - DNA, 19 bp, Homo sapiens
  siRNA target sequence for HR (NM_005144.2,2825-2843).
ggtgcgggacacatcgata

SEQ ID NO: 5324 - DNA, 19 bp, Homo sapiens
  siRNA target sequence for HR (NM_005144.2,2922-2940).
ggacttcaggacataccat

SEQ ID NO: 5325 - DNA, 19 bp, Homo sapiens
  siRNA target sequence for HR (NM_005144.2,2963-2981).
ggctcaatgccaaagttgt

SEQ ID NO: 5326 - DNA, 19 bp, Homo sapiens
  siRNA target sequence for HR (NM_005144.2,3769-3787).
cttctaccgcggtcaaact

SEQ ID NO: 5327 - DNA, 19 bp, Homo sapiens
  siRNA target sequence for HR (NM_005144.2,3795-3813).
ggccatgagcgaatacaca

SEQ ID NO: 5328 - DNA, 19 bp, Homo sapiens
  siRNA target sequence for HR (NM_005144.2,3796-3814).
gccatgagcgaatacacat

SEQ ID NO: 5329 - DNA, 19 bp, Homo sapiens
  siRNA target sequence for HR (NM_005144.2,4215-4233).
ctgggcagcacaacattct

SEQ ID NO: 5330 - DNA, 19 bp, Homo sapiens
  siRNA target sequence for HR (NM_005144.2,4369-4387).
gcgccctccatggaaaact

SEQ ID NO: 5331 - DNA, 19 bp, Homo sapiens
  siRNA target sequence for HR (NM_005144.2,5018-5036).
ggtggccgtggggacatta

SEQ ID NO: 5332 - DNA, 19 bp, Homo sapiens
  siRNA target sequence for HSF1 (NM_005526.1,1139-1157).
ccgaccgccctcattgact

SEQ ID NO: 5333 - DNA, 19 bp, Homo sapiens
  siRNA target sequence for HSF1 (NM_005526.1,1314-1332).
gtgaccacttggatgctat

SEQ ID NO: 5334 - DNA, 19 bp, Homo sapiens
  siRNA target sequence for HSF1 (NM_005526.1,1643-1661).
ggagagggctcctacttct

SEQ ID NO: 5335 - DNA, 19 bp, Homo sapiens
  siRNA target sequence for HSF2 (NM_004506.2,150-168).
cccacactaacgagttcat

SEQ ID NO: 5336 - DNA, 19 bp, Homo sapiens
  siRNA target sequence for HSF2 (NM_004506.2,177-195).
gccagaatggccaaagttt

SEQ ID NO: 5337 - DNA, 19 bp, Homo sapiens
  siRNA target sequence for HSF2 (NM_004506.2,202-220).
cttggatgagcaacgattt

SEQ ID NO: 5338 - DNA, 19 bp, Homo sapiens
  siRNA target sequence for HSF2 (NM_004506.2,205-223).
ggatgagcaacgatttgca

SEQ ID NO: 5339 - DNA, 19 bp, Homo sapiens
  siRNA target sequence for HSF2 (NM_004506.2,206-224).
gatgagcaacgatttgcaa

SEQ ID NO: 5340 - DNA, 19 bp, Homo sapiens
  siRNA target sequence for HSF2 (NM_004506.2,253-271).
caataatatggcaagcttt

SEQ ID NO: 5341 - DNA, 19 bp, Homo sapiens
  siRNA target sequence for HSF2 (NM_004506.2,272-290).
gtgaggcaactgaatatgt

SEQ ID NO: 5342 - DNA, 19 bp, Homo sapiens
  siRNA target sequence for HSF2 (NM_004506.2,274-292).
gaggcaactgaatatgtat

SEQ ID NO: 5343 - DNA, 19 bp, Homo sapiens
  siRNA target sequence for HSF2 (NM_004506.2,289-307).
gtatggtttccgtaaagta

SEQ ID NO: 5344 - DNA, 19 bp, Homo sapiens
  siRNA target sequence for HSF2 (NM_004506.2,392-410).
gacttgttggagaacatta

SEQ ID NO: 5345 - DNA, 19 bp, Homo sapiens
  siRNA target sequence for HSF2 (NM_004506.2,414-432).
ggaaggtttcatcttcaaa

SEQ ID NO: 5346 - DNA, 19 bp, Homo sapiens
  siRNA target sequence for HSF2 (NM_004506.2,453-471).
gtcaggaagatttaacaaa

SEQ ID NO: 5347 - DNA, 19 bp, Homo sapiens
  siRNA target sequence for HSF2 (NM_004506.2,565-583).
ggaggtgtcagaattacga

SEQ ID NO: 5348 - DNA, 19 bp, Homo sapiens
  siRNA target sequence for HSF2 (NM_004506.2,593-611).
gcacaacagcaacaagtta

SEQ ID NO: 5349 - DNA, 19 bp, Homo sapiens
  siRNA target sequence for HSF2 (NM_004506.2,614-632).
cgaaagattgtccagttta

SEQ ID NO: 5350 - DNA, 19 bp, Homo sapiens
  siRNA target sequence for HSF2 (NM_004506.2,615-633).
gaaagattgtccagtttat

SEQ ID NO: 5351 - DNA, 19 bp, Homo sapiens
  siRNA target sequence for HSF2 (NM_004506.2,619-637).
gattgtccagtttattgtt

SEQ ID NO: 5352 - DNA, 19 bp, Homo sapiens
  siRNA target sequence for HSF2 (NM_004506.2,635-653).
gttacattggttcaaaata

SEQ ID NO: 5353 - DNA, 19 bp, Homo sapiens
  siRNA target sequence for HSF2 (NM_004506.2,675-693).
gtaaaaggcctctacttct

SEQ ID NO: 5354 - DNA, 19 bp, Homo sapiens
  siRNA target sequence for HSF2 (NM_004506.2,683-701).
cctctacttctaaacacta

SEQ ID NO: 5355 - DNA, 19 bp, Homo sapiens
  siRNA target sequence for HSF2 (NM_004506.2,684-702).
ctctacttctaaacactaa

SEQ ID NO: 5356 - DNA, 19 bp, Homo sapiens
  siRNA target sequence for HSF2 (NM_004506.2,884-902).
gaaactaatgaggatgtta

SEQ ID NO: 5357 - DNA, 19 bp, Homo sapiens
  siRNA target sequence for HSF2 (NM_004506.2,1253-1271).
ctcctggttgatcttttca

SEQ ID NO: 5358 - DNA, 19 bp, Homo sapiens
  siRNA target sequence for HSF2 (NM_004506.2,1256-1274).
ctggttgatcttttcacta

SEQ ID NO: 5359 - DNA, 19 bp, Homo sapiens
  siRNA target sequence for HSF2 (NM_004506.2,1292-1310).
cccacagattacatcaata

SEQ ID NO: 5360 - DNA, 19 bp, Homo sapiens
  siRNA target sequence for HSF2 (NM_004506.2,1293-1311).
ccacagattacatcaataa

SEQ ID NO: 5361 - DNA, 19 bp, Homo sapiens
  siRNA target sequence for HSF2 (NM_004506.2,1294-1312).
cacagattacatcaataat

SEQ ID NO: 5362 - DNA, 19 bp, Homo sapiens
  siRNA target sequence for HSF2 (NM_004506.2,1401-1419).
cagataagcagcttatcca

SEQ ID NO: 5363 - DNA, 19 bp, Homo sapiens
  siRNA target sequence for HSF2 (NM_004506.2,1472-1490).
gttgaacaggcgagtacaa

SEQ ID NO: 5364 - DNA, 19 bp, Homo sapiens
  siRNA target sequence for HSF2 (NM_004506.2,1491-1509).
cagcatcatcagaagtttt

SEQ ID NO: 5365 - DNA, 19 bp, Homo sapiens
  siRNA target sequence for HSFY (NM_033108.1,133-151).
ccccaaagatgaattaact

SEQ ID NO: 5366 - DNA, 19 bp, Homo sapiens
  siRNA target sequence for HSFY (NM_033108.1,216-234).
ggtcaatgattgaagaaca

SEQ ID NO: 5367 - DNA, 19 bp, Homo sapiens
  siRNA target sequence for HSFY (NM_033108.1,701-719).
cctatatctactttattca

SEQ ID NO: 5368 - DNA, 19 bp, Homo sapiens
  siRNA target sequence for HSFY (NM_033108.1,756-774).
ctaacatggagaatcataa

SEQ ID NO: 5369 - DNA, 19 bp, Homo sapiens
  siRNA target sequence for HSFY (NM_033108.1,860-878).
gtcagacagataattgcaa

SEQ ID NO: 5370 - DNA, 19 bp, Homo sapiens
  siRNA target sequence for HSFY (NM_033108.1,862-880).
cagacagataattgcaaat

SEQ ID NO: 5371 - DNA, 19 bp, Homo sapiens
  siRNA target sequence for HSFY (NM_033108.1,868-886).
gataattgcaaattcatct

SEQ ID NO: 5372 - DNA, 19 bp, Homo sapiens
  siRNA target sequence for HSFY (NM_033108.1,1025-1043).
gcaaggggccacattgtga

SEQ ID NO: 5373 - DNA, 19 bp, Homo sapiens
  siRNA target sequence for HSFY (NM_033108.1,1029-1047).
ggggccacattgtgaattt

SEQ ID NO: 5374 - DNA, 19 bp, Homo sapiens
  siRNA target sequence for HSFY (NM_033108.1,1078-1096).
catatctcccttacaaaat

SEQ ID NO: 5375 - DNA, 19 bp, Homo sapiens
  siRNA target sequence for HSFY (NM_033108.1,1159-1177).
caatgaggctccatatcgt

SEQ ID NO: 5376 - DNA, 19 bp, Homo sapiens
  siRNA target sequence for HSFY (NM_033108.1,1213-1231).
gcctacgatcgctgataga

SEQ ID NO: 5377 - DNA, 19 bp, Homo sapiens
  siRNA target sequence for HSFY (NM_033108.1,1214-1232).
cctacgatcgctgatagat

SEQ ID NO: 5378 - DNA, 19 bp, Homo sapiens
  siRNA target sequence for HSFY (NM_152584.1,628-646).
gaaactttccagatcttca

SEQ ID NO: 5379 - DNA, 19 bp, Homo sapiens
  siRNA target sequence for HSFY (NM_152584.1,636-654).
ccagatcttcaacttatga

SEQ ID NO: 5380 - DNA, 19 bp, Homo sapiens
  siRNA target sequence for HSFY (NM_152584.1,637-655).
cagatcttcaacttatgaa

SEQ ID NO: 5381 - DNA, 19 bp, Homo sapiens
  siRNA target sequence for HSFY (NM_152584.1,639-657).
gatcttcaacttatgaaaa

SEQ ID NO: 5382 - DNA, 19 bp, Homo sapiens
  siRNA target sequence for HSFY (NM_152584.1,689-707).
gatgagtcgaattactcat

SEQ ID NO: 5383 - DNA, 19 bp, Homo sapiens
  siRNA target sequence for HSRNAFEV (NM_017521.1,609-627).
cccctgctgatcaacatgt

SEQ ID NO: 5384 - DNA, 19 bp, Homo sapiens
  siRNA target sequence for HSRNAFEV (NM_017521.1,610-628).
ccctgctgatcaacatgta

SEQ ID NO: 5385 - DNA, 19 bp, Homo sapiens
  siRNA target sequence for HSRNAFEV (NM_017521.1,793-811).
gcggtcacggcgagttcaa

SEQ ID NO: 5386 - DNA, 19 bp, Homo sapiens
  siRNA target sequence for HTLF (NM_002158.2,256-274).
ggaatgactccagataaga

SEQ ID NO: 5387 - DNA, 19 bp, Homo sapiens
  siRNA target sequence for HTLF (NM_002158.2,295-313).
gaaaagattgcaggattaa

SEQ ID NO: 5388 - DNA, 19 bp, Homo sapiens
  siRNA target sequence for HTLF (NM_002158.2,307-325).
ggattaagccagatttaca

SEQ ID NO: 5389 - DNA, 19 bp, Homo sapiens
  siRNA target sequence for HTLF (NM_002158.2,308-326).
gattaagccagatttacaa

SEQ ID NO: 5390 - DNA, 19 bp, Homo sapiens
  siRNA target sequence for HTLF (NM_002158.2,400-418).
gatgaactcacaaacttga

SEQ ID NO: 5391 - DNA, 19 bp, Homo sapiens
  siRNA target sequence for HTLF (NM_002158.2,414-432).
cttgaactggcttcatgaa

SEQ ID NO: 5392 - DNA, 19 bp, Homo sapiens
  siRNA target sequence for HTLF (NM_002158.2,434-452).
gcactaatcttctaacaaa

SEQ ID NO: 5393 - DNA, 19 bp, Homo sapiens
  siRNA target sequence for HTLF (NM_002158.2,437-455).
ctaatcttctaacaaactt

SEQ ID NO: 5394 - DNA, 19 bp, Homo sapiens
  siRNA target sequence for HTLF (NM_002158.2,464-482).
gaagtgagggtcttccaat

SEQ ID NO: 5395 - DNA, 19 bp, Homo sapiens
  siRNA target sequence for HTLF (NM_002158.2,467-485).
gtgagggtcttccaattgt

SEQ ID NO: 5396 - DNA, 19 bp, Homo sapiens
  siRNA target sequence for HTLF (NM_002158.2,471-489).
gggtcttccaattgttagt

SEQ ID NO: 5397 - DNA, 19 bp, Homo sapiens
  siRNA target sequence for HTLF (NM_002158.2,479-497).
caattgttagtccattgta

SEQ ID NO: 5398 - DNA, 19 bp, Homo sapiens
  siRNA target sequence for HTLF (NM_002158.2,484-502).
gttagtccattgtatgaca

SEQ ID NO: 5399 - DNA, 19 bp, Homo sapiens
  siRNA target sequence for HTLF (NM_002158.2,576-594).
gcccccatactcctttagt

SEQ ID NO: 5400 - DNA, 19 bp, Homo sapiens
  siRNA target sequence for HTLF (NM_002158.2,578-596).
ccccatactcctttagtct

SEQ ID NO: 5401 - DNA, 19 bp, Homo sapiens
  siRNA target sequence for HTLF (NM_002158.2,579-597).
cccatactcctttagtctt

SEQ ID NO: 5402 - DNA, 19 bp, Homo sapiens
  siRNA target sequence for HTLF (NM_002158.2,618-636).
gcactctccaaataaatgt

SEQ ID NO: 5403 - DNA, 19 bp, Homo sapiens
  siRNA target sequence for HTLF (NM_002158.2,639-657).
gcctgtcaaagaaatttat

SEQ ID NO: 5404 - DNA, 19 bp, Homo sapiens
  siRNA target sequence for HTLF (NM_002158.2,660-678).
ctggattctggaccatttt

SEQ ID NO: 5405 - DNA, 19 bp, Homo sapiens
  siRNA target sequence for HTLF (NM_002158.2,774-792).
caaggttaatggaaaaggt

SEQ ID NO: 5406 - DNA, 19 bp, Homo sapiens
  siRNA target sequence for HTLF (NM_002158.2,801-819).
gtgtgttgatccggaatat

SEQ ID NO: 5407 - DNA, 19 bp, Homo sapiens
  siRNA target sequence for HTLF (NM_002158.2,986-1004).
cttctatagaacaaggaat

SEQ ID NO: 5408 - DNA, 19 bp, Homo sapiens
  siRNA target sequence for HTLF (NM_002158.2,1055-1073).
ggagttacggcaatgcatt

SEQ ID NO: 5409 - DNA, 19 bp, Homo sapiens
  siRNA target sequence for HTLF (NM_002158.2,1056-1074).
gagttacggcaatgcattt

SEQ ID NO: 5410 - DNA, 19 bp, Homo sapiens
  siRNA target sequence for HTLF (NM_002158.2,1058-1076).
gttacggcaatgcatttca

SEQ ID NO: 5411 - DNA, 19 bp, Homo sapiens
  siRNA target sequence for HTLF (NM_002158.2,1082-1100).
ccagtgctgtacgattaca

SEQ ID NO: 5412 - DNA, 19 bp, Homo sapiens
  siRNA target sequence for HTLF (NM_002158.2,1083-1101).
cagtgctgtacgattacaa

SEQ ID NO: 5413 - DNA, 19 bp, Homo sapiens
  siRNA target sequence for HTLF (NM_002158.2,1093-1111).
cgattacaagagagtgatt

SEQ ID NO: 5414 - DNA, 19 bp, Homo sapiens
  siRNA target sequence for HTLF (NM_002158.2,1118-1136).
ccaccagcattgatccaaa

SEQ ID NO: 5415 - DNA, 19 bp, Homo sapiens
  siRNA target sequence for HTLF (NM_002158.2,1119-1137).
caccagcattgatccaaaa

SEQ ID NO: 5416 - DNA, 19 bp, Homo sapiens
  siRNA target sequence for HTLF (NM_002158.2,1121-1139).
ccagcattgatccaaaaga

SEQ ID NO: 5417 - DNA, 19 bp, Homo sapiens
  siRNA target sequence for HTLF (NM_002158.2,1211-1229).
cttctgtggatgaggtata

SEQ ID NO: 5418 - DNA, 19 bp, Homo sapiens
  siRNA target sequence for HTLF (NM_002158.2,1216-1234).
gtggatgaggtatatgaat

SEQ ID NO: 5419 - DNA, 19 bp, Homo sapiens
  siRNA target sequence for HTLF (NM_002158.2,1348-1366).
cagccttgtgcaaaaatct

SEQ ID NO: 5420 - DNA, 19 bp, Homo sapiens
  siRNA target sequence for HTLF (NM_002158.2,1350-1368).
gccttgtgcaaaaatctct

SEQ ID NO: 5421 - DNA, 19 bp, Homo sapiens
  siRNA target sequence for ILF1 (NM_004514.2,379-397).
ggccactcgagcttcatct

SEQ ID NO: 5422 - DNA, 19 bp, Homo sapiens
  siRNA target sequence for ILF1 (NM_004514.2,403-421).
cgccacctcgagatcttca

SEQ ID NO: 5423 - DNA, 19 bp, Homo sapiens
  siRNA target sequence for ILF1 (NM_004514.2,521-539).
gcaagaacggggtattcgt

SEQ ID NO: 5424 - DNA, 19 bp, Homo sapiens
  siRNA target sequence for ILF1 (NM_004514.2,602-620).
ggttcccgagcacaaacat

SEQ ID NO: 5425 - DNA, 19 bp, Homo sapiens
  siRNA target sequence for ILF1 (NM_004514.2,607-625).
ccgagcacaaacatcaaga

SEQ ID NO: 5426 - DNA, 19 bp, Homo sapiens
  siRNA target sequence for ILF1 (NM_004514.2,608-626).
cgagcacaaacatcaagat

SEQ ID NO: 5427 - DNA, 19 bp, Homo sapiens
  siRNA target sequence for ILF1 (NM_004514.2,609-627).
gagcacaaacatcaagata

SEQ ID NO: 5428 - DNA, 19 bp, Homo sapiens
  siRNA target sequence for ILF1 (NM_004514.2,614-632).
caaacatcaagataacgtt

SEQ ID NO: 5429 - DNA, 19 bp, Homo sapiens
  siRNA target sequence for ILF1 (NM_004514.2,710-728).
cgcccctgaccatcaacat

SEQ ID NO: 5430 - DNA, 19 bp, Homo sapiens
  siRNA target sequence for ILF1 (NM_004514.2,711-729).
gcccctgaccatcaacatt

SEQ ID NO: 5431 - DNA, 19 bp, Homo sapiens
  siRNA target sequence for ILF1 (NM_004514.2,857-875).
catctgacctcaatttaat

SEQ ID NO: 5432 - DNA, 19 bp, Homo sapiens
  siRNA target sequence for ILF1 (NM_004514.2,986-1004).
cgatggctcccgacaaaca

SEQ ID NO: 5433 - DNA, 19 bp, Homo sapiens
  siRNA target sequence for ILF1 (NM_004514.2,1008-1026).
caccctgaacgggatttat

SEQ ID NO: 5434 - DNA, 19 bp, Homo sapiens
  siRNA target sequence for ILF1 (NM_004514.2,1011-1029).
cctgaacgggatttataca

SEQ ID NO: 5435 - DNA, 19 bp, Homo sapiens
  siRNA target sequence for ILF1 (NM_004514.2,1099-1117).
ctctctctgaatcgttatt

SEQ ID NO: 5436 - DNA, 19 bp, Homo sapiens
  siRNA target sequence for ILF1 (NM_004514.2,1177-1195).
ccagcctctgaaagcaaat

SEQ ID NO: 5437 - DNA, 19 bp, Homo sapiens
  siRNA target sequence for ILF1 (NM_004514.2,1231-1249).
ggcgtgccctgctttagaa

SEQ ID NO: 5438 - DNA, 19 bp, Homo sapiens
  siRNA target sequence for ILF1 (NM_004514.2,1461-1479).
gtccagtcagccagtctta

SEQ ID NO: 5439 - DNA, 19 bp, Homo sapiens
  siRNA target sequence for ILF1 (NM_004514.2,1463-1481).
ccagtcagccagtcttaat

SEQ ID NO: 5440 - DNA, 19 bp, Homo sapiens
  siRNA target sequence for ILF1 (NM_004514.2,1791-1809).
cactgccagccggatcatt

SEQ ID NO: 5441 - DNA, 19 bp, Homo sapiens
  siRNA target sequence for ILF1 (NM_004514.2,1833-1851).
ccagacggtgaccatagta

SEQ ID NO: 5442 - DNA, 19 bp, Homo sapiens
  siRNA target sequence for ILF1 (NM_004514.2,1836-1854).
gacggtgaccatagtacaa

SEQ ID NO: 5443 - DNA, 19 bp, Homo sapiens
  siRNA target sequence for ILF1 (NM_004514.2,1838-1856).
cggtgaccatagtacaaca

SEQ ID NO: 5444 - DNA, 19 bp, Homo sapiens
  siRNA target sequence for ILF1 (NM_004514.2,1868-1886).
gtcaacaccagctaccaat

SEQ ID NO: 5445 - DNA, 19 bp, Homo sapiens
  siRNA target sequence for ILF1 (NM_004514.2,1870-1888).
caacaccagctaccaataa

SEQ ID NO: 5446 - DNA, 19 bp, Homo sapiens
  siRNA target sequence for ILF1 (NM_004514.2,1938-1956).
ccacggccaggtgaacaat

SEQ ID NO: 5447 - DNA, 19 bp, Homo sapiens
  siRNA target sequence for IPF1 (NM_000209.1,194-212).
cccctgcgtgcctgtacat

SEQ ID NO: 5448 - DNA, 19 bp, Homo sapiens
  siRNA target sequence for IPF1 (NM_000209.1,637-655).
gctgtcatgttgaacttga

SEQ ID NO: 5449 - DNA, 19 bp, Homo sapiens
  siRNA target sequence for IRF1 (NM_002198.1,229-247).
ggctagagatgcagattaa

SEQ ID NO: 5450 - DNA, 19 bp, Homo sapiens
  siRNA target sequence for IRF1 (NM_002198.1,230-248).
gctagagatgcagattaat

SEQ ID NO: 5451 - DNA, 19 bp, Homo sapiens
  siRNA target sequence for IRF1 (NM_002198.1,231-249).
ctagagatgcagattaatt

SEQ ID NO: 5452 - DNA, 19 bp, Homo sapiens
  siRNA target sequence for IRF1 (NM_002198.1,240-258).
cagattaattccaaccaaa

SEQ ID NO: 5453 - DNA, 19 bp, Homo sapiens
  siRNA target sequence for IRF1 (NM_002198.1,264-282).
gggctcatctggattaata

SEQ ID NO: 5454 - DNA, 19 bp, Homo sapiens
  siRNA target sequence for IRF1 (NM_002198.1,265-283).
ggctcatctggattaataa

SEQ ID NO: 5455 - DNA, 19 bp, Homo sapiens
  siRNA target sequence for IRF1 (NM_002198.1,811-829).
gcaccagtgatctgtacaa

SEQ ID NO: 5456 - DNA, 19 bp, Homo sapiens
  siRNA target sequence for IRF1 (NM_002198.1,854-872).
cacctctgaagctacaaca

SEQ ID NO: 5457 - DNA, 19 bp, Homo sapiens
  siRNA target sequence for IRF1 (NM_002198.1,928-946).
cggagtggcagccaacaaa

SEQ ID NO: 5458 - DNA, 19 bp, Homo sapiens
  siRNA target sequence for IRF1 (NM_002198.1,955-973).
ggaaggggtacctactcaa

SEQ ID NO: 5459 - DNA, 19 bp, Homo sapiens
  siRNA target sequence for IRF1 (NM_002198.1,986-1004).
ccagcccacctctgtctat

SEQ ID NO: 5460 - DNA, 19 bp, Homo sapiens
  siRNA target sequence for IRF2 (NM_002199.2,291-309).
gatgcatgcggctagacat

SEQ ID NO: 5461 - DNA, 19 bp, Homo sapiens
  siRNA target sequence for IRF2 (NM_002199.2,370-388).
catcaaccaggagtagata

SEQ ID NO: 5462 - DNA, 19 bp, Homo sapiens
  siRNA target sequence for IRF2 (NM_002199.2,422-440).
gatgcgccatgaattcctt

SEQ ID NO: 5463 - DNA, 19 bp, Homo sapiens
  siRNA target sequence for IRF2 (NM_002199.2,521-539).
cagaacggccttctaagaa

SEQ ID NO: 5464 - DNA, 19 bp, Homo sapiens
  siRNA target sequence for IRF2 (NM_002199.2,526-544).
cggccttctaagaaaggaa

SEQ ID NO: 5465 - DNA, 19 bp, Homo sapiens
  siRNA target sequence for IRF2 (NM_002199.2,527-545).
ggccttctaagaaaggaaa

SEQ ID NO: 5466 - DNA, 19 bp, Homo sapiens
  siRNA target sequence for IRF2 (NM_002199.2,652-670).
gcggtcctgacttcaacta

SEQ ID NO: 5467 - DNA, 19 bp, Homo sapiens
  siRNA target sequence for IRF2 (NM_002199.2,653-671).
cggtcctgacttcaactat

SEQ ID NO: 5468 - DNA, 19 bp, Homo sapiens
  siRNA target sequence for IRF2 (NM_002199.2,720-738).
ccatctggacagcaacatt

SEQ ID NO: 5469 - DNA, 19 bp, Homo sapiens
  siRNA target sequence for IRF2 (NM_002199.2,756-774).
caccaatccgccagacatt

SEQ ID NO: 5470 - DNA, 19 bp, Homo sapiens
  siRNA target sequence for IRF2 (NM_002199.2,849-867).
ctcccccgtgtcttcctat

SEQ ID NO: 5471 - DNA, 19 bp, Homo sapiens
  siRNA target sequence for IRF2 (NM_002199.2,890-908).
gtgtgcccagcgatgaaga

SEQ ID NO: 5472 - DNA, 19 bp, Homo sapiens
  siRNA target sequence for IRF2 (NM_002199.2,928-946).
cactggcggaagaggaata

SEQ ID NO: 5473 - DNA, 19 bp, Homo sapiens
  siRNA target sequence for IRF2 (NM_002199.2,1064-1082).
gcaatccggtgccttacaa

SEQ ID NO: 5474 - DNA, 19 bp, Homo sapiens
  siRNA target sequence for IRF2 (NM_002199.2,1173-1191).
cagcgtcatcaagaaaaca

SEQ ID NO: 5475 - DNA, 19 bp, Homo sapiens
  siRNA target sequence for IRF3 (NM_001571.1,220-238).
cgaggccactggtgcatat

SEQ ID NO: 5476 - DNA, 19 bp, Homo sapiens
  siRNA target sequence for IRF3 (NM_001571.1,343-361).
ccctcacgacccacataaa

SEQ ID NO: 5477 - DNA, 19 bp, Homo sapiens
  siRNA target sequence for IRF3 (NM_001571.1,344-362).
cctcacgacccacataaaa

SEQ ID NO: 5478 - DNA, 19 bp, Homo sapiens
  siRNA target sequence for IRF3 (NM_001571.1,347-365).
cacgacccacataaaatct

SEQ ID NO: 5479 - DNA, 19 bp, Homo sapiens
  siRNA target sequence for IRF3 (NM_001571.1,431-449).
ggaggcagtacttctgata

SEQ ID NO: 5480 - DNA, 19 bp, Homo sapiens
  siRNA target sequence for IRF3 (NM_001571.1,1017-1035).
ccttcattgtagatctgat

SEQ ID NO: 5481 - DNA, 19 bp, Homo sapiens
  siRNA target sequence for IRF3 (NM_001571.1,1018-1036).
cttcattgtagatctgatt

SEQ ID NO: 5482 - DNA, 19 bp, Homo sapiens
  siRNA target sequence for IRF4 (NM_002460.1,394-412).
ctgcggtgcgctttgaaca

SEQ ID NO: 5483 - DNA, 19 bp, Homo sapiens
  siRNA target sequence for IRF4 (NM_002460.1,461-479).
cagacccgtacaaagtgta

SEQ ID NO: 5484 - DNA, 19 bp, Homo sapiens
  siRNA target sequence for IRF4 (NM_002460.1,471-489).
caaagtgtacaggattgtt

SEQ ID NO: 5485 - DNA, 19 bp, Homo sapiens
  siRNA target sequence for IRF4 (NM_002460.1,593-611).
cccagcaggttcacaacta

SEQ ID NO: 5486 - DNA, 19 bp, Homo sapiens
  siRNA target sequence for IRF4 (NM_002460.1,595-613).
cagcaggttcacaactaca

SEQ ID NO: 5487 - DNA, 19 bp, Homo sapiens
  siRNA target sequence for IRF4 (NM_002460.1,720-738).
gcaaggcccagcttgtgaa

SEQ ID NO: 5488 - DNA, 19 bp, Homo sapiens
  siRNA target sequence for IRF4 (NM_002460.1,748-766).
caggtgacaggaacctttt

SEQ ID NO: 5489 - DNA, 19 bp, Homo sapiens
  siRNA target sequence for IRF4 (NM_002460.1,750-768).
ggtgacaggaaccttttat

SEQ ID NO: 5490 - DNA, 19 bp, Homo sapiens
  siRNA target sequence for IRF4 (NM_002460.1,753-771).
gacaggaaccttttatgct

SEQ ID NO: 5491 - DNA, 19 bp, Homo sapiens
  siRNA target sequence for IRF4 (NM_002460.1,933-951).
ctcccatggacatacgtat

SEQ ID NO: 5492 - DNA, 19 bp, Homo sapiens
  siRNA target sequence for IRF4 (NM_002460.1,1071-1089).
cgggctctatgcgaaaaga

SEQ ID NO: 5493 - DNA, 19 bp, Homo sapiens
  siRNA target sequence for IRF4 (NM_002460.1,1327-1345).
ctgctagccagacaactat

SEQ ID NO: 5494 - DNA, 19 bp, Homo sapiens
  siRNA target sequence for IRF4 (NM_002460.1,1380-1398).
gaggggctacgatttacca

SEQ ID NO: 5495 - DNA, 19 bp, Homo sapiens
  siRNA target sequence for IRF4 (NM_002460.1,1417-1435).
gaagattaccacagatcta

SEQ ID NO: 5496 - DNA, 19 bp, Homo sapiens
  siRNA target sequence for IRF4 (NM_002460.1,1437-1455).
ccgccattcctctattcaa

SEQ ID NO: 5497 - DNA, 19 bp, Homo sapiens
  siRNA target sequence for IRF4 (NM_002460.1,1439-1457).
gccattcctctattcaaga

SEQ ID NO: 5498 - DNA, 19 bp, Homo sapiens
  siRNA target sequence for IRF4 (NM_002460.1,1440-1458).
ccattcctctattcaagaa

SEQ ID NO: 5499 - DNA, 19 bp, Homo sapiens
  siRNA target sequence for IRF4 (NM_002460.1,1441-1459).
cattcctctattcaagaat

SEQ ID NO: 5500 - DNA, 19 bp, Homo sapiens
  siRNA target sequence for IRF5 (NM_002200.3,206-224).
cagtacccagggcttcaat

SEQ ID NO: 5501 - DNA, 19 bp, Homo sapiens
  siRNA target sequence for IRF5 (NM_002200.3,285-303).
ccagccaggacggagataa

SEQ ID NO: 5502 - DNA, 19 bp, Homo sapiens
  siRNA target sequence for IRF5 (NM_002200.3,414-432).
gggacttccgcctcatcta

SEQ ID NO: 5503 - DNA, 19 bp, Homo sapiens
  siRNA target sequence for IRF5 (NM_002200.3,453-471).
cacctcagccctacaagat

SEQ ID NO: 5504 - DNA, 19 bp, Homo sapiens
  siRNA target sequence for IRF5 (NM_002200.3,622-640).
ccacatgacaccctattct

SEQ ID NO: 5505 - DNA, 19 bp, Homo sapiens
  siRNA target sequence for IRF5 (NM_002200.3,1232-1250).
gtcaagaccaagcttttca

SEQ ID NO: 5506 - DNA, 19 bp, Homo sapiens
  siRNA target sequence for IRF5 (NM_002200.3,1271-1289).
gagctcatcctgttccaaa

SEQ ID NO: 5507 - DNA, 19 bp, Homo sapiens
  siRNA target sequence for IRF5 (NM_002200.3,1308-1326).
caccacccttcgagatctt

SEQ ID NO: 5508 - DNA, 19 bp, Homo sapiens
  siRNA target sequence for IRF5 (NM_002200.3,1443-1461).
cttggtcagctgatagtat

SEQ ID NO: 5509 - DNA, 19 bp, Homo sapiens
  siRNA target sequence for IRF6 (NM_006147.2,346-364).
ggctacacagggactctaa

SEQ ID NO: 5510 - DNA, 19 bp, Homo sapiens
  siRNA target sequence for IRF6 (NM_006147.2,395-413).
ccggcatagccctcaacaa

SEQ ID NO: 5511 - DNA, 19 bp, Homo sapiens
  siRNA target sequence for IRF6 (NM_006147.2,398-416).
gcatagccctcaacaagaa

SEQ ID NO: 5512 - DNA, 19 bp, Homo sapiens
  siRNA target sequence for IRF6 (NM_006147.2,535-553).
gagaattcaacctgatgta

SEQ ID NO: 5513 - DNA, 19 bp, Homo sapiens
  siRNA target sequence for IRF6 (NM_006147.2,618-636).
ccccagggctcgatcatta

SEQ ID NO: 5514 - DNA, 19 bp, Homo sapiens
  siRNA target sequence for IRF6 (NM_006147.2,752-770).
ccccttcctgaacatcaat

SEQ ID NO: 5515 - DNA, 19 bp, Homo sapiens
  siRNA target sequence for IRF6 (NM_006147.2,832-850).
cagtgtggcccaaaactga

SEQ ID NO: 5516 - DNA, 19 bp, Homo sapiens
  siRNA target sequence for IRF6 (NM_006147.2,917-935).
cagctctctcccaatgact

SEQ ID NO: 5517 - DNA, 19 bp, Homo sapiens
  siRNA target sequence for IRF6 (NM_006147.2,1004-1022).
gggctgccgactcttctat

SEQ ID NO: 5518 - DNA, 19 bp, Homo sapiens
  siRNA target sequence for IRF6 (NM_006147.2,1072-1090).
gcctggagcaggtcaaatt

SEQ ID NO: 5519 - DNA, 19 bp, Homo sapiens
  siRNA target sequence for IRF6 (NM_006147.2,1181-1199).
cagcggtcatgccatttat

SEQ ID NO: 5520 - DNA, 19 bp, Homo sapiens
  siRNA target sequence for IRF6 (NM_006147.2,1286-1304).
gaaggtcaagctattttgt

SEQ ID NO: 5521 - DNA, 19 bp, Homo sapiens
  siRNA target sequence for IRF6 (NM_006147.2,1362-1380).
ccaccgtttgagatctact

SEQ ID NO: 5522 - DNA, 19 bp, Homo sapiens
  siRNA target sequence for IRF6 (NM_006147.2,1363-1381).
caccgtttgagatctactt

SEQ ID NO: 5523 - DNA, 19 bp, Homo sapiens
  siRNA target sequence for IRF6 (NM_006147.2,1365-1383).
ccgtttgagatctacttat

SEQ ID NO: 5524 - DNA, 19 bp, Homo sapiens
  siRNA target sequence for IRF6 (NM_006147.2,1452-1470).
gtagtggctcggatgatct

SEQ ID NO: 5525 - DNA, 19 bp, Homo sapiens
  siRNA target sequence for IRF6 (NM_006147.2,1463-1481).
gatgatctacgagatgttt

SEQ ID NO: 5526 - DNA, 19 bp, Homo sapiens
  siRNA target sequence for IRF6 (NM_006147.2,1466-1484).
gatctacgagatgttttct

SEQ ID NO: 5527 - DNA, 19 bp, Homo sapiens
  siRNA target sequence for IRF6 (NM_006147.2,1493-1511).
cacacgatcctttgatagt

SEQ ID NO: 5528 - DNA, 19 bp, Homo sapiens
  siRNA target sequence for IRF6 (NM_006147.2,1518-1536).
gtccgcctgcagatctcaa

SEQ ID NO: 5529 - DNA, 19 bp, Homo sapiens
  siRNA target sequence for IRF6 (NM_006147.2,1540-1558).
cagacatcaaggataacat

SEQ ID NO: 5530 - DNA, 19 bp, Homo sapiens
  siRNA target sequence for IRF7 (NM_001572.2,1214-1232).
ccgagctgcacgttcctat

SEQ ID NO: 5531 - DNA, 19 bp, Homo sapiens
  siRNA target sequence for IRF7 (NM_001572.2,1215-1233).
cgagctgcacgttcctata

SEQ ID NO: 5532 - DNA, 19 bp, Homo sapiens
  siRNA target sequence for IRF7 (NM_001572.2,1562-1580).
ggctccccacgctatacca

SEQ ID NO: 5533 - DNA, 19 bp, Homo sapiens
  siRNA target sequence for IRF7 (NM_001572.2,1563-1581).
gctccccacgctataccat

SEQ ID NO: 5534 - DNA, 19 bp, Homo sapiens
  siRNA target sequence for IRF7 (NM_001572.2,1763-1781).
gacatcgagtgcttcctta

SEQ ID NO: 5535 - DNA, 19 bp, Homo sapiens
  siRNA target sequence for IRX1 (NM_024337.1,832-850).
cactgaatccacagtatga

SEQ ID NO: 5536 - DNA, 19 bp, Homo sapiens
  siRNA target sequence for IRX1 (NM_024337.1,889-907).
cacaaccaggagcctatta

SEQ ID NO: 5537 - DNA, 19 bp, Homo sapiens
  siRNA target sequence for IRX1 (NM_024337.1,1607-1625).
gacagccagcgctgttgaa

SEQ ID NO: 5538 - DNA, 19 bp, Homo sapiens
  siRNA target sequence for IRX3 (NM_024336.1,427-445).
cccagctgggataccaata

SEQ ID NO: 5539 - DNA, 19 bp, Homo sapiens
  siRNA target sequence for IRX3 (NM_024336.1,429-447).
cagctgggataccaataca

SEQ ID NO: 5540 - DNA, 19 bp, Homo sapiens
  siRNA target sequence for IRX3 (NM_024336.1,1175-1193).
gatcgatttggagaactta

SEQ ID NO: 5541 - DNA, 19 bp, Homo sapiens
  siRNA target sequence for IRX3 (NM_024336.1,1446-1464).
ctgcagaagcccaagatct

SEQ ID NO: 5542 - DNA, 19 bp, Homo sapiens
  siRNA target sequence for IRX4 (NM_016358.1,124-142).
cctacccgcagtttggata

SEQ ID NO: 5543 - DNA, 19 bp, Homo sapiens
  siRNA target sequence for IRX4 (NM_016358.1,516-534).
ccctatgacaggtatggaa

SEQ ID NO: 5544 - DNA, 19 bp, Homo sapiens
  siRNA target sequence for IRX4 (NM_016358.1,1411-1429).
cggtaaccagtctcagaaa

SEQ ID NO: 5545 - DNA, 19 bp, Homo sapiens
  siRNA target sequence for IRX5 (NM_005853.2,915-933).
cctcagcgactcggatttt

SEQ ID NO: 5546 - DNA, 19 bp, Homo sapiens
  siRNA target sequence for IRX5 (NM_005853.2,916-934).
ctcagcgactcggatttta

SEQ ID NO: 5547 - DNA, 19 bp, Homo sapiens
  siRNA target sequence for IRX5 (NM_005853.2,920-938).
gcgactcggattttaagga

SEQ ID NO: 5548 - DNA, 19 bp, Homo sapiens
  siRNA target sequence for IRX5 (NM_005853.2,1162-1180).
ctcgccaagcccaaactgt

SEQ ID NO: 5549 - DNA, 19 bp, Homo sapiens
  siRNA target sequence for IRX5 (NM_005853.2,1338-1356).
ggcgcagtgtccttttcca

SEQ ID NO: 5550 - DNA, 19 bp, Homo sapiens
  siRNA target sequence for IRX5 (NM_005853.2,1475-1493).
ccggtccggggtctcattt

SEQ ID NO: 5551 - DNA, 19 bp, Homo sapiens
  siRNA target sequence for IRX5 (NM_005853.2,1478-1496).
gtccggggtctcatttcaa

SEQ ID NO: 5552 - DNA, 19 bp, Homo sapiens
  siRNA target sequence for IRX5 (NM_005853.2,1483-1501).
gggtctcatttcaatggat

SEQ ID NO: 5553 - DNA, 19 bp, Homo sapiens
  siRNA target sequence for IRX5 (NM_005853.2,1484-1502).
ggtctcatttcaatggatt

SEQ ID NO: 5554 - DNA, 19 bp, Homo sapiens
  siRNA target sequence for IRX5 (NM_005853.2,1485-1503).
gtctcatttcaatggatta

SEQ ID NO: 5555 - DNA, 19 bp, Homo sapiens
  siRNA target sequence for IRX5 (NM_005853.2,1526-1544).
cggacgctttggctaaaga

SEQ ID NO: 5556 - DNA, 19 bp, Homo sapiens
  siRNA target sequence for IRX5 (NM_005853.2,1538-1556).
ctaaagacccgaaaatgtt

SEQ ID NO: 5557 - DNA, 19 bp, Homo sapiens
  siRNA target sequence for IRX5 (NM_005853.2,1584-1602).
caaagactctccctatgaa

SEQ ID NO: 5558 - DNA, 19 bp, Homo sapiens
  siRNA target sequence for IRX5 (NM_005853.2,1588-1606).
gactctccctatgaattga

SEQ ID NO: 5559 - DNA, 19 bp, Homo sapiens
  siRNA target sequence for ISGF3G (NM_006084.3,51-69).
cacgctgcacccgaaaact

SEQ ID NO: 5560 - DNA, 19 bp, Homo sapiens
  siRNA target sequence for ISGF3G (NM_006084.3,509-527).
ctccaggactccctcaata

SEQ ID NO: 5561 - DNA, 19 bp, Homo sapiens
  siRNA target sequence for ISGF3G (NM_006084.3,549-567).
ggggagcagtccattcaga

SEQ ID NO: 5562 - DNA, 19 bp, Homo sapiens
  siRNA target sequence for ISGF3G (NM_006084.3,1108-1126).
cagccatactccacagaat

SEQ ID NO: 5563 - DNA, 19 bp, Homo sapiens
  siRNA target sequence for ISGF3G (NM_006084.3,1112-1130).
catactccacagaatctta

SEQ ID NO: 5564 - DNA, 19 bp, Homo sapiens
  siRNA target sequence for ISL1 (NM_002202.1,274-292).
gtctgatttccctatgtgt

SEQ ID NO: 5565 - DNA, 19 bp, Homo sapiens
  siRNA target sequence for ISL1 (NM_002202.1,291-309).
gttggttgcggcaatcaga

SEQ ID NO: 5566 - DNA, 19 bp, Homo sapiens
  siRNA target sequence for ISL1 (NM_002202.1,295-313).
gttgcggcaatcagattca

SEQ ID NO: 5567 - DNA, 19 bp, Homo sapiens
  siRNA target sequence for ISL1 (NM_002202.1,306-324).
cagattcacgatcagtata

SEQ ID NO: 5568 - DNA, 19 bp, Homo sapiens
  siRNA target sequence for ISL1 (NM_002202.1,308-326).
gattcacgatcagtatatt

SEQ ID NO: 5569 - DNA, 19 bp, Homo sapiens
  siRNA target sequence for ISL1 (NM_002202.1,312-330).
cacgatcagtatattctga

SEQ ID NO: 5570 - DNA, 19 bp, Homo sapiens
  siRNA target sequence for ISL1 (NM_002202.1,352-370).
ggcatgcggcatgtttgaa

SEQ ID NO: 5571 - DNA, 19 bp, Homo sapiens
  siRNA target sequence for ISL1 (NM_002202.1,353-371).
gcatgcggcatgtttgaaa

SEQ ID NO: 5572 - DNA, 19 bp, Homo sapiens
  siRNA target sequence for ISL1 (NM_002202.1,368-386).
gaaatgtgcggagtgtaat

SEQ ID NO: 5573 - DNA, 19 bp, Homo sapiens
  siRNA target sequence for ISL1 (NM_002202.1,373-391).
gtgcggagtgtaatcagta

SEQ ID NO: 5574 - DNA, 19 bp, Homo sapiens
  siRNA target sequence for ISL1 (NM_002202.1,375-393).
gcggagtgtaatcagtatt

SEQ ID NO: 5575 - DNA, 19 bp, Homo sapiens
  siRNA target sequence for ISL1 (NM_002202.1,398-416).
cgagagctgtacatgcttt

SEQ ID NO: 5576 - DNA, 19 bp, Homo sapiens
  siRNA target sequence for ISL1 (NM_002202.1,401-419).
gagctgtacatgctttgtt

SEQ ID NO: 5577 - DNA, 19 bp, Homo sapiens
  siRNA target sequence for ISL1 (NM_002202.1,417-435).
gttagggatgggaaaacct

SEQ ID NO: 5578 - DNA, 19 bp, Homo sapiens
  siRNA target sequence for ISL1 (NM_002202.1,433-451).
cctactgtaaaagagatta

SEQ ID NO: 5579 - DNA, 19 bp, Homo sapiens
  siRNA target sequence for ISL1 (NM_002202.1,523-541).
cccgctccaaggtgtatca

SEQ ID NO: 5580 - DNA, 19 bp, Homo sapiens
  siRNA target sequence for ISL1 (NM_002202.1,525-543).
cgctccaaggtgtatcaca

SEQ ID NO: 5581 - DNA, 19 bp, Homo sapiens
  siRNA target sequence for ISL1 (NM_002202.1,526-544).
gctccaaggtgtatcacat

SEQ ID NO: 5582 - DNA, 19 bp, Homo sapiens
  siRNA target sequence for ISL1 (NM_002202.1,853-871).
ggccagatgcgctcatgaa

SEQ ID NO: 5583 - DNA, 19 bp, Homo sapiens
  siRNA target sequence for ISL1 (NM_002202.1,916-934).
gggtctggtttcaaaacaa

SEQ ID NO: 5584 - DNA, 19 bp, Homo sapiens
  siRNA target sequence for ISL1 (NM_002202.1,1100-1118).
ccagccaccttggaaagta

SEQ ID NO: 5585 - DNA, 19 bp, Homo sapiens
  siRNA target sequence for ISL1 (NM_002202.1,1130-1148).
cgccttgcagagtgacata

SEQ ID NO: 5586 - DNA, 19 bp, Homo sapiens
  siRNA target sequence for ISL1 (NM_002202.1,1188-1206).
ggaggaccgggctctaatt

SEQ ID NO: 5587 - DNA, 19 bp, Homo sapiens
  siRNA target sequence for ISL1 (NM_002202.1,1191-1209).
ggaccgggctctaattcca

SEQ ID NO: 5588 - DNA, 19 bp, Homo sapiens
  siRNA target sequence for ISL1 (NM_002202.1,1213-1231).
gcagtgaagtagcatcaat

SEQ ID NO: 5589 - DNA, 19 bp, Homo sapiens
  siRNA target sequence for ISL1 (NM_002202.1,1262-1280).
catggtagccagtcctatt

SEQ ID NO: 5590 - DNA, 19 bp, Homo sapiens
  siRNA target sequence for ISL2 (NM_145805.1,111-129).
gggtgctatgggtgatcat

SEQ ID NO: 5591 - DNA, 19 bp, Homo sapiens
  siRNA target sequence for ISL2 (NM_145805.1,112-130).
ggtgctatgggtgatcatt

SEQ ID NO: 5592 - DNA, 19 bp, Homo sapiens
  siRNA target sequence for ISL2 (NM_145805.1,116-134).
ctatgggtgatcattccaa

SEQ ID NO: 5593 - DNA, 19 bp, Homo sapiens
  siRNA target sequence for ISL2 (NM_145805.1,121-139).
ggtgatcattccaagaaga

SEQ ID NO: 5594 - DNA, 19 bp, Homo sapiens
  siRNA target sequence for ISL2 (NM_145805.1,122-140).
gtgatcattccaagaagaa

SEQ ID NO: 5595 - DNA, 19 bp, Homo sapiens
  siRNA target sequence for ISL2 (NM_145805.1,785-803).
gcgtctggttccagaacaa

SEQ ID NO: 5596 - DNA, 19 bp, Homo sapiens
  siRNA target sequence for ISL2 (NM_145805.1,813-831).
ggacaagaagaaatccatt

SEQ ID NO: 5597 - DNA, 19 bp, Homo sapiens
  siRNA target sequence for ISL2 (NM_145805.1,1114-1132).
ccggacacccccaacagta

SEQ ID NO: 5598 - DNA, 19 bp, Homo sapiens
  siRNA target sequence for ISL2 (NM_145805.1,1115-1133).
cggacacccccaacagtat

SEQ ID NO: 5599 - DNA, 19 bp, Homo sapiens
  siRNA target sequence for JUN (NM_002228.2,986-1004).
gatggaaacgaccttctat

SEQ ID NO: 5600 - DNA, 19 bp, Homo sapiens
  siRNA target sequence for JUN (NM_002228.2,1034-1052).
gtccgagagcggaccttat

SEQ ID NO: 5601 - DNA, 19 bp, Homo sapiens
  siRNA target sequence for JUN (NM_002228.2,1044-1062).
ggaccttatggctacagta

SEQ ID NO: 5602 - DNA, 19 bp, Homo sapiens
  siRNA target sequence for JUN (NM_002228.2,1485-1503).
gcaaacctcagcaacttca

SEQ ID NO: 5603 - DNA, 19 bp, Homo sapiens
  siRNA target sequence for JUN (NM_002228.2,1486-1504).
caaacctcagcaacttcaa

SEQ ID NO: 5604 - DNA, 19 bp, Homo sapiens
  siRNA target sequence for JUN (NM_002228.2,1891-1909).
cacagcttaaacagaaagt

SEQ ID NO: 5605 - DNA, 19 bp, Homo sapiens
  siRNA target sequence for JUN (NM_002228.2,1908-1926).
gtcatgaaccacgttaaca

SEQ ID NO: 5606 - DNA, 19 bp, Homo sapiens
  siRNA target sequence for JUN (NM_002228.2,1910-1928).
catgaaccacgttaacagt

SEQ ID NO: 5607 - DNA, 19 bp, Homo sapiens
  siRNA target sequence for JUN (NM_002228.2,1929-1947).
gggtgccaactcatgctaa

SEQ ID NO: 5608 - DNA, 19 bp, Homo sapiens
  siRNA target sequence for JUN (NM_002228.2,1944-1962).
ctaacgcagcagttgcaaa

SEQ ID NO: 5609 - DNA, 19 bp, Homo sapiens
  siRNA target sequence for JUNB (NM_002229.1,443-461).
ggtggcggcagctactttt

SEQ ID NO: 5610 - DNA, 19 bp, Homo sapiens
  siRNA target sequence for JUNB (NM_002229.1,1022-1040).
ccggtgtcccccatcaaca

SEQ ID NO: 5611 - DNA, 19 bp, Homo sapiens
  siRNA target sequence for JUNB (NM_002229.1,1023-1041).
cggtgtcccccatcaacat

SEQ ID NO: 5612 - DNA, 19 bp, Homo sapiens
  siRNA target sequence for JUND (NM_005354.2,1055-1073).
cgcgcctggaagagaaagt

SEQ ID NO: 5613 - DNA, 19 bp, Homo sapiens
  siRNA target sequence for KIAA0669 (NM_014779.1,1143-1161).
gacgtctcctccgagattt

SEQ ID NO: 5614 - DNA, 19 bp, Homo sapiens
  siRNA target sequence for KIAA0669 (NM_014779.1,1169-1187).
ctctcgggccacggattat

SEQ ID NO: 5615 - DNA, 19 bp, Homo sapiens
  siRNA target sequence for KIAA0669 (NM_014779.1,1219-1237).
ccgaagagacgcttaacaa

SEQ ID NO: 5616 - DNA, 19 bp, Homo sapiens
  siRNA target sequence for KIAA0669 (NM_014779.1,1220-1238).
cgaagagacgcttaacaat

SEQ ID NO: 5617 - DNA, 19 bp, Homo sapiens
  siRNA target sequence for KIAA0669 (NM_014779.1,1473-1491).
cagcctcccaccacatgta

SEQ ID NO: 5618 - DNA, 19 bp, Homo sapiens
  siRNA target sequence for KIAA0669 (NM_014779.1,1475-1493).
gcctcccaccacatgtagt

SEQ ID NO: 5619 - DNA, 19 bp, Homo sapiens
  siRNA target sequence for KIAA0669 (NM_014779.1,1476-1494).
cctcccaccacatgtagtt

SEQ ID NO: 5620 - DNA, 19 bp, Homo sapiens
  siRNA target sequence for KIAA0669 (NM_014779.1,1495-1513).
cccgttttcgcgtgatcaa

SEQ ID NO: 5621 - DNA, 19 bp, Homo sapiens
  siRNA target sequence for KIAA0669 (NM_014779.1,1550-1568).
ccgatggacgtgtatggaa

SEQ ID NO: 5622 - DNA, 19 bp, Homo sapiens
  siRNA target sequence for KIAA0669 (NM_014779.1,1551-1569).
cgatggacgtgtatggaat

SEQ ID NO: 5623 - DNA, 19 bp, Homo sapiens
  siRNA target sequence for KIAA0669 (NM_014779.1,1552-1570).
gatggacgtgtatggaata

SEQ ID NO: 5624 - DNA, 19 bp, Homo sapiens
  siRNA target sequence for KIAA0669 (NM_014779.1,1555-1573).
ggacgtgtatggaatacta

SEQ ID NO: 5625 - DNA, 19 bp, Homo sapiens
  siRNA target sequence for KIAA0669 (NM_014779.1,1556-1574).
gacgtgtatggaatactat

SEQ ID NO: 5626 - DNA, 19 bp, Homo sapiens
  siRNA target sequence for KIAA0669 (NM_014779.1,1558-1576).
cgtgtatggaatactatga

SEQ ID NO: 5627 - DNA, 19 bp, Homo sapiens
  siRNA target sequence for KIAA0669 (NM_014779.1,1603-1621).
ctagatccggggattgcat

SEQ ID NO: 5628 - DNA, 19 bp, Homo sapiens
  siRNA target sequence for KIAA0669 (NM_014779.1,1609-1627).
ccggggattgcattagaca

SEQ ID NO: 5629 - DNA, 19 bp, Homo sapiens
  siRNA target sequence for KIAA0669 (NM_014779.1,1773-1791).
cccccgtcggagaaaatga

SEQ ID NO: 5630 - DNA, 19 bp, Homo sapiens
  siRNA target sequence for KIAA0669 (NM_014779.1,2090-2108).
gtatcctcagcctcagata

SEQ ID NO: 5631 - DNA, 19 bp, Homo sapiens
  siRNA target sequence for KIAA0669 (NM_014779.1,2256-2274).
ggcaccggccagaatgctt

SEQ ID NO: 5632 - DNA, 19 bp, Homo sapiens
  siRNA target sequence for KIAA0669 (NM_014779.1,2577-2595).
gtgtctaccacttctgtta

SEQ ID NO: 5633 - DNA, 19 bp, Homo sapiens
  siRNA target sequence for KIAA0669 (NM_014779.1,2579-2597).
gtctaccacttctgttact

SEQ ID NO: 5634 - DNA, 19 bp, Homo sapiens
  siRNA target sequence for KIAA0669 (NM_014779.1,2714-2732).
cagcgcaccaacaagtcta

SEQ ID NO: 5635 - DNA, 19 bp, Homo sapiens
  siRNA target sequence for KIAA0669 (NM_014779.1,2740-2758).
ctgacctaagccagtttca

SEQ ID NO: 5636 - DNA, 19 bp, Homo sapiens
  siRNA target sequence for KIAA0669 (NM_014779.1,2742-2760).
gacctaagccagtttcaaa

SEQ ID NO: 5637 - DNA, 19 bp, Homo sapiens
  siRNA target sequence for KIAA0669 (NM_014779.1,2781-2799).
gggcaagtcgacgatacta

SEQ ID NO: 5638 - DNA, 19 bp, Homo sapiens
  siRNA target sequence for KIAA0669 (NM_014779.1,2783-2801).
gcaagtcgacgatactaga

SEQ ID NO: 5639 - DNA, 19 bp, Homo sapiens
  siRNA target sequence for KIAA0669 (NM_014779.1,2789-2807).
cgacgatactagaagaaaa

SEQ ID NO: 5640 - DNA, 19 bp, Homo sapiens
  siRNA target sequence for KIAA0669 (NM_014779.1,2790-2808).
gacgatactagaagaaaat

SEQ ID NO: 5641 - DNA, 19 bp, Homo sapiens
  siRNA target sequence for KIAA0669 (NM_014779.1,2888-2906).
ggcaaacccccttcagtta

SEQ ID NO: 5642 - DNA, 19 bp, Homo sapiens
  siRNA target sequence for KIAA0669 (NM_014779.1,2889-2907).
gcaaacccccttcagttaa

SEQ ID NO: 5643 - DNA, 19 bp, Homo sapiens
  siRNA target sequence for KIAA0669 (NM_014779.1,2901-2919).
cagttaacacctatgaaca

SEQ ID NO: 5644 - DNA, 19 bp, Homo sapiens
  siRNA target sequence for KIAA0669 (NM_014779.1,2920-2938).
gtctggccacctctgtatt

SEQ ID NO: 5645 - DNA, 19 bp, Homo sapiens
  siRNA target sequence for KIAA0669 (NM_014779.1,2997-3015).
caagcgttccatttgaaca

SEQ ID NO: 5646 - DNA, 19 bp, Homo sapiens
  siRNA target sequence for KIAA0669 (NM_014779.1,3060-3078).
ggtgttgtagccattgaca

SEQ ID NO: 5647 - DNA, 19 bp, Homo sapiens
  siRNA target sequence for KIAA0669 (NM_014779.1,3207-3225).
gcactgttaaaatctcttt

SEQ ID NO: 5648 - DNA, 19 bp, Homo sapiens
  siRNA target sequence for KIAA0669 (NM_014779.1,3222-3240).
ctttcaagcaatgatcaat

SEQ ID NO: 5649 - DNA, 19 bp, Homo sapiens
  siRNA target sequence for KIAA0863 (NM_014913.1,293-311).
ggaccttaaaggctttgat

SEQ ID NO: 5650 - DNA, 19 bp, Homo sapiens
  siRNA target sequence for KIAA0863 (NM_014913.1,335-353).
cacatcatggggtgatgtt

SEQ ID NO: 5651 - DNA, 19 bp, Homo sapiens
  siRNA target sequence for KIAA0863 (NM_014913.1,390-408).
cgaacaaagccatactgtt

SEQ ID NO: 5652 - DNA, 19 bp, Homo sapiens
  siRNA target sequence for KIAA0863 (NM_014913.1,406-424).
gttgtggcctctgtaaata

SEQ ID NO: 5653 - DNA, 19 bp, Homo sapiens
  siRNA target sequence for KIAA0863 (NM_014913.1,430-448).
caaaggtgcttacttcatt

SEQ ID NO: 5654 - DNA, 19 bp, Homo sapiens
  siRNA target sequence for KIAA0863 (NM_014913.1,435-453).
gtgcttacttcattcaaga

SEQ ID NO: 5655 - DNA, 19 bp, Homo sapiens
  siRNA target sequence for KIAA0863 (NM_014913.1,546-564).
ggaaggcacttcagaatgt

SEQ ID NO: 5656 - DNA, 19 bp, Homo sapiens
  siRNA target sequence for KIAA0863 (NM_014913.1,547-565).
gaaggcacttcagaatgtt

SEQ ID NO: 5657 - DNA, 19 bp, Homo sapiens
  siRNA target sequence for KIAA0863 (NM_014913.1,625-643).
catctaggagcgatgtgat

SEQ ID NO: 5658 - DNA, 19 bp, Homo sapiens
  siRNA target sequence for KIAA0863 (NM_014913.1,635-653).
cgatgtgataagtttcaca

SEQ ID NO: 5659 - DNA, 19 bp, Homo sapiens
  siRNA target sequence for KIAA0863 (NM_014913.1,636-654).
gatgtgataagtttcacat

SEQ ID NO: 5660 - DNA, 19 bp, Homo sapiens
  siRNA target sequence for KIAA0863 (NM_014913.1,708-726).
ctggtagcccattttcact

SEQ ID NO: 5661 - DNA, 19 bp, Homo sapiens
  siRNA target sequence for KIAA0863 (NM_014913.1,714-732).
gcccattttcactacttaa

SEQ ID NO: 5662 - DNA, 19 bp, Homo sapiens
  siRNA target sequence for KIAA0863 (NM_014913.1,715-733).
cccattttcactacttaat

SEQ ID NO: 5663 - DNA, 19 bp, Homo sapiens
  siRNA target sequence for KIAA0863 (NM_014913.1,768-786).
ggtgagcaaccgaaaacta

SEQ ID NO: 5664 - DNA, 19 bp, Homo sapiens
  siRNA target sequence for KIAA0863 (NM_014913.1,769-787).
gtgagcaaccgaaaactaa

SEQ ID NO: 5665 - DNA, 19 bp, Homo sapiens
  siRNA target sequence for KIAA0863 (NM_014913.1,773-791).
gcaaccgaaaactaacgat

SEQ ID NO: 5666 - DNA, 19 bp, Homo sapiens
  siRNA target sequence for KIAA0863 (NM_014913.1,774-792).
caaccgaaaactaacgata

SEQ ID NO: 5667 - DNA, 19 bp, Homo sapiens
  siRNA target sequence for KIAA0863 (NM_014913.1,778-796).
cgaaaactaacgatactgt

SEQ ID NO: 5668 - DNA, 19 bp, Homo sapiens
  siRNA target sequence for KIAA0863 (NM_014913.1,793-811).
ctgtttctatagagaagat

SEQ ID NO: 5669 - DNA, 19 bp, Homo sapiens
  siRNA target sequence for KIAA0863 (NM_014913.1,812-830).
cccaccacctgacaaatat

SEQ ID NO: 5670 - DNA, 19 bp, Homo sapiens
  siRNA target sequence for KIAA0863 (NM_014913.1,813-831).
ccaccacctgacaaatatt

SEQ ID NO: 5671 - DNA, 19 bp, Homo sapiens
  siRNA target sequence for KIAA0863 (NM_014913.1,816-834).
ccacctgacaaatattact

SEQ ID NO: 5672 - DNA, 19 bp, Homo sapiens
  siRNA target sequence for KIAA0863 (NM_014913.1,822-840).
gacaaatattactgtaaaa

SEQ ID NO: 5673 - DNA, 19 bp, Homo sapiens
  siRNA target sequence for KIAA0863 (NM_014913.1,862-880).
gccaggatgcgttaatgta

SEQ ID NO: 5674 - DNA, 19 bp, Homo sapiens
  siRNA target sequence for KIAA0863 (NM_014913.1,863-881).
ccaggatgcgttaatgtat

SEQ ID NO: 5675 - DNA, 19 bp, Homo sapiens
  siRNA target sequence for KIAA0863 (NM_014913.1,867-885).
gatgcgttaatgtatcaca

SEQ ID NO: 5676 - DNA, 19 bp, Homo sapiens
  siRNA target sequence for KIAA0863 (NM_014913.1,907-925).
gagatttggagaataagct

SEQ ID NO: 5677 - DNA, 19 bp, Homo sapiens
  siRNA target sequence for KIAA0863 (NM_014913.1,914-932).
ggagaataagcttagatct

SEQ ID NO: 5678 - DNA, 19 bp, Homo sapiens
  siRNA target sequence for KIAA0863 (NM_014913.1,923-941).
gcttagatctgtgatttca

SEQ ID NO: 5679 - DNA, 19 bp, Homo sapiens
  siRNA target sequence for KIAA0863 (NM_014913.1,977-995).
gcacattgctccaaaacca

SEQ ID NO: 5680 - DNA, 19 bp, Homo sapiens
  siRNA target sequence for KIAA0863 (NM_014913.1,1313-1331).
gccagtcggacctgtcaat

SEQ ID NO: 5681 - DNA, 19 bp, Homo sapiens
  siRNA target sequence for KIAA0863 (NM_014913.1,1314-1332).
ccagtcggacctgtcaata

SEQ ID NO: 5682 - DNA, 19 bp, Homo sapiens
  siRNA target sequence for KIAA0863 (NM_014913.1,1315-1333).
cagtcggacctgtcaataa

SEQ ID NO: 5683 - DNA, 19 bp, Homo sapiens
  siRNA target sequence for KIAA0863 (NM_014913.1,1317-1335).
gtcggacctgtcaataagt

SEQ ID NO: 5684 - DNA, 19 bp, Homo sapiens
  siRNA target sequence for KIAA0863 (NM_014913.1,1771-1789).
cagctgttgtgcctgtaaa

SEQ ID NO: 5685 - DNA, 19 bp, Homo sapiens
  siRNA target sequence for KIAA0863 (NM_014913.1,1870-1888).
ctggggtcttgcaactcaa

SEQ ID NO: 5686 - DNA, 19 bp, Homo sapiens
  siRNA target sequence for KIAA0863 (NM_014913.1,1892-1910).
gactgtgggcaccaacatt

SEQ ID NO: 5687 - DNA, 19 bp, Homo sapiens
  siRNA target sequence for KIAA0863 (NM_014913.1,1904-1922).
caacattctgcctgtgaat

SEQ ID NO: 5688 - DNA, 19 bp, Homo sapiens
  siRNA target sequence for KIAA0863 (NM_014913.1,1991-2009).
catccctacagggaaacaa

SEQ ID NO: 5689 - DNA, 19 bp, Homo sapiens
  siRNA target sequence for KIAA0863 (NM_014913.1,2007-2025).
caagtgaatgggattccaa

SEQ ID NO: 5690 - DNA, 19 bp, Homo sapiens
  siRNA target sequence for KIAA0863 (NM_014913.1,2191-2209).
ctcagagcgtgtttgttca

SEQ ID NO: 5691 - DNA, 19 bp, Homo sapiens
  siRNA target sequence for KIAA0863 (NM_014913.1,2345-2363).
gtccaagtctggtgagaaa

SEQ ID NO: 5692 - DNA, 19 bp, Homo sapiens
  siRNA target sequence for KIAA0863 (NM_014913.1,2360-2378).
gaaacttgagcctgaaaaa

SEQ ID NO: 5693 - DNA, 19 bp, Homo sapiens
  siRNA target sequence for KIAA0863 (NM_014913.1,2381-2399).
ggcagcgtgtgcaccattt

SEQ ID NO: 5694 - DNA, 19 bp, Homo sapiens
  siRNA target sequence for KIAA0863 (NM_014913.1,2383-2401).
cagcgtgtgcaccatttct

SEQ ID NO: 5695 - DNA, 19 bp, Homo sapiens
  siRNA target sequence for KIAA0863 (NM_014913.1,2385-2403).
gcgtgtgcaccatttctaa

SEQ ID NO: 5696 - DNA, 19 bp, Homo sapiens
  siRNA target sequence for KIAA0863 (NM_014913.1,2424-2442).
gtgcgatgtctgtcttgta

SEQ ID NO: 5697 - DNA, 19 bp, Homo sapiens
  siRNA target sequence for KIAA0863 (NM_014913.1,2427-2445).
cgatgtctgtcttgtaagt

SEQ ID NO: 5698 - DNA, 19 bp, Homo sapiens
  siRNA target sequence for KIAA0863 (NM_014913.1,2490-2508).
ggcttggggtgcttgttct

SEQ ID NO: 5699 - DNA, 19 bp, Homo sapiens
  siRNA target sequence for KIAA0863 (NM_014913.1,2516-2534).
caccttccatgatatcaaa

SEQ ID NO: 5700 - DNA, 19 bp, Homo sapiens
  siRNA target sequence for KIAA0863 (NM_014913.1,2576-2594).
gaagttgcctatggattat

SEQ ID NO: 5701 - DNA, 19 bp, Homo sapiens
  siRNA target sequence for KIAA0863 (NM_014913.1,2596-2614).
gcaacagaggttttcaatt

SEQ ID NO: 5702 - DNA, 19 bp, Homo sapiens
  siRNA target sequence for KIAA0863 (NM_014913.1,2689-2707).
gggagcgggaagtctactt

SEQ ID NO: 5703 - DNA, 19 bp, Homo sapiens
  siRNA target sequence for KIAA0863 (NM_014913.1,2850-2868).
gcctatgagctgcatttga

SEQ ID NO: 5704 - DNA, 19 bp, Homo sapiens
  siRNA target sequence for KIAA0863 (NM_014913.1,2851-2869).
cctatgagctgcatttgaa

SEQ ID NO: 5705 - DNA, 19 bp, Homo sapiens
  siRNA target sequence for KIAA0863 (NM_014913.1,2943-2961).
ggggtctacacgggaaata

SEQ ID NO: 5706 - DNA, 19 bp, Homo sapiens
  siRNA target sequence for KIAA0863 (NM_014913.1,2944-2962).
gggtctacacgggaaatat

SEQ ID NO: 5707 - DNA, 19 bp, Homo sapiens
  siRNA target sequence for KIAA0863 (NM_014913.1,2974-2992).
ccatcgccgtccatttggt

SEQ ID NO: 5708 - DNA, 19 bp, Homo sapiens
  siRNA target sequence for KIAA0863 (NM_014913.1,3033-3051).
caggcccagccgggtttta

SEQ ID NO: 5709 - DNA, 19 bp, Homo sapiens
  siRNA target sequence for KIAA0863 (NM_014913.1,3037-3055).
cccagccgggttttattca

SEQ ID NO: 5710 - DNA, 19 bp, Homo sapiens
  siRNA target sequence for KIAA0863 (NM_014913.1,3039-3057).
cagccgggttttattcaca

SEQ ID NO: 5711 - DNA, 19 bp, Homo sapiens
  siRNA target sequence for KIAA0863 (NM_014913.1,3056-3074).
caacagtgaactgctttta

SEQ ID NO: 5712 - DNA, 19 bp, Homo sapiens
  siRNA target sequence for KIAA0863 (NM_014913.1,3081-3099).
ggtgaagtgatgcatgatt

SEQ ID NO: 5713 - DNA, 19 bp, Homo sapiens
  siRNA target sequence for KIAA0863 (NM_014913.1,3170-3188).
gcagcctcccatcctaaat

SEQ ID NO: 5714 - DNA, 19 bp, Homo sapiens
  siRNA target sequence for KIAA0863 (NM_014913.1,3220-3238).
cgagtgttgtgccttttaa

SEQ ID NO: 5715 - DNA, 19 bp, Homo sapiens
  siRNA target sequence for KIAA0863 (NM_014913.1,3257-3275).
cagaacagagggacctatt

SEQ ID NO: 5716 - DNA, 19 bp, Homo sapiens
  siRNA target sequence for KIAA0863 (NM_014913.1,3259-3277).
gaacagagggacctattgt

SEQ ID NO: 5717 - DNA, 19 bp, Homo sapiens
  siRNA target sequence for KIAA0863 (NM_014913.1,3282-3300).
gacgaggctcttcagattt

SEQ ID NO: 5718 - DNA, 19 bp, Homo sapiens
  siRNA target sequence for KIAA0863 (NM_014913.1,3284-3302).
cgaggctcttcagatttta

SEQ ID NO: 5719 - DNA, 19 bp, Homo sapiens
  siRNA target sequence for KIAA0863 (NM_014913.1,3327-3345).
ggccgttcttatgaagaaa

SEQ ID NO: 5720 - DNA, 19 bp, Homo sapiens
  siRNA target sequence for KIAA0863 (NM_014913.1,3330-3348).
cgttcttatgaagaaaaga

SEQ ID NO: 5721 - DNA, 19 bp, Homo sapiens
  siRNA target sequence for KIAA0863 (NM_014913.1,3372-3390).
cataagaaaccatatccta

SEQ ID NO: 5722 - DNA, 19 bp, Homo sapiens
  siRNA target sequence for KIAA0863 (NM_014913.1,3382-3400).
catatcctagtaaaaagga

SEQ ID NO: 5723 - DNA, 19 bp, Homo sapiens
  siRNA target sequence for KIAA0863 (NM_014913.1,3500-3518).
caagccttctgtactttta

SEQ ID NO: 5724 - DNA, 19 bp, Homo sapiens
  siRNA target sequence for KIAA0863 (NM_014913.1,3548-3566).
gaaacatagattgaacttt

SEQ ID NO: 5725 - DNA, 19 bp, Homo sapiens
  siRNA target sequence for KIAA0863 (NM_014913.1,3552-3570).
catagattgaactttgaat

SEQ ID NO: 5726 - DNA, 19 bp, Homo sapiens
  siRNA target sequence for KIAA1041 (NM_014947.1,330-348).
ggcttgtccatctgtaact

SEQ ID NO: 5727 - DNA, 19 bp, Homo sapiens
  siRNA target sequence for KIAA1041 (NM_014947.1,331-349).
gcttgtccatctgtaactt

SEQ ID NO: 5728 - DNA, 19 bp, Homo sapiens
  siRNA target sequence for KIAA1041 (NM_014947.1,341-359).
ctgtaacttcattaaggat

SEQ ID NO: 5729 - DNA, 19 bp, Homo sapiens
  siRNA target sequence for KIAA1041 (NM_014947.1,454-472).
gcacatggaacaggaattt

SEQ ID NO: 5730 - DNA, 19 bp, Homo sapiens
  siRNA target sequence for KIAA1041 (NM_014947.1,457-475).
catggaacaggaatttcta

SEQ ID NO: 5731 - DNA, 19 bp, Homo sapiens
  siRNA target sequence for KIAA1041 (NM_014947.1,484-502).
gcactccttgacccaaata

SEQ ID NO: 5732 - DNA, 19 bp, Homo sapiens
  siRNA target sequence for KIAA1041 (NM_014947.1,542-560).
ggaaacctccatacagtta

SEQ ID NO: 5733 - DNA, 19 bp, Homo sapiens
  siRNA target sequence for KIAA1041 (NM_014947.1,564-582).
cagcctcattacatttgca

SEQ ID NO: 5734 - DNA, 19 bp, Homo sapiens
  siRNA target sequence for KIAA1041 (NM_014947.1,628-646).
cagtggatttgtgataact

SEQ ID NO: 5735 - DNA, 19 bp, Homo sapiens
  siRNA target sequence for KIAA1041 (NM_014947.1,681-699).
gaattccatacgacataat

SEQ ID NO: 5736 - DNA, 19 bp, Homo sapiens
  siRNA target sequence for KIAA1041 (NM_014947.1,758-776).
ggtcctactgggcaataga

SEQ ID NO: 5737 - DNA, 19 bp, Homo sapiens
  siRNA target sequence for KIAA1041 (NM_014947.1,816-834).
gaagagggcacgatctgta

SEQ ID NO: 5738 - DNA, 19 bp, Homo sapiens
  siRNA target sequence for KIAA1041 (NM_014947.1,819-837).
gagggcacgatctgtagaa

SEQ ID NO: 5739 - DNA, 19 bp, Homo sapiens
  siRNA target sequence for KIAA1041 (NM_014947.1,838-856).
cgggcctcaactccatata

SEQ ID NO: 5740 - DNA, 19 bp, Homo sapiens
  siRNA target sequence for KIAA1041 (NM_014947.1,841-859).
gcctcaactccatatagca

SEQ ID NO: 5741 - DNA, 19 bp, Homo sapiens
  siRNA target sequence for KIAA1041 (NM_014947.1,842-860).
cctcaactccatatagcat

SEQ ID NO: 5742 - DNA, 19 bp, Homo sapiens
  siRNA target sequence for KIAA1041 (NM_014947.1,843-861).
ctcaactccatatagcata

SEQ ID NO: 5743 - DNA, 19 bp, Homo sapiens
  siRNA target sequence for KIAA1041 (NM_014947.1,851-869).
catatagcatagattcaga

SEQ ID NO: 5744 - DNA, 19 bp, Homo sapiens
  siRNA target sequence for KIAA1041 (NM_014947.1,857-875).
gcatagattcagattcttt

SEQ ID NO: 5745 - DNA, 19 bp, Homo sapiens
  siRNA target sequence for KIAA1041 (NM_014947.1,876-894).
gggaatggagtgtattatt

SEQ ID NO: 5746 - DNA, 19 bp, Homo sapiens
  siRNA target sequence for KIAA1041 (NM_014947.1,920-938).
caatcaacactgtgactaa

SEQ ID NO: 5747 - DNA, 19 bp, Homo sapiens
  siRNA target sequence for KIAA1041 (NM_014947.1,935-953).
ctaacaaagtaacattgta

SEQ ID NO: 5748 - DNA, 19 bp, Homo sapiens
  siRNA target sequence for KIAA1041 (NM_014947.1,961-979).
gatcaggatggtagtgata

SEQ ID NO: 5749 - DNA, 19 bp, Homo sapiens
  siRNA target sequence for KIAA1041 (NM_014947.1,982-1000).
ccacgcagtagccttaaca

SEQ ID NO: 5750 - DNA, 19 bp, Homo sapiens
  siRNA target sequence for KIAA1041 (NM_014947.1,983-1001).
cacgcagtagccttaacaa

SEQ ID NO: 5751 - DNA, 19 bp, Homo sapiens
  siRNA target sequence for KIAA1041 (NM_014947.1,985-1003).
cgcagtagccttaacaaca

SEQ ID NO: 5752 - DNA, 19 bp, Homo sapiens
  siRNA target sequence for KIAA1041 (NM_014947.1,1015-1033).
cagagtttggcatctgtta

SEQ ID NO: 5753 - DNA, 19 bp, Homo sapiens
  siRNA target sequence for KIAA1041 (NM_014947.1,1024-1042).
gcatctgttaatttgaaca

SEQ ID NO: 5754 - DNA, 19 bp, Homo sapiens
  siRNA target sequence for KIAA1041 (NM_014947.1,1074-1092).
gacaagccatccagaatca

SEQ ID NO: 5755 - DNA, 19 bp, Homo sapiens
  siRNA target sequence for KIAA1041 (NM_014947.1,1076-1094).
caagccatccagaatcagt

SEQ ID NO: 5756 - DNA, 19 bp, Homo sapiens
  siRNA target sequence for KIAA1041 (NM_014947.1,1084-1102).
ccagaatcagtctctcaat

SEQ ID NO: 5757 - DNA, 19 bp, Homo sapiens
  siRNA target sequence for KIAA1041 (NM_014947.1,1145-1163).
gagacaagcaactactttt

SEQ ID NO: 5758 - DNA, 19 bp, Homo sapiens
  siRNA target sequence for KIAA1041 (NM_014947.1,1153-1171).
caactacttttctcagaat

SEQ ID NO: 5759 - DNA, 19 bp, Homo sapiens
  siRNA target sequence for KIAA1041 (NM_014947.1,1156-1174).
ctacttttctcagaatata

SEQ ID NO: 5760 - DNA, 19 bp, Homo sapiens
  siRNA target sequence for KIAA1041 (NM_014947.1,1194-1212).
ctcatttcggagcctttat

SEQ ID NO: 5761 - DNA, 19 bp, Homo sapiens
  siRNA target sequence for KIAA1041 (NM_014947.1,1205-1223).
gcctttataagtcagtttt

SEQ ID NO: 5762 - DNA, 19 bp, Homo sapiens
  siRNA target sequence for KIAA1041 (NM_014947.1,1206-1224).
cctttataagtcagttttt

SEQ ID NO: 5763 - DNA, 19 bp, Homo sapiens
  siRNA target sequence for KIAA1041 (NM_014947.1,1227-1245).
gcagtcacttagtcaacaa

SEQ ID NO: 5764 - DNA, 19 bp, Homo sapiens
  siRNA target sequence for KIAA1041 (NM_014947.1,1238-1256).
gtcaacaaggtttgatgaa

SEQ ID NO: 5765 - DNA, 19 bp, Homo sapiens
  siRNA target sequence for KIAA1041 (NM_014947.1,1251-1269).
gatgaacatcccttctgaa

SEQ ID NO: 5766 - DNA, 19 bp, Homo sapiens
  siRNA target sequence for KIAA1041 (NM_014947.1,1254-1272).
gaacatcccttctgaatct

SEQ ID NO: 5767 - DNA, 19 bp, Homo sapiens
  siRNA target sequence for KIAA1041 (NM_014947.1,1278-1296).
gcagtcccacacttcatgt

SEQ ID NO: 5768 - DNA, 19 bp, Homo sapiens
  siRNA target sequence for KIAA1041 (NM_014947.1,1284-1302).
ccacacttcatgtacctat

SEQ ID NO: 5769 - DNA, 19 bp, Homo sapiens
  siRNA target sequence for KIAA1041 (NM_014947.1,1383-1401).
caacaccacaggcagtaat

SEQ ID NO: 5770 - DNA, 19 bp, Homo sapiens
  siRNA target sequence for KIAA1041 (NM_014947.1,1464-1482).
ccatcgaccgcatggttta

SEQ ID NO: 5771 - DNA, 19 bp, Homo sapiens
  siRNA target sequence for KIAA1041 (NM_014947.1,1600-1618).
catcagcatcagacgttaa

SEQ ID NO: 5772 - DNA, 19 bp, Homo sapiens
  siRNA target sequence for KIAA1041 (NM_014947.1,1605-1623).
gcatcagacgttaacacat

SEQ ID NO: 5773 - DNA, 19 bp, Homo sapiens
  siRNA target sequence for KIAA1041 (NM_014947.1,1653-1671).
ctgtaattctggtgtttca

SEQ ID NO: 5774 - DNA, 19 bp, Homo sapiens
  siRNA target sequence for KIAA1041 (NM_014947.1,1655-1673).
gtaattctggtgtttcaaa

SEQ ID NO: 5775 - DNA, 19 bp, Homo sapiens
  siRNA target sequence for KIAA1041 (NM_014947.1,1664-1682).
gtgtttcaaatgattggta

SEQ ID NO: 5776 - DNA, 19 bp, Homo sapiens
  siRNA target sequence for KIAA1041 (NM_014947.1,1679-1697).
ggtatgcgacacttgatat

SEQ ID NO: 5777 - DNA, 19 bp, Homo sapiens
  siRNA target sequence for KIAA1041 (NM_014947.1,1684-1702).
gcgacacttgatatgctaa

SEQ ID NO: 5778 - DNA, 19 bp, Homo sapiens
  siRNA target sequence for KIAA1041 (NM_014947.1,1685-1703).
cgacacttgatatgctaaa

SEQ ID NO: 5779 - DNA, 19 bp, Homo sapiens
  siRNA target sequence for KIAA1041 (NM_014947.1,1686-1704).
gacacttgatatgctaaaa

SEQ ID NO: 5780 - DNA, 19 bp, Homo sapiens
  siRNA target sequence for KIAA1041 (NM_014947.1,1688-1706).
cacttgatatgctaaaaga

SEQ ID NO: 5781 - DNA, 19 bp, Homo sapiens
  siRNA target sequence for KIAA1041 (NM_014947.1,1714-1732).
cgaattgccagcagtgtta

SEQ ID NO: 5782 - DNA, 19 bp, Homo sapiens
  siRNA target sequence for KIAA1041 (NM_014947.1,1720-1738).
gccagcagtgttaattggt

SEQ ID NO: 5783 - DNA, 19 bp, Homo sapiens
  siRNA target sequence for KIAA1041 (NM_014947.1,1808-1826).
ctttagaccaggttcagtt

SEQ ID NO: 5784 - DNA, 19 bp, Homo sapiens
  siRNA target sequence for KIAA1041 (NM_014947.1,1819-1837).
gttcagtttgccgatcttt

SEQ ID NO: 5785 - DNA, 19 bp, Homo sapiens
  siRNA target sequence for KIAA1041 (NM_014947.1,1822-1840).
cagtttgccgatctttgtt

SEQ ID NO: 5786 - DNA, 19 bp, Homo sapiens
  siRNA target sequence for KIAA1041 (NM_014947.1,1838-1856).
gttcttctcttaatcagtt

SEQ ID NO: 5787 - DNA, 19 bp, Homo sapiens
  siRNA target sequence for KIAA1041 (NM_014947.1,1862-1880).
cacaaactggccttataca

SEQ ID NO: 5788 - DNA, 19 bp, Homo sapiens
  siRNA target sequence for KIAA1041 (NM_014947.1,1968-1986).
catagattctaggcaaaat

SEQ ID NO: 5789 - DNA, 19 bp, Homo sapiens
  siRNA target sequence for KIAA1041 (NM_014947.1,2001-2019).
gatgccaccccctggttat

SEQ ID NO: 5790 - DNA, 19 bp, Homo sapiens
  siRNA target sequence for KIAA1041 (NM_014947.1,2009-2027).
cccctggttatcctcatat

SEQ ID NO: 5791 - DNA, 19 bp, Homo sapiens
  siRNA target sequence for KIAA1443 (NM_020834.1,163-181).
gccagcggtctcagtagtt

SEQ ID NO: 5792 - DNA, 19 bp, Homo sapiens
  siRNA target sequence for KIAA1443 (NM_020834.1,165-183).
cagcggtctcagtagttca

SEQ ID NO: 5793 - DNA, 19 bp, Homo sapiens
  siRNA target sequence for KIAA1443 (NM_020834.1,575-593).
gtcctccaactcttagcaa

SEQ ID NO: 5794 - DNA, 19 bp, Homo sapiens
  siRNA target sequence for KIAA1443 (NM_020834.1,595-613).
cctacccagacgaaaggat

SEQ ID NO: 5795 - DNA, 19 bp, Homo sapiens
  siRNA target sequence for KIAA1443 (NM_020834.1,703-721).
ggagcattcccctaccaat

SEQ ID NO: 5796 - DNA, 19 bp, Homo sapiens
  siRNA target sequence for KIAA1443 (NM_020834.1,707-725).
cattcccctaccaatcaga

SEQ ID NO: 5797 - DNA, 19 bp, Homo sapiens
  siRNA target sequence for KIAA1443 (NM_020834.1,711-729).
cccctaccaatcagatttt

SEQ ID NO: 5798 - DNA, 19 bp, Homo sapiens
  siRNA target sequence for KIAA1443 (NM_020834.1,712-730).
ccctaccaatcagattttt

SEQ ID NO: 5799 - DNA, 19 bp, Homo sapiens
  siRNA target sequence for KIAA1443 (NM_020834.1,1445-1463).
cacccccaccggatataca

SEQ ID NO: 5800 - DNA, 19 bp, Homo sapiens
  siRNA target sequence for KIAA1443 (NM_020834.1,1555-1573).
gtgctggattggtttgact

SEQ ID NO: 5801 - DNA, 19 bp, Homo sapiens
  siRNA target sequence for KIAA1443 (NM_020834.1,1566-1584).
gtttgactctcgattacct

SEQ ID NO: 5802 - DNA, 19 bp, Homo sapiens
  siRNA target sequence for KIAA1443 (NM_020834.1,1588-1606).
ccagctgaggtggtagttt

SEQ ID NO: 5803 - DNA, 19 bp, Homo sapiens
  siRNA target sequence for KIAA1443 (NM_020834.1,1592-1610).
ctgaggtggtagtttgtct

SEQ ID NO: 5804 - DNA, 19 bp, Homo sapiens
  siRNA target sequence for KIAA1443 (NM_020834.1,1596-1614).
ggtggtagtttgtctagat

SEQ ID NO: 5805 - DNA, 19 bp, Homo sapiens
  siRNA target sequence for KIAA1443 (NM_020834.1,1599-1617).
ggtagtttgtctagatgaa

SEQ ID NO: 5806 - DNA, 19 bp, Homo sapiens
  siRNA target sequence for KIAA1474 (NM_020856.1,347-365).
gagtgtccatatgatcaaa

SEQ ID NO: 5807 - DNA, 19 bp, Homo sapiens
  siRNA target sequence for KIAA1474 (NM_020856.1,428-446).
ccctgccactcggaagaaa

SEQ ID NO: 5808 - DNA, 19 bp, Homo sapiens
  siRNA target sequence for KIAA1474 (NM_020856.1,520-538).
ccaacgatgcacttcagaa

SEQ ID NO: 5809 - DNA, 19 bp, Homo sapiens
  siRNA target sequence for KIAA1474 (NM_020856.1,550-568).
cttacatcacgccaaataa

SEQ ID NO: 5810 - DNA, 19 bp, Homo sapiens
  siRNA target sequence for KIAA1474 (NM_020856.1,765-783).
gtcacacctaccatcacaa

SEQ ID NO: 5811 - DNA, 19 bp, Homo sapiens
  siRNA target sequence for KIAA1474 (NM_020856.1,915-933).
gtcactgacgagaaaccta

SEQ ID NO: 5812 - DNA, 19 bp, Homo sapiens
  siRNA target sequence for KIAA1474 (NM_020856.1,963-981).
gagaagtgtgacatctctt

SEQ ID NO: 5813 - DNA, 19 bp, Homo sapiens
  siRNA target sequence for KIAA1474 (NM_020856.1,968-986).
gtgtgacatctcttccaaa

SEQ ID NO: 5814 - DNA, 19 bp, Homo sapiens
  siRNA target sequence for KIAA1474 (NM_020856.1,1063-1081).
cagtgacatccgcaatcaa

SEQ ID NO: 5815 - DNA, 19 bp, Homo sapiens
  siRNA target sequence for KIAA1474 (NM_020856.1,1065-1083).
gtgacatccgcaatcaaca

SEQ ID NO: 5816 - DNA, 19 bp, Homo sapiens
  siRNA target sequence for KIAA1474 (NM_020856.1,1140-1158).
caacttcccaacatgatga

SEQ ID NO: 5817 - DNA, 19 bp, Homo sapiens
  siRNA target sequence for KIAA1474 (NM_020856.1,1205-1223).
gtttggcaacagtgagatt

SEQ ID NO: 5818 - DNA, 19 bp, Homo sapiens
  siRNA target sequence for KIAA1474 (NM_020856.1,1279-1297).
ccatgcccaagacaaactt

SEQ ID NO: 5819 - DNA, 19 bp, Homo sapiens
  siRNA target sequence for KIAA1474 (NM_020856.1,1283-1301).
gcccaagacaaactttcat

SEQ ID NO: 5820 - DNA, 19 bp, Homo sapiens
  siRNA target sequence for KIAA1474 (NM_020856.1,1365-1383).
gagccggatgggaagcttt

SEQ ID NO: 5821 - DNA, 19 bp, Homo sapiens
  siRNA target sequence for KIAA1474 (NM_020856.1,1425-1443).
gtcggggaacccatcaaga

SEQ ID NO: 5822 - DNA, 19 bp, Homo sapiens
  siRNA target sequence for KIAA1474 (NM_020856.1,1617-1635).
cctgaacagccttttgtta

SEQ ID NO: 5823 - DNA, 19 bp, Homo sapiens
  siRNA target sequence for KIAA1474 (NM_020856.1,1618-1636).
ctgaacagccttttgttaa

SEQ ID NO: 5824 - DNA, 19 bp, Homo sapiens
  siRNA target sequence for KIAA1474 (NM_020856.1,1652-1670).
gcagtcagtcatgaacatt

SEQ ID NO: 5825 - DNA, 19 bp, Homo sapiens
  siRNA target sequence for KIAA1474 (NM_020856.1,1710-1728).
gaccccatgagcatgcttt

SEQ ID NO: 5826 - DNA, 19 bp, Homo sapiens
  siRNA target sequence for KIAA1474 (NM_020856.1,1803-1821).
cacctcgaccgctatttct

SEQ ID NO: 5827 - DNA, 19 bp, Homo sapiens
  siRNA target sequence for KIAA1474 (NM_020856.1,1839-1857).
cagcccatagacttgacaa

SEQ ID NO: 5828 - DNA, 19 bp, Homo sapiens
  siRNA target sequence for KIAA1474 (NM_020856.1,1957-1975).
catctgccgtcgtatcatt

SEQ ID NO: 5829 - DNA, 19 bp, Homo sapiens
  siRNA target sequence for KIAA1474 (NM_020856.1,1960-1978).
ctgccgtcgtatcattcat

SEQ ID NO: 5830 - DNA, 19 bp, Homo sapiens
  siRNA target sequence for KIAA1474 (NM_020856.1,1962-1980).
gccgtcgtatcattcatgt

SEQ ID NO: 5831 - DNA, 19 bp, Homo sapiens
  siRNA target sequence for KIAA1474 (NM_020856.1,1965-1983).
gtcgtatcattcatgtcaa

SEQ ID NO: 5832 - DNA, 19 bp, Homo sapiens
  siRNA target sequence for KIAA1474 (NM_020856.1,1968-1986).
gtatcattcatgtcaaact

SEQ ID NO: 5833 - DNA, 19 bp, Homo sapiens
  siRNA target sequence for KIAA1474 (NM_020856.1,2000-2018).
gaatgccttgtcagatata

SEQ ID NO: 5834 - DNA, 19 bp, Homo sapiens
  siRNA target sequence for KIAA1474 (NM_020856.1,2011-2029).
cagatatatccgatatgct

SEQ ID NO: 5835 - DNA, 19 bp, Homo sapiens
  siRNA target sequence for KIAA1474 (NM_020856.1,2043-2061).
gagagccacacgtcaaaat

SEQ ID NO: 5836 - DNA, 19 bp, Homo sapiens
  siRNA target sequence for KIAA1474 (NM_020856.1,2081-2099).
ctccgagaagtctgacatt

SEQ ID NO: 5837 - DNA, 19 bp, Homo sapiens
  siRNA target sequence for KIAA1474 (NM_020856.1,2083-2101).
ccgagaagtctgacattga

SEQ ID NO: 5838 - DNA, 19 bp, Homo sapiens
  siRNA target sequence for KIAA1474 (NM_020856.1,2227-2245).
cctcagaagggaagtacat

SEQ ID NO: 5839 - DNA, 19 bp, Homo sapiens
  siRNA target sequence for KIAA1474 (NM_020856.1,2265-2283).
caggagcggatgcatatct

SEQ ID NO: 5840 - DNA, 19 bp, Homo sapiens
  siRNA target sequence for KIAA1474 (NM_020856.1,2394-2412).
caccccgtcttcttttgta

SEQ ID NO: 5841 - DNA, 19 bp, Homo sapiens
  siRNA target sequence for KIAA1474 (NM_020856.1,2399-2417).
cgtcttcttttgtaacgat

SEQ ID NO: 5842 - DNA, 19 bp, Homo sapiens
  siRNA target sequence for KIAA1474 (NM_020856.1,2415-2433).
gattgtgcgtcccaaatca

SEQ ID NO: 5843 - DNA, 19 bp, Homo sapiens
  siRNA target sequence for KIAA1474 (NM_020856.1,2481-2499).
cggctacgggacttatcca

SEQ ID NO: 5844 - DNA, 19 bp, Homo sapiens
  siRNA target sequence for KIAA1474 (NM_020856.1,2482-2500).
ggctacgggacttatccaa

SEQ ID NO: 5845 - DNA, 19 bp, Homo sapiens
  siRNA target sequence for KIAA1474 (NM_020856.1,2483-2501).
gctacgggacttatccaaa

SEQ ID NO: 5846 - DNA, 19 bp, Homo sapiens
  siRNA target sequence for KIAA1474 (NM_020856.1,2502-2520).
ctgtccaccgaacagatta

SEQ ID NO: 5847 - DNA, 19 bp, Homo sapiens
  siRNA target sequence for KIAA1474 (NM_020856.1,2524-2542).
gtcagatagcacaaaccaa

SEQ ID NO: 5848 - DNA, 19 bp, Homo sapiens
  siRNA target sequence for KIAA1474 (NM_020856.1,2629-2647).
ccagcaagcacgctgttaa

SEQ ID NO: 5849 - DNA, 19 bp, Homo sapiens
  siRNA target sequence for KIAA1474 (NM_020856.1,2630-2648).
cagcaagcacgctgttaaa

SEQ ID NO: 5850 - DNA, 19 bp, Homo sapiens
  siRNA target sequence for KIAA1474 (NM_020856.1,2633-2651).
caagcacgctgttaaactt

SEQ ID NO: 5851 - DNA, 19 bp, Homo sapiens
  siRNA target sequence for KIAA1474 (NM_020856.1,2660-2678).
caaaacacacgggaaatct

SEQ ID NO: 5852 - DNA, 19 bp, Homo sapiens
  siRNA target sequence for KIAA1474 (NM_020856.1,2680-2698).
cggaagaccaccttctgta

SEQ ID NO: 5853 - DNA, 19 bp, Homo sapiens
  siRNA target sequence for KIAA1474 (NM_020856.1,2685-2703).
gaccaccttctgtatgtct

SEQ ID NO: 5854 - DNA, 19 bp, Homo sapiens
  siRNA target sequence for KIAA1618 (NM_020954.1,175-193).
gaggaaacccccaagttct

SEQ ID NO: 5855 - DNA, 19 bp, Homo sapiens
  siRNA target sequence for KIAA1618 (NM_020954.1,227-245).
cccccatagcagattctga

SEQ ID NO: 5856 - DNA, 19 bp, Homo sapiens
  siRNA target sequence for KIAA1618 (NM_020954.1,269-287).
cggcctcggagggtgaaat

SEQ ID NO: 5857 - DNA, 19 bp, Homo sapiens
  siRNA target sequence for KIAA1618 (NM_020954.1,272-290).
cctcggagggtgaaatgga

SEQ ID NO: 5858 - DNA, 19 bp, Homo sapiens
  siRNA target sequence for KIAA1618 (NM_020954.1,363-381).
cgaggagccctgttccaaa

SEQ ID NO: 5859 - DNA, 19 bp, Homo sapiens
  siRNA target sequence for KIAA1618 (NM_020954.1,389-407).
ggaccgtccaagaaagcaa

SEQ ID NO: 5860 - DNA, 19 bp, Homo sapiens
  siRNA target sequence for KIAA1618 (NM_020954.1,390-408).
gaccgtccaagaaagcaaa

SEQ ID NO: 5861 - DNA, 19 bp, Homo sapiens
  siRNA target sequence for KIAA1618 (NM_020954.1,392-410).
ccgtccaagaaagcaaaaa

SEQ ID NO: 5862 - DNA, 19 bp, Homo sapiens
  siRNA target sequence for KIAA1618 (NM_020954.1,831-849).
ccattctaggactgaagat

SEQ ID NO: 5863 - DNA, 19 bp, Homo sapiens
  siRNA target sequence for KIAA1618 (NM_020954.1,1271-1289).
gaggagtcaccgtgttctt

SEQ ID NO: 5864 - DNA, 19 bp, Homo sapiens
  siRNA target sequence for KIAA1618 (NM_020954.1,1421-1439).
gtcatgaccgcgttcttgt

SEQ ID NO: 5865 - DNA, 19 bp, Homo sapiens
  siRNA target sequence for KIAA1618 (NM_020954.1,1435-1453).
cttgttgaaggcattgtct

SEQ ID NO: 5866 - DNA, 19 bp, Homo sapiens
  siRNA target sequence for KIAA1618 (NM_020954.1,1460-1478).
ccaagaagcacctagataa

SEQ ID NO: 5867 - DNA, 19 bp, Homo sapiens
  siRNA target sequence for KIAA1618 (NM_020954.1,1486-1504).
ccttacaagtacgtcattt

SEQ ID NO: 5868 - DNA, 19 bp, Homo sapiens
  siRNA target sequence for KIAA1618 (NM_020954.1,1491-1509).
caagtacgtcatttataat

SEQ ID NO: 5869 - DNA, 19 bp, Homo sapiens
  siRNA target sequence for KIAA1618 (NM_020954.1,1569-1587).
caaccgctgtctgttcata

SEQ ID NO: 5870 - DNA, 19 bp, Homo sapiens
  siRNA target sequence for KIAA1618 (NM_020954.1,1572-1590).
ccgctgtctgttcataaaa

SEQ ID NO: 5871 - DNA, 19 bp, Homo sapiens
  siRNA target sequence for KIAA1618 (NM_020954.1,1573-1591).
cgctgtctgttcataaaat

SEQ ID NO: 5872 - DNA, 19 bp, Homo sapiens
  siRNA target sequence for KIAA1618 (NM_020954.1,1575-1593).
ctgtctgttcataaaatct

SEQ ID NO: 5873 - DNA, 19 bp, Homo sapiens
  siRNA target sequence for KIAA1618 (NM_020954.1,1610-1628).
gagactggcatcagtacta

SEQ ID NO: 5874 - DNA, 19 bp, Homo sapiens
  siRNA target sequence for KIAA1618 (NM_020954.1,1616-1634).
ggcatcagtactatgacat

SEQ ID NO: 5875 - DNA, 19 bp, Homo sapiens
  siRNA target sequence for KIAA1618 (NM_020954.1,1617-1635).
gcatcagtactatgacata

SEQ ID NO: 5876 - DNA, 19 bp, Homo sapiens
  siRNA target sequence for KIAA1618 (NM_020954.1,1621-1639).
cagtactatgacatagttt

SEQ ID NO: 5877 - DNA, 19 bp, Homo sapiens
  siRNA target sequence for KIAA1618 (NM_020954.1,1623-1641).
gtactatgacatagtttat

SEQ ID NO: 5878 - DNA, 19 bp, Homo sapiens
  siRNA target sequence for KIAA1618 (NM_020954.1,1939-1957).
ccattgccggacggaaaaa

SEQ ID NO: 5879 - DNA, 19 bp, Homo sapiens
  siRNA target sequence for KIAA1618 (NM_020954.1,1951-1969).
ggaaaaagcacggactttt

SEQ ID NO: 5880 - DNA, 19 bp, Homo sapiens
  siRNA target sequence for KIAA1618 (NM_020954.1,1952-1970).
gaaaaagcacggacttttt

SEQ ID NO: 5881 - DNA, 19 bp, Homo sapiens
  siRNA target sequence for KIAA1618 (NM_020954.1,2096-2114).
ccagctcaccagatgagtt

SEQ ID NO: 5882 - DNA, 19 bp, Homo sapiens
  siRNA target sequence for KIAA1618 (NM_020954.1,2097-2115).
cagctcaccagatgagttt

SEQ ID NO: 5883 - DNA, 19 bp, Homo sapiens
  siRNA target sequence for KIAA1618 (NM_020954.1,2099-2117).
gctcaccagatgagtttca

SEQ ID NO: 5884 - DNA, 19 bp, Homo sapiens
  siRNA target sequence for KIAA1618 (NM_020954.1,2327-2345).
cgttccgggaacaaatgct

SEQ ID NO: 5885 - DNA, 19 bp, Homo sapiens
  siRNA target sequence for KIAA1618 (NM_020954.1,2328-2346).
gttccgggaacaaatgcta

SEQ ID NO: 5886 - DNA, 19 bp, Homo sapiens
  siRNA target sequence for KIAA1618 (NM_020954.1,2351-2369).
cgagttccctacttcagtt

SEQ ID NO: 5887 - DNA, 19 bp, Homo sapiens
  siRNA target sequence for KIAA1618 (NM_020954.1,2352-2370).
gagttccctacttcagttt

SEQ ID NO: 5888 - DNA, 19 bp, Homo sapiens
  siRNA target sequence for KIAA1618 (NM_020954.1,2354-2372).
gttccctacttcagtttat

SEQ ID NO: 5889 - DNA, 19 bp, Homo sapiens
  siRNA target sequence for KIAA1618 (NM_020954.1,2358-2376).
cctacttcagtttatgaga

SEQ ID NO: 5890 - DNA, 19 bp, Homo sapiens
  siRNA target sequence for KIAA1618 (NM_020954.1,2442-2460).
gagtcacctggttatgtat

SEQ ID NO: 5891 - DNA, 19 bp, Homo sapiens
  siRNA target sequence for KIAA1618 (NM_020954.1,2586-2604).
gaacgttcagaacatttta

SEQ ID NO: 5892 - DNA, 19 bp, Homo sapiens
  siRNA target sequence for KIAA1618 (NM_020954.1,2628-2646).
cacttaccgggacaagatt

SEQ ID NO: 5893 - DNA, 19 bp, Homo sapiens
  siRNA target sequence for KIAA1618 (NM_020954.1,2714-2732).
gcacaaagctacttaagtt

SEQ ID NO: 5894 - DNA, 19 bp, Homo sapiens
  siRNA target sequence for KIAA1618 (NM_020954.1,2736-2754).
cgagctgccagccttatct

SEQ ID NO: 5895 - DNA, 19 bp, Homo sapiens
  siRNA target sequence for KIAA1618 (NM_020954.1,2747-2765).
ccttatctgccgagattgt

SEQ ID NO: 5896 - DNA, 19 bp, Homo sapiens
  siRNA target sequence for KIAA1618 (NM_020954.1,2760-2778).
gattgtctgcagaatgatt

SEQ ID NO: 5897 - DNA, 19 bp, Homo sapiens
  siRNA target sequence for KIAA1618 (NM_020954.1,2766-2784).
ctgcagaatgattagactt

SEQ ID NO: 5898 - DNA, 19 bp, Homo sapiens
  siRNA target sequence for KIAA1618 (NM_020954.1,2769-2787).
cagaatgattagacttcta

SEQ ID NO: 5899 - DNA, 19 bp, Homo sapiens
  siRNA target sequence for KIAA1618 (NM_020954.1,2856-2874).
gacccttgctgctacgaaa

SEQ ID NO: 5900 - DNA, 19 bp, Homo sapiens
  siRNA target sequence for KIAA1618 (NM_020954.1,2860-2878).
cttgctgctacgaaaaggt

SEQ ID NO: 5901 - DNA, 19 bp, Homo sapiens
  siRNA target sequence for KIAA1618 (NM_020954.1,2876-2894).
ggtggctccgagaagtttt

SEQ ID NO: 5902 - DNA, 19 bp, Homo sapiens
  siRNA target sequence for KIAA1618 (NM_020954.1,2877-2895).
gtggctccgagaagttttt

SEQ ID NO: 5903 - DNA, 19 bp, Homo sapiens
  siRNA target sequence for KIAA1618 (NM_020954.1,2884-2902).
cgagaagtttttacaaaga

SEQ ID NO: 5904 - DNA, 19 bp, Homo sapiens
  siRNA target sequence for KIAA1618 (NM_020954.1,2901-2919).
gaacatgctcacatcttca

SEQ ID NO: 5905 - DNA, 19 bp, Homo sapiens
  siRNA target sequence for KIAA1618 (NM_020954.1,2931-2949).
cacatacgtcaaggaaatt

SEQ ID NO: 5906 - DNA, 19 bp, Homo sapiens
  siRNA target sequence for KIAA1618 (NM_020954.1,2933-2951).
catacgtcaaggaaattga

SEQ ID NO: 5907 - DNA, 19 bp, Homo sapiens
  siRNA target sequence for KIAA1618 (NM_020954.1,3155-3173).
cagcctgccaggtgaacaa

SEQ ID NO: 5908 - DNA, 19 bp, Homo sapiens
  siRNA target sequence for KIAA1618 (NM_020954.1,3224-3242).
cccagctaagggctatgaa

SEQ ID NO: 5909 - DNA, 19 bp, Homo sapiens
  siRNA target sequence for KIAA1618 (NM_020954.1,3258-3276).
cagctcctccgctaactca

SEQ ID NO: 5910 - DNA, 19 bp, Homo sapiens
  siRNA target sequence for KIAA1618 (NM_020954.1,3264-3282).
ctccgctaactcagagatt

SEQ ID NO: 5911 - DNA, 19 bp, Homo sapiens
  siRNA target sequence for KIAA1618 (NM_020954.1,3313-3331).
ggcaatggcgctgaaatct

SEQ ID NO: 5912 - DNA, 19 bp, Homo sapiens
  siRNA target sequence for KLF12 (NM_007249.3,276-294).
gccggcagtcagagtcaaa

SEQ ID NO: 5913 - DNA, 19 bp, Homo sapiens
  siRNA target sequence for KLF12 (NM_007249.3,279-297).
ggcagtcagagtcaaaaca

SEQ ID NO: 5914 - DNA, 19 bp, Homo sapiens
  siRNA target sequence for KLF12 (NM_007249.3,323-341).
ctccaaacgtccacaacta

SEQ ID NO: 5915 - DNA, 19 bp, Homo sapiens
  siRNA target sequence for KLF12 (NM_007249.3,336-354).
caactatcccgatatggaa

SEQ ID NO: 5916 - DNA, 19 bp, Homo sapiens
  siRNA target sequence for KLF12 (NM_007249.3,364-382).
ctgttgctaaataatgtga

SEQ ID NO: 5917 - DNA, 19 bp, Homo sapiens
  siRNA target sequence for KLF12 (NM_007249.3,395-413).
cggaggactcgttatctgt

SEQ ID NO: 5918 - DNA, 19 bp, Homo sapiens
  siRNA target sequence for KLF12 (NM_007249.3,396-414).
ggaggactcgttatctgta

SEQ ID NO: 5919 - DNA, 19 bp, Homo sapiens
  siRNA target sequence for KLF12 (NM_007249.3,399-417).
ggactcgttatctgtagat

SEQ ID NO: 5920 - DNA, 19 bp, Homo sapiens
  siRNA target sequence for KLF12 (NM_007249.3,436-454).
gagccagtggacttgtcaa

SEQ ID NO: 5921 - DNA, 19 bp, Homo sapiens
  siRNA target sequence for KLF12 (NM_007249.3,438-456).
gccagtggacttgtcaata

SEQ ID NO: 5922 - DNA, 19 bp, Homo sapiens
  siRNA target sequence for KLF12 (NM_007249.3,439-457).
ccagtggacttgtcaataa

SEQ ID NO: 5923 - DNA, 19 bp, Homo sapiens
  siRNA target sequence for KLF12 (NM_007249.3,568-586).
gcctcatccccaactgtta

SEQ ID NO: 5924 - DNA, 19 bp, Homo sapiens
  siRNA target sequence for KLF12 (NM_007249.3,569-587).
cctcatccccaactgttat

SEQ ID NO: 5925 - DNA, 19 bp, Homo sapiens
  siRNA target sequence for KLF12 (NM_007249.3,583-601).
gttatcacatcagtatctt

SEQ ID NO: 5926 - DNA, 19 bp, Homo sapiens
  siRNA target sequence for KLF12 (NM_007249.3,608-626).
catcttcgtcaacagtatt

SEQ ID NO: 5927 - DNA, 19 bp, Homo sapiens
  siRNA target sequence for KLF12 (NM_007249.3,702-720).
gccttcaagtcccatgaat

SEQ ID NO: 5928 - DNA, 19 bp, Homo sapiens
  siRNA target sequence for KLF12 (NM_007249.3,713-731).
ccatgaatttacagtctaa

SEQ ID NO: 5929 - DNA, 19 bp, Homo sapiens
  siRNA target sequence for KLF12 (NM_007249.3,800-818).
ggtcacctggaaatgtgaa

SEQ ID NO: 5930 - DNA, 19 bp, Homo sapiens
  siRNA target sequence for KLF12 (NM_007249.3,803-821).
cacctggaaatgtgaacaa

SEQ ID NO: 5931 - DNA, 19 bp, Homo sapiens
  siRNA target sequence for KLF12 (NM_007249.3,886-904).
ggcctatctcccagacaaa

SEQ ID NO: 5932 - DNA, 19 bp, Homo sapiens
  siRNA target sequence for KLF12 (NM_007249.3,933-951).
gccaaatgtgaccttagat

SEQ ID NO: 5933 - DNA, 19 bp, Homo sapiens
  siRNA target sequence for KLF12 (NM_007249.3,934-952).
ccaaatgtgaccttagata

SEQ ID NO: 5934 - DNA, 19 bp, Homo sapiens
  siRNA target sequence for KLF12 (NM_007249.3,942-960).
gaccttagatagcgttaat

SEQ ID NO: 5935 - DNA, 19 bp, Homo sapiens
  siRNA target sequence for KLF12 (NM_007249.3,968-986).
gatctacggccctttccat

SEQ ID NO: 5936 - DNA, 19 bp, Homo sapiens
  siRNA target sequence for KLF12 (NM_007249.3,1009-1027).
catccgtccccagtatcaa

SEQ ID NO: 5937 - DNA, 19 bp, Homo sapiens
  siRNA target sequence for KLF12 (NM_007249.3,1035-1053).
gggcaatcgaatgaataat

SEQ ID NO: 5938 - DNA, 19 bp, Homo sapiens
  siRNA target sequence for KLF12 (NM_007249.3,1037-1055).
gcaatcgaatgaataatca

SEQ ID NO: 5939 - DNA, 19 bp, Homo sapiens
  siRNA target sequence for KLF12 (NM_007249.3,1038-1056).
caatcgaatgaataatcaa

SEQ ID NO: 5940 - DNA, 19 bp, Homo sapiens
  siRNA target sequence for KLF12 (NM_007249.3,1102-1120).
cgccagagacggtctgaat

SEQ ID NO: 5941 - DNA, 19 bp, Homo sapiens
  siRNA target sequence for KLF12 (NM_007249.3,1141-1159).
cgtatccacagatgtgatt

SEQ ID NO: 5942 - DNA, 19 bp, Homo sapiens
  siRNA target sequence for KLF12 (NM_007249.3,1204-1222).
gctcaccggaggacacata

SEQ ID NO: 5943 - DNA, 19 bp, Homo sapiens
  siRNA target sequence for KLF12 (NM_007249.3,1269-1287).
gttcgctcgttcagatgaa

SEQ ID NO: 5944 - DNA, 19 bp, Homo sapiens
  siRNA target sequence for KLF12 (NM_007249.3,1293-1311).
gaggcattaccgcaaacat

SEQ ID NO: 5945 - DNA, 19 bp, Homo sapiens
  siRNA target sequence for KLF12 (NM_007249.3,1353-1371).
cttttcccggtcagatcat

SEQ ID NO: 5946 - DNA, 19 bp, Homo sapiens
  siRNA target sequence for KLF3 (NM_016531.2,212-230).
cagtgtcatacccatctaa

SEQ ID NO: 5947 - DNA, 19 bp, Homo sapiens
  siRNA target sequence for KLF3 (NM_016531.2,214-232).
gtgtcatacccatctaatt

SEQ ID NO: 5948 - DNA, 19 bp, Homo sapiens
  siRNA target sequence for KLF3 (NM_016531.2,218-236).
catacccatctaattacat

SEQ ID NO: 5949 - DNA, 19 bp, Homo sapiens
  siRNA target sequence for KLF3 (NM_016531.2,227-245).
ctaattacatggaatccat

SEQ ID NO: 5950 - DNA, 19 bp, Homo sapiens
  siRNA target sequence for KLF3 (NM_016531.2,242-260).
ccatgaagcctaacaagta

SEQ ID NO: 5951 - DNA, 19 bp, Homo sapiens
  siRNA target sequence for KLF3 (NM_016531.2,314-332).
gtctgtcgcacggaataca

SEQ ID NO: 5952 - DNA, 19 bp, Homo sapiens
  siRNA target sequence for KLF3 (NM_016531.2,316-334).
ctgtcgcacggaatacaga

SEQ ID NO: 5953 - DNA, 19 bp, Homo sapiens
  siRNA target sequence for KLF3 (NM_016531.2,392-410).
cgccctcctctctgaagtt

SEQ ID NO: 5954 - DNA, 19 bp, Homo sapiens
  siRNA target sequence for KLF3 (NM_016531.2,461-479).
gcccaccgataaaaaaata

SEQ ID NO: 5955 - DNA, 19 bp, Homo sapiens
  siRNA target sequence for KLF3 (NM_016531.2,463-481).
ccaccgataaaaaaatact

SEQ ID NO: 5956 - DNA, 19 bp, Homo sapiens
  siRNA target sequence for KLF3 (NM_016531.2,549-567).
cctctcgcggcatggaata

SEQ ID NO: 5957 - DNA, 19 bp, Homo sapiens
  siRNA target sequence for KLF3 (NM_016531.2,613-631).
cccgtcccctttatgtaca

SEQ ID NO: 5958 - DNA, 19 bp, Homo sapiens
  siRNA target sequence for KLF3 (NM_016531.2,616-634).
gtcccctttatgtacacaa

SEQ ID NO: 5959 - DNA, 19 bp, Homo sapiens
  siRNA target sequence for KLF3 (NM_016531.2,649-667).
cctctcatggtctccttat

SEQ ID NO: 5960 - DNA, 19 bp, Homo sapiens
  siRNA target sequence for KLF3 (NM_016531.2,695-713).
gcatgcaagtacctgtaat

SEQ ID NO: 5961 - DNA, 19 bp, Homo sapiens
  siRNA target sequence for KLF3 (NM_016531.2,707-725).
ctgtaattgaatcatatga

SEQ ID NO: 5962 - DNA, 19 bp, Homo sapiens
  siRNA target sequence for KLF3 (NM_016531.2,842-860).
cattgttgcaagagaatca

SEQ ID NO: 5963 - DNA, 19 bp, Homo sapiens
  siRNA target sequence for KLF3 (NM_016531.2,879-897).
gcctgggaagagaccttta

SEQ ID NO: 5964 - DNA, 19 bp, Homo sapiens
  siRNA target sequence for KLF3 (NM_016531.2,903-921).
ggaatccccggatactcaa

SEQ ID NO: 5965 - DNA, 19 bp, Homo sapiens
  siRNA target sequence for KLF3 (NM_016531.2,904-922).
gaatccccggatactcaaa

SEQ ID NO: 5966 - DNA, 19 bp, Homo sapiens
  siRNA target sequence for KLF3 (NM_016531.2,908-926).
ccccggatactcaaaggaa

SEQ ID NO: 5967 - DNA, 19 bp, Homo sapiens
  siRNA target sequence for KLF3 (NM_016531.2,932-950).
ggatacacagatgtgatta

SEQ ID NO: 5968 - DNA, 19 bp, Homo sapiens
  siRNA target sequence for KLF3 (NM_016531.2,1066-1084).
cggtctgatgaactaacaa

SEQ ID NO: 5969 - DNA, 19 bp, Homo sapiens
  siRNA target sequence for KLF3 (NM_016531.2,1068-1086).
gtctgatgaactaacaaga

SEQ ID NO: 5970 - DNA, 19 bp, Homo sapiens
  siRNA target sequence for KLF3 (NM_016531.2,1072-1090).
gatgaactaacaagacatt

SEQ ID NO: 5971 - DNA, 19 bp, Homo sapiens
  siRNA target sequence for KLF4 (NM_004235.3,345-363).
gcgctgctcccatctttct

SEQ ID NO: 5972 - DNA, 19 bp, Homo sapiens
  siRNA target sequence for KLF4 (NM_004235.3,583-601).
gagagaccgaggagttcaa

SEQ ID NO: 5973 - DNA, 19 bp, Homo sapiens
  siRNA target sequence for KLF4 (NM_004235.3,618-636).
gactttattctctccaatt

SEQ ID NO: 5974 - DNA, 19 bp, Homo sapiens
  siRNA target sequence for KLF4 (NM_004235.3,1116-1134).
cgcacgtgccccaagatca

SEQ ID NO: 5975 - DNA, 19 bp, Homo sapiens
  siRNA target sequence for KLF4 (NM_004235.3,1117-1135).
gcacgtgccccaagatcaa

SEQ ID NO: 5976 - DNA, 19 bp, Homo sapiens
  siRNA target sequence for KLF4 (NM_004235.3,1351-1369).
ccttcctgcccgatcagat

SEQ ID NO: 5977 - DNA, 19 bp, Homo sapiens
  siRNA target sequence for KLF4 (NM_004235.3,1482-1500).
gccacccacacttgtgatt

SEQ ID NO: 5978 - DNA, 19 bp, Homo sapiens
  siRNA target sequence for KLF4 (NM_004235.3,1483-1501).
ccacccacacttgtgatta

SEQ ID NO: 5979 - DNA, 19 bp, Homo sapiens
  siRNA target sequence for KLF4 (NM_004235.3,1593-1611).
gacggctgtggatggaaat

SEQ ID NO: 5980 - DNA, 19 bp, Homo sapiens
  siRNA target sequence for KLF4 (NM_004235.3,1664-1682).
cccgttccagtgccaaaaa

SEQ ID NO: 5981 - DNA, 19 bp, Homo sapiens
  siRNA target sequence for KLF4 (NM_004235.3,1665-1683).
ccgttccagtgccaaaaat

SEQ ID NO: 5982 - DNA, 19 bp, Homo sapiens
  siRNA target sequence for KLF4 (NM_004235.3,1713-1731).
ctcgccttacacatgaaga

SEQ ID NO: 5983 - DNA, 19 bp, Homo sapiens
  siRNA target sequence for KLF7 (NM_003709.1,326-344).
ggacgtgttggctagttat

SEQ ID NO: 5984 - DNA, 19 bp, Homo sapiens
  siRNA target sequence for KLF7 (NM_003709.1,327-345).
gacgtgttggctagttata

SEQ ID NO: 5985 - DNA, 19 bp, Homo sapiens
  siRNA target sequence for KLF7 (NM_003709.1,330-348).
gtgttggctagttatagta

SEQ ID NO: 5986 - DNA, 19 bp, Homo sapiens
  siRNA target sequence for KLF7 (NM_003709.1,337-355).
ctagttatagtatattcca

SEQ ID NO: 5987 - DNA, 19 bp, Homo sapiens
  siRNA target sequence for KLF7 (NM_003709.1,380-398).
cggctacttctcagcttta

SEQ ID NO: 5988 - DNA, 19 bp, Homo sapiens
  siRNA target sequence for KLF7 (NM_003709.1,420-438).
cagcagacatgccttgaat

SEQ ID NO: 5989 - DNA, 19 bp, Homo sapiens
  siRNA target sequence for KLF7 (NM_003709.1,526-544).
cgtgcattgaggaaagctt

SEQ ID NO: 5990 - DNA, 19 bp, Homo sapiens
  siRNA target sequence for KLF7 (NM_003709.1,598-616).
gctcggcagtggacatctt

SEQ ID NO: 5991 - DNA, 19 bp, Homo sapiens
  siRNA target sequence for KLF7 (NM_003709.1,625-643).
gggacaagttgctatctga

SEQ ID NO: 5992 - DNA, 19 bp, Homo sapiens
  siRNA target sequence for KLF7 (NM_003709.1,713-731).
caacgcagtgacctcatta

SEQ ID NO: 5993 - DNA, 19 bp, Homo sapiens
  siRNA target sequence for KLF7 (NM_003709.1,759-777).
cgccatctggtcaaaacct

SEQ ID NO: 5994 - DNA, 19 bp, Homo sapiens
  siRNA target sequence for KLF7 (NM_003709.1,765-783).
ctggtcaaaacctcacaaa

SEQ ID NO: 5995 - DNA, 19 bp, Homo sapiens
  siRNA target sequence for KLF7 (NM_003709.1,802-820).
gcacggtgacgttgaaact

SEQ ID NO: 5996 - DNA, 19 bp, Homo sapiens
  siRNA target sequence for KLF7 (NM_003709.1,838-856).
ctctcagctccgtaaaggt

SEQ ID NO: 5997 - DNA, 19 bp, Homo sapiens
  siRNA target sequence for KLF7 (NM_003709.1,948-966).
gaagcatgtcccgaaaaca

SEQ ID NO: 5998 - DNA, 19 bp, Homo sapiens
  siRNA target sequence for KLF7 (NM_003709.1,974-992).
ggttcaccgctgtcagttt

SEQ ID NO: 5999 - DNA, 19 bp, Homo sapiens
  siRNA target sequence for KLF7 (NM_003709.1,975-993).
gttcaccgctgtcagttta

SEQ ID NO: 6000 - DNA, 19 bp, Homo sapiens
  siRNA target sequence for KLF7 (NM_003709.1,995-1013).
cgggtgccggaaagtttat

SEQ ID NO: 6001 - DNA, 19 bp, Homo sapiens
  siRNA target sequence for KLF7 (NM_003709.1,996-1014).
gggtgccggaaagtttata

SEQ ID NO: 6002 - DNA, 19 bp, Homo sapiens
  siRNA target sequence for KLF7 (NM_003709.1,998-1016).
gtgccggaaagtttataca

SEQ ID NO: 6003 - DNA, 19 bp, Homo sapiens
  siRNA target sequence for KLF7 (NM_003709.1,1000-1018).
gccggaaagtttatacaaa

SEQ ID NO: 6004 - DNA, 19 bp, Homo sapiens
  siRNA target sequence for L3MBTL (NM_015478.4,486-504).
ccaggagcggtcagtcata

SEQ ID NO: 6005 - DNA, 19 bp, Homo sapiens
  siRNA target sequence for L3MBTL (NM_015478.4,912-930).
cctacgcctgcactttgat

SEQ ID NO: 6006 - DNA, 19 bp, Homo sapiens
  siRNA target sequence for L3MBTL (NM_015478.4,1256-1274).
gggatgatacttatgacta

SEQ ID NO: 6007 - DNA, 19 bp, Homo sapiens
  siRNA target sequence for L3MBTL (NM_015478.4,1374-1392).
cttctgttgggagaaatat

SEQ ID NO: 6008 - DNA, 19 bp, Homo sapiens
  siRNA target sequence for L3MBTL (NM_015478.4,1454-1472).
gcttcctggtcaatatgaa

SEQ ID NO: 6009 - DNA, 19 bp, Homo sapiens
  siRNA target sequence for L3MBTL (NM_015478.4,1534-1552).
gaggaccatcggataaaga

SEQ ID NO: 6010 - DNA, 19 bp, Homo sapiens
  siRNA target sequence for L3MBTL (NM_015478.4,1568-1586).
ggagtcatggctatgattt

SEQ ID NO: 6011 - DNA, 19 bp, Homo sapiens
  siRNA target sequence for L3MBTL (NM_015478.4,1801-1819).
catgtcacaggcaagttca

SEQ ID NO: 6012 - DNA, 19 bp, Homo sapiens
  siRNA target sequence for L3MBTL (NM_015478.4,1953-1971).
ccatcacggccgaattgga

SEQ ID NO: 6013 - DNA, 19 bp, Homo sapiens
  siRNA target sequence for L3MBTL (NM_015478.4,1972-1990).
cgccctccgaagtatcgaa

SEQ ID NO: 6014 - DNA, 19 bp, Homo sapiens
  siRNA target sequence for L3MBTL (NM_015478.4,1973-1991).
gccctccgaagtatcgaaa

SEQ ID NO: 6015 - DNA, 19 bp, Homo sapiens
  siRNA target sequence for L3MBTL (NM_015478.4,1976-1994).
ctccgaagtatcgaaagat

SEQ ID NO: 6016 - DNA, 19 bp, Homo sapiens
  siRNA target sequence for L3MBTL (NM_015478.4,2226-2244).
caaagacgaggcaagaata

SEQ ID NO: 6017 - DNA, 19 bp, Homo sapiens
  siRNA target sequence for L3MBTL (NM_015478.4,2245-2263).
gtcagagtgacccatgtat

SEQ ID NO: 6018 - DNA, 19 bp, Homo sapiens
  siRNA target sequence for L3MBTL (NM_015478.4,2247-2265).
cagagtgacccatgtatct

SEQ ID NO: 6019 - DNA, 19 bp, Homo sapiens
  siRNA target sequence for L3MBTL (NM_015478.4,2304-2322).
ccttgtgtgctcagatcat

SEQ ID NO: 6020 - DNA, 19 bp, Homo sapiens
  siRNA target sequence for L3MBTL (NM_015478.4,2372-2390).
gctctctacccactcattt

SEQ ID NO: 6021 - DNA, 19 bp, Homo sapiens
  siRNA target sequence for L3MBTL (NM_015478.4,2386-2404).
catttgcttgccaaactta

SEQ ID NO: 6022 - DNA, 19 bp, Homo sapiens
  siRNA target sequence for L3MBTL (NM_015478.4,2391-2409).
gcttgccaaacttagcttt

SEQ ID NO: 6023 - DNA, 19 bp, Homo sapiens
  siRNA target sequence for LASS2 (NM_013384.3,505-523).
ggccgtcattgtggataaa

SEQ ID NO: 6024 - DNA, 19 bp, Homo sapiens
  siRNA target sequence for LASS2 (NM_013384.3,517-535).
ggataaaccctggttctat

SEQ ID NO: 6025 - DNA, 19 bp, Homo sapiens
  siRNA target sequence for LASS2 (NM_013384.3,554-572).
gagggatatcccatacaga

SEQ ID NO: 6026 - DNA, 19 bp, Homo sapiens
  siRNA target sequence for LASS2 (NM_013384.3,587-605).
cagtattggtactacatga

SEQ ID NO: 6027 - DNA, 19 bp, Homo sapiens
  siRNA target sequence for LASS2 (NM_013384.3,589-607).
gtattggtactacatgatt

SEQ ID NO: 6028 - DNA, 19 bp, Homo sapiens
  siRNA target sequence for LASS2 (NM_013384.3,594-612).
ggtactacatgattgaact

SEQ ID NO: 6029 - DNA, 19 bp, Homo sapiens
  siRNA target sequence for LASS2 (NM_013384.3,595-613).
gtactacatgattgaactt

SEQ ID NO: 6030 - DNA, 19 bp, Homo sapiens
  siRNA target sequence for LASS2 (NM_013384.3,740-758).
cgagctgggactctaatca

SEQ ID NO: 6031 - DNA, 19 bp, Homo sapiens
  siRNA target sequence for LASS2 (NM_013384.3,741-759).
gagctgggactctaatcat

SEQ ID NO: 6032 - DNA, 19 bp, Homo sapiens
  siRNA target sequence for LASS2 (NM_013384.3,850-868).
cgtcttcgccattgttttt

SEQ ID NO: 6033 - DNA, 19 bp, Homo sapiens
  siRNA target sequence for LASS2 (NM_013384.3,851-869).
gtcttcgccattgttttta

SEQ ID NO: 6034 - DNA, 19 bp, Homo sapiens
  siRNA target sequence for LASS2 (NM_013384.3,942-960).
ctgccttctttggctatta

SEQ ID NO: 6035 - DNA, 19 bp, Homo sapiens
  siRNA target sequence for LASS2 (NM_013384.3,953-971).
ggctattacttcttcaatt

SEQ ID NO: 6036 - DNA, 19 bp, Homo sapiens
  siRNA target sequence for LASS2 (NM_013384.3,972-990).
ccatgatgggagttctaca

SEQ ID NO: 6037 - DNA, 19 bp, Homo sapiens
  siRNA target sequence for LASS2 (NM_013384.3,1026-1044).
gcatggcccacaagttcat

SEQ ID NO: 6038 - DNA, 19 bp, Homo sapiens
  siRNA target sequence for LASS2 (NM_013384.3,1027-1045).
catggcccacaagttcata

SEQ ID NO: 6039 - DNA, 19 bp, Homo sapiens
  siRNA target sequence for LASS2 (NM_013384.3,1072-1090).
cagtgaccgggaagaaaca

SEQ ID NO: 6040 - DNA, 19 bp, Homo sapiens
  siRNA target sequence for LASS2 (NM_022075.2,229-247).
gctccagaccttgtatgat

SEQ ID NO: 6041 - DNA, 19 bp, Homo sapiens
  siRNA target sequence for LASS2 (NM_022075.2,233-251).
cagaccttgtatgattact

SEQ ID NO: 6042 - DNA, 19 bp, Homo sapiens
  siRNA target sequence for LASS2 (NM_022075.2,288-306).
cctgggccgatctagaaga

SEQ ID NO: 6043 - DNA, 19 bp, Homo sapiens
  siRNA target sequence for LASS2 (NM_022075.2,328-346).
caaagcctcagatctctat

SEQ ID NO: 6044 - DNA, 19 bp, Homo sapiens
  siRNA target sequence for LASS2 (NM_022075.2,332-350).
gcctcagatctctatatca

SEQ ID NO: 6045 - DNA, 19 bp, Homo sapiens
  siRNA target sequence for LASS2 (NM_022075.2,374-392).
ctcatcgttcgatacttct

SEQ ID NO: 6046 - DNA, 19 bp, Homo sapiens
  siRNA target sequence for LASS2 (NM_022075.2,376-394).
catcgttcgatacttcttt

SEQ ID NO: 6047 - DNA, 19 bp, Homo sapiens
  siRNA target sequence for LASS2 (NM_022075.2,418-436).
ggctgccctcttgaacata

SEQ ID NO: 6048 - DNA, 19 bp, Homo sapiens
  siRNA target sequence for LASS2 (NM_022075.2,470-488).
gccaccttggaacatttct

SEQ ID NO: 6049 - DNA, 19 bp, Homo sapiens
  siRNA target sequence for LASS2 (NM_022075.2,518-536).
gtggaagtagagcttttgt

SEQ ID NO: 6050 - DNA, 19 bp, Homo sapiens
  siRNA target sequence for LASS3 (NM_178842.2,470-488).
ggcttcctccaacaataaa

SEQ ID NO: 6051 - DNA, 19 bp, Homo sapiens
  siRNA target sequence for LASS3 (NM_178842.2,510-528).
cgatggactcgtctttgta

SEQ ID NO: 6052 - DNA, 19 bp, Homo sapiens
  siRNA target sequence for LASS3 (NM_178842.2,511-529).
gatggactcgtctttgtaa

SEQ ID NO: 6053 - DNA, 19 bp, Homo sapiens
  siRNA target sequence for LASS3 (NM_178842.2,536-554).
ctcatttatacgtgacaat

SEQ ID NO: 6054 - DNA, 19 bp, Homo sapiens
  siRNA target sequence for LASS3 (NM_178842.2,640-658).
gagacagttcgaaaggtta

SEQ ID NO: 6055 - DNA, 19 bp, Homo sapiens
  siRNA target sequence for LASS3 (NM_178842.2,649-667).
cgaaaggttacaccaaata

SEQ ID NO: 6056 - DNA, 19 bp, Homo sapiens
  siRNA target sequence for LASS3 (NM_178842.2,661-679).
ccaaatactgtcttagaga

SEQ ID NO: 6057 - DNA, 19 bp, Homo sapiens
  siRNA target sequence for LASS3 (NM_178842.2,701-719).
ggcaaccattgcaaactga

SEQ ID NO: 6058 - DNA, 19 bp, Homo sapiens
  siRNA target sequence for LASS3 (NM_178842.2,711-729).
gcaaactgatatttatgga

SEQ ID NO: 6059 - DNA, 19 bp, Homo sapiens
  siRNA target sequence for LASS3 (NM_178842.2,728-746).
gactggcaaagaagtgtaa

SEQ ID NO: 6060 - DNA, 19 bp, Homo sapiens
  siRNA target sequence for LASS3 (NM_178842.2,730-748).
ctggcaaagaagtgtaact

SEQ ID NO: 6061 - DNA, 19 bp, Homo sapiens
  siRNA target sequence for LASS3 (NM_178842.2,754-772).
gagcgccaggtggaaagat

SEQ ID NO: 6062 - DNA, 19 bp, Homo sapiens
  siRNA target sequence for LASS3 (NM_178842.2,763-781).
gtggaaagatggtttagga

SEQ ID NO: 6063 - DNA, 19 bp, Homo sapiens
  siRNA target sequence for LASS3 (NM_178842.2,779-797).
ggagtcggcggaatcaaga

SEQ ID NO: 6064 - DNA, 19 bp, Homo sapiens
  siRNA target sequence for LASS3 (NM_178842.2,844-862).
gcattttacttaatgatca

SEQ ID NO: 6065 - DNA, 19 bp, Homo sapiens
  siRNA target sequence for LASS3 (NM_178842.2,960-978).
gtactggtactacatttta

SEQ ID NO: 6066 - DNA, 19 bp, Homo sapiens
  siRNA target sequence for LASS3 (NM_178842.2,963-981).
ctggtactacattttagaa

SEQ ID NO: 6067 - DNA, 19 bp, Homo sapiens
  siRNA target sequence for LASS3 (NM_178842.2,996-1014).
gtctctgttatttagactt

SEQ ID NO: 6068 - DNA, 19 bp, Homo sapiens
  siRNA target sequence for LASS3 (NM_178842.2,1015-1033).
ggctttgatgtcaagagaa

SEQ ID NO: 6069 - DNA, 19 bp, Homo sapiens
  siRNA target sequence for LASS3 (NM_178842.2,1036-1054).
gattttctagctcatatca

SEQ ID NO: 6070 - DNA, 19 bp, Homo sapiens
  siRNA target sequence for LASS3 (NM_178842.2,1057-1075).
caccacctggctgctatta

SEQ ID NO: 6071 - DNA, 19 bp, Homo sapiens
  siRNA target sequence for LASS3 (NM_178842.2,1059-1077).
ccacctggctgctattagt

SEQ ID NO: 6072 - DNA, 19 bp, Homo sapiens
  siRNA target sequence for LASS3 (NM_178842.2,1086-1104).
cttctcttggtgtgctaat

SEQ ID NO: 6073 - DNA, 19 bp, Homo sapiens
  siRNA target sequence for LASS3 (NM_178842.2,1115-1133).
gtgggaccctcgtgatgat

SEQ ID NO: 6074 - DNA, 19 bp, Homo sapiens
  siRNA target sequence for LASS3 (NM_178842.2,1119-1137).
gaccctcgtgatgattgta

SEQ ID NO: 6075 - DNA, 19 bp, Homo sapiens
  siRNA target sequence for LASS3 (NM_178842.2,1121-1139).
ccctcgtgatgattgtaca

SEQ ID NO: 6076 - DNA, 19 bp, Homo sapiens
  siRNA target sequence for LASS3 (NM_178842.2,1138-1156).
cacgatgtggctgacattt

SEQ ID NO: 6077 - DNA, 19 bp, Homo sapiens
  siRNA target sequence for LASS3 (NM_178842.2,1162-1180).
gagtctgctaagatgtttt

SEQ ID NO: 6078 - DNA, 19 bp, Homo sapiens
  siRNA target sequence for LASS3 (NM_178842.2,1164-1182).
gtctgctaagatgttttct

SEQ ID NO: 6079 - DNA, 19 bp, Homo sapiens
  siRNA target sequence for LASS3 (NM_178842.2,1202-1220).
cctgtaacaccctgttttt

SEQ ID NO: 6080 - DNA, 19 bp, Homo sapiens
  siRNA target sequence for LASS3 (NM_178842.2,1245-1263).
cagccgcctcattgttttt

SEQ ID NO: 6081 - DNA, 19 bp, Homo sapiens
  siRNA target sequence for LASS3 (NM_178842.2,1286-1304).
cgctgatcttgcctatgta

SEQ ID NO: 6082 - DNA, 19 bp, Homo sapiens
  siRNA target sequence for LASS3 (NM_178842.2,1287-1305).
gctgatcttgcctatgtat

SEQ ID NO: 6083 - DNA, 19 bp, Homo sapiens
  siRNA target sequence for LASS3 (NM_178842.2,1308-1326).
cctcgagcctttcttttca

SEQ ID NO: 6084 - DNA, 19 bp, Homo sapiens
  siRNA target sequence for LASS3 (NM_178842.2,1309-1327).
ctcgagcctttcttttcat

SEQ ID NO: 6085 - DNA, 19 bp, Homo sapiens
  siRNA target sequence for LASS3 (NM_178842.2,1379-1397).
ggggttattacatcttgaa

SEQ ID NO: 6086 - DNA, 19 bp, Homo sapiens
  siRNA target sequence for LASS3 (NM_178842.2,1442-1460).
ggagtgatgacgaggatta

SEQ ID NO: 6087 - DNA, 19 bp, Homo sapiens
  siRNA target sequence for LASS3 (NM_178842.2,1443-1461).
gagtgatgacgaggattat

SEQ ID NO: 6088 - DNA, 19 bp, Homo sapiens
  siRNA target sequence for LASS3 (NM_178842.2,1501-1519).
ggcaaagagatggattgtt

SEQ ID NO: 6089 - DNA, 19 bp, Homo sapiens
  siRNA target sequence for LASS4 (NM_024552.1,342-360).
cgtggacagagctagaaga

SEQ ID NO: 6090 - DNA, 19 bp, Homo sapiens
  siRNA target sequence for LASS4 (NM_024552.1,686-704).
gccagctggaggtttctct

SEQ ID NO: 6091 - DNA, 19 bp, Homo sapiens
  siRNA target sequence for LASS4 (NM_024552.1,758-776).
ctgtgggcaccagtaatgt

SEQ ID NO: 6092 - DNA, 19 bp, Homo sapiens
  siRNA target sequence for LASS4 (NM_024552.1,1026-1044).
gtaagatggtcaactacat

SEQ ID NO: 6093 - DNA, 19 bp, Homo sapiens
  siRNA target sequence for LASS4 (NM_024552.1,1250-1268).
ctgcgcatgctctatagct

SEQ ID NO: 6094 - DNA, 19 bp, Homo sapiens
  siRNA target sequence for LASS4 (NM_024552.1,1259-1277).
ctctatagcttcatgaaga

SEQ ID NO: 6095 - DNA, 19 bp, Homo sapiens
  siRNA target sequence for LASS4 (NM_024552.1,1294-1312).
ggacattcgtagtgatgta

SEQ ID NO: 6096 - DNA, 19 bp, Homo sapiens
  siRNA target sequence for LASS4 (NM_024552.1,1301-1319).
cgtagtgatgtagaagaat

SEQ ID NO: 6097 - DNA, 19 bp, Homo sapiens
  siRNA target sequence for LASS5 (NM_147190.1,67-85).
cgcagggacccctaagctt

SEQ ID NO: 6098 - DNA, 19 bp, Homo sapiens
  siRNA target sequence for LASS5 (NM_147190.1,237-255).
ctgctcttcgagcgattta

SEQ ID NO: 6099 - DNA, 19 bp, Homo sapiens
  siRNA target sequence for LASS5 (NM_147190.1,239-257).
gctcttcgagcgatttatt

SEQ ID NO: 6100 - DNA, 19 bp, Homo sapiens
  siRNA target sequence for LASS5 (NM_147190.1,287-305).
cgaggacagtggtccttat

SEQ ID NO: 6101 - DNA, 19 bp, Homo sapiens
  siRNA target sequence for LASS5 (NM_147190.1,399-417).
gattggaatgtccgaaaaa

SEQ ID NO: 6102 - DNA, 19 bp, Homo sapiens
  siRNA target sequence for LASS5 (NM_147190.1,403-421).
ggaatgtccgaaaaatcca

SEQ ID NO: 6103 - DNA, 19 bp, Homo sapiens
  siRNA target sequence for LASS5 (NM_147190.1,404-422).
gaatgtccgaaaaatccaa

SEQ ID NO: 6104 - DNA, 19 bp, Homo sapiens
  siRNA target sequence for LASS5 (NM_147190.1,457-475).
ccccaacgcttactaaatt

SEQ ID NO: 6105 - DNA, 19 bp, Homo sapiens
  siRNA target sequence for LASS5 (NM_147190.1,459-477).
ccaacgcttactaaattct

SEQ ID NO: 6106 - DNA, 19 bp, Homo sapiens
  siRNA target sequence for LASS5 (NM_147190.1,511-529).
gtatattctgctatggaat

SEQ ID NO: 6107 - DNA, 19 bp, Homo sapiens
  siRNA target sequence for LASS5 (NM_147190.1,520-538).
gctatggaattagatttct

SEQ ID NO: 6108 - DNA, 19 bp, Homo sapiens
  siRNA target sequence for LASS5 (NM_147190.1,567-585).
cgacagtgctggcataact

SEQ ID NO: 6109 - DNA, 19 bp, Homo sapiens
  siRNA target sequence for LASS5 (NM_147190.1,568-586).
gacagtgctggcataacta

SEQ ID NO: 6110 - DNA, 19 bp, Homo sapiens
  siRNA target sequence for LASS5 (NM_147190.1,574-592).
gctggcataactatccatt

SEQ ID NO: 6111 - DNA, 19 bp, Homo sapiens
  siRNA target sequence for LASS5 (NM_147190.1,577-595).
ggcataactatccatttca

SEQ ID NO: 6112 - DNA, 19 bp, Homo sapiens
  siRNA target sequence for LASS5 (NM_147190.1,604-622).
caagtgggctttatcacta

SEQ ID NO: 6113 - DNA, 19 bp, Homo sapiens
  siRNA target sequence for LASS5 (NM_147190.1,612-630).
ctttatcactattatatca

SEQ ID NO: 6114 - DNA, 19 bp, Homo sapiens
  siRNA target sequence for LASS5 (NM_147190.1,618-636).
cactattatatcatggaat

SEQ ID NO: 6115 - DNA, 19 bp, Homo sapiens
  siRNA target sequence for LASS5 (NM_147190.1,633-651).
gaattggccttctattggt

SEQ ID NO: 6116 - DNA, 19 bp, Homo sapiens
  siRNA target sequence for LASS5 (NM_147190.1,644-662).
ctattggtcccttatgttt

SEQ ID NO: 6117 - DNA, 19 bp, Homo sapiens
  siRNA target sequence for LASS5 (NM_147190.1,649-667).
ggtcccttatgttttctca

SEQ ID NO: 6118 - DNA, 19 bp, Homo sapiens
  siRNA target sequence for LASS5 (NM_147190.1,689-707).
ggacttcctgatcatgttt

SEQ ID NO: 6119 - DNA, 19 bp, Homo sapiens
  siRNA target sequence for LASS5 (NM_147190.1,720-738).
gtcaccattgggcttatct

SEQ ID NO: 6120 - DNA, 19 bp, Homo sapiens
  siRNA target sequence for LASS5 (NM_147190.1,745-763).
cctacatcaacaatatggt

SEQ ID NO: 6121 - DNA, 19 bp, Homo sapiens
  siRNA target sequence for LASS5 (NM_147190.1,746-764).
ctacatcaacaatatggtt

SEQ ID NO: 6122 - DNA, 19 bp, Homo sapiens
  siRNA target sequence for LASS5 (NM_147190.1,768-786).
gtgggaactctgatcatgt

SEQ ID NO: 6123 - DNA, 19 bp, Homo sapiens
  siRNA target sequence for LASS5 (NM_147190.1,779-797).
gatcatgtgtctacatgat

SEQ ID NO: 6124 - DNA, 19 bp, Homo sapiens
  siRNA target sequence for LASS5 (NM_147190.1,903-921).
cgactaggaatctatccat

SEQ ID NO: 6125 - DNA, 19 bp, Homo sapiens
  siRNA target sequence for LASS5 (NM_147190.1,959-977).
gataatcgggccttatgct

SEQ ID NO: 6126 - DNA, 19 bp, Homo sapiens
  siRNA target sequence for LASS5 (NM_147190.1,1026-1044).
gtcatctggtcctacctaa

SEQ ID NO: 6127 - DNA, 19 bp, Homo sapiens
  siRNA target sequence for LASS5 (NM_147190.1,1031-1049).
ctggtcctacctaattgca

SEQ ID NO: 6128 - DNA, 19 bp, Homo sapiens
  siRNA target sequence for LASS5 (NM_147190.1,1041-1059).
ctaattgcacggattgctt

SEQ ID NO: 6129 - DNA, 19 bp, Homo sapiens
  siRNA target sequence for LASS5 (NM_147190.1,1067-1085).
cttgatcaggggaaaggta

SEQ ID NO: 6130 - DNA, 19 bp, Homo sapiens
  siRNA target sequence for LASS5 (NM_147190.1,1136-1154).
gaccacctgcacaaaaagt

SEQ ID NO: 6131 - DNA, 19 bp, Homo sapiens
  siRNA target sequence for LBX1 (NM_006562.3,273-291).
cgtctgtgcggagaagtta

SEQ ID NO: 6132 - DNA, 19 bp, Homo sapiens
  siRNA target sequence for LBX1 (NM_006562.3,409-427).
ctcgccagcaagacgttta

SEQ ID NO: 6133 - DNA, 19 bp, Homo sapiens
  siRNA target sequence for LBX1 (NM_006562.3,468-486).
cgacggtatgaccatcttt

SEQ ID NO: 6134 - DNA, 19 bp, Homo sapiens
  siRNA target sequence for LBX1 (NM_006562.3,566-584).
gctttctataccagaagta

SEQ ID NO: 6135 - DNA, 19 bp, Homo sapiens
  siRNA target sequence for LHX1 (NM_005568.2,1127-1145).
ccagggaaggcaaactcta

SEQ ID NO: 6136 - DNA, 19 bp, Homo sapiens
  siRNA target sequence for LHX1 (NM_005568.2,1164-1182).
ccggtgtttcggtaccaaa

SEQ ID NO: 6137 - DNA, 19 bp, Homo sapiens
  siRNA target sequence for LHX1 (NM_005568.2,1165-1183).
cggtgtttcggtaccaaat

SEQ ID NO: 6138 - DNA, 19 bp, Homo sapiens
  siRNA target sequence for LHX1 (NM_005568.2,1229-1247).
gagcgcggagcaaagtgtt

SEQ ID NO: 6139 - DNA, 19 bp, Homo sapiens
  siRNA target sequence for LHX1 (NM_005568.2,1295-1313).
ctggcgaggaactctacat

SEQ ID NO: 6140 - DNA, 19 bp, Homo sapiens
  siRNA target sequence for LHX1 (NM_005568.2,1335-1353).
ctgcaaagaggattaccta

SEQ ID NO: 6141 - DNA, 19 bp, Homo sapiens
  siRNA target sequence for LHX2 (NM_004789.3,1127-1145).
cgcgctcgggacttggttt

SEQ ID NO: 6142 - DNA, 19 bp, Homo sapiens
  siRNA target sequence for LHX2 (NM_004789.3,1128-1146).
gcgctcgggacttggttta

SEQ ID NO: 6143 - DNA, 19 bp, Homo sapiens
  siRNA target sequence for LHX2 (NM_004789.3,1129-1147).
cgctcgggacttggtttat

SEQ ID NO: 6144 - DNA, 19 bp, Homo sapiens
  siRNA target sequence for LHX2 (NM_004789.3,1131-1149).
ctcgggacttggtttatca

SEQ ID NO: 6145 - DNA, 19 bp, Homo sapiens
  siRNA target sequence for LHX2 (NM_004789.3,1164-1182).
cgtgcaccacgtgtaacaa

SEQ ID NO: 6146 - DNA, 19 bp, Homo sapiens
  siRNA target sequence for LHX2 (NM_004789.3,1167-1185).
gcaccacgtgtaacaagat

SEQ ID NO: 6147 - DNA, 19 bp, Homo sapiens
  siRNA target sequence for LHX2 (NM_004789.3,1366-1384).
gggtcttccctactacaat

SEQ ID NO: 6148 - DNA, 19 bp, Homo sapiens
  siRNA target sequence for LHX2 (NM_004789.3,1466-1484).
gcgctaagctgcaacgaaa

SEQ ID NO: 6149 - DNA, 19 bp, Homo sapiens
  siRNA target sequence for LHX2 (NM_004789.3,1467-1485).
cgctaagctgcaacgaaaa

SEQ ID NO: 6150 - DNA, 19 bp, Homo sapiens
  siRNA target sequence for LHX3 (NM_014564.2,348-366).
cgaggggagagcgtttact

SEQ ID NO: 6151 - DNA, 19 bp, Homo sapiens
  siRNA target sequence for LHX3 (NM_014564.2,646-664).
cgctgaagagcgcttacaa

SEQ ID NO: 6152 - DNA, 19 bp, Homo sapiens
  siRNA target sequence for LHX3 (NM_014564.2,648-666).
ctgaagagcgcttacaaca

SEQ ID NO: 6153 - DNA, 19 bp, Homo sapiens
  siRNA target sequence for LHX3 (NM_014564.2,810-828).
cagtatttccgcaacatga

SEQ ID NO: 6154 - DNA, 19 bp, Homo sapiens
  siRNA target sequence for LHX4 (NM_033343.2,285-303).
gtgtgccgatgcaacagat

SEQ ID NO: 6155 - DNA, 19 bp, Homo sapiens
  siRNA target sequence for LHX4 (NM_033343.2,469-487).
caagcgcttcggcacaaaa

SEQ ID NO: 6156 - DNA, 19 bp, Homo sapiens
  siRNA target sequence for LHX4 (NM_033343.2,473-491).
cgcttcggcacaaaatgca

SEQ ID NO: 6157 - DNA, 19 bp, Homo sapiens
  siRNA target sequence for LHX4 (NM_033343.2,819-837).
gggtcgtacaggtttggtt

SEQ ID NO: 6158 - DNA, 19 bp, Homo sapiens
  siRNA target sequence for LHX4 (NM_033343.2,820-838).
ggtcgtacaggtttggttt

SEQ ID NO: 6159 - DNA, 19 bp, Homo sapiens
  siRNA target sequence for LHX4 (NM_033343.2,889-907).
ccgctgggggcagttctat

SEQ ID NO: 6160 - DNA, 19 bp, Homo sapiens
  siRNA target sequence for LHX4 (NM_033343.2,998-1016).
cgagaggatcaaattctct

SEQ ID NO: 6161 - DNA, 19 bp, Homo sapiens
  siRNA target sequence for LHX4 (NM_033343.2,1019-1037).
gaacttggccacaccaata

SEQ ID NO: 6162 - DNA, 19 bp, Homo sapiens
  siRNA target sequence for LHX4 (NM_033343.2,1026-1044).
gccacaccaataggattta

SEQ ID NO: 6163 - DNA, 19 bp, Homo sapiens
  siRNA target sequence for LHX4 (NM_033343.2,1027-1045).
ccacaccaataggatttat

SEQ ID NO: 6164 - DNA, 19 bp, Homo sapiens
  siRNA target sequence for LHX4 (NM_033343.2,1060-1078).
cgttacaggcggacagtta

SEQ ID NO: 6165 - DNA, 19 bp, Homo sapiens
  siRNA target sequence for LHX4 (NM_033343.2,1061-1079).
gttacaggcggacagttaa

SEQ ID NO: 6166 - DNA, 19 bp, Homo sapiens
  siRNA target sequence for LHX4 (NM_033343.2,1065-1083).
caggcggacagttaatgaa

SEQ ID NO: 6167 - DNA, 19 bp, Homo sapiens
  siRNA target sequence for LHX4 (NM_033343.2,1102-1120).
cgggacaggacaatcctat

SEQ ID NO: 6168 - DNA, 19 bp, Homo sapiens
  siRNA target sequence for LHX4 (NM_033343.2,1133-1151).
gatgggagcccctatggaa

SEQ ID NO: 6169 - DNA, 19 bp, Homo sapiens
  siRNA target sequence for LHX4 (NM_033343.2,1228-1246).
cagtaatttgggcatcatt

SEQ ID NO: 6170 - DNA, 19 bp, Homo sapiens
  siRNA target sequence for LHX4 (NM_033343.2,1331-1349).
ggctatcccgactttccaa

SEQ ID NO: 6171 - DNA, 19 bp, Homo sapiens
  siRNA target sequence for LHX4 (NM_033343.2,1358-1376).
ggctcttggctcgatgaaa

SEQ ID NO: 6172 - DNA, 19 bp, Homo sapiens
  siRNA target sequence for LHX4 (NM_033343.2,1359-1377).
gctcttggctcgatgaaat

SEQ ID NO: 6173 - DNA, 19 bp, Homo sapiens
  siRNA target sequence for LHX4 (NM_033343.2,1362-1380).
cttggctcgatgaaatgga

SEQ ID NO: 6174 - DNA, 19 bp, Homo sapiens
  siRNA target sequence for LHX5 (NM_022363.2,646-664).
gtggcacatcaaatgtgtt

SEQ ID NO: 6175 - DNA, 19 bp, Homo sapiens
  siRNA target sequence for LHX5 (NM_022363.2,665-683).
cagtgctgcgagtgcaaaa

SEQ ID NO: 6176 - DNA, 19 bp, Homo sapiens
  siRNA target sequence for LHX5 (NM_022363.2,824-842).
gtctttcacctcaactgtt

SEQ ID NO: 6177 - DNA, 19 bp, Homo sapiens
  siRNA target sequence for LHX5 (NM_022363.2,1261-1279).
gaaccgacggtccaaagaa

SEQ ID NO: 6178 - DNA, 19 bp, Homo sapiens
  siRNA target sequence for LHX5 (NM_022363.2,1590-1608).
ccaggttcaccgacatgat

SEQ ID NO: 6179 - DNA, 19 bp, Homo sapiens
  siRNA target sequence for LHX6 (NM_014368.2,82-100).
gaccacccgctgtcttgaa

SEQ ID NO: 6180 - DNA, 19 bp, Homo sapiens
  siRNA target sequence for LHX6 (NM_014368.2,601-619).
ccactacgacaccatgatt

SEQ ID NO: 6181 - DNA, 19 bp, Homo sapiens
  siRNA target sequence for LHX6 (NM_014368.2,997-1015).
caccctgcacggctacatt

SEQ ID NO: 6182 - DNA, 19 bp, Homo sapiens
  siRNA target sequence for LHX6 (NM_014368.2,999-1017).
ccctgcacggctacattga

SEQ ID NO: 6183 - DNA, 19 bp, Homo sapiens
  siRNA target sequence for LHX6 (NM_014368.2,1078-1096).
cctcaaagccgatatggat

SEQ ID NO: 6184 - DNA, 19 bp, Homo sapiens
  siRNA target sequence for LHX9 (NM_020204.2,668-686).
gatctcggacaggtactat

SEQ ID NO: 6185 - DNA, 19 bp, Homo sapiens
  siRNA target sequence for LHX9 (NM_020204.2,1004-1022).
cctcttgcaaggagagtat

SEQ ID NO: 6186 - DNA, 19 bp, Homo sapiens
  siRNA target sequence for LHX9 (NM_020204.2,1143-1161).
ggagtggacatcgtcaatt

SEQ ID NO: 6187 - DNA, 19 bp, Homo sapiens
  siRNA target sequence for LHX9 (NM_020204.2,1144-1162).
gagtggacatcgtcaatta

SEQ ID NO: 6188 - DNA, 19 bp, Homo sapiens
  siRNA target sequence for LHX9 (NM_020204.2,1149-1167).
gacatcgtcaattacaact

SEQ ID NO: 6189 - DNA, 19 bp, Homo sapiens
  siRNA target sequence for LHX9 (NM_020204.2,1205-1223).
ggaccagcagccttatcca

SEQ ID NO: 6190 - DNA, 19 bp, Homo sapiens
  siRNA target sequence for LHX9 (NM_020204.2,1242-1260).
cgcatgcgaacctctttca

SEQ ID NO: 6191 - DNA, 19 bp, Homo sapiens
  siRNA target sequence for LHX9 (NM_020204.2,1243-1261).
gcatgcgaacctctttcaa

SEQ ID NO: 6192 - DNA, 19 bp, Homo sapiens
  siRNA target sequence for LHX9 (NM_020204.2,1350-1368).
ggtctgaccaaaagagttt

SEQ ID NO: 6193 - DNA, 19 bp, Homo sapiens
  siRNA target sequence for LHX9 (NM_020204.2,1505-1523).
cggcactgcgaccacttta

SEQ ID NO: 6194 - DNA, 19 bp, Homo sapiens
  siRNA target sequence for LHX9 (NM_020204.2,1506-1524).
ggcactgcgaccactttaa

SEQ ID NO: 6195 - DNA, 19 bp, Homo sapiens
  siRNA target sequence for LHX9 (NM_020204.2,1508-1526).
cactgcgaccactttaaca

SEQ ID NO: 6196 - DNA, 19 bp, Homo sapiens
  siRNA target sequence for LHX9 (NM_020204.2,1510-1528).
ctgcgaccactttaacaga

SEQ ID NO: 6197 - DNA, 19 bp, Homo sapiens
  siRNA target sequence for LHX9 (NM_020204.2,1530-1548).
ctgaccaatcccactatca

SEQ ID NO: 6198 - DNA, 19 bp, Homo sapiens
  siRNA target sequence for LHX9 (NM_020204.2,1532-1550).
gaccaatcccactatcact

SEQ ID NO: 6199 - DNA, 19 bp, Homo sapiens
  siRNA target sequence for LHX9 (NM_020204.2,1592-1610).
cggaagcccctcacaaact

SEQ ID NO: 6200 - DNA, 19 bp, Homo sapiens
  siRNA target sequence for LHX9 (NM_020204.2,1593-1611).
ggaagcccctcacaaacta

SEQ ID NO: 6201 - DNA, 19 bp, Homo sapiens
  siRNA target sequence for LHX9 (NM_020204.2,1599-1617).
ccctcacaaactaccttaa

SEQ ID NO: 6202 - DNA, 19 bp, Homo sapiens
  siRNA target sequence for LHX9 (NM_020204.2,1603-1621).
cacaaactaccttaacaaa

SEQ ID NO: 6203 - DNA, 19 bp, Homo sapiens
  siRNA target sequence for LMO1 (NM_002315.1,936-954).
ctcaatggcacctttgaat

SEQ ID NO: 6204 - DNA, 19 bp, Homo sapiens
  siRNA target sequence for LMO4 (NM_006769.2,966-984).
gtcctgttacaccaaaagt

SEQ ID NO: 6205 - DNA, 19 bp, Homo sapiens
  siRNA target sequence for LMO4 (NM_006769.2,1008-1026).
ctacattaggttatttgga

SEQ ID NO: 6206 - DNA, 19 bp, Homo sapiens
  siRNA target sequence for LMO4 (NM_006769.2,1085-1103).
gggcgcaaggcaatgtgta

SEQ ID NO: 6207 - DNA, 19 bp, Homo sapiens
  siRNA target sequence for LMO4 (NM_006769.2,1086-1104).
ggcgcaaggcaatgtgtat

SEQ ID NO: 6208 - DNA, 19 bp, Homo sapiens
  siRNA target sequence for LMO4 (NM_006769.2,1093-1111).
ggcaatgtgtatcatctta

SEQ ID NO: 6209 - DNA, 19 bp, Homo sapiens
  siRNA target sequence for LMO4 (NM_006769.2,1099-1117).
gtgtatcatcttaagtgtt

SEQ ID NO: 6210 - DNA, 19 bp, Homo sapiens
  siRNA target sequence for LMO4 (NM_006769.2,1101-1119).
gtatcatcttaagtgtttt

SEQ ID NO: 6211 - DNA, 19 bp, Homo sapiens
  siRNA target sequence for LMO4 (NM_006769.2,1150-1168).
ccgggagatcggtttcact

SEQ ID NO: 6212 - DNA, 19 bp, Homo sapiens
  siRNA target sequence for LMO4 (NM_006769.2,1151-1169).
cgggagatcggtttcacta

SEQ ID NO: 6213 - DNA, 19 bp, Homo sapiens
  siRNA target sequence for LMO4 (NM_006769.2,1156-1174).
gatcggtttcactacatca

SEQ ID NO: 6214 - DNA, 19 bp, Homo sapiens
  siRNA target sequence for LMO4 (NM_006769.2,1213-1231).
ctcatcaatggccatttga

SEQ ID NO: 6215 - DNA, 19 bp, Homo sapiens
  siRNA target sequence for LMO4 (NM_006769.2,1215-1233).
catcaatggccatttgaat

SEQ ID NO: 6216 - DNA, 19 bp, Homo sapiens
  siRNA target sequence for LMX1A (NM_177398.1,519-537).
gccatcgctcccaatgagt

SEQ ID NO: 6217 - DNA, 19 bp, Homo sapiens
  siRNA target sequence for LMX1A (NM_177398.1,550-568).
cccagaagagtgtatacca

SEQ ID NO: 6218 - DNA, 19 bp, Homo sapiens
  siRNA target sequence for LMX1A (NM_177398.1,652-670).
gcaaaggggactatgagaa

SEQ ID NO: 6219 - DNA, 19 bp, Homo sapiens
  siRNA target sequence for LMX1A (NM_177398.1,705-723).
gcctcagactcaggtaaaa

SEQ ID NO: 6220 - DNA, 19 bp, Homo sapiens
  siRNA target sequence for LMX1A (NM_177398.1,810-828).
cgtccgagaaccatcttga

SEQ ID NO: 6221 - DNA, 19 bp, Homo sapiens
  siRNA target sequence for LMX1A (NM_177398.1,813-831).
ccgagaaccatcttgacaa

SEQ ID NO: 6222 - DNA, 19 bp, Homo sapiens
  siRNA target sequence for LMX1A (NM_177398.1,1065-1083).
gggatggaaggaatcatga

SEQ ID NO: 6223 - DNA, 19 bp, Homo sapiens
  siRNA target sequence for LMX1A (NM_177398.1,1193-1211).
ccacatgcacccttatggt

SEQ ID NO: 6224 - DNA, 19 bp, Homo sapiens
  siRNA target sequence for LMX1A (NM_177398.1,1256-1274).
cagtaacctgggtgattgt

SEQ ID NO: 6225 - DNA, 19 bp, Homo sapiens
  siRNA target sequence for LMX1A (NM_177398.1,1337-1355).
gtactccatgcagaattct

SEQ ID NO: 6226 - DNA, 19 bp, Homo sapiens
  siRNA target sequence for LMX1B (NM_002316.1,383-401).
gcaagggcgacgaattcgt

SEQ ID NO: 6227 - DNA, 19 bp, Homo sapiens
  siRNA target sequence for LMX1B (NM_002316.1,988-1006).
gacagcgatacctccttaa

SEQ ID NO: 6228 - DNA, 19 bp, Homo sapiens
  siRNA target sequence for LOC51270 (NM_016521.2,418-436).
gcctgtgccgtctttccat

SEQ ID NO: 6229 - DNA, 19 bp, Homo sapiens
  siRNA target sequence for LOC51270 (NM_016521.2,495-513).
gagctggtcgccaagttca

SEQ ID NO: 6230 - DNA, 19 bp, Homo sapiens
  siRNA target sequence for LOC51270 (NM_016521.2,902-920).
ctccgacgacaaatcagaa

SEQ ID NO: 6231 - DNA, 19 bp, Homo sapiens
  siRNA target sequence for LOC51270 (NM_016521.2,904-922).
ccgacgacaaatcagaata

SEQ ID NO: 6232 - DNA, 19 bp, Homo sapiens
  siRNA target sequence for LOC51270 (NM_016521.2,905-923).
cgacgacaaatcagaatat

SEQ ID NO: 6233 - DNA, 19 bp, Homo sapiens
  siRNA target sequence for LOC51270 (NM_016521.2,916-934).
cagaatatctgtttaagtt

SEQ ID NO: 6234 - DNA, 19 bp, Homo sapiens
  siRNA target sequence for LOC51270 (NM_016521.2,977-995).
gtggatgggcatgactttt

SEQ ID NO: 6235 - DNA, 19 bp, Homo sapiens
  siRNA target sequence for LZTS1 (NM_021020.1,268-286).
ggcaagtccagctccaaaa

SEQ ID NO: 6236 - DNA, 19 bp, Homo sapiens
  siRNA target sequence for LZTS1 (NM_021020.1,269-287).
gcaagtccagctccaaaat

SEQ ID NO: 6237 - DNA, 19 bp, Homo sapiens
  siRNA target sequence for LZTS1 (NM_021020.1,290-308).
gcaagagcgaagacttctt

SEQ ID NO: 6238 - DNA, 19 bp, Homo sapiens
  siRNA target sequence for LZTS1 (NM_021020.1,296-314).
gcgaagacttcttctacat

SEQ ID NO: 6239 - DNA, 19 bp, Homo sapiens
  siRNA target sequence for LZTS1 (NM_021020.1,1869-1887).
cccctacgaggacatcata

SEQ ID NO: 6240 - DNA, 19 bp, Homo sapiens
  siRNA target sequence for MAD (NM_002357.1,317-335).
gcagatcaactcacaatga

SEQ ID NO: 6241 - DNA, 19 bp, Homo sapiens
  siRNA target sequence for MAD (NM_002357.1,345-363).
gaatagacgggctcatctt

SEQ ID NO: 6242 - DNA, 19 bp, Homo sapiens
  siRNA target sequence for MAD (NM_002357.1,421-439).
cacactacgttgagtttat

SEQ ID NO: 6243 - DNA, 19 bp, Homo sapiens
  siRNA target sequence for MAD (NM_002357.1,448-466).
gccaaattgcacataaaga

SEQ ID NO: 6244 - DNA, 19 bp, Homo sapiens
  siRNA target sequence for MAD (NM_002357.1,485-503).
gaaaagccgttcaccaaat

SEQ ID NO: 6245 - DNA, 19 bp, Homo sapiens
  siRNA target sequence for MAD (NM_002357.1,613-631).
gactccgacagggaagaaa

SEQ ID NO: 6246 - DNA, 19 bp, Homo sapiens
  siRNA target sequence for MAD (NM_002357.1,617-635).
ccgacagggaagaaatcga

SEQ ID NO: 6247 - DNA, 19 bp, Homo sapiens
  siRNA target sequence for MAD (NM_002357.1,646-664).
gagagcacggactatctca

SEQ ID NO: 6248 - DNA, 19 bp, Homo sapiens
  siRNA target sequence for MAD (NM_002357.1,755-773).
gcaccagcatcaagagaat

SEQ ID NO: 6249 - DNA, 19 bp, Homo sapiens
  siRNA target sequence for MAD (NM_002357.1,761-779).
gcatcaagagaataaagct

SEQ ID NO: 6250 - DNA, 19 bp, Homo sapiens
  siRNA target sequence for MADH3 (NM_005902.1,311-329).
ggctccctcatgtcatcta

SEQ ID NO: 6251 - DNA, 19 bp, Homo sapiens
  siRNA target sequence for MADH3 (NM_005902.1,390-408).
gtgtgagttcgccttcaat

SEQ ID NO: 6252 - DNA, 19 bp, Homo sapiens
  siRNA target sequence for MADH3 (NM_005902.1,392-410).
gtgagttcgccttcaatat

SEQ ID NO: 6253 - DNA, 19 bp, Homo sapiens
  siRNA target sequence for MADH3 (NM_005902.1,394-412).
gagttcgccttcaatatga

SEQ ID NO: 6254 - DNA, 19 bp, Homo sapiens
  siRNA target sequence for MADH3 (NM_005902.1,538-556).
cattccatccccgaaaaca

SEQ ID NO: 6255 - DNA, 19 bp, Homo sapiens
  siRNA target sequence for MADH3 (NM_005902.1,576-594).
cgagccccagagcaatatt

SEQ ID NO: 6256 - DNA, 19 bp, Homo sapiens
  siRNA target sequence for MADH3 (NM_005902.1,669-687).
cgcaggttctccaaaccta

SEQ ID NO: 6257 - DNA, 19 bp, Homo sapiens
  siRNA target sequence for MADH3 (NM_005902.1,670-688).
gcaggttctccaaacctat

SEQ ID NO: 6258 - DNA, 19 bp, Homo sapiens
  siRNA target sequence for MADH3 (NM_005902.1,699-717).
gatgtccccagcacataat

SEQ ID NO: 6259 - DNA, 19 bp, Homo sapiens
  siRNA target sequence for MADH3 (NM_005902.1,704-722).
ccccagcacataataactt

SEQ ID NO: 6260 - DNA, 19 bp, Homo sapiens
  siRNA target sequence for MADH3 (NM_005902.1,941-959).
gaggcgtgcggctctacta

SEQ ID NO: 6261 - DNA, 19 bp, Homo sapiens
  siRNA target sequence for MADH3 (NM_005902.1,988-1006).
ctcagtgacagcgctattt

SEQ ID NO: 6262 - DNA, 19 bp, Homo sapiens
  siRNA target sequence for MADH3 (NM_005902.1,992-1010).
gtgacagcgctatttttgt

SEQ ID NO: 6263 - DNA, 19 bp, Homo sapiens
  siRNA target sequence for MADH3 (NM_005902.1,1274-1292).
ctttgcagtggcttgacaa

SEQ ID NO: 6264 - DNA, 19 bp, Homo sapiens
  siRNA target sequence for MADH4 (NM_005359.3,237-255).
gacaatatgtctattacga

SEQ ID NO: 6265 - DNA, 19 bp, Homo sapiens
  siRNA target sequence for MADH4 (NM_005359.3,239-257).
caatatgtctattacgaat

SEQ ID NO: 6266 - DNA, 19 bp, Homo sapiens
  siRNA target sequence for MADH4 (NM_005359.3,282-300).
ctgagcattgtgcatagtt

SEQ ID NO: 6267 - DNA, 19 bp, Homo sapiens
  siRNA target sequence for MADH4 (NM_005359.3,286-304).
gcattgtgcatagtttgat

SEQ ID NO: 6268 - DNA, 19 bp, Homo sapiens
  siRNA target sequence for MADH4 (NM_005359.3,298-316).
gtttgatgtgccatagaca

SEQ ID NO: 6269 - DNA, 19 bp, Homo sapiens
  siRNA target sequence for MADH4 (NM_005359.3,324-342).
gagagtgaaacatttgcaa

SEQ ID NO: 6270 - DNA, 19 bp, Homo sapiens
  siRNA target sequence for MADH4 (NM_005359.3,349-367).
caattgaaagtttggtaaa

SEQ ID NO: 6271 - DNA, 19 bp, Homo sapiens
  siRNA target sequence for MADH4 (NM_005359.3,426-444).
ggagctcatcctagtaaat

SEQ ID NO: 6272 - DNA, 19 bp, Homo sapiens
  siRNA target sequence for MADH4 (NM_005359.3,452-470).
catacagagaacattggat

SEQ ID NO: 6273 - DNA, 19 bp, Homo sapiens
  siRNA target sequence for MADH4 (NM_005359.3,485-503).
ggctggtcggaaaggattt

SEQ ID NO: 6274 - DNA, 19 bp, Homo sapiens
  siRNA target sequence for MADH4 (NM_005359.3,533-551).
gtggcctgatcttcacaaa

SEQ ID NO: 6275 - DNA, 19 bp, Homo sapiens
  siRNA target sequence for MADH4 (NM_005359.3,535-553).
ggcctgatcttcacaaaaa

SEQ ID NO: 6276 - DNA, 19 bp, Homo sapiens
  siRNA target sequence for MADH4 (NM_005359.3,577-595).
gtcagtatgcgtttgactt

SEQ ID NO: 6277 - DNA, 19 bp, Homo sapiens
  siRNA target sequence for MADH4 (NM_005359.3,579-597).
cagtatgcgtttgacttaa

SEQ ID NO: 6278 - DNA, 19 bp, Homo sapiens
  siRNA target sequence for MADH4 (NM_005359.3,613-631).
gtgtgaatccatatcacta

SEQ ID NO: 6279 - DNA, 19 bp, Homo sapiens
  siRNA target sequence for MADH4 (NM_005359.3,627-645).
cactacgaacgagttgtat

SEQ ID NO: 6280 - DNA, 19 bp, Homo sapiens
  siRNA target sequence for MADH4 (NM_005359.3,629-647).
ctacgaacgagttgtatca

SEQ ID NO: 6281 - DNA, 19 bp, Homo sapiens
  siRNA target sequence for MADH4 (NM_005359.3,682-700).
gtaatgctccatcaagtat

SEQ ID NO: 6282 - DNA, 19 bp, Homo sapiens
  siRNA target sequence for MADH4 (NM_005359.3,760-778).
gacattcaattcaaaccat

SEQ ID NO: 6283 - DNA, 19 bp, Homo sapiens
  siRNA target sequence for MADH4 (NM_005359.3,799-817).
gtgcatcgacagagacata

SEQ ID NO: 6284 - DNA, 19 bp, Homo sapiens
  siRNA target sequence for MADH4 (NM_005359.3,801-819).
gcatcgacagagacataca

SEQ ID NO: 6285 - DNA, 19 bp, Homo sapiens
  siRNA target sequence for MADH4 (NM_005359.3,901-919).
gtcagcctgccagtatact

SEQ ID NO: 6286 - DNA, 19 bp, Homo sapiens
  siRNA target sequence for MADH4 (NM_005359.3,939-957).
ggactgttgcagatagcat

SEQ ID NO: 6287 - DNA, 19 bp, Homo sapiens
  siRNA target sequence for MADH4 (NM_005359.3,994-1012).
ctggtcagccagctactta

SEQ ID NO: 6288 - DNA, 19 bp, Homo sapiens
  siRNA target sequence for MADH4 (NM_005359.3,1002-1020).
ccagctacttaccatcata

SEQ ID NO: 6289 - DNA, 19 bp, Homo sapiens
  siRNA target sequence for MADH4 (NM_005359.3,1003-1021).
cagctacttaccatcataa

SEQ ID NO: 6290 - DNA, 19 bp, Homo sapiens
  siRNA target sequence for MADH4 (NM_005359.3,1053-1071).
gcaccatacacacctaatt

SEQ ID NO: 6291 - DNA, 19 bp, Homo sapiens
  siRNA target sequence for MADH4 (NM_005359.3,1119-1137).
ccccatcccggacattact

SEQ ID NO: 6292 - DNA, 19 bp, Homo sapiens
  siRNA target sequence for MADH4 (NM_005359.3,1182-1200).
catcctgctcctgagtatt

SEQ ID NO: 6293 - DNA, 19 bp, Homo sapiens
  siRNA target sequence for MADH4 (NM_005359.3,1185-1203).
cctgctcctgagtattggt

SEQ ID NO: 6294 - DNA, 19 bp, Homo sapiens
  siRNA target sequence for MADH4 (NM_005359.3,1204-1222).
gttccattgcttactttga

SEQ ID NO: 6295 - DNA, 19 bp, Homo sapiens
  siRNA target sequence for MADH4 (NM_005359.3,1264-1282).
gctgccctattgttactgt

SEQ ID NO: 6296 - DNA, 19 bp, Homo sapiens
  siRNA target sequence for MADH4 (NM_005359.3,1389-1407).
ggtgtgcagttggaatgta

SEQ ID NO: 6297 - DNA, 19 bp, Homo sapiens
  siRNA target sequence for MADH4 (NM_005359.3,1390-1408).
gtgtgcagttggaatgtaa

SEQ ID NO: 6298 - DNA, 19 bp, Homo sapiens
  siRNA target sequence for MADH4 (NM_005359.3,1426-1444).
gggtcaggtgccttagtga

SEQ ID NO: 6299 - DNA, 19 bp, Homo sapiens
  siRNA target sequence for MADH4 (NM_005359.3,1441-1459).
gtgaccacgcggtctttgt

SEQ ID NO: 6300 - DNA, 19 bp, Homo sapiens
  siRNA target sequence for MADH4 (NM_005359.3,1501-1519).
gagatgctgttcataagat

SEQ ID NO: 6301 - DNA, 19 bp, Homo sapiens
  siRNA target sequence for MADH4 (NM_005359.3,1520-1538).
ctacccaagtgcatatata

SEQ ID NO: 6302 - DNA, 19 bp, Homo sapiens
  siRNA target sequence for MADH4 (NM_005359.3,1531-1549).
catatataaaggtctttga

SEQ ID NO: 6303 - DNA, 19 bp, Homo sapiens
  siRNA target sequence for MADH4 (NM_005359.3,1713-1731).
gaccttcgtcgcttatgca

SEQ ID NO: 6304 - DNA, 19 bp, Homo sapiens
  siRNA target sequence for MADH4 (NM_005359.3,1715-1733).
ccttcgtcgcttatgcata

SEQ ID NO: 6305 - DNA, 19 bp, Homo sapiens
  siRNA target sequence for MADH4 (NM_005359.3,1719-1737).
cgtcgcttatgcatactca

SEQ ID NO: 6306 - DNA, 19 bp, Homo sapiens
  siRNA target sequence for MADH4 (NM_005359.3,1729-1747).
gcatactcaggatgagttt

SEQ ID NO: 6307 - DNA, 19 bp, Homo sapiens
  siRNA target sequence for MADH4 (NM_005359.3,1772-1790).
cccaagacagagcatcaaa

SEQ ID NO: 6308 - DNA, 19 bp, Homo sapiens
  siRNA target sequence for MADH4 (NM_005359.3,1835-1853).
gctcctagacgaagtactt

SEQ ID NO: 6309 - DNA, 19 bp, Homo sapiens
  siRNA target sequence for MADH4 (NM_005359.3,1838-1856).
cctagacgaagtacttcat

SEQ ID NO: 6310 - DNA, 19 bp, Homo sapiens
  siRNA target sequence for MADH4 (NM_005359.3,1839-1857).
ctagacgaagtacttcata

SEQ ID NO: 6311 - DNA, 19 bp, Homo sapiens
  siRNA target sequence for MAFG (NM_002359.1,641-659).
cagcgtcatcacaatagta

SEQ ID NO: 6312 - DNA, 19 bp, Homo sapiens
  siRNA target sequence for MAFG (NM_002359.1,643-661).
gcgtcatcacaatagtaaa

SEQ ID NO: 6313 - DNA, 19 bp, Homo sapiens
  siRNA target sequence for MAX (NM_002382.3,210-228).
gagcaaccgaggtttcaat

SEQ ID NO: 6314 - DNA, 19 bp, Homo sapiens
  siRNA target sequence for MAX (NM_002382.3,212-230).
gcaaccgaggtttcaatct

SEQ ID NO: 6315 - DNA, 19 bp, Homo sapiens
  siRNA target sequence for MAX (NM_002382.3,258-276).
gcactggaacgaaaacgta

SEQ ID NO: 6316 - DNA, 19 bp, Homo sapiens
  siRNA target sequence for MAX (NM_002382.3,407-425).
cacacaccagcaagatatt

SEQ ID NO: 6317 - DNA, 19 bp, Homo sapiens
  siRNA target sequence for MAX (NM_002382.3,409-427).
cacaccagcaagatattga

SEQ ID NO: 6318 - DNA, 19 bp, Homo sapiens
  siRNA target sequence for MAX (NM_145112.1,197-215).
ggagagcgacgctgacaaa

SEQ ID NO: 6319 - DNA, 19 bp, Homo sapiens
  siRNA target sequence for MAX (NM_145114.1,375-393).
gtccttcatcgtcaaagtt

SEQ ID NO: 6320 - DNA, 19 bp, Homo sapiens
  siRNA target sequence for MAX (NM_145114.1,378-396).
cttcatcgtcaaagtttga

SEQ ID NO: 6321 - DNA, 19 bp, Homo sapiens
  siRNA target sequence for MBD1 (NM_002384.1,224-242).
ggacgctcagacacctatt

SEQ ID NO: 6322 - DNA, 19 bp, Homo sapiens
  siRNA target sequence for MBD1 (NM_002384.1,225-243).
gacgctcagacacctatta

SEQ ID NO: 6323 - DNA, 19 bp, Homo sapiens
  siRNA target sequence for MBD1 (NM_002384.1,262-280).
caggatccgaagcaaagtt

SEQ ID NO: 6324 - DNA, 19 bp, Homo sapiens
  siRNA target sequence for MBD1 (NM_002384.1,264-282).
ggatccgaagcaaagttga

SEQ ID NO: 6325 - DNA, 19 bp, Homo sapiens
  siRNA target sequence for MBD1 (NM_002384.1,318-336).
ccctcttcgacttcaaaca

SEQ ID NO: 6326 - DNA, 19 bp, Homo sapiens
  siRNA target sequence for MBD1 (NM_002384.1,319-337).
cctcttcgacttcaaacaa

SEQ ID NO: 6327 - DNA, 19 bp, Homo sapiens
  siRNA target sequence for MBD1 (NM_002384.1,575-593).
caaaggcagcggctcaaaa

SEQ ID NO: 6328 - DNA, 19 bp, Homo sapiens
  siRNA target sequence for MBD1 (NM_002384.1,579-597).
ggcagcggctcaaaacgtt

SEQ ID NO: 6329 - DNA, 19 bp, Homo sapiens
  siRNA target sequence for MBD1 (NM_002384.1,607-625).
ctgtcgagcacagagaatt

SEQ ID NO: 6330 - DNA, 19 bp, Homo sapiens
  siRNA target sequence for MBD1 (NM_002384.1,636-654).
gggaacagagaatgtttaa

SEQ ID NO: 6331 - DNA, 19 bp, Homo sapiens
  siRNA target sequence for MBD1 (NM_002384.1,894-912).
ggcgccagtggaaatgtgt

SEQ ID NO: 6332 - DNA, 19 bp, Homo sapiens
  siRNA target sequence for MBD1 (NM_002384.1,921-939).
gttgcctacggggtaaaca

SEQ ID NO: 6333 - DNA, 19 bp, Homo sapiens
  siRNA target sequence for MBD1 (NM_002384.1,1073-1091).
ccacctgccgagttcatct

SEQ ID NO: 6334 - DNA, 19 bp, Homo sapiens
  siRNA target sequence for MBD1 (NM_002384.1,1074-1092).
cacctgccgagttcatcta

SEQ ID NO: 6335 - DNA, 19 bp, Homo sapiens
  siRNA target sequence for MBD1 (NM_002384.1,1076-1094).
cctgccgagttcatctatt

SEQ ID NO: 6336 - DNA, 19 bp, Homo sapiens
  siRNA target sequence for MBD1 (NM_002384.1,1077-1095).
ctgccgagttcatctatta

SEQ ID NO: 6337 - DNA, 19 bp, Homo sapiens
  siRNA target sequence for MBD1 (NM_002384.1,1079-1097).
gccgagttcatctattact

SEQ ID NO: 6338 - DNA, 19 bp, Homo sapiens
  siRNA target sequence for MBD1 (NM_002384.1,1081-1099).
cgagttcatctattactgt

SEQ ID NO: 6339 - DNA, 19 bp, Homo sapiens
  siRNA target sequence for MBD1 (NM_002384.1,1328-1346).
ggcactgaccttgtgtttt

SEQ ID NO: 6340 - DNA, 19 bp, Homo sapiens
  siRNA target sequence for MBD1 (NM_002384.1,1544-1562).
cccgtgatcacggagattt

SEQ ID NO: 6341 - DNA, 19 bp, Homo sapiens
  siRNA target sequence for MBD1 (NM_002384.1,1545-1563).
ccgtgatcacggagatttt

SEQ ID NO: 6342 - DNA, 19 bp, Homo sapiens
  siRNA target sequence for MBD1 (NM_002384.1,1547-1565).
gtgatcacggagattttca

SEQ ID NO: 6343 - DNA, 19 bp, Homo sapiens
  siRNA target sequence for MBD1 (NM_002384.1,1608-1626).
caaggtccaaagaccttaa

SEQ ID NO: 6344 - DNA, 19 bp, Homo sapiens
  siRNA target sequence for MBD1 (NM_002384.1,1612-1630).
gtccaaagaccttaaaaaa

SEQ ID NO: 6345 - DNA, 19 bp, Homo sapiens
  siRNA target sequence for MBD1 (NM_015845.2,1137-1155).
gctgcgacaagcccaaatt

SEQ ID NO: 6346 - DNA, 19 bp, Homo sapiens
  siRNA target sequence for MBD1 (NM_015845.2,1838-1856).
cctccagcttcgatgatgt

SEQ ID NO: 6347 - DNA, 19 bp, Homo sapiens
  siRNA target sequence for MDS1 (NM_004991.1,335-353).
ctggccacaaataatgagt

SEQ ID NO: 6348 - DNA, 19 bp, Homo sapiens
  siRNA target sequence for MDS1 (NM_004991.1,342-360).
caaataatgagtgtgtata

SEQ ID NO: 6349 - DNA, 19 bp, Homo sapiens
  siRNA target sequence for MDS1 (NM_004991.1,420-438).
ctccctccctcaatattca

SEQ ID NO: 6350 - DNA, 19 bp, Homo sapiens
  siRNA target sequence for MDS1 (NM_004991.1,423-441).
cctccctcaatattcaaga

SEQ ID NO: 6351 - DNA, 19 bp, Homo sapiens
  siRNA target sequence for MDS1 (NM_004991.1,548-566).
gaacttcgagagtcaaata

SEQ ID NO: 6352 - DNA, 19 bp, Homo sapiens
  siRNA target sequence for MDS1 (NM_004991.1,581-599).
ctaggaatatggaccaaaa

SEQ ID NO: 6353 - DNA, 19 bp, Homo sapiens
  siRNA target sequence for MDS1 (NM_004991.1,658-676).
gaaagaccccagttatgga

SEQ ID NO: 6354 - DNA, 19 bp, Homo sapiens
  siRNA target sequence for MDS1 (NM_004991.1,712-730).
cgttcactcttggttgtat

SEQ ID NO: 6355 - DNA, 19 bp, Homo sapiens
  siRNA target sequence for MEF2A (NM_005587.1,462-480).
ccgacaggtcacttttaca

SEQ ID NO: 6356 - DNA, 19 bp, Homo sapiens
  siRNA target sequence for MEF2A (NM_005587.1,463-481).
cgacaggtcacttttacaa

SEQ ID NO: 6357 - DNA, 19 bp, Homo sapiens
  siRNA target sequence for MEF2A (NM_005587.1,504-522).
gaaagcctatgaacttagt

SEQ ID NO: 6358 - DNA, 19 bp, Homo sapiens
  siRNA target sequence for MEF2A (NM_005587.1,570-588).
caaactgtttcaatatgct

SEQ ID NO: 6359 - DNA, 19 bp, Homo sapiens
  siRNA target sequence for MEF2A (NM_005587.1,580-598).
caatatgctagcactgata

SEQ ID NO: 6360 - DNA, 19 bp, Homo sapiens
  siRNA target sequence for MEF2A (NM_005587.1,593-611).
ctgatatggacaaagttct

SEQ ID NO: 6361 - DNA, 19 bp, Homo sapiens
  siRNA target sequence for MEF2A (NM_005587.1,648-666).
cagaaccaactcggatatt

SEQ ID NO: 6362 - DNA, 19 bp, Homo sapiens
  siRNA target sequence for MEF2A (NM_005587.1,650-668).
gaaccaactcggatattgt

SEQ ID NO: 6363 - DNA, 19 bp, Homo sapiens
  siRNA target sequence for MEF2A (NM_005587.1,653-671).
ccaactcggatattgttga

SEQ ID NO: 6364 - DNA, 19 bp, Homo sapiens
  siRNA target sequence for MEF2A (NM_005587.1,708-726).
cccagaccctgatacttca

SEQ ID NO: 6365 - DNA, 19 bp, Homo sapiens
  siRNA target sequence for MEF2A (NM_005587.1,709-727).
ccagaccctgatacttcat

SEQ ID NO: 6366 - DNA, 19 bp, Homo sapiens
  siRNA target sequence for MEF2A (NM_005587.1,710-728).
cagaccctgatacttcata

SEQ ID NO: 6367 - DNA, 19 bp, Homo sapiens
  siRNA target sequence for MEF2A (NM_005587.1,817-835).
ctgccacctcagaactttt

SEQ ID NO: 6368 - DNA, 19 bp, Homo sapiens
  siRNA target sequence for MEF2A (NM_005587.1,823-841).
cctcagaacttttcaatgt

SEQ ID NO: 6369 - DNA, 19 bp, Homo sapiens
  siRNA target sequence for MEF2A (NM_005587.1,856-874).
gtgaccagccccaatgctt

SEQ ID NO: 6370 - DNA, 19 bp, Homo sapiens
  siRNA target sequence for MEF2A (NM_005587.1,899-917).
cactggtgtccccatcttt

SEQ ID NO: 6371 - DNA, 19 bp, Homo sapiens
  siRNA target sequence for MEF2A (NM_005587.1,919-937).
gcagccagctcaacgttaa

SEQ ID NO: 6372 - DNA, 19 bp, Homo sapiens
  siRNA target sequence for MEF2A (NM_005587.1,923-941).
ccagctcaacgttaacaga

SEQ ID NO: 6373 - DNA, 19 bp, Homo sapiens
  siRNA target sequence for MEF2A (NM_005587.1,924-942).
cagctcaacgttaacagat

SEQ ID NO: 6374 - DNA, 19 bp, Homo sapiens
  siRNA target sequence for MEF2A (NM_005587.1,927-945).
ctcaacgttaacagattca

SEQ ID NO: 6375 - DNA, 19 bp, Homo sapiens
  siRNA target sequence for MEF2A (NM_005587.1,1085-1103).
cagtggggaatggatttgt

SEQ ID NO: 6376 - DNA, 19 bp, Homo sapiens
  siRNA target sequence for MEF2A (NM_005587.1,1135-1153).
gctactggtgcaaatagct

SEQ ID NO: 6377 - DNA, 19 bp, Homo sapiens
  siRNA target sequence for MEF2A (NM_005587.1,1157-1175).
gcaaagtcatgcctacaaa

SEQ ID NO: 6378 - DNA, 19 bp, Homo sapiens
  siRNA target sequence for MEF2A (NM_005587.1,1198-1216).
ggtaatcttggaatgaaca

SEQ ID NO: 6379 - DNA, 19 bp, Homo sapiens
  siRNA target sequence for MEF2A (NM_005587.1,1215-1233).
cagtaggaaaccagatctt

SEQ ID NO: 6380 - DNA, 19 bp, Homo sapiens
  siRNA target sequence for MEF2A (NM_005587.1,1226-1244).
cagatcttcgagttgtcat

SEQ ID NO: 6381 - DNA, 19 bp, Homo sapiens
  siRNA target sequence for MEF2A (NM_005587.1,1417-1435).
gcctacaacactgattatt

SEQ ID NO: 6382 - DNA, 19 bp, Homo sapiens
  siRNA target sequence for MEF2A (NM_005587.1,1419-1437).
ctacaacactgattattca

SEQ ID NO: 6383 - DNA, 19 bp, Homo sapiens
  siRNA target sequence for MEF2A (NM_005587.1,1459-1477).
gcccttcaaggcttcaact

SEQ ID NO: 6384 - DNA, 19 bp, Homo sapiens
  siRNA target sequence for MEF2A (NM_005587.1,1569-1587).
gttatctcagggttccaat

SEQ ID NO: 6385 - DNA, 19 bp, Homo sapiens
  siRNA target sequence for MEF2A (NM_005587.1,1620-1638).
caagtccgaaccgatttca

SEQ ID NO: 6386 - DNA, 19 bp, Homo sapiens
  siRNA target sequence for MEF2A (NM_005587.1,1637-1655).
cacctcctcgggatcgtat

SEQ ID NO: 6387 - DNA, 19 bp, Homo sapiens
  siRNA target sequence for MEF2A (NM_005587.1,1794-1812).
ctctagtagctcctatgat

SEQ ID NO: 6388 - DNA, 19 bp, Homo sapiens
  siRNA target sequence for MEF2A (NM_005587.1,1839-1857).
cgacttccattctccaatt

SEQ ID NO: 6389 - DNA, 19 bp, Homo sapiens
  siRNA target sequence for MEF2B (NM_005919.1,632-650).
cgtgtgctgctgaagtaca

SEQ ID NO: 6390 - DNA, 19 bp, Homo sapiens
  siRNA target sequence for MEF2B (NM_005919.1,855-873).
ccagcccagatgtggtata

SEQ ID NO: 6391 - DNA, 19 bp, Homo sapiens
  siRNA target sequence for MEF2C (NM_002397.2,430-448).
ggattatggatgaacgtaa

SEQ ID NO: 6392 - DNA, 19 bp, Homo sapiens
  siRNA target sequence for MEF2C (NM_002397.2,523-541).
gtgagattgcgctgatcat

SEQ ID NO: 6393 - DNA, 19 bp, Homo sapiens
  siRNA target sequence for MEF2C (NM_002397.2,525-543).
gagattgcgctgatcatct

SEQ ID NO: 6394 - DNA, 19 bp, Homo sapiens
  siRNA target sequence for MEF2C (NM_002397.2,743-761).
ggacaagtacaggaaaatt

SEQ ID NO: 6395 - DNA, 19 bp, Homo sapiens
  siRNA target sequence for MEF2C (NM_002397.2,846-864).
gtgtccagccacaacagtt

SEQ ID NO: 6396 - DNA, 19 bp, Homo sapiens
  siRNA target sequence for MEF2C (NM_002397.2,924-942).
ccttctctgcagaggaata

SEQ ID NO: 6397 - DNA, 19 bp, Homo sapiens
  siRNA target sequence for MEF2C (NM_002397.2,928-946).
ctctgcagaggaatagtat

SEQ ID NO: 6398 - DNA, 19 bp, Homo sapiens
  siRNA target sequence for MEF2C (NM_002397.2,947-965).
gtctcctggtgtaacacat

SEQ ID NO: 6399 - DNA, 19 bp, Homo sapiens
  siRNA target sequence for MEF2C (NM_002397.2,1086-1104).
cctggtaacttgaacaaga

SEQ ID NO: 6400 - DNA, 19 bp, Homo sapiens
  siRNA target sequence for MEF2C (NM_002397.2,1089-1107).
ggtaacttgaacaagaata

SEQ ID NO: 6401 - DNA, 19 bp, Homo sapiens
  siRNA target sequence for MEF2C (NM_002397.2,1179-1197).
ccaccaggcagcaagaata

SEQ ID NO: 6402 - DNA, 19 bp, Homo sapiens
  siRNA target sequence for MEF2C (NM_002397.2,1182-1200).
ccaggcagcaagaatacga

SEQ ID NO: 6403 - DNA, 19 bp, Homo sapiens
  siRNA target sequence for MEF2C (NM_002397.2,1218-1236).
gatgtcgacctgcttttga

SEQ ID NO: 6404 - DNA, 19 bp, Homo sapiens
  siRNA target sequence for MEF2C (NM_002397.2,1223-1241).
cgacctgcttttgaatcaa

SEQ ID NO: 6405 - DNA, 19 bp, Homo sapiens
  siRNA target sequence for MEF2C (NM_002397.2,1255-1273).
cccagtcggctcagtcatt

SEQ ID NO: 6406 - DNA, 19 bp, Homo sapiens
  siRNA target sequence for MEF2C (NM_002397.2,1292-1310).
cgtagcaactcctacttta

SEQ ID NO: 6407 - DNA, 19 bp, Homo sapiens
  siRNA target sequence for MEF2C (NM_002397.2,1504-1522).
cttgcactagcactcattt

SEQ ID NO: 6408 - DNA, 19 bp, Homo sapiens
  siRNA target sequence for MEF2C (NM_002397.2,1787-1805).
caagcgcatgcgactttct

SEQ ID NO: 6409 - DNA, 19 bp, Homo sapiens
  siRNA target sequence for MEIS1 (NM_002398.1,119-137).
catcccctccacgatgtat

SEQ ID NO: 6410 - DNA, 19 bp, Homo sapiens
  siRNA target sequence for MEIS1 (NM_002398.1,196-214).
ctctgcactcgcatcagta

SEQ ID NO: 6411 - DNA, 19 bp, Homo sapiens
  siRNA target sequence for MEIS1 (NM_002398.1,264-282).
gtcaatgacgctttaaaga

SEQ ID NO: 6412 - DNA, 19 bp, Homo sapiens
  siRNA target sequence for MEIS1 (NM_002398.1,270-288).
gacgctttaaagagagata

SEQ ID NO: 6413 - DNA, 19 bp, Homo sapiens
  siRNA target sequence for MEIS1 (NM_002398.1,272-290).
cgctttaaagagagataaa

SEQ ID NO: 6414 - DNA, 19 bp, Homo sapiens
  siRNA target sequence for MEIS1 (NM_002398.1,400-418).
gctcgtcagagtcattcaa

SEQ ID NO: 6415 - DNA, 19 bp, Homo sapiens
  siRNA target sequence for MEIS1 (NM_002398.1,403-421).
cgtcagagtcattcaatga

SEQ ID NO: 6416 - DNA, 19 bp, Homo sapiens
  siRNA target sequence for MEIS1 (NM_002398.1,429-447).
gccgtgttcgccaaacaga

SEQ ID NO: 6417 - DNA, 19 bp, Homo sapiens
  siRNA target sequence for MEIS1 (NM_002398.1,430-448).
ccgtgttcgccaaacagat

SEQ ID NO: 6418 - DNA, 19 bp, Homo sapiens
  siRNA target sequence for MEIS1 (NM_002398.1,431-449).
cgtgttcgccaaacagatt

SEQ ID NO: 6419 - DNA, 19 bp, Homo sapiens
  siRNA target sequence for MEIS1 (NM_002398.1,446-464).
gattcgcgcagaaaaacct

SEQ ID NO: 6420 - DNA, 19 bp, Homo sapiens
  siRNA target sequence for MEIS1 (NM_002398.1,480-498).
ccagaactggataacttga

SEQ ID NO: 6421 - DNA, 19 bp, Homo sapiens
  siRNA target sequence for MEIS1 (NM_002398.1,600-618).
gggaaaatgcctatcgatt

SEQ ID NO: 6422 - DNA, 19 bp, Homo sapiens
  siRNA target sequence for MEIS1 (NM_002398.1,610-628).
ctatcgatttggtgataga

SEQ ID NO: 6423 - DNA, 19 bp, Homo sapiens
  siRNA target sequence for MEIS1 (NM_002398.1,673-691).
gatcagcaaatctaactga

SEQ ID NO: 6424 - DNA, 19 bp, Homo sapiens
  siRNA target sequence for MEIS1 (NM_002398.1,698-716).
ctcttggaacagagatcat

SEQ ID NO: 6425 - DNA, 19 bp, Homo sapiens
  siRNA target sequence for MEIS1 (NM_002398.1,869-887).
ggacaaaaagcgtcacaaa

SEQ ID NO: 6426 - DNA, 19 bp, Homo sapiens
  siRNA target sequence for MEIS1 (NM_002398.1,884-902).
caaaaagcgtggcatcttt

SEQ ID NO: 6427 - DNA, 19 bp, Homo sapiens
  siRNA target sequence for MEIS1 (NM_002398.1,1010-1028).
catccttcaagtgaacaat

SEQ ID NO: 6428 - DNA, 19 bp, Homo sapiens
  siRNA target sequence for MEIS1 (NM_002398.1,1014-1032).
cttcaagtgaacaattggt

SEQ ID NO: 6429 - DNA, 19 bp, Homo sapiens
  siRNA target sequence for MEIS1 (NM_002398.1,1076-1094).
gtccaaccgagcagtaagt

SEQ ID NO: 6430 - DNA, 19 bp, Homo sapiens
  siRNA target sequence for MEIS1 (NM_002398.1,1079-1097).
caaccgagcagtaagtcaa

SEQ ID NO: 6431 - DNA, 19 bp, Homo sapiens
  siRNA target sequence for MEIS1 (NM_002398.1,1093-1111).
gtcaaggaacaccttataa

SEQ ID NO: 6432 - DNA, 19 bp, Homo sapiens
  siRNA target sequence for MEIS1 (NM_002398.1,1125-1143).
cccatgggaggtttcgtaa

SEQ ID NO: 6433 - DNA, 19 bp, Homo sapiens
  siRNA target sequence for MEIS1 (NM_002398.1,1126-1144).
ccatgggaggtttcgtaat

SEQ ID NO: 6434 - DNA, 19 bp, Homo sapiens
  siRNA target sequence for MEIS1 (NM_002398.1,1152-1170).
cagcaacatatgggaatta

SEQ ID NO: 6435 - DNA, 19 bp, Homo sapiens
  siRNA target sequence for MEIS1 (NM_002398.1,1154-1172).
gcaacatatgggaattaga

SEQ ID NO: 6436 - DNA, 19 bp, Homo sapiens
  siRNA target sequence for MEIS2 (NM_002399.2,621-639).
ggacaaggacgcgatctat

SEQ ID NO: 6437 - DNA, 19 bp, Homo sapiens
  siRNA target sequence for MEIS2 (NM_002399.2,636-654).
ctatgggcacccgttgttt

SEQ ID NO: 6438 - DNA, 19 bp, Homo sapiens
  siRNA target sequence for MEIS2 (NM_002399.2,645-663).
cccgttgtttcctctgtta

SEQ ID NO: 6439 - DNA, 19 bp, Homo sapiens
  siRNA target sequence for MEIS2 (NM_002399.2,948-966).
catcgacctcgtcattgat

SEQ ID NO: 6440 - DNA, 19 bp, Homo sapiens
  siRNA target sequence for MEIS2 (NM_002399.2,951-969).
cgacctcgtcattgatgaa

SEQ ID NO: 6441 - DNA, 19 bp, Homo sapiens
  siRNA target sequence for MEIS2 (NM_002399.2,952-970).
gacctcgtcattgatgaaa

SEQ ID NO: 6442 - DNA, 19 bp, Homo sapiens
  siRNA target sequence for MEIS2 (NM_002399.2,978-996).
cagctccaagtcagatcat

SEQ ID NO: 6443 - DNA, 19 bp, Homo sapiens
  siRNA target sequence for MEIS2 (NM_002399.2,1007-1025).
caggctcctccacaaatct

SEQ ID NO: 6444 - DNA, 19 bp, Homo sapiens
  siRNA target sequence for MEIS2 (NM_002399.2,1307-1325).
cttccgaagagcagaagaa

SEQ ID NO: 6445 - DNA, 19 bp, Homo sapiens
  siRNA target sequence for MEIS2 (NM_002399.2,1348-1366).
cttacaattctccaagtaa

SEQ ID NO: 6446 - DNA, 19 bp, Homo sapiens
  siRNA target sequence for MEIS2 (NM_002399.2,1407-1425).
catgattgaccagtcaaat

SEQ ID NO: 6447 - DNA, 19 bp, Homo sapiens
  siRNA target sequence for MEIS2 (NM_002399.2,1410-1428).
gattgaccagtcaaatcga

SEQ ID NO: 6448 - DNA, 19 bp, Homo sapiens
  siRNA target sequence for MEIS2 (NM_002399.2,1468-1486).
cccatggggagctttgtgt

SEQ ID NO: 6449 - DNA, 19 bp, Homo sapiens
  siRNA target sequence for MEIS2 (NM_002399.2,1515-1533).
gcctgcaggacctatgagt

SEQ ID NO: 6450 - DNA, 19 bp, Homo sapiens
  siRNA target sequence for MEIS2 (NM_170675.2,2060-2078).
gtcaaatcgagcaggtttt

SEQ ID NO: 6451 - DNA, 19 bp, Homo sapiens
  siRNA target sequence for MEIS2 (NM_170675.2,2062-2080).
caaatcgagcaggttttct

SEQ ID NO: 6452 - DNA, 19 bp, Homo sapiens
  siRNA target sequence for MEIS2 (NM_170675.2,2223-2241).
ggtcctatgggaatgagta

SEQ ID NO: 6453 - DNA, 19 bp, Homo sapiens
  siRNA target sequence for MEIS2 (NM_170675.2,2273-2291).
gaccccacaccctactcaa

SEQ ID NO: 6454 - DNA, 19 bp, Homo sapiens
  siRNA target sequence for MEIS2 (NM_170675.2,2275-2293).
ccccacaccctactcaatt

SEQ ID NO: 6455 - DNA, 19 bp, Homo sapiens
  siRNA target sequence for MEIS2 (NM_170675.2,2282-2300).
ccctactcaattaagacat

SEQ ID NO: 6456 - DNA, 19 bp, Homo sapiens
  siRNA target sequence for MEIS2 (NM_170675.2,2301-2319).
ggacccccaatgcattcat

SEQ ID NO: 6457 - DNA, 19 bp, Homo sapiens
  siRNA target sequence for MEIS2 (NM_170675.2,2302-2320).
gacccccaatgcattcata

SEQ ID NO: 6458 - DNA, 19 bp, Homo sapiens
  siRNA target sequence for MEIS2 (NM_170675.2,2304-2322).
cccccaatgcattcatatt

SEQ ID NO: 6459 - DNA, 19 bp, Homo sapiens
  siRNA target sequence for MEIS2 (NM_170675.2,2398-2416).
cacagagccccacaatgtt

SEQ ID NO: 6460 - DNA, 19 bp, Homo sapiens
  siRNA target sequence for MEIS2 (NM_170675.2,2402-2420).
gagccccacaatgttaaat

SEQ ID NO: 6461 - DNA, 19 bp, Homo sapiens
  siRNA target sequence for MEIS2 (NM_170675.2,2405-2423).
ccccacaatgttaaattct

SEQ ID NO: 6462 - DNA, 19 bp, Homo sapiens
  siRNA target sequence for MEOX1 (NM_004527.2,357-375).
gcagggggttccaaggaaa

SEQ ID NO: 6463 - DNA, 19 bp, Homo sapiens
  siRNA target sequence for MEOX1 (NM_004527.2,412-430).
gaggcccaggcgatgacta

SEQ ID NO: 6464 - DNA, 19 bp, Homo sapiens
  siRNA target sequence for MEOX1 (NM_004527.2,441-459).
gggagcactgccaatgaga

SEQ ID NO: 6465 - DNA, 19 bp, Homo sapiens
  siRNA target sequence for MEOX1 (NM_004527.2,617-635).
gactcggctccgcagatat

SEQ ID NO: 6466 - DNA, 19 bp, Homo sapiens
  siRNA target sequence for MEOX1 (NM_004527.2,619-637).
ctcggctccgcagatatga

SEQ ID NO: 6467 - DNA, 19 bp, Homo sapiens
  siRNA target sequence for MEOX1 (NM_004527.2,621-639).
cggctccgcagatatgaga

SEQ ID NO: 6468 - DNA, 19 bp, Homo sapiens
  siRNA target sequence for MEOX1 (NM_004527.2,623-641).
gctccgcagatatgagatt

SEQ ID NO: 6469 - DNA, 19 bp, Homo sapiens
  siRNA target sequence for MEOX1 (NM_004527.2,663-681).
gagcgccaggtcaaagtgt

SEQ ID NO: 6470 - DNA, 19 bp, Homo sapiens
  siRNA target sequence for MEOX2 (NM_005924.2,455-473).
cacctcccgcagatgtctt

SEQ ID NO: 6471 - DNA, 19 bp, Homo sapiens
  siRNA target sequence for MEOX2 (NM_005924.2,797-815).
gcccatcataattatctca

SEQ ID NO: 6472 - DNA, 19 bp, Homo sapiens
  siRNA target sequence for MEOX2 (NM_005924.2,1021-1039).
gcaaacaggggactctata

SEQ ID NO: 6473 - DNA, 19 bp, Homo sapiens
  siRNA target sequence for MEOX2 (NM_005924.2,1026-1044).
caggggactctatagcaaa

SEQ ID NO: 6474 - DNA, 19 bp, Homo sapiens
  siRNA target sequence for MEOX2 (NM_005924.2,1029-1047).
gggactctatagcaaatga

SEQ ID NO: 6475 - DNA, 19 bp, Homo sapiens
  siRNA target sequence for MIXL1 (NM_031944.1,427-445).
cgtcagagtgggaaatcct

SEQ ID NO: 6476 - DNA, 19 bp, Homo sapiens
  siRNA target sequence for MIXL1 (NM_031944.1,628-646).
ctctctgaagacattggtt

SEQ ID NO: 6477 - DNA, 19 bp, Homo sapiens
  siRNA target sequence for MLL (NM_005933.1,492-510).
gtctccttcagttaaaact

SEQ ID NO: 6478 - DNA, 19 bp, Homo sapiens
  siRNA target sequence for MLL (NM_005933.1,583-601).
gtgttttcccctctaaata

SEQ ID NO: 6479 - DNA, 19 bp, Homo sapiens
  siRNA target sequence for MLL (NM_005933.1,590-608).
cccctctaaataaatcaga

SEQ ID NO: 6480 - DNA, 19 bp, Homo sapiens
  siRNA target sequence for MLL (NM_005933.1,680-698).
ccttccctggagtaaaaat

SEQ ID NO: 6481 - DNA, 19 bp, Homo sapiens
  siRNA target sequence for MLL (NM_005933.1,684-702).
ccctggagtaaaaatcaaa

SEQ ID NO: 6482 - DNA, 19 bp, Homo sapiens
  siRNA target sequence for MLL (NM_005933.1,718-736).
gacatttcagagttaccaa

SEQ ID NO: 6483 - DNA, 19 bp, Homo sapiens
  siRNA target sequence for MLL (NM_005933.1,832-850).
ctctctcctctcaagtcta

SEQ ID NO: 6484 - DNA, 19 bp, Homo sapiens
  siRNA target sequence for MLL (NM_005933.1,838-856).
cctctcaagtctaagttta

SEQ ID NO: 6485 - DNA, 19 bp, Homo sapiens
  siRNA target sequence for MLL (NM_005933.1,841-859).
ctcaagtctaagtttaaga

SEQ ID NO: 6486 - DNA, 19 bp, Homo sapiens
  siRNA target sequence for MLL (NM_005933.1,843-861).
caagtctaagtttaagaca

SEQ ID NO: 6487 - DNA, 19 bp, Homo sapiens
  siRNA target sequence for MLL (NM_005933.1,882-900).
gaagggggtacaaattgta

SEQ ID NO: 6488 - DNA, 19 bp, Homo sapiens
  siRNA target sequence for MLL (NM_005933.1,981-999).
cagaaagtccggaaagaca

SEQ ID NO: 6489 - DNA, 19 bp, Homo sapiens
  siRNA target sequence for MLL (NM_005933.1,1060-1078).
ggattaagccagttaggat

SEQ ID NO: 6490 - DNA, 19 bp, Homo sapiens
  siRNA target sequence for MLL (NM_005933.1,1068-1086).
ccagttaggattattcctt

SEQ ID NO: 6491 - DNA, 19 bp, Homo sapiens
  siRNA target sequence for MLL (NM_005933.1,1108-1126).
ccattgctaagcaactctt

SEQ ID NO: 6492 - DNA, 19 bp, Homo sapiens
  siRNA target sequence for MLL (NM_005933.1,1200-1218).
gacacaggtcaaaaatatt

SEQ ID NO: 6493 - DNA, 19 bp, Homo sapiens
  siRNA target sequence for MLL (NM_005933.1,1269-1287).
gacccctcggcggtttata

SEQ ID NO: 6494 - DNA, 19 bp, Homo sapiens
  siRNA target sequence for MLL (NM_005933.1,1271-1289).
cccctcggcggtttataga

SEQ ID NO: 6495 - DNA, 19 bp, Homo sapiens
  siRNA target sequence for MLL (NM_005933.1,1296-1314).
ggattatgaccctccaatt

SEQ ID NO: 6496 - DNA, 19 bp, Homo sapiens
  siRNA target sequence for MLL (NM_005933.1,1297-1315).
gattatgaccctccaatta

SEQ ID NO: 6497 - DNA, 19 bp, Homo sapiens
  siRNA target sequence for MLL (NM_005933.1,1332-1350).
gtctacaccgaatagtaga

SEQ ID NO: 6498 - DNA, 19 bp, Homo sapiens
  siRNA target sequence for MLL (NM_005933.1,1334-1352).
ctacaccgaatagtagatt

SEQ ID NO: 6499 - DNA, 19 bp, Homo sapiens
  siRNA target sequence for MLL (NM_005933.1,1401-1419).
gcactcctctcaaatgtct

SEQ ID NO: 6500 - DNA, 19 bp, Homo sapiens
  siRNA target sequence for MLL (NM_005933.1,1423-1441).
gactcctctcgatctagta

SEQ ID NO: 6501 - DNA, 19 bp, Homo sapiens
  siRNA target sequence for MLL (NM_005933.1,1509-1527).
gagcgatacccctgaagtt

SEQ ID NO: 6502 - DNA, 19 bp, Homo sapiens
  siRNA target sequence for MLL (NM_005933.1,1511-1529).
gcgatacccctgaagttca

SEQ ID NO: 6503 - DNA, 19 bp, Homo sapiens
  siRNA target sequence for MLL (NM_005933.1,1512-1530).
cgatacccctgaagttcat

SEQ ID NO: 6504 - DNA, 19 bp, Homo sapiens
  siRNA target sequence for MLL (NM_005933.1,1615-1633).
ggatctagaacgacgaaaa

SEQ ID NO: 6505 - DNA, 19 bp, Homo sapiens
  siRNA target sequence for MLL (NM_005933.1,1616-1634).
gatctagaacgacgaaaaa

SEQ ID NO: 6506 - DNA, 19 bp, Homo sapiens
  siRNA target sequence for MLL (NM_005933.1,1619-1637).
ctagaacgacgaaaaaatt

SEQ ID NO: 6507 - DNA, 19 bp, Homo sapiens
  siRNA target sequence for MLL (NM_005933.1,1751-1769).
ggcttatgcctccaacaat

SEQ ID NO: 6508 - DNA, 19 bp, Homo sapiens
  siRNA target sequence for MLL (NM_005933.1,1762-1780).
ccaacaatccccttagcat

SEQ ID NO: 6509 - DNA, 19 bp, Homo sapiens
  siRNA target sequence for MLL (NM_005933.1,1812-1830).
gcaagggaagcgaaaatct

SEQ ID NO: 6510 - DNA, 19 bp, Homo sapiens
  siRNA target sequence for MLL (NM_005933.1,1813-1831).
caagggaagcgaaaatcta

SEQ ID NO: 6511 - DNA, 19 bp, Homo sapiens
  siRNA target sequence for MLL (NM_005933.1,1837-1855).
cgagaaccgacatttaggt

SEQ ID NO: 6512 - DNA, 19 bp, Homo sapiens
  siRNA target sequence for MLL (NM_005933.1,1874-1892).
ctaggtcagagccacaata

SEQ ID NO: 6513 - DNA, 19 bp, Homo sapiens
  siRNA target sequence for MLL (NM_005933.1,1878-1896).
gtcagagccacaatacttt

SEQ ID NO: 6514 - DNA, 19 bp, Homo sapiens
  siRNA target sequence for MLL (NM_005933.1,1882-1900).
gagccacaatacttttcct

SEQ ID NO: 6515 - DNA, 19 bp, Homo sapiens
  siRNA target sequence for MLL (NM_005933.1,1893-1911).
cttttcctcagcaaagtat

SEQ ID NO: 6516 - DNA, 19 bp, Homo sapiens
  siRNA target sequence for MLL (NM_005933.1,1924-1942).
cttattcgcaaaccaatat

SEQ ID NO: 6517 - DNA, 19 bp, Homo sapiens
  siRNA target sequence for MLL (NM_005933.1,1930-1948).
cgcaaaccaatatttgata

SEQ ID NO: 6518 - DNA, 19 bp, Homo sapiens
  siRNA target sequence for MLL (NM_005933.1,1932-1950).
caaaccaatatttgataat

SEQ ID NO: 6519 - DNA, 19 bp, Homo sapiens
  siRNA target sequence for MLL (NM_005933.1,2020-2038).
gcttcagcccgattgtttt

SEQ ID NO: 6520 - DNA, 19 bp, Homo sapiens
  siRNA target sequence for MLL (NM_005933.1,2089-2107).
ctgagagctccaagattta

SEQ ID NO: 6521 - DNA, 19 bp, Homo sapiens
  siRNA target sequence for MLL (NM_005933.1,2091-2109).
gagagctccaagatttact

SEQ ID NO: 6522 - DNA, 19 bp, Homo sapiens
  siRNA target sequence for MLL (NM_005933.1,2116-2134).
gaggctcactctagaatat

SEQ ID NO: 6523 - DNA, 19 bp, Homo sapiens
  siRNA target sequence for MLL (NM_005933.1,2141-2159).
ctgtaaccttgcctagtaa

SEQ ID NO: 6524 - DNA, 19 bp, Homo sapiens
  siRNA target sequence for MLL (NM_005933.1,2151-2169).
gcctagtaatcgaacttct

SEQ ID NO: 6525 - DNA, 19 bp, Homo sapiens
  siRNA target sequence for MLL (NM_005933.1,2180-2198).
cttcttcaggagtatccaa

SEQ ID NO: 6526 - DNA, 19 bp, Homo sapiens
  siRNA target sequence for MLL (NM_005933.1,2326-2344).
gtctcttcctcgttaagca

SEQ ID NO: 6527 - DNA, 19 bp, Homo sapiens
  siRNA target sequence for MLL (NM_005933.1,2328-2346).
ctcttcctcgttaagcatt

SEQ ID NO: 6528 - DNA, 19 bp, Homo sapiens
  siRNA target sequence for MLL (NM_005933.1,2334-2352).
ctcgttaagcatttctgtt

SEQ ID NO: 6529 - DNA, 19 bp, Homo sapiens
  siRNA target sequence for MLL (NM_005933.1,2337-2355).
gttaagcatttctgttagt

SEQ ID NO: 6530 - DNA, 19 bp, Homo sapiens
  siRNA target sequence for MLL (NM_005933.1,2371-2389).
gccttaaacccaactttta

SEQ ID NO: 6531 - DNA, 19 bp, Homo sapiens
  siRNA target sequence for MLL (NM_005933.1,2470-2488).
gcagagccattttcatcaa

SEQ ID NO: 6532 - DNA, 19 bp, Homo sapiens
  siRNA target sequence for MLL (NM_005933.1,2473-2491).
gagccattttcatcaagta

SEQ ID NO: 6533 - DNA, 19 bp, Homo sapiens
  siRNA target sequence for MLL (NM_005933.1,2500-2518).
cctctcttcccttggttta

SEQ ID NO: 6534 - DNA, 19 bp, Homo sapiens
  siRNA target sequence for MLL (NM_005933.1,2565-2583).
cgaggagctgtccaaagat

SEQ ID NO: 6535 - DNA, 19 bp, Homo sapiens
  siRNA target sequence for MLL (NM_005933.1,2700-2718).
gagtagttctgctttgtat

SEQ ID NO: 6536 - DNA, 19 bp, Homo sapiens
  siRNA target sequence for MLL (NM_005933.1,2788-2806).
gcaacagggcggaagaagt

SEQ ID NO: 6537 - DNA, 19 bp, Homo sapiens
  siRNA target sequence for MLL (NM_005933.1,2794-2812).
gggcggaagaagtcttcat

SEQ ID NO: 6538 - DNA, 19 bp, Homo sapiens
  siRNA target sequence for MLL (NM_005933.1,2796-2814).
gcggaagaagtcttcatca

SEQ ID NO: 6539 - DNA, 19 bp, Homo sapiens
  siRNA target sequence for MLL (NM_005933.1,2844-2862).
gactcttggggatacaaca

SEQ ID NO: 6540 - DNA, 19 bp, Homo sapiens
  siRNA target sequence for MLL (NM_005933.1,2853-2871).
ggatacaacagctgtcaaa

SEQ ID NO: 6541 - DNA, 19 bp, Homo sapiens
  siRNA target sequence for MLL (NM_005933.1,2854-2872).
gatacaacagctgtcaaaa

SEQ ID NO: 6542 - DNA, 19 bp, Homo sapiens
  siRNA target sequence for MLL (NM_005933.1,3114-3132).
gaagagtaagagtcttaaa

SEQ ID NO: 6543 - DNA, 19 bp, Homo sapiens
  siRNA target sequence for MLL (NM_005933.1,3117-3135).
gagtaagagtcttaaacaa

SEQ ID NO: 6544 - DNA, 19 bp, Homo sapiens
  siRNA target sequence for MLL (NM_005933.1,3240-3258).
ccgaaaacgagctgtgttt

SEQ ID NO: 6545 - DNA, 19 bp, Homo sapiens
  siRNA target sequence for MLL (NM_005933.1,3298-3316).
gaacgagaaaagattttgt

SEQ ID NO: 6546 - DNA, 19 bp, Homo sapiens
  siRNA target sequence for MLL (NM_005933.1,3325-3343).
gggaatgatgacaagtcat

SEQ ID NO: 6547 - DNA, 19 bp, Homo sapiens
  siRNA target sequence for MLL (NM_005933.1,3384-3402).
catcaaaccaattaaacct

SEQ ID NO: 6548 - DNA, 19 bp, Homo sapiens
  siRNA target sequence for MLL (NM_005933.1,3493-3511).
gaggactgtggtgtttgta

SEQ ID NO: 6549 - DNA, 19 bp, Homo sapiens
  siRNA target sequence for MLL (NM_005933.1,3495-3513).
ggactgtggtgtttgtact

SEQ ID NO: 6550 - DNA, 19 bp, Homo sapiens
  siRNA target sequence for MLL (NM_005933.1,3496-3514).
gactgtggtgtttgtacta

SEQ ID NO: 6551 - DNA, 19 bp, Homo sapiens
  siRNA target sequence for MLL (NM_005933.1,3498-3516).
ctgtggtgtttgtactaat

SEQ ID NO: 6552 - DNA, 19 bp, Homo sapiens
  siRNA target sequence for MLL (NM_005933.1,3503-3521).
gtgtttgtactaattgctt

SEQ ID NO: 6553 - DNA, 19 bp, Homo sapiens
  siRNA target sequence for MLL (NM_005933.1,3534-3552).
gtttggtggtcgcaatata

SEQ ID NO: 6554 - DNA, 19 bp, Homo sapiens
  siRNA target sequence for MLL (NM_005933.1,3538-3556).
ggtggtcgcaatataaaga

SEQ ID NO: 6555 - DNA, 19 bp, Homo sapiens
  siRNA target sequence for MLL (NM_005933.1,3581-3599).
gtcagaatctacaatggat

SEQ ID NO: 6556 - DNA, 19 bp, Homo sapiens
  siRNA target sequence for MLL (NM_005933.1,3711-3729).
ggtggactctagtcagaaa

SEQ ID NO: 6557 - DNA, 19 bp, Homo sapiens
  siRNA target sequence for MLL (NM_005933.1,3795-3813).
gcccgtcgaggaaaagagt

SEQ ID NO: 6558 - DNA, 19 bp, Homo sapiens
  siRNA target sequence for MLL (NM_005933.1,3833-3851).
cccctgggcctgaatccaa

SEQ ID NO: 6559 - DNA, 19 bp, Homo sapiens
  siRNA target sequence for MLL (NM_005933.1,3938-3956).
gaccgccaagaaaagaagt

SEQ ID NO: 6560 - DNA, 19 bp, Homo sapiens
  siRNA target sequence for MLL (NM_005933.1,3970-3988).
cctagtgagcccaagaaaa

SEQ ID NO: 6561 - DNA, 19 bp, Homo sapiens
  siRNA target sequence for MLL (NM_005933.1,4049-4067).
gcccaagtatccctgtaaa

SEQ ID NO: 6562 - DNA, 19 bp, Homo sapiens
  siRNA target sequence for MLL (NM_005933.1,4050-4068).
cccaagtatccctgtaaaa

SEQ ID NO: 6563 - DNA, 19 bp, Homo sapiens
  siRNA target sequence for MLL (NM_005933.1,4052-4070).
caagtatccctgtaaaaca

SEQ ID NO: 6564 - DNA, 19 bp, Homo sapiens
  siRNA target sequence for MLL (NM_005933.1,4094-4112).
cacctccggtcaataagca

SEQ ID NO: 6565 - DNA, 19 bp, Homo sapiens
  siRNA target sequence for MLL (NM_005933.1,4149-4167).
ctccaatggcaatagttct

SEQ ID NO: 6566 - DNA, 19 bp, Homo sapiens
  siRNA target sequence for MLL (NM_005933.1,4151-4169).
ccaatggcaatagttctaa

SEQ ID NO: 6567 - DNA, 19 bp, Homo sapiens
  siRNA target sequence for MLL (NM_005933.1,4157-4175).
gcaatagttctaagcaaaa

SEQ ID NO: 6568 - DNA, 19 bp, Homo sapiens
  siRNA target sequence for MLL (NM_005933.1,4158-4176).
caatagttctaagcaaaaa

SEQ ID NO: 6569 - DNA, 19 bp, Homo sapiens
  siRNA target sequence for MLL (NM_005933.1,4246-4264).
gagatgggaggcttaggaa

SEQ ID NO: 6570 - DNA, 19 bp, Homo sapiens
  siRNA target sequence for MLL (NM_005933.1,4313-4331).
ccagtagtgggcatgtaga

SEQ ID NO: 6571 - DNA, 19 bp, Homo sapiens
  siRNA target sequence for MLL (NM_005933.1,4316-4334).
gtagtgggcatgtagagtt

SEQ ID NO: 6572 - DNA, 19 bp, Homo sapiens
  siRNA target sequence for MLL (NM_005933.1,4319-4337).
gtgggcatgtagagtttgt

SEQ ID NO: 6573 - DNA, 19 bp, Homo sapiens
  siRNA target sequence for MLL (NM_005933.1,4322-4340).
ggcatgtagagtttgtgta

SEQ ID NO: 6574 - DNA, 19 bp, Homo sapiens
  siRNA target sequence for MLL (NM_005933.1,4323-4341).
gcatgtagagtttgtgtat

SEQ ID NO: 6575 - DNA, 19 bp, Homo sapiens
  siRNA target sequence for MLL (NM_005933.1,4324-4342).
catgtagagtttgtgtatt

SEQ ID NO: 6576 - DNA, 19 bp, Homo sapiens
  siRNA target sequence for MLL (NM_005933.1,4357-4375).
gagcccttccacaagtttt

SEQ ID NO: 6577 - DNA, 19 bp, Homo sapiens
  siRNA target sequence for MLL (NM_005933.1,4422-4440).
gtgttgtcgtcgttgcaaa

SEQ ID NO: 6578 - DNA, 19 bp, Homo sapiens
  siRNA target sequence for MLL (NM_005933.1,4424-4442).
gttgtcgtcgttgcaaatt

SEQ ID NO: 6579 - DNA, 19 bp, Homo sapiens
  siRNA target sequence for MLL (NM_005933.1,4480-4498).
cagctgctggagtgtaata

SEQ ID NO: 6580 - DNA, 19 bp, Homo sapiens
  siRNA target sequence for MLL (NM_005933.1,4483-4501).
ctgctggagtgtaataagt

SEQ ID NO: 6581 - DNA, 19 bp, Homo sapiens
  siRNA target sequence for MLL (NM_005933.1,4676-4694).
gcgccaagctctttgctaa

SEQ ID NO: 6582 - DNA, 19 bp, Homo sapiens
  siRNA target sequence for MLL (NM_005933.1,4813-4831).
gagatgtatgagattctat

SEQ ID NO: 6583 - DNA, 19 bp, Homo sapiens
  siRNA target sequence for MLL (NM_005933.1,4895-4913).
ggcgactggcccttgaaaa

SEQ ID NO: 6584 - DNA, 19 bp, Homo sapiens
  siRNA target sequence for MLL (NM_005933.1,5146-5164).
gaccaagggaattacacat

SEQ ID NO: 6585 - DNA, 19 bp, Homo sapiens
  siRNA target sequence for MLL (NM_005933.1,5172-5190).
ggagttcagtgatgatatt

SEQ ID NO: 6586 - DNA, 19 bp, Homo sapiens
  siRNA target sequence for MLL (NM_005933.1,5311-5329).
gtcaaaaagtccaggtttt

SEQ ID NO: 6587 - DNA, 19 bp, Homo sapiens
  siRNA target sequence for MLL (NM_005933.1,5443-5461).
gagcagcctcctttaatga

SEQ ID NO: 6588 - DNA, 19 bp, Homo sapiens
  siRNA target sequence for MLL (NM_005933.1,5612-5630).
gacagtgtgcgttatgttt

SEQ ID NO: 6589 - DNA, 19 bp, Homo sapiens
  siRNA target sequence for MLL (NM_005933.1,5614-5632).
cagtgtgcgttatgtttga

SEQ ID NO: 6590 - DNA, 19 bp, Homo sapiens
  siRNA target sequence for MLL (NM_005933.1,5616-5634).
gtgtgcgttatgtttgact

SEQ ID NO: 6591 - DNA, 19 bp, Homo sapiens
  siRNA target sequence for MLL (NM_005933.1,5618-5636).
gtgcgttatgtttgactta

SEQ ID NO: 6592 - DNA, 19 bp, Homo sapiens
  siRNA target sequence for MLL (NM_005933.1,5622-5640).
gttatgtttgacttatggt

SEQ ID NO: 6593 - DNA, 19 bp, Homo sapiens
  siRNA target sequence for MLL (NM_005933.1,5656-5674).
gatgctggtcgtttactat

SEQ ID NO: 6594 - DNA, 19 bp, Homo sapiens
  siRNA target sequence for MLL (NM_005933.1,5659-5677).
gctggtcgtttactatata

SEQ ID NO: 6595 - DNA, 19 bp, Homo sapiens
  siRNA target sequence for MLL (NM_005933.1,5660-5678).
ctggtcgtttactatatat

SEQ ID NO: 6596 - DNA, 19 bp, Homo sapiens
  siRNA target sequence for MLL (NM_005933.1,5689-5707).
gagtggacacatgtaaatt

SEQ ID NO: 6597 - DNA, 19 bp, Homo sapiens
  siRNA target sequence for MLL (NM_005933.1,5715-5733).
gtggtcagcggaagtgttt

SEQ ID NO: 6598 - DNA, 19 bp, Homo sapiens
  siRNA target sequence for MLL (NM_005933.1,5717-5735).
ggtcagcggaagtgtttga

SEQ ID NO: 6599 - DNA, 19 bp, Homo sapiens
  siRNA target sequence for MLL (NM_005933.1,5718-5736).
gtcagcggaagtgtttgaa

SEQ ID NO: 6600 - DNA, 19 bp, Homo sapiens
  siRNA target sequence for MLL (NM_005933.1,5737-5755).
gatgatgacggatcactaa

SEQ ID NO: 6601 - DNA, 19 bp, Homo sapiens
  siRNA target sequence for MLL (NM_005933.1,5740-5758).
gatgacggatcactaaaga

SEQ ID NO: 6602 - DNA, 19 bp, Homo sapiens
  siRNA target sequence for MLL (NM_005933.1,5849-5867).
gcaccagcaactatcactt

SEQ ID NO: 6603 - DNA, 19 bp, Homo sapiens
  siRNA target sequence for MLL (NM_005933.1,5923-5941).
caacgacatcgggatttga

SEQ ID NO: 6604 - DNA, 19 bp, Homo sapiens
  siRNA target sequence for MLL (NM_005933.1,5926-5944).
cgacatcgggatttgatca

SEQ ID NO: 6605 - DNA, 19 bp, Homo sapiens
  siRNA target sequence for MLL (NM_005933.1,5927-5945).
gacatcgggatttgatcaa

SEQ ID NO: 6606 - DNA, 19 bp, Homo sapiens
  siRNA target sequence for MLL (NM_005933.1,6063-6081).
gatgattgggtctatgaca

SEQ ID NO: 6607 - DNA, 19 bp, Homo sapiens
  siRNA target sequence for MLL (NM_005933.1,6080-6098).
caatcgactgcttaggaat

SEQ ID NO: 6608 - DNA, 19 bp, Homo sapiens
  siRNA target sequence for MLL (NM_005933.1,6084-6102).
cgactgcttaggaattcta

SEQ ID NO: 6609 - DNA, 19 bp, Homo sapiens
  siRNA target sequence for MLL (NM_005933.1,6085-6103).
gactgcttaggaattctaa

SEQ ID NO: 6610 - DNA, 19 bp, Homo sapiens
  siRNA target sequence for MLL (NM_005933.1,6087-6105).
ctgcttaggaattctaaat

SEQ ID NO: 6611 - DNA, 19 bp, Homo sapiens
  siRNA target sequence for MLL (NM_005933.1,6113-6131).
ccgactgtgaagataagct

SEQ ID NO: 6612 - DNA, 19 bp, Homo sapiens
  siRNA target sequence for MLL (NM_005933.1,6129-6147).
gctctttcctattggatat

SEQ ID NO: 6613 - DNA, 19 bp, Homo sapiens
  siRNA target sequence for MLL (NM_005933.1,6181-6199).
gctcgcaagcgctgtgtat

SEQ ID NO: 6614 - DNA, 19 bp, Homo sapiens
  siRNA target sequence for MLL (NM_005933.1,6182-6200).
ctcgcaagcgctgtgtata

SEQ ID NO: 6615 - DNA, 19 bp, Homo sapiens
  siRNA target sequence for MLL (NM_005933.1,6184-6202).
cgcaagcgctgtgtatata

SEQ ID NO: 6616 - DNA, 19 bp, Homo sapiens
  siRNA target sequence for MLL (NM_005933.1,6232-6250).
gtcgtagagccggatatca

SEQ ID NO: 6617 - DNA, 19 bp, Homo sapiens
  siRNA target sequence for MLL (NM_005933.1,6252-6270).
cagcactgttgaacatgat

SEQ ID NO: 6618 - DNA, 19 bp, Homo sapiens
  siRNA target sequence for MLL (NM_005933.1,6288-6306).
ccatagtccaacatctttt

SEQ ID NO: 6619 - DNA, 19 bp, Homo sapiens
  siRNA target sequence for MLL (NM_005933.1,6293-6311).
gtccaacatcttttacaga

SEQ ID NO: 6620 - DNA, 19 bp, Homo sapiens
  siRNA target sequence for MLL (NM_005933.1,6369-6387).
ccgacctcctcattcacaa

SEQ ID NO: 6621 - DNA, 19 bp, Homo sapiens
  siRNA target sequence for MLL (NM_005933.1,6392-6410).
ctggctcctgttattatca

SEQ ID NO: 6622 - DNA, 19 bp, Homo sapiens
  siRNA target sequence for MLL (NM_005933.1,6506-6524).
ccccaaccactcatgaaat

SEQ ID NO: 6623 - DNA, 19 bp, Homo sapiens
  siRNA target sequence for MLL (NM_005933.1,6509-6527).
caaccactcatgaaatagt

SEQ ID NO: 6624 - DNA, 19 bp, Homo sapiens
  siRNA target sequence for MLL (NM_005933.1,6528-6546).
cacagtaggtgatccttta

SEQ ID NO: 6625 - DNA, 19 bp, Homo sapiens
  siRNA target sequence for MLL (NM_005933.1,6530-6548).
cagtaggtgatcctttact

SEQ ID NO: 6626 - DNA, 19 bp, Homo sapiens
  siRNA target sequence for MLL (NM_005933.1,6532-6550).
gtaggtgatcctttactct

SEQ ID NO: 6627 - DNA, 19 bp, Homo sapiens
  siRNA target sequence for MLL (NM_005933.1,6611-6629).
ggtccaaactccggataat

SEQ ID NO: 6628 - DNA, 19 bp, Homo sapiens
  siRNA target sequence for MLL (NM_005933.1,6615-6633).
caaactccggataatgtct

SEQ ID NO: 6629 - DNA, 19 bp, Homo sapiens
  siRNA target sequence for MLL (NM_005933.1,6648-6666).
gaatacttactctaggaat

SEQ ID NO: 6630 - DNA, 19 bp, Homo sapiens
  siRNA target sequence for MLL (NM_005933.1,6687-6705).
caccgggaccgctactgat

SEQ ID NO: 6631 - DNA, 19 bp, Homo sapiens
  siRNA target sequence for MLL (NM_005933.1,6690-6708).
cgggaccgctactgatctt

SEQ ID NO: 6632 - DNA, 19 bp, Homo sapiens
  siRNA target sequence for MLL (NM_005933.1,6692-6710).
ggaccgctactgatcttga

SEQ ID NO: 6633 - DNA, 19 bp, Homo sapiens
  siRNA target sequence for MLL (NM_005933.1,6693-6711).
gaccgctactgatcttgaa

SEQ ID NO: 6634 - DNA, 19 bp, Homo sapiens
  siRNA target sequence for MLL (NM_005933.1,6696-6714).
cgctactgatcttgaatca

SEQ ID NO: 6635 - DNA, 19 bp, Homo sapiens
  siRNA target sequence for MLL (NM_005933.1,6697-6715).
gctactgatcttgaatcaa

SEQ ID NO: 6636 - DNA, 19 bp, Homo sapiens
  siRNA target sequence for MLL (NM_005933.1,6716-6734).
gtgccaaagtagttgatca

SEQ ID NO: 6637 - DNA, 19 bp, Homo sapiens
  siRNA target sequence for MLL (NM_005933.1,6719-6737).
ccaaagtagttgatcatgt

SEQ ID NO: 6638 - DNA, 19 bp, Homo sapiens
  siRNA target sequence for MLL (NM_005933.1,6782-6800).
ccacctcttcaaatttgca

SEQ ID NO: 6639 - DNA, 19 bp, Homo sapiens
  siRNA target sequence for MLL (NM_005933.1,6783-6801).
cacctcttcaaatttgcaa

SEQ ID NO: 6640 - DNA, 19 bp, Homo sapiens
  siRNA target sequence for MLL (NM_005933.1,6837-6855).
cttggatggatcttcatct

SEQ ID NO: 6641 - DNA, 19 bp, Homo sapiens
  siRNA target sequence for MLL (NM_005933.1,6969-6987).
ggcttaccctggaattcct

SEQ ID NO: 6642 - DNA, 19 bp, Homo sapiens
  siRNA target sequence for MLL (NM_005933.1,6994-7012).
gccccacaggttcataaca

SEQ ID NO: 6643 - DNA, 19 bp, Homo sapiens
  siRNA target sequence for MLL (NM_005933.1,6996-7014).
cccacaggttcataacaca

SEQ ID NO: 6644 - DNA, 19 bp, Homo sapiens
  siRNA target sequence for MLL (NM_005933.1,6997-7015).
ccacaggttcataacacaa

SEQ ID NO: 6645 - DNA, 19 bp, Homo sapiens
  siRNA target sequence for MLL (NM_005933.1,7000-7018).
caggttcataacacaacat

SEQ ID NO: 6646 - DNA, 19 bp, Homo sapiens
  siRNA target sequence for MLL (NM_005933.1,7003-7021).
gttcataacacaacatcta

SEQ ID NO: 6647 - DNA, 19 bp, Homo sapiens
  siRNA target sequence for MLL (NM_005933.1,7022-7040).
gagaactgaatgttagtaa

SEQ ID NO: 6648 - DNA, 19 bp, Homo sapiens
  siRNA target sequence for MLL (NM_005933.1,7067-7085).
cagtgtcgttttcttctaa

SEQ ID NO: 6649 - DNA, 19 bp, Homo sapiens
  siRNA target sequence for MLL (NM_005933.1,7186-7204).
gatactgaagtcaaaacct

SEQ ID NO: 6650 - DNA, 19 bp, Homo sapiens
  siRNA target sequence for MLL (NM_005933.1,7245-7263).
cgaacatatgggatctagt

SEQ ID NO: 6651 - DNA, 19 bp, Homo sapiens
  siRNA target sequence for MLL (NM_005933.1,7246-7264).
gaacatatgggatctagtt

SEQ ID NO: 6652 - DNA, 19 bp, Homo sapiens
  siRNA target sequence for MLL (NM_005933.1,7255-7273).
ggatctagttccagagata

SEQ ID NO: 6653 - DNA, 19 bp, Homo sapiens
  siRNA target sequence for MLL (NM_005933.1,7423-7441).
ggccaacgaccatgtaaca

SEQ ID NO: 6654 - DNA, 19 bp, Homo sapiens
  siRNA target sequence for MLL (NM_005933.1,7424-7442).
gccaacgaccatgtaacaa

SEQ ID NO: 6655 - DNA, 19 bp, Homo sapiens
  siRNA target sequence for MLL (NM_005933.1,7425-7443).
ccaacgaccatgtaacaat

SEQ ID NO: 6656 - DNA, 19 bp, Homo sapiens
  siRNA target sequence for MLL (NM_005933.1,7429-7447).
cgaccatgtaacaatgttt

SEQ ID NO: 6657 - DNA, 19 bp, Homo sapiens
  siRNA target sequence for MLL (NM_005933.1,7499-7517).
ctccacccatgcaagtaga

SEQ ID NO: 6658 - DNA, 19 bp, Homo sapiens
  siRNA target sequence for MLL (NM_005933.1,7520-7538).
gatctgccaaggaattaca

SEQ ID NO: 6659 - DNA, 19 bp, Homo sapiens
  siRNA target sequence for MLL (NM_005933.1,7547-7565).
ggaaacgcacagtcaaagt

SEQ ID NO: 6660 - DNA, 19 bp, Homo sapiens
  siRNA target sequence for MLL (NM_005933.1,7568-7586).
cactgacacctctaaaaat

SEQ ID NO: 6661 - DNA, 19 bp, Homo sapiens
  siRNA target sequence for MLL (NM_005933.1,7717-7735).
ccaagccccaataatacct

SEQ ID NO: 6662 - DNA, 19 bp, Homo sapiens
  siRNA target sequence for MLL (NM_005933.1,7733-7751).
cctcatgccaggattctca

SEQ ID NO: 6663 - DNA, 19 bp, Homo sapiens
  siRNA target sequence for MLL (NM_005933.1,7734-7752).
ctcatgccaggattctcaa

SEQ ID NO: 6664 - DNA, 19 bp, Homo sapiens
  siRNA target sequence for MLL (NM_005933.1,7748-7766).
ctcaaagtaacaactatca

SEQ ID NO: 6665 - DNA, 19 bp, Homo sapiens
  siRNA target sequence for MLL (NM_005933.1,7819-7837).
caggaggatggctctttta

SEQ ID NO: 6666 - DNA, 19 bp, Homo sapiens
  siRNA target sequence for MLL (NM_005933.1,7859-7877).
gtgcccgtgcacgttctaa

SEQ ID NO: 6667 - DNA, 19 bp, Homo sapiens
  siRNA target sequence for MLL (NM_005933.1,7861-7879).
gcccgtgcacgttctaaca

SEQ ID NO: 6668 - DNA, 19 bp, Homo sapiens
  siRNA target sequence for MLL (NM_005933.1,7902-7920).
ctatggagtaagatcctat

SEQ ID NO: 6669 - DNA, 19 bp, Homo sapiens
  siRNA target sequence for MLL (NM_005933.1,7921-7939).
ggtgaagaagacattccat

SEQ ID NO: 6670 - DNA, 19 bp, Homo sapiens
  siRNA target sequence for MLL (NM_005933.1,8021-8039).
cagatgaagacgacttata

SEQ ID NO: 6671 - DNA, 19 bp, Homo sapiens
  siRNA target sequence for MLL (NM_005933.1,8023-8041).
gatgaagacgacttatact

SEQ ID NO: 6672 - DNA, 19 bp, Homo sapiens
  siRNA target sequence for MLL (NM_005933.1,8029-8047).
gacgacttatactattaca

SEQ ID NO: 6673 - DNA, 19 bp, Homo sapiens
  siRNA target sequence for MLL (NM_005933.1,8032-8050).
gacttatactattacaact

SEQ ID NO: 6674 - DNA, 19 bp, Homo sapiens
  siRNA target sequence for MLL (NM_005933.1,8086-8104).
cgactggcatcccataatt

SEQ ID NO: 6675 - DNA, 19 bp, Homo sapiens
  siRNA target sequence for MLL (NM_005933.1,8169-8187).
gacagagagtgatactagt

SEQ ID NO: 6676 - DNA, 19 bp, Homo sapiens
  siRNA target sequence for MLL (NM_005933.1,8253-8271).
gaacttaaagattgataga

SEQ ID NO: 6677 - DNA, 19 bp, Homo sapiens
  siRNA target sequence for MLL (NM_005933.1,8262-8280).
gattgatagacctgaagat

SEQ ID NO: 6678 - DNA, 19 bp, Homo sapiens
  siRNA target sequence for MLL (NM_005933.1,8309-8327).
gttctgttggccacaaaaa

SEQ ID NO: 6679 - DNA, 19 bp, Homo sapiens
  siRNA target sequence for MLL (NM_005933.1,8329-8347).
gagccaaagatggataact

SEQ ID NO: 6680 - DNA, 19 bp, Homo sapiens
  siRNA target sequence for MLL (NM_005933.1,8340-8358).
ggataactgccattctgta

SEQ ID NO: 6681 - DNA, 19 bp, Homo sapiens
  siRNA target sequence for MLL (NM_005933.1,8422-8440).
cgcagagtccacacaagta

SEQ ID NO: 6682 - DNA, 19 bp, Homo sapiens
  siRNA target sequence for MLL (NM_005933.1,8444-8462).
cctccgacaaaaatttact

SEQ ID NO: 6683 - DNA, 19 bp, Homo sapiens
  siRNA target sequence for MLL (NM_005933.1,8477-8495).
ctgagctcctgaaatcaga

SEQ ID NO: 6684 - DNA, 19 bp, Homo sapiens
  siRNA target sequence for MLL (NM_005933.1,8479-8497).
gagctcctgaaatcagatt

SEQ ID NO: 6685 - DNA, 19 bp, Homo sapiens
  siRNA target sequence for MLL (NM_005933.1,8540-8558).
cagacattatggactttgt

SEQ ID NO: 6686 - DNA, 19 bp, Homo sapiens
  siRNA target sequence for MLL (NM_005933.1,8595-8613).
gagcccagagtcatcttca

SEQ ID NO: 6687 - DNA, 19 bp, Homo sapiens
  siRNA target sequence for MLL (NM_005933.1,8643-8661).
gggtcttgacagtaatcgt

SEQ ID NO: 6688 - DNA, 19 bp, Homo sapiens
  siRNA target sequence for MLL (NM_005933.1,8654-8672).
gtaatcgtgaaaaagacat

SEQ ID NO: 6689 - DNA, 19 bp, Homo sapiens
  siRNA target sequence for MLL (NM_005933.1,8829-8847).
ccagaatcccagtagacta

SEQ ID NO: 6690 - DNA, 19 bp, Homo sapiens
  siRNA target sequence for MLL (NM_005933.1,8837-8855).
ccagtagactagctgttat

SEQ ID NO: 6691 - DNA, 19 bp, Homo sapiens
  siRNA target sequence for MLL (NM_005933.1,8964-8982).
catgactcctgatcatttt

SEQ ID NO: 6692 - DNA, 19 bp, Homo sapiens
  siRNA target sequence for MLL (NM_005933.1,8998-9016).
gatgcagaccacatctcta

SEQ ID NO: 6693 - DNA, 19 bp, Homo sapiens
  siRNA target sequence for MLL (NM_005933.1,9018-9036).
ccctccttgtggttcagta

SEQ ID NO: 6694 - DNA, 19 bp, Homo sapiens
  siRNA target sequence for MLL (NM_005933.1,9039-9057).
gcaaggtcatggcaacaat

SEQ ID NO: 6695 - DNA, 19 bp, Homo sapiens
  siRNA target sequence for MLL (NM_005933.1,9049-9067).
ggcaacaatcaggatttaa

SEQ ID NO: 6696 - DNA, 19 bp, Homo sapiens
  siRNA target sequence for MLL (NM_005933.1,9051-9069).
caacaatcaggatttaact

SEQ ID NO: 6697 - DNA, 19 bp, Homo sapiens
  siRNA target sequence for MLL (NM_005933.1,9061-9079).
gatttaactaggaacagta

SEQ ID NO: 6698 - DNA, 19 bp, Homo sapiens
  siRNA target sequence for MLL (NM_005933.1,9141-9159).
gcccaattctactgatagt

SEQ ID NO: 6699 - DNA, 19 bp, Homo sapiens
  siRNA target sequence for MLL (NM_005933.1,9163-9181).
ggcccgtctcagatttcca

SEQ ID NO: 6700 - DNA, 19 bp, Homo sapiens
  siRNA target sequence for MLL (NM_005933.1,9165-9183).
cccgtctcagatttccaat

SEQ ID NO: 6701 - DNA, 19 bp, Homo sapiens
  siRNA target sequence for MLL (NM_005933.1,9221-9239).
ccactgagaaactcatagt

SEQ ID NO: 6702 - DNA, 19 bp, Homo sapiens
  siRNA target sequence for MLL (NM_005933.1,9222-9240).
cactgagaaactcatagtt

SEQ ID NO: 6703 - DNA, 19 bp, Homo sapiens
  siRNA target sequence for MLL (NM_005933.1,9224-9242).
ctgagaaactcatagttgt

SEQ ID NO: 6704 - DNA, 19 bp, Homo sapiens
  siRNA target sequence for MLL (NM_005933.1,9226-9244).
gagaaactcatagttgtta

SEQ ID NO: 6705 - DNA, 19 bp, Homo sapiens
  siRNA target sequence for MLL (NM_005933.1,9252-9270).
catgcagccactttatgtt

SEQ ID NO: 6706 - DNA, 19 bp, Homo sapiens
  siRNA target sequence for MLL (NM_005933.1,9346-9364).
gagacaaatacttcagtat

SEQ ID NO: 6707 - DNA, 19 bp, Homo sapiens
  siRNA target sequence for MLL (NM_005933.1,9389-9407).
cccttaccacaggactaaa

SEQ ID NO: 6708 - DNA, 19 bp, Homo sapiens
  siRNA target sequence for MLL (NM_005933.1,9390-9408).
ccttaccacaggactaaat

SEQ ID NO: 6709 - DNA, 19 bp, Homo sapiens
  siRNA target sequence for MLL (NM_005933.1,9435-9453).
gttcccttctgctagcaaa

SEQ ID NO: 6710 - DNA, 19 bp, Homo sapiens
  siRNA target sequence for MLL (NM_005933.1,9572-9590).
ctccggatccccaactttt

SEQ ID NO: 6711 - DNA, 19 bp, Homo sapiens
  siRNA target sequence for MLL (NM_005933.1,9674-9692).
gtctacagacccgaaagaa

SEQ ID NO: 6712 - DNA, 19 bp, Homo sapiens
  siRNA target sequence for MLL (NM_005933.1,9676-9694).
ctacagacccgaaagaata

SEQ ID NO: 6713 - DNA, 19 bp, Homo sapiens
  siRNA target sequence for MLL (NM_005933.1,9707-9725).
cctctagtaccccttcaaa

SEQ ID NO: 6714 - DNA, 19 bp, Homo sapiens
  siRNA target sequence for MLL (NM_005933.1,9710-9728).
ctagtaccccttcaaacat

SEQ ID NO: 6715 - DNA, 19 bp, Homo sapiens
  siRNA target sequence for MLL (NM_005933.1,9733-9751).
ccttctgatgtggtttcta

SEQ ID NO: 6716 - DNA, 19 bp, Homo sapiens
  siRNA target sequence for MLL (NM_005933.1,9734-9752).
cttctgatgtggtttctaa

SEQ ID NO: 6717 - DNA, 19 bp, Homo sapiens
  siRNA target sequence for MLL (NM_005933.1,9742-9760).
gtggtttctaatatgacat

SEQ ID NO: 6718 - DNA, 19 bp, Homo sapiens
  siRNA target sequence for MLL (NM_005933.1,9776-9794).
cctcccagcttcctaatca

SEQ ID NO: 6719 - DNA, 19 bp, Homo sapiens
  siRNA target sequence for MLL (NM_005933.1,9844-9862).
gtccccaacatcataaaaa

SEQ ID NO: 6720 - DNA, 19 bp, Homo sapiens
  siRNA target sequence for MLL (NM_005933.1,9852-9870).
catcataaaaagatctaaa

SEQ ID NO: 6721 - DNA, 19 bp, Homo sapiens
  siRNA target sequence for MLL (NM_005933.1,9937-9955).
gcggcaggcacatcaacaa

SEQ ID NO: 6722 - DNA, 19 bp, Homo sapiens
  siRNA target sequence for MLL (NM_005933.1,9939-9957).
ggcaggcacatcaacaata

SEQ ID NO: 6723 - DNA, 19 bp, Homo sapiens
  siRNA target sequence for MLL (NM_005933.1,9940-9958).
gcaggcacatcaacaataa

SEQ ID NO: 6724 - DNA, 19 bp, Homo sapiens
  siRNA target sequence for MLL (NM_005933.1,10027-10045).
gttgtatccatgcaaacta

SEQ ID NO: 6725 - DNA, 19 bp, Homo sapiens
  siRNA target sequence for MLL (NM_005933.1,10075-10093).
ccaggacacgtcaccttaa

SEQ ID NO: 6726 - DNA, 19 bp, Homo sapiens
  siRNA target sequence for MLL (NM_005933.1,10079-10097).
gacacgtcaccttaaccaa

SEQ ID NO: 6727 - DNA, 19 bp, Homo sapiens
  siRNA target sequence for MLL (NM_005933.1,10126-10144).
ggctcaataagcaatcttt

SEQ ID NO: 6728 - DNA, 19 bp, Homo sapiens
  siRNA target sequence for MLL (NM_005933.1,10127-10145).
gctcaataagcaatctttt

SEQ ID NO: 6729 - DNA, 19 bp, Homo sapiens
  siRNA target sequence for MLL (NM_005933.1,10128-10146).
ctcaataagcaatctttta

SEQ ID NO: 6730 - DNA, 19 bp, Homo sapiens
  siRNA target sequence for MLL (NM_005933.1,10130-10148).
caataagcaatcttttaat

SEQ ID NO: 6731 - DNA, 19 bp, Homo sapiens
  siRNA target sequence for MLL (NM_005933.1,10199-10217).
cgccaagttcaggaatgtt

SEQ ID NO: 6732 - DNA, 19 bp, Homo sapiens
  siRNA target sequence for MLL (NM_005933.1,10245-10263).
ctctactgctgcaataaca

SEQ ID NO: 6733 - DNA, 19 bp, Homo sapiens
  siRNA target sequence for MLL (NM_005933.1,10332-10350).
ggaagcagacgaacactat

SEQ ID NO: 6734 - DNA, 19 bp, Homo sapiens
  siRNA target sequence for MLL (NM_005933.1,10380-10398).
cagcaaaactgggattcat

SEQ ID NO: 6735 - DNA, 19 bp, Homo sapiens
  siRNA target sequence for MLL (NM_005933.1,10383-10401).
caaaactgggattcattct

SEQ ID NO: 6736 - DNA, 19 bp, Homo sapiens
  siRNA target sequence for MLL (NM_005933.1,10455-10473).
gacggtagacgctcctaat

SEQ ID NO: 6737 - DNA, 19 bp, Homo sapiens
  siRNA target sequence for MLL (NM_005933.1,10459-10477).
gtagacgctcctaatagca

SEQ ID NO: 6738 - DNA, 19 bp, Homo sapiens
  siRNA target sequence for MLL (NM_005933.1,10675-10693).
catttgcggaccagttctt

SEQ ID NO: 6739 - DNA, 19 bp, Homo sapiens
  siRNA target sequence for MLL (NM_005933.1,10835-10853).
ctgttcttccggaagttca

SEQ ID NO: 6740 - DNA, 19 bp, Homo sapiens
  siRNA target sequence for MLL (NM_005933.1,10857-10875).
gacccaaaatccagcaaat

SEQ ID NO: 6741 - DNA, 19 bp, Homo sapiens
  siRNA target sequence for MLL (NM_005933.1,10886-10904).
gtgcagaacctaaaacagt

SEQ ID NO: 6742 - DNA, 19 bp, Homo sapiens
  siRNA target sequence for MLL (NM_005933.1,10993-11011).
cccaagaaaggacttgttt

SEQ ID NO: 6743 - DNA, 19 bp, Homo sapiens
  siRNA target sequence for MLL (NM_005933.1,10994-11012).
ccaagaaaggacttgtttt

SEQ ID NO: 6744 - DNA, 19 bp, Homo sapiens
  siRNA target sequence for MLL (NM_005933.1,11062-11080).
gatgcctggaagtcattga

SEQ ID NO: 6745 - DNA, 19 bp, Homo sapiens
  siRNA target sequence for MLL (NM_005933.1,11114-11132).
gcctaaagcagctctcatt

SEQ ID NO: 6746 - DNA, 19 bp, Homo sapiens
  siRNA target sequence for MLL (NM_005933.1,11214-11232).
gcactgtcgaaattacaaa

SEQ ID NO: 6747 - DNA, 19 bp, Homo sapiens
  siRNA target sequence for MLL (NM_005933.1,11320-11338).
gcatttgacatgtttaact

SEQ ID NO: 6748 - DNA, 19 bp, Homo sapiens
  siRNA target sequence for MLL (NM_005933.1,11455-11473).
cgcttccggcacttaaaaa

SEQ ID NO: 6749 - DNA, 19 bp, Homo sapiens
  siRNA target sequence for MLL (NM_005933.1,11605-11623).
gacaagcgggaaaagtatt

SEQ ID NO: 6750 - DNA, 19 bp, Homo sapiens
  siRNA target sequence for MLL (NM_005933.1,11626-11644).
gacagcaagggcattggtt

SEQ ID NO: 6751 - DNA, 19 bp, Homo sapiens
  siRNA target sequence for MLL (NM_005933.1,11738-11756).
gctattctcgggtcatcaa

SEQ ID NO: 6752 - DNA, 19 bp, Homo sapiens
  siRNA target sequence for MLL (NM_005933.1,11739-11757).
ctattctcgggtcatcaat

SEQ ID NO: 6753 - DNA, 19 bp, Homo sapiens
  siRNA target sequence for MLL (NM_005933.1,11744-11762).
ctcgggtcatcaatattga

SEQ ID NO: 6754 - DNA, 19 bp, Homo sapiens
  siRNA target sequence for MLL (NM_005933.1,11871-11889).
caactgtggcgccaagaaa

SEQ ID NO: 6755 - DNA, 19 bp, Homo sapiens
  siRNA target sequence for MLL2 (NM_003482.1,23-41).
gtgaggataaagattcaca

SEQ ID NO: 6756 - DNA, 19 bp, Homo sapiens
  siRNA target sequence for MLL2 (NM_003482.1,241-259).
gagctacggcgctttgagt

SEQ ID NO: 6757 - DNA, 19 bp, Homo sapiens
  siRNA target sequence for MLL2 (NM_003482.1,340-358).
gacctatcacagattggtt

SEQ ID NO: 6758 - DNA, 19 bp, Homo sapiens
  siRNA target sequence for MLL2 (NM_003482.1,563-581).
gatgtccacggctttacca

SEQ ID NO: 6759 - DNA, 19 bp, Homo sapiens
  siRNA target sequence for MLL2 (NM_003482.1,602-620).
gcggttccttcctatccat

SEQ ID NO: 6760 - DNA, 19 bp, Homo sapiens
  siRNA target sequence for MLL2 (NM_003482.1,653-671).
gtgagggggctgcatatct

SEQ ID NO: 6761 - DNA, 19 bp, Homo sapiens
  siRNA target sequence for MLL2 (NM_003482.1,737-755).
gctgtgggcatcactatca

SEQ ID NO: 6762 - DNA, 19 bp, Homo sapiens
  siRNA target sequence for MLL2 (NM_003482.1,984-1002).
gggctcagcagaactgaat

SEQ ID NO: 6763 - DNA, 19 bp, Homo sapiens
  siRNA target sequence for MLL2 (NM_003482.1,1055-1073).
cccagggaggtcagactat

SEQ ID NO: 6764 - DNA, 19 bp, Homo sapiens
  siRNA target sequence for MLL2 (NM_003482.1,1098-1116).
cccggtgtgtagcagattt

SEQ ID NO: 6765 - DNA, 19 bp, Homo sapiens
  siRNA target sequence for MLL2 (NM_003482.1,1099-1117).
ccggtgtgtagcagatttt

SEQ ID NO: 6766 - DNA, 19 bp, Homo sapiens
  siRNA target sequence for MLL2 (NM_003482.1,1101-1119).
ggtgtgtagcagattttca

SEQ ID NO: 6767 - DNA, 19 bp, Homo sapiens
  siRNA target sequence for MLL2 (NM_003482.1,1519-1537).
cctgaatcatcaccttttt

SEQ ID NO: 6768 - DNA, 19 bp, Homo sapiens
  siRNA target sequence for MLL2 (NM_003482.1,2032-2050).
cctttgggggagttagagt

SEQ ID NO: 6769 - DNA, 19 bp, Homo sapiens
  siRNA target sequence for MLL2 (NM_003482.1,2033-2051).
ctttgggggagttagagta

SEQ ID NO: 6770 - DNA, 19 bp, Homo sapiens
  siRNA target sequence for MLL2 (NM_003482.1,2544-2562).
ccctctggatgggattgat

SEQ ID NO: 6771 - DNA, 19 bp, Homo sapiens
  siRNA target sequence for MLL2 (NM_003482.1,2601-2619).
cagtttggctagtgaactt

SEQ ID NO: 6772 - DNA, 19 bp, Homo sapiens
  siRNA target sequence for MLL2 (NM_003482.1,2603-2621).
gtttggctagtgaacttaa

SEQ ID NO: 6773 - DNA, 19 bp, Homo sapiens
  siRNA target sequence for MLL2 (NM_003482.1,2711-2729).
gctcaccatgtgaagaaca

SEQ ID NO: 6774 - DNA, 19 bp, Homo sapiens
  siRNA target sequence for MLL2 (NM_003482.1,2759-2777).
caccacccactctcatcaa

SEQ ID NO: 6775 - DNA, 19 bp, Homo sapiens
  siRNA target sequence for MLL2 (NM_003482.1,2787-2805).
cgttaacgagatctctaat

SEQ ID NO: 6776 - DNA, 19 bp, Homo sapiens
  siRNA target sequence for MLL2 (NM_003482.1,2904-2922).
ggtctctacggatgttagt

SEQ ID NO: 6777 - DNA, 19 bp, Homo sapiens
  siRNA target sequence for MLL2 (NM_003482.1,2971-2989).
gagactgatgactcactat

SEQ ID NO: 6778 - DNA, 19 bp, Homo sapiens
  siRNA target sequence for MLL2 (NM_003482.1,3062-3080).
cccgttcccgcatcaaaca

SEQ ID NO: 6779 - DNA, 19 bp, Homo sapiens
  siRNA target sequence for MLL2 (NM_003482.1,3244-3262).
gatgacaccatgcagaata

SEQ ID NO: 6780 - DNA, 19 bp, Homo sapiens
  siRNA target sequence for MLL2 (NM_003482.1,3381-3399).
gtgctatcacccttactgt

SEQ ID NO: 6781 - DNA, 19 bp, Homo sapiens
  siRNA target sequence for MLL2 (NM_003482.1,3440-3458).
ggcgttgtgtggagtgtat

SEQ ID NO: 6782 - DNA, 19 bp, Homo sapiens
  siRNA target sequence for MLL2 (NM_003482.1,3441-3459).
gcgttgtgtggagtgtatt

SEQ ID NO: 6783 - DNA, 19 bp, Homo sapiens
  siRNA target sequence for MLL2 (NM_003482.1,3718-3736).
gtagaagaggacctactaa

SEQ ID NO: 6784 - DNA, 19 bp, Homo sapiens
  siRNA target sequence for MLL2 (NM_003482.1,4150-4168).
cacatggagtgcgaaatta

SEQ ID NO: 6785 - DNA, 19 bp, Homo sapiens
  siRNA target sequence for MLL2 (NM_003482.1,4152-4170).
catggagtgcgaaattaaa

SEQ ID NO: 6786 - DNA, 19 bp, Homo sapiens
  siRNA target sequence for MLL2 (NM_003482.1,4527-4545).
gagccgtaaggcccttttt

SEQ ID NO: 6787 - DNA, 19 bp, Homo sapiens
  siRNA target sequence for MLL2 (NM_003482.1,4530-4548).
ccgtaaggccctttttgca

SEQ ID NO: 6788 - DNA, 19 bp, Homo sapiens
  siRNA target sequence for MLL2 (NM_003482.1,4782-4800).
gatgcttagctctgactta

SEQ ID NO: 6789 - DNA, 19 bp, Homo sapiens
  siRNA target sequence for MLL2 (NM_003482.1,5152-5170).
ggcgacggactctcctata

SEQ ID NO: 6790 - DNA, 19 bp, Homo sapiens
  siRNA target sequence for MLL2 (NM_003482.1,5236-5254).
gtgctctatgccaacatta

SEQ ID NO: 6791 - DNA, 19 bp, Homo sapiens
  siRNA target sequence for MLL2 (NM_003482.1,5286-5304).
ctggtcaagccgttgcaaa

SEQ ID NO: 6792 - DNA, 19 bp, Homo sapiens
  siRNA target sequence for MLL2 (NM_003482.1,5289-5307).
gtcaagccgttgcaaacaa

SEQ ID NO: 6793 - DNA, 19 bp, Homo sapiens
  siRNA target sequence for MLL2 (NM_003482.1,5291-5309).
caagccgttgcaaacaaat

SEQ ID NO: 6794 - DNA, 19 bp, Homo sapiens
  siRNA target sequence for MLL2 (NM_003482.1,5380-5398).
gcagctcaccgcatcaaca

SEQ ID NO: 6795 - DNA, 19 bp, Homo sapiens
  siRNA target sequence for MLL2 (NM_003482.1,5381-5399).
cagctcaccgcatcaacaa

SEQ ID NO: 6796 - DNA, 19 bp, Homo sapiens
  siRNA target sequence for MLL2 (NM_003482.1,5448-5466).
cgacatagcccgtaagact

SEQ ID NO: 6797 - DNA, 19 bp, Homo sapiens
  siRNA target sequence for MLL2 (NM_003482.1,5534-5552).
ctgcccccaccattttcat

SEQ ID NO: 6798 - DNA, 19 bp, Homo sapiens
  siRNA target sequence for MLL2 (NM_003482.1,5918-5936).
gctgcccctcgctggataa

SEQ ID NO: 6799 - DNA, 19 bp, Homo sapiens
  siRNA target sequence for MLL2 (NM_003482.1,5921-5939).
gcccctcgctggataactt

SEQ ID NO: 6800 - DNA, 19 bp, Homo sapiens
  siRNA target sequence for MLL2 (NM_003482.1,6054-6072).
ggcatcctctcctagctat

SEQ ID NO: 6801 - DNA, 19 bp, Homo sapiens
  siRNA target sequence for MLL2 (NM_003482.1,6080-6098).
caaacctgggctttgttga

SEQ ID NO: 6802 - DNA, 19 bp, Homo sapiens
  siRNA target sequence for MLL2 (NM_003482.1,6121-6139).
ctgggtggcctggagttaa

SEQ ID NO: 6803 - DNA, 19 bp, Homo sapiens
  siRNA target sequence for MLL2 (NM_003482.1,6294-6312).
ctacactgacccatatgct

SEQ ID NO: 6804 - DNA, 19 bp, Homo sapiens
  siRNA target sequence for MLL2 (NM_003482.1,6508-6526).
cagtcccctgacccttatt

SEQ ID NO: 6805 - DNA, 19 bp, Homo sapiens
  siRNA target sequence for MLL2 (NM_003482.1,6560-6578).
catttgccccattgcataa

SEQ ID NO: 6806 - DNA, 19 bp, Homo sapiens
  siRNA target sequence for MLL2 (NM_003482.1,6596-6614).
cccctgaagttgcctttaa

SEQ ID NO: 6807 - DNA, 19 bp, Homo sapiens
  siRNA target sequence for MLL2 (NM_003482.1,6738-6756).
ccctgggacgggtgcattt

SEQ ID NO: 6808 - DNA, 19 bp, Homo sapiens
  siRNA target sequence for MLL2 (NM_003482.1,6768-6786).
ctctcccatgcgtttcact

SEQ ID NO: 6809 - DNA, 19 bp, Homo sapiens
  siRNA target sequence for MLL2 (NM_003482.1,6770-6788).
ctcccatgcgtttcacttt

SEQ ID NO: 6810 - DNA, 19 bp, Homo sapiens
  siRNA target sequence for MLL2 (NM_003482.1,6847-6865).
ccaccccatgggatcaaca

SEQ ID NO: 6811 - DNA, 19 bp, Homo sapiens
  siRNA target sequence for MLL2 (NM_003482.1,7184-7202).
ccggccttagccaaacaga

SEQ ID NO: 6812 - DNA, 19 bp, Homo sapiens
  siRNA target sequence for MLL2 (NM_003482.1,7790-7808).
ctggtcctgcccagttcat

SEQ ID NO: 6813 - DNA, 19 bp, Homo sapiens
  siRNA target sequence for MLL2 (NM_003482.1,7815-7833).
gcggcacaatgtacagaaa

SEQ ID NO: 6814 - DNA, 19 bp, Homo sapiens
  siRNA target sequence for MLL2 (NM_003482.1,7876-7894).
cctcagagaccccgttttt

SEQ ID NO: 6815 - DNA, 19 bp, Homo sapiens
  siRNA target sequence for MLL2 (NM_003482.1,7877-7895).
ctcagagaccccgttttta

SEQ ID NO: 6816 - DNA, 19 bp, Homo sapiens
  siRNA target sequence for MLL2 (NM_003482.1,7887-7905).
ccgtttttaccctgtaagt

SEQ ID NO: 6817 - DNA, 19 bp, Homo sapiens
  siRNA target sequence for MLL2 (NM_003482.1,7889-7907).
gtttttaccctgtaagtga

SEQ ID NO: 6818 - DNA, 19 bp, Homo sapiens
  siRNA target sequence for MLL2 (NM_003482.1,8147-8165).
ccgagctggatgacgattt

SEQ ID NO: 6819 - DNA, 19 bp, Homo sapiens
  siRNA target sequence for MLL2 (NM_003482.1,8148-8166).
cgagctggatgacgatttt

SEQ ID NO: 6820 - DNA, 19 bp, Homo sapiens
  siRNA target sequence for MLL2 (NM_003482.1,8351-8369).
ctggggacaagaaggatat

SEQ ID NO: 6821 - DNA, 19 bp, Homo sapiens
  siRNA target sequence for MLL2 (NM_003482.1,8680-8698).
ggcacagggccattttcta

SEQ ID NO: 6822 - DNA, 19 bp, Homo sapiens
  siRNA target sequence for MLL2 (NM_003482.1,8792-8810).
gatcctccctgctggaaaa

SEQ ID NO: 6823 - DNA, 19 bp, Homo sapiens
  siRNA target sequence for MLL2 (NM_003482.1,8861-8879).
ctggggatgagctagacaa

SEQ ID NO: 6824 - DNA, 19 bp, Homo sapiens
  siRNA target sequence for MLL2 (NM_003482.1,8864-8882).
gggatgagctagacaagat

SEQ ID NO: 6825 - DNA, 19 bp, Homo sapiens
  siRNA target sequence for MLL2 (NM_003482.1,9216-9234).
ggctatggtgtccaatcaa

SEQ ID NO: 6826 - DNA, 19 bp, Homo sapiens
  siRNA target sequence for MLL2 (NM_003482.1,9344-9362).
gcatgaagccgcagcaatt

SEQ ID NO: 6827 - DNA, 19 bp, Homo sapiens
  siRNA target sequence for MLL2 (NM_003482.1,9706-9724).
gaggagtggctgttccata

SEQ ID NO: 6828 - DNA, 19 bp, Homo sapiens
  siRNA target sequence for MLL2 (NM_003482.1,9813-9831).
gcgcactgccaaaaaagct

SEQ ID NO: 6829 - DNA, 19 bp, Homo sapiens
  siRNA target sequence for MLL2 (NM_003482.1,10177-10195).
cctggtggccccttcctta

SEQ ID NO: 6830 - DNA, 19 bp, Homo sapiens
  siRNA target sequence for MLL2 (NM_003482.1,10178-10196).
ctggtggccccttccttaa

SEQ ID NO: 6831 - DNA, 19 bp, Homo sapiens
  siRNA target sequence for MLL2 (NM_003482.1,10180-10198).
ggtggccccttccttaata

SEQ ID NO: 6832 - DNA, 19 bp, Homo sapiens
  siRNA target sequence for MLL2 (NM_003482.1,10454-10472).
gtcctggagtacagacaaa

SEQ ID NO: 6833 - DNA, 19 bp, Homo sapiens
  siRNA target sequence for MLL2 (NM_003482.1,10643-10661).
ctcacagacaggtgcttat

SEQ ID NO: 6834 - DNA, 19 bp, Homo sapiens
  siRNA target sequence for MLL2 (NM_003482.1,10645-10663).
cacagacaggtgcttatga

SEQ ID NO: 6835 - DNA, 19 bp, Homo sapiens
  siRNA target sequence for MLL2 (NM_003482.1,11113-11131).
cagagtcgaactttactgt

SEQ ID NO: 6836 - DNA, 19 bp, Homo sapiens
  siRNA target sequence for MLL2 (NM_003482.1,11183-11201).
caaagcctcttcaacactt

SEQ ID NO: 6837 - DNA, 19 bp, Homo sapiens
  siRNA target sequence for MLL2 (NM_003482.1,11187-11205).
gcctcttcaacacttttct

SEQ ID NO: 6838 - DNA, 19 bp, Homo sapiens
  siRNA target sequence for MLL2 (NM_003482.1,11260-11278).
gtagacccagccgtttctt

SEQ ID NO: 6839 - DNA, 19 bp, Homo sapiens
  siRNA target sequence for MLL2 (NM_003482.1,11308-11326).
cagggagggccgttagcaa

SEQ ID NO: 6840 - DNA, 19 bp, Homo sapiens
  siRNA target sequence for MLL2 (NM_003482.1,11314-11332).
gggccgttagcaataggaa

SEQ ID NO: 6841 - DNA, 19 bp, Homo sapiens
  siRNA target sequence for MLL2 (NM_003482.1,11330-11348).
gaactacccctgagtcaat

SEQ ID NO: 6842 - DNA, 19 bp, Homo sapiens
  siRNA target sequence for MLL2 (NM_003482.1,11529-11547).
gctaggcagtggatcatct

SEQ ID NO: 6843 - DNA, 19 bp, Homo sapiens
  siRNA target sequence for MLL2 (NM_003482.1,11530-11548).
ctaggcagtggatcatctt

SEQ ID NO: 6844 - DNA, 19 bp, Homo sapiens
  siRNA target sequence for MLL2 (NM_003482.1,11661-11679).
gcccatgcaaaataataca

SEQ ID NO: 6845 - DNA, 19 bp, Homo sapiens
  siRNA target sequence for MLL2 (NM_003482.1,11726-11744).
gtctgcctggggttggaat

SEQ ID NO: 6846 - DNA, 19 bp, Homo sapiens
  siRNA target sequence for MLL2 (NM_003482.1,11946-11964).
gggctgccaacctcaactt

SEQ ID NO: 6847 - DNA, 19 bp, Homo sapiens
  siRNA target sequence for MLL2 (NM_003482.1,12049-12067).
ccaccaggagccttatcta

SEQ ID NO: 6848 - DNA, 19 bp, Homo sapiens
  siRNA target sequence for MLL2 (NM_003482.1,12129-12147).
gagaccttcacaattacct

SEQ ID NO: 6849 - DNA, 19 bp, Homo sapiens
  siRNA target sequence for MLL2 (NM_003482.1,12271-12289).
gcagataccttgtttagca

SEQ ID NO: 6850 - DNA, 19 bp, Homo sapiens
  siRNA target sequence for MLL2 (NM_003482.1,12570-12588).
gctactccgggcaaagaat

SEQ ID NO: 6851 - DNA, 19 bp, Homo sapiens
  siRNA target sequence for MLL2 (NM_003482.1,12818-12836).
gcgaggccttgctgaaaca

SEQ ID NO: 6852 - DNA, 19 bp, Homo sapiens
  siRNA target sequence for MLL2 (NM_003482.1,12875-12893).
ctgctatcaccgccaattt

SEQ ID NO: 6853 - DNA, 19 bp, Homo sapiens
  siRNA target sequence for MLL2 (NM_003482.1,12877-12895).
gctatcaccgccaatttta

SEQ ID NO: 6854 - DNA, 19 bp, Homo sapiens
  siRNA target sequence for MLL2 (NM_003482.1,14031-14049).
ggcctcatcccctgaatca

SEQ ID NO: 6855 - DNA, 19 bp, Homo sapiens
  siRNA target sequence for MLL2 (NM_003482.1,14105-14123).
ctcgcctcaagaaatggaa

SEQ ID NO: 6856 - DNA, 19 bp, Homo sapiens
  siRNA target sequence for MLL2 (NM_003482.1,14262-14280).
gcgtcgctgctgtttctgt

SEQ ID NO: 6857 - DNA, 19 bp, Homo sapiens
  siRNA target sequence for MLL2 (NM_003482.1,14536-14554).
gccaagtgcatgttcttca

SEQ ID NO: 6858 - DNA, 19 bp, Homo sapiens
  siRNA target sequence for MLL2 (NM_003482.1,14565-14583).
catgctgtgtccaatgcat

SEQ ID NO: 6859 - DNA, 19 bp, Homo sapiens
  siRNA target sequence for MLL2 (NM_003482.1,14569-14587).
ctgtgtccaatgcataaga

SEQ ID NO: 6860 - DNA, 19 bp, Homo sapiens
  siRNA target sequence for MLL2 (NM_003482.1,14573-14591).
gtccaatgcataagatcaa

SEQ ID NO: 6861 - DNA, 19 bp, Homo sapiens
  siRNA target sequence for MLL2 (NM_003482.1,14604-14622).
gcaagagctgagctctttt

SEQ ID NO: 6862 - DNA, 19 bp, Homo sapiens
  siRNA target sequence for MLL2 (NM_003482.1,14664-14682).
gcaaatcgctagcatcatt

SEQ ID NO: 6863 - DNA, 19 bp, Homo sapiens
  siRNA target sequence for MLL2 (NM_003482.1,14805-14823).
cgaggccacgcgcatctat

SEQ ID NO: 6864 - DNA, 19 bp, Homo sapiens
  siRNA target sequence for MLL2 (NM_003482.1,14809-14827).
gccacgcgcatctattgga

SEQ ID NO: 6865 - DNA, 19 bp, Homo sapiens
  siRNA target sequence for MLL2 (NM_003482.1,14826-14844).
gagcctccgcaccaacaat

SEQ ID NO: 6866 - DNA, 19 bp, Homo sapiens
  siRNA target sequence for MLL2 (NM_003482.1,14852-14870).
gctgctatcgctgttctat

SEQ ID NO: 6867 - DNA, 19 bp, Homo sapiens
  siRNA target sequence for MLL2 (NM_003482.1,14853-14871).
ctgctatcgctgttctatt

SEQ ID NO: 6868 - DNA, 19 bp, Homo sapiens
  siRNA target sequence for MLL2 (NM_003482.1,14856-14874).
ctatcgctgttctattggt

SEQ ID NO: 6869 - DNA, 19 bp, Homo sapiens
  siRNA target sequence for MLL2 (NM_003482.1,14864-14882).
gttctattggtgagaacaa

SEQ ID NO: 6870 - DNA, 19 bp, Homo sapiens
  siRNA target sequence for MLL2 (NM_003482.1,14961-14979).
cgtgtggaatcgcatcatt

SEQ ID NO: 6871 - DNA, 19 bp, Homo sapiens
  siRNA target sequence for MLL2 (NM_003482.1,15020-15038).
gactcttccctgagtatct

SEQ ID NO: 6872 - DNA, 19 bp, Homo sapiens
  siRNA target sequence for MLL2 (NM_003482.1,15078-15096).
gcttcgcatagctgaatca

SEQ ID NO: 6873 - DNA, 19 bp, Homo sapiens
  siRNA target sequence for MLL2 (NM_003482.1,15103-15121).
ggggtggagagctgtcaaa

SEQ ID NO: 6874 - DNA, 19 bp, Homo sapiens
  siRNA target sequence for MLL2 (NM_003482.1,15104-15122).
gggtggagagctgtcaaaa

SEQ ID NO: 6875 - DNA, 19 bp, Homo sapiens
  siRNA target sequence for MLL2 (NM_003482.1,15108-15126).
ggagagctgtcaaaactat

SEQ ID NO: 6876 - DNA, 19 bp, Homo sapiens
  siRNA target sequence for MLL2 (NM_003482.1,15190-15208).
gcccgatcagagcctaaaa

SEQ ID NO: 6877 - DNA, 19 bp, Homo sapiens
  siRNA target sequence for MLL2 (NM_003482.1,15191-15209).
cccgatcagagcctaaaat

SEQ ID NO: 6878 - DNA, 19 bp, Homo sapiens
  siRNA target sequence for MLL2 (NM_003482.1,15194-15212).
gatcagagcctaaaatcct

SEQ ID NO: 6879 - DNA, 19 bp, Homo sapiens
  siRNA target sequence for MLL2 (NM_003482.1,15251-15269).
gcatgtctaaggcatatca

SEQ ID NO: 6880 - DNA, 19 bp, Homo sapiens
  siRNA target sequence for MLL2 (NM_003482.1,15344-15362).
ggctgcgcaccgaatggaa

SEQ ID NO: 6881 - DNA, 19 bp, Homo sapiens
  siRNA target sequence for MLL2 (NM_003482.1,15349-15367).
cgcaccgaatggaagaaca

SEQ ID NO: 6882 - DNA, 19 bp, Homo sapiens
  siRNA target sequence for MLL2 (NM_003482.1,15350-15368).
gcaccgaatggaagaacaa

SEQ ID NO: 6883 - DNA, 19 bp, Homo sapiens
  siRNA target sequence for MLL2 (NM_003482.1,15427-15445).
gaaaagcacacaatggtta

SEQ ID NO: 6884 - DNA, 19 bp, Homo sapiens
  siRNA target sequence for MLL2 (NM_003482.1,15511-15529).
cagaatcgaggcatctaca

SEQ ID NO: 6885 - DNA, 19 bp, Homo sapiens
  siRNA target sequence for MLL2 (NM_003482.1,15534-15552).
ccgaataaacaatgaacat

SEQ ID NO: 6886 - DNA, 19 bp, Homo sapiens
  siRNA target sequence for MLL2 (NM_003482.1,15578-15596).
gccctgccaggtacattaa

SEQ ID NO: 6887 - DNA, 19 bp, Homo sapiens
  siRNA target sequence for MLL2 (NM_003482.1,15583-15601).
gccaggtacattaaccatt

SEQ ID NO: 6888 - DNA, 19 bp, Homo sapiens
  siRNA target sequence for MLL2 (NM_003482.1,15621-15639).
ggccgaagtcgtgacattt

SEQ ID NO: 6889 - DNA, 19 bp, Homo sapiens
  siRNA target sequence for MLL2 (NM_003482.1,15623-15641).
ccgaagtcgtgacatttga

SEQ ID NO: 6890 - DNA, 19 bp, Homo sapiens
  siRNA target sequence for MLL2 (NM_003482.1,15625-15643).
gaagtcgtgacatttgaca

SEQ ID NO: 6891 - DNA, 19 bp, Homo sapiens
  siRNA target sequence for MLL2 (NM_003482.1,15697-15715).
ctaacctatgactatcagt

SEQ ID NO: 6892 - DNA, 19 bp, Homo sapiens
  siRNA target sequence for MLL4 (NM_014727.1,364-382).
gagtttcagggttttcatt

SEQ ID NO: 6893 - DNA, 19 bp, Homo sapiens
  siRNA target sequence for MLL4 (NM_014727.1,372-390).
gggttttcattcagatgaa

SEQ ID NO: 6894 - DNA, 19 bp, Homo sapiens
  siRNA target sequence for MLL4 (NM_014727.1,451-469).
ggtcggggtcgcaagcata

SEQ ID NO: 6895 - DNA, 19 bp, Homo sapiens
  siRNA target sequence for MLL4 (NM_014727.1,452-470).
gtcggggtcgcaagcataa

SEQ ID NO: 6896 - DNA, 19 bp, Homo sapiens
  siRNA target sequence for MLL4 (NM_014727.1,454-472).
cggggtcgcaagcataaga

SEQ ID NO: 6897 - DNA, 19 bp, Homo sapiens
  siRNA target sequence for MLL4 (NM_014727.1,901-919).
ctcccctttgtgatcaagt

SEQ ID NO: 6898 - DNA, 19 bp, Homo sapiens
  siRNA target sequence for MLL4 (NM_014727.1,929-947).
gggccaaaaaagtaaagat

SEQ ID NO: 6899 - DNA, 19 bp, Homo sapiens
  siRNA target sequence for MLL4 (NM_014727.1,1566-1584).
gaatatccggcagtttatt

SEQ ID NO: 6900 - DNA, 19 bp, Homo sapiens
  siRNA target sequence for MLL4 (NM_014727.1,2395-2413).
gccaaagtgcagctattca

SEQ ID NO: 6901 - DNA, 19 bp, Homo sapiens
  siRNA target sequence for MLL4 (NM_014727.1,2396-2414).
ccaaagtgcagctattcaa

SEQ ID NO: 6902 - DNA, 19 bp, Homo sapiens
  siRNA target sequence for MLL4 (NM_014727.1,2541-2559).
gtcggtggaagctaagaga

SEQ ID NO: 6903 - DNA, 19 bp, Homo sapiens
  siRNA target sequence for MLL4 (NM_014727.1,2589-2607).
gcaaggtccccgcatcaaa

SEQ ID NO: 6904 - DNA, 19 bp, Homo sapiens
  siRNA target sequence for MLL4 (NM_014727.1,2594-2612).
gtccccgcatcaaacatgt

SEQ ID NO: 6905 - DNA, 19 bp, Homo sapiens
  siRNA target sequence for MLL4 (NM_014727.1,2710-2728).
ctcgccacagaggatacat

SEQ ID NO: 6906 - DNA, 19 bp, Homo sapiens
  siRNA target sequence for MLL4 (NM_014727.1,2712-2730).
cgccacagaggatacatca

SEQ ID NO: 6907 - DNA, 19 bp, Homo sapiens
  siRNA target sequence for MLL4 (NM_014727.1,2864-2882).
cccatcacggcaagaagat

SEQ ID NO: 6908 - DNA, 19 bp, Homo sapiens
  siRNA target sequence for MLL4 (NM_014727.1,2942-2960).
gtgtcaactgcctagacaa

SEQ ID NO: 6909 - DNA, 19 bp, Homo sapiens
  siRNA target sequence for MLL4 (NM_014727.1,3039-3057).
ggaacgactggctaaaaaa

SEQ ID NO: 6910 - DNA, 19 bp, Homo sapiens
  siRNA target sequence for MLL4 (NM_014727.1,3227-3245).
ctcggcgctgcgtcaaaca

SEQ ID NO: 6911 - DNA, 19 bp, Homo sapiens
  siRNA target sequence for MLL4 (NM_014727.1,3247-3265).
cgaccctcctatgatatct

SEQ ID NO: 6912 - DNA, 19 bp, Homo sapiens
  siRNA target sequence for MLL4 (NM_014727.1,3248-3266).
gaccctcctatgatatctt

SEQ ID NO: 6913 - DNA, 19 bp, Homo sapiens
  siRNA target sequence for MLL4 (NM_014727.1,3508-3526).
cgcgtccgtgtggatttta

SEQ ID NO: 6914 - DNA, 19 bp, Homo sapiens
  siRNA target sequence for MLL4 (NM_014727.1,3509-3527).
gcgtccgtgtggattttaa

SEQ ID NO: 6915 - DNA, 19 bp, Homo sapiens
  siRNA target sequence for MLL4 (NM_014727.1,3734-3752).
gctgccgtcgctgcaaatt

SEQ ID NO: 6916 - DNA, 19 bp, Homo sapiens
  siRNA target sequence for MLL4 (NM_014727.1,3895-3913).
gcctgtgtgcgctgtaaga

SEQ ID NO: 6917 - DNA, 19 bp, Homo sapiens
  siRNA target sequence for MLL4 (NM_014727.1,3949-3967).
gagtggtctggagattaca

SEQ ID NO: 6918 - DNA, 19 bp, Homo sapiens
  siRNA target sequence for MLL4 (NM_014727.1,3980-3998).
ggtgcacccagctatatga

SEQ ID NO: 6919 - DNA, 19 bp, Homo sapiens
  siRNA target sequence for MLL4 (NM_014727.1,3984-4002).
cacccagctatatgagaaa

SEQ ID NO: 6920 - DNA, 19 bp, Homo sapiens
  siRNA target sequence for MLL4 (NM_014727.1,3988-4006).
cagctatatgagaaaggaa

SEQ ID NO: 6921 - DNA, 19 bp, Homo sapiens
  siRNA target sequence for MLL4 (NM_014727.1,4104-4122).
cgaggggctctcagatgaa

SEQ ID NO: 6922 - DNA, 19 bp, Homo sapiens
  siRNA target sequence for MLL4 (NM_014727.1,4120-4138).
gaagactacgagatccttt

SEQ ID NO: 6923 - DNA, 19 bp, Homo sapiens
  siRNA target sequence for MLL4 (NM_014727.1,4369-4387).
gaggatggccactacaagt

SEQ ID NO: 6924 - DNA, 19 bp, Homo sapiens
  siRNA target sequence for MLL4 (NM_014727.1,5085-5103).
gaaccccgatggttttgat

SEQ ID NO: 6925 - DNA, 19 bp, Homo sapiens
  siRNA target sequence for MLL4 (NM_014727.1,5088-5106).
ccccgatggttttgatgtt

SEQ ID NO: 6926 - DNA, 19 bp, Homo sapiens
  siRNA target sequence for MLL4 (NM_014727.1,5090-5108).
ccgatggttttgatgttct

SEQ ID NO: 6927 - DNA, 19 bp, Homo sapiens
  siRNA target sequence for MLL4 (NM_014727.1,5197-5215).
ggttccatccgcattgact

SEQ ID NO: 6928 - DNA, 19 bp, Homo sapiens
  siRNA target sequence for MLL4 (NM_014727.1,5324-5342).
ggtatcggtgccgaattct

SEQ ID NO: 6929 - DNA, 19 bp, Homo sapiens
  siRNA target sequence for MLL4 (NM_014727.1,5500-5518).
cgccactcgcccattcaga

SEQ ID NO: 6930 - DNA, 19 bp, Homo sapiens
  siRNA target sequence for MLL4 (NM_014727.1,5501-5519).
gccactcgcccattcagaa

SEQ ID NO: 6931 - DNA, 19 bp, Homo sapiens
  siRNA target sequence for MLL4 (NM_014727.1,5661-5679).
ccctggaagtccatcttca

SEQ ID NO: 6932 - DNA, 19 bp, Homo sapiens
  siRNA target sequence for MLL4 (NM_014727.1,5783-5801).
gggcctcccctcctctaaa

SEQ ID NO: 6933 - DNA, 19 bp, Homo sapiens
  siRNA target sequence for MLL4 (NM_014727.1,5784-5802).
ggcctcccctcctctaaaa

SEQ ID NO: 6934 - DNA, 19 bp, Homo sapiens
  siRNA target sequence for MLL4 (NM_014727.1,6329-6347).
catcggaaattgtggattt

SEQ ID NO: 6935 - DNA, 19 bp, Homo sapiens
  siRNA target sequence for MLL4 (NM_014727.1,6508-6526).
ccaggggtccgggtgttaa

SEQ ID NO: 6936 - DNA, 19 bp, Homo sapiens
  siRNA target sequence for MLL4 (NM_014727.1,6552-6570).
caaacccgccacatccaaa

SEQ ID NO: 6937 - DNA, 19 bp, Homo sapiens
  siRNA target sequence for MLL4 (NM_014727.1,6556-6574).
cccgccacatccaaaatca

SEQ ID NO: 6938 - DNA, 19 bp, Homo sapiens
  siRNA target sequence for MLL4 (NM_014727.1,6558-6576).
cgccacatccaaaatcata

SEQ ID NO: 6939 - DNA, 19 bp, Homo sapiens
  siRNA target sequence for MLL4 (NM_014727.1,6566-6584).
ccaaaatcatacttgtcaa

SEQ ID NO: 6940 - DNA, 19 bp, Homo sapiens
  siRNA target sequence for MLL4 (NM_014727.1,7187-7205).
ctccatccccagatgataa

SEQ ID NO: 6941 - DNA, 19 bp, Homo sapiens
  siRNA target sequence for MLL4 (NM_014727.1,7353-7371).
cagacatctctcctttagt

SEQ ID NO: 6942 - DNA, 19 bp, Homo sapiens
  siRNA target sequence for MLL4 (NM_014727.1,7447-7465).
cagcgttgccagcactata

SEQ ID NO: 6943 - DNA, 19 bp, Homo sapiens
  siRNA target sequence for MLL4 (NM_014727.1,7450-7468).
cgttgccagcactataagt

SEQ ID NO: 6944 - DNA, 19 bp, Homo sapiens
  siRNA target sequence for MLL4 (NM_014727.1,7451-7469).
gttgccagcactataagtt

SEQ ID NO: 6945 - DNA, 19 bp, Homo sapiens
  siRNA target sequence for MLL4 (NM_014727.1,7529-7547).
ctcgggcagaggtctatct

SEQ ID NO: 6946 - DNA, 19 bp, Homo sapiens
  siRNA target sequence for MLL4 (NM_014727.1,7549-7567).
cggaagtgcacctttgaca

SEQ ID NO: 6947 - DNA, 19 bp, Homo sapiens
  siRNA target sequence for MLL4 (NM_014727.1,7550-7568).
ggaagtgcacctttgacat

SEQ ID NO: 6948 - DNA, 19 bp, Homo sapiens
  siRNA target sequence for MLL4 (NM_014727.1,7556-7574).
gcacctttgacatgttcaa

SEQ ID NO: 6949 - DNA, 19 bp, Homo sapiens
  siRNA target sequence for MLL4 (NM_014727.1,7683-7701).
catggccatgcgttttcgt

SEQ ID NO: 6950 - DNA, 19 bp, Homo sapiens
  siRNA target sequence for MLL4 (NM_014727.1,7693-7711).
cgttttcgtcaccttaaga

SEQ ID NO: 6951 - DNA, 19 bp, Homo sapiens
  siRNA target sequence for MLL4 (NM_014727.1,7756-7774).
gggcgaggcctgttctgta

SEQ ID NO: 6952 - DNA, 19 bp, Homo sapiens
  siRNA target sequence for MLL4 (NM_014727.1,7757-7775).
ggcgaggcctgttctgtaa

SEQ ID NO: 6953 - DNA, 19 bp, Homo sapiens
  siRNA target sequence for MLL4 (NM_014727.1,7896-7914).
catggatgactttgatgta

SEQ ID NO: 6954 - DNA, 19 bp, Homo sapiens
  siRNA target sequence for MLL4 (NM_014727.1,8125-8143).
cgctgccgtcggttcctta

SEQ ID NO: 6955 - DNA, 19 bp, Homo sapiens
  siRNA target sequence for MLL4 (NM_014727.1,8126-8144).
gctgccgtcggttccttaa

SEQ ID NO: 6956 - DNA, 19 bp, Homo sapiens
  siRNA target sequence for MLLT10 (NM_004641.1,217-235).
gacgaggtctcccatagta

SEQ ID NO: 6957 - DNA, 19 bp, Homo sapiens
  siRNA target sequence for MLLT10 (NM_004641.1,220-238).
gaggtctcccatagtatga

SEQ ID NO: 6958 - DNA, 19 bp, Homo sapiens
  siRNA target sequence for MLLT10 (NM_004641.1,333-351).
ggtgcatcaagcttgctat

SEQ ID NO: 6959 - DNA, 19 bp, Homo sapiens
  siRNA target sequence for MLLT10 (NM_004641.1,563-581).
ctgttccgcatgatcgtta

SEQ ID NO: 6960 - DNA, 19 bp, Homo sapiens
  siRNA target sequence for MLLT10 (NM_004641.1,565-583).
gttccgcatgatcgttata

SEQ ID NO: 6961 - DNA, 19 bp, Homo sapiens
  siRNA target sequence for MLLT10 (NM_004641.1,568-586).
ccgcatgatcgttataata

SEQ ID NO: 6962 - DNA, 19 bp, Homo sapiens
  siRNA target sequence for MLLT10 (NM_004641.1,571-589).
catgatcgttataataaga

SEQ ID NO: 6963 - DNA, 19 bp, Homo sapiens
  siRNA target sequence for MLLT10 (NM_004641.1,574-592).
gatcgttataataagactt

SEQ ID NO: 6964 - DNA, 19 bp, Homo sapiens
  siRNA target sequence for MLLT10 (NM_004641.1,588-606).
gacttgctacatttgtgat

SEQ ID NO: 6965 - DNA, 19 bp, Homo sapiens
  siRNA target sequence for MLLT10 (NM_004641.1,594-612).
ctacatttgtgatgaacaa

SEQ ID NO: 6966 - DNA, 19 bp, Homo sapiens
  siRNA target sequence for MLLT10 (NM_004641.1,638-656).
gtgcttgcatgacatgtaa

SEQ ID NO: 6967 - DNA, 19 bp, Homo sapiens
  siRNA target sequence for MLLT10 (NM_004641.1,640-658).
gcttgcatgacatgtaata

SEQ ID NO: 6968 - DNA, 19 bp, Homo sapiens
  siRNA target sequence for MLLT10 (NM_004641.1,641-659).
cttgcatgacatgtaataa

SEQ ID NO: 6969 - DNA, 19 bp, Homo sapiens
  siRNA target sequence for MLLT10 (NM_004641.1,644-662).
gcatgacatgtaataaaca

SEQ ID NO: 6970 - DNA, 19 bp, Homo sapiens
  siRNA target sequence for MLLT10 (NM_004641.1,645-663).
catgacatgtaataaacat

SEQ ID NO: 6971 - DNA, 19 bp, Homo sapiens
  siRNA target sequence for MLLT10 (NM_004641.1,673-691).
caggctttccatgtaacat

SEQ ID NO: 6972 - DNA, 19 bp, Homo sapiens
  siRNA target sequence for MLLT10 (NM_004641.1,705-723).
cggactgctttgtgaagaa

SEQ ID NO: 6973 - DNA, 19 bp, Homo sapiens
  siRNA target sequence for MLLT10 (NM_004641.1,728-746).
gtaatggtgccgataatgt

SEQ ID NO: 6974 - DNA, 19 bp, Homo sapiens
  siRNA target sequence for MLLT10 (NM_004641.1,734-752).
gtgccgataatgtccaata

SEQ ID NO: 6975 - DNA, 19 bp, Homo sapiens
  siRNA target sequence for MLLT10 (NM_004641.1,736-754).
gccgataatgtccaatact

SEQ ID NO: 6976 - DNA, 19 bp, Homo sapiens
  siRNA target sequence for MLLT10 (NM_004641.1,738-756).
cgataatgtccaatactgt

SEQ ID NO: 6977 - DNA, 19 bp, Homo sapiens
  siRNA target sequence for MLLT10 (NM_004641.1,748-766).
caatactgtggctactgta

SEQ ID NO: 6978 - DNA, 19 bp, Homo sapiens
  siRNA target sequence for MLLT10 (NM_004641.1,764-782).
gtaaataccattttagtaa

SEQ ID NO: 6979 - DNA, 19 bp, Homo sapiens
  siRNA target sequence for MLLT10 (NM_004641.1,801-819).
gggatctaataggtcatat

SEQ ID NO: 6980 - DNA, 19 bp, Homo sapiens
  siRNA target sequence for MLLT10 (NM_004641.1,803-821).
gatctaataggtcatatga

SEQ ID NO: 6981 - DNA, 19 bp, Homo sapiens
  siRNA target sequence for MLLT10 (NM_004641.1,849-867).
ctctcaggataaacatcat

SEQ ID NO: 6982 - DNA, 19 bp, Homo sapiens
  siRNA target sequence for MLLT10 (NM_004641.1,851-869).
ctcaggataaacatcatga

SEQ ID NO: 6983 - DNA, 19 bp, Homo sapiens
  siRNA target sequence for MLLT10 (NM_004641.1,949-967).
gttccatccttgactgtta

SEQ ID NO: 6984 - DNA, 19 bp, Homo sapiens
  siRNA target sequence for MLLT10 (NM_004641.1,990-1008).
cactagcaacaactctata

SEQ ID NO: 6985 - DNA, 19 bp, Homo sapiens
  siRNA target sequence for MLLT10 (NM_004641.1,1023-1041).
gcgcttggaagatactact

SEQ ID NO: 6986 - DNA, 19 bp, Homo sapiens
  siRNA target sequence for MLLT10 (NM_004641.1,1083-1101).
cacctctagtggaaaagat

SEQ ID NO: 6987 - DNA, 19 bp, Homo sapiens
  siRNA target sequence for MLLT10 (NM_004641.1,1252-1270).
ccaggcagtgtaaagtcat

SEQ ID NO: 6988 - DNA, 19 bp, Homo sapiens
  siRNA target sequence for MLLT10 (NM_004641.1,1327-1345).
ctgcgtaatgacagttact

SEQ ID NO: 6989 - DNA, 19 bp, Homo sapiens
  siRNA target sequence for MLLT10 (NM_004641.1,1364-1382).
cagcaaccaaagatgtaca

SEQ ID NO: 6990 - DNA, 19 bp, Homo sapiens
  siRNA target sequence for MLLT10 (NM_004641.1,1366-1384).
gcaaccaaagatgtacata

SEQ ID NO: 6991 - DNA, 19 bp, Homo sapiens
  siRNA target sequence for MLLT10 (NM_004641.1,1367-1385).
caaccaaagatgtacataa

SEQ ID NO: 6992 - DNA, 19 bp, Homo sapiens
  siRNA target sequence for MLLT10 (NM_004641.1,1459-1477).
gttacttcacagcctaaaa

SEQ ID NO: 6993 - DNA, 19 bp, Homo sapiens
  siRNA target sequence for MLLT10 (NM_004641.1,1463-1481).
cttcacagcctaaaagctt

SEQ ID NO: 6994 - DNA, 19 bp, Homo sapiens
  siRNA target sequence for MLLT10 (NM_004641.1,1468-1486).
cagcctaaaagctttgaaa

SEQ ID NO: 6995 - DNA, 19 bp, Homo sapiens
  siRNA target sequence for MLLT10 (NM_004641.1,1470-1488).
gcctaaaagctttgaaaat

SEQ ID NO: 6996 - DNA, 19 bp, Homo sapiens
  siRNA target sequence for MLLT10 (NM_004641.1,1515-1533).
ccttcctacagcaggatat

SEQ ID NO: 6997 - DNA, 19 bp, Homo sapiens
  siRNA target sequence for MLLT10 (NM_004641.1,1516-1534).
cttcctacagcaggatata

SEQ ID NO: 6998 - DNA, 19 bp, Homo sapiens
  siRNA target sequence for MLLT10 (NM_004641.1,1831-1849).
ggagcttgcccaacaacta

SEQ ID NO: 6999 - DNA, 19 bp, Homo sapiens
  siRNA target sequence for MLLT10 (NM_004641.1,1882-1900).
gacagaggtgacagttcta

SEQ ID NO: 7000 - DNA, 19 bp, Homo sapiens
  siRNA target sequence for MLLT10 (NM_004641.1,1884-1902).
cagaggtgacagttctaca

SEQ ID NO: 7001 - DNA, 19 bp, Homo sapiens
  siRNA target sequence for MLLT10 (NM_004641.1,1891-1909).
gacagttctacactaacaa

SEQ ID NO: 7002 - DNA, 19 bp, Homo sapiens
  siRNA target sequence for MLLT10 (NM_004641.1,1903-1921).
ctaacaaagcaagaactta

SEQ ID NO: 7003 - DNA, 19 bp, Homo sapiens
  siRNA target sequence for MLLT10 (NM_004641.1,1951-1969).
gtagcagtatcgtttccaa

SEQ ID NO: 7004 - DNA, 19 bp, Homo sapiens
  siRNA target sequence for MLLT10 (NM_004641.1,1955-1973).
cagtatcgtttccaaatgt

SEQ ID NO: 7005 - DNA, 19 bp, Homo sapiens
  siRNA target sequence for MLLT10 (NM_004641.1,2157-2175).
gtatggcaatagatcaaat

SEQ ID NO: 7006 - DNA, 19 bp, Homo sapiens
  siRNA target sequence for MLLT10 (NM_004641.1,2600-2618).
gtccgtctcatcaaataca

SEQ ID NO: 7007 - DNA, 19 bp, Homo sapiens
  siRNA target sequence for MLLT10 (NM_004641.1,2602-2620).
ccgtctcatcaaatacaca

SEQ ID NO: 7008 - DNA, 19 bp, Homo sapiens
  siRNA target sequence for MLLT10 (NM_004641.1,2634-2652).
gactgctcctactactgat

SEQ ID NO: 7009 - DNA, 19 bp, Homo sapiens
  siRNA target sequence for MLLT10 (NM_004641.1,2663-2681).
gcagtaagagccctcatat

SEQ ID NO: 7010 - DNA, 19 bp, Homo sapiens
  siRNA target sequence for MLLT10 (NM_004641.1,2664-2682).
cagtaagagccctcatata

SEQ ID NO: 7011 - DNA, 19 bp, Homo sapiens
  siRNA target sequence for MLLT10 (NM_004641.1,2688-2706).
cagctttttacctgataat

SEQ ID NO: 7012 - DNA, 19 bp, Homo sapiens
  siRNA target sequence for MLLT10 (NM_004641.1,2907-2925).
gtctgcagtgggtggaata

SEQ ID NO: 7013 - DNA, 19 bp, Homo sapiens
  siRNA target sequence for MLLT10 (NM_004641.1,2909-2927).
ctgcagtgggtggaataat

SEQ ID NO: 7014 - DNA, 19 bp, Homo sapiens
  siRNA target sequence for MLLT10 (NM_004641.1,2992-3010).
cagactcctgtcacaatgt

SEQ ID NO: 7015 - DNA, 19 bp, Homo sapiens
  siRNA target sequence for MLLT10 (NM_004641.1,3036-3054).
cacaaccgtaccacctaat

SEQ ID NO: 7016 - DNA, 19 bp, Homo sapiens
  siRNA target sequence for MLLT10 (NM_004641.1,3089-3107).
gtgcctcaggactaggatt

SEQ ID NO: 7017 - DNA, 19 bp, Homo sapiens
  siRNA target sequence for MLLT10 (NM_004641.1,3093-3111).
ctcaggactaggattactt

SEQ ID NO: 7018 - DNA, 19 bp, Homo sapiens
  siRNA target sequence for MLLT10 (NM_004641.1,3098-3116).
gactaggattactttctga

SEQ ID NO: 7019 - DNA, 19 bp, Homo sapiens
  siRNA target sequence for MLLT10 (NM_004641.1,3113-3131).
ctgaccagcaacgacaaat

SEQ ID NO: 7020 - DNA, 19 bp, Homo sapiens
  siRNA target sequence for MLLT10 (NM_004641.1,3120-3138).
gcaacgacaaatacttatt

SEQ ID NO: 7021 - DNA, 19 bp, Homo sapiens
  siRNA target sequence for MLLT10 (NM_004641.1,3147-3165).
gcagtttcagcagttgtta

SEQ ID NO: 7022 - DNA, 19 bp, Homo sapiens
  siRNA target sequence for MLLT10 (NM_004641.1,3150-3168).
gtttcagcagttgttaaat

SEQ ID NO: 7023 - DNA, 19 bp, Homo sapiens
  siRNA target sequence for MLLT2 (NM_005935.1,424-442).
gcagcccagtcaagtttgt

SEQ ID NO: 7024 - DNA, 19 bp, Homo sapiens
  siRNA target sequence for MLLT2 (NM_005935.1,427-445).
gcccagtcaagtttgtaca

SEQ ID NO: 7025 - DNA, 19 bp, Homo sapiens
  siRNA target sequence for MLLT2 (NM_005935.1,514-532).
gaggcatttcctgaaaaga

SEQ ID NO: 7026 - DNA, 19 bp, Homo sapiens
  siRNA target sequence for MLLT2 (NM_005935.1,577-595).
ctgtctagtcgaatacaga

SEQ ID NO: 7027 - DNA, 19 bp, Homo sapiens
  siRNA target sequence for MLLT2 (NM_005935.1,581-599).
ctagtcgaatacagaacat

SEQ ID NO: 7028 - DNA, 19 bp, Homo sapiens
  siRNA target sequence for MLLT2 (NM_005935.1,584-602).
gtcgaatacagaacatgtt

SEQ ID NO: 7029 - DNA, 19 bp, Homo sapiens
  siRNA target sequence for MLLT2 (NM_005935.1,619-637).
gtgaaggagttccttagta

SEQ ID NO: 7030 - DNA, 19 bp, Homo sapiens
  siRNA target sequence for MLLT2 (NM_005935.1,625-643).
gagttccttagtactaagt

SEQ ID NO: 7031 - DNA, 19 bp, Homo sapiens
  siRNA target sequence for MLLT2 (NM_005935.1,655-673).
cgcctggatgcttctgaaa

SEQ ID NO: 7032 - DNA, 19 bp, Homo sapiens
  siRNA target sequence for MLLT2 (NM_005935.1,678-696).
gttgggaaagccgaaatat

SEQ ID NO: 7033 - DNA, 19 bp, Homo sapiens
  siRNA target sequence for MLLT2 (NM_005935.1,682-700).
ggaaagccgaaatatcctt

SEQ ID NO: 7034 - DNA, 19 bp, Homo sapiens
  siRNA target sequence for MLLT2 (NM_005935.1,683-701).
gaaagccgaaatatccttt

SEQ ID NO: 7035 - DNA, 19 bp, Homo sapiens
  siRNA target sequence for MLLT2 (NM_005935.1,687-705).
gccgaaatatcctttaatt

SEQ ID NO: 7036 - DNA, 19 bp, Homo sapiens
  siRNA target sequence for MLLT2 (NM_005935.1,780-798).
gtctggaccactttctgtt

SEQ ID NO: 7037 - DNA, 19 bp, Homo sapiens
  siRNA target sequence for MLLT2 (NM_005935.1,825-843).
ggcgcagccaagaactgaa

SEQ ID NO: 7038 - DNA, 19 bp, Homo sapiens
  siRNA target sequence for MLLT2 (NM_005935.1,1009-1027).
gagctttctcccttaatct

SEQ ID NO: 7039 - DNA, 19 bp, Homo sapiens
  siRNA target sequence for MLLT2 (NM_005935.1,1046-1064).
cccctttgtcacctataca

SEQ ID NO: 7040 - DNA, 19 bp, Homo sapiens
  siRNA target sequence for MLLT2 (NM_005935.1,1334-1352).
gtgaatcccctgaactgaa

SEQ ID NO: 7041 - DNA, 19 bp, Homo sapiens
  siRNA target sequence for MLLT2 (NM_005935.1,1372-1390).
cgacagcagacctttgaaa

SEQ ID NO: 7042 - DNA, 19 bp, Homo sapiens
  siRNA target sequence for MLLT2 (NM_005935.1,1377-1395).
gcagacctttgaaaaaaca

SEQ ID NO: 7043 - DNA, 19 bp, Homo sapiens
  siRNA target sequence for MLLT2 (NM_005935.1,1528-1546).
cctttgacagcaatacata

SEQ ID NO: 7044 - DNA, 19 bp, Homo sapiens
  siRNA target sequence for MLLT2 (NM_005935.1,1607-1625).
gttctgtaacccaaaacca

SEQ ID NO: 7045 - DNA, 19 bp, Homo sapiens
  siRNA target sequence for MLLT2 (NM_005935.1,1623-1641).
ccaaaaacaatatgataca

SEQ ID NO: 7046 - DNA, 19 bp, Homo sapiens
  siRNA target sequence for MLLT2 (NM_005935.1,1870-1888).
gagagcgagagcagttcaa

SEQ ID NO: 7047 - DNA, 19 bp, Homo sapiens
  siRNA target sequence for MLLT2 (NM_005935.1,1932-1950).
gcctgagcctccaacaaca

SEQ ID NO: 7048 - DNA, 19 bp, Homo sapiens
  siRNA target sequence for MLLT2 (NM_005935.1,1933-1951).
cctgagcctccaacaacaa

SEQ ID NO: 7049 - DNA, 19 bp, Homo sapiens
  siRNA target sequence for MLLT2 (NM_005935.1,2211-2229).
gcaaaccgttggaaccaaa

SEQ ID NO: 7050 - DNA, 19 bp, Homo sapiens
  siRNA target sequence for MLLT2 (NM_005935.1,2844-2862).
caagttggccaaaaagaga

SEQ ID NO: 7051 - DNA, 19 bp, Homo sapiens
  siRNA target sequence for MLLT2 (NM_005935.1,2948-2966).
cccacaaagaatcttctaa

SEQ ID NO: 7052 - DNA, 19 bp, Homo sapiens
  siRNA target sequence for MLLT2 (NM_005935.1,3099-3117).
ccaggaccctcccaaaagt

SEQ ID NO: 7053 - DNA, 19 bp, Homo sapiens
  siRNA target sequence for MLLT2 (NM_005935.1,3210-3228).
gggttcttccggagatact

SEQ ID NO: 7054 - DNA, 19 bp, Homo sapiens
  siRNA target sequence for MLLT2 (NM_005935.1,3255-3273).
gccaaatggtaactctaaa

SEQ ID NO: 7055 - DNA, 19 bp, Homo sapiens
  siRNA target sequence for MLLT2 (NM_005935.1,3278-3296).
ggaagcctcaagtgaagtt

SEQ ID NO: 7056 - DNA, 19 bp, Homo sapiens
  siRNA target sequence for MLLT2 (NM_005935.1,3279-3297).
gaagcctcaagtgaagttt

SEQ ID NO: 7057 - DNA, 19 bp, Homo sapiens
  siRNA target sequence for MLLT2 (NM_005935.1,3283-3301).
cctcaagtgaagtttgaca

SEQ ID NO: 7058 - DNA, 19 bp, Homo sapiens
  siRNA target sequence for MLLT2 (NM_005935.1,3319-3337).
cacatgagggaggcaaaaa

SEQ ID NO: 7059 - DNA, 19 bp, Homo sapiens
  siRNA target sequence for MLLT2 (NM_005935.1,3401-3419).
ccgtcttgtccttcattga

SEQ ID NO: 7060 - DNA, 19 bp, Homo sapiens
  siRNA target sequence for MLLT2 (NM_005935.1,3474-3492).
ctactcagaaactgtagat

SEQ ID NO: 7061 - DNA, 19 bp, Homo sapiens
  siRNA target sequence for MLLT2 (NM_005935.1,3485-3503).
ctgtagatctcattaaatt

SEQ ID NO: 7062 - DNA, 19 bp, Homo sapiens
  siRNA target sequence for MLLT2 (NM_005935.1,3538-3556).
gcgccaacacaagagaaaa

SEQ ID NO: 7063 - DNA, 19 bp, Homo sapiens
  siRNA target sequence for MLLT2 (NM_005935.1,3577-3595).
cgttgccagtccattttga

SEQ ID NO: 7064 - DNA, 19 bp, Homo sapiens
  siRNA target sequence for MLLT2 (NM_005935.1,3578-3596).
gttgccagtccattttgaa

SEQ ID NO: 7065 - DNA, 19 bp, Homo sapiens
  siRNA target sequence for MLLT2 (NM_005935.1,3600-3618).
ggcgatgtttcgttgtaaa

SEQ ID NO: 7066 - DNA, 19 bp, Homo sapiens
  siRNA target sequence for MLLT2 (NM_005935.1,3601-3619).
gcgatgtttcgttgtaaaa

SEQ ID NO: 7067 - DNA, 19 bp, Homo sapiens
  siRNA target sequence for MLLT2 (NM_005935.1,3602-3620).
cgatgtttcgttgtaaaaa

SEQ ID NO: 7068 - DNA, 19 bp, Homo sapiens
  siRNA target sequence for MLLT2 (NM_005935.1,3636-3654).
gtattctcgtactcttaat

SEQ ID NO: 7069 - DNA, 19 bp, Homo sapiens
  siRNA target sequence for MLLT2 (NM_005935.1,3643-3661).
cgtactcttaataaacact

SEQ ID NO: 7070 - DNA, 19 bp, Homo sapiens
  siRNA target sequence for MLLT2 (NM_005935.1,3660-3678).
cttcgagagttcttccaaa

SEQ ID NO: 7071 - DNA, 19 bp, Homo sapiens
  siRNA target sequence for MLLT2 (NM_005935.1,3837-3855).
gaatatgacatcttcctat

SEQ ID NO: 7072 - DNA, 19 bp, Homo sapiens
  siRNA target sequence for MLLT2 (NM_005935.1,3860-3878).
ccatcacatcccatgttct

SEQ ID NO: 7073 - DNA, 19 bp, Homo sapiens
  siRNA target sequence for MLLT2 (NM_005935.1,3861-3879).
catcacatcccatgttctt

SEQ ID NO: 7074 - DNA, 19 bp, Homo sapiens
  siRNA target sequence for MLLT2 (NM_005935.1,3909-3927).
ggccctcacgaggaagaat

SEQ ID NO: 7075 - DNA, 19 bp, Homo sapiens
  siRNA target sequence for MLLT2 (NM_005935.1,3910-3928).
gccctcacgaggaagaata

SEQ ID NO: 7076 - DNA, 19 bp, Homo sapiens
  siRNA target sequence for MLLT2 (NM_005935.1,3911-3929).
ccctcacgaggaagaataa

SEQ ID NO: 7077 - DNA, 19 bp, Homo sapiens
  siRNA target sequence for MLLT2 (NM_005935.1,3943-3961).
cggctcagcacaaatgtgt

SEQ ID NO: 7078 - DNA, 19 bp, Homo sapiens
  siRNA target sequence for MLLT7 (NM_005938.1,557-575).
gtggatggtccgtactgta

SEQ ID NO: 7079 - DNA, 19 bp, Homo sapiens
  siRNA target sequence for MLLT7 (NM_005938.1,567-585).
cgtactgtaccctacttca

SEQ ID NO: 7080 - DNA, 19 bp, Homo sapiens
  siRNA target sequence for MLLT7 (NM_005938.1,568-586).
gtactgtaccctacttcaa

SEQ ID NO: 7081 - DNA, 19 bp, Homo sapiens
  siRNA target sequence for MLLT7 (NM_005938.1,939-957).
cgtccacgaagcagttcaa

SEQ ID NO: 7082 - DNA, 19 bp, Homo sapiens
  siRNA target sequence for MLLT7 (NM_005938.1,940-958).
gtccacgaagcagttcaaa

SEQ ID NO: 7083 - DNA, 19 bp, Homo sapiens
  siRNA target sequence for MLLT7 (NM_005938.1,1007-1025).
ggtgctggcggaggaaata

SEQ ID NO: 7084 - DNA, 19 bp, Homo sapiens
  siRNA target sequence for MLLT7 (NM_005938.1,1452-1470).
gttcccaccctttctatga

SEQ ID NO: 7085 - DNA, 19 bp, Homo sapiens
  siRNA target sequence for MLLT7 (NM_005938.1,1529-1547).
gctcacaccccctactgaa

SEQ ID NO: 7086 - DNA, 19 bp, Homo sapiens
  siRNA target sequence for MLLT7 (NM_005938.1,1570-1588).
ctcaggatctagatcttga

SEQ ID NO: 7087 - DNA, 19 bp, Homo sapiens
  siRNA target sequence for MNT (NM_020310.1,592-610).
ccggactcagcattaagga

SEQ ID NO: 7088 - DNA, 19 bp, Homo sapiens
  siRNA target sequence for MNT (NM_020310.1,1063-1081).
ggctggcacgtgagaagat

SEQ ID NO: 7089 - DNA, 19 bp, Homo sapiens
  siRNA target sequence for MORF4 (NM_006792.2,426-444).
cacccagctactcaacaaa

SEQ ID NO: 7090 - DNA, 19 bp, Homo sapiens
  siRNA target sequence for MORF4 (NM_006792.2,465-483).
cgaaattcttgcagattgt

SEQ ID NO: 7091 - DNA, 19 bp, Homo sapiens
  siRNA target sequence for MSC (NM_005098.2,660-678).
cggctggcttccagttaca

SEQ ID NO: 7092 - DNA, 19 bp, Homo sapiens
  siRNA target sequence for MSC (NM_005098.2,799-817).
cgcagccaacagactatgt

SEQ ID NO: 7093 - DNA, 19 bp, Homo sapiens
  siRNA target sequence for MSC (NM_005098.2,816-834).
gtggaaccaccgcttaaat

SEQ ID NO: 7094 - DNA, 19 bp, Homo sapiens
  siRNA target sequence for MSC (NM_005098.2,836-854).
ggactggaactcacttgat

SEQ ID NO: 7095 - DNA, 19 bp, Homo sapiens
  siRNA target sequence for MSC (NM_005098.2,849-867).
cttgatgggattattcgtt

SEQ ID NO: 7096 - DNA, 19 bp, Homo sapiens
  siRNA target sequence for MSX1 (NM_002448.1,591-609).
cctcaagctgccagaagat

SEQ ID NO: 7097 - DNA, 19 bp, Homo sapiens
  siRNA target sequence for MSX1 (NM_002448.1,713-731).
gcaccctccgcaaacacaa

SEQ ID NO: 7098 - DNA, 19 bp, Homo sapiens
  siRNA target sequence for MSX2 (NM_002449.3,71-89).
ccgtccaaaggcaatgact

SEQ ID NO: 7099 - DNA, 19 bp, Homo sapiens
  siRNA target sequence for MSX2 (NM_002449.3,72-90).
cgtccaaaggcaatgactt

SEQ ID NO: 7100 - DNA, 19 bp, Homo sapiens
  siRNA target sequence for MSX2 (NM_002449.3,76-94).
caaaggcaatgacttgttt

SEQ ID NO: 7101 - DNA, 19 bp, Homo sapiens
  siRNA target sequence for MSX2 (NM_002449.3,370-388).
ggtcaagtcggaaaattca

SEQ ID NO: 7102 - DNA, 19 bp, Homo sapiens
  siRNA target sequence for MSX2 (NM_002449.3,376-394).
gtcggaaaattcagaagat

SEQ ID NO: 7103 - DNA, 19 bp, Homo sapiens
  siRNA target sequence for MSX2 (NM_002449.3,642-660).
gggccaaggcgaaaagact

SEQ ID NO: 7104 - DNA, 19 bp, Homo sapiens
  siRNA target sequence for MSX2 (NM_002449.3,685-703).
gaaaatggctgcaaaacct

SEQ ID NO: 7105 - DNA, 19 bp, Homo sapiens
  siRNA target sequence for MSX2 (NM_002449.3,751-769).
gcaggcagcgtccatatat

SEQ ID NO: 7106 - DNA, 19 bp, Homo sapiens
  siRNA target sequence for MTA1 (NM_004689.2,31-49).
cggagactacgtctacttt

SEQ ID NO: 7107 - DNA, 19 bp, Homo sapiens
  siRNA target sequence for MTA1 (NM_004689.2,238-256).
cggcgaggaaggggaaata

SEQ ID NO: 7108 - DNA, 19 bp, Homo sapiens
  siRNA target sequence for MTA1 (NM_004689.2,286-304).
ggacctgcccgagaaacta

SEQ ID NO: 7109 - DNA, 19 bp, Homo sapiens
  siRNA target sequence for MTA1 (NM_004689.2,287-305).
gacctgcccgagaaactaa

SEQ ID NO: 7110 - DNA, 19 bp, Homo sapiens
  siRNA target sequence for MTA1 (NM_004689.2,484-502).
cctgctggcagataaagga

SEQ ID NO: 7111 - DNA, 19 bp, Homo sapiens
  siRNA target sequence for MTA1 (NM_004689.2,538-556).
caccgacttgttaaaagaa

SEQ ID NO: 7112 - DNA, 19 bp, Homo sapiens
  siRNA target sequence for MTA1 (NM_004689.2,875-893).
gcatcagaggccaaccttt

SEQ ID NO: 7113 - DNA, 19 bp, Homo sapiens
  siRNA target sequence for MTA1 (NM_004689.2,879-897).
cagaggccaaccttttcga

SEQ ID NO: 7114 - DNA, 19 bp, Homo sapiens
  siRNA target sequence for MTA1 (NM_004689.2,965-983).
ctgaccagcatcattgagt

SEQ ID NO: 7115 - DNA, 19 bp, Homo sapiens
  siRNA target sequence for MTA1 (NM_004689.2,996-1014).
ggaagaccaccgacagata

SEQ ID NO: 7116 - DNA, 19 bp, Homo sapiens
  siRNA target sequence for MTA1 (NM_004689.2,1047-1065).
ctgagagcaagttaaagca

SEQ ID NO: 7117 - DNA, 19 bp, Homo sapiens
  siRNA target sequence for MTA1 (NM_004689.2,1067-1085).
gtttatattcccaactata

SEQ ID NO: 7118 - DNA, 19 bp, Homo sapiens
  siRNA target sequence for MTA1 (NM_004689.2,1194-1212).
gttacaccacacagtctta

SEQ ID NO: 7119 - DNA, 19 bp, Homo sapiens
  siRNA target sequence for MTA1 (NM_004689.2,1224-1242).
cttggggtccccctaacat

SEQ ID NO: 7120 - DNA, 19 bp, Homo sapiens
  siRNA target sequence for MTA1 (NM_004689.2,1250-1268).
cgtctctgcgcatcttgtt

SEQ ID NO: 7121 - DNA, 19 bp, Homo sapiens
  siRNA target sequence for MTA1 (NM_004689.2,1258-1276).
cgcatcttgttggacatat

SEQ ID NO: 7122 - DNA, 19 bp, Homo sapiens
  siRNA target sequence for MTA1 (NM_004689.2,1331-1349).
ggaccaaaccgcagtaaca

SEQ ID NO: 7123 - DNA, 19 bp, Homo sapiens
  siRNA target sequence for MTA1 (NM_004689.2,1332-1350).
gaccaaaccgcagtaacat

SEQ ID NO: 7124 - DNA, 19 bp, Homo sapiens
  siRNA target sequence for MTA1 (NM_004689.2,1775-1793).
ggggtggacggcaacatga

SEQ ID NO: 7125 - DNA, 19 bp, Homo sapiens
  siRNA target sequence for MTA1 (NM_004689.2,1776-1794).
gggtggacggcaacatgaa

SEQ ID NO: 7126 - DNA, 19 bp, Homo sapiens
  siRNA target sequence for MTA1 (NM_004689.2,1778-1796).
gtggacggcaacatgaaga

SEQ ID NO: 7127 - DNA, 19 bp, Homo sapiens
  siRNA target sequence for MTA2 (NM_004739.2,405-423).
gggagattacgtctatttt

SEQ ID NO: 7128 - DNA, 19 bp, Homo sapiens
  siRNA target sequence for MTA2 (NM_004739.2,523-541).
cgcagggacatttctagta

SEQ ID NO: 7129 - DNA, 19 bp, Homo sapiens
  siRNA target sequence for MTA2 (NM_004739.2,633-651).
gcaccgggaactttttctt

SEQ ID NO: 7130 - DNA, 19 bp, Homo sapiens
  siRNA target sequence for MTA2 (NM_004739.2,649-667).
ctttctcggcaatttgaat

SEQ ID NO: 7131 - DNA, 19 bp, Homo sapiens
  siRNA target sequence for MTA2 (NM_004739.2,653-671).
ctcggcaatttgaatcatt

SEQ ID NO: 7132 - DNA, 19 bp, Homo sapiens
  siRNA target sequence for MTA2 (NM_004739.2,657-675).
gcaatttgaatcattacca

SEQ ID NO: 7133 - DNA, 19 bp, Homo sapiens
  siRNA target sequence for MTA2 (NM_004739.2,682-700).
cacatacgggggaaatgca

SEQ ID NO: 7134 - DNA, 19 bp, Homo sapiens
  siRNA target sequence for MTA2 (NM_004739.2,698-716).
gcagtgtgaccctcttgaa

SEQ ID NO: 7135 - DNA, 19 bp, Homo sapiens
  siRNA target sequence for MTA2 (NM_004739.2,699-717).
cagtgtgaccctcttgaat

SEQ ID NO: 7136 - DNA, 19 bp, Homo sapiens
  siRNA target sequence for MTA2 (NM_004739.2,751-769).
gaggactgctttttttact

SEQ ID NO: 7137 - DNA, 19 bp, Homo sapiens
  siRNA target sequence for MTA2 (NM_004739.2,753-771).
ggactgctttttttactca

SEQ ID NO: 7138 - DNA, 19 bp, Homo sapiens
  siRNA target sequence for MTA2 (NM_004739.2,805-823).
gctgatcagggcgagatta

SEQ ID NO: 7139 - DNA, 19 bp, Homo sapiens
  siRNA target sequence for MTA2 (NM_004739.2,824-842).
gagttggttgcaaatacca

SEQ ID NO: 7140 - DNA, 19 bp, Homo sapiens
  siRNA target sequence for MTA2 (NM_004739.2,865-883).
gtagagggagaatctgata

SEQ ID NO: 7141 - DNA, 19 bp, Homo sapiens
  siRNA target sequence for MTA2 (NM_004739.2,991-1009).
gcaagagccctagattgta

SEQ ID NO: 7142 - DNA, 19 bp, Homo sapiens
  siRNA target sequence for MTA2 (NM_004739.2,1059-1077).
ccgagatatcactctgttt

SEQ ID NO: 7143 - DNA, 19 bp, Homo sapiens
  siRNA target sequence for MTA2 (NM_004739.2,1061-1079).
gagatatcactctgtttca

SEQ ID NO: 7144 - DNA, 19 bp, Homo sapiens
  siRNA target sequence for MTA2 (NM_004739.2,1286-1304).
gcatagtccagttttatta

SEQ ID NO: 7145 - DNA, 19 bp, Homo sapiens
  siRNA target sequence for MTA2 (NM_004739.2,1291-1309).
gtccagttttattacatgt

SEQ ID NO: 7146 - DNA, 19 bp, Homo sapiens
  siRNA target sequence for MTA2 (NM_004739.2,1316-1334).
ccacagaccggtatattca

SEQ ID NO: 7147 - DNA, 19 bp, Homo sapiens
  siRNA target sequence for MTA2 (NM_004739.2,1410-1428).
ccctaaccagatcatttct

SEQ ID NO: 7148 - DNA, 19 bp, Homo sapiens
  siRNA target sequence for MTA2 (NM_004739.2,1412-1430).
ctaaccagatcatttctgt

SEQ ID NO: 7149 - DNA, 19 bp, Homo sapiens
  siRNA target sequence for MTA2 (NM_004739.2,1640-1658).
cacactcaaggggtcattt

SEQ ID NO: 7150 - DNA, 19 bp, Homo sapiens
  siRNA target sequence for MTA2 (NM_004739.2,1720-1738).
ctggctaagaacagacaaa

SEQ ID NO: 7151 - DNA, 19 bp, Homo sapiens
  siRNA target sequence for MTA2 (NM_004739.2,1722-1740).
ggctaagaacagacaaact

SEQ ID NO: 7152 - DNA, 19 bp, Homo sapiens
  siRNA target sequence for MTA2 (NM_004739.2,1723-1741).
gctaagaacagacaaactt

SEQ ID NO: 7153 - DNA, 19 bp, Homo sapiens
  siRNA target sequence for MTA2 (NM_004739.2,1724-1742).
ctaagaacagacaaacttt

SEQ ID NO: 7154 - DNA, 19 bp, Homo sapiens
  siRNA target sequence for MTA2 (NM_004739.2,1781-1799).
gcatgtgcagggacctatt

SEQ ID NO: 7155 - DNA, 19 bp, Homo sapiens
  siRNA target sequence for MTA2 (NM_004739.2,1782-1800).
catgtgcagggacctatta

SEQ ID NO: 7156 - DNA, 19 bp, Homo sapiens
  siRNA target sequence for MTA2 (NM_004739.2,1823-1841).
ggccttatgctcctatcaa

SEQ ID NO: 7157 - DNA, 19 bp, Homo sapiens
  siRNA target sequence for MTA2 (NM_004739.2,1824-1842).
gccttatgctcctatcaat

SEQ ID NO: 7158 - DNA, 19 bp, Homo sapiens
  siRNA target sequence for MTA2 (NM_004739.2,1865-1883).
gctccattcgacttcctaa

SEQ ID NO: 7159 - DNA, 19 bp, Homo sapiens
  siRNA target sequence for MTA2 (NM_004739.2,1932-1950).
ggcaactatcgtcaaagat

SEQ ID NO: 7160 - DNA, 19 bp, Homo sapiens
  siRNA target sequence for MTA2 (NM_004739.2,1934-1952).
caactatcgtcaaagatct

SEQ ID NO: 7161 - DNA, 19 bp, Homo sapiens
  siRNA target sequence for MTA2 (NM_004739.2,2053-2071).
gtgaaacgggcctatgaga

SEQ ID NO: 7162 - DNA, 19 bp, Homo sapiens
  siRNA target sequence for MTA2 (NM_004739.2,2116-2134).
ctggcttcagggattcgtt

SEQ ID NO: 7163 - DNA, 19 bp, Homo sapiens
  siRNA target sequence for MTA2 (NM_004739.2,2152-2170).
gccaagcgtcagaaactaa

SEQ ID NO: 7164 - DNA, 19 bp, Homo sapiens
  siRNA target sequence for MTA2 (NM_004739.2,2199-2217).
gtttgtggccacaaaggat

SEQ ID NO: 7165 - DNA, 19 bp, Homo sapiens
  siRNA target sequence for MTA2 (NM_004739.2,2357-2375).
gcaccaatgagcctattgt

SEQ ID NO: 7166 - DNA, 19 bp, Homo sapiens
  siRNA target sequence for MTF1 (NM_005955.1,138-156).
gagctgacccccgatgata

SEQ ID NO: 7167 - DNA, 19 bp, Homo sapiens
  siRNA target sequence for MTF1 (NM_005955.1,140-158).
gctgacccccgatgataaa

SEQ ID NO: 7168 - DNA, 19 bp, Homo sapiens
  siRNA target sequence for MTF1 (NM_005955.1,141-159).
ctgacccccgatgataaaa

SEQ ID NO: 7169 - DNA, 19 bp, Homo sapiens
  siRNA target sequence for MTF1 (NM_005955.1,145-163).
cccccgatgataaaatgct

SEQ ID NO: 7170 - DNA, 19 bp, Homo sapiens
  siRNA target sequence for MTF1 (NM_005955.1,199-217).
catctggaactgtttatga

SEQ ID NO: 7171 - DNA, 19 bp, Homo sapiens
  siRNA target sequence for MTF1 (NM_005955.1,220-238).
ggaccactgttcttattga

SEQ ID NO: 7172 - DNA, 19 bp, Homo sapiens
  siRNA target sequence for MTF1 (NM_005955.1,277-295).
gacagtgcggagaacactt

SEQ ID NO: 7173 - DNA, 19 bp, Homo sapiens
  siRNA target sequence for MTF1 (NM_005955.1,381-399).
ccagatcagattcatttga

SEQ ID NO: 7174 - DNA, 19 bp, Homo sapiens
  siRNA target sequence for MTF1 (NM_005955.1,415-433).
ccacacccatgccaagaaa

SEQ ID NO: 7175 - DNA, 19 bp, Homo sapiens
  siRNA target sequence for MTF1 (NM_005955.1,416-434).
cacacccatgccaagaaat

SEQ ID NO: 7176 - DNA, 19 bp, Homo sapiens
  siRNA target sequence for MTF1 (NM_005955.1,421-439).
ccatgccaagaaatattga

SEQ ID NO: 7177 - DNA, 19 bp, Homo sapiens
  siRNA target sequence for MTF1 (NM_005955.1,463-481).
cggaatgtccggaaacaaa

SEQ ID NO: 7178 - DNA, 19 bp, Homo sapiens
  siRNA target sequence for MTF1 (NM_005955.1,469-487).
gtccggaaacaaaacgtaa

SEQ ID NO: 7179 - DNA, 19 bp, Homo sapiens
  siRNA target sequence for MTF1 (NM_005955.1,489-507).
gaagtaaagcggtaccaat

SEQ ID NO: 7180 - DNA, 19 bp, Homo sapiens
  siRNA target sequence for MTF1 (NM_005955.1,492-510).
gtaaagcggtaccaatgta

SEQ ID NO: 7181 - DNA, 19 bp, Homo sapiens
  siRNA target sequence for MTF1 (NM_005955.1,497-515).
gcggtaccaatgtaccttt

SEQ ID NO: 7182 - DNA, 19 bp, Homo sapiens
  siRNA target sequence for MTF1 (NM_005955.1,766-784).
cgtttaactgtgaatctga

SEQ ID NO: 7183 - DNA, 19 bp, Homo sapiens
  siRNA target sequence for MTF1 (NM_005955.1,824-842).
gaagcacattcgaactcat

SEQ ID NO: 7184 - DNA, 19 bp, Homo sapiens
  siRNA target sequence for MTF1 (NM_005955.1,1013-1031).
gaaaggtcatgataacaaa

SEQ ID NO: 7185 - DNA, 19 bp, Homo sapiens
  siRNA target sequence for MTF1 (NM_005955.1,1074-1092).
gatacaaatcactcacttt

SEQ ID NO: 7186 - DNA, 19 bp, Homo sapiens
  siRNA target sequence for MTF1 (NM_005955.1,1113-1131).
ctgtccacagattctgaat

SEQ ID NO: 7187 - DNA, 19 bp, Homo sapiens
  siRNA target sequence for MTF1 (NM_005955.1,1163-1181).
ggacctcagcacaatttca

SEQ ID NO: 7188 - DNA, 19 bp, Homo sapiens
  siRNA target sequence for MTF1 (NM_005955.1,1185-1203).
gcaatcatctttgaatcaa

SEQ ID NO: 7189 - DNA, 19 bp, Homo sapiens
  siRNA target sequence for MTF1 (NM_005955.1,1205-1223).
gttccagaattcagatgat

SEQ ID NO: 7190 - DNA, 19 bp, Homo sapiens
  siRNA target sequence for MTF1 (NM_005955.1,1216-1234).
cagatgatacggcaattca

SEQ ID NO: 7191 - DNA, 19 bp, Homo sapiens
  siRNA target sequence for MTF1 (NM_005955.1,1262-1280).
gactgaaagttttaatggt

SEQ ID NO: 7192 - DNA, 19 bp, Homo sapiens
  siRNA target sequence for MTF1 (NM_005955.1,1317-1335).
ggaaattcagcatctttat

SEQ ID NO: 7193 - DNA, 19 bp, Homo sapiens
  siRNA target sequence for MTF1 (NM_005955.1,1460-1478).
caacccccctgctctctta

SEQ ID NO: 7194 - DNA, 19 bp, Homo sapiens
  siRNA target sequence for MTF1 (NM_005955.1,1519-1537).
ctgctaatcatcaagagtt

SEQ ID NO: 7195 - DNA, 19 bp, Homo sapiens
  siRNA target sequence for MTF1 (NM_005955.1,1522-1540).
ctaatcatcaagagtttct

SEQ ID NO: 7196 - DNA, 19 bp, Homo sapiens
  siRNA target sequence for MTF1 (NM_005955.1,1553-1571).
ggcaccgcagcccattgta

SEQ ID NO: 7197 - DNA, 19 bp, Homo sapiens
  siRNA target sequence for MTF1 (NM_005955.1,1643-1661).
cccaccacaaagtactact

SEQ ID NO: 7198 - DNA, 19 bp, Homo sapiens
  siRNA target sequence for MTF1 (NM_005955.1,1701-1719).
gccaactctgtcctaacta

SEQ ID NO: 7199 - DNA, 19 bp, Homo sapiens
  siRNA target sequence for MTF1 (NM_005955.1,1702-1720).
ccaactctgtcctaactaa

SEQ ID NO: 7200 - DNA, 19 bp, Homo sapiens
  siRNA target sequence for MTF1 (NM_005955.1,1703-1721).
caactctgtcctaactaat

SEQ ID NO: 7201 - DNA, 19 bp, Homo sapiens
  siRNA target sequence for MTF1 (NM_005955.1,1781-1799).
catgggagaacagaactta

SEQ ID NO: 7202 - DNA, 19 bp, Homo sapiens
  siRNA target sequence for MTF1 (NM_005955.1,1785-1803).
ggagaacagaacttacaat

SEQ ID NO: 7203 - DNA, 19 bp, Homo sapiens
  siRNA target sequence for MTF1 (NM_005955.1,1791-1809).
cagaacttacaatggatat

SEQ ID NO: 7204 - DNA, 19 bp, Homo sapiens
  siRNA target sequence for MTF1 (NM_005955.1,1793-1811).
gaacttacaatggatatta

SEQ ID NO: 7205 - DNA, 19 bp, Homo sapiens
  siRNA target sequence for MTF1 (NM_005955.1,1819-1837).
ccaccagttctccacaaaa

SEQ ID NO: 7206 - DNA, 19 bp, Homo sapiens
  siRNA target sequence for MTF1 (NM_005955.1,1942-1960).
gtgttcctgtgatcatcat

SEQ ID NO: 7207 - DNA, 19 bp, Homo sapiens
  siRNA target sequence for MTF1 (NM_005955.1,2100-2118).
ctcccagcgcagactttct

SEQ ID NO: 7208 - DNA, 19 bp, Homo sapiens
  siRNA target sequence for MTF1 (NM_005955.1,2102-2120).
cccagcgcagactttctct

SEQ ID NO: 7209 - DNA, 19 bp, Homo sapiens
  siRNA target sequence for MTF1 (NM_005955.1,2103-2121).
ccagcgcagactttctctt

SEQ ID NO: 7210 - DNA, 19 bp, Homo sapiens
  siRNA target sequence for MTF1 (NM_005955.1,2201-2219).
ccctcagacagaaacatta

SEQ ID NO: 7211 - DNA, 19 bp, Homo sapiens
  siRNA target sequence for MTF1 (NM_005955.1,2228-2246).
ggatgtgtcagagtttcta

SEQ ID NO: 7212 - DNA, 19 bp, Homo sapiens
  siRNA target sequence for MTF1 (NM_005955.1,2262-2280).
gacaccccgtccaatctga

SEQ ID NO: 7213 - DNA, 19 bp, Homo sapiens
  siRNA target sequence for MTF1 (NM_005955.1,2264-2282).
caccccgtccaatctgatt

SEQ ID NO: 7214 - DNA, 19 bp, Homo sapiens
  siRNA target sequence for MYBL2 (NM_002466.2,257-275).
ctaccaggacacagattca

SEQ ID NO: 7215 - DNA, 19 bp, Homo sapiens
  siRNA target sequence for MYBL2 (NM_002466.2,283-301).
cggagcagagggatagcaa

SEQ ID NO: 7216 - DNA, 19 bp, Homo sapiens
  siRNA target sequence for MYBL2 (NM_002466.2,740-758).
ctggaactctaccatcaaa

SEQ ID NO: 7217 - DNA, 19 bp, Homo sapiens
  siRNA target sequence for MYBL2 (NM_002466.2,768-786).
gacacaggaggcttcttga

SEQ ID NO: 7218 - DNA, 19 bp, Homo sapiens
  siRNA target sequence for MYBL2 (NM_002466.2,802-820).
gcaagcccccagtgtactt

SEQ ID NO: 7219 - DNA, 19 bp, Homo sapiens
  siRNA target sequence for MYBL2 (NM_002466.2,902-920).
ctccgtccctcctaccata

SEQ ID NO: 7220 - DNA, 19 bp, Homo sapiens
  siRNA target sequence for MYBL2 (NM_002466.2,904-922).
ccgtccctcctaccataaa

SEQ ID NO: 7221 - DNA, 19 bp, Homo sapiens
  siRNA target sequence for MYBL2 (NM_002466.2,977-995).
ggagcccatcggtacagat

SEQ ID NO: 7222 - DNA, 19 bp, Homo sapiens
  siRNA target sequence for MYBL2 (NM_002466.2,1177-1195).
cttggtgtgacctgagtaa

SEQ ID NO: 7223 - DNA, 19 bp, Homo sapiens
  siRNA target sequence for MYBL2 (NM_002466.2,1216-1234).
catctgcagaggacagtat

SEQ ID NO: 7224 - DNA, 19 bp, Homo sapiens
  siRNA target sequence for MYBL2 (NM_002466.2,1709-1727).
gaaacatgctgcgtttgta

SEQ ID NO: 7225 - DNA, 19 bp, Homo sapiens
  siRNA target sequence for MYBL2 (NM_002466.2,1768-1786).
cgccaaccccgttcaagaa

SEQ ID NO: 7226 - DNA, 19 bp, Homo sapiens
  siRNA target sequence for MYBL2 (NM_002466.2,1940-1958).
gcggagccccatcaagaaa

SEQ ID NO: 7227 - DNA, 19 bp, Homo sapiens
  siRNA target sequence for MYBL2 (NM_002466.2,1995-2013).
gatgtgaagctgatgatgt

SEQ ID NO: 7228 - DNA, 19 bp, Homo sapiens
  siRNA target sequence for MYBL2 (NM_002466.2,2227-2245).
ccagggaccagcttttcat

SEQ ID NO: 7229 - DNA, 19 bp, Homo sapiens
  siRNA target sequence for MYC (NM_002467.2,434-452).
cggtgcagccgtatttcta

SEQ ID NO: 7230 - DNA, 19 bp, Homo sapiens
  siRNA target sequence for MYC (NM_002467.2,436-454).
gtgcagccgtatttctact

SEQ ID NO: 7231 - DNA, 19 bp, Homo sapiens
  siRNA target sequence for MYC (NM_002467.2,712-730).
gtgaaccagagtttcatct

SEQ ID NO: 7232 - DNA, 19 bp, Homo sapiens
  siRNA target sequence for MYC (NM_002467.2,739-757).
gacgacgagaccttcatca

SEQ ID NO: 7233 - DNA, 19 bp, Homo sapiens
  siRNA target sequence for MYC (NM_002467.2,838-856).
caggctgcgcgcaaagaca

SEQ ID NO: 7234 - DNA, 19 bp, Homo sapiens
  siRNA target sequence for MYC (NM_002467.2,1031-1049).
ctccgtcctcggattctct

SEQ ID NO: 7235 - DNA, 19 bp, Homo sapiens
  siRNA target sequence for MYC (NM_002467.2,1486-1504).
gagctaaaacggagctttt

SEQ ID NO: 7236 - DNA, 19 bp, Homo sapiens
  siRNA target sequence for MYC (NM_002467.2,1551-1569).
ccccaaggtagttatcctt

SEQ ID NO: 7237 - DNA, 19 bp, Homo sapiens
  siRNA target sequence for MYC (NM_002467.2,1552-1570).
cccaaggtagttatcctta

SEQ ID NO: 7238 - DNA, 19 bp, Homo sapiens
  siRNA target sequence for MYC (NM_002467.2,1608-1626).
ggagcaaaagctcatttct

SEQ ID NO: 7239 - DNA, 19 bp, Homo sapiens
  siRNA target sequence for MYC (NM_002467.2,1643-1661).
ggaaacgacgagaacagtt

SEQ ID NO: 7240 - DNA, 19 bp, Homo sapiens
  siRNA target sequence for MYC (NM_002467.2,1675-1693).
gaacagctacggaactctt

SEQ ID NO: 7241 - DNA, 19 bp, Homo sapiens
  siRNA target sequence for MYCL2 (NM_005377.1,591-609).
cgactccgagggtgaagaa

SEQ ID NO: 7242 - DNA, 19 bp, Homo sapiens
  siRNA target sequence for MYCL2 (NM_005377.1,592-610).
gactccgagggtgaagaaa

SEQ ID NO: 7243 - DNA, 19 bp, Homo sapiens
  siRNA target sequence for MYCL2 (NM_005377.1,647-665).
cgcggaagccagtcatcat

SEQ ID NO: 7244 - DNA, 19 bp, Homo sapiens
  siRNA target sequence for MYCL2 (NM_005377.1,688-706).
gatccccgcatgaatctct

SEQ ID NO: 7245 - DNA, 19 bp, Homo sapiens
  siRNA target sequence for MYCL2 (NM_005377.1,906-924).
gcccaaacccatccattat

SEQ ID NO: 7246 - DNA, 19 bp, Homo sapiens
  siRNA target sequence for MYCL2 (NM_005377.1,969-987).
gcgcaagagacggaatgat

SEQ ID NO: 7247 - DNA, 19 bp, Homo sapiens
  siRNA target sequence for MYCL2 (NM_005377.1,1037-1055).
gctgctctagggtttccaa

SEQ ID NO: 7248 - DNA, 19 bp, Homo sapiens
  siRNA target sequence for MYCL2 (NM_005377.1,1038-1056).
ctgctctagggtttccaaa

SEQ ID NO: 7249 - DNA, 19 bp, Homo sapiens
  siRNA target sequence for MYCL2 (NM_005377.1,1041-1059).
ctctagggtttccaaagta

SEQ ID NO: 7250 - DNA, 19 bp, Homo sapiens
  siRNA target sequence for MYCL2 (NM_005377.1,1071-1089).
caaggccacggaatactta

SEQ ID NO: 7251 - DNA, 19 bp, Homo sapiens
  siRNA target sequence for MYCL2 (NM_005377.1,1074-1092).
ggccacggaatacttacat

SEQ ID NO: 7252 - DNA, 19 bp, Homo sapiens
  siRNA target sequence for MYCL2 (NM_005377.1,1079-1097).
cggaatacttacatgaact

SEQ ID NO: 7253 - DNA, 19 bp, Homo sapiens
  siRNA target sequence for MYCL2 (NM_005377.1,1145-1163).
gccagcgacggcaattgca

SEQ ID NO: 7254 - DNA, 19 bp, Homo sapiens
  siRNA target sequence for MYCL2 (NM_005377.1,1150-1168).
cgacggcaattgcagaaaa

SEQ ID NO: 7255 - DNA, 19 bp, Homo sapiens
  siRNA target sequence for MYCL2 (NM_005377.1,1154-1172).
ggcaattgcagaaaagaat

SEQ ID NO: 7256 - DNA, 19 bp, Homo sapiens
  siRNA target sequence for MYCN (NM_005378.3,190-208).
ccagacctcgagtttgact

SEQ ID NO: 7257 - DNA, 19 bp, Homo sapiens
  siRNA target sequence for MYCN (NM_005378.3,230-248).
cggacgaagatgacttcta

SEQ ID NO: 7258 - DNA, 19 bp, Homo sapiens
  siRNA target sequence for MYCN (NM_005378.3,377-395).
cggagatgctgcttgagaa

SEQ ID NO: 7259 - DNA, 19 bp, Homo sapiens
  siRNA target sequence for MYCN (NM_005378.3,915-933).
caccctgagcgattcagat

SEQ ID NO: 7260 - DNA, 19 bp, Homo sapiens
  siRNA target sequence for MYCN (NM_005378.3,1330-1348).
cttcggtccagctttctca

SEQ ID NO: 7261 - DNA, 19 bp, Homo sapiens
  siRNA target sequence for MYCN (NM_005378.3,1360-1378).
cacgtgccggagttggtaa

SEQ ID NO: 7262 - DNA, 19 bp, Homo sapiens
  siRNA target sequence for MYCN (NM_005378.3,1363-1381).
gtgccggagttggtaaaga

SEQ ID NO: 7263 - DNA, 19 bp, Homo sapiens
  siRNA target sequence for MYCN (NM_005378.3,1365-1383).
gccggagttggtaaagaat

SEQ ID NO: 7264 - DNA, 19 bp, Homo sapiens
  siRNA target sequence for MYF6 (NM_002469.1,456-474).
cggagcgccatcagctata

SEQ ID NO: 7265 - DNA, 19 bp, Homo sapiens
  siRNA target sequence for MYF6 (NM_002469.1,457-475).
ggagcgccatcagctatat

SEQ ID NO: 7266 - DNA, 19 bp, Homo sapiens
  siRNA target sequence for MYF6 (NM_002469.1,458-476).
gagcgccatcagctatatt

SEQ ID NO: 7267 - DNA, 19 bp, Homo sapiens
  siRNA target sequence for MYF6 (NM_002469.1,460-478).
gcgccatcagctatattga

SEQ ID NO: 7268 - DNA, 19 bp, Homo sapiens
  siRNA target sequence for MYF6 (NM_002469.1,615-633).
ccaagtgtttccgatcatt

SEQ ID NO: 7269 - DNA, 19 bp, Homo sapiens
  siRNA target sequence for MYF6 (NM_002469.1,644-662).
cgtgataacggctaaggaa

SEQ ID NO: 7270 - DNA, 19 bp, Homo sapiens
  siRNA target sequence for MYF6 (NM_002469.1,663-681).
ggaggagcaagtattgatt

SEQ ID NO: 7271 - DNA, 19 bp, Homo sapiens
  siRNA target sequence for MYNN (NM_018657.2,149-167).
ccactgtgagcacctttta

SEQ ID NO: 7272 - DNA, 19 bp, Homo sapiens
  siRNA target sequence for MYNN (NM_018657.2,205-223).
gtgactgtaccatagtgat

SEQ ID NO: 7273 - DNA, 19 bp, Homo sapiens
  siRNA target sequence for MYNN (NM_018657.2,236-254).
gtttaaagctcataggaat

SEQ ID NO: 7274 - DNA, 19 bp, Homo sapiens
  siRNA target sequence for MYNN (NM_018657.2,260-278).
ggcctcctttagtgagtat

SEQ ID NO: 7275 - DNA, 19 bp, Homo sapiens
  siRNA target sequence for MYNN (NM_018657.2,266-284).
ctttagtgagtattttggt

SEQ ID NO: 7276 - DNA, 19 bp, Homo sapiens
  siRNA target sequence for MYNN (NM_018657.2,360-378).
ctgttggagtttatataca

SEQ ID NO: 7277 - DNA, 19 bp, Homo sapiens
  siRNA target sequence for MYNN (NM_018657.2,362-380).
gttggagtttatatacaca

SEQ ID NO: 7278 - DNA, 19 bp, Homo sapiens
  siRNA target sequence for MYNN (NM_018657.2,450-468).
gaggtggtcactaaatgca

SEQ ID NO: 7279 - DNA, 19 bp, Homo sapiens
  siRNA target sequence for MYNN (NM_018657.2,511-529).
ctacagagatatctagtat

SEQ ID NO: 7280 - DNA, 19 bp, Homo sapiens
  siRNA target sequence for MYNN (NM_018657.2,552-570).
caacagacttgtcttctta

SEQ ID NO: 7281 - DNA, 19 bp, Homo sapiens
  siRNA target sequence for MYNN (NM_018657.2,567-585).
cttactctgcgagattata

SEQ ID NO: 7282 - DNA, 19 bp, Homo sapiens
  siRNA target sequence for MYNN (NM_018657.2,571-589).
ctctgcgagattataataa

SEQ ID NO: 7283 - DNA, 19 bp, Homo sapiens
  siRNA target sequence for MYNN (NM_018657.2,575-593).
gcgagattataataatcga

SEQ ID NO: 7284 - DNA, 19 bp, Homo sapiens
  siRNA target sequence for MYNN (NM_018657.2,642-660).
ggcgcgttagcgaaaaagt

SEQ ID NO: 7285 - DNA, 19 bp, Homo sapiens
  siRNA target sequence for MYNN (NM_018657.2,644-662).
cgcgttagcgaaaaagtca

SEQ ID NO: 7286 - DNA, 19 bp, Homo sapiens
  siRNA target sequence for MYNN (NM_018657.2,645-663).
gcgttagcgaaaaagtcat

SEQ ID NO: 7287 - DNA, 19 bp, Homo sapiens
  siRNA target sequence for MYNN (NM_018657.2,706-724).
cagggcagaataaaacagt

SEQ ID NO: 7288 - DNA, 19 bp, Homo sapiens
  siRNA target sequence for MYNN (NM_018657.2,733-751).
ccagtgacatcttagagaa

SEQ ID NO: 7289 - DNA, 19 bp, Homo sapiens
  siRNA target sequence for MYNN (NM_018657.2,734-752).
cagtgacatcttagagaat

SEQ ID NO: 7290 - DNA, 19 bp, Homo sapiens
  siRNA target sequence for MYNN (NM_018657.2,749-767).
gaatgcatctgttgaatta

SEQ ID NO: 7291 - DNA, 19 bp, Homo sapiens
  siRNA target sequence for MYNN (NM_018657.2,790-808).
ccacacctgtagtagaaca

SEQ ID NO: 7292 - DNA, 19 bp, Homo sapiens
  siRNA target sequence for MYNN (NM_018657.2,879-897).
gatattgtgcacactgtta

SEQ ID NO: 7293 - DNA, 19 bp, Homo sapiens
  siRNA target sequence for MYNN (NM_018657.2,941-959).
gaaagaacactctatgtct

SEQ ID NO: 7294 - DNA, 19 bp, Homo sapiens
  siRNA target sequence for MYNN (NM_018657.2,945-963).
gaacactctatgtctaata

SEQ ID NO: 7295 - DNA, 19 bp, Homo sapiens
  siRNA target sequence for MYNN (NM_018657.2,968-986).
cagcgtcaagagtccttat

SEQ ID NO: 7296 - DNA, 19 bp, Homo sapiens
  siRNA target sequence for MYNN (NM_018657.2,970-988).
gcgtcaagagtccttatga

SEQ ID NO: 7297 - DNA, 19 bp, Homo sapiens
  siRNA target sequence for MYNN (NM_018657.2,1008-1026).
gagctggatcagaggtatt

SEQ ID NO: 7298 - DNA, 19 bp, Homo sapiens
  siRNA target sequence for MYNN (NM_018657.2,1028-1046).
caaggccaagccaatgtgt

SEQ ID NO: 7299 - DNA, 19 bp, Homo sapiens
  siRNA target sequence for MYNN (NM_018657.2,1034-1052).
caagccaatgtgtaacaca

SEQ ID NO: 7300 - DNA, 19 bp, Homo sapiens
  siRNA target sequence for MYNN (NM_018657.2,1104-1122).
cataaaggagtcaaacctt

SEQ ID NO: 7301 - DNA, 19 bp, Homo sapiens
  siRNA target sequence for MYNN (NM_018657.2,1119-1137).
ccttacgtctgccacttat

SEQ ID NO: 7302 - DNA, 19 bp, Homo sapiens
  siRNA target sequence for MYNN (NM_018657.2,1164-1182).
cagctgaaaacgcatgtaa

SEQ ID NO: 7303 - DNA, 19 bp, Homo sapiens
  siRNA target sequence for MYNN (NM_018657.2,1166-1184).
gctgaaaacgcatgtaaga

SEQ ID NO: 7304 - DNA, 19 bp, Homo sapiens
  siRNA target sequence for MYNN (NM_018657.2,1167-1185).
ctgaaaacgcatgtaagaa

SEQ ID NO: 7305 - DNA, 19 bp, Homo sapiens
  siRNA target sequence for MYNN (NM_018657.2,1323-1341).
gcaacttctagcaatctca

SEQ ID NO: 7306 - DNA, 19 bp, Homo sapiens
  siRNA target sequence for MYNN (NM_018657.2,1327-1345).
cttctagcaatctcaagat

SEQ ID NO: 7307 - DNA, 19 bp, Homo sapiens
  siRNA target sequence for MYNN (NM_018657.2,1330-1348).
ctagcaatctcaagattca

SEQ ID NO: 7308 - DNA, 19 bp, Homo sapiens
  siRNA target sequence for MYNN (NM_018657.2,1415-1433).
cagcacactgacctatcat

SEQ ID NO: 7309 - DNA, 19 bp, Homo sapiens
  siRNA target sequence for MYNN (NM_018657.2,1494-1512).
gtctctagttctcttatca

SEQ ID NO: 7310 - DNA, 19 bp, Homo sapiens
  siRNA target sequence for MYNN (NM_018657.2,1496-1514).
ctctagttctcttatcact

SEQ ID NO: 7311 - DNA, 19 bp, Homo sapiens
  siRNA target sequence for MYNN (NM_018657.2,1580-1598).
ctcaggagagctcaacaaa

SEQ ID NO: 7312 - DNA, 19 bp, Homo sapiens
  siRNA target sequence for MYNN (NM_018657.2,1626-1644).
ccatttatctgcgaattat

SEQ ID NO: 7313 - DNA, 19 bp, Homo sapiens
  siRNA target sequence for MYNN (NM_018657.2,1727-1745).
cagtgcagaggatcatact

SEQ ID NO: 7314 - DNA, 19 bp, Homo sapiens
  siRNA target sequence for MYNN (NM_018657.2,1731-1749).
gcagaggatcatactttga

SEQ ID NO: 7315 - DNA, 19 bp, Homo sapiens
  siRNA target sequence for MYNN (NM_018657.2,1774-1792).
gtcctttatcagaaactat

SEQ ID NO: 7316 - DNA, 19 bp, Homo sapiens
  siRNA target sequence for MYNN (NM_018657.2,1797-1815).
gtgaagccttctgatatga

SEQ ID NO: 7317 - DNA, 19 bp, Homo sapiens
  siRNA target sequence for MYNN (NM_018657.2,1799-1817).
gaagccttctgatatgact

SEQ ID NO: 7318 - DNA, 19 bp, Homo sapiens
  siRNA target sequence for MYNN (NM_018657.2,1802-1820).
gccttctgatatgacttta

SEQ ID NO: 7319 - DNA, 19 bp, Homo sapiens
  siRNA target sequence for MYNN (NM_018657.2,1807-1825).
ctgatatgactttaccatt

SEQ ID NO: 7320 - DNA, 19 bp, Homo sapiens
  siRNA target sequence for MYNN (NM_018657.2,1840-1858).
ggactgaggaccatcacat

SEQ ID NO: 7321 - DNA, 19 bp, Homo sapiens
  siRNA target sequence for MYNN (NM_018657.2,1881-1899).
cagtctcctacatcagata

SEQ ID NO: 7322 - DNA, 19 bp, Homo sapiens
  siRNA target sequence for MYNN (NM_018657.2,1887-1905).
cctacatcagatacattgt

SEQ ID NO: 7323 - DNA, 19 bp, Homo sapiens
  siRNA target sequence for MYNN (NM_018657.2,1932-1950).
gaaccacagttgatttttt

SEQ ID NO: 7324 - DNA, 19 bp, Homo sapiens
  siRNA target sequence for MYOG (NM_002479.2,88-106).
ggaaccccgcttctatgat

SEQ ID NO: 7325 - DNA, 19 bp, Homo sapiens
  siRNA target sequence for MYOG (NM_002479.2,255-273).
gggcgtgtaaggtgtgtaa

SEQ ID NO: 7326 - DNA, 19 bp, Homo sapiens
  siRNA target sequence for MYOG (NM_002479.2,420-438).
gcagtgccatccagtacat

SEQ ID NO: 7327 - DNA, 19 bp, Homo sapiens
  siRNA target sequence for MYST2 (NM_007067.3,172-190).
gaagattccgatttttcta

SEQ ID NO: 7328 - DNA, 19 bp, Homo sapiens
  siRNA target sequence for MYST2 (NM_007067.3,293-311).
ccagtcctgttcgaaatct

SEQ ID NO: 7329 - DNA, 19 bp, Homo sapiens
  siRNA target sequence for MYST2 (NM_007067.3,382-400).
ccagtgacaccgaaaaaat

SEQ ID NO: 7330 - DNA, 19 bp, Homo sapiens
  siRNA target sequence for MYST2 (NM_007067.3,422-440).
catctggttcagaaactga

SEQ ID NO: 7331 - DNA, 19 bp, Homo sapiens
  siRNA target sequence for MYST2 (NM_007067.3,533-551).
ctgagtctgacatagacat

SEQ ID NO: 7332 - DNA, 19 bp, Homo sapiens
  siRNA target sequence for MYST2 (NM_007067.3,554-572).
ccagccccaatgtatctca

SEQ ID NO: 7333 - DNA, 19 bp, Homo sapiens
  siRNA target sequence for MYST2 (NM_007067.3,640-658).
cgccgtcgcttccatgaaa

SEQ ID NO: 7334 - DNA, 19 bp, Homo sapiens
  siRNA target sequence for MYST2 (NM_007067.3,644-662).
gtcgcttccatgaaagcta

SEQ ID NO: 7335 - DNA, 19 bp, Homo sapiens
  siRNA target sequence for MYST2 (NM_007067.3,655-673).
gaaagctacaacttcaata

SEQ ID NO: 7336 - DNA, 19 bp, Homo sapiens
  siRNA target sequence for MYST2 (NM_007067.3,682-700).
cctacaccaggctgtaact

SEQ ID NO: 7337 - DNA, 19 bp, Homo sapiens
  siRNA target sequence for MYST2 (NM_007067.3,707-725).
gacaccttacaggaaaaca

SEQ ID NO: 7338 - DNA, 19 bp, Homo sapiens
  siRNA target sequence for MYST2 (NM_007067.3,746-764).
caggatgcccactgtatca

SEQ ID NO: 7339 - DNA, 19 bp, Homo sapiens
  siRNA target sequence for MYST2 (NM_007067.3,748-766).
ggatgcccactgtatcata

SEQ ID NO: 7340 - DNA, 19 bp, Homo sapiens
  siRNA target sequence for MYST2 (NM_007067.3,749-767).
gatgcccactgtatcataa

SEQ ID NO: 7341 - DNA, 19 bp, Homo sapiens
  siRNA target sequence for MYST2 (NM_007067.3,752-770).
gcccactgtatcataacct

SEQ ID NO: 7342 - DNA, 19 bp, Homo sapiens
  siRNA target sequence for MYST2 (NM_007067.3,803-821).
gccgggataagcagataga

SEQ ID NO: 7343 - DNA, 19 bp, Homo sapiens
  siRNA target sequence for MYST2 (NM_007067.3,804-822).
ccgggataagcagatagaa

SEQ ID NO: 7344 - DNA, 19 bp, Homo sapiens
  siRNA target sequence for MYST2 (NM_007067.3,806-824).
gggataagcagatagaaga

SEQ ID NO: 7345 - DNA, 19 bp, Homo sapiens
  siRNA target sequence for MYST2 (NM_007067.3,895-913).
cagcttcgatataaggaaa

SEQ ID NO: 7346 - DNA, 19 bp, Homo sapiens
  siRNA target sequence for MYST2 (NM_007067.3,897-915).
gcttcgatataaggaaaaa

SEQ ID NO: 7347 - DNA, 19 bp, Homo sapiens
  siRNA target sequence for MYST2 (NM_007067.3,1710-1728).
ccgctacctgcataatttt

SEQ ID NO: 7348 - DNA, 19 bp, Homo sapiens
  siRNA target sequence for MYT1 (NM_004535.1,499-517).
ctccaggcaccgaagttta

SEQ ID NO: 7349 - DNA, 19 bp, Homo sapiens
  siRNA target sequence for MYT1 (NM_004535.1,659-677).
gtgaaggacgcctctgttt

SEQ ID NO: 7350 - DNA, 19 bp, Homo sapiens
  siRNA target sequence for MYT1 (NM_004535.1,668-686).
gcctctgtttcggatgaat

SEQ ID NO: 7351 - DNA, 19 bp, Homo sapiens
  siRNA target sequence for MYT1 (NM_004535.1,772-790).
cgtcaagtcccattttgga

SEQ ID NO: 7352 - DNA, 19 bp, Homo sapiens
  siRNA target sequence for MYT1 (NM_004535.1,773-791).
gtcaagtcccattttggat

SEQ ID NO: 7353 - DNA, 19 bp, Homo sapiens
  siRNA target sequence for MYT1 (NM_004535.1,868-886).
cctgaacttgggtcaaatt

SEQ ID NO: 7354 - DNA, 19 bp, Homo sapiens
  siRNA target sequence for MYT1 (NM_004535.1,981-999).
ccagcgaggagggtgaaaa

SEQ ID NO: 7355 - DNA, 19 bp, Homo sapiens
  siRNA target sequence for MYT1 (NM_004535.1,993-1011).
gtgaaaagggcctcttcat

SEQ ID NO: 7356 - DNA, 19 bp, Homo sapiens
  siRNA target sequence for MYT1 (NM_004535.1,1287-1305).
ctcctgatgtgatctttca

SEQ ID NO: 7357 - DNA, 19 bp, Homo sapiens
  siRNA target sequence for MYT1 (NM_004535.1,1625-1643).
gacactgtgcggaagagtt

SEQ ID NO: 7358 - DNA, 19 bp, Homo sapiens
  siRNA target sequence for MYT1 (NM_004535.1,1629-1647).
ctgtgcggaagagttacta

SEQ ID NO: 7359 - DNA, 19 bp, Homo sapiens
  siRNA target sequence for MYT1 (NM_004535.1,1631-1649).
gtgcggaagagttactaca

SEQ ID NO: 7360 - DNA, 19 bp, Homo sapiens
  siRNA target sequence for MYT1 (NM_004535.1,1639-1657).
gagttactacagtaaagat

SEQ ID NO: 7361 - DNA, 19 bp, Homo sapiens
  siRNA target sequence for MYT1 (NM_004535.1,1668-1686).
ctgagaagcgtgagatcaa

SEQ ID NO: 7362 - DNA, 19 bp, Homo sapiens
  siRNA target sequence for MYT1 (NM_004535.1,1670-1688).
gagaagcgtgagatcaagt

SEQ ID NO: 7363 - DNA, 19 bp, Homo sapiens
  siRNA target sequence for MYT1 (NM_004535.1,1761-1779).
gtccccacaaggataggat

SEQ ID NO: 7364 - DNA, 19 bp, Homo sapiens
  siRNA target sequence for MYT1 (NM_004535.1,1865-1883).
cgcaacacgcacagaagtt

SEQ ID NO: 7365 - DNA, 19 bp, Homo sapiens
  siRNA target sequence for MYT1 (NM_004535.1,1952-1970).
ggagatccttccaagagta

SEQ ID NO: 7366 - DNA, 19 bp, Homo sapiens
  siRNA target sequence for MYT1 (NM_004535.1,2017-2035).
gctcgaggtccctccatat

SEQ ID NO: 7367 - DNA, 19 bp, Homo sapiens
  siRNA target sequence for MYT1 (NM_004535.1,2115-2133).
cctttgactacgcaagttt

SEQ ID NO: 7368 - DNA, 19 bp, Homo sapiens
  siRNA target sequence for MYT1 (NM_004535.1,2130-2148).
gtttcgatgctcaggtttt

SEQ ID NO: 7369 - DNA, 19 bp, Homo sapiens
  siRNA target sequence for MYT1 (NM_004535.1,2157-2175).
gcatgcttgccccaaagat

SEQ ID NO: 7370 - DNA, 19 bp, Homo sapiens
  siRNA target sequence for MYT1 (NM_004535.1,2158-2176).
catgcttgccccaaagatt

SEQ ID NO: 7371 - DNA, 19 bp, Homo sapiens
  siRNA target sequence for MYT1 (NM_004535.1,2182-2200).
cagcgaaacctcacctaaa

SEQ ID NO: 7372 - DNA, 19 bp, Homo sapiens
  siRNA target sequence for MYT1 (NM_004535.1,2191-2209).
ctcacctaaagcctttcaa

SEQ ID NO: 7373 - DNA, 19 bp, Homo sapiens
  siRNA target sequence for MYT1 (NM_004535.1,2347-2365).
cgaggtagacgaaaatgga

SEQ ID NO: 7374 - DNA, 19 bp, Homo sapiens
  siRNA target sequence for MYT1 (NM_004535.1,2348-2366).
gaggtagacgaaaatggaa

SEQ ID NO: 7375 - DNA, 19 bp, Homo sapiens
  siRNA target sequence for MYT1 (NM_004535.1,2611-2629).
gccagcagcccattctttt

SEQ ID NO: 7376 - DNA, 19 bp, Homo sapiens
  siRNA target sequence for MYT1 (NM_004535.1,3069-3087).
gtcacatcagcgggaaata

SEQ ID NO: 7377 - DNA, 19 bp, Homo sapiens
  siRNA target sequence for MYT1 (NM_004535.1,3248-3266).
ctcacccaccggagtttgt

SEQ ID NO: 7378 - DNA, 19 bp, Homo sapiens
  siRNA target sequence for MYT1 (NM_004535.1,3250-3268).
cacccaccggagtttgtca

SEQ ID NO: 7379 - DNA, 19 bp, Homo sapiens
  siRNA target sequence for MYT1 (NM_004535.1,3282-3300).
caacctttgctggaaagaa

SEQ ID NO: 7380 - DNA, 19 bp, Homo sapiens
  siRNA target sequence for MYT1 (NM_004535.1,3593-3611).
ccgcacatggagccaatat

SEQ ID NO: 7381 - DNA, 19 bp, Homo sapiens
  siRNA target sequence for MYT1 (NM_004535.1,3604-3622).
gccaatatgcgaacagaat

SEQ ID NO: 7382 - DNA, 19 bp, Homo sapiens
  siRNA target sequence for MYT1 (NM_004535.1,3605-3623).
ccaatatgcgaacagaatt

SEQ ID NO: 7383 - DNA, 19 bp, Homo sapiens
  siRNA target sequence for MYT1 (NM_004535.1,3606-3624).
caatatgcgaacagaattt

SEQ ID NO: 7384 - DNA, 19 bp, Homo sapiens
  siRNA target sequence for MYT1 (NM_004535.1,3639-3657).
gcaccctcaccgacatgta

SEQ ID NO: 7385 - DNA, 19 bp, Homo sapiens
  siRNA target sequence for NEUROG1 (NM_006161.2,864-882).
cagccgcctccgaagactt

SEQ ID NO: 7386 - DNA, 19 bp, Homo sapiens
  siRNA target sequence for NEUROG1 (NM_006161.2,941-959).
cacacaacgccctgtttca

SEQ ID NO: 7387 - DNA, 19 bp, Homo sapiens
  siRNA target sequence for NEUROG1 (NM_006161.2,943-961).
cacaacgccctgtttcatt

SEQ ID NO: 7388 - DNA, 19 bp, Homo sapiens
  siRNA target sequence for NFAT5 (NM_006599.2,1213-1231).
cctcggacttcatctcatt

SEQ ID NO: 7389 - DNA, 19 bp, Homo sapiens
  siRNA target sequence for NFAT5 (NM_006599.2,1274-1292).
ctcgcgagaatctgtctat

SEQ ID NO: 7390 - DNA, 19 bp, Homo sapiens
  siRNA target sequence for NFAT5 (NM_006599.2,1276-1294).
cgcgagaatctgtctatga

SEQ ID NO: 7391 - DNA, 19 bp, Homo sapiens
  siRNA target sequence for NFAT5 (NM_006599.2,1301-1319).
cccaaaggagttacagtta

SEQ ID NO: 7392 - DNA, 19 bp, Homo sapiens
  siRNA target sequence for NFAT5 (NM_006599.2,1316-1334).
gttacctccatctagagaa

SEQ ID NO: 7393 - DNA, 19 bp, Homo sapiens
  siRNA target sequence for NFAT5 (NM_006599.2,1502-1520).
cgacagcaaggctatgcaa

SEQ ID NO: 7394 - DNA, 19 bp, Homo sapiens
  siRNA target sequence for NFAT5 (NM_006599.2,1537-1555).
cagccgtgggggtaagtaa

SEQ ID NO: 7395 - DNA, 19 bp, Homo sapiens
  siRNA target sequence for NFAT5 (NM_006599.2,1539-1557).
gccgtgggggtaagtaaca

SEQ ID NO: 7396 - DNA, 19 bp, Homo sapiens
  siRNA target sequence for NFAT5 (NM_006599.2,1541-1559).
cgtgggggtaagtaacaga

SEQ ID NO: 7397 - DNA, 19 bp, Homo sapiens
  siRNA target sequence for NFAT5 (NM_006599.2,1552-1570).
gtaacagaggggtaagtga

SEQ ID NO: 7398 - DNA, 19 bp, Homo sapiens
  siRNA target sequence for NFAT5 (NM_006599.2,1558-1576).
gaggggtaagtgaaaagca

SEQ ID NO: 7399 - DNA, 19 bp, Homo sapiens
  siRNA target sequence for NFAT5 (NM_006599.2,1623-1641).
cacacagtcttgtacatct

SEQ ID NO: 7400 - DNA, 19 bp, Homo sapiens
  siRNA target sequence for NFAT5 (NM_006599.2,1655-1673).
ggacttgctggataacagt

SEQ ID NO: 7401 - DNA, 19 bp, Homo sapiens
  siRNA target sequence for NFAT5 (NM_006599.2,1692-1710).
gaggggtgtggattggaat

SEQ ID NO: 7402 - DNA, 19 bp, Homo sapiens
  siRNA target sequence for NFAT5 (NM_006599.2,1713-1731).
gagcagagctgcagtatgt

SEQ ID NO: 7403 - DNA, 19 bp, Homo sapiens
  siRNA target sequence for NFAT5 (NM_006599.2,1740-1758).
gattccccctccaacttca

SEQ ID NO: 7404 - DNA, 19 bp, Homo sapiens
  siRNA target sequence for NFAT5 (NM_006599.2,1746-1764).
ccctccaacttcagtaaca

SEQ ID NO: 7405 - DNA, 19 bp, Homo sapiens
  siRNA target sequence for NFAT5 (NM_006599.2,1747-1765).
cctccaacttcagtaacat

SEQ ID NO: 7406 - DNA, 19 bp, Homo sapiens
  siRNA target sequence for NFAT5 (NM_006599.2,1766-1784).
gagcaccagttcctacaat

SEQ ID NO: 7407 - DNA, 19 bp, Homo sapiens
  siRNA target sequence for NFAT5 (NM_006599.2,1768-1786).
gcaccagttcctacaatga

SEQ ID NO: 7408 - DNA, 19 bp, Homo sapiens
  siRNA target sequence for NFAT5 (NM_006599.2,1771-1789).
ccagttcctacaatgataa

SEQ ID NO: 7409 - DNA, 19 bp, Homo sapiens
  siRNA target sequence for NFAT5 (NM_006599.2,1790-1808).
cactgaggtacctcgtaaa

SEQ ID NO: 7410 - DNA, 19 bp, Homo sapiens
  siRNA target sequence for NFAT5 (NM_006599.2,1803-1821).
cgtaaatcacgaaaacgaa

SEQ ID NO: 7411 - DNA, 19 bp, Homo sapiens
  siRNA target sequence for NFAT5 (NM_006599.2,1804-1822).
gtaaatcacgaaaacgaaa

SEQ ID NO: 7412 - DNA, 19 bp, Homo sapiens
  siRNA target sequence for NFAT5 (NM_006599.2,1810-1828).
cacgaaaacgaaatccaaa

SEQ ID NO: 7413 - DNA, 19 bp, Homo sapiens
  siRNA target sequence for NFAT5 (NM_006599.2,1841-1859).
ggtcaaacgacgagattgt

SEQ ID NO: 7414 - DNA, 19 bp, Homo sapiens
  siRNA target sequence for NFAT5 (NM_006599.2,1844-1862).
caaacgacgagattgtgaa

SEQ ID NO: 7415 - DNA, 19 bp, Homo sapiens
  siRNA target sequence for NFAT5 (NM_006599.2,1897-1915).
ccaaagcacctcactatgt

SEQ ID NO: 7416 - DNA, 19 bp, Homo sapiens
  siRNA target sequence for NFAT5 (NM_006599.2,1925-1943).
gcttaccacggacaacaaa

SEQ ID NO: 7417 - DNA, 19 bp, Homo sapiens
  siRNA target sequence for NFAT5 (NM_006599.2,1949-1967).
ctcaaaagcgggaaatgga

SEQ ID NO: 7418 - DNA, 19 bp, Homo sapiens
  siRNA target sequence for NFAT5 (NM_006599.2,2008-2026).
ctatgttgtgtggacaata

SEQ ID NO: 7419 - DNA, 19 bp, Homo sapiens
  siRNA target sequence for NFAT5 (NM_006599.2,2017-2035).
gtggacaatatcctgttaa

SEQ ID NO: 7420 - DNA, 19 bp, Homo sapiens
  siRNA target sequence for NFAT5 (NM_006599.2,2110-2128).
gccgtggctcagtgaaaga

SEQ ID NO: 7421 - DNA, 19 bp, Homo sapiens
  siRNA target sequence for NFAT5 (NM_006599.2,2111-2129).
ccgtggctcagtgaaagat

SEQ ID NO: 7422 - DNA, 19 bp, Homo sapiens
  siRNA target sequence for NFAT5 (NM_006599.2,2112-2130).
cgtggctcagtgaaagata

SEQ ID NO: 7423 - DNA, 19 bp, Homo sapiens
  siRNA target sequence for NFAT5 (NM_006599.2,2115-2133).
ggctcagtgaaagatagaa

SEQ ID NO: 7424 - DNA, 19 bp, Homo sapiens
  siRNA target sequence for NFAT5 (NM_006599.2,2117-2135).
ctcagtgaaagatagaaca

SEQ ID NO: 7425 - DNA, 19 bp, Homo sapiens
  siRNA target sequence for NFAT5 (NM_006599.2,2179-2197).
ctgtagtgttgcaagtgtt

SEQ ID NO: 7426 - DNA, 19 bp, Homo sapiens
  siRNA target sequence for NFAT5 (NM_006599.2,2207-2225).
cgactctggacgagtgaaa

SEQ ID NO: 7427 - DNA, 19 bp, Homo sapiens
  siRNA target sequence for NFAT5 (NM_006599.2,2249-2267).
cagagtaactggacgaaat

SEQ ID NO: 7428 - DNA, 19 bp, Homo sapiens
  siRNA target sequence for NFAT5 (NM_006599.2,2291-2309).
cattgaaggcactactgtt

SEQ ID NO: 7429 - DNA, 19 bp, Homo sapiens
  siRNA target sequence for NFAT5 (NM_006599.2,2299-2317).
gcactactgttatagaagt

SEQ ID NO: 7430 - DNA, 19 bp, Homo sapiens
  siRNA target sequence for NFAT5 (NM_006599.2,2322-2340).
cttgatcctagcaacaaca

SEQ ID NO: 7431 - DNA, 19 bp, Homo sapiens
  siRNA target sequence for NFAT5 (NM_006599.2,2325-2343).
gatcctagcaacaacatga

SEQ ID NO: 7432 - DNA, 19 bp, Homo sapiens
  siRNA target sequence for NFAT5 (NM_006599.2,2355-2373).
gactgcgtagggatattga

SEQ ID NO: 7433 - DNA, 19 bp, Homo sapiens
  siRNA target sequence for NFAT5 (NM_006599.2,2359-2377).
gcgtagggatattgaaatt

SEQ ID NO: 7434 - DNA, 19 bp, Homo sapiens
  siRNA target sequence for NFAT5 (NM_006599.2,2391-2409).
gtcgaagccagaataggaa

SEQ ID NO: 7435 - DNA, 19 bp, Homo sapiens
  siRNA target sequence for NFAT5 (NM_006599.2,2393-2411).
cgaagccagaataggaatt

SEQ ID NO: 7436 - DNA, 19 bp, Homo sapiens
  siRNA target sequence for NFAT5 (NM_006599.2,2432-2450).
cactcgtgccagattggtt

SEQ ID NO: 7437 - DNA, 19 bp, Homo sapiens
  siRNA target sequence for NFAT5 (NM_006599.2,2434-2452).
ctcgtgccagattggtttt

SEQ ID NO: 7438 - DNA, 19 bp, Homo sapiens
  siRNA target sequence for NFAT5 (NM_006599.2,2443-2461).
gattggtttttcgagttaa

SEQ ID NO: 7439 - DNA, 19 bp, Homo sapiens
  siRNA target sequence for NFAT5 (NM_006599.2,2448-2466).
gtttttcgagttaatatca

SEQ ID NO: 7440 - DNA, 19 bp, Homo sapiens
  siRNA target sequence for NFAT5 (NM_006599.2,2532-2550).
gcaggagtgccagaaatct

SEQ ID NO: 7441 - DNA, 19 bp, Homo sapiens
  siRNA target sequence for NFAT5 (NM_006599.2,2533-2551).
caggagtgccagaaatctt

SEQ ID NO: 7442 - DNA, 19 bp, Homo sapiens
  siRNA target sequence for NFAT5 (NM_006599.2,2535-2553).
ggagtgccagaaatcttaa

SEQ ID NO: 7443 - DNA, 19 bp, Homo sapiens
  siRNA target sequence for NFAT5 (NM_006599.2,2536-2554).
gagtgccagaaatcttaaa

SEQ ID NO: 7444 - DNA, 19 bp, Homo sapiens
  siRNA target sequence for NFAT5 (NM_006599.2,2685-2703).
gaaattgatatggaactat

SEQ ID NO: 7445 - DNA, 19 bp, Homo sapiens
  siRNA target sequence for NFAT5 (NM_006599.2,2696-2714).
ggaactatttcatcagaat

SEQ ID NO: 7446 - DNA, 19 bp, Homo sapiens
  siRNA target sequence for NFAT5 (NM_006599.2,2737-2755).
cctatcatgaccaacatat

SEQ ID NO: 7447 - DNA, 19 bp, Homo sapiens
  siRNA target sequence for NFAT5 (NM_006599.2,2738-2756).
ctatcatgaccaacatata

SEQ ID NO: 7448 - DNA, 19 bp, Homo sapiens
  siRNA target sequence for NFAT5 (NM_006599.2,2742-2760).
catgaccaacatataactt

SEQ ID NO: 7449 - DNA, 19 bp, Homo sapiens
  siRNA target sequence for NFAT5 (NM_006599.2,2763-2781).
cctgtgtcagtgggaatat

SEQ ID NO: 7450 - DNA, 19 bp, Homo sapiens
  siRNA target sequence for NFAT5 (NM_006599.2,2764-2782).
ctgtgtcagtgggaatata

SEQ ID NO: 7451 - DNA, 19 bp, Homo sapiens
  siRNA target sequence for NFAT5 (NM_006599.2,2776-2794).
gaatatatgtagtgacaaa

SEQ ID NO: 7452 - DNA, 19 bp, Homo sapiens
  siRNA target sequence for NFAT5 (NM_006599.2,2806-2824).
ctcatgatgttcaaccatt

SEQ ID NO: 7453 - DNA, 19 bp, Homo sapiens
  siRNA target sequence for NFAT5 (NM_006599.2,2811-2829).
gatgttcaaccattcactt

SEQ ID NO: 7454 - DNA, 19 bp, Homo sapiens
  siRNA target sequence for NFAT5 (NM_006599.2,2919-2937).
gccatgaaagcaatgaaaa

SEQ ID NO: 7455 - DNA, 19 bp, Homo sapiens
  siRNA target sequence for NFAT5 (NM_006599.2,2933-2951).
gaaaactactggatgtaat

SEQ ID NO: 7456 - DNA, 19 bp, Homo sapiens
  siRNA target sequence for NFAT5 (NM_006599.2,2981-2999).
cctgatgactccactcata

SEQ ID NO: 7457 - DNA, 19 bp, Homo sapiens
  siRNA target sequence for NFAT5 (NM_006599.2,2994-3012).
ctcataccaagcagtatga

SEQ ID NO: 7458 - DNA, 19 bp, Homo sapiens
  siRNA target sequence for NFAT5 (NM_006599.2,3000-3018).
ccaagcagtatgattaaga

SEQ ID NO: 7459 - DNA, 19 bp, Homo sapiens
  siRNA target sequence for NFAT5 (NM_006599.2,3027-3045).
gttactccaatggaagtaa

SEQ ID NO: 7460 - DNA, 19 bp, Homo sapiens
  siRNA target sequence for NFAT5 (NM_006599.2,3227-3245).
gaccctgacaactattcaa

SEQ ID NO: 7461 - DNA, 19 bp, Homo sapiens
  siRNA target sequence for NFAT5 (NM_006599.2,3257-3275).
ctcacagcctggtactttt

SEQ ID NO: 7462 - DNA, 19 bp, Homo sapiens
  siRNA target sequence for NFAT5 (NM_006599.2,3304-3322).
ccaacagcgatgcactatt

SEQ ID NO: 7463 - DNA, 19 bp, Homo sapiens
  siRNA target sequence for NFAT5 (NM_006599.2,3327-3345).
caggctacacagtttcaga

SEQ ID NO: 7464 - DNA, 19 bp, Homo sapiens
  siRNA target sequence for NFAT5 (NM_006599.2,3338-3356).
gtttcagacaagagaaact

SEQ ID NO: 7465 - DNA, 19 bp, Homo sapiens
  siRNA target sequence for NFAT5 (NM_006599.2,3384-3402).
ggtacagtggttaatttgt

SEQ ID NO: 7466 - DNA, 19 bp, Homo sapiens
  siRNA target sequence for NFAT5 (NM_006599.2,3468-3486).
cagcagcagatttcatcaa

SEQ ID NO: 7467 - DNA, 19 bp, Homo sapiens
  siRNA target sequence for NFAT5 (NM_006599.2,3470-3488).
gcagcagatttcatcaaat

SEQ ID NO: 7468 - DNA, 19 bp, Homo sapiens
  siRNA target sequence for NFAT5 (NM_006599.2,3514-3532).
gtcagcttcagaatactat

SEQ ID NO: 7469 - DNA, 19 bp, Homo sapiens
  siRNA target sequence for NFAT5 (NM_006599.2,3594-3612).
gacttggtccaacaagttt

SEQ ID NO: 7470 - DNA, 19 bp, Homo sapiens
  siRNA target sequence for NFAT5 (NM_006599.2,3596-3614).
cttggtccaacaagtttta

SEQ ID NO: 7471 - DNA, 19 bp, Homo sapiens
  siRNA target sequence for NFAT5 (NM_006599.2,3680-3698).
gcagcttagtgcagatatt

SEQ ID NO: 7472 - DNA, 19 bp, Homo sapiens
  siRNA target sequence for NFAT5 (NM_006599.2,3823-3841).
ctgaaaacacgttatctaa

SEQ ID NO: 7473 - DNA, 19 bp, Homo sapiens
  siRNA target sequence for NFAT5 (NM_006599.2,3867-3885).
cagcaagtgatggaatctt

SEQ ID NO: 7474 - DNA, 19 bp, Homo sapiens
  siRNA target sequence for NFAT5 (NM_006599.2,3903-3921).
gagatgcaacagagtatct

SEQ ID NO: 7475 - DNA, 19 bp, Homo sapiens
  siRNA target sequence for NFAT5 (NM_006599.2,4025-4043).
gagtgcattgtctaccaat

SEQ ID NO: 7476 - DNA, 19 bp, Homo sapiens
  siRNA target sequence for NFAT5 (NM_006599.2,4136-4154).
ccctggcactaccatgttt

SEQ ID NO: 7477 - DNA, 19 bp, Homo sapiens
  siRNA target sequence for NFAT5 (NM_006599.2,4140-4158).
ggcactaccatgtttcaga

SEQ ID NO: 7478 - DNA, 19 bp, Homo sapiens
  siRNA target sequence for NFAT5 (NM_006599.2,4148-4166).
catgtttcagacatcaagt

SEQ ID NO: 7479 - DNA, 19 bp, Homo sapiens
  siRNA target sequence for NFAT5 (NM_006599.2,4151-4169).
gtttcagacatcaagttca

SEQ ID NO: 7480 - DNA, 19 bp, Homo sapiens
  siRNA target sequence for NFAT5 (NM_006599.2,4188-4206).
ggaacacaagcaaaacaga

SEQ ID NO: 7481 - DNA, 19 bp, Homo sapiens
  siRNA target sequence for NFAT5 (NM_006599.2,4232-4250).
ggtccaaatgcaacatagt

SEQ ID NO: 7482 - DNA, 19 bp, Homo sapiens
  siRNA target sequence for NFAT5 (NM_006599.2,4254-4272).
gacaatcaacctcaagtta

SEQ ID NO: 7483 - DNA, 19 bp, Homo sapiens
  siRNA target sequence for NFAT5 (NM_006599.2,4282-4300).
catccacaaaaagtatgat

SEQ ID NO: 7484 - DNA, 19 bp, Homo sapiens
  siRNA target sequence for NFAT5 (NM_006599.2,4298-4316).
gatgagtgttcagaatagt

SEQ ID NO: 7485 - DNA, 19 bp, Homo sapiens
  siRNA target sequence for NFAT5 (NM_006599.2,4318-4336).
gtacccaacaacaaggtaa

SEQ ID NO: 7486 - DNA, 19 bp, Homo sapiens
  siRNA target sequence for NFAT5 (NM_006599.2,4322-4340).
ccaacaacaaggtaatggt

SEQ ID NO: 7487 - DNA, 19 bp, Homo sapiens
  siRNA target sequence for NFAT5 (NM_006599.2,4326-4344).
caacaaggtaatggtttat

SEQ ID NO: 7488 - DNA, 19 bp, Homo sapiens
  siRNA target sequence for NFAT5 (NM_006599.2,4404-4422).
cattcacaggcccaacttt

SEQ ID NO: 7489 - DNA, 19 bp, Homo sapiens
  siRNA target sequence for NFAT5 (NM_006599.2,4484-4502).
ctttcatagtccaaatcct

SEQ ID NO: 7490 - DNA, 19 bp, Homo sapiens
  siRNA target sequence for NFAT5 (NM_006599.2,4528-4546).
cctcctctgaacaaatgca

SEQ ID NO: 7491 - DNA, 19 bp, Homo sapiens
  siRNA target sequence for NFAT5 (NM_006599.2,4570-4588).
gtaccattgctgtgttaca

SEQ ID NO: 7492 - DNA, 19 bp, Homo sapiens
  siRNA target sequence for NFAT5 (NM_006599.2,4583-4601).
gttacagggctcttcagtt

SEQ ID NO: 7493 - DNA, 19 bp, Homo sapiens
  siRNA target sequence for NFAT5 (NM_006599.2,4611-4629).
cagcagtcaaccaacatat

SEQ ID NO: 7494 - DNA, 19 bp, Homo sapiens
  siRNA target sequence for NFAT5 (NM_006599.2,4640-4658).
gagtcccatgaataatctt

SEQ ID NO: 7495 - DNA, 19 bp, Homo sapiens
  siRNA target sequence for NFAT5 (NM_006599.2,4676-4694).
ccaagaagcattttttgca

SEQ ID NO: 7496 - DNA, 19 bp, Homo sapiens
  siRNA target sequence for NFAT5 (NM_006599.2,4726-4744).
catcaaacagtgaacaaca

SEQ ID NO: 7497 - DNA, 19 bp, Homo sapiens
  siRNA target sequence for NFAT5 (NM_006599.2,4778-4796).
catccagactcctatgctt

SEQ ID NO: 7498 - DNA, 19 bp, Homo sapiens
  siRNA target sequence for NFAT5 (NM_006599.2,4789-4807).
ctatgctttcccaagaaca

SEQ ID NO: 7499 - DNA, 19 bp, Homo sapiens
  siRNA target sequence for NFAT5 (NM_006599.2,4819-4837).
cgcagcagggtttatttca

SEQ ID NO: 7500 - DNA, 19 bp, Homo sapiens
  siRNA target sequence for NFAT5 (NM_006599.2,4853-4871).
gggctcccttccacctaat

SEQ ID NO: 7501 - DNA, 19 bp, Homo sapiens
  siRNA target sequence for NFAT5 (NM_006599.2,4907-4925).
gtcacagcactcaatagtt

SEQ ID NO: 7502 - DNA, 19 bp, Homo sapiens
  siRNA target sequence for NFAT5 (NM_006599.2,5061-5079).
ccaccaccaaacatgatat

SEQ ID NO: 7503 - DNA, 19 bp, Homo sapiens
  siRNA target sequence for NFAT5 (NM_006599.2,5062-5080).
caccaccaaacatgatatt

SEQ ID NO: 7504 - DNA, 19 bp, Homo sapiens
  siRNA target sequence for NFAT5 (NM_006599.2,5075-5093).
gatattcaacccaaatcaa

SEQ ID NO: 7505 - DNA, 19 bp, Homo sapiens
  siRNA target sequence for NFAT5 (NM_006599.2,5104-5122).
ctaatcaggagcaacagaa

SEQ ID NO: 7506 - DNA, 19 bp, Homo sapiens
  siRNA target sequence for NFAT5 (NM_006599.2,5190-5208).
cagagtcagtccacagttt

SEQ ID NO: 7507 - DNA, 19 bp, Homo sapiens
  siRNA target sequence for NFAT5 (NM_006599.2,5229-5247).
cctacccagtcggaatcat

SEQ ID NO: 7508 - DNA, 19 bp, Homo sapiens
  siRNA target sequence for NFAT5 (NM_006599.2,5250-5268).
cagacccccttgttccata

SEQ ID NO: 7509 - DNA, 19 bp, Homo sapiens
  siRNA target sequence for NFAT5 (NM_006599.2,5264-5282).
ccatagctctcctcagatt

SEQ ID NO: 7510 - DNA, 19 bp, Homo sapiens
  siRNA target sequence for NFAT5 (NM_006599.2,5357-5375).
cttgcagaccagtataaat

SEQ ID NO: 7511 - DNA, 19 bp, Homo sapiens
  siRNA target sequence for NFAT5 (NM_006599.2,5414-5432).
gaacaacatgcctggaatt

SEQ ID NO: 7512 - DNA, 19 bp, Homo sapiens
  siRNA target sequence for NFAT5 (NM_006599.2,5458-5476).
cacaggctactttatttca

SEQ ID NO: 7513 - DNA, 19 bp, Homo sapiens
  siRNA target sequence for NFAT5 (NM_006599.2,5460-5478).
caggctactttatttcaca

SEQ ID NO: 7514 - DNA, 19 bp, Homo sapiens
  siRNA target sequence for NFAT5 (NM_006599.2,5532-5550).
cagacatcaggaatgttct

SEQ ID NO: 7515 - DNA, 19 bp, Homo sapiens
  siRNA target sequence for NFAT5 (NM_006599.2,5587-5605).
cctctggaccagctacatt

SEQ ID NO: 7516 - DNA, 19 bp, Homo sapiens
  siRNA target sequence for NFAT5 (NM_006599.2,5602-5620).
cattgcctgatcagttgat

SEQ ID NO: 7517 - DNA, 19 bp, Homo sapiens
  siRNA target sequence for NFAT5 (NM_006599.2,5706-5724).
ccactggcatcctctataa

SEQ ID NO: 7518 - DNA, 19 bp, Homo sapiens
  siRNA target sequence for NFAT5 (NM_006599.2,5707-5725).
cactggcatcctctataaa

SEQ ID NO: 7519 - DNA, 19 bp, Homo sapiens
  siRNA target sequence for NFAT5 (NM_006599.2,5728-5746).
ccaaccagaacatcgaaaa

SEQ ID NO: 7520 - DNA, 19 bp, Homo sapiens
  siRNA target sequence for NFAT5 (NM_006599.2,5732-5750).
ccagaacatcgaaaagatt

SEQ ID NO: 7521 - DNA, 19 bp, Homo sapiens
  siRNA target sequence for NFATC1 (NM_006162.3,569-587).
cagcggaggaagaacacta

SEQ ID NO: 7522 - DNA, 19 bp, Homo sapiens
  siRNA target sequence for NFATC1 (NM_006162.3,805-823).
cctcgcatcgagataacct

SEQ ID NO: 7523 - DNA, 19 bp, Homo sapiens
  siRNA target sequence for NFATC1 (NM_006162.3,833-851).
gcctgtaccacaacaataa

SEQ ID NO: 7524 - DNA, 19 bp, Homo sapiens
  siRNA target sequence for NFATC1 (NM_006162.3,1231-1249).
gcgtccccttgcaacaaga

SEQ ID NO: 7525 - DNA, 19 bp, Homo sapiens
  siRNA target sequence for NFATC1 (NM_006162.3,1869-1887).
gatgctgcagcttttcatt

SEQ ID NO: 7526 - DNA, 19 bp, Homo sapiens
  siRNA target sequence for NFATC1 (NM_006162.3,2051-2069).
gtgccggaatcctgaaact

SEQ ID NO: 7527 - DNA, 19 bp, Homo sapiens
  siRNA target sequence for NFATC1 (NM_006162.3,2194-2212).
gcctccaaccccatcgaat

SEQ ID NO: 7528 - DNA, 19 bp, Homo sapiens
  siRNA target sequence for NFATC1 (NM_006162.3,2320-2338).
caggactccaaggtcattt

SEQ ID NO: 7529 - DNA, 19 bp, Homo sapiens
  siRNA target sequence for NFATC1 (NM_006162.3,2373-2391).
ggagatggaagcgaaaact

SEQ ID NO: 7530 - DNA, 19 bp, Homo sapiens
  siRNA target sequence for NFATC1 (NM_006162.3,2400-2418).
cctgtgcaagccgaattct

SEQ ID NO: 7531 - DNA, 19 bp, Homo sapiens
  siRNA target sequence for NFATC1 (NM_006162.3,2434-2452).
ccgccatttcggaatcaga

SEQ ID NO: 7532 - DNA, 19 bp, Homo sapiens
  siRNA target sequence for NFATC1 (NM_006162.3,2443-2461).
cggaatcagaggataacca

SEQ ID NO: 7533 - DNA, 19 bp, Homo sapiens
  siRNA target sequence for NFATC1 (NM_006162.3,2464-2482).
cccgttcacgtcagtttct

SEQ ID NO: 7534 - DNA, 19 bp, Homo sapiens
  siRNA target sequence for NFATC1 (NM_006162.3,2465-2483).
ccgttcacgtcagtttcta

SEQ ID NO: 7535 - DNA, 19 bp, Homo sapiens
  siRNA target sequence for NFATC1 (NM_006162.3,2485-2503).
gtctgcaacgggaagagaa

SEQ ID NO: 7536 - DNA, 19 bp, Homo sapiens
  siRNA target sequence for NFATC1 (NM_006162.3,2537-2555).
ccgccaacgttccaattat

SEQ ID NO: 7537 - DNA, 19 bp, Homo sapiens
  siRNA target sequence for NFATC1 (NM_006162.3,2538-2556).
cgccaacgttccaattata

SEQ ID NO: 7538 - DNA, 19 bp, Homo sapiens
  siRNA target sequence for NFATC1 (NM_006162.3,2539-2557).
gccaacgttccaattataa

SEQ ID NO: 7539 - DNA, 19 bp, Homo sapiens
  siRNA target sequence for NFATC1 (NM_006162.3,2540-2558).
ccaacgttccaattataaa

SEQ ID NO: 7540 - DNA, 19 bp, Homo sapiens
  siRNA target sequence for NFATC1 (NM_006162.3,2541-2559).
caacgttccaattataaaa

SEQ ID NO: 7541 - DNA, 19 bp, Homo sapiens
  siRNA target sequence for NFATC1 (NM_006162.3,2561-2579).
cagaacccactgatgatta

SEQ ID NO: 7542 - DNA, 19 bp, Homo sapiens
  siRNA target sequence for NFATC1 (NM_006162.3,2604-2622).
ggtgagccaggggttaagt

SEQ ID NO: 7543 - DNA, 19 bp, Homo sapiens
  siRNA target sequence for NFATC1 (NM_006162.3,2624-2642).
ctctcccaagaccatacta

SEQ ID NO: 7544 - DNA, 19 bp, Homo sapiens
  siRNA target sequence for NFATC1 (NM_172390.1,2541-2559).
caacggtaacgccatcttt

SEQ ID NO: 7545 - DNA, 19 bp, Homo sapiens
  siRNA target sequence for NFATC1 (NM_172390.1,2545-2563).
ggtaacgccatctttctaa

SEQ ID NO: 7546 - DNA, 19 bp, Homo sapiens
  siRNA target sequence for NFATC1 (NM_172390.1,2581-2599).
gagcgcgtggggtgctttt

SEQ ID NO: 7547 - DNA, 19 bp, Homo sapiens
  siRNA target sequence for NFATC2 (NM_012340.2,322-340).
cgactatgagtatttgaat

SEQ ID NO: 7548 - DNA, 19 bp, Homo sapiens
  siRNA target sequence for NFATC2 (NM_012340.2,393-411).
ccgcataccccgatgatgt

SEQ ID NO: 7549 - DNA, 19 bp, Homo sapiens
  siRNA target sequence for NFATC2 (NM_012340.2,567-585).
ctccgtcccacgaactgat

SEQ ID NO: 7550 - DNA, 19 bp, Homo sapiens
  siRNA target sequence for NFATC2 (NM_012340.2,786-804).
cctgcgtctcgcccaataa

SEQ ID NO: 7551 - DNA, 19 bp, Homo sapiens
  siRNA target sequence for NFATC2 (NM_012340.2,825-843).
gtccgcagtttcaaaacat

SEQ ID NO: 7552 - DNA, 19 bp, Homo sapiens
  siRNA target sequence for NFATC2 (NM_012340.2,861-879).
ccagaacctcgccaataat

SEQ ID NO: 7553 - DNA, 19 bp, Homo sapiens
  siRNA target sequence for NFATC2 (NM_012340.2,1553-1571).
ctccatggctacatggaaa

SEQ ID NO: 7554 - DNA, 19 bp, Homo sapiens
  siRNA target sequence for NFATC2 (NM_012340.2,1607-1625).
gctgatgagcggatcctta

SEQ ID NO: 7555 - DNA, 19 bp, Homo sapiens
  siRNA target sequence for NFATC2 (NM_012340.2,1608-1626).
ctgatgagcggatccttaa

SEQ ID NO: 7556 - DNA, 19 bp, Homo sapiens
  siRNA target sequence for NFATC2 (NM_012340.2,1651-1669).
ccgaatcacggggaaaact

SEQ ID NO: 7557 - DNA, 19 bp, Homo sapiens
  siRNA target sequence for NFATC2 (NM_012340.2,1680-1698).
ccagctatgagaagatagt

SEQ ID NO: 7558 - DNA, 19 bp, Homo sapiens
  siRNA target sequence for NFATC2 (NM_012340.2,1766-1784).
gcggggatcttgaagctta

SEQ ID NO: 7559 - DNA, 19 bp, Homo sapiens
  siRNA target sequence for NFATC2 (NM_012340.2,1811-1829).
ggcgagacggacattggaa

SEQ ID NO: 7560 - DNA, 19 bp, Homo sapiens
  siRNA target sequence for NFATC2 (NM_012340.2,1818-1836).
cggacattggaagaaagaa

SEQ ID NO: 7561 - DNA, 19 bp, Homo sapiens
  siRNA target sequence for NFATC2 (NM_012340.2,1839-1857).
cgcgggtgagactggtttt

SEQ ID NO: 7562 - DNA, 19 bp, Homo sapiens
  siRNA target sequence for NFATC2 (NM_012340.2,1881-1899).
gtggcagaatcgtctcttt

SEQ ID NO: 7563 - DNA, 19 bp, Homo sapiens
  siRNA target sequence for NFATC2 (NM_012340.2,1884-1902).
gcagaatcgtctctttaca

SEQ ID NO: 7564 - DNA, 19 bp, Homo sapiens
  siRNA target sequence for NFATC2 (NM_012340.2,1896-1914).
ctttacagactgcatctaa

SEQ ID NO: 7565 - DNA, 19 bp, Homo sapiens
  siRNA target sequence for NFATC2 (NM_012340.2,1948-1966).
gctgcccatggttgaaaga

SEQ ID NO: 7566 - DNA, 19 bp, Homo sapiens
  siRNA target sequence for NFATC2 (NM_012340.2,2011-2029).
cctcacggggcagaacttt

SEQ ID NO: 7567 - DNA, 19 bp, Homo sapiens
  siRNA target sequence for NFATC2 (NM_012340.2,2012-2030).
ctcacggggcagaacttta

SEQ ID NO: 7568 - DNA, 19 bp, Homo sapiens
  siRNA target sequence for NFATC2 (NM_012340.2,2031-2049).
catccgagtccaaagttgt

SEQ ID NO: 7569 - DNA, 19 bp, Homo sapiens
  siRNA target sequence for NFATC2 (NM_012340.2,2035-2053).
cgagtccaaagttgtgttt

SEQ ID NO: 7570 - DNA, 19 bp, Homo sapiens
  siRNA target sequence for NFATC2 (NM_012340.2,2124-2142).
ccaacatgctttttgttga

SEQ ID NO: 7571 - DNA, 19 bp, Homo sapiens
  siRNA target sequence for NFATC2 (NM_012340.2,2171-2189).
cgcacacctgtaaaagtga

SEQ ID NO: 7572 - DNA, 19 bp, Homo sapiens
  siRNA target sequence for NFATC2 (NM_012340.2,2172-2190).
gcacacctgtaaaagtgaa

SEQ ID NO: 7573 - DNA, 19 bp, Homo sapiens
  siRNA target sequence for NFATC2 (NM_012340.2,2188-2206).
gaacttctacgtcatcaat

SEQ ID NO: 7574 - DNA, 19 bp, Homo sapiens
  siRNA target sequence for NFATC2 (NM_012340.2,2198-2216).
gtcatcaatgggaagagaa

SEQ ID NO: 7575 - DNA, 19 bp, Homo sapiens
  siRNA target sequence for NFATC2 (NM_012340.2,2268-2286).
cggagcccacggatgaata

SEQ ID NO: 7576 - DNA, 19 bp, Homo sapiens
  siRNA target sequence for NFATC2 (NM_012340.2,2269-2287).
ggagcccacggatgaatat

SEQ ID NO: 7577 - DNA, 19 bp, Homo sapiens
  siRNA target sequence for NFATC2 (NM_012340.2,2796-2814).
cctaccccacagtcattca

SEQ ID NO: 7578 - DNA, 19 bp, Homo sapiens
  siRNA target sequence for NFATC2 (NM_012340.2,2832-2850).
gccaaagagccgccaaaaa

SEQ ID NO: 7579 - DNA, 19 bp, Homo sapiens
  siRNA target sequence for NFATC2 (NM_012340.2,2859-2877).
cggtcagtgaccaaaagga

SEQ ID NO: 7580 - DNA, 19 bp, Homo sapiens
  siRNA target sequence for NFATC2 (NM_012340.2,2960-2978).
cttagctggatacaaaaca

SEQ ID NO: 7581 - DNA, 19 bp, Homo sapiens
  siRNA target sequence for NFATC2 (NM_012340.2,2964-2982).
gctggatacaaaacatatt

SEQ ID NO: 7582 - DNA, 19 bp, Homo sapiens
  siRNA target sequence for NFATC3 (NM_004555.2,237-255).
cgacgagctcgacttcaaa

SEQ ID NO: 7583 - DNA, 19 bp, Homo sapiens
  siRNA target sequence for NFATC3 (NM_004555.2,325-343).
gatgattgtgcatccattt

SEQ ID NO: 7584 - DNA, 19 bp, Homo sapiens
  siRNA target sequence for NFATC3 (NM_004555.2,328-346).
gattgtgcatccatttaca

SEQ ID NO: 7585 - DNA, 19 bp, Homo sapiens
  siRNA target sequence for NFATC3 (NM_004555.2,332-350).
gtgcatccatttacatctt

SEQ ID NO: 7586 - DNA, 19 bp, Homo sapiens
  siRNA target sequence for NFATC3 (NM_004555.2,392-410).
gcttaccacatcatggatt

SEQ ID NO: 7587 - DNA, 19 bp, Homo sapiens
  siRNA target sequence for NFATC3 (NM_004555.2,393-411).
cttaccacatcatggatta

SEQ ID NO: 7588 - DNA, 19 bp, Homo sapiens
  siRNA target sequence for NFATC3 (NM_004555.2,445-463).
cagctccaaagtcacaaaa

SEQ ID NO: 7589 - DNA, 19 bp, Homo sapiens
  siRNA target sequence for NFATC3 (NM_004555.2,450-468).
ccaaagtcacaaaaactat

SEQ ID NO: 7590 - DNA, 19 bp, Homo sapiens
  siRNA target sequence for NFATC3 (NM_004555.2,524-542).
cctttgagtgcccaagtat

SEQ ID NO: 7591 - DNA, 19 bp, Homo sapiens
  siRNA target sequence for NFATC3 (NM_004555.2,525-543).
ctttgagtgcccaagtatt

SEQ ID NO: 7592 - DNA, 19 bp, Homo sapiens
  siRNA target sequence for NFATC3 (NM_004555.2,562-580).
cctaactgtcatcaagaat

SEQ ID NO: 7593 - DNA, 19 bp, Homo sapiens
  siRNA target sequence for NFATC3 (NM_004555.2,567-585).
ctgtcatcaagaattagat

SEQ ID NO: 7594 - DNA, 19 bp, Homo sapiens
  siRNA target sequence for NFATC3 (NM_004555.2,613-631).
gacccagaacgggaatttt

SEQ ID NO: 7595 - DNA, 19 bp, Homo sapiens
  siRNA target sequence for NFATC3 (NM_004555.2,641-659).
cttctagagatcatctcta

SEQ ID NO: 7596 - DNA, 19 bp, Homo sapiens
  siRNA target sequence for NFATC3 (NM_004555.2,681-699).
ccgggagtcttctcttagt

SEQ ID NO: 7597 - DNA, 19 bp, Homo sapiens
  siRNA target sequence for NFATC3 (NM_004555.2,738-756).
ctctgatgcatcttcttgt

SEQ ID NO: 7598 - DNA, 19 bp, Homo sapiens
  siRNA target sequence for NFATC3 (NM_004555.2,755-773).
gtgaatcgctttcacatat

SEQ ID NO: 7599 - DNA, 19 bp, Homo sapiens
  siRNA target sequence for NFATC3 (NM_004555.2,1132-1150).
gatacgtggctcaatgctt

SEQ ID NO: 7600 - DNA, 19 bp, Homo sapiens
  siRNA target sequence for NFATC3 (NM_004555.2,1209-1227).
gactgacatccctctcaaa

SEQ ID NO: 7601 - DNA, 19 bp, Homo sapiens
  siRNA target sequence for NFATC3 (NM_004555.2,1316-1334).
gggagacttcaatagatga

SEQ ID NO: 7602 - DNA, 19 bp, Homo sapiens
  siRNA target sequence for NFATC3 (NM_004555.2,1317-1335).
ggagacttcaatagatgat

SEQ ID NO: 7603 - DNA, 19 bp, Homo sapiens
  siRNA target sequence for NFATC3 (NM_004555.2,1370-1388).
catgtggtgatcagtttct

SEQ ID NO: 7604 - DNA, 19 bp, Homo sapiens
  siRNA target sequence for NFATC3 (NM_004555.2,1376-1394).
gtgatcagtttctttcagt

SEQ ID NO: 7605 - DNA, 19 bp, Homo sapiens
  siRNA target sequence for NFATC3 (NM_004555.2,1426-1444).
cctggccacacccctatat

SEQ ID NO: 7606 - DNA, 19 bp, Homo sapiens
  siRNA target sequence for NFATC3 (NM_004555.2,1427-1445).
ctggccacacccctatatt

SEQ ID NO: 7607 - DNA, 19 bp, Homo sapiens
  siRNA target sequence for NFATC3 (NM_004555.2,1537-1555).
catcgagcccattatgaaa

SEQ ID NO: 7608 - DNA, 19 bp, Homo sapiens
  siRNA target sequence for NFATC3 (NM_004555.2,1567-1585).
cgaggggcagtaaaagcat

SEQ ID NO: 7609 - DNA, 19 bp, Homo sapiens
  siRNA target sequence for NFATC3 (NM_004555.2,1592-1610).
ggggacatcctgttgtgaa

SEQ ID NO: 7610 - DNA, 19 bp, Homo sapiens
  siRNA target sequence for NFATC3 (NM_004555.2,1611-1629).
gctcctgggctataacgaa

SEQ ID NO: 7611 - DNA, 19 bp, Homo sapiens
  siRNA target sequence for NFATC3 (NM_004555.2,1612-1630).
ctcctgggctataacgaaa

SEQ ID NO: 7612 - DNA, 19 bp, Homo sapiens
  siRNA target sequence for NFATC3 (NM_004555.2,1658-1676).
ggacagcagatgatcgata

SEQ ID NO: 7613 - DNA, 19 bp, Homo sapiens
  siRNA target sequence for NFATC3 (NM_004555.2,1659-1677).
gacagcagatgatcgatat

SEQ ID NO: 7614 - DNA, 19 bp, Homo sapiens
  siRNA target sequence for NFATC3 (NM_004555.2,1839-1857).
ccgcaattcagatatagaa

SEQ ID NO: 7615 - DNA, 19 bp, Homo sapiens
  siRNA target sequence for NFATC3 (NM_004555.2,1841-1859).
gcaattcagatatagaact

SEQ ID NO: 7616 - DNA, 19 bp, Homo sapiens
  siRNA target sequence for NFATC3 (NM_004555.2,1884-1902).
cagaaagaatactagagta

SEQ ID NO: 7617 - DNA, 19 bp, Homo sapiens
  siRNA target sequence for NFATC3 (NM_004555.2,1895-1913).
ctagagtacgacttgtgtt

SEQ ID NO: 7618 - DNA, 19 bp, Homo sapiens
  siRNA target sequence for NFATC3 (NM_004555.2,1986-2004).
ccagcggtctgctcaagaa

SEQ ID NO: 7619 - DNA, 19 bp, Homo sapiens
  siRNA target sequence for NFATC3 (NM_004555.2,1989-2007).
gcggtctgctcaagaactt

SEQ ID NO: 7620 - DNA, 19 bp, Homo sapiens
  siRNA target sequence for NFATC3 (NM_004555.2,2008-2026).
cctcatattgagaagtaca

SEQ ID NO: 7621 - DNA, 19 bp, Homo sapiens
  siRNA target sequence for NFATC3 (NM_004555.2,2011-2029).
catattgagaagtacagta

SEQ ID NO: 7622 - DNA, 19 bp, Homo sapiens
  siRNA target sequence for NFATC3 (NM_004555.2,2017-2035).
gagaagtacagtatcaaca

SEQ ID NO: 7623 - DNA, 19 bp, Homo sapiens
  siRNA target sequence for NFATC3 (NM_004555.2,2025-2043).
cagtatcaacagttgttct

SEQ ID NO: 7624 - DNA, 19 bp, Homo sapiens
  siRNA target sequence for NFATC3 (NM_004555.2,2031-2049).
caacagttgttctgtaaat

SEQ ID NO: 7625 - DNA, 19 bp, Homo sapiens
  siRNA target sequence for NFATC3 (NM_004555.2,2034-2052).
cagttgttctgtaaatgga

SEQ ID NO: 7626 - DNA, 19 bp, Homo sapiens
  siRNA target sequence for NFATC3 (NM_004555.2,2174-2192).
gtcaaggggctcacattgt

SEQ ID NO: 7627 - DNA, 19 bp, Homo sapiens
  siRNA target sequence for NFATC3 (NM_004555.2,2183-2201).
ctcacattgtccttgaagt

SEQ ID NO: 7628 - DNA, 19 bp, Homo sapiens
  siRNA target sequence for NFATC3 (NM_004555.2,2193-2211).
ccttgaagttcctccatat

SEQ ID NO: 7629 - DNA, 19 bp, Homo sapiens
  siRNA target sequence for NFATC3 (NM_004555.2,2197-2215).
gaagttcctccatatcata

SEQ ID NO: 7630 - DNA, 19 bp, Homo sapiens
  siRNA target sequence for NFATC3 (NM_004555.2,2244-2262).
gcacttttatctttgcaat

SEQ ID NO: 7631 - DNA, 19 bp, Homo sapiens
  siRNA target sequence for NFATC3 (NM_004555.2,2280-2298).
ccagtctcaacgttttact

SEQ ID NO: 7632 - DNA, 19 bp, Homo sapiens
  siRNA target sequence for NFATC3 (NM_004555.2,2281-2299).
cagtctcaacgttttactt

SEQ ID NO: 7633 - DNA, 19 bp, Homo sapiens
  siRNA target sequence for NFATC3 (NM_004555.2,2283-2301).
gtctcaacgttttacttat

SEQ ID NO: 7634 - DNA, 19 bp, Homo sapiens
  siRNA target sequence for NFATC3 (NM_004555.2,2519-2537).
gagatgagagtgttagtaa

SEQ ID NO: 7635 - DNA, 19 bp, Homo sapiens
  siRNA target sequence for NFATC3 (NM_004555.2,2550-2568).
gattccttctccaattgta

SEQ ID NO: 7636 - DNA, 19 bp, Homo sapiens
  siRNA target sequence for NFATC3 (NM_004555.2,2619-2637).
gcctatgcaaactaatgtt

SEQ ID NO: 7637 - DNA, 19 bp, Homo sapiens
  siRNA target sequence for NFATC3 (NM_004555.2,2621-2639).
ctatgcaaactaatgttgt

SEQ ID NO: 7638 - DNA, 19 bp, Homo sapiens
  siRNA target sequence for NFATC3 (NM_004555.2,2640-2658).
gtacaatggaccaacttgt

SEQ ID NO: 7639 - DNA, 19 bp, Homo sapiens
  siRNA target sequence for NFATC3 (NM_004555.2,2651-2669).
caacttgtcttcctattaa

SEQ ID NO: 7640 - DNA, 19 bp, Homo sapiens
  siRNA target sequence for NFATC3 (NM_004555.2,2671-2689).
gctgcctctagtcaagaat

SEQ ID NO: 7641 - DNA, 19 bp, Homo sapiens
  siRNA target sequence for NFATC3 (NM_004555.2,2672-2690).
ctgcctctagtcaagaatt

SEQ ID NO: 7642 - DNA, 19 bp, Homo sapiens
  siRNA target sequence for NFATC3 (NM_004555.2,2675-2693).
cctctagtcaagaatttga

SEQ ID NO: 7643 - DNA, 19 bp, Homo sapiens
  siRNA target sequence for NFATC3 (NM_004555.2,2790-2808).
ctcaacaggacatctctta

SEQ ID NO: 7644 - DNA, 19 bp, Homo sapiens
  siRNA target sequence for NFATC3 (NM_004555.2,2925-2943).
gccttcgtctcagttacaa

SEQ ID NO: 7645 - DNA, 19 bp, Homo sapiens
  siRNA target sequence for NFATC3 (NM_004555.2,2930-2948).
cgtctcagttacaacctat

SEQ ID NO: 7646 - DNA, 19 bp, Homo sapiens
  siRNA target sequence for NFATC3 (NM_004555.2,2931-2949).
gtctcagttacaacctatt

SEQ ID NO: 7647 - DNA, 19 bp, Homo sapiens
  siRNA target sequence for NFATC3 (NM_004555.2,2935-2953).
cagttacaacctattacat

SEQ ID NO: 7648 - DNA, 19 bp, Homo sapiens
  siRNA target sequence for NFATC3 (NM_004555.2,2937-2955).
gttacaacctattacatat

SEQ ID NO: 7649 - DNA, 19 bp, Homo sapiens
  siRNA target sequence for NFATC3 (NM_004555.2,3052-3070).
cagcctatgccttaccaat

SEQ ID NO: 7650 - DNA, 19 bp, Homo sapiens
  siRNA target sequence for NFATC3 (NM_004555.2,3132-3150).
ctcaactcaagcacaaagt

SEQ ID NO: 7651 - DNA, 19 bp, Homo sapiens
  siRNA target sequence for NFATC3 (NM_004555.2,3172-3190).
gcaccttcatccttaatat

SEQ ID NO: 7652 - DNA, 19 bp, Homo sapiens
  siRNA target sequence for NFATC3 (NM_004555.2,3201-3219).
gtgtgatccagcgtcattt

SEQ ID NO: 7653 - DNA, 19 bp, Homo sapiens
  siRNA target sequence for NFATC3 (NM_004555.2,3229-3247).
ggggcaactgtgagcatta

SEQ ID NO: 7654 - DNA, 19 bp, Homo sapiens
  siRNA target sequence for NFATC3 (NM_004555.2,3265-3283).
cgagagcctaactttgcaa

SEQ ID NO: 7655 - DNA, 19 bp, Homo sapiens
  siRNA target sequence for NFATC3 (NM_004555.2,3270-3288).
gcctaactttgcaaccatt

SEQ ID NO: 7656 - DNA, 19 bp, Homo sapiens
  siRNA target sequence for NFATC3 (NM_004555.2,3289-3307).
ggtctgcaggacatcactt

SEQ ID NO: 7657 - DNA, 19 bp, Homo sapiens
  siRNA target sequence for NFATC3 (NM_004555.2,3290-3308).
gtctgcaggacatcacttt

SEQ ID NO: 7658 - DNA, 19 bp, Homo sapiens
  siRNA target sequence for NFATC3 (NM_004555.2,3294-3312).
gcaggacatcactttagat

SEQ ID NO: 7659 - DNA, 19 bp, Homo sapiens
  siRNA target sequence for NFATC3 (NM_004555.2,3297-3315).
ggacatcactttagatgat

SEQ ID NO: 7660 - DNA, 19 bp, Homo sapiens
  siRNA target sequence for NFATC3 (NM_004555.2,3305-3323).
ctttagatgatgaccaatt

SEQ ID NO: 7661 - DNA, 19 bp, Homo sapiens
  siRNA target sequence for NFATC3 (NM_173163.1,3316-3334).
gatttgtttaccagtaata

SEQ ID NO: 7662 - DNA, 19 bp, Homo sapiens
  siRNA target sequence for NFATC3 (NM_173163.1,3349-3367).
cagttgagacctacgtttt

SEQ ID NO: 7663 - DNA, 19 bp, Homo sapiens
  siRNA target sequence for NFATC3 (NM_173163.1,3386-3404).
gatatctgaggaatctaga

SEQ ID NO: 7664 - DNA, 19 bp, Homo sapiens
  siRNA target sequence for NFATC3 (NM_173165.1,3398-3416).
gtcctgagtccctggattt

SEQ ID NO: 7665 - DNA, 19 bp, Homo sapiens
  siRNA target sequence for NFATC3 (NM_173165.1,3403-3421).
gagtccctggatttaggaa

SEQ ID NO: 7666 - DNA, 19 bp, Homo sapiens
  siRNA target sequence for NFATC4 (NM_004554.3,311-329).
gatgaggagctggaattta

SEQ ID NO: 7667 - DNA, 19 bp, Homo sapiens
  siRNA target sequence for NFATC4 (NM_004554.3,706-724).
ggacggctctcctagagat

SEQ ID NO: 7668 - DNA, 19 bp, Homo sapiens
  siRNA target sequence for NFATC4 (NM_004554.3,707-725).
gacggctctcctagagatt

SEQ ID NO: 7669 - DNA, 19 bp, Homo sapiens
  siRNA target sequence for NFATC4 (NM_004554.3,1464-1482).
ggggacacagccctatctt

SEQ ID NO: 7670 - DNA, 19 bp, Homo sapiens
  siRNA target sequence for NFATC4 (NM_004554.3,1629-1647).
gcggtcaccccgtagtcaa

SEQ ID NO: 7671 - DNA, 19 bp, Homo sapiens
  siRNA target sequence for NFATC4 (NM_004554.3,1690-1708).
catcggcactgcagatgaa

SEQ ID NO: 7672 - DNA, 19 bp, Homo sapiens
  siRNA target sequence for NFATC4 (NM_004554.3,1717-1735).
gcggcctcatgccttctat

SEQ ID NO: 7673 - DNA, 19 bp, Homo sapiens
  siRNA target sequence for NFATC4 (NM_004554.3,1719-1737).
ggcctcatgccttctatca

SEQ ID NO: 7674 - DNA, 19 bp, Homo sapiens
  siRNA target sequence for NFATC4 (NM_004554.3,1765-1783).
ggccacggccagctatgaa

SEQ ID NO: 7675 - DNA, 19 bp, Homo sapiens
  siRNA target sequence for NFATC4 (NM_004554.3,1867-1885).
cctgaagcttcggaattca

SEQ ID NO: 7676 - DNA, 19 bp, Homo sapiens
  siRNA target sequence for NFATC4 (NM_004554.3,2133-2151).
ccaaggtggtgttcattga

SEQ ID NO: 7677 - DNA, 19 bp, Homo sapiens
  siRNA target sequence for NFATC4 (NM_004554.3,2268-2286).
ggccagtccaggtctactt

SEQ ID NO: 7678 - DNA, 19 bp, Homo sapiens
  siRNA target sequence for NFATC4 (NM_004554.3,2269-2287).
gccagtccaggtctacttt

SEQ ID NO: 7679 - DNA, 19 bp, Homo sapiens
  siRNA target sequence for NFATC4 (NM_004554.3,2270-2288).
ccagtccaggtctactttt

SEQ ID NO: 7680 - DNA, 19 bp, Homo sapiens
  siRNA target sequence for NFATC4 (NM_004554.3,2271-2289).
cagtccaggtctactttta

SEQ ID NO: 7681 - DNA, 19 bp, Homo sapiens
  siRNA target sequence for NFATC4 (NM_004554.3,2313-2331).
gcagtcctacccagagttt

SEQ ID NO: 7682 - DNA, 19 bp, Homo sapiens
  siRNA target sequence for NFATC4 (NM_004554.3,2457-2475).
cctcctatccccatgaaga

SEQ ID NO: 7683 - DNA, 19 bp, Homo sapiens
  siRNA target sequence for NFATC4 (NM_004554.3,2795-2813).
cctgctgagggatacaata

SEQ ID NO: 7684 - DNA, 19 bp, Homo sapiens
  siRNA target sequence for NFE2 (NM_006163.1,299-317).
gcaggaacagggtgataca

SEQ ID NO: 7685 - DNA, 19 bp, Homo sapiens
  siRNA target sequence for NFE2 (NM_006163.1,378-396).
cgagctgcagggtctgaat

SEQ ID NO: 7686 - DNA, 19 bp, Homo sapiens
  siRNA target sequence for NFE2 (NM_006163.1,451-469).
ccaccacccacaacttact

SEQ ID NO: 7687 - DNA, 19 bp, Homo sapiens
  siRNA target sequence for NFE2 (NM_006163.1,700-718).
gaatccgactcaggattat

SEQ ID NO: 7688 - DNA, 19 bp, Homo sapiens
  siRNA target sequence for NFE2 (NM_006163.1,710-728).
caggattatccctcaacta

SEQ ID NO: 7689 - DNA, 19 bp, Homo sapiens
  siRNA target sequence for NFE2 (NM_006163.1,726-744).
ctatagcgatgctgaatct

SEQ ID NO: 7690 - DNA, 19 bp, Homo sapiens
  siRNA target sequence for NFE2 (NM_006163.1,779-797).
gcagcgaatatgtagagat

SEQ ID NO: 7691 - DNA, 19 bp, Homo sapiens
  siRNA target sequence for NFE2 (NM_006163.1,782-800).
gcgaatatgtagagatgta

SEQ ID NO: 7692 - DNA, 19 bp, Homo sapiens
  siRNA target sequence for NFE2 (NM_006163.1,841-859).
gcccactccaactatacct

SEQ ID NO: 7693 - DNA, 19 bp, Homo sapiens
  siRNA target sequence for NFE2 (NM_006163.1,842-860).
cccactccaactatacctt

SEQ ID NO: 7694 - DNA, 19 bp, Homo sapiens
  siRNA target sequence for NFE2 (NM_006163.1,960-978).
ggccttggccatgaagatt

SEQ ID NO: 7695 - DNA, 19 bp, Homo sapiens
  siRNA target sequence for NFE2 (NM_006163.1,980-998).
cttttcctacggacaagat

SEQ ID NO: 7696 - DNA, 19 bp, Homo sapiens
  siRNA target sequence for NFE2 (NM_006163.1,985-1003).
cctacggacaagattgtca

SEQ ID NO: 7697 - DNA, 19 bp, Homo sapiens
  siRNA target sequence for NFE2 (NM_006163.1,986-1004).
ctacggacaagattgtcaa

SEQ ID NO: 7698 - DNA, 19 bp, Homo sapiens
  siRNA target sequence for NFE2 (NM_006163.1,1005-1023).
cttgccggtagatgacttt

SEQ ID NO: 7699 - DNA, 19 bp, Homo sapiens
  siRNA target sequence for NFE2 (NM_006163.1,1084-1102).
cgacgacggggcaaaaaca

SEQ ID NO: 7700 - DNA, 19 bp, Homo sapiens
  siRNA target sequence for NFE2 (NM_006163.1,1085-1103).
gacgacggggcaaaaacaa

SEQ ID NO: 7701 - DNA, 19 bp, Homo sapiens
  siRNA target sequence for NFE2 (NM_006163.1,1255-1273).
gagctgtaccgtgacattt

SEQ ID NO: 7702 - DNA, 19 bp, Homo sapiens
  siRNA target sequence for NFE2L1 (NM_003204.1,702-720).
ccccactccgggagatcat

SEQ ID NO: 7703 - DNA, 19 bp, Homo sapiens
  siRNA target sequence for NFE2L1 (NM_003204.1,727-745).
gcccagttctgcctatact

SEQ ID NO: 7704 - DNA, 19 bp, Homo sapiens
  siRNA target sequence for NFE2L1 (NM_003204.1,729-747).
ccagttctgcctatactca

SEQ ID NO: 7705 - DNA, 19 bp, Homo sapiens
  siRNA target sequence for NFE2L1 (NM_003204.1,758-776).
cacaacctgaggaatacct

SEQ ID NO: 7706 - DNA, 19 bp, Homo sapiens
  siRNA target sequence for NFE2L1 (NM_003204.1,804-822).
gcatagacctggacaatta

SEQ ID NO: 7707 - DNA, 19 bp, Homo sapiens
  siRNA target sequence for NFE2L1 (NM_003204.1,1031-1049).
cagggattcggtgaagatt

SEQ ID NO: 7708 - DNA, 19 bp, Homo sapiens
  siRNA target sequence for NFE2L1 (NM_003204.1,1079-1097).
gtcagtggagacttaacca

SEQ ID NO: 7709 - DNA, 19 bp, Homo sapiens
  siRNA target sequence for NFE2L1 (NM_003204.1,1095-1113).
ccaaagaggacatagatct

SEQ ID NO: 7710 - DNA, 19 bp, Homo sapiens
  siRNA target sequence for NFE2L1 (NM_003204.1,1123-1141).
cctttggcgacaggatatt

SEQ ID NO: 7711 - DNA, 19 bp, Homo sapiens
  siRNA target sequence for NFE2L1 (NM_003204.1,1128-1146).
ggcgacaggatattgatct

SEQ ID NO: 7712 - DNA, 19 bp, Homo sapiens
  siRNA target sequence for NFE2L1 (NM_003204.1,1152-1170).
ctgggcgtgaggtttttga

SEQ ID NO: 7713 - DNA, 19 bp, Homo sapiens
  siRNA target sequence for NFE2L1 (NM_003204.1,1154-1172).
gggcgtgaggtttttgact

SEQ ID NO: 7714 - DNA, 19 bp, Homo sapiens
  siRNA target sequence for NFE2L1 (NM_003204.1,1155-1173).
ggcgtgaggtttttgacta

SEQ ID NO: 7715 - DNA, 19 bp, Homo sapiens
  siRNA target sequence for NFE2L1 (NM_003204.1,1157-1175).
cgtgaggtttttgactata

SEQ ID NO: 7716 - DNA, 19 bp, Homo sapiens
  siRNA target sequence for NFE2L1 (NM_003204.1,1457-1475).
ccccctgctcttcaaaaca

SEQ ID NO: 7717 - DNA, 19 bp, Homo sapiens
  siRNA target sequence for NFE2L1 (NM_003204.1,1501-1519).
gacagagtcaccatttgat

SEQ ID NO: 7718 - DNA, 19 bp, Homo sapiens
  siRNA target sequence for NFE2L1 (NM_003204.1,1565-1583).
gccatggaagtgaacacat

SEQ ID NO: 7719 - DNA, 19 bp, Homo sapiens
  siRNA target sequence for NFE2L1 (NM_003204.1,1581-1599).
catcagcaagtgaaatcct

SEQ ID NO: 7720 - DNA, 19 bp, Homo sapiens
  siRNA target sequence for NFE2L1 (NM_003204.1,1650-1668).
ccaacactcccatcaatca

SEQ ID NO: 7721 - DNA, 19 bp, Homo sapiens
  siRNA target sequence for NFE2L1 (NM_003204.1,1656-1674).
ctcccatcaatcagaatgt

SEQ ID NO: 7722 - DNA, 19 bp, Homo sapiens
  siRNA target sequence for NFE2L1 (NM_003204.1,1658-1676).
cccatcaatcagaatgtca

SEQ ID NO: 7723 - DNA, 19 bp, Homo sapiens
  siRNA target sequence for NFE2L1 (NM_003204.1,1900-1918).
ccctttggggggtctgtta

SEQ ID NO: 7724 - DNA, 19 bp, Homo sapiens
  siRNA target sequence for NFE2L1 (NM_003204.1,1902-1920).
ctttggggggtctgttaga

SEQ ID NO: 7725 - DNA, 19 bp, Homo sapiens
  siRNA target sequence for NFE2L1 (NM_003204.1,1911-1929).
gtctgttagatgaagctat

SEQ ID NO: 7726 - DNA, 19 bp, Homo sapiens
  siRNA target sequence for NFE2L1 (NM_003204.1,2441-2459).
cgagcccgagccatgaaga

SEQ ID NO: 7727 - DNA, 19 bp, Homo sapiens
  siRNA target sequence for NFE2L1 (NM_003204.1,2442-2460).
gagcccgagccatgaagat

SEQ ID NO: 7728 - DNA, 19 bp, Homo sapiens
  siRNA target sequence for NFE2L1 (NM_003204.1,2463-2481).
ctttcaccaatgacaaaat

SEQ ID NO: 7729 - DNA, 19 bp, Homo sapiens
  siRNA target sequence for NFE2L1 (NM_003204.1,2788-2806).
ctactcgcccagtcagtat

SEQ ID NO: 7730 - DNA, 19 bp, Homo sapiens
  siRNA target sequence for NFE2L2 (NM_006164.2,151-169).
cccagcaggacatggattt

SEQ ID NO: 7731 - DNA, 19 bp, Homo sapiens
  siRNA target sequence for NFE2L2 (NM_006164.2,153-171).
cagcaggacatggatttga

SEQ ID NO: 7732 - DNA, 19 bp, Homo sapiens
  siRNA target sequence for NFE2L2 (NM_006164.2,155-173).
gcaggacatggatttgatt

SEQ ID NO: 7733 - DNA, 19 bp, Homo sapiens
  siRNA target sequence for NFE2L2 (NM_006164.2,161-179).
catggatttgattgacata

SEQ ID NO: 7734 - DNA, 19 bp, Homo sapiens
  siRNA target sequence for NFE2L2 (NM_006164.2,204-222).
ggagtaagtcgagaagtat

SEQ ID NO: 7735 - DNA, 19 bp, Homo sapiens
  siRNA target sequence for NFE2L2 (NM_006164.2,326-344).
cgctcagttacaactagat

SEQ ID NO: 7736 - DNA, 19 bp, Homo sapiens
  siRNA target sequence for NFE2L2 (NM_006164.2,355-373).
gtgaatttctcccaattca

SEQ ID NO: 7737 - DNA, 19 bp, Homo sapiens
  siRNA target sequence for NFE2L2 (NM_006164.2,485-503).
gcagacattcccgtttgta

SEQ ID NO: 7738 - DNA, 19 bp, Homo sapiens
  siRNA target sequence for NFE2L2 (NM_006164.2,536-554).
gtcacttgttcctgatatt

SEQ ID NO: 7739 - DNA, 19 bp, Homo sapiens
  siRNA target sequence for NFE2L2 (NM_006164.2,574-592).
cagtcttcattgctactaa

SEQ ID NO: 7740 - DNA, 19 bp, Homo sapiens
  siRNA target sequence for NFE2L2 (NM_006164.2,624-642).
caggtagcccctgttgatt

SEQ ID NO: 7741 - DNA, 19 bp, Homo sapiens
  siRNA target sequence for NFE2L2 (NM_006164.2,626-644).
ggtagcccctgttgattta

SEQ ID NO: 7742 - DNA, 19 bp, Homo sapiens
  siRNA target sequence for NFE2L2 (NM_006164.2,649-667).
gtatgcaacaggacattga

SEQ ID NO: 7743 - DNA, 19 bp, Homo sapiens
  siRNA target sequence for NFE2L2 (NM_006164.2,657-675).
caggacattgagcaagttt

SEQ ID NO: 7744 - DNA, 19 bp, Homo sapiens
  siRNA target sequence for NFE2L2 (NM_006164.2,699-717).
gagttacagtgtcttaata

SEQ ID NO: 7745 - DNA, 19 bp, Homo sapiens
  siRNA target sequence for NFE2L2 (NM_006164.2,766-784).
ccaaactgacagaagttga

SEQ ID NO: 7746 - DNA, 19 bp, Homo sapiens
  siRNA target sequence for NFE2L2 (NM_006164.2,773-791).
gacagaagttgacaattat

SEQ ID NO: 7747 - DNA, 19 bp, Homo sapiens
  siRNA target sequence for NFE2L2 (NM_006164.2,785-803).
caattatcatttttactca

SEQ ID NO: 7748 - DNA, 19 bp, Homo sapiens
  siRNA target sequence for NFE2L2 (NM_006164.2,832-850).
gtaactgtagtccacattt

SEQ ID NO: 7749 - DNA, 19 bp, Homo sapiens
  siRNA target sequence for NFE2L2 (NM_006164.2,947-965).
cacagattttggtgatgaa

SEQ ID NO: 7750 - DNA, 19 bp, Homo sapiens
  siRNA target sequence for NFE2L2 (NM_006164.2,1011-1029).
ccctcacctgctactttaa

SEQ ID NO: 7751 - DNA, 19 bp, Homo sapiens
  siRNA target sequence for NFE2L2 (NM_006164.2,1021-1039).
ctactttaagccattcact

SEQ ID NO: 7752 - DNA, 19 bp, Homo sapiens
  siRNA target sequence for NFE2L2 (NM_006164.2,1077-1095).
ctatcactttgcaaagctt

SEQ ID NO: 7753 - DNA, 19 bp, Homo sapiens
  siRNA target sequence for NFE2L2 (NM_006164.2,1145-1163).
cggcatttcactaaacaca

SEQ ID NO: 7754 - DNA, 19 bp, Homo sapiens
  siRNA target sequence for NFE2L2 (NM_006164.2,1208-1226).
ctatggagacacactactt

SEQ ID NO: 7755 - DNA, 19 bp, Homo sapiens
  siRNA target sequence for NFE2L2 (NM_006164.2,1264-1282).
cccctggaagtgtcaaaca

SEQ ID NO: 7756 - DNA, 19 bp, Homo sapiens
  siRNA target sequence for NFE2L2 (NM_006164.2,1394-1412).
gaaagaattgcctgtaagt

SEQ ID NO: 7757 - DNA, 19 bp, Homo sapiens
  siRNA target sequence for NFE2L2 (NM_006164.2,1422-1440).
cggaaaaccccattcacaa

SEQ ID NO: 7758 - DNA, 19 bp, Homo sapiens
  siRNA target sequence for NFE2L2 (NM_006164.2,1518-1536).
cctgtagaaaaaatcatta

SEQ ID NO: 7759 - DNA, 19 bp, Homo sapiens
  siRNA target sequence for NFE2L2 (NM_006164.2,1545-1563).
gttgttgacttcaacgaaa

SEQ ID NO: 7760 - DNA, 19 bp, Homo sapiens
  siRNA target sequence for NFE2L2 (NM_006164.2,1548-1566).
gttgacttcaacgaaatga

SEQ ID NO: 7761 - DNA, 19 bp, Homo sapiens
  siRNA target sequence for NFE2L2 (NM_006164.2,1568-1586).
gtccaaagagcagttcaat

SEQ ID NO: 7762 - DNA, 19 bp, Homo sapiens
  siRNA target sequence for NFE2L2 (NM_006164.2,1617-1635).
cgtaggaggggtaagaata

SEQ ID NO: 7763 - DNA, 19 bp, Homo sapiens
  siRNA target sequence for NFE2L2 (NM_006164.2,1689-1707).
gagcaagatttagatcatt

SEQ ID NO: 7764 - DNA, 19 bp, Homo sapiens
  siRNA target sequence for NFE2L2 (NM_006164.2,1808-1826).
cagcatgctacgtgatgaa

SEQ ID NO: 7765 - DNA, 19 bp, Homo sapiens
  siRNA target sequence for NFE2L2 (NM_006164.2,1837-1855).
cttattctcctagtgaata

SEQ ID NO: 7766 - DNA, 19 bp, Homo sapiens
  siRNA target sequence for NFE2L2 (NM_006164.2,1890-1908).
cttgttcccaaaagtaaga

SEQ ID NO: 7767 - DNA, 19 bp, Homo sapiens
  siRNA target sequence for NFE2L3 (NM_004289.4,78-96).
ccgcgtagacctagatctt

SEQ ID NO: 7768 - DNA, 19 bp, Homo sapiens
  siRNA target sequence for NFE2L3 (NM_004289.4,79-97).
cgcgtagacctagatcttt

SEQ ID NO: 7769 - DNA, 19 bp, Homo sapiens
  siRNA target sequence for NFE2L3 (NM_004289.4,80-98).
gcgtagacctagatcttta

SEQ ID NO: 7770 - DNA, 19 bp, Homo sapiens
  siRNA target sequence for NFE2L3 (NM_004289.4,573-591).
gaatggggtactaagagaa

SEQ ID NO: 7771 - DNA, 19 bp, Homo sapiens
  siRNA target sequence for NFE2L3 (NM_004289.4,595-613).
cacgaagctgtggatcata

SEQ ID NO: 7772 - DNA, 19 bp, Homo sapiens
  siRNA target sequence for NFE2L3 (NM_004289.4,597-615).
cgaagctgtggatcatagt

SEQ ID NO: 7773 - DNA, 19 bp, Homo sapiens
  siRNA target sequence for NFE2L3 (NM_004289.4,759-777).
gaatgggacagatacttct

SEQ ID NO: 7774 - DNA, 19 bp, Homo sapiens
  siRNA target sequence for NFE2L3 (NM_004289.4,763-781).
gggacagatacttctttct

SEQ ID NO: 7775 - DNA, 19 bp, Homo sapiens
  siRNA target sequence for NFE2L3 (NM_004289.4,782-800).
ctctggaagacttattcca

SEQ ID NO: 7776 - DNA, 19 bp, Homo sapiens
  siRNA target sequence for NFE2L3 (NM_004289.4,790-808).
gacttattccagttgcttt

SEQ ID NO: 7777 - DNA, 19 bp, Homo sapiens
  siRNA target sequence for NFE2L3 (NM_004289.4,812-830).
cacagcctgaaaattcact

SEQ ID NO: 7778 - DNA, 19 bp, Homo sapiens
  siRNA target sequence for NFE2L3 (NM_004289.4,885-903).
gaattcttcagcacattat

SEQ ID NO: 7779 - DNA, 19 bp, Homo sapiens
  siRNA target sequence for NFE2L3 (NM_004289.4,890-908).
cttcagcacattatcatgt

SEQ ID NO: 7780 - DNA, 19 bp, Homo sapiens
  siRNA target sequence for NFE2L3 (NM_004289.4,912-930).
cttcagccaggctataagt

SEQ ID NO: 7781 - DNA, 19 bp, Homo sapiens
  siRNA target sequence for NFE2L3 (NM_004289.4,929-947).
gtcaggatgtgaatcttca

SEQ ID NO: 7782 - DNA, 19 bp, Homo sapiens
  siRNA target sequence for NFE2L3 (NM_004289.4,1097-1115).
caccggttgacaatcatat

SEQ ID NO: 7783 - DNA, 19 bp, Homo sapiens
  siRNA target sequence for NFE2L3 (NM_004289.4,1099-1117).
ccggttgacaatcatatga

SEQ ID NO: 7784 - DNA, 19 bp, Homo sapiens
  siRNA target sequence for NFE2L3 (NM_004289.4,1107-1125).
caatcatatgaggaatcta

SEQ ID NO: 7785 - DNA, 19 bp, Homo sapiens
  siRNA target sequence for NFE2L3 (NM_004289.4,1127-1145).
caagccaagacctactgta

SEQ ID NO: 7786 - DNA, 19 bp, Homo sapiens
  siRNA target sequence for NFE2L3 (NM_004289.4,1130-1148).
gccaagacctactgtatga

SEQ ID NO: 7787 - DNA, 19 bp, Homo sapiens
  siRNA target sequence for NFE2L3 (NM_004289.4,1141-1159).
ctgtatgaccttgacataa

SEQ ID NO: 7788 - DNA, 19 bp, Homo sapiens
  siRNA target sequence for NFE2L3 (NM_004289.4,1143-1161).
gtatgaccttgacataaat

SEQ ID NO: 7789 - DNA, 19 bp, Homo sapiens
  siRNA target sequence for NFE2L3 (NM_004289.4,1203-1221).
caactttgatccaatcgat

SEQ ID NO: 7790 - DNA, 19 bp, Homo sapiens
  siRNA target sequence for NFE2L3 (NM_004289.4,1218-1236).
cgatgtttctcagcttttt

SEQ ID NO: 7791 - DNA, 19 bp, Homo sapiens
  siRNA target sequence for NFE2L3 (NM_004289.4,1323-1341).
gtgtgatgaaggtgctata

SEQ ID NO: 7792 - DNA, 19 bp, Homo sapiens
  siRNA target sequence for NFE2L3 (NM_004289.4,1327-1345).
gatgaaggtgctataggtt

SEQ ID NO: 7793 - DNA, 19 bp, Homo sapiens
  siRNA target sequence for NFE2L3 (NM_004289.4,1330-1348).
gaaggtgctataggttatt

SEQ ID NO: 7794 - DNA, 19 bp, Homo sapiens
  siRNA target sequence for NFE2L3 (NM_004289.4,1333-1351).
ggtgctataggttattgca

SEQ ID NO: 7795 - DNA, 19 bp, Homo sapiens
  siRNA target sequence for NFE2L3 (NM_004289.4,1364-1382).
ctagttcccatcatgactt

SEQ ID NO: 7796 - DNA, 19 bp, Homo sapiens
  siRNA target sequence for NFE2L3 (NM_004289.4,1367-1385).
gttcccatcatgacttaga

SEQ ID NO: 7797 - DNA, 19 bp, Homo sapiens
  siRNA target sequence for NFE2L3 (NM_004289.4,1429-1447).
cacttggatcaaagtgatt

SEQ ID NO: 7798 - DNA, 19 bp, Homo sapiens
  siRNA target sequence for NFE2L3 (NM_004289.4,1434-1452).
ggatcaaagtgattctgat

SEQ ID NO: 7799 - DNA, 19 bp, Homo sapiens
  siRNA target sequence for NFE2L3 (NM_004289.4,1566-1584).
gataaggagtagatacctt

SEQ ID NO: 7800 - DNA, 19 bp, Homo sapiens
  siRNA target sequence for NFE2L3 (NM_004289.4,1615-1633).
gaacagcgtgctaaagctt

SEQ ID NO: 7801 - DNA, 19 bp, Homo sapiens
  siRNA target sequence for NFE2L3 (NM_004289.4,1620-1638).
gcgtgctaaagctttgcat

SEQ ID NO: 7802 - DNA, 19 bp, Homo sapiens
  siRNA target sequence for NFE2L3 (NM_004289.4,1621-1639).
cgtgctaaagctttgcata

SEQ ID NO: 7803 - DNA, 19 bp, Homo sapiens
  siRNA target sequence for NFE2L3 (NM_004289.4,1622-1640).
gtgctaaagctttgcatat

SEQ ID NO: 7804 - DNA, 19 bp, Homo sapiens
  siRNA target sequence for NFE2L3 (NM_004289.4,1630-1648).
gctttgcatatcccttttt

SEQ ID NO: 7805 - DNA, 19 bp, Homo sapiens
  siRNA target sequence for NFE2L3 (NM_004289.4,1663-1681).
gtcggcatgcctgttgatt

SEQ ID NO: 7806 - DNA, 19 bp, Homo sapiens
  siRNA target sequence for NFE2L3 (NM_004289.4,1665-1683).
cggcatgcctgttgattct

SEQ ID NO: 7807 - DNA, 19 bp, Homo sapiens
  siRNA target sequence for NFE2L3 (NM_004289.4,1666-1684).
ggcatgcctgttgattctt

SEQ ID NO: 7808 - DNA, 19 bp, Homo sapiens
  siRNA target sequence for NFE2L3 (NM_004289.4,1672-1690).
cctgttgattctttcaata

SEQ ID NO: 7809 - DNA, 19 bp, Homo sapiens
  siRNA target sequence for NFE2L3 (NM_004289.4,1675-1693).
gttgattctttcaatagca

SEQ ID NO: 7810 - DNA, 19 bp, Homo sapiens
  siRNA target sequence for NFE2L3 (NM_004289.4,1691-1709).
gcatgttaagtagatatta

SEQ ID NO: 7811 - DNA, 19 bp, Homo sapiens
  siRNA target sequence for NFE2L3 (NM_004289.4,1692-1710).
catgttaagtagatattat

SEQ ID NO: 7812 - DNA, 19 bp, Homo sapiens
  siRNA target sequence for NFE2L3 (NM_004289.4,1784-1802).
gtcgtaaacgcaaattgga

SEQ ID NO: 7813 - DNA, 19 bp, Homo sapiens
  siRNA target sequence for NFE2L3 (NM_004289.4,1792-1810).
cgcaaattggacataattt

SEQ ID NO: 7814 - DNA, 19 bp, Homo sapiens
  siRNA target sequence for NFE2L3 (NM_004289.4,1819-1837).
gaagatgatgtatgtaact

SEQ ID NO: 7815 - DNA, 19 bp, Homo sapiens
  siRNA target sequence for NFE2L3 (NM_004289.4,1867-1885).
gagcaagcacaatgtaaca

SEQ ID NO: 7816 - DNA, 19 bp, Homo sapiens
  siRNA target sequence for NFE2L3 (NM_004289.4,1873-1891).
gcacaatgtaacaaagcta

SEQ ID NO: 7817 - DNA, 19 bp, Homo sapiens
  siRNA target sequence for NFE2L3 (NM_004289.4,1874-1892).
cacaatgtaacaaagctat

SEQ ID NO: 7818 - DNA, 19 bp, Homo sapiens
  siRNA target sequence for NFE2L3 (NM_004289.4,1908-1926).
gaaactgcatgacctttat

SEQ ID NO: 7819 - DNA, 19 bp, Homo sapiens
  siRNA target sequence for NFE2L3 (NM_004289.4,1914-1932).
gcatgacctttatcatgat

SEQ ID NO: 7820 - DNA, 19 bp, Homo sapiens
  siRNA target sequence for NFE2L3 (NM_004289.4,1915-1933).
catgacctttatcatgata

SEQ ID NO: 7821 - DNA, 19 bp, Homo sapiens
  siRNA target sequence for NFE2L3 (NM_004289.4,1997-2015).
gtacccatgatggaagtat

SEQ ID NO: 7822 - DNA, 19 bp, Homo sapiens
  siRNA target sequence for NFE2L3 (NM_004289.4,2000-2018).
cccatgatggaagtatctt

SEQ ID NO: 7823 - DNA, 19 bp, Homo sapiens
  siRNA target sequence for NFE2L3 (NM_004289.4,2016-2034).
cttgatagtacccaaagaa

SEQ ID NO: 7824 - DNA, 19 bp, Homo sapiens
  siRNA target sequence for NFIA (NM_005595.1,241-259).
cgagcctttgcctacacat

SEQ ID NO: 7825 - DNA, 19 bp, Homo sapiens
  siRNA target sequence for NFIA (NM_005595.1,270-288).
gcaggcccgaaaacgaaaa

SEQ ID NO: 7826 - DNA, 19 bp, Homo sapiens
  siRNA target sequence for NFIA (NM_005595.1,271-289).
caggcccgaaaacgaaaat

SEQ ID NO: 7827 - DNA, 19 bp, Homo sapiens
  siRNA target sequence for NFIA (NM_005595.1,274-292).
gcccgaaaacgaaaatact

SEQ ID NO: 7828 - DNA, 19 bp, Homo sapiens
  siRNA target sequence for NFIA (NM_005595.1,275-293).
cccgaaaacgaaaatactt

SEQ ID NO: 7829 - DNA, 19 bp, Homo sapiens
  siRNA target sequence for NFIA (NM_005595.1,309-327).
gcgtatgtcaaaagaagaa

SEQ ID NO: 7830 - DNA, 19 bp, Homo sapiens
  siRNA target sequence for NFIA (NM_005595.1,335-353).
ccgtgaaggatgaattgct

SEQ ID NO: 7831 - DNA, 19 bp, Homo sapiens
  siRNA target sequence for NFIA (NM_005595.1,336-354).
cgtgaaggatgaattgcta

SEQ ID NO: 7832 - DNA, 19 bp, Homo sapiens
  siRNA target sequence for NFIA (NM_005595.1,389-407).
ctcgacttctggcaaagtt

SEQ ID NO: 7833 - DNA, 19 bp, Homo sapiens
  siRNA target sequence for NFIA (NM_005595.1,399-417).
ggcaaagttgcggaaagat

SEQ ID NO: 7834 - DNA, 19 bp, Homo sapiens
  siRNA target sequence for NFIA (NM_005595.1,401-419).
caaagttgcggaaagatat

SEQ ID NO: 7835 - DNA, 19 bp, Homo sapiens
  siRNA target sequence for NFIA (NM_005595.1,425-443).
ccgaatatcgagaggattt

SEQ ID NO: 7836 - DNA, 19 bp, Homo sapiens
  siRNA target sequence for NFIA (NM_005595.1,426-444).
cgaatatcgagaggatttt

SEQ ID NO: 7837 - DNA, 19 bp, Homo sapiens
  siRNA target sequence for NFIA (NM_005595.1,473-491).
catgttgtgttctttccaa

SEQ ID NO: 7838 - DNA, 19 bp, Homo sapiens
  siRNA target sequence for NFIA (NM_005595.1,506-524).
gcaagatgcgaagaattga

SEQ ID NO: 7839 - DNA, 19 bp, Homo sapiens
  siRNA target sequence for NFIA (NM_005595.1,527-545).
gcctccgccaggcagataa

SEQ ID NO: 7840 - DNA, 19 bp, Homo sapiens
  siRNA target sequence for NFIA (NM_005595.1,551-569).
ggaggttggaccttgttat

SEQ ID NO: 7841 - DNA, 19 bp, Homo sapiens
  siRNA target sequence for NFIA (NM_005595.1,554-572).
ggttggaccttgttatggt

SEQ ID NO: 7842 - DNA, 19 bp, Homo sapiens
  siRNA target sequence for NFIA (NM_005595.1,586-604).
ggtattccgctggaaagta

SEQ ID NO: 7843 - DNA, 19 bp, Homo sapiens
  siRNA target sequence for NFIA (NM_005595.1,607-625).
gatggcgagcgccttgtaa

SEQ ID NO: 7844 - DNA, 19 bp, Homo sapiens
  siRNA target sequence for NFIA (NM_005595.1,610-628).
ggcgagcgccttgtaaagt

SEQ ID NO: 7845 - DNA, 19 bp, Homo sapiens
  siRNA target sequence for NFIA (NM_005595.1,627-645).
gtccccacaatgctctaat

SEQ ID NO: 7846 - DNA, 19 bp, Homo sapiens
  siRNA target sequence for NFIA (NM_005595.1,670-688).
cacataggggtttctgtta

SEQ ID NO: 7847 - DNA, 19 bp, Homo sapiens
  siRNA target sequence for NFIA (NM_005595.1,683-701).
ctgttaaggaactcgattt

SEQ ID NO: 7848 - DNA, 19 bp, Homo sapiens
  siRNA target sequence for NFIA (NM_005595.1,685-703).
gttaaggaactcgatttat

SEQ ID NO: 7849 - DNA, 19 bp, Homo sapiens
  siRNA target sequence for NFIA (NM_005595.1,760-778).
ccaagtgacgctgacatta

SEQ ID NO: 7850 - DNA, 19 bp, Homo sapiens
  siRNA target sequence for NFIA (NM_005595.1,764-782).
gtgacgctgacattaagga

SEQ ID NO: 7851 - DNA, 19 bp, Homo sapiens
  siRNA target sequence for NFIA (NM_005595.1,780-798).
ggaccagccagaaaatgga

SEQ ID NO: 7852 - DNA, 19 bp, Homo sapiens
  siRNA target sequence for NFIA (NM_005595.1,827-845).
catcaggtgtttttagtgt

SEQ ID NO: 7853 - DNA, 19 bp, Homo sapiens
  siRNA target sequence for NFIA (NM_005595.1,919-937).
gaaagttcttcatactaca

SEQ ID NO: 7854 - DNA, 19 bp, Homo sapiens
  siRNA target sequence for NFIA (NM_005595.1,1036-1054).
ggtgaggagccattttata

SEQ ID NO: 7855 - DNA, 19 bp, Homo sapiens
  siRNA target sequence for NFIA (NM_005595.1,1216-1234).
catcaccgacctgtcatta

SEQ ID NO: 7856 - DNA, 19 bp, Homo sapiens
  siRNA target sequence for NFIA (NM_005595.1,1449-1467).
ggtgcacaacccattcctt

SEQ ID NO: 7857 - DNA, 19 bp, Homo sapiens
  siRNA target sequence for NFIB (NM_005596.1,281-299).
ccgtgcaattgcctatact

SEQ ID NO: 7858 - DNA, 19 bp, Homo sapiens
  siRNA target sequence for NFIB (NM_005596.1,282-300).
cgtgcaattgcctatactt

SEQ ID NO: 7859 - DNA, 19 bp, Homo sapiens
  siRNA target sequence for NFIB (NM_005596.1,315-333).
gctcgaaaacgcaagtact

SEQ ID NO: 7860 - DNA, 19 bp, Homo sapiens
  siRNA target sequence for NFIB (NM_005596.1,316-334).
ctcgaaaacgcaagtactt

SEQ ID NO: 7861 - DNA, 19 bp, Homo sapiens
  siRNA target sequence for NFIB (NM_005596.1,318-336).
cgaaaacgcaagtacttta

SEQ ID NO: 7862 - DNA, 19 bp, Homo sapiens
  siRNA target sequence for NFIB (NM_005596.1,341-359).
gcatgagaagcgaatgtca

SEQ ID NO: 7863 - DNA, 19 bp, Homo sapiens
  siRNA target sequence for NFIB (NM_005596.1,347-365).
gaagcgaatgtcaaaggat

SEQ ID NO: 7864 - DNA, 19 bp, Homo sapiens
  siRNA target sequence for NFIB (NM_005596.1,441-459).
gccaaactgcgcaaagata

SEQ ID NO: 7865 - DNA, 19 bp, Homo sapiens
  siRNA target sequence for NFIB (NM_005596.1,442-460).
ccaaactgcgcaaagatat

SEQ ID NO: 7866 - DNA, 19 bp, Homo sapiens
  siRNA target sequence for NFIB (NM_005596.1,514-532).
cgtgctgtgtcttatccaa

SEQ ID NO: 7867 - DNA, 19 bp, Homo sapiens
  siRNA target sequence for NFIB (NM_005596.1,515-533).
gtgctgtgtcttatccaat

SEQ ID NO: 7868 - DNA, 19 bp, Homo sapiens
  siRNA target sequence for NFIB (NM_005596.1,569-587).
cctgcgacaggcagacaaa

SEQ ID NO: 7869 - DNA, 19 bp, Homo sapiens
  siRNA target sequence for NFIB (NM_005596.1,592-610).
ggcgtctggatctagtcat

SEQ ID NO: 7870 - DNA, 19 bp, Homo sapiens
  siRNA target sequence for NFIB (NM_005596.1,705-723).
ccacatcatatcacagtat

SEQ ID NO: 7871 - DNA, 19 bp, Homo sapiens
  siRNA target sequence for NFIB (NM_005596.1,711-729).
catatcacagtatcagtta

SEQ ID NO: 7872 - DNA, 19 bp, Homo sapiens
  siRNA target sequence for NFIB (NM_005596.1,726-744).
gttaaggagcttgatttgt

SEQ ID NO: 7873 - DNA, 19 bp, Homo sapiens
  siRNA target sequence for NFIB (NM_005596.1,758-776).
cgtgcaggagcaagattct

SEQ ID NO: 7874 - DNA, 19 bp, Homo sapiens
  siRNA target sequence for NFIB (NM_005596.1,767-785).
gcaagattctggacaatca

SEQ ID NO: 7875 - DNA, 19 bp, Homo sapiens
  siRNA target sequence for NFIB (NM_005596.1,825-843).
ggttaccttgaggatagtt

SEQ ID NO: 7876 - DNA, 19 bp, Homo sapiens
  siRNA target sequence for NFIB (NM_005596.1,830-848).
ccttgaggatagttttgta

SEQ ID NO: 7877 - DNA, 19 bp, Homo sapiens
  siRNA target sequence for NFIB (NM_005596.1,831-849).
cttgaggatagttttgtaa

SEQ ID NO: 7878 - DNA, 19 bp, Homo sapiens
  siRNA target sequence for NFIB (NM_005596.1,834-852).
gaggatagttttgtaaaat

SEQ ID NO: 7879 - DNA, 19 bp, Homo sapiens
  siRNA target sequence for NFIB (NM_005596.1,856-874).
gagtcttcaatgtatcaga

SEQ ID NO: 7880 - DNA, 19 bp, Homo sapiens
  siRNA target sequence for NFIB (NM_005596.1,863-881).
caatgtatcagaacttgta

SEQ ID NO: 7881 - DNA, 19 bp, Homo sapiens
  siRNA target sequence for NFIB (NM_005596.1,946-964).
gccaaccatactatcatga

SEQ ID NO: 7882 - DNA, 19 bp, Homo sapiens
  siRNA target sequence for NFIB (NM_005596.1,968-986).
gaactcgggggtcaatctt

SEQ ID NO: 7883 - DNA, 19 bp, Homo sapiens
  siRNA target sequence for NFIB (NM_005596.1,1021-1039).
gacccaaaactatatccat

SEQ ID NO: 7884 - DNA, 19 bp, Homo sapiens
  siRNA target sequence for NFIB (NM_005596.1,1260-1278).
gcacacagtgtcatctcaa

SEQ ID NO: 7885 - DNA, 19 bp, Homo sapiens
  siRNA target sequence for NFIB (NM_005596.1,1309-1327).
catttccaacacaagctat

SEQ ID NO: 7886 - DNA, 19 bp, Homo sapiens
  siRNA target sequence for NFIB (NM_005596.1,1338-1356).
gccccatcgagctactttt

SEQ ID NO: 7887 - DNA, 19 bp, Homo sapiens
  siRNA target sequence for NFIB (NM_005596.1,1342-1360).
catcgagctacttttctca

SEQ ID NO: 7888 - DNA, 19 bp, Homo sapiens
  siRNA target sequence for NFIB (NM_005596.1,1357-1375).
ctcatccaacaatcagata

SEQ ID NO: 7889 - DNA, 19 bp, Homo sapiens
  siRNA target sequence for NFIB (NM_005596.1,1397-1415).
ggatactctgaagaactat

SEQ ID NO: 7890 - DNA, 19 bp, Homo sapiens
  siRNA target sequence for NFIB (NM_005596.1,1409-1427).
gaactatgtaccttcttat

SEQ ID NO: 7891 - DNA, 19 bp, Homo sapiens
  siRNA target sequence for NFIC (NM_005597.1,856-874).
gggagcaagcggcacaaat

SEQ ID NO: 7892 - DNA, 19 bp, Homo sapiens
  siRNA target sequence for NFIC (NM_005597.1,1015-1033).
gacaagtcaccattcaaca

SEQ ID NO: 7893 - DNA, 19 bp, Homo sapiens
  siRNA target sequence for NFIC (NM_005597.1,1130-1148).
cgtcctccgctctgcattt

SEQ ID NO: 7894 - DNA, 19 bp, Homo sapiens
  siRNA target sequence for NFIC (NM_005597.1,1233-1251).
ggacccgctcaaagatctt

SEQ ID NO: 7895 - DNA, 19 bp, Homo sapiens
  siRNA target sequence for NFIL3 (NM_005384.1,246-264).
ggagcaggcgtctcttgat

SEQ ID NO: 7896 - DNA, 19 bp, Homo sapiens
  siRNA target sequence for NFIL3 (NM_005384.1,269-287).
gtagcaatgtggacaagat

SEQ ID NO: 7897 - DNA, 19 bp, Homo sapiens
  siRNA target sequence for NFIL3 (NM_005384.1,272-290).
gcaatgtggacaagatgat

SEQ ID NO: 7898 - DNA, 19 bp, Homo sapiens
  siRNA target sequence for NFIL3 (NM_005384.1,282-300).
caagatgatggtccttaat

SEQ ID NO: 7899 - DNA, 19 bp, Homo sapiens
  siRNA target sequence for NFIL3 (NM_005384.1,285-303).
gatgatggtccttaattct

SEQ ID NO: 7900 - DNA, 19 bp, Homo sapiens
  siRNA target sequence for NFIL3 (NM_005384.1,291-309).
ggtccttaattctgcttta

SEQ ID NO: 7901 - DNA, 19 bp, Homo sapiens
  siRNA target sequence for NFIL3 (NM_005384.1,394-412).
cggaggaaacgggaattca

SEQ ID NO: 7902 - DNA, 19 bp, Homo sapiens
  siRNA target sequence for NFIL3 (NM_005384.1,563-581).
ctgagctgctttcactaaa

SEQ ID NO: 7903 - DNA, 19 bp, Homo sapiens
  siRNA target sequence for NFIL3 (NM_005384.1,608-626).
cagcatatgctcaagagat

SEQ ID NO: 7904 - DNA, 19 bp, Homo sapiens
  siRNA target sequence for NFIL3 (NM_005384.1,624-642).
gattcagaaactcagtaat

SEQ ID NO: 7905 - DNA, 19 bp, Homo sapiens
  siRNA target sequence for NFIL3 (NM_005384.1,715-733).
ccctcgatggtgtcaagta

SEQ ID NO: 7906 - DNA, 19 bp, Homo sapiens
  siRNA target sequence for NFIL3 (NM_005384.1,717-735).
ctcgatggtgtcaagtagt

SEQ ID NO: 7907 - DNA, 19 bp, Homo sapiens
  siRNA target sequence for NFIL3 (NM_005384.1,720-738).
gatggtgtcaagtagttgt

SEQ ID NO: 7908 - DNA, 19 bp, Homo sapiens
  siRNA target sequence for NFIL3 (NM_005384.1,723-741).
ggtgtcaagtagttgtatt

SEQ ID NO: 7909 - DNA, 19 bp, Homo sapiens
  siRNA target sequence for NFIL3 (NM_005384.1,724-742).
gtgtcaagtagttgtattt

SEQ ID NO: 7910 - DNA, 19 bp, Homo sapiens
  siRNA target sequence for NFIL3 (NM_005384.1,734-752).
gttgtatttctgtcattaa

SEQ ID NO: 7911 - DNA, 19 bp, Homo sapiens
  siRNA target sequence for NFIL3 (NM_005384.1,737-755).
gtatttctgtcattaaaca

SEQ ID NO: 7912 - DNA, 19 bp, Homo sapiens
  siRNA target sequence for NFIL3 (NM_005384.1,768-786).
ctcgctgtccgatgtttca

SEQ ID NO: 7913 - DNA, 19 bp, Homo sapiens
  siRNA target sequence for NFIL3 (NM_005384.1,770-788).
cgctgtccgatgtttcaga

SEQ ID NO: 7914 - DNA, 19 bp, Homo sapiens
  siRNA target sequence for NFIL3 (NM_005384.1,771-789).
gctgtccgatgtttcagaa

SEQ ID NO: 7915 - DNA, 19 bp, Homo sapiens
  siRNA target sequence for NFIL3 (NM_005384.1,836-854).
gcagaagtcctgaaaacaa

SEQ ID NO: 7916 - DNA, 19 bp, Homo sapiens
  siRNA target sequence for NFIL3 (NM_005384.1,870-888).
gcaagagccgatggaatta

SEQ ID NO: 7917 - DNA, 19 bp, Homo sapiens
  siRNA target sequence for NFIL3 (NM_005384.1,934-952).
gcgtccatctatcaaaact

SEQ ID NO: 7918 - DNA, 19 bp, Homo sapiens
  siRNA target sequence for NFIL3 (NM_005384.1,935-953).
cgtccatctatcaaaacta

SEQ ID NO: 7919 - DNA, 19 bp, Homo sapiens
  siRNA target sequence for NFIL3 (NM_005384.1,936-954).
gtccatctatcaaaactat

SEQ ID NO: 7920 - DNA, 19 bp, Homo sapiens
  siRNA target sequence for NFIL3 (NM_005384.1,989-1007).
ccccactactgcaagtcaa

SEQ ID NO: 7921 - DNA, 19 bp, Homo sapiens
  siRNA target sequence for NFIL3 (NM_005384.1,1051-1069).
ggtgtggtaggaaagtcat

SEQ ID NO: 7922 - DNA, 19 bp, Homo sapiens
  siRNA target sequence for NFIL3 (NM_005384.1,1249-1267).
gaggccacgcaaaaacttt

SEQ ID NO: 7923 - DNA, 19 bp, Homo sapiens
  siRNA target sequence for NFIL3 (NM_005384.1,1264-1282).
ctttcctcacctattgaca

SEQ ID NO: 7924 - DNA, 19 bp, Homo sapiens
  siRNA target sequence for NFIL3 (NM_005384.1,1273-1291).
cctattgacatgacatcta

SEQ ID NO: 7925 - DNA, 19 bp, Homo sapiens
  siRNA target sequence for NFIL3 (NM_005384.1,1274-1292).
ctattgacatgacatctaa

SEQ ID NO: 7926 - DNA, 19 bp, Homo sapiens
  siRNA target sequence for NFIL3 (NM_005384.1,1281-1299).
catgacatctaaaagacat

SEQ ID NO: 7927 - DNA, 19 bp, Homo sapiens
  siRNA target sequence for NFIL3 (NM_005384.1,1295-1313).
gacatttcgaactcgaaaa

SEQ ID NO: 7928 - DNA, 19 bp, Homo sapiens
  siRNA target sequence for NFIL3 (NM_005384.1,1321-1339).
gccccaagtatggtacatt

SEQ ID NO: 7929 - DNA, 19 bp, Homo sapiens
  siRNA target sequence for NFIL3 (NM_005384.1,1332-1350).
ggtacattcttctcttact

SEQ ID NO: 7930 - DNA, 19 bp, Homo sapiens
  siRNA target sequence for NFIL3 (NM_005384.1,1366-1384).
gtgactaacattcaagatt

SEQ ID NO: 7931 - DNA, 19 bp, Homo sapiens
  siRNA target sequence for NFIL3 (NM_005384.1,1422-1440).
gagtggcaaaactcagaat

SEQ ID NO: 7932 - DNA, 19 bp, Homo sapiens
  siRNA target sequence for NFIL3 (NM_005384.1,1467-1485).
gaaagacagtggctacaaa

SEQ ID NO: 7933 - DNA, 19 bp, Homo sapiens
  siRNA target sequence for NFIL3 (NM_005384.1,1492-1510).
gacccagagaacttgtatt

SEQ ID NO: 7934 - DNA, 19 bp, Homo sapiens
  siRNA target sequence for NFIL3 (NM_005384.1,1518-1536).
ggggatagcaaacttatct

SEQ ID NO: 7935 - DNA, 19 bp, Homo sapiens
  siRNA target sequence for NFKB1 (NM_003998.2,470-488).
ggcagaagatgatccatat

SEQ ID NO: 7936 - DNA, 19 bp, Homo sapiens
  siRNA target sequence for NFKB1 (NM_003998.2,496-514).
ggcctgaacaaatgtttca

SEQ ID NO: 7937 - DNA, 19 bp, Homo sapiens
  siRNA target sequence for NFKB1 (NM_003998.2,513-531).
catttggatccttctttga

SEQ ID NO: 7938 - DNA, 19 bp, Homo sapiens
  siRNA target sequence for NFKB1 (NM_003998.2,519-537).
gatccttctttgactcata

SEQ ID NO: 7939 - DNA, 19 bp, Homo sapiens
  siRNA target sequence for NFKB1 (NM_003998.2,526-544).
ctttgactcatacaatatt

SEQ ID NO: 7940 - DNA, 19 bp, Homo sapiens
  siRNA target sequence for NFKB1 (NM_003998.2,588-606).
gatggcccataccttcaaa

SEQ ID NO: 7941 - DNA, 19 bp, Homo sapiens
  siRNA target sequence for NFKB1 (NM_003998.2,591-609).
ggcccataccttcaaatat

SEQ ID NO: 7942 - DNA, 19 bp, Homo sapiens
  siRNA target sequence for NFKB1 (NM_003998.2,592-610).
gcccataccttcaaatatt

SEQ ID NO: 7943 - DNA, 19 bp, Homo sapiens
  siRNA target sequence for NFKB1 (NM_003998.2,631-649).
gatttcgtttccgttatgt

SEQ ID NO: 7944 - DNA, 19 bp, Homo sapiens
  siRNA target sequence for NFKB1 (NM_003998.2,637-655).
gtttccgttatgtatgtga

SEQ ID NO: 7945 - DNA, 19 bp, Homo sapiens
  siRNA target sequence for NFKB1 (NM_003998.2,709-727).
cttaccctcaggtcaaaat

SEQ ID NO: 7946 - DNA, 19 bp, Homo sapiens
  siRNA target sequence for NFKB1 (NM_003998.2,719-737).
ggtcaaaatctgcaactat

SEQ ID NO: 7947 - DNA, 19 bp, Homo sapiens
  siRNA target sequence for NFKB1 (NM_003998.2,740-758).
gggaccagcaaaggttatt

SEQ ID NO: 7948 - DNA, 19 bp, Homo sapiens
  siRNA target sequence for NFKB1 (NM_003998.2,742-760).
gaccagcaaaggttattgt

SEQ ID NO: 7949 - DNA, 19 bp, Homo sapiens
  siRNA target sequence for NFKB1 (NM_003998.2,878-896).
cgcaaacctgggtatactt

SEQ ID NO: 7950 - DNA, 19 bp, Homo sapiens
  siRNA target sequence for NFKB1 (NM_003998.2,889-907).
gtatacttcatgtgacaaa

SEQ ID NO: 7951 - DNA, 19 bp, Homo sapiens
  siRNA target sequence for NFKB1 (NM_003998.2,949-967).
cgtgtataaggggctataa

SEQ ID NO: 7952 - DNA, 19 bp, Homo sapiens
  siRNA target sequence for NFKB1 (NM_003998.2,950-968).
gtgtataaggggctataat

SEQ ID NO: 7953 - DNA, 19 bp, Homo sapiens
  siRNA target sequence for NFKB1 (NM_003998.2,1101-1119).
gtggtgcggctcatgttta

SEQ ID NO: 7954 - DNA, 19 bp, Homo sapiens
  siRNA target sequence for NFKB1 (NM_003998.2,1103-1121).
ggtgcggctcatgtttaca

SEQ ID NO: 7955 - DNA, 19 bp, Homo sapiens
  siRNA target sequence for NFKB1 (NM_003998.2,1181-1199).
cgccatctatgacagtaaa

SEQ ID NO: 7956 - DNA, 19 bp, Homo sapiens
  siRNA target sequence for NFKB1 (NM_003998.2,1203-1221).
cccaatgcatccaacttga

SEQ ID NO: 7957 - DNA, 19 bp, Homo sapiens
  siRNA target sequence for NFKB1 (NM_003998.2,1204-1222).
ccaatgcatccaacttgaa

SEQ ID NO: 7958 - DNA, 19 bp, Homo sapiens
  siRNA target sequence for NFKB1 (NM_003998.2,1205-1223).
caatgcatccaacttgaaa

SEQ ID NO: 7959 - DNA, 19 bp, Homo sapiens
  siRNA target sequence for NFKB1 (NM_003998.2,1258-1276).
ctggaggggaggaaattta

SEQ ID NO: 7960 - DNA, 19 bp, Homo sapiens
  siRNA target sequence for NFKB1 (NM_003998.2,1302-1320).
gatgacatccagattcgat

SEQ ID NO: 7961 - DNA, 19 bp, Homo sapiens
  siRNA target sequence for NFKB1 (NM_003998.2,1305-1323).
gacatccagattcgatttt

SEQ ID NO: 7962 - DNA, 19 bp, Homo sapiens
  siRNA target sequence for NFKB1 (NM_003998.2,1373-1391).
ccccacagatgttcataga

SEQ ID NO: 7963 - DNA, 19 bp, Homo sapiens
  siRNA target sequence for NFKB1 (NM_003998.2,1461-1479).
gtccagcttcggaggaaat

SEQ ID NO: 7964 - DNA, 19 bp, Homo sapiens
  siRNA target sequence for NFKB1 (NM_003998.2,1463-1481).
ccagcttcggaggaaatct

SEQ ID NO: 7965 - DNA, 19 bp, Homo sapiens
  siRNA target sequence for NFKB1 (NM_003998.2,1492-1510).
ctagtgaaccaaaaccttt

SEQ ID NO: 7966 - DNA, 19 bp, Homo sapiens
  siRNA target sequence for NFKB1 (NM_003998.2,1572-1590).
cccaatttttcggatagtt

SEQ ID NO: 7967 - DNA, 19 bp, Homo sapiens
  siRNA target sequence for NFKB1 (NM_003998.2,1620-1638).
ggcggaggcatgtttggta

SEQ ID NO: 7968 - DNA, 19 bp, Homo sapiens
  siRNA target sequence for NFKB1 (NM_003998.2,1688-1706).
cccacactatggatttcct

SEQ ID NO: 7969 - DNA, 19 bp, Homo sapiens
  siRNA target sequence for NFKB1 (NM_003998.2,1689-1707).
ccacactatggatttccta

SEQ ID NO: 7970 - DNA, 19 bp, Homo sapiens
  siRNA target sequence for NFKB1 (NM_003998.2,1732-1750).
ctggaactactaaatctaa

SEQ ID NO: 7971 - DNA, 19 bp, Homo sapiens
  siRNA target sequence for NFKB1 (NM_003998.2,1767-1785).
ggaaccatggacactgaat

SEQ ID NO: 7972 - DNA, 19 bp, Homo sapiens
  siRNA target sequence for NFKB1 (NM_003998.2,1772-1790).
catggacactgaatctaaa

SEQ ID NO: 7973 - DNA, 19 bp, Homo sapiens
  siRNA target sequence for NFKB1 (NM_003998.2,1906-1924).
gtgaggtcactctaacgta

SEQ ID NO: 7974 - DNA, 19 bp, Homo sapiens
  siRNA target sequence for NFKB1 (NM_003998.2,1911-1929).
gtcactctaacgtatgcaa

SEQ ID NO: 7975 - DNA, 19 bp, Homo sapiens
  siRNA target sequence for NFKB1 (NM_003998.2,1921-1939).
cgtatgcaacaggaacaaa

SEQ ID NO: 7976 - DNA, 19 bp, Homo sapiens
  siRNA target sequence for NFKB1 (NM_003998.2,1948-1966).
gtgctggagttcaggataa

SEQ ID NO: 7977 - DNA, 19 bp, Homo sapiens
  siRNA target sequence for NFKB1 (NM_003998.2,2118-2136).
gcaatcatccaccttcatt

SEQ ID NO: 7978 - DNA, 19 bp, Homo sapiens
  siRNA target sequence for NFKB1 (NM_003998.2,2303-2321).
ggaccgcttgggtaactct

SEQ ID NO: 7979 - DNA, 19 bp, Homo sapiens
  siRNA target sequence for NFKB1 (NM_003998.2,2307-2325).
cgcttgggtaactctgttt

SEQ ID NO: 7980 - DNA, 19 bp, Homo sapiens
  siRNA target sequence for NFKB1 (NM_003998.2,2358-2376).
gttctcagtatcttactca

SEQ ID NO: 7981 - DNA, 19 bp, Homo sapiens
  siRNA target sequence for NFKB1 (NM_003998.2,2411-2429).
caacggggacggtctgaat

SEQ ID NO: 7982 - DNA, 19 bp, Homo sapiens
  siRNA target sequence for NFKB1 (NM_003998.2,2420-2438).
cggtctgaatgccattcat

SEQ ID NO: 7983 - DNA, 19 bp, Homo sapiens
  siRNA target sequence for NFKB1 (NM_003998.2,2422-2440).
gtctgaatgccattcatct

SEQ ID NO: 7984 - DNA, 19 bp, Homo sapiens
  siRNA target sequence for NFKB1 (NM_003998.2,2452-2470).
gcaatagcctgccatgttt

SEQ ID NO: 7985 - DNA, 19 bp, Homo sapiens
  siRNA target sequence for NFKB1 (NM_003998.2,2547-2565).
gtggagcacgacaacatct

SEQ ID NO: 7986 - DNA, 19 bp, Homo sapiens
  siRNA target sequence for NFKB1 (NM_003998.2,2550-2568).
gagcacgacaacatctcat

SEQ ID NO: 7987 - DNA, 19 bp, Homo sapiens
  siRNA target sequence for NFKB1 (NM_003998.2,2714-2732).
gaactttgagcctctctat

SEQ ID NO: 7988 - DNA, 19 bp, Homo sapiens
  siRNA target sequence for NFKB1 (NM_003998.2,2785-2803).
gaaccacgcctctagatat

SEQ ID NO: 7989 - DNA, 19 bp, Homo sapiens
  siRNA target sequence for NFKB1 (NM_003998.2,2806-2824).
ccaccagctggcaggtatt

SEQ ID NO: 7990 - DNA, 19 bp, Homo sapiens
  siRNA target sequence for NFKB1 (NM_003998.2,2913-2931).
gtgaagctgcagctgtata

SEQ ID NO: 7991 - DNA, 19 bp, Homo sapiens
  siRNA target sequence for NFKB1 (NM_003998.2,2918-2936).
gctgcagctgtataagtta

SEQ ID NO: 7992 - DNA, 19 bp, Homo sapiens
  siRNA target sequence for NFKB1 (NM_003998.2,2925-2943).
ctgtataagttactagaaa

SEQ ID NO: 7993 - DNA, 19 bp, Homo sapiens
  siRNA target sequence for NFKB1 (NM_003998.2,2988-3006).
ggtctggggatacttaata

SEQ ID NO: 7994 - DNA, 19 bp, Homo sapiens
  siRNA target sequence for NFKB1 (NM_003998.2,2989-3007).
gtctggggatacttaataa

SEQ ID NO: 7995 - DNA, 19 bp, Homo sapiens
  siRNA target sequence for NFKB1 (NM_003998.2,3020-3038).
gagtcctgctccttccaaa

SEQ ID NO: 7996 - DNA, 19 bp, Homo sapiens
  siRNA target sequence for NFKB1 (NM_003998.2,3040-3058).
cacttatggacaactatga

SEQ ID NO: 7997 - DNA, 19 bp, Homo sapiens
  siRNA target sequence for NFKB1 (NM_003998.2,3109-3127).
gctacaccgaagcaattga

SEQ ID NO: 7998 - DNA, 19 bp, Homo sapiens
  siRNA target sequence for NFKB1 (NM_003998.2,3110-3128).
ctacaccgaagcaattgaa

SEQ ID NO: 7999 - DNA, 19 bp, Homo sapiens
  siRNA target sequence for NFKB1 (NM_003998.2,3115-3133).
ccgaagcaattgaagtgat

SEQ ID NO: 8000 - DNA, 19 bp, Homo sapiens
  siRNA target sequence for NFKB1 (NM_003998.2,3196-3214).
cctccacaaggcagcaaat

SEQ ID NO: 8001 - DNA, 19 bp, Homo sapiens
  siRNA target sequence for NFKB1 (NM_003998.2,3199-3217).
ccacaaggcagcaaataga

SEQ ID NO: 8002 - DNA, 19 bp, Homo sapiens
  siRNA target sequence for NFKB1 (NM_003998.2,3310-3328).
cactgctaactctcaacaa

SEQ ID NO: 8003 - DNA, 19 bp, Homo sapiens
  siRNA target sequence for NFKB1 (NM_003998.2,3347-3365).
gcaggaaggacctctagaa

SEQ ID NO: 8004 - DNA, 19 bp, Homo sapiens
  siRNA target sequence for NFKB1 (NM_003998.2,3355-3373).
gacctctagaaggcaaaat

SEQ ID NO: 8005 - DNA, 19 bp, Homo sapiens
  siRNA target sequence for NFKB2 (NM_002502.2,182-200).
ccaggtctggatggtatta

SEQ ID NO: 8006 - DNA, 19 bp, Homo sapiens
  siRNA target sequence for NFKB2 (NM_002502.2,186-204).
gtctggatggtattattga

SEQ ID NO: 8007 - DNA, 19 bp, Homo sapiens
  siRNA target sequence for NFKB2 (NM_002502.2,188-206).
ctggatggtattattgaat

SEQ ID NO: 8008 - DNA, 19 bp, Homo sapiens
  siRNA target sequence for NFKB2 (NM_002502.2,203-221).
gaatatgatgatttcaaat

SEQ ID NO: 8009 - DNA, 19 bp, Homo sapiens
  siRNA target sequence for NFKB2 (NM_002502.2,307-325).
gagaggcttccgatttcga

SEQ ID NO: 8010 - DNA, 19 bp, Homo sapiens
  siRNA target sequence for NFKB2 (NM_002502.2,309-327).
gaggcttccgatttcgata

SEQ ID NO: 8011 - DNA, 19 bp, Homo sapiens
  siRNA target sequence for NFKB2 (NM_002502.2,390-408).
cctatcccactgtcaagat

SEQ ID NO: 8012 - DNA, 19 bp, Homo sapiens
  siRNA target sequence for NFKB2 (NM_002502.2,395-413).
cccactgtcaagatctgta

SEQ ID NO: 8013 - DNA, 19 bp, Homo sapiens
  siRNA target sequence for NFKB2 (NM_002502.2,396-414).
ccactgtcaagatctgtaa

SEQ ID NO: 8014 - DNA, 19 bp, Homo sapiens
  siRNA target sequence for NFKB2 (NM_002502.2,516-534).
ggatctgcgccgtttctgt

SEQ ID NO: 8015 - DNA, 19 bp, Homo sapiens
  siRNA target sequence for NFKB2 (NM_002502.2,601-619).
gatggggactatgatacaa

SEQ ID NO: 8016 - DNA, 19 bp, Homo sapiens
  siRNA target sequence for NFKB2 (NM_002502.2,604-622).
ggggactatgatacaaaaa

SEQ ID NO: 8017 - DNA, 19 bp, Homo sapiens
  siRNA target sequence for NFKB2 (NM_002502.2,712-730).
ggtgatggatctgagtata

SEQ ID NO: 8018 - DNA, 19 bp, Homo sapiens
  siRNA target sequence for NFKB2 (NM_002502.2,834-852).
gggcatcaaacctgaagat

SEQ ID NO: 8019 - DNA, 19 bp, Homo sapiens
  siRNA target sequence for NFKB2 (NM_002502.2,835-853).
ggcatcaaacctgaagatt

SEQ ID NO: 8020 - DNA, 19 bp, Homo sapiens
  siRNA target sequence for NFKB2 (NM_002502.2,836-854).
gcatcaaacctgaagattt

SEQ ID NO: 8021 - DNA, 19 bp, Homo sapiens
  siRNA target sequence for NFKB2 (NM_002502.2,934-952).
cattgaggttcggttctat

SEQ ID NO: 8022 - DNA, 19 bp, Homo sapiens
  siRNA target sequence for NFKB2 (NM_002502.2,1037-1055).
cccccctatcacaagatga

SEQ ID NO: 8023 - DNA, 19 bp, Homo sapiens
  siRNA target sequence for NFKB2 (NM_002502.2,1040-1058).
ccctatcacaagatgaaga

SEQ ID NO: 8024 - DNA, 19 bp, Homo sapiens
  siRNA target sequence for NFKB2 (NM_002502.2,1057-1075).
gattgagcggcctgtaaca

SEQ ID NO: 8025 - DNA, 19 bp, Homo sapiens
  siRNA target sequence for NFKB2 (NM_002502.2,1063-1081).
gcggcctgtaacagtgttt

SEQ ID NO: 8026 - DNA, 19 bp, Homo sapiens
  siRNA target sequence for NFKB2 (NM_002502.2,1107-1125).
gggacgtgtctgattccaa

SEQ ID NO: 8027 - DNA, 19 bp, Homo sapiens
  siRNA target sequence for NFKB2 (NM_002502.2,1108-1126).
ggacgtgtctgattccaaa

SEQ ID NO: 8028 - DNA, 19 bp, Homo sapiens
  siRNA target sequence for NFKB2 (NM_002502.2,1281-1299).
gtggcagcctcggtttctt

SEQ ID NO: 8029 - DNA, 19 bp, Homo sapiens
  siRNA target sequence for NFKB2 (NM_002502.2,1654-1672).
cgggcagaccagtgtcatt

SEQ ID NO: 8030 - DNA, 19 bp, Homo sapiens
  siRNA target sequence for NFKB2 (NM_002502.2,1667-1685).
gtcattgagcagatagtct

SEQ ID NO: 8031 - DNA, 19 bp, Homo sapiens
  siRNA target sequence for NFKB2 (NM_002502.2,1925-1943).
gtgccccagctgttgcata

SEQ ID NO: 8032 - DNA, 19 bp, Homo sapiens
  siRNA target sequence for NFKB2 (NM_002502.2,1936-1954).
gttgcatatgcctgacttt

SEQ ID NO: 8033 - DNA, 19 bp, Homo sapiens
  siRNA target sequence for NFKB2 (NM_002502.2,2152-2170).
cacctttgcgggaaacaca

SEQ ID NO: 8034 - DNA, 19 bp, Homo sapiens
  siRNA target sequence for NFKB2 (NM_002502.2,2903-2921).
cgtccccacctatttcaaa

SEQ ID NO: 8035 - DNA, 19 bp, Homo sapiens
  siRNA target sequence for NFKB2 (NM_002502.2,2907-2925).
cccacctatttcaaatctt

SEQ ID NO: 8036 - DNA, 19 bp, Homo sapiens
  siRNA target sequence for NFX1 (NM_002504.3,565-583).
caaaaaagcaacacagttt

SEQ ID NO: 8037 - DNA, 19 bp, Homo sapiens
  siRNA target sequence for NFX1 (NM_002504.3,592-610).
ctatggtagaggaccaaaa

SEQ ID NO: 8038 - DNA, 19 bp, Homo sapiens
  siRNA target sequence for NFX1 (NM_002504.3,613-631).
caaggggaaactcaaatgt

SEQ ID NO: 8039 - DNA, 19 bp, Homo sapiens
  siRNA target sequence for NFX1 (NM_002504.3,665-683).
gatgctggacccgaaagta

SEQ ID NO: 8040 - DNA, 19 bp, Homo sapiens
  siRNA target sequence for NFX1 (NM_002504.3,726-744).
cctctagaaaaggagtatt

SEQ ID NO: 8041 - DNA, 19 bp, Homo sapiens
  siRNA target sequence for NFX1 (NM_002504.3,751-769).
gtatggagccagacgaaat

SEQ ID NO: 8042 - DNA, 19 bp, Homo sapiens
  siRNA target sequence for NFX1 (NM_002504.3,823-841).
gccacgaccaggcagaaat

SEQ ID NO: 8043 - DNA, 19 bp, Homo sapiens
  siRNA target sequence for NFX1 (NM_002504.3,853-871).
ggagggccaccgacataca

SEQ ID NO: 8044 - DNA, 19 bp, Homo sapiens
  siRNA target sequence for NFX1 (NM_002504.3,854-872).
gagggccaccgacatacaa

SEQ ID NO: 8045 - DNA, 19 bp, Homo sapiens
  siRNA target sequence for NFX1 (NM_002504.3,1087-1105).
gcacacaggttctctaatt

SEQ ID NO: 8046 - DNA, 19 bp, Homo sapiens
  siRNA target sequence for NFX1 (NM_002504.3,1134-1152).
gcatggtgtgctgtgaatt

SEQ ID NO: 8047 - DNA, 19 bp, Homo sapiens
  siRNA target sequence for NFX1 (NM_002504.3,1186-1204).
gagctgttaccatgtgttt

SEQ ID NO: 8048 - DNA, 19 bp, Homo sapiens
  siRNA target sequence for NFX1 (NM_002504.3,1189-1207).
ctgttaccatgtgtttcat

SEQ ID NO: 8049 - DNA, 19 bp, Homo sapiens
  siRNA target sequence for NFX1 (NM_002504.3,1275-1293).
gccctgcctgtcagaatgt

SEQ ID NO: 8050 - DNA, 19 bp, Homo sapiens
  siRNA target sequence for NFX1 (NM_002504.3,1299-1317).
cacatgttcctaataccta

SEQ ID NO: 8051 - DNA, 19 bp, Homo sapiens
  siRNA target sequence for NFX1 (NM_002504.3,1308-1326).
ctaatacctacacttgttt

SEQ ID NO: 8052 - DNA, 19 bp, Homo sapiens
  siRNA target sequence for NFX1 (NM_002504.3,1351-1369).
gtggagcagaaatgaaatt

SEQ ID NO: 8053 - DNA, 19 bp, Homo sapiens
  siRNA target sequence for NFX1 (NM_002504.3,1551-1569).
ctaacccatgtgagaatat

SEQ ID NO: 8054 - DNA, 19 bp, Homo sapiens
  siRNA target sequence for NFX1 (NM_002504.3,1622-1640).
cagccttgccagatcattt

SEQ ID NO: 8055 - DNA, 19 bp, Homo sapiens
  siRNA target sequence for NFX1 (NM_002504.3,1666-1684).
cacctcccgagatgtgtta

SEQ ID NO: 8056 - DNA, 19 bp, Homo sapiens
  siRNA target sequence for NFX1 (NM_002504.3,1669-1687).
ctcccgagatgtgttatgt

SEQ ID NO: 8057 - DNA, 19 bp, Homo sapiens
  siRNA target sequence for NFX1 (NM_002504.3,1686-1704).
gtggaaccgatgtaggaaa

SEQ ID NO: 8058 - DNA, 19 bp, Homo sapiens
  siRNA target sequence for NFX1 (NM_002504.3,1718-1736).
ggggatttcagctgtttaa

SEQ ID NO: 8059 - DNA, 19 bp, Homo sapiens
  siRNA target sequence for NFX1 (NM_002504.3,1753-1771).
cttgaaatgcggtaaccat

SEQ ID NO: 8060 - DNA, 19 bp, Homo sapiens
  siRNA target sequence for NFX1 (NM_002504.3,1864-1882).
cagccaattgctagaactt

SEQ ID NO: 8061 - DNA, 19 bp, Homo sapiens
  siRNA target sequence for NFX1 (NM_002504.3,1873-1891).
gctagaacttggaagtagt

SEQ ID NO: 8062 - DNA, 19 bp, Homo sapiens
  siRNA target sequence for NFX1 (NM_002504.3,1874-1892).
ctagaacttggaagtagta

SEQ ID NO: 8063 - DNA, 19 bp, Homo sapiens
  siRNA target sequence for NFX1 (NM_002504.3,1951-1969).
gccttgtggttccttagat

SEQ ID NO: 8064 - DNA, 19 bp, Homo sapiens
  siRNA target sequence for NFX1 (NM_002504.3,2020-2038).
ctctcgcacatcagttatt

SEQ ID NO: 8065 - DNA, 19 bp, Homo sapiens
  siRNA target sequence for NFX1 (NM_002504.3,2024-2042).
cgcacatcagttatttcct

SEQ ID NO: 8066 - DNA, 19 bp, Homo sapiens
  siRNA target sequence for NFX1 (NM_002504.3,2076-2094).
gtaccagtctcaaaagtga

SEQ ID NO: 8067 - DNA, 19 bp, Homo sapiens
  siRNA target sequence for NFX1 (NM_002504.3,2112-2130).
gtgacaagcggtgtaacaa

SEQ ID NO: 8068 - DNA, 19 bp, Homo sapiens
  siRNA target sequence for NFX1 (NM_002504.3,2114-2132).
gacaagcggtgtaacaaga

SEQ ID NO: 8069 - DNA, 19 bp, Homo sapiens
  siRNA target sequence for NFX1 (NM_002504.3,2116-2134).
caagcggtgtaacaagaaa

SEQ ID NO: 8070 - DNA, 19 bp, Homo sapiens
  siRNA target sequence for NFX1 (NM_002504.3,2137-2155).
gttgtgtggacggcataaa

SEQ ID NO: 8071 - DNA, 19 bp, Homo sapiens
  siRNA target sequence for NFX1 (NM_002504.3,2140-2158).
gtgtggacggcataaatgt

SEQ ID NO: 8072 - DNA, 19 bp, Homo sapiens
  siRNA target sequence for NFX1 (NM_002504.3,2142-2160).
gtggacggcataaatgtaa

SEQ ID NO: 8073 - DNA, 19 bp, Homo sapiens
  siRNA target sequence for NFX1 (NM_002504.3,2147-2165).
cggcataaatgtaatgaga

SEQ ID NO: 8074 - DNA, 19 bp, Homo sapiens
  siRNA target sequence for NFX1 (NM_002504.3,2216-2234).
ctccgttgtggccttcata

SEQ ID NO: 8075 - DNA, 19 bp, Homo sapiens
  siRNA target sequence for NFX1 (NM_002504.3,2227-2245).
ccttcataggtgtgaagaa

SEQ ID NO: 8076 - DNA, 19 bp, Homo sapiens
  siRNA target sequence for NFX1 (NM_002504.3,2275-2293).
ctggcaagccagttttgat

SEQ ID NO: 8077 - DNA, 19 bp, Homo sapiens
  siRNA target sequence for NFX1 (NM_002504.3,2277-2295).
ggcaagccagttttgatga

SEQ ID NO: 8078 - DNA, 19 bp, Homo sapiens
  siRNA target sequence for NFX1 (NM_002504.3,2278-2296).
gcaagccagttttgatgaa

SEQ ID NO: 8079 - DNA, 19 bp, Homo sapiens
  siRNA target sequence for NFX1 (NM_002504.3,2310-2328).
gtggtgcatcagtgattta

SEQ ID NO: 8080 - DNA, 19 bp, Homo sapiens
  siRNA target sequence for NFX1 (NM_002504.3,2392-2410).
gtgtgaccatccagtatat

SEQ ID NO: 8081 - DNA, 19 bp, Homo sapiens
  siRNA target sequence for NFX1 (NM_002504.3,2394-2412).
gtgaccatccagtatatca

SEQ ID NO: 8082 - DNA, 19 bp, Homo sapiens
  siRNA target sequence for NFX1 (NM_002504.3,2396-2414).
gaccatccagtatatcatt

SEQ ID NO: 8083 - DNA, 19 bp, Homo sapiens
  siRNA target sequence for NFX1 (NM_002504.3,2438-2456).
cccccttgcactttcctaa

SEQ ID NO: 8084 - DNA, 19 bp, Homo sapiens
  siRNA target sequence for NFX1 (NM_002504.3,2442-2460).
cttgcactttcctaactca

SEQ ID NO: 8085 - DNA, 19 bp, Homo sapiens
  siRNA target sequence for NFX1 (NM_002504.3,2501-2519).
ccctgtcacctggttgata

SEQ ID NO: 8086 - DNA, 19 bp, Homo sapiens
  siRNA target sequence for NFX1 (NM_002504.3,2507-2525).
cacctggttgatatctctt

SEQ ID NO: 8087 - DNA, 19 bp, Homo sapiens
  siRNA target sequence for NFX1 (NM_002504.3,2691-2709).
gccctgtgactgcttgtaa

SEQ ID NO: 8088 - DNA, 19 bp, Homo sapiens
  siRNA target sequence for NFX1 (NM_002504.3,2696-2714).
gtgactgcttgtaaagcta

SEQ ID NO: 8089 - DNA, 19 bp, Homo sapiens
  siRNA target sequence for NFX1 (NM_002504.3,2717-2735).
gtagagctacagtgtgaat

SEQ ID NO: 8090 - DNA, 19 bp, Homo sapiens
  siRNA target sequence for NFX1 (NM_002504.3,2766-2784).
ctgaagcatctagtactta

SEQ ID NO: 8091 - DNA, 19 bp, Homo sapiens
  siRNA target sequence for NFX1 (NM_002504.3,2771-2789).
gcatctagtacttatcaaa

SEQ ID NO: 8092 - DNA, 19 bp, Homo sapiens
  siRNA target sequence for NFX1 (NM_002504.3,2775-2793).
ctagtacttatcaaagaat

SEQ ID NO: 8093 - DNA, 19 bp, Homo sapiens
  siRNA target sequence for NFX1 (NM_002504.3,2848-2866).
ggagatcagcaagttaatt

SEQ ID NO: 8094 - DNA, 19 bp, Homo sapiens
  siRNA target sequence for NFX1 (NM_002504.3,2961-2979).
gtgaggattctgatccttt

SEQ ID NO: 8095 - DNA, 19 bp, Homo sapiens
  siRNA target sequence for NFX1 (NM_002504.3,2965-2983).
ggattctgatcctttcaat

SEQ ID NO: 8096 - DNA, 19 bp, Homo sapiens
  siRNA target sequence for NFX1 (NM_002504.3,2966-2984).
gattctgatcctttcaata

SEQ ID NO: 8097 - DNA, 19 bp, Homo sapiens
  siRNA target sequence for NFX1 (NM_002504.3,2972-2990).
gatcctttcaatatacgtt

SEQ ID NO: 8098 - DNA, 19 bp, Homo sapiens
  siRNA target sequence for NFX1 (NM_002504.3,2987-3005).
cgttcttcagggtcaaaat

SEQ ID NO: 8099 - DNA, 19 bp, Homo sapiens
  siRNA target sequence for NFX1 (NM_002504.3,2996-3014).
gggtcaaaattcagtgata

SEQ ID NO: 8100 - DNA, 19 bp, Homo sapiens
  siRNA target sequence for NFX1 (NM_002504.3,2998-3016).
gtcaaaattcagtgatagt

SEQ ID NO: 8101 - DNA, 19 bp, Homo sapiens
  siRNA target sequence for NFX1 (NM_002504.3,3054-3072).
gtgacgttgagaaggaaat

SEQ ID NO: 8102 - DNA, 19 bp, Homo sapiens
  siRNA target sequence for NFX1 (NM_002504.3,3164-3182).
catgacttggcccaagttt

SEQ ID NO: 8103 - DNA, 19 bp, Homo sapiens
  siRNA target sequence for NFX1 (NM_002504.3,3275-3293).
ctgacaggtgtgcttgaaa

SEQ ID NO: 8104 - DNA, 19 bp, Homo sapiens
  siRNA target sequence for NFX1 (NM_002504.3,3336-3354).
gacatcagtcagacaagaa

SEQ ID NO: 8105 - DNA, 19 bp, Homo sapiens
  siRNA target sequence for NFX1 (NM_002504.3,3352-3370).
gaatcctgggagcagtaat

SEQ ID NO: 8106 - DNA, 19 bp, Homo sapiens
  siRNA target sequence for NFX1 (NM_147133.1,3090-3108).
ccgtgaataaggttgaagt

SEQ ID NO: 8107 - DNA, 19 bp, Homo sapiens
  siRNA target sequence for NFYA (NM_002505.3,205-223).
gttcgacagagcagattgt

SEQ ID NO: 8108 - DNA, 19 bp, Homo sapiens
  siRNA target sequence for NFYA (NM_002505.3,208-226).
cgacagagcagattgttgt

SEQ ID NO: 8109 - DNA, 19 bp, Homo sapiens
  siRNA target sequence for NFYA (NM_002505.3,339-357).
gtccaagggcagccattaa

SEQ ID NO: 8110 - DNA, 19 bp, Homo sapiens
  siRNA target sequence for NFYA (NM_002505.3,670-688).
ggcagaccatcgtctatca

SEQ ID NO: 8111 - DNA, 19 bp, Homo sapiens
  siRNA target sequence for NFYA (NM_002505.3,671-689).
gcagaccatcgtctatcaa

SEQ ID NO: 8112 - DNA, 19 bp, Homo sapiens
  siRNA target sequence for NFYA (NM_002505.3,680-698).
cgtctatcaaccagttaat

SEQ ID NO: 8113 - DNA, 19 bp, Homo sapiens
  siRNA target sequence for NFYA (NM_002505.3,774-792).
ggagcacagattgttcaaa

SEQ ID NO: 8114 - DNA, 19 bp, Homo sapiens
  siRNA target sequence for NFYA (NM_002505.3,855-873).
gcaggcaatgtggtcaatt

SEQ ID NO: 8115 - DNA, 19 bp, Homo sapiens
  siRNA target sequence for NFYA (NM_002505.3,1012-1030).
ggcaagcccgagctaaact

SEQ ID NO: 8116 - DNA, 19 bp, Homo sapiens
  siRNA target sequence for NFYA (NM_002505.3,1013-1031).
gcaagcccgagctaaacta

SEQ ID NO: 8117 - DNA, 19 bp, Homo sapiens
  siRNA target sequence for NFYA (NM_002505.3,1156-1174).
cccatatgcaggatccaaa

SEQ ID NO: 8118 - DNA, 19 bp, Homo sapiens
  siRNA target sequence for NFYA (NM_002505.3,1171-1189).
caaaccaagccgatgaaga

SEQ ID NO: 8119 - DNA, 19 bp, Homo sapiens
  siRNA target sequence for NFYA (NM_002505.3,1181-1199).
cgatgaagaagcaatgaca

SEQ ID NO: 8120 - DNA, 19 bp, Homo sapiens
  siRNA target sequence for NFYB (NM_006166.2,208-226).
ggacagcatgaatgatcat

SEQ ID NO: 8121 - DNA, 19 bp, Homo sapiens
  siRNA target sequence for NFYB (NM_006166.2,435-453).
caatcaatggagaagatat

SEQ ID NO: 8122 - DNA, 19 bp, Homo sapiens
  siRNA target sequence for NFYB (NM_006166.2,667-685).
ggtttacacaacatcatat

SEQ ID NO: 8123 - DNA, 19 bp, Homo sapiens
  siRNA target sequence for NFYB (NM_006166.2,675-693).
caacatcatatcaacagat

SEQ ID NO: 8124 - DNA, 19 bp, Homo sapiens
  siRNA target sequence for NFYC (NM_014223.2,255-273).
cctcgggtcatggaagaaa

SEQ ID NO: 8125 - DNA, 19 bp, Homo sapiens
  siRNA target sequence for NFYC (NM_014223.2,256-274).
ctcgggtcatggaagaaat

SEQ ID NO: 8126 - DNA, 19 bp, Homo sapiens
  siRNA target sequence for NFYC (NM_014223.2,275-293).
ccggaatttaacagtgaaa

SEQ ID NO: 8127 - DNA, 19 bp, Homo sapiens
  siRNA target sequence for NFYC (NM_014223.2,312-330).
ctcccactggctcgtatta

SEQ ID NO: 8128 - DNA, 19 bp, Homo sapiens
  siRNA target sequence for NFYC (NM_014223.2,315-333).
ccactggctcgtattaaga

SEQ ID NO: 8129 - DNA, 19 bp, Homo sapiens
  siRNA target sequence for NFYC (NM_014223.2,316-334).
cactggctcgtattaagaa

SEQ ID NO: 8130 - DNA, 19 bp, Homo sapiens
  siRNA target sequence for NFYC (NM_014223.2,324-342).
cgtattaagaagattatga

SEQ ID NO: 8131 - DNA, 19 bp, Homo sapiens
  siRNA target sequence for NFYC (NM_014223.2,393-411).
gccaaggcagcccagattt

SEQ ID NO: 8132 - DNA, 19 bp, Homo sapiens
  siRNA target sequence for NFYC (NM_014223.2,464-482).
ccggactctacagagaaat

SEQ ID NO: 8133 - DNA, 19 bp, Homo sapiens
  siRNA target sequence for NFYC (NM_014223.2,488-506).
cgccatggcaattacaaaa

SEQ ID NO: 8134 - DNA, 19 bp, Homo sapiens
  siRNA target sequence for NFYC (NM_014223.2,489-507).
gccatggcaattacaaaat

SEQ ID NO: 8135 - DNA, 19 bp, Homo sapiens
  siRNA target sequence for NFYC (NM_014223.2,490-508).
ccatggcaattacaaaatt

SEQ ID NO: 8136 - DNA, 19 bp, Homo sapiens
  siRNA target sequence for NFYC (NM_014223.2,494-512).
ggcaattacaaaatttgat

SEQ ID NO: 8137 - DNA, 19 bp, Homo sapiens
  siRNA target sequence for NFYC (NM_014223.2,502-520).
caaaatttgatcagtttga

SEQ ID NO: 8138 - DNA, 19 bp, Homo sapiens
  siRNA target sequence for NFYC (NM_014223.2,510-528).
gatcagtttgattttctca

SEQ ID NO: 8139 - DNA, 19 bp, Homo sapiens
  siRNA target sequence for NFYC (NM_014223.2,578-596).
ggtgcgccagtctgtaact

SEQ ID NO: 8140 - DNA, 19 bp, Homo sapiens
  siRNA target sequence for NFYC (NM_014223.2,601-619).
ccgagccagtccagtacta

SEQ ID NO: 8141 - DNA, 19 bp, Homo sapiens
  siRNA target sequence for NFYC (NM_014223.2,602-620).
cgagccagtccagtactat

SEQ ID NO: 8142 - DNA, 19 bp, Homo sapiens
  siRNA target sequence for NFYC (NM_014223.2,705-723).
cagcctgggcagatcatca

SEQ ID NO: 8143 - DNA, 19 bp, Homo sapiens
  siRNA target sequence for NFYC (NM_014223.2,997-1015).
ccaccaatgctcaacagat

SEQ ID NO: 8144 - DNA, 19 bp, Homo sapiens
  siRNA target sequence for NFYC (NM_014223.2,998-1016).
caccaatgctcaacagatt

SEQ ID NO: 8145 - DNA, 19 bp, Homo sapiens
  siRNA target sequence for NFYC (NM_014223.2,1001-1019).
caatgctcaacagattaca

SEQ ID NO: 8146 - DNA, 19 bp, Homo sapiens
  siRNA target sequence for NKX2-2 (NM_002509.2,389-407).
cggtcaaggacatcttaga

SEQ ID NO: 8147 - DNA, 19 bp, Homo sapiens
  siRNA target sequence for NKX2-2 (NM_002509.2,593-611).
gcaccgagggccttcagta

SEQ ID NO: 8148 - DNA, 19 bp, Homo sapiens
  siRNA target sequence for NKX2-2 (NM_002509.2,685-703).
gagtcaccggacaatgaca

SEQ ID NO: 8149 - DNA, 19 bp, Homo sapiens
  siRNA target sequence for NKX2-2 (NM_002509.2,743-761).
gaaagcggcgagtgctttt

SEQ ID NO: 8150 - DNA, 19 bp, Homo sapiens
  siRNA target sequence for NKX2-2 (NM_002509.2,982-1000).
gtcagggacggcaaaccat

SEQ ID NO: 8151 - DNA, 19 bp, Homo sapiens
  siRNA target sequence for NKX2-3 (NM_145285.1,326-344).
cgctgaggggacgcaattt

SEQ ID NO: 8152 - DNA, 19 bp, Homo sapiens
  siRNA target sequence for NKX2-3 (NM_145285.1,327-345).
gctgaggggacgcaatttt

SEQ ID NO: 8153 - DNA, 19 bp, Homo sapiens
  siRNA target sequence for NKX2-3 (NM_145285.1,372-390).
gacgagggcgagaaattgt

SEQ ID NO: 8154 - DNA, 19 bp, Homo sapiens
  siRNA target sequence for NKX2-3 (NM_145285.1,378-396).
ggcgagaaattgtcctatt

SEQ ID NO: 8155 - DNA, 19 bp, Homo sapiens
  siRNA target sequence for NKX2-3 (NM_145285.1,768-786).
cagaatcgcaggtacaagt

SEQ ID NO: 8156 - DNA, 19 bp, Homo sapiens
  siRNA target sequence for NKX2-5 (NM_004387.1,489-507).
gaccctagagccgaaaaga

SEQ ID NO: 8157 - DNA, 19 bp, Homo sapiens
  siRNA target sequence for NKX2-5 (NM_004387.1,493-511).
ctagagccgaaaagaaaga

SEQ ID NO: 8158 - DNA, 19 bp, Homo sapiens
  siRNA target sequence for NKX2-5 (NM_004387.1,909-927).
ctcaatccctacggttata

SEQ ID NO: 8159 - DNA, 19 bp, Homo sapiens
  siRNA target sequence for NKX2-8 (NM_014360.2,222-240).
cgtgcgcagccttctagat

SEQ ID NO: 8160 - DNA, 19 bp, Homo sapiens
  siRNA target sequence for NKX2-8 (NM_014360.2,225-243).
gcgcagccttctagattta

SEQ ID NO: 8161 - DNA, 19 bp, Homo sapiens
  siRNA target sequence for NKX2-8 (NM_014360.2,428-446).
cggacgccgagaaaaggaa

SEQ ID NO: 8162 - DNA, 19 bp, Homo sapiens
  siRNA target sequence for NKX2-8 (NM_014360.2,865-883).
gcctaccagcacttagcat

SEQ ID NO: 8163 - DNA, 19 bp, Homo sapiens
  siRNA target sequence for NKX3-1 (NM_006167.2,338-356).
ggcacttggggtcttatct

SEQ ID NO: 8164 - DNA, 19 bp, Homo sapiens
  siRNA target sequence for NKX3-1 (NM_006167.2,340-358).
cacttggggtcttatctgt

SEQ ID NO: 8165 - DNA, 19 bp, Homo sapiens
  siRNA target sequence for NKX3-1 (NM_006167.2,567-585).
gaacagacgctataagact

SEQ ID NO: 8166 - DNA, 19 bp, Homo sapiens
  siRNA target sequence for NKX3-1 (NM_006167.2,674-692).
ccctggtctccgtgtataa

SEQ ID NO: 8167 - DNA, 19 bp, Homo sapiens
  siRNA target sequence for NKX3-1 (NM_006167.2,676-694).
ctggtctccgtgtataaca

SEQ ID NO: 8168 - DNA, 19 bp, Homo sapiens
  siRNA target sequence for NKX6-1 (NM_006168.1,481-499).
ggactgccacgctttagca

SEQ ID NO: 8169 - DNA, 19 bp, Homo sapiens
  siRNA target sequence for NKX6-1 (NM_006168.1,663-681).
ggcctgtacccctcatcaa

SEQ ID NO: 8170 - DNA, 19 bp, Homo sapiens
  siRNA target sequence for NKX6-1 (NM_006168.1,674-692).
ctcatcaaggatccatttt

SEQ ID NO: 8171 - DNA, 19 bp, Homo sapiens
  siRNA target sequence for NKX6-1 (NM_006168.1,718-736).
cacacgagacccacttttt

SEQ ID NO: 8172 - DNA, 19 bp, Homo sapiens
  siRNA target sequence for NKX6-1 (NM_006168.1,767-785).
ctttcgaacaaacaaaata

SEQ ID NO: 8173 - DNA, 19 bp, Homo sapiens
  siRNA target sequence for NKX6-1 (NM_006168.1,805-823).
gctcgtttggcctattcgt

SEQ ID NO: 8174 - DNA, 19 bp, Homo sapiens
  siRNA target sequence for NKX6-1 (NM_006168.1,806-824).
ctcgtttggcctattcgtt

SEQ ID NO: 8175 - DNA, 19 bp, Homo sapiens
  siRNA target sequence for NKX6-2 (NM_177400.1,695-713).
cggaggacgacgacgaata

SEQ ID NO: 8176 - DNA, 19 bp, Homo sapiens
  siRNA target sequence for NME2 (NM_002512.1,256-274).
cctgggctggtgaagtaca

SEQ ID NO: 8177 - DNA, 19 bp, Homo sapiens
  siRNA target sequence for NME2 (NM_002512.1,484-502).
gaactggttgactacaagt

SEQ ID NO: 8178 - DNA, 19 bp, Homo sapiens
  siRNA target sequence for NME2 (NM_002512.1,487-505).
ctggttgactacaagtctt

SEQ ID NO: 8179 - DNA, 19 bp, Homo sapiens
  siRNA target sequence for NME2 (NM_002512.1,511-529).
catgactgggtctatgaat

SEQ ID NO: 8180 - DNA, 19 bp, Homo sapiens
  siRNA target sequence for NPAS1 (NM_002517.2,231-249).
cgtcccctgggactttcta

SEQ ID NO: 8181 - DNA, 19 bp, Homo sapiens
  siRNA target sequence for NPAS1 (NM_002517.2,545-563).
cgctggtctccgaagtctt

SEQ ID NO: 8182 - DNA, 19 bp, Homo sapiens
  siRNA target sequence for NPAS1 (NM_002517.2,701-719).
gcagcgtcttcgactacat

SEQ ID NO: 8183 - DNA, 19 bp, Homo sapiens
  siRNA target sequence for NPAS1 (NM_002517.2,702-720).
cagcgtcttcgactacatt

SEQ ID NO: 8184 - DNA, 19 bp, Homo sapiens
  siRNA target sequence for NPAS1 (NM_002517.2,888-906).
ccaggagcgctccttcttt

SEQ ID NO: 8185 - DNA, 19 bp, Homo sapiens
  siRNA target sequence for NPAS1 (NM_002517.2,1058-1076).
cactccatggacacatgat

SEQ ID NO: 8186 - DNA, 19 bp, Homo sapiens
  siRNA target sequence for NPAS1 (NM_002517.2,1853-1871).
cgctcccggaggcctttta

SEQ ID NO: 8187 - DNA, 19 bp, Homo sapiens
  siRNA target sequence for NPAS2 (NM_002518.2,423-441).
ccaccgtgttggaaaaggt

SEQ ID NO: 8188 - DNA, 19 bp, Homo sapiens
  siRNA target sequence for NPAS2 (NM_002518.2,514-532).
gccttcattcctcagtaat

SEQ ID NO: 8189 - DNA, 19 bp, Homo sapiens
  siRNA target sequence for NPAS2 (NM_002518.2,591-609).
cagacggcagcatcatcta

SEQ ID NO: 8190 - DNA, 19 bp, Homo sapiens
  siRNA target sequence for NPAS2 (NM_002518.2,748-766).
cccctccccagaatactta

SEQ ID NO: 8191 - DNA, 19 bp, Homo sapiens
  siRNA target sequence for NPAS2 (NM_002518.2,827-845).
gaatttccaacttatgaat

SEQ ID NO: 8192 - DNA, 19 bp, Homo sapiens
  siRNA target sequence for NPAS2 (NM_002518.2,891-909).
gcccctcctgtaatggttt

SEQ ID NO: 8193 - DNA, 19 bp, Homo sapiens
  siRNA target sequence for NPAS2 (NM_002518.2,933-951).
gccgggtgccactaggaaa

SEQ ID NO: 8194 - DNA, 19 bp, Homo sapiens
  siRNA target sequence for NPAS2 (NM_002518.2,978-996).
gtctggcaacaccacaatt

SEQ ID NO: 8195 - DNA, 19 bp, Homo sapiens
  siRNA target sequence for NPAS2 (NM_002518.2,1011-1029).
gcatagttgacgaaccttt

SEQ ID NO: 8196 - DNA, 19 bp, Homo sapiens
  siRNA target sequence for NPAS2 (NM_002518.2,1012-1030).
catagttgacgaaccttta

SEQ ID NO: 8197 - DNA, 19 bp, Homo sapiens
  siRNA target sequence for NPAS2 (NM_002518.2,1048-1066).
gcatagcttggaatggaaa

SEQ ID NO: 8198 - DNA, 19 bp, Homo sapiens
  siRNA target sequence for NPAS2 (NM_002518.2,1049-1067).
catagcttggaatggaaat

SEQ ID NO: 8199 - DNA, 19 bp, Homo sapiens
  siRNA target sequence for NPAS2 (NM_002518.2,1104-1122).
gatacctgccttttgaagt

SEQ ID NO: 8200 - DNA, 19 bp, Homo sapiens
  siRNA target sequence for NPAS2 (NM_002518.2,1262-1280).
ctgcagactcactactaca

SEQ ID NO: 8201 - DNA, 19 bp, Homo sapiens
  siRNA target sequence for NPAS2 (NM_002518.2,1326-1344).
cacactcggtggtcagtta

SEQ ID NO: 8202 - DNA, 19 bp, Homo sapiens
  siRNA target sequence for NPAS2 (NM_002518.2,1445-1463).
gaacctcggcagcacttta

SEQ ID NO: 8203 - DNA, 19 bp, Homo sapiens
  siRNA target sequence for NPAS2 (NM_002518.2,1477-1495).
gggtgcctcgggccttaat

SEQ ID NO: 8204 - DNA, 19 bp, Homo sapiens
  siRNA target sequence for NPAS2 (NM_002518.2,1478-1496).
ggtgcctcgggccttaata

SEQ ID NO: 8205 - DNA, 19 bp, Homo sapiens
  siRNA target sequence for NPAS2 (NM_002518.2,1481-1499).
gcctcgggccttaatacca

SEQ ID NO: 8206 - DNA, 19 bp, Homo sapiens
  siRNA target sequence for NPAS2 (NM_002518.2,1487-1505).
ggccttaataccagtcatt

SEQ ID NO: 8207 - DNA, 19 bp, Homo sapiens
  siRNA target sequence for NPAS2 (NM_002518.2,1508-1526).
ccatcggcgtcctcaagaa

SEQ ID NO: 8208 - DNA, 19 bp, Homo sapiens
  siRNA target sequence for NPAS2 (NM_002518.2,2206-2224).
gctcccgccaagtctgaat

SEQ ID NO: 8209 - DNA, 19 bp, Homo sapiens
  siRNA target sequence for NPAS2 (NM_002518.2,2210-2228).
ccgccaagtctgaatctga

SEQ ID NO: 8210 - DNA, 19 bp, Homo sapiens
  siRNA target sequence for NPAS2 (NM_002518.2,2379-2397).
ggacgggacggcaagtcaa

SEQ ID NO: 8211 - DNA, 19 bp, Homo sapiens
  siRNA target sequence for NPAS2 (NM_002518.2,2382-2400).
cgggacggcaagtcaagta

SEQ ID NO: 8212 - DNA, 19 bp, Homo sapiens
  siRNA target sequence for NR0B1 (NM_000475.2,37-55).
ctctacaacatgcttatga

SEQ ID NO: 8213 - DNA, 19 bp, Homo sapiens
  siRNA target sequence for NR0B1 (NM_000475.2,49-67).
cttatgagcgcgaagcaaa

SEQ ID NO: 8214 - DNA, 19 bp, Homo sapiens
  siRNA target sequence for NR0B1 (NM_000475.2,249-267).
gctgacgagcgcaaagcaa

SEQ ID NO: 8215 - DNA, 19 bp, Homo sapiens
  siRNA target sequence for NR0B1 (NM_000475.2,250-268).
ctgacgagcgcaaagcaaa

SEQ ID NO: 8216 - DNA, 19 bp, Homo sapiens
  siRNA target sequence for NR0B1 (NM_000475.2,254-272).
cgagcgcaaagcaaacgta

SEQ ID NO: 8217 - DNA, 19 bp, Homo sapiens
  siRNA target sequence for NR0B1 (NM_000475.2,447-465).
gctcactagctcaaagcaa

SEQ ID NO: 8218 - DNA, 19 bp, Homo sapiens
  siRNA target sequence for NR0B1 (NM_000475.2,645-663).
cgtgcccacgagcacaaat

SEQ ID NO: 8219 - DNA, 19 bp, Homo sapiens
  siRNA target sequence for NR0B1 (NM_000475.2,648-666).
gcccacgagcacaaatcaa

SEQ ID NO: 8220 - DNA, 19 bp, Homo sapiens
  siRNA target sequence for NR0B1 (NM_000475.2,794-812).
cgctgcgcttcgtcaagta

SEQ ID NO: 8221 - DNA, 19 bp, Homo sapiens
  siRNA target sequence for NR0B1 (NM_000475.2,796-814).
ctgcgcttcgtcaagtact

SEQ ID NO: 8222 - DNA, 19 bp, Homo sapiens
  siRNA target sequence for NR0B1 (NM_000475.2,1178-1196).
gcctgcagtgcgtgaagta

SEQ ID NO: 8223 - DNA, 19 bp, Homo sapiens
  siRNA target sequence for NR0B1 (NM_000475.2,1182-1200).
gcagtgcgtgaagtacatt

SEQ ID NO: 8224 - DNA, 19 bp, Homo sapiens
  siRNA target sequence for NR0B1 (NM_000475.2,1272-1290).
cagattcatcgaacttaat

SEQ ID NO: 8225 - DNA, 19 bp, Homo sapiens
  siRNA target sequence for NR0B1 (NM_000475.2,1366-1384).
gtcagcatggatgatatga

SEQ ID NO: 8226 - DNA, 19 bp, Homo sapiens
  siRNA target sequence for NR0B1 (NM_000475.2,1387-1405).
ctggaaatgctctgtacaa

SEQ ID NO: 8227 - DNA, 19 bp, Homo sapiens
  siRNA target sequence for NR0B2 (NM_021969.1,135-153).
cgtagccgctgcctatgta

SEQ ID NO: 8228 - DNA, 19 bp, Homo sapiens
  siRNA target sequence for NR0B2 (NM_021969.1,199-217).
gggaggccttggatgttct

SEQ ID NO: 8229 - DNA, 19 bp, Homo sapiens
  siRNA target sequence for NR0B2 (NM_021969.1,367-385).
cggtgcccagcatactcaa

SEQ ID NO: 8230 - DNA, 19 bp, Homo sapiens
  siRNA target sequence for NR0B2 (NM_021969.1,462-480).
gcggtgcagtggcttcaat

SEQ ID NO: 8231 - DNA, 19 bp, Homo sapiens
  siRNA target sequence for NR0B2 (NM_021969.1,743-761).
ccctatcattggagatgtt

SEQ ID NO: 8232 - DNA, 19 bp, Homo sapiens
  siRNA target sequence for NR1D1 (NM_021724.1,713-731).
ctgaatccctctatagtga

SEQ ID NO: 8233 - DNA, 19 bp, Homo sapiens
  siRNA target sequence for NR1D1 (NM_021724.1,923-941).
cccctgggagtctacaagt

SEQ ID NO: 8234 - DNA, 19 bp, Homo sapiens
  siRNA target sequence for NR1D1 (NM_021724.1,1642-1660).
gcccccaatgacaacaaca

SEQ ID NO: 8235 - DNA, 19 bp, Homo sapiens
  siRNA target sequence for NR1D1 (NM_021724.1,1846-1864).
cggcagggcaactcaaaga

SEQ ID NO: 8236 - DNA, 19 bp, Homo sapiens
  siRNA target sequence for NR1D1 (NM_021724.1,1877-1895).
catgtcctatgaacatgta

SEQ ID NO: 8237 - DNA, 19 bp, Homo sapiens
  siRNA target sequence for NR1D1 (NM_021724.1,2065-2083).
ctgatggtgcgctttgctt

SEQ ID NO: 8238 - DNA, 19 bp, Homo sapiens
  siRNA target sequence for NR1D1 (NM_021724.1,2275-2293).
cgctcgggcatggagaatt

SEQ ID NO: 8239 - DNA, 19 bp, Homo sapiens
  siRNA target sequence for NR1H2 (NM_007121.1,906-924).
cagcggctcaagaactaat

SEQ ID NO: 8240 - DNA, 19 bp, Homo sapiens
  siRNA target sequence for NR1H2 (NM_007121.1,908-926).
gcggctcaagaactaatga

SEQ ID NO: 8241 - DNA, 19 bp, Homo sapiens
  siRNA target sequence for NR1H2 (NM_007121.1,909-927).
cggctcaagaactaatgat

SEQ ID NO: 8242 - DNA, 19 bp, Homo sapiens
  siRNA target sequence for NR1H2 (NM_007121.1,946-964).
ccaactgcagtgcaacaaa

SEQ ID NO: 8243 - DNA, 19 bp, Homo sapiens
  siRNA target sequence for NR1H2 (NM_007121.1,1090-1108).
cgtggacttcgctaagcaa

SEQ ID NO: 8244 - DNA, 19 bp, Homo sapiens
  siRNA target sequence for NR1H2 (NM_007121.1,1161-1179).
catccactatcgagatcat

SEQ ID NO: 8245 - DNA, 19 bp, Homo sapiens
  siRNA target sequence for NR1H2 (NM_007121.1,1217-1235).
gagtgtatcaccttcttga

SEQ ID NO: 8246 - DNA, 19 bp, Homo sapiens
  siRNA target sequence for NR1H3 (NM_005693.1,265-283).
cagagatccgtccacaaaa

SEQ ID NO: 8247 - DNA, 19 bp, Homo sapiens
  siRNA target sequence for NR1H3 (NM_005693.1,957-975).
cctgggagtgagagtatca

SEQ ID NO: 8248 - DNA, 19 bp, Homo sapiens
  siRNA target sequence for NR1H3 (NM_005693.1,980-998).
cctcaaggatttcagttat

SEQ ID NO: 8249 - DNA, 19 bp, Homo sapiens
  siRNA target sequence for NR1H3 (NM_005693.1,1073-1091).
gaatgagctgcaactcaat

SEQ ID NO: 8250 - DNA, 19 bp, Homo sapiens
  siRNA target sequence for NR1H3 (NM_005693.1,1174-1192).
ggctgcagcacacatatgt

SEQ ID NO: 8251 - DNA, 19 bp, Homo sapiens
  siRNA target sequence for NR1H3 (NM_005693.1,1228-1246).
cccatgaccgactgatgtt

SEQ ID NO: 8252 - DNA, 19 bp, Homo sapiens
  siRNA target sequence for NR1H3 (NM_005693.1,1321-1339).
gtctgcaggacaaaaagct

SEQ ID NO: 8253 - DNA, 19 bp, Homo sapiens
  siRNA target sequence for NR1H4 (NM_005123.1,433-451).
gtgttttaacagaacaagt

SEQ ID NO: 8254 - DNA, 19 bp, Homo sapiens
  siRNA target sequence for NR1H4 (NM_005123.1,483-501).
gaaccatactcgcaataca

SEQ ID NO: 8255 - DNA, 19 bp, Homo sapiens
  siRNA target sequence for NR1H4 (NM_005123.1,493-511).
cgcaatacagcaatgttca

SEQ ID NO: 8256 - DNA, 19 bp, Homo sapiens
  siRNA target sequence for NR1H4 (NM_005123.1,518-536).
ccaagttcaaccacagatt

SEQ ID NO: 8257 - DNA, 19 bp, Homo sapiens
  siRNA target sequence for NR1H4 (NM_005123.1,664-682).
cagagatgcctgtaacaaa

SEQ ID NO: 8258 - DNA, 19 bp, Homo sapiens
  siRNA target sequence for NR1H4 (NM_005123.1,753-771).
gcctctggataccactata

SEQ ID NO: 8259 - DNA, 19 bp, Homo sapiens
  siRNA target sequence for NR1H4 (NM_005123.1,782-800).
ctgtgaggggtgtaaaggt

SEQ ID NO: 8260 - DNA, 19 bp, Homo sapiens
  siRNA target sequence for NR1H4 (NM_005123.1,784-802).
gtgaggggtgtaaaggttt

SEQ ID NO: 8261 - DNA, 19 bp, Homo sapiens
  siRNA target sequence for NR1H4 (NM_005123.1,859-877).
gtgtgatggatatgtacat

SEQ ID NO: 8262 - DNA, 19 bp, Homo sapiens
  siRNA target sequence for NR1H4 (NM_005123.1,894-912).
gagtgtcgactaaggaaat

SEQ ID NO: 8263 - DNA, 19 bp, Homo sapiens
  siRNA target sequence for NR1H4 (NM_005123.1,936-954).
gaatgcttgttaactgaaa

SEQ ID NO: 8264 - DNA, 19 bp, Homo sapiens
  siRNA target sequence for NR1H4 (NM_005123.1,1214-1232).
gacggaaatggcaaccaat

SEQ ID NO: 8265 - DNA, 19 bp, Homo sapiens
  siRNA target sequence for NR1H4 (NM_005123.1,1236-1254).
gtacaggttcttgtagaat

SEQ ID NO: 8266 - DNA, 19 bp, Homo sapiens
  siRNA target sequence for NR1H4 (NM_005123.1,1321-1339).
ctgcggttgaagctatgtt

SEQ ID NO: 8267 - DNA, 19 bp, Homo sapiens
  siRNA target sequence for NR1H4 (NM_005123.1,1340-1358).
ccttcgttcagctgagatt

SEQ ID NO: 8268 - DNA, 19 bp, Homo sapiens
  siRNA target sequence for NR1H4 (NM_005123.1,1341-1359).
cttcgttcagctgagattt

SEQ ID NO: 8269 - DNA, 19 bp, Homo sapiens
  siRNA target sequence for NR1H4 (NM_005123.1,1381-1399).
ggcattctgacctattgga

SEQ ID NO: 8270 - DNA, 19 bp, Homo sapiens
  siRNA target sequence for NR1H4 (NM_005123.1,1382-1400).
gcattctgacctattggaa

SEQ ID NO: 8271 - DNA, 19 bp, Homo sapiens
  siRNA target sequence for NR1H4 (NM_005123.1,1389-1407).
gacctattggaagaaagaa

SEQ ID NO: 8272 - DNA, 19 bp, Homo sapiens
  siRNA target sequence for NR1H4 (NM_005123.1,1501-1519).
ctctgcttacagcaattgt

SEQ ID NO: 8273 - DNA, 19 bp, Homo sapiens
  siRNA target sequence for NR1H4 (NM_005123.1,1530-1548).
ccagatagacaatacataa

SEQ ID NO: 8274 - DNA, 19 bp, Homo sapiens
  siRNA target sequence for NR1H4 (NM_005123.1,1531-1549).
cagatagacaatacataaa

SEQ ID NO: 8275 - DNA, 19 bp, Homo sapiens
  siRNA target sequence for NR1H4 (NM_005123.1,1653-1671).
ctgggtcgcctgactgaat

SEQ ID NO: 8276 - DNA, 19 bp, Homo sapiens
  siRNA target sequence for NR1H4 (NM_005123.1,1655-1673).
gggtcgcctgactgaatta

SEQ ID NO: 8277 - DNA, 19 bp, Homo sapiens
  siRNA target sequence for NR1H4 (NM_005123.1,1666-1684).
ctgaattacggacattcaa

SEQ ID NO: 8278 - DNA, 19 bp, Homo sapiens
  siRNA target sequence for NR1H4 (NM_005123.1,1717-1735).
gagtaaacgaccacaagtt

SEQ ID NO: 8279 - DNA, 19 bp, Homo sapiens
  siRNA target sequence for NR1H4 (NM_005123.1,1719-1737).
gtaaacgaccacaagttta

SEQ ID NO: 8280 - DNA, 19 bp, Homo sapiens
  siRNA target sequence for NR1I2 (NM_003889.2,1942-1960).
gtcggaggtccccaaatct

SEQ ID NO: 8281 - DNA, 19 bp, Homo sapiens
  siRNA target sequence for NR1I2 (NM_003889.2,1953-1971).
ccaaatctgccgtgtatgt

SEQ ID NO: 8282 - DNA, 19 bp, Homo sapiens
  siRNA target sequence for NR1I2 (NM_003889.2,1987-2005).
ggctatcacttcaatgtca

SEQ ID NO: 8283 - DNA, 19 bp, Homo sapiens
  siRNA target sequence for NR1I2 (NM_003889.2,1988-2006).
gctatcacttcaatgtcat

SEQ ID NO: 8284 - DNA, 19 bp, Homo sapiens
  siRNA target sequence for NR1I2 (NM_003889.2,2305-2323).
gacgctcagatgaaaacct

SEQ ID NO: 8285 - DNA, 19 bp, Homo sapiens
  siRNA target sequence for NR1I2 (NM_003889.2,2531-2549).
gtggcgggaaagagatctt

SEQ ID NO: 8286 - DNA, 19 bp, Homo sapiens
  siRNA target sequence for NR1I2 (NM_003889.2,2563-2581).
cacatggctgacatgtcaa

SEQ ID NO: 8287 - DNA, 19 bp, Homo sapiens
  siRNA target sequence for NR1I2 (NM_003889.2,2572-2590).
gacatgtcaacctacatgt

SEQ ID NO: 8288 - DNA, 19 bp, Homo sapiens
  siRNA target sequence for NR1I2 (NM_003889.2,2577-2595).
gtcaacctacatgttcaaa

SEQ ID NO: 8289 - DNA, 19 bp, Homo sapiens
  siRNA target sequence for NR1I2 (NM_003889.2,2961-2979).
gtcctacattgaatgcaat

SEQ ID NO: 8290 - DNA, 19 bp, Homo sapiens
  siRNA target sequence for NR1I2 (NM_003889.2,3033-3051).
cgagctccgcagcatcaat

SEQ ID NO: 8291 - DNA, 19 bp, Homo sapiens
  siRNA target sequence for NR1I2 (NM_003889.2,3085-3103).
gacatacacccctttgcta

SEQ ID NO: 8292 - DNA, 19 bp, Homo sapiens
  siRNA target sequence for NR1I2 (NM_003889.2,3107-3125).
ccctcatgcaggagttgtt

SEQ ID NO: 8293 - DNA, 19 bp, Homo sapiens
  siRNA target sequence for NR1I2 (NM_022002.1,59-77).
ccaggactcaccacttcaa

SEQ ID NO: 8294 - DNA, 19 bp, Homo sapiens
  siRNA target sequence for NR1I2 (NM_022002.1,122-140).
cggctgagttggcttcaaa

SEQ ID NO: 8295 - DNA, 19 bp, Homo sapiens
  siRNA target sequence for NR1I3 (NM_005122.2,210-228).
gccacaggctaccacttta

SEQ ID NO: 8296 - DNA, 19 bp, Homo sapiens
  siRNA target sequence for NR1I3 (NM_005122.2,212-230).
cacaggctaccactttaat

SEQ ID NO: 8297 - DNA, 19 bp, Homo sapiens
  siRNA target sequence for NR1I3 (NM_005122.2,359-377).
gttgcagaagtgcttagat

SEQ ID NO: 8298 - DNA, 19 bp, Homo sapiens
  siRNA target sequence for NR1I3 (NM_005122.2,463-481).
cacctgtgcaactgagtaa

SEQ ID NO: 8299 - DNA, 19 bp, Homo sapiens
  siRNA target sequence for NR1I3 (NM_005122.2,634-652).
cacacttcgcagacatcaa

SEQ ID NO: 8300 - DNA, 19 bp, Homo sapiens
  siRNA target sequence for NR1I3 (NM_005122.2,761-779).
ctgtcacatcgtactcaat

SEQ ID NO: 8301 - DNA, 19 bp, Homo sapiens
  siRNA target sequence for NR1I3 (NM_005122.2,817-835).
ggcctcttcgctacacaat

SEQ ID NO: 8302 - DNA, 19 bp, Homo sapiens
  siRNA target sequence for NR1I3 (NM_005122.2,818-836).
gcctcttcgctacacaatt

SEQ ID NO: 8303 - DNA, 19 bp, Homo sapiens
  siRNA target sequence for NR1I3 (NM_005122.2,854-872).
ggggttccaggtagagttt

SEQ ID NO: 8304 - DNA, 19 bp, Homo sapiens
  siRNA target sequence for NR1I3 (NM_005122.2,855-873).
gggttccaggtagagtttt

SEQ ID NO: 8305 - DNA, 19 bp, Homo sapiens
  siRNA target sequence for NR1I3 (NM_005122.2,856-874).
ggttccaggtagagttttt

SEQ ID NO: 8306 - DNA, 19 bp, Homo sapiens
  siRNA target sequence for NR1I3 (NM_005122.2,893-911).
ccatggaacactacgaaaa

SEQ ID NO: 8307 - DNA, 19 bp, Homo sapiens
  siRNA target sequence for NR1I3 (NM_005122.2,986-1004).
ccagagagatgagattgat

SEQ ID NO: 8308 - DNA, 19 bp, Homo sapiens
  siRNA target sequence for NR1I3 (NM_005122.2,1024-1042).
cactgactctgcaaagcta

SEQ ID NO: 8309 - DNA, 19 bp, Homo sapiens
  siRNA target sequence for NR1I3 (NM_005122.2,1108-1126).
ctgagctccggagcattaa

SEQ ID NO: 8310 - DNA, 19 bp, Homo sapiens
  siRNA target sequence for NR1I3 (NM_005122.2,1128-1146).
gaggcctacgggtaccaaa

SEQ ID NO: 8311 - DNA, 19 bp, Homo sapiens
  siRNA target sequence for NR1I3 (NM_005122.2,1132-1150).
cctacgggtaccaaatcca

SEQ ID NO: 8312 - DNA, 19 bp, Homo sapiens
  siRNA target sequence for NR2C1 (NM_003297.1,150-168).
gtgacagcacttgatcata

SEQ ID NO: 8313 - DNA, 19 bp, Homo sapiens
  siRNA target sequence for NR2C1 (NM_003297.1,286-304).
caggtgtcaaccagttatt

SEQ ID NO: 8314 - DNA, 19 bp, Homo sapiens
  siRNA target sequence for NR2C1 (NM_003297.1,288-306).
ggtgtcaaccagttatttt

SEQ ID NO: 8315 - DNA, 19 bp, Homo sapiens
  siRNA target sequence for NR2C1 (NM_003297.1,370-388).
gaccaaataaggtttttga

SEQ ID NO: 8316 - DNA, 19 bp, Homo sapiens
  siRNA target sequence for NR2C1 (NM_003297.1,472-490).
gaagcatccgaaaaaattt

SEQ ID NO: 8317 - DNA, 19 bp, Homo sapiens
  siRNA target sequence for NR2C1 (NM_003297.1,475-493).
gcatccgaaaaaatttagt

SEQ ID NO: 8318 - DNA, 19 bp, Homo sapiens
  siRNA target sequence for NR2C1 (NM_003297.1,476-494).
catccgaaaaaatttagta

SEQ ID NO: 8319 - DNA, 19 bp, Homo sapiens
  siRNA target sequence for NR2C1 (NM_003297.1,505-523).
gaggatcaaaggattgtat

SEQ ID NO: 8320 - DNA, 19 bp, Homo sapiens
  siRNA target sequence for NR2C1 (NM_003297.1,552-570).
caatactgcaggttacaga

SEQ ID NO: 8321 - DNA, 19 bp, Homo sapiens
  siRNA target sequence for NR2C1 (NM_003297.1,560-578).
caggttacagagatgtatt

SEQ ID NO: 8322 - DNA, 19 bp, Homo sapiens
  siRNA target sequence for NR2C1 (NM_003297.1,571-589).
gatgtattgcgtttggaat

SEQ ID NO: 8323 - DNA, 19 bp, Homo sapiens
  siRNA target sequence for NR2C1 (NM_003297.1,574-592).
gtattgcgtttggaatgaa

SEQ ID NO: 8324 - DNA, 19 bp, Homo sapiens
  siRNA target sequence for NR2C1 (NM_003297.1,627-645).
gaagtatcacgagaaaaat

SEQ ID NO: 8325 - DNA, 19 bp, Homo sapiens
  siRNA target sequence for NR2C1 (NM_003297.1,692-710).
ccttcgtagcccattaact

SEQ ID NO: 8326 - DNA, 19 bp, Homo sapiens
  siRNA target sequence for NR2C1 (NM_003297.1,709-727).
ctgcaactccaacttttgt

SEQ ID NO: 8327 - DNA, 19 bp, Homo sapiens
  siRNA target sequence for NR2C1 (NM_003297.1,711-729).
gcaactccaacttttgtaa

SEQ ID NO: 8328 - DNA, 19 bp, Homo sapiens
  siRNA target sequence for NR2C1 (NM_003297.1,726-744).
gtaacagatagtgaaagta

SEQ ID NO: 8329 - DNA, 19 bp, Homo sapiens
  siRNA target sequence for NR2C1 (NM_003297.1,748-766).
ggtcaacaggactgttaga

SEQ ID NO: 8330 - DNA, 19 bp, Homo sapiens
  siRNA target sequence for NR2C1 (NM_003297.1,749-767).
gtcaacaggactgttagat

SEQ ID NO: 8331 - DNA, 19 bp, Homo sapiens
  siRNA target sequence for NR2C1 (NM_003297.1,765-783).
gattcaggaatgttcatga

SEQ ID NO: 8332 - DNA, 19 bp, Homo sapiens
  siRNA target sequence for NR2C1 (NM_003297.1,852-870).
cagggagatttaagtacat

SEQ ID NO: 8333 - DNA, 19 bp, Homo sapiens
  siRNA target sequence for NR2C1 (NM_003297.1,872-890).
ggccaatgtggttacatca

SEQ ID NO: 8334 - DNA, 19 bp, Homo sapiens
  siRNA target sequence for NR2C1 (NM_003297.1,873-891).
gccaatgtggttacatcat

SEQ ID NO: 8335 - DNA, 19 bp, Homo sapiens
  siRNA target sequence for NR2C1 (NM_003297.1,874-892).
ccaatgtggttacatcatt

SEQ ID NO: 8336 - DNA, 19 bp, Homo sapiens
  siRNA target sequence for NR2C1 (NM_003297.1,875-893).
caatgtggttacatcatta

SEQ ID NO: 8337 - DNA, 19 bp, Homo sapiens
  siRNA target sequence for NR2C1 (NM_003297.1,889-907).
cattagcgaatcttggaaa

SEQ ID NO: 8338 - DNA, 19 bp, Homo sapiens
  siRNA target sequence for NR2C1 (NM_003297.1,941-959).
gtctatgattgaaagctta

SEQ ID NO: 8339 - DNA, 19 bp, Homo sapiens
  siRNA target sequence for NR2C1 (NM_003297.1,969-987).
gatacctctttgtgtgaat

SEQ ID NO: 8340 - DNA, 19 bp, Homo sapiens
  siRNA target sequence for NR2C1 (NM_003297.1,999-1017).
cagaccaacggtgatgttt

SEQ ID NO: 8341 - DNA, 19 bp, Homo sapiens
  siRNA target sequence for NR2C1 (NM_003297.1,1029-1047).
gacactcttgcaaaagcat

SEQ ID NO: 8342 - DNA, 19 bp, Homo sapiens
  siRNA target sequence for NR2C1 (NM_003297.1,1098-1116).
ggaagtgtacacctaatca

SEQ ID NO: 8343 - DNA, 19 bp, Homo sapiens
  siRNA target sequence for NR2C1 (NM_003297.1,1115-1133).
cactggagattcaagcata

SEQ ID NO: 8344 - DNA, 19 bp, Homo sapiens
  siRNA target sequence for NR2C1 (NM_003297.1,1120-1138).
gagattcaagcataaatta

SEQ ID NO: 8345 - DNA, 19 bp, Homo sapiens
  siRNA target sequence for NR2C1 (NM_003297.1,1165-1183).
gcgattcacatgtagcttt

SEQ ID NO: 8346 - DNA, 19 bp, Homo sapiens
  siRNA target sequence for NR2C1 (NM_003297.1,1271-1289).
gcactgggcactttcgatt

SEQ ID NO: 8347 - DNA, 19 bp, Homo sapiens
  siRNA target sequence for NR2C1 (NM_003297.1,1279-1297).
cactttcgattccttcttt

SEQ ID NO: 8348 - DNA, 19 bp, Homo sapiens
  siRNA target sequence for NR2C1 (NM_003297.1,1343-1361).
ctggaatgaactttttact

SEQ ID NO: 8349 - DNA, 19 bp, Homo sapiens
  siRNA target sequence for NR2C1 (NM_003297.1,1372-1390).
cccagtgctggcaagtgat

SEQ ID NO: 8350 - DNA, 19 bp, Homo sapiens
  siRNA target sequence for NR2C1 (NM_003297.1,1433-1451).
caatagtcttcaacaagat

SEQ ID NO: 8351 - DNA, 19 bp, Homo sapiens
  siRNA target sequence for NR2C1 (NM_003297.1,1513-1531).
gtaacagcatggttaaact

SEQ ID NO: 8352 - DNA, 19 bp, Homo sapiens
  siRNA target sequence for NR2C1 (NM_003297.1,1532-1550).
ctgcattgatggatacgaa

SEQ ID NO: 8353 - DNA, 19 bp, Homo sapiens
  siRNA target sequence for NR2C1 (NM_003297.1,1534-1552).
gcattgatggatacgaata

SEQ ID NO: 8354 - DNA, 19 bp, Homo sapiens
  siRNA target sequence for NR2C1 (NM_003297.1,1535-1553).
cattgatggatacgaatat

SEQ ID NO: 8355 - DNA, 19 bp, Homo sapiens
  siRNA target sequence for NR2C1 (NM_003297.1,1556-1574).
ctacctgaaggcaatagta

SEQ ID NO: 8356 - DNA, 19 bp, Homo sapiens
  siRNA target sequence for NR2C1 (NM_003297.1,1587-1605).
gatcatccaagcctagaaa

SEQ ID NO: 8357 - DNA, 19 bp, Homo sapiens
  siRNA target sequence for NR2C1 (NM_003297.1,1590-1608).
catccaagcctagaaaaca

SEQ ID NO: 8358 - DNA, 19 bp, Homo sapiens
  siRNA target sequence for NR2C1 (NM_003297.1,1637-1655).
ggcttatgtggaattccaa

SEQ ID NO: 8359 - DNA, 19 bp, Homo sapiens
  siRNA target sequence for NR2C1 (NM_003297.1,1646-1664).
ggaattccaagattatata

SEQ ID NO: 8360 - DNA, 19 bp, Homo sapiens
  siRNA target sequence for NR2C1 (NM_003297.1,1656-1674).
gattatataaccaaaacat

SEQ ID NO: 8361 - DNA, 19 bp, Homo sapiens
  siRNA target sequence for NR2C1 (NM_003297.1,1699-1717).
ccagactactactcagatt

SEQ ID NO: 8362 - DNA, 19 bp, Homo sapiens
  siRNA target sequence for NR2C1 (NM_003297.1,1712-1730).
cagattgccagctttaaga

SEQ ID NO: 8363 - DNA, 19 bp, Homo sapiens
  siRNA target sequence for NR2C1 (NM_003297.1,1714-1732).
gattgccagctttaagact

SEQ ID NO: 8364 - DNA, 19 bp, Homo sapiens
  siRNA target sequence for NR2C1 (NM_003297.1,1773-1791).
ctcattggcaatatacgaa

SEQ ID NO: 8365 - DNA, 19 bp, Homo sapiens
  siRNA target sequence for NR2C1 (NM_003297.1,1775-1793).
cattggcaatatacgaatt

SEQ ID NO: 8366 - DNA, 19 bp, Homo sapiens
  siRNA target sequence for NR2C1 (NM_003297.1,1779-1797).
ggcaatatacgaattgaca

SEQ ID NO: 8367 - DNA, 19 bp, Homo sapiens
  siRNA target sequence for NR2C1 (NM_003297.1,1798-1816).
gtgttatcccacatatttt

SEQ ID NO: 8368 - DNA, 19 bp, Homo sapiens
  siRNA target sequence for NR2C1 (NM_003297.1,1800-1818).
gttatcccacatattttga

SEQ ID NO: 8369 - DNA, 19 bp, Homo sapiens
  siRNA target sequence for NR2C1 (NM_003297.1,1830-1848).
gcagattataactctcaaa

SEQ ID NO: 8370 - DNA, 19 bp, Homo sapiens
  siRNA target sequence for NR2C1 (NM_003297.1,1833-1851).
gattataactctcaaataa

SEQ ID NO: 8371 - DNA, 19 bp, Homo sapiens
  siRNA target sequence for NR2C2 (NM_003298.2,229-247).
ccccacgcatccagataat

SEQ ID NO: 8372 - DNA, 19 bp, Homo sapiens
  siRNA target sequence for NR2C2 (NM_003298.2,308-326).
cccattgagtgttttcaca

SEQ ID NO: 8373 - DNA, 19 bp, Homo sapiens
  siRNA target sequence for NR2C2 (NM_003298.2,487-505).
ccagcgccaagcaactcat

SEQ ID NO: 8374 - DNA, 19 bp, Homo sapiens
  siRNA target sequence for NR2C2 (NM_003298.2,488-506).
cagcgccaagcaactcata

SEQ ID NO: 8375 - DNA, 19 bp, Homo sapiens
  siRNA target sequence for NR2C2 (NM_003298.2,490-508).
gcgccaagcaactcatatt

SEQ ID NO: 8376 - DNA, 19 bp, Homo sapiens
  siRNA target sequence for NR2C2 (NM_003298.2,492-510).
gccaagcaactcatattca

SEQ ID NO: 8377 - DNA, 19 bp, Homo sapiens
  siRNA target sequence for NR2C2 (NM_003298.2,532-550).
ctggcaggatccagattgt

SEQ ID NO: 8378 - DNA, 19 bp, Homo sapiens
  siRNA target sequence for NR2C2 (NM_003298.2,534-552).
ggcaggatccagattgtca

SEQ ID NO: 8379 - DNA, 19 bp, Homo sapiens
  siRNA target sequence for NR2C2 (NM_003298.2,740-758).
ccaagactgcatcatcaat

SEQ ID NO: 8380 - DNA, 19 bp, Homo sapiens
  siRNA target sequence for NR2C2 (NM_003298.2,767-785).
ccggaaccgctgtcagttt

SEQ ID NO: 8381 - DNA, 19 bp, Homo sapiens
  siRNA target sequence for NR2C2 (NM_003298.2,782-800).
gttttgccggctgaaaaaa

SEQ ID NO: 8382 - DNA, 19 bp, Homo sapiens
  siRNA target sequence for NR2C2 (NM_003298.2,787-805).
gccggctgaaaaaatgctt

SEQ ID NO: 8383 - DNA, 19 bp, Homo sapiens
  siRNA target sequence for NR2C2 (NM_003298.2,788-806).
ccggctgaaaaaatgctta

SEQ ID NO: 8384 - DNA, 19 bp, Homo sapiens
  siRNA target sequence for NR2C2 (NM_003298.2,814-832).
gcatgaaaatggaatctgt

SEQ ID NO: 8385 - DNA, 19 bp, Homo sapiens
  siRNA target sequence for NR2C2 (NM_003298.2,858-876).
gtgcaacgggagaaaccaa

SEQ ID NO: 8386 - DNA, 19 bp, Homo sapiens
  siRNA target sequence for NR2C2 (NM_003298.2,864-882).
cgggagaaaccaagcaatt

SEQ ID NO: 8387 - DNA, 19 bp, Homo sapiens
  siRNA target sequence for NR2C2 (NM_003298.2,878-896).
caattgtgctgcttcaact

SEQ ID NO: 8388 - DNA, 19 bp, Homo sapiens
  siRNA target sequence for NR2C2 (NM_003298.2,947-965).
cacgtttgtggcagacaaa

SEQ ID NO: 8389 - DNA, 19 bp, Homo sapiens
  siRNA target sequence for NR2C2 (NM_003298.2,949-967).
cgtttgtggcagacaaaga

SEQ ID NO: 8390 - DNA, 19 bp, Homo sapiens
  siRNA target sequence for NR2C2 (NM_003298.2,976-994).
gacaaacaggtcttcttga

SEQ ID NO: 8391 - DNA, 19 bp, Homo sapiens
  siRNA target sequence for NR2C2 (NM_003298.2,1061-1079).
ggattctaaggctgaaaca

SEQ ID NO: 8392 - DNA, 19 bp, Homo sapiens
  siRNA target sequence for NR2C2 (NM_003298.2,1062-1080).
gattctaaggctgaaacaa

SEQ ID NO: 8393 - DNA, 19 bp, Homo sapiens
  siRNA target sequence for NR2C2 (NM_003298.2,1125-1143).
gccaacctaagtgaatctt

SEQ ID NO: 8394 - DNA, 19 bp, Homo sapiens
  siRNA target sequence for NR2C2 (NM_003298.2,1181-1199).
ccagtctgcaagtgagata

SEQ ID NO: 8395 - DNA, 19 bp, Homo sapiens
  siRNA target sequence for NR2C2 (NM_003298.2,1182-1200).
cagtctgcaagtgagataa

SEQ ID NO: 8396 - DNA, 19 bp, Homo sapiens
  siRNA target sequence for NR2C2 (NM_003298.2,1196-1214).
gataactcgggcatttgat

SEQ ID NO: 8397 - DNA, 19 bp, Homo sapiens
  siRNA target sequence for NR2C2 (NM_003298.2,1201-1219).
ctcgggcatttgatacctt

SEQ ID NO: 8398 - DNA, 19 bp, Homo sapiens
  siRNA target sequence for NR2C2 (NM_003298.2,1206-1224).
gcatttgataccttagcta

SEQ ID NO: 8399 - DNA, 19 bp, Homo sapiens
  siRNA target sequence for NR2C2 (NM_003298.2,1368-1386).
cacgtcacatttaagctaa

SEQ ID NO: 8400 - DNA, 19 bp, Homo sapiens
  siRNA target sequence for NR2C2 (NM_003298.2,1371-1389).
gtcacatttaagctaacaa

SEQ ID NO: 8401 - DNA, 19 bp, Homo sapiens
  siRNA target sequence for NR2C2 (NM_003298.2,1413-1431).
ctcaacgtgcactacatct

SEQ ID NO: 8402 - DNA, 19 bp, Homo sapiens
  siRNA target sequence for NR2C2 (NM_003298.2,1654-1672).
ctggtgaccggataaagca

SEQ ID NO: 8403 - DNA, 19 bp, Homo sapiens
  siRNA target sequence for NR2C2 (NM_003298.2,1714-1732).
gcatggcgaagctggatat

SEQ ID NO: 8404 - DNA, 19 bp, Homo sapiens
  siRNA target sequence for NR2C2 (NM_003298.2,1715-1733).
catggcgaagctggatata

SEQ ID NO: 8405 - DNA, 19 bp, Homo sapiens
  siRNA target sequence for NR2C2 (NM_003298.2,1718-1736).
ggcgaagctggatatagat

SEQ ID NO: 8406 - DNA, 19 bp, Homo sapiens
  siRNA target sequence for NR2C2 (NM_003298.2,1728-1746).
gatatagatggctatgagt

SEQ ID NO: 8407 - DNA, 19 bp, Homo sapiens
  siRNA target sequence for NR2C2 (NM_003298.2,1734-1752).
gatggctatgagtatgcat

SEQ ID NO: 8408 - DNA, 19 bp, Homo sapiens
  siRNA target sequence for NR2C2 (NM_003298.2,1739-1757).
ctatgagtatgcatacctt

SEQ ID NO: 8409 - DNA, 19 bp, Homo sapiens
  siRNA target sequence for NR2C2 (NM_003298.2,1745-1763).
gtatgcataccttaaagct

SEQ ID NO: 8410 - DNA, 19 bp, Homo sapiens
  siRNA target sequence for NR2C2 (NM_003298.2,1750-1768).
cataccttaaagctatagt

SEQ ID NO: 8411 - DNA, 19 bp, Homo sapiens
  siRNA target sequence for NR2C2 (NM_003298.2,1801-1819).
gcacaagccagattgaaaa

SEQ ID NO: 8412 - DNA, 19 bp, Homo sapiens
  siRNA target sequence for NR2C2 (NM_003298.2,1802-1820).
cacaagccagattgaaaaa

SEQ ID NO: 8413 - DNA, 19 bp, Homo sapiens
  siRNA target sequence for NR2C2 (NM_003298.2,1807-1825).
gccagattgaaaaattcca

SEQ ID NO: 8414 - DNA, 19 bp, Homo sapiens
  siRNA target sequence for NR2C2 (NM_003298.2,1847-1865).
gcaggactatgttcagaaa

SEQ ID NO: 8415 - DNA, 19 bp, Homo sapiens
  siRNA target sequence for NR2C2 (NM_003298.2,1851-1869).
gactatgttcagaaaacct

SEQ ID NO: 8416 - DNA, 19 bp, Homo sapiens
  siRNA target sequence for NR2C2 (NM_003298.2,1928-1946).
gatgagctccaacataaca

SEQ ID NO: 8417 - DNA, 19 bp, Homo sapiens
  siRNA target sequence for NR2C2 (NM_003298.2,1940-1958).
cataacagaagaacttttt

SEQ ID NO: 8418 - DNA, 19 bp, Homo sapiens
  siRNA target sequence for NR2C2 (NM_003298.2,1965-1983).
ggtctcattggcaatgttt

SEQ ID NO: 8419 - DNA, 19 bp, Homo sapiens
  siRNA target sequence for NR2C2 (NM_003298.2,1970-1988).
cattggcaatgtttcgata

SEQ ID NO: 8420 - DNA, 19 bp, Homo sapiens
  siRNA target sequence for NR2C2 (NM_003298.2,1974-1992).
ggcaatgtttcgatagaca

SEQ ID NO: 8421 - DNA, 19 bp, Homo sapiens
  siRNA target sequence for NR2C2 (NM_003298.2,1980-1998).
gtttcgatagacagcataa

SEQ ID NO: 8422 - DNA, 19 bp, Homo sapiens
  siRNA target sequence for NR2C2 (NM_003298.2,2018-2036).
ggagacagcagagtataat

SEQ ID NO: 8423 - DNA, 19 bp, Homo sapiens
  siRNA target sequence for NR2E1 (NM_003269.2,724-742).
gatcaacaagccgcatttt

SEQ ID NO: 8424 - DNA, 19 bp, Homo sapiens
  siRNA target sequence for NR2E1 (NM_003269.2,730-748).
caagccgcattttagatat

SEQ ID NO: 8425 - DNA, 19 bp, Homo sapiens
  siRNA target sequence for NR2E1 (NM_003269.2,744-762).
gatatcccctgcaaagtgt

SEQ ID NO: 8426 - DNA, 19 bp, Homo sapiens
  siRNA target sequence for NR2E1 (NM_003269.2,831-849).
cggagcatccgaaggaata

SEQ ID NO: 8427 - DNA, 19 bp, Homo sapiens
  siRNA target sequence for NR2E1 (NM_003269.2,851-869).
gacctatgtctgcaaatct

SEQ ID NO: 8428 - DNA, 19 bp, Homo sapiens
  siRNA target sequence for NR2E1 (NM_003269.2,919-937).
gggcgtgtcggctgaagaa

SEQ ID NO: 8429 - DNA, 19 bp, Homo sapiens
  siRNA target sequence for NR2E1 (NM_003269.2,1202-1220).
gtacccccatgaagtgaat

SEQ ID NO: 8430 - DNA, 19 bp, Homo sapiens
  siRNA target sequence for NR2E1 (NM_003269.2,1217-1235).
gaatgggaccccaatgtat

SEQ ID NO: 8431 - DNA, 19 bp, Homo sapiens
  siRNA target sequence for NR2E1 (NM_003269.2,1221-1239).
gggaccccaatgtatctct

SEQ ID NO: 8432 - DNA, 19 bp, Homo sapiens
  siRNA target sequence for NR2E1 (NM_003269.2,1222-1240).
ggaccccaatgtatctcta

SEQ ID NO: 8433 - DNA, 19 bp, Homo sapiens
  siRNA target sequence for NR2E1 (NM_003269.2,1228-1246).
caatgtatctctatgaagt

SEQ ID NO: 8434 - DNA, 19 bp, Homo sapiens
  siRNA target sequence for NR2E1 (NM_003269.2,1253-1271).
ggagtcggtgtgtgaatca

SEQ ID NO: 8435 - DNA, 19 bp, Homo sapiens
  siRNA target sequence for NR2E1 (NM_003269.2,1270-1288).
cagctgccagacttctctt

SEQ ID NO: 8436 - DNA, 19 bp, Homo sapiens
  siRNA target sequence for NR2E1 (NM_003269.2,1295-1313).
catcaagtgggctaagagt

SEQ ID NO: 8437 - DNA, 19 bp, Homo sapiens
  siRNA target sequence for NR2E1 (NM_003269.2,1325-1343).
ctccacgctgtctttgcaa

SEQ ID NO: 8438 - DNA, 19 bp, Homo sapiens
  siRNA target sequence for NR2E1 (NM_003269.2,1515-1533).
gaggtggtggctcgattta

SEQ ID NO: 8439 - DNA, 19 bp, Homo sapiens
  siRNA target sequence for NR2E1 (NM_003269.2,1517-1535).
ggtggtggctcgatttaga

SEQ ID NO: 8440 - DNA, 19 bp, Homo sapiens
  siRNA target sequence for NR2E1 (NM_003269.2,1520-1538).
ggtggctcgatttagacaa

SEQ ID NO: 8441 - DNA, 19 bp, Homo sapiens
  siRNA target sequence for NR2E1 (NM_003269.2,1541-1559).
ccggttagatgctactgaa

SEQ ID NO: 8442 - DNA, 19 bp, Homo sapiens
  siRNA target sequence for NR2E1 (NM_003269.2,1542-1560).
cggttagatgctactgaat

SEQ ID NO: 8443 - DNA, 19 bp, Homo sapiens
  siRNA target sequence for NR2E1 (NM_003269.2,1543-1561).
ggttagatgctactgaatt

SEQ ID NO: 8444 - DNA, 19 bp, Homo sapiens
  siRNA target sequence for NR2E1 (NM_003269.2,1544-1562).
gttagatgctactgaattt

SEQ ID NO: 8445 - DNA, 19 bp, Homo sapiens
  siRNA target sequence for NR2E1 (NM_003269.2,1589-1607).
caaagccgttcctacacat

SEQ ID NO: 8446 - DNA, 19 bp, Homo sapiens
  siRNA target sequence for NR2E1 (NM_003269.2,1646-1664).
cattgcagcccttcaagat

SEQ ID NO: 8447 - DNA, 19 bp, Homo sapiens
  siRNA target sequence for NR2E1 (NM_003269.2,1688-1706).
ctacatccataccagatat

SEQ ID NO: 8448 - DNA, 19 bp, Homo sapiens
  siRNA target sequence for NR2E1 (NM_003269.2,1743-1761).
cttttgccagctttacgtt

SEQ ID NO: 8449 - DNA, 19 bp, Homo sapiens
  siRNA target sequence for NR2E1 (NM_003269.2,1748-1766).
gccagctttacgttctatt

SEQ ID NO: 8450 - DNA, 19 bp, Homo sapiens
  siRNA target sequence for NR2E1 (NM_003269.2,1749-1767).
ccagctttacgttctatta

SEQ ID NO: 8451 - DNA, 19 bp, Homo sapiens
  siRNA target sequence for NR2E1 (NM_003269.2,1774-1792).
caactatagaagaagtgtt

SEQ ID NO: 8452 - DNA, 19 bp, Homo sapiens
  siRNA target sequence for NR2E1 (NM_003269.2,1808-1826).
cggcaatgtgccaattaca

SEQ ID NO: 8453 - DNA, 19 bp, Homo sapiens
  siRNA target sequence for NR2E3 (NM_014249.2,693-711).
ccctgggccaccacttcat

SEQ ID NO: 8454 - DNA, 19 bp, Homo sapiens
  siRNA target sequence for NR2E3 (NM_014249.2,709-727).
catggccagccttataaca

SEQ ID NO: 8455 - DNA, 19 bp, Homo sapiens
  siRNA target sequence for NR2E3 (NM_014249.2,861-879).
cggctcgcctactcttcat

SEQ ID NO: 8456 - DNA, 19 bp, Homo sapiens
  siRNA target sequence for NR2E3 (NM_014249.2,955-973).
ggcgtggagtgaactcttt

SEQ ID NO: 8457 - DNA, 19 bp, Homo sapiens
  siRNA target sequence for NR2E3 (NM_014249.2,1094-1112).
gtcctgcaggaaactatct

SEQ ID NO: 8458 - DNA, 19 bp, Homo sapiens
  siRNA target sequence for NR2E3 (NM_014249.2,1096-1114).
cctgcaggaaactatctct

SEQ ID NO: 8459 - DNA, 19 bp, Homo sapiens
  siRNA target sequence for NR2E3 (NM_014249.2,1284-1302).
ccgtgaggtttgggaaatt

SEQ ID NO: 8460 - DNA, 19 bp, Homo sapiens
  siRNA target sequence for NR2E3 (NM_014249.2,1366-1384).
caagaccatagggaatact

SEQ ID NO: 8461 - DNA, 19 bp, Homo sapiens
  siRNA target sequence for NR2E3 (NM_014249.2,1390-1408).
ggagaagctcctttgtgat

SEQ ID NO: 8462 - DNA, 19 bp, Homo sapiens
  siRNA target sequence for NR2E3 (NM_014249.2,1391-1409).
gagaagctcctttgtgata

SEQ ID NO: 8463 - DNA, 19 bp, Homo sapiens
  siRNA target sequence for NR2F1 (NM_005654.3,424-442).
gagcgtccgcaggaactta

SEQ ID NO: 8464 - DNA, 19 bp, Homo sapiens
  siRNA target sequence for NR2F1 (NM_005654.3,427-445).
cgtccgcaggaacttaact

SEQ ID NO: 8465 - DNA, 19 bp, Homo sapiens
  siRNA target sequence for NR2F1 (NM_005654.3,552-570).
cggttcagcgaggaagaat

SEQ ID NO: 8466 - DNA, 19 bp, Homo sapiens
  siRNA target sequence for NR2F2 (NM_021005.2,1108-1126).
cgtacctgtccggatatat

SEQ ID NO: 8467 - DNA, 19 bp, Homo sapiens
  siRNA target sequence for NR2F2 (NM_021005.2,1109-1127).
gtacctgtccggatatatt

SEQ ID NO: 8468 - DNA, 19 bp, Homo sapiens
  siRNA target sequence for NR2F2 (NM_021005.2,1199-1217).
catgggtatcgagaacatt

SEQ ID NO: 8469 - DNA, 19 bp, Homo sapiens
  siRNA target sequence for NR2F2 (NM_021005.2,1330-1348).
gcgagctgtttgtgttgaa

SEQ ID NO: 8470 - DNA, 19 bp, Homo sapiens
  siRNA target sequence for NR2F2 (NM_021005.2,1331-1349).
cgagctgtttgtgttgaat

SEQ ID NO: 8471 - DNA, 19 bp, Homo sapiens
  siRNA target sequence for NR2F2 (NM_021005.2,1609-1627).
gtgctttggaagaatacgt

SEQ ID NO: 8472 - DNA, 19 bp, Homo sapiens
  siRNA target sequence for NR2F2 (NM_021005.2,1652-1670).
gacgagattcggaaagctt

SEQ ID NO: 8473 - DNA, 19 bp, Homo sapiens
  siRNA target sequence for NR2F2 (NM_021005.2,1697-1715).
cgtctcctcctcagtcata

SEQ ID NO: 8474 - DNA, 19 bp, Homo sapiens
  siRNA target sequence for NR2F2 (NM_021005.2,1705-1723).
cctcagtcatagagcaatt

SEQ ID NO: 8475 - DNA, 19 bp, Homo sapiens
  siRNA target sequence for NR2F2 (NM_021005.2,1708-1726).
cagtcatagagcaattgtt

SEQ ID NO: 8476 - DNA, 19 bp, Homo sapiens
  siRNA target sequence for NR2F2 (NM_021005.2,1782-1800).
ctgtccggcagcagtttta

SEQ ID NO: 8477 - DNA, 19 bp, Homo sapiens
  siRNA target sequence for NR2F2 (NM_021005.2,1795-1813).
gttttaactggccgtatat

SEQ ID NO: 8478 - DNA, 19 bp, Homo sapiens
  siRNA target sequence for NR2F2 (NM_021005.2,1804-1822).
ggccgtatatggcaattca

SEQ ID NO: 8479 - DNA, 19 bp, Homo sapiens
  siRNA target sequence for NR2F2 (NM_021005.2,1805-1823).
gccgtatatggcaattcaa

SEQ ID NO: 8480 - DNA, 19 bp, Homo sapiens
  siRNA target sequence for NR2F2 (NM_021005.2,1806-1824).
ccgtatatggcaattcaat

SEQ ID NO: 8481 - DNA, 19 bp, Homo sapiens
  siRNA target sequence for NR3C1 (NM_000176.1,205-223).
gatgtgatggacttctata

SEQ ID NO: 8482 - DNA, 19 bp, Homo sapiens
  siRNA target sequence for NR3C1 (NM_000176.1,274-292).
ctggctgtcgcttctcaat

SEQ ID NO: 8483 - DNA, 19 bp, Homo sapiens
  siRNA target sequence for NR3C1 (NM_000176.1,276-294).
ggctgtcgcttctcaatca

SEQ ID NO: 8484 - DNA, 19 bp, Homo sapiens
  siRNA target sequence for NR3C1 (NM_000176.1,278-296).
ctgtcgcttctcaatcaga

SEQ ID NO: 8485 - DNA, 19 bp, Homo sapiens
  siRNA target sequence for NR3C1 (NM_000176.1,382-400).
ctctcaatgggactgtata

SEQ ID NO: 8486 - DNA, 19 bp, Homo sapiens
  siRNA target sequence for NR3C1 (NM_000176.1,445-463).
ccacagcagggccaaatca

SEQ ID NO: 8487 - DNA, 19 bp, Homo sapiens
  siRNA target sequence for NR3C1 (NM_000176.1,471-489).
ctcgggggaaacagactta

SEQ ID NO: 8488 - DNA, 19 bp, Homo sapiens
  siRNA target sequence for NR3C1 (NM_000176.1,660-678).
caacggtggcaatgtgaaa

SEQ ID NO: 8489 - DNA, 19 bp, Homo sapiens
  siRNA target sequence for NR3C1 (NM_000176.1,665-683).
gtggcaatgtgaaattgta

SEQ ID NO: 8490 - DNA, 19 bp, Homo sapiens
  siRNA target sequence for NR3C1 (NM_000176.1,667-685).
ggcaatgtgaaattgtata

SEQ ID NO: 8491 - DNA, 19 bp, Homo sapiens
  siRNA target sequence for NR3C1 (NM_000176.1,771-789).
gagatcagacctgttgata

SEQ ID NO: 8492 - DNA, 19 bp, Homo sapiens
  siRNA target sequence for NR3C1 (NM_000176.1,773-791).
gatcagacctgttgataga

SEQ ID NO: 8493 - DNA, 19 bp, Homo sapiens
  siRNA target sequence for NR3C1 (NM_000176.1,778-796).
gacctgttgatagatgaaa

SEQ ID NO: 8494 - DNA, 19 bp, Homo sapiens
  siRNA target sequence for NR3C1 (NM_000176.1,828-846).
cgattcattccttttggaa

SEQ ID NO: 8495 - DNA, 19 bp, Homo sapiens
  siRNA target sequence for NR3C1 (NM_000176.1,861-879).
ggactgcaagcctctcatt

SEQ ID NO: 8496 - DNA, 19 bp, Homo sapiens
  siRNA target sequence for NR3C1 (NM_000176.1,862-880).
gactgcaagcctctcattt

SEQ ID NO: 8497 - DNA, 19 bp, Homo sapiens
  siRNA target sequence for NR3C1 (NM_000176.1,876-894).
cattttaccggacactaaa

SEQ ID NO: 8498 - DNA, 19 bp, Homo sapiens
  siRNA target sequence for NR3C1 (NM_000176.1,927-945).
gtcaagccccagtaatgta

SEQ ID NO: 8499 - DNA, 19 bp, Homo sapiens
  siRNA target sequence for NR3C1 (NM_000176.1,932-950).
gccccagtaatgtaacact

SEQ ID NO: 8500 - DNA, 19 bp, Homo sapiens
  siRNA target sequence for NR3C1 (NM_000176.1,990-1008).
ctgcacccctggggtaatt

SEQ ID NO: 8501 - DNA, 19 bp, Homo sapiens
  siRNA target sequence for NR3C1 (NM_000176.1,992-1010).
gcacccctggggtaattaa

SEQ ID NO: 8502 - DNA, 19 bp, Homo sapiens
  siRNA target sequence for NR3C1 (NM_000176.1,1015-1033).
gagaaactgggcacagttt

SEQ ID NO: 8503 - DNA, 19 bp, Homo sapiens
  siRNA target sequence for NR3C1 (NM_000176.1,1054-1072).
ggagcaaatataattggta

SEQ ID NO: 8504 - DNA, 19 bp, Homo sapiens
  siRNA target sequence for NR3C1 (NM_000176.1,1210-1228).
ggttccgaaaattggaata

SEQ ID NO: 8505 - DNA, 19 bp, Homo sapiens
  siRNA target sequence for NR3C1 (NM_000176.1,1281-1299).
ccctggtcgaacagttttt

SEQ ID NO: 8506 - DNA, 19 bp, Homo sapiens
  siRNA target sequence for NR3C1 (NM_000176.1,1282-1300).
cctggtcgaacagtttttt

SEQ ID NO: 8507 - DNA, 19 bp, Homo sapiens
  siRNA target sequence for NR3C1 (NM_000176.1,1286-1304).
gtcgaacagttttttctaa

SEQ ID NO: 8508 - DNA, 19 bp, Homo sapiens
  siRNA target sequence for NR3C1 (NM_000176.1,1442-1460).
cttgtggaagctgtaaagt

SEQ ID NO: 8509 - DNA, 19 bp, Homo sapiens
  siRNA target sequence for NR3C1 (NM_000176.1,1477-1495).
gtggaaggacagcacaatt

SEQ ID NO: 8510 - DNA, 19 bp, Homo sapiens
  siRNA target sequence for NR3C1 (NM_000176.1,1483-1501).
ggacagcacaattacctat

SEQ ID NO: 8511 - DNA, 19 bp, Homo sapiens
  siRNA target sequence for NR3C1 (NM_000176.1,1527-1545).
cgataaaattcgaagaaaa

SEQ ID NO: 8512 - DNA, 19 bp, Homo sapiens
  siRNA target sequence for NR3C1 (NM_000176.1,1552-1570).
ccagcatgccgctatcgaa

SEQ ID NO: 8513 - DNA, 19 bp, Homo sapiens
  siRNA target sequence for NR3C1 (NM_000176.1,1553-1571).
cagcatgccgctatcgaaa

SEQ ID NO: 8514 - DNA, 19 bp, Homo sapiens
  siRNA target sequence for NR3C1 (NM_000176.1,1555-1573).
gcatgccgctatcgaaaat

SEQ ID NO: 8515 - DNA, 19 bp, Homo sapiens
  siRNA target sequence for NR3C1 (NM_000176.1,1559-1577).
gccgctatcgaaaatgtct

SEQ ID NO: 8516 - DNA, 19 bp, Homo sapiens
  siRNA target sequence for NR3C1 (NM_000176.1,1560-1578).
ccgctatcgaaaatgtctt

SEQ ID NO: 8517 - DNA, 19 bp, Homo sapiens
  siRNA target sequence for NR3C1 (NM_000176.1,1812-1830).
gactacgctcaacatgtta

SEQ ID NO: 8518 - DNA, 19 bp, Homo sapiens
  siRNA target sequence for NR3C1 (NM_000176.1,1877-1895).
caggtttcaggaacttaca

SEQ ID NO: 8519 - DNA, 19 bp, Homo sapiens
  siRNA target sequence for NR3C1 (NM_000176.1,1920-1938).
gcagtactcctggatgttt

SEQ ID NO: 8520 - DNA, 19 bp, Homo sapiens
  siRNA target sequence for NR3C1 (NM_000176.1,1954-1972).
ctggggtggagatcatata

SEQ ID NO: 8521 - DNA, 19 bp, Homo sapiens
  siRNA target sequence for NR3C1 (NM_000176.1,1956-1974).
ggggtggagatcatataga

SEQ ID NO: 8522 - DNA, 19 bp, Homo sapiens
  siRNA target sequence for NR3C1 (NM_000176.1,1997-2015).
gttttgctcctgatctgat

SEQ ID NO: 8523 - DNA, 19 bp, Homo sapiens
  siRNA target sequence for NR3C1 (NM_000176.1,2006-2024).
ctgatctgattattaatga

SEQ ID NO: 8524 - DNA, 19 bp, Homo sapiens
  siRNA target sequence for NR3C1 (NM_000176.1,2045-2063).
gcatgtacgaccaatgtaa

SEQ ID NO: 8525 - DNA, 19 bp, Homo sapiens
  siRNA target sequence for NR3C1 (NM_000176.1,2046-2064).
catgtacgaccaatgtaaa

SEQ ID NO: 8526 - DNA, 19 bp, Homo sapiens
  siRNA target sequence for NR3C1 (NM_000176.1,2092-2110).
cacaggcttcaggtatctt

SEQ ID NO: 8527 - DNA, 19 bp, Homo sapiens
  siRNA target sequence for NR3C1 (NM_000176.1,2094-2112).
caggcttcaggtatcttat

SEQ ID NO: 8528 - DNA, 19 bp, Homo sapiens
  siRNA target sequence for NR3C1 (NM_000176.1,2097-2115).
gcttcaggtatcttatgaa

SEQ ID NO: 8529 - DNA, 19 bp, Homo sapiens
  siRNA target sequence for NR3C1 (NM_000176.1,2265-2283).
ctggcagcggttttatcaa

SEQ ID NO: 8530 - DNA, 19 bp, Homo sapiens
  siRNA target sequence for NR3C1 (NM_000176.1,2267-2285).
ggcagcggttttatcaact

SEQ ID NO: 8531 - DNA, 19 bp, Homo sapiens
  siRNA target sequence for NR3C1 (NM_000176.1,2334-2352).
ctattgcttccaaacattt

SEQ ID NO: 8532 - DNA, 19 bp, Homo sapiens
  siRNA target sequence for NR3C1 (NM_000176.1,2339-2357).
gcttccaaacatttttgga

SEQ ID NO: 8533 - DNA, 19 bp, Homo sapiens
  siRNA target sequence for NR3C1 (NM_000176.1,2355-2373).
ggataagaccatgagtatt

SEQ ID NO: 8534 - DNA, 19 bp, Homo sapiens
  siRNA target sequence for NR3C1 (NM_000176.1,2403-2421).
caccaatcagataccaaaa

SEQ ID NO: 8535 - DNA, 19 bp, Homo sapiens
  siRNA target sequence for NR3C1 (NM_000176.1,2405-2423).
ccaatcagataccaaaata

SEQ ID NO: 8536 - DNA, 19 bp, Homo sapiens
  siRNA target sequence for NR3C1 (NM_000176.1,2410-2428).
cagataccaaaatattcaa

SEQ ID NO: 8537 - DNA, 19 bp, Homo sapiens
  siRNA target sequence for NR3C2 (NM_000901.1,241-259).
ctccctgaaggtctagata

SEQ ID NO: 8538 - DNA, 19 bp, Homo sapiens
  siRNA target sequence for NR3C2 (NM_000901.1,319-337).
gagaggaccgatgagaata

SEQ ID NO: 8539 - DNA, 19 bp, Homo sapiens
  siRNA target sequence for NR3C2 (NM_000901.1,323-341).
ggaccgatgagaataacta

SEQ ID NO: 8540 - DNA, 19 bp, Homo sapiens
  siRNA target sequence for NR3C2 (NM_000901.1,326-344).
ccgatgagaataactacat

SEQ ID NO: 8541 - DNA, 19 bp, Homo sapiens
  siRNA target sequence for NR3C2 (NM_000901.1,352-370).
gtcaacgtaagctgtgttt

SEQ ID NO: 8542 - DNA, 19 bp, Homo sapiens
  siRNA target sequence for NR3C2 (NM_000901.1,367-385).
gtttccggtgctattccaa

SEQ ID NO: 8543 - DNA, 19 bp, Homo sapiens
  siRNA target sequence for NR3C2 (NM_000901.1,454-472).
cggcctgggattttaacat

SEQ ID NO: 8544 - DNA, 19 bp, Homo sapiens
  siRNA target sequence for NR3C2 (NM_000901.1,456-474).
gcctgggattttaacatct

SEQ ID NO: 8545 - DNA, 19 bp, Homo sapiens
  siRNA target sequence for NR3C2 (NM_000901.1,460-478).
gggattttaacatctgata

SEQ ID NO: 8546 - DNA, 19 bp, Homo sapiens
  siRNA target sequence for NR3C2 (NM_000901.1,520-538).
gctgagtccatgggtttat

SEQ ID NO: 8547 - DNA, 19 bp, Homo sapiens
  siRNA target sequence for NR3C2 (NM_000901.1,521-539).
ctgagtccatgggtttata

SEQ ID NO: 8548 - DNA, 19 bp, Homo sapiens
  siRNA target sequence for NR3C2 (NM_000901.1,527-545).
ccatgggtttatatatgga

SEQ ID NO: 8549 - DNA, 19 bp, Homo sapiens
  siRNA target sequence for NR3C2 (NM_000901.1,602-620).
gtccagctaagatttatca

SEQ ID NO: 8550 - DNA, 19 bp, Homo sapiens
  siRNA target sequence for NR3C2 (NM_000901.1,608-626).
ctaagatttatcagaatgt

SEQ ID NO: 8551 - DNA, 19 bp, Homo sapiens
  siRNA target sequence for NR3C2 (NM_000901.1,625-643).
gttgaacagctggtgaaat

SEQ ID NO: 8552 - DNA, 19 bp, Homo sapiens
  siRNA target sequence for NR3C2 (NM_000901.1,628-646).
gaacagctggtgaaatttt

SEQ ID NO: 8553 - DNA, 19 bp, Homo sapiens
  siRNA target sequence for NR3C2 (NM_000901.1,631-649).
cagctggtgaaattttaca

SEQ ID NO: 8554 - DNA, 19 bp, Homo sapiens
  siRNA target sequence for NR3C2 (NM_000901.1,664-682).
cgtccttccactctaagtt

SEQ ID NO: 8555 - DNA, 19 bp, Homo sapiens
  siRNA target sequence for NR3C2 (NM_000901.1,694-712).
cccttgagatcatttatgt

SEQ ID NO: 8556 - DNA, 19 bp, Homo sapiens
  siRNA target sequence for NR3C2 (NM_000901.1,757-775).
gttaaaagccctatcatgt

SEQ ID NO: 8557 - DNA, 19 bp, Homo sapiens
  siRNA target sequence for NR3C2 (NM_000901.1,966-984).
ccctgcacatgctagcaat

SEQ ID NO: 8558 - DNA, 19 bp, Homo sapiens
  siRNA target sequence for NR3C2 (NM_000901.1,1006-1024).
ccgttaagtagcatgaaat

SEQ ID NO: 8559 - DNA, 19 bp, Homo sapiens
  siRNA target sequence for NR3C2 (NM_000901.1,1067-1085).
cagtctccagtcccaataa

SEQ ID NO: 8560 - DNA, 19 bp, Homo sapiens
  siRNA target sequence for NR3C2 (NM_000901.1,1105-1123).
gtgtctagccctgcaaata

SEQ ID NO: 8561 - DNA, 19 bp, Homo sapiens
  siRNA target sequence for NR3C2 (NM_000901.1,1107-1125).
gtctagccctgcaaatatt

SEQ ID NO: 8562 - DNA, 19 bp, Homo sapiens
  siRNA target sequence for NR3C2 (NM_000901.1,1148-1166).
ccagcccttcgaacactaa

SEQ ID NO: 8563 - DNA, 19 bp, Homo sapiens
  siRNA target sequence for NR3C2 (NM_000901.1,1149-1167).
cagcccttcgaacactaat

SEQ ID NO: 8564 - DNA, 19 bp, Homo sapiens
  siRNA target sequence for NR3C2 (NM_000901.1,1151-1169).
gcccttcgaacactaataa

SEQ ID NO: 8565 - DNA, 19 bp, Homo sapiens
  siRNA target sequence for NR3C2 (NM_000901.1,1215-1233).
ctgtagccctgtaaacaat

SEQ ID NO: 8566 - DNA, 19 bp, Homo sapiens
  siRNA target sequence for NR3C2 (NM_000901.1,1324-1342).
caagaggtcccttttccta

SEQ ID NO: 8567 - DNA, 19 bp, Homo sapiens
  siRNA target sequence for NR3C2 (NM_000901.1,1354-1372).
gtagagagtgccatctcaa

SEQ ID NO: 8568 - DNA, 19 bp, Homo sapiens
  siRNA target sequence for NR3C2 (NM_000901.1,1376-1394).
gtgtgactggccagcttaa

SEQ ID NO: 8569 - DNA, 19 bp, Homo sapiens
  siRNA target sequence for NR3C2 (NM_000901.1,1378-1396).
gtgactggccagcttaata

SEQ ID NO: 8570 - DNA, 19 bp, Homo sapiens
  siRNA target sequence for NR3C2 (NM_000901.1,1380-1398).
gactggccagcttaatatt

SEQ ID NO: 8571 - DNA, 19 bp, Homo sapiens
  siRNA target sequence for NR3C2 (NM_000901.1,1417-1435).
gaaccagatggagctttta

SEQ ID NO: 8572 - DNA, 19 bp, Homo sapiens
  siRNA target sequence for NR3C2 (NM_000901.1,1560-1578).
cccgtttccatttatggat

SEQ ID NO: 8573 - DNA, 19 bp, Homo sapiens
  siRNA target sequence for NR3C2 (NM_000901.1,1576-1594).
gatggctcgtatttttcct

SEQ ID NO: 8574 - DNA, 19 bp, Homo sapiens
  siRNA target sequence for NR3C2 (NM_000901.1,1650-1668).
cggctttgatggtaactgt

SEQ ID NO: 8575 - DNA, 19 bp, Homo sapiens
  siRNA target sequence for NR3C2 (NM_000901.1,1678-1696).
ggattcccagtgggtatta

SEQ ID NO: 8576 - DNA, 19 bp, Homo sapiens
  siRNA target sequence for NR3C2 (NM_000901.1,1679-1697).
gattcccagtgggtattaa

SEQ ID NO: 8577 - DNA, 19 bp, Homo sapiens
  siRNA target sequence for NR3C2 (NM_000901.1,1750-1768).
gctattgttggggtgaatt

SEQ ID NO: 8578 - DNA, 19 bp, Homo sapiens
  siRNA target sequence for NR3C2 (NM_000901.1,1798-1816).
ggtgctcaaggtacaatat

SEQ ID NO: 8579 - DNA, 19 bp, Homo sapiens
  siRNA target sequence for NR3C2 (NM_000901.1,1801-1819).
gctcaaggtacaatatctt

SEQ ID NO: 8580 - DNA, 19 bp, Homo sapiens
  siRNA target sequence for NR3C2 (NM_000901.1,1802-1820).
ctcaaggtacaatatcttt

SEQ ID NO: 8581 - DNA, 19 bp, Homo sapiens
  siRNA target sequence for NR3C2 (NM_000901.1,1848-1866).
ccaacacctgagttccttt

SEQ ID NO: 8582 - DNA, 19 bp, Homo sapiens
  siRNA target sequence for NR3C2 (NM_000901.1,1868-1886).
ctcctgtcaatactttagt

SEQ ID NO: 8583 - DNA, 19 bp, Homo sapiens
  siRNA target sequence for NR3C2 (NM_000901.1,1906-1924).
ggcgacctgtcgtctagaa

SEQ ID NO: 8584 - DNA, 19 bp, Homo sapiens
  siRNA target sequence for NR3C2 (NM_000901.1,1908-1926).
cgacctgtcgtctagaaga

SEQ ID NO: 8585 - DNA, 19 bp, Homo sapiens
  siRNA target sequence for NR3C2 (NM_000901.1,1914-1932).
gtcgtctagaagaagtgat

SEQ ID NO: 8586 - DNA, 19 bp, Homo sapiens
  siRNA target sequence for NR3C2 (NM_000901.1,1933-1951).
gggtatccggtcttagaat

SEQ ID NO: 8587 - DNA, 19 bp, Homo sapiens
  siRNA target sequence for NR3C2 (NM_000901.1,1934-1952).
ggtatccggtcttagaata

SEQ ID NO: 8588 - DNA, 19 bp, Homo sapiens
  siRNA target sequence for NR3C2 (NM_000901.1,1974-1992).
ctctactttacgaagtgtt

SEQ ID NO: 8589 - DNA, 19 bp, Homo sapiens
  siRNA target sequence for NR3C2 (NM_000901.1,2163-2181).
gattcgacgaaagaattgt

SEQ ID NO: 8590 - DNA, 19 bp, Homo sapiens
  siRNA target sequence for NR3C2 (NM_000901.1,2227-2245).
ggagcacgaaagtcaaaga

SEQ ID NO: 8591 - DNA, 19 bp, Homo sapiens
  siRNA target sequence for NR3C2 (NM_000901.1,2228-2246).
gagcacgaaagtcaaagaa

SEQ ID NO: 8592 - DNA, 19 bp, Homo sapiens
  siRNA target sequence for NR3C2 (NM_000901.1,2230-2248).
gcacgaaagtcaaagaagt

SEQ ID NO: 8593 - DNA, 19 bp, Homo sapiens
  siRNA target sequence for NR3C2 (NM_000901.1,2343-2361).
gtacatcgctcctgcaaaa

SEQ ID NO: 8594 - DNA, 19 bp, Homo sapiens
  siRNA target sequence for NR3C2 (NM_000901.1,2420-2438).
caccttcccccgttatggt

SEQ ID NO: 8595 - DNA, 19 bp, Homo sapiens
  siRNA target sequence for NR3C2 (NM_000901.1,2428-2446).
cccgttatggtccttgaaa

SEQ ID NO: 8596 - DNA, 19 bp, Homo sapiens
  siRNA target sequence for NR3C2 (NM_000901.1,2431-2449).
gttatggtccttgaaaaca

SEQ ID NO: 8597 - DNA, 19 bp, Homo sapiens
  siRNA target sequence for NR3C2 (NM_000901.1,2492-2510).
cagatacagccgaaaatct

SEQ ID NO: 8598 - DNA, 19 bp, Homo sapiens
  siRNA target sequence for NR3C2 (NM_000901.1,2527-2545).
cgcttagcaggcaaacaga

SEQ ID NO: 8599 - DNA, 19 bp, Homo sapiens
  siRNA target sequence for NR3C2 (NM_000901.1,2556-2574).
cgtgaagtgggcaaaggta

SEQ ID NO: 8600 - DNA, 19 bp, Homo sapiens
  siRNA target sequence for NR3C2 (NM_000901.1,2595-2613).
gcctcttgaggaccaaatt

SEQ ID NO: 8601 - DNA, 19 bp, Homo sapiens
  siRNA target sequence for NR3C2 (NM_000901.1,2596-2614).
cctcttgaggaccaaatta

SEQ ID NO: 8602 - DNA, 19 bp, Homo sapiens
  siRNA target sequence for NR3C2 (NM_000901.1,2661-2679).
ctggagatcgtacaaacat

SEQ ID NO: 8603 - DNA, 19 bp, Homo sapiens
  siRNA target sequence for NR3C2 (NM_000901.1,2666-2684).
gatcgtacaaacatacgaa

SEQ ID NO: 8604 - DNA, 19 bp, Homo sapiens
  siRNA target sequence for NR3C2 (NM_000901.1,2681-2699).
cgaacagccaatttctcta

SEQ ID NO: 8605 - DNA, 19 bp, Homo sapiens
  siRNA target sequence for NR3C2 (NM_000901.1,2682-2700).
gaacagccaatttctctat

SEQ ID NO: 8606 - DNA, 19 bp, Homo sapiens
  siRNA target sequence for NR3C2 (NM_000901.1,2704-2722).
gcaccagacctagtcttta

SEQ ID NO: 8607 - DNA, 19 bp, Homo sapiens
  siRNA target sequence for NR3C2 (NM_000901.1,2708-2726).
cagacctagtctttaatga

SEQ ID NO: 8608 - DNA, 19 bp, Homo sapiens
  siRNA target sequence for NR3C2 (NM_000901.1,2736-2754).
gcatcagtctgccatgtat

SEQ ID NO: 8609 - DNA, 19 bp, Homo sapiens
  siRNA target sequence for NR3C2 (NM_000901.1,2742-2760).
gtctgccatgtatgaacta

SEQ ID NO: 8610 - DNA, 19 bp, Homo sapiens
  siRNA target sequence for NR3C2 (NM_000901.1,2803-2821).
cagctcacctttgaagaat

SEQ ID NO: 8611 - DNA, 19 bp, Homo sapiens
  siRNA target sequence for NR3C2 (NM_000901.1,2841-2859).
gctgctactaagcacaatt

SEQ ID NO: 8612 - DNA, 19 bp, Homo sapiens
  siRNA target sequence for NR3C2 (NM_000901.1,2844-2862).
gctactaagcacaattcca

SEQ ID NO: 8613 - DNA, 19 bp, Homo sapiens
  siRNA target sequence for NR4A1 (NM_002135.3,488-506).
cggctacacaggagagttt

SEQ ID NO: 8614 - DNA, 19 bp, Homo sapiens
  siRNA target sequence for NR4A1 (NM_002135.3,800-818).
gcccagccagacttacgaa

SEQ ID NO: 8615 - DNA, 19 bp, Homo sapiens
  siRNA target sequence for NR4A1 (NM_002135.3,1133-1151).
cgcttcatgccagcattat

SEQ ID NO: 8616 - DNA, 19 bp, Homo sapiens
  siRNA target sequence for NR4A1 (NM_002135.3,1306-1324).
gcatggtgaaggaagttgt

SEQ ID NO: 8617 - DNA, 19 bp, Homo sapiens
  siRNA target sequence for NR4A1 (NM_002135.3,1516-1534).
gggatgtacagcagttcta

SEQ ID NO: 8618 - DNA, 19 bp, Homo sapiens
  siRNA target sequence for NR4A1 (NM_002135.3,1687-1705).
gcgagggcaagctcatctt

SEQ ID NO: 8619 - DNA, 19 bp, Homo sapiens
  siRNA target sequence for NR4A1 (NM_002135.3,1753-1771).
gggactggattgacagtat

SEQ ID NO: 8620 - DNA, 19 bp, Homo sapiens
  siRNA target sequence for NR4A1 (NM_002135.3,2060-2078).
gccccctccacccatcatt

SEQ ID NO: 8621 - DNA, 19 bp, Homo sapiens
  siRNA target sequence for NR4A1 (NM_002135.3,2064-2082).
cctccacccatcattgaca

SEQ ID NO: 8622 - DNA, 19 bp, Homo sapiens
  siRNA target sequence for NR4A1 (NM_173158.1,1098-1116).
ggggccttttgttggaaat

SEQ ID NO: 8623 - DNA, 19 bp, Homo sapiens
  siRNA target sequence for NR4A2 (NM_006186.2,425-443).
cagctccgatttcttaact

SEQ ID NO: 8624 - DNA, 19 bp, Homo sapiens
  siRNA target sequence for NR4A2 (NM_006186.2,447-465).
gagtttgtcaagtttagca

SEQ ID NO: 8625 - DNA, 19 bp, Homo sapiens
  siRNA target sequence for NR4A2 (NM_006186.2,473-491).
caccaacactgaaatcact

SEQ ID NO: 8626 - DNA, 19 bp, Homo sapiens
  siRNA target sequence for NR4A2 (NM_006186.2,588-606).
ggacagcagtcctccatta

SEQ ID NO: 8627 - DNA, 19 bp, Homo sapiens
  siRNA target sequence for NR4A2 (NM_006186.2,589-607).
gacagcagtcctccattaa

SEQ ID NO: 8628 - DNA, 19 bp, Homo sapiens
  siRNA target sequence for NR4A2 (NM_006186.2,601-619).
ccattaaggtagaagacat

SEQ ID NO: 8629 - DNA, 19 bp, Homo sapiens
  siRNA target sequence for NR4A2 (NM_006186.2,681-699).
cactccgggtcggtttact

SEQ ID NO: 8630 - DNA, 19 bp, Homo sapiens
  siRNA target sequence for NR4A2 (NM_006186.2,685-703).
ccgggtcggtttactacaa

SEQ ID NO: 8631 - DNA, 19 bp, Homo sapiens
  siRNA target sequence for NR4A2 (NM_006186.2,772-790).
cgggatctctccacaactt

SEQ ID NO: 8632 - DNA, 19 bp, Homo sapiens
  siRNA target sequence for NR4A2 (NM_006186.2,857-875).
cctcttctcctttaagcaa

SEQ ID NO: 8633 - DNA, 19 bp, Homo sapiens
  siRNA target sequence for NR4A2 (NM_006186.2,858-876).
ctcttctcctttaagcaat

SEQ ID NO: 8634 - DNA, 19 bp, Homo sapiens
  siRNA target sequence for NR4A2 (NM_006186.2,885-903).
ggcaccccggtgtctagtt

SEQ ID NO: 8635 - DNA, 19 bp, Homo sapiens
  siRNA target sequence for NR4A2 (NM_006186.2,1331-1349).
ggttcgcacagacagttta

SEQ ID NO: 8636 - DNA, 19 bp, Homo sapiens
  siRNA target sequence for NR4A2 (NM_006186.2,1332-1350).
gttcgcacagacagtttaa

SEQ ID NO: 8637 - DNA, 19 bp, Homo sapiens
  siRNA target sequence for NR4A2 (NM_006186.2,1496-1514).
ccaggcgaaccctgactat

SEQ ID NO: 8638 - DNA, 19 bp, Homo sapiens
  siRNA target sequence for NR4A2 (NM_006186.2,1499-1517).
ggcgaaccctgactatcaa

SEQ ID NO: 8639 - DNA, 19 bp, Homo sapiens
  siRNA target sequence for NR4A2 (NM_006186.2,1500-1518).
gcgaaccctgactatcaaa

SEQ ID NO: 8640 - DNA, 19 bp, Homo sapiens
  siRNA target sequence for NR4A2 (NM_006186.2,1501-1519).
cgaaccctgactatcaaat

SEQ ID NO: 8641 - DNA, 19 bp, Homo sapiens
  siRNA target sequence for NR4A2 (NM_006186.2,1505-1523).
ccctgactatcaaatgagt

SEQ ID NO: 8642 - DNA, 19 bp, Homo sapiens
  siRNA target sequence for NR4A2 (NM_006186.2,1634-1652).
cgaccaagacctgcttttt

SEQ ID NO: 8643 - DNA, 19 bp, Homo sapiens
  siRNA target sequence for NR4A2 (NM_006186.2,1705-1723).
cagtggagggtaaactcat

SEQ ID NO: 8644 - DNA, 19 bp, Homo sapiens
  siRNA target sequence for NR4A2 (NM_006186.2,1709-1727).
ggagggtaaactcatcttt

SEQ ID NO: 8645 - DNA, 19 bp, Homo sapiens
  siRNA target sequence for NR4A2 (NM_006186.2,1710-1728).
gagggtaaactcatctttt

SEQ ID NO: 8646 - DNA, 19 bp, Homo sapiens
  siRNA target sequence for NR4A2 (NM_006186.2,1713-1731).
ggtaaactcatcttttgca

SEQ ID NO: 8647 - DNA, 19 bp, Homo sapiens
  siRNA target sequence for NR4A2 (NM_006186.2,1780-1798).
ggattgattccattgttga

SEQ ID NO: 8648 - DNA, 19 bp, Homo sapiens
  siRNA target sequence for NR4A2 (NM_006186.2,2040-2058).
gggctacagcgcattttct

SEQ ID NO: 8649 - DNA, 19 bp, Homo sapiens
  siRNA target sequence for NR4A2 (NM_006186.2,2041-2059).
ggctacagcgcattttcta

SEQ ID NO: 8650 - DNA, 19 bp, Homo sapiens
  siRNA target sequence for NR4A2 (NM_006186.2,2078-2096).
ggtgccaccgccagcaata

SEQ ID NO: 8651 - DNA, 19 bp, Homo sapiens
  siRNA target sequence for NR4A2 (NM_006186.2,2085-2103).
ccgccagcaataattgaca

SEQ ID NO: 8652 - DNA, 19 bp, Homo sapiens
  siRNA target sequence for NR4A2 (NM_006186.2,2086-2104).
cgccagcaataattgacaa

SEQ ID NO: 8653 - DNA, 19 bp, Homo sapiens
  siRNA target sequence for NR4A2 (NM_006186.2,2089-2107).
cagcaataattgacaaact

SEQ ID NO: 8654 - DNA, 19 bp, Homo sapiens
  siRNA target sequence for NR4A2 (NM_173172.1,1683-1701).
cgattagcatacagaatat

SEQ ID NO: 8655 - DNA, 19 bp, Homo sapiens
  siRNA target sequence for NR4A3 (NM_006981.2,926-944).
cgagcaactacgaactcaa

SEQ ID NO: 8656 - DNA, 19 bp, Homo sapiens
  siRNA target sequence for NR4A3 (NM_006981.2,946-964).
ccttcctgcgtgtaccaaa

SEQ ID NO: 8657 - DNA, 19 bp, Homo sapiens
  siRNA target sequence for NR4A3 (NM_006981.2,1115-1133).
ccagcacctccatgtactt

SEQ ID NO: 8658 - DNA, 19 bp, Homo sapiens
  siRNA target sequence for NR4A3 (NM_006981.2,1786-1804).
ctcagtgttggaatggtaa

SEQ ID NO: 8659 - DNA, 19 bp, Homo sapiens
  siRNA target sequence for NR4A3 (NM_006981.2,1815-1833).
ccgtacagatagtctgaaa

SEQ ID NO: 8660 - DNA, 19 bp, Homo sapiens
  siRNA target sequence for NR4A3 (NM_006981.2,1909-1927).
cctccaatctgcatgatga

SEQ ID NO: 8661 - DNA, 19 bp, Homo sapiens
  siRNA target sequence for NR4A3 (NM_006981.2,1932-1950).
ccttgtccgagctttaaca

SEQ ID NO: 8662 - DNA, 19 bp, Homo sapiens
  siRNA target sequence for NR4A3 (NM_006981.2,1955-1973).
caacacccagagatcttga

SEQ ID NO: 8663 - DNA, 19 bp, Homo sapiens
  siRNA target sequence for NR4A3 (NM_006981.2,1958-1976).
cacccagagatcttgatta

SEQ ID NO: 8664 - DNA, 19 bp, Homo sapiens
  siRNA target sequence for NR4A3 (NM_006981.2,1960-1978).
cccagagatcttgattatt

SEQ ID NO: 8665 - DNA, 19 bp, Homo sapiens
  siRNA target sequence for NR4A3 (NM_006981.2,2125-2143).
cagacattacttattgaat

SEQ ID NO: 8666 - DNA, 19 bp, Homo sapiens
  siRNA target sequence for NR4A3 (NM_006981.2,2184-2202).
gtcaaacactgctgaagat

SEQ ID NO: 8667 - DNA, 19 bp, Homo sapiens
  siRNA target sequence for NR4A3 (NM_006981.2,2192-2210).
ctgctgaagataagtttgt

SEQ ID NO: 8668 - DNA, 19 bp, Homo sapiens
  siRNA target sequence for NR4A3 (NM_006981.2,2261-2279).
gggagtggctcgactctat

SEQ ID NO: 8669 - DNA, 19 bp, Homo sapiens
  siRNA target sequence for NR4A3 (NM_006981.2,2262-2280).
ggagtggctcgactctatt

SEQ ID NO: 8670 - DNA, 19 bp, Homo sapiens
  siRNA target sequence for NR4A3 (NM_006981.2,2263-2281).
gagtggctcgactctatta

SEQ ID NO: 8671 - DNA, 19 bp, Homo sapiens
  siRNA target sequence for NR4A3 (NM_006981.2,2265-2283).
gtggctcgactctattaaa

SEQ ID NO: 8672 - DNA, 19 bp, Homo sapiens
  siRNA target sequence for NR4A3 (NM_006981.2,2267-2285).
ggctcgactctattaaaga

SEQ ID NO: 8673 - DNA, 19 bp, Homo sapiens
  siRNA target sequence for NR4A3 (NM_006981.2,2269-2287).
ctcgactctattaaagact

SEQ ID NO: 8674 - DNA, 19 bp, Homo sapiens
  siRNA target sequence for NR4A3 (NM_006981.2,2271-2289).
cgactctattaaagacttt

SEQ ID NO: 8675 - DNA, 19 bp, Homo sapiens
  siRNA target sequence for NR4A3 (NM_006981.2,2276-2294).
ctattaaagacttttcctt

SEQ ID NO: 8676 - DNA, 19 bp, Homo sapiens
  siRNA target sequence for NR4A3 (NM_006981.2,2302-2320).
cagagcctgaaccttgata

SEQ ID NO: 8677 - DNA, 19 bp, Homo sapiens
  siRNA target sequence for NR4A3 (NM_006981.2,2307-2325).
cctgaaccttgatatccaa

SEQ ID NO: 8678 - DNA, 19 bp, Homo sapiens
  siRNA target sequence for NR4A3 (NM_006981.2,2360-2378).
cagaaagacatgggttaaa

SEQ ID NO: 8679 - DNA, 19 bp, Homo sapiens
  siRNA target sequence for NR4A3 (NM_006981.2,2390-2408).
gagtcgaagagctatgcaa

SEQ ID NO: 8680 - DNA, 19 bp, Homo sapiens
  siRNA target sequence for NR4A3 (NM_006981.2,2491-2509).
gtagaactgaggaagatct

SEQ ID NO: 8681 - DNA, 19 bp, Homo sapiens
  siRNA target sequence for NR4A3 (NM_006981.2,2559-2577).
gtctccaccttccatcatt

SEQ ID NO: 8682 - DNA, 19 bp, Homo sapiens
  siRNA target sequence for NR4A3 (NM_006981.2,2561-2579).
ctccaccttccatcattga

SEQ ID NO: 8683 - DNA, 19 bp, Homo sapiens
  siRNA target sequence for NR4A3 (NM_006981.2,2563-2581).
ccaccttccatcattgaca

SEQ ID NO: 8684 - DNA, 19 bp, Homo sapiens
  siRNA target sequence for NR4A3 (NM_006981.2,2564-2582).
caccttccatcattgacaa

SEQ ID NO: 8685 - DNA, 19 bp, Homo sapiens
  siRNA target sequence for NR4A3 (NM_173199.1,1972-1990).
gattattccagagtaagtt

SEQ ID NO: 8686 - DNA, 19 bp, Homo sapiens
  siRNA target sequence for NR4A3 (NM_173199.1,1980-1998).
cagagtaagttttatgatt

SEQ ID NO: 8687 - DNA, 19 bp, Homo sapiens
  siRNA target sequence for NR4A3 (NM_173199.1,2017-2035).
gatcagggtctctatttat

SEQ ID NO: 8688 - DNA, 19 bp, Homo sapiens
  siRNA target sequence for NR4A3 (NM_173199.1,2028-2046).
ctatttatggctactagta

SEQ ID NO: 8689 - DNA, 19 bp, Homo sapiens
  siRNA target sequence for NR4A3 (NM_173199.1,2036-2054).
ggctactagtaataagagt

SEQ ID NO: 8690 - DNA, 19 bp, Homo sapiens
  siRNA target sequence for NR4A3 (NM_173199.1,2041-2059).
ctagtaataagagttgatt

SEQ ID NO: 8691 - DNA, 19 bp, Homo sapiens
  siRNA target sequence for NR4A3 (NM_173200.1,47-65).
gcatgactcaatcagattt

SEQ ID NO: 8692 - DNA, 19 bp, Homo sapiens
  siRNA target sequence for NR5A1 (NM_004959.3,302-320).
cgcacggtgcagaacaaca

SEQ ID NO: 8693 - DNA, 19 bp, Homo sapiens
  siRNA target sequence for NR5A1 (NM_004959.3,453-471).
ggggtggccggaacaagtt

SEQ ID NO: 8694 - DNA, 19 bp, Homo sapiens
  siRNA target sequence for NR5A1 (NM_004959.3,454-472).
gggtggccggaacaagttt

SEQ ID NO: 8695 - DNA, 19 bp, Homo sapiens
  siRNA target sequence for NR5A1 (NM_004959.3,508-526).
gcagaagaaggcacagatt

SEQ ID NO: 8696 - DNA, 19 bp, Homo sapiens
  siRNA target sequence for NR5A1 (NM_004959.3,929-947).
ctgcaggagcccaccaaaa

SEQ ID NO: 8697 - DNA, 19 bp, Homo sapiens
  siRNA target sequence for NR5A1 (NM_004959.3,1415-1433).
ccgcactgcggggacaaat

SEQ ID NO: 8698 - DNA, 19 bp, Homo sapiens
  siRNA target sequence for NR5A1 (NM_004959.3,1416-1434).
cgcactgcggggacaaatt

SEQ ID NO: 8699 - DNA, 19 bp, Homo sapiens
  siRNA target sequence for NR6A1 (NM_001489.2,429-447).
gcggagcatttgcaacaaa

SEQ ID NO: 8700 - DNA, 19 bp, Homo sapiens
  siRNA target sequence for NR6A1 (NM_001489.2,441-459).
caacaaacgggtatatcga

SEQ ID NO: 8701 - DNA, 19 bp, Homo sapiens
  siRNA target sequence for NR6A1 (NM_001489.2,681-699).
gagcaaccatggtgatagt

SEQ ID NO: 8702 - DNA, 19 bp, Homo sapiens
  siRNA target sequence for NR6A1 (NM_001489.2,683-701).
gcaaccatggtgatagtga

SEQ ID NO: 8703 - DNA, 19 bp, Homo sapiens
  siRNA target sequence for NR6A1 (NM_001489.2,770-788).
gtaggtctgtggaactgaa

SEQ ID NO: 8704 - DNA, 19 bp, Homo sapiens
  siRNA target sequence for NR6A1 (NM_001489.2,829-847).
gtgcctccacattaccaat

SEQ ID NO: 8705 - DNA, 19 bp, Homo sapiens
  siRNA target sequence for NR6A1 (NM_001489.2,832-850).
cctccacattaccaatata

SEQ ID NO: 8706 - DNA, 19 bp, Homo sapiens
  siRNA target sequence for NR6A1 (NM_001489.2,953-971).
ccgaggacctggaaccatt

SEQ ID NO: 8707 - DNA, 19 bp, Homo sapiens
  siRNA target sequence for NR6A1 (NM_001489.2,977-995).
cgcccatgttgattgaaga

SEQ ID NO: 8708 - DNA, 19 bp, Homo sapiens
  siRNA target sequence for NR6A1 (NM_001489.2,1006-1024).
gtgacacaggcagaactat

SEQ ID NO: 8709 - DNA, 19 bp, Homo sapiens
  siRNA target sequence for NR6A1 (NM_001489.2,1045-1063).
gccgacgagctgctcttta

SEQ ID NO: 8710 - DNA, 19 bp, Homo sapiens
  siRNA target sequence for NR6A1 (NM_001489.2,1068-1086).
gattgcctggatcaagaaa

SEQ ID NO: 8711 - DNA, 19 bp, Homo sapiens
  siRNA target sequence for NR6A1 (NM_001489.2,1102-1120).
gagctctcaatcaaggatt

SEQ ID NO: 8712 - DNA, 19 bp, Homo sapiens
  siRNA target sequence for NR6A1 (NM_001489.2,1139-1157).
ctacgtggcaggagctaat

SEQ ID NO: 8713 - DNA, 19 bp, Homo sapiens
  siRNA target sequence for NR6A1 (NM_001489.2,1142-1160).
cgtggcaggagctaatcct

SEQ ID NO: 8714 - DNA, 19 bp, Homo sapiens
  siRNA target sequence for NR6A1 (NM_001489.2,1227-1245).
ctcgccctccgatgaagaa

SEQ ID NO: 8715 - DNA, 19 bp, Homo sapiens
  siRNA target sequence for NR6A1 (NM_001489.2,1229-1247).
cgccctccgatgaagaact

SEQ ID NO: 8716 - DNA, 19 bp, Homo sapiens
  siRNA target sequence for NR6A1 (NM_001489.2,1230-1248).
gccctccgatgaagaacta

SEQ ID NO: 8717 - DNA, 19 bp, Homo sapiens
  siRNA target sequence for NR6A1 (NM_001489.2,1288-1306).
ctcatctacctctatcaca

SEQ ID NO: 8718 - DNA, 19 bp, Homo sapiens
  siRNA target sequence for NR6A1 (NM_001489.2,1335-1353).
ggagtatgcttgcatgaaa

SEQ ID NO: 8719 - DNA, 19 bp, Homo sapiens
  siRNA target sequence for NR6A1 (NM_001489.2,1407-1425).
ggaacaattgaataaacga

SEQ ID NO: 8720 - DNA, 19 bp, Homo sapiens
  siRNA target sequence for NR6A1 (NM_001489.2,1408-1426).
gaacaattgaataaacgat

SEQ ID NO: 8721 - DNA, 19 bp, Homo sapiens
  siRNA target sequence for NR6A1 (NM_001489.2,1502-1520).
gcttacctgagattcgata

SEQ ID NO: 8722 - DNA, 19 bp, Homo sapiens
  siRNA target sequence for NR6A1 (NM_001489.2,1503-1521).
cttacctgagattcgatat

SEQ ID NO: 8723 - DNA, 19 bp, Homo sapiens
  siRNA target sequence for NT5C (NM_014595.1,239-257).
ccgacctggcggataaagt

SEQ ID NO: 8724 - DNA, 19 bp, Homo sapiens
  siRNA target sequence for NT5C (NM_014595.1,349-367).
gacacgcaggtcttcatct

SEQ ID NO: 8725 - DNA, 19 bp, Homo sapiens
  siRNA target sequence for NT5C (NM_014595.1,440-458).
cccagttcgtagaacgaat

SEQ ID NO: 8726 - DNA, 19 bp, Homo sapiens
  siRNA target sequence for NT5C (NM_014595.1,441-459).
ccagttcgtagaacgaatt

SEQ ID NO: 8727 - DNA, 19 bp, Homo sapiens
  siRNA target sequence for NT5C (NM_014595.1,442-460).
cagttcgtagaacgaatta

SEQ ID NO: 8728 - DNA, 19 bp, Homo sapiens
  siRNA target sequence for NY-BR-1 (NM_052997.1,120-138).
catcaaccttaatatacaa

SEQ ID NO: 8729 - DNA, 19 bp, Homo sapiens
  siRNA target sequence for NY-BR-1 (NM_052997.1,310-328).
gattctggtgccgatataa

SEQ ID NO: 8730 - DNA, 19 bp, Homo sapiens
  siRNA target sequence for NY-BR-1 (NM_052997.1,314-332).
ctggtgccgatataaatct

SEQ ID NO: 8731 - DNA, 19 bp, Homo sapiens
  siRNA target sequence for NY-BR-1 (NM_052997.1,457-475).
cttttactatccataacga

SEQ ID NO: 8732 - DNA, 19 bp, Homo sapiens
  siRNA target sequence for NY-BR-1 (NM_052997.1,463-481).
ctatccataacgaaaagaa

SEQ ID NO: 8733 - DNA, 19 bp, Homo sapiens
  siRNA target sequence for NY-BR-1 (NM_052997.1,524-542).
cgaatgcagttaataagta

SEQ ID NO: 8734 - DNA, 19 bp, Homo sapiens
  siRNA target sequence for NY-BR-1 (NM_052997.1,624-642).
ctttgctgcagatatatgt

SEQ ID NO: 8735 - DNA, 19 bp, Homo sapiens
  siRNA target sequence for NY-BR-1 (NM_052997.1,671-689).
cttgtggatttcatcacat

SEQ ID NO: 8736 - DNA, 19 bp, Homo sapiens
  siRNA target sequence for NY-BR-1 (NM_052997.1,674-692).
gtggatttcatcacattca

SEQ ID NO: 8737 - DNA, 19 bp, Homo sapiens
  siRNA target sequence for NY-BR-1 (NM_052997.1,2788-2806).
ggaaaattagaagattcaa

SEQ ID NO: 8738 - DNA, 19 bp, Homo sapiens
  siRNA target sequence for NY-BR-1 (NM_052997.1,3105-3123).
gcataggaaagagttagaa

SEQ ID NO: 8739 - DNA, 19 bp, Homo sapiens
  siRNA target sequence for NY-BR-1 (NM_052997.1,3613-3631).
gatgcttgtttgcaaagaa

SEQ ID NO: 8740 - DNA, 19 bp, Homo sapiens
  siRNA target sequence for NY-BR-1 (NM_052997.1,4018-4036).
catcatctcctaaaagaga

SEQ ID NO: 8741 - DNA, 19 bp, Homo sapiens
  siRNA target sequence for NY-BR-1 (NM_052997.1,4066-4084).
catttaaaaaaccgtatat

SEQ ID NO: 8742 - DNA, 19 bp, Homo sapiens
  siRNA target sequence for ODAG (NM_021167.2,176-194).
ccacctgcagcgtatgcaa

SEQ ID NO: 8743 - DNA, 19 bp, Homo sapiens
  siRNA target sequence for ODAG (NM_021167.2,235-253).
gagatcctctgccatcatt

SEQ ID NO: 8744 - DNA, 19 bp, Homo sapiens
  siRNA target sequence for ODAG (NM_021167.2,428-446).
ggtctgctcggctcagaaa

SEQ ID NO: 8745 - DNA, 19 bp, Homo sapiens
  siRNA target sequence for ODAG (NM_021167.2,434-452).
ctcggctcagaaacactaa

SEQ ID NO: 8746 - DNA, 19 bp, Homo sapiens
  siRNA target sequence for ODAG (NM_021167.2,502-520).
gggagaagacatatattta

SEQ ID NO: 8747 - DNA, 19 bp, Homo sapiens
  siRNA target sequence for ODAG (NM_021167.2,651-669).
ctactatgctcaaatcaga

SEQ ID NO: 8748 - DNA, 19 bp, Homo sapiens
  siRNA target sequence for ODAG (NM_021167.2,658-676).
gctcaaatcagaggtttta

SEQ ID NO: 8749 - DNA, 19 bp, Homo sapiens
  siRNA target sequence for ODAG (NM_021167.2,659-677).
ctcaaatcagaggttttat

SEQ ID NO: 8750 - DNA, 19 bp, Homo sapiens
  siRNA target sequence for ODAG (NM_021167.2,734-752).
ctagccccagagaccaatt

SEQ ID NO: 8751 - DNA, 19 bp, Homo sapiens
  siRNA target sequence for ODAG (NM_021167.2,754-772).
gatcccgcctcctatatca

SEQ ID NO: 8752 - DNA, 19 bp, Homo sapiens
  siRNA target sequence for ODAG (NM_021167.2,826-844).
catgcaccttctgagtatt

SEQ ID NO: 8753 - DNA, 19 bp, Homo sapiens
  siRNA target sequence for ODAG (NM_021167.2,832-850).
ccttctgagtatttcaagt

SEQ ID NO: 8754 - DNA, 19 bp, Homo sapiens
  siRNA target sequence for ODAG (NM_021167.2,849-867).
gtcacggtcatcaccattt

SEQ ID NO: 8755 - DNA, 19 bp, Homo sapiens
  siRNA target sequence for ODAG (NM_021167.2,886-904).
ccagagaagggctacatat

SEQ ID NO: 8756 - DNA, 19 bp, Homo sapiens
  siRNA target sequence for ODAG (NM_021167.2,916-934).
gggcctactcctgcaataa

SEQ ID NO: 8757 - DNA, 19 bp, Homo sapiens
  siRNA target sequence for ODAG (NM_021167.2,943-961).
gaatcagttgccaaccatt

SEQ ID NO: 8758 - DNA, 19 bp, Homo sapiens
  siRNA target sequence for ONECUT1 (NM_004498.1,475-493).
ccacagtctcggacaagtt

SEQ ID NO: 8759 - DNA, 19 bp, Homo sapiens
  siRNA target sequence for ONECUT1 (NM_004498.1,597-615).
gggctggcctccatgaata

SEQ ID NO: 8760 - DNA, 19 bp, Homo sapiens
  siRNA target sequence for ONECUT1 (NM_004498.1,598-616).
ggctggcctccatgaataa

SEQ ID NO: 8761 - DNA, 19 bp, Homo sapiens
  siRNA target sequence for ONECUT1 (NM_004498.1,745-763).
ccatgcccaccgacaagat

SEQ ID NO: 8762 - DNA, 19 bp, Homo sapiens
  siRNA target sequence for ONECUT1 (NM_004498.1,1223-1241).
ccgcttagcagcatgcaaa

SEQ ID NO: 8763 - DNA, 19 bp, Homo sapiens
  siRNA target sequence for ONECUT1 (NM_004498.1,1224-1242).
cgcttagcagcatgcaaaa

SEQ ID NO: 8764 - DNA, 19 bp, Homo sapiens
  siRNA target sequence for ONECUT1 (NM_004498.1,1313-1331).
ccagcgtcgaactctacat

SEQ ID NO: 8765 - DNA, 19 bp, Homo sapiens
  siRNA target sequence for ONECUT1 (NM_004498.1,1318-1336).
gtcgaactctacatgcaat

SEQ ID NO: 8766 - DNA, 19 bp, Homo sapiens
  siRNA target sequence for ONECUT1 (NM_004498.1,1320-1338).
cgaactctacatgcaatat

SEQ ID NO: 8767 - DNA, 19 bp, Homo sapiens
  siRNA target sequence for ONECUT1 (NM_004498.1,1321-1339).
gaactctacatgcaatatt

SEQ ID NO: 8768 - DNA, 19 bp, Homo sapiens
  siRNA target sequence for ONECUT1 (NM_004498.1,1466-1484).
cgagggcagctccaattca

SEQ ID NO: 8769 - DNA, 19 bp, Homo sapiens
  siRNA target sequence for ONECUT2 (NM_004852.1,94-112).
cccggagctgacaatggaa

SEQ ID NO: 8770 - DNA, 19 bp, Homo sapiens
  siRNA target sequence for ONECUT2 (NM_004852.1,95-113).
ccggagctgacaatggaaa

SEQ ID NO: 8771 - DNA, 19 bp, Homo sapiens
  siRNA target sequence for ONECUT2 (NM_004852.1,1011-1029).
cgggccagctggaagaaat

SEQ ID NO: 8772 - DNA, 19 bp, Homo sapiens
  siRNA target sequence for ONECUT2 (NM_004852.1,1139-1157).
gacctgctccggaatccaa

SEQ ID NO: 8773 - DNA, 19 bp, Homo sapiens
  siRNA target sequence for ONECUT2 (NM_004852.1,1141-1159).
cctgctccggaatccaaaa

SEQ ID NO: 8774 - DNA, 19 bp, Homo sapiens
  siRNA target sequence for ONECUT2 (NM_004852.1,1162-1180).
gtggagtaaactcaaatct

SEQ ID NO: 8775 - DNA, 19 bp, Homo sapiens
  siRNA target sequence for ONECUT2 (NM_004852.1,1350-1368).
cactcttcgccatcttcaa

SEQ ID NO: 8776 - DNA, 19 bp, Homo sapiens
  siRNA target sequence for ONECUT2 (NM_004852.1,1522-1540).
ctccagcacgtgtaccaaa

SEQ ID NO: 8777 - DNA, 19 bp, Homo sapiens
  siRNA target sequence for OTEX (NM_139282.1,94-112).
cacgacaccgtgttctact

SEQ ID NO: 8778 - DNA, 19 bp, Homo sapiens
  siRNA target sequence for OTEX (NM_139282.1,117-135).
gagtgtataccaggtaaaa

SEQ ID NO: 8779 - DNA, 19 bp, Homo sapiens
  siRNA target sequence for OTEX (NM_139282.1,119-137).
gtgtataccaggtaaaaat

SEQ ID NO: 8780 - DNA, 19 bp, Homo sapiens
  siRNA target sequence for OTEX (NM_139282.1,457-475).
cctgatgtgcccacaagaa

SEQ ID NO: 8781 - DNA, 19 bp, Homo sapiens
  siRNA target sequence for OTEX (NM_139282.1,477-495).
ggaacttgccgaaaactta

SEQ ID NO: 8782 - DNA, 19 bp, Homo sapiens
  siRNA target sequence for OTEX (NM_139282.1,599-617).
cagacgactgtgtctacat

SEQ ID NO: 8783 - DNA, 19 bp, Homo sapiens
  siRNA target sequence for OTX1 (NM_014562.2,251-269).
gatgtcttacctcaaacaa

SEQ ID NO: 8784 - DNA, 19 bp, Homo sapiens
  siRNA target sequence for OTX1 (NM_014562.2,893-911).
caccgcagcagcctcttat

SEQ ID NO: 8785 - DNA, 19 bp, Homo sapiens
  siRNA target sequence for OTX1 (NM_014562.2,959-977).
gccctcctcttcctacttt

SEQ ID NO: 8786 - DNA, 19 bp, Homo sapiens
  siRNA target sequence for OTX1 (NM_014562.2,1231-1249).
cctccgcctggaaactcaa

SEQ ID NO: 8787 - DNA, 19 bp, Homo sapiens
  siRNA target sequence for OTX1 (NM_014562.2,1260-1278).
cccgactgtctggactata

SEQ ID NO: 8788 - DNA, 19 bp, Homo sapiens
  siRNA target sequence for OTX2 (NM_021728.2,477-495).
cccggtacccagacatctt

SEQ ID NO: 8789 - DNA, 19 bp, Homo sapiens
  siRNA target sequence for OTX2 (NM_021728.2,570-588).
ctaagtgccgccaacaaca

SEQ ID NO: 8790 - DNA, 19 bp, Homo sapiens
  siRNA target sequence for OTX2 (NM_021728.2,599-617).
cagaatggaggtcaaaaca

SEQ ID NO: 8791 - DNA, 19 bp, Homo sapiens
  siRNA target sequence for OTX2 (NM_021728.2,820-838).
ctatcccatgacctatact

SEQ ID NO: 8792 - DNA, 19 bp, Homo sapiens
  siRNA target sequence for OTX2 (NM_021728.2,841-859).
ggcttcaggttatagtcaa

SEQ ID NO: 8793 - DNA, 19 bp, Homo sapiens
  siRNA target sequence for OTX2 (NM_021728.2,846-864).
caggttatagtcaaggata

SEQ ID NO: 8794 - DNA, 19 bp, Homo sapiens
  siRNA target sequence for OTX2 (NM_021728.2,860-878).
ggatatgctggctcaactt

SEQ ID NO: 8795 - DNA, 19 bp, Homo sapiens
  siRNA target sequence for OTX2 (NM_021728.2,891-909).
gcatggactgtggatcata

SEQ ID NO: 8796 - DNA, 19 bp, Homo sapiens
  siRNA target sequence for OTX2 (NM_021728.2,892-910).
catggactgtggatcatat

SEQ ID NO: 8797 - DNA, 19 bp, Homo sapiens
  siRNA target sequence for OTX2 (NM_021728.2,955-973).
cagtcccatgggtaccaat

SEQ ID NO: 8798 - DNA, 19 bp, Homo sapiens
  siRNA target sequence for OTX2 (NM_021728.2,1032-1050).
cttcaagcttgggttttaa

SEQ ID NO: 8799 - DNA, 19 bp, Homo sapiens
  siRNA target sequence for OTX2 (NM_021728.2,1056-1074).
ccactgattgcttggatta

SEQ ID NO: 8800 - DNA, 19 bp, Homo sapiens
  siRNA target sequence for OTX2 (NM_021728.2,1057-1075).
cactgattgcttggattat

SEQ ID NO: 8801 - DNA, 19 bp, Homo sapiens
  siRNA target sequence for OTX3 (NM_147192.2,62-80).
cactcagcgccatgtacaa

SEQ ID NO: 8802 - DNA, 19 bp, Homo sapiens
  siRNA target sequence for OTX3 (NM_147192.2,134-152).
cagtgcatgcgcttacatt

SEQ ID NO: 8803 - DNA, 19 bp, Homo sapiens
  siRNA target sequence for OTX3 (NM_147192.2,170-188).
gctgtacatttcaagacat

SEQ ID NO: 8804 - DNA, 19 bp, Homo sapiens
  siRNA target sequence for OTX3 (NM_147192.2,923-941).
cctacctgggcgtcaacat

SEQ ID NO: 8805 - DNA, 19 bp, Homo sapiens
  siRNA target sequence for OTX3 (NM_172225.1,160-178).
cgcctggctgacatcatct

SEQ ID NO: 8806 - DNA, 19 bp, Homo sapiens
  siRNA target sequence for P1P373C6 (NM_019110.3,247-265).
ggctagagaaccgagaaaa

SEQ ID NO: 8807 - DNA, 19 bp, Homo sapiens
  siRNA target sequence for P1P373C6 (NM_019110.3,712-730).
ggcactattgacacaaact

SEQ ID NO: 8808 - DNA, 19 bp, Homo sapiens
  siRNA target sequence for P1P373C6 (NM_019110.3,1017-1035).
cccttggtggtgaaataca

SEQ ID NO: 8809 - DNA, 19 bp, Homo sapiens
  siRNA target sequence for P1P373C6 (NM_019110.3,1199-1217).
cgacattattgccatgaat

SEQ ID NO: 8810 - DNA, 19 bp, Homo sapiens
  siRNA target sequence for P1P373C6 (NM_019110.3,1686-1704).
ctgaggctcccgtgtctta

SEQ ID NO: 8811 - DNA, 19 bp, Homo sapiens
  siRNA target sequence for P1P373C6 (NM_019110.3,1688-1706).
gaggctcccgtgtcttata

SEQ ID NO: 8812 - DNA, 19 bp, Homo sapiens
  siRNA target sequence for P1P373C6 (NM_019110.3,1690-1708).
ggctcccgtgtcttataaa

SEQ ID NO: 8813 - DNA, 19 bp, Homo sapiens
  siRNA target sequence for P1P373C6 (NM_019110.3,1743-1761).
gaagtcttattgaacatca

SEQ ID NO: 8814 - DNA, 19 bp, Homo sapiens
  siRNA target sequence for p66alpha (NM_017660.2,510-528).
gcaaaactcgtgttgttga

SEQ ID NO: 8815 - DNA, 19 bp, Homo sapiens
  siRNA target sequence for p66alpha (NM_017660.2,516-534).
ctcgtgttgttgaaaaagt

SEQ ID NO: 8816 - DNA, 19 bp, Homo sapiens
  siRNA target sequence for p66alpha (NM_017660.2,533-551).
gttgcggcagagtcaaata

SEQ ID NO: 8817 - DNA, 19 bp, Homo sapiens
  siRNA target sequence for p66alpha (NM_017660.2,914-932).
catccgcgtcgccaatgtt

SEQ ID NO: 8818 - DNA, 19 bp, Homo sapiens
  siRNA target sequence for p66alpha (NM_017660.2,1727-1745).
caggaccggcagacattct

SEQ ID NO: 8819 - DNA, 19 bp, Homo sapiens
  siRNA target sequence for p66alpha (NM_017660.2,1729-1747).
ggaccggcagacattctga

SEQ ID NO: 8820 - DNA, 19 bp, Homo sapiens
  siRNA target sequence for P66beta (NM_020699.1,99-117).
ctggcaaagcgactcaaaa

SEQ ID NO: 8821 - DNA, 19 bp, Homo sapiens
  siRNA target sequence for P66beta (NM_020699.1,132-150).
gccatggaacgtctgaaaa

SEQ ID NO: 8822 - DNA, 19 bp, Homo sapiens
  siRNA target sequence for P66beta (NM_020699.1,133-151).
ccatggaacgtctgaaaat

SEQ ID NO: 8823 - DNA, 19 bp, Homo sapiens
  siRNA target sequence for P66beta (NM_020699.1,376-394).
ctccctcaccagacatcat

SEQ ID NO: 8824 - DNA, 19 bp, Homo sapiens
  siRNA target sequence for P66beta (NM_020699.1,549-567).
gcccgactggtcctgttaa

SEQ ID NO: 8825 - DNA, 19 bp, Homo sapiens
  siRNA target sequence for P66beta (NM_020699.1,552-570).
cgactggtcctgttaaaga

SEQ ID NO: 8826 - DNA, 19 bp, Homo sapiens
  siRNA target sequence for P66beta (NM_020699.1,553-571).
gactggtcctgttaaagaa

SEQ ID NO: 8827 - DNA, 19 bp, Homo sapiens
  siRNA target sequence for P66beta (NM_020699.1,608-626).
ccagaagactccagttgta

SEQ ID NO: 8828 - DNA, 19 bp, Homo sapiens
  siRNA target sequence for P66beta (NM_020699.1,629-647).
gaatgcagcatctattgtt

SEQ ID NO: 8829 - DNA, 19 bp, Homo sapiens
  siRNA target sequence for P66beta (NM_020699.1,674-692).
gcagggcctatctaagctt

SEQ ID NO: 8830 - DNA, 19 bp, Homo sapiens
  siRNA target sequence for P66beta (NM_020699.1,714-732).
ggggttgaacctcaaaatt

SEQ ID NO: 8831 - DNA, 19 bp, Homo sapiens
  siRNA target sequence for P66beta (NM_020699.1,717-735).
gttgaacctcaaaatttga

SEQ ID NO: 8832 - DNA, 19 bp, Homo sapiens
  siRNA target sequence for P66beta (NM_020699.1,758-776).
catccgttcagctaccaat

SEQ ID NO: 8833 - DNA, 19 bp, Homo sapiens
  siRNA target sequence for P66beta (NM_020699.1,762-780).
cgttcagctaccaatacca

SEQ ID NO: 8834 - DNA, 19 bp, Homo sapiens
  siRNA target sequence for P66beta (NM_020699.1,778-796).
ccacccttccacacatgtt

SEQ ID NO: 8835 - DNA, 19 bp, Homo sapiens
  siRNA target sequence for P66beta (NM_020699.1,800-818).
gtctcaacgtgttattgca

SEQ ID NO: 8836 - DNA, 19 bp, Homo sapiens
  siRNA target sequence for P66beta (NM_020699.1,890-908).
catgaatcccgccatcaat

SEQ ID NO: 8837 - DNA, 19 bp, Homo sapiens
  siRNA target sequence for P66beta (NM_020699.1,912-930).
caaccgcagtcaagttctt

SEQ ID NO: 8838 - DNA, 19 bp, Homo sapiens
  siRNA target sequence for P66beta (NM_020699.1,1165-1183).
cagccaatagcgagttcat

SEQ ID NO: 8839 - DNA, 19 bp, Homo sapiens
  siRNA target sequence for P66beta (NM_020699.1,1256-1274).
gcgggttgaaccctttgta

SEQ ID NO: 8840 - DNA, 19 bp, Homo sapiens
  siRNA target sequence for P66beta (NM_020699.1,1257-1275).
cgggttgaaccctttgtat

SEQ ID NO: 8841 - DNA, 19 bp, Homo sapiens
  siRNA target sequence for P66beta (NM_020699.1,1259-1277).
ggttgaaccctttgtatgt

SEQ ID NO: 8842 - DNA, 19 bp, Homo sapiens
  siRNA target sequence for P66beta (NM_020699.1,1281-1299).
cagtgccgcacagatttca

SEQ ID NO: 8843 - DNA, 19 bp, Homo sapiens
  siRNA target sequence for P66beta (NM_020699.1,1302-1320).
cctcactggaagcaagaaa

SEQ ID NO: 8844 - DNA, 19 bp, Homo sapiens
  siRNA target sequence for P66beta (NM_020699.1,1386-1404).
cacaccaaccggctgaaaa

SEQ ID NO: 8845 - DNA, 19 bp, Homo sapiens
  siRNA target sequence for P66beta (NM_020699.1,1388-1406).
caccaaccggctgaaaaat

SEQ ID NO: 8846 - DNA, 19 bp, Homo sapiens
  siRNA target sequence for P66beta (NM_020699.1,1498-1516).
ccagtgtcagtaaacaaga

SEQ ID NO: 8847 - DNA, 19 bp, Homo sapiens
  siRNA target sequence for P66beta (NM_020699.1,1517-1535).
gaccatcatgagacatcat

SEQ ID NO: 8848 - DNA, 19 bp, Homo sapiens
  siRNA target sequence for P66beta (NM_020699.1,1596-1614).
cgctccatgctttcaaact

SEQ ID NO: 8849 - DNA, 19 bp, Homo sapiens
  siRNA target sequence for P66beta (NM_020699.1,1597-1615).
gctccatgctttcaaactt

SEQ ID NO: 8850 - DNA, 19 bp, Homo sapiens
  siRNA target sequence for P66beta (NM_020699.1,1657-1675).
gtatgccaggtgtcaacat

SEQ ID NO: 8851 - DNA, 19 bp, Homo sapiens
  siRNA target sequence for P66beta (NM_020699.1,1666-1684).
gtgtcaacattgcatactt

SEQ ID NO: 8852 - DNA, 19 bp, Homo sapiens
  siRNA target sequence for P66beta (NM_020699.1,1673-1691).
cattgcatacttgaatact

SEQ ID NO: 8853 - DNA, 19 bp, Homo sapiens
  siRNA target sequence for P66beta (NM_020699.1,1723-1741).
cagaccgacagcgtgaata

SEQ ID NO: 8854 - DNA, 19 bp, Homo sapiens
  siRNA target sequence for P66beta (NM_020699.1,1727-1745).
ccgacagcgtgaatacctt

SEQ ID NO: 8855 - DNA, 19 bp, Homo sapiens
  siRNA target sequence for P66beta (NM_020699.1,1728-1746).
cgacagcgtgaataccttt

SEQ ID NO: 8856 - DNA, 19 bp, Homo sapiens
  siRNA target sequence for P66beta (NM_020699.1,1729-1747).
gacagcgtgaatacctttt

SEQ ID NO: 8857 - DNA, 19 bp, Homo sapiens
  siRNA target sequence for P66beta (NM_020699.1,1734-1752).
cgtgaataccttttagaca

SEQ ID NO: 8858 - DNA, 19 bp, Homo sapiens
  siRNA target sequence for P66beta (NM_020699.1,1735-1753).
gtgaataccttttagacat

SEQ ID NO: 8859 - DNA, 19 bp, Homo sapiens
  siRNA target sequence for P66beta (NM_020699.1,1754-1772).
gatccctccccggtctata

SEQ ID NO: 8860 - DNA, 19 bp, Homo sapiens
  siRNA target sequence for PAX2 (NM_000278.2,1080-1098).
gtctcttccatcaacagaa

SEQ ID NO: 8861 - DNA, 19 bp, Homo sapiens
  siRNA target sequence for PAX2 (NM_000278.2,1232-1250).
gggatcctactccatcaat

SEQ ID NO: 8862 - DNA, 19 bp, Homo sapiens
  siRNA target sequence for PAX2 (NM_000278.2,1451-1469).
ggcatcagagcacatcaaa

SEQ ID NO: 8863 - DNA, 19 bp, Homo sapiens
  siRNA target sequence for PAX2 (NM_000278.2,1452-1470).
gcatcagagcacatcaaat

SEQ ID NO: 8864 - DNA, 19 bp, Homo sapiens
  siRNA target sequence for PAX2 (NM_000278.2,1505-1523).
gacccctgggcttgatgaa

SEQ ID NO: 8865 - DNA, 19 bp, Homo sapiens
  siRNA target sequence for PAX2 (NM_003987.2,1349-1367).
gcatctggtctggacttta

SEQ ID NO: 8866 - DNA, 19 bp, Homo sapiens
  siRNA target sequence for PAX2 (NM_003987.2,1350-1368).
catctggtctggactttaa

SEQ ID NO: 8867 - DNA, 19 bp, Homo sapiens
  siRNA target sequence for PAX2 (NM_003989.2,1833-1851).
cctatgaccgccactagtt

SEQ ID NO: 8868 - DNA, 19 bp, Homo sapiens
  siRNA target sequence for PAX2 (NM_003989.2,1834-1852).
ctatgaccgccactagtta

SEQ ID NO: 8869 - DNA, 19 bp, Homo sapiens
  siRNA target sequence for PAX3 (NM_000438.3,698-716).
cgcctgacgtggagaagaa

SEQ ID NO: 8870 - DNA, 19 bp, Homo sapiens
  siRNA target sequence for PAX3 (NM_000438.3,700-718).
cctgacgtggagaagaaaa

SEQ ID NO: 8871 - DNA, 19 bp, Homo sapiens
  siRNA target sequence for PAX3 (NM_000438.3,831-849).
ccgcatcctgagaagtaaa

SEQ ID NO: 8872 - DNA, 19 bp, Homo sapiens
  siRNA target sequence for PAX3 (NM_000438.3,832-850).
cgcatcctgagaagtaaat

SEQ ID NO: 8873 - DNA, 19 bp, Homo sapiens
  siRNA target sequence for PAX3 (NM_181457.1,968-986).
cagatgaaggctctgatat

SEQ ID NO: 8874 - DNA, 19 bp, Homo sapiens
  siRNA target sequence for PAX3 (NM_181457.1,973-991).
gaaggctctgatattgact

SEQ ID NO: 8875 - DNA, 19 bp, Homo sapiens
  siRNA target sequence for PAX3 (NM_181457.1,990-1008).
ctctgaaccagatttacca

SEQ ID NO: 8876 - DNA, 19 bp, Homo sapiens
  siRNA target sequence for PAX3 (NM_181457.1,1062-1080).
ggaactggagcgtgctttt

SEQ ID NO: 8877 - DNA, 19 bp, Homo sapiens
  siRNA target sequence for PAX3 (NM_181457.1,1150-1168).
cgagtacaggtctggttta

SEQ ID NO: 8878 - DNA, 19 bp, Homo sapiens
  siRNA target sequence for PAX3 (NM_181457.1,1153-1171).
gtacaggtctggtttagca

SEQ ID NO: 8879 - DNA, 19 bp, Homo sapiens
  siRNA target sequence for PAX3 (NM_181457.1,1199-1217).
ctggggccaatcaactgat

SEQ ID NO: 8880 - DNA, 19 bp, Homo sapiens
  siRNA target sequence for PAX3 (NM_181457.1,1218-1236).
ggctttcaaccatctcatt

SEQ ID NO: 8881 - DNA, 19 bp, Homo sapiens
  siRNA target sequence for PAX3 (NM_181457.1,1298-1316).
cttaccagcccacatctat

SEQ ID NO: 8882 - DNA, 19 bp, Homo sapiens
  siRNA target sequence for PAX3 (NM_181457.1,1437-1455).
cagcaccaggcatggattt

SEQ ID NO: 8883 - DNA, 19 bp, Homo sapiens
  siRNA target sequence for PAX3 (NM_181457.1,1447-1465).
catggattttccagctata

SEQ ID NO: 8884 - DNA, 19 bp, Homo sapiens
  siRNA target sequence for PAX3 (NM_181457.1,1451-1469).
gattttccagctatacaga

SEQ ID NO: 8885 - DNA, 19 bp, Homo sapiens
  siRNA target sequence for PAX3 (NM_181457.1,1576-1594).
catcagccccagactgatt

SEQ ID NO: 8886 - DNA, 19 bp, Homo sapiens
  siRNA target sequence for PAX3 (NM_181457.1,1655-1673).
gtcagagactagaccatat

SEQ ID NO: 8887 - DNA, 19 bp, Homo sapiens
  siRNA target sequence for PAX3 (NM_181457.1,1750-1768).
cctgtcacaggctaccaat

SEQ ID NO: 8888 - DNA, 19 bp, Homo sapiens
  siRNA target sequence for PAX3 (NM_181457.1,1751-1769).
ctgtcacaggctaccaata

SEQ ID NO: 8889 - DNA, 19 bp, Homo sapiens
  siRNA target sequence for PAX3 (NM_181458.1,1781-1799).
gacaaagtgcctttcatta

SEQ ID NO: 8890 - DNA, 19 bp, Homo sapiens
  siRNA target sequence for PAX3 (NM_181459.1,1810-1828).
gatatcgcttggtttcaaa

SEQ ID NO: 8891 - DNA, 19 bp, Homo sapiens
  siRNA target sequence for PAX4 (NM_006193.1,306-324).
gacatctcacggatcctta

SEQ ID NO: 8892 - DNA, 19 bp, Homo sapiens
  siRNA target sequence for PAX4 (NM_006193.1,311-329).
ctcacggatccttaaggta

SEQ ID NO: 8893 - DNA, 19 bp, Homo sapiens
  siRNA target sequence for PAX4 (NM_006193.1,315-333).
cggatccttaaggtatcta

SEQ ID NO: 8894 - DNA, 19 bp, Homo sapiens
  siRNA target sequence for PAX4 (NM_006193.1,316-334).
ggatccttaaggtatctaa

SEQ ID NO: 8895 - DNA, 19 bp, Homo sapiens
  siRNA target sequence for PAX4 (NM_006193.1,559-577).
gagtcctgcgggcattaca

SEQ ID NO: 8896 - DNA, 19 bp, Homo sapiens
  siRNA target sequence for PAX4 (NM_006193.1,696-714).
cggaatcggactatcttct

SEQ ID NO: 8897 - DNA, 19 bp, Homo sapiens
  siRNA target sequence for PAX4 (NM_006193.1,757-775).
ggcagtatcctgattcagt

SEQ ID NO: 8898 - DNA, 19 bp, Homo sapiens
  siRNA target sequence for PAX4 (NM_006193.1,925-943).
gggttgccccaggaatcat

SEQ ID NO: 8899 - DNA, 19 bp, Homo sapiens
  siRNA target sequence for PAX4 (NM_006193.1,1218-1236).
ctactgtatggcttggaat

SEQ ID NO: 8900 - DNA, 19 bp, Homo sapiens
  siRNA target sequence for PAX6 (NM_000280.1,426-444).
cagtcacagcggagtgaat

SEQ ID NO: 8901 - DNA, 19 bp, Homo sapiens
  siRNA target sequence for PAX6 (NM_000280.1,428-446).
gtcacagcggagtgaatca

SEQ ID NO: 8902 - DNA, 19 bp, Homo sapiens
  siRNA target sequence for PAX6 (NM_000280.1,448-466).
ctcggtggtgtctttgtca

SEQ ID NO: 8903 - DNA, 19 bp, Homo sapiens
  siRNA target sequence for PAX6 (NM_000280.1,488-506).
ccacccggcagaagattgt

SEQ ID NO: 8904 - DNA, 19 bp, Homo sapiens
  siRNA target sequence for PAX6 (NM_000280.1,536-554).
gcgacatttcccgaattct

SEQ ID NO: 8905 - DNA, 19 bp, Homo sapiens
  siRNA target sequence for PAX6 (NM_000280.1,563-581).
ccaacggatgtgtgagtaa

SEQ ID NO: 8906 - DNA, 19 bp, Homo sapiens
  siRNA target sequence for PAX6 (NM_000280.1,567-585).
cggatgtgtgagtaaaatt

SEQ ID NO: 8907 - DNA, 19 bp, Homo sapiens
  siRNA target sequence for PAX6 (NM_000280.1,624-642).
ggcaatcggtggtagtaaa

SEQ ID NO: 8908 - DNA, 19 bp, Homo sapiens
  siRNA target sequence for PAX6 (NM_000280.1,671-689).
gcaaaatagcccagtataa

SEQ ID NO: 8909 - DNA, 19 bp, Homo sapiens
  siRNA target sequence for PAX6 (NM_000280.1,693-711).
ggagtgcccgtccatcttt

SEQ ID NO: 8910 - DNA, 19 bp, Homo sapiens
  siRNA target sequence for PAX6 (NM_000280.1,745-763).
ggggtctgtaccaacgata

SEQ ID NO: 8911 - DNA, 19 bp, Homo sapiens
  siRNA target sequence for PAX6 (NM_000280.1,746-764).
gggtctgtaccaacgataa

SEQ ID NO: 8912 - DNA, 19 bp, Homo sapiens
  siRNA target sequence for PAX6 (NM_000280.1,748-766).
gtctgtaccaacgataaca

SEQ ID NO: 8913 - DNA, 19 bp, Homo sapiens
  siRNA target sequence for PAX6 (NM_000280.1,750-768).
ctgtaccaacgataacata

SEQ ID NO: 8914 - DNA, 19 bp, Homo sapiens
  siRNA target sequence for PAX6 (NM_000280.1,769-787).
ccaagcgtgtcatcaataa

SEQ ID NO: 8915 - DNA, 19 bp, Homo sapiens
  siRNA target sequence for PAX6 (NM_000280.1,770-788).
caagcgtgtcatcaataaa

SEQ ID NO: 8916 - DNA, 19 bp, Homo sapiens
  siRNA target sequence for PAX6 (NM_000280.1,774-792).
cgtgtcatcaataaacaga

SEQ ID NO: 8917 - DNA, 19 bp, Homo sapiens
  siRNA target sequence for PAX6 (NM_000280.1,828-846).
gggcgcagacggcatgtat

SEQ ID NO: 8918 - DNA, 19 bp, Homo sapiens
  siRNA target sequence for PAX6 (NM_000280.1,830-848).
gcgcagacggcatgtatga

SEQ ID NO: 8919 - DNA, 19 bp, Homo sapiens
  siRNA target sequence for PAX6 (NM_000280.1,832-850).
gcagacggcatgtatgata

SEQ ID NO: 8920 - DNA, 19 bp, Homo sapiens
  siRNA target sequence for PAX6 (NM_000280.1,833-851).
cagacggcatgtatgataa

SEQ ID NO: 8921 - DNA, 19 bp, Homo sapiens
  siRNA target sequence for PAX6 (NM_000280.1,847-865).
gataaactaaggatgttga

SEQ ID NO: 8922 - DNA, 19 bp, Homo sapiens
  siRNA target sequence for PAX6 (NM_000280.1,987-1005).
cagttccaacggagaagat

SEQ ID NO: 8923 - DNA, 19 bp, Homo sapiens
  siRNA target sequence for PAX6 (NM_000280.1,992-1010).
ccaacggagaagattcaga

SEQ ID NO: 8924 - DNA, 19 bp, Homo sapiens
  siRNA target sequence for PAX6 (NM_000280.1,993-1011).
caacggagaagattcagat

SEQ ID NO: 8925 - DNA, 19 bp, Homo sapiens
  siRNA target sequence for PAX6 (NM_000280.1,1142-1160).
gactagcagccaaaataga

SEQ ID NO: 8926 - DNA, 19 bp, Homo sapiens
  siRNA target sequence for PAX6 (NM_000280.1,1182-1200).
ggtatggttttctaatcga

SEQ ID NO: 8927 - DNA, 19 bp, Homo sapiens
  siRNA target sequence for PAX6 (NM_000280.1,1251-1269).
cagcaacacacctagtcat

SEQ ID NO: 8928 - DNA, 19 bp, Homo sapiens
  siRNA target sequence for PAX6 (NM_000280.1,1253-1271).
gcaacacacctagtcatat

SEQ ID NO: 8929 - DNA, 19 bp, Homo sapiens
  siRNA target sequence for PAX6 (NM_000280.1,1257-1275).
cacacctagtcatattcct

SEQ ID NO: 8930 - DNA, 19 bp, Homo sapiens
  siRNA target sequence for PAX6 (NM_000280.1,1259-1277).
cacctagtcatattcctat

SEQ ID NO: 8931 - DNA, 19 bp, Homo sapiens
  siRNA target sequence for PAX6 (NM_000280.1,1330-1348).
ccggtttcctccttcacat

SEQ ID NO: 8932 - DNA, 19 bp, Homo sapiens
  siRNA target sequence for PAX6 (NM_000280.1,1506-1524).
ggtgaatgggcggagttat

SEQ ID NO: 8933 - DNA, 19 bp, Homo sapiens
  siRNA target sequence for PAX6 (NM_000280.1,1509-1527).
gaatgggcggagttatgat

SEQ ID NO: 8934 - DNA, 19 bp, Homo sapiens
  siRNA target sequence for PAX6 (NM_000280.1,1514-1532).
ggcggagttatgataccta

SEQ ID NO: 8935 - DNA, 19 bp, Homo sapiens
  siRNA target sequence for PAX6 (NM_000280.1,1642-1660).
ggaagtgaacctgatatgt

SEQ ID NO: 8936 - DNA, 19 bp, Homo sapiens
  siRNA target sequence for PAX6 (NM_000280.1,1651-1669).
cctgatatgtctcaatact

SEQ ID NO: 8937 - DNA, 19 bp, Homo sapiens
  siRNA target sequence for PAX6 (NM_001604.2,580-598).
caagtgctggacaatcaaa

SEQ ID NO: 8938 - DNA, 19 bp, Homo sapiens
  siRNA target sequence for PAX7 (NM_002584.1,615-633).
ggcacggtaccgagaatga

SEQ ID NO: 8939 - DNA, 19 bp, Homo sapiens
  siRNA target sequence for PAX7 (NM_002584.1,616-634).
gcacggtaccgagaatgat

SEQ ID NO: 8940 - DNA, 19 bp, Homo sapiens
  siRNA target sequence for PAX7 (NM_002584.1,665-683).
cacgggattccctttggaa

SEQ ID NO: 8941 - DNA, 19 bp, Homo sapiens
  siRNA target sequence for PAX7 (NM_002584.1,928-946).
cgactccggatgtagagaa

SEQ ID NO: 8942 - DNA, 19 bp, Homo sapiens
  siRNA target sequence for PAX7 (NM_002584.1,933-951).
ccggatgtagagaaaaaga

SEQ ID NO: 8943 - DNA, 19 bp, Homo sapiens
  siRNA target sequence for PAX7 (NM_002584.1,1037-1055).
cactgtgccctcaggttta

SEQ ID NO: 8944 - DNA, 19 bp, Homo sapiens
  siRNA target sequence for PAX7 (NM_002584.1,1072-1090).
gcgtgctcagaatcaagtt

SEQ ID NO: 8945 - DNA, 19 bp, Homo sapiens
  siRNA target sequence for PAX7 (NM_002584.1,1254-1272).
cgcagtcggaccacattca

SEQ ID NO: 8946 - DNA, 19 bp, Homo sapiens
  siRNA target sequence for PAX7 (NM_002584.1,2056-2074).
gggcctcctgcttgtttat

SEQ ID NO: 8947 - DNA, 19 bp, Homo sapiens
  siRNA target sequence for PAX7 (NM_002584.1,2059-2077).
cctcctgcttgtttatgga

SEQ ID NO: 8948 - DNA, 19 bp, Homo sapiens
  siRNA target sequence for PAX7 (NM_002584.1,2099-2117).
gtggggaatgtccatttca

SEQ ID NO: 8949 - DNA, 19 bp, Homo sapiens
  siRNA target sequence for PAX7 (NM_002584.1,2101-2119).
ggggaatgtccatttcaca

SEQ ID NO: 8950 - DNA, 19 bp, Homo sapiens
  siRNA target sequence for PAX7 (NM_013945.1,1043-1061).
gccctcagtgagttcgatt

SEQ ID NO: 8951 - DNA, 19 bp, Homo sapiens
  siRNA target sequence for PAX7 (NM_013945.1,1044-1062).
ccctcagtgagttcgatta

SEQ ID NO: 8952 - DNA, 19 bp, Homo sapiens
  siRNA target sequence for PAX8 (NM_003466.2,170-188).
cctcacaactccatcagat

SEQ ID NO: 8953 - DNA, 19 bp, Homo sapiens
  siRNA target sequence for PAX8 (NM_003466.2,376-394).
catccggcctggagtgata

SEQ ID NO: 8954 - DNA, 19 bp, Homo sapiens
  siRNA target sequence for PAX8 (NM_003466.2,535-553).
cagtgtcagctccattaat

SEQ ID NO: 8955 - DNA, 19 bp, Homo sapiens
  siRNA target sequence for PAX8 (NM_003466.2,741-759).
gcagcgacaagaggaaaat

SEQ ID NO: 8956 - DNA, 19 bp, Homo sapiens
  siRNA target sequence for PAX8 (NM_003466.2,870-888).
cgctcgagtgcccatttga

SEQ ID NO: 8957 - DNA, 19 bp, Homo sapiens
  siRNA target sequence for PAX8 (NM_003466.2,1349-1367).
gtggcaggaagtgaatact

SEQ ID NO: 8958 - DNA, 19 bp, Homo sapiens
  siRNA target sequence for PAX8 (NM_013952.2,1058-1076).
gtggcagctccgccttttt

SEQ ID NO: 8959 - DNA, 19 bp, Homo sapiens
  siRNA target sequence for PAX8 (NM_013992.2,935-953).
ggcgagcaggaagtgaata

SEQ ID NO: 8960 - DNA, 19 bp, Homo sapiens
  siRNA target sequence for PAX8 (NM_013992.2,937-955).
cgagcaggaagtgaatact

SEQ ID NO: 8961 - DNA, 19 bp, Homo sapiens
  siRNA target sequence for PBX1 (NM_002585.1,552-570).
ctcagtggagcattcagat

SEQ ID NO: 8962 - DNA, 19 bp, Homo sapiens
  siRNA target sequence for PBX1 (NM_002585.1,607-625).
catacggagctggagaaat

SEQ ID NO: 8963 - DNA, 19 bp, Homo sapiens
  siRNA target sequence for PBX1 (NM_002585.1,648-666).
caccacccacgtgatgaat

SEQ ID NO: 8964 - DNA, 19 bp, Homo sapiens
  siRNA target sequence for PBX1 (NM_002585.1,827-845).
ggaagagacggaatttcaa

SEQ ID NO: 8965 - DNA, 19 bp, Homo sapiens
  siRNA target sequence for PBX1 (NM_002585.1,952-970).
gtctcccaggtatcaaact

SEQ ID NO: 8966 - DNA, 19 bp, Homo sapiens
  siRNA target sequence for PBX1 (NM_002585.1,1002-1020).
gaacataggtaaatttcaa

SEQ ID NO: 8967 - DNA, 19 bp, Homo sapiens
  siRNA target sequence for PBX1 (NM_002585.1,1023-1041).
ggaagccaatatttatgct

SEQ ID NO: 8968 - DNA, 19 bp, Homo sapiens
  siRNA target sequence for PBX1 (NM_002585.1,1178-1196).
cactcaatggggattctta

SEQ ID NO: 8969 - DNA, 19 bp, Homo sapiens
  siRNA target sequence for PBX1 (NM_002585.1,1288-1306).
gcagccagtcagatgtaca

SEQ ID NO: 8970 - DNA, 19 bp, Homo sapiens
  siRNA target sequence for PBX2 (NM_002586.3,1295-1313).
ggctctggcggctctttca

SEQ ID NO: 8971 - DNA, 19 bp, Homo sapiens
  siRNA target sequence for PBX2 (NM_002586.3,1301-1319).
ggcggctctttcaatctct

SEQ ID NO: 8972 - DNA, 19 bp, Homo sapiens
  siRNA target sequence for PBX2 (NM_002586.3,1355-1373).
ctcaacggagattcctatt

SEQ ID NO: 8973 - DNA, 19 bp, Homo sapiens
  siRNA target sequence for PBX2 (NM_002586.3,1357-1375).
caacggagattcctattct

SEQ ID NO: 8974 - DNA, 19 bp, Homo sapiens
  siRNA target sequence for PBX2 (NM_002586.3,1416-1434).
ggggctatggggataacct

SEQ ID NO: 8975 - DNA, 19 bp, Homo sapiens
  siRNA target sequence for PBX2 (NM_002586.3,1436-1454).
gggggaggccagatgtaca

SEQ ID NO: 8976 - DNA, 19 bp, Homo sapiens
  siRNA target sequence for PBX3 (NM_006195.2,420-438).
ctcccgatccccagctaat

SEQ ID NO: 8977 - DNA, 19 bp, Homo sapiens
  siRNA target sequence for PBX3 (NM_006195.2,434-452).
ctaatgagactggacaata

SEQ ID NO: 8978 - DNA, 19 bp, Homo sapiens
  siRNA target sequence for PBX3 (NM_006195.2,441-459).
gactggacaatatgctttt

SEQ ID NO: 8979 - DNA, 19 bp, Homo sapiens
  siRNA target sequence for PBX3 (NM_006195.2,534-552).
gttcttcagataactctat

SEQ ID NO: 8980 - DNA, 19 bp, Homo sapiens
  siRNA target sequence for PBX3 (NM_006195.2,537-555).
cttcagataactctattga

SEQ ID NO: 8981 - DNA, 19 bp, Homo sapiens
  siRNA target sequence for PBX3 (NM_006195.2,667-685).
ccgagaacagagtagaaca

SEQ ID NO: 8982 - DNA, 19 bp, Homo sapiens
  siRNA target sequence for PBX3 (NM_006195.2,727-745).
catccatcgaaaatttagt

SEQ ID NO: 8983 - DNA, 19 bp, Homo sapiens
  siRNA target sequence for PBX3 (NM_006195.2,763-781).
caaacaaagcacttgtgaa

SEQ ID NO: 8984 - DNA, 19 bp, Homo sapiens
  siRNA target sequence for PBX3 (NM_006195.2,774-792).
cttgtgaagcagttatgat

SEQ ID NO: 8985 - DNA, 19 bp, Homo sapiens
  siRNA target sequence for PBX3 (NM_006195.2,777-795).
gtgaagcagttatgatttt

SEQ ID NO: 8986 - DNA, 19 bp, Homo sapiens
  siRNA target sequence for PBX3 (NM_006195.2,782-800).
gcagttatgattttaagat

SEQ ID NO: 8987 - DNA, 19 bp, Homo sapiens
  siRNA target sequence for PBX3 (NM_006195.2,821-839).
cggaaaaggcgtaacttca

SEQ ID NO: 8988 - DNA, 19 bp, Homo sapiens
  siRNA target sequence for PBX3 (NM_006195.2,840-858).
gtaaacaggccacagaaat

SEQ ID NO: 8989 - DNA, 19 bp, Homo sapiens
  siRNA target sequence for PBX3 (NM_006195.2,847-865).
ggccacagaaatcttgaat

SEQ ID NO: 8990 - DNA, 19 bp, Homo sapiens
  siRNA target sequence for PBX3 (NM_006195.2,945-963).
cagtgtcacaggtatccaa

SEQ ID NO: 8991 - DNA, 19 bp, Homo sapiens
  siRNA target sequence for PBX3 (NM_006195.2,947-965).
gtgtcacaggtatccaatt

SEQ ID NO: 8992 - DNA, 19 bp, Homo sapiens
  siRNA target sequence for PBX3 (NM_006195.2,1119-1137).
ccggttcttctggttcttt

SEQ ID NO: 8993 - DNA, 19 bp, Homo sapiens
  siRNA target sequence for PBX3 (NM_006195.2,1179-1197).
gtctgaatggggattctta

SEQ ID NO: 8994 - DNA, 19 bp, Homo sapiens
  siRNA target sequence for PBX3 (NM_006195.2,1242-1260).
ccctccgtcatgttatcaa

SEQ ID NO: 8995 - DNA, 19 bp, Homo sapiens
  siRNA target sequence for PBX3 (NM_006195.2,1243-1261).
cctccgtcatgttatcaat

SEQ ID NO: 8996 - DNA, 19 bp, Homo sapiens
  siRNA target sequence for PBX3 (NM_006195.2,1247-1265).
cgtcatgttatcaatcaga

SEQ ID NO: 8997 - DNA, 19 bp, Homo sapiens
  siRNA target sequence for PBX3 (NM_006195.2,1284-1302).
gccttggaggaaattcact

SEQ ID NO: 8998 - DNA, 19 bp, Homo sapiens
  siRNA target sequence for PBX3 (NM_006195.2,1303-1321).
gtacagtccacataattta

SEQ ID NO: 8999 - DNA, 19 bp, Homo sapiens
  siRNA target sequence for PBX3 (NM_006195.2,1336-1354).
ctggcaggacgcaacaact

SEQ ID NO: 9000 - DNA, 19 bp, Homo sapiens
  siRNA target sequence for PBX4 (NM_025245.1,339-357).
caggtggctgtccaaatga

SEQ ID NO: 9001 - DNA, 19 bp, Homo sapiens
  siRNA target sequence for PBX4 (NM_025245.1,341-359).
ggtggctgtccaaatgaca

SEQ ID NO: 9002 - DNA, 19 bp, Homo sapiens
  siRNA target sequence for PBX4 (NM_025245.1,344-362).
ggctgtccaaatgacaata

SEQ ID NO: 9003 - DNA, 19 bp, Homo sapiens
  siRNA target sequence for PBX4 (NM_025245.1,394-412).
gtcccagatccgacagatt

SEQ ID NO: 9004 - DNA, 19 bp, Homo sapiens
  siRNA target sequence for PBX4 (NM_025245.1,396-414).
cccagatccgacagattta

SEQ ID NO: 9005 - DNA, 19 bp, Homo sapiens
  siRNA target sequence for PBX4 (NM_025245.1,420-438).
ctgagctagagaaatatga

SEQ ID NO: 9006 - DNA, 19 bp, Homo sapiens
  siRNA target sequence for PBX4 (NM_025245.1,759-777).
ccatctcccaggtctctaa

SEQ ID NO: 9007 - DNA, 19 bp, Homo sapiens
  siRNA target sequence for PBX4 (NM_025245.1,790-808).
caaaagaatccggtataaa

SEQ ID NO: 9008 - DNA, 19 bp, Homo sapiens
  siRNA target sequence for PBX4 (NM_025245.1,811-829).
gaacatggggaagtttcaa

SEQ ID NO: 9009 - DNA, 19 bp, Homo sapiens
  siRNA target sequence for PBX4 (NM_025245.1,830-848).
gaagaggctaccatttaca

SEQ ID NO: 9010 - DNA, 19 bp, Homo sapiens
  siRNA target sequence for PBX4 (NM_025245.1,1102-1120).
catcaactccagtacatct

SEQ ID NO: 9011 - DNA, 19 bp, Homo sapiens
  siRNA target sequence for PEG3 (NM_006210.1,389-407).
gccaccaaacctaagaagt

SEQ ID NO: 9012 - DNA, 19 bp, Homo sapiens
  siRNA target sequence for PEG3 (NM_006210.1,447-465).
ctaaggagccggatgtcat

SEQ ID NO: 9013 - DNA, 19 bp, Homo sapiens
  siRNA target sequence for PEG3 (NM_006210.1,503-521).
cagaggtttcggaacctaa

SEQ ID NO: 9014 - DNA, 19 bp, Homo sapiens
  siRNA target sequence for PEG3 (NM_006210.1,507-525).
ggtttcggaacctaatcta

SEQ ID NO: 9015 - DNA, 19 bp, Homo sapiens
  siRNA target sequence for PEG3 (NM_006210.1,508-526).
gtttcggaacctaatctat

SEQ ID NO: 9016 - DNA, 19 bp, Homo sapiens
  siRNA target sequence for PEG3 (NM_006210.1,543-561).
ctcggaagaccctgatcaa

SEQ ID NO: 9017 - DNA, 19 bp, Homo sapiens
  siRNA target sequence for PEG3 (NM_006210.1,673-691).
gccttgggtgcgagcaaaa

SEQ ID NO: 9018 - DNA, 19 bp, Homo sapiens
  siRNA target sequence for PEG3 (NM_006210.1,674-692).
ccttgggtgcgagcaaaaa

SEQ ID NO: 9019 - DNA, 19 bp, Homo sapiens
  siRNA target sequence for PEG3 (NM_006210.1,675-693).
cttgggtgcgagcaaaaaa

SEQ ID NO: 9020 - DNA, 19 bp, Homo sapiens
  siRNA target sequence for PEG3 (NM_006210.1,824-842).
cctcactcagtccattctt

SEQ ID NO: 9021 - DNA, 19 bp, Homo sapiens
  siRNA target sequence for PEG3 (NM_006210.1,825-843).
ctcactcagtccattcttt

SEQ ID NO: 9022 - DNA, 19 bp, Homo sapiens
  siRNA target sequence for PEG3 (NM_006210.1,961-979).
ggtggcgaaaacaagcttt

SEQ ID NO: 9023 - DNA, 19 bp, Homo sapiens
  siRNA target sequence for PEG3 (NM_006210.1,1004-1022).
gactccagggcttatgagt

SEQ ID NO: 9024 - DNA, 19 bp, Homo sapiens
  siRNA target sequence for PEG3 (NM_006210.1,1033-1051).
ggatgctgaatcataccaa

SEQ ID NO: 9025 - DNA, 19 bp, Homo sapiens
  siRNA target sequence for PEG3 (NM_006210.1,1174-1192).
gcagggccactcatcaaga

SEQ ID NO: 9026 - DNA, 19 bp, Homo sapiens
  siRNA target sequence for PEG3 (NM_006210.1,1175-1193).
cagggccactcatcaagat

SEQ ID NO: 9027 - DNA, 19 bp, Homo sapiens
  siRNA target sequence for PEG3 (NM_006210.1,1215-1233).
gcaccagtcgaggtctaaa

SEQ ID NO: 9028 - DNA, 19 bp, Homo sapiens
  siRNA target sequence for PEG3 (NM_006210.1,1216-1234).
caccagtcgaggtctaaaa

SEQ ID NO: 9029 - DNA, 19 bp, Homo sapiens
  siRNA target sequence for PEG3 (NM_006210.1,1219-1237).
cagtcgaggtctaaaaact

SEQ ID NO: 9030 - DNA, 19 bp, Homo sapiens
  siRNA target sequence for PEG3 (NM_006210.1,1221-1239).
gtcgaggtctaaaaactat

SEQ ID NO: 9031 - DNA, 19 bp, Homo sapiens
  siRNA target sequence for PEG3 (NM_006210.1,1240-1258).
gcctgaagccaaaaaatca

SEQ ID NO: 9032 - DNA, 19 bp, Homo sapiens
  siRNA target sequence for PEG3 (NM_006210.1,1271-1289).
gggatttgtgaagatgaat

SEQ ID NO: 9033 - DNA, 19 bp, Homo sapiens
  siRNA target sequence for PEG3 (NM_006210.1,1273-1291).
gatttgtgaagatgaatct

SEQ ID NO: 9034 - DNA, 19 bp, Homo sapiens
  siRNA target sequence for PEG3 (NM_006210.1,1293-1311).
cccacggagtgataatgga

SEQ ID NO: 9035 - DNA, 19 bp, Homo sapiens
  siRNA target sequence for PEG3 (NM_006210.1,1297-1315).
cggagtgataatggaaaaa

SEQ ID NO: 9036 - DNA, 19 bp, Homo sapiens
  siRNA target sequence for PEG3 (NM_006210.1,1368-1386).
gcgaccggtcacagagatt

SEQ ID NO: 9037 - DNA, 19 bp, Homo sapiens
  siRNA target sequence for PEG3 (NM_006210.1,1387-1405).
ccccagaatgtcagatgat

SEQ ID NO: 9038 - DNA, 19 bp, Homo sapiens
  siRNA target sequence for PEG3 (NM_006210.1,1388-1406).
cccagaatgtcagatgata

SEQ ID NO: 9039 - DNA, 19 bp, Homo sapiens
  siRNA target sequence for PEG3 (NM_006210.1,1444-1462).
gatccagcagcgggtttat

SEQ ID NO: 9040 - DNA, 19 bp, Homo sapiens
  siRNA target sequence for PEG3 (NM_006210.1,1447-1465).
ccagcagcgggtttatgaa

SEQ ID NO: 9041 - DNA, 19 bp, Homo sapiens
  siRNA target sequence for PEG3 (NM_006210.1,1479-1497).
ggggaggctttaggtttaa

SEQ ID NO: 9042 - DNA, 19 bp, Homo sapiens
  siRNA target sequence for PEG3 (NM_006210.1,1480-1498).
gggaggctttaggtttaat

SEQ ID NO: 9043 - DNA, 19 bp, Homo sapiens
  siRNA target sequence for PEG3 (NM_006210.1,1533-1551).
gaaagaggcgctatcattt

SEQ ID NO: 9044 - DNA, 19 bp, Homo sapiens
  siRNA target sequence for PEG3 (NM_006210.1,1568-1586).
ggctcgattcacgatcaaa

SEQ ID NO: 9045 - DNA, 19 bp, Homo sapiens
  siRNA target sequence for PEG3 (NM_006210.1,1569-1587).
gctcgattcacgatcaaaa

SEQ ID NO: 9046 - DNA, 19 bp, Homo sapiens
  siRNA target sequence for PEG3 (NM_006210.1,1570-1588).
ctcgattcacgatcaaaaa

SEQ ID NO: 9047 - DNA, 19 bp, Homo sapiens
  siRNA target sequence for PEG3 (NM_006210.1,1683-1701).
ccgagtcacagccaattga

SEQ ID NO: 9048 - DNA, 19 bp, Homo sapiens
  siRNA target sequence for PEG3 (NM_006210.1,1684-1702).
cgagtcacagccaattgat

SEQ ID NO: 9049 - DNA, 19 bp, Homo sapiens
  siRNA target sequence for PEG3 (NM_006210.1,1685-1703).
gagtcacagccaattgatt

SEQ ID NO: 9050 - DNA, 19 bp, Homo sapiens
  siRNA target sequence for PEG3 (NM_006210.1,1687-1705).
gtcacagccaattgatttt

SEQ ID NO: 9051 - DNA, 19 bp, Homo sapiens
  siRNA target sequence for PEG3 (NM_006210.1,1706-1724).
ggggcaatgccatatgtat

SEQ ID NO: 9052 - DNA, 19 bp, Homo sapiens
  siRNA target sequence for PEG3 (NM_006210.1,1708-1726).
ggcaatgccatatgtatgt

SEQ ID NO: 9053 - DNA, 19 bp, Homo sapiens
  siRNA target sequence for PEG3 (NM_006210.1,1769-1787).
gagcaccagatcatgcata

SEQ ID NO: 9054 - DNA, 19 bp, Homo sapiens
  siRNA target sequence for PEG3 (NM_006210.1,1772-1790).
caccagatcatgcatacta

SEQ ID NO: 9055 - DNA, 19 bp, Homo sapiens
  siRNA target sequence for PEG3 (NM_006210.1,1774-1792).
ccagatcatgcatactaga

SEQ ID NO: 9056 - DNA, 19 bp, Homo sapiens
  siRNA target sequence for PEG3 (NM_006210.1,1838-1856).
gtcagtgaagttcagaaaa

SEQ ID NO: 9057 - DNA, 19 bp, Homo sapiens
  siRNA target sequence for PEG3 (NM_006210.1,1861-1879).
ggttggagggaaacgtttt

SEQ ID NO: 9058 - DNA, 19 bp, Homo sapiens
  siRNA target sequence for PEG3 (NM_006210.1,1924-1942).
ggctgaacatcggaagatt

SEQ ID NO: 9059 - DNA, 19 bp, Homo sapiens
  siRNA target sequence for PEG3 (NM_006210.1,1952-1970).
ggttatcttgtggaatgta

SEQ ID NO: 9060 - DNA, 19 bp, Homo sapiens
  siRNA target sequence for PEG3 (NM_006210.1,1999-2017).
gcctagccccacctttagt

SEQ ID NO: 9061 - DNA, 19 bp, Homo sapiens
  siRNA target sequence for PEG3 (NM_006210.1,2196-2214).
gcccagcccttaatgagtt

SEQ ID NO: 9062 - DNA, 19 bp, Homo sapiens
  siRNA target sequence for PEG3 (NM_006210.1,2197-2215).
cccagcccttaatgagttt

SEQ ID NO: 9063 - DNA, 19 bp, Homo sapiens
  siRNA target sequence for PEG3 (NM_006210.1,2199-2217).
cagcccttaatgagtttca

SEQ ID NO: 9064 - DNA, 19 bp, Homo sapiens
  siRNA target sequence for PEG3 (NM_006210.1,2203-2221).
ccttaatgagtttcagaaa

SEQ ID NO: 9065 - DNA, 19 bp, Homo sapiens
  siRNA target sequence for PEG3 (NM_006210.1,2313-2331).
ctagagggaacccatttga

SEQ ID NO: 9066 - DNA, 19 bp, Homo sapiens
  siRNA target sequence for PEG3 (NM_006210.1,2435-2453).
cgggatgccttcatgcaaa

SEQ ID NO: 9067 - DNA, 19 bp, Homo sapiens
  siRNA target sequence for PEG3 (NM_006210.1,2509-2527).
cagagggtatgagaaatct

SEQ ID NO: 9068 - DNA, 19 bp, Homo sapiens
  siRNA target sequence for PEG3 (NM_006210.1,2541-2559).
ggccattcactgaatctca

SEQ ID NO: 9069 - DNA, 19 bp, Homo sapiens
  siRNA target sequence for PEG3 (NM_006210.1,2603-2621).
gaaaaggcgttcaccatta

SEQ ID NO: 9070 - DNA, 19 bp, Homo sapiens
  siRNA target sequence for PEG3 (NM_006210.1,2651-2669).
cccactaaggaaaatgtct

SEQ ID NO: 9071 - DNA, 19 bp, Homo sapiens
  siRNA target sequence for PEG3 (NM_006210.1,2652-2670).
ccactaaggaaaatgtcta

SEQ ID NO: 9072 - DNA, 19 bp, Homo sapiens
  siRNA target sequence for PEG3 (NM_006210.1,2682-2700).
catatgagaggtctgttat

SEQ ID NO: 9073 - DNA, 19 bp, Homo sapiens
  siRNA target sequence for PEG3 (NM_006210.1,2744-2762).
gcagggcccagtaaaccaa

SEQ ID NO: 9074 - DNA, 19 bp, Homo sapiens
  siRNA target sequence for PEG3 (NM_006210.1,2745-2763).
cagggcccagtaaaccaaa

SEQ ID NO: 9075 - DNA, 19 bp, Homo sapiens
  siRNA target sequence for PEG3 (NM_006210.1,2748-2766).
ggcccagtaaaccaaaagt

SEQ ID NO: 9076 - DNA, 19 bp, Homo sapiens
  siRNA target sequence for PEG3 (NM_006210.1,2749-2767).
gcccagtaaaccaaaagta

SEQ ID NO: 9077 - DNA, 19 bp, Homo sapiens
  siRNA target sequence for PEG3 (NM_006210.1,2894-2912).
ccaagaagtcacaatggaa

SEQ ID NO: 9078 - DNA, 19 bp, Homo sapiens
  siRNA target sequence for PEG3 (NM_006210.1,3019-3037).
cagtaagaatcgcaactat

SEQ ID NO: 9079 - DNA, 19 bp, Homo sapiens
  siRNA target sequence for PEG3 (NM_006210.1,3021-3039).
gtaagaatcgcaactatga

SEQ ID NO: 9080 - DNA, 19 bp, Homo sapiens
  siRNA target sequence for PEG3 (NM_006210.1,3034-3052).
ctatgaagactctgtcata

SEQ ID NO: 9081 - DNA, 19 bp, Homo sapiens
  siRNA target sequence for PEG3 (NM_006210.1,3095-3113).
gagggatctggtgagttta

SEQ ID NO: 9082 - DNA, 19 bp, Homo sapiens
  siRNA target sequence for PEG3 (NM_006210.1,3115-3133).
gaaggatggcgaattctct

SEQ ID NO: 9083 - DNA, 19 bp, Homo sapiens
  siRNA target sequence for PEG3 (NM_006210.1,3144-3162).
caaatgtccgtgaatacca

SEQ ID NO: 9084 - DNA, 19 bp, Homo sapiens
  siRNA target sequence for PEG3 (NM_006210.1,3160-3178).
ccagaaggctcgtgctaaa

SEQ ID NO: 9085 - DNA, 19 bp, Homo sapiens
  siRNA target sequence for PEG3 (NM_006210.1,3161-3179).
cagaaggctcgtgctaaaa

SEQ ID NO: 9086 - DNA, 19 bp, Homo sapiens
  siRNA target sequence for PEG3 (NM_006210.1,3167-3185).
gctcgtgctaaaaagaaat

SEQ ID NO: 9087 - DNA, 19 bp, Homo sapiens
  siRNA target sequence for PEG3 (NM_006210.1,3255-3273).
ctcgagggatgctctatga

SEQ ID NO: 9088 - DNA, 19 bp, Homo sapiens
  siRNA target sequence for PEG3 (NM_006210.1,3257-3275).
cgagggatgctctatgaat

SEQ ID NO: 9089 - DNA, 19 bp, Homo sapiens
  siRNA target sequence for PEG3 (NM_006210.1,3397-3415).
ccctactgaccctcaaaca

SEQ ID NO: 9090 - DNA, 19 bp, Homo sapiens
  siRNA target sequence for PEG3 (NM_006210.1,3443-3461).
gagcaagcgcggaacaaat

SEQ ID NO: 9091 - DNA, 19 bp, Homo sapiens
  siRNA target sequence for PEG3 (NM_006210.1,3445-3463).
gcaagcgcggaacaaatgt

SEQ ID NO: 9092 - DNA, 19 bp, Homo sapiens
  siRNA target sequence for PEG3 (NM_006210.1,3446-3464).
caagcgcggaacaaatgta

SEQ ID NO: 9093 - DNA, 19 bp, Homo sapiens
  siRNA target sequence for PEG3 (NM_006210.1,3462-3480).
gtaaggacttcagacaatt

SEQ ID NO: 9094 - DNA, 19 bp, Homo sapiens
  siRNA target sequence for PEG3 (NM_006210.1,3552-3570).
ctcaaggcgagaatactga

SEQ ID NO: 9095 - DNA, 19 bp, Homo sapiens
  siRNA target sequence for PEG3 (NM_006210.1,3603-3621).
gtcaggagacaattgaaga

SEQ ID NO: 9096 - DNA, 19 bp, Homo sapiens
  siRNA target sequence for PEG3 (NM_006210.1,3667-3685).
ccctgatgacaaaatctat

SEQ ID NO: 9097 - DNA, 19 bp, Homo sapiens
  siRNA target sequence for PEG3 (NM_006210.1,3777-3795).
gggagtacacacattctgt

SEQ ID NO: 9098 - DNA, 19 bp, Homo sapiens
  siRNA target sequence for PEG3 (NM_006210.1,3778-3796).
ggagtacacacattctgta

SEQ ID NO: 9099 - DNA, 19 bp, Homo sapiens
  siRNA target sequence for PEG3 (NM_006210.1,3816-3834).
gcgagtatcagagagatta

SEQ ID NO: 9100 - DNA, 19 bp, Homo sapiens
  siRNA target sequence for PEG3 (NM_006210.1,3860-3878).
ccaaagtgtggggaatctt

SEQ ID NO: 9101 - DNA, 19 bp, Homo sapiens
  siRNA target sequence for PEG3 (NM_006210.1,4025-4043).
gctgggtcggccattcgat

SEQ ID NO: 9102 - DNA, 19 bp, Homo sapiens
  siRNA target sequence for PEG3 (NM_006210.1,4100-4118).
cttcatagggaagatgatt

SEQ ID NO: 9103 - DNA, 19 bp, Homo sapiens
  siRNA target sequence for PEG3 (NM_006210.1,4192-4210).
gaccgaagagagactcttt

SEQ ID NO: 9104 - DNA, 19 bp, Homo sapiens
  siRNA target sequence for PEG3 (NM_006210.1,4218-4236).
cagtctgtggagaatcttt

SEQ ID NO: 9105 - DNA, 19 bp, Homo sapiens
  siRNA target sequence for PEG3 (NM_006210.1,4237-4255).
cgtcaacccagcagaactt

SEQ ID NO: 9106 - DNA, 19 bp, Homo sapiens
  siRNA target sequence for PEG3 (NM_006210.1,4262-4280).
cacgtaactgttcataaga

SEQ ID NO: 9107 - DNA, 19 bp, Homo sapiens
  siRNA target sequence for PEG3 (NM_006210.1,4264-4282).
cgtaactgttcataagaat

SEQ ID NO: 9108 - DNA, 19 bp, Homo sapiens
  siRNA target sequence for PEG3 (NM_006210.1,4292-4310).
gagtacgggtcctcctata

SEQ ID NO: 9109 - DNA, 19 bp, Homo sapiens
  siRNA target sequence for PEG3 (NM_006210.1,4294-4312).
gtacgggtcctcctatact

SEQ ID NO: 9110 - DNA, 19 bp, Homo sapiens
  siRNA target sequence for PEG3 (NM_006210.1,4336-4354).
cctcaaaggagctatacca

SEQ ID NO: 9111 - DNA, 19 bp, Homo sapiens
  siRNA target sequence for PEG3 (NM_006210.1,4337-4355).
ctcaaaggagctataccat

SEQ ID NO: 9112 - DNA, 19 bp, Homo sapiens
  siRNA target sequence for PEG3 (NM_006210.1,4344-4362).
gagctataccattctatga

SEQ ID NO: 9113 - DNA, 19 bp, Homo sapiens
  siRNA target sequence for PEG3 (NM_006210.1,4346-4364).
gctataccattctatgaat

SEQ ID NO: 9114 - DNA, 19 bp, Homo sapiens
  siRNA target sequence for PEG3 (NM_006210.1,4498-4516).
ccatgttccacaagtagtt

SEQ ID NO: 9115 - DNA, 19 bp, Homo sapiens
  siRNA target sequence for PEG3 (NM_006210.1,4521-4539).
ggattcagggcttaaacgt

SEQ ID NO: 9116 - DNA, 19 bp, Homo sapiens
  siRNA target sequence for PEG3 (NM_006210.1,4522-4540).
gattcagggcttaaacgta

SEQ ID NO: 9117 - DNA, 19 bp, Homo sapiens
  siRNA target sequence for PEG3 (NM_006210.1,4809-4827).
ctgacggtgtgggaattga

SEQ ID NO: 9118 - DNA, 19 bp, Homo sapiens
  siRNA target sequence for PEG3 (NM_006210.1,4941-4959).
ctcatgccagcatgatcat

SEQ ID NO: 9119 - DNA, 19 bp, Homo sapiens
  siRNA target sequence for PEG3 (NM_006210.1,4947-4965).
ccagcatgatcatatttga

SEQ ID NO: 9120 - DNA, 19 bp, Homo sapiens
  siRNA target sequence for PEG3 (NM_006210.1,5070-5088).
gtgggcagctcttcaatga

SEQ ID NO: 9121 - DNA, 19 bp, Homo sapiens
  siRNA target sequence for PGBD1 (NM_032507.2,602-620).
cacaccaaggaacagataa

SEQ ID NO: 9122 - DNA, 19 bp, Homo sapiens
  siRNA target sequence for PGBD1 (NM_032507.2,673-691).
gccctgtgtgaagacatat

SEQ ID NO: 9123 - DNA, 19 bp, Homo sapiens
  siRNA target sequence for PGBD1 (NM_032507.2,676-694).
ctgtgtgaagacatatcct

SEQ ID NO: 9124 - DNA, 19 bp, Homo sapiens
  siRNA target sequence for PGBD1 (NM_032507.2,1132-1150).
cagtccgatgactgaagaa

SEQ ID NO: 9125 - DNA, 19 bp, Homo sapiens
  siRNA target sequence for PGBD1 (NM_032507.2,1134-1152).
gtccgatgactgaagaaat

SEQ ID NO: 9126 - DNA, 19 bp, Homo sapiens
  siRNA target sequence for PGBD1 (NM_032507.2,1250-1268).
ccccagattccttgtagta

SEQ ID NO: 9127 - DNA, 19 bp, Homo sapiens
  siRNA target sequence for PGBD1 (NM_032507.2,1287-1305).
ggacagttgcacatttgaa

SEQ ID NO: 9128 - DNA, 19 bp, Homo sapiens
  siRNA target sequence for PGBD1 (NM_032507.2,1354-1372).
ctcatccctggaatatgct

SEQ ID NO: 9129 - DNA, 19 bp, Homo sapiens
  siRNA target sequence for PGBD1 (NM_032507.2,1430-1448).
ctccaaggcctctcattct

SEQ ID NO: 9130 - DNA, 19 bp, Homo sapiens
  siRNA target sequence for PGBD1 (NM_032507.2,1490-1508).
cagcctgctcaaaagaagt

SEQ ID NO: 9131 - DNA, 19 bp, Homo sapiens
  siRNA target sequence for PGBD1 (NM_032507.2,1492-1510).
gcctgctcaaaagaagtta

SEQ ID NO: 9132 - DNA, 19 bp, Homo sapiens
  siRNA target sequence for PGBD1 (NM_032507.2,1539-1557).
ggaccaaaagagacattaa

SEQ ID NO: 9133 - DNA, 19 bp, Homo sapiens
  siRNA target sequence for PGBD1 (NM_032507.2,1624-1642).
cccagtagagctttttgaa

SEQ ID NO: 9134 - DNA, 19 bp, Homo sapiens
  siRNA target sequence for PGBD1 (NM_032507.2,1626-1644).
cagtagagctttttgaatt

SEQ ID NO: 9135 - DNA, 19 bp, Homo sapiens
  siRNA target sequence for PGBD1 (NM_032507.2,1784-1802).
catcctagaagggaaatgt

SEQ ID NO: 9136 - DNA, 19 bp, Homo sapiens
  siRNA target sequence for PGBD1 (NM_032507.2,1902-1920).
gccacctagatcaaaaaga

SEQ ID NO: 9137 - DNA, 19 bp, Homo sapiens
  siRNA target sequence for PGBD1 (NM_032507.2,1903-1921).
ccacctagatcaaaaagat

SEQ ID NO: 9138 - DNA, 19 bp, Homo sapiens
  siRNA target sequence for PGBD1 (NM_032507.2,1904-1922).
cacctagatcaaaaagata

SEQ ID NO: 9139 - DNA, 19 bp, Homo sapiens
  siRNA target sequence for PGBD1 (NM_032507.2,1910-1928).
gatcaaaaagataagttta

SEQ ID NO: 9140 - DNA, 19 bp, Homo sapiens
  siRNA target sequence for PGBD1 (NM_032507.2,1940-1958).
cctctcataaaacaaatga

SEQ ID NO: 9141 - DNA, 19 bp, Homo sapiens
  siRNA target sequence for PGBD1 (NM_032507.2,1982-2000).
cccctggaagaatactatt

SEQ ID NO: 9142 - DNA, 19 bp, Homo sapiens
  siRNA target sequence for PGBD1 (NM_032507.2,1991-2009).
gaatactattgctttgata

SEQ ID NO: 9143 - DNA, 19 bp, Homo sapiens
  siRNA target sequence for PGBD1 (NM_032507.2,2006-2024).
gataagtcaatgtgtgaat

SEQ ID NO: 9144 - DNA, 19 bp, Homo sapiens
  siRNA target sequence for PGBD1 (NM_032507.2,2017-2035).
gtgtgaatgctttgatagt

SEQ ID NO: 9145 - DNA, 19 bp, Homo sapiens
  siRNA target sequence for PGBD1 (NM_032507.2,2025-2043).
gctttgatagtgaccaatt

SEQ ID NO: 9146 - DNA, 19 bp, Homo sapiens
  siRNA target sequence for PGBD1 (NM_032507.2,2045-2063).
ctgaatggaaagcctatta

SEQ ID NO: 9147 - DNA, 19 bp, Homo sapiens
  siRNA target sequence for PGBD1 (NM_032507.2,2058-2076).
ctattagaattggctataa

SEQ ID NO: 9148 - DNA, 19 bp, Homo sapiens
  siRNA target sequence for PGBD1 (NM_032507.2,2115-2133).
ggtttgaaccctatcaaga

SEQ ID NO: 9149 - DNA, 19 bp, Homo sapiens
  siRNA target sequence for PGBD1 (NM_032507.2,2172-2190).
ggttaggtggaaatctagt

SEQ ID NO: 9150 - DNA, 19 bp, Homo sapiens
  siRNA target sequence for PGBD1 (NM_032507.2,2178-2196).
gtggaaatctagtgatgaa

SEQ ID NO: 9151 - DNA, 19 bp, Homo sapiens
  siRNA target sequence for PGBD1 (NM_032507.2,2194-2212).
gaacttcgctgatgttctt

SEQ ID NO: 9152 - DNA, 19 bp, Homo sapiens
  siRNA target sequence for PGBD1 (NM_032507.2,2197-2215).
cttcgctgatgttctttta

SEQ ID NO: 9153 - DNA, 19 bp, Homo sapiens
  siRNA target sequence for PGBD1 (NM_032507.2,2232-2250).
cctatcacctgtgttttga

SEQ ID NO: 9154 - DNA, 19 bp, Homo sapiens
  siRNA target sequence for PGBD1 (NM_032507.2,2254-2272).
cttctttacaagtgtcaaa

SEQ ID NO: 9155 - DNA, 19 bp, Homo sapiens
  siRNA target sequence for PGBD1 (NM_032507.2,2305-2323).
ggcaacaggaacaattcgt

SEQ ID NO: 9156 - DNA, 19 bp, Homo sapiens
  siRNA target sequence for PGBD1 (NM_032507.2,2324-2342).
gagaacaggaccgaaaaat

SEQ ID NO: 9157 - DNA, 19 bp, Homo sapiens
  siRNA target sequence for PGBD1 (NM_032507.2,2326-2344).
gaacaggaccgaaaaatgt

SEQ ID NO: 9158 - DNA, 19 bp, Homo sapiens
  siRNA target sequence for PGBD1 (NM_032507.2,2336-2354).
gaaaaatgtccccttatga

SEQ ID NO: 9159 - DNA, 19 bp, Homo sapiens
  siRNA target sequence for PGBD1 (NM_032507.2,2398-2416).
ccgaatagaagaaaacaat

SEQ ID NO: 9160 - DNA, 19 bp, Homo sapiens
  siRNA target sequence for PGBD1 (NM_032507.2,2505-2523).
gttgtgatgctgataacga

SEQ ID NO: 9161 - DNA, 19 bp, Homo sapiens
  siRNA target sequence for PGBD1 (NM_032507.2,2536-2554).
gataagtcaaccatccata

SEQ ID NO: 9162 - DNA, 19 bp, Homo sapiens
  siRNA target sequence for PGBD1 (NM_032507.2,2541-2559).
gtcaaccatccatagtaaa

SEQ ID NO: 9163 - DNA, 19 bp, Homo sapiens
  siRNA target sequence for PGBD1 (NM_032507.2,2546-2564).
ccatccatagtaaaagtgt

SEQ ID NO: 9164 - DNA, 19 bp, Homo sapiens
  siRNA target sequence for PGBD1 (NM_032507.2,2574-2592).
gcaaggaaggtgtagctaa

SEQ ID NO: 9165 - DNA, 19 bp, Homo sapiens
  siRNA target sequence for PGBD1 (NM_032507.2,2575-2593).
caaggaaggtgtagctaaa

SEQ ID NO: 9166 - DNA, 19 bp, Homo sapiens
  siRNA target sequence for PGBD1 (NM_032507.2,2588-2606).
gctaaaatggatcaaatta

SEQ ID NO: 9167 - DNA, 19 bp, Homo sapiens
  siRNA target sequence for PGBD1 (NM_032507.2,2635-2653).
caagaaatggtactcaatt

SEQ ID NO: 9168 - DNA, 19 bp, Homo sapiens
  siRNA target sequence for PGBD1 (NM_032507.2,2656-2674).
ggtgagctacatgattgat

SEQ ID NO: 9169 - DNA, 19 bp, Homo sapiens
  siRNA target sequence for PGBD1 (NM_032507.2,2659-2677).
gagctacatgattgatgta

SEQ ID NO: 9170 - DNA, 19 bp, Homo sapiens
  siRNA target sequence for PGBD1 (NM_032507.2,2727-2745).
ctctagaccccttggattt

SEQ ID NO: 9171 - DNA, 19 bp, Homo sapiens
  siRNA target sequence for PGR (NM_000926.2,1581-1599).
gacaccttgcctgaagttt

SEQ ID NO: 9172 - DNA, 19 bp, Homo sapiens
  siRNA target sequence for PGR (NM_000926.2,1593-1611).
gaagtttcggccataccta

SEQ ID NO: 9173 - DNA, 19 bp, Homo sapiens
  siRNA target sequence for PGR (NM_000926.2,1656-1674).
gacccctccgacgaaaaga

SEQ ID NO: 9174 - DNA, 19 bp, Homo sapiens
  siRNA target sequence for PGR (NM_000926.2,1698-1716).
gacgtggagggcgcatatt

SEQ ID NO: 9175 - DNA, 19 bp, Homo sapiens
  siRNA target sequence for PGR (NM_000926.2,1701-1719).
gtggagggcgcatattcca

SEQ ID NO: 9176 - DNA, 19 bp, Homo sapiens
  siRNA target sequence for PGR (NM_000926.2,1756-1774).
ctagtcccccagaaaagga

SEQ ID NO: 9177 - DNA, 19 bp, Homo sapiens
  siRNA target sequence for PGR (NM_000926.2,2344-2362).
ccaccacggtgatggattt

SEQ ID NO: 9178 - DNA, 19 bp, Homo sapiens
  siRNA target sequence for PGR (NM_000926.2,2347-2365).
ccacggtgatggatttcat

SEQ ID NO: 9179 - DNA, 19 bp, Homo sapiens
  siRNA target sequence for PGR (NM_000926.2,2372-2390).
gcctatcctgcctctcaat

SEQ ID NO: 9180 - DNA, 19 bp, Homo sapiens
  siRNA target sequence for PGR (NM_000926.2,2383-2401).
ctctcaatcacgccttatt

SEQ ID NO: 9181 - DNA, 19 bp, Homo sapiens
  siRNA target sequence for PGR (NM_000926.2,2421-2439).
ctgctggaagacgaaagtt

SEQ ID NO: 9182 - DNA, 19 bp, Homo sapiens
  siRNA target sequence for PGR (NM_000926.2,2567-2585).
cgacgcgtaccctctctat

SEQ ID NO: 9183 - DNA, 19 bp, Homo sapiens
  siRNA target sequence for PGR (NM_000926.2,2568-2586).
gacgcgtaccctctctata

SEQ ID NO: 9184 - DNA, 19 bp, Homo sapiens
  siRNA target sequence for PGR (NM_000926.2,2602-2620).
ccgctctaaagataaagga

SEQ ID NO: 9185 - DNA, 19 bp, Homo sapiens
  siRNA target sequence for PGR (NM_000926.2,2828-2846).
ggagtgcatcctgtacaaa

SEQ ID NO: 9186 - DNA, 19 bp, Homo sapiens
  siRNA target sequence for PGR (NM_000926.2,3125-3143).
cagcttcgagtcattacct

SEQ ID NO: 9187 - DNA, 19 bp, Homo sapiens
  siRNA target sequence for PGR (NM_000926.2,3134-3152).
gtcattacctcagaagatt

SEQ ID NO: 9188 - DNA, 19 bp, Homo sapiens
  siRNA target sequence for PGR (NM_000926.2,3141-3159).
cctcagaagatttgtttaa

SEQ ID NO: 9189 - DNA, 19 bp, Homo sapiens
  siRNA target sequence for PGR (NM_000926.2,3276-3294).
gactgcatcgttgataaaa

SEQ ID NO: 9190 - DNA, 19 bp, Homo sapiens
  siRNA target sequence for PGR (NM_000926.2,3350-3368).
ggtccttggaggtcgaaaa

SEQ ID NO: 9191 - DNA, 19 bp, Homo sapiens
  siRNA target sequence for PGR (NM_000926.2,3351-3369).
gtccttggaggtcgaaaat

SEQ ID NO: 9192 - DNA, 19 bp, Homo sapiens
  siRNA target sequence for PGR (NM_000926.2,3353-3371).
ccttggaggtcgaaaattt

SEQ ID NO: 9193 - DNA, 19 bp, Homo sapiens
  siRNA target sequence for PGR (NM_000926.2,3354-3372).
cttggaggtcgaaaattta

SEQ ID NO: 9194 - DNA, 19 bp, Homo sapiens
  siRNA target sequence for PGR (NM_000926.2,3357-3375).
ggaggtcgaaaatttaaaa

SEQ ID NO: 9195 - DNA, 19 bp, Homo sapiens
  siRNA target sequence for PGR (NM_000926.2,3487-3505).
gtcaagacatacagttgat

SEQ ID NO: 9196 - DNA, 19 bp, Homo sapiens
  siRNA target sequence for PGR (NM_000926.2,3511-3529).
cactgatcaacctgttaat

SEQ ID NO: 9197 - DNA, 19 bp, Homo sapiens
  siRNA target sequence for PGR (NM_000926.2,3513-3531).
ctgatcaacctgttaatga

SEQ ID NO: 9198 - DNA, 19 bp, Homo sapiens
  siRNA target sequence for PGR (NM_000926.2,3592-3610).
ctttgctgacaagtcttaa

SEQ ID NO: 9199 - DNA, 19 bp, Homo sapiens
  siRNA target sequence for PGR (NM_000926.2,3596-3614).
gctgacaagtcttaatcaa

SEQ ID NO: 9200 - DNA, 19 bp, Homo sapiens
  siRNA target sequence for PGR (NM_000926.2,3599-3617).
gacaagtcttaatcaacta

SEQ ID NO: 9201 - DNA, 19 bp, Homo sapiens
  siRNA target sequence for PGR (NM_000926.2,3620-3638).
cgagaggcaacttctttca

SEQ ID NO: 9202 - DNA, 19 bp, Homo sapiens
  siRNA target sequence for PGR (NM_000926.2,3623-3641).
gaggcaacttctttcagta

SEQ ID NO: 9203 - DNA, 19 bp, Homo sapiens
  siRNA target sequence for PGR (NM_000926.2,3639-3657).
gtagtcaagtggtctaaat

SEQ ID NO: 9204 - DNA, 19 bp, Homo sapiens
  siRNA target sequence for PGR (NM_000926.2,3662-3680).
gccaggttttcgaaactta

SEQ ID NO: 9205 - DNA, 19 bp, Homo sapiens
  siRNA target sequence for PGR (NM_000926.2,3681-3699).
catattgatgaccagataa

SEQ ID NO: 9206 - DNA, 19 bp, Homo sapiens
  siRNA target sequence for PGR (NM_000926.2,3715-3733).
cttggatgagcttaatggt

SEQ ID NO: 9207 - DNA, 19 bp, Homo sapiens
  siRNA target sequence for PGR (NM_000926.2,3782-3800).
gtattttgcacctgatcta

SEQ ID NO: 9208 - DNA, 19 bp, Homo sapiens
  siRNA target sequence for PGR (NM_000926.2,3790-3808).
cacctgatctaatactaaa

SEQ ID NO: 9209 - DNA, 19 bp, Homo sapiens
  siRNA target sequence for PGR (NM_000926.2,3825-3843).
gaatcatcattctattcat

SEQ ID NO: 9210 - DNA, 19 bp, Homo sapiens
  siRNA target sequence for PGR (NM_000926.2,3917-3935).
gaaagtattgttacttctt

SEQ ID NO: 9211 - DNA, 19 bp, Homo sapiens
  siRNA target sequence for PGR (NM_000926.2,3961-3979).
gaagtcaaacccagtttga

SEQ ID NO: 9212 - DNA, 19 bp, Homo sapiens
  siRNA target sequence for PGR (NM_000926.2,3988-4006).
ggtcaagctacattagaga

SEQ ID NO: 9213 - DNA, 19 bp, Homo sapiens
  siRNA target sequence for PGR (NM_000926.2,4007-4025).
gctcatcaaggcaattggt

SEQ ID NO: 9214 - DNA, 19 bp, Homo sapiens
  siRNA target sequence for PGR (NM_000926.2,4048-4066).
cgagctcacagcgtttcta

SEQ ID NO: 9215 - DNA, 19 bp, Homo sapiens
  siRNA target sequence for PGR (NM_000926.2,4051-4069).
gctcacagcgtttctatca

SEQ ID NO: 9216 - DNA, 19 bp, Homo sapiens
  siRNA target sequence for PGR (NM_000926.2,4052-4070).
ctcacagcgtttctatcaa

SEQ ID NO: 9217 - DNA, 19 bp, Homo sapiens
  siRNA target sequence for PGR (NM_000926.2,4054-4072).
cacagcgtttctatcaact

SEQ ID NO: 9218 - DNA, 19 bp, Homo sapiens
  siRNA target sequence for PGR (NM_000926.2,4058-4076).
gcgtttctatcaacttaca

SEQ ID NO: 9219 - DNA, 19 bp, Homo sapiens
  siRNA target sequence for PGR (NM_000926.2,4060-4078).
gtttctatcaacttacaaa

SEQ ID NO: 9220 - DNA, 19 bp, Homo sapiens
  siRNA target sequence for PGR (NM_000926.2,4116-4134).
catctgtactgcttgaata

SEQ ID NO: 9221 - DNA, 19 bp, Homo sapiens
  siRNA target sequence for PGR (NM_000926.2,4126-4144).
gcttgaatacatttatcca

SEQ ID NO: 9222 - DNA, 19 bp, Homo sapiens
  siRNA target sequence for PGR (NM_000926.2,4150-4168).
gggcactgagtgttgaatt

SEQ ID NO: 9223 - DNA, 19 bp, Homo sapiens
  siRNA target sequence for PGR (NM_000926.2,4197-4215).
gcacaattacccaagatat

SEQ ID NO: 9224 - DNA, 19 bp, Homo sapiens
  siRNA target sequence for PGR (NM_000926.2,4198-4216).
cacaattacccaagatatt

SEQ ID NO: 9225 - DNA, 19 bp, Homo sapiens
  siRNA target sequence for PHF1 (NM_002636.3,175-193).
ggactgatgggctgctata

SEQ ID NO: 9226 - DNA, 19 bp, Homo sapiens
  siRNA target sequence for PHF1 (NM_002636.3,178-196).
ctgatgggctgctatactt

SEQ ID NO: 9227 - DNA, 19 bp, Homo sapiens
  siRNA target sequence for PHF1 (NM_002636.3,377-395).
gaagtgtcgccatgcttat

SEQ ID NO: 9228 - DNA, 19 bp, Homo sapiens
  siRNA target sequence for PHF1 (NM_002636.3,493-511).
ggggaggtgccctgaagaa

SEQ ID NO: 9229 - DNA, 19 bp, Homo sapiens
  siRNA target sequence for PHF1 (NM_002636.3,598-616).
gcaaccgacagcagagtta

SEQ ID NO: 9230 - DNA, 19 bp, Homo sapiens
  siRNA target sequence for PHF1 (NM_002636.3,603-621).
cgacagcagagttactgtt

SEQ ID NO: 9231 - DNA, 19 bp, Homo sapiens
  siRNA target sequence for PHF1 (NM_002636.3,608-626).
gcagagttactgttactgt

SEQ ID NO: 9232 - DNA, 19 bp, Homo sapiens
  siRNA target sequence for PHF1 (NM_002636.3,730-748).
gggacaggttctatgaatt

SEQ ID NO: 9233 - DNA, 19 bp, Homo sapiens
  siRNA target sequence for PHF1 (NM_002636.3,731-749).
ggacaggttctatgaattt

SEQ ID NO: 9234 - DNA, 19 bp, Homo sapiens
  siRNA target sequence for PHF1 (NM_002636.3,966-984).
ctcctctctgctcttaaca

SEQ ID NO: 9235 - DNA, 19 bp, Homo sapiens
  siRNA target sequence for PHF1 (NM_002636.3,985-1003).
gccacaaggaccgtttcat

SEQ ID NO: 9236 - DNA, 19 bp, Homo sapiens
  siRNA target sequence for PHF1 (NM_002636.3,986-1004).
ccacaaggaccgtttcatt

SEQ ID NO: 9237 - DNA, 19 bp, Homo sapiens
  siRNA target sequence for PHF1 (NM_002636.3,987-1005).
cacaaggaccgtttcattt

SEQ ID NO: 9238 - DNA, 19 bp, Homo sapiens
  siRNA target sequence for PHF1 (NM_002636.3,1282-1300).
cagccccatccggatgttt

SEQ ID NO: 9239 - DNA, 19 bp, Homo sapiens
  siRNA target sequence for PHF1 (NM_002636.3,1286-1304).
cccatccggatgtttgctt

SEQ ID NO: 9240 - DNA, 19 bp, Homo sapiens
  siRNA target sequence for PHF1 (NM_002636.3,1370-1388).
ctggaacttcacattggtt

SEQ ID NO: 9241 - DNA, 19 bp, Homo sapiens
  siRNA target sequence for PHF2 (NM_005392.2,644-662).
ggagccacctgacattgta

SEQ ID NO: 9242 - DNA, 19 bp, Homo sapiens
  siRNA target sequence for PHF2 (NM_005392.2,1018-1036).
ccttcgcgggacatttcct

SEQ ID NO: 9243 - DNA, 19 bp, Homo sapiens
  siRNA target sequence for PHF2 (NM_005392.2,1309-1327).
cttcacagctaatcaaaga

SEQ ID NO: 9244 - DNA, 19 bp, Homo sapiens
  siRNA target sequence for PHF2 (NM_005392.2,1340-1358).
gatccggctcagtgagaat

SEQ ID NO: 9245 - DNA, 19 bp, Homo sapiens
  siRNA target sequence for PHF2 (NM_005392.2,1370-1388).
cgtccgaccggaagtgaat

SEQ ID NO: 9246 - DNA, 19 bp, Homo sapiens
  siRNA target sequence for PHF2 (NM_005392.2,1371-1389).
gtccgaccggaagtgaata

SEQ ID NO: 9247 - DNA, 19 bp, Homo sapiens
  siRNA target sequence for PHF2 (NM_005392.2,1373-1391).
ccgaccggaagtgaatact

SEQ ID NO: 9248 - DNA, 19 bp, Homo sapiens
  siRNA target sequence for PHF2 (NM_005392.2,1375-1393).
gaccggaagtgaatactgt

SEQ ID NO: 9249 - DNA, 19 bp, Homo sapiens
  siRNA target sequence for PHF2 (NM_005392.2,1520-1538).
gatgcccaagccatccaaa

SEQ ID NO: 9250 - DNA, 19 bp, Homo sapiens
  siRNA target sequence for PHF2 (NM_005392.2,1739-1757).
cctgagtgtgcccaacaaa

SEQ ID NO: 9251 - DNA, 19 bp, Homo sapiens
  siRNA target sequence for PHF2 (NM_005392.2,1855-1873).
ctgactccttactgaagat

SEQ ID NO: 9252 - DNA, 19 bp, Homo sapiens
  siRNA target sequence for PHF2 (NM_005392.2,1939-1957).
ctttctccaacaagaaact

SEQ ID NO: 9253 - DNA, 19 bp, Homo sapiens
  siRNA target sequence for PHF2 (NM_005392.2,2043-2061).
gtgcgggatgagtatgagt

SEQ ID NO: 9254 - DNA, 19 bp, Homo sapiens
  siRNA target sequence for PHF2 (NM_005392.2,2131-2149).
gggacttgtccttcttgtt

SEQ ID NO: 9255 - DNA, 19 bp, Homo sapiens
  siRNA target sequence for PHF2 (NM_005392.2,2196-2214).
gactcggcagcgtacaaga

SEQ ID NO: 9256 - DNA, 19 bp, Homo sapiens
  siRNA target sequence for PHF2 (NM_005392.2,2507-2525).
ccatggtgcccggaagaat

SEQ ID NO: 9257 - DNA, 19 bp, Homo sapiens
  siRNA target sequence for PHF2 (NM_005392.2,2698-2716).
cccggtcgaagaaaaggaa

SEQ ID NO: 9258 - DNA, 19 bp, Homo sapiens
  siRNA target sequence for PHF2 (NM_005392.2,2699-2717).
ccggtcgaagaaaaggaaa

SEQ ID NO: 9259 - DNA, 19 bp, Homo sapiens
  siRNA target sequence for PHF2 (NM_005392.2,2830-2848).
cggctgctgcagctaagtt

SEQ ID NO: 9260 - DNA, 19 bp, Homo sapiens
  siRNA target sequence for PHF2 (NM_005392.2,3208-3226).
ccgcatcgtctccaaacaa

SEQ ID NO: 9261 - DNA, 19 bp, Homo sapiens
  siRNA target sequence for PHF2 (NM_005392.2,3233-3251).
cgctgccaaaggaaaacgt

SEQ ID NO: 9262 - DNA, 19 bp, Homo sapiens
  siRNA target sequence for PHF2 (NM_005392.2,3234-3252).
gctgccaaaggaaaacgta

SEQ ID NO: 9263 - DNA, 19 bp, Homo sapiens
  siRNA target sequence for PHOX2B (NM_003924.2,445-463).
gcctatgctgacttcagtt

SEQ ID NO: 9264 - DNA, 19 bp, Homo sapiens
  siRNA target sequence for PHOX2B (NM_003924.2,487-505).
cagtataacccgataagga

SEQ ID NO: 9265 - DNA, 19 bp, Homo sapiens
  siRNA target sequence for PHOX2B (NM_003924.2,495-513).
cccgataaggaccactttt

SEQ ID NO: 9266 - DNA, 19 bp, Homo sapiens
  siRNA target sequence for PHOX2B (NM_003924.2,590-608).
cgtacgccgcagttcctta

SEQ ID NO: 9267 - DNA, 19 bp, Homo sapiens
  siRNA target sequence for PHOX2B (NM_003924.2,594-612).
cgccgcagttccttacaaa

SEQ ID NO: 9268 - DNA, 19 bp, Homo sapiens
  siRNA target sequence for PHOX2B (NM_003924.2,596-614).
ccgcagttccttacaaact

SEQ ID NO: 9269 - DNA, 19 bp, Homo sapiens
  siRNA target sequence for PHOX2B (NM_003924.2,1270-1288).
gccaaagccgccttagtga

SEQ ID NO: 9270 - DNA, 19 bp, Homo sapiens
  siRNA target sequence for PHOX2B (NM_003924.2,1271-1289).
ccaaagccgccttagtgaa

SEQ ID NO: 9271 - DNA, 19 bp, Homo sapiens
  siRNA target sequence for PHOX2B (NM_003924.2,1285-1303).
gtgaagagcagtatgttct

SEQ ID NO: 9272 - DNA, 19 bp, Homo sapiens
  siRNA target sequence for PHTF1 (NM_006608.1,44-62).
gagagagatgctatatcgt

SEQ ID NO: 9273 - DNA, 19 bp, Homo sapiens
  siRNA target sequence for PHTF1 (NM_006608.1,83-101).
gcctacgatcagcagatat

SEQ ID NO: 9274 - DNA, 19 bp, Homo sapiens
  siRNA target sequence for PHTF1 (NM_006608.1,123-141).
ctcagattaagggtttgaa

SEQ ID NO: 9275 - DNA, 19 bp, Homo sapiens
  siRNA target sequence for PHTF1 (NM_006608.1,178-196).
cttgattgacgttgactta

SEQ ID NO: 9276 - DNA, 19 bp, Homo sapiens
  siRNA target sequence for PHTF1 (NM_006608.1,284-302).
ccattgttcagcaattggt

SEQ ID NO: 9277 - DNA, 19 bp, Homo sapiens
  siRNA target sequence for PHTF1 (NM_006608.1,362-380).
gttatagcaattgtcttat

SEQ ID NO: 9278 - DNA, 19 bp, Homo sapiens
  siRNA target sequence for PHTF1 (NM_006608.1,400-418).
gaacataagtgaagtactt

SEQ ID NO: 9279 - DNA, 19 bp, Homo sapiens
  siRNA target sequence for PHTF1 (NM_006608.1,446-464).
ggaactgtccactgtcaaa

SEQ ID NO: 9280 - DNA, 19 bp, Homo sapiens
  siRNA target sequence for PHTF1 (NM_006608.1,447-465).
gaactgtccactgtcaaat

SEQ ID NO: 9281 - DNA, 19 bp, Homo sapiens
  siRNA target sequence for PHTF1 (NM_006608.1,452-470).
gtccactgtcaaattgtgt

SEQ ID NO: 9282 - DNA, 19 bp, Homo sapiens
  siRNA target sequence for PHTF1 (NM_006608.1,467-485).
gtgtctactcagataacaa

SEQ ID NO: 9283 - DNA, 19 bp, Homo sapiens
  siRNA target sequence for PHTF1 (NM_006608.1,469-487).
gtctactcagataacaaga

SEQ ID NO: 9284 - DNA, 19 bp, Homo sapiens
  siRNA target sequence for PHTF1 (NM_006608.1,554-572).
cgagaaaatggaaataact

SEQ ID NO: 9285 - DNA, 19 bp, Homo sapiens
  siRNA target sequence for PHTF1 (NM_006608.1,563-581).
ggaaataactcctctgata

SEQ ID NO: 9286 - DNA, 19 bp, Homo sapiens
  siRNA target sequence for PHTF1 (NM_006608.1,590-608).
ggaatagaaactttggaat

SEQ ID NO: 9287 - DNA, 19 bp, Homo sapiens
  siRNA target sequence for PHTF1 (NM_006608.1,604-622).
ggaatctgtacccattatt

SEQ ID NO: 9288 - DNA, 19 bp, Homo sapiens
  siRNA target sequence for PHTF1 (NM_006608.1,614-632).
cccattattggtggttttt

SEQ ID NO: 9289 - DNA, 19 bp, Homo sapiens
  siRNA target sequence for PHTF1 (NM_006608.1,626-644).
ggtttttgggagactatct

SEQ ID NO: 9290 - DNA, 19 bp, Homo sapiens
  siRNA target sequence for PHTF1 (NM_006608.1,648-666).
gcaacaggattaaaagagt

SEQ ID NO: 9291 - DNA, 19 bp, Homo sapiens
  siRNA target sequence for PHTF1 (NM_006608.1,654-672).
ggattaaaagagtaaaatt

SEQ ID NO: 9292 - DNA, 19 bp, Homo sapiens
  siRNA target sequence for PHTF1 (NM_006608.1,687-705).
ggactgaaactgacaatga

SEQ ID NO: 9293 - DNA, 19 bp, Homo sapiens
  siRNA target sequence for PHTF1 (NM_006608.1,708-726).
caagttgtgtccatcctat

SEQ ID NO: 9294 - DNA, 19 bp, Homo sapiens
  siRNA target sequence for PHTF1 (NM_006608.1,714-732).
gtgtccatcctatcattaa

SEQ ID NO: 9295 - DNA, 19 bp, Homo sapiens
  siRNA target sequence for PHTF1 (NM_006608.1,716-734).
gtccatcctatcattaaga

SEQ ID NO: 9296 - DNA, 19 bp, Homo sapiens
  siRNA target sequence for PHTF1 (NM_006608.1,727-745).
cattaagaggagacaatgt

SEQ ID NO: 9297 - DNA, 19 bp, Homo sapiens
  siRNA target sequence for PHTF1 (NM_006608.1,740-758).
caatgtcgaccagagatta

SEQ ID NO: 9298 - DNA, 19 bp, Homo sapiens
  siRNA target sequence for PHTF1 (NM_006608.1,744-762).
gtcgaccagagattagaat

SEQ ID NO: 9299 - DNA, 19 bp, Homo sapiens
  siRNA target sequence for PHTF1 (NM_006608.1,746-764).
cgaccagagattagaatgt

SEQ ID NO: 9300 - DNA, 19 bp, Homo sapiens
  siRNA target sequence for PHTF1 (NM_006608.1,878-896).
gcacggacacagatgatat

SEQ ID NO: 9301 - DNA, 19 bp, Homo sapiens
  siRNA target sequence for PHTF1 (NM_006608.1,881-899).
cggacacagatgatattat

SEQ ID NO: 9302 - DNA, 19 bp, Homo sapiens
  siRNA target sequence for PHTF1 (NM_006608.1,920-938).
gcctcaagtgacaatggtt

SEQ ID NO: 9303 - DNA, 19 bp, Homo sapiens
  siRNA target sequence for PHTF1 (NM_006608.1,989-1007).
gtaaagaaaaccactacaa

SEQ ID NO: 9304 - DNA, 19 bp, Homo sapiens
  siRNA target sequence for PHTF1 (NM_006608.1,1114-1132).
cctcaacatgtcaagaaga

SEQ ID NO: 9305 - DNA, 19 bp, Homo sapiens
  siRNA target sequence for PHTF1 (NM_006608.1,1340-1358).
gatcgagttagtgcaataa

SEQ ID NO: 9306 - DNA, 19 bp, Homo sapiens
  siRNA target sequence for PHTF1 (NM_006608.1,1343-1361).
cgagttagtgcaataatct

SEQ ID NO: 9307 - DNA, 19 bp, Homo sapiens
  siRNA target sequence for PHTF1 (NM_006608.1,1393-1411).
gtctgtgttggaaataagt

SEQ ID NO: 9308 - DNA, 19 bp, Homo sapiens
  siRNA target sequence for PHTF1 (NM_006608.1,1403-1421).
gaaataagtggcatcatca

SEQ ID NO: 9309 - DNA, 19 bp, Homo sapiens
  siRNA target sequence for PHTF1 (NM_006608.1,1445-1463).
caaggagtaggttatcaga

SEQ ID NO: 9310 - DNA, 19 bp, Homo sapiens
  siRNA target sequence for PHTF1 (NM_006608.1,1480-1498).
cactattggattagcattt

SEQ ID NO: 9311 - DNA, 19 bp, Homo sapiens
  siRNA target sequence for PHTF1 (NM_006608.1,1488-1506).
gattagcattttttccatt

SEQ ID NO: 9312 - DNA, 19 bp, Homo sapiens
  siRNA target sequence for PHTF1 (NM_006608.1,1538-1556).
gaccaactaaagtccattt

SEQ ID NO: 9313 - DNA, 19 bp, Homo sapiens
  siRNA target sequence for PHTF1 (NM_006608.1,1592-1610).
ccacctgttacacctatta

SEQ ID NO: 9314 - DNA, 19 bp, Homo sapiens
  siRNA target sequence for PHTF1 (NM_006608.1,1598-1616).
gttacacctattattgttt

SEQ ID NO: 9315 - DNA, 19 bp, Homo sapiens
  siRNA target sequence for PHTF1 (NM_006608.1,1723-1741).
cttcagccatattacttct

SEQ ID NO: 9316 - DNA, 19 bp, Homo sapiens
  siRNA target sequence for PHTF1 (NM_006608.1,1789-1807).
ggtggagaatattaaaata

SEQ ID NO: 9317 - DNA, 19 bp, Homo sapiens
  siRNA target sequence for PHTF1 (NM_006608.1,1810-1828).
gttatcactgcgttcctat

SEQ ID NO: 9318 - DNA, 19 bp, Homo sapiens
  siRNA target sequence for PHTF1 (NM_006608.1,1815-1833).
cactgcgttcctatctaaa

SEQ ID NO: 9319 - DNA, 19 bp, Homo sapiens
  siRNA target sequence for PHTF1 (NM_006608.1,1819-1837).
gcgttcctatctaaagaga

SEQ ID NO: 9320 - DNA, 19 bp, Homo sapiens
  siRNA target sequence for PHTF1 (NM_006608.1,1882-1900).
cctactgacactttcgatt

SEQ ID NO: 9321 - DNA, 19 bp, Homo sapiens
  siRNA target sequence for PHTF1 (NM_006608.1,1890-1908).
cactttcgattgctttcat

SEQ ID NO: 9322 - DNA, 19 bp, Homo sapiens
  siRNA target sequence for PHTF1 (NM_006608.1,1892-1910).
ctttcgattgctttcattt

SEQ ID NO: 9323 - DNA, 19 bp, Homo sapiens
  siRNA target sequence for PHTF1 (NM_006608.1,1956-1974).
cttataactgggagttttt

SEQ ID NO: 9324 - DNA, 19 bp, Homo sapiens
  siRNA target sequence for PHTF1 (NM_006608.1,1978-1996).
ctgggaaacagctttacta

SEQ ID NO: 9325 - DNA, 19 bp, Homo sapiens
  siRNA target sequence for PHTF1 (NM_006608.1,2021-2039).
ctggggtctgaaaccaata

SEQ ID NO: 9326 - DNA, 19 bp, Homo sapiens
  siRNA target sequence for PHTF1 (NM_006608.1,2024-2042).
gggtctgaaaccaataaga

SEQ ID NO: 9327 - DNA, 19 bp, Homo sapiens
  siRNA target sequence for PHTF1 (NM_006608.1,2049-2067).
gcaatgtttcaatattact

SEQ ID NO: 9328 - DNA, 19 bp, Homo sapiens
  siRNA target sequence for PHTF1 (NM_006608.1,2120-2138).
gaacagcttactctagtaa

SEQ ID NO: 9329 - DNA, 19 bp, Homo sapiens
  siRNA target sequence for PHTF1 (NM_006608.1,2157-2175).
ccaccaagttgttgaaaga

SEQ ID NO: 9330 - DNA, 19 bp, Homo sapiens
  siRNA target sequence for PHTF1 (NM_006608.1,2182-2200).
cacaccatttagactctat

SEQ ID NO: 9331 - DNA, 19 bp, Homo sapiens
  siRNA target sequence for PHTF1 (NM_006608.1,2193-2211).
gactctatggactgacaat

SEQ ID NO: 9332 - DNA, 19 bp, Homo sapiens
  siRNA target sequence for PHTF1 (NM_006608.1,2208-2226).
caatgaatcccttaatcta

SEQ ID NO: 9333 - DNA, 19 bp, Homo sapiens
  siRNA target sequence for PHTF1 (NM_006608.1,2227-2245).
caatatcacaagagtagtt

SEQ ID NO: 9334 - DNA, 19 bp, Homo sapiens
  siRNA target sequence for PHTF1 (NM_006608.1,2253-2271).
ctgctgtctcaggtgttat

SEQ ID NO: 9335 - DNA, 19 bp, Homo sapiens
  siRNA target sequence for PHTF1 (NM_006608.1,2255-2273).
gctgtctcaggtgttataa

SEQ ID NO: 9336 - DNA, 19 bp, Homo sapiens
  siRNA target sequence for PHTF1 (NM_006608.1,2260-2278).
ctcaggtgttataagtgat

SEQ ID NO: 9337 - DNA, 19 bp, Homo sapiens
  siRNA target sequence for PHTF1 (NM_006608.1,2265-2283).
gtgttataagtgatcttct

SEQ ID NO: 9338 - DNA, 19 bp, Homo sapiens
  siRNA target sequence for PHTF1 (NM_006608.1,2274-2292).
gtgatcttctaggatttaa

SEQ ID NO: 9339 - DNA, 19 bp, Homo sapiens
  siRNA target sequence for PHTF1 (NM_006608.1,2276-2294).
gatcttctaggatttaata

SEQ ID NO: 9340 - DNA, 19 bp, Homo sapiens
  siRNA target sequence for PHTF1 (NM_006608.1,2300-2318).
ctgtggaaaattaaatcat

SEQ ID NO: 9341 - DNA, 19 bp, Homo sapiens
  siRNA target sequence for PILB (NM_012228.2,245-263).
gttctacgtcacaagagaa

SEQ ID NO: 9342 - DNA, 19 bp, Homo sapiens
  siRNA target sequence for PILB (NM_012228.2,288-306).
gggatctacctgaataaca

SEQ ID NO: 9343 - DNA, 19 bp, Homo sapiens
  siRNA target sequence for PILB (NM_012228.2,289-307).
ggatctacctgaataacaa

SEQ ID NO: 9344 - DNA, 19 bp, Homo sapiens
  siRNA target sequence for PILB (NM_012228.2,339-357).
gacagtccactcttcagtt

SEQ ID NO: 9345 - DNA, 19 bp, Homo sapiens
  siRNA target sequence for PILB (NM_012228.2,456-474).
ctggatacctcgttaggat

SEQ ID NO: 9346 - DNA, 19 bp, Homo sapiens
  siRNA target sequence for PITX1 (NM_002653.3,691-709).
caacgtacgcacttcacaa

SEQ ID NO: 9347 - DNA, 19 bp, Homo sapiens
  siRNA target sequence for PITX1 (NM_002653.3,1130-1148).
ccaactcgggcctcaacaa

SEQ ID NO: 9348 - DNA, 19 bp, Homo sapiens
  siRNA target sequence for PITX1 (NM_002653.3,1136-1154).
cgggcctcaacaacatcaa

SEQ ID NO: 9349 - DNA, 19 bp, Homo sapiens
  siRNA target sequence for PITX2 (NM_000325.4,884-902).
gccgaggacccgtctaaga

SEQ ID NO: 9350 - DNA, 19 bp, Homo sapiens
  siRNA target sequence for PITX2 (NM_000325.4,916-934).
gcggcagcggactcacttt

SEQ ID NO: 9351 - DNA, 19 bp, Homo sapiens
  siRNA target sequence for PITX2 (NM_000325.4,917-935).
cggcagcggactcacttta

SEQ ID NO: 9352 - DNA, 19 bp, Homo sapiens
  siRNA target sequence for PITX2 (NM_000325.4,920-938).
cagcggactcactttacca

SEQ ID NO: 9353 - DNA, 19 bp, Homo sapiens
  siRNA target sequence for PITX2 (NM_000325.4,1102-1120).
ggccgagctatgcaagaat

SEQ ID NO: 9354 - DNA, 19 bp, Homo sapiens
  siRNA target sequence for PITX2 (NM_000325.4,1456-1474).
gccgactcctccgtatgtt

SEQ ID NO: 9355 - DNA, 19 bp, Homo sapiens
  siRNA target sequence for PITX2 (NM_000325.4,1457-1475).
ccgactcctccgtatgttt

SEQ ID NO: 9356 - DNA, 19 bp, Homo sapiens
  siRNA target sequence for PITX2 (NM_000325.4,1458-1476).
cgactcctccgtatgttta

SEQ ID NO: 9357 - DNA, 19 bp, Homo sapiens
  siRNA target sequence for PITX2 (NM_153426.1,609-627).
gtcggcgtgtgtgcaatta

SEQ ID NO: 9358 - DNA, 19 bp, Homo sapiens
  siRNA target sequence for PITX2 (NM_153426.1,751-769).
catcctggcgccaatgaga

SEQ ID NO: 9359 - DNA, 19 bp, Homo sapiens
  siRNA target sequence for PITX2 (NM_153426.1,755-773).
ctggcgccaatgagaaaga

SEQ ID NO: 9360 - DNA, 19 bp, Homo sapiens
  siRNA target sequence for PITX2 (NM_153427.1,613-631).
gcgtgtgtgcaattagaga

SEQ ID NO: 9361 - DNA, 19 bp, Homo sapiens
  siRNA target sequence for PITX2 (NM_153427.1,614-632).
cgtgtgtgcaattagagaa

SEQ ID NO: 9362 - DNA, 19 bp, Homo sapiens
  siRNA target sequence for PITX2 (NM_153427.1,617-635).
gtgtgcaattagagaaaga

SEQ ID NO: 9363 - DNA, 19 bp, Homo sapiens
  siRNA target sequence for PITX3 (NM_005029.3,263-281).
gagcacagcgactcagaaa

SEQ ID NO: 9364 - DNA, 19 bp, Homo sapiens
  siRNA target sequence for PITX3 (NM_005029.3,317-335).
gacggttcgctgaaaaaga

SEQ ID NO: 9365 - DNA, 19 bp, Homo sapiens
  siRNA target sequence for PKNOX1 (NM_004571.3,211-229).
gtatagacagctatcaaga

SEQ ID NO: 9366 - DNA, 19 bp, Homo sapiens
  siRNA target sequence for PKNOX1 (NM_004571.3,232-250).
ggcaacagatgcaagtagt

SEQ ID NO: 9367 - DNA, 19 bp, Homo sapiens
  siRNA target sequence for PKNOX1 (NM_004571.3,242-260).
gcaagtagtaacagagtta

SEQ ID NO: 9368 - DNA, 19 bp, Homo sapiens
  siRNA target sequence for PKNOX1 (NM_004571.3,243-261).
caagtagtaacagagttaa

SEQ ID NO: 9369 - DNA, 19 bp, Homo sapiens
  siRNA target sequence for PKNOX1 (NM_004571.3,246-264).
gtagtaacagagttaaaga

SEQ ID NO: 9370 - DNA, 19 bp, Homo sapiens
  siRNA target sequence for PKNOX1 (NM_004571.3,367-385).
ggcatccactatttccatt

SEQ ID NO: 9371 - DNA, 19 bp, Homo sapiens
  siRNA target sequence for PKNOX1 (NM_004571.3,368-386).
gcatccactatttccatta

SEQ ID NO: 9372 - DNA, 19 bp, Homo sapiens
  siRNA target sequence for PKNOX1 (NM_004571.3,369-387).
catccactatttccattat

SEQ ID NO: 9373 - DNA, 19 bp, Homo sapiens
  siRNA target sequence for PKNOX1 (NM_004571.3,439-457).
caacttctgccagttttga

SEQ ID NO: 9374 - DNA, 19 bp, Homo sapiens
  siRNA target sequence for PKNOX1 (NM_004571.3,445-463).
ctgccagttttgatgtaga

SEQ ID NO: 9375 - DNA, 19 bp, Homo sapiens
  siRNA target sequence for PKNOX1 (NM_004571.3,462-480).
gacatcgaaaattttgtaa

SEQ ID NO: 9376 - DNA, 19 bp, Homo sapiens
  siRNA target sequence for PKNOX1 (NM_004571.3,464-482).
catcgaaaattttgtaaga

SEQ ID NO: 9377 - DNA, 19 bp, Homo sapiens
  siRNA target sequence for PKNOX1 (NM_004571.3,489-507).
gagaaggaagggaaacctt

SEQ ID NO: 9378 - DNA, 19 bp, Homo sapiens
  siRNA target sequence for PKNOX1 (NM_004571.3,554-572).
ccaggttttgcgcattcat

SEQ ID NO: 9379 - DNA, 19 bp, Homo sapiens
  siRNA target sequence for PKNOX1 (NM_004571.3,557-575).
ggttttgcgcattcatctt

SEQ ID NO: 9380 - DNA, 19 bp, Homo sapiens
  siRNA target sequence for PKNOX1 (NM_004571.3,576-594).
cttgagctggaaaaggtta

SEQ ID NO: 9381 - DNA, 19 bp, Homo sapiens
  siRNA target sequence for PKNOX1 (NM_004571.3,581-599).
gctggaaaaggttaacgaa

SEQ ID NO: 9382 - DNA, 19 bp, Homo sapiens
  siRNA target sequence for PKNOX1 (NM_004571.3,626-644).
cattgcttgtctgaaaaca

SEQ ID NO: 9383 - DNA, 19 bp, Homo sapiens
  siRNA target sequence for PKNOX1 (NM_004571.3,773-791).
gctgcagcagggaaacgta

SEQ ID NO: 9384 - DNA, 19 bp, Homo sapiens
  siRNA target sequence for PKNOX1 (NM_004571.3,877-895).
cgcctgggacaattaggat

SEQ ID NO: 9385 - DNA, 19 bp, Homo sapiens
  siRNA target sequence for PKNOX1 (NM_004571.3,906-924).
cagcttcagttacagttaa

SEQ ID NO: 9386 - DNA, 19 bp, Homo sapiens
  siRNA target sequence for PKNOX1 (NM_004571.3,937-955).
gcatcttgcatcaagatga

SEQ ID NO: 9387 - DNA, 19 bp, Homo sapiens
  siRNA target sequence for PKNOX1 (NM_004571.3,954-972).
gatggttcatctaagaaca

SEQ ID NO: 9388 - DNA, 19 bp, Homo sapiens
  siRNA target sequence for PKNOX1 (NM_004571.3,977-995).
gggcgtcctgccaaagcat

SEQ ID NO: 9389 - DNA, 19 bp, Homo sapiens
  siRNA target sequence for PKNOX1 (NM_004571.3,1070-1088).
gattgctgctcagacaaat

SEQ ID NO: 9390 - DNA, 19 bp, Homo sapiens
  siRNA target sequence for PKNOX1 (NM_004571.3,1093-1111).
cactactccaagtcaacaa

SEQ ID NO: 9391 - DNA, 19 bp, Homo sapiens
  siRNA target sequence for PKNOX1 (NM_004571.3,1135-1153).
gaattcttcagccaatgtt

SEQ ID NO: 9392 - DNA, 19 bp, Homo sapiens
  siRNA target sequence for PKNOX1 (NM_004571.3,1140-1158).
cttcagccaatgttggatt

SEQ ID NO: 9393 - DNA, 19 bp, Homo sapiens
  siRNA target sequence for PKNOX1 (NM_004571.3,1143-1161).
cagccaatgttggattcaa

SEQ ID NO: 9394 - DNA, 19 bp, Homo sapiens
  siRNA target sequence for PKNOX1 (NM_004571.3,1217-1235).
gaggttttggcctgattct

SEQ ID NO: 9395 - DNA, 19 bp, Homo sapiens
  siRNA target sequence for PKNOX1 (NM_004571.3,1219-1237).
ggttttggcctgattctat

SEQ ID NO: 9396 - DNA, 19 bp, Homo sapiens
  siRNA target sequence for PKNOX1 (NM_004571.3,1306-1324).
ccacgcccgtgaacatgaa

SEQ ID NO: 9397 - DNA, 19 bp, Homo sapiens
  siRNA target sequence for PKNOX2 (NM_022062.1,198-216).
ctgacaagcgagctgtata

SEQ ID NO: 9398 - DNA, 19 bp, Homo sapiens
  siRNA target sequence for PKNOX2 (NM_022062.1,200-218).
gacaagcgagctgtataca

SEQ ID NO: 9399 - DNA, 19 bp, Homo sapiens
  siRNA target sequence for PKNOX2 (NM_022062.1,239-257).
ctgacgctgctgtttgaga

SEQ ID NO: 9400 - DNA, 19 bp, Homo sapiens
  siRNA target sequence for PKNOX2 (NM_022062.1,511-529).
caacctgctcaggaatgat

SEQ ID NO: 9401 - DNA, 19 bp, Homo sapiens
  siRNA target sequence for PKNOX2 (NM_022062.1,668-686).
ggcaacatcgccatgacaa

SEQ ID NO: 9402 - DNA, 19 bp, Homo sapiens
  siRNA target sequence for PKNOX2 (NM_022062.1,687-705).
ccgtcaactcacaagttgt

SEQ ID NO: 9403 - DNA, 19 bp, Homo sapiens
  siRNA target sequence for PKNOX2 (NM_022062.1,725-743).
caaccggttaccatggtaa

SEQ ID NO: 9404 - DNA, 19 bp, Homo sapiens
  siRNA target sequence for PKNOX2 (NM_022062.1,799-817).
gaacacacaggttaacctt

SEQ ID NO: 9405 - DNA, 19 bp, Homo sapiens
  siRNA target sequence for PKNOX2 (NM_022062.1,878-896).
cccaagcatgccaccaata

SEQ ID NO: 9406 - DNA, 19 bp, Homo sapiens
  siRNA target sequence for PLAG1 (NM_002655.1,492-510).
cattcctggtgatttgtca

SEQ ID NO: 9407 - DNA, 19 bp, Homo sapiens
  siRNA target sequence for PLAG1 (NM_002655.1,499-517).
ggtgatttgtcagaagtaa

SEQ ID NO: 9408 - DNA, 19 bp, Homo sapiens
  siRNA target sequence for PLAG1 (NM_002655.1,553-571).
cgtggtgaaaccaaaccaa

SEQ ID NO: 9409 - DNA, 19 bp, Homo sapiens
  siRNA target sequence for PLAG1 (NM_002655.1,660-678).
gccctacaagtgcatacaa

SEQ ID NO: 9410 - DNA, 19 bp, Homo sapiens
  siRNA target sequence for PLAG1 (NM_002655.1,662-680).
cctacaagtgcatacaaca

SEQ ID NO: 9411 - DNA, 19 bp, Homo sapiens
  siRNA target sequence for PLAG1 (NM_002655.1,663-681).
ctacaagtgcatacaacaa

SEQ ID NO: 9412 - DNA, 19 bp, Homo sapiens
  siRNA target sequence for PLAG1 (NM_002655.1,753-771).
ccacaagtgtaattattgt

SEQ ID NO: 9413 - DNA, 19 bp, Homo sapiens
  siRNA target sequence for PLAG1 (NM_002655.1,780-798).
gtttcaccggaaagatcat

SEQ ID NO: 9414 - DNA, 19 bp, Homo sapiens
  siRNA target sequence for PLAG1 (NM_002655.1,820-838).
cacgaccctaacaaagaga

SEQ ID NO: 9415 - DNA, 19 bp, Homo sapiens
  siRNA target sequence for PLAG1 (NM_002655.1,826-844).
cctaacaaagagacgttta

SEQ ID NO: 9416 - DNA, 19 bp, Homo sapiens
  siRNA target sequence for PLAG1 (NM_002655.1,870-888).
caataccaagcttggattt

SEQ ID NO: 9417 - DNA, 19 bp, Homo sapiens
  siRNA target sequence for PLAG1 (NM_002655.1,876-894).
caagcttggatttaaacgt

SEQ ID NO: 9418 - DNA, 19 bp, Homo sapiens
  siRNA target sequence for PLAG1 (NM_002655.1,903-921).
cttgcatgccgcaacaagt

SEQ ID NO: 9419 - DNA, 19 bp, Homo sapiens
  siRNA target sequence for PLAG1 (NM_002655.1,928-946).
ctcacctgtaaggtatgtt

SEQ ID NO: 9420 - DNA, 19 bp, Homo sapiens
  siRNA target sequence for PLAG1 (NM_002655.1,933-951).
ctgtaaggtatgtttgcaa

SEQ ID NO: 9421 - DNA, 19 bp, Homo sapiens
  siRNA target sequence for PLAG1 (NM_002655.1,939-957).
ggtatgtttgcaaactttt

SEQ ID NO: 9422 - DNA, 19 bp, Homo sapiens
  siRNA target sequence for PLAG1 (NM_002655.1,1005-1023).
gtcgtctggtggggttaaa

SEQ ID NO: 9423 - DNA, 19 bp, Homo sapiens
  siRNA target sequence for PLAG1 (NM_002655.1,1159-1177).
cacctgactcgacatatga

SEQ ID NO: 9424 - DNA, 19 bp, Homo sapiens
  siRNA target sequence for PLAG1 (NM_002655.1,1214-1232).
cagaaccagtggatttcct

SEQ ID NO: 9425 - DNA, 19 bp, Homo sapiens
  siRNA target sequence for PLAG1 (NM_002655.1,1311-1329).
gttatcaaagccattcaca

SEQ ID NO: 9426 - DNA, 19 bp, Homo sapiens
  siRNA target sequence for PLAG1 (NM_002655.1,1339-1357).
cagttaaacctctacaaca

SEQ ID NO: 9427 - DNA, 19 bp, Homo sapiens
  siRNA target sequence for PLAG1 (NM_002655.1,1382-1400).
cgggatctgcccaccaaat

SEQ ID NO: 9428 - DNA, 19 bp, Homo sapiens
  siRNA target sequence for PLAG1 (NM_002655.1,1384-1402).
ggatctgcccaccaaatga

SEQ ID NO: 9429 - DNA, 19 bp, Homo sapiens
  siRNA target sequence for PLAG1 (NM_002655.1,1393-1411).
caccaaatgatcacaactt

SEQ ID NO: 9430 - DNA, 19 bp, Homo sapiens
  siRNA target sequence for PLAG1 (NM_002655.1,1421-1439).
gaatgacatgcccaataga

SEQ ID NO: 9431 - DNA, 19 bp, Homo sapiens
  siRNA target sequence for PLAG1 (NM_002655.1,1427-1445).
catgcccaatagatatgga

SEQ ID NO: 9432 - DNA, 19 bp, Homo sapiens
  siRNA target sequence for PLAG1 (NM_002655.1,1485-1503).
gttcagttctacctcatat

SEQ ID NO: 9433 - DNA, 19 bp, Homo sapiens
  siRNA target sequence for PLAG1 (NM_002655.1,1488-1506).
cagttctacctcatatgca

SEQ ID NO: 9434 - DNA, 19 bp, Homo sapiens
  siRNA target sequence for PLAG1 (NM_002655.1,1490-1508).
gttctacctcatatgcaat

SEQ ID NO: 9435 - DNA, 19 bp, Homo sapiens
  siRNA target sequence for PLAG1 (NM_002655.1,1573-1591).
ggtggcgtgccctcttcat

SEQ ID NO: 9436 - DNA, 19 bp, Homo sapiens
  siRNA target sequence for PLAG1 (NM_002655.1,1582-1600).
ccctcttcatcccaagatt

SEQ ID NO: 9437 - DNA, 19 bp, Homo sapiens
  siRNA target sequence for PLAG1 (NM_002655.1,1641-1659).
gattgggtccctagatgat

SEQ ID NO: 9438 - DNA, 19 bp, Homo sapiens
  siRNA target sequence for PLAG1 (NM_002655.1,1669-1687).
gacctctccctatccaaaa

SEQ ID NO: 9439 - DNA, 19 bp, Homo sapiens
  siRNA target sequence for PLAG1 (NM_002655.1,1672-1690).
ctctccctatccaaaagct

SEQ ID NO: 9440 - DNA, 19 bp, Homo sapiens
  siRNA target sequence for PLAG1 (NM_002655.1,1716-1734).
cacaccagcattggatttt

SEQ ID NO: 9441 - DNA, 19 bp, Homo sapiens
  siRNA target sequence for PLAG1 (NM_002655.1,1728-1746).
ggatttttctcagttgttt

SEQ ID NO: 9442 - DNA, 19 bp, Homo sapiens
  siRNA target sequence for PLAG1 (NM_002655.1,1772-1790).
cctataatcctctatcagt

SEQ ID NO: 9443 - DNA, 19 bp, Homo sapiens
  siRNA target sequence for PLAG1 (NM_002655.1,1870-1888).
caggatcctgcaaacacta

SEQ ID NO: 9444 - DNA, 19 bp, Homo sapiens
  siRNA target sequence for PLAG1 (NM_002655.1,1872-1890).
ggatcctgcaaacactata

SEQ ID NO: 9445 - DNA, 19 bp, Homo sapiens
  siRNA target sequence for PLAG1 (NM_002655.1,1921-1939).
gctttcaccagcagtttaa

SEQ ID NO: 9446 - DNA, 19 bp, Homo sapiens
  siRNA target sequence for PLAGL2 (NM_002657.2,231-249).
cctggattcaagatgcaaa

SEQ ID NO: 9447 - DNA, 19 bp, Homo sapiens
  siRNA target sequence for PLAGL2 (NM_002657.2,314-332).
gtgaagtgccaatgtgaaa

SEQ ID NO: 9448 - DNA, 19 bp, Homo sapiens
  siRNA target sequence for PLAGL2 (NM_002657.2,316-334).
gaagtgccaatgtgaaatt

SEQ ID NO: 9449 - DNA, 19 bp, Homo sapiens
  siRNA target sequence for PLAGL2 (NM_002657.2,337-355).
gggaacacctttctcaaat

SEQ ID NO: 9450 - DNA, 19 bp, Homo sapiens
  siRNA target sequence for PLAGL2 (NM_002657.2,389-407).
ccagagcagagaccatata

SEQ ID NO: 9451 - DNA, 19 bp, Homo sapiens
  siRNA target sequence for PLAGL2 (NM_002657.2,392-410).
gagcagagaccatatagct

SEQ ID NO: 9452 - DNA, 19 bp, Homo sapiens
  siRNA target sequence for PLAGL2 (NM_002657.2,491-509).
ccccaccagtgtatgtact

SEQ ID NO: 9453 - DNA, 19 bp, Homo sapiens
  siRNA target sequence for PLAGL2 (NM_002657.2,556-574).
gacccatgatcctaacaaa

SEQ ID NO: 9454 - DNA, 19 bp, Homo sapiens
  siRNA target sequence for PLAGL2 (NM_002657.2,558-576).
cccatgatcctaacaaaga

SEQ ID NO: 9455 - DNA, 19 bp, Homo sapiens
  siRNA target sequence for PLAGL2 (NM_002657.2,595-613).
gtgcggtaagaattacaat

SEQ ID NO: 9456 - DNA, 19 bp, Homo sapiens
  siRNA target sequence for PLAGL2 (NM_002657.2,599-617).
ggtaagaattacaatacga

SEQ ID NO: 9457 - DNA, 19 bp, Homo sapiens
  siRNA target sequence for PLAGL2 (NM_002657.2,600-618).
gtaagaattacaatacgaa

SEQ ID NO: 9458 - DNA, 19 bp, Homo sapiens
  siRNA target sequence for PLAGL2 (NM_002657.2,1078-1096).
gttgcccatgggcatgtat

SEQ ID NO: 9459 - DNA, 19 bp, Homo sapiens
  siRNA target sequence for PLAGL2 (NM_002657.2,1183-1201).
ggaatcctcacctatctct

SEQ ID NO: 9460 - DNA, 19 bp, Homo sapiens
  siRNA target sequence for PLAGL2 (NM_002657.2,1232-1250).
cttggatctacctcatact

SEQ ID NO: 9461 - DNA, 19 bp, Homo sapiens
  siRNA target sequence for PLAGL2 (NM_002657.2,1245-1263).
catacttgcccgacaaatt

SEQ ID NO: 9462 - DNA, 19 bp, Homo sapiens
  siRNA target sequence for PLU-1 (NM_006618.2,774-792).
ctaccagacttaacttctt

SEQ ID NO: 9463 - DNA, 19 bp, Homo sapiens
  siRNA target sequence for PLU-1 (NM_006618.2,793-811).
cagggcaggaactctgata

SEQ ID NO: 9464 - DNA, 19 bp, Homo sapiens
  siRNA target sequence for PLU-1 (NM_006618.2,801-819).
gaactctgatacatagtaa

SEQ ID NO: 9465 - DNA, 19 bp, Homo sapiens
  siRNA target sequence for PLU-1 (NM_006618.2,840-858).
caactgaaaccctaaggat

SEQ ID NO: 9466 - DNA, 19 bp, Homo sapiens
  siRNA target sequence for PLU-1 (NM_006618.2,947-965).
gggtgggactctttttcct

SEQ ID NO: 9467 - DNA, 19 bp, Homo sapiens
  siRNA target sequence for PLU-1 (NM_006618.2,1011-1029).
cgtcgtcggaggctgaaaa

SEQ ID NO: 9468 - DNA, 19 bp, Homo sapiens
  siRNA target sequence for PLU-1 (NM_006618.2,1296-1314).
cggaccccttcgctttcat

SEQ ID NO: 9469 - DNA, 19 bp, Homo sapiens
  siRNA target sequence for PLU-1 (NM_006618.2,1460-1478).
cgtgtaaaattgaatttct

SEQ ID NO: 9470 - DNA, 19 bp, Homo sapiens
  siRNA target sequence for PLU-1 (NM_006618.2,1542-1560).
ggaagatcttggacttatt

SEQ ID NO: 9471 - DNA, 19 bp, Homo sapiens
  siRNA target sequence for PLU-1 (NM_006618.2,1552-1570).
ggacttatttcagcttaat

SEQ ID NO: 9472 - DNA, 19 bp, Homo sapiens
  siRNA target sequence for PLU-1 (NM_006618.2,1553-1571).
gacttatttcagcttaata

SEQ ID NO: 9473 - DNA, 19 bp, Homo sapiens
  siRNA target sequence for PLU-1 (NM_006618.2,1664-1682).
gcagtgggctcacatatca

SEQ ID NO: 9474 - DNA, 19 bp, Homo sapiens
  siRNA target sequence for PLU-1 (NM_006618.2,1686-1704).
ggcattatgaacgaattct

SEQ ID NO: 9475 - DNA, 19 bp, Homo sapiens
  siRNA target sequence for PLU-1 (NM_006618.2,1703-1721).
ctcaacccctacaacttat

SEQ ID NO: 9476 - DNA, 19 bp, Homo sapiens
  siRNA target sequence for PLU-1 (NM_006618.2,1846-1864).
cccagcccgacgagcaaaa

SEQ ID NO: 9477 - DNA, 19 bp, Homo sapiens
  siRNA target sequence for PLU-1 (NM_006618.2,1879-1897).
ggccatgaatattaaaata

SEQ ID NO: 9478 - DNA, 19 bp, Homo sapiens
  siRNA target sequence for PLU-1 (NM_006618.2,1948-1966).
gggttgtccaactccaaaa

SEQ ID NO: 9479 - DNA, 19 bp, Homo sapiens
  siRNA target sequence for PLU-1 (NM_006618.2,1995-2013).
gcatcaagcaagaacctat

SEQ ID NO: 9480 - DNA, 19 bp, Homo sapiens
  siRNA target sequence for PLU-1 (NM_006618.2,2053-2071).
gcccaagagtcgatctaaa

SEQ ID NO: 9481 - DNA, 19 bp, Homo sapiens
  siRNA target sequence for PLU-1 (NM_006618.2,2054-2072).
cccaagagtcgatctaaaa

SEQ ID NO: 9482 - DNA, 19 bp, Homo sapiens
  siRNA target sequence for PLU-1 (NM_006618.2,2188-2206).
cccacctctccatgatgtt

SEQ ID NO: 9483 - DNA, 19 bp, Homo sapiens
  siRNA target sequence for PLU-1 (NM_006618.2,2253-2271).
gtaagccacaagaagcatt

SEQ ID NO: 9484 - DNA, 19 bp, Homo sapiens
  siRNA target sequence for PLU-1 (NM_006618.2,2296-2314).
ctataccctccgtactttt

SEQ ID NO: 9485 - DNA, 19 bp, Homo sapiens
  siRNA target sequence for PLU-1 (NM_006618.2,2323-2341).
ggcagatgcgttcaaatct

SEQ ID NO: 9486 - DNA, 19 bp, Homo sapiens
  siRNA target sequence for PLU-1 (NM_006618.2,2327-2345).
gatgcgttcaaatctgatt

SEQ ID NO: 9487 - DNA, 19 bp, Homo sapiens
  siRNA target sequence for PLU-1 (NM_006618.2,2330-2348).
gcgttcaaatctgattact

SEQ ID NO: 9488 - DNA, 19 bp, Homo sapiens
  siRNA target sequence for PLU-1 (NM_006618.2,2331-2349).
cgttcaaatctgattactt

SEQ ID NO: 9489 - DNA, 19 bp, Homo sapiens
  siRNA target sequence for PLU-1 (NM_006618.2,2384-2402).
gttgagaaagaattttgga

SEQ ID NO: 9490 - DNA, 19 bp, Homo sapiens
  siRNA target sequence for PLU-1 (NM_006618.2,2393-2411).
gaattttggagactagtaa

SEQ ID NO: 9491 - DNA, 19 bp, Homo sapiens
  siRNA target sequence for PLU-1 (NM_006618.2,2403-2421).
gactagtaagcactattga

SEQ ID NO: 9492 - DNA, 19 bp, Homo sapiens
  siRNA target sequence for PLU-1 (NM_006618.2,2490-2508).
gagatgggaaaatcaaact

SEQ ID NO: 9493 - DNA, 19 bp, Homo sapiens
  siRNA target sequence for PLU-1 (NM_006618.2,2531-2549).
cttgatagtggctggaatt

SEQ ID NO: 9494 - DNA, 19 bp, Homo sapiens
  siRNA target sequence for PLU-1 (NM_006618.2,2672-2690).
gaccactggagctattcaa

SEQ ID NO: 9495 - DNA, 19 bp, Homo sapiens
  siRNA target sequence for PLU-1 (NM_006618.2,2674-2692).
ccactggagctattcaatt

SEQ ID NO: 9496 - DNA, 19 bp, Homo sapiens
  siRNA target sequence for PLU-1 (NM_006618.2,2675-2693).
cactggagctattcaatta

SEQ ID NO: 9497 - DNA, 19 bp, Homo sapiens
  siRNA target sequence for PLU-1 (NM_006618.2,2679-2697).
ggagctattcaattaacta

SEQ ID NO: 9498 - DNA, 19 bp, Homo sapiens
  siRNA target sequence for PLU-1 (NM_006618.2,2682-2700).
gctattcaattaactactt

SEQ ID NO: 9499 - DNA, 19 bp, Homo sapiens
  siRNA target sequence for PLU-1 (NM_006618.2,2780-2798).
gctccagaactctttgtgt

SEQ ID NO: 9500 - DNA, 19 bp, Homo sapiens
  siRNA target sequence for PLU-1 (NM_006618.2,2856-2874).
ctcatgaagtgcctgttta

SEQ ID NO: 9501 - DNA, 19 bp, Homo sapiens
  siRNA target sequence for PLU-1 (NM_006618.2,2870-2888).
gtttaccgaactaatcagt

SEQ ID NO: 9502 - DNA, 19 bp, Homo sapiens
  siRNA target sequence for PLU-1 (NM_006618.2,2891-2909).
gctggggagtttgtgatta

SEQ ID NO: 9503 - DNA, 19 bp, Homo sapiens
  siRNA target sequence for PLU-1 (NM_006618.2,3023-3041).
cgcttgcttcatcgatatt

SEQ ID NO: 9504 - DNA, 19 bp, Homo sapiens
  siRNA target sequence for PLU-1 (NM_006618.2,3025-3043).
cttgcttcatcgatattgt

SEQ ID NO: 9505 - DNA, 19 bp, Homo sapiens
  siRNA target sequence for PLU-1 (NM_006618.2,3109-3127).
ggcttcaactgttcagaaa

SEQ ID NO: 9506 - DNA, 19 bp, Homo sapiens
  siRNA target sequence for PLU-1 (NM_006618.2,3111-3129).
cttcaactgttcagaaaga

SEQ ID NO: 9507 - DNA, 19 bp, Homo sapiens
  siRNA target sequence for PLU-1 (NM_006618.2,3114-3132).
caactgttcagaaagacat

SEQ ID NO: 9508 - DNA, 19 bp, Homo sapiens
  siRNA target sequence for PLU-1 (NM_006618.2,3165-3183).
gagaaactgtccgtaaatt

SEQ ID NO: 9509 - DNA, 19 bp, Homo sapiens
  siRNA target sequence for PLU-1 (NM_006618.2,3177-3195).
gtaaattgggagtgattga

SEQ ID NO: 9510 - DNA, 19 bp, Homo sapiens
  siRNA target sequence for PLU-1 (NM_006618.2,3198-3216).
cggaaagaatggattttga

SEQ ID NO: 9511 - DNA, 19 bp, Homo sapiens
  siRNA target sequence for PLU-1 (NM_006618.2,3233-3251).
gaacgtcagtgtgtaaaat

SEQ ID NO: 9512 - DNA, 19 bp, Homo sapiens
  siRNA target sequence for PLU-1 (NM_006618.2,3372-3390).
ggtacacgctggatgatct

SEQ ID NO: 9513 - DNA, 19 bp, Homo sapiens
  siRNA target sequence for PLU-1 (NM_006618.2,3386-3404).
gatctctaccctatgatga

SEQ ID NO: 9514 - DNA, 19 bp, Homo sapiens
  siRNA target sequence for PLU-1 (NM_006618.2,3422-3440).
gcagaatcttacaacgaat

SEQ ID NO: 9515 - DNA, 19 bp, Homo sapiens
  siRNA target sequence for PLU-1 (NM_006618.2,3433-3451).
caacgaatgggccttgaat

SEQ ID NO: 9516 - DNA, 19 bp, Homo sapiens
  siRNA target sequence for PLU-1 (NM_006618.2,3461-3479).
gctttggaggcaaagatca

SEQ ID NO: 9517 - DNA, 19 bp, Homo sapiens
  siRNA target sequence for PLU-1 (NM_006618.2,3497-3515).
gtcagcttcaaggctttaa

SEQ ID NO: 9518 - DNA, 19 bp, Homo sapiens
  siRNA target sequence for PLU-1 (NM_006618.2,3499-3517).
cagcttcaaggctttaatt

SEQ ID NO: 9519 - DNA, 19 bp, Homo sapiens
  siRNA target sequence for PLU-1 (NM_006618.2,3605-3623).
gttgcgcagcagttgctta

SEQ ID NO: 9520 - DNA, 19 bp, Homo sapiens
  siRNA target sequence for PLU-1 (NM_006618.2,3657-3675).
gagggaaatcccaaaatca

SEQ ID NO: 9521 - DNA, 19 bp, Homo sapiens
  siRNA target sequence for PLU-1 (NM_006618.2,3659-3677).
gggaaatcccaaaatcagt

SEQ ID NO: 9522 - DNA, 19 bp, Homo sapiens
  siRNA target sequence for PLU-1 (NM_006618.2,3691-3709).
gctccggcagtttgtaaca

SEQ ID NO: 9523 - DNA, 19 bp, Homo sapiens
  siRNA target sequence for PLU-1 (NM_006618.2,3736-3754).
cagtcagacaccattacta

SEQ ID NO: 9524 - DNA, 19 bp, Homo sapiens
  siRNA target sequence for PLU-1 (NM_006618.2,3742-3760).
gacaccattactaaaggat

SEQ ID NO: 9525 - DNA, 19 bp, Homo sapiens
  siRNA target sequence for PLU-1 (NM_006618.2,3763-3781).
cttgaatcgtgtagaagat

SEQ ID NO: 9526 - DNA, 19 bp, Homo sapiens
  siRNA target sequence for PLU-1 (NM_006618.2,3895-3913).
gatgcgtatccgtttggaa

SEQ ID NO: 9527 - DNA, 19 bp, Homo sapiens
  siRNA target sequence for PLU-1 (NM_006618.2,3958-3976).
cagctcccttactttagat

SEQ ID NO: 9528 - DNA, 19 bp, Homo sapiens
  siRNA target sequence for PLU-1 (NM_006618.2,3963-3981).
cccttactttagatgatat

SEQ ID NO: 9529 - DNA, 19 bp, Homo sapiens
  siRNA target sequence for PLU-1 (NM_006618.2,3965-3983).
cttactttagatgatatga

SEQ ID NO: 9530 - DNA, 19 bp, Homo sapiens
  siRNA target sequence for PLU-1 (NM_006618.2,4108-4126).
ggccaggccacgacattca

SEQ ID NO: 9531 - DNA, 19 bp, Homo sapiens
  siRNA target sequence for PLU-1 (NM_006618.2,4109-4127).
gccaggccacgacattcat

SEQ ID NO: 9532 - DNA, 19 bp, Homo sapiens
  siRNA target sequence for PLU-1 (NM_006618.2,4113-4131).
ggccacgacattcattgaa

SEQ ID NO: 9533 - DNA, 19 bp, Homo sapiens
  siRNA target sequence for PLU-1 (NM_006618.2,4114-4132).
gccacgacattcattgaat

SEQ ID NO: 9534 - DNA, 19 bp, Homo sapiens
  siRNA target sequence for PLU-1 (NM_006618.2,4115-4133).
ccacgacattcattgaata

SEQ ID NO: 9535 - DNA, 19 bp, Homo sapiens
  siRNA target sequence for PLU-1 (NM_006618.2,4134-4152).
gccttgctacggcagtaaa

SEQ ID NO: 9536 - DNA, 19 bp, Homo sapiens
  siRNA target sequence for PLU-1 (NM_006618.2,4139-4157).
gctacggcagtaaaggaaa

SEQ ID NO: 9537 - DNA, 19 bp, Homo sapiens
  siRNA target sequence for PLU-1 (NM_006618.2,4140-4158).
ctacggcagtaaaggaaat

SEQ ID NO: 9538 - DNA, 19 bp, Homo sapiens
  siRNA target sequence for PLU-1 (NM_006618.2,4143-4161).
cggcagtaaaggaaatcga

SEQ ID NO: 9539 - DNA, 19 bp, Homo sapiens
  siRNA target sequence for PLU-1 (NM_006618.2,4159-4177).
cgaagagatccctgcatat

SEQ ID NO: 9540 - DNA, 19 bp, Homo sapiens
  siRNA target sequence for PLU-1 (NM_006618.2,4260-4278).
gacgtgtgccagtgttaga

SEQ ID NO: 9541 - DNA, 19 bp, Homo sapiens
  siRNA target sequence for PLU-1 (NM_006618.2,4262-4280).
cgtgtgccagtgttagaca

SEQ ID NO: 9542 - DNA, 19 bp, Homo sapiens
  siRNA target sequence for PLU-1 (NM_006618.2,4273-4291).
gttagacacactcatagaa

SEQ ID NO: 9543 - DNA, 19 bp, Homo sapiens
  siRNA target sequence for PLU-1 (NM_006618.2,4383-4401).
gtgctgttaatacattctt

SEQ ID NO: 9544 - DNA, 19 bp, Homo sapiens
  siRNA target sequence for PLU-1 (NM_006618.2,4435-4453).
gctgtgtcctcgatgtgat

SEQ ID NO: 9545 - DNA, 19 bp, Homo sapiens
  siRNA target sequence for PLU-1 (NM_006618.2,4436-4454).
ctgtgtcctcgatgtgata

SEQ ID NO: 9546 - DNA, 19 bp, Homo sapiens
  siRNA target sequence for PLU-1 (NM_006618.2,4549-4567).
cctggagagagctttaact

SEQ ID NO: 9547 - DNA, 19 bp, Homo sapiens
  siRNA target sequence for PLU-1 (NM_006618.2,4611-4629).
ctcgcctaagggaaatgga

SEQ ID NO: 9548 - DNA, 19 bp, Homo sapiens
  siRNA target sequence for PLU-1 (NM_006618.2,4677-4695).
ctctccaagatgtggatat

SEQ ID NO: 9549 - DNA, 19 bp, Homo sapiens
  siRNA target sequence for PLU-1 (NM_006618.2,4679-4697).
ctccaagatgtggatataa

SEQ ID NO: 9550 - DNA, 19 bp, Homo sapiens
  siRNA target sequence for PLU-1 (NM_006618.2,4722-4740).
cagctgcccctatgattca

SEQ ID NO: 9551 - DNA, 19 bp, Homo sapiens
  siRNA target sequence for PLU-1 (NM_006618.2,4728-4746).
cccctatgattcaatgtga

SEQ ID NO: 9552 - DNA, 19 bp, Homo sapiens
  siRNA target sequence for PLU-1 (NM_006618.2,4778-4796).
gtggcggtacccagtattt

SEQ ID NO: 9553 - DNA, 19 bp, Homo sapiens
  siRNA target sequence for PLU-1 (NM_006618.2,4780-4798).
ggcggtacccagtatttca

SEQ ID NO: 9554 - DNA, 19 bp, Homo sapiens
  siRNA target sequence for PLU-1 (NM_006618.2,4782-4800).
cggtacccagtatttcaca

SEQ ID NO: 9555 - DNA, 19 bp, Homo sapiens
  siRNA target sequence for PLU-1 (NM_006618.2,4912-4930).
gggagatgcacttcgatat

SEQ ID NO: 9556 - DNA, 19 bp, Homo sapiens
  siRNA target sequence for PLU-1 (NM_006618.2,4913-4931).
ggagatgcacttcgatata

SEQ ID NO: 9557 - DNA, 19 bp, Homo sapiens
  siRNA target sequence for PLU-1 (NM_006618.2,4914-4932).
gagatgcacttcgatatat

SEQ ID NO: 9558 - DNA, 19 bp, Homo sapiens
  siRNA target sequence for PLU-1 (NM_006618.2,4920-4938).
cacttcgatatatgattga

SEQ ID NO: 9559 - DNA, 19 bp, Homo sapiens
  siRNA target sequence for PLU-1 (NM_006618.2,4922-4940).
cttcgatatatgattgaaa

SEQ ID NO: 9560 - DNA, 19 bp, Homo sapiens
  siRNA target sequence for PLU-1 (NM_006618.2,4976-4994).
ctttcgtcagggaatctta

SEQ ID NO: 9561 - DNA, 19 bp, Homo sapiens
  siRNA target sequence for PLU-1 (NM_006618.2,4980-4998).
cgtcagggaatcttaaatt

SEQ ID NO: 9562 - DNA, 19 bp, Homo sapiens
  siRNA target sequence for PLU-1 (NM_006618.2,5012-5030).
gtgggctcaggactgttat

SEQ ID NO: 9563 - DNA, 19 bp, Homo sapiens
  siRNA target sequence for PLU-1 (NM_006618.2,5014-5032).
gggctcaggactgttatat

SEQ ID NO: 9564 - DNA, 19 bp, Homo sapiens
  siRNA target sequence for PLU-1 (NM_006618.2,5015-5033).
ggctcaggactgttatata

SEQ ID NO: 9565 - DNA, 19 bp, Homo sapiens
  siRNA target sequence for PLU-1 (NM_006618.2,5068-5086).
cacaaacaaggtatctcaa

SEQ ID NO: 9566 - DNA, 19 bp, Homo sapiens
  siRNA target sequence for PLU-1 (NM_006618.2,5094-5112).
gcacaacatcattttcttt

SEQ ID NO: 9567 - DNA, 19 bp, Homo sapiens
  siRNA target sequence for PLU-1 (NM_006618.2,5125-5143).
ggacaacagaacctcatat

SEQ ID NO: 9568 - DNA, 19 bp, Homo sapiens
  siRNA target sequence for PLU-1 (NM_006618.2,5158-5176).
ctcaactggacgaagttgt

SEQ ID NO: 9569 - DNA, 19 bp, Homo sapiens
  siRNA target sequence for PLU-1 (NM_006618.2,5160-5178).
caactggacgaagttgtat

SEQ ID NO: 9570 - DNA, 19 bp, Homo sapiens
  siRNA target sequence for PLU-1 (NM_006618.2,5239-5257).
ggtatcccttcctgaaatt

SEQ ID NO: 9571 - DNA, 19 bp, Homo sapiens
  siRNA target sequence for PLU-1 (NM_006618.2,5361-5379).
ggaagcgagatggaattaa

SEQ ID NO: 9572 - DNA, 19 bp, Homo sapiens
  siRNA target sequence for PLU-1 (NM_006618.2,5365-5383).
gcgagatggaattaacagt

SEQ ID NO: 9573 - DNA, 19 bp, Homo sapiens
  siRNA target sequence for PLU-1 (NM_006618.2,5382-5400).
gtcttgagagaaaactgaa

SEQ ID NO: 9574 - DNA, 19 bp, Homo sapiens
  siRNA target sequence for PLU-1 (NM_006618.2,5435-5453).
cggtgggaacgagttaaga

SEQ ID NO: 9575 - DNA, 19 bp, Homo sapiens
  siRNA target sequence for PLU-1 (NM_006618.2,5503-5521).
catgaacaatttcaagtta

SEQ ID NO: 9576 - DNA, 19 bp, Homo sapiens
  siRNA target sequence for PLU-1 (NM_006618.2,5524-5542).
gagagagcgtagctatgaa

SEQ ID NO: 9577 - DNA, 19 bp, Homo sapiens
  siRNA target sequence for PLU-1 (NM_006618.2,5530-5548).
gcgtagctatgaattagtt

SEQ ID NO: 9578 - DNA, 19 bp, Homo sapiens
  siRNA target sequence for PLU-1 (NM_006618.2,5573-5591).
ccctcagacacatcctatt

SEQ ID NO: 9579 - DNA, 19 bp, Homo sapiens
  siRNA target sequence for PLU-1 (NM_006618.2,5694-5712).
gcaatcagtggtttcatca

SEQ ID NO: 9580 - DNA, 19 bp, Homo sapiens
  siRNA target sequence for PML (NM_002675.2,448-466).
gccctggataacgtctttt

SEQ ID NO: 9581 - DNA, 19 bp, Homo sapiens
  siRNA target sequence for PML (NM_002675.2,449-467).
ccctggataacgtcttttt

SEQ ID NO: 9582 - DNA, 19 bp, Homo sapiens
  siRNA target sequence for PML (NM_002675.2,683-701).
cccgcaagaccaacaacat

SEQ ID NO: 9583 - DNA, 19 bp, Homo sapiens
  siRNA target sequence for PML (NM_002675.2,1367-1385).
ctcccagggaccctattga

SEQ ID NO: 9584 - DNA, 19 bp, Homo sapiens
  siRNA target sequence for PML (NM_002675.2,1503-1521).
gtacgccttctccatcaaa

SEQ ID NO: 9585 - DNA, 19 bp, Homo sapiens
  siRNA target sequence for PML (NM_002675.2,1592-1610).
gccccaggaaggtcatcaa

SEQ ID NO: 9586 - DNA, 19 bp, Homo sapiens
  siRNA target sequence for PML (NM_002675.2,1831-1849).
gactcagatgccgaaaact

SEQ ID NO: 9587 - DNA, 19 bp, Homo sapiens
  siRNA target sequence for PML (NM_002675.2,1960-1978).
gacagacctctggttttct

SEQ ID NO: 9588 - DNA, 19 bp, Homo sapiens
  siRNA target sequence for PML (NM_002675.2,1962-1980).
cagacctctggttttcttt

SEQ ID NO: 9589 - DNA, 19 bp, Homo sapiens
  siRNA target sequence for PML (NM_002675.2,1983-2001).
cctcaagattgacaatgaa

SEQ ID NO: 9590 - DNA, 19 bp, Homo sapiens
  siRNA target sequence for PML (NM_033238.1,2122-2140).
cacttcctcagctttctga

SEQ ID NO: 9591 - DNA, 19 bp, Homo sapiens
  siRNA target sequence for PML (NM_033238.1,2336-2354).
cctacctggcgagaaacat

SEQ ID NO: 9592 - DNA, 19 bp, Homo sapiens
  siRNA target sequence for PML (NM_033238.1,2443-2461).
catgtctaccccttcagta

SEQ ID NO: 9593 - DNA, 19 bp, Homo sapiens
  siRNA target sequence for PML (NM_033238.1,2673-2691).
ggctctgggcacctacttt

SEQ ID NO: 9594 - DNA, 19 bp, Homo sapiens
  siRNA target sequence for PML (NM_033238.1,2675-2693).
ctctgggcacctactttga

SEQ ID NO: 9595 - DNA, 19 bp, Homo sapiens
  siRNA target sequence for PML (NM_033239.1,2102-2120).
ggatccgctacctgttgta

SEQ ID NO: 9596 - DNA, 19 bp, Homo sapiens
  siRNA target sequence for PML (NM_033239.1,2159-2177).
gcttgcaccctcaattgca

SEQ ID NO: 9597 - DNA, 19 bp, Homo sapiens
  siRNA target sequence for PML (NM_033239.1,2160-2178).
cttgcaccctcaattgcat

SEQ ID NO: 9598 - DNA, 19 bp, Homo sapiens
  siRNA target sequence for PML (NM_033239.1,2373-2391).
gtggctcaacaactttttt

SEQ ID NO: 9599 - DNA, 19 bp, Homo sapiens
  siRNA target sequence for PML (NM_033239.1,2539-2557).
ctggaagcctctccaatta

SEQ ID NO: 9600 - DNA, 19 bp, Homo sapiens
  siRNA target sequence for PML (NM_033247.1,1429-1447).
gcacagagtagcactcatt

SEQ ID NO: 9601 - DNA, 19 bp, Homo sapiens
  siRNA target sequence for PML (NM_033249.1,1392-1410).
cctggatgtctccaataca

SEQ ID NO: 9602 - DNA, 19 bp, Homo sapiens
  siRNA target sequence for POLR2I (NM_006233.3,147-165).
gcgtgccggaactgtgatt

SEQ ID NO: 9603 - DNA, 19 bp, Homo sapiens
  siRNA target sequence for POLR2I (NM_006233.3,148-166).
cgtgccggaactgtgatta

SEQ ID NO: 9604 - DNA, 19 bp, Homo sapiens
  siRNA target sequence for POLR2I (NM_006233.3,151-169).
gccggaactgtgattacca

SEQ ID NO: 9605 - DNA, 19 bp, Homo sapiens
  siRNA target sequence for POLR2I (NM_006233.3,351-369).
gacgccatgcgcctttact

SEQ ID NO: 9606 - DNA, 19 bp, Homo sapiens
  siRNA target sequence for POLR3K (NM_016310.2,122-140).
gcccctacgtgcacaacat

SEQ ID NO: 9607 - DNA, 19 bp, Homo sapiens
  siRNA target sequence for POLR3K (NM_016310.2,160-178).
cggaagtacccaaaactga

SEQ ID NO: 9608 - DNA, 19 bp, Homo sapiens
  siRNA target sequence for POLR3K (NM_016310.2,259-277).
catcctcgtgcttacttca

SEQ ID NO: 9609 - DNA, 19 bp, Homo sapiens
  siRNA target sequence for POU1F1 (NM_000306.1,128-146).
gagttgccaagcttttact

SEQ ID NO: 9610 - DNA, 19 bp, Homo sapiens
  siRNA target sequence for POU1F1 (NM_000306.1,190-208).
ctctgcctctgataatgca

SEQ ID NO: 9611 - DNA, 19 bp, Homo sapiens
  siRNA target sequence for POU1F1 (NM_000306.1,246-264).
gccaccaatgtgatgtcta

SEQ ID NO: 9612 - DNA, 19 bp, Homo sapiens
  siRNA target sequence for POU1F1 (NM_000306.1,452-470).
ggaactcaggcggaaaagt

SEQ ID NO: 9613 - DNA, 19 bp, Homo sapiens
  siRNA target sequence for POU1F1 (NM_000306.1,453-471).
gaactcaggcggaaaagta

SEQ ID NO: 9614 - DNA, 19 bp, Homo sapiens
  siRNA target sequence for POU1F1 (NM_000306.1,456-474).
ctcaggcggaaaagtaaat

SEQ ID NO: 9615 - DNA, 19 bp, Homo sapiens
  siRNA target sequence for POU1F1 (NM_000306.1,460-478).
ggcggaaaagtaaattggt

SEQ ID NO: 9616 - DNA, 19 bp, Homo sapiens
  siRNA target sequence for POU1F1 (NM_000306.1,565-583).
gatacacccagacaaatgt

SEQ ID NO: 9617 - DNA, 19 bp, Homo sapiens
  siRNA target sequence for POU1F1 (NM_000306.1,603-621).
gtgcatggctctgaattca

SEQ ID NO: 9618 - DNA, 19 bp, Homo sapiens
  siRNA target sequence for POU1F1 (NM_000306.1,609-627).
ggctctgaattcagtcaaa

SEQ ID NO: 9619 - DNA, 19 bp, Homo sapiens
  siRNA target sequence for POU1F1 (NM_000306.1,628-646).
caacaatctgccgatttga

SEQ ID NO: 9620 - DNA, 19 bp, Homo sapiens
  siRNA target sequence for POU1F1 (NM_000306.1,677-695).
caaactgaaagcaatatta

SEQ ID NO: 9621 - DNA, 19 bp, Homo sapiens
  siRNA target sequence for POU1F1 (NM_000306.1,726-744).
ggagctttgtacaatgaaa

SEQ ID NO: 9622 - DNA, 19 bp, Homo sapiens
  siRNA target sequence for POU1F1 (NM_000306.1,825-843).
ggagaacagaataaacctt

SEQ ID NO: 9623 - DNA, 19 bp, Homo sapiens
  siRNA target sequence for POU1F1 (NM_000306.1,970-988).
ctatttctaaggaacatct

SEQ ID NO: 9624 - DNA, 19 bp, Homo sapiens
  siRNA target sequence for POU2F1 (NM_002697.1,127-145).
ccaatggtctggactttca

SEQ ID NO: 9625 - DNA, 19 bp, Homo sapiens
  siRNA target sequence for POU2F1 (NM_002697.1,221-239).
ccaactcgctggaacaagt

SEQ ID NO: 9626 - DNA, 19 bp, Homo sapiens
  siRNA target sequence for POU2F1 (NM_002697.1,222-240).
caactcgctggaacaagtt

SEQ ID NO: 9627 - DNA, 19 bp, Homo sapiens
  siRNA target sequence for POU2F1 (NM_002697.1,253-271).
ctcagtctttaaatgtaca

SEQ ID NO: 9628 - DNA, 19 bp, Homo sapiens
  siRNA target sequence for POU2F1 (NM_002697.1,369-387).
ctagctggaggacagataa

SEQ ID NO: 9629 - DNA, 19 bp, Homo sapiens
  siRNA target sequence for POU2F1 (NM_002697.1,381-399).
cagataactgggcttactt

SEQ ID NO: 9630 - DNA, 19 bp, Homo sapiens
  siRNA target sequence for POU2F1 (NM_002697.1,403-421).
cgcctgcccagcaacagtt

SEQ ID NO: 9631 - DNA, 19 bp, Homo sapiens
  siRNA target sequence for POU2F1 (NM_002697.1,409-427).
cccagcaacagttactact

SEQ ID NO: 9632 - DNA, 19 bp, Homo sapiens
  siRNA target sequence for POU2F1 (NM_002697.1,572-590).
gatcgcacaggatcttcaa

SEQ ID NO: 9633 - DNA, 19 bp, Homo sapiens
  siRNA target sequence for POU2F1 (NM_002697.1,603-621).
cttcaacagcagaatctca

SEQ ID NO: 9634 - DNA, 19 bp, Homo sapiens
  siRNA target sequence for POU2F1 (NM_002697.1,642-660).
gtgcatccaaccaccaatt

SEQ ID NO: 9635 - DNA, 19 bp, Homo sapiens
  siRNA target sequence for POU2F1 (NM_002697.1,663-681).
cagccagcgcagtttatca

SEQ ID NO: 9636 - DNA, 19 bp, Homo sapiens
  siRNA target sequence for POU2F1 (NM_002697.1,713-731).
cctgcaagcgcaaaatctt

SEQ ID NO: 9637 - DNA, 19 bp, Homo sapiens
  siRNA target sequence for POU2F1 (NM_002697.1,828-846).
gcagcaaccccaattcaga

SEQ ID NO: 9638 - DNA, 19 bp, Homo sapiens
  siRNA target sequence for POU2F1 (NM_002697.1,952-970).
gacgaatcaaacttggatt

SEQ ID NO: 9639 - DNA, 19 bp, Homo sapiens
  siRNA target sequence for POU2F1 (NM_002697.1,989-1007).
gctcgctatggggaaacta

SEQ ID NO: 9640 - DNA, 19 bp, Homo sapiens
  siRNA target sequence for POU2F1 (NM_002697.1,990-1008).
ctcgctatggggaaactat

SEQ ID NO: 9641 - DNA, 19 bp, Homo sapiens
  siRNA target sequence for POU2F1 (NM_002697.1,992-1010).
cgctatggggaaactatat

SEQ ID NO: 9642 - DNA, 19 bp, Homo sapiens
  siRNA target sequence for POU2F1 (NM_002697.1,998-1016).
ggggaaactatatggaaat

SEQ ID NO: 9643 - DNA, 19 bp, Homo sapiens
  siRNA target sequence for POU2F1 (NM_002697.1,1050-1068).
gccttgaacctcagcttta

SEQ ID NO: 9644 - DNA, 19 bp, Homo sapiens
  siRNA target sequence for POU2F1 (NM_002697.1,1051-1069).
ccttgaacctcagctttaa

SEQ ID NO: 9645 - DNA, 19 bp, Homo sapiens
  siRNA target sequence for POU2F1 (NM_002697.1,1119-1137).
gagaacctctcatctgatt

SEQ ID NO: 9646 - DNA, 19 bp, Homo sapiens
  siRNA target sequence for POU2F1 (NM_002697.1,1299-1317).
gatcagctcaatatggaaa

SEQ ID NO: 9647 - DNA, 19 bp, Homo sapiens
  siRNA target sequence for POU2F1 (NM_002697.1,1391-1409).
gaccagcagctcacctatt

SEQ ID NO: 9648 - DNA, 19 bp, Homo sapiens
  siRNA target sequence for POU2F1 (NM_002697.1,1393-1411).
ccagcagctcacctattaa

SEQ ID NO: 9649 - DNA, 19 bp, Homo sapiens
  siRNA target sequence for POU2F1 (NM_002697.1,1394-1412).
cagcagctcacctattaaa

SEQ ID NO: 9650 - DNA, 19 bp, Homo sapiens
  siRNA target sequence for POU2F1 (NM_002697.1,1397-1415).
cagctcacctattaaagca

SEQ ID NO: 9651 - DNA, 19 bp, Homo sapiens
  siRNA target sequence for POU2F1 (NM_002697.1,1399-1417).
gctcacctattaaagcaat

SEQ ID NO: 9652 - DNA, 19 bp, Homo sapiens
  siRNA target sequence for POU2F1 (NM_002697.1,1518-1536).
gctgctgtgacgaatcttt

SEQ ID NO: 9653 - DNA, 19 bp, Homo sapiens
  siRNA target sequence for POU2F1 (NM_002697.1,1522-1540).
ctgtgacgaatctttcagt

SEQ ID NO: 9654 - DNA, 19 bp, Homo sapiens
  siRNA target sequence for POU2F1 (NM_002697.1,1524-1542).
gtgacgaatctttcagtta

SEQ ID NO: 9655 - DNA, 19 bp, Homo sapiens
  siRNA target sequence for POU2F1 (NM_002697.1,1526-1544).
gacgaatctttcagttaca

SEQ ID NO: 9656 - DNA, 19 bp, Homo sapiens
  siRNA target sequence for POU2F1 (NM_002697.1,1865-1883).
gatggcaccctcacagttt

SEQ ID NO: 9657 - DNA, 19 bp, Homo sapiens
  siRNA target sequence for POU2F1 (NM_002697.1,1958-1976).
cagtacactggcaactatt

SEQ ID NO: 9658 - DNA, 19 bp, Homo sapiens
  siRNA target sequence for POU2F1 (NM_002697.1,1960-1978).
gtacactggcaactattca

SEQ ID NO: 9659 - DNA, 19 bp, Homo sapiens
  siRNA target sequence for POU2F1 (NM_002697.1,1992-2010).
ggtggctctcttccaataa

SEQ ID NO: 9660 - DNA, 19 bp, Homo sapiens
  siRNA target sequence for POU2F1 (NM_002697.1,1995-2013).
ggctctcttccaataacat

SEQ ID NO: 9661 - DNA, 19 bp, Homo sapiens
  siRNA target sequence for POU2F1 (NM_002697.1,2023-2041).
caactgggaacctggtatt

SEQ ID NO: 9662 - DNA, 19 bp, Homo sapiens
  siRNA target sequence for POU2F1 (NM_002697.1,2116-2134).
ccagcaaccctgttagctt

SEQ ID NO: 9663 - DNA, 19 bp, Homo sapiens
  siRNA target sequence for POU2F2 (NM_002698.1,142-160).
cacacagacaccgaaagaa

SEQ ID NO: 9664 - DNA, 19 bp, Homo sapiens
  siRNA target sequence for POU2F2 (NM_002698.1,226-244).
ggccccagtacaaagatca

SEQ ID NO: 9665 - DNA, 19 bp, Homo sapiens
  siRNA target sequence for POU2F2 (NM_002698.1,319-337).
caggcccaactcatgttga

SEQ ID NO: 9666 - DNA, 19 bp, Homo sapiens
  siRNA target sequence for POU2F2 (NM_002698.1,465-483).
cctgctaccgacaccaaat

SEQ ID NO: 9667 - DNA, 19 bp, Homo sapiens
  siRNA target sequence for POU2F2 (NM_002698.1,804-822).
cgatgcagagactatgtct

SEQ ID NO: 9668 - DNA, 19 bp, Homo sapiens
  siRNA target sequence for POU2F2 (NM_002698.1,928-946).
gtccgcttcgccttagaga

SEQ ID NO: 9669 - DNA, 19 bp, Homo sapiens
  siRNA target sequence for POU2F2 (NM_002698.1,1192-1210).
ctgagcacaacagttacta

SEQ ID NO: 9670 - DNA, 19 bp, Homo sapiens
  siRNA target sequence for POU2F2 (NM_002698.1,1197-1215).
cacaacagttactacctta

SEQ ID NO: 9671 - DNA, 19 bp, Homo sapiens
  siRNA target sequence for POU2F3 (NM_014352.1,29-47).
cacacagatatcaagatga

SEQ ID NO: 9672 - DNA, 19 bp, Homo sapiens
  siRNA target sequence for POU2F3 (NM_014352.1,223-241).
gtccggaaaccaaatgtct

SEQ ID NO: 9673 - DNA, 19 bp, Homo sapiens
  siRNA target sequence for POU2F3 (NM_014352.1,472-490).
gccaggatcctctttagaa

SEQ ID NO: 9674 - DNA, 19 bp, Homo sapiens
  siRNA target sequence for POU2F3 (NM_014352.1,820-838).
ccccagcctcagtgaagta

SEQ ID NO: 9675 - DNA, 19 bp, Homo sapiens
  siRNA target sequence for POU2F3 (NM_014352.1,931-949).
ggaggagatctccatgatt

SEQ ID NO: 9676 - DNA, 19 bp, Homo sapiens
  siRNA target sequence for POU2F3 (NM_014352.1,1212-1230).
gccccactgcatctcaaaa

SEQ ID NO: 9677 - DNA, 19 bp, Homo sapiens
  siRNA target sequence for POU2F3 (NM_014352.1,1214-1232).
cccactgcatctcaaaata

SEQ ID NO: 9678 - DNA, 19 bp, Homo sapiens
  siRNA target sequence for POU2F3 (NM_014352.1,1249-1267).
gaactccgcctccagtttt

SEQ ID NO: 9679 - DNA, 19 bp, Homo sapiens
  siRNA target sequence for POU2F3 (NM_014352.1,1255-1273).
cgcctccagttttaactct

SEQ ID NO: 9680 - DNA, 19 bp, Homo sapiens
  siRNA target sequence for POU2F3 (NM_014352.1,1256-1274).
gcctccagttttaactctt

SEQ ID NO: 9681 - DNA, 19 bp, Homo sapiens
  siRNA target sequence for POU3F2 (NM_005604.1,1003-1021).
cggatcaaactgggattta

SEQ ID NO: 9682 - DNA, 19 bp, Homo sapiens
  siRNA target sequence for POU3F4 (NM_000307.1,125-143).
ccgcaaccctcagaaactt

SEQ ID NO: 9683 - DNA, 19 bp, Homo sapiens
  siRNA target sequence for POU3F4 (NM_000307.1,127-145).
gcaaccctcagaaacttct

SEQ ID NO: 9684 - DNA, 19 bp, Homo sapiens
  siRNA target sequence for POU3F4 (NM_000307.1,387-405).
gcaccgaacccgtctatca

SEQ ID NO: 9685 - DNA, 19 bp, Homo sapiens
  siRNA target sequence for POU3F4 (NM_000307.1,614-632).
ggaacagttcgccaaacaa

SEQ ID NO: 9686 - DNA, 19 bp, Homo sapiens
  siRNA target sequence for POU3F4 (NM_000307.1,615-633).
gaacagttcgccaaacaat

SEQ ID NO: 9687 - DNA, 19 bp, Homo sapiens
  siRNA target sequence for POU3F4 (NM_000307.1,620-638).
gttcgccaaacaattcaaa

SEQ ID NO: 9688 - DNA, 19 bp, Homo sapiens
  siRNA target sequence for POU3F4 (NM_000307.1,623-641).
cgccaaacaattcaaacaa

SEQ ID NO: 9689 - DNA, 19 bp, Homo sapiens
  siRNA target sequence for POU3F4 (NM_000307.1,624-642).
gccaaacaattcaaacaaa

SEQ ID NO: 9690 - DNA, 19 bp, Homo sapiens
  siRNA target sequence for POU3F4 (NM_000307.1,829-847).
cgaccagcattgacaagat

SEQ ID NO: 9691 - DNA, 19 bp, Homo sapiens
  siRNA target sequence for POU3F4 (NM_000307.1,1002-1020).
gtctggttctgtaatcgaa

SEQ ID NO: 9692 - DNA, 19 bp, Homo sapiens
  siRNA target sequence for POU3F4 (NM_000307.1,1010-1028).
ctgtaatcgaagacaaaaa

SEQ ID NO: 9693 - DNA, 19 bp, Homo sapiens
  siRNA target sequence for POU3F4 (NM_000307.1,1012-1030).
gtaatcgaagacaaaaaga

SEQ ID NO: 9694 - DNA, 19 bp, Homo sapiens
  siRNA target sequence for POU4F1 (NM_006237.2,1465-1483).
cagaagcggatgaaattct

SEQ ID NO: 9695 - DNA, 19 bp, Homo sapiens
  siRNA target sequence for POU4F2 (NM_004575.1,273-291).
cacgtggagcccaagtact

SEQ ID NO: 9696 - DNA, 19 bp, Homo sapiens
  siRNA target sequence for POU4F2 (NM_004575.1,493-511).
caaccccaccgagcaatat

SEQ ID NO: 9697 - DNA, 19 bp, Homo sapiens
  siRNA target sequence for POU4F2 (NM_004575.1,496-514).
ccccaccgagcaatatatt

SEQ ID NO: 9698 - DNA, 19 bp, Homo sapiens
  siRNA target sequence for POU4F2 (NM_004575.1,635-653).
cacctaccacactatgaat

SEQ ID NO: 9699 - DNA, 19 bp, Homo sapiens
  siRNA target sequence for POU4F2 (NM_004575.1,1128-1146).
ctcacactgtcccacaata

SEQ ID NO: 9700 - DNA, 19 bp, Homo sapiens
  siRNA target sequence for POU4F2 (NM_004575.1,1289-1307).
ctcgctcgaagcctacttt

SEQ ID NO: 9701 - DNA, 19 bp, Homo sapiens
  siRNA target sequence for POU4F2 (NM_004575.1,1318-1336).
ctcggccctcctctgaaaa

SEQ ID NO: 9702 - DNA, 19 bp, Homo sapiens
  siRNA target sequence for POU4F3 (NM_002700.1,46-64).
ctgcaagaacccaaattct

SEQ ID NO: 9703 - DNA, 19 bp, Homo sapiens
  siRNA target sequence for POU4F3 (NM_002700.1,115-133).
ccgcagctgcagggtaata

SEQ ID NO: 9704 - DNA, 19 bp, Homo sapiens
  siRNA target sequence for POU4F3 (NM_002700.1,116-134).
cgcagctgcagggtaatat

SEQ ID NO: 9705 - DNA, 19 bp, Homo sapiens
  siRNA target sequence for POU4F3 (NM_002700.1,117-135).
gcagctgcagggtaatata

SEQ ID NO: 9706 - DNA, 19 bp, Homo sapiens
  siRNA target sequence for POU4F3 (NM_002700.1,118-136).
cagctgcagggtaatatat

SEQ ID NO: 9707 - DNA, 19 bp, Homo sapiens
  siRNA target sequence for POU4F3 (NM_002700.1,123-141).
gcagggtaatatatttgga

SEQ ID NO: 9708 - DNA, 19 bp, Homo sapiens
  siRNA target sequence for POU4F3 (NM_002700.1,124-142).
cagggtaatatatttggaa

SEQ ID NO: 9709 - DNA, 19 bp, Homo sapiens
  siRNA target sequence for POU4F3 (NM_002700.1,629-647).
cggctctggctaatctcaa

SEQ ID NO: 9710 - DNA, 19 bp, Homo sapiens
  siRNA target sequence for POU4F3 (NM_002700.1,772-790).
gcctaccgagagaagaaca

SEQ ID NO: 9711 - DNA, 19 bp, Homo sapiens
  siRNA target sequence for POU4F3 (NM_002700.1,860-878).
gttcactcgaggcctattt

SEQ ID NO: 9712 - DNA, 19 bp, Homo sapiens
  siRNA target sequence for POU4F3 (NM_002700.1,893-911).
gtccttcatctgagaagat

SEQ ID NO: 9713 - DNA, 19 bp, Homo sapiens
  siRNA target sequence for POU5F1 (NM_002701.1,129-147).
gccacacgtaggttcttga

SEQ ID NO: 9714 - DNA, 19 bp, Homo sapiens
  siRNA target sequence for POU5F1 (NM_002701.1,130-148).
ccacacgtaggttcttgaa

SEQ ID NO: 9715 - DNA, 19 bp, Homo sapiens
  siRNA target sequence for POU5F1 (NM_002701.1,131-149).
cacacgtaggttcttgaat

SEQ ID NO: 9716 - DNA, 19 bp, Homo sapiens
  siRNA target sequence for POU5F1 (NM_002701.1,143-161).
cttgaatcccgaatggaaa

SEQ ID NO: 9717 - DNA, 19 bp, Homo sapiens
  siRNA target sequence for PPARA (NM_005036.2,274-292).
gcccgttatctgaagagtt

SEQ ID NO: 9718 - DNA, 19 bp, Homo sapiens
  siRNA target sequence for PPARA (NM_005036.2,305-323).
gggaaacatccaagagatt

SEQ ID NO: 9719 - DNA, 19 bp, Homo sapiens
  siRNA target sequence for PPARA (NM_005036.2,332-350).
catcggcgaggatagttct

SEQ ID NO: 9720 - DNA, 19 bp, Homo sapiens
  siRNA target sequence for PPARA (NM_005036.2,341-359).
ggatagttctggaagcttt

SEQ ID NO: 9721 - DNA, 19 bp, Homo sapiens
  siRNA target sequence for PPARA (NM_005036.2,368-386).
ggaataccagtatttagga

SEQ ID NO: 9722 - DNA, 19 bp, Homo sapiens
  siRNA target sequence for PPARA (NM_005036.2,442-460).
gcccctcctcggtgactta

SEQ ID NO: 9723 - DNA, 19 bp, Homo sapiens
  siRNA target sequence for PPARA (NM_005036.2,446-464).
ctcctcggtgacttatcct

SEQ ID NO: 9724 - DNA, 19 bp, Homo sapiens
  siRNA target sequence for PPARA (NM_005036.2,490-508).
ctcccagtggagcattgaa

SEQ ID NO: 9725 - DNA, 19 bp, Homo sapiens
  siRNA target sequence for PPARA (NM_005036.2,492-510).
cccagtggagcattgaaca

SEQ ID NO: 9726 - DNA, 19 bp, Homo sapiens
  siRNA target sequence for PPARA (NM_005036.2,493-511).
ccagtggagcattgaacat

SEQ ID NO: 9727 - DNA, 19 bp, Homo sapiens
  siRNA target sequence for PPARA (NM_005036.2,498-516).
ggagcattgaacatcgaat

SEQ ID NO: 9728 - DNA, 19 bp, Homo sapiens
  siRNA target sequence for PPARA (NM_005036.2,501-519).
gcattgaacatcgaatgta

SEQ ID NO: 9729 - DNA, 19 bp, Homo sapiens
  siRNA target sequence for PPARA (NM_005036.2,533-551).
caaggcctcaggctatcat

SEQ ID NO: 9730 - DNA, 19 bp, Homo sapiens
  siRNA target sequence for PPARA (NM_005036.2,584-602).
cttctttcggcgaacgatt

SEQ ID NO: 9731 - DNA, 19 bp, Homo sapiens
  siRNA target sequence for PPARA (NM_005036.2,716-734).
caacgcgattcgttttgga

SEQ ID NO: 9732 - DNA, 19 bp, Homo sapiens
  siRNA target sequence for PPARA (NM_005036.2,745-763).
gatctgagaaagcaaaact

SEQ ID NO: 9733 - DNA, 19 bp, Homo sapiens
  siRNA target sequence for PPARA (NM_005036.2,826-844).
ctctggccaagagaatcta

SEQ ID NO: 9734 - DNA, 19 bp, Homo sapiens
  siRNA target sequence for PPARA (NM_005036.2,846-864).
gaggcctacttgaagaact

SEQ ID NO: 9735 - DNA, 19 bp, Homo sapiens
  siRNA target sequence for PPARA (NM_005036.2,911-929).
cagtaacaatccacctttt

SEQ ID NO: 9736 - DNA, 19 bp, Homo sapiens
  siRNA target sequence for PPARA (NM_005036.2,913-931).
gtaacaatccaccttttgt

SEQ ID NO: 9737 - DNA, 19 bp, Homo sapiens
  siRNA target sequence for PPARA (NM_005036.2,991-1009).
ccaatggcatccagaacaa

SEQ ID NO: 9738 - DNA, 19 bp, Homo sapiens
  siRNA target sequence for PPARA (NM_005036.2,1013-1031).
ggcggaggtccgcatcttt

SEQ ID NO: 9739 - DNA, 19 bp, Homo sapiens
  siRNA target sequence for PPARA (NM_005036.2,1017-1035).
gaggtccgcatctttcact

SEQ ID NO: 9740 - DNA, 19 bp, Homo sapiens
  siRNA target sequence for PPARA (NM_005036.2,1121-1139).
cgatcaagtgacattgcta

SEQ ID NO: 9741 - DNA, 19 bp, Homo sapiens
  siRNA target sequence for PPARA (NM_005036.2,1202-1220).
gctggtagcgtatggaaat

SEQ ID NO: 9742 - DNA, 19 bp, Homo sapiens
  siRNA target sequence for PPARA (NM_005036.2,1375-1393).
gtcctggccttctaaacgt

SEQ ID NO: 9743 - DNA, 19 bp, Homo sapiens
  siRNA target sequence for PPARA (NM_005036.2,1391-1409).
cgtaggacacattgaaaaa

SEQ ID NO: 9744 - DNA, 19 bp, Homo sapiens
  siRNA target sequence for PPARA (NM_005036.2,1453-1471).
gcaaccacccggacgatat

SEQ ID NO: 9745 - DNA, 19 bp, Homo sapiens
  siRNA target sequence for PPARA (NM_005036.2,1457-1475).
ccacccggacgatatcttt

SEQ ID NO: 9746 - DNA, 19 bp, Homo sapiens
  siRNA target sequence for PPARA (NM_005036.2,1462-1480).
cggacgatatctttctctt

SEQ ID NO: 9747 - DNA, 19 bp, Homo sapiens
  siRNA target sequence for PPARD (NM_006238.2,551-569).
catgcggcagcctcaacat

SEQ ID NO: 9748 - DNA, 19 bp, Homo sapiens
  siRNA target sequence for PPARD (NM_006238.2,774-792).
caacgctatccgttttggt

SEQ ID NO: 9749 - DNA, 19 bp, Homo sapiens
  siRNA target sequence for PPARD (NM_006238.2,994-1012).
cacgacatcgagacattgt

SEQ ID NO: 9750 - DNA, 19 bp, Homo sapiens
  siRNA target sequence for PPARD (NM_006238.2,1188-1206).
ggttacccttctcaagtat

SEQ ID NO: 9751 - DNA, 19 bp, Homo sapiens
  siRNA target sequence for PPARD (NM_006238.2,1335-1353).
cattgagcctaagtttgaa

SEQ ID NO: 9752 - DNA, 19 bp, Homo sapiens
  siRNA target sequence for PPARD (NM_006238.2,1391-1409).
gtgacctggccctattcat

SEQ ID NO: 9753 - DNA, 19 bp, Homo sapiens
  siRNA target sequence for PPARG (NM_005037.3,158-176).
ggatctctccgtaatggaa

SEQ ID NO: 9754 - DNA, 19 bp, Homo sapiens
  siRNA target sequence for PPARG (NM_005037.3,229-247).
gcatttctactccacatta

SEQ ID NO: 9755 - DNA, 19 bp, Homo sapiens
  siRNA target sequence for PPARG (NM_005037.3,238-256).
ctccacattacgaagacat

SEQ ID NO: 9756 - DNA, 19 bp, Homo sapiens
  siRNA target sequence for PPARG (NM_005037.3,243-261).
cattacgaagacattccat

SEQ ID NO: 9757 - DNA, 19 bp, Homo sapiens
  siRNA target sequence for PPARG (NM_005037.3,248-266).
cgaagacattccattcaca

SEQ ID NO: 9758 - DNA, 19 bp, Homo sapiens
  siRNA target sequence for PPARG (NM_005037.3,252-270).
gacattccattcacaagaa

SEQ ID NO: 9759 - DNA, 19 bp, Homo sapiens
  siRNA target sequence for PPARG (NM_005037.3,277-295).
cagtggttgcagattacaa

SEQ ID NO: 9760 - DNA, 19 bp, Homo sapiens
  siRNA target sequence for PPARG (NM_005037.3,279-297).
gtggttgcagattacaagt

SEQ ID NO: 9761 - DNA, 19 bp, Homo sapiens
  siRNA target sequence for PPARG (NM_005037.3,281-299).
ggttgcagattacaagtat

SEQ ID NO: 9762 - DNA, 19 bp, Homo sapiens
  siRNA target sequence for PPARG (NM_005037.3,317-335).
gtaccaaagtgcaatcaaa

SEQ ID NO: 9763 - DNA, 19 bp, Homo sapiens
  siRNA target sequence for PPARG (NM_005037.3,343-361).
ctgcatctccaccttatta

SEQ ID NO: 9764 - DNA, 19 bp, Homo sapiens
  siRNA target sequence for PPARG (NM_005037.3,345-363).
gcatctccaccttattatt

SEQ ID NO: 9765 - DNA, 19 bp, Homo sapiens
  siRNA target sequence for PPARG (NM_005037.3,368-386).
gaagactcagctctacaat

SEQ ID NO: 9766 - DNA, 19 bp, Homo sapiens
  siRNA target sequence for PPARG (NM_005037.3,413-431).
cctcatggcaattgaatgt

SEQ ID NO: 9767 - DNA, 19 bp, Homo sapiens
  siRNA target sequence for PPARG (NM_005037.3,430-448).
gtcgtgtctgtggagataa

SEQ ID NO: 9768 - DNA, 19 bp, Homo sapiens
  siRNA target sequence for PPARG (NM_005037.3,515-533).
cagattgaagcttatctat

SEQ ID NO: 9769 - DNA, 19 bp, Homo sapiens
  siRNA target sequence for PPARG (NM_005037.3,534-552).
gacagatgtgatcttaact

SEQ ID NO: 9770 - DNA, 19 bp, Homo sapiens
  siRNA target sequence for PPARG (NM_005037.3,555-573).
cggatccacaaaaaaagta

SEQ ID NO: 9771 - DNA, 19 bp, Homo sapiens
  siRNA target sequence for PPARG (NM_005037.3,612-630).
gcagtggggatgtctcata

SEQ ID NO: 9772 - DNA, 19 bp, Homo sapiens
  siRNA target sequence for PPARG (NM_005037.3,681-699).
gcggagatctccagtgata

SEQ ID NO: 9773 - DNA, 19 bp, Homo sapiens
  siRNA target sequence for PPARG (NM_005037.3,682-700).
cggagatctccagtgatat

SEQ ID NO: 9774 - DNA, 19 bp, Homo sapiens
  siRNA target sequence for PPARG (NM_005037.3,803-821).
gatcttgacaggaaagaca

SEQ ID NO: 9775 - DNA, 19 bp, Homo sapiens
  siRNA target sequence for PPARG (NM_005037.3,825-843).
gacaaatcaccattcgtta

SEQ ID NO: 9776 - DNA, 19 bp, Homo sapiens
  siRNA target sequence for PPARG (NM_005037.3,839-857).
cgttatctatgacatgaat

SEQ ID NO: 9777 - DNA, 19 bp, Homo sapiens
  siRNA target sequence for PPARG (NM_005037.3,840-858).
gttatctatgacatgaatt

SEQ ID NO: 9778 - DNA, 19 bp, Homo sapiens
  siRNA target sequence for PPARG (NM_005037.3,849-867).
gacatgaattccttaatga

SEQ ID NO: 9779 - DNA, 19 bp, Homo sapiens
  siRNA target sequence for PPARG (NM_005037.3,926-944).
ggtggccatccgcatcttt

SEQ ID NO: 9780 - DNA, 19 bp, Homo sapiens
  siRNA target sequence for PPARG (NM_005037.3,988-1006).
cagagtatgccaaaagcat

SEQ ID NO: 9781 - DNA, 19 bp, Homo sapiens
  siRNA target sequence for PPARG (NM_005037.3,1059-1077).
ggagtccacgagatcattt

SEQ ID NO: 9782 - DNA, 19 bp, Homo sapiens
  siRNA target sequence for PPARG (NM_005037.3,1060-1078).
gagtccacgagatcattta

SEQ ID NO: 9783 - DNA, 19 bp, Homo sapiens
  siRNA target sequence for PPARG (NM_005037.3,1062-1080).
gtccacgagatcatttaca

SEQ ID NO: 9784 - DNA, 19 bp, Homo sapiens
  siRNA target sequence for PPARG (NM_005037.3,1064-1082).
ccacgagatcatttacaca

SEQ ID NO: 9785 - DNA, 19 bp, Homo sapiens
  siRNA target sequence for PPARG (NM_005037.3,1065-1083).
cacgagatcatttacacaa

SEQ ID NO: 9786 - DNA, 19 bp, Homo sapiens
  siRNA target sequence for PPARG (NM_005037.3,1088-1106).
ggcctccttgatgaataaa

SEQ ID NO: 9787 - DNA, 19 bp, Homo sapiens
  siRNA target sequence for PPARG (NM_005037.3,1125-1143).
gagggccaaggcttcatga

SEQ ID NO: 9788 - DNA, 19 bp, Homo sapiens
  siRNA target sequence for PPARG (NM_005037.3,1139-1157).
catgacaagggagtttcta

SEQ ID NO: 9789 - DNA, 19 bp, Homo sapiens
  siRNA target sequence for PPARG (NM_005037.3,1163-1181).
cctgcgaaagccttttggt

SEQ ID NO: 9790 - DNA, 19 bp, Homo sapiens
  siRNA target sequence for PPARG (NM_005037.3,1301-1319).
gaatgtgaagcccattgaa

SEQ ID NO: 9791 - DNA, 19 bp, Homo sapiens
  siRNA target sequence for PPARG (NM_005037.3,1307-1325).
gaagcccattgaagacatt

SEQ ID NO: 9792 - DNA, 19 bp, Homo sapiens
  siRNA target sequence for PPARG (NM_005037.3,1419-1437).
gacctcagacagattgtca

SEQ ID NO: 9793 - DNA, 19 bp, Homo sapiens
  siRNA target sequence for PPARG (NM_015869.2,196-214).
gtctgcaaacatatcacaa

SEQ ID NO: 9794 - DNA, 19 bp, Homo sapiens
  siRNA target sequence for PRDM1 (NM_001198.2,516-534).
cagtgaagaggttattgga

SEQ ID NO: 9795 - DNA, 19 bp, Homo sapiens
  siRNA target sequence for PRDM1 (NM_001198.2,532-550).
ggagtgatgagtaaagaat

SEQ ID NO: 9796 - DNA, 19 bp, Homo sapiens
  siRNA target sequence for PRDM1 (NM_001198.2,533-551).
gagtgatgagtaaagaata

SEQ ID NO: 9797 - DNA, 19 bp, Homo sapiens
  siRNA target sequence for PRDM1 (NM_001198.2,537-555).
gatgagtaaagaatacata

SEQ ID NO: 9798 - DNA, 19 bp, Homo sapiens
  siRNA target sequence for PRDM1 (NM_001198.2,578-596).
ccctaataggtgaaatcta

SEQ ID NO: 9799 - DNA, 19 bp, Homo sapiens
  siRNA target sequence for PRDM1 (NM_001198.2,618-636).
gaacgccaacaggaaatat

SEQ ID NO: 9800 - DNA, 19 bp, Homo sapiens
  siRNA target sequence for PRDM1 (NM_001198.2,660-678).
ggagcttcaccacttcatt

SEQ ID NO: 9801 - DNA, 19 bp, Homo sapiens
  siRNA target sequence for PRDM1 (NM_001198.2,672-690).
cttcattgacggctttaat

SEQ ID NO: 9802 - DNA, 19 bp, Homo sapiens
  siRNA target sequence for PRDM1 (NM_001198.2,681-699).
cggctttaatgaagagaaa

SEQ ID NO: 9803 - DNA, 19 bp, Homo sapiens
  siRNA target sequence for PRDM1 (NM_001198.2,763-781).
cagaacgggatgaacatct

SEQ ID NO: 9804 - DNA, 19 bp, Homo sapiens
  siRNA target sequence for PRDM1 (NM_001198.2,769-787).
gggatgaacatctacttct

SEQ ID NO: 9805 - DNA, 19 bp, Homo sapiens
  siRNA target sequence for PRDM1 (NM_001198.2,770-788).
ggatgaacatctacttcta

SEQ ID NO: 9806 - DNA, 19 bp, Homo sapiens
  siRNA target sequence for PRDM1 (NM_001198.2,809-827).
ccaaccaggaacttcttgt

SEQ ID NO: 9807 - DNA, 19 bp, Homo sapiens
  siRNA target sequence for PRDM1 (NM_001198.2,817-835).
gaacttcttgtgtggtatt

SEQ ID NO: 9808 - DNA, 19 bp, Homo sapiens
  siRNA target sequence for PRDM1 (NM_001198.2,872-890).
ccggagagctgacaatgat

SEQ ID NO: 9809 - DNA, 19 bp, Homo sapiens
  siRNA target sequence for PRDM1 (NM_001198.2,874-892).
ggagagctgacaatgatga

SEQ ID NO: 9810 - DNA, 19 bp, Homo sapiens
  siRNA target sequence for PRDM1 (NM_001198.2,921-939).
gcaaccgagcactgagaaa

SEQ ID NO: 9811 - DNA, 19 bp, Homo sapiens
  siRNA target sequence for PRDM1 (NM_001198.2,922-940).
caaccgagcactgagaaaa

SEQ ID NO: 9812 - DNA, 19 bp, Homo sapiens
  siRNA target sequence for PRDM1 (NM_001198.2,926-944).
cgagcactgagaaaaatga

SEQ ID NO: 9813 - DNA, 19 bp, Homo sapiens
  siRNA target sequence for PRDM1 (NM_001198.2,971-989).
gagagtacagcgtgaaaga

SEQ ID NO: 9814 - DNA, 19 bp, Homo sapiens
  siRNA target sequence for PRDM1 (NM_001198.2,978-996).
cagcgtgaaagaaatccta

SEQ ID NO: 9815 - DNA, 19 bp, Homo sapiens
  siRNA target sequence for PRDM1 (NM_001198.2,980-998).
gcgtgaaagaaatcctaaa

SEQ ID NO: 9816 - DNA, 19 bp, Homo sapiens
  siRNA target sequence for PRDM1 (NM_001198.2,1027-1045).
gacctctaccgttctaaca

SEQ ID NO: 9817 - DNA, 19 bp, Homo sapiens
  siRNA target sequence for PRDM1 (NM_001198.2,1029-1047).
cctctaccgttctaacatt

SEQ ID NO: 9818 - DNA, 19 bp, Homo sapiens
  siRNA target sequence for PRDM1 (NM_001198.2,1030-1048).
ctctaccgttctaacattt

SEQ ID NO: 9819 - DNA, 19 bp, Homo sapiens
  siRNA target sequence for PRDM1 (NM_001198.2,1052-1070).
ccctcacatcagaaaagga

SEQ ID NO: 9820 - DNA, 19 bp, Homo sapiens
  siRNA target sequence for PRDM1 (NM_001198.2,1068-1086).
ggacctcgatgactttaga

SEQ ID NO: 9821 - DNA, 19 bp, Homo sapiens
  siRNA target sequence for PRDM1 (NM_001198.2,1069-1087).
gacctcgatgactttagaa

SEQ ID NO: 9822 - DNA, 19 bp, Homo sapiens
  siRNA target sequence for PRDM1 (NM_001198.2,1071-1089).
cctcgatgactttagaaga

SEQ ID NO: 9823 - DNA, 19 bp, Homo sapiens
  siRNA target sequence for PRDM1 (NM_001198.2,1143-1161).
ccctctgccagaagacttt

SEQ ID NO: 9824 - DNA, 19 bp, Homo sapiens
  siRNA target sequence for PRDM1 (NM_001198.2,1144-1162).
cctctgccagaagactttt

SEQ ID NO: 9825 - DNA, 19 bp, Homo sapiens
  siRNA target sequence for PRDM1 (NM_001198.2,1189-1207).
gagagacccacgtacatca

SEQ ID NO: 9826 - DNA, 19 bp, Homo sapiens
  siRNA target sequence for PRDM1 (NM_001198.2,1346-1364).
gggactcctacgcttactt

SEQ ID NO: 9827 - DNA, 19 bp, Homo sapiens
  siRNA target sequence for PRDM1 (NM_001198.2,1348-1366).
gactcctacgcttacttga

SEQ ID NO: 9828 - DNA, 19 bp, Homo sapiens
  siRNA target sequence for PRDM1 (NM_001198.2,1373-1391).
cctacggcacggaaggttt

SEQ ID NO: 9829 - DNA, 19 bp, Homo sapiens
  siRNA target sequence for PRDM1 (NM_001198.2,1482-1500).
cccctacggcatgaattgt

SEQ ID NO: 9830 - DNA, 19 bp, Homo sapiens
  siRNA target sequence for PRDM1 (NM_001198.2,1483-1501).
ccctacggcatgaattgta

SEQ ID NO: 9831 - DNA, 19 bp, Homo sapiens
  siRNA target sequence for PRDM1 (NM_001198.2,1484-1502).
cctacggcatgaattgtaa

SEQ ID NO: 9832 - DNA, 19 bp, Homo sapiens
  siRNA target sequence for PRDM1 (NM_001198.2,1485-1503).
ctacggcatgaattgtaat

SEQ ID NO: 9833 - DNA, 19 bp, Homo sapiens
  siRNA target sequence for PRDM1 (NM_001198.2,1512-1530).
cgctgtgagcagcatgaat

SEQ ID NO: 9834 - DNA, 19 bp, Homo sapiens
  siRNA target sequence for PRDM1 (NM_001198.2,1523-1541).
gcatgaatggcatcaacaa

SEQ ID NO: 9835 - DNA, 19 bp, Homo sapiens
  siRNA target sequence for PRDM1 (NM_001198.2,1527-1545).
gaatggcatcaacaacttt

SEQ ID NO: 9836 - DNA, 19 bp, Homo sapiens
  siRNA target sequence for PRDM1 (NM_001198.2,1816-1834).
gtggtgcagcccaaagcta

SEQ ID NO: 9837 - DNA, 19 bp, Homo sapiens
  siRNA target sequence for PRDM1 (NM_001198.2,1862-1880).
gcgacgaagccatgaatct

SEQ ID NO: 9838 - DNA, 19 bp, Homo sapiens
  siRNA target sequence for PRDM1 (NM_001198.2,1864-1882).
gacgaagccatgaatctca

SEQ ID NO: 9839 - DNA, 19 bp, Homo sapiens
  siRNA target sequence for PRDM1 (NM_001198.2,1945-1963).
ggcaagatcaagtacgaat

SEQ ID NO: 9840 - DNA, 19 bp, Homo sapiens
  siRNA target sequence for PRDM1 (NM_001198.2,2027-2045).
gtggagaacggcctttcaa

SEQ ID NO: 9841 - DNA, 19 bp, Homo sapiens
  siRNA target sequence for PRDM1 (NM_001198.2,2057-2075).
gcaacaagggctttactca

SEQ ID NO: 9842 - DNA, 19 bp, Homo sapiens
  siRNA target sequence for PRDM1 (NM_001198.2,2136-2154).
ggtctgccacaagagattt

SEQ ID NO: 9843 - DNA, 19 bp, Homo sapiens
  siRNA target sequence for PRDM1 (NM_001198.2,2137-2155).
gtctgccacaagagattta

SEQ ID NO: 9844 - DNA, 19 bp, Homo sapiens
  siRNA target sequence for PRDM1 (NM_001198.2,2221-2239).
gtgtgccctgccaagttca

SEQ ID NO: 9845 - DNA, 19 bp, Homo sapiens
  siRNA target sequence for PRDM1 (NM_001198.2,2430-2448).
gtttgacatcagtgacaat

SEQ ID NO: 9846 - DNA, 19 bp, Homo sapiens
  siRNA target sequence for PRDM1 (NM_001198.2,2539-2557).
gaaactggcctgaaagtgt

SEQ ID NO: 9847 - DNA, 19 bp, Homo sapiens
  siRNA target sequence for PRDM16 (NM_022114.1,101-119).
gtgacggtgacgttgtaaa

SEQ ID NO: 9848 - DNA, 19 bp, Homo sapiens
  siRNA target sequence for PRDM16 (NM_022114.1,103-121).
gacggtgacgttgtaaata

SEQ ID NO: 9849 - DNA, 19 bp, Homo sapiens
  siRNA target sequence for PRDM16 (NM_022114.1,105-123).
cggtgacgttgtaaataat

SEQ ID NO: 9850 - DNA, 19 bp, Homo sapiens
  siRNA target sequence for PRDM16 (NM_022114.1,107-125).
gtgacgttgtaaataatat

SEQ ID NO: 9851 - DNA, 19 bp, Homo sapiens
  siRNA target sequence for PRDM16 (NM_022114.1,109-127).
gacgttgtaaataatatgt

SEQ ID NO: 9852 - DNA, 19 bp, Homo sapiens
  siRNA target sequence for PRDM16 (NM_022114.1,111-129).
cgttgtaaataatatgtat

SEQ ID NO: 9853 - DNA, 19 bp, Homo sapiens
  siRNA target sequence for PRDM16 (NM_022114.1,267-285).
cgaggcccctgtctacatt

SEQ ID NO: 9854 - DNA, 19 bp, Homo sapiens
  siRNA target sequence for PRDM16 (NM_022114.1,438-456).
cttcggatgggagcaaata

SEQ ID NO: 9855 - DNA, 19 bp, Homo sapiens
  siRNA target sequence for PRDM16 (NM_022114.1,487-505).
ggctgcatcacaaagatct

SEQ ID NO: 9856 - DNA, 19 bp, Homo sapiens
  siRNA target sequence for PRDM16 (NM_022114.1,528-546).
gttctgcgtggatgcaaat

SEQ ID NO: 9857 - DNA, 19 bp, Homo sapiens
  siRNA target sequence for PRDM16 (NM_022114.1,977-995).
cggaggagcgcgagtacaa

SEQ ID NO: 9858 - DNA, 19 bp, Homo sapiens
  siRNA target sequence for PRDM16 (NM_022114.1,978-996).
ggaggagcgcgagtacaaa

SEQ ID NO: 9859 - DNA, 19 bp, Homo sapiens
  siRNA target sequence for PRDM16 (NM_022114.1,1068-1086).
caaacgcttcgaatgtgaa

SEQ ID NO: 9860 - DNA, 19 bp, Homo sapiens
  siRNA target sequence for PRDM16 (NM_022114.1,1072-1090).
cgcttcgaatgtgaaaact

SEQ ID NO: 9861 - DNA, 19 bp, Homo sapiens
  siRNA target sequence for PRDM16 (NM_022114.1,1232-1250).
gcacggtgaagcctttcat

SEQ ID NO: 9862 - DNA, 19 bp, Homo sapiens
  siRNA target sequence for PRDM16 (NM_022114.1,1233-1251).
cacggtgaagcctttcata

SEQ ID NO: 9863 - DNA, 19 bp, Homo sapiens
  siRNA target sequence for PRDM16 (NM_022114.1,1402-1420).
gagggcaagaaccattaca

SEQ ID NO: 9864 - DNA, 19 bp, Homo sapiens
  siRNA target sequence for PRDM16 (NM_022114.1,1862-1880).
cggacggcagtgactttga

SEQ ID NO: 9865 - DNA, 19 bp, Homo sapiens
  siRNA target sequence for PRDM16 (NM_022114.1,2054-2072).
ccgaggtgcctgtcttcta

SEQ ID NO: 9866 - DNA, 19 bp, Homo sapiens
  siRNA target sequence for PRDM16 (NM_022114.1,2055-2073).
cgaggtgcctgtcttctat

SEQ ID NO: 9867 - DNA, 19 bp, Homo sapiens
  siRNA target sequence for PRDM16 (NM_022114.1,2056-2074).
gaggtgcctgtcttctatt

SEQ ID NO: 9868 - DNA, 19 bp, Homo sapiens
  siRNA target sequence for PRDM16 (NM_022114.1,2156-2174).
catccattgccgagaagta

SEQ ID NO: 9869 - DNA, 19 bp, Homo sapiens
  siRNA target sequence for PRDM16 (NM_022114.1,2319-2337).
caaggccgagccaaagtca

SEQ ID NO: 9870 - DNA, 19 bp, Homo sapiens
  siRNA target sequence for PRDM16 (NM_022114.1,2659-2677).
cccatctacagggtagaaa

SEQ ID NO: 9871 - DNA, 19 bp, Homo sapiens
  siRNA target sequence for PRDM16 (NM_022114.1,2992-3010).
cagccgtacaggtgtaagt

SEQ ID NO: 9872 - DNA, 19 bp, Homo sapiens
  siRNA target sequence for PRDM16 (NM_022114.1,2995-3013).
ccgtacaggtgtaagtact

SEQ ID NO: 9873 - DNA, 19 bp, Homo sapiens
  siRNA target sequence for PRDM16 (NM_022114.1,3019-3037).
cgctccttcagcatctctt

SEQ ID NO: 9874 - DNA, 19 bp, Homo sapiens
  siRNA target sequence for PRDM16 (NM_022114.1,3239-3257).
cggacaaccacgcactttt

SEQ ID NO: 9875 - DNA, 19 bp, Homo sapiens
  siRNA target sequence for PRDM16 (NM_022114.1,3251-3269).
cacttttagacgagaaaga

SEQ ID NO: 9876 - DNA, 19 bp, Homo sapiens
  siRNA target sequence for PRDM16 (NM_022114.1,3282-3300).
ctcggaaatcagaaacttt

SEQ ID NO: 9877 - DNA, 19 bp, Homo sapiens
  siRNA target sequence for PRDM16 (NM_022114.1,3597-3615).
ccacgaaggcggtctgtta

SEQ ID NO: 9878 - DNA, 19 bp, Homo sapiens
  siRNA target sequence for PRDM16 (NM_022114.1,3601-3619).
gaaggcggtctgttagctt

SEQ ID NO: 9879 - DNA, 19 bp, Homo sapiens
  siRNA target sequence for PRDM16 (NM_022114.1,3621-3639).
ggagccgatgccgactttt

SEQ ID NO: 9880 - DNA, 19 bp, Homo sapiens
  siRNA target sequence for PRDM16 (NM_022114.1,3685-3703).
gttaaagatgtgcttaatt

SEQ ID NO: 9881 - DNA, 19 bp, Homo sapiens
  siRNA target sequence for PRDM16 (NM_022114.1,3696-3714).
gcttaattccaccttagat

SEQ ID NO: 9882 - DNA, 19 bp, Homo sapiens
  siRNA target sequence for PRDM2 (NM_012231.2,903-921).
ctgaggtacccgaacatgt

SEQ ID NO: 9883 - DNA, 19 bp, Homo sapiens
  siRNA target sequence for PRDM2 (NM_012231.2,986-1004).
gtctgggccactaaaccaa

SEQ ID NO: 9884 - DNA, 19 bp, Homo sapiens
  siRNA target sequence for PRDM2 (NM_012231.2,992-1010).
gccactaaaccaattttaa

SEQ ID NO: 9885 - DNA, 19 bp, Homo sapiens
  siRNA target sequence for PRDM2 (NM_012231.2,1053-1071).
gatctcaggttaagaataa

SEQ ID NO: 9886 - DNA, 19 bp, Homo sapiens
  siRNA target sequence for PRDM2 (NM_012231.2,1085-1103).
gaggtgtattacccaaatt

SEQ ID NO: 9887 - DNA, 19 bp, Homo sapiens
  siRNA target sequence for PRDM2 (NM_012231.2,1143-1161).
gaaactggctgcgatatgt

SEQ ID NO: 9888 - DNA, 19 bp, Homo sapiens
  siRNA target sequence for PRDM2 (NM_012231.2,1174-1192).
ctcaggagaagagcaaaat

SEQ ID NO: 9889 - DNA, 19 bp, Homo sapiens
  siRNA target sequence for PRDM2 (NM_012231.2,1213-1231).
cagagccatttactataaa

SEQ ID NO: 9890 - DNA, 19 bp, Homo sapiens
  siRNA target sequence for PRDM2 (NM_012231.2,1217-1235).
gccatttactataaaactt

SEQ ID NO: 9891 - DNA, 19 bp, Homo sapiens
  siRNA target sequence for PRDM2 (NM_012231.2,1405-1423).
caaaatccaagacatacaa

SEQ ID NO: 9892 - DNA, 19 bp, Homo sapiens
  siRNA target sequence for PRDM2 (NM_012231.2,1447-1465).
cacctctgcaaatatgaga

SEQ ID NO: 9893 - DNA, 19 bp, Homo sapiens
  siRNA target sequence for PRDM2 (NM_012231.2,1634-1652).
gcttgtgaggtgaatgatt

SEQ ID NO: 9894 - DNA, 19 bp, Homo sapiens
  siRNA target sequence for PRDM2 (NM_012231.2,1635-1653).
cttgtgaggtgaatgattt

SEQ ID NO: 9895 - DNA, 19 bp, Homo sapiens
  siRNA target sequence for PRDM2 (NM_012231.2,1879-1897).
gcaaatccccagaactaaa

SEQ ID NO: 9896 - DNA, 19 bp, Homo sapiens
  siRNA target sequence for PRDM2 (NM_012231.2,1911-1929).
gtgatgtatttgaaacgtt

SEQ ID NO: 9897 - DNA, 19 bp, Homo sapiens
  siRNA target sequence for PRDM2 (NM_012231.2,1933-1951).
gtttccgtgtcaacattgt

SEQ ID NO: 9898 - DNA, 19 bp, Homo sapiens
  siRNA target sequence for PRDM2 (NM_012231.2,1979-1997).
cttgagcgtcacatgcata

SEQ ID NO: 9899 - DNA, 19 bp, Homo sapiens
  siRNA target sequence for PRDM2 (NM_012231.2,1984-2002).
gcgtcacatgcatatccat

SEQ ID NO: 9900 - DNA, 19 bp, Homo sapiens
  siRNA target sequence for PRDM2 (NM_012231.2,1985-2003).
cgtcacatgcatatccata

SEQ ID NO: 9901 - DNA, 19 bp, Homo sapiens
  siRNA target sequence for PRDM2 (NM_012231.2,1986-2004).
gtcacatgcatatccatat

SEQ ID NO: 9902 - DNA, 19 bp, Homo sapiens
  siRNA target sequence for PRDM2 (NM_012231.2,2010-2028).
ccgtcaatcatgctttcaa

SEQ ID NO: 9903 - DNA, 19 bp, Homo sapiens
  siRNA target sequence for PRDM2 (NM_012231.2,2109-2127).
ggaaacccagccaaacact

SEQ ID NO: 9904 - DNA, 19 bp, Homo sapiens
  siRNA target sequence for PRDM2 (NM_012231.2,2110-2128).
gaaacccagccaaacacta

SEQ ID NO: 9905 - DNA, 19 bp, Homo sapiens
  siRNA target sequence for PRDM2 (NM_012231.2,2216-2234).
gactgtctgatcatgaatt

SEQ ID NO: 9906 - DNA, 19 bp, Homo sapiens
  siRNA target sequence for PRDM2 (NM_012231.2,2218-2236).
ctgtctgatcatgaattca

SEQ ID NO: 9907 - DNA, 19 bp, Homo sapiens
  siRNA target sequence for PRDM2 (NM_012231.2,2220-2238).
gtctgatcatgaattcaga

SEQ ID NO: 9908 - DNA, 19 bp, Homo sapiens
  siRNA target sequence for PRDM2 (NM_012231.2,2243-2261).
gcttcccaagacacaataa

SEQ ID NO: 9909 - DNA, 19 bp, Homo sapiens
  siRNA target sequence for PRDM2 (NM_012231.2,2300-2318).
cttcatccgtgcaaatatt

SEQ ID NO: 9910 - DNA, 19 bp, Homo sapiens
  siRNA target sequence for PRDM2 (NM_012231.2,2326-2344).
ggtttttggaactcatact

SEQ ID NO: 9911 - DNA, 19 bp, Homo sapiens
  siRNA target sequence for PRDM2 (NM_012231.2,2327-2345).
gtttttggaactcatacta

SEQ ID NO: 9912 - DNA, 19 bp, Homo sapiens
  siRNA target sequence for PRDM2 (NM_012231.2,2504-2522).
gcagatgatgtgtacatca

SEQ ID NO: 9913 - DNA, 19 bp, Homo sapiens
  siRNA target sequence for PRDM2 (NM_012231.2,2527-2545).
catttctagcaatatctct

SEQ ID NO: 9914 - DNA, 19 bp, Homo sapiens
  siRNA target sequence for PRDM2 (NM_012231.2,2536-2554).
caatatctctgaaaactta

SEQ ID NO: 9915 - DNA, 19 bp, Homo sapiens
  siRNA target sequence for PRDM2 (NM_012231.2,2551-2569).
cttaaattactatattgat

SEQ ID NO: 9916 - DNA, 19 bp, Homo sapiens
  siRNA target sequence for PRDM2 (NM_012231.2,2598-2616).
gtaactgtgatgtgattga

SEQ ID NO: 9917 - DNA, 19 bp, Homo sapiens
  siRNA target sequence for PRDM2 (NM_012231.2,2625-2643).
ctgcttcggcagatttgta

SEQ ID NO: 9918 - DNA, 19 bp, Homo sapiens
  siRNA target sequence for PRDM2 (NM_012231.2,2664-2682).
ctccagttacagtggaaat

SEQ ID NO: 9919 - DNA, 19 bp, Homo sapiens
  siRNA target sequence for PRDM2 (NM_012231.2,2703-2721).
cacaggtccctgtaacaga

SEQ ID NO: 9920 - DNA, 19 bp, Homo sapiens
  siRNA target sequence for PRDM2 (NM_012231.2,2707-2725).
ggtccctgtaacagaagat

SEQ ID NO: 9921 - DNA, 19 bp, Homo sapiens
  siRNA target sequence for PRDM2 (NM_012231.2,2737-2755).
gcctttgggcagcacaaat

SEQ ID NO: 9922 - DNA, 19 bp, Homo sapiens
  siRNA target sequence for PRDM2 (NM_012231.2,2738-2756).
cctttgggcagcacaaata

SEQ ID NO: 9923 - DNA, 19 bp, Homo sapiens
  siRNA target sequence for PRDM2 (NM_012231.2,2789-2807).
cctgcactgcccaaaatta

SEQ ID NO: 9924 - DNA, 19 bp, Homo sapiens
  siRNA target sequence for PRDM2 (NM_012231.2,2855-2873).
cttcctcttagcatatcaa

SEQ ID NO: 9925 - DNA, 19 bp, Homo sapiens
  siRNA target sequence for PRDM2 (NM_012231.2,2858-2876).
cctcttagcatatcaacaa

SEQ ID NO: 9926 - DNA, 19 bp, Homo sapiens
  siRNA target sequence for PRDM2 (NM_012231.2,2874-2892).
caacagaggcagtgtcttt

SEQ ID NO: 9927 - DNA, 19 bp, Homo sapiens
  siRNA target sequence for PRDM2 (NM_012231.2,2936-2954).
cttcttcaaacccaagata

SEQ ID NO: 9928 - DNA, 19 bp, Homo sapiens
  siRNA target sequence for PRDM2 (NM_012231.2,2976-2994).
cagcaactgaaatagctaa

SEQ ID NO: 9929 - DNA, 19 bp, Homo sapiens
  siRNA target sequence for PRDM2 (NM_012231.2,3038-3056).
gtgacctcaagtaggttta

SEQ ID NO: 9930 - DNA, 19 bp, Homo sapiens
  siRNA target sequence for PRDM2 (NM_012231.2,3387-3405).
gggaatctgtcttagatct

SEQ ID NO: 9931 - DNA, 19 bp, Homo sapiens
  siRNA target sequence for PRDM2 (NM_012231.2,3401-3419).
gatctcagtgtgcataaaa

SEQ ID NO: 9932 - DNA, 19 bp, Homo sapiens
  siRNA target sequence for PRDM2 (NM_012231.2,3410-3428).
gtgcataaaaagcattgta

SEQ ID NO: 9933 - DNA, 19 bp, Homo sapiens
  siRNA target sequence for PRDM2 (NM_012231.2,3412-3430).
gcataaaaagcattgtagt

SEQ ID NO: 9934 - DNA, 19 bp, Homo sapiens
  siRNA target sequence for PRDM2 (NM_012231.2,3474-3492).
ctacgtgtagtgctgtaaa

SEQ ID NO: 9935 - DNA, 19 bp, Homo sapiens
  siRNA target sequence for PRDM2 (NM_012231.2,3539-3557).
gaatataatggcatcgatt

SEQ ID NO: 9936 - DNA, 19 bp, Homo sapiens
  siRNA target sequence for PRDM2 (NM_012231.2,3550-3568).
catcgatttacctgtagaa

SEQ ID NO: 9937 - DNA, 19 bp, Homo sapiens
  siRNA target sequence for PRDM2 (NM_012231.2,3588-3606).
ggagcccaagtccttgtaa

SEQ ID NO: 9938 - DNA, 19 bp, Homo sapiens
  siRNA target sequence for PRDM2 (NM_012231.2,4085-4103).
cctctctccgcaatatcat

SEQ ID NO: 9939 - DNA, 19 bp, Homo sapiens
  siRNA target sequence for PRDM2 (NM_012231.2,4090-4108).
ctccgcaatatcatctgtt

SEQ ID NO: 9940 - DNA, 19 bp, Homo sapiens
  siRNA target sequence for PRDM2 (NM_012231.2,4093-4111).
cgcaatatcatctgttgtt

SEQ ID NO: 9941 - DNA, 19 bp, Homo sapiens
  siRNA target sequence for PRDM2 (NM_012231.2,4139-4157).
ctccccatgatatctttca

SEQ ID NO: 9942 - DNA, 19 bp, Homo sapiens
  siRNA target sequence for PRDM2 (NM_012231.2,4226-4244).
gttgttgttcaggaaacat

SEQ ID NO: 9943 - DNA, 19 bp, Homo sapiens
  siRNA target sequence for PRDM2 (NM_012231.2,4259-4277).
gtttgcaacgtctgtgaat

SEQ ID NO: 9944 - DNA, 19 bp, Homo sapiens
  siRNA target sequence for PRDM2 (NM_012231.2,4286-4304).
ctttccattaaagatctaa

SEQ ID NO: 9945 - DNA, 19 bp, Homo sapiens
  siRNA target sequence for PRDM2 (NM_012231.2,4301-4319).
ctaaccaaacatttatcta

SEQ ID NO: 9946 - DNA, 19 bp, Homo sapiens
  siRNA target sequence for PRDM2 (NM_012231.2,4358-4376).
gtgcagctttttaaggata

SEQ ID NO: 9947 - DNA, 19 bp, Homo sapiens
  siRNA target sequence for PRDM2 (NM_012231.2,4389-4407).
cagaacatcgctttttgct

SEQ ID NO: 9948 - DNA, 19 bp, Homo sapiens
  siRNA target sequence for PRDM2 (NM_012231.2,4512-4530).
gcacacatcacgagtttga

SEQ ID NO: 9949 - DNA, 19 bp, Homo sapiens
  siRNA target sequence for PRDM2 (NM_012231.2,4575-4593).
cccatgtagagcatatgca

SEQ ID NO: 9950 - DNA, 19 bp, Homo sapiens
  siRNA target sequence for PRDM2 (NM_012231.2,4596-4614).
gcttgccagaagatccttt

SEQ ID NO: 9951 - DNA, 19 bp, Homo sapiens
  siRNA target sequence for PRDM2 (NM_012231.2,4658-4676).
gagctttacacgactataa

SEQ ID NO: 9952 - DNA, 19 bp, Homo sapiens
  siRNA target sequence for PRDM2 (NM_012231.2,4733-4751).
cagcattacccaagcttta

SEQ ID NO: 9953 - DNA, 19 bp, Homo sapiens
  siRNA target sequence for PRDM2 (NM_012231.2,4735-4753).
gcattacccaagctttaaa

SEQ ID NO: 9954 - DNA, 19 bp, Homo sapiens
  siRNA target sequence for PRDM2 (NM_012231.2,4796-4814).
ggtgtgacagccacaaatt

SEQ ID NO: 9955 - DNA, 19 bp, Homo sapiens
  siRNA target sequence for PRDM2 (NM_012231.2,4850-4868).
gccattcgctgcacaaagt

SEQ ID NO: 9956 - DNA, 19 bp, Homo sapiens
  siRNA target sequence for PRDM2 (NM_012231.2,4852-4870).
cattcgctgcacaaagtgt

SEQ ID NO: 9957 - DNA, 19 bp, Homo sapiens
  siRNA target sequence for PRDM2 (NM_012231.2,4872-4890).
gaaaaggtgtcgacaatat

SEQ ID NO: 9958 - DNA, 19 bp, Homo sapiens
  siRNA target sequence for PRDM2 (NM_012231.2,4891-4909).
gccggagttgcacaaacat

SEQ ID NO: 9959 - DNA, 19 bp, Homo sapiens
  siRNA target sequence for PRDM2 (NM_012231.2,4892-4910).
ccggagttgcacaaacata

SEQ ID NO: 9960 - DNA, 19 bp, Homo sapiens
  siRNA target sequence for PRDM2 (NM_012231.2,4893-4911).
cggagttgcacaaacatat

SEQ ID NO: 9961 - DNA, 19 bp, Homo sapiens
  siRNA target sequence for PRDM2 (NM_012231.2,4944-4962).
ggtacacgcctaagaaaaa

SEQ ID NO: 9962 - DNA, 19 bp, Homo sapiens
  siRNA target sequence for PRDM2 (NM_012231.2,5000-5018).
ggcgtggtggttttagata

SEQ ID NO: 9963 - DNA, 19 bp, Homo sapiens
  siRNA target sequence for PRDM2 (NM_012231.2,5003-5021).
gtggtggttttagataact

SEQ ID NO: 9964 - DNA, 19 bp, Homo sapiens
  siRNA target sequence for PRDM2 (NM_012231.2,5005-5023).
ggtggttttagataactct

SEQ ID NO: 9965 - DNA, 19 bp, Homo sapiens
  siRNA target sequence for PRDM2 (NM_012231.2,5051-5069).
cagcccaaaaggcttaact

SEQ ID NO: 9966 - DNA, 19 bp, Homo sapiens
  siRNA target sequence for PRDM2 (NM_012231.2,5075-5093).
gttgagctcagcaaaatgt

SEQ ID NO: 9967 - DNA, 19 bp, Homo sapiens
  siRNA target sequence for PRDM2 (NM_012231.2,5085-5103).
gcaaaatgtcgtcgaataa

SEQ ID NO: 9968 - DNA, 19 bp, Homo sapiens
  siRNA target sequence for PRDM2 (NM_012231.2,5094-5112).
cgtcgaataagctcaaatt

SEQ ID NO: 9969 - DNA, 19 bp, Homo sapiens
  siRNA target sequence for PRDM2 (NM_012231.2,5095-5113).
gtcgaataagctcaaatta

SEQ ID NO: 9970 - DNA, 19 bp, Homo sapiens
  siRNA target sequence for PRDM2 (NM_012231.2,5137-5155).
gctagtacagaaagcaatt

SEQ ID NO: 9971 - DNA, 19 bp, Homo sapiens
  siRNA target sequence for PRDM2 (NM_012231.2,5179-5197).
gcagaaggccgacttgaaa

SEQ ID NO: 9972 - DNA, 19 bp, Homo sapiens
  siRNA target sequence for PRDM2 (NM_012231.2,5180-5198).
cagaaggccgacttgaaaa

SEQ ID NO: 9973 - DNA, 19 bp, Homo sapiens
  siRNA target sequence for PRDM2 (NM_012231.2,5185-5203).
ggccgacttgaaaaatgct

SEQ ID NO: 9974 - DNA, 19 bp, Homo sapiens
  siRNA target sequence for PRDM2 (NM_012231.2,5186-5204).
gccgacttgaaaaatgctt

SEQ ID NO: 9975 - DNA, 19 bp, Homo sapiens
  siRNA target sequence for PRDM2 (NM_012231.2,5221-5239).
catctgcccttactgtaat

SEQ ID NO: 9976 - DNA, 19 bp, Homo sapiens
  siRNA target sequence for PRDM2 (NM_012231.2,5224-5242).
ctgcccttactgtaatcga

SEQ ID NO: 9977 - DNA, 19 bp, Homo sapiens
  siRNA target sequence for PRDM2 (NM_012231.2,5235-5253).
gtaatcgagagttcactta

SEQ ID NO: 9978 - DNA, 19 bp, Homo sapiens
  siRNA target sequence for PRDM2 (NM_012231.2,5353-5371).
ctcatcacctgcaagtagt

SEQ ID NO: 9979 - DNA, 19 bp, Homo sapiens
  siRNA target sequence for PRDM2 (NM_012231.2,5360-5378).
cctgcaagtagtgacaaaa

SEQ ID NO: 9980 - DNA, 19 bp, Homo sapiens
  siRNA target sequence for PRDM2 (NM_012231.2,5408-5426).
gcggatgcggagattaaaa

SEQ ID NO: 9981 - DNA, 19 bp, Homo sapiens
  siRNA target sequence for PRDM2 (NM_012231.2,5409-5427).
cggatgcggagattaaaat

SEQ ID NO: 9982 - DNA, 19 bp, Homo sapiens
  siRNA target sequence for PRDM2 (NM_012231.2,5534-5552).
gcagcttcggtgaaatcca

SEQ ID NO: 9983 - DNA, 19 bp, Homo sapiens
  siRNA target sequence for PRDM2 (NM_012231.2,5535-5553).
cagcttcggtgaaatccaa

SEQ ID NO: 9984 - DNA, 19 bp, Homo sapiens
  siRNA target sequence for PRDM2 (NM_012231.2,5537-5555).
gcttcggtgaaatccaaaa

SEQ ID NO: 9985 - DNA, 19 bp, Homo sapiens
  siRNA target sequence for PRDM2 (NM_012231.2,5538-5556).
cttcggtgaaatccaaaaa

SEQ ID NO: 9986 - DNA, 19 bp, Homo sapiens
  siRNA target sequence for PRDM2 (NM_012231.2,5578-5596).
gaactccagcccgataaga

SEQ ID NO: 9987 - DNA, 19 bp, Homo sapiens
  siRNA target sequence for PRDM2 (NM_012231.2,5636-5654).
gctgtggccaagaatcatt

SEQ ID NO: 9988 - DNA, 19 bp, Homo sapiens
  siRNA target sequence for PRDM2 (NM_012231.2,5657-5675).
gctcagctttccagcaaaa

SEQ ID NO: 9989 - DNA, 19 bp, Homo sapiens
  siRNA target sequence for PRDM2 (NM_012231.2,5693-5711).
gtgagggtacagaaaagca

SEQ ID NO: 9990 - DNA, 19 bp, Homo sapiens
  siRNA target sequence for PRDM2 (NM_012231.2,5734-5752).
caccttggcgagtaagaaa

SEQ ID NO: 9991 - DNA, 19 bp, Homo sapiens
  siRNA target sequence for PRDM2 (NM_012231.2,5754-5772).
gaacagaccggttcaatat

SEQ ID NO: 9992 - DNA, 19 bp, Homo sapiens
  siRNA target sequence for PRDM2 (NM_012231.2,5759-5777).
gaccggttcaatataaaat

SEQ ID NO: 9993 - DNA, 19 bp, Homo sapiens
  siRNA target sequence for PRDM2 (NM_012231.2,5761-5779).
ccggttcaatataaaatct

SEQ ID NO: 9994 - DNA, 19 bp, Homo sapiens
  siRNA target sequence for PRDM2 (NM_012231.2,5762-5780).
cggttcaatataaaatcta

SEQ ID NO: 9995 - DNA, 19 bp, Homo sapiens
  siRNA target sequence for PRRX1 (NM_006902.2,1117-1135).
ccctgcaggcgaaaaagaa

SEQ ID NO: 9996 - DNA, 19 bp, Homo sapiens
  siRNA target sequence for PRRX1 (NM_006902.2,1119-1137).
ctgcaggcgaaaaagaact

SEQ ID NO: 9997 - DNA, 19 bp, Homo sapiens
  siRNA target sequence for PRRX1 (NM_006902.2,1186-1204).
cggcacaggcggatgagaa

SEQ ID NO: 9998 - DNA, 19 bp, Homo sapiens
  siRNA target sequence for PRRX1 (NM_006902.2,1310-1328).
gagaaagcagcgaaggaat

SEQ ID NO: 9999 - DNA, 19 bp, Homo sapiens
  siRNA target sequence for PRRX1 (NM_006902.2,1325-1343).
gaataggacaaccttcaat

SEQ ID NO: 10000 - DNA, 19 bp, Homo sapiens
  siRNA target sequence for PRRX1 (NM_006902.2,1358-1376).
ggctttggagcgtgtcttt

SEQ ID NO: 10001 - DNA, 19 bp, Homo sapiens
  siRNA target sequence for PRRX1 (NM_006902.2,1373-1391).
ctttgagcggacacactat

SEQ ID NO: 10002 - DNA, 19 bp, Homo sapiens
  siRNA target sequence for PRRX1 (NM_006902.2,1384-1402).
cacactatcctgatgcttt

SEQ ID NO: 10003 - DNA, 19 bp, Homo sapiens
  siRNA target sequence for PRRX1 (NM_006902.2,1522-1540).
cttccctcctcaaatccta

SEQ ID NO: 10004 - DNA, 19 bp, Homo sapiens
  siRNA target sequence for PRRX1 (NM_006902.2,1643-1661).
gtccctcccaagatgttgt

SEQ ID NO: 10005 - DNA, 19 bp, Homo sapiens
  siRNA target sequence for PRRX1 (NM_022716.1,1637-1655).
cgccatggctacttattct

SEQ ID NO: 10006 - DNA, 19 bp, Homo sapiens
  siRNA target sequence for PRRX1 (NM_022716.1,1656-1674).
gccacatgtgccaacaata

SEQ ID NO: 10007 - DNA, 19 bp, Homo sapiens
  siRNA target sequence for PRRX1 (NM_022716.1,1727-1745).
ggccaaggaatatagttta

SEQ ID NO: 10008 - DNA, 19 bp, Homo sapiens
  siRNA target sequence for PRRX1 (NM_022716.1,1729-1747).
ccaaggaatatagtttaca

SEQ ID NO: 10009 - DNA, 19 bp, Homo sapiens
  siRNA target sequence for PRRX2 (NM_016307.3,805-823).
ccgccctgagtccagatta

SEQ ID NO: 10010 - DNA, 19 bp, Homo sapiens
  siRNA target sequence for PRRX2 (NM_016307.3,806-824).
cgccctgagtccagattat

SEQ ID NO: 10011 - DNA, 19 bp, Homo sapiens
  siRNA target sequence for RARA (NM_000964.1,243-261).
gcttccagttagtggatat

SEQ ID NO: 10012 - DNA, 19 bp, Homo sapiens
  siRNA target sequence for RARA (NM_000964.1,244-262).
cttccagttagtggatata

SEQ ID NO: 10013 - DNA, 19 bp, Homo sapiens
  siRNA target sequence for RARA (NM_000964.1,247-265).
ccagttagtggatatagca

SEQ ID NO: 10014 - DNA, 19 bp, Homo sapiens
  siRNA target sequence for RARA (NM_000964.1,795-813).
ctccaccaagtgcatcatt

SEQ ID NO: 10015 - DNA, 19 bp, Homo sapiens
  siRNA target sequence for RARA (NM_000964.1,801-819).
caagtgcatcattaagact

SEQ ID NO: 10016 - DNA, 19 bp, Homo sapiens
  siRNA target sequence for RARA (NM_000964.1,1324-1342).
cctctcatccaggaaatgt

SEQ ID NO: 10017 - DNA, 19 bp, Homo sapiens
  siRNA target sequence for RARB (NM_000965.2,503-521).
ctgggcaaatcctggattt

SEQ ID NO: 10018 - DNA, 19 bp, Homo sapiens
  siRNA target sequence for RARB (NM_000965.2,508-526).
caaatcctggatttctaca

SEQ ID NO: 10019 - DNA, 19 bp, Homo sapiens
  siRNA target sequence for RARB (NM_000965.2,610-628).
cggcacactgctcaatcaa

SEQ ID NO: 10020 - DNA, 19 bp, Homo sapiens
  siRNA target sequence for RARB (NM_000965.2,611-629).
ggcacactgctcaatcaat

SEQ ID NO: 10021 - DNA, 19 bp, Homo sapiens
  siRNA target sequence for RARB (NM_000965.2,686-704).
ctccccctcgagtgtacaa

SEQ ID NO: 10022 - DNA, 19 bp, Homo sapiens
  siRNA target sequence for RARB (NM_000965.2,714-732).
cgtctgccaggacaaatca

SEQ ID NO: 10023 - DNA, 19 bp, Homo sapiens
  siRNA target sequence for RARB (NM_000965.2,717-735).
ctgccaggacaaatcatca

SEQ ID NO: 10024 - DNA, 19 bp, Homo sapiens
  siRNA target sequence for RARB (NM_000965.2,775-793).
ggctttttccgcagaagta

SEQ ID NO: 10025 - DNA, 19 bp, Homo sapiens
  siRNA target sequence for RARB (NM_000965.2,776-794).
gctttttccgcagaagtat

SEQ ID NO: 10026 - DNA, 19 bp, Homo sapiens
  siRNA target sequence for RARB (NM_000965.2,798-816).
gaagaatatgatttacact

SEQ ID NO: 10027 - DNA, 19 bp, Homo sapiens
  siRNA target sequence for RARB (NM_000965.2,815-833).
cttgtcaccgagataagaa

SEQ ID NO: 10028 - DNA, 19 bp, Homo sapiens
  siRNA target sequence for RARB (NM_000965.2,858-876).
gaatcgatgccaatactgt

SEQ ID NO: 10029 - DNA, 19 bp, Homo sapiens
  siRNA target sequence for RARB (NM_000965.2,902-920).
gaatgtccaaagaatctgt

SEQ ID NO: 10030 - DNA, 19 bp, Homo sapiens
  siRNA target sequence for RARB (NM_000965.2,968-986).
gcacagagagctatgaaat

SEQ ID NO: 10031 - DNA, 19 bp, Homo sapiens
  siRNA target sequence for RARB (NM_000965.2,1063-1081).
ggtaaatacaccacgaatt

SEQ ID NO: 10032 - DNA, 19 bp, Homo sapiens
  siRNA target sequence for RARB (NM_000965.2,1140-1158).
ggccaccaagtgcattatt

SEQ ID NO: 10033 - DNA, 19 bp, Homo sapiens
  siRNA target sequence for RARB (NM_000965.2,1164-1182).
cgtggagtttgctaaacgt

SEQ ID NO: 10034 - DNA, 19 bp, Homo sapiens
  siRNA target sequence for RARB (NM_000965.2,1245-1263).
ggacatcctgattcttaga

SEQ ID NO: 10035 - DNA, 19 bp, Homo sapiens
  siRNA target sequence for RARB (NM_000965.2,1248-1266).
catcctgattcttagaatt

SEQ ID NO: 10036 - DNA, 19 bp, Homo sapiens
  siRNA target sequence for RARB (NM_000965.2,1274-1292).
ggtataccccagaacaaga

SEQ ID NO: 10037 - DNA, 19 bp, Homo sapiens
  siRNA target sequence for RARB (NM_000965.2,1311-1329).
cggccttaccctaaatcga

SEQ ID NO: 10038 - DNA, 19 bp, Homo sapiens
  siRNA target sequence for RARB (NM_000965.2,1312-1330).
ggccttaccctaaatcgaa

SEQ ID NO: 10039 - DNA, 19 bp, Homo sapiens
  siRNA target sequence for RARB (NM_000965.2,1358-1376).
ctctgactgaccttgtgtt

SEQ ID NO: 10040 - DNA, 19 bp, Homo sapiens
  siRNA target sequence for RARB (NM_000965.2,1432-1450).
ctcagtgccatctgcttaa

SEQ ID NO: 10041 - DNA, 19 bp, Homo sapiens
  siRNA target sequence for RARB (NM_000965.2,1481-1499).
cgacaaaagtagataagct

SEQ ID NO: 10042 - DNA, 19 bp, Homo sapiens
  siRNA target sequence for RARB (NM_000965.2,1482-1500).
gacaaaagtagataagcta

SEQ ID NO: 10043 - DNA, 19 bp, Homo sapiens
  siRNA target sequence for RARB (NM_000965.2,1508-1526).
cattgctggaagcactaaa

SEQ ID NO: 10044 - DNA, 19 bp, Homo sapiens
  siRNA target sequence for RARB (NM_000965.2,1512-1530).
gctggaagcactaaaaatt

SEQ ID NO: 10045 - DNA, 19 bp, Homo sapiens
  siRNA target sequence for RARB (NM_000965.2,1551-1569).
cagcaagcctcacatgttt

SEQ ID NO: 10046 - DNA, 19 bp, Homo sapiens
  siRNA target sequence for RARB (NM_000965.2,1599-1617).
ccgtagcatcagtgctaaa

SEQ ID NO: 10047 - DNA, 19 bp, Homo sapiens
  siRNA target sequence for RARB (NM_000965.2,1618-1636).
ggtgcagagcgtgtaatta

SEQ ID NO: 10048 - DNA, 19 bp, Homo sapiens
  siRNA target sequence for RARB (NM_000965.2,1622-1640).
cagagcgtgtaattacctt

SEQ ID NO: 10049 - DNA, 19 bp, Homo sapiens
  siRNA target sequence for RARB (NM_000965.2,1626-1644).
gcgtgtaattaccttgaaa

SEQ ID NO: 10050 - DNA, 19 bp, Homo sapiens
  siRNA target sequence for RARB (NM_000965.2,1627-1645).
cgtgtaattaccttgaaaa

SEQ ID NO: 10051 - DNA, 19 bp, Homo sapiens
  siRNA target sequence for RARB (NM_000965.2,1661-1679).
caatgccacctctcattca

SEQ ID NO: 10052 - DNA, 19 bp, Homo sapiens
  siRNA target sequence for RARB (NM_000965.2,1665-1683).
gccacctctcattcaagaa

SEQ ID NO: 10053 - DNA, 19 bp, Homo sapiens
  siRNA target sequence for RARG (NM_000966.3,674-692).
cgcctcctcgggtctacaa

SEQ ID NO: 10054 - DNA, 19 bp, Homo sapiens
  siRNA target sequence for RARG (NM_000966.3,698-716).
gcttcgtgtgcaatgacaa

SEQ ID NO: 10055 - DNA, 19 bp, Homo sapiens
  siRNA target sequence for RARG (NM_000966.3,808-826).
caccgcgacaaaaactgta

SEQ ID NO: 10056 - DNA, 19 bp, Homo sapiens
  siRNA target sequence for RARG (NM_000966.3,811-829).
cgcgacaaaaactgtatca

SEQ ID NO: 10057 - DNA, 19 bp, Homo sapiens
  siRNA target sequence for RARG (NM_000966.3,812-830).
gcgacaaaaactgtatcat

SEQ ID NO: 10058 - DNA, 19 bp, Homo sapiens
  siRNA target sequence for RARG (NM_000966.3,1129-1147).
gctaccaagtgcatcatca

SEQ ID NO: 10059 - DNA, 19 bp, Homo sapiens
  siRNA target sequence for RARG (NM_000966.3,1167-1185).
gcggttgcctggctttaca

SEQ ID NO: 10060 - DNA, 19 bp, Homo sapiens
  siRNA target sequence for RARG (NM_000966.3,1646-1664).
gcccgatgcctcccttaat

SEQ ID NO: 10061 - DNA, 19 bp, Homo sapiens
  siRNA target sequence for RARG (NM_000966.3,1675-1693).
ctggagaaccctgaaatgt

SEQ ID NO: 10062 - DNA, 19 bp, Homo sapiens
  siRNA target sequence for RAX (NM_013435.1,299-317).
gccatcctggggtttacca

SEQ ID NO: 10063 - DNA, 19 bp, Homo sapiens
  siRNA target sequence for RB1 (NM_000321.1,394-412).
ggagtattgggaggttata

SEQ ID NO: 10064 - DNA, 19 bp, Homo sapiens
  siRNA target sequence for RB1 (NM_000321.1,403-421).
ggaggttatattcaaaaga

SEQ ID NO: 10065 - DNA, 19 bp, Homo sapiens
  siRNA target sequence for RB1 (NM_000321.1,426-444).
ggaactgtggggaatctgt

SEQ ID NO: 10066 - DNA, 19 bp, Homo sapiens
  siRNA target sequence for RB1 (NM_000321.1,427-445).
gaactgtggggaatctgta

SEQ ID NO: 10067 - DNA, 19 bp, Homo sapiens
  siRNA target sequence for RB1 (NM_000321.1,469-487).
gatgagatgtcgttcactt

SEQ ID NO: 10068 - DNA, 19 bp, Homo sapiens
  siRNA target sequence for RB1 (NM_000321.1,557-575).
ccagtaccaaagttgataa

SEQ ID NO: 10069 - DNA, 19 bp, Homo sapiens
  siRNA target sequence for RB1 (NM_000321.1,587-605).
gactgttgaagaagtatga

SEQ ID NO: 10070 - DNA, 19 bp, Homo sapiens
  siRNA target sequence for RB1 (NM_000321.1,591-609).
gttgaagaagtatgatgta

SEQ ID NO: 10071 - DNA, 19 bp, Homo sapiens
  siRNA target sequence for RB1 (NM_000321.1,634-652).
gaaaggacatgtgaactta

SEQ ID NO: 10072 - DNA, 19 bp, Homo sapiens
  siRNA target sequence for RB1 (NM_000321.1,664-682).
caacccagcagttcgatat

SEQ ID NO: 10073 - DNA, 19 bp, Homo sapiens
  siRNA target sequence for RB1 (NM_000321.1,667-685).
cccagcagttcgatatcta

SEQ ID NO: 10074 - DNA, 19 bp, Homo sapiens
  siRNA target sequence for RB1 (NM_000321.1,669-687).
cagcagttcgatatctact

SEQ ID NO: 10075 - DNA, 19 bp, Homo sapiens
  siRNA target sequence for RB1 (NM_000321.1,672-690).
cagttcgatatctactgaa

SEQ ID NO: 10076 - DNA, 19 bp, Homo sapiens
  siRNA target sequence for RB1 (NM_000321.1,674-692).
gttcgatatctactgaaat

SEQ ID NO: 10077 - DNA, 19 bp, Homo sapiens
  siRNA target sequence for RB1 (NM_000321.1,677-695).
cgatatctactgaaataaa

SEQ ID NO: 10078 - DNA, 19 bp, Homo sapiens
  siRNA target sequence for RB1 (NM_000321.1,796-814).
ctatgtgtccttgactatt

SEQ ID NO: 10079 - DNA, 19 bp, Homo sapiens
  siRNA target sequence for RB1 (NM_000321.1,830-848).
ctcccatgttgctcaaaga

SEQ ID NO: 10080 - DNA, 19 bp, Homo sapiens
  siRNA target sequence for RB1 (NM_000321.1,837-855).
gttgctcaaagaaccatat

SEQ ID NO: 10081 - DNA, 19 bp, Homo sapiens
  siRNA target sequence for RB1 (NM_000321.1,840-858).
gctcaaagaaccatataaa

SEQ ID NO: 10082 - DNA, 19 bp, Homo sapiens
  siRNA target sequence for RB1 (NM_000321.1,914-932).
ggagtgcacggatagcaaa

SEQ ID NO: 10083 - DNA, 19 bp, Homo sapiens
  siRNA target sequence for RB1 (NM_000321.1,915-933).
gagtgcacggatagcaaaa

SEQ ID NO: 10084 - DNA, 19 bp, Homo sapiens
  siRNA target sequence for RB1 (NM_000321.1,917-935).
gtgcacggatagcaaaaca

SEQ ID NO: 10085 - DNA, 19 bp, Homo sapiens
  siRNA target sequence for RB1 (NM_000321.1,920-938).
cacggatagcaaaacaact

SEQ ID NO: 10086 - DNA, 19 bp, Homo sapiens
  siRNA target sequence for RB1 (NM_000321.1,1038-1056).
gaattctcttggacttgta

SEQ ID NO: 10087 - DNA, 19 bp, Homo sapiens
  siRNA target sequence for RB1 (NM_000321.1,1072-1090).
ccagaggttgaaaatcttt

SEQ ID NO: 10088 - DNA, 19 bp, Homo sapiens
  siRNA target sequence for RB1 (NM_000321.1,1091-1109).
ctaaacgatacgaagaaat

SEQ ID NO: 10089 - DNA, 19 bp, Homo sapiens
  siRNA target sequence for RB1 (NM_000321.1,1097-1115).
gatacgaagaaatttatct

SEQ ID NO: 10090 - DNA, 19 bp, Homo sapiens
  siRNA target sequence for RB1 (NM_000321.1,1168-1186).
cagactgattctatagaca

SEQ ID NO: 10091 - DNA, 19 bp, Homo sapiens
  siRNA target sequence for RB1 (NM_000321.1,1200-1218).
gagaacaccacgaaaaagt

SEQ ID NO: 10092 - DNA, 19 bp, Homo sapiens
  siRNA target sequence for RB1 (NM_000321.1,1202-1220).
gaacaccacgaaaaagtaa

SEQ ID NO: 10093 - DNA, 19 bp, Homo sapiens
  siRNA target sequence for RB1 (NM_000321.1,1258-1276).
ccagttaggactgttatga

SEQ ID NO: 10094 - DNA, 19 bp, Homo sapiens
  siRNA target sequence for RB1 (NM_000321.1,1259-1277).
cagttaggactgttatgaa

SEQ ID NO: 10095 - DNA, 19 bp, Homo sapiens
  siRNA target sequence for RB1 (NM_000321.1,1275-1293).
gaacactatccaacaatta

SEQ ID NO: 10096 - DNA, 19 bp, Homo sapiens
  siRNA target sequence for RB1 (NM_000321.1,1328-1346).
cagaaaatctgatttccta

SEQ ID NO: 10097 - DNA, 19 bp, Homo sapiens
  siRNA target sequence for RB1 (NM_000321.1,1369-1387).
ccaaaagaaagtatactga

SEQ ID NO: 10098 - DNA, 19 bp, Homo sapiens
  siRNA target sequence for RB1 (NM_000321.1,1384-1402).
ctgaaaagagtgaaggata

SEQ ID NO: 10099 - DNA, 19 bp, Homo sapiens
  siRNA target sequence for RB1 (NM_000321.1,1391-1409).
gagtgaaggatataggata

SEQ ID NO: 10100 - DNA, 19 bp, Homo sapiens
  siRNA target sequence for RB1 (NM_000321.1,1405-1423).
ggatacatctttaaagaga

SEQ ID NO: 10101 - DNA, 19 bp, Homo sapiens
  siRNA target sequence for RB1 (NM_000321.1,1442-1460).
gacagggttgtgtcgaaat

SEQ ID NO: 10102 - DNA, 19 bp, Homo sapiens
  siRNA target sequence for RB1 (NM_000321.1,1447-1465).
ggttgtgtcgaaattggat

SEQ ID NO: 10103 - DNA, 19 bp, Homo sapiens
  siRNA target sequence for RB1 (NM_000321.1,1463-1481).
gatcacagcgatacaaact

SEQ ID NO: 10104 - DNA, 19 bp, Homo sapiens
  siRNA target sequence for RB1 (NM_000321.1,1480-1498).
cttggagttcgcttgtatt

SEQ ID NO: 10105 - DNA, 19 bp, Homo sapiens
  siRNA target sequence for RB1 (NM_000321.1,1509-1527).
ggaatccatgcttaaatca

SEQ ID NO: 10106 - DNA, 19 bp, Homo sapiens
  siRNA target sequence for RB1 (NM_000321.1,1515-1533).
catgcttaaatcagaagaa

SEQ ID NO: 10107 - DNA, 19 bp, Homo sapiens
  siRNA target sequence for RB1 (NM_000321.1,1544-1562).
ccattcaaaattttagcaa

SEQ ID NO: 10108 - DNA, 19 bp, Homo sapiens
  siRNA target sequence for RB1 (NM_000321.1,1564-1582).
cttctgaatgacaacattt

SEQ ID NO: 10109 - DNA, 19 bp, Homo sapiens
  siRNA target sequence for RB1 (NM_000321.1,1604-1622).
gcgctcttgaggttgtaat

SEQ ID NO: 10110 - DNA, 19 bp, Homo sapiens
  siRNA target sequence for RB1 (NM_000321.1,1615-1633).
gttgtaatggccacatata

SEQ ID NO: 10111 - DNA, 19 bp, Homo sapiens
  siRNA target sequence for RB1 (NM_000321.1,1618-1636).
gtaatggccacatatagca

SEQ ID NO: 10112 - DNA, 19 bp, Homo sapiens
  siRNA target sequence for RB1 (NM_000321.1,1640-1658).
gtacatctcagaatcttga

SEQ ID NO: 10113 - DNA, 19 bp, Homo sapiens
  siRNA target sequence for RB1 (NM_000321.1,1690-1708).
ctgaatgtgcttaatttaa

SEQ ID NO: 10114 - DNA, 19 bp, Homo sapiens
  siRNA target sequence for RB1 (NM_000321.1,1729-1747).
gtgatcgaaagttttatca

SEQ ID NO: 10115 - DNA, 19 bp, Homo sapiens
  siRNA target sequence for RB1 (NM_000321.1,1731-1749).
gatcgaaagttttatcaaa

SEQ ID NO: 10116 - DNA, 19 bp, Homo sapiens
  siRNA target sequence for RB1 (NM_000321.1,1832-1850).
cagattcacctttatttga

SEQ ID NO: 10117 - DNA, 19 bp, Homo sapiens
  siRNA target sequence for RB1 (NM_000321.1,1882-1900).
ccaactgatcaccttgaat

SEQ ID NO: 10118 - DNA, 19 bp, Homo sapiens
  siRNA target sequence for RB1 (NM_000321.1,1940-1958).
ctgcagcagatatgtatct

SEQ ID NO: 10119 - DNA, 19 bp, Homo sapiens
  siRNA target sequence for RB1 (NM_000321.1,1953-1971).
gtatctttctcctgtaaga

SEQ ID NO: 10120 - DNA, 19 bp, Homo sapiens
  siRNA target sequence for RB1 (NM_000321.1,1988-2006).
gttcaactacgcgtgtaaa

SEQ ID NO: 10121 - DNA, 19 bp, Homo sapiens
  siRNA target sequence for RB1 (NM_000321.1,2110-2128).
gcctatctccggctaaata

SEQ ID NO: 10122 - DNA, 19 bp, Homo sapiens
  siRNA target sequence for RB1 (NM_000321.1,2112-2130).
ctatctccggctaaataca

SEQ ID NO: 10123 - DNA, 19 bp, Homo sapiens
  siRNA target sequence for RB1 (NM_000321.1,2116-2134).
ctccggctaaatacacttt

SEQ ID NO: 10124 - DNA, 19 bp, Homo sapiens
  siRNA target sequence for RB1 (NM_000321.1,2118-2136).
ccggctaaatacactttgt

SEQ ID NO: 10125 - DNA, 19 bp, Homo sapiens
  siRNA target sequence for RB1 (NM_000321.1,2120-2138).
ggctaaatacactttgtga

SEQ ID NO: 10126 - DNA, 19 bp, Homo sapiens
  siRNA target sequence for RB1 (NM_000321.1,2148-2166).
gtctgagcacccagaatta

SEQ ID NO: 10127 - DNA, 19 bp, Homo sapiens
  siRNA target sequence for RB1 (NM_000321.1,2155-2173).
cacccagaattagaacata

SEQ ID NO: 10128 - DNA, 19 bp, Homo sapiens
  siRNA target sequence for RB1 (NM_000321.1,2159-2177).
cagaattagaacatatcat

SEQ ID NO: 10129 - DNA, 19 bp, Homo sapiens
  siRNA target sequence for RB1 (NM_000321.1,2161-2179).
gaattagaacatatcatct

SEQ ID NO: 10130 - DNA, 19 bp, Homo sapiens
  siRNA target sequence for RB1 (NM_000321.1,2239-2257).
gaccaaattatgatgtgtt

SEQ ID NO: 10131 - DNA, 19 bp, Homo sapiens
  siRNA target sequence for RB1 (NM_000321.1,2355-2373).
caaacgtgttttgatcaaa

SEQ ID NO: 10132 - DNA, 19 bp, Homo sapiens
  siRNA target sequence for RB1 (NM_000321.1,2377-2395).
gaggagtatgattctatta

SEQ ID NO: 10133 - DNA, 19 bp, Homo sapiens
  siRNA target sequence for RB1 (NM_000321.1,2466-2484).
ccctaccttgtcaccaata

SEQ ID NO: 10134 - DNA, 19 bp, Homo sapiens
  siRNA target sequence for RB1 (NM_000321.1,2494-2512).
cctcgaagcccttacaagt

SEQ ID NO: 10135 - DNA, 19 bp, Homo sapiens
  siRNA target sequence for RB1 (NM_000321.1,2495-2513).
ctcgaagcccttacaagtt

SEQ ID NO: 10136 - DNA, 19 bp, Homo sapiens
  siRNA target sequence for RB1 (NM_000321.1,2536-2554).
cctggagggaacatctata

SEQ ID NO: 10137 - DNA, 19 bp, Homo sapiens
  siRNA target sequence for RB1 (NM_000321.1,2537-2555).
ctggagggaacatctatat

SEQ ID NO: 10138 - DNA, 19 bp, Homo sapiens
  siRNA target sequence for RB1 (NM_000321.1,2560-2578).
cccctgaagagtccatata

SEQ ID NO: 10139 - DNA, 19 bp, Homo sapiens
  siRNA target sequence for RB1 (NM_000321.1,2561-2579).
ccctgaagagtccatataa

SEQ ID NO: 10140 - DNA, 19 bp, Homo sapiens
  siRNA target sequence for RB1 (NM_000321.1,2562-2580).
cctgaagagtccatataaa

SEQ ID NO: 10141 - DNA, 19 bp, Homo sapiens
  siRNA target sequence for RB1 (NM_000321.1,2568-2586).
gagtccatataaaatttca

SEQ ID NO: 10142 - DNA, 19 bp, Homo sapiens
  siRNA target sequence for RB1 (NM_000321.1,2624-2642).
caagaatcttagtatcaat

SEQ ID NO: 10143 - DNA, 19 bp, Homo sapiens
  siRNA target sequence for RB1 (NM_000321.1,2703-2721).
cgaccgtgtgctcaaaaga

SEQ ID NO: 10144 - DNA, 19 bp, Homo sapiens
  siRNA target sequence for RB1 (NM_000321.1,2704-2722).
gaccgtgtgctcaaaagaa

SEQ ID NO: 10145 - DNA, 19 bp, Homo sapiens
  siRNA target sequence for RB1 (NM_000321.1,2706-2724).
ccgtgtgctcaaaagaagt

SEQ ID NO: 10146 - DNA, 19 bp, Homo sapiens
  siRNA target sequence for RB1 (NM_000321.1,2754-2772).
gaaaaaactacgctttgat

SEQ ID NO: 10147 - DNA, 19 bp, Homo sapiens
  siRNA target sequence for RB1 (NM_000321.1,2841-2859).
ggcagaaatgacttctact

SEQ ID NO: 10148 - DNA, 19 bp, Homo sapiens
  siRNA target sequence for RB1 (NM_000321.1,2858-2876).
ctcgaacacgaatgcaaaa

SEQ ID NO: 10149 - DNA, 19 bp, Homo sapiens
  siRNA target sequence for RBBP1 (NM_002892.2,215-233).
ggctggtgaaagttaaggt

SEQ ID NO: 10150 - DNA, 19 bp, Homo sapiens
  siRNA target sequence for RBBP1 (NM_002892.2,216-234).
gctggtgaaagttaaggta

SEQ ID NO: 10151 - DNA, 19 bp, Homo sapiens
  siRNA target sequence for RBBP1 (NM_002892.2,244-262).
caggataataccacacaat

SEQ ID NO: 10152 - DNA, 19 bp, Homo sapiens
  siRNA target sequence for RBBP1 (NM_002892.2,320-338).
ggacatctgatggatcttt

SEQ ID NO: 10153 - DNA, 19 bp, Homo sapiens
  siRNA target sequence for RBBP1 (NM_002892.2,321-339).
gacatctgatggatctttt

SEQ ID NO: 10154 - DNA, 19 bp, Homo sapiens
  siRNA target sequence for RBBP1 (NM_002892.2,323-341).
catctgatggatcttttca

SEQ ID NO: 10155 - DNA, 19 bp, Homo sapiens
  siRNA target sequence for RBBP1 (NM_002892.2,346-364).
gctattatcagcaagttga

SEQ ID NO: 10156 - DNA, 19 bp, Homo sapiens
  siRNA target sequence for RBBP1 (NM_002892.2,363-381).
gacagatgctagttggtat

SEQ ID NO: 10157 - DNA, 19 bp, Homo sapiens
  siRNA target sequence for RBBP1 (NM_002892.2,377-395).
ggtataccgtggtgtttga

SEQ ID NO: 10158 - DNA, 19 bp, Homo sapiens
  siRNA target sequence for RBBP1 (NM_002892.2,378-396).
gtataccgtggtgtttgat

SEQ ID NO: 10159 - DNA, 19 bp, Homo sapiens
  siRNA target sequence for RBBP1 (NM_002892.2,400-418).
ggtgatgagcgaacattga

SEQ ID NO: 10160 - DNA, 19 bp, Homo sapiens
  siRNA target sequence for RBBP1 (NM_002892.2,417-435).
gagacgtacctcactttgt

SEQ ID NO: 10161 - DNA, 19 bp, Homo sapiens
  siRNA target sequence for RBBP1 (NM_002892.2,419-437).
gacgtacctcactttgtct

SEQ ID NO: 10162 - DNA, 19 bp, Homo sapiens
  siRNA target sequence for RBBP1 (NM_002892.2,470-488).
cacttgaccagcttccatt

SEQ ID NO: 10163 - DNA, 19 bp, Homo sapiens
  siRNA target sequence for RBBP1 (NM_002892.2,472-490).
cttgaccagcttccattaa

SEQ ID NO: 10164 - DNA, 19 bp, Homo sapiens
  siRNA target sequence for RBBP1 (NM_002892.2,475-493).
gaccagcttccattaacaa

SEQ ID NO: 10165 - DNA, 19 bp, Homo sapiens
  siRNA target sequence for RBBP1 (NM_002892.2,616-634).
cgccgtctcaatgatgaat

SEQ ID NO: 10166 - DNA, 19 bp, Homo sapiens
  siRNA target sequence for RBBP1 (NM_002892.2,617-635).
gccgtctcaatgatgaatt

SEQ ID NO: 10167 - DNA, 19 bp, Homo sapiens
  siRNA target sequence for RBBP1 (NM_002892.2,618-636).
ccgtctcaatgatgaatta

SEQ ID NO: 10168 - DNA, 19 bp, Homo sapiens
  siRNA target sequence for RBBP1 (NM_002892.2,664-682).
gcaacggagaggactgaat

SEQ ID NO: 10169 - DNA, 19 bp, Homo sapiens
  siRNA target sequence for RBBP1 (NM_002892.2,668-686).
cggagaggactgaatggta

SEQ ID NO: 10170 - DNA, 19 bp, Homo sapiens
  siRNA target sequence for RBBP1 (NM_002892.2,704-722).
ctcccagctgtaatgatga

SEQ ID NO: 10171 - DNA, 19 bp, Homo sapiens
  siRNA target sequence for RBBP1 (NM_002892.2,754-772).
cgatcatttattgattcta

SEQ ID NO: 10172 - DNA, 19 bp, Homo sapiens
  siRNA target sequence for RBBP1 (NM_002892.2,755-773).
gatcatttattgattctaa

SEQ ID NO: 10173 - DNA, 19 bp, Homo sapiens
  siRNA target sequence for RBBP1 (NM_002892.2,766-784).
gattctaaattttactcta

SEQ ID NO: 10174 - DNA, 19 bp, Homo sapiens
  siRNA target sequence for RBBP1 (NM_002892.2,912-930).
ggatataagtgaaatcctt

SEQ ID NO: 10175 - DNA, 19 bp, Homo sapiens
  siRNA target sequence for RBBP1 (NM_002892.2,933-951).
gtcatccagtagtgatgat

SEQ ID NO: 10176 - DNA, 19 bp, Homo sapiens
  siRNA target sequence for RBBP1 (NM_002892.2,1060-1078).
ctccagcagctttataagt

SEQ ID NO: 10177 - DNA, 19 bp, Homo sapiens
  siRNA target sequence for RBBP1 (NM_002892.2,1091-1109).
gaggtactccaatcaacaa

SEQ ID NO: 10178 - DNA, 19 bp, Homo sapiens
  siRNA target sequence for RBBP1 (NM_002892.2,1115-1133).
ctgttttgggctataaaga

SEQ ID NO: 10179 - DNA, 19 bp, Homo sapiens
  siRNA target sequence for RBBP1 (NM_002892.2,1122-1140).
gggctataaagatctcaat

SEQ ID NO: 10180 - DNA, 19 bp, Homo sapiens
  siRNA target sequence for RBBP1 (NM_002892.2,1124-1142).
gctataaagatctcaatct

SEQ ID NO: 10181 - DNA, 19 bp, Homo sapiens
  siRNA target sequence for RBBP1 (NM_002892.2,1152-1170).
cttcagactggtttatcat

SEQ ID NO: 10182 - DNA, 19 bp, Homo sapiens
  siRNA target sequence for RBBP1 (NM_002892.2,1171-1189).
cagggtggatgtgacaata

SEQ ID NO: 10183 - DNA, 19 bp, Homo sapiens
  siRNA target sequence for RBBP1 (NM_002892.2,1198-1216).
ggtgctgtatggaagcaaa

SEQ ID NO: 10184 - DNA, 19 bp, Homo sapiens
  siRNA target sequence for RBBP1 (NM_002892.2,1199-1217).
gtgctgtatggaagcaaat

SEQ ID NO: 10185 - DNA, 19 bp, Homo sapiens
  siRNA target sequence for RBBP1 (NM_002892.2,1201-1219).
gctgtatggaagcaaattt

SEQ ID NO: 10186 - DNA, 19 bp, Homo sapiens
  siRNA target sequence for RBBP1 (NM_002892.2,1231-1249).
ggcattcctattttgaatt

SEQ ID NO: 10187 - DNA, 19 bp, Homo sapiens
  siRNA target sequence for RBBP1 (NM_002892.2,1233-1251).
cattcctattttgaattca

SEQ ID NO: 10188 - DNA, 19 bp, Homo sapiens
  siRNA target sequence for RBBP1 (NM_002892.2,1276-1294).
gcttatagaaagtatctct

SEQ ID NO: 10189 - DNA, 19 bp, Homo sapiens
  siRNA target sequence for RBBP1 (NM_002892.2,1311-1329).
ctgccgttcggcaaatatt

SEQ ID NO: 10190 - DNA, 19 bp, Homo sapiens
  siRNA target sequence for RBBP1 (NM_002892.2,1313-1331).
gccgttcggcaaatattca

SEQ ID NO: 10191 - DNA, 19 bp, Homo sapiens
  siRNA target sequence for RBBP1 (NM_002892.2,1315-1333).
cgttcggcaaatattcagt

SEQ ID NO: 10192 - DNA, 19 bp, Homo sapiens
  siRNA target sequence for RBBP1 (NM_002892.2,1316-1334).
gttcggcaaatattcagtt

SEQ ID NO: 10193 - DNA, 19 bp, Homo sapiens
  siRNA target sequence for RBBP1 (NM_002892.2,1404-1422).
ggctctcaaattagatcaa

SEQ ID NO: 10194 - DNA, 19 bp, Homo sapiens
  siRNA target sequence for RBBP1 (NM_002892.2,1456-1474).
gaggaaaatatcgattcaa

SEQ ID NO: 10195 - DNA, 19 bp, Homo sapiens
  siRNA target sequence for RBBP1 (NM_002892.2,1459-1477).
gaaaatatcgattcaaaca

SEQ ID NO: 10196 - DNA, 19 bp, Homo sapiens
  siRNA target sequence for RBBP1 (NM_002892.2,1467-1485).
cgattcaaacagtgaaagt

SEQ ID NO: 10197 - DNA, 19 bp, Homo sapiens
  siRNA target sequence for RBBP1 (NM_002892.2,1518-1536).
gggacgaaggagaattgct

SEQ ID NO: 10198 - DNA, 19 bp, Homo sapiens
  siRNA target sequence for RBBP1 (NM_002892.2,1534-1552).
gctcgagatgtaaattcta

SEQ ID NO: 10199 - DNA, 19 bp, Homo sapiens
  siRNA target sequence for RBBP1 (NM_002892.2,1535-1553).
ctcgagatgtaaattctat

SEQ ID NO: 10200 - DNA, 19 bp, Homo sapiens
  siRNA target sequence for RBBP1 (NM_002892.2,1537-1555).
cgagatgtaaattctatta

SEQ ID NO: 10201 - DNA, 19 bp, Homo sapiens
  siRNA target sequence for RBBP1 (NM_002892.2,1830-1848).
ctgcctaacaggaaccaaa

SEQ ID NO: 10202 - DNA, 19 bp, Homo sapiens
  siRNA target sequence for RBBP1 (NM_002892.2,2110-2128).
cggggacgacctcctttaa

SEQ ID NO: 10203 - DNA, 19 bp, Homo sapiens
  siRNA target sequence for RBBP1 (NM_002892.2,2111-2129).
ggggacgacctcctttaaa

SEQ ID NO: 10204 - DNA, 19 bp, Homo sapiens
  siRNA target sequence for RBBP1 (NM_002892.2,2112-2130).
gggacgacctcctttaaaa

SEQ ID NO: 10205 - DNA, 19 bp, Homo sapiens
  siRNA target sequence for RBBP1 (NM_002892.2,2113-2131).
ggacgacctcctttaaaat

SEQ ID NO: 10206 - DNA, 19 bp, Homo sapiens
  siRNA target sequence for RBBP1 (NM_002892.2,2116-2134).
cgacctcctttaaaatcaa

SEQ ID NO: 10207 - DNA, 19 bp, Homo sapiens
  siRNA target sequence for RBBP1 (NM_002892.2,2132-2150).
caaccctctcatcaaacat

SEQ ID NO: 10208 - DNA, 19 bp, Homo sapiens
  siRNA target sequence for RBBP1 (NM_002892.2,2148-2166).
catgccgtatggcttatct

SEQ ID NO: 10209 - DNA, 19 bp, Homo sapiens
  siRNA target sequence for RBBP1 (NM_002892.2,2152-2170).
ccgtatggcttatctaaga

SEQ ID NO: 10210 - DNA, 19 bp, Homo sapiens
  siRNA target sequence for RBBP1 (NM_002892.2,2154-2172).
gtatggcttatctaagaca

SEQ ID NO: 10211 - DNA, 19 bp, Homo sapiens
  siRNA target sequence for RBBP1 (NM_002892.2,2328-2346).
gatttctgcacatatatta

SEQ ID NO: 10212 - DNA, 19 bp, Homo sapiens
  siRNA target sequence for RBBP1 (NM_002892.2,2350-2368).
gaaaatgataggactcaaa

SEQ ID NO: 10213 - DNA, 19 bp, Homo sapiens
  siRNA target sequence for RBBP1 (NM_002892.2,2363-2381).
ctcaaatgcagcctttaga

SEQ ID NO: 10214 - DNA, 19 bp, Homo sapiens
  siRNA target sequence for RBBP1 (NM_002892.2,2587-2605).
gctcatagtcttgaattgt

SEQ ID NO: 10215 - DNA, 19 bp, Homo sapiens
  siRNA target sequence for RBBP1 (NM_002892.2,2599-2617).
gaattgtcttcattagaca

SEQ ID NO: 10216 - DNA, 19 bp, Homo sapiens
  siRNA target sequence for RBBP1 (NM_002892.2,2676-2694).
gttgaaacggaaaatacta

SEQ ID NO: 10217 - DNA, 19 bp, Homo sapiens
  siRNA target sequence for RBBP1 (NM_002892.2,2698-2716).
caatcatcgccagagaaaa

SEQ ID NO: 10218 - DNA, 19 bp, Homo sapiens
  siRNA target sequence for RBBP1 (NM_002892.2,2745-2763).
gacaaatactgtatctcaa

SEQ ID NO: 10219 - DNA, 19 bp, Homo sapiens
  siRNA target sequence for RBBP1 (NM_002892.2,2764-2782).
gaaaggaccagtgattgta

SEQ ID NO: 10220 - DNA, 19 bp, Homo sapiens
  siRNA target sequence for RBBP1 (NM_002892.2,2791-2809).
gagggaatgaaaaacttaa

SEQ ID NO: 10221 - DNA, 19 bp, Homo sapiens
  siRNA target sequence for RBBP1 (NM_002892.2,2884-2902).
caactgactagtgaaagat

SEQ ID NO: 10222 - DNA, 19 bp, Homo sapiens
  siRNA target sequence for RBBP1 (NM_002892.2,2889-2907).
gactagtgaaagatttgat

SEQ ID NO: 10223 - DNA, 19 bp, Homo sapiens
  siRNA target sequence for RBBP1 (NM_002892.2,2981-2999).
ccttggtttgccatgaagt

SEQ ID NO: 10224 - DNA, 19 bp, Homo sapiens
  siRNA target sequence for RBBP1 (NM_002892.2,2982-3000).
cttggtttgccatgaagta

SEQ ID NO: 10225 - DNA, 19 bp, Homo sapiens
  siRNA target sequence for RBBP1 (NM_002892.2,3100-3118).
cctcctgtagtccaacata

SEQ ID NO: 10226 - DNA, 19 bp, Homo sapiens
  siRNA target sequence for RBBP1 (NM_002892.2,3101-3119).
ctcctgtagtccaacataa

SEQ ID NO: 10227 - DNA, 19 bp, Homo sapiens
  siRNA target sequence for RBBP1 (NM_002892.2,3103-3121).
cctgtagtccaacataact

SEQ ID NO: 10228 - DNA, 19 bp, Homo sapiens
  siRNA target sequence for RBBP1 (NM_002892.2,3104-3122).
ctgtagtccaacataactt

SEQ ID NO: 10229 - DNA, 19 bp, Homo sapiens
  siRNA target sequence for RBBP1 (NM_002892.2,3130-3148).
gcttcaccacttactctta

SEQ ID NO: 10230 - DNA, 19 bp, Homo sapiens
  siRNA target sequence for RBBP1 (NM_002892.2,3159-3177).
gtctcgaagcgtaaaaagt

SEQ ID NO: 10231 - DNA, 19 bp, Homo sapiens
  siRNA target sequence for RBBP1 (NM_002892.2,3161-3179).
ctcgaagcgtaaaaagtga

SEQ ID NO: 10232 - DNA, 19 bp, Homo sapiens
  siRNA target sequence for RBBP1 (NM_002892.2,3176-3194).
gtgagagtgatataacgat

SEQ ID NO: 10233 - DNA, 19 bp, Homo sapiens
  siRNA target sequence for RBBP1 (NM_002892.2,3180-3198).
gagtgatataacgattgaa

SEQ ID NO: 10234 - DNA, 19 bp, Homo sapiens
  siRNA target sequence for RBBP1 (NM_002892.2,3182-3200).
gtgatataacgattgaagt

SEQ ID NO: 10235 - DNA, 19 bp, Homo sapiens
  siRNA target sequence for RBBP1 (NM_002892.2,3191-3209).
cgattgaagttgatagtat

SEQ ID NO: 10236 - DNA, 19 bp, Homo sapiens
  siRNA target sequence for RBBP1 (NM_002892.2,3206-3224).
gtattgctgaagaatctca

SEQ ID NO: 10237 - DNA, 19 bp, Homo sapiens
  siRNA target sequence for RBBP1 (NM_002892.2,3240-3258).
gagggaatcggcaaatgga

SEQ ID NO: 10238 - DNA, 19 bp, Homo sapiens
  siRNA target sequence for RBBP1 (NM_002892.2,3242-3260).
gggaatcggcaaatggatt

SEQ ID NO: 10239 - DNA, 19 bp, Homo sapiens
  siRNA target sequence for RBBP1 (NM_002892.2,3249-3267).
ggcaaatggatttgaaact

SEQ ID NO: 10240 - DNA, 19 bp, Homo sapiens
  siRNA target sequence for RBBP1 (NM_002892.2,3274-3292).
gcctctggtacctgtagta

SEQ ID NO: 10241 - DNA, 19 bp, Homo sapiens
  siRNA target sequence for RBBP1 (NM_002892.2,3275-3293).
cctctggtacctgtagtat

SEQ ID NO: 10242 - DNA, 19 bp, Homo sapiens
  siRNA target sequence for RBBP1 (NM_002892.2,3276-3294).
ctctggtacctgtagtata

SEQ ID NO: 10243 - DNA, 19 bp, Homo sapiens
  siRNA target sequence for RBBP1 (NM_002892.2,3278-3296).
ctggtacctgtagtataat

SEQ ID NO: 10244 - DNA, 19 bp, Homo sapiens
  siRNA target sequence for RBBP1 (NM_002892.2,3431-3449).
gacaaagcagtgatagtga

SEQ ID NO: 10245 - DNA, 19 bp, Homo sapiens
  siRNA target sequence for RBBP1 (NM_002892.2,3457-3475).
cctgtcctagacaattcaa

SEQ ID NO: 10246 - DNA, 19 bp, Homo sapiens
  siRNA target sequence for RBBP1 (NM_002892.2,3527-3545).
cacgatctcctgcaagaat

SEQ ID NO: 10247 - DNA, 19 bp, Homo sapiens
  siRNA target sequence for RBBP1 (NM_002892.2,3529-3547).
cgatctcctgcaagaatat

SEQ ID NO: 10248 - DNA, 19 bp, Homo sapiens
  siRNA target sequence for RBBP1 (NM_002892.2,3542-3560).
gaatatccccgcacatcaa

SEQ ID NO: 10249 - DNA, 19 bp, Homo sapiens
  siRNA target sequence for RBBP1 (NM_002892.2,3623-3641).
ggagctttcagctcaatga

SEQ ID NO: 10250 - DNA, 19 bp, Homo sapiens
  siRNA target sequence for RBBP1 (NM_002892.2,3624-3642).
gagctttcagctcaatgaa

SEQ ID NO: 10251 - DNA, 19 bp, Homo sapiens
  siRNA target sequence for RBBP1 (NM_002892.2,3626-3644).
gctttcagctcaatgaatt

SEQ ID NO: 10252 - DNA, 19 bp, Homo sapiens
  siRNA target sequence for RBBP1 (NM_002892.2,3717-3735).
gtctttgaagtctgaagtt

SEQ ID NO: 10253 - DNA, 19 bp, Homo sapiens
  siRNA target sequence for RBBP2 (NM_005056.1,202-220).
cagagtgccccgtctttga

SEQ ID NO: 10254 - DNA, 19 bp, Homo sapiens
  siRNA target sequence for RBBP2 (NM_005056.1,270-288).
cggcctttggcggagaaaa

SEQ ID NO: 10255 - DNA, 19 bp, Homo sapiens
  siRNA target sequence for RBBP2 (NM_005056.1,336-354).
gcctgtgaagtaaaaagct

SEQ ID NO: 10256 - DNA, 19 bp, Homo sapiens
  siRNA target sequence for RBBP2 (NM_005056.1,397-415).
caatgaccagagtgagatt

SEQ ID NO: 10257 - DNA, 19 bp, Homo sapiens
  siRNA target sequence for RBBP2 (NM_005056.1,416-434).
ggatttcttggatcaacta

SEQ ID NO: 10258 - DNA, 19 bp, Homo sapiens
  siRNA target sequence for RBBP2 (NM_005056.1,422-440).
cttggatcaactagcaaaa

SEQ ID NO: 10259 - DNA, 19 bp, Homo sapiens
  siRNA target sequence for RBBP2 (NM_005056.1,446-464).
ggaacttcaaggatctact

SEQ ID NO: 10260 - DNA, 19 bp, Homo sapiens
  siRNA target sequence for RBBP2 (NM_005056.1,473-491).
ccctgtggtagagagaaaa

SEQ ID NO: 10261 - DNA, 19 bp, Homo sapiens
  siRNA target sequence for RBBP2 (NM_005056.1,474-492).
cctgtggtagagagaaaaa

SEQ ID NO: 10262 - DNA, 19 bp, Homo sapiens
  siRNA target sequence for RBBP2 (NM_005056.1,487-505).
gaaaaatcctggatctgta

SEQ ID NO: 10263 - DNA, 19 bp, Homo sapiens
  siRNA target sequence for RBBP2 (NM_005056.1,503-521).
gtatgctttgagcaagatt

SEQ ID NO: 10264 - DNA, 19 bp, Homo sapiens
  siRNA target sequence for RBBP2 (NM_005056.1,580-598).
gtagtcgcttgggatatct

SEQ ID NO: 10265 - DNA, 19 bp, Homo sapiens
  siRNA target sequence for RBBP2 (NM_005056.1,590-608).
gggatatctgccaggaaaa

SEQ ID NO: 10266 - DNA, 19 bp, Homo sapiens
  siRNA target sequence for RBBP2 (NM_005056.1,610-628).
gaactgggtctcttttgaa

SEQ ID NO: 10267 - DNA, 19 bp, Homo sapiens
  siRNA target sequence for RBBP2 (NM_005056.1,619-637).
ctcttttgaagtcacatta

SEQ ID NO: 10268 - DNA, 19 bp, Homo sapiens
  siRNA target sequence for RBBP2 (NM_005056.1,643-661).
gaattctctacccatatga

SEQ ID NO: 10269 - DNA, 19 bp, Homo sapiens
  siRNA target sequence for RBBP2 (NM_005056.1,735-753).
gaggttctcagcactgata

SEQ ID NO: 10270 - DNA, 19 bp, Homo sapiens
  siRNA target sequence for RBBP2 (NM_005056.1,901-919).
gcttggcaatgggaacaaa

SEQ ID NO: 10271 - DNA, 19 bp, Homo sapiens
  siRNA target sequence for RBBP2 (NM_005056.1,905-923).
ggcaatgggaacaaaagat

SEQ ID NO: 10272 - DNA, 19 bp, Homo sapiens
  siRNA target sequence for RBBP2 (NM_005056.1,935-953).
ggtcacccgaagacgaaaa

SEQ ID NO: 10273 - DNA, 19 bp, Homo sapiens
  siRNA target sequence for RBBP2 (NM_005056.1,938-956).
cacccgaagacgaaaagtt

SEQ ID NO: 10274 - DNA, 19 bp, Homo sapiens
  siRNA target sequence for RBBP2 (NM_005056.1,964-982).
ggtcagacgcatttaacat

SEQ ID NO: 10275 - DNA, 19 bp, Homo sapiens
  siRNA target sequence for RBBP2 (NM_005056.1,969-987).
gacgcatttaacatgcaaa

SEQ ID NO: 10276 - DNA, 19 bp, Homo sapiens
  siRNA target sequence for RBBP2 (NM_005056.1,1051-1069).
gtcggggaaacaatgaaga

SEQ ID NO: 10277 - DNA, 19 bp, Homo sapiens
  siRNA target sequence for RBBP2 (NM_005056.1,1098-1116).
gacagctatcatacatttt

SEQ ID NO: 10278 - DNA, 19 bp, Homo sapiens
  siRNA target sequence for RBBP2 (NM_005056.1,1103-1121).
ctatcatacattttgtcta

SEQ ID NO: 10279 - DNA, 19 bp, Homo sapiens
  siRNA target sequence for RBBP2 (NM_005056.1,1175-1193).
cgccgaggaatgtagcaaa

SEQ ID NO: 10280 - DNA, 19 bp, Homo sapiens
  siRNA target sequence for RBBP2 (NM_005056.1,1218-1236).
caagctgtacgagagtata

SEQ ID NO: 10281 - DNA, 19 bp, Homo sapiens
  siRNA target sequence for RBBP2 (NM_005056.1,1222-1240).
ctgtacgagagtatacact

SEQ ID NO: 10282 - DNA, 19 bp, Homo sapiens
  siRNA target sequence for RBBP2 (NM_005056.1,1304-1322).
ggttcccacagaactagta

SEQ ID NO: 10283 - DNA, 19 bp, Homo sapiens
  siRNA target sequence for RBBP2 (NM_005056.1,1308-1326).
cccacagaactagtagaaa

SEQ ID NO: 10284 - DNA, 19 bp, Homo sapiens
  siRNA target sequence for RBBP2 (NM_005056.1,1309-1327).
ccacagaactagtagaaaa

SEQ ID NO: 10285 - DNA, 19 bp, Homo sapiens
  siRNA target sequence for RBBP2 (NM_005056.1,1467-1485).
gcactttctggttggaatt

SEQ ID NO: 10286 - DNA, 19 bp, Homo sapiens
  siRNA target sequence for RBBP2 (NM_005056.1,1618-1636).
gttattccatcaactactt

SEQ ID NO: 10287 - DNA, 19 bp, Homo sapiens
  siRNA target sequence for RBBP2 (NM_005056.1,1640-1658).
ctggggggagccaaagaca

SEQ ID NO: 10288 - DNA, 19 bp, Homo sapiens
  siRNA target sequence for RBBP2 (NM_005056.1,1661-1679).
gtatggtgtgccatctcat

SEQ ID NO: 10289 - DNA, 19 bp, Homo sapiens
  siRNA target sequence for RBBP2 (NM_005056.1,1806-1824).
gtgtacaggaccaatcagt

SEQ ID NO: 10290 - DNA, 19 bp, Homo sapiens
  siRNA target sequence for RBBP2 (NM_005056.1,1825-1843).
gtgctggcgagtttgttgt

SEQ ID NO: 10291 - DNA, 19 bp, Homo sapiens
  siRNA target sequence for RBBP2 (NM_005056.1,1831-1849).
gcgagtttgttgtgacatt

SEQ ID NO: 10292 - DNA, 19 bp, Homo sapiens
  siRNA target sequence for RBBP2 (NM_005056.1,1832-1850).
cgagtttgttgtgacattt

SEQ ID NO: 10293 - DNA, 19 bp, Homo sapiens
  siRNA target sequence for RBBP2 (NM_005056.1,1858-1876).
cctatcactctggatttaa

SEQ ID NO: 10294 - DNA, 19 bp, Homo sapiens
  siRNA target sequence for RBBP2 (NM_005056.1,1930-1948).
ccattggacgtcaatgtgt

SEQ ID NO: 10295 - DNA, 19 bp, Homo sapiens
  siRNA target sequence for RBBP2 (NM_005056.1,1931-1949).
cattggacgtcaatgtgta

SEQ ID NO: 10296 - DNA, 19 bp, Homo sapiens
  siRNA target sequence for RBBP2 (NM_005056.1,1936-1954).
gacgtcaatgtgtaaatca

SEQ ID NO: 10297 - DNA, 19 bp, Homo sapiens
  siRNA target sequence for RBBP2 (NM_005056.1,1938-1956).
cgtcaatgtgtaaatcatt

SEQ ID NO: 10298 - DNA, 19 bp, Homo sapiens
  siRNA target sequence for RBBP2 (NM_005056.1,1987-2005).
cacacgaggaactaatttt

SEQ ID NO: 10299 - DNA, 19 bp, Homo sapiens
  siRNA target sequence for RBBP2 (NM_005056.1,1989-2007).
cacgaggaactaattttca

SEQ ID NO: 10300 - DNA, 19 bp, Homo sapiens
  siRNA target sequence for RBBP2 (NM_005056.1,2054-2072).
ggtctgcaaagaattgact

SEQ ID NO: 10301 - DNA, 19 bp, Homo sapiens
  siRNA target sequence for RBBP2 (NM_005056.1,2069-2087).
gactctcatgactgaagaa

SEQ ID NO: 10302 - DNA, 19 bp, Homo sapiens
  siRNA target sequence for RBBP2 (NM_005056.1,2184-2202).
gcatgcagaaccacatgtt

SEQ ID NO: 10303 - DNA, 19 bp, Homo sapiens
  siRNA target sequence for RBBP2 (NM_005056.1,2185-2203).
catgcagaaccacatgttt

SEQ ID NO: 10304 - DNA, 19 bp, Homo sapiens
  siRNA target sequence for RBBP2 (NM_005056.1,2233-2251).
ctgagcggcttgtatgtct

SEQ ID NO: 10305 - DNA, 19 bp, Homo sapiens
  siRNA target sequence for RBBP2 (NM_005056.1,2302-2320).
gatatcgctacccattaga

SEQ ID NO: 10306 - DNA, 19 bp, Homo sapiens
  siRNA target sequence for RBBP2 (NM_005056.1,2327-2345).
cccttctctgctatatggt

SEQ ID NO: 10307 - DNA, 19 bp, Homo sapiens
  siRNA target sequence for RBBP2 (NM_005056.1,2332-2350).
ctctgctatatggtgtaaa

SEQ ID NO: 10308 - DNA, 19 bp, Homo sapiens
  siRNA target sequence for RBBP2 (NM_005056.1,2337-2355).
ctatatggtgtaaaagtca

SEQ ID NO: 10309 - DNA, 19 bp, Homo sapiens
  siRNA target sequence for RBBP2 (NM_005056.1,2378-2396).
ggtcagtcgtgttacagaa

SEQ ID NO: 10310 - DNA, 19 bp, Homo sapiens
  siRNA target sequence for RBBP2 (NM_005056.1,2383-2401).
gtcgtgttacagaagcatt

SEQ ID NO: 10311 - DNA, 19 bp, Homo sapiens
  siRNA target sequence for RBBP2 (NM_005056.1,2397-2415).
gcattgtctgctaacttca

SEQ ID NO: 10312 - DNA, 19 bp, Homo sapiens
  siRNA target sequence for RBBP2 (NM_005056.1,2398-2416).
cattgtctgctaacttcaa

SEQ ID NO: 10313 - DNA, 19 bp, Homo sapiens
  siRNA target sequence for RBBP2 (NM_005056.1,2457-2475).
gatgctgaggataggaaat

SEQ ID NO: 10314 - DNA, 19 bp, Homo sapiens
  siRNA target sequence for RBBP2 (NM_005056.1,2477-2495).
cccagagaatgatctcttt

SEQ ID NO: 10315 - DNA, 19 bp, Homo sapiens
  siRNA target sequence for RBBP2 (NM_005056.1,2483-2501).
gaatgatctctttcgaaaa

SEQ ID NO: 10316 - DNA, 19 bp, Homo sapiens
  siRNA target sequence for RBBP2 (NM_005056.1,2634-2652).
gcctttgtccaacaacttt

SEQ ID NO: 10317 - DNA, 19 bp, Homo sapiens
  siRNA target sequence for RBBP2 (NM_005056.1,2674-2692).
gccaagctcggcaagtaaa

SEQ ID NO: 10318 - DNA, 19 bp, Homo sapiens
  siRNA target sequence for RBBP2 (NM_005056.1,2676-2694).
caagctcggcaagtaaaga

SEQ ID NO: 10319 - DNA, 19 bp, Homo sapiens
  siRNA target sequence for RBBP2 (NM_005056.1,2810-2828).
ggaactccctgaattacca

SEQ ID NO: 10320 - DNA, 19 bp, Homo sapiens
  siRNA target sequence for RBBP2 (NM_005056.1,2856-2874).
cggtggttggacgaagtaa

SEQ ID NO: 10321 - DNA, 19 bp, Homo sapiens
  siRNA target sequence for RBBP2 (NM_005056.1,2860-2878).
ggttggacgaagtaagact

SEQ ID NO: 10322 - DNA, 19 bp, Homo sapiens
  siRNA target sequence for RBBP2 (NM_005056.1,2894-2912).
gcaacaagtcactttggat

SEQ ID NO: 10323 - DNA, 19 bp, Homo sapiens
  siRNA target sequence for RBBP2 (NM_005056.1,3108-3126).
gcctttctacccaatgtgt

SEQ ID NO: 10324 - DNA, 19 bp, Homo sapiens
  siRNA target sequence for RBBP2 (NM_005056.1,3109-3127).
cctttctacccaatgtgtt

SEQ ID NO: 10325 - DNA, 19 bp, Homo sapiens
  siRNA target sequence for RBBP2 (NM_005056.1,3166-3184).
ccgctaaagtggaagctat

SEQ ID NO: 10326 - DNA, 19 bp, Homo sapiens
  siRNA target sequence for RBBP2 (NM_005056.1,3192-3210).
ggcagcaattacgcttatt

SEQ ID NO: 10327 - DNA, 19 bp, Homo sapiens
  siRNA target sequence for RBBP2 (NM_005056.1,3196-3214).
gcaattacgcttatttgga

SEQ ID NO: 10328 - DNA, 19 bp, Homo sapiens
  siRNA target sequence for RBBP2 (NM_005056.1,3236-3254).
gaaaggacgccctattcct

SEQ ID NO: 10329 - DNA, 19 bp, Homo sapiens
  siRNA target sequence for RBBP2 (NM_005056.1,3320-3338).
gactgggcggacgtttctt

SEQ ID NO: 10330 - DNA, 19 bp, Homo sapiens
  siRNA target sequence for RBBP2 (NM_005056.1,3322-3340).
ctgggcggacgtttcttaa

SEQ ID NO: 10331 - DNA, 19 bp, Homo sapiens
  siRNA target sequence for RBBP2 (NM_005056.1,3324-3342).
gggcggacgtttcttaaga

SEQ ID NO: 10332 - DNA, 19 bp, Homo sapiens
  siRNA target sequence for RBBP2 (NM_005056.1,3325-3343).
ggcggacgtttcttaagaa

SEQ ID NO: 10333 - DNA, 19 bp, Homo sapiens
  siRNA target sequence for RBBP2 (NM_005056.1,3327-3345).
cggacgtttcttaagaaga

SEQ ID NO: 10334 - DNA, 19 bp, Homo sapiens
  siRNA target sequence for RBBP2 (NM_005056.1,3382-3400).
ggaccgacattggtgtata

SEQ ID NO: 10335 - DNA, 19 bp, Homo sapiens
  siRNA target sequence for RBBP2 (NM_005056.1,3546-3564).
gaacgggagcaaaaagaga

SEQ ID NO: 10336 - DNA, 19 bp, Homo sapiens
  siRNA target sequence for RBBP2 (NM_005056.1,3614-3632).
ggtggaccgcatagaagaa

SEQ ID NO: 10337 - DNA, 19 bp, Homo sapiens
  siRNA target sequence for RBBP2 (NM_005056.1,3617-3635).
ggaccgcatagaagaagta

SEQ ID NO: 10338 - DNA, 19 bp, Homo sapiens
  siRNA target sequence for RBBP2 (NM_005056.1,3618-3636).
gaccgcatagaagaagtaa

SEQ ID NO: 10339 - DNA, 19 bp, Homo sapiens
  siRNA target sequence for RBBP2 (NM_005056.1,3621-3639).
cgcatagaagaagtaaaat

SEQ ID NO: 10340 - DNA, 19 bp, Homo sapiens
  siRNA target sequence for RBBP2 (NM_005056.1,3622-3640).
gcatagaagaagtaaaatt

SEQ ID NO: 10341 - DNA, 19 bp, Homo sapiens
  siRNA target sequence for RBBP2 (NM_005056.1,3658-3676).
cagccagtgggtttatgct

SEQ ID NO: 10342 - DNA, 19 bp, Homo sapiens
  siRNA target sequence for RBBP2 (NM_005056.1,3691-3709).
gcaaagactggttccataa

SEQ ID NO: 10343 - DNA, 19 bp, Homo sapiens
  siRNA target sequence for RBBP2 (NM_005056.1,3717-3735).
gttcctcttcctaaatcaa

SEQ ID NO: 10344 - DNA, 19 bp, Homo sapiens
  siRNA target sequence for RBBP2 (NM_005056.1,3811-3829).
ggcccaggctagagactat

SEQ ID NO: 10345 - DNA, 19 bp, Homo sapiens
  siRNA target sequence for RBBP2 (NM_005056.1,3884-3902).
ggccctgcagtgtttgaca

SEQ ID NO: 10346 - DNA, 19 bp, Homo sapiens
  siRNA target sequence for RBBP2 (NM_005056.1,3899-3917).
gacagaacgtgctatgagt

SEQ ID NO: 10347 - DNA, 19 bp, Homo sapiens
  siRNA target sequence for RBBP2 (NM_005056.1,3942-3960).
ctagccacagatgaactat

SEQ ID NO: 10348 - DNA, 19 bp, Homo sapiens
  siRNA target sequence for RBBP2 (NM_005056.1,3967-3985).
ccctggccaaactatctgt

SEQ ID NO: 10349 - DNA, 19 bp, Homo sapiens
  siRNA target sequence for RBBP2 (NM_005056.1,4008-4026).
caggcggctcgagaaaaaa

SEQ ID NO: 10350 - DNA, 19 bp, Homo sapiens
  siRNA target sequence for RBBP2 (NM_005056.1,4010-4028).
ggcggctcgagaaaaaact

SEQ ID NO: 10351 - DNA, 19 bp, Homo sapiens
  siRNA target sequence for RBBP2 (NM_005056.1,4040-4058).
cagtgcagaactccaaaaa

SEQ ID NO: 10352 - DNA, 19 bp, Homo sapiens
  siRNA target sequence for RBBP2 (NM_005056.1,4141-4159).
cttctcctcgacaaacaat

SEQ ID NO: 10353 - DNA, 19 bp, Homo sapiens
  siRNA target sequence for RBBP2 (NM_005056.1,4207-4225).
catatggctacgacatgaa

SEQ ID NO: 10354 - DNA, 19 bp, Homo sapiens
  siRNA target sequence for RBBP2 (NM_005056.1,4244-4262).
gtcctctagtagtcttgaa

SEQ ID NO: 10355 - DNA, 19 bp, Homo sapiens
  siRNA target sequence for RBBP2 (NM_005056.1,4255-4273).
gtcttgaacccaatctttt

SEQ ID NO: 10356 - DNA, 19 bp, Homo sapiens
  siRNA target sequence for RBBP2 (NM_005056.1,4265-4283).
caatcttttttgtgatgaa

SEQ ID NO: 10357 - DNA, 19 bp, Homo sapiens
  siRNA target sequence for RBBP2 (NM_005056.1,4442-4460).
ggtgccccgaagtttggaa

SEQ ID NO: 10358 - DNA, 19 bp, Homo sapiens
  siRNA target sequence for RBBP2 (NM_005056.1,4521-4539).
ggagatctcctggaagtat

SEQ ID NO: 10359 - DNA, 19 bp, Homo sapiens
  siRNA target sequence for RBBP2 (NM_005056.1,4596-4614).
gaagacagattcttgcata

SEQ ID NO: 10360 - DNA, 19 bp, Homo sapiens
  siRNA target sequence for RBBP2 (NM_005056.1,4876-4894).
cagccaaagttgaacttgt

SEQ ID NO: 10361 - DNA, 19 bp, Homo sapiens
  siRNA target sequence for RBBP2 (NM_005056.1,4893-4911).
gtgaaagagagcactgaaa

SEQ ID NO: 10362 - DNA, 19 bp, Homo sapiens
  siRNA target sequence for RBBP2 (NM_005056.1,4934-4952).
ggacatcccctcaaagtat

SEQ ID NO: 10363 - DNA, 19 bp, Homo sapiens
  siRNA target sequence for RBBP2 (NM_005056.1,5099-5117).
ctgcttttctaaaaaggta

SEQ ID NO: 10364 - DNA, 19 bp, Homo sapiens
  siRNA target sequence for RBBP2 (NM_005056.1,5114-5132).
ggtagactgggtacaatgt

SEQ ID NO: 10365 - DNA, 19 bp, Homo sapiens
  siRNA target sequence for RBBP2 (NM_005056.1,5273-5291).
cataatgagctacaaacta

SEQ ID NO: 10366 - DNA, 19 bp, Homo sapiens
  siRNA target sequence for REL (NM_002908.1,188-206).
gtgcgtataacccgtatat

SEQ ID NO: 10367 - DNA, 19 bp, Homo sapiens
  siRNA target sequence for REL (NM_002908.1,198-216).
cccgtatatagagataatt

SEQ ID NO: 10368 - DNA, 19 bp, Homo sapiens
  siRNA target sequence for REL (NM_002908.1,200-218).
cgtatatagagataattga

SEQ ID NO: 10369 - DNA, 19 bp, Homo sapiens
  siRNA target sequence for REL (NM_002908.1,201-219).
gtatatagagataattgaa

SEQ ID NO: 10370 - DNA, 19 bp, Homo sapiens
  siRNA target sequence for REL (NM_002908.1,229-247).
cagaggggaatgcgtttta

SEQ ID NO: 10371 - DNA, 19 bp, Homo sapiens
  siRNA target sequence for REL (NM_002908.1,231-249).
gaggggaatgcgttttaga

SEQ ID NO: 10372 - DNA, 19 bp, Homo sapiens
  siRNA target sequence for REL (NM_002908.1,233-251).
ggggaatgcgttttagata

SEQ ID NO: 10373 - DNA, 19 bp, Homo sapiens
  siRNA target sequence for REL (NM_002908.1,235-253).
ggaatgcgttttagataca

SEQ ID NO: 10374 - DNA, 19 bp, Homo sapiens
  siRNA target sequence for REL (NM_002908.1,236-254).
gaatgcgttttagatacaa

SEQ ID NO: 10375 - DNA, 19 bp, Homo sapiens
  siRNA target sequence for REL (NM_002908.1,240-258).
gcgttttagatacaaatgt

SEQ ID NO: 10376 - DNA, 19 bp, Homo sapiens
  siRNA target sequence for REL (NM_002908.1,319-337).
ccttctatccagattatga

SEQ ID NO: 10377 - DNA, 19 bp, Homo sapiens
  siRNA target sequence for REL (NM_002908.1,358-376).
gtgagaattacattagtaa

SEQ ID NO: 10378 - DNA, 19 bp, Homo sapiens
  siRNA target sequence for REL (NM_002908.1,368-386).
cattagtaacaaagaatga

SEQ ID NO: 10379 - DNA, 19 bp, Homo sapiens
  siRNA target sequence for REL (NM_002908.1,381-399).
gaatgacccatataaacct

SEQ ID NO: 10380 - DNA, 19 bp, Homo sapiens
  siRNA target sequence for REL (NM_002908.1,426-444).
ctgcagagacggctactat

SEQ ID NO: 10381 - DNA, 19 bp, Homo sapiens
  siRNA target sequence for REL (NM_002908.1,429-447).
cagagacggctactatgaa

SEQ ID NO: 10382 - DNA, 19 bp, Homo sapiens
  siRNA target sequence for REL (NM_002908.1,438-456).
ctactatgaagcagaattt

SEQ ID NO: 10383 - DNA, 19 bp, Homo sapiens
  siRNA target sequence for REL (NM_002908.1,467-485).
gcagacctttgtttttcca

SEQ ID NO: 10384 - DNA, 19 bp, Homo sapiens
  siRNA target sequence for REL (NM_002908.1,483-501).
ccaaaatttgggtattcga

SEQ ID NO: 10385 - DNA, 19 bp, Homo sapiens
  siRNA target sequence for REL (NM_002908.1,484-502).
caaaatttgggtattcgat

SEQ ID NO: 10386 - DNA, 19 bp, Homo sapiens
  siRNA target sequence for REL (NM_002908.1,494-512).
gtattcgatgtgtgaagaa

SEQ ID NO: 10387 - DNA, 19 bp, Homo sapiens
  siRNA target sequence for REL (NM_002908.1,649-667).
gatgaacatggtaatttga

SEQ ID NO: 10388 - DNA, 19 bp, Homo sapiens
  siRNA target sequence for REL (NM_002908.1,706-724).
gacaaccgtgctccaaata

SEQ ID NO: 10389 - DNA, 19 bp, Homo sapiens
  siRNA target sequence for REL (NM_002908.1,737-755).
ggatttgtcgtgtaaacaa

SEQ ID NO: 10390 - DNA, 19 bp, Homo sapiens
  siRNA target sequence for REL (NM_002908.1,832-850).
cgttttgtgttgaacgatt

SEQ ID NO: 10391 - DNA, 19 bp, Homo sapiens
  siRNA target sequence for REL (NM_002908.1,843-861).
gaacgattgggaagcaaaa

SEQ ID NO: 10392 - DNA, 19 bp, Homo sapiens
  siRNA target sequence for REL (NM_002908.1,853-871).
gaagcaaaaggcatctttt

SEQ ID NO: 10393 - DNA, 19 bp, Homo sapiens
  siRNA target sequence for REL (NM_002908.1,889-907).
cgtcaagtagccattgttt

SEQ ID NO: 10394 - DNA, 19 bp, Homo sapiens
  siRNA target sequence for REL (NM_002908.1,890-908).
gtcaagtagccattgtttt

SEQ ID NO: 10395 - DNA, 19 bp, Homo sapiens
  siRNA target sequence for REL (NM_002908.1,936-954).
cacagaacccgtaacagta

SEQ ID NO: 10396 - DNA, 19 bp, Homo sapiens
  siRNA target sequence for REL (NM_002908.1,938-956).
cagaacccgtaacagtaaa

SEQ ID NO: 10397 - DNA, 19 bp, Homo sapiens
  siRNA target sequence for REL (NM_002908.1,940-958).
gaacccgtaacagtaaaaa

SEQ ID NO: 10398 - DNA, 19 bp, Homo sapiens
  siRNA target sequence for REL (NM_002908.1,994-1012).
gaatctatggattttagat

SEQ ID NO: 10399 - DNA, 19 bp, Homo sapiens
  siRNA target sequence for REL (NM_002908.1,1038-1056).
cggcaataaagcaaagaaa

SEQ ID NO: 10400 - DNA, 19 bp, Homo sapiens
  siRNA target sequence for REL (NM_002908.1,1089-1107).
ccaggatcacgtagaaaca

SEQ ID NO: 10401 - DNA, 19 bp, Homo sapiens
  siRNA target sequence for REL (NM_002908.1,1220-1238).
ctggtctcctcggttcaat

SEQ ID NO: 10402 - DNA, 19 bp, Homo sapiens
  siRNA target sequence for REL (NM_002908.1,1305-1323).
gcctacaggggtttcaagt

SEQ ID NO: 10403 - DNA, 19 bp, Homo sapiens
  siRNA target sequence for REL (NM_002908.1,1356-1374).
catctcaagtggattgtca

SEQ ID NO: 10404 - DNA, 19 bp, Homo sapiens
  siRNA target sequence for REL (NM_002908.1,1435-1453).
ccacgctcaggcaatacaa

SEQ ID NO: 10405 - DNA, 19 bp, Homo sapiens
  siRNA target sequence for REL (NM_002908.1,1436-1454).
cacgctcaggcaatacaaa

SEQ ID NO: 10406 - DNA, 19 bp, Homo sapiens
  siRNA target sequence for REL (NM_002908.1,1451-1469).
caaacccactgagtagttt

SEQ ID NO: 10407 - DNA, 19 bp, Homo sapiens
  siRNA target sequence for REL (NM_002908.1,1455-1473).
cccactgagtagtttttca

SEQ ID NO: 10408 - DNA, 19 bp, Homo sapiens
  siRNA target sequence for REL (NM_002908.1,1459-1477).
ctgagtagtttttcaacaa

SEQ ID NO: 10409 - DNA, 19 bp, Homo sapiens
  siRNA target sequence for REL (NM_002908.1,1475-1493).
caaggacacttccttctaa

SEQ ID NO: 10410 - DNA, 19 bp, Homo sapiens
  siRNA target sequence for REL (NM_002908.1,1487-1505).
cttctaattcgcaaggtat

SEQ ID NO: 10411 - DNA, 19 bp, Homo sapiens
  siRNA target sequence for REL (NM_002908.1,1732-1750).
cttgaaaacccctcatgta

SEQ ID NO: 10412 - DNA, 19 bp, Homo sapiens
  siRNA target sequence for REL (NM_002908.1,1735-1753).
gaaaacccctcatgtaatt

SEQ ID NO: 10413 - DNA, 19 bp, Homo sapiens
  siRNA target sequence for REL (NM_002908.1,1811-1829).
cagcaggcgccaattccaa

SEQ ID NO: 10414 - DNA, 19 bp, Homo sapiens
  siRNA target sequence for REL (NM_002908.1,1813-1831).
gcaggcgccaattccaata

SEQ ID NO: 10415 - DNA, 19 bp, Homo sapiens
  siRNA target sequence for REL (NM_002908.1,1816-1834).
ggcgccaattccaatacta

SEQ ID NO: 10416 - DNA, 19 bp, Homo sapiens
  siRNA target sequence for REL (NM_002908.1,1818-1836).
cgccaattccaatactact

SEQ ID NO: 10417 - DNA, 19 bp, Homo sapiens
  siRNA target sequence for REL (NM_002908.1,1827-1845).
caatactactgtttttgtt

SEQ ID NO: 10418 - DNA, 19 bp, Homo sapiens
  siRNA target sequence for REL (NM_002908.1,1847-1865).
cacaatcagatgcatttga

SEQ ID NO: 10419 - DNA, 19 bp, Homo sapiens
  siRNA target sequence for REL (NM_002908.1,1906-1924).
gagtcgggaccatcaaaca

SEQ ID NO: 10420 - DNA, 19 bp, Homo sapiens
  siRNA target sequence for REL (NM_002908.1,1908-1926).
gtcgggaccatcaaacagt

SEQ ID NO: 10421 - DNA, 19 bp, Homo sapiens
  siRNA target sequence for REL (NM_002908.1,1912-1930).
ggaccatcaaacagtacta

SEQ ID NO: 10422 - DNA, 19 bp, Homo sapiens
  siRNA target sequence for REL (NM_002908.1,1913-1931).
gaccatcaaacagtactaa

SEQ ID NO: 10423 - DNA, 19 bp, Homo sapiens
  siRNA target sequence for REL (NM_002908.1,1951-1969).
gttcaagatagtcagtatt

SEQ ID NO: 10424 - DNA, 19 bp, Homo sapiens
  siRNA target sequence for REL (NM_002908.1,1972-1990).
ggtattggcagtatgcaaa

SEQ ID NO: 10425 - DNA, 19 bp, Homo sapiens
  siRNA target sequence for REL (NM_002908.1,1982-2000).
gtatgcaaaatgagcaatt

SEQ ID NO: 10426 - DNA, 19 bp, Homo sapiens
  siRNA target sequence for REL (NM_002908.1,1986-2004).
gcaaaatgagcaattgagt

SEQ ID NO: 10427 - DNA, 19 bp, Homo sapiens
  siRNA target sequence for REL (NM_002908.1,2001-2019).
gagtgactcctttccatat

SEQ ID NO: 10428 - DNA, 19 bp, Homo sapiens
  siRNA target sequence for RELA (NM_021975.1,259-277).
cccacgagcttgtaggaaa

SEQ ID NO: 10429 - DNA, 19 bp, Homo sapiens
  siRNA target sequence for RELA (NM_021975.1,283-301).
gccgggatggcttctatga

SEQ ID NO: 10430 - DNA, 19 bp, Homo sapiens
  siRNA target sequence for RELA (NM_021975.1,396-414).
cgcatccagaccaacaaca

SEQ ID NO: 10431 - DNA, 19 bp, Homo sapiens
  siRNA target sequence for RELA (NM_021975.1,416-434).
ccccttccaagttcctata

SEQ ID NO: 10432 - DNA, 19 bp, Homo sapiens
  siRNA target sequence for RELA (NM_021975.1,590-608).
ccgagtgaaccgaaactct

SEQ ID NO: 10433 - DNA, 19 bp, Homo sapiens
  siRNA target sequence for RELA (NM_021975.1,666-684).
gacattgaggtgtatttca

SEQ ID NO: 10434 - DNA, 19 bp, Homo sapiens
  siRNA target sequence for RELA (NM_021975.1,735-753).
cgacaagtggccattgtgt

SEQ ID NO: 10435 - DNA, 19 bp, Homo sapiens
  siRNA target sequence for RELA (NM_021975.1,736-754).
gacaagtggccattgtgtt

SEQ ID NO: 10436 - DNA, 19 bp, Homo sapiens
  siRNA target sequence for RELA (NM_021975.1,841-859).
gtgagcccatggaattcca

SEQ ID NO: 10437 - DNA, 19 bp, Homo sapiens
  siRNA target sequence for RELA (NM_021975.1,888-906).
cggattgaggagaaacgta

SEQ ID NO: 10438 - DNA, 19 bp, Homo sapiens
  siRNA target sequence for RELA (NM_021975.1,889-907).
ggattgaggagaaacgtaa

SEQ ID NO: 10439 - DNA, 19 bp, Homo sapiens
  siRNA target sequence for RELA (NM_021975.1,903-921).
cgtaaaaggacatatgaga

SEQ ID NO: 10440 - DNA, 19 bp, Homo sapiens
  siRNA target sequence for RELA (NM_021975.1,1038-1056).
cagccctatccctttacgt

SEQ ID NO: 10441 - DNA, 19 bp, Homo sapiens
  siRNA target sequence for RELA (NM_021975.1,1061-1079).
cctgagcaccatcaactat

SEQ ID NO: 10442 - DNA, 19 bp, Homo sapiens
  siRNA target sequence for RELA (NM_021975.1,1482-1500).
gagtaccctgaggctataa

SEQ ID NO: 10443 - DNA, 19 bp, Homo sapiens
  siRNA target sequence for RELA (NM_021975.1,1484-1502).
gtaccctgaggctataact

SEQ ID NO: 10444 - DNA, 19 bp, Homo sapiens
  siRNA target sequence for RELB (NM_006509.2,839-857).
ccattgagcggaagattca

SEQ ID NO: 10445 - DNA, 19 bp, Homo sapiens
  siRNA target sequence for RELB (NM_006509.2,840-858).
cattgagcggaagattcaa

SEQ ID NO: 10446 - DNA, 19 bp, Homo sapiens
  siRNA target sequence for RELB (NM_006509.2,996-1014).
gcccgtctatgacaagaaa

SEQ ID NO: 10447 - DNA, 19 bp, Homo sapiens
  siRNA target sequence for RELB (NM_006509.2,1033-1051).
ctgcggatttgccgaatta

SEQ ID NO: 10448 - DNA, 19 bp, Homo sapiens
  siRNA target sequence for RELB (NM_006509.2,1036-1054).
cggatttgccgaattaaca

SEQ ID NO: 10449 - DNA, 19 bp, Homo sapiens
  siRNA target sequence for RELB (NM_006509.2,1037-1055).
ggatttgccgaattaacaa

SEQ ID NO: 10450 - DNA, 19 bp, Homo sapiens
  siRNA target sequence for RELB (NM_006509.2,1780-1798).
cttgtgggcagcaacatgt

SEQ ID NO: 10451 - DNA, 19 bp, Homo sapiens
  siRNA target sequence for RELB (NM_006509.2,1791-1809).
caacatgttccccaatcat

SEQ ID NO: 10452 - DNA, 19 bp, Homo sapiens
  siRNA target sequence for RERE (NM_012102.2,1147-1165).
gggcctgtagggagtaaga

SEQ ID NO: 10453 - DNA, 19 bp, Homo sapiens
  siRNA target sequence for RERE (NM_012102.2,1177-1195).
ctcatgaacgtcaaatggt

SEQ ID NO: 10454 - DNA, 19 bp, Homo sapiens
  siRNA target sequence for RERE (NM_012102.2,1193-1211).
ggtactaccgtcaatctga

SEQ ID NO: 10455 - DNA, 19 bp, Homo sapiens
  siRNA target sequence for RERE (NM_012102.2,1239-1257).
ggttcaggatcgacataat

SEQ ID NO: 10456 - DNA, 19 bp, Homo sapiens
  siRNA target sequence for RERE (NM_012102.2,1245-1263).
ggatcgacataatgaaaat

SEQ ID NO: 10457 - DNA, 19 bp, Homo sapiens
  siRNA target sequence for RERE (NM_012102.2,1268-1286).
ctggaagagaacttgtcat

SEQ ID NO: 10458 - DNA, 19 bp, Homo sapiens
  siRNA target sequence for RERE (NM_012102.2,1354-1372).
gcccttagagggaagtgta

SEQ ID NO: 10459 - DNA, 19 bp, Homo sapiens
  siRNA target sequence for RERE (NM_012102.2,1355-1373).
cccttagagggaagtgtaa

SEQ ID NO: 10460 - DNA, 19 bp, Homo sapiens
  siRNA target sequence for RERE (NM_012102.2,1377-1395).
ctcccatttttctgacata

SEQ ID NO: 10461 - DNA, 19 bp, Homo sapiens
  siRNA target sequence for RERE (NM_012102.2,1417-1435).
gcccgagtggattcatttt

SEQ ID NO: 10462 - DNA, 19 bp, Homo sapiens
  siRNA target sequence for RERE (NM_012102.2,1418-1436).
cccgagtggattcattttt

SEQ ID NO: 10463 - DNA, 19 bp, Homo sapiens
  siRNA target sequence for RERE (NM_012102.2,1612-1630).
gacctccttatgtacttga

SEQ ID NO: 10464 - DNA, 19 bp, Homo sapiens
  siRNA target sequence for RERE (NM_012102.2,1743-1761).
gcatgaaagcggttacgat

SEQ ID NO: 10465 - DNA, 19 bp, Homo sapiens
  siRNA target sequence for RERE (NM_012102.2,1824-1842).
gaccgaggacgaagtgaaa

SEQ ID NO: 10466 - DNA, 19 bp, Homo sapiens
  siRNA target sequence for RERE (NM_012102.2,1834-1852).
gaagtgaaacgcttcgtta

SEQ ID NO: 10467 - DNA, 19 bp, Homo sapiens
  siRNA target sequence for RERE (NM_012102.2,1864-1882).
cagtacgggaagaacttct

SEQ ID NO: 10468 - DNA, 19 bp, Homo sapiens
  siRNA target sequence for RERE (NM_012102.2,1924-1942).
gagctgatcaccttctatt

SEQ ID NO: 10469 - DNA, 19 bp, Homo sapiens
  siRNA target sequence for RERE (NM_012102.2,1927-1945).
ctgatcaccttctattact

SEQ ID NO: 10470 - DNA, 19 bp, Homo sapiens
  siRNA target sequence for RERE (NM_012102.2,1929-1947).
gatcaccttctattactat

SEQ ID NO: 10471 - DNA, 19 bp, Homo sapiens
  siRNA target sequence for RERE (NM_012102.2,2006-2024).
ccgtgttcaggaggattaa

SEQ ID NO: 10472 - DNA, 19 bp, Homo sapiens
  siRNA target sequence for RERE (NM_012102.2,2010-2028).
gttcaggaggattaagact

SEQ ID NO: 10473 - DNA, 19 bp, Homo sapiens
  siRNA target sequence for RERE (NM_012102.2,2065-2083).
cccccgtccagtgaattct

SEQ ID NO: 10474 - DNA, 19 bp, Homo sapiens
  siRNA target sequence for RERE (NM_012102.2,2066-2084).
ccccgtccagtgaattctt

SEQ ID NO: 10475 - DNA, 19 bp, Homo sapiens
  siRNA target sequence for RERE (NM_012102.2,2231-2249).
gtcgcatccacttcaagaa

SEQ ID NO: 10476 - DNA, 19 bp, Homo sapiens
  siRNA target sequence for RERE (NM_012102.2,2284-2302).
gacccgccaccgtttatgt

SEQ ID NO: 10477 - DNA, 19 bp, Homo sapiens
  siRNA target sequence for RERE (NM_012102.2,2287-2305).
ccgccaccgtttatgttca

SEQ ID NO: 10478 - DNA, 19 bp, Homo sapiens
  siRNA target sequence for RERE (NM_012102.2,2288-2306).
cgccaccgtttatgttcaa

SEQ ID NO: 10479 - DNA, 19 bp, Homo sapiens
  siRNA target sequence for RERE (NM_012102.2,2329-2347).
gggctcagtgggaagcata

SEQ ID NO: 10480 - DNA, 19 bp, Homo sapiens
  siRNA target sequence for RERE (NM_012102.2,2432-2450).
cctcacccatcaatgaaga

SEQ ID NO: 10481 - DNA, 19 bp, Homo sapiens
  siRNA target sequence for RERE (NM_012102.2,2556-2574).
ctcttcccctcttaagagt

SEQ ID NO: 10482 - DNA, 19 bp, Homo sapiens
  siRNA target sequence for RERE (NM_012102.2,2561-2579).
cccctcttaagagtaacaa

SEQ ID NO: 10483 - DNA, 19 bp, Homo sapiens
  siRNA target sequence for RERE (NM_012102.2,2562-2580).
ccctcttaagagtaacaaa

SEQ ID NO: 10484 - DNA, 19 bp, Homo sapiens
  siRNA target sequence for RERE (NM_012102.2,2664-2682).
gcccaactcgccatctgaa

SEQ ID NO: 10485 - DNA, 19 bp, Homo sapiens
  siRNA target sequence for RERE (NM_012102.2,3498-3516).
ctcacccttctccatgaat

SEQ ID NO: 10486 - DNA, 19 bp, Homo sapiens
  siRNA target sequence for RERE (NM_012102.2,4021-4039).
cagtcagctaggttctaca

SEQ ID NO: 10487 - DNA, 19 bp, Homo sapiens
  siRNA target sequence for RERE (NM_012102.2,4023-4041).
gtcagctaggttctacaaa

SEQ ID NO: 10488 - DNA, 19 bp, Homo sapiens
  siRNA target sequence for RERE (NM_012102.2,4070-4088).
cccggacagacctgtactt

SEQ ID NO: 10489 - DNA, 19 bp, Homo sapiens
  siRNA target sequence for RERE (NM_012102.2,5282-5300).
caagtcaggaagattatta

SEQ ID NO: 10490 - DNA, 19 bp, Homo sapiens
  siRNA target sequence for RFX5 (NM_000449.2,252-270).
ctccgaggtaccatttcca

SEQ ID NO: 10491 - DNA, 19 bp, Homo sapiens
  siRNA target sequence for RFX5 (NM_000449.2,269-287).
caaggccgtgcagaacaaa

SEQ ID NO: 10492 - DNA, 19 bp, Homo sapiens
  siRNA target sequence for RFX5 (NM_000449.2,272-290).
ggccgtgcagaacaaagta

SEQ ID NO: 10493 - DNA, 19 bp, Homo sapiens
  siRNA target sequence for RFX5 (NM_000449.2,293-311).
ggggatcctgcaagatgta

SEQ ID NO: 10494 - DNA, 19 bp, Homo sapiens
  siRNA target sequence for RFX5 (NM_000449.2,295-313).
ggatcctgcaagatgtaca

SEQ ID NO: 10495 - DNA, 19 bp, Homo sapiens
  siRNA target sequence for RFX5 (NM_000449.2,366-384).
cccaccactggagacaaaa

SEQ ID NO: 10496 - DNA, 19 bp, Homo sapiens
  siRNA target sequence for RFX5 (NM_000449.2,467-485).
cacctgtctgccaaagcaa

SEQ ID NO: 10497 - DNA, 19 bp, Homo sapiens
  siRNA target sequence for RFX5 (NM_000449.2,495-513).
gatgcctatcggaagtact

SEQ ID NO: 10498 - DNA, 19 bp, Homo sapiens
  siRNA target sequence for RFX5 (NM_000449.2,615-633).
ggccagtccaaatattgct

SEQ ID NO: 10499 - DNA, 19 bp, Homo sapiens
  siRNA target sequence for RFX5 (NM_000449.2,616-634).
gccagtccaaatattgcta

SEQ ID NO: 10500 - DNA, 19 bp, Homo sapiens
  siRNA target sequence for RFX5 (NM_000449.2,649-667).
ggaagaccttggtgtctat

SEQ ID NO: 10501 - DNA, 19 bp, Homo sapiens
  siRNA target sequence for RFX5 (NM_000449.2,711-729).
gaaatgggcccagaagtaa

SEQ ID NO: 10502 - DNA, 19 bp, Homo sapiens
  siRNA target sequence for RFX5 (NM_000449.2,927-945).
cctcgggaacggtcatcta

SEQ ID NO: 10503 - DNA, 19 bp, Homo sapiens
  siRNA target sequence for RFX5 (NM_000449.2,928-946).
ctcgggaacggtcatctaa

SEQ ID NO: 10504 - DNA, 19 bp, Homo sapiens
  siRNA target sequence for RFX5 (NM_000449.2,933-951).
gaacggtcatctaaaccaa

SEQ ID NO: 10505 - DNA, 19 bp, Homo sapiens
  siRNA target sequence for RFX5 (NM_000449.2,1064-1082).
gcggaagaagagtgtagtt

SEQ ID NO: 10506 - DNA, 19 bp, Homo sapiens
  siRNA target sequence for RFX5 (NM_000449.2,1102-1120).
ccaataacctgcaggttaa

SEQ ID NO: 10507 - DNA, 19 bp, Homo sapiens
  siRNA target sequence for RFX5 (NM_000449.2,1184-1202).
cccagtctctccacctatt

SEQ ID NO: 10508 - DNA, 19 bp, Homo sapiens
  siRNA target sequence for RFX5 (NM_000449.2,1282-1300).
ctgtgcccatcattaacat

SEQ ID NO: 10509 - DNA, 19 bp, Homo sapiens
  siRNA target sequence for RFX5 (NM_000449.2,1484-1502).
ggctccaccagctaaagca

SEQ ID NO: 10510 - DNA, 19 bp, Homo sapiens
  siRNA target sequence for RFX5 (NM_000449.2,1501-1519).
cagcaaagcaggatataga

SEQ ID NO: 10511 - DNA, 19 bp, Homo sapiens
  siRNA target sequence for RFXANK (NM_003721.2,843-861).
gtgacaacctcgtcaacaa

SEQ ID NO: 10512 - DNA, 19 bp, Homo sapiens
  siRNA target sequence for RFXAP (NM_000538.2,817-835).
cctgcaagacctactcttt

SEQ ID NO: 10513 - DNA, 19 bp, Homo sapiens
  siRNA target sequence for RFXAP (NM_000538.2,818-836).
ctgcaagacctactctttt

SEQ ID NO: 10514 - DNA, 19 bp, Homo sapiens
  siRNA target sequence for RFXAP (NM_000538.2,824-842).
gacctactcttttagaaca

SEQ ID NO: 10515 - DNA, 19 bp, Homo sapiens
  siRNA target sequence for RFXAP (NM_000538.2,827-845).
ctactcttttagaacaagt

SEQ ID NO: 10516 - DNA, 19 bp, Homo sapiens
  siRNA target sequence for RFXAP (NM_000538.2,880-898).
ccagaagtagtgcaatttt

SEQ ID NO: 10517 - DNA, 19 bp, Homo sapiens
  siRNA target sequence for RLF (NM_012421.1,276-294).
gaatgcatcagaacatatt

SEQ ID NO: 10518 - DNA, 19 bp, Homo sapiens
  siRNA target sequence for RLF (NM_012421.1,280-298).
gcatcagaacatattgtgt

SEQ ID NO: 10519 - DNA, 19 bp, Homo sapiens
  siRNA target sequence for RLF (NM_012421.1,338-356).
ccagtgcacgtccatactt

SEQ ID NO: 10520 - DNA, 19 bp, Homo sapiens
  siRNA target sequence for RLF (NM_012421.1,339-357).
cagtgcacgtccatactta

SEQ ID NO: 10521 - DNA, 19 bp, Homo sapiens
  siRNA target sequence for RLF (NM_012421.1,343-361).
gcacgtccatacttaacta

SEQ ID NO: 10522 - DNA, 19 bp, Homo sapiens
  siRNA target sequence for RLF (NM_012421.1,349-367).
ccatacttaactactgaat

SEQ ID NO: 10523 - DNA, 19 bp, Homo sapiens
  siRNA target sequence for RLF (NM_012421.1,368-386).
gtgaagatgtcctcttagt

SEQ ID NO: 10524 - DNA, 19 bp, Homo sapiens
  siRNA target sequence for RLF (NM_012421.1,395-413).
gattagtactgagttgttt

SEQ ID NO: 10525 - DNA, 19 bp, Homo sapiens
  siRNA target sequence for RLF (NM_012421.1,400-418).
gtactgagttgtttcgaat

SEQ ID NO: 10526 - DNA, 19 bp, Homo sapiens
  siRNA target sequence for RLF (NM_012421.1,491-509).
cacatgatgcattattgga

SEQ ID NO: 10527 - DNA, 19 bp, Homo sapiens
  siRNA target sequence for RLF (NM_012421.1,493-511).
catgatgcattattggaat

SEQ ID NO: 10528 - DNA, 19 bp, Homo sapiens
  siRNA target sequence for RLF (NM_012421.1,574-592).
gttcttcttaaaattctgt

SEQ ID NO: 10529 - DNA, 19 bp, Homo sapiens
  siRNA target sequence for RLF (NM_012421.1,607-625).
gaaacggaggaagtcaata

SEQ ID NO: 10530 - DNA, 19 bp, Homo sapiens
  siRNA target sequence for RLF (NM_012421.1,657-675).
gcaaatgcgaataaaacat

SEQ ID NO: 10531 - DNA, 19 bp, Homo sapiens
  siRNA target sequence for RLF (NM_012421.1,658-676).
caaatgcgaataaaacatt

SEQ ID NO: 10532 - DNA, 19 bp, Homo sapiens
  siRNA target sequence for RLF (NM_012421.1,665-683).
gaataaaacatttgttgaa

SEQ ID NO: 10533 - DNA, 19 bp, Homo sapiens
  siRNA target sequence for RLF (NM_012421.1,697-715).
ccccaggctactgctttat

SEQ ID NO: 10534 - DNA, 19 bp, Homo sapiens
  siRNA target sequence for RLF (NM_012421.1,763-781).
cagcaagcctatatcacat

SEQ ID NO: 10535 - DNA, 19 bp, Homo sapiens
  siRNA target sequence for RLF (NM_012421.1,766-784).
caagcctatatcacatgtt

SEQ ID NO: 10536 - DNA, 19 bp, Homo sapiens
  siRNA target sequence for RLF (NM_012421.1,834-852).
cgactgcaaggaagtacta

SEQ ID NO: 10537 - DNA, 19 bp, Homo sapiens
  siRNA target sequence for RLF (NM_012421.1,844-862).
gaagtactagacatcattt

SEQ ID NO: 10538 - DNA, 19 bp, Homo sapiens
  siRNA target sequence for RLF (NM_012421.1,885-903).
ggataacacagcatttgtt

SEQ ID NO: 10539 - DNA, 19 bp, Homo sapiens
  siRNA target sequence for RLF (NM_012421.1,904-922).
ctttgtacgacttacctta

SEQ ID NO: 10540 - DNA, 19 bp, Homo sapiens
  siRNA target sequence for RLF (NM_012421.1,978-996).
gagtaaactgcaaagaaga

SEQ ID NO: 10541 - DNA, 19 bp, Homo sapiens
  siRNA target sequence for RLF (NM_012421.1,995-1013).
gaattgacccttctttaga

SEQ ID NO: 10542 - DNA, 19 bp, Homo sapiens
  siRNA target sequence for RLF (NM_012421.1,1000-1018).
gacccttctttagatactt

SEQ ID NO: 10543 - DNA, 19 bp, Homo sapiens
  siRNA target sequence for RLF (NM_012421.1,1023-1041).
ggagcgctgtcgtcagttt

SEQ ID NO: 10544 - DNA, 19 bp, Homo sapiens
  siRNA target sequence for RLF (NM_012421.1,1036-1054).
cagtttggtgtcatagcta

SEQ ID NO: 10545 - DNA, 19 bp, Homo sapiens
  siRNA target sequence for RLF (NM_012421.1,1076-1094).
gcctcattagagttataca

SEQ ID NO: 10546 - DNA, 19 bp, Homo sapiens
  siRNA target sequence for RLF (NM_012421.1,1077-1095).
cctcattagagttatacaa

SEQ ID NO: 10547 - DNA, 19 bp, Homo sapiens
  siRNA target sequence for RLF (NM_012421.1,1080-1098).
cattagagttatacaaact

SEQ ID NO: 10548 - DNA, 19 bp, Homo sapiens
  siRNA target sequence for RLF (NM_012421.1,1115-1133).
gtcttggggtgtcaatttt

SEQ ID NO: 10549 - DNA, 19 bp, Homo sapiens
  siRNA target sequence for RLF (NM_012421.1,1120-1138).
ggggtgtcaattttactgt

SEQ ID NO: 10550 - DNA, 19 bp, Homo sapiens
  siRNA target sequence for RLF (NM_012421.1,1241-1259).
gagcctgtcagcttacaga

SEQ ID NO: 10551 - DNA, 19 bp, Homo sapiens
  siRNA target sequence for RLF (NM_012421.1,1243-1261).
gcctgtcagcttacagaat

SEQ ID NO: 10552 - DNA, 19 bp, Homo sapiens
  siRNA target sequence for RLF (NM_012421.1,1273-1291).
cccagtttggatggattta

SEQ ID NO: 10553 - DNA, 19 bp, Homo sapiens
  siRNA target sequence for RLF (NM_012421.1,1441-1459).
cgacactgccaccaacttt

SEQ ID NO: 10554 - DNA, 19 bp, Homo sapiens
  siRNA target sequence for RLF (NM_012421.1,1489-1507).
gatttaagtggctatgaaa

SEQ ID NO: 10555 - DNA, 19 bp, Homo sapiens
  siRNA target sequence for RLF (NM_012421.1,1498-1516).
ggctatgaaatgtccatta

SEQ ID NO: 10556 - DNA, 19 bp, Homo sapiens
  siRNA target sequence for RLF (NM_012421.1,1630-1648).
cctattggctcttctgaaa

SEQ ID NO: 10557 - DNA, 19 bp, Homo sapiens
  siRNA target sequence for RLF (NM_012421.1,1658-1676).
ggtggcttcagtacaagtt

SEQ ID NO: 10558 - DNA, 19 bp, Homo sapiens
  siRNA target sequence for RLF (NM_012421.1,1659-1677).
gtggcttcagtacaagttt

SEQ ID NO: 10559 - DNA, 19 bp, Homo sapiens
  siRNA target sequence for RLF (NM_012421.1,1663-1681).
cttcagtacaagtttttct

SEQ ID NO: 10560 - DNA, 19 bp, Homo sapiens
  siRNA target sequence for RLF (NM_012421.1,1691-1709).
gtaagcgggaatgtataga

SEQ ID NO: 10561 - DNA, 19 bp, Homo sapiens
  siRNA target sequence for RLF (NM_012421.1,1715-1733).
gaattcttcatcattctaa

SEQ ID NO: 10562 - DNA, 19 bp, Homo sapiens
  siRNA target sequence for RLF (NM_012421.1,1738-1756).
catatggaagatggaattt

SEQ ID NO: 10563 - DNA, 19 bp, Homo sapiens
  siRNA target sequence for RLF (NM_012421.1,1760-1778).
cctgtccagtttgtattaa

SEQ ID NO: 10564 - DNA, 19 bp, Homo sapiens
  siRNA target sequence for RLF (NM_012421.1,1810-1828).
catgtgatggagcatgtta

SEQ ID NO: 10565 - DNA, 19 bp, Homo sapiens
  siRNA target sequence for RLF (NM_012421.1,1849-1867).
gaccgctctaaaaagaaat

SEQ ID NO: 10566 - DNA, 19 bp, Homo sapiens
  siRNA target sequence for RLF (NM_012421.1,1881-1899).
ctctcaaaagggtatttgt

SEQ ID NO: 10567 - DNA, 19 bp, Homo sapiens
  siRNA target sequence for RLF (NM_012421.1,1924-1942).
gagcaaaaccattcattga

SEQ ID NO: 10568 - DNA, 19 bp, Homo sapiens
  siRNA target sequence for RLF (NM_012421.1,2005-2023).
ctgcaagacagagatttgt

SEQ ID NO: 10569 - DNA, 19 bp, Homo sapiens
  siRNA target sequence for RLF (NM_012421.1,2041-2059).
gactgttcccgtgtgttta

SEQ ID NO: 10570 - DNA, 19 bp, Homo sapiens
  siRNA target sequence for RLF (NM_012421.1,2045-2063).
gttcccgtgtgtttaagca

SEQ ID NO: 10571 - DNA, 19 bp, Homo sapiens
  siRNA target sequence for RLF (NM_012421.1,2048-2066).
cccgtgtgtttaagcaatt

SEQ ID NO: 10572 - DNA, 19 bp, Homo sapiens
  siRNA target sequence for RLF (NM_012421.1,2049-2067).
ccgtgtgtttaagcaattt

SEQ ID NO: 10573 - DNA, 19 bp, Homo sapiens
  siRNA target sequence for RLF (NM_012421.1,2120-2138).
ccaagcactacttggatat

SEQ ID NO: 10574 - DNA, 19 bp, Homo sapiens
  siRNA target sequence for RLF (NM_012421.1,2162-2180).
cttactgtcgacgacattt

SEQ ID NO: 10575 - DNA, 19 bp, Homo sapiens
  siRNA target sequence for RLF (NM_012421.1,2222-2240).
gtgggcctcagccttatat

SEQ ID NO: 10576 - DNA, 19 bp, Homo sapiens
  siRNA target sequence for RLF (NM_012421.1,2224-2242).
gggcctcagccttatatgt

SEQ ID NO: 10577 - DNA, 19 bp, Homo sapiens
  siRNA target sequence for RLF (NM_012421.1,2243-2261).
gtgtatctatagattgcta

SEQ ID NO: 10578 - DNA, 19 bp, Homo sapiens
  siRNA target sequence for RLF (NM_012421.1,2264-2282).
ctaggtttggatcagtaaa

SEQ ID NO: 10579 - DNA, 19 bp, Homo sapiens
  siRNA target sequence for RLF (NM_012421.1,2267-2285).
ggtttggatcagtaaatga

SEQ ID NO: 10580 - DNA, 19 bp, Homo sapiens
  siRNA target sequence for RLF (NM_012421.1,2268-2286).
gtttggatcagtaaatgaa

SEQ ID NO: 10581 - DNA, 19 bp, Homo sapiens
  siRNA target sequence for RLF (NM_012421.1,2311-2329).
gacgatctgcgttacaaat

SEQ ID NO: 10582 - DNA, 19 bp, Homo sapiens
  siRNA target sequence for RLF (NM_012421.1,2313-2331).
cgatctgcgttacaaatgt

SEQ ID NO: 10583 - DNA, 19 bp, Homo sapiens
  siRNA target sequence for RLF (NM_012421.1,2317-2335).
ctgcgttacaaatgtgaat

SEQ ID NO: 10584 - DNA, 19 bp, Homo sapiens
  siRNA target sequence for RLF (NM_012421.1,2319-2337).
gcgttacaaatgtgaatta

SEQ ID NO: 10585 - DNA, 19 bp, Homo sapiens
  siRNA target sequence for RLF (NM_012421.1,2320-2338).
cgttacaaatgtgaattaa

SEQ ID NO: 10586 - DNA, 19 bp, Homo sapiens
  siRNA target sequence for RLF (NM_012421.1,2341-2359).
ggctgtaatattgttttca

SEQ ID NO: 10587 - DNA, 19 bp, Homo sapiens
  siRNA target sequence for RLF (NM_012421.1,2445-2463).
ctattactccaaaattgaa

SEQ ID NO: 10588 - DNA, 19 bp, Homo sapiens
  siRNA target sequence for RLF (NM_012421.1,2469-2487).
gaatcacctctcaatgcat

SEQ ID NO: 10589 - DNA, 19 bp, Homo sapiens
  siRNA target sequence for RLF (NM_012421.1,2548-2566).
ggtgaaaagcaagattgta

SEQ ID NO: 10590 - DNA, 19 bp, Homo sapiens
  siRNA target sequence for RLF (NM_012421.1,2589-2607).
ccaaactgataaatcacat

SEQ ID NO: 10591 - DNA, 19 bp, Homo sapiens
  siRNA target sequence for RLF (NM_012421.1,2603-2621).
cacatttacctgaagatct

SEQ ID NO: 10592 - DNA, 19 bp, Homo sapiens
  siRNA target sequence for RLF (NM_012421.1,2636-2654).
cagctaattctcaaataga

SEQ ID NO: 10593 - DNA, 19 bp, Homo sapiens
  siRNA target sequence for RLF (NM_012421.1,2680-2698).
gaaaacagtgacagtaatt

SEQ ID NO: 10594 - DNA, 19 bp, Homo sapiens
  siRNA target sequence for RLF (NM_012421.1,2693-2711).
gtaattctagtgatcagtt

SEQ ID NO: 10595 - DNA, 19 bp, Homo sapiens
  siRNA target sequence for RLF (NM_012421.1,2699-2717).
ctagtgatcagttaagtca

SEQ ID NO: 10596 - DNA, 19 bp, Homo sapiens
  siRNA target sequence for RLF (NM_012421.1,2723-2741).
cttcagcttcaatgaatga

SEQ ID NO: 10597 - DNA, 19 bp, Homo sapiens
  siRNA target sequence for RLF (NM_012421.1,2758-2776).
ctagatcactctgaaacta

SEQ ID NO: 10598 - DNA, 19 bp, Homo sapiens
  siRNA target sequence for RLF (NM_012421.1,2770-2788).
gaaactatgcaggatgtat

SEQ ID NO: 10599 - DNA, 19 bp, Homo sapiens
  siRNA target sequence for RLF (NM_012421.1,2778-2796).
gcaggatgtattgttatct

SEQ ID NO: 10600 - DNA, 19 bp, Homo sapiens
  siRNA target sequence for RLF (NM_012421.1,2785-2803).
gtattgttatctaatgaga

SEQ ID NO: 10601 - DNA, 19 bp, Homo sapiens
  siRNA target sequence for RLF (NM_012421.1,2860-2878).
gacgggactaagtttacct

SEQ ID NO: 10602 - DNA, 19 bp, Homo sapiens
  siRNA target sequence for RLF (NM_012421.1,2890-2908).
ggctgtggttccacataca

SEQ ID NO: 10603 - DNA, 19 bp, Homo sapiens
  siRNA target sequence for RLF (NM_012421.1,2891-2909).
gctgtggttccacatacaa

SEQ ID NO: 10604 - DNA, 19 bp, Homo sapiens
  siRNA target sequence for RLF (NM_012421.1,2894-2912).
gtggttccacatacaaaaa

SEQ ID NO: 10605 - DNA, 19 bp, Homo sapiens
  siRNA target sequence for RLF (NM_012421.1,2940-2958).
gaaggttcatccataccat

SEQ ID NO: 10606 - DNA, 19 bp, Homo sapiens
  siRNA target sequence for RLF (NM_012421.1,2996-3014).
cctctttgggtaatgaaca

SEQ ID NO: 10607 - DNA, 19 bp, Homo sapiens
  siRNA target sequence for RLF (NM_012421.1,3078-3096).
cccagatgaaggtctagat

SEQ ID NO: 10608 - DNA, 19 bp, Homo sapiens
  siRNA target sequence for RLF (NM_012421.1,3080-3098).
cagatgaaggtctagatca

SEQ ID NO: 10609 - DNA, 19 bp, Homo sapiens
  siRNA target sequence for RLF (NM_012421.1,3089-3107).
gtctagatcacaatattca

SEQ ID NO: 10610 - DNA, 19 bp, Homo sapiens
  siRNA target sequence for RLF (NM_012421.1,3149-3167).
cctccatttgtgcttctaa

SEQ ID NO: 10611 - DNA, 19 bp, Homo sapiens
  siRNA target sequence for RLF (NM_012421.1,3188-3206).
ccatgttggaacttctgtt

SEQ ID NO: 10612 - DNA, 19 bp, Homo sapiens
  siRNA target sequence for RLF (NM_012421.1,3204-3222).
gttacgcttgaaacattta

SEQ ID NO: 10613 - DNA, 19 bp, Homo sapiens
  siRNA target sequence for RLF (NM_012421.1,3208-3226).
cgcttgaaacatttaagct

SEQ ID NO: 10614 - DNA, 19 bp, Homo sapiens
  siRNA target sequence for RLF (NM_012421.1,3209-3227).
gcttgaaacatttaagctt

SEQ ID NO: 10615 - DNA, 19 bp, Homo sapiens
  siRNA target sequence for RLF (NM_012421.1,3217-3235).
catttaagcttgaaaaact

SEQ ID NO: 10616 - DNA, 19 bp, Homo sapiens
  siRNA target sequence for RLF (NM_012421.1,3236-3254).
caataacacatggatcttt

SEQ ID NO: 10617 - DNA, 19 bp, Homo sapiens
  siRNA target sequence for RLF (NM_012421.1,3294-3312).
gtctcttcagtcagtttca

SEQ ID NO: 10618 - DNA, 19 bp, Homo sapiens
  siRNA target sequence for RLF (NM_012421.1,3301-3319).
cagtcagtttcatctatct

SEQ ID NO: 10619 - DNA, 19 bp, Homo sapiens
  siRNA target sequence for RLF (NM_012421.1,3303-3321).
gtcagtttcatctatctca

SEQ ID NO: 10620 - DNA, 19 bp, Homo sapiens
  siRNA target sequence for RLF (NM_012421.1,3314-3332).
ctatctcagaccttaattt

SEQ ID NO: 10621 - DNA, 19 bp, Homo sapiens
  siRNA target sequence for RLF (NM_012421.1,3379-3397).
gcggctaagccgtttttct

SEQ ID NO: 10622 - DNA, 19 bp, Homo sapiens
  siRNA target sequence for RLF (NM_012421.1,3381-3399).
ggctaagccgtttttctgt

SEQ ID NO: 10623 - DNA, 19 bp, Homo sapiens
  siRNA target sequence for RLF (NM_012421.1,3429-3447).
gaccagagaggctctgtta

SEQ ID NO: 10624 - DNA, 19 bp, Homo sapiens
  siRNA target sequence for RLF (NM_012421.1,3431-3449).
ccagagaggctctgttaat

SEQ ID NO: 10625 - DNA, 19 bp, Homo sapiens
  siRNA target sequence for RLF (NM_012421.1,3544-3562).
caaaggtcatttacaagaa

SEQ ID NO: 10626 - DNA, 19 bp, Homo sapiens
  siRNA target sequence for RLF (NM_012421.1,3560-3578).
gaaaaacacaccttaggat

SEQ ID NO: 10627 - DNA, 19 bp, Homo sapiens
  siRNA target sequence for RLF (NM_012421.1,3566-3584).
cacaccttaggattcatta

SEQ ID NO: 10628 - DNA, 19 bp, Homo sapiens
  siRNA target sequence for RLF (NM_012421.1,3568-3586).
caccttaggattcattata

SEQ ID NO: 10629 - DNA, 19 bp, Homo sapiens
  siRNA target sequence for RLF (NM_012421.1,3662-3680).
catgttcagtagataggtt

SEQ ID NO: 10630 - DNA, 19 bp, Homo sapiens
  siRNA target sequence for RLF (NM_012421.1,3678-3696).
gttgaaaggtgattgttct

SEQ ID NO: 10631 - DNA, 19 bp, Homo sapiens
  siRNA target sequence for RLF (NM_012421.1,3709-3727).
ggtgatcccagtagtaact

SEQ ID NO: 10632 - DNA, 19 bp, Homo sapiens
  siRNA target sequence for RLF (NM_012421.1,3748-3766).
cctaaaaaggatgaatgta

SEQ ID NO: 10633 - DNA, 19 bp, Homo sapiens
  siRNA target sequence for RLF (NM_012421.1,3885-3903).
gcgaactgttgctaaagga

SEQ ID NO: 10634 - DNA, 19 bp, Homo sapiens
  siRNA target sequence for RLF (NM_012421.1,3886-3904).
cgaactgttgctaaaggaa

SEQ ID NO: 10635 - DNA, 19 bp, Homo sapiens
  siRNA target sequence for RLF (NM_012421.1,3892-3910).
gttgctaaaggaaatctgt

SEQ ID NO: 10636 - DNA, 19 bp, Homo sapiens
  siRNA target sequence for RLF (NM_012421.1,3937-3955).
ccattccattgtattcata

SEQ ID NO: 10637 - DNA, 19 bp, Homo sapiens
  siRNA target sequence for RLF (NM_012421.1,3977-3995).
ccaatctaaaaggcttaat

SEQ ID NO: 10638 - DNA, 19 bp, Homo sapiens
  siRNA target sequence for RLF (NM_012421.1,3978-3996).
caatctaaaaggcttaatt

SEQ ID NO: 10639 - DNA, 19 bp, Homo sapiens
  siRNA target sequence for RLF (NM_012421.1,3988-4006).
ggcttaattcgccattaca

SEQ ID NO: 10640 - DNA, 19 bp, Homo sapiens
  siRNA target sequence for RLF (NM_012421.1,3990-4008).
cttaattcgccattacaga

SEQ ID NO: 10641 - DNA, 19 bp, Homo sapiens
  siRNA target sequence for RLF (NM_012421.1,3999-4017).
ccattacagaactgtacat

SEQ ID NO: 10642 - DNA, 19 bp, Homo sapiens
  siRNA target sequence for RLF (NM_012421.1,4020-4038).
gtacaacaaagaacagtta

SEQ ID NO: 10643 - DNA, 19 bp, Homo sapiens
  siRNA target sequence for RLF (NM_012421.1,4023-4041).
caacaaagaacagttatgt

SEQ ID NO: 10644 - DNA, 19 bp, Homo sapiens
  siRNA target sequence for RLF (NM_012421.1,4150-4168).
gctaagcactgtagtgatt

SEQ ID NO: 10645 - DNA, 19 bp, Homo sapiens
  siRNA target sequence for RLF (NM_012421.1,4155-4173).
gcactgtagtgattctcat

SEQ ID NO: 10646 - DNA, 19 bp, Homo sapiens
  siRNA target sequence for RLF (NM_012421.1,4156-4174).
cactgtagtgattctcata

SEQ ID NO: 10647 - DNA, 19 bp, Homo sapiens
  siRNA target sequence for RLF (NM_012421.1,4160-4178).
gtagtgattctcataacct

SEQ ID NO: 10648 - DNA, 19 bp, Homo sapiens
  siRNA target sequence for RLF (NM_012421.1,4169-4187).
ctcataacctagaccatat

SEQ ID NO: 10649 - DNA, 19 bp, Homo sapiens
  siRNA target sequence for RLF (NM_012421.1,4222-4240).
gcagcaaggttttcttgta

SEQ ID NO: 10650 - DNA, 19 bp, Homo sapiens
  siRNA target sequence for RLF (NM_012421.1,4254-4272).
ccctgctgttttttataca

SEQ ID NO: 10651 - DNA, 19 bp, Homo sapiens
  siRNA target sequence for RLF (NM_012421.1,4296-4314).
gatggaacagcataatatt

SEQ ID NO: 10652 - DNA, 19 bp, Homo sapiens
  siRNA target sequence for RLF (NM_012421.1,4380-4398).
ccatcgcagtaattactca

SEQ ID NO: 10653 - DNA, 19 bp, Homo sapiens
  siRNA target sequence for RLF (NM_012421.1,4469-4487).
gactactaaggagtgaaaa

SEQ ID NO: 10654 - DNA, 19 bp, Homo sapiens
  siRNA target sequence for RLF (NM_012421.1,4474-4492).
ctaaggagtgaaaaggtat

SEQ ID NO: 10655 - DNA, 19 bp, Homo sapiens
  siRNA target sequence for RLF (NM_012421.1,4493-4511).
gtcaaacagctgatactca

SEQ ID NO: 10656 - DNA, 19 bp, Homo sapiens
  siRNA target sequence for RLF (NM_012421.1,4527-4545).
gaccaccaggagatcattt

SEQ ID NO: 10657 - DNA, 19 bp, Homo sapiens
  siRNA target sequence for RLF (NM_012421.1,4533-4551).
caggagatcatttaatgct

SEQ ID NO: 10658 - DNA, 19 bp, Homo sapiens
  siRNA target sequence for RLF (NM_012421.1,4535-4553).
ggagatcatttaatgctaa

SEQ ID NO: 10659 - DNA, 19 bp, Homo sapiens
  siRNA target sequence for RLF (NM_012421.1,4610-4628).
gagctgaggccctccatat

SEQ ID NO: 10660 - DNA, 19 bp, Homo sapiens
  siRNA target sequence for RLF (NM_012421.1,4612-4630).
gctgaggccctccatatgt

SEQ ID NO: 10661 - DNA, 19 bp, Homo sapiens
  siRNA target sequence for RLF (NM_012421.1,4665-4683).
catggttcaaggatgctta

SEQ ID NO: 10662 - DNA, 19 bp, Homo sapiens
  siRNA target sequence for RLF (NM_012421.1,4668-4686).
ggttcaaggatgcttatct

SEQ ID NO: 10663 - DNA, 19 bp, Homo sapiens
  siRNA target sequence for RLF (NM_012421.1,4706-4724).
gcattgtgaggcattacaa

SEQ ID NO: 10664 - DNA, 19 bp, Homo sapiens
  siRNA target sequence for RLF (NM_012421.1,4726-4744).
cgcactcatcagatgagta

SEQ ID NO: 10665 - DNA, 19 bp, Homo sapiens
  siRNA target sequence for RLF (NM_012421.1,4748-4766).
cctatttagagcaacagat

SEQ ID NO: 10666 - DNA, 19 bp, Homo sapiens
  siRNA target sequence for RLF (NM_012421.1,4764-4782).
gatggagaatcttgttgtt

SEQ ID NO: 10667 - DNA, 19 bp, Homo sapiens
  siRNA target sequence for RLF (NM_012421.1,4785-4803).
cgttaagtacggtaccaaa

SEQ ID NO: 10668 - DNA, 19 bp, Homo sapiens
  siRNA target sequence for RLF (NM_012421.1,4786-4804).
gttaagtacggtaccaaaa

SEQ ID NO: 10669 - DNA, 19 bp, Homo sapiens
  siRNA target sequence for RLF (NM_012421.1,4809-4827).
ggaggaacccccttctgaa

SEQ ID NO: 10670 - DNA, 19 bp, Homo sapiens
  siRNA target sequence for RLF (NM_012421.1,4825-4843).
gaagcagatccctgtataa

SEQ ID NO: 10671 - DNA, 19 bp, Homo sapiens
  siRNA target sequence for RLF (NM_012421.1,4828-4846).
gcagatccctgtataaaga

SEQ ID NO: 10672 - DNA, 19 bp, Homo sapiens
  siRNA target sequence for RLF (NM_012421.1,4829-4847).
cagatccctgtataaagaa

SEQ ID NO: 10673 - DNA, 19 bp, Homo sapiens
  siRNA target sequence for RLF (NM_012421.1,4915-4933).
cccatccagaacactgatt

SEQ ID NO: 10674 - DNA, 19 bp, Homo sapiens
  siRNA target sequence for RLF (NM_012421.1,5057-5075).
ccctagaacagtgtaatat

SEQ ID NO: 10675 - DNA, 19 bp, Homo sapiens
  siRNA target sequence for RLF (NM_012421.1,5140-5158).
gggacttatttcacaagtt

SEQ ID NO: 10676 - DNA, 19 bp, Homo sapiens
  siRNA target sequence for RLF (NM_012421.1,5166-5184).
gcctttaccaaggatcaaa

SEQ ID NO: 10677 - DNA, 19 bp, Homo sapiens
  siRNA target sequence for RLF (NM_012421.1,5281-5299).
cggtcatttgatttgaaga

SEQ ID NO: 10678 - DNA, 19 bp, Homo sapiens
  siRNA target sequence for RLF (NM_012421.1,5394-5412).
gcacttaacattaagtaat

SEQ ID NO: 10679 - DNA, 19 bp, Homo sapiens
  siRNA target sequence for RLF (NM_012421.1,5414-5432).
cttcacagtccagtaatga

SEQ ID NO: 10680 - DNA, 19 bp, Homo sapiens
  siRNA target sequence for RLF (NM_012421.1,5417-5435).
cacagtccagtaatgattt

SEQ ID NO: 10681 - DNA, 19 bp, Homo sapiens
  siRNA target sequence for RLF (NM_012421.1,5421-5439).
gtccagtaatgatttaaca

SEQ ID NO: 10682 - DNA, 19 bp, Homo sapiens
  siRNA target sequence for RLF (NM_012421.1,5441-5459).
ggaatgttgtggcaaataa

SEQ ID NO: 10683 - DNA, 19 bp, Homo sapiens
  siRNA target sequence for RLF (NM_012421.1,5501-5519).
cttccagtgactctacaat

SEQ ID NO: 10684 - DNA, 19 bp, Homo sapiens
  siRNA target sequence for RLF (NM_012421.1,5504-5522).
ccagtgactctacaattca

SEQ ID NO: 10685 - DNA, 19 bp, Homo sapiens
  siRNA target sequence for RLF (NM_012421.1,5505-5523).
cagtgactctacaattcat

SEQ ID NO: 10686 - DNA, 19 bp, Homo sapiens
  siRNA target sequence for RLF (NM_012421.1,5532-5550).
gactgcaatcccaccttta

SEQ ID NO: 10687 - DNA, 19 bp, Homo sapiens
  siRNA target sequence for RLF (NM_012421.1,5534-5552).
ctgcaatcccacctttaat

SEQ ID NO: 10688 - DNA, 19 bp, Homo sapiens
  siRNA target sequence for RLF (NM_012421.1,5596-5614).
gttgtattggacaaagcat

SEQ ID NO: 10689 - DNA, 19 bp, Homo sapiens
  siRNA target sequence for RLF (NM_012421.1,5627-5645).
gagagcttgccttaaaaca

SEQ ID NO: 10690 - DNA, 19 bp, Homo sapiens
  siRNA target sequence for RLF (NM_012421.1,5667-5685).
ggtggttcttgaaagatct

SEQ ID NO: 10691 - DNA, 19 bp, Homo sapiens
  siRNA target sequence for RLF (NM_012421.1,5668-5686).
gtggttcttgaaagatcta

SEQ ID NO: 10692 - DNA, 19 bp, Homo sapiens
  siRNA target sequence for RLF (NM_012421.1,5694-5712).
cacaccaattttagactta

SEQ ID NO: 10693 - DNA, 19 bp, Homo sapiens
  siRNA target sequence for RNF110 (NM_007144.2,250-268).
cggactacacggatcaaaa

SEQ ID NO: 10694 - DNA, 19 bp, Homo sapiens
  siRNA target sequence for RNF110 (NM_007144.2,251-269).
ggactacacggatcaaaat

SEQ ID NO: 10695 - DNA, 19 bp, Homo sapiens
  siRNA target sequence for RNF110 (NM_007144.2,382-400).
ctggagaccaacaaatact

SEQ ID NO: 10696 - DNA, 19 bp, Homo sapiens
  siRNA target sequence for RNF110 (NM_007144.2,410-428).
gtgacgtgcaggtccataa

SEQ ID NO: 10697 - DNA, 19 bp, Homo sapiens
  siRNA target sequence for RNF110 (NM_007144.2,412-430).
gacgtgcaggtccataaaa

SEQ ID NO: 10698 - DNA, 19 bp, Homo sapiens
  siRNA target sequence for RNF110 (NM_007144.2,444-462).
gagcatcaggtctgacaaa

SEQ ID NO: 10699 - DNA, 19 bp, Homo sapiens
  siRNA target sequence for RNF110 (NM_007144.2,464-482).
cacttcaagacattgtcta

SEQ ID NO: 10700 - DNA, 19 bp, Homo sapiens
  siRNA target sequence for RNF110 (NM_007144.2,609-627).
gggggctctgagtgatgat

SEQ ID NO: 10701 - DNA, 19 bp, Homo sapiens
  siRNA target sequence for RNF110 (NM_007144.2,638-656).
gcctctccatcgaattcta

SEQ ID NO: 10702 - DNA, 19 bp, Homo sapiens
  siRNA target sequence for RNF110 (NM_007144.2,799-817).
gatgtgcccagcaagtaca

SEQ ID NO: 10703 - DNA, 19 bp, Homo sapiens
  siRNA target sequence for RNF4 (NM_002938.2,358-376).
ggtggagcaataaattcta

SEQ ID NO: 10704 - DNA, 19 bp, Homo sapiens
  siRNA target sequence for RNF4 (NM_002938.2,514-532).
gatctgactcacaatgact

SEQ ID NO: 10705 - DNA, 19 bp, Homo sapiens
  siRNA target sequence for RNF4 (NM_002938.2,638-656).
ccagggacagagacgtata

SEQ ID NO: 10706 - DNA, 19 bp, Homo sapiens
  siRNA target sequence for RNF4 (NM_002938.2,641-659).
gggacagagacgtatatgt

SEQ ID NO: 10707 - DNA, 19 bp, Homo sapiens
  siRNA target sequence for RNF4 (NM_002938.2,643-661).
gacagagacgtatatgtga

SEQ ID NO: 10708 - DNA, 19 bp, Homo sapiens
  siRNA target sequence for RNF4 (NM_002938.2,738-756).
ctgcatggacggatactca

SEQ ID NO: 10709 - DNA, 19 bp, Homo sapiens
  siRNA target sequence for RNF4 (NM_002938.2,778-796).
ctcatcgtttccacagaat

SEQ ID NO: 10710 - DNA, 19 bp, Homo sapiens
  siRNA target sequence for RNF4 (NM_002938.2,854-872).
gcccaacttgtaggaaaaa

SEQ ID NO: 10711 - DNA, 19 bp, Homo sapiens
  siRNA target sequence for RNF4 (NM_002938.2,856-874).
ccaacttgtaggaaaaaga

SEQ ID NO: 10712 - DNA, 19 bp, Homo sapiens
  siRNA target sequence for RNF4 (NM_002938.2,886-904).
cggtaccaccccatttata

SEQ ID NO: 10713 - DNA, 19 bp, Homo sapiens
  siRNA target sequence for RNF4 (NM_002938.2,888-906).
gtaccaccccatttatata

SEQ ID NO: 10714 - DNA, 19 bp, Homo sapiens
  siRNA target sequence for RORA (NM_002943.2,206-224).
gagtgccgtggtcaatcat

SEQ ID NO: 10715 - DNA, 19 bp, Homo sapiens
  siRNA target sequence for RORA (NM_002943.2,216-234).
gtcaatcatgggtcattgt

SEQ ID NO: 10716 - DNA, 19 bp, Homo sapiens
  siRNA target sequence for RORA (NM_002943.2,218-236).
caatcatgggtcattgtct

SEQ ID NO: 10717 - DNA, 19 bp, Homo sapiens
  siRNA target sequence for RORA (NM_002943.2,365-383).
ccacagccaagaactttat

SEQ ID NO: 10718 - DNA, 19 bp, Homo sapiens
  siRNA target sequence for RORA (NM_002943.2,411-429).
gctccctgcattgagaaaa

SEQ ID NO: 10719 - DNA, 19 bp, Homo sapiens
  siRNA target sequence for RORA (NM_002943.2,468-486).
caaatcatcaggaatccat

SEQ ID NO: 10720 - DNA, 19 bp, Homo sapiens
  siRNA target sequence for RORA (NM_002943.2,483-501).
ccattatggtgtcattaca

SEQ ID NO: 10721 - DNA, 19 bp, Homo sapiens
  siRNA target sequence for RORA (NM_002943.2,562-580).
cctcgtcagaagaactgtt

SEQ ID NO: 10722 - DNA, 19 bp, Homo sapiens
  siRNA target sequence for RORA (NM_002943.2,563-581).
ctcgtcagaagaactgttt

SEQ ID NO: 10723 - DNA, 19 bp, Homo sapiens
  siRNA target sequence for RORA (NM_002943.2,608-626).
gccaacactgtcgattaca

SEQ ID NO: 10724 - DNA, 19 bp, Homo sapiens
  siRNA target sequence for RORA (NM_002943.2,610-628).
caacactgtcgattacaga

SEQ ID NO: 10725 - DNA, 19 bp, Homo sapiens
  siRNA target sequence for RORA (NM_002943.2,613-631).
cactgtcgattacagaaat

SEQ ID NO: 10726 - DNA, 19 bp, Homo sapiens
  siRNA target sequence for RORA (NM_002943.2,648-666).
gtctcgagatgctgtaaaa

SEQ ID NO: 10727 - DNA, 19 bp, Homo sapiens
  siRNA target sequence for RORA (NM_002943.2,650-668).
ctcgagatgctgtaaaatt

SEQ ID NO: 10728 - DNA, 19 bp, Homo sapiens
  siRNA target sequence for RORA (NM_002943.2,823-841).
cacgacgacctcagtaact

SEQ ID NO: 10729 - DNA, 19 bp, Homo sapiens
  siRNA target sequence for RORA (NM_002943.2,922-940).
gaccagtcaggtcttgata

SEQ ID NO: 10730 - DNA, 19 bp, Homo sapiens
  siRNA target sequence for RORA (NM_002943.2,927-945).
gtcaggtcttgatatcaat

SEQ ID NO: 10731 - DNA, 19 bp, Homo sapiens
  siRNA target sequence for RORA (NM_002943.2,932-950).
gtcttgatatcaatggaat

SEQ ID NO: 10732 - DNA, 19 bp, Homo sapiens
  siRNA target sequence for RORA (NM_002943.2,951-969).
caaaccagaaccaatatgt

SEQ ID NO: 10733 - DNA, 19 bp, Homo sapiens
  siRNA target sequence for RORA (NM_002943.2,988-1006).
ggcttctttccctactgtt

SEQ ID NO: 10734 - DNA, 19 bp, Homo sapiens
  siRNA target sequence for RORA (NM_002943.2,1040-1058).
ccatggcagaattagaaca

SEQ ID NO: 10735 - DNA, 19 bp, Homo sapiens
  siRNA target sequence for RORA (NM_002943.2,1054-1072).
gaacaccttgcacagaata

SEQ ID NO: 10736 - DNA, 19 bp, Homo sapiens
  siRNA target sequence for RORA (NM_002943.2,1114-1132).
gagctccagcagataacgt

SEQ ID NO: 10737 - DNA, 19 bp, Homo sapiens
  siRNA target sequence for RORA (NM_002943.2,1130-1148).
cgtggcagacctttttaca

SEQ ID NO: 10738 - DNA, 19 bp, Homo sapiens
  siRNA target sequence for RORA (NM_002943.2,1217-1235).
cagaagctatacagtatgt

SEQ ID NO: 10739 - DNA, 19 bp, Homo sapiens
  siRNA target sequence for RORA (NM_002943.2,1242-1260).
gtttgccaaacgcattgat

SEQ ID NO: 10740 - DNA, 19 bp, Homo sapiens
  siRNA target sequence for RORA (NM_002943.2,1247-1265).
ccaaacgcattgatggatt

SEQ ID NO: 10741 - DNA, 19 bp, Homo sapiens
  siRNA target sequence for RORA (NM_002943.2,1285-1303).
gatcaaattgtgcttctaa

SEQ ID NO: 10742 - DNA, 19 bp, Homo sapiens
  siRNA target sequence for RORA (NM_002943.2,1315-1333).
ctagaggtggtgtttatca

SEQ ID NO: 10743 - DNA, 19 bp, Homo sapiens
  siRNA target sequence for RORA (NM_002943.2,1318-1336).
gaggtggtgtttatcagaa

SEQ ID NO: 10744 - DNA, 19 bp, Homo sapiens
  siRNA target sequence for RORA (NM_002943.2,1321-1339).
gtggtgtttatcagaatgt

SEQ ID NO: 10745 - DNA, 19 bp, Homo sapiens
  siRNA target sequence for RORA (NM_002943.2,1362-1380).
caacaccgtgtactttgat

SEQ ID NO: 10746 - DNA, 19 bp, Homo sapiens
  siRNA target sequence for RORA (NM_002943.2,1371-1389).
gtactttgatgggaagtat

SEQ ID NO: 10747 - DNA, 19 bp, Homo sapiens
  siRNA target sequence for RORA (NM_002943.2,1391-1409).
ccagccccgacgtcttcaa

SEQ ID NO: 10748 - DNA, 19 bp, Homo sapiens
  siRNA target sequence for RORA (NM_002943.2,1392-1410).
cagccccgacgtcttcaaa

SEQ ID NO: 10749 - DNA, 19 bp, Homo sapiens
  siRNA target sequence for RORA (NM_002943.2,1398-1416).
cgacgtcttcaaatcctta

SEQ ID NO: 10750 - DNA, 19 bp, Homo sapiens
  siRNA target sequence for RORA (NM_002943.2,1454-1472).
gaaagagtttatgttctat

SEQ ID NO: 10751 - DNA, 19 bp, Homo sapiens
  siRNA target sequence for RORA (NM_002943.2,1531-1549).
cgctcatggctgcaagaaa

SEQ ID NO: 10752 - DNA, 19 bp, Homo sapiens
  siRNA target sequence for RORA (NM_002943.2,1617-1635).
ccgagaagatggaatacta

SEQ ID NO: 10753 - DNA, 19 bp, Homo sapiens
  siRNA target sequence for RORA (NM_002943.2,1618-1636).
cgagaagatggaatactaa

SEQ ID NO: 10754 - DNA, 19 bp, Homo sapiens
  siRNA target sequence for RORA (NM_002943.2,1671-1689).
cttatgtggacgacataca

SEQ ID NO: 10755 - DNA, 19 bp, Homo sapiens
  siRNA target sequence for RORA (NM_002943.2,1676-1694).
gtggacgacatacagaaaa

SEQ ID NO: 10756 - DNA, 19 bp, Homo sapiens
  siRNA target sequence for RORA (NM_002943.2,1681-1699).
cgacatacagaaaagctaa

SEQ ID NO: 10757 - DNA, 19 bp, Homo sapiens
  siRNA target sequence for RORA (NM_002943.2,1725-1743).
cattgtgcgacttcatttt

SEQ ID NO: 10758 - DNA, 19 bp, Homo sapiens
  siRNA target sequence for RORA (NM_002943.2,1748-1766).
cattatacaaggagttgtt

SEQ ID NO: 10759 - DNA, 19 bp, Homo sapiens
  siRNA target sequence for RORA (NM_002943.2,1782-1800).
gccagcaatgcaaattgat

SEQ ID NO: 10760 - DNA, 19 bp, Homo sapiens
  siRNA target sequence for RORA (NM_134260.1,342-360).
gtcttcaggtgatgctttt

SEQ ID NO: 10761 - DNA, 19 bp, Homo sapiens
  siRNA target sequence for RORA (NM_134260.1,364-382).
cttactggcgtctgttgtt

SEQ ID NO: 10762 - DNA, 19 bp, Homo sapiens
  siRNA target sequence for RORA (NM_134260.1,393-411).
gaatggcaagccaccatat

SEQ ID NO: 10763 - DNA, 19 bp, Homo sapiens
  siRNA target sequence for RORA (NM_134260.1,404-422).
caccatattcacaaaagga

SEQ ID NO: 10764 - DNA, 19 bp, Homo sapiens
  siRNA target sequence for RORA (NM_134261.1,218-236).
gtgcgcagacagagctatt

SEQ ID NO: 10765 - DNA, 19 bp, Homo sapiens
  siRNA target sequence for RORA (NM_134261.1,249-267).
gaggtatctcagtaacgaa

SEQ ID NO: 10766 - DNA, 19 bp, Homo sapiens
  siRNA target sequence for RORA (NM_134261.1,260-278).
gtaacgaagaagacacata

SEQ ID NO: 10767 - DNA, 19 bp, Homo sapiens
  siRNA target sequence for RORA (NM_134262.1,110-128).
cagcgatgaaagctcaaat

SEQ ID NO: 10768 - DNA, 19 bp, Homo sapiens
  siRNA target sequence for RORA (NM_134262.1,113-131).
cgatgaaagctcaaattga

SEQ ID NO: 10769 - DNA, 19 bp, Homo sapiens
  siRNA target sequence for RORB (NM_006914.2,599-617).
gagcacaaattgaagtgat

SEQ ID NO: 10770 - DNA, 19 bp, Homo sapiens
  siRNA target sequence for RORB (NM_006914.2,613-631).
gtgataccatgcaaaattt

SEQ ID NO: 10771 - DNA, 19 bp, Homo sapiens
  siRNA target sequence for RORB (NM_006914.2,655-673).
cactacggagtcatcacat

SEQ ID NO: 10772 - DNA, 19 bp, Homo sapiens
  siRNA target sequence for RORB (NM_006914.2,660-678).
cggagtcatcacatgtgaa

SEQ ID NO: 10773 - DNA, 19 bp, Homo sapiens
  siRNA target sequence for RORB (NM_006914.2,805-823).
cttgccctaggaatgtcaa

SEQ ID NO: 10774 - DNA, 19 bp, Homo sapiens
  siRNA target sequence for RORB (NM_006914.2,999-1017).
cgagaccagcggcacttat

SEQ ID NO: 10775 - DNA, 19 bp, Homo sapiens
  siRNA target sequence for RORB (NM_006914.2,1019-1037).
ccaacgggcacgtcattga

SEQ ID NO: 10776 - DNA, 19 bp, Homo sapiens
  siRNA target sequence for RORB (NM_006914.2,1042-1060).
cccaagtctgagggttatt

SEQ ID NO: 10777 - DNA, 19 bp, Homo sapiens
  siRNA target sequence for RORB (NM_006914.2,1154-1172).
catccgtacccaacttgtt

SEQ ID NO: 10778 - DNA, 19 bp, Homo sapiens
  siRNA target sequence for RORB (NM_006914.2,1159-1177).
gtacccaacttgtttacct

SEQ ID NO: 10779 - DNA, 19 bp, Homo sapiens
  siRNA target sequence for RORB (NM_006914.2,1176-1194).
ctatagctctttcaacaat

SEQ ID NO: 10780 - DNA, 19 bp, Homo sapiens
  siRNA target sequence for RORB (NM_006914.2,1210-1228).
gggataaccatgactgaaa

SEQ ID NO: 10781 - DNA, 19 bp, Homo sapiens
  siRNA target sequence for RORB (NM_006914.2,1211-1229).
ggataaccatgactgaaat

SEQ ID NO: 10782 - DNA, 19 bp, Homo sapiens
  siRNA target sequence for RORB (NM_006914.2,1311-1329).
gcagacccacacctatgaa

SEQ ID NO: 10783 - DNA, 19 bp, Homo sapiens
  siRNA target sequence for RORB (NM_006914.2,1317-1335).
ccacacctatgaagaaatt

SEQ ID NO: 10784 - DNA, 19 bp, Homo sapiens
  siRNA target sequence for RORB (NM_006914.2,1394-1412).
ctcacgccatccaatacgt

SEQ ID NO: 10785 - DNA, 19 bp, Homo sapiens
  siRNA target sequence for RORB (NM_006914.2,1419-1437).
gtttgcaaagcggataaca

SEQ ID NO: 10786 - DNA, 19 bp, Homo sapiens
  siRNA target sequence for RORB (NM_006914.2,1520-1538).
gtgccttcaacccattaaa

SEQ ID NO: 10787 - DNA, 19 bp, Homo sapiens
  siRNA target sequence for RORB (NM_006914.2,1522-1540).
gccttcaacccattaaaca

SEQ ID NO: 10788 - DNA, 19 bp, Homo sapiens
  siRNA target sequence for RORB (NM_006914.2,1523-1541).
ccttcaacccattaaacaa

SEQ ID NO: 10789 - DNA, 19 bp, Homo sapiens
  siRNA target sequence for RORB (NM_006914.2,1546-1564).
gttctgtttgaaggaaaat

SEQ ID NO: 10790 - DNA, 19 bp, Homo sapiens
  siRNA target sequence for RORB (NM_006914.2,1663-1681).
gaggagatcgctttgttct

SEQ ID NO: 10791 - DNA, 19 bp, Homo sapiens
  siRNA target sequence for RORB (NM_006914.2,1666-1684).
gagatcgctttgttctcat

SEQ ID NO: 10792 - DNA, 19 bp, Homo sapiens
  siRNA target sequence for RORB (NM_006914.2,1804-1822).
gagaccttggcaaagttaa

SEQ ID NO: 10793 - DNA, 19 bp, Homo sapiens
  siRNA target sequence for RORB (NM_006914.2,1867-1885).
gagaagctgcaggtattta

SEQ ID NO: 10794 - DNA, 19 bp, Homo sapiens
  siRNA target sequence for RORB (NM_006914.2,1915-1933).
ctgtttcctccgttataca

SEQ ID NO: 10795 - DNA, 19 bp, Homo sapiens
  siRNA target sequence for RORC (NM_005060.2,129-147).
gacccacacctcacaaatt

SEQ ID NO: 10796 - DNA, 19 bp, Homo sapiens
  siRNA target sequence for RORC (NM_005060.2,131-149).
cccacacctcacaaattga

SEQ ID NO: 10797 - DNA, 19 bp, Homo sapiens
  siRNA target sequence for RORC (NM_005060.2,151-169).
gtgatcccttgcaaaatct

SEQ ID NO: 10798 - DNA, 19 bp, Homo sapiens
  siRNA target sequence for RORC (NM_005060.2,359-377).
cccgagatgctgtcaagtt

SEQ ID NO: 10799 - DNA, 19 bp, Homo sapiens
  siRNA target sequence for RORC (NM_005060.2,610-628).
ggctctgggccctcatatt

SEQ ID NO: 10800 - DNA, 19 bp, Homo sapiens
  siRNA target sequence for RORC (NM_005060.2,614-632).
ctgggccctcatattccaa

SEQ ID NO: 10801 - DNA, 19 bp, Homo sapiens
  siRNA target sequence for RORC (NM_005060.2,619-637).
ccctcatattccaacaact

SEQ ID NO: 10802 - DNA, 19 bp, Homo sapiens
  siRNA target sequence for RORC (NM_005060.2,620-638).
cctcatattccaacaactt

SEQ ID NO: 10803 - DNA, 19 bp, Homo sapiens
  siRNA target sequence for RORC (NM_005060.2,706-724).
ggcagagagagcttctata

SEQ ID NO: 10804 - DNA, 19 bp, Homo sapiens
  siRNA target sequence for RORC (NM_005060.2,949-967).
cggcagcgctccaacatct

SEQ ID NO: 10805 - DNA, 19 bp, Homo sapiens
  siRNA target sequence for RORC (NM_005060.2,1103-1121).
gccagaatgaccagattgt

SEQ ID NO: 10806 - DNA, 19 bp, Homo sapiens
  siRNA target sequence for RORC (NM_005060.2,1113-1131).
ccagattgtgcttctcaaa

SEQ ID NO: 10807 - DNA, 19 bp, Homo sapiens
  siRNA target sequence for RORC (NM_005060.2,1183-1201).
gacaaccgcacggtctttt

SEQ ID NO: 10808 - DNA, 19 bp, Homo sapiens
  siRNA target sequence for RORC (NM_005060.2,1185-1203).
caaccgcacggtctttttt

SEQ ID NO: 10809 - DNA, 19 bp, Homo sapiens
  siRNA target sequence for RORC (NM_005060.2,1188-1206).
ccgcacggtcttttttgaa

SEQ ID NO: 10810 - DNA, 19 bp, Homo sapiens
  siRNA target sequence for RORC (NM_005060.2,1331-1349).
cagcccttgttctcatcaa

SEQ ID NO: 10811 - DNA, 19 bp, Homo sapiens
  siRNA target sequence for RORC (NM_005060.2,1407-1425).
ggagctggcctttcatcat

SEQ ID NO: 10812 - DNA, 19 bp, Homo sapiens
  siRNA target sequence for RPF-1 (NM_007252.1,138-156).
ctgtcagtgcggagtgaaa

SEQ ID NO: 10813 - DNA, 19 bp, Homo sapiens
  siRNA target sequence for RPF-1 (NM_007252.1,142-160).
cagtgcggagtgaaatgaa

SEQ ID NO: 10814 - DNA, 19 bp, Homo sapiens
  siRNA target sequence for RPF-1 (NM_007252.1,226-244).
cgcctgtggaatcaaatga

SEQ ID NO: 10815 - DNA, 19 bp, Homo sapiens
  siRNA target sequence for RPF-1 (NM_007252.1,283-301).
gaaacccagcattatcaga

SEQ ID NO: 10816 - DNA, 19 bp, Homo sapiens
  siRNA target sequence for RPF-1 (NM_007252.1,552-570).
gcagccggaggcattatga

SEQ ID NO: 10817 - DNA, 19 bp, Homo sapiens
  siRNA target sequence for RPF-1 (NM_007252.1,1017-1035).
gccatgagctccatagcaa

SEQ ID NO: 10818 - DNA, 19 bp, Homo sapiens
  siRNA target sequence for RPF-1 (NM_007252.1,1075-1093).
gggtcacaggtcaactagt

SEQ ID NO: 10819 - DNA, 19 bp, Homo sapiens
  siRNA target sequence for RPF-1 (NM_007252.1,1076-1094).
ggtcacaggtcaactagtt

SEQ ID NO: 10820 - DNA, 19 bp, Homo sapiens
  siRNA target sequence for RPF-1 (NM_007252.1,1077-1095).
gtcacaggtcaactagtta

SEQ ID NO: 10821 - DNA, 19 bp, Homo sapiens
  siRNA target sequence for RPF-1 (NM_007252.1,1081-1099).
caggtcaactagttactaa

SEQ ID NO: 10822 - DNA, 19 bp, Homo sapiens
  siRNA target sequence for RPF-1 (NM_007252.1,1232-1250).
gatcatcgccacagtcatt

SEQ ID NO: 10823 - DNA, 19 bp, Homo sapiens
  siRNA target sequence for RPF-1 (NM_007252.1,1539-1557).
cgagaatttgccaaagctt

SEQ ID NO: 10824 - DNA, 19 bp, Homo sapiens
  siRNA target sequence for RPF-1 (NM_007252.1,1646-1664).
ggccatctgcaggtttgaa

SEQ ID NO: 10825 - DNA, 19 bp, Homo sapiens
  siRNA target sequence for RPF-1 (NM_007252.1,1647-1665).
gccatctgcaggtttgaaa

SEQ ID NO: 10826 - DNA, 19 bp, Homo sapiens
  siRNA target sequence for RPF-1 (NM_007252.1,1668-1686).
ctggacatcacccctaaaa

SEQ ID NO: 10827 - DNA, 19 bp, Homo sapiens
  siRNA target sequence for RPF-1 (NM_007252.1,1670-1688).
ggacatcacccctaaaagt

SEQ ID NO: 10828 - DNA, 19 bp, Homo sapiens
  siRNA target sequence for RPF-1 (NM_007252.1,1778-1796).
cgggagtgaaccatccaaa

SEQ ID NO: 10829 - DNA, 19 bp, Homo sapiens
  siRNA target sequence for RPF-1 (NM_007252.1,1822-1840).
caccccaggcccttgagat

SEQ ID NO: 10830 - DNA, 19 bp, Homo sapiens
  siRNA target sequence for RPF-1 (NM_007252.1,1872-1890).
ccttctgggcaggaaatga

SEQ ID NO: 10831 - DNA, 19 bp, Homo sapiens
  siRNA target sequence for RPF-1 (NM_007252.1,1880-1898).
gcaggaaatgaccgaaatt

SEQ ID NO: 10832 - DNA, 19 bp, Homo sapiens
  siRNA target sequence for RPF-1 (NM_007252.1,1910-1928).
gaactatgaccgagaagta

SEQ ID NO: 10833 - DNA, 19 bp, Homo sapiens
  siRNA target sequence for RPF-1 (NM_007252.1,1913-1931).
ctatgaccgagaagtagtt

SEQ ID NO: 10834 - DNA, 19 bp, Homo sapiens
  siRNA target sequence for RPF-1 (NM_007252.1,1919-1937).
ccgagaagtagttagagtt

SEQ ID NO: 10835 - DNA, 19 bp, Homo sapiens
  siRNA target sequence for RPF-1 (NM_007252.1,1920-1938).
cgagaagtagttagagttt

SEQ ID NO: 10836 - DNA, 19 bp, Homo sapiens
  siRNA target sequence for RPF-1 (NM_007252.1,1933-1951).
gagtttggttctgcaataa

SEQ ID NO: 10837 - DNA, 19 bp, Homo sapiens
  siRNA target sequence for RUNX1 (NM_001754.2,491-509).
gcttcatgagagaatgcat

SEQ ID NO: 10838 - DNA, 19 bp, Homo sapiens
  siRNA target sequence for RUNX1 (NM_001754.2,840-858).
gatggctggcaatgatgaa

SEQ ID NO: 10839 - DNA, 19 bp, Homo sapiens
  siRNA target sequence for RUNX1 (NM_001754.2,864-882).
ctcggctgagctgagaaat

SEQ ID NO: 10840 - DNA, 19 bp, Homo sapiens
  siRNA target sequence for RUNX1 (NM_001754.2,903-921).
ccaggttgcaagatttaat

SEQ ID NO: 10841 - DNA, 19 bp, Homo sapiens
  siRNA target sequence for RUNX1 (NM_001754.2,1044-1062).
ccgagaacctcgaagacat

SEQ ID NO: 10842 - DNA, 19 bp, Homo sapiens
  siRNA target sequence for RUNX1 (NM_001754.2,1058-1076).
gacatcggcagaaactaga

SEQ ID NO: 10843 - DNA, 19 bp, Homo sapiens
  siRNA target sequence for RUNX1 (NM_001754.2,1299-1317).
ccaatacctgggatccatt

SEQ ID NO: 10844 - DNA, 19 bp, Homo sapiens
  siRNA target sequence for RUNX1 (NM_001754.2,1360-1378).
cgtgccagcggcatgacaa

SEQ ID NO: 10845 - DNA, 19 bp, Homo sapiens
  siRNA target sequence for RUNX2 (NM_004348.1,429-447).
ggcgggtaacgatgaaaat

SEQ ID NO: 10846 - DNA, 19 bp, Homo sapiens
  siRNA target sequence for RUNX2 (NM_004348.1,430-448).
gcgggtaacgatgaaaatt

SEQ ID NO: 10847 - DNA, 19 bp, Homo sapiens
  siRNA target sequence for RUNX2 (NM_004348.1,431-449).
cgggtaacgatgaaaatta

SEQ ID NO: 10848 - DNA, 19 bp, Homo sapiens
  siRNA target sequence for RUNX2 (NM_004348.1,432-450).
gggtaacgatgaaaattat

SEQ ID NO: 10849 - DNA, 19 bp, Homo sapiens
  siRNA target sequence for RUNX2 (NM_004348.1,433-451).
ggtaacgatgaaaattatt

SEQ ID NO: 10850 - DNA, 19 bp, Homo sapiens
  siRNA target sequence for RUNX2 (NM_004348.1,473-491).
ctgctgttatgaaaaacca

SEQ ID NO: 10851 - DNA, 19 bp, Homo sapiens
  siRNA target sequence for RUNX2 (NM_004348.1,500-518).
ggttcaacgatctgagatt

SEQ ID NO: 10852 - DNA, 19 bp, Homo sapiens
  siRNA target sequence for RUNX2 (NM_004348.1,501-519).
gttcaacgatctgagattt

SEQ ID NO: 10853 - DNA, 19 bp, Homo sapiens
  siRNA target sequence for RUNX2 (NM_004348.1,558-576).
cataaccgtcttcacaaat

SEQ ID NO: 10854 - DNA, 19 bp, Homo sapiens
  siRNA target sequence for RUNX2 (NM_004348.1,600-618).
cagagcaattaaagttaca

SEQ ID NO: 10855 - DNA, 19 bp, Homo sapiens
  siRNA target sequence for RUNX2 (NM_004348.1,658-676).
cttgatgactctaaaccta

SEQ ID NO: 10856 - DNA, 19 bp, Homo sapiens
  siRNA target sequence for RUNX2 (NM_004348.1,773-791).
ctgcaccaagtccttttaa

SEQ ID NO: 10857 - DNA, 19 bp, Homo sapiens
  siRNA target sequence for RUNX2 (NM_004348.1,800-818).
gacagagtcagattacaga

SEQ ID NO: 10858 - DNA, 19 bp, Homo sapiens
  siRNA target sequence for RUNX2 (NM_004348.1,848-866).
ggtcctatgaccagtctta

SEQ ID NO: 10859 - DNA, 19 bp, Homo sapiens
  siRNA target sequence for RUNX2 (NM_004348.1,963-981).
gcctaggcgcatttcagat

SEQ ID NO: 10860 - DNA, 19 bp, Homo sapiens
  siRNA target sequence for RUNX2 (NM_004348.1,1013-1031).
ggccttccactctcagtaa

SEQ ID NO: 10861 - DNA, 19 bp, Homo sapiens
  siRNA target sequence for RUNX2 (NM_004348.1,1135-1153).
cactatccagccaccttta

SEQ ID NO: 10862 - DNA, 19 bp, Homo sapiens
  siRNA target sequence for RUNX2 (NM_004348.1,1272-1290).
gaccagcagcactccatat

SEQ ID NO: 10863 - DNA, 19 bp, Homo sapiens
  siRNA target sequence for RUNX2 (NM_004348.1,1280-1298).
gcactccatatctctacta

SEQ ID NO: 10864 - DNA, 19 bp, Homo sapiens
  siRNA target sequence for RUNX2 (NM_004348.1,1395-1413).
cagcacgctattaaatcca

SEQ ID NO: 10865 - DNA, 19 bp, Homo sapiens
  siRNA target sequence for RUNX2 (NM_004348.1,1400-1418).
cgctattaaatccaaattt

SEQ ID NO: 10866 - DNA, 19 bp, Homo sapiens
  siRNA target sequence for RXRA (NM_002957.3,1344-1362).
cgctccatcgggctcaaat

SEQ ID NO: 10867 - DNA, 19 bp, Homo sapiens
  siRNA target sequence for RXRB (NM_021976.3,241-259).
cggtgggggtgcgaaaaga

SEQ ID NO: 10868 - DNA, 19 bp, Homo sapiens
  siRNA target sequence for RXRB (NM_021976.3,247-265).
gggtgcgaaaagaaatgca

SEQ ID NO: 10869 - DNA, 19 bp, Homo sapiens
  siRNA target sequence for RXRB (NM_021976.3,248-266).
ggtgcgaaaagaaatgcat

SEQ ID NO: 10870 - DNA, 19 bp, Homo sapiens
  siRNA target sequence for RXRB (NM_021976.3,249-267).
gtgcgaaaagaaatgcatt

SEQ ID NO: 10871 - DNA, 19 bp, Homo sapiens
  siRNA target sequence for RXRB (NM_021976.3,653-671).
cagcccccagattaactca

SEQ ID NO: 10872 - DNA, 19 bp, Homo sapiens
  siRNA target sequence for RXRB (NM_021976.3,811-829).
gaagctcaggcaaacacta

SEQ ID NO: 10873 - DNA, 19 bp, Homo sapiens
  siRNA target sequence for RXRB (NM_021976.3,879-897).
cgcaaagaccttacatact

SEQ ID NO: 10874 - DNA, 19 bp, Homo sapiens
  siRNA target sequence for RXRB (NM_021976.3,881-899).
caaagaccttacatactct

SEQ ID NO: 10875 - DNA, 19 bp, Homo sapiens
  siRNA target sequence for RXRB (NM_021976.3,898-916).
cttgccgggacaacaaaga

SEQ ID NO: 10876 - DNA, 19 bp, Homo sapiens
  siRNA target sequence for RXRB (NM_021976.3,1162-1180).
gcggcagcagcccaaatga

SEQ ID NO: 10877 - DNA, 19 bp, Homo sapiens
  siRNA target sequence for RXRB (NM_021976.3,1179-1197).
gaccctgtgactaacatct

SEQ ID NO: 10878 - DNA, 19 bp, Homo sapiens
  siRNA target sequence for RXRB (NM_021976.3,1198-1216).
gtcaggcagctgacaaaca

SEQ ID NO: 10879 - DNA, 19 bp, Homo sapiens
  siRNA target sequence for RXRB (NM_021976.3,1241-1259).
gaagaggatcccacacttt

SEQ ID NO: 10880 - DNA, 19 bp, Homo sapiens
  siRNA target sequence for RXRB (NM_021976.3,1264-1282).
ccttgcctctggatgatca

SEQ ID NO: 10881 - DNA, 19 bp, Homo sapiens
  siRNA target sequence for RXRB (NM_021976.3,1272-1290).
ctggatgatcaggtcatat

SEQ ID NO: 10882 - DNA, 19 bp, Homo sapiens
  siRNA target sequence for RXRB (NM_021976.3,1331-1349).
ctcacaccgatccattgat

SEQ ID NO: 10883 - DNA, 19 bp, Homo sapiens
  siRNA target sequence for RXRB (NM_021976.3,1333-1351).
cacaccgatccattgatgt

SEQ ID NO: 10884 - DNA, 19 bp, Homo sapiens
  siRNA target sequence for RXRB (NM_021976.3,1498-1516).
gcctgagggcaatcattct

SEQ ID NO: 10885 - DNA, 19 bp, Homo sapiens
  siRNA target sequence for RXRB (NM_021976.3,1500-1518).
ctgagggcaatcattctgt

SEQ ID NO: 10886 - DNA, 19 bp, Homo sapiens
  siRNA target sequence for RXRB (NM_021976.3,1504-1522).
gggcaatcattctgtttaa

SEQ ID NO: 10887 - DNA, 19 bp, Homo sapiens
  siRNA target sequence for RXRB (NM_021976.3,1505-1523).
ggcaatcattctgtttaat

SEQ ID NO: 10888 - DNA, 19 bp, Homo sapiens
  siRNA target sequence for RXRB (NM_021976.3,1563-1581).
gtcctgcgggagaaagtgt

SEQ ID NO: 10889 - DNA, 19 bp, Homo sapiens
  siRNA target sequence for RXRB (NM_021976.3,1565-1583).
cctgcgggagaaagtgtat

SEQ ID NO: 10890 - DNA, 19 bp, Homo sapiens
  siRNA target sequence for RXRB (NM_021976.3,1593-1611).
gagacctactgcaaacaga

SEQ ID NO: 10891 - DNA, 19 bp, Homo sapiens
  siRNA target sequence for RXRB (NM_021976.3,1668-1686).
cggtccattggccttaagt

SEQ ID NO: 10892 - DNA, 19 bp, Homo sapiens
  siRNA target sequence for RXRB (NM_021976.3,1670-1688).
gtccattggccttaagtgt

SEQ ID NO: 10893 - DNA, 19 bp, Homo sapiens
  siRNA target sequence for RXRG (NM_006917.2,444-462).
gcgcctccaggaatcaact

SEQ ID NO: 10894 - DNA, 19 bp, Homo sapiens
  siRNA target sequence for RXRG (NM_006917.2,445-463).
cgcctccaggaatcaactt

SEQ ID NO: 10895 - DNA, 19 bp, Homo sapiens
  siRNA target sequence for RXRG (NM_006917.2,543-561).
cccgggattggaaacatga

SEQ ID NO: 10896 - DNA, 19 bp, Homo sapiens
  siRNA target sequence for RXRG (NM_006917.2,580-598).
ccggatctctggttaaaca

SEQ ID NO: 10897 - DNA, 19 bp, Homo sapiens
  siRNA target sequence for RXRG (NM_006917.2,582-600).
ggatctctggttaaacaca

SEQ ID NO: 10898 - DNA, 19 bp, Homo sapiens
  siRNA target sequence for RXRG (NM_006917.2,583-601).
gatctctggttaaacacat

SEQ ID NO: 10899 - DNA, 19 bp, Homo sapiens
  siRNA target sequence for RXRG (NM_006917.2,635-653).
gcactacggggtatacagt

SEQ ID NO: 10900 - DNA, 19 bp, Homo sapiens
  siRNA target sequence for RXRG (NM_006917.2,641-659).
cggggtatacagttgtgaa

SEQ ID NO: 10901 - DNA, 19 bp, Homo sapiens
  siRNA target sequence for RXRG (NM_006917.2,704-722).
ctacacgtgtcgggataat

SEQ ID NO: 10902 - DNA, 19 bp, Homo sapiens
  siRNA target sequence for RXRG (NM_006917.2,707-725).
cacgtgtcgggataataaa

SEQ ID NO: 10903 - DNA, 19 bp, Homo sapiens
  siRNA target sequence for RXRG (NM_006917.2,709-727).
cgtgtcgggataataaaga

SEQ ID NO: 10904 - DNA, 19 bp, Homo sapiens
  siRNA target sequence for RXRG (NM_006917.2,786-804).
cttgtcatgggcatgaaga

SEQ ID NO: 10905 - DNA, 19 bp, Homo sapiens
  siRNA target sequence for RXRG (NM_006917.2,868-886).
ctaccagtggtcatgaaga

SEQ ID NO: 10906 - DNA, 19 bp, Homo sapiens
  siRNA target sequence for RXRG (NM_006917.2,890-908).
gcctgtggagaggattcta

SEQ ID NO: 10907 - DNA, 19 bp, Homo sapiens
  siRNA target sequence for RXRG (NM_006917.2,943-961).
cctatggtgacatgaatat

SEQ ID NO: 10908 - DNA, 19 bp, Homo sapiens
  siRNA target sequence for RXRG (NM_006917.2,980-998).
ccctgttaccaacatatgt

SEQ ID NO: 10909 - DNA, 19 bp, Homo sapiens
  siRNA target sequence for RXRG (NM_006917.2,1017-1035).
cttttcaccctcgttgaat

SEQ ID NO: 10910 - DNA, 19 bp, Homo sapiens
  siRNA target sequence for RXRG (NM_006917.2,1099-1117).
cagggtggaatgaattgct

SEQ ID NO: 10911 - DNA, 19 bp, Homo sapiens
  siRNA target sequence for RXRG (NM_006917.2,1297-1315).
gcctgcgagccattgtact

SEQ ID NO: 10912 - DNA, 19 bp, Homo sapiens
  siRNA target sequence for RXRG (NM_006917.2,1301-1319).
gcgagccattgtactcttt

SEQ ID NO: 10913 - DNA, 19 bp, Homo sapiens
  siRNA target sequence for RXRG (NM_006917.2,1302-1320).
cgagccattgtactcttta

SEQ ID NO: 10914 - DNA, 19 bp, Homo sapiens
  siRNA target sequence for RXRG (NM_006917.2,1303-1321).
gagccattgtactctttaa

SEQ ID NO: 10915 - DNA, 19 bp, Homo sapiens
  siRNA target sequence for RXRG (NM_006917.2,1363-1381).
ctctgcgagagaaggttta

SEQ ID NO: 10916 - DNA, 19 bp, Homo sapiens
  siRNA target sequence for RXRG (NM_006917.2,1397-1415).
ctacaccaagcagaagtat

SEQ ID NO: 10917 - DNA, 19 bp, Homo sapiens
  siRNA target sequence for RXRG (NM_006917.2,1466-1484).
gcgttccattggcttgaaa

SEQ ID NO: 10918 - DNA, 19 bp, Homo sapiens
  siRNA target sequence for RXRG (NM_006917.2,1467-1485).
cgttccattggcttgaaat

SEQ ID NO: 10919 - DNA, 19 bp, Homo sapiens
  siRNA target sequence for SATB1 (NM_002971.2,286-304).
cagaaatgtctaacaatgt

SEQ ID NO: 10920 - DNA, 19 bp, Homo sapiens
  siRNA target sequence for SATB1 (NM_002971.2,382-400).
ggagtacaggtgcaaaaat

SEQ ID NO: 10921 - DNA, 19 bp, Homo sapiens
  siRNA target sequence for SATB1 (NM_002971.2,385-403).
gtacaggtgcaaaaatgca

SEQ ID NO: 10922 - DNA, 19 bp, Homo sapiens
  siRNA target sequence for SATB1 (NM_002971.2,405-423).
ggagtgcctttaaaacact

SEQ ID NO: 10923 - DNA, 19 bp, Homo sapiens
  siRNA target sequence for SATB1 (NM_002971.2,426-444).
ggccatctgatgaaaacca

SEQ ID NO: 10924 - DNA, 19 bp, Homo sapiens
  siRNA target sequence for SATB1 (NM_002971.2,427-445).
gccatctgatgaaaaccaa

SEQ ID NO: 10925 - DNA, 19 bp, Homo sapiens
  siRNA target sequence for SATB1 (NM_002971.2,476-494).
ctgtgtggtggaacattat

SEQ ID NO: 10926 - DNA, 19 bp, Homo sapiens
  siRNA target sequence for SATB1 (NM_002971.2,586-604).
cattgctgtctctaggtta

SEQ ID NO: 10927 - DNA, 19 bp, Homo sapiens
  siRNA target sequence for SATB1 (NM_002971.2,634-652).
ggctaatccaggttggaaa

SEQ ID NO: 10928 - DNA, 19 bp, Homo sapiens
  siRNA target sequence for SATB1 (NM_002971.2,758-776).
cagttgccccaaactagaa

SEQ ID NO: 10929 - DNA, 19 bp, Homo sapiens
  siRNA target sequence for SATB1 (NM_002971.2,777-795).
gacttgcctcccgaacaat

SEQ ID NO: 10930 - DNA, 19 bp, Homo sapiens
  siRNA target sequence for SATB1 (NM_002971.2,830-848).
cttactgaaagatatgaat

SEQ ID NO: 10931 - DNA, 19 bp, Homo sapiens
  siRNA target sequence for SATB1 (NM_002971.2,898-916).
ccattgtgaacagtactta

SEQ ID NO: 10932 - DNA, 19 bp, Homo sapiens
  siRNA target sequence for SATB1 (NM_002971.2,995-1013).
ggttgaaatggatagtctt

SEQ ID NO: 10933 - DNA, 19 bp, Homo sapiens
  siRNA target sequence for SATB1 (NM_002971.2,996-1014).
gttgaaatggatagtcttt

SEQ ID NO: 10934 - DNA, 19 bp, Homo sapiens
  siRNA target sequence for SATB1 (NM_002971.2,1033-1051).
gcgccaatcatgtcaattt

SEQ ID NO: 10935 - DNA, 19 bp, Homo sapiens
  siRNA target sequence for SATB1 (NM_002971.2,1157-1175).
ccctgggctcgtatcaaca

SEQ ID NO: 10936 - DNA, 19 bp, Homo sapiens
  siRNA target sequence for SATB1 (NM_002971.2,1166-1184).
cgtatcaacacctatcagt

SEQ ID NO: 10937 - DNA, 19 bp, Homo sapiens
  siRNA target sequence for SATB1 (NM_002971.2,1177-1195).
ctatcagtcctcaattggt

SEQ ID NO: 10938 - DNA, 19 bp, Homo sapiens
  siRNA target sequence for SATB1 (NM_002971.2,1232-1250).
gcagtatgcagtgaataga

SEQ ID NO: 10939 - DNA, 19 bp, Homo sapiens
  siRNA target sequence for SATB1 (NM_002971.2,1258-1276).
cccagcagtccttaaacca

SEQ ID NO: 10940 - DNA, 19 bp, Homo sapiens
  siRNA target sequence for SATB1 (NM_002971.2,1259-1277).
ccagcagtccttaaaccaa

SEQ ID NO: 10941 - DNA, 19 bp, Homo sapiens
  siRNA target sequence for SATB1 (NM_002971.2,1263-1281).
cagtccttaaaccaacaat

SEQ ID NO: 10942 - DNA, 19 bp, Homo sapiens
  siRNA target sequence for SATB1 (NM_002971.2,1293-1311).
cctccccctgtcagtagat

SEQ ID NO: 10943 - DNA, 19 bp, Homo sapiens
  siRNA target sequence for SATB1 (NM_002971.2,1296-1314).
ccccctgtcagtagatcta

SEQ ID NO: 10944 - DNA, 19 bp, Homo sapiens
  siRNA target sequence for SATB1 (NM_002971.2,1297-1315).
cccctgtcagtagatctat

SEQ ID NO: 10945 - DNA, 19 bp, Homo sapiens
  siRNA target sequence for SATB1 (NM_002971.2,1299-1317).
cctgtcagtagatctatga

SEQ ID NO: 10946 - DNA, 19 bp, Homo sapiens
  siRNA target sequence for SATB1 (NM_002971.2,1302-1320).
gtcagtagatctatgaata

SEQ ID NO: 10947 - DNA, 19 bp, Homo sapiens
  siRNA target sequence for SATB1 (NM_002971.2,1353-1371).
gaggtgtcttccgaaatct

SEQ ID NO: 10948 - DNA, 19 bp, Homo sapiens
  siRNA target sequence for SATB1 (NM_002971.2,1378-1396).
gggtacgcgatgaactgaa

SEQ ID NO: 10949 - DNA, 19 bp, Homo sapiens
  siRNA target sequence for SATB1 (NM_002971.2,1379-1397).
ggtacgcgatgaactgaaa

SEQ ID NO: 10950 - DNA, 19 bp, Homo sapiens
  siRNA target sequence for SATB1 (NM_002971.2,1505-1523).
gtctttgctggtaaacctt

SEQ ID NO: 10951 - DNA, 19 bp, Homo sapiens
  siRNA target sequence for SATB1 (NM_002971.2,1557-1575).
gctgaaagagaccgaatat

SEQ ID NO: 10952 - DNA, 19 bp, Homo sapiens
  siRNA target sequence for SATB1 (NM_002971.2,1558-1576).
ctgaaagagaccgaatata

SEQ ID NO: 10953 - DNA, 19 bp, Homo sapiens
  siRNA target sequence for SATB1 (NM_002971.2,1653-1671).
cgtcctccccaggtgaaaa

SEQ ID NO: 10954 - DNA, 19 bp, Homo sapiens
  siRNA target sequence for SATB1 (NM_002971.2,1698-1716).
gggaaaccagagaacaata

SEQ ID NO: 10955 - DNA, 19 bp, Homo sapiens
  siRNA target sequence for SATB1 (NM_002971.2,1835-1853).
gctgttacgctggaaagaa

SEQ ID NO: 10956 - DNA, 19 bp, Homo sapiens
  siRNA target sequence for SATB1 (NM_002971.2,1838-1856).
gttacgctggaaagaagat

SEQ ID NO: 10957 - DNA, 19 bp, Homo sapiens
  siRNA target sequence for SATB1 (NM_002971.2,1927-1945).
cagaacgtgatgccattta

SEQ ID NO: 10958 - DNA, 19 bp, Homo sapiens
  siRNA target sequence for SATB1 (NM_002971.2,2185-2203).
cacgaacaaaaatttcagt

SEQ ID NO: 10959 - DNA, 19 bp, Homo sapiens
  siRNA target sequence for SATB1 (NM_002971.2,2355-2373).
ggcaaactgaaggacaatt

SEQ ID NO: 10960 - DNA, 19 bp, Homo sapiens
  siRNA target sequence for SATB1 (NM_002971.2,2384-2402).
ggtcgatgtggcagaatat

SEQ ID NO: 10961 - DNA, 19 bp, Homo sapiens
  siRNA target sequence for SATB1 (NM_002971.2,2387-2405).
cgatgtggcagaatataaa

SEQ ID NO: 10962 - DNA, 19 bp, Homo sapiens
  siRNA target sequence for SATB1 (NM_002971.2,2455-2473).
ctaacacccttttttcagt

SEQ ID NO: 10963 - DNA, 19 bp, Homo sapiens
  siRNA target sequence for SATB1 (NM_002971.2,2502-2520).
ggaaacacagacattaata

SEQ ID NO: 10964 - DNA, 19 bp, Homo sapiens
  siRNA target sequence for SATB1 (NM_002971.2,2507-2525).
cacagacattaatactgat

SEQ ID NO: 10965 - DNA, 19 bp, Homo sapiens
  siRNA target sequence for SATB1 (NM_002971.2,2511-2529).
gacattaatactgatttga

SEQ ID NO: 10966 - DNA, 19 bp, Homo sapiens
  siRNA target sequence for SATB2 (NM_015265.1,246-264).
gccgtgggaggtttgatga

SEQ ID NO: 10967 - DNA, 19 bp, Homo sapiens
  siRNA target sequence for SATB2 (NM_015265.1,247-265).
ccgtgggaggtttgatgat

SEQ ID NO: 10968 - DNA, 19 bp, Homo sapiens
  siRNA target sequence for SATB2 (NM_015265.1,290-308).
gttggacggctctcttgaa

SEQ ID NO: 10969 - DNA, 19 bp, Homo sapiens
  siRNA target sequence for SATB2 (NM_015265.1,293-311).
ggacggctctcttgaatat

SEQ ID NO: 10970 - DNA, 19 bp, Homo sapiens
  siRNA target sequence for SATB2 (NM_015265.1,297-315).
ggctctcttgaatatgaca

SEQ ID NO: 10971 - DNA, 19 bp, Homo sapiens
  siRNA target sequence for SATB2 (NM_015265.1,298-316).
gctctcttgaatatgacaa

SEQ ID NO: 10972 - DNA, 19 bp, Homo sapiens
  siRNA target sequence for SATB2 (NM_015265.1,462-480).
ctccccctcagttatgtga

SEQ ID NO: 10973 - DNA, 19 bp, Homo sapiens
  siRNA target sequence for SATB2 (NM_015265.1,503-521).
ggccgacatgctacaagat

SEQ ID NO: 10974 - DNA, 19 bp, Homo sapiens
  siRNA target sequence for SATB2 (NM_015265.1,505-523).
ccgacatgctacaagatgt

SEQ ID NO: 10975 - DNA, 19 bp, Homo sapiens
  siRNA target sequence for SATB2 (NM_015265.1,509-527).
catgctacaagatgtctat

SEQ ID NO: 10976 - DNA, 19 bp, Homo sapiens
  siRNA target sequence for SATB2 (NM_015265.1,534-552).
gtgacgttgaaaatccaat

SEQ ID NO: 10977 - DNA, 19 bp, Homo sapiens
  siRNA target sequence for SATB2 (NM_015265.1,607-625).
cagtccgcaatgccttaaa

SEQ ID NO: 10978 - DNA, 19 bp, Homo sapiens
  siRNA target sequence for SATB2 (NM_015265.1,641-659).
gatgaaccagagcacatta

SEQ ID NO: 10979 - DNA, 19 bp, Homo sapiens
  siRNA target sequence for SATB2 (NM_015265.1,673-691).
ctctctcccagagtatgat

SEQ ID NO: 10980 - DNA, 19 bp, Homo sapiens
  siRNA target sequence for SATB2 (NM_015265.1,746-764).
ggagtttgggagatggtat

SEQ ID NO: 10981 - DNA, 19 bp, Homo sapiens
  siRNA target sequence for SATB2 (NM_015265.1,830-848).
gggccagcgtccaatgcat

SEQ ID NO: 10982 - DNA, 19 bp, Homo sapiens
  siRNA target sequence for SATB2 (NM_015265.1,831-849).
ggccagcgtccaatgcatt

SEQ ID NO: 10983 - DNA, 19 bp, Homo sapiens
  siRNA target sequence for SATB2 (NM_015265.1,832-850).
gccagcgtccaatgcattt

SEQ ID NO: 10984 - DNA, 19 bp, Homo sapiens
  siRNA target sequence for SATB2 (NM_015265.1,833-851).
ccagcgtccaatgcattta

SEQ ID NO: 10985 - DNA, 19 bp, Homo sapiens
  siRNA target sequence for SATB2 (NM_015265.1,836-854).
gcgtccaatgcatttacca

SEQ ID NO: 10986 - DNA, 19 bp, Homo sapiens
  siRNA target sequence for SATB2 (NM_015265.1,837-855).
cgtccaatgcatttaccaa

SEQ ID NO: 10987 - DNA, 19 bp, Homo sapiens
  siRNA target sequence for SATB2 (NM_015265.1,841-859).
caatgcatttaccaaatat

SEQ ID NO: 10988 - DNA, 19 bp, Homo sapiens
  siRNA target sequence for SATB2 (NM_015265.1,948-966).
gcattacagcccatcatga

SEQ ID NO: 10989 - DNA, 19 bp, Homo sapiens
  siRNA target sequence for SATB2 (NM_015265.1,986-1004).
ccagcttagtccacaactt

SEQ ID NO: 10990 - DNA, 19 bp, Homo sapiens
  siRNA target sequence for SATB2 (NM_015265.1,989-1007).
gcttagtccacaacttgta

SEQ ID NO: 10991 - DNA, 19 bp, Homo sapiens
  siRNA target sequence for SATB2 (NM_015265.1,990-1008).
cttagtccacaacttgtaa

SEQ ID NO: 10992 - DNA, 19 bp, Homo sapiens
  siRNA target sequence for SATB2 (NM_015265.1,1021-1039).
ccatggcccatctgataaa

SEQ ID NO: 10993 - DNA, 19 bp, Homo sapiens
  siRNA target sequence for SATB2 (NM_015265.1,1025-1043).
ggcccatctgataaaccaa

SEQ ID NO: 10994 - DNA, 19 bp, Homo sapiens
  siRNA target sequence for SATB2 (NM_015265.1,1251-1269).
cgcacacagggattgttgt

SEQ ID NO: 10995 - DNA, 19 bp, Homo sapiens
  siRNA target sequence for SATB2 (NM_015265.1,1307-1325).
ctctcagtctcttctagta

SEQ ID NO: 10996 - DNA, 19 bp, Homo sapiens
  siRNA target sequence for SATB2 (NM_015265.1,1492-1510).
caacagacctccctattaa

SEQ ID NO: 10997 - DNA, 19 bp, Homo sapiens
  siRNA target sequence for SATB2 (NM_015265.1,1495-1513).
cagacctccctattaaggt

SEQ ID NO: 10998 - DNA, 19 bp, Homo sapiens
  siRNA target sequence for SATB2 (NM_015265.1,1681-1699).
gcaccctctgggaaaacct

SEQ ID NO: 10999 - DNA, 19 bp, Homo sapiens
  siRNA target sequence for SATB2 (NM_015265.1,1817-1835).
gccggtgcaggtacttcat

SEQ ID NO: 11000 - DNA, 19 bp, Homo sapiens
  siRNA target sequence for SATB2 (NM_015265.1,1818-1836).
ccggtgcaggtacttcata

SEQ ID NO: 11001 - DNA, 19 bp, Homo sapiens
  siRNA target sequence for SATB2 (NM_015265.1,1932-1950).
cggtctcgcacaaagatct

SEQ ID NO: 11002 - DNA, 19 bp, Homo sapiens
  siRNA target sequence for SATB2 (NM_015265.1,1964-1982).
ggggatcctccaaagcttt

SEQ ID NO: 11003 - DNA, 19 bp, Homo sapiens
  siRNA target sequence for SATB2 (NM_015265.1,2013-2031).
gaagccatccacactcttt

SEQ ID NO: 11004 - DNA, 19 bp, Homo sapiens
  siRNA target sequence for SATB2 (NM_015265.1,2206-2224).
ccgaggagatgtacaaagt

SEQ ID NO: 11005 - DNA, 19 bp, Homo sapiens
  siRNA target sequence for SATB2 (NM_015265.1,2258-2276).
ggcagcacctgccgaaatt

SEQ ID NO: 11006 - DNA, 19 bp, Homo sapiens
  siRNA target sequence for SATB2 (NM_015265.1,2260-2278).
cagcacctgccgaaattga

SEQ ID NO: 11007 - DNA, 19 bp, Homo sapiens
  siRNA target sequence for SBLF (NM_006873.2,198-216).
cctcccccattgtagattt

SEQ ID NO: 11008 - DNA, 19 bp, Homo sapiens
  siRNA target sequence for SBLF (NM_006873.2,199-217).
ctcccccattgtagatttt

SEQ ID NO: 11009 - DNA, 19 bp, Homo sapiens
  siRNA target sequence for SBLF (NM_006873.2,201-219).
cccccattgtagattttta

SEQ ID NO: 11010 - DNA, 19 bp, Homo sapiens
  siRNA target sequence for SBLF (NM_006873.2,202-220).
ccccattgtagatttttat

SEQ ID NO: 11011 - DNA, 19 bp, Homo sapiens
  siRNA target sequence for SBLF (NM_006873.2,203-221).
cccattgtagatttttatt

SEQ ID NO: 11012 - DNA, 19 bp, Homo sapiens
  siRNA target sequence for SBLF (NM_006873.2,227-245).
ccaggacctccaagtaact

SEQ ID NO: 11013 - DNA, 19 bp, Homo sapiens
  siRNA target sequence for SBLF (NM_006873.2,255-273).
ctacacctaccaaagactt

SEQ ID NO: 11014 - DNA, 19 bp, Homo sapiens
  siRNA target sequence for SBLF (NM_006873.2,304-322).
gactcatgtgctttatcct

SEQ ID NO: 11015 - DNA, 19 bp, Homo sapiens
  siRNA target sequence for SBLF (NM_006873.2,341-359).
gacagcccactcgcaatat

SEQ ID NO: 11016 - DNA, 19 bp, Homo sapiens
  siRNA target sequence for SBLF (NM_006873.2,343-361).
cagcccactcgcaatatca

SEQ ID NO: 11017 - DNA, 19 bp, Homo sapiens
  siRNA target sequence for SBLF (NM_006873.2,382-400).
gcctaccagaccaacatgt

SEQ ID NO: 11018 - DNA, 19 bp, Homo sapiens
  siRNA target sequence for SBLF (NM_006873.2,383-401).
cctaccagaccaacatgtt

SEQ ID NO: 11019 - DNA, 19 bp, Homo sapiens
  siRNA target sequence for SBLF (NM_006873.2,495-513).
gcctaggattccaaagtga

SEQ ID NO: 11020 - DNA, 19 bp, Homo sapiens
  siRNA target sequence for SBLF (NM_006873.2,523-541).
ccagtttcagtattttcga

SEQ ID NO: 11021 - DNA, 19 bp, Homo sapiens
  siRNA target sequence for SBLF (NM_006873.2,539-557).
cgagaggactgtgcttttt

SEQ ID NO: 11022 - DNA, 19 bp, Homo sapiens
  siRNA target sequence for SBLF (NM_006873.2,649-667).
gatgcctattgaccaaaaa

SEQ ID NO: 11023 - DNA, 19 bp, Homo sapiens
  siRNA target sequence for SBLF (NM_006873.2,697-715).
ctgtgagaagcttgaacat

SEQ ID NO: 11024 - DNA, 19 bp, Homo sapiens
  siRNA target sequence for SBLF (NM_006873.2,734-752).
caagactcacttagaagtt

SEQ ID NO: 11025 - DNA, 19 bp, Homo sapiens
  siRNA target sequence for SBLF (NM_006873.2,737-755).
gactcacttagaagtttgt

SEQ ID NO: 11026 - DNA, 19 bp, Homo sapiens
  siRNA target sequence for SBLF (NM_006873.2,754-772).
gtctatgcactgtctatgt

SEQ ID NO: 11027 - DNA, 19 bp, Homo sapiens
  siRNA target sequence for SBLF (NM_006873.2,883-901).
ccggcaatggggaccaatt

SEQ ID NO: 11028 - DNA, 19 bp, Homo sapiens
  siRNA target sequence for SBLF (NM_006873.2,884-902).
cggcaatggggaccaattt

SEQ ID NO: 11029 - DNA, 19 bp, Homo sapiens
  siRNA target sequence for SBLF (NM_006873.2,885-903).
ggcaatggggaccaatttt

SEQ ID NO: 11030 - DNA, 19 bp, Homo sapiens
  siRNA target sequence for SBLF (NM_006873.2,973-991).
gatacagcttgatccatat

SEQ ID NO: 11031 - DNA, 19 bp, Homo sapiens
  siRNA target sequence for SBLF (NM_006873.2,977-995).
cagcttgatccatattgta

SEQ ID NO: 11032 - DNA, 19 bp, Homo sapiens
  siRNA target sequence for SBLF (NM_006873.2,1007-1025).
cccaaggttgagaacttca

SEQ ID NO: 11033 - DNA, 19 bp, Homo sapiens
  siRNA target sequence for SBLF (NM_006873.2,1045-1063).
cactgtgaagattgaacat

SEQ ID NO: 11034 - DNA, 19 bp, Homo sapiens
  siRNA target sequence for SBLF (NM_006873.2,1099-1117).
gacagaagtagttcatgaa

SEQ ID NO: 11035 - DNA, 19 bp, Homo sapiens
  siRNA target sequence for SBLF (NM_006873.2,1149-1167).
ccacatcgtaccatgactt

SEQ ID NO: 11036 - DNA, 19 bp, Homo sapiens
  siRNA target sequence for SBLF (NM_006873.2,1204-1222).
gaagttgccagctgtttca

SEQ ID NO: 11037 - DNA, 19 bp, Homo sapiens
  siRNA target sequence for SBLF (NM_006873.2,1281-1299).
ggggtaaagtcacaaaaga

SEQ ID NO: 11038 - DNA, 19 bp, Homo sapiens
  siRNA target sequence for SBLF (NM_006873.2,1317-1335).
gtgctgtgataactcaaat

SEQ ID NO: 11039 - DNA, 19 bp, Homo sapiens
  siRNA target sequence for SBLF (NM_006873.2,1371-1389).
gctttttaaccttgaatga

SEQ ID NO: 11040 - DNA, 19 bp, Homo sapiens
  siRNA target sequence for SBLF (NM_006873.2,1396-1414).
gttgccgaagcgagatgaa

SEQ ID NO: 11041 - DNA, 19 bp, Homo sapiens
  siRNA target sequence for SBLF (NM_006873.2,1401-1419).
cgaagcgagatgaatccta

SEQ ID NO: 11042 - DNA, 19 bp, Homo sapiens
  siRNA target sequence for SBLF (NM_006873.2,1402-1420).
gaagcgagatgaatcctat

SEQ ID NO: 11043 - DNA, 19 bp, Homo sapiens
  siRNA target sequence for SBLF (NM_006873.2,1405-1423).
gcgagatgaatcctattat

SEQ ID NO: 11044 - DNA, 19 bp, Homo sapiens
  siRNA target sequence for SBLF (NM_006873.2,1409-1427).
gatgaatcctattatgaga

SEQ ID NO: 11045 - DNA, 19 bp, Homo sapiens
  siRNA target sequence for SBLF (NM_006873.2,1446-1464).
ggattgatattcttgacta

SEQ ID NO: 11046 - DNA, 19 bp, Homo sapiens
  siRNA target sequence for SBLF (NM_006873.2,1457-1475).
cttgactaccattttcata

SEQ ID NO: 11047 - DNA, 19 bp, Homo sapiens
  siRNA target sequence for SBLF (NM_006873.2,1460-1478).
gactaccattttcataagt

SEQ ID NO: 11048 - DNA, 19 bp, Homo sapiens
  siRNA target sequence for SBLF (NM_006873.2,1479-1497).
gtgtgaatgtacaagaatt

SEQ ID NO: 11049 - DNA, 19 bp, Homo sapiens
  siRNA target sequence for SBLF (NM_006873.2,1499-1517).
gagcaatcaagaatcatta

SEQ ID NO: 11050 - DNA, 19 bp, Homo sapiens
  siRNA target sequence for SBLF (NM_006873.2,1502-1520).
caatcaagaatcattaagt

SEQ ID NO: 11051 - DNA, 19 bp, Homo sapiens
  siRNA target sequence for SBLF (NM_006873.2,1547-1565).
gagctgatgcgtttcaaga

SEQ ID NO: 11052 - DNA, 19 bp, Homo sapiens
  siRNA target sequence for SBLF (NM_006873.2,1555-1573).
gcgtttcaagactttgtat

SEQ ID NO: 11053 - DNA, 19 bp, Homo sapiens
  siRNA target sequence for SBLF (NM_006873.2,1556-1574).
cgtttcaagactttgtata

SEQ ID NO: 11054 - DNA, 19 bp, Homo sapiens
  siRNA target sequence for SBLF (NM_006873.2,1623-1641).
gagcatacgtggaacttca

SEQ ID NO: 11055 - DNA, 19 bp, Homo sapiens
  siRNA target sequence for SBLF (NM_006873.2,1666-1684).
ggcgcagaggtcatcctat

SEQ ID NO: 11056 - DNA, 19 bp, Homo sapiens
  siRNA target sequence for SBLF (NM_006873.2,1701-1719).
cctgtgacaatataaggat

SEQ ID NO: 11057 - DNA, 19 bp, Homo sapiens
  siRNA target sequence for SBLF (NM_006873.2,1706-1724).
gacaatataaggatacact

SEQ ID NO: 11058 - DNA, 19 bp, Homo sapiens
  siRNA target sequence for SBLF (NM_006873.2,1780-1798).
gaagtctctgaaagctaaa

SEQ ID NO: 11059 - DNA, 19 bp, Homo sapiens
  siRNA target sequence for SBLF (NM_006873.2,1821-1839).
ggagtttacaggaacttga

SEQ ID NO: 11060 - DNA, 19 bp, Homo sapiens
  siRNA target sequence for SBLF (NM_006873.2,1822-1840).
gagtttacaggaacttgaa

SEQ ID NO: 11061 - DNA, 19 bp, Homo sapiens
  siRNA target sequence for SBLF (NM_006873.2,1861-1879).
cactgtggggtcagcaaaa

SEQ ID NO: 11062 - DNA, 19 bp, Homo sapiens
  siRNA target sequence for SBLF (NM_006873.2,1899-1917).
cagtggtatggaagataga

SEQ ID NO: 11063 - DNA, 19 bp, Homo sapiens
  siRNA target sequence for SBLF (NM_006873.2,1921-1939).
gcttccagacaaaaattca

SEQ ID NO: 11064 - DNA, 19 bp, Homo sapiens
  siRNA target sequence for SBLF (NM_006873.2,1952-1970).
ccccattgtctgtcataca

SEQ ID NO: 11065 - DNA, 19 bp, Homo sapiens
  siRNA target sequence for SBLF (NM_006873.2,1979-1997).
cttggatcagaccaagaaa

SEQ ID NO: 11066 - DNA, 19 bp, Homo sapiens
  siRNA target sequence for SBLF (NM_006873.2,2001-2019).
cctctgattggtatccatt

SEQ ID NO: 11067 - DNA, 19 bp, Homo sapiens
  siRNA target sequence for SBLF (NM_006873.2,2002-2020).
ctctgattggtatccattt

SEQ ID NO: 11068 - DNA, 19 bp, Homo sapiens
  siRNA target sequence for SBLF (NM_006873.2,2011-2029).
gtatccatttgctactgtt

SEQ ID NO: 11069 - DNA, 19 bp, Homo sapiens
  siRNA target sequence for SBLF (NM_006873.2,2158-2176).
gaagtggattaaaatcgat

SEQ ID NO: 11070 - DNA, 19 bp, Homo sapiens
  siRNA target sequence for SCAND2 (NM_022050.2,433-451).
ctgtggaccaacaaatcca

SEQ ID NO: 11071 - DNA, 19 bp, Homo sapiens
  siRNA target sequence for SCAND2 (NM_022050.2,452-470).
gactccttcagtacaagat

SEQ ID NO: 11072 - DNA, 19 bp, Homo sapiens
  siRNA target sequence for SCAND2 (NM_022050.2,454-472).
ctccttcagtacaagatct

SEQ ID NO: 11073 - DNA, 19 bp, Homo sapiens
  siRNA target sequence for SCAND2 (NM_022050.2,465-483).
caagatctccaaatagtta

SEQ ID NO: 11074 - DNA, 19 bp, Homo sapiens
  siRNA target sequence for SCAND2 (NM_022050.2,501-519).
cactgggagcaggaaattt

SEQ ID NO: 11075 - DNA, 19 bp, Homo sapiens
  siRNA target sequence for SCMH1 (NM_012236.1,501-519).
ctccaagcaacgagttcaa

SEQ ID NO: 11076 - DNA, 19 bp, Homo sapiens
  siRNA target sequence for SCMH1 (NM_012236.1,503-521).
ccaagcaacgagttcaaga

SEQ ID NO: 11077 - DNA, 19 bp, Homo sapiens
  siRNA target sequence for SCMH1 (NM_012236.1,504-522).
caagcaacgagttcaagat

SEQ ID NO: 11078 - DNA, 19 bp, Homo sapiens
  siRNA target sequence for SCMH1 (NM_012236.1,514-532).
gttcaagatcagtatgaaa

SEQ ID NO: 11079 - DNA, 19 bp, Homo sapiens
  siRNA target sequence for SCMH1 (NM_012236.1,568-586).
ctgtattgccacagtagtt

SEQ ID NO: 11080 - DNA, 19 bp, Homo sapiens
  siRNA target sequence for SCMH1 (NM_012236.1,620-638).
gatgggagcgacaacaaaa

SEQ ID NO: 11081 - DNA, 19 bp, Homo sapiens
  siRNA target sequence for SCMH1 (NM_012236.1,627-645).
gcgacaacaaaaatgactt

SEQ ID NO: 11082 - DNA, 19 bp, Homo sapiens
  siRNA target sequence for SCMH1 (NM_012236.1,731-749).
cggctgaatgcgtcttctt

SEQ ID NO: 11083 - DNA, 19 bp, Homo sapiens
  siRNA target sequence for SCMH1 (NM_012236.1,760-778).
ccttttgaagacgctaaat

SEQ ID NO: 11084 - DNA, 19 bp, Homo sapiens
  siRNA target sequence for SCMH1 (NM_012236.1,822-840).
catcgccttcccacaactt

SEQ ID NO: 11085 - DNA, 19 bp, Homo sapiens
  siRNA target sequence for SCMH1 (NM_012236.1,825-843).
cgccttcccacaacttctt

SEQ ID NO: 11086 - DNA, 19 bp, Homo sapiens
  siRNA target sequence for SCMH1 (NM_012236.1,1086-1104).
cctccgatgtgaatactga

SEQ ID NO: 11087 - DNA, 19 bp, Homo sapiens
  siRNA target sequence for SCMH1 (NM_012236.1,1164-1182).
ggcgtaaaccaggaaagaa

SEQ ID NO: 11088 - DNA, 19 bp, Homo sapiens
  siRNA target sequence for SCMH1 (NM_012236.1,1192-1210).
gacacccaagaccctaatt

SEQ ID NO: 11089 - DNA, 19 bp, Homo sapiens
  siRNA target sequence for SCMH1 (NM_012236.1,1233-1251).
ccaagacagctgaaccttt

SEQ ID NO: 11090 - DNA, 19 bp, Homo sapiens
  siRNA target sequence for SCMH1 (NM_012236.1,1402-1420).
catgcaggccccaacagtt

SEQ ID NO: 11091 - DNA, 19 bp, Homo sapiens
  siRNA target sequence for SCMH1 (NM_012236.1,1410-1428).
ccccaacagtttgtatcta

SEQ ID NO: 11092 - DNA, 19 bp, Homo sapiens
  siRNA target sequence for SCMH1 (NM_012236.1,1412-1430).
ccaacagtttgtatctact

SEQ ID NO: 11093 - DNA, 19 bp, Homo sapiens
  siRNA target sequence for SCMH1 (NM_012236.1,1413-1431).
caacagtttgtatctactt

SEQ ID NO: 11094 - DNA, 19 bp, Homo sapiens
  siRNA target sequence for SCMH1 (NM_012236.1,1418-1436).
gtttgtatctacttgaaca

SEQ ID NO: 11095 - DNA, 19 bp, Homo sapiens
  siRNA target sequence for SCMH1 (NM_012236.1,1454-1472).
ccccacttagataagaaga

SEQ ID NO: 11096 - DNA, 19 bp, Homo sapiens
  siRNA target sequence for SCMH1 (NM_012236.1,1455-1473).
cccacttagataagaagaa

SEQ ID NO: 11097 - DNA, 19 bp, Homo sapiens
  siRNA target sequence for SCMH1 (NM_012236.1,1543-1561).
ctgtatcgactgtgcttat

SEQ ID NO: 11098 - DNA, 19 bp, Homo sapiens
  siRNA target sequence for SCMH1 (NM_012236.1,1545-1563).
gtatcgactgtgcttatca

SEQ ID NO: 11099 - DNA, 19 bp, Homo sapiens
  siRNA target sequence for SCMH1 (NM_012236.1,1596-1614).
gccatggtggtgaggttat

SEQ ID NO: 11100 - DNA, 19 bp, Homo sapiens
  siRNA target sequence for SCMH1 (NM_012236.1,1708-1726).
caaccttcgtagtgacaat

SEQ ID NO: 11101 - DNA, 19 bp, Homo sapiens
  siRNA target sequence for SCMH1 (NM_012236.1,1712-1730).
cttcgtagtgacaatctgt

SEQ ID NO: 11102 - DNA, 19 bp, Homo sapiens
  siRNA target sequence for SCMH1 (NM_012236.1,2055-2073).
ggacagtcgaggatgtgat

SEQ ID NO: 11103 - DNA, 19 bp, Homo sapiens
  siRNA target sequence for SCML1 (NM_006746.2,628-646).
gaggtttacgagacattct

SEQ ID NO: 11104 - DNA, 19 bp, Homo sapiens
  siRNA target sequence for SCML1 (NM_006746.2,679-697).
gtgtcaaggcgtgagaata

SEQ ID NO: 11105 - DNA, 19 bp, Homo sapiens
  siRNA target sequence for SCML1 (NM_006746.2,681-699).
gtcaaggcgtgagaataat

SEQ ID NO: 11106 - DNA, 19 bp, Homo sapiens
  siRNA target sequence for SCML1 (NM_006746.2,793-811).
ccagtgcatccctcagatt

SEQ ID NO: 11107 - DNA, 19 bp, Homo sapiens
  siRNA target sequence for SCML1 (NM_006746.2,794-812).
cagtgcatccctcagattt

SEQ ID NO: 11108 - DNA, 19 bp, Homo sapiens
  siRNA target sequence for SCML1 (NM_006746.2,847-865).
gatggtgcaacgtatggtt

SEQ ID NO: 11109 - DNA, 19 bp, Homo sapiens
  siRNA target sequence for SCML1 (NM_006746.2,853-871).
gcaacgtatggttcttctt

SEQ ID NO: 11110 - DNA, 19 bp, Homo sapiens
  siRNA target sequence for SCML1 (NM_006746.2,901-919).
gacagcatccacaacactt

SEQ ID NO: 11111 - DNA, 19 bp, Homo sapiens
  siRNA target sequence for SCML1 (NM_006746.2,906-924).
catccacaacacttactca

SEQ ID NO: 11112 - DNA, 19 bp, Homo sapiens
  siRNA target sequence for SCML1 (NM_006746.2,962-980).
ggtcaccagttgaaaatga

SEQ ID NO: 11113 - DNA, 19 bp, Homo sapiens
  siRNA target sequence for SCML1 (NM_006746.2,1181-1199).
cggctgtgaagctatgcta

SEQ ID NO: 11114 - DNA, 19 bp, Homo sapiens
  siRNA target sequence for SCML1 (NM_006746.2,1186-1204).
gtgaagctatgctactaca

SEQ ID NO: 11115 - DNA, 19 bp, Homo sapiens
  siRNA target sequence for SCML1 (NM_006746.2,1188-1206).
gaagctatgctactacatt

SEQ ID NO: 11116 - DNA, 19 bp, Homo sapiens
  siRNA target sequence for SCML1 (NM_006746.2,1200-1218).
ctacattgaccgacttaaa

SEQ ID NO: 11117 - DNA, 19 bp, Homo sapiens
  siRNA target sequence for SCML1 (NM_006746.2,1203-1221).
cattgaccgacttaaacaa

SEQ ID NO: 11118 - DNA, 19 bp, Homo sapiens
  siRNA target sequence for SCML1 (NM_006746.2,1210-1228).
cgacttaaacaaggaaaat

SEQ ID NO: 11119 - DNA, 19 bp, Homo sapiens
  siRNA target sequence for SCML2 (NM_006089.1,208-226).
gaaagagactgggtctata

SEQ ID NO: 11120 - DNA, 19 bp, Homo sapiens
  siRNA target sequence for SCML2 (NM_006089.1,244-262).
cttccgtcagtctcagatt

SEQ ID NO: 11121 - DNA, 19 bp, Homo sapiens
  siRNA target sequence for SCML2 (NM_006089.1,314-332).
cgcaatgccacttcagtat

SEQ ID NO: 11122 - DNA, 19 bp, Homo sapiens
  siRNA target sequence for SCML2 (NM_006089.1,483-501).
cactagggtaccagatgaa

SEQ ID NO: 11123 - DNA, 19 bp, Homo sapiens
  siRNA target sequence for SCML2 (NM_006089.1,485-503).
ctagggtaccagatgaata

SEQ ID NO: 11124 - DNA, 19 bp, Homo sapiens
  siRNA target sequence for SCML2 (NM_006089.1,488-506).
gggtaccagatgaatacat

SEQ ID NO: 11125 - DNA, 19 bp, Homo sapiens
  siRNA target sequence for SCML2 (NM_006089.1,513-531).
ggccgatgttcctcttaaa

SEQ ID NO: 11126 - DNA, 19 bp, Homo sapiens
  siRNA target sequence for SCML2 (NM_006089.1,534-552).
cactaaatgggtctgaaat

SEQ ID NO: 11127 - DNA, 19 bp, Homo sapiens
  siRNA target sequence for SCML2 (NM_006089.1,585-603).
caaagcccccactaaataa

SEQ ID NO: 11128 - DNA, 19 bp, Homo sapiens
  siRNA target sequence for SCML2 (NM_006089.1,666-684).
cgaccattggagatgttaa

SEQ ID NO: 11129 - DNA, 19 bp, Homo sapiens
  siRNA target sequence for SCML2 (NM_006089.1,686-704).
ggggatgaagttcatatca

SEQ ID NO: 11130 - DNA, 19 bp, Homo sapiens
  siRNA target sequence for SCML2 (NM_006089.1,688-706).
ggatgaagttcatatcaca

SEQ ID NO: 11131 - DNA, 19 bp, Homo sapiens
  siRNA target sequence for SCML2 (NM_006089.1,717-735).
ggagtggagcttttgatta

SEQ ID NO: 11132 - DNA, 19 bp, Homo sapiens
  siRNA target sequence for SCML2 (NM_006089.1,745-763).
gtatgattctcgagatatt

SEQ ID NO: 11133 - DNA, 19 bp, Homo sapiens
  siRNA target sequence for SCML2 (NM_006089.1,782-800).
cgcctgacaggagatgtat

SEQ ID NO: 11134 - DNA, 19 bp, Homo sapiens
  siRNA target sequence for SCML2 (NM_006089.1,783-801).
gcctgacaggagatgtatt

SEQ ID NO: 11135 - DNA, 19 bp, Homo sapiens
  siRNA target sequence for SCML2 (NM_006089.1,896-914).
cagaaaactactctaatat

SEQ ID NO: 11136 - DNA, 19 bp, Homo sapiens
  siRNA target sequence for SCML2 (NM_006089.1,931-949).
caggagatcaagtcgaatt

SEQ ID NO: 11137 - DNA, 19 bp, Homo sapiens
  siRNA target sequence for SCML2 (NM_006089.1,933-951).
ggagatcaagtcgaattaa

SEQ ID NO: 11138 - DNA, 19 bp, Homo sapiens
  siRNA target sequence for SCML2 (NM_006089.1,934-952).
gagatcaagtcgaattaaa

SEQ ID NO: 11139 - DNA, 19 bp, Homo sapiens
  siRNA target sequence for SCML2 (NM_006089.1,1046-1064).
cctttgcccgtgatatgtt

SEQ ID NO: 11140 - DNA, 19 bp, Homo sapiens
  siRNA target sequence for SCML2 (NM_006089.1,1052-1070).
cccgtgatatgttctacat

SEQ ID NO: 11141 - DNA, 19 bp, Homo sapiens
  siRNA target sequence for SCML2 (NM_006089.1,1100-1118).
gaccgtggcatgttatata

SEQ ID NO: 11142 - DNA, 19 bp, Homo sapiens
  siRNA target sequence for SCML2 (NM_006089.1,1104-1122).
gtggcatgttatataaaga

SEQ ID NO: 11143 - DNA, 19 bp, Homo sapiens
  siRNA target sequence for SCML2 (NM_006089.1,1343-1361).
cgtggaggagaagtgataa

SEQ ID NO: 11144 - DNA, 19 bp, Homo sapiens
  siRNA target sequence for SCML2 (NM_006089.1,1455-1473).
gtctgcagtgtgataacct

SEQ ID NO: 11145 - DNA, 19 bp, Homo sapiens
  siRNA target sequence for SCML2 (NM_006089.1,1457-1475).
ctgcagtgtgataaccttt

SEQ ID NO: 11146 - DNA, 19 bp, Homo sapiens
  siRNA target sequence for SCML2 (NM_006089.1,1460-1478).
cagtgtgataaccttttga

SEQ ID NO: 11147 - DNA, 19 bp, Homo sapiens
  siRNA target sequence for SCML2 (NM_006089.1,1462-1480).
gtgtgataaccttttgagt

SEQ ID NO: 11148 - DNA, 19 bp, Homo sapiens
  siRNA target sequence for SCML2 (NM_006089.1,1497-1515).
cttccaggggtcatactca

SEQ ID NO: 11149 - DNA, 19 bp, Homo sapiens
  siRNA target sequence for SCML2 (NM_006089.1,1626-1644).
ctaagctccccaaaacaaa

SEQ ID NO: 11150 - DNA, 19 bp, Homo sapiens
  siRNA target sequence for SCML2 (NM_006089.1,1696-1714).
caaagaggagaatctttca

SEQ ID NO: 11151 - DNA, 19 bp, Homo sapiens
  siRNA target sequence for SCML2 (NM_006089.1,1726-1744).
gagctcatcactaaattca

SEQ ID NO: 11152 - DNA, 19 bp, Homo sapiens
  siRNA target sequence for SCML2 (NM_006089.1,1756-1774).
gaatcctgcctgtagaaat

SEQ ID NO: 11153 - DNA, 19 bp, Homo sapiens
  siRNA target sequence for SCML2 (NM_006089.1,1764-1782).
cctgtagaaatcctatgta

SEQ ID NO: 11154 - DNA, 19 bp, Homo sapiens
  siRNA target sequence for SCML2 (NM_006089.1,1841-1859).
ccactagttggggacatat

SEQ ID NO: 11155 - DNA, 19 bp, Homo sapiens
  siRNA target sequence for SCML2 (NM_006089.1,1869-1887).
gcagtccccatgaagttaa

SEQ ID NO: 11156 - DNA, 19 bp, Homo sapiens
  siRNA target sequence for SCML2 (NM_006089.1,1983-2001).
ggtctgtggatgaagtgat

SEQ ID NO: 11157 - DNA, 19 bp, Homo sapiens
  siRNA target sequence for SCML2 (NM_006089.1,1984-2002).
gtctgtggatgaagtgata

SEQ ID NO: 11158 - DNA, 19 bp, Homo sapiens
  siRNA target sequence for SCML2 (NM_006089.1,1991-2009).
gatgaagtgatacagttta

SEQ ID NO: 11159 - DNA, 19 bp, Homo sapiens
  siRNA target sequence for SCML2 (NM_006089.1,2015-2033).
catacagatcctcagatat

SEQ ID NO: 11160 - DNA, 19 bp, Homo sapiens
  siRNA target sequence for SCML2 (NM_006089.1,2053-2071).
cttcaggcaacatgaaatt

SEQ ID NO: 11161 - DNA, 19 bp, Homo sapiens
  siRNA target sequence for SCRT1 (NM_031309.2,452-470).
gcggacgccttcttcatca

SEQ ID NO: 11162 - DNA, 19 bp, Homo sapiens
  siRNA target sequence for SCRT1 (NM_031309.2,693-711).
gcgagtgcggcaaaacata

SEQ ID NO: 11163 - DNA, 19 bp, Homo sapiens
  siRNA target sequence for SDCCAG33 (NM_005786.3,1545-1563).
gtgtatgcaaacttgttct

SEQ ID NO: 11164 - DNA, 19 bp, Homo sapiens
  siRNA target sequence for SDCCAG33 (NM_005786.3,1579-1597).
ccagcttagctctggattt

SEQ ID NO: 11165 - DNA, 19 bp, Homo sapiens
  siRNA target sequence for SDCCAG33 (NM_005786.3,1872-1890).
ctctaccgccagaacaaca

SEQ ID NO: 11166 - DNA, 19 bp, Homo sapiens
  siRNA target sequence for SDCCAG33 (NM_005786.3,2176-2194).
ccaagcattaccagaaagt

SEQ ID NO: 11167 - DNA, 19 bp, Homo sapiens
  siRNA target sequence for SDCCAG33 (NM_005786.3,2353-2371).
cgtacgtcacgcccaataa

SEQ ID NO: 11168 - DNA, 19 bp, Homo sapiens
  siRNA target sequence for SDCCAG33 (NM_005786.3,2503-2521).
ccgggcacttcctgaaagt

SEQ ID NO: 11169 - DNA, 19 bp, Homo sapiens
  siRNA target sequence for SDCCAG33 (NM_005786.3,2865-2883).
gtctccacggccattagca

SEQ ID NO: 11170 - DNA, 19 bp, Homo sapiens
  siRNA target sequence for SDCCAG33 (NM_005786.3,3195-3213).
gctgcgtcccccatagcaa

SEQ ID NO: 11171 - DNA, 19 bp, Homo sapiens
  siRNA target sequence for SDCCAG33 (NM_005786.3,3196-3214).
ctgcgtcccccatagcaaa

SEQ ID NO: 11172 - DNA, 19 bp, Homo sapiens
  siRNA target sequence for SDCCAG33 (NM_005786.3,3199-3217).
cgtcccccatagcaaaaga

SEQ ID NO: 11173 - DNA, 19 bp, Homo sapiens
  siRNA target sequence for SDCCAG33 (NM_005786.3,3203-3221).
ccccatagcaaaagagaat

SEQ ID NO: 11174 - DNA, 19 bp, Homo sapiens
  siRNA target sequence for SDCCAG33 (NM_005786.3,3204-3222).
cccatagcaaaagagaata

SEQ ID NO: 11175 - DNA, 19 bp, Homo sapiens
  siRNA target sequence for SDCCAG33 (NM_005786.3,3250-3268).
gcggcaaaccacagaagaa

SEQ ID NO: 11176 - DNA, 19 bp, Homo sapiens
  siRNA target sequence for SDCCAG33 (NM_005786.3,3433-3451).
ctttgcagtccatcatgaa

SEQ ID NO: 11177 - DNA, 19 bp, Homo sapiens
  siRNA target sequence for SDCCAG33 (NM_005786.3,3499-3517).
cgctggcgatgctgtacaa

SEQ ID NO: 11178 - DNA, 19 bp, Homo sapiens
  siRNA target sequence for SDCCAG33 (NM_005786.3,3584-3602).
cgaccgctactattatgaa

SEQ ID NO: 11179 - DNA, 19 bp, Homo sapiens
  siRNA target sequence for SDCCAG33 (NM_005786.3,3585-3603).
gaccgctactattatgaaa

SEQ ID NO: 11180 - DNA, 19 bp, Homo sapiens
  siRNA target sequence for SDCCAG33 (NM_005786.3,3760-3778).
cgccctccacagtttcaga

SEQ ID NO: 11181 - DNA, 19 bp, Homo sapiens
  siRNA target sequence for SDCCAG33 (NM_005786.3,3922-3940).
ccacagagggcaagtacat

SEQ ID NO: 11182 - DNA, 19 bp, Homo sapiens
  siRNA target sequence for SDCCAG33 (NM_005786.3,3968-3986).
ggtgcacatctcgaagttt

SEQ ID NO: 11183 - DNA, 19 bp, Homo sapiens
  siRNA target sequence for SDCCAG33 (NM_005786.3,3969-3987).
gtgcacatctcgaagttta

SEQ ID NO: 11184 - DNA, 19 bp, Homo sapiens
  siRNA target sequence for SDCCAG33 (NM_005786.3,3971-3989).
gcacatctcgaagtttact

SEQ ID NO: 11185 - DNA, 19 bp, Homo sapiens
  siRNA target sequence for SDCCAG33 (NM_005786.3,4046-4064).
gaggacagggggaacgaaa

SEQ ID NO: 11186 - DNA, 19 bp, Homo sapiens
  siRNA target sequence for SDCCAG33 (NM_005786.3,4048-4066).
ggacagggggaacgaaatt

SEQ ID NO: 11187 - DNA, 19 bp, Homo sapiens
  siRNA target sequence for SDCCAG33 (NM_005786.3,4051-4069).
cagggggaacgaaattcct

SEQ ID NO: 11188 - DNA, 19 bp, Homo sapiens
  siRNA target sequence for SDCCAG33 (NM_005786.3,4053-4071).
gggggaacgaaattcctaa

SEQ ID NO: 11189 - DNA, 19 bp, Homo sapiens
  siRNA target sequence for SDCCAG33 (NM_005786.3,4054-4072).
ggggaacgaaattcctaaa

SEQ ID NO: 11190 - DNA, 19 bp, Homo sapiens
  siRNA target sequence for SDCCAG33 (NM_005786.3,4056-4074).
ggaacgaaattcctaaaga

SEQ ID NO: 11191 - DNA, 19 bp, Homo sapiens
  siRNA target sequence for SDCCAG33 (NM_005786.3,4129-4147).
gaactgcttctacatacat

SEQ ID NO: 11192 - DNA, 19 bp, Homo sapiens
  siRNA target sequence for SDCCAG33 (NM_005786.3,4190-4208).
ctccaagctgccactcaat

SEQ ID NO: 11193 - DNA, 19 bp, Homo sapiens
  siRNA target sequence for SDCCAG33 (NM_005786.3,4192-4210).
ccaagctgccactcaatca

SEQ ID NO: 11194 - DNA, 19 bp, Homo sapiens
  siRNA target sequence for SDCCAG33 (NM_005786.3,4235-4253).
gaaagtcctcaccaacaaa

SEQ ID NO: 11195 - DNA, 19 bp, Homo sapiens
  siRNA target sequence for SDCCAG33 (NM_005786.3,4310-4328).
gctctgcaaccggactttt

SEQ ID NO: 11196 - DNA, 19 bp, Homo sapiens
  siRNA target sequence for SDCCAG33 (NM_005786.3,4344-4362).
gtcaaactgcaccttagta

SEQ ID NO: 11197 - DNA, 19 bp, Homo sapiens
  siRNA target sequence for SDCCAG33 (NM_005786.3,4382-4400).
cgaggaccacctgatctat

SEQ ID NO: 11198 - DNA, 19 bp, Homo sapiens
  siRNA target sequence for SHOX2 (NM_003030.2,207-225).
gaaggccagaccaaaatca

SEQ ID NO: 11199 - DNA, 19 bp, Homo sapiens
  siRNA target sequence for SHOX2 (NM_003030.2,232-250).
ggcgaagtcggaccaattt

SEQ ID NO: 11200 - DNA, 19 bp, Homo sapiens
  siRNA target sequence for SHOX2 (NM_003030.2,234-252).
cgaagtcggaccaatttca

SEQ ID NO: 11201 - DNA, 19 bp, Homo sapiens
  siRNA target sequence for SHOX2 (NM_003030.2,381-399).
cgaagagctaaatgtagaa

SEQ ID NO: 11202 - DNA, 19 bp, Homo sapiens
  siRNA target sequence for SHOX2 (NM_003030.2,416-434).
ccataaaggtgttctcata

SEQ ID NO: 11203 - DNA, 19 bp, Homo sapiens
  siRNA target sequence for SHOX2 (NM_003030.2,460-478).
gtagagtcgcaccttatgt

SEQ ID NO: 11204 - DNA, 19 bp, Homo sapiens
  siRNA target sequence for SHOX2 (NM_003030.2,463-481).
gagtcgcaccttatgtcaa

SEQ ID NO: 11205 - DNA, 19 bp, Homo sapiens
  siRNA target sequence for SHOX2 (NM_003030.2,477-495).
gtcaacgtaggtgctttaa

SEQ ID NO: 11206 - DNA, 19 bp, Homo sapiens
  siRNA target sequence for SHOX2 (NM_003030.2,719-737).
cgccgatctcagactgaaa

SEQ ID NO: 11207 - DNA, 19 bp, Homo sapiens
  siRNA target sequence for SHOX2 (NM_006884.1,42-60).
gcgttcgtctccaagtctt

SEQ ID NO: 11208 - DNA, 19 bp, Homo sapiens
  siRNA target sequence for SHOX2 (NM_006884.1,374-392).
gtccccggagctgaaagat

SEQ ID NO: 11209 - DNA, 19 bp, Homo sapiens
  siRNA target sequence for SIM1 (NM_005068.2,319-337).
gacaaagcatccataatca

SEQ ID NO: 11210 - DNA, 19 bp, Homo sapiens
  siRNA target sequence for SIM1 (NM_005068.2,340-358).
ctcacgaccagctatctca

SEQ ID NO: 11211 - DNA, 19 bp, Homo sapiens
  siRNA target sequence for SIM1 (NM_005068.2,344-362).
cgaccagctatctcaaaat

SEQ ID NO: 11212 - DNA, 19 bp, Homo sapiens
  siRNA target sequence for SIM1 (NM_005068.2,348-366).
cagctatctcaaaatgaga

SEQ ID NO: 11213 - DNA, 19 bp, Homo sapiens
  siRNA target sequence for SIM1 (NM_005068.2,564-582).
gaccggaaacagcatttat

SEQ ID NO: 11214 - DNA, 19 bp, Homo sapiens
  siRNA target sequence for SIM1 (NM_005068.2,566-584).
ccggaaacagcatttatga

SEQ ID NO: 11215 - DNA, 19 bp, Homo sapiens
  siRNA target sequence for SIM1 (NM_005068.2,567-585).
cggaaacagcatttatgaa

SEQ ID NO: 11216 - DNA, 19 bp, Homo sapiens
  siRNA target sequence for SIM1 (NM_005068.2,889-907).
cacagcaatatgtttatgt

SEQ ID NO: 11217 - DNA, 19 bp, Homo sapiens
  siRNA target sequence for SIM1 (NM_005068.2,1040-1058).
gctgcgcgcaccatttgct

SEQ ID NO: 11218 - DNA, 19 bp, Homo sapiens
  siRNA target sequence for SIM1 (NM_005068.2,1178-1196).
gtatcgtcagcgtcaacta

SEQ ID NO: 11219 - DNA, 19 bp, Homo sapiens
  siRNA target sequence for SIM1 (NM_005068.2,1329-1347).
gctctccagctcaaagtca

SEQ ID NO: 11220 - DNA, 19 bp, Homo sapiens
  siRNA target sequence for SIM1 (NM_005068.2,1370-1388).
ctcagtattcgggatttca

SEQ ID NO: 11221 - DNA, 19 bp, Homo sapiens
  siRNA target sequence for SIM1 (NM_005068.2,1372-1390).
cagtattcgggatttcaca

SEQ ID NO: 11222 - DNA, 19 bp, Homo sapiens
  siRNA target sequence for SIM1 (NM_005068.2,1391-1409).
cagaaagatcggaatctga

SEQ ID NO: 11223 - DNA, 19 bp, Homo sapiens
  siRNA target sequence for SIM1 (NM_005068.2,1397-1415).
gatcggaatctgatcatga

SEQ ID NO: 11224 - DNA, 19 bp, Homo sapiens
  siRNA target sequence for SIM1 (NM_005068.2,1506-1524).
gtgcgcctacagacagttt

SEQ ID NO: 11225 - DNA, 19 bp, Homo sapiens
  siRNA target sequence for SIM1 (NM_005068.2,1783-1801).
ggtcattgggatgaagata

SEQ ID NO: 11226 - DNA, 19 bp, Homo sapiens
  siRNA target sequence for SIM1 (NM_005068.2,1855-1873).
cgtactgagcagtatcaaa

SEQ ID NO: 11227 - DNA, 19 bp, Homo sapiens
  siRNA target sequence for SIM1 (NM_005068.2,1915-1933).
gccactcagcaaatgatta

SEQ ID NO: 11228 - DNA, 19 bp, Homo sapiens
  siRNA target sequence for SIM1 (NM_005068.2,1919-1937).
ctcagcaaatgattaaaga

SEQ ID NO: 11229 - DNA, 19 bp, Homo sapiens
  siRNA target sequence for SIM1 (NM_005068.2,1977-1995).
ccaactggcttccattaat

SEQ ID NO: 11230 - DNA, 19 bp, Homo sapiens
  siRNA target sequence for SIM1 (NM_005068.2,2132-2150).
gcccccatgaaaatgacta

SEQ ID NO: 11231 - DNA, 19 bp, Homo sapiens
  siRNA target sequence for SIM1 (NM_005068.2,2135-2153).
cccatgaaaatgactatga

SEQ ID NO: 11232 - DNA, 19 bp, Homo sapiens
  siRNA target sequence for SIM1 (NM_005068.2,2167-2185).
gcactatctcggataagta

SEQ ID NO: 11233 - DNA, 19 bp, Homo sapiens
  siRNA target sequence for SIM1 (NM_005068.2,2190-2208).
caattcggatcgcatttca

SEQ ID NO: 11234 - DNA, 19 bp, Homo sapiens
  siRNA target sequence for SIM1 (NM_005068.2,2197-2215).
gatcgcatttcaaaatcca

SEQ ID NO: 11235 - DNA, 19 bp, Homo sapiens
  siRNA target sequence for SIM1 (NM_005068.2,2213-2231).
ccagtttgatcctagctaa

SEQ ID NO: 11236 - DNA, 19 bp, Homo sapiens
  siRNA target sequence for SIM1 (NM_005068.2,2216-2234).
gtttgatcctagctaaaga

SEQ ID NO: 11237 - DNA, 19 bp, Homo sapiens
  siRNA target sequence for SIM1 (NM_005068.2,2220-2238).
gatcctagctaaagactat

SEQ ID NO: 11238 - DNA, 19 bp, Homo sapiens
  siRNA target sequence for SIM1 (NM_005068.2,2235-2253).
ctatctgcattcggatata

SEQ ID NO: 11239 - DNA, 19 bp, Homo sapiens
  siRNA target sequence for SIM1 (NM_005068.2,2305-2323).
ggctctcaccggcagtatt

SEQ ID NO: 11240 - DNA, 19 bp, Homo sapiens
  siRNA target sequence for SIM1 (NM_005068.2,2306-2324).
gctctcaccggcagtattt

SEQ ID NO: 11241 - DNA, 19 bp, Homo sapiens
  siRNA target sequence for SIM1 (NM_005068.2,2307-2325).
ctctcaccggcagtatttt

SEQ ID NO: 11242 - DNA, 19 bp, Homo sapiens
  siRNA target sequence for SIM1 (NM_005068.2,2309-2327).
ctcaccggcagtattttga

SEQ ID NO: 11243 - DNA, 19 bp, Homo sapiens
  siRNA target sequence for SIM1 (NM_005068.2,2331-2349).
gcatgcttacacattaact

SEQ ID NO: 11244 - DNA, 19 bp, Homo sapiens
  siRNA target sequence for SIM1 (NM_005068.2,2359-2377).
ctggagcacttatatgaca

SEQ ID NO: 11245 - DNA, 19 bp, Homo sapiens
  siRNA target sequence for SIM1 (NM_005068.2,2374-2392).
gacagcgaaaccattagaa

SEQ ID NO: 11246 - DNA, 19 bp, Homo sapiens
  siRNA target sequence for SIM1 (NM_005068.2,2406-2424).
ctgtaatggctcacacttt

SEQ ID NO: 11247 - DNA, 19 bp, Homo sapiens
  siRNA target sequence for SIM1 (NM_005068.2,2408-2426).
gtaatggctcacactttga

SEQ ID NO: 11248 - DNA, 19 bp, Homo sapiens
  siRNA target sequence for SIM2 (NM_005069.2,193-211).
ccacgagctacctgaagat

SEQ ID NO: 11249 - DNA, 19 bp, Homo sapiens
  siRNA target sequence for SIM2 (NM_005069.2,218-236).
cgtcttccccgaaggttta

SEQ ID NO: 11250 - DNA, 19 bp, Homo sapiens
  siRNA target sequence for SIM2 (NM_005069.2,221-239).
cttccccgaaggtttagga

SEQ ID NO: 11251 - DNA, 19 bp, Homo sapiens
  siRNA target sequence for SIM2 (NM_005069.2,342-360).
gcatctgatggcaaaatca

SEQ ID NO: 11252 - DNA, 19 bp, Homo sapiens
  siRNA target sequence for SIM2 (NM_005069.2,374-392).
gaccgcttctgtccattta

SEQ ID NO: 11253 - DNA, 19 bp, Homo sapiens
  siRNA target sequence for SIM2 (NM_005069.2,408-426).
gagctcacgggcaacagta

SEQ ID NO: 11254 - DNA, 19 bp, Homo sapiens
  siRNA target sequence for SIM2 (NM_005069.2,410-428).
gctcacgggcaacagtatt

SEQ ID NO: 11255 - DNA, 19 bp, Homo sapiens
  siRNA target sequence for SIM2 (NM_005069.2,411-429).
ctcacgggcaacagtattt

SEQ ID NO: 11256 - DNA, 19 bp, Homo sapiens
  siRNA target sequence for SIM2 (NM_005069.2,413-431).
cacgggcaacagtatttat

SEQ ID NO: 11257 - DNA, 19 bp, Homo sapiens
  siRNA target sequence for SIM2 (NM_005069.2,415-433).
cgggcaacagtatttatga

SEQ ID NO: 11258 - DNA, 19 bp, Homo sapiens
  siRNA target sequence for SIM2 (NM_005069.2,445-463).
cttctgaccacgatgagat

SEQ ID NO: 11259 - DNA, 19 bp, Homo sapiens
  siRNA target sequence for SIM2 (NM_005069.2,506-524).
gctccaagagtatgagata

SEQ ID NO: 11260 - DNA, 19 bp, Homo sapiens
  siRNA target sequence for SIM2 (NM_005069.2,529-547).
ggtcgttctttcttcgaat

SEQ ID NO: 11261 - DNA, 19 bp, Homo sapiens
  siRNA target sequence for SIM2 (NM_005069.2,532-550).
cgttctttcttcgaatgaa

SEQ ID NO: 11262 - DNA, 19 bp, Homo sapiens
  siRNA target sequence for SIM2 (NM_005069.2,533-551).
gttctttcttcgaatgaaa

SEQ ID NO: 11263 - DNA, 19 bp, Homo sapiens
  siRNA target sequence for SIM2 (NM_005069.2,715-733).
gtgccatcaccgagatcaa

SEQ ID NO: 11264 - DNA, 19 bp, Homo sapiens
  siRNA target sequence for SIM2 (NM_005069.2,726-744).
gagatcaagctgtacagta

SEQ ID NO: 11265 - DNA, 19 bp, Homo sapiens
  siRNA target sequence for SIM2 (NM_005069.2,839-857).
cgagaagaccctataccat

SEQ ID NO: 11266 - DNA, 19 bp, Homo sapiens
  siRNA target sequence for SIM2 (NM_005069.2,1025-1043).
ctgcatcgtgagtgtcaat

SEQ ID NO: 11267 - DNA, 19 bp, Homo sapiens
  siRNA target sequence for SIM2 (NM_005069.2,1027-1045).
gcatcgtgagtgtcaatta

SEQ ID NO: 11268 - DNA, 19 bp, Homo sapiens
  siRNA target sequence for SIM2 (NM_005069.2,1028-1046).
catcgtgagtgtcaattat

SEQ ID NO: 11269 - DNA, 19 bp, Homo sapiens
  siRNA target sequence for SIM2 (NM_005069.2,1031-1049).
cgtgagtgtcaattatgta

SEQ ID NO: 11270 - DNA, 19 bp, Homo sapiens
  siRNA target sequence for SIM2 (NM_005069.2,1047-1065).
gtactcacggagattgaat

SEQ ID NO: 11271 - DNA, 19 bp, Homo sapiens
  siRNA target sequence for SIM2 (NM_005069.2,1142-1160).
ctcacaagaaactaggaaa

SEQ ID NO: 11272 - DNA, 19 bp, Homo sapiens
  siRNA target sequence for SIM2 (NM_005069.2,1210-1228).
cttaccccccacagcaata

SEQ ID NO: 11273 - DNA, 19 bp, Homo sapiens
  siRNA target sequence for SIM2 (NM_005069.2,1474-1492).
gtgaggtggcacgcttttt

SEQ ID NO: 11274 - DNA, 19 bp, Homo sapiens
  siRNA target sequence for SIM2 (NM_005069.2,1558-1576).
gctcgtctccagctaaaaa

SEQ ID NO: 11275 - DNA, 19 bp, Homo sapiens
  siRNA target sequence for SIM2 (NM_005069.2,1559-1577).
ctcgtctccagctaaaaat

SEQ ID NO: 11276 - DNA, 19 bp, Homo sapiens
  siRNA target sequence for SIX1 (NM_005982.1,535-553).
ggctgaaggcgcattacgt

SEQ ID NO: 11277 - DNA, 19 bp, Homo sapiens
  siRNA target sequence for SIX1 (NM_005982.1,605-623).
ggtgcgccgaaaatttcca

SEQ ID NO: 11278 - DNA, 19 bp, Homo sapiens
  siRNA target sequence for SIX1 (NM_005982.1,836-854).
ggagaacaccgaaaacaat

SEQ ID NO: 11279 - DNA, 19 bp, Homo sapiens
  siRNA target sequence for SIX1 (NM_005982.1,993-1011).
cacgccaggagctcaaact

SEQ ID NO: 11280 - DNA, 19 bp, Homo sapiens
  siRNA target sequence for SIX1 (NM_005982.1,995-1013).
cgccaggagctcaaactat

SEQ ID NO: 11281 - DNA, 19 bp, Homo sapiens
  siRNA target sequence for SIX1 (NM_005982.1,996-1014).
gccaggagctcaaactatt

SEQ ID NO: 11282 - DNA, 19 bp, Homo sapiens
  siRNA target sequence for SIX2 (NM_016932.3,396-414).
gcaccttcacaagaatgaa

SEQ ID NO: 11283 - DNA, 19 bp, Homo sapiens
  siRNA target sequence for SIX2 (NM_016932.3,397-415).
caccttcacaagaatgaaa

SEQ ID NO: 11284 - DNA, 19 bp, Homo sapiens
  siRNA target sequence for SIX2 (NM_016932.3,533-551).
ggctcaaggcacactacat

SEQ ID NO: 11285 - DNA, 19 bp, Homo sapiens
  siRNA target sequence for SIX3 (NM_005413.1,432-450).
caaacttcgccgattctca

SEQ ID NO: 11286 - DNA, 19 bp, Homo sapiens
  siRNA target sequence for SIX3 (NM_005413.1,745-763).
gtgcgaggccatcaacaaa

SEQ ID NO: 11287 - DNA, 19 bp, Homo sapiens
  siRNA target sequence for SIX3 (NM_005413.1,1114-1132).
cctcactcccacacaagta

SEQ ID NO: 11288 - DNA, 19 bp, Homo sapiens
  siRNA target sequence for SIX3 (NM_005413.1,1356-1374).
ccagcgactcggaatgtga

SEQ ID NO: 11289 - DNA, 19 bp, Homo sapiens
  siRNA target sequence for SIX3 (NM_005413.1,1357-1375).
cagcgactcggaatgtgat

SEQ ID NO: 11290 - DNA, 19 bp, Homo sapiens
  siRNA target sequence for SIX3 (NM_005413.1,1361-1379).
gactcggaatgtgatgtat

SEQ ID NO: 11291 - DNA, 19 bp, Homo sapiens
  siRNA target sequence for SIX4 (NM_017420.1,604-622).
ggcgaggagacggtgtatt

SEQ ID NO: 11292 - DNA, 19 bp, Homo sapiens
  siRNA target sequence for SIX4 (NM_017420.1,606-624).
cgaggagacggtgtattgt

SEQ ID NO: 11293 - DNA, 19 bp, Homo sapiens
  siRNA target sequence for SIX4 (NM_017420.1,607-625).
gaggagacggtgtattgtt

SEQ ID NO: 11294 - DNA, 19 bp, Homo sapiens
  siRNA target sequence for SIX4 (NM_017420.1,610-628).
gagacggtgtattgtttca

SEQ ID NO: 11295 - DNA, 19 bp, Homo sapiens
  siRNA target sequence for SIX4 (NM_017420.1,783-801).
cgagacccagtccaaaagt

SEQ ID NO: 11296 - DNA, 19 bp, Homo sapiens
  siRNA target sequence for SIX4 (NM_017420.1,839-857).
gcaagggacatgaggattt

SEQ ID NO: 11297 - DNA, 19 bp, Homo sapiens
  siRNA target sequence for SIX4 (NM_017420.1,914-932).
gtcatatggagccagtata

SEQ ID NO: 11298 - DNA, 19 bp, Homo sapiens
  siRNA target sequence for SIX4 (NM_017420.1,916-934).
catatggagccagtatata

SEQ ID NO: 11299 - DNA, 19 bp, Homo sapiens
  siRNA target sequence for SIX4 (NM_017420.1,925-943).
ccagtatatatgcaacaaa

SEQ ID NO: 11300 - DNA, 19 bp, Homo sapiens
  siRNA target sequence for SIX4 (NM_017420.1,952-970).
gctaagatatcattaagct

SEQ ID NO: 11301 - DNA, 19 bp, Homo sapiens
  siRNA target sequence for SIX4 (NM_017420.1,971-989).
cttctggagttctgttgaa

SEQ ID NO: 11302 - DNA, 19 bp, Homo sapiens
  siRNA target sequence for SIX4 (NM_017420.1,999-1017).
ggtacctgcaagtacttca

SEQ ID NO: 11303 - DNA, 19 bp, Homo sapiens
  siRNA target sequence for SIX4 (NM_017420.1,1013-1031).
cttcacctgtcttccttaa

SEQ ID NO: 11304 - DNA, 19 bp, Homo sapiens
  siRNA target sequence for SIX4 (NM_017420.1,1018-1036).
cctgtcttccttaatggaa

SEQ ID NO: 11305 - DNA, 19 bp, Homo sapiens
  siRNA target sequence for SIX4 (NM_017420.1,1052-1070).
gacccagtggagttatcct

SEQ ID NO: 11306 - DNA, 19 bp, Homo sapiens
  siRNA target sequence for SIX4 (NM_017420.1,1054-1072).
cccagtggagttatcctta

SEQ ID NO: 11307 - DNA, 19 bp, Homo sapiens
  siRNA target sequence for SIX4 (NM_017420.1,1055-1073).
ccagtggagttatccttaa

SEQ ID NO: 11308 - DNA, 19 bp, Homo sapiens
  siRNA target sequence for SIX4 (NM_017420.1,1056-1074).
cagtggagttatccttaat

SEQ ID NO: 11309 - DNA, 19 bp, Homo sapiens
  siRNA target sequence for SIX4 (NM_017420.1,1104-1122).
ggcattgaacccaccaaaa

SEQ ID NO: 11310 - DNA, 19 bp, Homo sapiens
  siRNA target sequence for SIX4 (NM_017420.1,1105-1123).
gcattgaacccaccaaaaa

SEQ ID NO: 11311 - DNA, 19 bp, Homo sapiens
  siRNA target sequence for SIX4 (NM_017420.1,1106-1124).
cattgaacccaccaaaaat

SEQ ID NO: 11312 - DNA, 19 bp, Homo sapiens
  siRNA target sequence for SIX4 (NM_017420.1,1162-1180).
gacatactggggtctactt

SEQ ID NO: 11313 - DNA, 19 bp, Homo sapiens
  siRNA target sequence for SIX4 (NM_017420.1,1282-1300).
cccagcactgaggtgaaaa

SEQ ID NO: 11314 - DNA, 19 bp, Homo sapiens
  siRNA target sequence for SIX4 (NM_017420.1,1334-1352).
gagggtctgtagtgacttt

SEQ ID NO: 11315 - DNA, 19 bp, Homo sapiens
  siRNA target sequence for SIX4 (NM_017420.1,1336-1354).
gggtctgtagtgactttta

SEQ ID NO: 11316 - DNA, 19 bp, Homo sapiens
  siRNA target sequence for SIX4 (NM_017420.1,1358-1376).
caccagtgcaaattaacca

SEQ ID NO: 11317 - DNA, 19 bp, Homo sapiens
  siRNA target sequence for SIX4 (NM_017420.1,1423-1441).
cttaatgggagcattggat

SEQ ID NO: 11318 - DNA, 19 bp, Homo sapiens
  siRNA target sequence for SIX4 (NM_017420.1,1474-1492).
gcagcttcacaaggtaata

SEQ ID NO: 11319 - DNA, 19 bp, Homo sapiens
  siRNA target sequence for SIX4 (NM_017420.1,1596-1614).
ggtatacacggttcctaat

SEQ ID NO: 11320 - DNA, 19 bp, Homo sapiens
  siRNA target sequence for SIX4 (NM_017420.1,1597-1615).
gtatacacggttcctaata

SEQ ID NO: 11321 - DNA, 19 bp, Homo sapiens
  siRNA target sequence for SIX4 (NM_017420.1,1623-1641).
gactataggatctgtgaaa

SEQ ID NO: 11322 - DNA, 19 bp, Homo sapiens
  siRNA target sequence for SIX4 (NM_017420.1,1625-1643).
ctataggatctgtgaaaca

SEQ ID NO: 11323 - DNA, 19 bp, Homo sapiens
  siRNA target sequence for SIX4 (NM_017420.1,1689-1707).
caatcagaatgcacaagta

SEQ ID NO: 11324 - DNA, 19 bp, Homo sapiens
  siRNA target sequence for SIX4 (NM_017420.1,1756-1774).
ctggcctcctcattagtta

SEQ ID NO: 11325 - DNA, 19 bp, Homo sapiens
  siRNA target sequence for SIX4 (NM_017420.1,1764-1782).
ctcattagttaatgtatct

SEQ ID NO: 11326 - DNA, 19 bp, Homo sapiens
  siRNA target sequence for SIX4 (NM_017420.1,1777-1795).
gtatctccaactcacaatt

SEQ ID NO: 11327 - DNA, 19 bp, Homo sapiens
  siRNA target sequence for SIX4 (NM_017420.1,1803-1821).
cagtccctctacactacta

SEQ ID NO: 11328 - DNA, 19 bp, Homo sapiens
  siRNA target sequence for SIX4 (NM_017420.1,1805-1823).
gtccctctacactactaaa

SEQ ID NO: 11329 - DNA, 19 bp, Homo sapiens
  siRNA target sequence for SIX4 (NM_017420.1,1851-1869).
cgatagccaaccaatgtct

SEQ ID NO: 11330 - DNA, 19 bp, Homo sapiens
  siRNA target sequence for SIX4 (NM_017420.1,1873-1891).
ccggtggcaagcaaatcta

SEQ ID NO: 11331 - DNA, 19 bp, Homo sapiens
  siRNA target sequence for SIX4 (NM_017420.1,1875-1893).
ggtggcaagcaaatctact

SEQ ID NO: 11332 - DNA, 19 bp, Homo sapiens
  siRNA target sequence for SIX4 (NM_017420.1,1901-1919).
ctgtcagcaacactaacta

SEQ ID NO: 11333 - DNA, 19 bp, Homo sapiens
  siRNA target sequence for SIX4 (NM_017420.1,1911-1929).
cactaactatgcaactctt

SEQ ID NO: 11334 - DNA, 19 bp, Homo sapiens
  siRNA target sequence for SIX4 (NM_017420.1,1932-1950).
gaactgctcccttattact

SEQ ID NO: 11335 - DNA, 19 bp, Homo sapiens
  siRNA target sequence for SIX4 (NM_017420.1,2061-2079).
ccaagaacatcgtttggtt

SEQ ID NO: 11336 - DNA, 19 bp, Homo sapiens
  siRNA target sequence for SIX4 (NM_017420.1,2083-2101).
caatcggtagctaacatga

SEQ ID NO: 11337 - DNA, 19 bp, Homo sapiens
  siRNA target sequence for SIX4 (NM_017420.1,2092-2110).
gctaacatgaaagagaatt

SEQ ID NO: 11338 - DNA, 19 bp, Homo sapiens
  siRNA target sequence for SIX4 (NM_017420.1,2093-2111).
ctaacatgaaagagaattt

SEQ ID NO: 11339 - DNA, 19 bp, Homo sapiens
  siRNA target sequence for SIX4 (NM_017420.1,2130-2148).
caaagcaacaagtagctta

SEQ ID NO: 11340 - DNA, 19 bp, Homo sapiens
  siRNA target sequence for SIX4 (NM_017420.1,2251-2269).
gtccagctggatgaagata

SEQ ID NO: 11341 - DNA, 19 bp, Homo sapiens
  siRNA target sequence for SIX6 (NM_007374.1,102-120).
cagctgcccatcttgaatt

SEQ ID NO: 11342 - DNA, 19 bp, Homo sapiens
  siRNA target sequence for SIX6 (NM_007374.1,293-311).
ctaccgcgagctctatcat

SEQ ID NO: 11343 - DNA, 19 bp, Homo sapiens
  siRNA target sequence for SIX6 (NM_007374.1,298-316).
gcgagctctatcatatcct

SEQ ID NO: 11344 - DNA, 19 bp, Homo sapiens
  siRNA target sequence for SLC26A10 (NM_133489.1,2715-2733).
ccagatcagctgtttgtga

SEQ ID NO: 11345 - DNA, 19 bp, Homo sapiens
  siRNA target sequence for SLC26A3 (NM_000111.1,191-209).
gaaccctttgggaatcagt

SEQ ID NO: 11346 - DNA, 19 bp, Homo sapiens
  siRNA target sequence for SLC26A3 (NM_000111.1,217-235).
ggccaggccagtgtattct

SEQ ID NO: 11347 - DNA, 19 bp, Homo sapiens
  siRNA target sequence for SLC26A3 (NM_000111.1,242-260).
gcttttgaggaaaatcata

SEQ ID NO: 11348 - DNA, 19 bp, Homo sapiens
  siRNA target sequence for SLC26A3 (NM_000111.1,243-261).
cttttgaggaaaatcataa

SEQ ID NO: 11349 - DNA, 19 bp, Homo sapiens
  siRNA target sequence for SLC26A3 (NM_000111.1,290-308).
ctggatcatctcaaagtgt

SEQ ID NO: 11350 - DNA, 19 bp, Homo sapiens
  siRNA target sequence for SLC26A3 (NM_000111.1,296-314).
catctcaaagtgtgttgta

SEQ ID NO: 11351 - DNA, 19 bp, Homo sapiens
  siRNA target sequence for SLC26A3 (NM_000111.1,323-341).
ccacaaaaggccaagagaa

SEQ ID NO: 11352 - DNA, 19 bp, Homo sapiens
  siRNA target sequence for SLC26A3 (NM_000111.1,324-342).
cacaaaaggccaagagaat

SEQ ID NO: 11353 - DNA, 19 bp, Homo sapiens
  siRNA target sequence for SLC26A3 (NM_000111.1,376-394).
gccagcataccggcttaaa

SEQ ID NO: 11354 - DNA, 19 bp, Homo sapiens
  siRNA target sequence for SLC26A3 (NM_000111.1,378-396).
cagcataccggcttaaaga

SEQ ID NO: 11355 - DNA, 19 bp, Homo sapiens
  siRNA target sequence for SLC26A3 (NM_000111.1,380-398).
gcataccggcttaaagaat

SEQ ID NO: 11356 - DNA, 19 bp, Homo sapiens
  siRNA target sequence for SLC26A3 (NM_000111.1,395-413).
gaatggttgctcagtgata

SEQ ID NO: 11357 - DNA, 19 bp, Homo sapiens
  siRNA target sequence for SLC26A3 (NM_000111.1,399-417).
ggttgctcagtgatattgt

SEQ ID NO: 11358 - DNA, 19 bp, Homo sapiens
  siRNA target sequence for SLC26A3 (NM_000111.1,435-453).
ggattgtggccgtactaca

SEQ ID NO: 11359 - DNA, 19 bp, Homo sapiens
  siRNA target sequence for SLC26A3 (NM_000111.1,436-454).
gattgtggccgtactacaa

SEQ ID NO: 11360 - DNA, 19 bp, Homo sapiens
  siRNA target sequence for SLC26A3 (NM_000111.1,442-460).
ggccgtactacaaggttta

SEQ ID NO: 11361 - DNA, 19 bp, Homo sapiens
  siRNA target sequence for SLC26A3 (NM_000111.1,445-463).
cgtactacaaggtttagca

SEQ ID NO: 11362 - DNA, 19 bp, Homo sapiens
  siRNA target sequence for SLC26A3 (NM_000111.1,446-464).
gtactacaaggtttagcat

SEQ ID NO: 11363 - DNA, 19 bp, Homo sapiens
  siRNA target sequence for SLC26A3 (NM_000111.1,478-496).
cgacattcccccagtctat

SEQ ID NO: 11364 - DNA, 19 bp, Homo sapiens
  siRNA target sequence for SLC26A3 (NM_000111.1,487-505).
cccagtctatgggttgtat

SEQ ID NO: 11365 - DNA, 19 bp, Homo sapiens
  siRNA target sequence for SLC26A3 (NM_000111.1,491-509).
gtctatgggttgtatgcat

SEQ ID NO: 11366 - DNA, 19 bp, Homo sapiens
  siRNA target sequence for SLC26A3 (NM_000111.1,497-515).
gggttgtatgcatcctttt

SEQ ID NO: 11367 - DNA, 19 bp, Homo sapiens
  siRNA target sequence for SLC26A3 (NM_000111.1,498-516).
ggttgtatgcatccttttt

SEQ ID NO: 11368 - DNA, 19 bp, Homo sapiens
  siRNA target sequence for SLC26A3 (NM_000111.1,518-536).
ccagccataatctaccttt

SEQ ID NO: 11369 - DNA, 19 bp, Homo sapiens
  siRNA target sequence for SLC26A3 (NM_000111.1,519-537).
cagccataatctacctttt

SEQ ID NO: 11370 - DNA, 19 bp, Homo sapiens
  siRNA target sequence for SLC26A3 (NM_000111.1,566-584).
ggtccgtttccgattctga

SEQ ID NO: 11371 - DNA, 19 bp, Homo sapiens
  siRNA target sequence for SLC26A3 (NM_000111.1,592-610).
ggtgggactagcagtttca

SEQ ID NO: 11372 - DNA, 19 bp, Homo sapiens
  siRNA target sequence for SLC26A3 (NM_000111.1,629-647).
gtcccagatcgcaatgcaa

SEQ ID NO: 11373 - DNA, 19 bp, Homo sapiens
  siRNA target sequence for SLC26A3 (NM_000111.1,651-669).
ctttgggattgcctaacaa

SEQ ID NO: 11374 - DNA, 19 bp, Homo sapiens
  siRNA target sequence for SLC26A3 (NM_000111.1,661-679).
gcctaacaactcgaataat

SEQ ID NO: 11375 - DNA, 19 bp, Homo sapiens
  siRNA target sequence for SLC26A3 (NM_000111.1,662-680).
cctaacaactcgaataatt

SEQ ID NO: 11376 - DNA, 19 bp, Homo sapiens
  siRNA target sequence for SLC26A3 (NM_000111.1,667-685).
caactcgaataattcttca

SEQ ID NO: 11377 - DNA, 19 bp, Homo sapiens
  siRNA target sequence for SLC26A3 (NM_000111.1,670-688).
ctcgaataattcttcacta

SEQ ID NO: 11378 - DNA, 19 bp, Homo sapiens
  siRNA target sequence for SLC26A3 (NM_000111.1,765-783).
ggattctgcggattggatt

SEQ ID NO: 11379 - DNA, 19 bp, Homo sapiens
  siRNA target sequence for SLC26A3 (NM_000111.1,766-784).
gattctgcggattggattt

SEQ ID NO: 11380 - DNA, 19 bp, Homo sapiens
  siRNA target sequence for SLC26A3 (NM_000111.1,774-792).
ggattggatttgtagtgat

SEQ ID NO: 11381 - DNA, 19 bp, Homo sapiens
  siRNA target sequence for SLC26A3 (NM_000111.1,932-950).
gtattctcacaaatagaga

SEQ ID NO: 11382 - DNA, 19 bp, Homo sapiens
  siRNA target sequence for SLC26A3 (NM_000111.1,994-1012).
ggttgtatccattgttaaa

SEQ ID NO: 11383 - DNA, 19 bp, Homo sapiens
  siRNA target sequence for SLC26A3 (NM_000111.1,1046-1064).
gtgcccattccaatcgaat

SEQ ID NO: 11384 - DNA, 19 bp, Homo sapiens
  siRNA target sequence for SLC26A3 (NM_000111.1,1049-1067).
cccattccaatcgaattca

SEQ ID NO: 11385 - DNA, 19 bp, Homo sapiens
  siRNA target sequence for SLC26A3 (NM_000111.1,1050-1068).
ccattccaatcgaattcat

SEQ ID NO: 11386 - DNA, 19 bp, Homo sapiens
  siRNA target sequence for SLC26A3 (NM_000111.1,1051-1069).
cattccaatcgaattcatt

SEQ ID NO: 11387 - DNA, 19 bp, Homo sapiens
  siRNA target sequence for SLC26A3 (NM_000111.1,1055-1073).
ccaatcgaattcattatga

SEQ ID NO: 11388 - DNA, 19 bp, Homo sapiens
  siRNA target sequence for SLC26A3 (NM_000111.1,1095-1113).
cctacggctgtgactttaa

SEQ ID NO: 11389 - DNA, 19 bp, Homo sapiens
  siRNA target sequence for SLC26A3 (NM_000111.1,1096-1114).
ctacggctgtgactttaaa

SEQ ID NO: 11390 - DNA, 19 bp, Homo sapiens
  siRNA target sequence for SLC26A3 (NM_000111.1,1154-1172).
ggatttcagccccctatta

SEQ ID NO: 11391 - DNA, 19 bp, Homo sapiens
  siRNA target sequence for SLC26A3 (NM_000111.1,1178-1196).
gacgtggagactttccaaa

SEQ ID NO: 11392 - DNA, 19 bp, Homo sapiens
  siRNA target sequence for SLC26A3 (NM_000111.1,1213-1231).
cttcggcatcgcaatggtt

SEQ ID NO: 11393 - DNA, 19 bp, Homo sapiens
  siRNA target sequence for SLC26A3 (NM_000111.1,1218-1236).
gcatcgcaatggttgcatt

SEQ ID NO: 11394 - DNA, 19 bp, Homo sapiens
  siRNA target sequence for SLC26A3 (NM_000111.1,1219-1237).
catcgcaatggttgcattt

SEQ ID NO: 11395 - DNA, 19 bp, Homo sapiens
  siRNA target sequence for SLC26A3 (NM_000111.1,1222-1240).
cgcaatggttgcatttgca

SEQ ID NO: 11396 - DNA, 19 bp, Homo sapiens
  siRNA target sequence for SLC26A3 (NM_000111.1,1260-1278).
gcgtctattccctcaaata

SEQ ID NO: 11397 - DNA, 19 bp, Homo sapiens
  siRNA target sequence for SLC26A3 (NM_000111.1,1264-1282).
ctattccctcaaatacgat

SEQ ID NO: 11398 - DNA, 19 bp, Homo sapiens
  siRNA target sequence for SLC26A3 (NM_000111.1,1292-1310).
gatggcaatcaggagttaa

SEQ ID NO: 11399 - DNA, 19 bp, Homo sapiens
  siRNA target sequence for SLC26A3 (NM_000111.1,1319-1337).
ggactgggtaacatagtct

SEQ ID NO: 11400 - DNA, 19 bp, Homo sapiens
  siRNA target sequence for SLC26A3 (NM_000111.1,1417-1435).
gattgctgggcttattggt

SEQ ID NO: 11401 - DNA, 19 bp, Homo sapiens
  siRNA target sequence for SLC26A3 (NM_000111.1,1454-1472).
gtcgttctagccattggat

SEQ ID NO: 11402 - DNA, 19 bp, Homo sapiens
  siRNA target sequence for SLC26A3 (NM_000111.1,1456-1474).
cgttctagccattggattt

SEQ ID NO: 11403 - DNA, 19 bp, Homo sapiens
  siRNA target sequence for SLC26A3 (NM_000111.1,1478-1496).
ctggcgcctctacaaaagt

SEQ ID NO: 11404 - DNA, 19 bp, Homo sapiens
  siRNA target sequence for SLC26A3 (NM_000111.1,1550-1568).
gctgaaataggcagattgt

SEQ ID NO: 11405 - DNA, 19 bp, Homo sapiens
  siRNA target sequence for SLC26A3 (NM_000111.1,1569-1587).
ggcgaaaggacaaatatga

SEQ ID NO: 11406 - DNA, 19 bp, Homo sapiens
  siRNA target sequence for SLC26A3 (NM_000111.1,1650-1668).
cagctagtgtggcatttca

SEQ ID NO: 11407 - DNA, 19 bp, Homo sapiens
  siRNA target sequence for SLC26A3 (NM_000111.1,1653-1671).
ctagtgtggcatttcaact

SEQ ID NO: 11408 - DNA, 19 bp, Homo sapiens
  siRNA target sequence for SLC26A3 (NM_000111.1,1662-1680).
catttcaactgctaaccat

SEQ ID NO: 11409 - DNA, 19 bp, Homo sapiens
  siRNA target sequence for SLC26A3 (NM_000111.1,1681-1699).
cgtgttcaggacccaattt

SEQ ID NO: 11410 - DNA, 19 bp, Homo sapiens
  siRNA target sequence for SLC26A3 (NM_000111.1,1707-1725).
gcagcacgctggctaatat

SEQ ID NO: 11411 - DNA, 19 bp, Homo sapiens
  siRNA target sequence for SLC26A3 (NM_000111.1,1711-1729).
cacgctggctaatattgga

SEQ ID NO: 11412 - DNA, 19 bp, Homo sapiens
  siRNA target sequence for SLC26A3 (NM_000111.1,1727-1745).
ggaagaaccaacatctata

SEQ ID NO: 11413 - DNA, 19 bp, Homo sapiens
  siRNA target sequence for SLC26A3 (NM_000111.1,1734-1752).
ccaacatctataagaataa

SEQ ID NO: 11414 - DNA, 19 bp, Homo sapiens
  siRNA target sequence for SLC26A3 (NM_000111.1,1800-1818).
gatgtccatctcctatcta

SEQ ID NO: 11415 - DNA, 19 bp, Homo sapiens
  siRNA target sequence for SLC26A3 (NM_000111.1,1803-1821).
gtccatctcctatctactt

SEQ ID NO: 11416 - DNA, 19 bp, Homo sapiens
  siRNA target sequence for SLC26A3 (NM_000111.1,1855-1873).
cgatgctgttggctttagt

SEQ ID NO: 11417 - DNA, 19 bp, Homo sapiens
  siRNA target sequence for SLC26A3 (NM_000111.1,1866-1884).
gctttagtccacttcgaat

SEQ ID NO: 11418 - DNA, 19 bp, Homo sapiens
  siRNA target sequence for SLC26A3 (NM_000111.1,1867-1885).
ctttagtccacttcgaatt

SEQ ID NO: 11419 - DNA, 19 bp, Homo sapiens
  siRNA target sequence for SLC26A3 (NM_000111.1,1889-1907).
cgcaagcgcaacaaagctt

SEQ ID NO: 11420 - DNA, 19 bp, Homo sapiens
  siRNA target sequence for SLC26A3 (NM_000111.1,1890-1908).
gcaagcgcaacaaagcttt

SEQ ID NO: 11421 - DNA, 19 bp, Homo sapiens
  siRNA target sequence for SLC26A3 (NM_000111.1,1942-1960).
gctacaagtgacaccaaaa

SEQ ID NO: 11422 - DNA, 19 bp, Homo sapiens
  siRNA target sequence for SLC26A3 (NM_000111.1,1951-1969).
gacaccaaaaggatttata

SEQ ID NO: 11423 - DNA, 19 bp, Homo sapiens
  siRNA target sequence for SLC26A3 (NM_000111.1,1999-2017).
cgaagagctggacaacaat

SEQ ID NO: 11424 - DNA, 19 bp, Homo sapiens
  siRNA target sequence for SLC26A3 (NM_000111.1,2005-2023).
gctggacaacaatcagata

SEQ ID NO: 11425 - DNA, 19 bp, Homo sapiens
  siRNA target sequence for SLC26A3 (NM_000111.1,2030-2048).
ctggaccagccaatcaata

SEQ ID NO: 11426 - DNA, 19 bp, Homo sapiens
  siRNA target sequence for SLC26A3 (NM_000111.1,2148-2166).
cagtgtcctttcttgatgt

SEQ ID NO: 11427 - DNA, 19 bp, Homo sapiens
  siRNA target sequence for SLC26A3 (NM_000111.1,2174-2192).
gtgaggggccttaaatcga

SEQ ID NO: 11428 - DNA, 19 bp, Homo sapiens
  siRNA target sequence for SLC26A3 (NM_000111.1,2176-2194).
gaggggccttaaatcgatt

SEQ ID NO: 11429 - DNA, 19 bp, Homo sapiens
  siRNA target sequence for SLC26A3 (NM_000111.1,2178-2196).
ggggccttaaatcgatttt

SEQ ID NO: 11430 - DNA, 19 bp, Homo sapiens
  siRNA target sequence for SLC26A3 (NM_000111.1,2181-2199).
gccttaaatcgattttgca

SEQ ID NO: 11431 - DNA, 19 bp, Homo sapiens
  siRNA target sequence for SLC26A3 (NM_000111.1,2190-2208).
cgattttgcaagaatttat

SEQ ID NO: 11432 - DNA, 19 bp, Homo sapiens
  siRNA target sequence for SLC26A3 (NM_000111.1,2211-2229).
ggatcaaggtagatgtgta

SEQ ID NO: 11433 - DNA, 19 bp, Homo sapiens
  siRNA target sequence for SLC26A3 (NM_000111.1,2218-2236).
ggtagatgtgtatatcgtt

SEQ ID NO: 11434 - DNA, 19 bp, Homo sapiens
  siRNA target sequence for SLC26A3 (NM_000111.1,2227-2245).
gtatatcgttggaactgat

SEQ ID NO: 11435 - DNA, 19 bp, Homo sapiens
  siRNA target sequence for SLC26A3 (NM_000111.1,2260-2278).
gaagcttaaccggtatgaa

SEQ ID NO: 11436 - DNA, 19 bp, Homo sapiens
  siRNA target sequence for SLC26A3 (NM_000111.1,2263-2281).
gcttaaccggtatgaattt

SEQ ID NO: 11437 - DNA, 19 bp, Homo sapiens
  siRNA target sequence for SLC26A3 (NM_000111.1,2269-2287).
ccggtatgaattttttgat

SEQ ID NO: 11438 - DNA, 19 bp, Homo sapiens
  siRNA target sequence for SLC26A3 (NM_000111.1,2291-2309).
gaagtgaaaagctcaatat

SEQ ID NO: 11439 - DNA, 19 bp, Homo sapiens
  siRNA target sequence for SLC26A3 (NM_000111.1,2319-2337).
caatccatgatgctgtttt

SEQ ID NO: 11440 - DNA, 19 bp, Homo sapiens
  siRNA target sequence for SLC26A3 (NM_000111.1,2357-2375).
gattacagtacttcaaagt

SEQ ID NO: 11441 - DNA, 19 bp, Homo sapiens
  siRNA target sequence for SLC26A3 (NM_000111.1,2400-2418).
gaaaaattgattttaccat

SEQ ID NO: 11442 - DNA, 19 bp, Homo sapiens
  siRNA target sequence for SLC26A3 (NM_000111.1,2424-2442).
caaatggaggattacgtaa

SEQ ID NO: 11443 - DNA, 19 bp, Homo sapiens
  siRNA target sequence for SLC2A4RG (NM_020062.3,587-605).
gaggcagcccactttctgt

SEQ ID NO: 11444 - DNA, 19 bp, Homo sapiens
  siRNA target sequence for SLC30A9 (NM_006345.2,223-241).
cgccaggagtggcagaatt

SEQ ID NO: 11445 - DNA, 19 bp, Homo sapiens
  siRNA target sequence for SLC30A9 (NM_006345.2,224-242).
gccaggagtggcagaattt

SEQ ID NO: 11446 - DNA, 19 bp, Homo sapiens
  siRNA target sequence for SLC30A9 (NM_006345.2,225-243).
ccaggagtggcagaattta

SEQ ID NO: 11447 - DNA, 19 bp, Homo sapiens
  siRNA target sequence for SLC30A9 (NM_006345.2,229-247).
gagtggcagaatttagtga

SEQ ID NO: 11448 - DNA, 19 bp, Homo sapiens
  siRNA target sequence for SLC30A9 (NM_006345.2,275-293).
cctgtagtcatccatatat

SEQ ID NO: 11449 - DNA, 19 bp, Homo sapiens
  siRNA target sequence for SLC30A9 (NM_006345.2,276-294).
ctgtagtcatccatatatt

SEQ ID NO: 11450 - DNA, 19 bp, Homo sapiens
  siRNA target sequence for SLC30A9 (NM_006345.2,295-313).
ggtaccctgagtcaagtaa

SEQ ID NO: 11451 - DNA, 19 bp, Homo sapiens
  siRNA target sequence for SLC30A9 (NM_006345.2,296-314).
gtaccctgagtcaagtaaa

SEQ ID NO: 11452 - DNA, 19 bp, Homo sapiens
  siRNA target sequence for SLC30A9 (NM_006345.2,439-457).
cctctccaagtaagagtta

SEQ ID NO: 11453 - DNA, 19 bp, Homo sapiens
  siRNA target sequence for SLC30A9 (NM_006345.2,454-472).
gttaaagcagtccttaaga

SEQ ID NO: 11454 - DNA, 19 bp, Homo sapiens
  siRNA target sequence for SLC30A9 (NM_006345.2,515-533).
ctggagtcagagcgataaa

SEQ ID NO: 11455 - DNA, 19 bp, Homo sapiens
  siRNA target sequence for SLC30A9 (NM_006345.2,520-538).
gtcagagcgataaatgagt

SEQ ID NO: 11456 - DNA, 19 bp, Homo sapiens
  siRNA target sequence for SLC30A9 (NM_006345.2,559-577).
ctagaacaacttcgaaaaa

SEQ ID NO: 11457 - DNA, 19 bp, Homo sapiens
  siRNA target sequence for SLC30A9 (NM_006345.2,586-604).
cgaagtccccatgaagata

SEQ ID NO: 11458 - DNA, 19 bp, Homo sapiens
  siRNA target sequence for SLC30A9 (NM_006345.2,590-608).
gtccccatgaagatactga

SEQ ID NO: 11459 - DNA, 19 bp, Homo sapiens
  siRNA target sequence for SLC30A9 (NM_006345.2,607-625).
gagtcttttactgtatact

SEQ ID NO: 11460 - DNA, 19 bp, Homo sapiens
  siRNA target sequence for SLC30A9 (NM_006345.2,643-661).
gcaaaatctttggaagttt

SEQ ID NO: 11461 - DNA, 19 bp, Homo sapiens
  siRNA target sequence for SLC30A9 (NM_006345.2,690-708).
gaaaaaattgcgtaaggaa

SEQ ID NO: 11462 - DNA, 19 bp, Homo sapiens
  siRNA target sequence for SLC30A9 (NM_006345.2,699-717).
gcgtaaggaagcagaaata

SEQ ID NO: 11463 - DNA, 19 bp, Homo sapiens
  siRNA target sequence for SLC30A9 (NM_006345.2,769-787).
gatttcttgggaaatacca

SEQ ID NO: 11464 - DNA, 19 bp, Homo sapiens
  siRNA target sequence for SLC30A9 (NM_006345.2,848-866).
caatttgcatcaatggatt

SEQ ID NO: 11465 - DNA, 19 bp, Homo sapiens
  siRNA target sequence for SLC30A9 (NM_006345.2,863-881).
gattaaactgcttctttaa

SEQ ID NO: 11466 - DNA, 19 bp, Homo sapiens
  siRNA target sequence for SLC30A9 (NM_006345.2,902-920).
ccggttcagcaagtatgtt

SEQ ID NO: 11467 - DNA, 19 bp, Homo sapiens
  siRNA target sequence for SLC30A9 (NM_006345.2,904-922).
ggttcagcaagtatgttct

SEQ ID NO: 11468 - DNA, 19 bp, Homo sapiens
  siRNA target sequence for SLC30A9 (NM_006345.2,923-941).
cagaagctatacactcatt

SEQ ID NO: 11469 - DNA, 19 bp, Homo sapiens
  siRNA target sequence for SLC30A9 (NM_006345.2,925-943).
gaagctatacactcattat

SEQ ID NO: 11470 - DNA, 19 bp, Homo sapiens
  siRNA target sequence for SLC30A9 (NM_006345.2,929-947).
ctatacactcattatctga

SEQ ID NO: 11471 - DNA, 19 bp, Homo sapiens
  siRNA target sequence for SLC30A9 (NM_006345.2,1012-1030).
catccgtacggattttcaa

SEQ ID NO: 11472 - DNA, 19 bp, Homo sapiens
  siRNA target sequence for SLC30A9 (NM_006345.2,1015-1033).
ccgtacggattttcaaata

SEQ ID NO: 11473 - DNA, 19 bp, Homo sapiens
  siRNA target sequence for SLC30A9 (NM_006345.2,1016-1034).
cgtacggattttcaaatat

SEQ ID NO: 11474 - DNA, 19 bp, Homo sapiens
  siRNA target sequence for SLC30A9 (NM_006345.2,1077-1095).
gatgggtgcaggactatct

SEQ ID NO: 11475 - DNA, 19 bp, Homo sapiens
  siRNA target sequence for SLC30A9 (NM_006345.2,1119-1137).
gcttcatcctcaaccaata

SEQ ID NO: 11476 - DNA, 19 bp, Homo sapiens
  siRNA target sequence for SLC30A9 (NM_006345.2,1132-1150).
ccaatagaatcccttctat

SEQ ID NO: 11477 - DNA, 19 bp, Homo sapiens
  siRNA target sequence for SLC30A9 (NM_006345.2,1152-1170).
ggcatattgtattttagca

SEQ ID NO: 11478 - DNA, 19 bp, Homo sapiens
  siRNA target sequence for SLC30A9 (NM_006345.2,1243-1261).
ggaatgtcattttacaagt

SEQ ID NO: 11479 - DNA, 19 bp, Homo sapiens
  siRNA target sequence for SLC30A9 (NM_006345.2,1274-1292).
gtcgtgatcctagtacaaa

SEQ ID NO: 11480 - DNA, 19 bp, Homo sapiens
  siRNA target sequence for SLC30A9 (NM_006345.2,1282-1300).
cctagtacaaatgtgatat

SEQ ID NO: 11481 - DNA, 19 bp, Homo sapiens
  siRNA target sequence for SLC30A9 (NM_006345.2,1318-1336).
gcagtcttgggagttataa

SEQ ID NO: 11482 - DNA, 19 bp, Homo sapiens
  siRNA target sequence for SLC30A9 (NM_006345.2,1353-1371).
gggccttacttctataaca

SEQ ID NO: 11483 - DNA, 19 bp, Homo sapiens
  siRNA target sequence for SLC30A9 (NM_006345.2,1370-1388).
caggcaatccactgtatga

SEQ ID NO: 11484 - DNA, 19 bp, Homo sapiens
  siRNA target sequence for SLC30A9 (NM_006345.2,1404-1422).
gggtgtgggcaccttatta

SEQ ID NO: 11485 - DNA, 19 bp, Homo sapiens
  siRNA target sequence for SLC30A9 (NM_006345.2,1440-1458).
cctcatctacactaacaca

SEQ ID NO: 11486 - DNA, 19 bp, Homo sapiens
  siRNA target sequence for SLC30A9 (NM_006345.2,1532-1550).
cagtaagggcaattcatga

SEQ ID NO: 11487 - DNA, 19 bp, Homo sapiens
  siRNA target sequence for SLC30A9 (NM_006345.2,1538-1556).
gggcaattcatgatgttaa

SEQ ID NO: 11488 - DNA, 19 bp, Homo sapiens
  siRNA target sequence for SLC30A9 (NM_006345.2,1560-1578).
cacagatctgggattaggt

SEQ ID NO: 11489 - DNA, 19 bp, Homo sapiens
  siRNA target sequence for SLC30A9 (NM_006345.2,1567-1585).
ctgggattaggtaaagtaa

SEQ ID NO: 11490 - DNA, 19 bp, Homo sapiens
  siRNA target sequence for SLC30A9 (NM_006345.2,1569-1587).
gggattaggtaaagtaaga

SEQ ID NO: 11491 - DNA, 19 bp, Homo sapiens
  siRNA target sequence for SLC30A9 (NM_006345.2,1570-1588).
ggattaggtaaagtaagat

SEQ ID NO: 11492 - DNA, 19 bp, Homo sapiens
  siRNA target sequence for SLC30A9 (NM_006345.2,1571-1589).
gattaggtaaagtaagatt

SEQ ID NO: 11493 - DNA, 19 bp, Homo sapiens
  siRNA target sequence for SLC30A9 (NM_006345.2,1612-1630).
gggcgagttgttacaagat

SEQ ID NO: 11494 - DNA, 19 bp, Homo sapiens
  siRNA target sequence for SLC30A9 (NM_006345.2,1614-1632).
gcgagttgttacaagatca

SEQ ID NO: 11495 - DNA, 19 bp, Homo sapiens
  siRNA target sequence for SLC30A9 (NM_006345.2,1616-1634).
gagttgttacaagatcata

SEQ ID NO: 11496 - DNA, 19 bp, Homo sapiens
  siRNA target sequence for SLC30A9 (NM_006345.2,1618-1636).
gttgttacaagatcatatt

SEQ ID NO: 11497 - DNA, 19 bp, Homo sapiens
  siRNA target sequence for SLC30A9 (NM_006345.2,1654-1672).
gaccaaatgttacaagaaa

SEQ ID NO: 11498 - DNA, 19 bp, Homo sapiens
  siRNA target sequence for SLC30A9 (NM_006345.2,1693-1711).
gaagaactagagaccttta

SEQ ID NO: 11499 - DNA, 19 bp, Homo sapiens
  siRNA target sequence for SLC30A9 (NM_006345.2,1699-1717).
ctagagacctttatgctta

SEQ ID NO: 11500 - DNA, 19 bp, Homo sapiens
  siRNA target sequence for SLC30A9 (NM_006345.2,1704-1722).
gacctttatgcttaaacat

SEQ ID NO: 11501 - DNA, 19 bp, Homo sapiens
  siRNA target sequence for SLC30A9 (NM_006345.2,1748-1766).
gagctgaagtagatagact

SEQ ID NO: 11502 - DNA, 19 bp, Homo sapiens
  siRNA target sequence for SLC30A9 (NM_006345.2,1793-1811).
ctgaagttcgacatgtaga

SEQ ID NO: 11503 - DNA, 19 bp, Homo sapiens
  siRNA target sequence for SLC30A9 (NM_006345.2,1795-1813).
gaagttcgacatgtagatt

SEQ ID NO: 11504 - DNA, 19 bp, Homo sapiens
  siRNA target sequence for SLC34A3 (NM_080877.1,1257-1275).
cgtgaggacagtcatcaat

SEQ ID NO: 11505 - DNA, 19 bp, Homo sapiens
  siRNA target sequence for SLC38A2 (NM_018976.3,354-372).
cgaaatgggacgattcagt

SEQ ID NO: 11506 - DNA, 19 bp, Homo sapiens
  siRNA target sequence for SLC38A2 (NM_018976.3,355-373).
gaaatgggacgattcagta

SEQ ID NO: 11507 - DNA, 19 bp, Homo sapiens
  siRNA target sequence for SLC38A2 (NM_018976.3,404-422).
gttccaacagcgacttcaa

SEQ ID NO: 11508 - DNA, 19 bp, Homo sapiens
  siRNA target sequence for SLC38A2 (NM_018976.3,479-497).
ctgaaaaccagaacttttt

SEQ ID NO: 11509 - DNA, 19 bp, Homo sapiens
  siRNA target sequence for SLC38A2 (NM_018976.3,605-623).
gaatccttgggctttctta

SEQ ID NO: 11510 - DNA, 19 bp, Homo sapiens
  siRNA target sequence for SLC38A2 (NM_018976.3,686-704).
ccctgtattctgttcatct

SEQ ID NO: 11511 - DNA, 19 bp, Homo sapiens
  siRNA target sequence for SLC38A2 (NM_018976.3,724-742).
gaaggagggtctttattat

SEQ ID NO: 11512 - DNA, 19 bp, Homo sapiens
  siRNA target sequence for SLC38A2 (NM_018976.3,728-746).
gagggtctttattatatga

SEQ ID NO: 11513 - DNA, 19 bp, Homo sapiens
  siRNA target sequence for SLC38A2 (NM_018976.3,732-750).
gtctttattatatgaacaa

SEQ ID NO: 11514 - DNA, 19 bp, Homo sapiens
  siRNA target sequence for SLC38A2 (NM_018976.3,734-752).
ctttattatatgaacaatt

SEQ ID NO: 11515 - DNA, 19 bp, Homo sapiens
  siRNA target sequence for SLC38A2 (NM_018976.3,787-805).
gcagcatctggatcaatta

SEQ ID NO: 11516 - DNA, 19 bp, Homo sapiens
  siRNA target sequence for SLC38A2 (NM_018976.3,830-848).
caagctacctcttcatagt

SEQ ID NO: 11517 - DNA, 19 bp, Homo sapiens
  siRNA target sequence for SLC38A2 (NM_018976.3,837-855).
cctcttcatagtgaaatat

SEQ ID NO: 11518 - DNA, 19 bp, Homo sapiens
  siRNA target sequence for SLC38A2 (NM_018976.3,868-886).
gtgatccaggcattaacga

SEQ ID NO: 11519 - DNA, 19 bp, Homo sapiens
  siRNA target sequence for SLC38A2 (NM_018976.3,873-891).
ccaggcattaacgaacatt

SEQ ID NO: 11520 - DNA, 19 bp, Homo sapiens
  siRNA target sequence for SLC38A2 (NM_018976.3,876-894).
ggcattaacgaacattgaa

SEQ ID NO: 11521 - DNA, 19 bp, Homo sapiens
  siRNA target sequence for SLC38A2 (NM_018976.3,878-896).
cattaacgaacattgaaga

SEQ ID NO: 11522 - DNA, 19 bp, Homo sapiens
  siRNA target sequence for SLC38A2 (NM_018976.3,912-930).
gtatctgaacgggaactat

SEQ ID NO: 11523 - DNA, 19 bp, Homo sapiens
  siRNA target sequence for SLC38A2 (NM_018976.3,918-936).
gaacgggaactatttggtt

SEQ ID NO: 11524 - DNA, 19 bp, Homo sapiens
  siRNA target sequence for SLC38A2 (NM_018976.3,923-941).
ggaactatttggttctgtt

SEQ ID NO: 11525 - DNA, 19 bp, Homo sapiens
  siRNA target sequence for SLC38A2 (NM_018976.3,964-982).
cctttgtcgctgtttagaa

SEQ ID NO: 11526 - DNA, 19 bp, Homo sapiens
  siRNA target sequence for SLC38A2 (NM_018976.3,1009-1027).
ggcctttccttgttgtgta

SEQ ID NO: 11527 - DNA, 19 bp, Homo sapiens
  siRNA target sequence for SLC38A2 (NM_018976.3,1095-1113).
gataattaacgaaacaata

SEQ ID NO: 11528 - DNA, 19 bp, Homo sapiens
  siRNA target sequence for SLC38A2 (NM_018976.3,1144-1162).
gtacctgctttgtcacata

SEQ ID NO: 11529 - DNA, 19 bp, Homo sapiens
  siRNA target sequence for SLC38A2 (NM_018976.3,1148-1166).
ctgctttgtcacataacgt

SEQ ID NO: 11530 - DNA, 19 bp, Homo sapiens
  siRNA target sequence for SLC38A2 (NM_018976.3,1157-1175).
cacataacgtgactgaaaa

SEQ ID NO: 11531 - DNA, 19 bp, Homo sapiens
  siRNA target sequence for SLC38A2 (NM_018976.3,1185-1203).
cagacctcactattttatt

SEQ ID NO: 11532 - DNA, 19 bp, Homo sapiens
  siRNA target sequence for SLC38A2 (NM_018976.3,1206-1224).
caactcacagactgtctat

SEQ ID NO: 11533 - DNA, 19 bp, Homo sapiens
  siRNA target sequence for SLC38A2 (NM_018976.3,1226-1244).
ctgtgccaattctgatctt

SEQ ID NO: 11534 - DNA, 19 bp, Homo sapiens
  siRNA target sequence for SLC38A2 (NM_018976.3,1230-1248).
gccaattctgatcttttca

SEQ ID NO: 11535 - DNA, 19 bp, Homo sapiens
  siRNA target sequence for SLC38A2 (NM_018976.3,1294-1312).
gaccgcagccgtagaagaa

SEQ ID NO: 11536 - DNA, 19 bp, Homo sapiens
  siRNA target sequence for SLC38A2 (NM_018976.3,1297-1315).
cgcagccgtagaagaatga

SEQ ID NO: 11537 - DNA, 19 bp, Homo sapiens
  siRNA target sequence for SLC38A2 (NM_018976.3,1298-1316).
gcagccgtagaagaatgat

SEQ ID NO: 11538 - DNA, 19 bp, Homo sapiens
  siRNA target sequence for SLC38A2 (NM_018976.3,1301-1319).
gccgtagaagaatgatgaa

SEQ ID NO: 11539 - DNA, 19 bp, Homo sapiens
  siRNA target sequence for SLC38A2 (NM_018976.3,1302-1320).
ccgtagaagaatgatgaat

SEQ ID NO: 11540 - DNA, 19 bp, Homo sapiens
  siRNA target sequence for SLC38A2 (NM_018976.3,1379-1397).
gatacctaacattttacga

SEQ ID NO: 11541 - DNA, 19 bp, Homo sapiens
  siRNA target sequence for SLC38A2 (NM_018976.3,1433-1451).
ctatcttgggaactgatat

SEQ ID NO: 11542 - DNA, 19 bp, Homo sapiens
  siRNA target sequence for SLC38A2 (NM_018976.3,1497-1515).
gacagtaccagtagttatt

SEQ ID NO: 11543 - DNA, 19 bp, Homo sapiens
  siRNA target sequence for SLC38A2 (NM_018976.3,1499-1517).
cagtaccagtagttatttt

SEQ ID NO: 11544 - DNA, 19 bp, Homo sapiens
  siRNA target sequence for SLC38A2 (NM_018976.3,1518-1536).
cccaatccggagttctgta

SEQ ID NO: 11545 - DNA, 19 bp, Homo sapiens
  siRNA target sequence for SLC38A2 (NM_018976.3,1519-1537).
ccaatccggagttctgtaa

SEQ ID NO: 11546 - DNA, 19 bp, Homo sapiens
  siRNA target sequence for SLC38A2 (NM_018976.3,1529-1547).
gttctgtaactcacttgtt

SEQ ID NO: 11547 - DNA, 19 bp, Homo sapiens
  siRNA target sequence for SLC38A2 (NM_018976.3,1542-1560).
cttgttgtgtgcatcaaaa

SEQ ID NO: 11548 - DNA, 19 bp, Homo sapiens
  siRNA target sequence for SLC38A2 (NM_018976.3,1566-1584).
cagttggtggcgtcatagt

SEQ ID NO: 11549 - DNA, 19 bp, Homo sapiens
  siRNA target sequence for SLC38A2 (NM_018976.3,1572-1590).
gtggcgtcatagtctcatt

SEQ ID NO: 11550 - DNA, 19 bp, Homo sapiens
  siRNA target sequence for SLC38A2 (NM_018976.3,1575-1593).
gcgtcatagtctcattaca

SEQ ID NO: 11551 - DNA, 19 bp, Homo sapiens
  siRNA target sequence for SLC38A2 (NM_018976.3,1585-1603).
ctcattacagtgtctatct

SEQ ID NO: 11552 - DNA, 19 bp, Homo sapiens
  siRNA target sequence for SLC38A2 (NM_018976.3,1594-1612).
gtgtctatcttggcattta

SEQ ID NO: 11553 - DNA, 19 bp, Homo sapiens
  siRNA target sequence for SLC38A2 (NM_018976.3,1636-1654).
ccaactattagggatatct

SEQ ID NO: 11554 - DNA, 19 bp, Homo sapiens
  siRNA target sequence for SLC38A2 (NM_018976.3,1731-1749).
gaaagaacctatgaaatct

SEQ ID NO: 11555 - DNA, 19 bp, Homo sapiens
  siRNA target sequence for SLC38A2 (NM_018976.3,1803-1821).
cggaagcatggccttgatt

SEQ ID NO: 11556 - DNA, 19 bp, Homo sapiens
  siRNA target sequence for SLC38A6 (NM_153811.1,236-254).
gcgatccccaggtgtttca

SEQ ID NO: 11557 - DNA, 19 bp, Homo sapiens
  siRNA target sequence for SLC38A6 (NM_153811.1,237-255).
cgatccccaggtgtttcat

SEQ ID NO: 11558 - DNA, 19 bp, Homo sapiens
  siRNA target sequence for SLC38A6 (NM_153811.1,238-256).
gatccccaggtgtttcatt

SEQ ID NO: 11559 - DNA, 19 bp, Homo sapiens
  siRNA target sequence for SLC38A6 (NM_153811.1,258-276).
ggtttatcagtgtttaatt

SEQ ID NO: 11560 - DNA, 19 bp, Homo sapiens
  siRNA target sequence for SLC38A6 (NM_153811.1,326-344).
ggctaataccggtgtcttt

SEQ ID NO: 11561 - DNA, 19 bp, Homo sapiens
  siRNA target sequence for SLC38A6 (NM_153811.1,393-411).
gtccatcttctgcttagta

SEQ ID NO: 11562 - DNA, 19 bp, Homo sapiens
  siRNA target sequence for SLC38A6 (NM_153811.1,399-417).
cttctgcttagtatgtgta

SEQ ID NO: 11563 - DNA, 19 bp, Homo sapiens
  siRNA target sequence for SLC38A6 (NM_153811.1,422-440).
gacagctgtaacatcttat

SEQ ID NO: 11564 - DNA, 19 bp, Homo sapiens
  siRNA target sequence for SLC38A6 (NM_153811.1,427-445).
ctgtaacatcttatgaaga

SEQ ID NO: 11565 - DNA, 19 bp, Homo sapiens
  siRNA target sequence for SLC38A6 (NM_153811.1,444-462).
gatcttggactctttgcat

SEQ ID NO: 11566 - DNA, 19 bp, Homo sapiens
  siRNA target sequence for SLC38A6 (NM_153811.1,488-506).
ggcaggcaccataataatt

SEQ ID NO: 11567 - DNA, 19 bp, Homo sapiens
  siRNA target sequence for SLC38A6 (NM_153811.1,492-510).
ggcaccataataattcaga

SEQ ID NO: 11568 - DNA, 19 bp, Homo sapiens
  siRNA target sequence for SLC38A6 (NM_153811.1,581-599).
gactggagactatagtaga

SEQ ID NO: 11569 - DNA, 19 bp, Homo sapiens
  siRNA target sequence for SLC38A6 (NM_153811.1,583-601).
ctggagactatagtagata

SEQ ID NO: 11570 - DNA, 19 bp, Homo sapiens
  siRNA target sequence for SLC38A6 (NM_153811.1,585-603).
ggagactatagtagatatt

SEQ ID NO: 11571 - DNA, 19 bp, Homo sapiens
  siRNA target sequence for SLC38A6 (NM_153811.1,612-630).
gatggacaaacactactaa

SEQ ID NO: 11572 - DNA, 19 bp, Homo sapiens
  siRNA target sequence for SLC38A6 (NM_153811.1,615-633).
ggacaaacactactaataa

SEQ ID NO: 11573 - DNA, 19 bp, Homo sapiens
  siRNA target sequence for SLC38A6 (NM_153811.1,616-634).
gacaaacactactaataat

SEQ ID NO: 11574 - DNA, 19 bp, Homo sapiens
  siRNA target sequence for SLC38A6 (NM_153811.1,728-746).
ctttgctcttgtggtaata

SEQ ID NO: 11575 - DNA, 19 bp, Homo sapiens
  siRNA target sequence for SLC38A6 (NM_153811.1,732-750).
gctcttgtggtaataatta

SEQ ID NO: 11576 - DNA, 19 bp, Homo sapiens
  siRNA target sequence for SLC38A6 (NM_153811.1,764-782).
cccttgtcctctgacatta

SEQ ID NO: 11577 - DNA, 19 bp, Homo sapiens
  siRNA target sequence for SLC38A6 (NM_153811.1,851-869).
ctccaaagagagtgcttat

SEQ ID NO: 11578 - DNA, 19 bp, Homo sapiens
  siRNA target sequence for SLC38A6 (NM_153811.1,917-935).
gcccatatactgtgaactt

SEQ ID NO: 11579 - DNA, 19 bp, Homo sapiens
  siRNA target sequence for SLC38A6 (NM_153811.1,979-997).
caattgctttaagttttct

SEQ ID NO: 11580 - DNA, 19 bp, Homo sapiens
  siRNA target sequence for SLC38A6 (NM_153811.1,1019-1037).
ctttgggtacctcactttt

SEQ ID NO: 11581 - DNA, 19 bp, Homo sapiens
  siRNA target sequence for SLC38A6 (NM_153811.1,1024-1042).
ggtacctcactttttatga

SEQ ID NO: 11582 - DNA, 19 bp, Homo sapiens
  siRNA target sequence for SLC38A6 (NM_153811.1,1056-1074).
gaattactaaaaggttata

SEQ ID NO: 11583 - DNA, 19 bp, Homo sapiens
  siRNA target sequence for SLC38A6 (NM_153811.1,1068-1086).
ggttatagtaaatacttat

SEQ ID NO: 11584 - DNA, 19 bp, Homo sapiens
  siRNA target sequence for SLC38A6 (NM_153811.1,1168-1186).
ccagaaaagctgtaacaat

SEQ ID NO: 11585 - DNA, 19 bp, Homo sapiens
  siRNA target sequence for SLC38A6 (NM_153811.1,1211-1229).
ctcatggattcgccatttt

SEQ ID NO: 11586 - DNA, 19 bp, Homo sapiens
  siRNA target sequence for SLC38A6 (NM_153811.1,1232-1250).
gatcactctagcactcaat

SEQ ID NO: 11587 - DNA, 19 bp, Homo sapiens
  siRNA target sequence for SLC38A6 (NM_153811.1,1235-1253).
cactctagcactcaatatt

SEQ ID NO: 11588 - DNA, 19 bp, Homo sapiens
  siRNA target sequence for SLC38A6 (NM_153811.1,1237-1255).
ctctagcactcaatattat

SEQ ID NO: 11589 - DNA, 19 bp, Homo sapiens
  siRNA target sequence for SLC38A6 (NM_153811.1,1247-1265).
caatattatcatcgtttta

SEQ ID NO: 11590 - DNA, 19 bp, Homo sapiens
  siRNA target sequence for SLC38A6 (NM_153811.1,1305-1323).
gtagttggtgccagtacat

SEQ ID NO: 11591 - DNA, 19 bp, Homo sapiens
  siRNA target sequence for SLC38A6 (NM_153811.1,1346-1364).
cccaggactattttatctt

SEQ ID NO: 11592 - DNA, 19 bp, Homo sapiens
  siRNA target sequence for SLC38A6 (NM_153811.1,1351-1369).
gactattttatcttaaact

SEQ ID NO: 11593 - DNA, 19 bp, Homo sapiens
  siRNA target sequence for SLC38A6 (NM_153811.1,1455-1473).
gcactcatcatttttgatt

SEQ ID NO: 11594 - DNA, 19 bp, Homo sapiens
  siRNA target sequence for SLC4A10 (NM_022058.2,160-178).
gaggtggaactcgttctat

SEQ ID NO: 11595 - DNA, 19 bp, Homo sapiens
  siRNA target sequence for SLC4A10 (NM_022058.2,163-181).
gtggaactcgttctattct

SEQ ID NO: 11596 - DNA, 19 bp, Homo sapiens
  siRNA target sequence for SLC4A10 (NM_022058.2,165-183).
ggaactcgttctattctca

SEQ ID NO: 11597 - DNA, 19 bp, Homo sapiens
  siRNA target sequence for SLC4A10 (NM_022058.2,166-184).
gaactcgttctattctcaa

SEQ ID NO: 11598 - DNA, 19 bp, Homo sapiens
  siRNA target sequence for SLC4A10 (NM_022058.2,213-231).
ggtcatcgaacactattta

SEQ ID NO: 11599 - DNA, 19 bp, Homo sapiens
  siRNA target sequence for SLC4A10 (NM_022058.2,214-232).
gtcatcgaacactatttat

SEQ ID NO: 11600 - DNA, 19 bp, Homo sapiens
  siRNA target sequence for SLC4A10 (NM_022058.2,278-296).
caggcatcgtggtcataaa

SEQ ID NO: 11601 - DNA, 19 bp, Homo sapiens
  siRNA target sequence for SLC4A10 (NM_022058.2,280-298).
ggcatcgtggtcataaaca

SEQ ID NO: 11602 - DNA, 19 bp, Homo sapiens
  siRNA target sequence for SLC4A10 (NM_022058.2,282-300).
catcgtggtcataaacaca

SEQ ID NO: 11603 - DNA, 19 bp, Homo sapiens
  siRNA target sequence for SLC4A10 (NM_022058.2,340-358).
gaagggagtcaccttcttt

SEQ ID NO: 11604 - DNA, 19 bp, Homo sapiens
  siRNA target sequence for SLC4A10 (NM_022058.2,374-392).
gagggtacagtttattctt

SEQ ID NO: 11605 - DNA, 19 bp, Homo sapiens
  siRNA target sequence for SLC4A10 (NM_022058.2,476-494).
cgctgagtggcgagaaaca

SEQ ID NO: 11606 - DNA, 19 bp, Homo sapiens
  siRNA target sequence for SLC4A10 (NM_022058.2,578-596).
cagcttgtttgaattgaga

SEQ ID NO: 11607 - DNA, 19 bp, Homo sapiens
  siRNA target sequence for SLC4A10 (NM_022058.2,584-602).
gtttgaattgagaagttgt

SEQ ID NO: 11608 - DNA, 19 bp, Homo sapiens
  siRNA target sequence for SLC4A10 (NM_022058.2,627-645).
gacatgcatgccaacactt

SEQ ID NO: 11609 - DNA, 19 bp, Homo sapiens
  siRNA target sequence for SLC4A10 (NM_022058.2,629-647).
catgcatgccaacacttta

SEQ ID NO: 11610 - DNA, 19 bp, Homo sapiens
  siRNA target sequence for SLC4A10 (NM_022058.2,688-706).
caggtcagctgaatgaaga

SEQ ID NO: 11611 - DNA, 19 bp, Homo sapiens
  siRNA target sequence for SLC4A10 (NM_022058.2,734-752).
gatgaaacagcatcatcat

SEQ ID NO: 11612 - DNA, 19 bp, Homo sapiens
  siRNA target sequence for SLC4A10 (NM_022058.2,876-894).
gctccagcctgtgttgaaa

SEQ ID NO: 11613 - DNA, 19 bp, Homo sapiens
  siRNA target sequence for SLC4A10 (NM_022058.2,978-996).
gctgaagcatcgaacatct

SEQ ID NO: 11614 - DNA, 19 bp, Homo sapiens
  siRNA target sequence for SLC4A10 (NM_022058.2,1016-1034).
cttggatcgaacagtagtt

SEQ ID NO: 11615 - DNA, 19 bp, Homo sapiens
  siRNA target sequence for SLC4A10 (NM_022058.2,1045-1063).
ggttgtctccagctgtatt

SEQ ID NO: 11616 - DNA, 19 bp, Homo sapiens
  siRNA target sequence for SLC4A10 (NM_022058.2,1212-1230).
gctaaagatcgtaatgact

SEQ ID NO: 11617 - DNA, 19 bp, Homo sapiens
  siRNA target sequence for SLC4A10 (NM_022058.2,1218-1236).
gatcgtaatgacttggtat

SEQ ID NO: 11618 - DNA, 19 bp, Homo sapiens
  siRNA target sequence for SLC4A10 (NM_022058.2,1229-1247).
cttggtatcaggaattgat

SEQ ID NO: 11619 - DNA, 19 bp, Homo sapiens
  siRNA target sequence for SLC4A10 (NM_022058.2,1288-1306).
gggatccaagcattcgaat

SEQ ID NO: 11620 - DNA, 19 bp, Homo sapiens
  siRNA target sequence for SLC4A10 (NM_022058.2,1346-1364).
gattcctgctgtaccaaat

SEQ ID NO: 11621 - DNA, 19 bp, Homo sapiens
  siRNA target sequence for SLC4A10 (NM_022058.2,1424-1442).
gcgaactggaaggattttt

SEQ ID NO: 11622 - DNA, 19 bp, Homo sapiens
  siRNA target sequence for SLC4A10 (NM_022058.2,1435-1453).
ggatttttgggggacttat

SEQ ID NO: 11623 - DNA, 19 bp, Homo sapiens
  siRNA target sequence for SLC4A10 (NM_022058.2,1443-1461).
gggggacttattttagata

SEQ ID NO: 11624 - DNA, 19 bp, Homo sapiens
  siRNA target sequence for SLC4A10 (NM_022058.2,1446-1464).
ggacttattttagatatca

SEQ ID NO: 11625 - DNA, 19 bp, Homo sapiens
  siRNA target sequence for SLC4A10 (NM_022058.2,1539-1557).
ctctactgcgcgtgtatgt

SEQ ID NO: 11626 - DNA, 19 bp, Homo sapiens
  siRNA target sequence for SLC4A10 (NM_022058.2,1541-1559).
ctactgcgcgtgtatgtct

SEQ ID NO: 11627 - DNA, 19 bp, Homo sapiens
  siRNA target sequence for SLC4A10 (NM_022058.2,1593-1611).
gcaactgaagggcgtataa

SEQ ID NO: 11628 - DNA, 19 bp, Homo sapiens
  siRNA target sequence for SLC4A10 (NM_022058.2,1643-1661).
gaccgggatagcctattct

SEQ ID NO: 11629 - DNA, 19 bp, Homo sapiens
  siRNA target sequence for SLC4A10 (NM_022058.2,1645-1663).
ccgggatagcctattctct

SEQ ID NO: 11630 - DNA, 19 bp, Homo sapiens
  siRNA target sequence for SLC4A10 (NM_022058.2,1669-1687).
gtggacagcctcttaccat

SEQ ID NO: 11631 - DNA, 19 bp, Homo sapiens
  siRNA target sequence for SLC4A10 (NM_022058.2,1671-1689).
ggacagcctcttaccatat

SEQ ID NO: 11632 - DNA, 19 bp, Homo sapiens
  siRNA target sequence for SLC4A10 (NM_022058.2,1672-1690).
gacagcctcttaccatatt

SEQ ID NO: 11633 - DNA, 19 bp, Homo sapiens
  siRNA target sequence for SLC4A10 (NM_022058.2,1752-1770).
gggctgtcatacctatctt

SEQ ID NO: 11634 - DNA, 19 bp, Homo sapiens
  siRNA target sequence for SLC4A10 (NM_022058.2,1792-1810).
ggactgcaactctatgtat

SEQ ID NO: 11635 - DNA, 19 bp, Homo sapiens
  siRNA target sequence for SLC4A10 (NM_022058.2,1798-1816).
caactctatgtatcatact

SEQ ID NO: 11636 - DNA, 19 bp, Homo sapiens
  siRNA target sequence for SLC4A10 (NM_022058.2,1801-1819).
ctctatgtatcatacttgt

SEQ ID NO: 11637 - DNA, 19 bp, Homo sapiens
  siRNA target sequence for SLC4A10 (NM_022058.2,1847-1865).
ctacatcactcggtttact

SEQ ID NO: 11638 - DNA, 19 bp, Homo sapiens
  siRNA target sequence for SLC4A10 (NM_022058.2,1850-1868).
catcactcggtttactgaa

SEQ ID NO: 11639 - DNA, 19 bp, Homo sapiens
  siRNA target sequence for SLC4A10 (NM_022058.2,1853-1871).
cactcggtttactgaagaa

SEQ ID NO: 11640 - DNA, 19 bp, Homo sapiens
  siRNA target sequence for SLC4A10 (NM_022058.2,1932-1950).
ctcagtgaagcatatccaa

SEQ ID NO: 11641 - DNA, 19 bp, Homo sapiens
  siRNA target sequence for SLC4A10 (NM_022058.2,1936-1954).
gtgaagcatatccaatcaa

SEQ ID NO: 11642 - DNA, 19 bp, Homo sapiens
  siRNA target sequence for SLC4A10 (NM_022058.2,1938-1956).
gaagcatatccaatcaaca

SEQ ID NO: 11643 - DNA, 19 bp, Homo sapiens
  siRNA target sequence for SLC4A10 (NM_022058.2,1948-1966).
caatcaacatgcataatga

SEQ ID NO: 11644 - DNA, 19 bp, Homo sapiens
  siRNA target sequence for SLC4A10 (NM_022058.2,1997-2015).
ctgtgtggaaccgcataat

SEQ ID NO: 11645 - DNA, 19 bp, Homo sapiens
  siRNA target sequence for SLC4A10 (NM_022058.2,2157-2175).
gttccagatgttctatttt

SEQ ID NO: 11646 - DNA, 19 bp, Homo sapiens
  siRNA target sequence for SLC4A10 (NM_022058.2,2189-2207).
gttcttttccacagttact

SEQ ID NO: 11647 - DNA, 19 bp, Homo sapiens
  siRNA target sequence for SLC4A10 (NM_022058.2,2284-2302).
ctgtctttcttacaattct

SEQ ID NO: 11648 - DNA, 19 bp, Homo sapiens
  siRNA target sequence for SLC4A10 (NM_022058.2,2286-2304).
gtctttcttacaattctgt

SEQ ID NO: 11649 - DNA, 19 bp, Homo sapiens
  siRNA target sequence for SLC4A10 (NM_022058.2,2305-2323).
gtatggttttaattgacta

SEQ ID NO: 11650 - DNA, 19 bp, Homo sapiens
  siRNA target sequence for SLC4A10 (NM_022058.2,2349-2367).
ctacaagtaccaagtgttt

SEQ ID NO: 11651 - DNA, 19 bp, Homo sapiens
  siRNA target sequence for SLC4A10 (NM_022058.2,2369-2387).
caagcccactagagatgat

SEQ ID NO: 11652 - DNA, 19 bp, Homo sapiens
  siRNA target sequence for SLC4A10 (NM_022058.2,2396-2414).
gtttgttacgcctttaggt

SEQ ID NO: 11653 - DNA, 19 bp, Homo sapiens
  siRNA target sequence for SLC4A10 (NM_022058.2,2429-2447).
gacagtaatagctgctata

SEQ ID NO: 11654 - DNA, 19 bp, Homo sapiens
  siRNA target sequence for SLC4A10 (NM_022058.2,2431-2449).
cagtaatagctgctataat

SEQ ID NO: 11655 - DNA, 19 bp, Homo sapiens
  siRNA target sequence for SLC4A10 (NM_022058.2,2546-2564).
gtaccatctggacctatta

SEQ ID NO: 11656 - DNA, 19 bp, Homo sapiens
  siRNA target sequence for SLC4A10 (NM_022058.2,2653-2671).
gcctaaaactggaatcaga

SEQ ID NO: 11657 - DNA, 19 bp, Homo sapiens
  siRNA target sequence for SLC4A10 (NM_022058.2,2655-2673).
ctaaaactggaatcagaat

SEQ ID NO: 11658 - DNA, 19 bp, Homo sapiens
  siRNA target sequence for SLC4A10 (NM_022058.2,2773-2791).
ccagtattctgaagtttat

SEQ ID NO: 11659 - DNA, 19 bp, Homo sapiens
  siRNA target sequence for SLC4A10 (NM_022058.2,2795-2813).
catgccagtgctatatgga

SEQ ID NO: 11660 - DNA, 19 bp, Homo sapiens
  siRNA target sequence for SLC4A10 (NM_022058.2,2804-2822).
gctatatggagtgtttctt

SEQ ID NO: 11661 - DNA, 19 bp, Homo sapiens
  siRNA target sequence for SLC4A10 (NM_022058.2,2836-2854).
catctctaaagggaattca

SEQ ID NO: 11662 - DNA, 19 bp, Homo sapiens
  siRNA target sequence for SLC4A10 (NM_022058.2,2853-2871).
cagttctttgataggataa

SEQ ID NO: 11663 - DNA, 19 bp, Homo sapiens
  siRNA target sequence for SLC4A10 (NM_022058.2,2879-2897).
ctggatgccggcaaaacat

SEQ ID NO: 11664 - DNA, 19 bp, Homo sapiens
  siRNA target sequence for SLC4A10 (NM_022058.2,2881-2899).
ggatgccggcaaaacatca

SEQ ID NO: 11665 - DNA, 19 bp, Homo sapiens
  siRNA target sequence for SLC4A10 (NM_022058.2,2882-2900).
gatgccggcaaaacatcaa

SEQ ID NO: 11666 - DNA, 19 bp, Homo sapiens
  siRNA target sequence for SLC4A10 (NM_022058.2,2921-2939).
gcacgtaccgcttcgaaaa

SEQ ID NO: 11667 - DNA, 19 bp, Homo sapiens
  siRNA target sequence for SLC4A10 (NM_022058.2,2973-2991).
cttggccttttgtggataa

SEQ ID NO: 11668 - DNA, 19 bp, Homo sapiens
  siRNA target sequence for SLC4A10 (NM_022058.2,3206-3224).
ggaagggcactatagagat

SEQ ID NO: 11669 - DNA, 19 bp, Homo sapiens
  siRNA target sequence for SLC4A10 (NM_022058.2,3225-3243).
gatccatctgtgatcaata

SEQ ID NO: 11670 - DNA, 19 bp, Homo sapiens
  siRNA target sequence for SLC4A10 (NM_022058.2,3275-3293).
gaggaaccttctgattact

SEQ ID NO: 11671 - DNA, 19 bp, Homo sapiens
  siRNA target sequence for SLC4A10 (NM_022058.2,3285-3303).
ctgattactgccgataact

SEQ ID NO: 11672 - DNA, 19 bp, Homo sapiens
  siRNA target sequence for SLC4A10 (NM_022058.2,3287-3305).
gattactgccgataactca

SEQ ID NO: 11673 - DNA, 19 bp, Homo sapiens
  siRNA target sequence for SLC4A10 (NM_022058.2,3292-3310).
ctgccgataactcaaaaga

SEQ ID NO: 11674 - DNA, 19 bp, Homo sapiens
  siRNA target sequence for SLC4A10 (NM_022058.2,3295-3313).
ccgataactcaaaagataa

SEQ ID NO: 11675 - DNA, 19 bp, Homo sapiens
  siRNA target sequence for SMARCA4 (NM_003072.2,1406-1424).
gcatcgcacaccgaattca

SEQ ID NO: 11676 - DNA, 19 bp, Homo sapiens
  siRNA target sequence for SMARCA4 (NM_003072.2,1567-1585).
gagacagccctcaatgcta

SEQ ID NO: 11677 - DNA, 19 bp, Homo sapiens
  siRNA target sequence for SMARCA4 (NM_003072.2,1693-1711).
caggaatacctcaatagca

SEQ ID NO: 11678 - DNA, 19 bp, Homo sapiens
  siRNA target sequence for SMARCA4 (NM_003072.2,1751-1769).
ccgtcacaggcaaaatcca

SEQ ID NO: 11679 - DNA, 19 bp, Homo sapiens
  siRNA target sequence for SMARCA4 (NM_003072.2,2227-2245).
gtagctccgaggtctgata

SEQ ID NO: 11680 - DNA, 19 bp, Homo sapiens
  siRNA target sequence for SMARCA4 (NM_003072.2,2231-2249).
ctccgaggtctgatagtga

SEQ ID NO: 11681 - DNA, 19 bp, Homo sapiens
  siRNA target sequence for SMARCA4 (NM_003072.2,2538-2556).
caaacagtaccagatcaaa

SEQ ID NO: 11682 - DNA, 19 bp, Homo sapiens
  siRNA target sequence for SMARCA4 (NM_003072.2,2569-2587).
ctggtgtccctgtacaaca

SEQ ID NO: 11683 - DNA, 19 bp, Homo sapiens
  siRNA target sequence for SMARCA4 (NM_003072.2,2667-2685).
ggagcacaaacgcatcaat

SEQ ID NO: 11684 - DNA, 19 bp, Homo sapiens
  siRNA target sequence for SMARCA4 (NM_003072.2,2729-2747).
gggcgtacgagtttgacaa

SEQ ID NO: 11685 - DNA, 19 bp, Homo sapiens
  siRNA target sequence for SMARCA4 (NM_003072.2,2759-2777).
ccgtggtgaaggtgtctta

SEQ ID NO: 11686 - DNA, 19 bp, Homo sapiens
  siRNA target sequence for SMARCA4 (NM_003072.2,2849-2867).
cgacgtacgagtacatcat

SEQ ID NO: 11687 - DNA, 19 bp, Homo sapiens
  siRNA target sequence for SMARCA4 (NM_003072.2,2853-2871).
gtacgagtacatcatcaaa

SEQ ID NO: 11688 - DNA, 19 bp, Homo sapiens
  siRNA target sequence for SMARCA4 (NM_003072.2,2895-2913).
ccgttggaagtacatgatt

SEQ ID NO: 11689 - DNA, 19 bp, Homo sapiens
  siRNA target sequence for SMARCA4 (NM_003072.2,3008-3026).
gcacaccgctgcagaacaa

SEQ ID NO: 11690 - DNA, 19 bp, Homo sapiens
  siRNA target sequence for SMARCA4 (NM_003072.2,3089-3107).
ccttcgagcagtggtttaa

SEQ ID NO: 11691 - DNA, 19 bp, Homo sapiens
  siRNA target sequence for SMARCA4 (NM_003072.2,3250-3268).
gtggagtacgtcatcaagt

SEQ ID NO: 11692 - DNA, 19 bp, Homo sapiens
  siRNA target sequence for SMARCA4 (NM_003072.2,3504-3522).
ccgagcctcgggtaaattt

SEQ ID NO: 11693 - DNA, 19 bp, Homo sapiens
  siRNA target sequence for SMARCA4 (NM_003072.2,3506-3524).
gagcctcgggtaaatttga

SEQ ID NO: 11694 - DNA, 19 bp, Homo sapiens
  siRNA target sequence for SMARCA4 (NM_003072.2,3625-3643).
gcgtatcgcggctttaaat

SEQ ID NO: 11695 - DNA, 19 bp, Homo sapiens
  siRNA target sequence for SMARCA4 (NM_003072.2,3626-3644).
cgtatcgcggctttaaata

SEQ ID NO: 11696 - DNA, 19 bp, Homo sapiens
  siRNA target sequence for SMARCA4 (NM_003072.2,3713-3731).
gctctgagtacttcatctt

SEQ ID NO: 11697 - DNA, 19 bp, Homo sapiens
  siRNA target sequence for SMARCA4 (NM_003072.2,3779-3797).
cagacactgtgatcatttt

SEQ ID NO: 11698 - DNA, 19 bp, Homo sapiens
  siRNA target sequence for SMARCA4 (NM_003072.2,4303-4321).
ctcccctcgtggatcatca

SEQ ID NO: 11699 - DNA, 19 bp, Homo sapiens
  siRNA target sequence for SMARCA4 (NM_003072.2,4672-4690).
gtggatgccgtgatcaagt

SEQ ID NO: 11700 - DNA, 19 bp, Homo sapiens
  siRNA target sequence for SMARCA4 (NM_003072.2,4675-4693).
gatgccgtgatcaagtaca

SEQ ID NO: 11701 - DNA, 19 bp, Homo sapiens
  siRNA target sequence for SMARCA4 (NM_003072.2,4781-4799).
gcaagcccgtggacttcaa

SEQ ID NO: 11702 - DNA, 19 bp, Homo sapiens
  siRNA target sequence for SMARCA4 (NM_003072.2,4788-4806).
cgtggacttcaagaagata

SEQ ID NO: 11703 - DNA, 19 bp, Homo sapiens
  siRNA target sequence for SMARCA4 (NM_003072.2,5045-5063).
ctcggtccgtcaaagtgaa

SEQ ID NO: 11704 - DNA, 19 bp, Homo sapiens
  siRNA target sequence for SNAPC2 (NM_003083.1,248-266).
gggaggccattcagaaagt

SEQ ID NO: 11705 - DNA, 19 bp, Homo sapiens
  siRNA target sequence for SNAPC4 (NM_003086.1,460-478).
cacgtggagatctcagaat

SEQ ID NO: 11706 - DNA, 19 bp, Homo sapiens
  siRNA target sequence for SNAPC4 (NM_003086.1,462-480).
cgtggagatctcagaatca

SEQ ID NO: 11707 - DNA, 19 bp, Homo sapiens
  siRNA target sequence for SNAPC4 (NM_003086.1,463-481).
gtggagatctcagaatcaa

SEQ ID NO: 11708 - DNA, 19 bp, Homo sapiens
  siRNA target sequence for SNAPC4 (NM_003086.1,465-483).
ggagatctcagaatcaagt

SEQ ID NO: 11709 - DNA, 19 bp, Homo sapiens
  siRNA target sequence for SNAPC4 (NM_003086.1,482-500).
gtctcgagtcagattctga

SEQ ID NO: 11710 - DNA, 19 bp, Homo sapiens
  siRNA target sequence for SNAPC4 (NM_003086.1,586-604).
gaggacgatcccaaggata

SEQ ID NO: 11711 - DNA, 19 bp, Homo sapiens
  siRNA target sequence for SNAPC4 (NM_003086.1,588-606).
ggacgatcccaaggataaa

SEQ ID NO: 11712 - DNA, 19 bp, Homo sapiens
  siRNA target sequence for SNAPC4 (NM_003086.1,794-812).
catacatggggcacttcat

SEQ ID NO: 11713 - DNA, 19 bp, Homo sapiens
  siRNA target sequence for SNAPC4 (NM_003086.1,912-930).
ccttgtgaccaaatggaaa

SEQ ID NO: 11714 - DNA, 19 bp, Homo sapiens
  siRNA target sequence for SNAPC4 (NM_003086.1,988-1006).
cttcagcccaagttactga

SEQ ID NO: 11715 - DNA, 19 bp, Homo sapiens
  siRNA target sequence for SNAPC4 (NM_003086.1,1155-1173).
ccacgactgggagaagatt

SEQ ID NO: 11716 - DNA, 19 bp, Homo sapiens
  siRNA target sequence for SNAPC4 (NM_003086.1,1156-1174).
cacgactgggagaagattt

SEQ ID NO: 11717 - DNA, 19 bp, Homo sapiens
  siRNA target sequence for SNAPC4 (NM_003086.1,1159-1177).
gactgggagaagatttcca

SEQ ID NO: 11718 - DNA, 19 bp, Homo sapiens
  siRNA target sequence for SNAPC4 (NM_003086.1,1161-1179).
ctgggagaagatttccaat

SEQ ID NO: 11719 - DNA, 19 bp, Homo sapiens
  siRNA target sequence for SNAPC4 (NM_003086.1,1170-1188).
gatttccaatattaacttt

SEQ ID NO: 11720 - DNA, 19 bp, Homo sapiens
  siRNA target sequence for SNAPC4 (NM_003086.1,1482-1500).
catcccctaccgcagaatt

SEQ ID NO: 11721 - DNA, 19 bp, Homo sapiens
  siRNA target sequence for SNAPC4 (NM_003086.1,1487-1505).
cctaccgcagaattgtcta

SEQ ID NO: 11722 - DNA, 19 bp, Homo sapiens
  siRNA target sequence for SNAPC4 (NM_003086.1,1496-1514).
gaattgtctactatatgga

SEQ ID NO: 11723 - DNA, 19 bp, Homo sapiens
  siRNA target sequence for SNAPC4 (NM_003086.1,1632-1650).
cggggagcaggattggttt

SEQ ID NO: 11724 - DNA, 19 bp, Homo sapiens
  siRNA target sequence for SNAPC4 (NM_003086.1,1633-1651).
ggggagcaggattggttta

SEQ ID NO: 11725 - DNA, 19 bp, Homo sapiens
  siRNA target sequence for SNAPC4 (NM_003086.1,1634-1652).
gggagcaggattggtttaa

SEQ ID NO: 11726 - DNA, 19 bp, Homo sapiens
  siRNA target sequence for SNAPC4 (NM_003086.1,1734-1752).
gggtcggtggaatttaaaa

SEQ ID NO: 11727 - DNA, 19 bp, Homo sapiens
  siRNA target sequence for SNAPC4 (NM_003086.1,1736-1754).
gtcggtggaatttaaaaga

SEQ ID NO: 11728 - DNA, 19 bp, Homo sapiens
  siRNA target sequence for SNAPC4 (NM_003086.1,2850-2868).
ggacccaccagttcatctt

SEQ ID NO: 11729 - DNA, 19 bp, Homo sapiens
  siRNA target sequence for SNAPC4 (NM_003086.1,3203-3221).
cgggtcccaccgtcttaaa

SEQ ID NO: 11730 - DNA, 19 bp, Homo sapiens
  siRNA target sequence for SNAPC4 (NM_003086.1,3204-3222).
gggtcccaccgtcttaaat

SEQ ID NO: 11731 - DNA, 19 bp, Homo sapiens
  siRNA target sequence for SNAPC4 (NM_003086.1,3206-3224).
gtcccaccgtcttaaatgt

SEQ ID NO: 11732 - DNA, 19 bp, Homo sapiens
  siRNA target sequence for SNAPC4 (NM_003086.1,3776-3794).
ggcagcccccagccaatat

SEQ ID NO: 11733 - DNA, 19 bp, Homo sapiens
  siRNA target sequence for SNAPC4 (NM_003086.1,3781-3799).
cccccagccaatatgaaca

SEQ ID NO: 11734 - DNA, 19 bp, Homo sapiens
  siRNA target sequence for SNAPC4 (NM_003086.1,4697-4715).
gcctggatacttctaatga

SEQ ID NO: 11735 - DNA, 19 bp, Homo sapiens
  siRNA target sequence for SNAPC5 (NM_006049.1,83-101).
gcctcaaggttgaagaatt

SEQ ID NO: 11736 - DNA, 19 bp, Homo sapiens
  siRNA target sequence for SNAPC5 (NM_006049.1,84-102).
cctcaaggttgaagaatta

SEQ ID NO: 11737 - DNA, 19 bp, Homo sapiens
  siRNA target sequence for SNAPC5 (NM_006049.1,97-115).
gaattagccctccaatcaa

SEQ ID NO: 11738 - DNA, 19 bp, Homo sapiens
  siRNA target sequence for SNAPC5 (NM_006049.1,106-124).
ctccaatcaatgatcagtt

SEQ ID NO: 11739 - DNA, 19 bp, Homo sapiens
  siRNA target sequence for SNAPC5 (NM_006049.1,109-127).
caatcaatgatcagttcta

SEQ ID NO: 11740 - DNA, 19 bp, Homo sapiens
  siRNA target sequence for SNAPC5 (NM_006049.1,164-182).
ctgaacagtcacatgatat

SEQ ID NO: 11741 - DNA, 19 bp, Homo sapiens
  siRNA target sequence for SNAPC5 (NM_006049.1,166-184).
gaacagtcacatgatatgt

SEQ ID NO: 11742 - DNA, 19 bp, Homo sapiens
  siRNA target sequence for SNAPC5 (NM_006049.1,183-201).
gttggtgcatgtagacaat

SEQ ID NO: 11743 - DNA, 19 bp, Homo sapiens
  siRNA target sequence for SNAPC5 (NM_006049.1,186-204).
ggtgcatgtagacaatgaa

SEQ ID NO: 11744 - DNA, 19 bp, Homo sapiens
  siRNA target sequence for SNAPC5 (NM_006049.1,205-223).
gcatcaatcaaccaaacaa

SEQ ID NO: 11745 - DNA, 19 bp, Homo sapiens
  siRNA target sequence for SNFT (NM_018664.1,538-556).
gctctgccctatgaacttt

SEQ ID NO: 11746 - DNA, 19 bp, Homo sapiens
  siRNA target sequence for SOLH (NM_005632.1,1403-1421).
ccaagtgcacgctcagaaa

SEQ ID NO: 11747 - DNA, 19 bp, Homo sapiens
  siRNA target sequence for SOLH (NM_005632.1,1912-1930).
cgaccccaggagatcaact

SEQ ID NO: 11748 - DNA, 19 bp, Homo sapiens
  siRNA target sequence for SOLH (NM_005632.1,3448-3466).
caggtcctggtgatcttgt

SEQ ID NO: 11749 - DNA, 19 bp, Homo sapiens
  siRNA target sequence for SOX13 (NM_005686.1,304-322).
ctggacttcaaccgaaatt

SEQ ID NO: 11750 - DNA, 19 bp, Homo sapiens
  siRNA target sequence for SOX13 (NM_005686.1,307-325).
gacttcaaccgaaatttga

SEQ ID NO: 11751 - DNA, 19 bp, Homo sapiens
  siRNA target sequence for SOX13 (NM_005686.1,331-349).
gtggtgccagccatagaga

SEQ ID NO: 11752 - DNA, 19 bp, Homo sapiens
  siRNA target sequence for SOX13 (NM_005686.1,508-526).
cactcggagcagaagaaca

SEQ ID NO: 11753 - DNA, 19 bp, Homo sapiens
  siRNA target sequence for SOX13 (NM_005686.1,664-682).
gttaacatgccttatgtca

SEQ ID NO: 11754 - DNA, 19 bp, Homo sapiens
  siRNA target sequence for SOX14 (NM_004189.2,170-188).
gcctaggtgccgaatggaa

SEQ ID NO: 11755 - DNA, 19 bp, Homo sapiens
  siRNA target sequence for SOX14 (NM_004189.2,642-660).
cgtggtgccctgtaactgt

SEQ ID NO: 11756 - DNA, 19 bp, Homo sapiens
  siRNA target sequence for SOX14 (NM_004189.2,730-748).
ggcatagacccttattcgt

SEQ ID NO: 11757 - DNA, 19 bp, Homo sapiens
  siRNA target sequence for SOX2 (NM_003106.2,1062-1080).
gctcgcagacctacatgaa

SEQ ID NO: 11758 - DNA, 19 bp, Homo sapiens
  siRNA target sequence for SOX4 (NM_003107.2,955-973).
ccccgagtgggcacatcaa

SEQ ID NO: 11759 - DNA, 19 bp, Homo sapiens
  siRNA target sequence for SOX4 (NM_003107.2,2016-2034).
ctgaaccccagctcaaact

SEQ ID NO: 11760 - DNA, 19 bp, Homo sapiens
  siRNA target sequence for SOX4 (NM_003107.2,2083-2101).
gggacctggattttaactt

SEQ ID NO: 11761 - DNA, 19 bp, Homo sapiens
  siRNA target sequence for SOX4 (NM_003107.2,2191-2209).
gcatctccaacctggtttt

SEQ ID NO: 11762 - DNA, 19 bp, Homo sapiens
  siRNA target sequence for SOX5 (NM_006940.4,406-424).
gccccacacaactcatcta

SEQ ID NO: 11763 - DNA, 19 bp, Homo sapiens
  siRNA target sequence for SOX5 (NM_006940.4,463-481).
ggcgagtccttgtctagta

SEQ ID NO: 11764 - DNA, 19 bp, Homo sapiens
  siRNA target sequence for SOX5 (NM_006940.4,465-483).
cgagtccttgtctagtaca

SEQ ID NO: 11765 - DNA, 19 bp, Homo sapiens
  siRNA target sequence for SOX5 (NM_006940.4,504-522).
gcgcaagggcagtttagct

SEQ ID NO: 11766 - DNA, 19 bp, Homo sapiens
  siRNA target sequence for SOX5 (NM_006940.4,512-530).
gcagtttagctgatgttgt

SEQ ID NO: 11767 - DNA, 19 bp, Homo sapiens
  siRNA target sequence for SOX5 (NM_006940.4,515-533).
gtttagctgatgttgttga

SEQ ID NO: 11768 - DNA, 19 bp, Homo sapiens
  siRNA target sequence for SOX5 (NM_006940.4,583-601).
gaaacccccagtattgaaa

SEQ ID NO: 11769 - DNA, 19 bp, Homo sapiens
  siRNA target sequence for SOX5 (NM_006940.4,649-667).
gggaactttggcgaaataa

SEQ ID NO: 11770 - DNA, 19 bp, Homo sapiens
  siRNA target sequence for SOX5 (NM_006940.4,703-721).
caactcatgggtatgatca

SEQ ID NO: 11771 - DNA, 19 bp, Homo sapiens
  siRNA target sequence for SOX5 (NM_006940.4,919-937).
ggtcagctgccgccattaa

SEQ ID NO: 11772 - DNA, 19 bp, Homo sapiens
  siRNA target sequence for SOX5 (NM_006940.4,920-938).
gtcagctgccgccattaat

SEQ ID NO: 11773 - DNA, 19 bp, Homo sapiens
  siRNA target sequence for SOX5 (NM_006940.4,945-963).
cgtattccctcctgatcaa

SEQ ID NO: 11774 - DNA, 19 bp, Homo sapiens
  siRNA target sequence for SOX5 (NM_006940.4,1004-1022).
ctccaggcttcagctataa

SEQ ID NO: 11775 - DNA, 19 bp, Homo sapiens
  siRNA target sequence for SOX5 (NM_006940.4,1017-1035).
ctataaggctggatgtagt

SEQ ID NO: 11776 - DNA, 19 bp, Homo sapiens
  siRNA target sequence for SOX5 (NM_006940.4,1247-1265).
gcccaccacccaaaagcaa

SEQ ID NO: 11777 - DNA, 19 bp, Homo sapiens
  siRNA target sequence for SOX5 (NM_006940.4,1399-1417).
gtcccagcagcgttagcta

SEQ ID NO: 11778 - DNA, 19 bp, Homo sapiens
  siRNA target sequence for SOX5 (NM_006940.4,1428-1446).
cagagttagcacaataggt

SEQ ID NO: 11779 - DNA, 19 bp, Homo sapiens
  siRNA target sequence for SOX5 (NM_006940.4,1436-1454).
gcacaataggttacttaaa

SEQ ID NO: 11780 - DNA, 19 bp, Homo sapiens
  siRNA target sequence for SOX5 (NM_006940.4,1437-1455).
cacaataggttacttaaat

SEQ ID NO: 11781 - DNA, 19 bp, Homo sapiens
  siRNA target sequence for SOX5 (NM_006940.4,1483-1501).
caagaagctcggcaaatga

SEQ ID NO: 11782 - DNA, 19 bp, Homo sapiens
  siRNA target sequence for SOX5 (NM_006940.4,1554-1572).
gaatagtctgggtctcaat

SEQ ID NO: 11783 - DNA, 19 bp, Homo sapiens
  siRNA target sequence for SOX5 (NM_006940.4,1575-1593).
ctgccgaacagaaaaggaa

SEQ ID NO: 11784 - DNA, 19 bp, Homo sapiens
  siRNA target sequence for SOX5 (NM_006940.4,1616-1634).
ctcagcaactggcagttaa

SEQ ID NO: 11785 - DNA, 19 bp, Homo sapiens
  siRNA target sequence for SOX5 (NM_006940.4,1621-1639).
caactggcagttaaacaga

SEQ ID NO: 11786 - DNA, 19 bp, Homo sapiens
  siRNA target sequence for SOX5 (NM_006940.4,1649-1667).
gaaaatttagccatgcaat

SEQ ID NO: 11787 - DNA, 19 bp, Homo sapiens
  siRNA target sequence for SOX5 (NM_006940.4,1660-1678).
catgcaatgatggatttca

SEQ ID NO: 11788 - DNA, 19 bp, Homo sapiens
  siRNA target sequence for SOX5 (NM_006940.4,1677-1695).
caatctgagtggagattct

SEQ ID NO: 11789 - DNA, 19 bp, Homo sapiens
  siRNA target sequence for SOX5 (NM_006940.4,1740-1758).
ccgagggcgtggtagcaat

SEQ ID NO: 11790 - DNA, 19 bp, Homo sapiens
  siRNA target sequence for SOX5 (NM_006940.4,1754-1772).
gcaatgaaccccacataaa

SEQ ID NO: 11791 - DNA, 19 bp, Homo sapiens
  siRNA target sequence for SOX5 (NM_006940.4,2065-2083).
gaaatgcggcagtacttca

SEQ ID NO: 11792 - DNA, 19 bp, Homo sapiens
  siRNA target sequence for SOX5 (NM_006940.4,2300-2318).
gagaaatttatgatgagta

SEQ ID NO: 11793 - DNA, 19 bp, Homo sapiens
  siRNA target sequence for SOX5 (NM_006940.4,2355-2373).
gagtgacagtgaaaaccat

SEQ ID NO: 11794 - DNA, 19 bp, Homo sapiens
  siRNA target sequence for SOX6 (NM_033326.1,186-204).
ctctgcaccccataatgca

SEQ ID NO: 11795 - DNA, 19 bp, Homo sapiens
  siRNA target sequence for SOX6 (NM_033326.1,378-396).
gtcgggaccgtgagataat

SEQ ID NO: 11796 - DNA, 19 bp, Homo sapiens
  siRNA target sequence for SOX6 (NM_033326.1,380-398).
cgggaccgtgagataatga

SEQ ID NO: 11797 - DNA, 19 bp, Homo sapiens
  siRNA target sequence for SOX6 (NM_033326.1,389-407).
gagataatgaccagtgtta

SEQ ID NO: 11798 - DNA, 19 bp, Homo sapiens
  siRNA target sequence for SOX6 (NM_033326.1,391-409).
gataatgaccagtgttact

SEQ ID NO: 11799 - DNA, 19 bp, Homo sapiens
  siRNA target sequence for SOX6 (NM_033326.1,514-532).
ctgcatggaaaaactactt

SEQ ID NO: 11800 - DNA, 19 bp, Homo sapiens
  siRNA target sequence for SOX6 (NM_033326.1,517-535).
catggaaaaactactttca

SEQ ID NO: 11801 - DNA, 19 bp, Homo sapiens
  siRNA target sequence for SOX6 (NM_033326.1,707-725).
gcagcgtcacaaattgaga

SEQ ID NO: 11802 - DNA, 19 bp, Homo sapiens
  siRNA target sequence for SOX6 (NM_033326.1,708-726).
cagcgtcacaaattgagaa

SEQ ID NO: 11803 - DNA, 19 bp, Homo sapiens
  siRNA target sequence for SOX6 (NM_033326.1,711-729).
cgtcacaaattgagaaaca

SEQ ID NO: 11804 - DNA, 19 bp, Homo sapiens
  siRNA target sequence for SOX6 (NM_033326.1,857-875).
ccgctcatgatcccaattt

SEQ ID NO: 11805 - DNA, 19 bp, Homo sapiens
  siRNA target sequence for SOX6 (NM_033326.1,858-876).
cgctcatgatcccaatttt

SEQ ID NO: 11806 - DNA, 19 bp, Homo sapiens
  siRNA target sequence for SOX6 (NM_033326.1,935-953).
ccccctggaataacataca

SEQ ID NO: 11807 - DNA, 19 bp, Homo sapiens
  siRNA target sequence for SOX6 (NM_033326.1,937-955).
ccctggaataacatacaaa

SEQ ID NO: 11808 - DNA, 19 bp, Homo sapiens
  siRNA target sequence for SOX6 (NM_033326.1,967-985).
ctaccccgtacagttcatt

SEQ ID NO: 11809 - DNA, 19 bp, Homo sapiens
  siRNA target sequence for SOX6 (NM_033326.1,971-989).
cccgtacagttcattccat

SEQ ID NO: 11810 - DNA, 19 bp, Homo sapiens
  siRNA target sequence for SOX6 (NM_033326.1,1014-1032).
ctggactcagccctttaca

SEQ ID NO: 11811 - DNA, 19 bp, Homo sapiens
  siRNA target sequence for SOX6 (NM_033326.1,1074-1092).
ggctaaagggcctaagtga

SEQ ID NO: 11812 - DNA, 19 bp, Homo sapiens
  siRNA target sequence for SOX6 (NM_033326.1,1091-1109).
gaccgttttggcaggaatt

SEQ ID NO: 11813 - DNA, 19 bp, Homo sapiens
  siRNA target sequence for SOX6 (NM_033326.1,1140-1158).
cttacaaccacaaacagat

SEQ ID NO: 11814 - DNA, 19 bp, Homo sapiens
  siRNA target sequence for SOX6 (NM_033326.1,1291-1309).
cagccctgtaactcaagtt

SEQ ID NO: 11815 - DNA, 19 bp, Homo sapiens
  siRNA target sequence for SOX6 (NM_033326.1,1293-1311).
gccctgtaactcaagttaa

SEQ ID NO: 11816 - DNA, 19 bp, Homo sapiens
  siRNA target sequence for SOX6 (NM_033326.1,1296-1314).
ctgtaactcaagttaagga

SEQ ID NO: 11817 - DNA, 19 bp, Homo sapiens
  siRNA target sequence for SOX6 (NM_033326.1,1482-1500).
gaggatcctctttagatat

SEQ ID NO: 11818 - DNA, 19 bp, Homo sapiens
  siRNA target sequence for SOX6 (NM_033326.1,1622-1640).
ggtgttgacgggaaactgt

SEQ ID NO: 11819 - DNA, 19 bp, Homo sapiens
  siRNA target sequence for SOX6 (NM_033326.1,1631-1649).
gggaaactgtcctccataa

SEQ ID NO: 11820 - DNA, 19 bp, Homo sapiens
  siRNA target sequence for SOX6 (NM_033326.1,1685-1703).
gaaagaacgcgctttgaga

SEQ ID NO: 11821 - DNA, 19 bp, Homo sapiens
  siRNA target sequence for SOX6 (NM_033326.1,1689-1707).
gaacgcgctttgagaattt

SEQ ID NO: 11822 - DNA, 19 bp, Homo sapiens
  siRNA target sequence for SOX6 (NM_033326.1,1714-1732).
ccagttaacgggaaagtca

SEQ ID NO: 11823 - DNA, 19 bp, Homo sapiens
  siRNA target sequence for SOX6 (NM_033326.1,1717-1735).
gttaacgggaaagtcaaat

SEQ ID NO: 11824 - DNA, 19 bp, Homo sapiens
  siRNA target sequence for SOX6 (NM_033326.1,1768-1786).
ccttactcggccagaagat

SEQ ID NO: 11825 - DNA, 19 bp, Homo sapiens
  siRNA target sequence for SOX6 (NM_033326.1,1848-1866).
gcagcgagccacacattaa

SEQ ID NO: 11826 - DNA, 19 bp, Homo sapiens
  siRNA target sequence for SOX6 (NM_033326.1,1947-1965).
ccaacattagcaaaatctt

SEQ ID NO: 11827 - DNA, 19 bp, Homo sapiens
  siRNA target sequence for SOX6 (NM_033326.1,1948-1966).
caacattagcaaaatctta

SEQ ID NO: 11828 - DNA, 19 bp, Homo sapiens
  siRNA target sequence for SOX6 (NM_033326.1,1999-2017).
gaagcaaccttattatgaa

SEQ ID NO: 11829 - DNA, 19 bp, Homo sapiens
  siRNA target sequence for SOX6 (NM_033326.1,2034-2052).
gcaagatccacttagagaa

SEQ ID NO: 11830 - DNA, 19 bp, Homo sapiens
  siRNA target sequence for SOX6 (NM_033326.1,2083-2101).
gaaacgcacctgcattgtt

SEQ ID NO: 11831 - DNA, 19 bp, Homo sapiens
  siRNA target sequence for SOX6 (NM_033326.1,2114-2132).
cttcggattggggagtata

SEQ ID NO: 11832 - DNA, 19 bp, Homo sapiens
  siRNA target sequence for SOX6 (NM_033326.1,2118-2136).
ggattggggagtataagca

SEQ ID NO: 11833 - DNA, 19 bp, Homo sapiens
  siRNA target sequence for SOX6 (NM_033326.1,2119-2137).
gattggggagtataagcaa

SEQ ID NO: 11834 - DNA, 19 bp, Homo sapiens
  siRNA target sequence for SOX6 (NM_033326.1,2182-2200).
ggggcaacagcctcagatt

SEQ ID NO: 11835 - DNA, 19 bp, Homo sapiens
  siRNA target sequence for SOX6 (NM_033326.1,2211-2229).
caggaacaggtgttgtgta

SEQ ID NO: 11836 - DNA, 19 bp, Homo sapiens
  siRNA target sequence for SOX6 (NM_033326.1,2227-2245).
gtatcctggtgctatcact

SEQ ID NO: 11837 - DNA, 19 bp, Homo sapiens
  siRNA target sequence for SOX6 (NM_033326.1,2323-2341).
ggtcatccagagcacttat

SEQ ID NO: 11838 - DNA, 19 bp, Homo sapiens
  siRNA target sequence for SOX6 (NM_033326.1,2366-2384).
ctagctggaaatgaaatga

SEQ ID NO: 11839 - DNA, 19 bp, Homo sapiens
  siRNA target sequence for SOX8 (NM_014587.2,1273-1291).
gcaggcctccagctactat

SEQ ID NO: 11840 - DNA, 19 bp, Homo sapiens
  siRNA target sequence for SP140 (NM_007237.2,154-172).
gagacagcaatctcaactt

SEQ ID NO: 11841 - DNA, 19 bp, Homo sapiens
  siRNA target sequence for SP140 (NM_007237.2,156-174).
gacagcaatctcaacttca

SEQ ID NO: 11842 - DNA, 19 bp, Homo sapiens
  siRNA target sequence for SP140 (NM_007237.2,318-336).
cgagaccgctccttcatct

SEQ ID NO: 11843 - DNA, 19 bp, Homo sapiens
  siRNA target sequence for SP140 (NM_007237.2,332-350).
catctccgagcagatgtat

SEQ ID NO: 11844 - DNA, 19 bp, Homo sapiens
  siRNA target sequence for SP140 (NM_007237.2,337-355).
ccgagcagatgtatgaaca

SEQ ID NO: 11845 - DNA, 19 bp, Homo sapiens
  siRNA target sequence for SP140 (NM_007237.2,391-409).
caagagtgatgtattgtgt

SEQ ID NO: 11846 - DNA, 19 bp, Homo sapiens
  siRNA target sequence for SP140 (NM_007237.2,442-460).
cacatctggaagcattgtt

SEQ ID NO: 11847 - DNA, 19 bp, Homo sapiens
  siRNA target sequence for SP140 (NM_007237.2,453-471).
gcattgttcagcaggatta

SEQ ID NO: 11848 - DNA, 19 bp, Homo sapiens
  siRNA target sequence for SP140 (NM_007237.2,486-504).
cctgatttaaacgagattt

SEQ ID NO: 11849 - DNA, 19 bp, Homo sapiens
  siRNA target sequence for SP140 (NM_007237.2,487-505).
ctgatttaaacgagattta

SEQ ID NO: 11850 - DNA, 19 bp, Homo sapiens
  siRNA target sequence for SP140 (NM_007237.2,489-507).
gatttaaacgagatttaca

SEQ ID NO: 11851 - DNA, 19 bp, Homo sapiens
  siRNA target sequence for SP140 (NM_007237.2,534-552).
cactcacctctccaaatga

SEQ ID NO: 11852 - DNA, 19 bp, Homo sapiens
  siRNA target sequence for SP140 (NM_007237.2,538-556).
cacctctccaaatgaataa

SEQ ID NO: 11853 - DNA, 19 bp, Homo sapiens
  siRNA target sequence for SP140 (NM_007237.2,551-569).
gaataatgtaaacgattta

SEQ ID NO: 11854 - DNA, 19 bp, Homo sapiens
  siRNA target sequence for SP140 (NM_007237.2,577-595).
gacccagattactaccata

SEQ ID NO: 11855 - DNA, 19 bp, Homo sapiens
  siRNA target sequence for SP140 (NM_007237.2,581-599).
cagattactaccatatggt

SEQ ID NO: 11856 - DNA, 19 bp, Homo sapiens
  siRNA target sequence for SP140 (NM_007237.2,583-601).
gattactaccatatggtaa

SEQ ID NO: 11857 - DNA, 19 bp, Homo sapiens
  siRNA target sequence for SP140 (NM_007237.2,611-629).
cagcaatgcctgtcatgaa

SEQ ID NO: 11858 - DNA, 19 bp, Homo sapiens
  siRNA target sequence for SP140 (NM_007237.2,776-794).
gggagtgtcctgtaaactt

SEQ ID NO: 11859 - DNA, 19 bp, Homo sapiens
  siRNA target sequence for SP140 (NM_007237.2,833-851).
caagttactgccttatgat

SEQ ID NO: 11860 - DNA, 19 bp, Homo sapiens
  siRNA target sequence for SP140 (NM_007237.2,836-854).
gttactgccttatgataca

SEQ ID NO: 11861 - DNA, 19 bp, Homo sapiens
  siRNA target sequence for SP140 (NM_007237.2,882-900).
gatgcggcaaggacataca

SEQ ID NO: 11862 - DNA, 19 bp, Homo sapiens
  siRNA target sequence for SP140 (NM_007237.2,1352-1370).
gtcagtgtctagtgaacta

SEQ ID NO: 11863 - DNA, 19 bp, Homo sapiens
  siRNA target sequence for SP140 (NM_007237.2,1354-1372).
cagtgtctagtgaactaga

SEQ ID NO: 11864 - DNA, 19 bp, Homo sapiens
  siRNA target sequence for SP140 (NM_007237.2,1358-1376).
gtctagtgaactagaaaat

SEQ ID NO: 11865 - DNA, 19 bp, Homo sapiens
  siRNA target sequence for SP140 (NM_007237.2,1417-1435).
ctagcctgctatatgataa

SEQ ID NO: 11866 - DNA, 19 bp, Homo sapiens
  siRNA target sequence for SP140 (NM_007237.2,1420-1438).
gcctgctatatgataatgt

SEQ ID NO: 11867 - DNA, 19 bp, Homo sapiens
  siRNA target sequence for SP140 (NM_007237.2,1448-1466).
ggagcaatcagcatatgaa

SEQ ID NO: 11868 - DNA, 19 bp, Homo sapiens
  siRNA target sequence for SP140 (NM_007237.2,2100-2118).
gatcctccaagaatacgtt

SEQ ID NO: 11869 - DNA, 19 bp, Homo sapiens
  siRNA target sequence for SPBPBP (NM_006692.1,597-615).
cagctgtgccagatcactt

SEQ ID NO: 11870 - DNA, 19 bp, Homo sapiens
  siRNA target sequence for SPBPBP (NM_006692.1,776-794).
ggctggagagtgccattat

SEQ ID NO: 11871 - DNA, 19 bp, Homo sapiens
  siRNA target sequence for SPBPBP (NM_006692.1,777-795).
gctggagagtgccattata

SEQ ID NO: 11872 - DNA, 19 bp, Homo sapiens
  siRNA target sequence for SPBPBP (NM_006692.1,778-796).
ctggagagtgccattataa

SEQ ID NO: 11873 - DNA, 19 bp, Homo sapiens
  siRNA target sequence for SPBPBP (NM_006692.1,783-801).
gagtgccattataacaaca

SEQ ID NO: 11874 - DNA, 19 bp, Homo sapiens
  siRNA target sequence for SPBPBP (NM_006692.1,785-803).
gtgccattataacaacaaa

SEQ ID NO: 11875 - DNA, 19 bp, Homo sapiens
  siRNA target sequence for SPBPBP (NM_006692.1,859-877).
gggcactttactaaagctt

SEQ ID NO: 11876 - DNA, 19 bp, Homo sapiens
  siRNA target sequence for SPBPBP (NM_006692.1,860-878).
ggcactttactaaagcttt

SEQ ID NO: 11877 - DNA, 19 bp, Homo sapiens
  siRNA target sequence for SPBPBP (NM_006692.1,861-879).
gcactttactaaagcttta

SEQ ID NO: 11878 - DNA, 19 bp, Homo sapiens
  siRNA target sequence for SPDEF (NM_012391.1,1334-1352).
cgctccatccgccagtatt

SEQ ID NO: 11879 - DNA, 19 bp, Homo sapiens
  siRNA target sequence for SPDEF (NM_012391.1,1335-1353).
gctccatccgccagtatta

SEQ ID NO: 11880 - DNA, 19 bp, Homo sapiens
  siRNA target sequence for SPDEF (NM_012391.1,1338-1356).
ccatccgccagtattacaa

SEQ ID NO: 11881 - DNA, 19 bp, Homo sapiens
  siRNA target sequence for SPI1 (NM_003120.1,229-247).
cgtcccccctccatcagaa

SEQ ID NO: 11882 - DNA, 19 bp, Homo sapiens
  siRNA target sequence for SPI1 (NM_003120.1,257-275).
ccctatgacacggatctat

SEQ ID NO: 11883 - DNA, 19 bp, Homo sapiens
  siRNA target sequence for SPI1 (NM_003120.1,258-276).
cctatgacacggatctata

SEQ ID NO: 11884 - DNA, 19 bp, Homo sapiens
  siRNA target sequence for SPI1 (NM_003120.1,281-299).
cgccaaacgcacgagtatt

SEQ ID NO: 11885 - DNA, 19 bp, Homo sapiens
  siRNA target sequence for SPI1 (NM_003120.1,282-300).
gccaaacgcacgagtatta

SEQ ID NO: 11886 - DNA, 19 bp, Homo sapiens
  siRNA target sequence for SPI1 (NM_003120.1,293-311).
gagtattacccctatctca

SEQ ID NO: 11887 - DNA, 19 bp, Homo sapiens
  siRNA target sequence for SPIB (NM_003121.1,59-77).
cccagatggcgtcttctat

SEQ ID NO: 11888 - DNA, 19 bp, Homo sapiens
  siRNA target sequence for SPIB (NM_003121.1,61-79).
cagatggcgtcttctatga

SEQ ID NO: 11889 - DNA, 19 bp, Homo sapiens
  siRNA target sequence for SPIB (NM_003121.1,192-210).
ccggcagcagccgctttta

SEQ ID NO: 11890 - DNA, 19 bp, Homo sapiens
  siRNA target sequence for SPIB (NM_003121.1,316-334).
cataccccacggagaactt

SEQ ID NO: 11891 - DNA, 19 bp, Homo sapiens
  siRNA target sequence for SPIC (NM_152323.1,50-68).
gctgggtcaagcatttgaa

SEQ ID NO: 11892 - DNA, 19 bp, Homo sapiens
  siRNA target sequence for SPIC (NM_152323.1,81-99).
gttctgaggcaacattcaa

SEQ ID NO: 11893 - DNA, 19 bp, Homo sapiens
  siRNA target sequence for SPIC (NM_152323.1,111-129).
cagtactcgccagattaca

SEQ ID NO: 11894 - DNA, 19 bp, Homo sapiens
  siRNA target sequence for SPIC (NM_152323.1,116-134).
ctcgccagattacagaaat

SEQ ID NO: 11895 - DNA, 19 bp, Homo sapiens
  siRNA target sequence for SPIC (NM_152323.1,118-136).
cgccagattacagaaatta

SEQ ID NO: 11896 - DNA, 19 bp, Homo sapiens
  siRNA target sequence for SPIC (NM_152323.1,152-170).
ccatcgtcctcatgtcaaa

SEQ ID NO: 11897 - DNA, 19 bp, Homo sapiens
  siRNA target sequence for SPIC (NM_152323.1,162-180).
catgtcaaaggaaattcca

SEQ ID NO: 11898 - DNA, 19 bp, Homo sapiens
  siRNA target sequence for SPIC (NM_152323.1,239-257).
cagtgctgcggacttctat

SEQ ID NO: 11899 - DNA, 19 bp, Homo sapiens
  siRNA target sequence for SPIC (NM_152323.1,241-259).
gtgctgcggacttctattt

SEQ ID NO: 11900 - DNA, 19 bp, Homo sapiens
  siRNA target sequence for SPIC (NM_152323.1,359-377).
ccgactgtttgaatacctt

SEQ ID NO: 11901 - DNA, 19 bp, Homo sapiens
  siRNA target sequence for SPIC (NM_152323.1,396-414).
ccggagatggcatcttgta

SEQ ID NO: 11902 - DNA, 19 bp, Homo sapiens
  siRNA target sequence for SPIC (NM_152323.1,397-415).
cggagatggcatcttgtat

SEQ ID NO: 11903 - DNA, 19 bp, Homo sapiens
  siRNA target sequence for SPIC (NM_152323.1,533-551).
ggccagggcactcagaaat

SEQ ID NO: 11904 - DNA, 19 bp, Homo sapiens
  siRNA target sequence for SPIC (NM_152323.1,534-552).
gccagggcactcagaaatt

SEQ ID NO: 11905 - DNA, 19 bp, Homo sapiens
  siRNA target sequence for SPIC (NM_152323.1,535-553).
ccagggcactcagaaatta

SEQ ID NO: 11906 - DNA, 19 bp, Homo sapiens
  siRNA target sequence for SPIC (NM_152323.1,562-580).
gtggggaaattaccaaaat

SEQ ID NO: 11907 - DNA, 19 bp, Homo sapiens
  siRNA target sequence for SPIC (NM_152323.1,647-665).
ggggaaagagatcttctat

SEQ ID NO: 11908 - DNA, 19 bp, Homo sapiens
  siRNA target sequence for SPIC (NM_152323.1,662-680).
ctattcacagtgtgttcaa

SEQ ID NO: 11909 - DNA, 19 bp, Homo sapiens
  siRNA target sequence for SPIC (NM_152323.1,681-699).
cctgatcaagaatatctca

SEQ ID NO: 11910 - DNA, 19 bp, Homo sapiens
  siRNA target sequence for SPIC (NM_152323.1,750-768).
gagctaaatcaccatgatt

SEQ ID NO: 11911 - DNA, 19 bp, Homo sapiens
  siRNA target sequence for SREBF1 (NM_004176.2,477-495).
ccactccattgaagatgta

SEQ ID NO: 11912 - DNA, 19 bp, Homo sapiens
  siRNA target sequence for SREBF1 (NM_004176.2,516-534).
cccctgggcctggtatcaa

SEQ ID NO: 11913 - DNA, 19 bp, Homo sapiens
  siRNA target sequence for SREBF1 (NM_004176.2,1226-1244).
gaggcaaagctgaataaat

SEQ ID NO: 11914 - DNA, 19 bp, Homo sapiens
  siRNA target sequence for SREBF1 (NM_004176.2,1257-1275).
gcaaggccatcgactacat

SEQ ID NO: 11915 - DNA, 19 bp, Homo sapiens
  siRNA target sequence for SREBF1 (NM_004176.2,1258-1276).
caaggccatcgactacatt

SEQ ID NO: 11916 - DNA, 19 bp, Homo sapiens
  siRNA target sequence for SREBF1 (NM_004176.2,2171-2189).
gcagccctggtctaccata

SEQ ID NO: 11917 - DNA, 19 bp, Homo sapiens
  siRNA target sequence for SREBF1 (NM_004176.2,2172-2190).
cagccctggtctaccataa

SEQ ID NO: 11918 - DNA, 19 bp, Homo sapiens
  siRNA target sequence for SREBF1 (NM_004176.2,2305-2323).
gacgctggccgagatctat

SEQ ID NO: 11919 - DNA, 19 bp, Homo sapiens
  siRNA target sequence for SREBF1 (NM_004176.2,2307-2325).
cgctggccgagatctatgt

SEQ ID NO: 11920 - DNA, 19 bp, Homo sapiens
  siRNA target sequence for SREBF1 (NM_004176.2,2354-2372).
ctcccacgggccttgcatt

SEQ ID NO: 11921 - DNA, 19 bp, Homo sapiens
  siRNA target sequence for SREBF1 (NM_004176.2,2356-2374).
cccacgggccttgcatttt

SEQ ID NO: 11922 - DNA, 19 bp, Homo sapiens
  siRNA target sequence for SREBF1 (NM_004176.2,2463-2481).
ccgtgggccaccgtttctt

SEQ ID NO: 11923 - DNA, 19 bp, Homo sapiens
  siRNA target sequence for SRF (NM_003131.1,849-867).
ggaagacgggcatcatgaa

SEQ ID NO: 11924 - DNA, 19 bp, Homo sapiens
  siRNA target sequence for SRF (NM_003131.1,924-942).
gtgagacaggccatgtgta

SEQ ID NO: 11925 - DNA, 19 bp, Homo sapiens
  siRNA target sequence for SRF (NM_003131.1,926-944).
gagacaggccatgtgtata

SEQ ID NO: 11926 - DNA, 19 bp, Homo sapiens
  siRNA target sequence for SRF (NM_003131.1,930-948).
caggccatgtgtatacctt

SEQ ID NO: 11927 - DNA, 19 bp, Homo sapiens
  siRNA target sequence for SRF (NM_003131.1,985-1003).
gaccggcaaggcactgatt

SEQ ID NO: 11928 - DNA, 19 bp, Homo sapiens
  siRNA target sequence for SRF (NM_003131.1,987-1005).
ccggcaaggcactgattca

SEQ ID NO: 11929 - DNA, 19 bp, Homo sapiens
  siRNA target sequence for SRF (NM_003131.1,989-1007).
ggcaaggcactgattcaga

SEQ ID NO: 11930 - DNA, 19 bp, Homo sapiens
  siRNA target sequence for SRF (NM_003131.1,1066-1084).
gagtgccactggctttgaa

SEQ ID NO: 11931 - DNA, 19 bp, Homo sapiens
  siRNA target sequence for SRF (NM_003131.1,1423-1441).
cccagtgcaggccattcaa

SEQ ID NO: 11932 - DNA, 19 bp, Homo sapiens
  siRNA target sequence for SRF (NM_003131.1,1425-1443).
cagtgcaggccattcaagt

SEQ ID NO: 11933 - DNA, 19 bp, Homo sapiens
  siRNA target sequence for SRF (NM_003131.1,1590-1608).
gcccgcatgcggtgatgta

SEQ ID NO: 11934 - DNA, 19 bp, Homo sapiens
  siRNA target sequence for SRF (NM_003131.1,1591-1609).
cccgcatgcggtgatgtat

SEQ ID NO: 11935 - DNA, 19 bp, Homo sapiens
  siRNA target sequence for ST18 (NM_014682.1,711-729).
gctgcgtactcgctctaaa

SEQ ID NO: 11936 - DNA, 19 bp, Homo sapiens
  siRNA target sequence for ST18 (NM_014682.1,714-732).
gcgtactcgctctaaagga

SEQ ID NO: 11937 - DNA, 19 bp, Homo sapiens
  siRNA target sequence for ST18 (NM_014682.1,715-733).
cgtactcgctctaaaggaa

SEQ ID NO: 11938 - DNA, 19 bp, Homo sapiens
  siRNA target sequence for ST18 (NM_014682.1,738-756).
ggtgccaatggattcacta

SEQ ID NO: 11939 - DNA, 19 bp, Homo sapiens
  siRNA target sequence for ST18 (NM_014682.1,825-843).
gggggttccagtcaacaaa

SEQ ID NO: 11940 - DNA, 19 bp, Homo sapiens
  siRNA target sequence for ST18 (NM_014682.1,922-940).
gacgatggccccttggaaa

SEQ ID NO: 11941 - DNA, 19 bp, Homo sapiens
  siRNA target sequence for ST18 (NM_014682.1,953-971).
ctaccgcagaggaaatcat

SEQ ID NO: 11942 - DNA, 19 bp, Homo sapiens
  siRNA target sequence for ST18 (NM_014682.1,957-975).
cgcagaggaaatcatgata

SEQ ID NO: 11943 - DNA, 19 bp, Homo sapiens
  siRNA target sequence for ST18 (NM_014682.1,969-987).
catgataaaacctatggat

SEQ ID NO: 11944 - DNA, 19 bp, Homo sapiens
  siRNA target sequence for ST18 (NM_014682.1,1037-1055).
gatactcttgttatcaaga

SEQ ID NO: 11945 - DNA, 19 bp, Homo sapiens
  siRNA target sequence for ST18 (NM_014682.1,1054-1072).
gagctcatggtcaagtctt

SEQ ID NO: 11946 - DNA, 19 bp, Homo sapiens
  siRNA target sequence for ST18 (NM_014682.1,1056-1074).
gctcatggtcaagtcttta

SEQ ID NO: 11947 - DNA, 19 bp, Homo sapiens
  siRNA target sequence for ST18 (NM_014682.1,1106-1124).
ctgttcagactgtaagtga

SEQ ID NO: 11948 - DNA, 19 bp, Homo sapiens
  siRNA target sequence for ST18 (NM_014682.1,1179-1197).
cgagtgctttctgattcat

SEQ ID NO: 11949 - DNA, 19 bp, Homo sapiens
  siRNA target sequence for ST18 (NM_014682.1,1244-1262).
gctcctctgatgacaatga

SEQ ID NO: 11950 - DNA, 19 bp, Homo sapiens
  siRNA target sequence for ST18 (NM_014682.1,1328-1346).
cacctagagtcccaaagta

SEQ ID NO: 11951 - DNA, 19 bp, Homo sapiens
  siRNA target sequence for ST18 (NM_014682.1,1331-1349).
ctagagtcccaaagtatgt

SEQ ID NO: 11952 - DNA, 19 bp, Homo sapiens
  siRNA target sequence for ST18 (NM_014682.1,1430-1448).
ggtgtgattctgaaacaga

SEQ ID NO: 11953 - DNA, 19 bp, Homo sapiens
  siRNA target sequence for ST18 (NM_014682.1,1431-1449).
gtgtgattctgaaacagaa

SEQ ID NO: 11954 - DNA, 19 bp, Homo sapiens
  siRNA target sequence for ST18 (NM_014682.1,1532-1550).
gcgagagcctggcagtaat

SEQ ID NO: 11955 - DNA, 19 bp, Homo sapiens
  siRNA target sequence for ST18 (NM_014682.1,1578-1596).
ggccaaggggaatttaagt

SEQ ID NO: 11956 - DNA, 19 bp, Homo sapiens
  siRNA target sequence for ST18 (NM_014682.1,1623-1641).
ggctgagcgaggttgtgtt

SEQ ID NO: 11957 - DNA, 19 bp, Homo sapiens
  siRNA target sequence for ST18 (NM_014682.1,1624-1642).
gctgagcgaggttgtgttt

SEQ ID NO: 11958 - DNA, 19 bp, Homo sapiens
  siRNA target sequence for ST18 (NM_014682.1,1625-1643).
ctgagcgaggttgtgtttt

SEQ ID NO: 11959 - DNA, 19 bp, Homo sapiens
  siRNA target sequence for ST18 (NM_014682.1,1629-1647).
gcgaggttgtgttttccat

SEQ ID NO: 11960 - DNA, 19 bp, Homo sapiens
  siRNA target sequence for ST18 (NM_014682.1,1703-1721).
ggcaaaccaaagttatcga

SEQ ID NO: 11961 - DNA, 19 bp, Homo sapiens
  siRNA target sequence for ST18 (NM_014682.1,1726-1744).
ggtggaagacaaatcttta

SEQ ID NO: 11962 - DNA, 19 bp, Homo sapiens
  siRNA target sequence for ST18 (NM_014682.1,1853-1871).
cggggtgcccccacaaagt

SEQ ID NO: 11963 - DNA, 19 bp, Homo sapiens
  siRNA target sequence for ST18 (NM_014682.1,1872-1890).
gcgggttcccctggaaatt

SEQ ID NO: 11964 - DNA, 19 bp, Homo sapiens
  siRNA target sequence for ST18 (NM_014682.1,2097-2115).
gaagcaaattgaattcaat

SEQ ID NO: 11965 - DNA, 19 bp, Homo sapiens
  siRNA target sequence for ST18 (NM_014682.1,2142-2160).
cagagccacagtgtcaaaa

SEQ ID NO: 11966 - DNA, 19 bp, Homo sapiens
  siRNA target sequence for ST18 (NM_014682.1,2144-2162).
gagccacagtgtcaaaaga

SEQ ID NO: 11967 - DNA, 19 bp, Homo sapiens
  siRNA target sequence for ST18 (NM_014682.1,2220-2238).
cggtaaacgccctctcata

SEQ ID NO: 11968 - DNA, 19 bp, Homo sapiens
  siRNA target sequence for ST18 (NM_014682.1,2350-2368).
ggccgtgccagctcttata

SEQ ID NO: 11969 - DNA, 19 bp, Homo sapiens
  siRNA target sequence for ST18 (NM_014682.1,2353-2371).
cgtgccagctcttatagct

SEQ ID NO: 11970 - DNA, 19 bp, Homo sapiens
  siRNA target sequence for ST18 (NM_014682.1,2354-2372).
gtgccagctcttatagcta

SEQ ID NO: 11971 - DNA, 19 bp, Homo sapiens
  siRNA target sequence for ST18 (NM_014682.1,2370-2388).
ctacggtcaatgtagtgaa

SEQ ID NO: 11972 - DNA, 19 bp, Homo sapiens
  siRNA target sequence for ST18 (NM_014682.1,2486-2504).
ccaagggagccgaaataga

SEQ ID NO: 11973 - DNA, 19 bp, Homo sapiens
  siRNA target sequence for ST18 (NM_014682.1,2487-2505).
caagggagccgaaatagaa

SEQ ID NO: 11974 - DNA, 19 bp, Homo sapiens
  siRNA target sequence for ST18 (NM_014682.1,2569-2587).
cccctaacttcctctaaca

SEQ ID NO: 11975 - DNA, 19 bp, Homo sapiens
  siRNA target sequence for ST18 (NM_014682.1,2580-2598).
ctctaacacttctattcca

SEQ ID NO: 11976 - DNA, 19 bp, Homo sapiens
  siRNA target sequence for ST18 (NM_014682.1,2678-2696).
gctgggacactcctatcaa

SEQ ID NO: 11977 - DNA, 19 bp, Homo sapiens
  siRNA target sequence for ST18 (NM_014682.1,2682-2700).
ggacactcctatcaactat

SEQ ID NO: 11978 - DNA, 19 bp, Homo sapiens
  siRNA target sequence for ST18 (NM_014682.1,2687-2705).
ctcctatcaactatagcaa

SEQ ID NO: 11979 - DNA, 19 bp, Homo sapiens
  siRNA target sequence for ST18 (NM_014682.1,2689-2707).
cctatcaactatagcaaaa

SEQ ID NO: 11980 - DNA, 19 bp, Homo sapiens
  siRNA target sequence for ST18 (NM_014682.1,2750-2768).
gctctctagaaaatttaga

SEQ ID NO: 11981 - DNA, 19 bp, Homo sapiens
  siRNA target sequence for ST18 (NM_014682.1,2785-2803).
ggagaggcctctataccaa

SEQ ID NO: 11982 - DNA, 19 bp, Homo sapiens
  siRNA target sequence for ST18 (NM_014682.1,2814-2832).
caagcttcatgcaagagat

SEQ ID NO: 11983 - DNA, 19 bp, Homo sapiens
  siRNA target sequence for ST18 (NM_014682.1,2825-2843).
caagagatctcaaaaagga

SEQ ID NO: 11984 - DNA, 19 bp, Homo sapiens
  siRNA target sequence for ST18 (NM_014682.1,2830-2848).
gatctcaaaaaggaactaa

SEQ ID NO: 11985 - DNA, 19 bp, Homo sapiens
  siRNA target sequence for ST18 (NM_014682.1,2833-2851).
ctcaaaaaggaactaatca

SEQ ID NO: 11986 - DNA, 19 bp, Homo sapiens
  siRNA target sequence for ST18 (NM_014682.1,2902-2920).
gcatctcatcgcagtgttt

SEQ ID NO: 11987 - DNA, 19 bp, Homo sapiens
  siRNA target sequence for ST18 (NM_014682.1,2970-2988).
ctctcaggagcttaagtgt

SEQ ID NO: 11988 - DNA, 19 bp, Homo sapiens
  siRNA target sequence for ST18 (NM_014682.1,3112-3130).
gaagaccctgaactgaaat

SEQ ID NO: 11989 - DNA, 19 bp, Homo sapiens
  siRNA target sequence for ST18 (NM_014682.1,3225-3243).
gaaggagaatcctctcaat

SEQ ID NO: 11990 - DNA, 19 bp, Homo sapiens
  siRNA target sequence for ST18 (NM_014682.1,3311-3329).
ggctgggccatgtaaataa

SEQ ID NO: 11991 - DNA, 19 bp, Homo sapiens
  siRNA target sequence for ST18 (NM_014682.1,3312-3330).
gctgggccatgtaaataat

SEQ ID NO: 11992 - DNA, 19 bp, Homo sapiens
  siRNA target sequence for ST18 (NM_014682.1,3315-3333).
gggccatgtaaataatgtt

SEQ ID NO: 11993 - DNA, 19 bp, Homo sapiens
  siRNA target sequence for ST18 (NM_014682.1,3337-3355).
gtcacccaccgaagcttat

SEQ ID NO: 11994 - DNA, 19 bp, Homo sapiens
  siRNA target sequence for ST18 (NM_014682.1,3339-3357).
cacccaccgaagcttatct

SEQ ID NO: 11995 - DNA, 19 bp, Homo sapiens
  siRNA target sequence for ST18 (NM_014682.1,3369-3387).
caatgcacaagttatcaaa

SEQ ID NO: 11996 - DNA, 19 bp, Homo sapiens
  siRNA target sequence for ST18 (NM_014682.1,3551-3569).
ctatggagagcaacttaaa

SEQ ID NO: 11997 - DNA, 19 bp, Homo sapiens
  siRNA target sequence for ST18 (NM_014682.1,3691-3709).
cctatcagtgagcagaatt

SEQ ID NO: 11998 - DNA, 19 bp, Homo sapiens
  siRNA target sequence for ST18 (NM_014682.1,3692-3710).
ctatcagtgagcagaattt

SEQ ID NO: 11999 - DNA, 19 bp, Homo sapiens
  siRNA target sequence for ST18 (NM_014682.1,3721-3739).
gtaaatacactcacagata

SEQ ID NO: 12000 - DNA, 19 bp, Homo sapiens
  siRNA target sequence for ST18 (NM_014682.1,3804-3822).
ggcagtgaagggtatccat

SEQ ID NO: 12001 - DNA, 19 bp, Homo sapiens
  siRNA target sequence for STAT1 (NM_007315.2,356-374).
ctcagtggtacgaacttca

SEQ ID NO: 12002 - DNA, 19 bp, Homo sapiens
  siRNA target sequence for STAT1 (NM_007315.2,402-420).
ggttcaccagctttatgat

SEQ ID NO: 12003 - DNA, 19 bp, Homo sapiens
  siRNA target sequence for STAT1 (NM_007315.2,451-469).
ctggcacagtggttagaaa

SEQ ID NO: 12004 - DNA, 19 bp, Homo sapiens
  siRNA target sequence for STAT1 (NM_007315.2,480-498).
ggagcacgctgccaatgat

SEQ ID NO: 12005 - DNA, 19 bp, Homo sapiens
  siRNA target sequence for STAT1 (NM_007315.2,483-501).
gcacgctgccaatgatgtt

SEQ ID NO: 12006 - DNA, 19 bp, Homo sapiens
  siRNA target sequence for STAT1 (NM_007315.2,484-502).
cacgctgccaatgatgttt

SEQ ID NO: 12007 - DNA, 19 bp, Homo sapiens
  siRNA target sequence for STAT1 (NM_007315.2,509-527).
ccaccatccgttttcatga

SEQ ID NO: 12008 - DNA, 19 bp, Homo sapiens
  siRNA target sequence for STAT1 (NM_007315.2,534-552).
gtcacagctggatgatcaa

SEQ ID NO: 12009 - DNA, 19 bp, Homo sapiens
  siRNA target sequence for STAT1 (NM_007315.2,538-556).
cagctggatgatcaatata

SEQ ID NO: 12010 - DNA, 19 bp, Homo sapiens
  siRNA target sequence for STAT1 (NM_007315.2,582-600).
cttgctacagcataacata

SEQ ID NO: 12011 - DNA, 19 bp, Homo sapiens
  siRNA target sequence for STAT1 (NM_007315.2,586-604).
ctacagcataacataagga

SEQ ID NO: 12012 - DNA, 19 bp, Homo sapiens
  siRNA target sequence for STAT1 (NM_007315.2,612-630).
gcgtaatcttcaggataat

SEQ ID NO: 12013 - DNA, 19 bp, Homo sapiens
  siRNA target sequence for STAT1 (NM_007315.2,640-658).
gacccaatccagatgtcta

SEQ ID NO: 12014 - DNA, 19 bp, Homo sapiens
  siRNA target sequence for STAT1 (NM_007315.2,648-666).
ccagatgtctatgatcatt

SEQ ID NO: 12015 - DNA, 19 bp, Homo sapiens
  siRNA target sequence for STAT1 (NM_007315.2,649-667).
cagatgtctatgatcattt

SEQ ID NO: 12016 - DNA, 19 bp, Homo sapiens
  siRNA target sequence for STAT1 (NM_007315.2,723-741).
ggctcagtcggggaatatt

SEQ ID NO: 12017 - DNA, 19 bp, Homo sapiens
  siRNA target sequence for STAT1 (NM_007315.2,749-767).
cagtgatgttagacaaaca

SEQ ID NO: 12018 - DNA, 19 bp, Homo sapiens
  siRNA target sequence for STAT1 (NM_007315.2,751-769).
gtgatgttagacaaacaga

SEQ ID NO: 12019 - DNA, 19 bp, Homo sapiens
  siRNA target sequence for STAT1 (NM_007315.2,768-786).
gaaagagcttgacagtaaa

SEQ ID NO: 12020 - DNA, 19 bp, Homo sapiens
  siRNA target sequence for STAT1 (NM_007315.2,801-819).
ggacaaggttatgtgtata

SEQ ID NO: 12021 - DNA, 19 bp, Homo sapiens
  siRNA target sequence for STAT1 (NM_007315.2,853-871).
gatgaatatgacttcaaat

SEQ ID NO: 12022 - DNA, 19 bp, Homo sapiens
  siRNA target sequence for STAT1 (NM_007315.2,942-960).
gttactcaagaagatgtat

SEQ ID NO: 12023 - DNA, 19 bp, Homo sapiens
  siRNA target sequence for STAT1 (NM_007315.2,980-998).
gaaaggaagtagttcacaa

SEQ ID NO: 12024 - DNA, 19 bp, Homo sapiens
  siRNA target sequence for STAT1 (NM_007315.2,1012-1030).
ctgaatgtcactgaactta

SEQ ID NO: 12025 - DNA, 19 bp, Homo sapiens
  siRNA target sequence for STAT1 (NM_007315.2,1032-1050).
ccagaatgccctgattaat

SEQ ID NO: 12026 - DNA, 19 bp, Homo sapiens
  siRNA target sequence for STAT1 (NM_007315.2,1035-1053).
gaatgccctgattaatgat

SEQ ID NO: 12027 - DNA, 19 bp, Homo sapiens
  siRNA target sequence for STAT1 (NM_007315.2,1041-1059).
cctgattaatgatgaacta

SEQ ID NO: 12028 - DNA, 19 bp, Homo sapiens
  siRNA target sequence for STAT1 (NM_007315.2,1128-1146).
gcagaactggttcactata

SEQ ID NO: 12029 - DNA, 19 bp, Homo sapiens
  siRNA target sequence for STAT1 (NM_007315.2,1131-1149).
gaactggttcactatagtt

SEQ ID NO: 12030 - DNA, 19 bp, Homo sapiens
  siRNA target sequence for STAT1 (NM_007315.2,1218-1236).
cgaacatgaccctatcaca

SEQ ID NO: 12031 - DNA, 19 bp, Homo sapiens
  siRNA target sequence for STAT1 (NM_007315.2,1258-1276).
gaccgcaccttcagtcttt

SEQ ID NO: 12032 - DNA, 19 bp, Homo sapiens
  siRNA target sequence for STAT1 (NM_007315.2,1404-1422).
gcaagagctgaattataat

SEQ ID NO: 12033 - DNA, 19 bp, Homo sapiens
  siRNA target sequence for STAT1 (NM_007315.2,1408-1426).
gagctgaattataatttga

SEQ ID NO: 12034 - DNA, 19 bp, Homo sapiens
  siRNA target sequence for STAT1 (NM_007315.2,1410-1428).
gctgaattataatttgaaa

SEQ ID NO: 12035 - DNA, 19 bp, Homo sapiens
  siRNA target sequence for STAT1 (NM_007315.2,1545-1563).
cagtctggcggctgaattt

SEQ ID NO: 12036 - DNA, 19 bp, Homo sapiens
  siRNA target sequence for STAT1 (NM_007315.2,1566-1584).
gcacctgcaattgaaagaa

SEQ ID NO: 12037 - DNA, 19 bp, Homo sapiens
  siRNA target sequence for STAT1 (NM_007315.2,1612-1630).
gagggtcctctcatcgtta

SEQ ID NO: 12038 - DNA, 19 bp, Homo sapiens
  siRNA target sequence for STAT1 (NM_007315.2,1636-1654).
gagcttcactcccttagtt

SEQ ID NO: 12039 - DNA, 19 bp, Homo sapiens
  siRNA target sequence for STAT1 (NM_007315.2,1638-1656).
gcttcactcccttagtttt

SEQ ID NO: 12040 - DNA, 19 bp, Homo sapiens
  siRNA target sequence for STAT1 (NM_007315.2,1668-1686).
gtgccagcctggtttggta

SEQ ID NO: 12041 - DNA, 19 bp, Homo sapiens
  siRNA target sequence for STAT1 (NM_007315.2,1832-1850).
gatgggctcagctttcaga

SEQ ID NO: 12042 - DNA, 19 bp, Homo sapiens
  siRNA target sequence for STAT1 (NM_007315.2,1944-1962).
cagccccgatggtctcatt

SEQ ID NO: 12043 - DNA, 19 bp, Homo sapiens
  siRNA target sequence for STAT1 (NM_007315.2,1963-1981).
ccgtggacgaggttttgta

SEQ ID NO: 12044 - DNA, 19 bp, Homo sapiens
  siRNA target sequence for STAT1 (NM_007315.2,1964-1982).
cgtggacgaggttttgtaa

SEQ ID NO: 12045 - DNA, 19 bp, Homo sapiens
  siRNA target sequence for STAT1 (NM_007315.2,1968-1986).
gacgaggttttgtaaggaa

SEQ ID NO: 12046 - DNA, 19 bp, Homo sapiens
  siRNA target sequence for STAT1 (NM_007315.2,2058-2076).
gctccctctctggaatgat

SEQ ID NO: 12047 - DNA, 19 bp, Homo sapiens
  siRNA target sequence for STAT1 (NM_007315.2,2176-2194).
gaaggggccatcacattca

SEQ ID NO: 12048 - DNA, 19 bp, Homo sapiens
  siRNA target sequence for STAT1 (NM_007315.2,2179-2197).
ggggccatcacattcacat

SEQ ID NO: 12049 - DNA, 19 bp, Homo sapiens
  siRNA target sequence for STAT1 (NM_007315.2,2285-2303).
ctgacatcattcgcaatta

SEQ ID NO: 12050 - DNA, 19 bp, Homo sapiens
  siRNA target sequence for STAT1 (NM_007315.2,2313-2331).
ggctgctgagaatattcct

SEQ ID NO: 12051 - DNA, 19 bp, Homo sapiens
  siRNA target sequence for STAT1 (NM_007315.2,2346-2364).
gtatctgtatccaaatatt

SEQ ID NO: 12052 - DNA, 19 bp, Homo sapiens
  siRNA target sequence for STAT1 (NM_007315.2,2428-2446).
cttgatggccctaaaggaa

SEQ ID NO: 12053 - DNA, 19 bp, Homo sapiens
  siRNA target sequence for STAT1 (NM_007315.2,2559-2577).
gatagtgggctctgtagaa

SEQ ID NO: 12054 - DNA, 19 bp, Homo sapiens
  siRNA target sequence for STAT1 (NM_007315.2,2570-2588).
ctgtagaattcgacagtat

SEQ ID NO: 12055 - DNA, 19 bp, Homo sapiens
  siRNA target sequence for STAT1 (NM_007315.2,2572-2590).
gtagaattcgacagtatga

SEQ ID NO: 12056 - DNA, 19 bp, Homo sapiens
  siRNA target sequence for STAT1 (NM_007315.2,2575-2593).
gaattcgacagtatgatga

SEQ ID NO: 12057 - DNA, 19 bp, Homo sapiens
  siRNA target sequence for STAT2 (NM_005419.2,239-257).
ccaaggctaccatgctatt

SEQ ID NO: 12058 - DNA, 19 bp, Homo sapiens
  siRNA target sequence for STAT2 (NM_005419.2,385-403).
cagttggctgagatgatct

SEQ ID NO: 12059 - DNA, 19 bp, Homo sapiens
  siRNA target sequence for STAT2 (NM_005419.2,387-405).
gttggctgagatgatcttt

SEQ ID NO: 12060 - DNA, 19 bp, Homo sapiens
  siRNA target sequence for STAT2 (NM_005419.2,495-513).
gagccagcaacatgagatt

SEQ ID NO: 12061 - DNA, 19 bp, Homo sapiens
  siRNA target sequence for STAT2 (NM_005419.2,498-516).
ccagcaacatgagattgaa

SEQ ID NO: 12062 - DNA, 19 bp, Homo sapiens
  siRNA target sequence for STAT2 (NM_005419.2,547-565).
gagaagctggtaaaatcca

SEQ ID NO: 12063 - DNA, 19 bp, Homo sapiens
  siRNA target sequence for STAT2 (NM_005419.2,563-581).
ccatcagccaactgaaaga

SEQ ID NO: 12064 - DNA, 19 bp, Homo sapiens
  siRNA target sequence for STAT2 (NM_005419.2,685-703).
ctcaatgaactggacaaaa

SEQ ID NO: 12065 - DNA, 19 bp, Homo sapiens
  siRNA target sequence for STAT2 (NM_005419.2,733-751).
gcactgctaggccgattaa

SEQ ID NO: 12066 - DNA, 19 bp, Homo sapiens
  siRNA target sequence for STAT2 (NM_005419.2,736-754).
ctgctaggccgattaacta

SEQ ID NO: 12067 - DNA, 19 bp, Homo sapiens
  siRNA target sequence for STAT2 (NM_005419.2,746-764).
gattaactaccctaatcga

SEQ ID NO: 12068 - DNA, 19 bp, Homo sapiens
  siRNA target sequence for STAT2 (NM_005419.2,1189-1207).
caaggcttccggaagttca

SEQ ID NO: 12069 - DNA, 19 bp, Homo sapiens
  siRNA target sequence for STAT2 (NM_005419.2,1452-1470).
catgaaccagctctcaatt

SEQ ID NO: 12070 - DNA, 19 bp, Homo sapiens
  siRNA target sequence for STAT2 (NM_005419.2,1713-1731).
gagccctcctggcaagtta

SEQ ID NO: 12071 - DNA, 19 bp, Homo sapiens
  siRNA target sequence for STAT2 (NM_005419.2,1717-1735).
cctcctggcaagttaccat

SEQ ID NO: 12072 - DNA, 19 bp, Homo sapiens
  siRNA target sequence for STAT2 (NM_005419.2,1804-1822).
cgcatcatgggctttgtga

SEQ ID NO: 12073 - DNA, 19 bp, Homo sapiens
  siRNA target sequence for STAT2 (NM_005419.2,1873-1891).
ctactgcgcttcagtgaat

SEQ ID NO: 12074 - DNA, 19 bp, Homo sapiens
  siRNA target sequence for STAT2 (NM_005419.2,1939-1957).
gacaaggtgctcatctact

SEQ ID NO: 12075 - DNA, 19 bp, Homo sapiens
  siRNA target sequence for STAT2 (NM_005419.2,1991-2009).
cactcccgctgactgaaat

SEQ ID NO: 12076 - DNA, 19 bp, Homo sapiens
  siRNA target sequence for STAT2 (NM_005419.2,1993-2011).
ctcccgctgactgaaatca

SEQ ID NO: 12077 - DNA, 19 bp, Homo sapiens
  siRNA target sequence for STAT2 (NM_005419.2,2028-2046).
gctcactgaggagaatata

SEQ ID NO: 12078 - DNA, 19 bp, Homo sapiens
  siRNA target sequence for STAT2 (NM_005419.2,2128-2146).
ctccaggaacggaggaaat

SEQ ID NO: 12079 - DNA, 19 bp, Homo sapiens
  siRNA target sequence for STAT2 (NM_005419.2,2163-2181).
cattgtggtctctaataga

SEQ ID NO: 12080 - DNA, 19 bp, Homo sapiens
  siRNA target sequence for STAT2 (NM_005419.2,2371-2389).
cccacactatgcatggtat

SEQ ID NO: 12081 - DNA, 19 bp, Homo sapiens
  siRNA target sequence for STAT2 (NM_005419.2,2375-2393).
cactatgcatggtatcaca

SEQ ID NO: 12082 - DNA, 19 bp, Homo sapiens
  siRNA target sequence for STAT2 (NM_005419.2,2381-2399).
gcatggtatcacaaacagt

SEQ ID NO: 12083 - DNA, 19 bp, Homo sapiens
  siRNA target sequence for STAT2 (NM_005419.2,2458-2476).
gatctgagacatttgaaca

SEQ ID NO: 12084 - DNA, 19 bp, Homo sapiens
  siRNA target sequence for STAT2 (NM_005419.2,2498-2516).
gaaactgtgtaaagattga

SEQ ID NO: 12085 - DNA, 19 bp, Homo sapiens
  siRNA target sequence for STAT2 (NM_005419.2,2561-2579).
ccgtggatgaggtttacgt

SEQ ID NO: 12086 - DNA, 19 bp, Homo sapiens
  siRNA target sequence for STAT3 (NM_003150.2,355-373).
cggccagcaaagaatcaca

SEQ ID NO: 12087 - DNA, 19 bp, Homo sapiens
  siRNA target sequence for STAT3 (NM_003150.2,405-423).
gagattgaccagcagtata

SEQ ID NO: 12088 - DNA, 19 bp, Homo sapiens
  siRNA target sequence for STAT3 (NM_003150.2,431-449).
cctgcaagagtcgaatgtt

SEQ ID NO: 12089 - DNA, 19 bp, Homo sapiens
  siRNA target sequence for STAT3 (NM_003150.2,459-477).
cacaatctacgaagaatca

SEQ ID NO: 12090 - DNA, 19 bp, Homo sapiens
  siRNA target sequence for STAT3 (NM_003150.2,902-920).
ggagtacgtgcagaaaact

SEQ ID NO: 12091 - DNA, 19 bp, Homo sapiens
  siRNA target sequence for STAT3 (NM_003150.2,994-1012).
gcctagatcggctagaaaa

SEQ ID NO: 12092 - DNA, 19 bp, Homo sapiens
  siRNA target sequence for STAT3 (NM_003150.2,996-1014).
ctagatcggctagaaaact

SEQ ID NO: 12093 - DNA, 19 bp, Homo sapiens
  siRNA target sequence for STAT3 (NM_003150.2,1002-1020).
cggctagaaaactggataa

SEQ ID NO: 12094 - DNA, 19 bp, Homo sapiens
  siRNA target sequence for STAT3 (NM_003150.2,1021-1039).
cgtcattagcagaatctca

SEQ ID NO: 12095 - DNA, 19 bp, Homo sapiens
  siRNA target sequence for STAT3 (NM_003150.2,1041-1059).
cttcagacccgtcaacaaa

SEQ ID NO: 12096 - DNA, 19 bp, Homo sapiens
  siRNA target sequence for STAT3 (NM_003150.2,1044-1062).
cagacccgtcaacaaatta

SEQ ID NO: 12097 - DNA, 19 bp, Homo sapiens
  siRNA target sequence for STAT3 (NM_003150.2,1070-1088).
ggaggagttgcagcaaaaa

SEQ ID NO: 12098 - DNA, 19 bp, Homo sapiens
  siRNA target sequence for STAT3 (NM_003150.2,1148-1166).
ggagctgtttagaaactta

SEQ ID NO: 12099 - DNA, 19 bp, Homo sapiens
  siRNA target sequence for STAT3 (NM_003150.2,1149-1167).
gagctgtttagaaacttaa

SEQ ID NO: 12100 - DNA, 19 bp, Homo sapiens
  siRNA target sequence for STAT3 (NM_003150.2,1242-1260).
ggcgtccagttcactacta

SEQ ID NO: 12101 - DNA, 19 bp, Homo sapiens
  siRNA target sequence for STAT3 (NM_003150.2,1243-1261).
gcgtccagttcactactaa

SEQ ID NO: 12102 - DNA, 19 bp, Homo sapiens
  siRNA target sequence for STAT3 (NM_003150.2,1244-1262).
cgtccagttcactactaaa

SEQ ID NO: 12103 - DNA, 19 bp, Homo sapiens
  siRNA target sequence for STAT3 (NM_003150.2,1277-1295).
caaattccctgagttgaat

SEQ ID NO: 12104 - DNA, 19 bp, Homo sapiens
  siRNA target sequence for STAT3 (NM_003150.2,1314-1332).
gtgtgcattgacaaagact

SEQ ID NO: 12105 - DNA, 19 bp, Homo sapiens
  siRNA target sequence for STAT3 (NM_003150.2,1352-1370).
cagaggatcccggaaattt

SEQ ID NO: 12106 - DNA, 19 bp, Homo sapiens
  siRNA target sequence for STAT3 (NM_003150.2,1356-1374).
ggatcccggaaatttaaca

SEQ ID NO: 12107 - DNA, 19 bp, Homo sapiens
  siRNA target sequence for STAT3 (NM_003150.2,1357-1375).
gatcccggaaatttaacat

SEQ ID NO: 12108 - DNA, 19 bp, Homo sapiens
  siRNA target sequence for STAT3 (NM_003150.2,1360-1378).
cccggaaatttaacattct

SEQ ID NO: 12109 - DNA, 19 bp, Homo sapiens
  siRNA target sequence for STAT3 (NM_003150.2,1423-1441).
gcagcctctctgcagaatt

SEQ ID NO: 12110 - DNA, 19 bp, Homo sapiens
  siRNA target sequence for STAT3 (NM_003150.2,1497-1515).
gatgcttccctgattgtga

SEQ ID NO: 12111 - DNA, 19 bp, Homo sapiens
  siRNA target sequence for STAT3 (NM_003150.2,1667-1685).
gaccaacaatcccaagaat

SEQ ID NO: 12112 - DNA, 19 bp, Homo sapiens
  siRNA target sequence for STAT3 (NM_003150.2,1669-1687).
ccaacaatcccaagaatgt

SEQ ID NO: 12113 - DNA, 19 bp, Homo sapiens
  siRNA target sequence for STAT3 (NM_003150.2,1670-1688).
caacaatcccaagaatgta

SEQ ID NO: 12114 - DNA, 19 bp, Homo sapiens
  siRNA target sequence for STAT3 (NM_003150.2,1817-1835).
gggacctggtgtgaattat

SEQ ID NO: 12115 - DNA, 19 bp, Homo sapiens
  siRNA target sequence for STAT3 (NM_003150.2,1818-1836).
ggacctggtgtgaattatt

SEQ ID NO: 12116 - DNA, 19 bp, Homo sapiens
  siRNA target sequence for STAT3 (NM_003150.2,1845-1863).
cagatcacatgggctaaat

SEQ ID NO: 12117 - DNA, 19 bp, Homo sapiens
  siRNA target sequence for STAT3 (NM_003150.2,1847-1865).
gatcacatgggctaaattt

SEQ ID NO: 12118 - DNA, 19 bp, Homo sapiens
  siRNA target sequence for STAT3 (NM_003150.2,1957-1975).
ggaacgaagggtacatcat

SEQ ID NO: 12119 - DNA, 19 bp, Homo sapiens
  siRNA target sequence for STAT3 (NM_003150.2,2028-2046).
ggcaccttcctgctaagat

SEQ ID NO: 12120 - DNA, 19 bp, Homo sapiens
  siRNA target sequence for STAT3 (NM_003150.2,2029-2047).
gcaccttcctgctaagatt

SEQ ID NO: 12121 - DNA, 19 bp, Homo sapiens
  siRNA target sequence for STAT3 (NM_003150.2,2064-2082).
gaaggaggcgtcactttca

SEQ ID NO: 12122 - DNA, 19 bp, Homo sapiens
  siRNA target sequence for STAT3 (NM_003150.2,2067-2085).
ggaggcgtcactttcactt

SEQ ID NO: 12123 - DNA, 19 bp, Homo sapiens
  siRNA target sequence for STAT3 (NM_003150.2,2123-2141).
gtccgtggaaccatacaca

SEQ ID NO: 12124 - DNA, 19 bp, Homo sapiens
  siRNA target sequence for STAT3 (NM_003150.2,2259-2277).
gaggcattcggaaagtatt

SEQ ID NO: 12125 - DNA, 19 bp, Homo sapiens
  siRNA target sequence for STAT3 (NM_003150.2,2261-2279).
ggcattcggaaagtattgt

SEQ ID NO: 12126 - DNA, 19 bp, Homo sapiens
  siRNA target sequence for STAT3 (NM_003150.2,2358-2376).
ccaacgacctgcagcaata

SEQ ID NO: 12127 - DNA, 19 bp, Homo sapiens
  siRNA target sequence for STAT3 (NM_003150.2,2363-2381).
gacctgcagcaataccatt

SEQ ID NO: 12128 - DNA, 19 bp, Homo sapiens
  siRNA target sequence for STAT3 (NM_003150.2,2400-2418).
cgcactttagattcattga

SEQ ID NO: 12129 - DNA, 19 bp, Homo sapiens
  siRNA target sequence for STAT4 (NM_003151.2,353-371).
gttggcccaatggattgaa

SEQ ID NO: 12130 - DNA, 19 bp, Homo sapiens
  siRNA target sequence for STAT4 (NM_003151.2,359-377).
ccaatggattgaaaatcaa

SEQ ID NO: 12131 - DNA, 19 bp, Homo sapiens
  siRNA target sequence for STAT4 (NM_003151.2,382-400).
gggaggcagcttctaacaa

SEQ ID NO: 12132 - DNA, 19 bp, Homo sapiens
  siRNA target sequence for STAT4 (NM_003151.2,391-409).
cttctaacaatgaaaccat

SEQ ID NO: 12133 - DNA, 19 bp, Homo sapiens
  siRNA target sequence for STAT4 (NM_003151.2,410-428).
ggcaacgattcttcttcaa

SEQ ID NO: 12134 - DNA, 19 bp, Homo sapiens
  siRNA target sequence for STAT4 (NM_003151.2,411-429).
gcaacgattcttcttcaaa

SEQ ID NO: 12135 - DNA, 19 bp, Homo sapiens
  siRNA target sequence for STAT4 (NM_003151.2,412-430).
caacgattcttcttcaaaa

SEQ ID NO: 12136 - DNA, 19 bp, Homo sapiens
  siRNA target sequence for STAT4 (NM_003151.2,455-473).
gttaggtcgtgtttccaaa

SEQ ID NO: 12137 - DNA, 19 bp, Homo sapiens
  siRNA target sequence for STAT4 (NM_003151.2,486-504).
ctcttgatacacaatctaa

SEQ ID NO: 12138 - DNA, 19 bp, Homo sapiens
  siRNA target sequence for STAT4 (NM_003151.2,488-506).
cttgatacacaatctaaaa

SEQ ID NO: 12139 - DNA, 19 bp, Homo sapiens
  siRNA target sequence for STAT4 (NM_003151.2,495-513).
cacaatctaaaaagaatta

SEQ ID NO: 12140 - DNA, 19 bp, Homo sapiens
  siRNA target sequence for STAT4 (NM_003151.2,558-576).
gctgtggttatttcaaact

SEQ ID NO: 12141 - DNA, 19 bp, Homo sapiens
  siRNA target sequence for STAT4 (NM_003151.2,627-645).
gggcctctagagaaatcct

SEQ ID NO: 12142 - DNA, 19 bp, Homo sapiens
  siRNA target sequence for STAT4 (NM_003151.2,628-646).
ggcctctagagaaatcctt

SEQ ID NO: 12143 - DNA, 19 bp, Homo sapiens
  siRNA target sequence for STAT4 (NM_003151.2,629-647).
gcctctagagaaatcctta

SEQ ID NO: 12144 - DNA, 19 bp, Homo sapiens
  siRNA target sequence for STAT4 (NM_003151.2,636-654).
gagaaatccttacaaagtt

SEQ ID NO: 12145 - DNA, 19 bp, Homo sapiens
  siRNA target sequence for STAT4 (NM_003151.2,726-744).
gaacaagataccaaatact

SEQ ID NO: 12146 - DNA, 19 bp, Homo sapiens
  siRNA target sequence for STAT4 (NM_003151.2,762-780).
gaatttgactacaggtata

SEQ ID NO: 12147 - DNA, 19 bp, Homo sapiens
  siRNA target sequence for STAT4 (NM_003151.2,768-786).
gactacaggtataaaacaa

SEQ ID NO: 12148 - DNA, 19 bp, Homo sapiens
  siRNA target sequence for STAT4 (NM_003151.2,770-788).
ctacaggtataaaacaatt

SEQ ID NO: 12149 - DNA, 19 bp, Homo sapiens
  siRNA target sequence for STAT4 (NM_003151.2,918-936).
gagacagacctgttaatga

SEQ ID NO: 12150 - DNA, 19 bp, Homo sapiens
  siRNA target sequence for STAT4 (NM_003151.2,935-953).
gaacaccatgctcatagaa

SEQ ID NO: 12151 - DNA, 19 bp, Homo sapiens
  siRNA target sequence for STAT4 (NM_003151.2,1029-1047).
cagaactgctttacactat

SEQ ID NO: 12152 - DNA, 19 bp, Homo sapiens
  siRNA target sequence for STAT4 (NM_003151.2,1044-1062).
ctattggcagaaagtcttt

SEQ ID NO: 12153 - DNA, 19 bp, Homo sapiens
  siRNA target sequence for STAT4 (NM_003151.2,1075-1093).
ggcaattggagaaactaga

SEQ ID NO: 12154 - DNA, 19 bp, Homo sapiens
  siRNA target sequence for STAT4 (NM_003151.2,1095-1113).
gagcaatctaccaaaatga

SEQ ID NO: 12155 - DNA, 19 bp, Homo sapiens
  siRNA target sequence for STAT4 (NM_003151.2,1097-1115).
gcaatctaccaaaatgaca

SEQ ID NO: 12156 - DNA, 19 bp, Homo sapiens
  siRNA target sequence for STAT4 (NM_003151.2,1125-1143).
gatcccattccaatgcaaa

SEQ ID NO: 12157 - DNA, 19 bp, Homo sapiens
  siRNA target sequence for STAT4 (NM_003151.2,1128-1146).
cccattccaatgcaaagaa

SEQ ID NO: 12158 - DNA, 19 bp, Homo sapiens
  siRNA target sequence for STAT4 (NM_003151.2,1162-1180).
gagtcaccttcttgatcta

SEQ ID NO: 12159 - DNA, 19 bp, Homo sapiens
  siRNA target sequence for STAT4 (NM_003151.2,1164-1182).
gtcaccttcttgatctaca

SEQ ID NO: 12160 - DNA, 19 bp, Homo sapiens
  siRNA target sequence for STAT4 (NM_003151.2,1239-1257).
cagaggccgttggtactta

SEQ ID NO: 12161 - DNA, 19 bp, Homo sapiens
  siRNA target sequence for STAT4 (NM_003151.2,1241-1259).
gaggccgttggtacttaaa

SEQ ID NO: 12162 - DNA, 19 bp, Homo sapiens
  siRNA target sequence for STAT4 (NM_003151.2,1278-1296).
gtaaaactaaggctactaa

SEQ ID NO: 12163 - DNA, 19 bp, Homo sapiens
  siRNA target sequence for STAT4 (NM_003151.2,1329-1347).
gttaaggcatcaattgaca

SEQ ID NO: 12164 - DNA, 19 bp, Homo sapiens
  siRNA target sequence for STAT4 (NM_003151.2,1334-1352).
ggcatcaattgacaagaat

SEQ ID NO: 12165 - DNA, 19 bp, Homo sapiens
  siRNA target sequence for STAT4 (NM_003151.2,1346-1364).
caagaatgtttcaactcta

SEQ ID NO: 12166 - DNA, 19 bp, Homo sapiens
  siRNA target sequence for STAT4 (NM_003151.2,1360-1378).
ctctaagcaaccgaagatt

SEQ ID NO: 12167 - DNA, 19 bp, Homo sapiens
  siRNA target sequence for STAT4 (NM_003151.2,1366-1384).
gcaaccgaagatttgtact

SEQ ID NO: 12168 - DNA, 19 bp, Homo sapiens
  siRNA target sequence for STAT4 (NM_003151.2,1367-1385).
caaccgaagatttgtactt

SEQ ID NO: 12169 - DNA, 19 bp, Homo sapiens
  siRNA target sequence for STAT4 (NM_003151.2,1370-1388).
ccgaagatttgtactttgt

SEQ ID NO: 12170 - DNA, 19 bp, Homo sapiens
  siRNA target sequence for STAT4 (NM_003151.2,1383-1401).
ctttgtggaactaatgtca

SEQ ID NO: 12171 - DNA, 19 bp, Homo sapiens
  siRNA target sequence for STAT4 (NM_003151.2,1431-1449).
gggagtctctcagtagaat

SEQ ID NO: 12172 - DNA, 19 bp, Homo sapiens
  siRNA target sequence for STAT4 (NM_003151.2,1517-1535).
ggtgactgaagaacttcat

SEQ ID NO: 12173 - DNA, 19 bp, Homo sapiens
  siRNA target sequence for STAT4 (NM_003151.2,1518-1536).
gtgactgaagaacttcatt

SEQ ID NO: 12174 - DNA, 19 bp, Homo sapiens
  siRNA target sequence for STAT4 (NM_003151.2,1527-1545).
gaacttcattccataacgt

SEQ ID NO: 12175 - DNA, 19 bp, Homo sapiens
  siRNA target sequence for STAT4 (NM_003151.2,1570-1588).
gcctgaccatagatttgga

SEQ ID NO: 12176 - DNA, 19 bp, Homo sapiens
  siRNA target sequence for STAT4 (NM_003151.2,1625-1643).
cagtcagttacctaatgct

SEQ ID NO: 12177 - DNA, 19 bp, Homo sapiens
  siRNA target sequence for STAT4 (NM_003151.2,1720-1738).
ccacattgagtcaactact

SEQ ID NO: 12178 - DNA, 19 bp, Homo sapiens
  siRNA target sequence for STAT4 (NM_003151.2,1770-1788).
gttggtcgtggtcttaact

SEQ ID NO: 12179 - DNA, 19 bp, Homo sapiens
  siRNA target sequence for STAT4 (NM_003151.2,1780-1798).
gtcttaactcagatcaact

SEQ ID NO: 12180 - DNA, 19 bp, Homo sapiens
  siRNA target sequence for STAT4 (NM_003151.2,1789-1807).
cagatcaactccatatgct

SEQ ID NO: 12181 - DNA, 19 bp, Homo sapiens
  siRNA target sequence for STAT4 (NM_003151.2,1868-1886).
ctgcaaggaacatttacct

SEQ ID NO: 12182 - DNA, 19 bp, Homo sapiens
  siRNA target sequence for STAT4 (NM_003151.2,1874-1892).
ggaacatttacctggtaaa

SEQ ID NO: 12183 - DNA, 19 bp, Homo sapiens
  siRNA target sequence for STAT4 (NM_003151.2,1875-1893).
gaacatttacctggtaaat

SEQ ID NO: 12184 - DNA, 19 bp, Homo sapiens
  siRNA target sequence for STAT4 (NM_003151.2,1878-1896).
catttacctggtaaatcat

SEQ ID NO: 12185 - DNA, 19 bp, Homo sapiens
  siRNA target sequence for STAT4 (NM_003151.2,1907-1925).
gacatggcttgaagcaata

SEQ ID NO: 12186 - DNA, 19 bp, Homo sapiens
  siRNA target sequence for STAT4 (NM_003151.2,1912-1930).
ggcttgaagcaatattgga

SEQ ID NO: 12187 - DNA, 19 bp, Homo sapiens
  siRNA target sequence for STAT4 (NM_003151.2,1913-1931).
gcttgaagcaatattggat

SEQ ID NO: 12188 - DNA, 19 bp, Homo sapiens
  siRNA target sequence for STAT4 (NM_003151.2,1976-1994).
catgggctttgttagcaaa

SEQ ID NO: 12189 - DNA, 19 bp, Homo sapiens
  siRNA target sequence for STAT4 (NM_003151.2,2027-2045).
gcctggcacctttttatta

SEQ ID NO: 12190 - DNA, 19 bp, Homo sapiens
  siRNA target sequence for STAT4 (NM_003151.2,2028-2046).
cctggcacctttttattaa

SEQ ID NO: 12191 - DNA, 19 bp, Homo sapiens
  siRNA target sequence for STAT4 (NM_003151.2,2060-2078).
ccatctcggaggaataact

SEQ ID NO: 12192 - DNA, 19 bp, Homo sapiens
  siRNA target sequence for STAT4 (NM_003151.2,2061-2079).
catctcggaggaataactt

SEQ ID NO: 12193 - DNA, 19 bp, Homo sapiens
  siRNA target sequence for STAT4 (NM_003151.2,2083-2101).
cctgggtggaccattctga

SEQ ID NO: 12194 - DNA, 19 bp, Homo sapiens
  siRNA target sequence for STAT4 (NM_003151.2,2084-2102).
ctgggtggaccattctgaa

SEQ ID NO: 12195 - DNA, 19 bp, Homo sapiens
  siRNA target sequence for STAT4 (NM_003151.2,2087-2105).
ggtggaccattctgaaagt

SEQ ID NO: 12196 - DNA, 19 bp, Homo sapiens
  siRNA target sequence for STAT4 (NM_003151.2,2114-2132).
gagattccactctgtagaa

SEQ ID NO: 12197 - DNA, 19 bp, Homo sapiens
  siRNA target sequence for STAT4 (NM_003151.2,2123-2141).
ctctgtagaaccctacaat

SEQ ID NO: 12198 - DNA, 19 bp, Homo sapiens
  siRNA target sequence for STAT4 (NM_003151.2,2125-2143).
ctgtagaaccctacaataa

SEQ ID NO: 12199 - DNA, 19 bp, Homo sapiens
  siRNA target sequence for STAT4 (NM_003151.2,2174-2192).
catcctgcgagactacaaa

SEQ ID NO: 12200 - DNA, 19 bp, Homo sapiens
  siRNA target sequence for STAT4 (NM_003151.2,2177-2195).
cctgcgagactacaaagtt

SEQ ID NO: 12201 - DNA, 19 bp, Homo sapiens
  siRNA target sequence for STAT4 (NM_003151.2,2180-2198).
gcgagactacaaagttatt

SEQ ID NO: 12202 - DNA, 19 bp, Homo sapiens
  siRNA target sequence for STAT4 (NM_003151.2,2181-2199).
cgagactacaaagttatta

SEQ ID NO: 12203 - DNA, 19 bp, Homo sapiens
  siRNA target sequence for STAT4 (NM_003151.2,2286-2304).
cagccttgcgaagtttcaa

SEQ ID NO: 12204 - DNA, 19 bp, Homo sapiens
  siRNA target sequence for STAT4 (NM_003151.2,2288-2306).
gccttgcgaagtttcaaga

SEQ ID NO: 12205 - DNA, 19 bp, Homo sapiens
  siRNA target sequence for STAT4 (NM_003151.2,2317-2335).
ggggtgacaaaggttatgt

SEQ ID NO: 12206 - DNA, 19 bp, Homo sapiens
  siRNA target sequence for STAT4 (NM_003151.2,2318-2336).
gggtgacaaaggttatgtt

SEQ ID NO: 12207 - DNA, 19 bp, Homo sapiens
  siRNA target sequence for STAT4 (NM_003151.2,2431-2449).
cggtgttgagagaaaacct

SEQ ID NO: 12208 - DNA, 19 bp, Homo sapiens
  siRNA target sequence for STAT4 (NM_003151.2,2447-2465).
cctgagtcccacaacaatt

SEQ ID NO: 12209 - DNA, 19 bp, Homo sapiens
  siRNA target sequence for STAT4 (NM_003151.2,2450-2468).
gagtcccacaacaattgaa

SEQ ID NO: 12210 - DNA, 19 bp, Homo sapiens
  siRNA target sequence for STAT5A (NM_003152.2,916-934).
cgcagctccagaaaacata

SEQ ID NO: 12211 - DNA, 19 bp, Homo sapiens
  siRNA target sequence for STAT5A (NM_003152.2,964-982).
gcatccggcacattctgta

SEQ ID NO: 12212 - DNA, 19 bp, Homo sapiens
  siRNA target sequence for STAT5A (NM_003152.2,970-988).
ggcacattctgtacaatga

SEQ ID NO: 12213 - DNA, 19 bp, Homo sapiens
  siRNA target sequence for STAT5A (NM_003152.2,2416-2434).
gggccatcctaggttttgt

SEQ ID NO: 12214 - DNA, 19 bp, Homo sapiens
  siRNA target sequence for STAT5A (NM_003152.2,2418-2436).
gccatcctaggttttgtga

SEQ ID NO: 12215 - DNA, 19 bp, Homo sapiens
  siRNA target sequence for STAT5A (NM_003152.2,2472-2490).
cccgacgggaccttcttgt

SEQ ID NO: 12216 - DNA, 19 bp, Homo sapiens
  siRNA target sequence for STAT5A (NM_003152.2,2473-2491).
ccgacgggaccttcttgtt

SEQ ID NO: 12217 - DNA, 19 bp, Homo sapiens
  siRNA target sequence for STAT5A (NM_003152.2,2483-2501).
cttcttgttgcgctttagt

SEQ ID NO: 12218 - DNA, 19 bp, Homo sapiens
  siRNA target sequence for STAT5A (NM_003152.2,2493-2511).
cgctttagtgactcagaaa

SEQ ID NO: 12219 - DNA, 19 bp, Homo sapiens
  siRNA target sequence for STAT5A (NM_003152.2,2622-2640).
ggggacctgagctatctca

SEQ ID NO: 12220 - DNA, 19 bp, Homo sapiens
  siRNA target sequence for STAT5A (NM_003152.2,2699-2717).
gctggctaaagctgttgat

SEQ ID NO: 12221 - DNA, 19 bp, Homo sapiens
  siRNA target sequence for STAT5B (NM_012448.2,285-303).
cgttatatggccagcattt

SEQ ID NO: 12222 - DNA, 19 bp, Homo sapiens
  siRNA target sequence for STAT5B (NM_012448.2,286-304).
gttatatggccagcatttt

SEQ ID NO: 12223 - DNA, 19 bp, Homo sapiens
  siRNA target sequence for STAT5B (NM_012448.2,311-329).
gaggtgcggcattatttat

SEQ ID NO: 12224 - DNA, 19 bp, Homo sapiens
  siRNA target sequence for STAT5B (NM_012448.2,351-369).
catgggactcagtagatct

SEQ ID NO: 12225 - DNA, 19 bp, Homo sapiens
  siRNA target sequence for STAT5B (NM_012448.2,354-372).
gggactcagtagatcttga

SEQ ID NO: 12226 - DNA, 19 bp, Homo sapiens
  siRNA target sequence for STAT5B (NM_012448.2,355-373).
ggactcagtagatcttgat

SEQ ID NO: 12227 - DNA, 19 bp, Homo sapiens
  siRNA target sequence for STAT5B (NM_012448.2,356-374).
gactcagtagatcttgata

SEQ ID NO: 12228 - DNA, 19 bp, Homo sapiens
  siRNA target sequence for STAT5B (NM_012448.2,358-376).
ctcagtagatcttgataat

SEQ ID NO: 12229 - DNA, 19 bp, Homo sapiens
  siRNA target sequence for STAT5B (NM_012448.2,545-563).
cgctgcatccgccatatat

SEQ ID NO: 12230 - DNA, 19 bp, Homo sapiens
  siRNA target sequence for STAT5B (NM_012448.2,546-564).
gctgcatccgccatatatt

SEQ ID NO: 12231 - DNA, 19 bp, Homo sapiens
  siRNA target sequence for STAT5B (NM_012448.2,549-567).
gcatccgccatatattgta

SEQ ID NO: 12232 - DNA, 19 bp, Homo sapiens
  siRNA target sequence for STAT5B (NM_012448.2,553-571).
ccgccatatattgtacaat

SEQ ID NO: 12233 - DNA, 19 bp, Homo sapiens
  siRNA target sequence for STAT5B (NM_012448.2,555-573).
gccatatattgtacaatga

SEQ ID NO: 12234 - DNA, 19 bp, Homo sapiens
  siRNA target sequence for STAT5B (NM_012448.2,556-574).
ccatatattgtacaatgaa

SEQ ID NO: 12235 - DNA, 19 bp, Homo sapiens
  siRNA target sequence for STAT5B (NM_012448.2,1567-1585).
gttcagtgttggtggaaat

SEQ ID NO: 12236 - DNA, 19 bp, Homo sapiens
  siRNA target sequence for STAT5B (NM_012448.2,1581-1599).
gaaatgagctggtttttca

SEQ ID NO: 12237 - DNA, 19 bp, Homo sapiens
  siRNA target sequence for STAT5B (NM_012448.2,1670-1688).
gttctctgggacaatgctt

SEQ ID NO: 12238 - DNA, 19 bp, Homo sapiens
  siRNA target sequence for STAT5B (NM_012448.2,1675-1693).
ctgggacaatgcttttgca

SEQ ID NO: 12239 - DNA, 19 bp, Homo sapiens
  siRNA target sequence for STAT5B (NM_012448.2,1916-1934).
ccaggacggaattacactt

SEQ ID NO: 12240 - DNA, 19 bp, Homo sapiens
  siRNA target sequence for STAT5B (NM_012448.2,1917-1935).
caggacggaattacacttt

SEQ ID NO: 12241 - DNA, 19 bp, Homo sapiens
  siRNA target sequence for STAT5B (NM_012448.2,1919-1937).
ggacggaattacactttct

SEQ ID NO: 12242 - DNA, 19 bp, Homo sapiens
  siRNA target sequence for STAT5B (NM_012448.2,2002-2020).
ggccattttggggtttgta

SEQ ID NO: 12243 - DNA, 19 bp, Homo sapiens
  siRNA target sequence for STAT5B (NM_012448.2,2032-2050).
ggcccatgacctactcatt

SEQ ID NO: 12244 - DNA, 19 bp, Homo sapiens
  siRNA target sequence for STAT5B (NM_012448.2,2033-2051).
gcccatgacctactcatta

SEQ ID NO: 12245 - DNA, 19 bp, Homo sapiens
  siRNA target sequence for STAT5B (NM_012448.2,2036-2054).
catgacctactcattaaca

SEQ ID NO: 12246 - DNA, 19 bp, Homo sapiens
  siRNA target sequence for STAT5B (NM_012448.2,2099-2117).
ggcggcatcaccattgctt

SEQ ID NO: 12247 - DNA, 19 bp, Homo sapiens
  siRNA target sequence for STAT5B (NM_012448.2,2200-2218).
ccgcttgggagacttgaat

SEQ ID NO: 12248 - DNA, 19 bp, Homo sapiens
  siRNA target sequence for STAT5B (NM_012448.2,2201-2219).
cgcttgggagacttgaatt

SEQ ID NO: 12249 - DNA, 19 bp, Homo sapiens
  siRNA target sequence for STAT5B (NM_012448.2,2206-2224).
gggagacttgaattacctt

SEQ ID NO: 12250 - DNA, 19 bp, Homo sapiens
  siRNA target sequence for STAT5B (NM_012448.2,2207-2225).
ggagacttgaattacctta

SEQ ID NO: 12251 - DNA, 19 bp, Homo sapiens
  siRNA target sequence for STAT5B (NM_012448.2,2208-2226).
gagacttgaattaccttat

SEQ ID NO: 12252 - DNA, 19 bp, Homo sapiens
  siRNA target sequence for STAT5B (NM_012448.2,2210-2228).
gacttgaattaccttatct

SEQ ID NO: 12253 - DNA, 19 bp, Homo sapiens
  siRNA target sequence for STAT5B (NM_012448.2,2238-2256).
ctgatcggccaaaagatga

SEQ ID NO: 12254 - DNA, 19 bp, Homo sapiens
  siRNA target sequence for STAT5B (NM_012448.2,2246-2264).
ccaaaagatgaagtatact

SEQ ID NO: 12255 - DNA, 19 bp, Homo sapiens
  siRNA target sequence for STAT5B (NM_012448.2,2290-2308).
cgagtctgctactgctaaa

SEQ ID NO: 12256 - DNA, 19 bp, Homo sapiens
  siRNA target sequence for STAT5B (NM_012448.2,2293-2311).
gtctgctactgctaaagct

SEQ ID NO: 12257 - DNA, 19 bp, Homo sapiens
  siRNA target sequence for STAT6 (NM_003153.3,495-513).
gcaccatcttgcaacacat

SEQ ID NO: 12258 - DNA, 19 bp, Homo sapiens
  siRNA target sequence for STAT6 (NM_003153.3,516-534).
gcacccttgagagcatata

SEQ ID NO: 12259 - DNA, 19 bp, Homo sapiens
  siRNA target sequence for STAT6 (NM_003153.3,517-535).
cacccttgagagcatatat

SEQ ID NO: 12260 - DNA, 19 bp, Homo sapiens
  siRNA target sequence for STAT6 (NM_003153.3,519-537).
cccttgagagcatatatca

SEQ ID NO: 12261 - DNA, 19 bp, Homo sapiens
  siRNA target sequence for STAT6 (NM_003153.3,647-665).
gaagaactcaagtttaaga

SEQ ID NO: 12262 - DNA, 19 bp, Homo sapiens
  siRNA target sequence for STAT6 (NM_003153.3,757-775).
gcacagcttgatagaaact

SEQ ID NO: 12263 - DNA, 19 bp, Homo sapiens
  siRNA target sequence for STAT6 (NM_003153.3,766-784).
gatagaaactcctgctaat

SEQ ID NO: 12264 - DNA, 19 bp, Homo sapiens
  siRNA target sequence for STAT6 (NM_003153.3,1796-1814).
ggccgtggcttcacctttt

SEQ ID NO: 12265 - DNA, 19 bp, Homo sapiens
  siRNA target sequence for STAT6 (NM_003153.3,1869-1887).
ggtctgaccggctgatcat

SEQ ID NO: 12266 - DNA, 19 bp, Homo sapiens
  siRNA target sequence for STAT6 (NM_003153.3,2011-2029).
ggatggctctccacagata

SEQ ID NO: 12267 - DNA, 19 bp, Homo sapiens
  siRNA target sequence for STAT6 (NM_003153.3,2099-2117).
gctcagctcaaaaatctct

SEQ ID NO: 12268 - DNA, 19 bp, Homo sapiens
  siRNA target sequence for STAT6 (NM_003153.3,2142-2160).
ctttccggagccactacaa

SEQ ID NO: 12269 - DNA, 19 bp, Homo sapiens
  siRNA target sequence for STAT6 (NM_003153.3,2265-2283).
ccatggtgccttcttatga

SEQ ID NO: 12270 - DNA, 19 bp, Homo sapiens
  siRNA target sequence for STAT6 (NM_003153.3,2622-2640).
cttggattggtgaagacat

SEQ ID NO: 12271 - DNA, 19 bp, Homo sapiens
  siRNA target sequence for STAT6 (NM_003153.3,2664-2682).
ctgaacaggacctcactaa

SEQ ID NO: 12272 - DNA, 19 bp, Homo sapiens
  siRNA target sequence for STAT6 (NM_003153.3,2762-2780).
caatctgggatctcaatgt

SEQ ID NO: 12273 - DNA, 19 bp, Homo sapiens
  siRNA target sequence for SUPT4H1 (NM_003168.1,123-141).
gttcgctggtcaagactat

SEQ ID NO: 12274 - DNA, 19 bp, Homo sapiens
  siRNA target sequence for SUPT4H1 (NM_003168.1,126-144).
cgctggtcaagactataga

SEQ ID NO: 12275 - DNA, 19 bp, Homo sapiens
  siRNA target sequence for SUPT4H1 (NM_003168.1,165-183).
gtgacaattgtgatgcata

SEQ ID NO: 12276 - DNA, 19 bp, Homo sapiens
  siRNA target sequence for SUPT4H1 (NM_003168.1,169-187).
caattgtgatgcatatcta

SEQ ID NO: 12277 - DNA, 19 bp, Homo sapiens
  siRNA target sequence for SUPT4H1 (NM_003168.1,174-192).
gtgatgcatatctacaaat

SEQ ID NO: 12278 - DNA, 19 bp, Homo sapiens
  siRNA target sequence for SUPT4H1 (NM_003168.1,176-194).
gatgcatatctacaaatga

SEQ ID NO: 12279 - DNA, 19 bp, Homo sapiens
  siRNA target sequence for SUPT4H1 (NM_003168.1,197-215).
ggtaaccgagagatggtat

SEQ ID NO: 12280 - DNA, 19 bp, Homo sapiens
  siRNA target sequence for SUPT4H1 (NM_003168.1,198-216).
gtaaccgagagatggtata

SEQ ID NO: 12281 - DNA, 19 bp, Homo sapiens
  siRNA target sequence for SUPT4H1 (NM_003168.1,220-238).
ctgcactagctcttccttt

SEQ ID NO: 12282 - DNA, 19 bp, Homo sapiens
  siRNA target sequence for SUPT4H1 (NM_003168.1,339-357).
gtcgcctgccccaaggaat

SEQ ID NO: 12283 - DNA, 19 bp, Homo sapiens
  siRNA target sequence for SUPT4H1 (NM_003168.1,358-376).
cgtgcgggagctgaaaagt

SEQ ID NO: 12284 - DNA, 19 bp, Homo sapiens
  siRNA target sequence for SUPT4H1 (NM_003168.1,380-398).
ggagtggcctacaaatcca

SEQ ID NO: 12285 - DNA, 19 bp, Homo sapiens
  siRNA target sequence for SUPT5H (NM_003169.2,216-234).
cagcgaggacagcaacttt

SEQ ID NO: 12286 - DNA, 19 bp, Homo sapiens
  siRNA target sequence for SUPT5H (NM_003169.2,305-323).
cagcgggcagtgagaaaga

SEQ ID NO: 12287 - DNA, 19 bp, Homo sapiens
  siRNA target sequence for SUPT5H (NM_003169.2,446-464).
ctgatgttgacgatgagta

SEQ ID NO: 12288 - DNA, 19 bp, Homo sapiens
  siRNA target sequence for SUPT5H (NM_003169.2,523-541).
gaagcctccaatatcgata

SEQ ID NO: 12289 - DNA, 19 bp, Homo sapiens
  siRNA target sequence for SUPT5H (NM_003169.2,616-634).
ctgggcgagtattacatga

SEQ ID NO: 12290 - DNA, 19 bp, Homo sapiens
  siRNA target sequence for SUPT5H (NM_003169.2,619-637).
ggcgagtattacatgaaga

SEQ ID NO: 12291 - DNA, 19 bp, Homo sapiens
  siRNA target sequence for SUPT5H (NM_003169.2,620-638).
gcgagtattacatgaagaa

SEQ ID NO: 12292 - DNA, 19 bp, Homo sapiens
  siRNA target sequence for SUPT5H (NM_003169.2,666-684).
ggtgtatggaggatctgat

SEQ ID NO: 12293 - DNA, 19 bp, Homo sapiens
  siRNA target sequence for SUPT5H (NM_003169.2,746-764).
ggactgtcaaatgtaagat

SEQ ID NO: 12294 - DNA, 19 bp, Homo sapiens
  siRNA target sequence for SUPT5H (NM_003169.2,747-765).
gactgtcaaatgtaagatt

SEQ ID NO: 12295 - DNA, 19 bp, Homo sapiens
  siRNA target sequence for SUPT5H (NM_003169.2,775-793).
cgggccacggccatttcct

SEQ ID NO: 12296 - DNA, 19 bp, Homo sapiens
  siRNA target sequence for SUPT5H (NM_003169.2,865-883).
catgtgaagggctacatct

SEQ ID NO: 12297 - DNA, 19 bp, Homo sapiens
  siRNA target sequence for SUPT5H (NM_003169.2,1112-1130).
ccatctccctgaagatgat

SEQ ID NO: 12298 - DNA, 19 bp, Homo sapiens
  siRNA target sequence for SUPT5H (NM_003169.2,1493-1511).
gtgagggtgagctcatcaa

SEQ ID NO: 12299 - DNA, 19 bp, Homo sapiens
  siRNA target sequence for SUPT5H (NM_003169.2,1597-1615).
ccagcccaggaacttagaa

SEQ ID NO: 12300 - DNA, 19 bp, Homo sapiens
  siRNA target sequence for SUPT5H (NM_003169.2,1689-1707).
ggtggaggagaatttcgtt

SEQ ID NO: 12301 - DNA, 19 bp, Homo sapiens
  siRNA target sequence for SUPT5H (NM_003169.2,1990-2008).
catgtgaaagacatcgtta

SEQ ID NO: 12302 - DNA, 19 bp, Homo sapiens
  siRNA target sequence for SUPT5H (NM_003169.2,2042-2060).
gggagattcgccatctctt

SEQ ID NO: 12303 - DNA, 19 bp, Homo sapiens
  siRNA target sequence for SUPT5H (NM_003169.2,2161-2179).
cgtgatgtgaccaacttca

SEQ ID NO: 12304 - DNA, 19 bp, Homo sapiens
  siRNA target sequence for SUPT5H (NM_003169.2,2245-2263).
cagcgtggcggctttggta

SEQ ID NO: 12305 - DNA, 19 bp, Homo sapiens
  siRNA target sequence for SUPT5H (NM_003169.2,2306-2324).
ggagggacaacgaactcat

SEQ ID NO: 12306 - DNA, 19 bp, Homo sapiens
  siRNA target sequence for SUPT5H (NM_003169.2,2523-2541).
ctcccagacgcccatgtat

SEQ ID NO: 12307 - DNA, 19 bp, Homo sapiens
  siRNA target sequence for SUPT5H (NM_003169.2,2959-2977).
ccagcaggctaccagaata

SEQ ID NO: 12308 - DNA, 19 bp, Homo sapiens
  siRNA target sequence for SUPT5H (NM_003169.2,3141-3159).
ctgggtaaccactgacatt

SEQ ID NO: 12309 - DNA, 19 bp, Homo sapiens
  siRNA target sequence for SUPT5H (NM_003169.2,3366-3384).
cgtcctactgagcattgat

SEQ ID NO: 12310 - DNA, 19 bp, Homo sapiens
  siRNA target sequence for SUPT6H (NM_003170.2,160-178).
ccccgagtcaccaagaaat

SEQ ID NO: 12311 - DNA, 19 bp, Homo sapiens
  siRNA target sequence for SUPT6H (NM_003170.2,235-253).
gatgagcaaggcaacttga

SEQ ID NO: 12312 - DNA, 19 bp, Homo sapiens
  siRNA target sequence for SUPT6H (NM_003170.2,249-267).
cttgaaaggctttatcaat

SEQ ID NO: 12313 - DNA, 19 bp, Homo sapiens
  siRNA target sequence for SUPT6H (NM_003170.2,306-324).
cagtgactctggtgattca

SEQ ID NO: 12314 - DNA, 19 bp, Homo sapiens
  siRNA target sequence for SUPT6H (NM_003170.2,373-391).
cgcctggaggatgatgatt

SEQ ID NO: 12315 - DNA, 19 bp, Homo sapiens
  siRNA target sequence for SUPT6H (NM_003170.2,405-423).
ggagaatttgggtgtcaaa

SEQ ID NO: 12316 - DNA, 19 bp, Homo sapiens
  siRNA target sequence for SUPT6H (NM_003170.2,441-459).
gtaccggcgtgtcaaaaaa

SEQ ID NO: 12317 - DNA, 19 bp, Homo sapiens
  siRNA target sequence for SUPT6H (NM_003170.2,445-463).
cggcgtgtcaaaaaaatgt

SEQ ID NO: 12318 - DNA, 19 bp, Homo sapiens
  siRNA target sequence for SUPT6H (NM_003170.2,521-539).
ctattgcggaagaaatctt

SEQ ID NO: 12319 - DNA, 19 bp, Homo sapiens
  siRNA target sequence for SUPT6H (NM_003170.2,626-644).
cagatattgacgacttcat

SEQ ID NO: 12320 - DNA, 19 bp, Homo sapiens
  siRNA target sequence for SUPT6H (NM_003170.2,655-673).
gatggacagcctctgaaaa

SEQ ID NO: 12321 - DNA, 19 bp, Homo sapiens
  siRNA target sequence for SUPT6H (NM_003170.2,741-759).
cggtgtggactttgactat

SEQ ID NO: 12322 - DNA, 19 bp, Homo sapiens
  siRNA target sequence for SUPT6H (NM_003170.2,747-765).
ggactttgactatgatgaa

SEQ ID NO: 12323 - DNA, 19 bp, Homo sapiens
  siRNA target sequence for SUPT6H (NM_003170.2,879-897).
gagccgtaggagcatcttt

SEQ ID NO: 12324 - DNA, 19 bp, Homo sapiens
  siRNA target sequence for SUPT6H (NM_003170.2,1046-1064).
ggatctacaggaatgcttt

SEQ ID NO: 12325 - DNA, 19 bp, Homo sapiens
  siRNA target sequence for SUPT6H (NM_003170.2,1047-1065).
gatctacaggaatgctttt

SEQ ID NO: 12326 - DNA, 19 bp, Homo sapiens
  siRNA target sequence for SUPT6H (NM_003170.2,1089-1107).
ggaaagctgtgattaccta

SEQ ID NO: 12327 - DNA, 19 bp, Homo sapiens
  siRNA target sequence for SUPT6H (NM_003170.2,1144-1162).
gggcccagcacaattcaga

SEQ ID NO: 12328 - DNA, 19 bp, Homo sapiens
  siRNA target sequence for SUPT6H (NM_003170.2,1151-1169).
gcacaattcagaagatcaa

SEQ ID NO: 12329 - DNA, 19 bp, Homo sapiens
  siRNA target sequence for SUPT6H (NM_003170.2,1245-1263).
gcctgagttgcacatcaat

SEQ ID NO: 12330 - DNA, 19 bp, Homo sapiens
  siRNA target sequence for SUPT6H (NM_003170.2,1306-1324).
ctgcggatccgtaaagaga

SEQ ID NO: 12331 - DNA, 19 bp, Homo sapiens
  siRNA target sequence for SUPT6H (NM_003170.2,1327-1345).
ctaacacggctgtttgaga

SEQ ID NO: 12332 - DNA, 19 bp, Homo sapiens
  siRNA target sequence for SUPT6H (NM_003170.2,1347-1365).
gatgcaggcttatcagtat

SEQ ID NO: 12333 - DNA, 19 bp, Homo sapiens
  siRNA target sequence for SUPT6H (NM_003170.2,1355-1373).
cttatcagtatgaacagat

SEQ ID NO: 12334 - DNA, 19 bp, Homo sapiens
  siRNA target sequence for SUPT6H (NM_003170.2,1441-1459).
ctcaaggatgtccaatcaa

SEQ ID NO: 12335 - DNA, 19 bp, Homo sapiens
  siRNA target sequence for SUPT6H (NM_003170.2,1505-1523).
gccgagacatccctaagat

SEQ ID NO: 12336 - DNA, 19 bp, Homo sapiens
  siRNA target sequence for SUPT6H (NM_003170.2,1643-1661).
cctctcgccgagacatgta

SEQ ID NO: 12337 - DNA, 19 bp, Homo sapiens
  siRNA target sequence for SUPT6H (NM_003170.2,1794-1812).
gctggccaaggattacgtt

SEQ ID NO: 12338 - DNA, 19 bp, Homo sapiens
  siRNA target sequence for SUPT6H (NM_003170.2,1795-1813).
ctggccaaggattacgttt

SEQ ID NO: 12339 - DNA, 19 bp, Homo sapiens
  siRNA target sequence for SUPT6H (NM_003170.2,1982-2000).
cccactatgcctattcctt

SEQ ID NO: 12340 - DNA, 19 bp, Homo sapiens
  siRNA target sequence for SUPT6H (NM_003170.2,2013-2031).
gaacaagcctgttaaggaa

SEQ ID NO: 12341 - DNA, 19 bp, Homo sapiens
  siRNA target sequence for SUPT6H (NM_003170.2,2090-2108).
ctgacatcagcatagattt

SEQ ID NO: 12342 - DNA, 19 bp, Homo sapiens
  siRNA target sequence for SUPT6H (NM_003170.2,2128-2146).
ggcaacgaccagacatatt

SEQ ID NO: 12343 - DNA, 19 bp, Homo sapiens
  siRNA target sequence for SUPT6H (NM_003170.2,2129-2147).
gcaacgaccagacatattt

SEQ ID NO: 12344 - DNA, 19 bp, Homo sapiens
  siRNA target sequence for SUPT6H (NM_003170.2,2130-2148).
caacgaccagacatatttt

SEQ ID NO: 12345 - DNA, 19 bp, Homo sapiens
  siRNA target sequence for SUPT6H (NM_003170.2,2225-2243).
ccatcgaacgggctttaca

SEQ ID NO: 12346 - DNA, 19 bp, Homo sapiens
  siRNA target sequence for SUPT6H (NM_003170.2,2324-2342).
gtagtcgaaagctctacaa

SEQ ID NO: 12347 - DNA, 19 bp, Homo sapiens
  siRNA target sequence for SUPT6H (NM_003170.2,2329-2347).
cgaaagctctacaattggt

SEQ ID NO: 12348 - DNA, 19 bp, Homo sapiens
  siRNA target sequence for SUPT6H (NM_003170.2,2330-2348).
gaaagctctacaattggtt

SEQ ID NO: 12349 - DNA, 19 bp, Homo sapiens
  siRNA target sequence for SUPT6H (NM_003170.2,2428-2446).
cgagtcctcggcattgctt

SEQ ID NO: 12350 - DNA, 19 bp, Homo sapiens
  siRNA target sequence for SUPT6H (NM_003170.2,2429-2447).
gagtcctcggcattgcttt

SEQ ID NO: 12351 - DNA, 19 bp, Homo sapiens
  siRNA target sequence for SUPT6H (NM_003170.2,2514-2532).
ccttcgactgccccatttt

SEQ ID NO: 12352 - DNA, 19 bp, Homo sapiens
  siRNA target sequence for SUPT6H (NM_003170.2,2515-2533).
cttcgactgccccatttta

SEQ ID NO: 12353 - DNA, 19 bp, Homo sapiens
  siRNA target sequence for SUPT6H (NM_003170.2,2654-2672).
gggacgcccagatgttgat

SEQ ID NO: 12354 - DNA, 19 bp, Homo sapiens
  siRNA target sequence for SUPT6H (NM_003170.2,2655-2673).
ggacgcccagatgttgatt

SEQ ID NO: 12355 - DNA, 19 bp, Homo sapiens
  siRNA target sequence for SUPT6H (NM_003170.2,2658-2676).
cgcccagatgttgattgaa

SEQ ID NO: 12356 - DNA, 19 bp, Homo sapiens
  siRNA target sequence for SUPT6H (NM_003170.2,2751-2769).
cgagttggccattctctat

SEQ ID NO: 12357 - DNA, 19 bp, Homo sapiens
  siRNA target sequence for SUPT6H (NM_003170.2,2790-2808).
ggcagagttccgggattat

SEQ ID NO: 12358 - DNA, 19 bp, Homo sapiens
  siRNA target sequence for SUPT6H (NM_003170.2,2847-2865).
catccaggaccctctgatt

SEQ ID NO: 12359 - DNA, 19 bp, Homo sapiens
  siRNA target sequence for SUPT6H (NM_003170.2,2850-2868).
ccaggaccctctgattgaa

SEQ ID NO: 12360 - DNA, 19 bp, Homo sapiens
  siRNA target sequence for SUPT6H (NM_003170.2,2851-2869).
caggaccctctgattgaat

SEQ ID NO: 12361 - DNA, 19 bp, Homo sapiens
  siRNA target sequence for SUPT6H (NM_003170.2,2882-2900).
gcagttccgatgaagacat

SEQ ID NO: 12362 - DNA, 19 bp, Homo sapiens
  siRNA target sequence for SUPT6H (NM_003170.2,3163-3181).
cccaaagtcttcatgaatt

SEQ ID NO: 12363 - DNA, 19 bp, Homo sapiens
  siRNA target sequence for SUPT6H (NM_003170.2,3224-3242).
gcactgactcatatattga

SEQ ID NO: 12364 - DNA, 19 bp, Homo sapiens
  siRNA target sequence for SUPT6H (NM_003170.2,3227-3245).
ctgactcatatattgaagt

SEQ ID NO: 12365 - DNA, 19 bp, Homo sapiens
  siRNA target sequence for SUPT6H (NM_003170.2,3260-3278).
gtgtccaccctgagactta

SEQ ID NO: 12366 - DNA, 19 bp, Homo sapiens
  siRNA target sequence for SUPT6H (NM_003170.2,3299-3317).
cagtggatgccctggaata

SEQ ID NO: 12367 - DNA, 19 bp, Homo sapiens
  siRNA target sequence for SUPT6H (NM_003170.2,3434-3452).
gctatggtgacaaacacat

SEQ ID NO: 12368 - DNA, 19 bp, Homo sapiens
  siRNA target sequence for SUPT6H (NM_003170.2,3475-3493).
gagctgagctgtcgatata

SEQ ID NO: 12369 - DNA, 19 bp, Homo sapiens
  siRNA target sequence for SUPT6H (NM_003170.2,3529-3547).
gaggagatcttcaatatgt

SEQ ID NO: 12370 - DNA, 19 bp, Homo sapiens
  siRNA target sequence for SUPT6H (NM_003170.2,3645-3663).
ccaggcgatccgcaatgat

SEQ ID NO: 12371 - DNA, 19 bp, Homo sapiens
  siRNA target sequence for SUPT6H (NM_003170.2,3724-3742).
gtgtggaaccactttgaca

SEQ ID NO: 12372 - DNA, 19 bp, Homo sapiens
  siRNA target sequence for SUPT6H (NM_003170.2,3759-3777).
ccaggccatcggtgtcaaa

SEQ ID NO: 12373 - DNA, 19 bp, Homo sapiens
  siRNA target sequence for SUPT6H (NM_003170.2,3760-3778).
caggccatcggtgtcaaaa

SEQ ID NO: 12374 - DNA, 19 bp, Homo sapiens
  siRNA target sequence for SUPT6H (NM_003170.2,3762-3780).
ggccatcggtgtcaaaaca

SEQ ID NO: 12375 - DNA, 19 bp, Homo sapiens
  siRNA target sequence for SUPT6H (NM_003170.2,3774-3792).
caaaacacggctagacaat

SEQ ID NO: 12376 - DNA, 19 bp, Homo sapiens
  siRNA target sequence for SUPT6H (NM_003170.2,3880-3898).
cactgccgcatcatgaaga

SEQ ID NO: 12377 - DNA, 19 bp, Homo sapiens
  siRNA target sequence for SUPT6H (NM_003170.2,3882-3900).
ctgccgcatcatgaagatt

SEQ ID NO: 12378 - DNA, 19 bp, Homo sapiens
  siRNA target sequence for SUPT6H (NM_003170.2,3884-3902).
gccgcatcatgaagattga

SEQ ID NO: 12379 - DNA, 19 bp, Homo sapiens
  siRNA target sequence for SUPT6H (NM_003170.2,3975-3993).
gcccaaagacacctactat

SEQ ID NO: 12380 - DNA, 19 bp, Homo sapiens
  siRNA target sequence for SUPT6H (NM_003170.2,3977-3995).
ccaaagacacctactatga

SEQ ID NO: 12381 - DNA, 19 bp, Homo sapiens
  siRNA target sequence for SUPT6H (NM_003170.2,4048-4066).
cagcagcggaccacataca

SEQ ID NO: 12382 - DNA, 19 bp, Homo sapiens
  siRNA target sequence for SUPT6H (NM_003170.2,4054-4072).
cggaccacatacatcaaga

SEQ ID NO: 12383 - DNA, 19 bp, Homo sapiens
  siRNA target sequence for SUPT6H (NM_003170.2,4087-4105).
ccatccttccataatatca

SEQ ID NO: 12384 - DNA, 19 bp, Homo sapiens
  siRNA target sequence for SUPT6H (NM_003170.2,4088-4106).
catccttccataatatcaa

SEQ ID NO: 12385 - DNA, 19 bp, Homo sapiens
  siRNA target sequence for SUPT6H (NM_003170.2,4286-4304).
ggatcaacagtgaggaatt

SEQ ID NO: 12386 - DNA, 19 bp, Homo sapiens
  siRNA target sequence for SUPT6H (NM_003170.2,4295-4313).
gtgaggaattcgaagattt

SEQ ID NO: 12387 - DNA, 19 bp, Homo sapiens
  siRNA target sequence for SUPT6H (NM_003170.2,4365-4383).
ccttctgaatcacaagtat

SEQ ID NO: 12388 - DNA, 19 bp, Homo sapiens
  siRNA target sequence for SUPT6H (NM_003170.2,4399-4417).
ggtggggaccgcaagaaat

SEQ ID NO: 12389 - DNA, 19 bp, Homo sapiens
  siRNA target sequence for SUPT6H (NM_003170.2,4423-4441).
gagctgctcatcaaaacta

SEQ ID NO: 12390 - DNA, 19 bp, Homo sapiens
  siRNA target sequence for SUPT6H (NM_003170.2,4453-4471).
cccaccttcatcccttatt

SEQ ID NO: 12391 - DNA, 19 bp, Homo sapiens
  siRNA target sequence for SUPT6H (NM_003170.2,4529-4547).
gtaaacccaggatagaata

SEQ ID NO: 12392 - DNA, 19 bp, Homo sapiens
  siRNA target sequence for SUPT6H (NM_003170.2,4599-4617).
cgtgaatggactgtttaga

SEQ ID NO: 12393 - DNA, 19 bp, Homo sapiens
  siRNA target sequence for SUPT6H (NM_003170.2,4606-4624).
ggactgtttagatggttta

SEQ ID NO: 12394 - DNA, 19 bp, Homo sapiens
  siRNA target sequence for SUPT6H (NM_003170.2,4616-4634).
gatggtttaaggatcacta

SEQ ID NO: 12395 - DNA, 19 bp, Homo sapiens
  siRNA target sequence for SUPT6H (NM_003170.2,4681-4699).
cggacacctgcctctatca

SEQ ID NO: 12396 - DNA, 19 bp, Homo sapiens
  siRNA target sequence for SUPT6H (NM_003170.2,4682-4700).
ggacacctgcctctatcaa

SEQ ID NO: 12397 - DNA, 19 bp, Homo sapiens
  siRNA target sequence for SUPT6H (NM_003170.2,4683-4701).
gacacctgcctctatcaat

SEQ ID NO: 12398 - DNA, 19 bp, Homo sapiens
  siRNA target sequence for SUPT6H (NM_003170.2,4687-4705).
cctgcctctatcaatgcta

SEQ ID NO: 12399 - DNA, 19 bp, Homo sapiens
  siRNA target sequence for SUPT6H (NM_003170.2,4883-4901).
gcagtgcttaccacgtatt

SEQ ID NO: 12400 - DNA, 19 bp, Homo sapiens
  siRNA target sequence for T (NM_003181.2,971-989).
ctgaactccttgcataagt

SEQ ID NO: 12401 - DNA, 19 bp, Homo sapiens
  siRNA target sequence for T (NM_003181.2,973-991).
gaactccttgcataagtat

SEQ ID NO: 12402 - DNA, 19 bp, Homo sapiens
  siRNA target sequence for T (NM_003181.2,1022-1040).
ggtccacagcgcatgatca

SEQ ID NO: 12403 - DNA, 19 bp, Homo sapiens
  siRNA target sequence for T (NM_003181.2,1372-1390).
ctatgctcatcggaacaat

SEQ ID NO: 12404 - DNA, 19 bp, Homo sapiens
  siRNA target sequence for T (NM_003181.2,1387-1405).
caattctccaacctattct

SEQ ID NO: 12405 - DNA, 19 bp, Homo sapiens
  siRNA target sequence for TADA2L (NM_001488.2,395-413).
gcaatgatccctctgataa

SEQ ID NO: 12406 - DNA, 19 bp, Homo sapiens
  siRNA target sequence for TADA2L (NM_001488.2,535-553).
catcaaagcgatcatactt

SEQ ID NO: 12407 - DNA, 19 bp, Homo sapiens
  siRNA target sequence for TADA2L (NM_001488.2,542-560).
gcgatcatacttatgaaat

SEQ ID NO: 12408 - DNA, 19 bp, Homo sapiens
  siRNA target sequence for TADA2L (NM_001488.2,544-562).
gatcatacttatgaaataa

SEQ ID NO: 12409 - DNA, 19 bp, Homo sapiens
  siRNA target sequence for TADA2L (NM_001488.2,657-675).
gcaggatgtagccaatcaa

SEQ ID NO: 12410 - DNA, 19 bp, Homo sapiens
  siRNA target sequence for TADA2L (NM_001488.2,661-679).
gatgtagccaatcaaatgt

SEQ ID NO: 12411 - DNA, 19 bp, Homo sapiens
  siRNA target sequence for TADA2L (NM_001488.2,701-719).
gtgagaagcactatatgaa

SEQ ID NO: 12412 - DNA, 19 bp, Homo sapiens
  siRNA target sequence for TADA2L (NM_001488.2,829-847).
ccccgacctacctttgact

SEQ ID NO: 12413 - DNA, 19 bp, Homo sapiens
  siRNA target sequence for TADA2L (NM_001488.2,884-902).
ctcgagcagatttcattga

SEQ ID NO: 12414 - DNA, 19 bp, Homo sapiens
  siRNA target sequence for TADA2L (NM_001488.2,952-970).
gaagatgactcggacattt

SEQ ID NO: 12415 - DNA, 19 bp, Homo sapiens
  siRNA target sequence for TADA2L (NM_001488.2,987-1005).
ggctgtggtagatatctat

SEQ ID NO: 12416 - DNA, 19 bp, Homo sapiens
  siRNA target sequence for TADA2L (NM_001488.2,1054-1072).
catggattaatcaacctta

SEQ ID NO: 12417 - DNA, 19 bp, Homo sapiens
  siRNA target sequence for TADA2L (NM_001488.2,1057-1075).
ggattaatcaaccttagaa

SEQ ID NO: 12418 - DNA, 19 bp, Homo sapiens
  siRNA target sequence for TADA2L (NM_001488.2,1058-1076).
gattaatcaaccttagaaa

SEQ ID NO: 12419 - DNA, 19 bp, Homo sapiens
  siRNA target sequence for TADA2L (NM_001488.2,1068-1086).
ccttagaaagtttcaatta

SEQ ID NO: 12420 - DNA, 19 bp, Homo sapiens
  siRNA target sequence for TADA2L (NM_001488.2,1073-1091).
gaaagtttcaattaatgga

SEQ ID NO: 12421 - DNA, 19 bp, Homo sapiens
  siRNA target sequence for TADA2L (NM_001488.2,1111-1129).
gtccaggacctgtatgaaa

SEQ ID NO: 12422 - DNA, 19 bp, Homo sapiens
  siRNA target sequence for TADA2L (NM_001488.2,1114-1132).
caggacctgtatgaaacaa

SEQ ID NO: 12423 - DNA, 19 bp, Homo sapiens
  siRNA target sequence for TADA2L (NM_001488.2,1134-1152).
gaggcgatttgcaagaatt

SEQ ID NO: 12424 - DNA, 19 bp, Homo sapiens
  siRNA target sequence for TADA2L (NM_001488.2,1136-1154).
ggcgatttgcaagaattgt

SEQ ID NO: 12425 - DNA, 19 bp, Homo sapiens
  siRNA target sequence for TADA2L (NM_001488.2,1157-1175).
ggccagtggaacatgacaa

SEQ ID NO: 12426 - DNA, 19 bp, Homo sapiens
  siRNA target sequence for TADA2L (NM_001488.2,1159-1177).
ccagtggaacatgacaaat

SEQ ID NO: 12427 - DNA, 19 bp, Homo sapiens
  siRNA target sequence for TADA2L (NM_001488.2,1168-1186).
catgacaaattcattgaaa

SEQ ID NO: 12428 - DNA, 19 bp, Homo sapiens
  siRNA target sequence for TADA2L (NM_001488.2,1183-1201).
gaaagccatgcattggaat

SEQ ID NO: 12429 - DNA, 19 bp, Homo sapiens
  siRNA target sequence for TADA2L (NM_001488.2,1422-1440).
cattccaatggcttcgaat

SEQ ID NO: 12430 - DNA, 19 bp, Homo sapiens
  siRNA target sequence for TADA2L (NM_001488.2,1542-1560).
ccctggagcctatttagaa

SEQ ID NO: 12431 - DNA, 19 bp, Homo sapiens
  siRNA target sequence for TADA2L (NM_001488.2,1543-1561).
cctggagcctatttagaat

SEQ ID NO: 12432 - DNA, 19 bp, Homo sapiens
  siRNA target sequence for TADA2L (NM_001488.2,1544-1562).
ctggagcctatttagaata

SEQ ID NO: 12433 - DNA, 19 bp, Homo sapiens
  siRNA target sequence for TADA2L (NM_001488.2,1546-1564).
ggagcctatttagaataca

SEQ ID NO: 12434 - DNA, 19 bp, Homo sapiens
  siRNA target sequence for TADA2L (NM_001488.2,1547-1565).
gagcctatttagaatacaa

SEQ ID NO: 12435 - DNA, 19 bp, Homo sapiens
  siRNA target sequence for TADA2L (NM_001488.2,1551-1569).
ctatttagaatacaaatct

SEQ ID NO: 12436 - DNA, 19 bp, Homo sapiens
  siRNA target sequence for TADA2L (NM_001488.2,1570-1588).
gctctattgaacgaatgta

SEQ ID NO: 12437 - DNA, 19 bp, Homo sapiens
  siRNA target sequence for TADA2L (NM_001488.2,1571-1589).
ctctattgaacgaatgtaa

SEQ ID NO: 12438 - DNA, 19 bp, Homo sapiens
  siRNA target sequence for TADA2L (NM_001488.2,1573-1591).
ctattgaacgaatgtaaca

SEQ ID NO: 12439 - DNA, 19 bp, Homo sapiens
  siRNA target sequence for TADA2L (NM_001488.2,1590-1608).
caagcaaggaggcttaaga

SEQ ID NO: 12440 - DNA, 19 bp, Homo sapiens
  siRNA target sequence for TADA2L (NM_001488.2,1618-1636).
gcaagagcactcatcaaga

SEQ ID NO: 12441 - DNA, 19 bp, Homo sapiens
  siRNA target sequence for TADA2L (NM_001488.2,1619-1637).
caagagcactcatcaagat

SEQ ID NO: 12442 - DNA, 19 bp, Homo sapiens
  siRNA target sequence for TADA2L (NM_001488.2,1625-1643).
cactcatcaagatagatgt

SEQ ID NO: 12443 - DNA, 19 bp, Homo sapiens
  siRNA target sequence for TADA2L (NM_001488.2,1632-1650).
caagatagatgtgaacaaa

SEQ ID NO: 12444 - DNA, 19 bp, Homo sapiens
  siRNA target sequence for TADA2L (NM_001488.2,1647-1665).
caaaacccggaaaatctat

SEQ ID NO: 12445 - DNA, 19 bp, Homo sapiens
  siRNA target sequence for TADA2L (NM_133439.1,1262-1280).
gtgtgttttatgtgaagtt

SEQ ID NO: 12446 - DNA, 19 bp, Homo sapiens
  siRNA target sequence for TADA3L (NM_006354.2,806-824).
gggtcgagaccatgaactt

SEQ ID NO: 12447 - DNA, 19 bp, Homo sapiens
  siRNA target sequence for TADA3L (NM_006354.2,932-950).
caagatccaggaatatgaa

SEQ ID NO: 12448 - DNA, 19 bp, Homo sapiens
  siRNA target sequence for TADA3L (NM_006354.2,974-992).
gccacggatccccaaaaat

SEQ ID NO: 12449 - DNA, 19 bp, Homo sapiens
  siRNA target sequence for TADA3L (NM_006354.2,1060-1078).
gcacacttgaggagttact

SEQ ID NO: 12450 - DNA, 19 bp, Homo sapiens
  siRNA target sequence for TADA3L (NM_006354.2,1195-1213).
cggctgtggctgacaagaa

SEQ ID NO: 12451 - DNA, 19 bp, Homo sapiens
  siRNA target sequence for TADA3L (NM_006354.2,1235-1253).
gaccgaactggacactaaa

SEQ ID NO: 12452 - DNA, 19 bp, Homo sapiens
  siRNA target sequence for TADA3L (NM_006354.2,1438-1456).
cctcccctcgcaatcagaa

SEQ ID NO: 12453 - DNA, 19 bp, Homo sapiens
  siRNA target sequence for TADA3L (NM_006354.2,1441-1459).
cccctcgcaatcagaacaa

SEQ ID NO: 12454 - DNA, 19 bp, Homo sapiens
  siRNA target sequence for TAF10 (NM_006284.2,366-384).
cgcctttggtggacttctt

SEQ ID NO: 12455 - DNA, 19 bp, Homo sapiens
  siRNA target sequence for TAF10 (NM_006284.2,463-481).
ctcagacccacgcataatt

SEQ ID NO: 12456 - DNA, 19 bp, Homo sapiens
  siRNA target sequence for TAF10 (NM_006284.2,503-521).
cagaaattcatctcagata

SEQ ID NO: 12457 - DNA, 19 bp, Homo sapiens
  siRNA target sequence for TAF10 (NM_006284.2,593-611).
gaccgcaagtacactctaa

SEQ ID NO: 12458 - DNA, 19 bp, Homo sapiens
  siRNA target sequence for TAF10 (NM_006284.2,597-615).
gcaagtacactctaaccat

SEQ ID NO: 12459 - DNA, 19 bp, Homo sapiens
  siRNA target sequence for TAF10 (NM_006284.2,637-655).
cagcgagtatggcatcaat

SEQ ID NO: 12460 - DNA, 19 bp, Homo sapiens
  siRNA target sequence for TAF10 (NM_006284.2,639-657).
gcgagtatggcatcaatgt

SEQ ID NO: 12461 - DNA, 19 bp, Homo sapiens
  siRNA target sequence for TAF13 (NM_005645.2,47-65).
ccacgtttgaggaagaaaa

SEQ ID NO: 12462 - DNA, 19 bp, Homo sapiens
  siRNA target sequence for TAF13 (NM_005645.2,122-140).
ctaaagaattgcgatgtat

SEQ ID NO: 12463 - DNA, 19 bp, Homo sapiens
  siRNA target sequence for TAF13 (NM_005645.2,155-173).
gggatgaccagaatcctta

SEQ ID NO: 12464 - DNA, 19 bp, Homo sapiens
  siRNA target sequence for TAF13 (NM_005645.2,176-194).
ctgagtcagtggatattct

SEQ ID NO: 12465 - DNA, 19 bp, Homo sapiens
  siRNA target sequence for TAF13 (NM_005645.2,230-248).
ctcacaaggcaatgtcaat

SEQ ID NO: 12466 - DNA, 19 bp, Homo sapiens
  siRNA target sequence for TAF13 (NM_005645.2,234-252).
caaggcaatgtcaattgga

SEQ ID NO: 12467 - DNA, 19 bp, Homo sapiens
  siRNA target sequence for TAF13 (NM_005645.2,254-272).
gacaaggtcgagtacaagt

SEQ ID NO: 12468 - DNA, 19 bp, Homo sapiens
  siRNA target sequence for TAF13 (NM_005645.2,262-280).
cgagtacaagttgaagata

SEQ ID NO: 12469 - DNA, 19 bp, Homo sapiens
  siRNA target sequence for TAF13 (NM_005645.2,274-292).
gaagatatcgtcttcttga

SEQ ID NO: 12470 - DNA, 19 bp, Homo sapiens
  siRNA target sequence for TAF1B (NM_005680.1,155-173).
ctcatggggtcttactgat

SEQ ID NO: 12471 - DNA, 19 bp, Homo sapiens
  siRNA target sequence for TAF1B (NM_005680.1,169-187).
ctgatgaaggcaaatatta

SEQ ID NO: 12472 - DNA, 19 bp, Homo sapiens
  siRNA target sequence for TAF1B (NM_005680.1,190-208).
gcacttcttgccacaatgt

SEQ ID NO: 12473 - DNA, 19 bp, Homo sapiens
  siRNA target sequence for TAF1B (NM_005680.1,191-209).
cacttcttgccacaatgtt

SEQ ID NO: 12474 - DNA, 19 bp, Homo sapiens
  siRNA target sequence for TAF1B (NM_005680.1,228-246).
gttacaaacactgatctta

SEQ ID NO: 12475 - DNA, 19 bp, Homo sapiens
  siRNA target sequence for TAF1B (NM_005680.1,309-327).
ggctgggattggtatgtgt

SEQ ID NO: 12476 - DNA, 19 bp, Homo sapiens
  siRNA target sequence for TAF1B (NM_005680.1,334-352).
gtttccagtatattcttta

SEQ ID NO: 12477 - DNA, 19 bp, Homo sapiens
  siRNA target sequence for TAF1B (NM_005680.1,382-400).
gagtaggcccagagttaaa

SEQ ID NO: 12478 - DNA, 19 bp, Homo sapiens
  siRNA target sequence for TAF1B (NM_005680.1,384-402).
gtaggcccagagttaaaga

SEQ ID NO: 12479 - DNA, 19 bp, Homo sapiens
  siRNA target sequence for TAF1B (NM_005680.1,487-505).
ggaaacctacggtattaga

SEQ ID NO: 12480 - DNA, 19 bp, Homo sapiens
  siRNA target sequence for TAF1B (NM_005680.1,492-510).
cctacggtattagaagata

SEQ ID NO: 12481 - DNA, 19 bp, Homo sapiens
  siRNA target sequence for TAF1B (NM_005680.1,493-511).
ctacggtattagaagataa

SEQ ID NO: 12482 - DNA, 19 bp, Homo sapiens
  siRNA target sequence for TAF1B (NM_005680.1,605-623).
catccacactcgaaaacct

SEQ ID NO: 12483 - DNA, 19 bp, Homo sapiens
  siRNA target sequence for TAF1B (NM_005680.1,673-691).
ctctggatggagttgaata

SEQ ID NO: 12484 - DNA, 19 bp, Homo sapiens
  siRNA target sequence for TAF1B (NM_005680.1,677-695).
ggatggagttgaatactca

SEQ ID NO: 12485 - DNA, 19 bp, Homo sapiens
  siRNA target sequence for TAF1B (NM_005680.1,735-753).
cagacacttgccttctgtt

SEQ ID NO: 12486 - DNA, 19 bp, Homo sapiens
  siRNA target sequence for TAF1B (NM_005680.1,737-755).
gacacttgccttctgttat

SEQ ID NO: 12487 - DNA, 19 bp, Homo sapiens
  siRNA target sequence for TAF1B (NM_005680.1,773-791).
gagagaagcaataacactt

SEQ ID NO: 12488 - DNA, 19 bp, Homo sapiens
  siRNA target sequence for TAF1B (NM_005680.1,813-831).
gaagaggaccatattcctt

SEQ ID NO: 12489 - DNA, 19 bp, Homo sapiens
  siRNA target sequence for TAF1B (NM_005680.1,818-836).
ggaccatattccttacata

SEQ ID NO: 12490 - DNA, 19 bp, Homo sapiens
  siRNA target sequence for TAF1B (NM_005680.1,819-837).
gaccatattccttacataa

SEQ ID NO: 12491 - DNA, 19 bp, Homo sapiens
  siRNA target sequence for TAF1B (NM_005680.1,829-847).
cttacataaatgcttttca

SEQ ID NO: 12492 - DNA, 19 bp, Homo sapiens
  siRNA target sequence for TAF1B (NM_005680.1,855-873).
ccagaacagatgaaattat

SEQ ID NO: 12493 - DNA, 19 bp, Homo sapiens
  siRNA target sequence for TAF1B (NM_005680.1,877-895).
gacgtgacagaggaatctt

SEQ ID NO: 12494 - DNA, 19 bp, Homo sapiens
  siRNA target sequence for TAF1B (NM_005680.1,888-906).
ggaatctttggtatagagt

SEQ ID NO: 12495 - DNA, 19 bp, Homo sapiens
  siRNA target sequence for TAF1B (NM_005680.1,913-931).
ctgactacgaggacatcta

SEQ ID NO: 12496 - DNA, 19 bp, Homo sapiens
  siRNA target sequence for TAF1B (NM_005680.1,988-1006).
ctgaagactgctatcttca

SEQ ID NO: 12497 - DNA, 19 bp, Homo sapiens
  siRNA target sequence for TAF1B (NM_005680.1,1002-1020).
cttcatcccaacatactgt

SEQ ID NO: 12498 - DNA, 19 bp, Homo sapiens
  siRNA target sequence for TAF1B (NM_005680.1,1008-1026).
cccaacatactgtgtatga

SEQ ID NO: 12499 - DNA, 19 bp, Homo sapiens
  siRNA target sequence for TAF1B (NM_005680.1,1041-1059).
gtcaacctccctgatgaaa

SEQ ID NO: 12500 - DNA, 19 bp, Homo sapiens
  siRNA target sequence for TAF1B (NM_005680.1,1051-1069).
ctgatgaaatgcatagctt

SEQ ID NO: 12501 - DNA, 19 bp, Homo sapiens
  siRNA target sequence for TAF1B (NM_005680.1,1056-1074).
gaaatgcatagcttaactt

SEQ ID NO: 12502 - DNA, 19 bp, Homo sapiens
  siRNA target sequence for TAF1B (NM_005680.1,1076-1094).
ccacgtggtaaaaatgact

SEQ ID NO: 12503 - DNA, 19 bp, Homo sapiens
  siRNA target sequence for TAF1B (NM_005680.1,1118-1136).
gacatttgatcctatagct

SEQ ID NO: 12504 - DNA, 19 bp, Homo sapiens
  siRNA target sequence for TAF1B (NM_005680.1,1150-1168).
ctgttaagtacgatgtaca

SEQ ID NO: 12505 - DNA, 19 bp, Homo sapiens
  siRNA target sequence for TAF1B (NM_005680.1,1177-1195).
ctatcattgtggtggtatt

SEQ ID NO: 12506 - DNA, 19 bp, Homo sapiens
  siRNA target sequence for TAF1B (NM_005680.1,1226-1244).
cgagtggtctttgtctaat

SEQ ID NO: 12507 - DNA, 19 bp, Homo sapiens
  siRNA target sequence for TAF1B (NM_005680.1,1240-1258).
ctaatcttgctgaaaagca

SEQ ID NO: 12508 - DNA, 19 bp, Homo sapiens
  siRNA target sequence for TAF1B (NM_005680.1,1384-1402).
gtgaaaagccactctacta

SEQ ID NO: 12509 - DNA, 19 bp, Homo sapiens
  siRNA target sequence for TAF1B (NM_005680.1,1386-1404).
gaaaagccactctactact

SEQ ID NO: 12510 - DNA, 19 bp, Homo sapiens
  siRNA target sequence for TAF1B (NM_005680.1,1391-1409).
gccactctactactcattt

SEQ ID NO: 12511 - DNA, 19 bp, Homo sapiens
  siRNA target sequence for TAF1B (NM_005680.1,1412-1430).
cgacaaaccagtagcatat

SEQ ID NO: 12512 - DNA, 19 bp, Homo sapiens
  siRNA target sequence for TAF1B (NM_005680.1,1415-1433).
caaaccagtagcatataaa

SEQ ID NO: 12513 - DNA, 19 bp, Homo sapiens
  siRNA target sequence for TAF1B (NM_005680.1,1605-1623).
caatcactgctgactaaga

SEQ ID NO: 12514 - DNA, 19 bp, Homo sapiens
  siRNA target sequence for TAF1B (NM_005680.1,1611-1629).
ctgctgactaagaattcat

SEQ ID NO: 12515 - DNA, 19 bp, Homo sapiens
  siRNA target sequence for TAF1B (NM_005680.1,1614-1632).
ctgactaagaattcattat

SEQ ID NO: 12516 - DNA, 19 bp, Homo sapiens
  siRNA target sequence for TAF1B (NM_005680.1,1638-1656).
cttagtacacagaaattct

SEQ ID NO: 12517 - DNA, 19 bp, Homo sapiens
  siRNA target sequence for TAF1B (NM_005680.1,1649-1667).
gaaattctgcagatgctat

SEQ ID NO: 12518 - DNA, 19 bp, Homo sapiens
  siRNA target sequence for TAF1B (NM_005680.1,1684-1702).
cctatgaagaatcaaatta

SEQ ID NO: 12519 - DNA, 19 bp, Homo sapiens
  siRNA target sequence for TAF1B (NM_005680.1,1705-1723).
ctctgagttatcagtttat

SEQ ID NO: 12520 - DNA, 19 bp, Homo sapiens
  siRNA target sequence for TAF1B (NM_005680.1,1783-1801).
gcttagttgagaagaaact

SEQ ID NO: 12521 - DNA, 19 bp, Homo sapiens
  siRNA target sequence for TAF4 (NM_003185.2,25-43).
gacgaggtcttcttcaaca

SEQ ID NO: 12522 - DNA, 19 bp, Homo sapiens
  siRNA target sequence for TAF4 (NM_003185.2,170-188).
cgctcgggaaccatgttgt

SEQ ID NO: 12523 - DNA, 19 bp, Homo sapiens
  siRNA target sequence for TAF4 (NM_003185.2,635-653).
ctgtcagcctggtcaacaa

SEQ ID NO: 12524 - DNA, 19 bp, Homo sapiens
  siRNA target sequence for TAF4 (NM_003185.2,1116-1134).
catcgggccaactatgcaa

SEQ ID NO: 12525 - DNA, 19 bp, Homo sapiens
  siRNA target sequence for TAF4 (NM_003185.2,1362-1380).
cctcgtccgaagtgagaat

SEQ ID NO: 12526 - DNA, 19 bp, Homo sapiens
  siRNA target sequence for TAF4 (NM_003185.2,1545-1563).
ggtgaccccaactaccata

SEQ ID NO: 12527 - DNA, 19 bp, Homo sapiens
  siRNA target sequence for TAF4 (NM_003185.2,1548-1566).
gaccccaactaccataatt

SEQ ID NO: 12528 - DNA, 19 bp, Homo sapiens
  siRNA target sequence for TAF4 (NM_003185.2,1750-1768).
gccacggaaactatggaaa

SEQ ID NO: 12529 - DNA, 19 bp, Homo sapiens
  siRNA target sequence for TAF4 (NM_003185.2,1754-1772).
cggaaactatggaaaacgt

SEQ ID NO: 12530 - DNA, 19 bp, Homo sapiens
  siRNA target sequence for TAF4 (NM_003185.2,1770-1788).
cgtgaagaaatgtaaaaat

SEQ ID NO: 12531 - DNA, 19 bp, Homo sapiens
  siRNA target sequence for TAF4 (NM_003185.2,1791-1809).
cctatctacgttaataaaa

SEQ ID NO: 12532 - DNA, 19 bp, Homo sapiens
  siRNA target sequence for TAF4 (NM_003185.2,1913-1931).
ggttataccgagaacttaa

SEQ ID NO: 12533 - DNA, 19 bp, Homo sapiens
  siRNA target sequence for TAF4 (NM_003185.2,1914-1932).
gttataccgagaacttaat

SEQ ID NO: 12534 - DNA, 19 bp, Homo sapiens
  siRNA target sequence for TAF4 (NM_003185.2,1920-1938).
ccgagaacttaattcttca

SEQ ID NO: 12535 - DNA, 19 bp, Homo sapiens
  siRNA target sequence for TAF4 (NM_003185.2,2460-2478).
gcctgggggaggttcgttt

SEQ ID NO: 12536 - DNA, 19 bp, Homo sapiens
  siRNA target sequence for TAF4 (NM_003185.2,2474-2492).
cgtttcgggacgatgatga

SEQ ID NO: 12537 - DNA, 19 bp, Homo sapiens
  siRNA target sequence for TAF4 (NM_003185.2,2479-2497).
cgggacgatgatgacatta

SEQ ID NO: 12538 - DNA, 19 bp, Homo sapiens
  siRNA target sequence for TAF4 (NM_003185.2,2480-2498).
gggacgatgatgacattaa

SEQ ID NO: 12539 - DNA, 19 bp, Homo sapiens
  siRNA target sequence for TAF4 (NM_003185.2,2481-2499).
ggacgatgatgacattaat

SEQ ID NO: 12540 - DNA, 19 bp, Homo sapiens
  siRNA target sequence for TAF4 (NM_003185.2,2507-2525).
catcgatggctggagtaaa

SEQ ID NO: 12541 - DNA, 19 bp, Homo sapiens
  siRNA target sequence for TAF4 (NM_003185.2,2510-2528).
cgatggctggagtaaactt

SEQ ID NO: 12542 - DNA, 19 bp, Homo sapiens
  siRNA target sequence for TAF4 (NM_003185.2,2585-2603).
cgcggtcctgtaaagatga

SEQ ID NO: 12543 - DNA, 19 bp, Homo sapiens
  siRNA target sequence for TAF4 (NM_003185.2,2586-2604).
gcggtcctgtaaagatgaa

SEQ ID NO: 12544 - DNA, 19 bp, Homo sapiens
  siRNA target sequence for TAF4 (NM_003185.2,2587-2605).
cggtcctgtaaagatgaaa

SEQ ID NO: 12545 - DNA, 19 bp, Homo sapiens
  siRNA target sequence for TAF4 (NM_003185.2,2670-2688).
ggaattacatccagatgta

SEQ ID NO: 12546 - DNA, 19 bp, Homo sapiens
  siRNA target sequence for TAF4 (NM_003185.2,2677-2695).
catccagatgtagtaagtt

SEQ ID NO: 12547 - DNA, 19 bp, Homo sapiens
  siRNA target sequence for TAF4 (NM_003185.2,2683-2701).
gatgtagtaagttatgtat

SEQ ID NO: 12548 - DNA, 19 bp, Homo sapiens
  siRNA target sequence for TAF4 (NM_003185.2,2711-2729).
cgcaacaaaggctacagaa

SEQ ID NO: 12549 - DNA, 19 bp, Homo sapiens
  siRNA target sequence for TAF4 (NM_003185.2,2712-2730).
gcaacaaaggctacagaat

SEQ ID NO: 12550 - DNA, 19 bp, Homo sapiens
  siRNA target sequence for TAF4 (NM_003185.2,2778-2796).
caaggatgacgacagatat

SEQ ID NO: 12551 - DNA, 19 bp, Homo sapiens
  siRNA target sequence for TAF4 (NM_003185.2,2814-2832).
ccgggcacagctcaagttt

SEQ ID NO: 12552 - DNA, 19 bp, Homo sapiens
  siRNA target sequence for TAF4 (NM_003185.2,2815-2833).
cgggcacagctcaagtttt

SEQ ID NO: 12553 - DNA, 19 bp, Homo sapiens
  siRNA target sequence for TAF4 (NM_003185.2,2816-2834).
gggcacagctcaagttttt

SEQ ID NO: 12554 - DNA, 19 bp, Homo sapiens
  siRNA target sequence for TAF4 (NM_003185.2,2817-2835).
ggcacagctcaagtttttt

SEQ ID NO: 12555 - DNA, 19 bp, Homo sapiens
  siRNA target sequence for TAF4 (NM_003185.2,2907-2925).
gtctcggtcaagacaagaa

SEQ ID NO: 12556 - DNA, 19 bp, Homo sapiens
  siRNA target sequence for TAF4 (NM_003185.2,2935-2953).
cagttaaggctgaaacaga

SEQ ID NO: 12557 - DNA, 19 bp, Homo sapiens
  siRNA target sequence for TAF4 (NM_003185.2,3139-3157).
cagttcacgcgacaaagaa

SEQ ID NO: 12558 - DNA, 19 bp, Homo sapiens
  siRNA target sequence for TAF4 (NM_003185.2,3181-3199).
ctcatattttgtttagaaa

SEQ ID NO: 12559 - DNA, 19 bp, Homo sapiens
  siRNA target sequence for TAF4 (NM_003185.2,3223-3241).
ctgctgctctacaaagcat

SEQ ID NO: 12560 - DNA, 19 bp, Homo sapiens
  siRNA target sequence for TAF5 (NM_006951.2,565-583).
ctgcggctccgggtaaagt

SEQ ID NO: 12561 - DNA, 19 bp, Homo sapiens
  siRNA target sequence for TAF5 (NM_006951.2,645-663).
caaggagatcccacaatgt

SEQ ID NO: 12562 - DNA, 19 bp, Homo sapiens
  siRNA target sequence for TAF5 (NM_006951.2,654-672).
cccacaatgtatgaagaat

SEQ ID NO: 12563 - DNA, 19 bp, Homo sapiens
  siRNA target sequence for TAF5 (NM_006951.2,658-676).
caatgtatgaagaatacta

SEQ ID NO: 12564 - DNA, 19 bp, Homo sapiens
  siRNA target sequence for TAF5 (NM_006951.2,662-680).
gtatgaagaatactatagt

SEQ ID NO: 12565 - DNA, 19 bp, Homo sapiens
  siRNA target sequence for TAF5 (NM_006951.2,728-746).
gttgtcccaacttttttat

SEQ ID NO: 12566 - DNA, 19 bp, Homo sapiens
  siRNA target sequence for TAF5 (NM_006951.2,767-785).
cttggagctagtctacaat

SEQ ID NO: 12567 - DNA, 19 bp, Homo sapiens
  siRNA target sequence for TAF5 (NM_006951.2,770-788).
ggagctagtctacaatcaa

SEQ ID NO: 12568 - DNA, 19 bp, Homo sapiens
  siRNA target sequence for TAF5 (NM_006951.2,779-797).
ctacaatcaacatgagaat

SEQ ID NO: 12569 - DNA, 19 bp, Homo sapiens
  siRNA target sequence for TAF5 (NM_006951.2,801-819).
gcaaagtcattctttgaga

SEQ ID NO: 12570 - DNA, 19 bp, Homo sapiens
  siRNA target sequence for TAF5 (NM_006951.2,825-843).
catggagatcaggaatgtt

SEQ ID NO: 12571 - DNA, 19 bp, Homo sapiens
  siRNA target sequence for TAF5 (NM_006951.2,851-869).
ggatgacctacgagtatta

SEQ ID NO: 12572 - DNA, 19 bp, Homo sapiens
  siRNA target sequence for TAF5 (NM_006951.2,852-870).
gatgacctacgagtattat

SEQ ID NO: 12573 - DNA, 19 bp, Homo sapiens
  siRNA target sequence for TAF5 (NM_006951.2,855-873).
gacctacgagtattatcta

SEQ ID NO: 12574 - DNA, 19 bp, Homo sapiens
  siRNA target sequence for TAF5 (NM_006951.2,857-875).
cctacgagtattatctagt

SEQ ID NO: 12575 - DNA, 19 bp, Homo sapiens
  siRNA target sequence for TAF5 (NM_006951.2,871-889).
ctagtcttaccaaaaagga

SEQ ID NO: 12576 - DNA, 19 bp, Homo sapiens
  siRNA target sequence for TAF5 (NM_006951.2,914-932).
gttggattttcgaacaagt

SEQ ID NO: 12577 - DNA, 19 bp, Homo sapiens
  siRNA target sequence for TAF5 (NM_006951.2,917-935).
ggattttcgaacaagtaaa

SEQ ID NO: 12578 - DNA, 19 bp, Homo sapiens
  siRNA target sequence for TAF5 (NM_006951.2,918-936).
gattttcgaacaagtaaat

SEQ ID NO: 12579 - DNA, 19 bp, Homo sapiens
  siRNA target sequence for TAF5 (NM_006951.2,1055-1073).
gatgccgcgtagtaagcaa

SEQ ID NO: 12580 - DNA, 19 bp, Homo sapiens
  siRNA target sequence for TAF5 (NM_006951.2,1060-1078).
cgcgtagtaagcaacagat

SEQ ID NO: 12581 - DNA, 19 bp, Homo sapiens
  siRNA target sequence for TAF5 (NM_006951.2,1061-1079).
gcgtagtaagcaacagata

SEQ ID NO: 12582 - DNA, 19 bp, Homo sapiens
  siRNA target sequence for TAF5 (NM_006951.2,1063-1081).
gtagtaagcaacagataga

SEQ ID NO: 12583 - DNA, 19 bp, Homo sapiens
  siRNA target sequence for TAF5 (NM_006951.2,1100-1118).
ggcaggagaggctaaacga

SEQ ID NO: 12584 - DNA, 19 bp, Homo sapiens
  siRNA target sequence for TAF5 (NM_006951.2,1116-1134).
cgagaggcaaacaaatcaa

SEQ ID NO: 12585 - DNA, 19 bp, Homo sapiens
  siRNA target sequence for TAF5 (NM_006951.2,1235-1253).
gcctaaaaaagatagtatt

SEQ ID NO: 12586 - DNA, 19 bp, Homo sapiens
  siRNA target sequence for TAF5 (NM_006951.2,1245-1263).
gatagtattggatccaaaa

SEQ ID NO: 12587 - DNA, 19 bp, Homo sapiens
  siRNA target sequence for TAF5 (NM_006951.2,1249-1267).
gtattggatccaaaagcaa

SEQ ID NO: 12588 - DNA, 19 bp, Homo sapiens
  siRNA target sequence for TAF5 (NM_006951.2,1284-1302).
gctccacctcagaacagaa

SEQ ID NO: 12589 - DNA, 19 bp, Homo sapiens
  siRNA target sequence for TAF5 (NM_006951.2,1329-1347).
gataagttggataagataa

SEQ ID NO: 12590 - DNA, 19 bp, Homo sapiens
  siRNA target sequence for TAF5 (NM_006951.2,1389-1407).
gactgcttaccctccattt

SEQ ID NO: 12591 - DNA, 19 bp, Homo sapiens
  siRNA target sequence for TAF5 (NM_006951.2,1482-1500).
ggaggttttgcagattcaa

SEQ ID NO: 12592 - DNA, 19 bp, Homo sapiens
  siRNA target sequence for TAF5 (NM_006951.2,1513-1531).
ggtcggtaacacccaaaaa

SEQ ID NO: 12593 - DNA, 19 bp, Homo sapiens
  siRNA target sequence for TAF5 (NM_006951.2,1532-1550).
gcttcgtagtgtcaaacaa

SEQ ID NO: 12594 - DNA, 19 bp, Homo sapiens
  siRNA target sequence for TAF5 (NM_006951.2,1552-1570).
catcagatcttagtcttat

SEQ ID NO: 12595 - DNA, 19 bp, Homo sapiens
  siRNA target sequence for TAF5 (NM_006951.2,1557-1575).
gatcttagtcttatagaca

SEQ ID NO: 12596 - DNA, 19 bp, Homo sapiens
  siRNA target sequence for TAF5 (NM_006951.2,1676-1694).
cagtccggataggaactat

SEQ ID NO: 12597 - DNA, 19 bp, Homo sapiens
  siRNA target sequence for TAF5 (NM_006951.2,1678-1696).
gtccggataggaactatct

SEQ ID NO: 12598 - DNA, 19 bp, Homo sapiens
  siRNA target sequence for TAF5 (NM_006951.2,1710-1728).
gaggacggaactgttagat

SEQ ID NO: 12599 - DNA, 19 bp, Homo sapiens
  siRNA target sequence for TAF5 (NM_006951.2,1713-1731).
gacggaactgttagattgt

SEQ ID NO: 12600 - DNA, 19 bp, Homo sapiens
  siRNA target sequence for TAF5 (NM_006951.2,1730-1748).
gtggagccttcaaacattt

SEQ ID NO: 12601 - DNA, 19 bp, Homo sapiens
  siRNA target sequence for TAF5 (NM_006951.2,1733-1751).
gagccttcaaacatttact

SEQ ID NO: 12602 - DNA, 19 bp, Homo sapiens
  siRNA target sequence for TAF5 (NM_006951.2,1750-1768).
cttgtttggtgggatataa

SEQ ID NO: 12603 - DNA, 19 bp, Homo sapiens
  siRNA target sequence for TAF5 (NM_006951.2,1762-1780).
gatataaaggacacaacta

SEQ ID NO: 12604 - DNA, 19 bp, Homo sapiens
  siRNA target sequence for TAF5 (NM_006951.2,1782-1800).
ccagtatgggacacacaat

SEQ ID NO: 12605 - DNA, 19 bp, Homo sapiens
  siRNA target sequence for TAF5 (NM_006951.2,1783-1801).
cagtatgggacacacaatt

SEQ ID NO: 12606 - DNA, 19 bp, Homo sapiens
  siRNA target sequence for TAF5 (NM_006951.2,1793-1811).
cacacaattttctccatat

SEQ ID NO: 12607 - DNA, 19 bp, Homo sapiens
  siRNA target sequence for TAF5 (NM_006951.2,1797-1815).
caattttctccatatggat

SEQ ID NO: 12608 - DNA, 19 bp, Homo sapiens
  siRNA target sequence for TAF5 (NM_006951.2,1866-1884).
gaccactatcagcctttaa

SEQ ID NO: 12609 - DNA, 19 bp, Homo sapiens
  siRNA target sequence for TAF5 (NM_006951.2,1868-1886).
ccactatcagcctttaaga

SEQ ID NO: 12610 - DNA, 19 bp, Homo sapiens
  siRNA target sequence for TAF5 (NM_006951.2,1869-1887).
cactatcagcctttaagaa

SEQ ID NO: 12611 - DNA, 19 bp, Homo sapiens
  siRNA target sequence for TAF5 (NM_006951.2,1871-1889).
ctatcagcctttaagaata

SEQ ID NO: 12612 - DNA, 19 bp, Homo sapiens
  siRNA target sequence for TAF5 (NM_006951.2,1902-1920).
cttgctgatgtgaattgta

SEQ ID NO: 12613 - DNA, 19 bp, Homo sapiens
  siRNA target sequence for TAF5 (NM_006951.2,1918-1936).
gtaccagattccatccaaa

SEQ ID NO: 12614 - DNA, 19 bp, Homo sapiens
  siRNA target sequence for TAF5 (NM_006951.2,1928-1946).
ccatccaaattctaattat

SEQ ID NO: 12615 - DNA, 19 bp, Homo sapiens
  siRNA target sequence for TAF5 (NM_006951.2,1988-2006).
cgtcctgaatggtaactgt

SEQ ID NO: 12616 - DNA, 19 bp, Homo sapiens
  siRNA target sequence for TAF5 (NM_006951.2,1992-2010).
ctgaatggtaactgtgtaa

SEQ ID NO: 12617 - DNA, 19 bp, Homo sapiens
  siRNA target sequence for TAF5 (NM_006951.2,2023-2041).
gacacaagggaccaattca

SEQ ID NO: 12618 - DNA, 19 bp, Homo sapiens
  siRNA target sequence for TAF5 (NM_006951.2,2034-2052).
ccaattcattccttgacat

SEQ ID NO: 12619 - DNA, 19 bp, Homo sapiens
  siRNA target sequence for TAF5 (NM_006951.2,2163-2181).
gtctgttcacttaggttta

SEQ ID NO: 12620 - DNA, 19 bp, Homo sapiens
  siRNA target sequence for TAF5 (NM_006951.2,2165-2183).
ctgttcacttaggtttagt

SEQ ID NO: 12621 - DNA, 19 bp, Homo sapiens
  siRNA target sequence for TAF5 (NM_006951.2,2202-2220).
gcatcaggttcaatggata

SEQ ID NO: 12622 - DNA, 19 bp, Homo sapiens
  siRNA target sequence for TAF5 (NM_006951.2,2216-2234).
ggataatacagttcgatta

SEQ ID NO: 12623 - DNA, 19 bp, Homo sapiens
  siRNA target sequence for TAF5 (NM_006951.2,2230-2248).
gattatgggatgctatcaa

SEQ ID NO: 12624 - DNA, 19 bp, Homo sapiens
  siRNA target sequence for TAF5 (NM_006951.2,2324-2342).
gttattgttgggaacatat

SEQ ID NO: 12625 - DNA, 19 bp, Homo sapiens
  siRNA target sequence for TAF5 (NM_006951.2,2348-2366).
caaatcaacaccagttgta

SEQ ID NO: 12626 - DNA, 19 bp, Homo sapiens
  siRNA target sequence for TAF5 (NM_006951.2,2397-2415).
ctagctgcaggagcttata

SEQ ID NO: 12627 - DNA, 19 bp, Homo sapiens
  siRNA target sequence for TAF5L (NM_014409.2,110-128).
cgtaccgagcagattcaga

SEQ ID NO: 12628 - DNA, 19 bp, Homo sapiens
  siRNA target sequence for TAF5L (NM_014409.2,111-129).
gtaccgagcagattcagat

SEQ ID NO: 12629 - DNA, 19 bp, Homo sapiens
  siRNA target sequence for TAF5L (NM_014409.2,321-339).
gacgactgcggaattttct

SEQ ID NO: 12630 - DNA, 19 bp, Homo sapiens
  siRNA target sequence for TAF5L (NM_014409.2,329-347).
cggaattttctcactgatt

SEQ ID NO: 12631 - DNA, 19 bp, Homo sapiens
  siRNA target sequence for TAF5L (NM_014409.2,331-349).
gaattttctcactgattct

SEQ ID NO: 12632 - DNA, 19 bp, Homo sapiens
  siRNA target sequence for TAF5L (NM_014409.2,412-430).
caacctggtccaaaacagt

SEQ ID NO: 12633 - DNA, 19 bp, Homo sapiens
  siRNA target sequence for TAF5L (NM_014409.2,436-454).
gagcacagtggaaagtttt

SEQ ID NO: 12634 - DNA, 19 bp, Homo sapiens
  siRNA target sequence for TAF5L (NM_014409.2,438-456).
gcacagtggaaagttttta

SEQ ID NO: 12635 - DNA, 19 bp, Homo sapiens
  siRNA target sequence for TAF5L (NM_014409.2,459-477).
gccgcttccatggaatgtt

SEQ ID NO: 12636 - DNA, 19 bp, Homo sapiens
  siRNA target sequence for TAF5L (NM_014409.2,489-507).
ctagccagaaggatgtcat

SEQ ID NO: 12637 - DNA, 19 bp, Homo sapiens
  siRNA target sequence for TAF5L (NM_014409.2,512-530).
cagctacagaccactcaaa

SEQ ID NO: 12638 - DNA, 19 bp, Homo sapiens
  siRNA target sequence for TAF5L (NM_014409.2,560-578).
cttcgagcattcctagata

SEQ ID NO: 12639 - DNA, 19 bp, Homo sapiens
  siRNA target sequence for TAF5L (NM_014409.2,563-581).
cgagcattcctagataaca

SEQ ID NO: 12640 - DNA, 19 bp, Homo sapiens
  siRNA target sequence for TAF5L (NM_014409.2,564-582).
gagcattcctagataacaa

SEQ ID NO: 12641 - DNA, 19 bp, Homo sapiens
  siRNA target sequence for TAF5L (NM_014409.2,566-584).
gcattcctagataacaagt

SEQ ID NO: 12642 - DNA, 19 bp, Homo sapiens
  siRNA target sequence for TAF5L (NM_014409.2,605-623).
gacagctacaactacctta

SEQ ID NO: 12643 - DNA, 19 bp, Homo sapiens
  siRNA target sequence for TAF5L (NM_014409.2,631-649).
cctccaaagtgacaacaat

SEQ ID NO: 12644 - DNA, 19 bp, Homo sapiens
  siRNA target sequence for TAF5L (NM_014409.2,632-650).
ctccaaagtgacaacaata

SEQ ID NO: 12645 - DNA, 19 bp, Homo sapiens
  siRNA target sequence for TAF5L (NM_014409.2,670-688).
caccttacatattcatctt

SEQ ID NO: 12646 - DNA, 19 bp, Homo sapiens
  siRNA target sequence for TAF5L (NM_014409.2,807-825).
ctgccctagaggtcttaca

SEQ ID NO: 12647 - DNA, 19 bp, Homo sapiens
  siRNA target sequence for TAF5L (NM_014409.2,955-973).
gtttgacaactcctgtata

SEQ ID NO: 12648 - DNA, 19 bp, Homo sapiens
  siRNA target sequence for TAF5L (NM_014409.2,993-1011).
ccaagaagttaaaatcaga

SEQ ID NO: 12649 - DNA, 19 bp, Homo sapiens
  siRNA target sequence for TAF5L (NM_014409.2,1025-1043).
gacgtgtcccgcatccatt

SEQ ID NO: 12650 - DNA, 19 bp, Homo sapiens
  siRNA target sequence for TAF5L (NM_014409.2,1036-1054).
catccatttggcttgtgat

SEQ ID NO: 12651 - DNA, 19 bp, Homo sapiens
  siRNA target sequence for TAF5L (NM_014409.2,1088-1106).
gcaggcacggagatgaaga

SEQ ID NO: 12652 - DNA, 19 bp, Homo sapiens
  siRNA target sequence for TAF5L (NM_014409.2,1181-1199).
gaagacatgtccatcagat

SEQ ID NO: 12653 - DNA, 19 bp, Homo sapiens
  siRNA target sequence for TAF5L (NM_014409.2,1275-1293).
gtccatatagcctgtactt

SEQ ID NO: 12654 - DNA, 19 bp, Homo sapiens
  siRNA target sequence for TAF5L (NM_014409.2,1344-1362).
cgtacccgctgaggatata

SEQ ID NO: 12655 - DNA, 19 bp, Homo sapiens
  siRNA target sequence for TAF5L (NM_014409.2,1345-1363).
gtacccgctgaggatatat

SEQ ID NO: 12656 - DNA, 19 bp, Homo sapiens
  siRNA target sequence for TAF5L (NM_014409.2,1379-1397).
gatgtggactgtgtcaaat

SEQ ID NO: 12657 - DNA, 19 bp, Homo sapiens
  siRNA target sequence for TAF5L (NM_014409.2,1393-1411).
caaattccaccctaattca

SEQ ID NO: 12658 - DNA, 19 bp, Homo sapiens
  siRNA target sequence for TAF5L (NM_014409.2,1400-1418).
caccctaattcaaactact

SEQ ID NO: 12659 - DNA, 19 bp, Homo sapiens
  siRNA target sequence for TAF5L (NM_014409.2,1474-1492).
ctcggtgaggcttttcaca

SEQ ID NO: 12660 - DNA, 19 bp, Homo sapiens
  siRNA target sequence for TAF5L (NM_014409.2,1527-1545).
ctcccaacggtaagtactt

SEQ ID NO: 12661 - DNA, 19 bp, Homo sapiens
  siRNA target sequence for TAF5L (NM_014409.2,1707-1725).
gggacatcaggaacactta

SEQ ID NO: 12662 - DNA, 19 bp, Homo sapiens
  siRNA target sequence for TAF5L (NM_014409.2,1807-1825).
gttcatggcctgtaacctt

SEQ ID NO: 12663 - DNA, 19 bp, Homo sapiens
  siRNA target sequence for TAF5L (NM_014409.2,1831-1849).
ggtgactggaattacacaa

SEQ ID NO: 12664 - DNA, 19 bp, Homo sapiens
  siRNA target sequence for TAF5L (NM_014409.2,1834-1852).
gactggaattacacaagaa

SEQ ID NO: 12665 - DNA, 19 bp, Homo sapiens
  siRNA target sequence for TARDBP (NM_007375.2,620-638).
gtcacagcgacatatgata

SEQ ID NO: 12666 - DNA, 19 bp, Homo sapiens
  siRNA target sequence for TARDBP (NM_007375.2,658-676).
gcaaacttcctaattctaa

SEQ ID NO: 12667 - DNA, 19 bp, Homo sapiens
  siRNA target sequence for TARDBP (NM_007375.2,1136-1154).
gggtatgatgggcatgtta

SEQ ID NO: 12668 - DNA, 19 bp, Homo sapiens
  siRNA target sequence for TARDBP (NM_007375.2,1174-1192).
caggcccatcgggtaataa

SEQ ID NO: 12669 - DNA, 19 bp, Homo sapiens
  siRNA target sequence for TARDBP (NM_007375.2,1177-1195).
gcccatcgggtaataacca

SEQ ID NO: 12670 - DNA, 19 bp, Homo sapiens
  siRNA target sequence for TARDBP (NM_007375.2,1180-1198).
catcgggtaataaccaaaa

SEQ ID NO: 12671 - DNA, 19 bp, Homo sapiens
  siRNA target sequence for TARDBP (NM_007375.2,1183-1201).
cgggtaataaccaaaacca

SEQ ID NO: 12672 - DNA, 19 bp, Homo sapiens
  siRNA target sequence for TARDBP (NM_007375.2,1184-1202).
gggtaataaccaaaaccaa

SEQ ID NO: 12673 - DNA, 19 bp, Homo sapiens
  siRNA target sequence for TARDBP (NM_007375.2,1229-1247).
ggccttcggttctggaaat

SEQ ID NO: 12674 - DNA, 19 bp, Homo sapiens
  siRNA target sequence for TARDBP (NM_007375.2,1230-1248).
gccttcggttctggaaata

SEQ ID NO: 12675 - DNA, 19 bp, Homo sapiens
  siRNA target sequence for TARDBP (NM_007375.2,1231-1249).
ccttcggttctggaaataa

SEQ ID NO: 12676 - DNA, 19 bp, Homo sapiens
  siRNA target sequence for TARDBP (NM_007375.2,1308-1326).
gggtcgggcagtggtttta

SEQ ID NO: 12677 - DNA, 19 bp, Homo sapiens
  siRNA target sequence for TARDBP (NM_007375.2,1309-1327).
ggtcgggcagtggttttaa

SEQ ID NO: 12678 - DNA, 19 bp, Homo sapiens
  siRNA target sequence for TARDBP (NM_007375.2,1310-1328).
gtcgggcagtggttttaat

SEQ ID NO: 12679 - DNA, 19 bp, Homo sapiens
  siRNA target sequence for TBR1 (NM_006593.2,339-357).
ctctccaagaaatttctca

SEQ ID NO: 12680 - DNA, 19 bp, Homo sapiens
  siRNA target sequence for TBR1 (NM_006593.2,385-403).
gcggatccgagcttgtctt

SEQ ID NO: 12681 - DNA, 19 bp, Homo sapiens
  siRNA target sequence for TBR1 (NM_006593.2,405-423).
cacgatcatcccattatct

SEQ ID NO: 12682 - DNA, 19 bp, Homo sapiens
  siRNA target sequence for TBR1 (NM_006593.2,479-497).
gacgaatcagtcagataca

SEQ ID NO: 12683 - DNA, 19 bp, Homo sapiens
  siRNA target sequence for TBR1 (NM_006593.2,481-499).
cgaatcagtcagatacaga

SEQ ID NO: 12684 - DNA, 19 bp, Homo sapiens
  siRNA target sequence for TBR1 (NM_006593.2,486-504).
cagtcagatacagacaatt

SEQ ID NO: 12685 - DNA, 19 bp, Homo sapiens
  siRNA target sequence for TBR1 (NM_006593.2,528-546).
ggggacgtccagagaagta

SEQ ID NO: 12686 - DNA, 19 bp, Homo sapiens
  siRNA target sequence for TBR1 (NM_006593.2,530-548).
ggacgtccagagaagtaaa

SEQ ID NO: 12687 - DNA, 19 bp, Homo sapiens
  siRNA target sequence for TBR1 (NM_006593.2,574-592).
ctgagcttcgtcacagttt

SEQ ID NO: 12688 - DNA, 19 bp, Homo sapiens
  siRNA target sequence for TBR1 (NM_006593.2,578-596).
gcttcgtcacagtttcgat

SEQ ID NO: 12689 - DNA, 19 bp, Homo sapiens
  siRNA target sequence for TBR1 (NM_006593.2,1035-1053).
gatcccacggctcattaca

SEQ ID NO: 12690 - DNA, 19 bp, Homo sapiens
  siRNA target sequence for TBR1 (NM_006593.2,1038-1056).
cccacggctcattacaata

SEQ ID NO: 12691 - DNA, 19 bp, Homo sapiens
  siRNA target sequence for TBR1 (NM_006593.2,1039-1057).
ccacggctcattacaatat

SEQ ID NO: 12692 - DNA, 19 bp, Homo sapiens
  siRNA target sequence for TBR1 (NM_006593.2,1042-1060).
cggctcattacaatatttt

SEQ ID NO: 12693 - DNA, 19 bp, Homo sapiens
  siRNA target sequence for TBR1 (NM_006593.2,1146-1164).
caaggaaatcgggtctata

SEQ ID NO: 12694 - DNA, 19 bp, Homo sapiens
  siRNA target sequence for TBR1 (NM_006593.2,1150-1168).
gaaatcgggtctatatgca

SEQ ID NO: 12695 - DNA, 19 bp, Homo sapiens
  siRNA target sequence for TBR1 (NM_006593.2,1199-1217).
gatgcgccaagaaatctct

SEQ ID NO: 12696 - DNA, 19 bp, Homo sapiens
  siRNA target sequence for TBR1 (NM_006593.2,1202-1220).
gcgccaagaaatctctttt

SEQ ID NO: 12697 - DNA, 19 bp, Homo sapiens
  siRNA target sequence for TBR1 (NM_006593.2,1418-1436).
ccagaacacggatattaca

SEQ ID NO: 12698 - DNA, 19 bp, Homo sapiens
  siRNA target sequence for TBR1 (NM_006593.2,1743-1761).
ccgcaacgctggtttgtga

SEQ ID NO: 12699 - DNA, 19 bp, Homo sapiens
  siRNA target sequence for TBR1 (NM_006593.2,2179-2197).
ccagcgactcggggattta

SEQ ID NO: 12700 - DNA, 19 bp, Homo sapiens
  siRNA target sequence for TBR1 (NM_006593.2,2182-2200).
gcgactcggggatttacga

SEQ ID NO: 12701 - DNA, 19 bp, Homo sapiens
  siRNA target sequence for TBR1 (NM_006593.2,2312-2330).
ggacattagcggctactat

SEQ ID NO: 12702 - DNA, 19 bp, Homo sapiens
  siRNA target sequence for TBX1 (NM_005992.1,482-500).
cgctgtgggacgagttcaa

SEQ ID NO: 12703 - DNA, 19 bp, Homo sapiens
  siRNA target sequence for TBX1 (NM_005992.1,580-598).
gatcccatggccgactata

SEQ ID NO: 12704 - DNA, 19 bp, Homo sapiens
  siRNA target sequence for TBX1 (NM_005992.1,584-602).
ccatggccgactatatgct

SEQ ID NO: 12705 - DNA, 19 bp, Homo sapiens
  siRNA target sequence for TBX1 (NM_005992.1,740-758).
cgcagtggatgaagcaaat

SEQ ID NO: 12706 - DNA, 19 bp, Homo sapiens
  siRNA target sequence for TBX1 (NM_005992.1,799-817).
gacgacaacggccacatta

SEQ ID NO: 12707 - DNA, 19 bp, Homo sapiens
  siRNA target sequence for TBX1 (NM_005992.1,801-819).
cgacaacggccacattatt

SEQ ID NO: 12708 - DNA, 19 bp, Homo sapiens
  siRNA target sequence for TBX1 (NM_005992.1,807-825).
cggccacattattctgaat

SEQ ID NO: 12709 - DNA, 19 bp, Homo sapiens
  siRNA target sequence for TBX1 (NM_005992.1,874-892).
cgcaaagatagcgagaaat

SEQ ID NO: 12710 - DNA, 19 bp, Homo sapiens
  siRNA target sequence for TBX1 (NM_005992.1,875-893).
gcaaagatagcgagaaata

SEQ ID NO: 12711 - DNA, 19 bp, Homo sapiens
  siRNA target sequence for TBX1 (NM_005992.1,895-913).
gccgaggagaacttcaaaa

SEQ ID NO: 12712 - DNA, 19 bp, Homo sapiens
  siRNA target sequence for TBX1 (NM_005992.1,898-916).
gaggagaacttcaaaacct

SEQ ID NO: 12713 - DNA, 19 bp, Homo sapiens
  siRNA target sequence for TBX1 (NM_005992.1,968-986).
ggatcacgcagctcaagat

SEQ ID NO: 12714 - DNA, 19 bp, Homo sapiens
  siRNA target sequence for TBX1 (NM_005992.1,969-987).
gatcacgcagctcaagatt

SEQ ID NO: 12715 - DNA, 19 bp, Homo sapiens
  siRNA target sequence for TBX1 (NM_080647.1,1362-1380).
gcaccaccacccctacaaa

SEQ ID NO: 12716 - DNA, 19 bp, Homo sapiens
  siRNA target sequence for TBX1 (NM_080647.1,1365-1383).
ccaccacccctacaaatat

SEQ ID NO: 12717 - DNA, 19 bp, Homo sapiens
  siRNA target sequence for TBX10 (NM_005995.2,306-324).
cctctgtgggaggaattca

SEQ ID NO: 12718 - DNA, 19 bp, Homo sapiens
  siRNA target sequence for TBX10 (NM_005995.2,444-462).
cccctggacgacaagagat

SEQ ID NO: 12719 - DNA, 19 bp, Homo sapiens
  siRNA target sequence for TBX10 (NM_005995.2,445-463).
ccctggacgacaagagata

SEQ ID NO: 12720 - DNA, 19 bp, Homo sapiens
  siRNA target sequence for TBX19 (NM_005149.1,82-100).
cccagcgatggcactgttt

SEQ ID NO: 12721 - DNA, 19 bp, Homo sapiens
  siRNA target sequence for TBX19 (NM_005149.1,86-104).
gcgatggcactgtttctca

SEQ ID NO: 12722 - DNA, 19 bp, Homo sapiens
  siRNA target sequence for TBX19 (NM_005149.1,87-105).
cgatggcactgtttctcat

SEQ ID NO: 12723 - DNA, 19 bp, Homo sapiens
  siRNA target sequence for TBX19 (NM_005149.1,158-176).
ctacggagaagcaacttca

SEQ ID NO: 12724 - DNA, 19 bp, Homo sapiens
  siRNA target sequence for TBX19 (NM_005149.1,161-179).
cggagaagcaacttcagat

SEQ ID NO: 12725 - DNA, 19 bp, Homo sapiens
  siRNA target sequence for TBX19 (NM_005149.1,194-212).
cacctctctggcagagatt

SEQ ID NO: 12726 - DNA, 19 bp, Homo sapiens
  siRNA target sequence for TBX19 (NM_005149.1,197-215).
ctctctggcagagattcaa

SEQ ID NO: 12727 - DNA, 19 bp, Homo sapiens
  siRNA target sequence for TBX19 (NM_005149.1,246-264).
gaatggcagacggatgttt

SEQ ID NO: 12728 - DNA, 19 bp, Homo sapiens
  siRNA target sequence for TBX19 (NM_005149.1,257-275).
ggatgtttccagtcctaaa

SEQ ID NO: 12729 - DNA, 19 bp, Homo sapiens
  siRNA target sequence for TBX19 (NM_005149.1,261-279).
gtttccagtcctaaagatt

SEQ ID NO: 12730 - DNA, 19 bp, Homo sapiens
  siRNA target sequence for TBX19 (NM_005149.1,266-284).
cagtcctaaagattagtgt

SEQ ID NO: 12731 - DNA, 19 bp, Homo sapiens
  siRNA target sequence for TBX19 (NM_005149.1,404-422).
gccacagctgcgtctacat

SEQ ID NO: 12732 - DNA, 19 bp, Homo sapiens
  siRNA target sequence for TBX19 (NM_005149.1,580-598).
gcccatcgaatggtaacaa

SEQ ID NO: 12733 - DNA, 19 bp, Homo sapiens
  siRNA target sequence for TBX19 (NM_005149.1,581-599).
cccatcgaatggtaacaaa

SEQ ID NO: 12734 - DNA, 19 bp, Homo sapiens
  siRNA target sequence for TBX19 (NM_005149.1,583-601).
catcgaatggtaacaaact

SEQ ID NO: 12735 - DNA, 19 bp, Homo sapiens
  siRNA target sequence for TBX19 (NM_005149.1,880-898).
catggctgtgagcactatt

SEQ ID NO: 12736 - DNA, 19 bp, Homo sapiens
  siRNA target sequence for TBX19 (NM_005149.1,962-980).
cctcagtgaatttgataga

SEQ ID NO: 12737 - DNA, 19 bp, Homo sapiens
  siRNA target sequence for TBX19 (NM_005149.1,963-981).
ctcagtgaatttgatagaa

SEQ ID NO: 12738 - DNA, 19 bp, Homo sapiens
  siRNA target sequence for TBX19 (NM_005149.1,1018-1036).
gacagctggacttccttat

SEQ ID NO: 12739 - DNA, 19 bp, Homo sapiens
  siRNA target sequence for TBX19 (NM_005149.1,1178-1196).
gcaccccaggagcatttct

SEQ ID NO: 12740 - DNA, 19 bp, Homo sapiens
  siRNA target sequence for TBX2 (NM_005994.2,497-515).
ctgacgattgccgctataa

SEQ ID NO: 12741 - DNA, 19 bp, Homo sapiens
  siRNA target sequence for TBX2 (NM_005994.2,499-517).
gacgattgccgctataagt

SEQ ID NO: 12742 - DNA, 19 bp, Homo sapiens
  siRNA target sequence for TBX2 (NM_005994.2,673-691).
cacggcttcaccatcctaa

SEQ ID NO: 12743 - DNA, 19 bp, Homo sapiens
  siRNA target sequence for TBX2 (NM_005994.2,1696-1714).
gcatctcagggaattccaa

SEQ ID NO: 12744 - DNA, 19 bp, Homo sapiens
  siRNA target sequence for TBX2 (NM_005994.2,1876-1894).
cgtttcagcccctatcaga

SEQ ID NO: 12745 - DNA, 19 bp, Homo sapiens
  siRNA target sequence for TBX20 (NM_020417.1,111-129).
gcgacggagaacacaatca

SEQ ID NO: 12746 - DNA, 19 bp, Homo sapiens
  siRNA target sequence for TBX20 (NM_020417.1,112-130).
cgacggagaacacaatcaa

SEQ ID NO: 12747 - DNA, 19 bp, Homo sapiens
  siRNA target sequence for TBX20 (NM_020417.1,432-450).
gatcctgaggccaagtaca

SEQ ID NO: 12748 - DNA, 19 bp, Homo sapiens
  siRNA target sequence for TBX20 (NM_020417.1,468-486).
gtccctgtggacaacaaga

SEQ ID NO: 12749 - DNA, 19 bp, Homo sapiens
  siRNA target sequence for TBX20 (NM_020417.1,586-604).
ccggtgagcaactactcaa

SEQ ID NO: 12750 - DNA, 19 bp, Homo sapiens
  siRNA target sequence for TBX20 (NM_020417.1,587-605).
cggtgagcaactactcaaa

SEQ ID NO: 12751 - DNA, 19 bp, Homo sapiens
  siRNA target sequence for TBX20 (NM_020417.1,589-607).
gtgagcaactactcaaaca

SEQ ID NO: 12752 - DNA, 19 bp, Homo sapiens
  siRNA target sequence for TBX20 (NM_020417.1,650-668).
ggatcaacatggccatata

SEQ ID NO: 12753 - DNA, 19 bp, Homo sapiens
  siRNA target sequence for TBX20 (NM_020417.1,651-669).
gatcaacatggccatataa

SEQ ID NO: 12754 - DNA, 19 bp, Homo sapiens
  siRNA target sequence for TBX20 (NM_020417.1,657-675).
catggccatataattttga

SEQ ID NO: 12755 - DNA, 19 bp, Homo sapiens
  siRNA target sequence for TBX20 (NM_020417.1,805-823).
ctgcctaccagaatcaact

SEQ ID NO: 12756 - DNA, 19 bp, Homo sapiens
  siRNA target sequence for TBX20 (NM_020417.1,809-827).
ctaccagaatcaactgata

SEQ ID NO: 12757 - DNA, 19 bp, Homo sapiens
  siRNA target sequence for TBX20 (NM_020417.1,822-840).
ctgataacgaagctgaaaa

SEQ ID NO: 12758 - DNA, 19 bp, Homo sapiens
  siRNA target sequence for TBX21 (NM_013351.1,644-662).
ctgttgtggtccaagttta

SEQ ID NO: 12759 - DNA, 19 bp, Homo sapiens
  siRNA target sequence for TBX21 (NM_013351.1,646-664).
gttgtggtccaagtttaat

SEQ ID NO: 12760 - DNA, 19 bp, Homo sapiens
  siRNA target sequence for TBX21 (NM_013351.1,1072-1090).
caacacgcatatctttact

SEQ ID NO: 12761 - DNA, 19 bp, Homo sapiens
  siRNA target sequence for TBX21 (NM_013351.1,1239-1257).
ctggacccaactgtcaatt

SEQ ID NO: 12762 - DNA, 19 bp, Homo sapiens
  siRNA target sequence for TBX21 (NM_013351.1,1688-1706).
ggcgaaggagactctaaga

SEQ ID NO: 12763 - DNA, 19 bp, Homo sapiens
  siRNA target sequence for TBX21 (NM_013351.1,1712-1730).
cgcgtgtccccctatcctt

SEQ ID NO: 12764 - DNA, 19 bp, Homo sapiens
  siRNA target sequence for TBX22 (NM_016954.2,125-143).
ctgagctgcgggagaaaaa

SEQ ID NO: 12765 - DNA, 19 bp, Homo sapiens
  siRNA target sequence for TBX22 (NM_016954.2,191-209).
gcgagccgcttgaaaaaca

SEQ ID NO: 12766 - DNA, 19 bp, Homo sapiens
  siRNA target sequence for TBX22 (NM_016954.2,192-210).
cgagccgcttgaaaaacaa

SEQ ID NO: 12767 - DNA, 19 bp, Homo sapiens
  siRNA target sequence for TBX22 (NM_016954.2,197-215).
cgcttgaaaaacaacctaa

SEQ ID NO: 12768 - DNA, 19 bp, Homo sapiens
  siRNA target sequence for TBX22 (NM_016954.2,269-287).
gcaacagctctgaaagtct

SEQ ID NO: 12769 - DNA, 19 bp, Homo sapiens
  siRNA target sequence for TBX22 (NM_016954.2,351-369).
cgggactgagatgatcatt

SEQ ID NO: 12770 - DNA, 19 bp, Homo sapiens
  siRNA target sequence for TBX22 (NM_016954.2,352-370).
gggactgagatgatcatta

SEQ ID NO: 12771 - DNA, 19 bp, Homo sapiens
  siRNA target sequence for TBX22 (NM_016954.2,459-477).
ggtgccggtggattccaaa

SEQ ID NO: 12772 - DNA, 19 bp, Homo sapiens
  siRNA target sequence for TBX22 (NM_016954.2,469-487).
gattccaaacgctataggt

SEQ ID NO: 12773 - DNA, 19 bp, Homo sapiens
  siRNA target sequence for TBX22 (NM_016954.2,479-497).
gctataggtacgtctatca

SEQ ID NO: 12774 - DNA, 19 bp, Homo sapiens
  siRNA target sequence for TBX22 (NM_016954.2,539-557).
gcatcattcctagattcta

SEQ ID NO: 12775 - DNA, 19 bp, Homo sapiens
  siRNA target sequence for TBX22 (NM_016954.2,590-608).
cctggatgcggcagatcat

SEQ ID NO: 12776 - DNA, 19 bp, Homo sapiens
  siRNA target sequence for TBX22 (NM_016954.2,609-627).
cagctttgatcgcatgaaa

SEQ ID NO: 12777 - DNA, 19 bp, Homo sapiens
  siRNA target sequence for TBX22 (NM_016954.2,611-629).
gctttgatcgcatgaaact

SEQ ID NO: 12778 - DNA, 19 bp, Homo sapiens
  siRNA target sequence for TBX22 (NM_016954.2,692-710).
cccgagtgcacgtgataga

SEQ ID NO: 12779 - DNA, 19 bp, Homo sapiens
  siRNA target sequence for TBX22 (NM_016954.2,798-816).
cacagtaacggcttaccaa

SEQ ID NO: 12780 - DNA, 19 bp, Homo sapiens
  siRNA target sequence for TBX22 (NM_016954.2,800-818).
cagtaacggcttaccaaaa

SEQ ID NO: 12781 - DNA, 19 bp, Homo sapiens
  siRNA target sequence for TBX22 (NM_016954.2,814-832).
caaaaccaacagattacga

SEQ ID NO: 12782 - DNA, 19 bp, Homo sapiens
  siRNA target sequence for TBX22 (NM_016954.2,819-837).
ccaacagattacgaaacta

SEQ ID NO: 12783 - DNA, 19 bp, Homo sapiens
  siRNA target sequence for TBX22 (NM_016954.2,825-843).
gattacgaaactaaaaata

SEQ ID NO: 12784 - DNA, 19 bp, Homo sapiens
  siRNA target sequence for TBX22 (NM_016954.2,922-940).
ccatggaggccttctttca

SEQ ID NO: 12785 - DNA, 19 bp, Homo sapiens
  siRNA target sequence for TBX22 (NM_016954.2,935-953).
ctttcactctcgattttaa

SEQ ID NO: 12786 - DNA, 19 bp, Homo sapiens
  siRNA target sequence for TBX22 (NM_016954.2,941-959).
ctctcgattttaaaacctt

SEQ ID NO: 12787 - DNA, 19 bp, Homo sapiens
  siRNA target sequence for TBX22 (NM_016954.2,1055-1073).
gcttttcacctatgtttca

SEQ ID NO: 12788 - DNA, 19 bp, Homo sapiens
  siRNA target sequence for TBX22 (NM_016954.2,1079-1097).
ctacaagctcccttggaat

SEQ ID NO: 12789 - DNA, 19 bp, Homo sapiens
  siRNA target sequence for TBX22 (NM_016954.2,1111-1129).
gcatacctgcccaatgtca

SEQ ID NO: 12790 - DNA, 19 bp, Homo sapiens
  siRNA target sequence for TBX22 (NM_016954.2,1132-1150).
ctgcctctatgctacaaga

SEQ ID NO: 12791 - DNA, 19 bp, Homo sapiens
  siRNA target sequence for TBX22 (NM_016954.2,1134-1152).
gcctctatgctacaagatt

SEQ ID NO: 12792 - DNA, 19 bp, Homo sapiens
  siRNA target sequence for TBX22 (NM_016954.2,1146-1164).
caagatttgtccaactaat

SEQ ID NO: 12793 - DNA, 19 bp, Homo sapiens
  siRNA target sequence for TBX22 (NM_016954.2,1149-1167).
gatttgtccaactaatttt

SEQ ID NO: 12794 - DNA, 19 bp, Homo sapiens
  siRNA target sequence for TBX22 (NM_016954.2,1217-1235).
gcaacagttctcagtcttt

SEQ ID NO: 12795 - DNA, 19 bp, Homo sapiens
  siRNA target sequence for TBX22 (NM_016954.2,1218-1236).
caacagttctcagtcttta

SEQ ID NO: 12796 - DNA, 19 bp, Homo sapiens
  siRNA target sequence for TBX22 (NM_016954.2,1276-1294).
ggggtcaccaattcaaaaa

SEQ ID NO: 12797 - DNA, 19 bp, Homo sapiens
  siRNA target sequence for TBX22 (NM_016954.2,1314-1332).
cagtgatcagtatctacaa

SEQ ID NO: 12798 - DNA, 19 bp, Homo sapiens
  siRNA target sequence for TBX22 (NM_016954.2,1327-1345).
ctacaagcacctaattcta

SEQ ID NO: 12799 - DNA, 19 bp, Homo sapiens
  siRNA target sequence for TBX22 (NM_016954.2,1371-1389).
gtcacctggaaatattttt

SEQ ID NO: 12800 - DNA, 19 bp, Homo sapiens
  siRNA target sequence for TBX22 (NM_016954.2,1435-1453).
ccttcctatgacttttata

SEQ ID NO: 12801 - DNA, 19 bp, Homo sapiens
  siRNA target sequence for TBX22 (NM_016954.2,1439-1457).
cctatgacttttatagata

SEQ ID NO: 12802 - DNA, 19 bp, Homo sapiens
  siRNA target sequence for TBX22 (NM_016954.2,1470-1488).
gccatctagactgataagt

SEQ ID NO: 12803 - DNA, 19 bp, Homo sapiens
  siRNA target sequence for TBX22 (NM_016954.2,1487-1505).
gtggttccaaccatcttaa

SEQ ID NO: 12804 - DNA, 19 bp, Homo sapiens
  siRNA target sequence for TBX22 (NM_016954.2,1490-1508).
gttccaaccatcttaaagt

SEQ ID NO: 12805 - DNA, 19 bp, Homo sapiens
  siRNA target sequence for TBX22 (NM_016954.2,1493-1511).
ccaaccatcttaaagtgaa

SEQ ID NO: 12806 - DNA, 19 bp, Homo sapiens
  siRNA target sequence for TBX22 (NM_016954.2,1509-1527).
gaatgacgacagtcaagtt

SEQ ID NO: 12807 - DNA, 19 bp, Homo sapiens
  siRNA target sequence for TBX22 (NM_016954.2,1513-1531).
gacgacagtcaagtttctt

SEQ ID NO: 12808 - DNA, 19 bp, Homo sapiens
  siRNA target sequence for TBX22 (NM_016954.2,1515-1533).
cgacagtcaagtttctttt

SEQ ID NO: 12809 - DNA, 19 bp, Homo sapiens
  siRNA target sequence for TBX22 (NM_016954.2,1558-1576).
cattggtatccagcaatta

SEQ ID NO: 12810 - DNA, 19 bp, Homo sapiens
  siRNA target sequence for TBX22 (NM_016954.2,1568-1586).
cagcaattaaccattacct

SEQ ID NO: 12811 - DNA, 19 bp, Homo sapiens
  siRNA target sequence for TBX22 (NM_016954.2,1570-1588).
gcaattaaccattaccttt

SEQ ID NO: 12812 - DNA, 19 bp, Homo sapiens
  siRNA target sequence for TBX3 (NM_005996.2,449-467).
cgatcatggatcaattggt

SEQ ID NO: 12813 - DNA, 19 bp, Homo sapiens
  siRNA target sequence for TBX3 (NM_005996.2,515-533).
cgcatctgaggcctttgaa

SEQ ID NO: 12814 - DNA, 19 bp, Homo sapiens
  siRNA target sequence for TBX3 (NM_005996.2,576-594).
gcacctggaggctaaagaa

SEQ ID NO: 12815 - DNA, 19 bp, Homo sapiens
  siRNA target sequence for TBX3 (NM_005996.2,642-660).
gtcgggaaggcgaatgttt

SEQ ID NO: 12816 - DNA, 19 bp, Homo sapiens
  siRNA target sequence for TBX3 (NM_005996.2,734-752).
ctgatgactgtcgttataa

SEQ ID NO: 12817 - DNA, 19 bp, Homo sapiens
  siRNA target sequence for TBX3 (NM_005996.2,745-763).
cgttataaatttcacaatt

SEQ ID NO: 12818 - DNA, 19 bp, Homo sapiens
  siRNA target sequence for TBX3 (NM_005996.2,882-900).
gaaactcaccaacaacatt

SEQ ID NO: 12819 - DNA, 19 bp, Homo sapiens
  siRNA target sequence for TBX3 (NM_005996.2,910-928).
catggatttactatattga

SEQ ID NO: 12820 - DNA, 19 bp, Homo sapiens
  siRNA target sequence for TBX3 (NM_005996.2,981-999).
cttgaaactcccttatagt

SEQ ID NO: 12821 - DNA, 19 bp, Homo sapiens
  siRNA target sequence for TBX3 (NM_005996.2,998-1016).
gtacatttcggacatactt

SEQ ID NO: 12822 - DNA, 19 bp, Homo sapiens
  siRNA target sequence for TBX3 (NM_005996.2,1001-1019).
catttcggacatacttgtt

SEQ ID NO: 12823 - DNA, 19 bp, Homo sapiens
  siRNA target sequence for TBX3 (NM_005996.2,1014-1032).
cttgttccccgaaactgaa

SEQ ID NO: 12824 - DNA, 19 bp, Homo sapiens
  siRNA target sequence for TBX3 (NM_005996.2,1060-1078).
gataagataacccagttaa

SEQ ID NO: 12825 - DNA, 19 bp, Homo sapiens
  siRNA target sequence for TBX3 (NM_005996.2,1161-1179).
gtccatgagggtgtttgat

SEQ ID NO: 12826 - DNA, 19 bp, Homo sapiens
  siRNA target sequence for TBX3 (NM_005996.2,1163-1181).
ccatgagggtgtttgatga

SEQ ID NO: 12827 - DNA, 19 bp, Homo sapiens
  siRNA target sequence for TBX3 (NM_005996.2,1284-1302).
gacatcgaacctcaaagat

SEQ ID NO: 12828 - DNA, 19 bp, Homo sapiens
  siRNA target sequence for TBX3 (NM_005996.2,1286-1304).
catcgaacctcaaagattt

SEQ ID NO: 12829 - DNA, 19 bp, Homo sapiens
  siRNA target sequence for TBX3 (NM_005996.2,1433-1451).
cggtcaaggctcacctttt

SEQ ID NO: 12830 - DNA, 19 bp, Homo sapiens
  siRNA target sequence for TBX3 (NM_016569.2,944-962).
ctacgtggcaggggaatta

SEQ ID NO: 12831 - DNA, 19 bp, Homo sapiens
  siRNA target sequence for TBX3 (NM_016569.2,951-969).
gcaggggaattatagtttt

SEQ ID NO: 12832 - DNA, 19 bp, Homo sapiens
  siRNA target sequence for TBX3 (NM_016569.2,954-972).
ggggaattatagttttggt

SEQ ID NO: 12833 - DNA, 19 bp, Homo sapiens
  siRNA target sequence for TBX3 (NM_016569.2,955-973).
gggaattatagttttggta

SEQ ID NO: 12834 - DNA, 19 bp, Homo sapiens
  siRNA target sequence for TBX3 (NM_016569.2,965-983).
gttttggtactcagactat

SEQ ID NO: 12835 - DNA, 19 bp, Homo sapiens
  siRNA target sequence for TBX3 (NM_016569.2,970-988).
ggtactcagactatattga

SEQ ID NO: 12836 - DNA, 19 bp, Homo sapiens
  siRNA target sequence for TBX3 (NM_016569.2,971-989).
gtactcagactatattgaa

SEQ ID NO: 12837 - DNA, 19 bp, Homo sapiens
  siRNA target sequence for TBX4 (NM_018488.2,338-356).
ccagctacaaggtaaaagt

SEQ ID NO: 12838 - DNA, 19 bp, Homo sapiens
  siRNA target sequence for TBX4 (NM_018488.2,371-389).
ccaagaccaagtatatcct

SEQ ID NO: 12839 - DNA, 19 bp, Homo sapiens
  siRNA target sequence for TBX4 (NM_018488.2,841-859).
gaataccccgtgatttcca

SEQ ID NO: 12840 - DNA, 19 bp, Homo sapiens
  siRNA target sequence for TBX4 (NM_018488.2,1029-1047).
ggactcaagcctcttctat

SEQ ID NO: 12841 - DNA, 19 bp, Homo sapiens
  siRNA target sequence for TBX4 (NM_018488.2,1075-1093).
cgccacctggacttacctt

SEQ ID NO: 12842 - DNA, 19 bp, Homo sapiens
  siRNA target sequence for TBX4 (NM_018488.2,1124-1142).
cggtgggggaggatcacta

SEQ ID NO: 12843 - DNA, 19 bp, Homo sapiens
  siRNA target sequence for TBX4 (NM_018488.2,1125-1143).
ggtgggggaggatcactat

SEQ ID NO: 12844 - DNA, 19 bp, Homo sapiens
  siRNA target sequence for TBX4 (NM_018488.2,1126-1144).
gtgggggaggatcactatt

SEQ ID NO: 12845 - DNA, 19 bp, Homo sapiens
  siRNA target sequence for TBX4 (NM_018488.2,1157-1175).
ctccctacgaccagcaaat

SEQ ID NO: 12846 - DNA, 19 bp, Homo sapiens
  siRNA target sequence for TBX4 (NM_018488.2,1452-1470).
ccactttagtgtctacaat

SEQ ID NO: 12847 - DNA, 19 bp, Homo sapiens
  siRNA target sequence for TBX4 (NM_018488.2,1558-1576).
ccaccctcgccacatctaa

SEQ ID NO: 12848 - DNA, 19 bp, Homo sapiens
  siRNA target sequence for TBX4 (NM_018488.2,1559-1577).
caccctcgccacatctaaa

SEQ ID NO: 12849 - DNA, 19 bp, Homo sapiens
  siRNA target sequence for TBX4 (NM_018488.2,1563-1581).
ctcgccacatctaaatgct

SEQ ID NO: 12850 - DNA, 19 bp, Homo sapiens
  siRNA target sequence for TBX4 (NM_018488.2,1579-1597).
gctgccaatgagtttctct

SEQ ID NO: 12851 - DNA, 19 bp, Homo sapiens
  siRNA target sequence for TBX4 (NM_018488.2,1588-1606).
gagtttctctactctcaaa

SEQ ID NO: 12852 - DNA, 19 bp, Homo sapiens
  siRNA target sequence for TBX4 (NM_018488.2,1617-1635).
gtcccgagaatcttcctta

SEQ ID NO: 12853 - DNA, 19 bp, Homo sapiens
  siRNA target sequence for TBX4 (NM_018488.2,1621-1639).
cgagaatcttccttacagt

SEQ ID NO: 12854 - DNA, 19 bp, Homo sapiens
  siRNA target sequence for TBX4 (NM_018488.2,1622-1640).
gagaatcttccttacagta

SEQ ID NO: 12855 - DNA, 19 bp, Homo sapiens
  siRNA target sequence for TBX5 (NM_000192.3,730-748).
cctgccctgcgattcgaaa

SEQ ID NO: 12856 - DNA, 19 bp, Homo sapiens
  siRNA target sequence for TBX5 (NM_000192.3,877-895).
gggcacggaaatgatcata

SEQ ID NO: 12857 - DNA, 19 bp, Homo sapiens
  siRNA target sequence for TBX5 (NM_000192.3,878-896).
ggcacggaaatgatcataa

SEQ ID NO: 12858 - DNA, 19 bp, Homo sapiens
  siRNA target sequence for TBX5 (NM_000192.3,911-929).
cggatgtttcccagttaca

SEQ ID NO: 12859 - DNA, 19 bp, Homo sapiens
  siRNA target sequence for TBX5 (NM_000192.3,934-952).
gaaggtgacgggccttaat

SEQ ID NO: 12860 - DNA, 19 bp, Homo sapiens
  siRNA target sequence for TBX5 (NM_000192.3,944-962).
ggccttaatcccaaaacga

SEQ ID NO: 12861 - DNA, 19 bp, Homo sapiens
  siRNA target sequence for TBX5 (NM_000192.3,990-1008).
ctgccgacgatcacagata

SEQ ID NO: 12862 - DNA, 19 bp, Homo sapiens
  siRNA target sequence for TBX5 (NM_000192.3,992-1010).
gccgacgatcacagataca

SEQ ID NO: 12863 - DNA, 19 bp, Homo sapiens
  siRNA target sequence for TBX5 (NM_000192.3,993-1011).
ccgacgatcacagatacaa

SEQ ID NO: 12864 - DNA, 19 bp, Homo sapiens
  siRNA target sequence for TBX5 (NM_000192.3,994-1012).
cgacgatcacagatacaaa

SEQ ID NO: 12865 - DNA, 19 bp, Homo sapiens
  siRNA target sequence for TBX5 (NM_000192.3,1005-1023).
gatacaaattcgcagataa

SEQ ID NO: 12866 - DNA, 19 bp, Homo sapiens
  siRNA target sequence for TBX5 (NM_000192.3,1198-1216).
caaataccagcctagatta

SEQ ID NO: 12867 - DNA, 19 bp, Homo sapiens
  siRNA target sequence for TBX5 (NM_000192.3,1222-1240).
cgtgaaagcggatgaaaat

SEQ ID NO: 12868 - DNA, 19 bp, Homo sapiens
  siRNA target sequence for TBX5 (NM_000192.3,1324-1342).
ccacaagatcacgcaatta

SEQ ID NO: 12869 - DNA, 19 bp, Homo sapiens
  siRNA target sequence for TBX5 (NM_000192.3,1330-1348).
gatcacgcaattaaagatt

SEQ ID NO: 12870 - DNA, 19 bp, Homo sapiens
  siRNA target sequence for TBX5 (NM_000192.3,1335-1353).
cgcaattaaagattgagaa

SEQ ID NO: 12871 - DNA, 19 bp, Homo sapiens
  siRNA target sequence for TBX5 (NM_000192.3,1393-1411).
ggagctgcacagaatgtca

SEQ ID NO: 12872 - DNA, 19 bp, Homo sapiens
  siRNA target sequence for TBX5 (NM_000192.3,1394-1412).
gagctgcacagaatgtcaa

SEQ ID NO: 12873 - DNA, 19 bp, Homo sapiens
  siRNA target sequence for TBX5 (NM_000192.3,1449-1467).
gcaccgtgaggcaaaaagt

SEQ ID NO: 12874 - DNA, 19 bp, Homo sapiens
  siRNA target sequence for TBX5 (NM_000192.3,1609-1627).
ccaggagcatagccaaatt

SEQ ID NO: 12875 - DNA, 19 bp, Homo sapiens
  siRNA target sequence for TBX5 (NM_000192.3,1615-1633).
gcatagccaaatttaccat

SEQ ID NO: 12876 - DNA, 19 bp, Homo sapiens
  siRNA target sequence for TBX5 (NM_000192.3,1616-1634).
catagccaaatttaccatt

SEQ ID NO: 12877 - DNA, 19 bp, Homo sapiens
  siRNA target sequence for TBX5 (NM_000192.3,1665-1683).
ccacagaccatccctataa

SEQ ID NO: 12878 - DNA, 19 bp, Homo sapiens
  siRNA target sequence for TBX5 (NM_000192.3,1723-1741).
cttctaccgctctagctat

SEQ ID NO: 12879 - DNA, 19 bp, Homo sapiens
  siRNA target sequence for TBX5 (NM_000192.3,1789-1807).
gcggcaagcttgcatgtat

SEQ ID NO: 12880 - DNA, 19 bp, Homo sapiens
  siRNA target sequence for TBX5 (NM_000192.3,2141-2159).
ggcgtgccaaggactctat

SEQ ID NO: 12881 - DNA, 19 bp, Homo sapiens
  siRNA target sequence for TBX5 (NM_000192.3,2201-2219).
ccagagtggagcgacaata

SEQ ID NO: 12882 - DNA, 19 bp, Homo sapiens
  siRNA target sequence for TBX5 (NM_000192.3,2204-2222).
gagtggagcgacaatagct

SEQ ID NO: 12883 - DNA, 19 bp, Homo sapiens
  siRNA target sequence for TBX5 (NM_080718.1,991-1009).
gatcacccctggtcaattt

SEQ ID NO: 12884 - DNA, 19 bp, Homo sapiens
  siRNA target sequence for TBX5 (NM_080718.1,994-1012).
cacccctggtcaatttgct

SEQ ID NO: 12885 - DNA, 19 bp, Homo sapiens
  siRNA target sequence for TBX5 (NM_080718.1,996-1014).
cccctggtcaatttgcttt

SEQ ID NO: 12886 - DNA, 19 bp, Homo sapiens
  siRNA target sequence for TBX5 (NM_080718.1,999-1017).
ctggtcaatttgctttctt

SEQ ID NO: 12887 - DNA, 19 bp, Homo sapiens
  siRNA target sequence for TBX6 (NM_004608.2,822-840).
cccctaaactggattgctt

SEQ ID NO: 12888 - DNA, 19 bp, Homo sapiens
  siRNA target sequence for TBX6 (NM_004608.2,1108-1126).
gtttcttctggatgtgatt

SEQ ID NO: 12889 - DNA, 19 bp, Homo sapiens
  siRNA target sequence for TBX6 (NM_004608.2,1198-1216).
gcctgaccgtgtctacatt

SEQ ID NO: 12890 - DNA, 19 bp, Homo sapiens
  siRNA target sequence for TBX6 (NM_004608.2,1255-1273).
gcagcctgtgtctttccat

SEQ ID NO: 12891 - DNA, 19 bp, Homo sapiens
  siRNA target sequence for TBX6 (NM_004608.2,1508-1526).
cgggagaacggcagaaact

SEQ ID NO: 12892 - DNA, 19 bp, Homo sapiens
  siRNA target sequence for TBX6 (NM_004608.2,1644-1662).
gagacattcgtgaatcaga

SEQ ID NO: 12893 - DNA, 19 bp, Homo sapiens
  siRNA target sequence for TBX6 (NM_004608.2,1747-1765).
gcaccctgcggctttccat

SEQ ID NO: 12894 - DNA, 19 bp, Homo sapiens
  siRNA target sequence for TBX6 (NM_004608.2,1834-1852).
cccctactcggctgcattt

SEQ ID NO: 12895 - DNA, 19 bp, Homo sapiens
  siRNA target sequence for TBX6 (NM_080758.1,1527-1545).
gtaagaggtgggagttgtt

SEQ ID NO: 12896 - DNA, 19 bp, Homo sapiens
  siRNA target sequence for TBX6 (NM_080758.1,1533-1551).
ggtgggagttgttcattca

SEQ ID NO: 12897 - DNA, 19 bp, Homo sapiens
  siRNA target sequence for TCEA1 (NM_006756.1,164-182).
cgcggctggagcattggat

SEQ ID NO: 12898 - DNA, 19 bp, Homo sapiens
  siRNA target sequence for TCEA1 (NM_006756.1,165-183).
gcggctggagcattggatt

SEQ ID NO: 12899 - DNA, 19 bp, Homo sapiens
  siRNA target sequence for TCEA1 (NM_006756.1,171-189).
ggagcattggatttgctaa

SEQ ID NO: 12900 - DNA, 19 bp, Homo sapiens
  siRNA target sequence for TCEA1 (NM_006756.1,186-204).
ctaaaggagcttaagaata

SEQ ID NO: 12901 - DNA, 19 bp, Homo sapiens
  siRNA target sequence for TCEA1 (NM_006756.1,192-210).
gagcttaagaatattccta

SEQ ID NO: 12902 - DNA, 19 bp, Homo sapiens
  siRNA target sequence for TCEA1 (NM_006756.1,208-226).
ctatgaccctggaattact

SEQ ID NO: 12903 - DNA, 19 bp, Homo sapiens
  siRNA target sequence for TCEA1 (NM_006756.1,233-251).
cacaagaatcggaatgtca

SEQ ID NO: 12904 - DNA, 19 bp, Homo sapiens
  siRNA target sequence for TCEA1 (NM_006756.1,242-260).
cggaatgtcagttaatgct

SEQ ID NO: 12905 - DNA, 19 bp, Homo sapiens
  siRNA target sequence for TCEA1 (NM_006756.1,244-262).
gaatgtcagttaatgctat

SEQ ID NO: 12906 - DNA, 19 bp, Homo sapiens
  siRNA target sequence for TCEA1 (NM_006756.1,319-337).
cctggaaaaaattattaga

SEQ ID NO: 12907 - DNA, 19 bp, Homo sapiens
  siRNA target sequence for TCEA1 (NM_006756.1,430-448).
ccagcggcaatgtaagcaa

SEQ ID NO: 12908 - DNA, 19 bp, Homo sapiens
  siRNA target sequence for TCEA1 (NM_006756.1,461-479).
gacaaatgctcgagatact

SEQ ID NO: 12909 - DNA, 19 bp, Homo sapiens
  siRNA target sequence for TCEA1 (NM_006756.1,463-481).
caaatgctcgagatactta

SEQ ID NO: 12910 - DNA, 19 bp, Homo sapiens
  siRNA target sequence for TCEA1 (NM_006756.1,471-489).
cgagatacttatgtttcat

SEQ ID NO: 12911 - DNA, 19 bp, Homo sapiens
  siRNA target sequence for TCEA2 (NM_003195.4,1062-1080).
gatgccgtgcgcaacaagt

SEQ ID NO: 12912 - DNA, 19 bp, Homo sapiens
  siRNA target sequence for TCEA2 (NM_003195.4,1159-1177).
ctcagatcgaggaatgcat

SEQ ID NO: 12913 - DNA, 19 bp, Homo sapiens
  siRNA target sequence for TCEAL1 (NM_004780.1,168-186).
gacaaaccacgcaaagaaa

SEQ ID NO: 12914 - DNA, 19 bp, Homo sapiens
  siRNA target sequence for TCEAL1 (NM_004780.1,170-188).
caaaccacgcaaagaaaat

SEQ ID NO: 12915 - DNA, 19 bp, Homo sapiens
  siRNA target sequence for TCEAL1 (NM_004780.1,503-521).
ggacatacatggcagaaat

SEQ ID NO: 12916 - DNA, 19 bp, Homo sapiens
  siRNA target sequence for TCF1 (NM_000545.3,621-639).
cggaggaaccgtttcaagt

SEQ ID NO: 12917 - DNA, 19 bp, Homo sapiens
  siRNA target sequence for TCF1 (NM_000545.3,730-748).
gcaatagggcggaatgcat

SEQ ID NO: 12918 - DNA, 19 bp, Homo sapiens
  siRNA target sequence for TCF1 (NM_000545.3,1570-1588).
gcctgctcccgcagactat

SEQ ID NO: 12919 - DNA, 19 bp, Homo sapiens
  siRNA target sequence for TCF19 (NM_007109.1,271-289).
ggtcacaggctggaattga

SEQ ID NO: 12920 - DNA, 19 bp, Homo sapiens
  siRNA target sequence for TCF19 (NM_007109.1,354-372).
cttcatgttccaacaagta

SEQ ID NO: 12921 - DNA, 19 bp, Homo sapiens
  siRNA target sequence for TCF19 (NM_007109.1,388-406).
gactttgctgccattacca

SEQ ID NO: 12922 - DNA, 19 bp, Homo sapiens
  siRNA target sequence for TCF2 (NM_000458.1,211-229).
cgtcgctccagcaagaact

SEQ ID NO: 12923 - DNA, 19 bp, Homo sapiens
  siRNA target sequence for TCF2 (NM_000458.1,438-456).
gacggcgacgactatgaca

SEQ ID NO: 12924 - DNA, 19 bp, Homo sapiens
  siRNA target sequence for TCF2 (NM_000458.1,550-568).
ggagggctgctaaaatgat

SEQ ID NO: 12925 - DNA, 19 bp, Homo sapiens
  siRNA target sequence for TCF2 (NM_000458.1,704-722).
ctggtacgtcagaaagcaa

SEQ ID NO: 12926 - DNA, 19 bp, Homo sapiens
  siRNA target sequence for TCF2 (NM_000458.1,724-742).
gagagatcctccgacaatt

SEQ ID NO: 12927 - DNA, 19 bp, Homo sapiens
  siRNA target sequence for TCF2 (NM_000458.1,726-744).
gagatcctccgacaattca

SEQ ID NO: 12928 - DNA, 19 bp, Homo sapiens
  siRNA target sequence for TCF2 (NM_000458.1,915-933).
gcgtcccagcaaatcttgt

SEQ ID NO: 12929 - DNA, 19 bp, Homo sapiens
  siRNA target sequence for TCF2 (NM_000458.1,916-934).
cgtcccagcaaatcttgta

SEQ ID NO: 12930 - DNA, 19 bp, Homo sapiens
  siRNA target sequence for TCF2 (NM_000458.1,939-957).
gcctacgatcggcaaaaga

SEQ ID NO: 12931 - DNA, 19 bp, Homo sapiens
  siRNA target sequence for TCF2 (NM_000458.1,940-958).
cctacgatcggcaaaagaa

SEQ ID NO: 12932 - DNA, 19 bp, Homo sapiens
  siRNA target sequence for TCF2 (NM_000458.1,997-1015).
gcaacagggcagaatgttt

SEQ ID NO: 12933 - DNA, 19 bp, Homo sapiens
  siRNA target sequence for TCF2 (NM_000458.1,1321-1339).
ccagccagtcggttttaca

SEQ ID NO: 12934 - DNA, 19 bp, Homo sapiens
  siRNA target sequence for TCF2 (NM_000458.1,1384-1402).
cacctgatggtaaaatgat

SEQ ID NO: 12935 - DNA, 19 bp, Homo sapiens
  siRNA target sequence for TCF2 (NM_000458.1,1386-1404).
cctgatggtaaaatgatct

SEQ ID NO: 12936 - DNA, 19 bp, Homo sapiens
  siRNA target sequence for TCF2 (NM_000458.1,1431-1449).
gtcagcaccttgacgaata

SEQ ID NO: 12937 - DNA, 19 bp, Homo sapiens
  siRNA target sequence for TCF2 (NM_000458.1,1435-1453).
gcaccttgacgaatatcca

SEQ ID NO: 12938 - DNA, 19 bp, Homo sapiens
  siRNA target sequence for TCF2 (NM_000458.1,1474-1492).
cccagcaatctcaaaacct

SEQ ID NO: 12939 - DNA, 19 bp, Homo sapiens
  siRNA target sequence for TCF2 (NM_000458.1,1764-1782).
cacacctcccggtttccat

SEQ ID NO: 12940 - DNA, 19 bp, Homo sapiens
  siRNA target sequence for TCF2 (NM_000458.1,1785-1803).
gcaatggtggtcacagata

SEQ ID NO: 12941 - DNA, 19 bp, Homo sapiens
  siRNA target sequence for TCF2 (NM_000458.1,1823-1841).
caccaacatgtcttcaagt

SEQ ID NO: 12942 - DNA, 19 bp, Homo sapiens
  siRNA target sequence for TCF2 (NM_006481.1,1229-1247).
caagctgtcaggtaagcaa

SEQ ID NO: 12943 - DNA, 19 bp, Homo sapiens
  siRNA target sequence for TCF2 (NM_006481.1,1286-1304).
gttcttgccacggatctta

SEQ ID NO: 12944 - DNA, 19 bp, Homo sapiens
  siRNA target sequence for TCF2 (NM_006481.1,1296-1314).
cggatcttatctggtttaa

SEQ ID NO: 12945 - DNA, 19 bp, Homo sapiens
  siRNA target sequence for TCF2 (NM_006481.1,1324-1342).
gaggagcaaacgcttttga

SEQ ID NO: 12946 - DNA, 19 bp, Homo sapiens
  siRNA target sequence for TCF2 (NM_006481.1,1326-1344).
ggagcaaacgcttttgaga

SEQ ID NO: 12947 - DNA, 19 bp, Homo sapiens
  siRNA target sequence for TCF2 (NM_006481.1,1327-1345).
gagcaaacgcttttgagat

SEQ ID NO: 12948 - DNA, 19 bp, Homo sapiens
  siRNA target sequence for TCF2 (NM_006481.1,1330-1348).
caaacgcttttgagatgat

SEQ ID NO: 12949 - DNA, 19 bp, Homo sapiens
  siRNA target sequence for TCF3 (NM_003200.1,1033-1051).
gcactggcctcgatctact

SEQ ID NO: 12950 - DNA, 19 bp, Homo sapiens
  siRNA target sequence for TCF3 (NM_003200.1,1053-1071).
cccggatcactcaagcaat

SEQ ID NO: 12951 - DNA, 19 bp, Homo sapiens
  siRNA target sequence for TCF3 (NM_003200.1,1054-1072).
ccggatcactcaagcaata

SEQ ID NO: 12952 - DNA, 19 bp, Homo sapiens
  siRNA target sequence for TCF3 (NM_003200.1,1055-1073).
cggatcactcaagcaataa

SEQ ID NO: 12953 - DNA, 19 bp, Homo sapiens
  siRNA target sequence for TCF3 (NM_003200.1,1057-1075).
gatcactcaagcaataact

SEQ ID NO: 12954 - DNA, 19 bp, Homo sapiens
  siRNA target sequence for TCF3 (NM_003200.1,1193-1211).
gcctgcagagtaagataga

SEQ ID NO: 12955 - DNA, 19 bp, Homo sapiens
  siRNA target sequence for TCF3 (NM_003200.1,1867-1885).
cccaaagcagcctgtttga

SEQ ID NO: 12956 - DNA, 19 bp, Homo sapiens
  siRNA target sequence for TCF7L1 (NM_031283.1,399-417).
caggacagcgcgttcttta

SEQ ID NO: 12957 - DNA, 19 bp, Homo sapiens
  siRNA target sequence for TCF7L1 (NM_031283.1,401-419).
ggacagcgcgttctttaaa

SEQ ID NO: 12958 - DNA, 19 bp, Homo sapiens
  siRNA target sequence for TCF7L1 (NM_031283.1,436-454).
ggtaccccttcctgatgat

SEQ ID NO: 12959 - DNA, 19 bp, Homo sapiens
  siRNA target sequence for TCF7L1 (NM_031283.1,586-604).
ctccagcacacttgtctaa

SEQ ID NO: 12960 - DNA, 19 bp, Homo sapiens
  siRNA target sequence for TCF7L1 (NM_031283.1,589-607).
cagcacacttgtctaataa

SEQ ID NO: 12961 - DNA, 19 bp, Homo sapiens
  siRNA target sequence for TCF7L1 (NM_031283.1,757-775).
ccgagctgtcaccgtatta

SEQ ID NO: 12962 - DNA, 19 bp, Homo sapiens
  siRNA target sequence for TCF7L1 (NM_031283.1,1050-1068).
cctgcagtgagcgtgaaat

SEQ ID NO: 12963 - DNA, 19 bp, Homo sapiens
  siRNA target sequence for TCF7L1 (NM_031283.1,1072-1090).
cagtcaccgtgaaaaagga

SEQ ID NO: 12964 - DNA, 19 bp, Homo sapiens
  siRNA target sequence for TCF7L1 (NM_031283.1,1229-1247).
caacctgtctcgagaagaa

SEQ ID NO: 12965 - DNA, 19 bp, Homo sapiens
  siRNA target sequence for TCF8 (NM_030751.2,72-90).
gcgcaataacgttacaaat

SEQ ID NO: 12966 - DNA, 19 bp, Homo sapiens
  siRNA target sequence for TCF8 (NM_030751.2,73-91).
cgcaataacgttacaaatt

SEQ ID NO: 12967 - DNA, 19 bp, Homo sapiens
  siRNA target sequence for TCF8 (NM_030751.2,81-99).
cgttacaaattataatact

SEQ ID NO: 12968 - DNA, 19 bp, Homo sapiens
  siRNA target sequence for TCF8 (NM_030751.2,332-350).
caggatgtacagtaaaaga

SEQ ID NO: 12969 - DNA, 19 bp, Homo sapiens
  siRNA target sequence for TCF8 (NM_030751.2,335-353).
gatgtacagtaaaagatga

SEQ ID NO: 12970 - DNA, 19 bp, Homo sapiens
  siRNA target sequence for TCF8 (NM_030751.2,509-527).
caccagatgcattttcaca

SEQ ID NO: 12971 - DNA, 19 bp, Homo sapiens
  siRNA target sequence for TCF8 (NM_030751.2,556-574).
ggctataaacgctttacct

SEQ ID NO: 12972 - DNA, 19 bp, Homo sapiens
  siRNA target sequence for TCF8 (NM_030751.2,572-590).
cctctctgaaagaacacat

SEQ ID NO: 12973 - DNA, 19 bp, Homo sapiens
  siRNA target sequence for TCF8 (NM_030751.2,609-627).
gaatgaagataactttagt

SEQ ID NO: 12974 - DNA, 19 bp, Homo sapiens
  siRNA target sequence for TCF8 (NM_030751.2,673-691).
cgtcacatgacatcacata

SEQ ID NO: 12975 - DNA, 19 bp, Homo sapiens
  siRNA target sequence for TCF8 (NM_030751.2,717-735).
gacgcagtctgggtgtaat

SEQ ID NO: 12976 - DNA, 19 bp, Homo sapiens
  siRNA target sequence for TCF8 (NM_030751.2,720-738).
gcagtctgggtgtaatcgt

SEQ ID NO: 12977 - DNA, 19 bp, Homo sapiens
  siRNA target sequence for TCF8 (NM_030751.2,721-739).
cagtctgggtgtaatcgta

SEQ ID NO: 12978 - DNA, 19 bp, Homo sapiens
  siRNA target sequence for TCF8 (NM_030751.2,725-743).
ctgggtgtaatcgtaaatt

SEQ ID NO: 12979 - DNA, 19 bp, Homo sapiens
  siRNA target sequence for TCF8 (NM_030751.2,727-745).
gggtgtaatcgtaaattca

SEQ ID NO: 12980 - DNA, 19 bp, Homo sapiens
  siRNA target sequence for TCF8 (NM_030751.2,728-746).
ggtgtaatcgtaaattcaa

SEQ ID NO: 12981 - DNA, 19 bp, Homo sapiens
  siRNA target sequence for TCF8 (NM_030751.2,729-747).
gtgtaatcgtaaattcaaa

SEQ ID NO: 12982 - DNA, 19 bp, Homo sapiens
  siRNA target sequence for TCF8 (NM_030751.2,784-802).
cacctaaaagagcacttaa

SEQ ID NO: 12983 - DNA, 19 bp, Homo sapiens
  siRNA target sequence for TCF8 (NM_030751.2,867-885).
ctcctatagctcacacata

SEQ ID NO: 12984 - DNA, 19 bp, Homo sapiens
  siRNA target sequence for TCF8 (NM_030751.2,878-896).
cacacataagcagtaagaa

SEQ ID NO: 12985 - DNA, 19 bp, Homo sapiens
  siRNA target sequence for TCF8 (NM_030751.2,903-921).
cagcttgatacctgtgaat

SEQ ID NO: 12986 - DNA, 19 bp, Homo sapiens
  siRNA target sequence for TCF8 (NM_030751.2,918-936).
gaatgggcgaccaagaaca

SEQ ID NO: 12987 - DNA, 19 bp, Homo sapiens
  siRNA target sequence for TCF8 (NM_030751.2,1000-1018).
ccacagatacggcaaaaga

SEQ ID NO: 12988 - DNA, 19 bp, Homo sapiens
  siRNA target sequence for TCF8 (NM_030751.2,1030-1048).
ccccttcaagaacaacttt

SEQ ID NO: 12989 - DNA, 19 bp, Homo sapiens
  siRNA target sequence for TCF8 (NM_030751.2,1230-1248).
gtctcccataagtatcaat

SEQ ID NO: 12990 - DNA, 19 bp, Homo sapiens
  siRNA target sequence for TCF8 (NM_030751.2,1232-1250).
ctcccataagtatcaattt

SEQ ID NO: 12991 - DNA, 19 bp, Homo sapiens
  siRNA target sequence for TCF8 (NM_030751.2,1234-1252).
cccataagtatcaatttaa

SEQ ID NO: 12992 - DNA, 19 bp, Homo sapiens
  siRNA target sequence for TCF8 (NM_030751.2,1241-1259).
gtatcaatttaagtgatat

SEQ ID NO: 12993 - DNA, 19 bp, Homo sapiens
  siRNA target sequence for TCF8 (NM_030751.2,1255-1273).
gatattcagaatgtactta

SEQ ID NO: 12994 - DNA, 19 bp, Homo sapiens
  siRNA target sequence for TCF8 (NM_030751.2,1302-1320).
gcaagtgttggagaataat

SEQ ID NO: 12995 - DNA, 19 bp, Homo sapiens
  siRNA target sequence for TCF8 (NM_030751.2,1356-1374).
caatgcttcacccatacaa

SEQ ID NO: 12996 - DNA, 19 bp, Homo sapiens
  siRNA target sequence for TCF8 (NM_030751.2,1429-1447).
ggaacaaccaaaattatca

SEQ ID NO: 12997 - DNA, 19 bp, Homo sapiens
  siRNA target sequence for TCF8 (NM_030751.2,1469-1487).
ctagccaacttcaagttgt

SEQ ID NO: 12998 - DNA, 19 bp, Homo sapiens
  siRNA target sequence for TCF8 (NM_030751.2,1480-1498).
caagttgttcctcaaaatt

SEQ ID NO: 12999 - DNA, 19 bp, Homo sapiens
  siRNA target sequence for TCF8 (NM_030751.2,1513-1531).
ccagtcgctacaaacagtt

SEQ ID NO: 13000 - DNA, 19 bp, Homo sapiens
  siRNA target sequence for TCF8 (NM_030751.2,1516-1534).
gtcgctacaaacagttgta

SEQ ID NO: 13001 - DNA, 19 bp, Homo sapiens
  siRNA target sequence for TCF8 (NM_030751.2,1652-1670).
cacttccagaattaaagca

SEQ ID NO: 13002 - DNA, 19 bp, Homo sapiens
  siRNA target sequence for TCF8 (NM_030751.2,1774-1792).
cctagtcagccacctttaa

SEQ ID NO: 13003 - DNA, 19 bp, Homo sapiens
  siRNA target sequence for TCF8 (NM_030751.2,1775-1793).
ctagtcagccacctttaaa

SEQ ID NO: 13004 - DNA, 19 bp, Homo sapiens
  siRNA target sequence for TCF8 (NM_030751.2,1778-1796).
gtcagccacctttaaagaa

SEQ ID NO: 13005 - DNA, 19 bp, Homo sapiens
  siRNA target sequence for TCF8 (NM_030751.2,1809-1827).
cctaaaagcatattatgct

SEQ ID NO: 13006 - DNA, 19 bp, Homo sapiens
  siRNA target sequence for TCF8 (NM_030751.2,1810-1828).
ctaaaagcatattatgctt

SEQ ID NO: 13007 - DNA, 19 bp, Homo sapiens
  siRNA target sequence for TCF8 (NM_030751.2,1881-1899).
cctaccactggatgtagta

SEQ ID NO: 13008 - DNA, 19 bp, Homo sapiens
  siRNA target sequence for TCF8 (NM_030751.2,1882-1900).
ctaccactggatgtagtaa

SEQ ID NO: 13009 - DNA, 19 bp, Homo sapiens
  siRNA target sequence for TCF8 (NM_030751.2,1886-1904).
cactggatgtagtaaaaaa

SEQ ID NO: 13010 - DNA, 19 bp, Homo sapiens
  siRNA target sequence for TCF8 (NM_030751.2,1917-1935).
gatgcaagctggacagatt

SEQ ID NO: 13011 - DNA, 19 bp, Homo sapiens
  siRNA target sequence for TCF8 (NM_030751.2,1998-2016).
caatgatcagcctcaatct

SEQ ID NO: 13012 - DNA, 19 bp, Homo sapiens
  siRNA target sequence for TCF8 (NM_030751.2,2037-2055).
ggacagcacagtaaatcta

SEQ ID NO: 13013 - DNA, 19 bp, Homo sapiens
  siRNA target sequence for TCF8 (NM_030751.2,2043-2061).
cacagtaaatctacaaagt

SEQ ID NO: 13014 - DNA, 19 bp, Homo sapiens
  siRNA target sequence for TCF8 (NM_030751.2,2060-2078).
gtcctttgaagatgactaa

SEQ ID NO: 13015 - DNA, 19 bp, Homo sapiens
  siRNA target sequence for TCF8 (NM_030751.2,2073-2091).
gactaactccccagtttta

SEQ ID NO: 13016 - DNA, 19 bp, Homo sapiens
  siRNA target sequence for TCF8 (NM_030751.2,2098-2116).
ggatcaaccaccaatggtt

SEQ ID NO: 13017 - DNA, 19 bp, Homo sapiens
  siRNA target sequence for TCF8 (NM_030751.2,2109-2127).
caatggttccagaagtagt

SEQ ID NO: 13018 - DNA, 19 bp, Homo sapiens
  siRNA target sequence for TCF8 (NM_030751.2,2132-2150).
catccccatcacctctaaa

SEQ ID NO: 13019 - DNA, 19 bp, Homo sapiens
  siRNA target sequence for TCF8 (NM_030751.2,2218-2236).
gtagaacctcttgatcttt

SEQ ID NO: 13020 - DNA, 19 bp, Homo sapiens
  siRNA target sequence for TCF8 (NM_030751.2,2266-2284).
gaaaggtcaactatcacta

SEQ ID NO: 13021 - DNA, 19 bp, Homo sapiens
  siRNA target sequence for TCF8 (NM_030751.2,2273-2291).
caactatcactagtgttta

SEQ ID NO: 13022 - DNA, 19 bp, Homo sapiens
  siRNA target sequence for TCF8 (NM_030751.2,2276-2294).
ctatcactagtgtttacca

SEQ ID NO: 13023 - DNA, 19 bp, Homo sapiens
  siRNA target sequence for TCF8 (NM_030751.2,2421-2439).
cataaatatcgctatacct

SEQ ID NO: 13024 - DNA, 19 bp, Homo sapiens
  siRNA target sequence for TCF8 (NM_030751.2,2504-2522).
gagcgctagctgccaataa

SEQ ID NO: 13025 - DNA, 19 bp, Homo sapiens
  siRNA target sequence for TCF8 (NM_030751.2,2507-2525).
cgctagctgccaataagca

SEQ ID NO: 13026 - DNA, 19 bp, Homo sapiens
  siRNA target sequence for TCF8 (NM_030751.2,2508-2526).
gctagctgccaataagcaa

SEQ ID NO: 13027 - DNA, 19 bp, Homo sapiens
  siRNA target sequence for TCF8 (NM_030751.2,2509-2527).
ctagctgccaataagcaaa

SEQ ID NO: 13028 - DNA, 19 bp, Homo sapiens
  siRNA target sequence for TCF8 (NM_030751.2,2513-2531).
ctgccaataagcaaacgat

SEQ ID NO: 13029 - DNA, 19 bp, Homo sapiens
  siRNA target sequence for TCF8 (NM_030751.2,2545-2563).
gtggcatacacctactcaa

SEQ ID NO: 13030 - DNA, 19 bp, Homo sapiens
  siRNA target sequence for TCF8 (NM_030751.2,2548-2566).
gcatacacctactcaacta

SEQ ID NO: 13031 - DNA, 19 bp, Homo sapiens
  siRNA target sequence for TCF8 (NM_030751.2,2587-2605).
gaaccacccttgaaagtga

SEQ ID NO: 13032 - DNA, 19 bp, Homo sapiens
  siRNA target sequence for TCF8 (NM_030751.2,2728-2746).
ggaatgtatgcttgtgatt

SEQ ID NO: 13033 - DNA, 19 bp, Homo sapiens
  siRNA target sequence for TCF8 (NM_030751.2,2763-2781).
ccaaaagagtagttcatta

SEQ ID NO: 13034 - DNA, 19 bp, Homo sapiens
  siRNA target sequence for TCF8 (NM_030751.2,2764-2782).
caaaagagtagttcattat

SEQ ID NO: 13035 - DNA, 19 bp, Homo sapiens
  siRNA target sequence for TCF8 (NM_030751.2,2869-2887).
gaacacatgcgattacatt

SEQ ID NO: 13036 - DNA, 19 bp, Homo sapiens
  siRNA target sequence for TCF8 (NM_030751.2,2942-2960).
ggtcttattctcaacacat

SEQ ID NO: 13037 - DNA, 19 bp, Homo sapiens
  siRNA target sequence for TCF8 (NM_030751.2,2965-2983).
catcgctactcctactgta

SEQ ID NO: 13038 - DNA, 19 bp, Homo sapiens
  siRNA target sequence for TCF8 (NM_030751.2,3089-3107).
cggacgagagagagagttt

SEQ ID NO: 13039 - DNA, 19 bp, Homo sapiens
  siRNA target sequence for TCF8 (NM_030751.2,3332-3350).
gcagcttaggacaaaaagt

SEQ ID NO: 13040 - DNA, 19 bp, Homo sapiens
  siRNA target sequence for TCF8 (NM_030751.2,3367-3385).
caagtgtctgaagaaaaga

SEQ ID NO: 13041 - DNA, 19 bp, Homo sapiens
  siRNA target sequence for TCFL4 (NM_170607.2,339-357).
gtagtgtccagagctaata

SEQ ID NO: 13042 - DNA, 19 bp, Homo sapiens
  siRNA target sequence for TCFL4 (NM_170607.2,342-360).
gtgtccagagctaatagca

SEQ ID NO: 13043 - DNA, 19 bp, Homo sapiens
  siRNA target sequence for TCFL4 (NM_170607.2,497-515).
catcaagagaggctatgat

SEQ ID NO: 13044 - DNA, 19 bp, Homo sapiens
  siRNA target sequence for TCFL4 (NM_170607.2,580-598).
gcaaagccatcgttctaca

SEQ ID NO: 13045 - DNA, 19 bp, Homo sapiens
  siRNA target sequence for TCFL4 (NM_170607.2,585-603).
gccatcgttctacaaaaga

SEQ ID NO: 13046 - DNA, 19 bp, Homo sapiens
  siRNA target sequence for TCFL4 (NM_170607.2,675-693).
gatgtcaccgccctaaaga

SEQ ID NO: 13047 - DNA, 19 bp, Homo sapiens
  siRNA target sequence for TCFL4 (NM_170607.2,678-696).
gtcaccgccctaaagatca

SEQ ID NO: 13048 - DNA, 19 bp, Homo sapiens
  siRNA target sequence for TCFL4 (NM_170607.2,682-700).
ccgccctaaagatcatgaa

SEQ ID NO: 13049 - DNA, 19 bp, Homo sapiens
  siRNA target sequence for TCFL4 (NM_170607.2,683-701).
cgccctaaagatcatgaaa

SEQ ID NO: 13050 - DNA, 19 bp, Homo sapiens
  siRNA target sequence for TCFL4 (NM_170607.2,766-784).
ctgaccaggtcaagttcaa

SEQ ID NO: 13051 - DNA, 19 bp, Homo sapiens
  siRNA target sequence for TCFL4 (NM_170607.2,880-898).
ggatcgaggagcactgtaa

SEQ ID NO: 13052 - DNA, 19 bp, Homo sapiens
  siRNA target sequence for TCFL4 (NM_170607.2,907-925).
ccctgcgggagattgtgat

SEQ ID NO: 13053 - DNA, 19 bp, Homo sapiens
  siRNA target sequence for TCFL4 (NM_170607.2,908-926).
cctgcgggagattgtgatt

SEQ ID NO: 13054 - DNA, 19 bp, Homo sapiens
  siRNA target sequence for TCFL4 (NM_170607.2,927-945).
ggcgtcctgcaccaattga

SEQ ID NO: 13055 - DNA, 19 bp, Homo sapiens
  siRNA target sequence for TCFL4 (NM_170607.2,928-946).
gcgtcctgcaccaattgaa

SEQ ID NO: 13056 - DNA, 19 bp, Homo sapiens
  siRNA target sequence for TCFL4 (NM_170607.2,929-947).
cgtcctgcaccaattgaaa

SEQ ID NO: 13057 - DNA, 19 bp, Homo sapiens
  siRNA target sequence for TEAD2 (NM_003598.1,367-385).
gaagacccgaactcgaaaa

SEQ ID NO: 13058 - DNA, 19 bp, Homo sapiens
  siRNA target sequence for TEAD2 (NM_003598.1,406-424).
ggttttggcccgaaggaaa

SEQ ID NO: 13059 - DNA, 19 bp, Homo sapiens
  siRNA target sequence for TEAD2 (NM_003598.1,771-789).
ggttgcagctggtagagtt

SEQ ID NO: 13060 - DNA, 19 bp, Homo sapiens
  siRNA target sequence for TEAD2 (NM_003598.1,809-827).
ccagatgcagttgattctt

SEQ ID NO: 13061 - DNA, 19 bp, Homo sapiens
  siRNA target sequence for TEAD2 (NM_003598.1,810-828).
cagatgcagttgattctta

SEQ ID NO: 13062 - DNA, 19 bp, Homo sapiens
  siRNA target sequence for TEAD2 (NM_003598.1,942-960).
gcctccgagagctatatga

SEQ ID NO: 13063 - DNA, 19 bp, Homo sapiens
  siRNA target sequence for TEAD2 (NM_003598.1,943-961).
cctccgagagctatatgat

SEQ ID NO: 13064 - DNA, 19 bp, Homo sapiens
  siRNA target sequence for TEAD2 (NM_003598.1,1074-1092).
gagtgagcagccagtatga

SEQ ID NO: 13065 - DNA, 19 bp, Homo sapiens
  siRNA target sequence for TEAD2 (NM_003598.1,1123-1141).
ctccaaggtctgctctttt

SEQ ID NO: 13066 - DNA, 19 bp, Homo sapiens
  siRNA target sequence for TEAD2 (NM_003598.1,1183-1201).
gctggaggacggcagattt

SEQ ID NO: 13067 - DNA, 19 bp, Homo sapiens
  siRNA target sequence for TEAD2 (NM_003598.1,1187-1205).
gaggacggcagatttgtgt

SEQ ID NO: 13068 - DNA, 19 bp, Homo sapiens
  siRNA target sequence for TEAD2 (NM_003598.1,1268-1286).
ctgcctgagcgatacatga

SEQ ID NO: 13069 - DNA, 19 bp, Homo sapiens
  siRNA target sequence for TEAD2 (NM_003598.1,1271-1289).
cctgagcgatacatgatga

SEQ ID NO: 13070 - DNA, 19 bp, Homo sapiens
  siRNA target sequence for TEAD2 (NM_003598.1,1272-1290).
ctgagcgatacatgatgaa

SEQ ID NO: 13071 - DNA, 19 bp, Homo sapiens
  siRNA target sequence for TEAD2 (NM_003598.1,1274-1292).
gagcgatacatgatgaaca

SEQ ID NO: 13072 - DNA, 19 bp, Homo sapiens
  siRNA target sequence for TEAD2 (NM_003598.1,1316-1334).
ctccaggtggtgacaaaca

SEQ ID NO: 13073 - DNA, 19 bp, Homo sapiens
  siRNA target sequence for TEAD2 (NM_003598.1,1355-1373).
ctctgcaccgcctatgtct

SEQ ID NO: 13074 - DNA, 19 bp, Homo sapiens
  siRNA target sequence for TEAD3 (NM_003214.1,391-409).
cggccgaaatgagttgatt

SEQ ID NO: 13075 - DNA, 19 bp, Homo sapiens
  siRNA target sequence for TEAD3 (NM_003214.1,403-421).
gttgattgcacgctatatt

SEQ ID NO: 13076 - DNA, 19 bp, Homo sapiens
  siRNA target sequence for TEAD3 (NM_003214.1,406-424).
gattgcacgctatattaaa

SEQ ID NO: 13077 - DNA, 19 bp, Homo sapiens
  siRNA target sequence for TEAD3 (NM_003214.1,410-428).
gcacgctatattaaactga

SEQ ID NO: 13078 - DNA, 19 bp, Homo sapiens
  siRNA target sequence for TEAD3 (NM_003214.1,708-726).
gaccctctcaggacatcaa

SEQ ID NO: 13079 - DNA, 19 bp, Homo sapiens
  siRNA target sequence for TEAD3 (NM_003214.1,769-787).
gccgacgctcagcagttat

SEQ ID NO: 13080 - DNA, 19 bp, Homo sapiens
  siRNA target sequence for TEAD3 (NM_003214.1,771-789).
cgacgctcagcagttatga

SEQ ID NO: 13081 - DNA, 19 bp, Homo sapiens
  siRNA target sequence for TEAD3 (NM_003214.1,832-850).
gtggcaggaccgtaccatt

SEQ ID NO: 13082 - DNA, 19 bp, Homo sapiens
  siRNA target sequence for TEAD3 (NM_003214.1,992-1010).
gtgcgccagatctatgaca

SEQ ID NO: 13083 - DNA, 19 bp, Homo sapiens
  siRNA target sequence for TEAD3 (NM_003214.1,1464-1482).
cccagcaccatgtctacaa

SEQ ID NO: 13084 - DNA, 19 bp, Homo sapiens
  siRNA target sequence for TEAD4 (NM_003213.1,297-315).
cggatattgagcagagttt

SEQ ID NO: 13085 - DNA, 19 bp, Homo sapiens
  siRNA target sequence for TEAD4 (NM_003213.1,342-360).
cctgtggcaggcgcaaaat

SEQ ID NO: 13086 - DNA, 19 bp, Homo sapiens
  siRNA target sequence for TEAD4 (NM_003213.1,345-363).
gtggcaggcgcaaaatcat

SEQ ID NO: 13087 - DNA, 19 bp, Homo sapiens
  siRNA target sequence for TEAD4 (NM_003213.1,497-515).
gagatccaggccaagctaa

SEQ ID NO: 13088 - DNA, 19 bp, Homo sapiens
  siRNA target sequence for TEAD4 (NM_003213.1,737-755).
cctctgccagggtttgagt

SEQ ID NO: 13089 - DNA, 19 bp, Homo sapiens
  siRNA target sequence for TEAD4 (NM_003213.1,956-974).
gtggacatccgccaaatct

SEQ ID NO: 13090 - DNA, 19 bp, Homo sapiens
  siRNA target sequence for TEAD4 (NM_003213.1,1107-1125).
gggtctccagccagtatga

SEQ ID NO: 13091 - DNA, 19 bp, Homo sapiens
  siRNA target sequence for TEAD4 (NM_003213.1,1207-1225).
gtatgctcgctatgagaat

SEQ ID NO: 13092 - DNA, 19 bp, Homo sapiens
  siRNA target sequence for TEAD4 (NM_003213.1,1256-1274).
ccgctctgtgagtacatga

SEQ ID NO: 13093 - DNA, 19 bp, Homo sapiens
  siRNA target sequence for TEAD4 (NM_003213.1,1388-1406).
ctgtgcattgcctatgtct

SEQ ID NO: 13094 - DNA, 19 bp, Homo sapiens
  siRNA target sequence for TEAD4 (NM_003213.1,1390-1408).
gtgcattgcctatgtcttt

SEQ ID NO: 13095 - DNA, 19 bp, Homo sapiens
  siRNA target sequence for TEAD4 (NM_003213.1,1431-1449).
gggctcagcaccacatcta

SEQ ID NO: 13096 - DNA, 19 bp, Homo sapiens
  siRNA target sequence for TFAM (NM_003201.1,750-768).
ggacgaaactcgttatcat

SEQ ID NO: 13097 - DNA, 19 bp, Homo sapiens
  siRNA target sequence for TFAM (NM_003201.1,751-769).
gacgaaactcgttatcata

SEQ ID NO: 13098 - DNA, 19 bp, Homo sapiens
  siRNA target sequence for TFAM (NM_003201.1,753-771).
cgaaactcgttatcataat

SEQ ID NO: 13099 - DNA, 19 bp, Homo sapiens
  siRNA target sequence for TFAM (NM_003201.1,758-776).
ctcgttatcataatgaaat

SEQ ID NO: 13100 - DNA, 19 bp, Homo sapiens
  siRNA target sequence for TFAP2B (NM_003221.2,80-98).
gtcaagtacgaagatatct

SEQ ID NO: 13101 - DNA, 19 bp, Homo sapiens
  siRNA target sequence for TFAP2B (NM_003221.2,535-553).
cggccatcccggaatggaa

SEQ ID NO: 13102 - DNA, 19 bp, Homo sapiens
  siRNA target sequence for TFAP2B (NM_003221.2,585-603).
gcggcatgaatctattgga

SEQ ID NO: 13103 - DNA, 19 bp, Homo sapiens
  siRNA target sequence for TFAP2B (NM_003221.2,601-619).
ggaccagtctgtcattaaa

SEQ ID NO: 13104 - DNA, 19 bp, Homo sapiens
  siRNA target sequence for TFAP2B (NM_003221.2,637-655).
caaatcggtgacttctcta

SEQ ID NO: 13105 - DNA, 19 bp, Homo sapiens
  siRNA target sequence for TFAP2B (NM_003221.2,642-660).
cggtgacttctctaatgat

SEQ ID NO: 13106 - DNA, 19 bp, Homo sapiens
  siRNA target sequence for TFAP2B (NM_003221.2,718-736).
cgtcccaggccgtttgtct

SEQ ID NO: 13107 - DNA, 19 bp, Homo sapiens
  siRNA target sequence for TFAP2B (NM_003221.2,733-751).
gtctctgctcagttcaact

SEQ ID NO: 13108 - DNA, 19 bp, Homo sapiens
  siRNA target sequence for TFAP2B (NM_003221.2,744-762).
gttcaacttcgaagtacaa

SEQ ID NO: 13109 - DNA, 19 bp, Homo sapiens
  siRNA target sequence for TFAP2B (NM_003221.2,747-765).
caacttcgaagtacaaagt

SEQ ID NO: 13110 - DNA, 19 bp, Homo sapiens
  siRNA target sequence for TFAP2B (NM_003221.2,887-905).
gaaaaaatcggtttgaatt

SEQ ID NO: 13111 - DNA, 19 bp, Homo sapiens
  siRNA target sequence for TFAP2B (NM_003221.2,929-947).
gcaaatgtcacgttactca

SEQ ID NO: 13112 - DNA, 19 bp, Homo sapiens
  siRNA target sequence for TFAP2B (NM_003221.2,1021-1039).
caaagccgtctctgagtat

SEQ ID NO: 13113 - DNA, 19 bp, Homo sapiens
  siRNA target sequence for TFAP2B (NM_003221.2,1025-1043).
gccgtctctgagtatttga

SEQ ID NO: 13114 - DNA, 19 bp, Homo sapiens
  siRNA target sequence for TFAP2B (NM_003221.2,1026-1044).
ccgtctctgagtatttgaa

SEQ ID NO: 13115 - DNA, 19 bp, Homo sapiens
  siRNA target sequence for TFAP2B (NM_003221.2,1069-1087).
cctgcactcccgaaagaat

SEQ ID NO: 13116 - DNA, 19 bp, Homo sapiens
  siRNA target sequence for TFAP2B (NM_003221.2,1070-1088).
ctgcactcccgaaagaata

SEQ ID NO: 13117 - DNA, 19 bp, Homo sapiens
  siRNA target sequence for TFAP2B (NM_003221.2,1353-1371).
gggaaggcccaggtagtaa

SEQ ID NO: 13118 - DNA, 19 bp, Homo sapiens
  siRNA target sequence for TFAP2B (NM_003221.2,1355-1373).
gaaggcccaggtagtaaaa

SEQ ID NO: 13119 - DNA, 19 bp, Homo sapiens
  siRNA target sequence for TFAP2BL1 (NM_172238.1,568-586).
caaacagctaccgtttgat

SEQ ID NO: 13120 - DNA, 19 bp, Homo sapiens
  siRNA target sequence for TFAP2BL1 (NM_172238.1,841-859).
ccaccgactttattaacct

SEQ ID NO: 13121 - DNA, 19 bp, Homo sapiens
  siRNA target sequence for TFAP2BL1 (NM_172238.1,956-974).
gagccatggctctcagtat

SEQ ID NO: 13122 - DNA, 19 bp, Homo sapiens
  siRNA target sequence for TFAP2BL1 (NM_172238.1,1086-1104).
ggccaaggtggagtgataa

SEQ ID NO: 13123 - DNA, 19 bp, Homo sapiens
  siRNA target sequence for TFAP2BL1 (NM_172238.1,1088-1106).
ccaaggtggagtgataaga

SEQ ID NO: 13124 - DNA, 19 bp, Homo sapiens
  siRNA target sequence for TFAP2BL1 (NM_172238.1,1124-1142).
ggtcaaccccacagactta

SEQ ID NO: 13125 - DNA, 19 bp, Homo sapiens
  siRNA target sequence for TFAP2BL1 (NM_172238.1,1125-1143).
gtcaaccccacagacttat

SEQ ID NO: 13126 - DNA, 19 bp, Homo sapiens
  siRNA target sequence for TFAP2BL1 (NM_172238.1,1158-1176).
ggccgtttgtcccttctta

SEQ ID NO: 13127 - DNA, 19 bp, Homo sapiens
  siRNA target sequence for TFAP2BL1 (NM_172238.1,1160-1178).
ccgtttgtcccttcttagt

SEQ ID NO: 13128 - DNA, 19 bp, Homo sapiens
  siRNA target sequence for TFAP2BL1 (NM_172238.1,1161-1179).
cgtttgtcccttcttagtt

SEQ ID NO: 13129 - DNA, 19 bp, Homo sapiens
  siRNA target sequence for TFAP2BL1 (NM_172238.1,1177-1195).
gttctacttccaaatacaa

SEQ ID NO: 13130 - DNA, 19 bp, Homo sapiens
  siRNA target sequence for TFAP2BL1 (NM_172238.1,1254-1272).
ctcttgggaggcattttga

SEQ ID NO: 13131 - DNA, 19 bp, Homo sapiens
  siRNA target sequence for TFAP2BL1 (NM_172238.1,1256-1274).
cttgggaggcattttgaga

SEQ ID NO: 13132 - DNA, 19 bp, Homo sapiens
  siRNA target sequence for TFAP2BL1 (NM_172238.1,1320-1338).
gataggcttggcttaaact

SEQ ID NO: 13133 - DNA, 19 bp, Homo sapiens
  siRNA target sequence for TFAP2BL1 (NM_172238.1,1416-1434).
cgggattttggctacactt

SEQ ID NO: 13134 - DNA, 19 bp, Homo sapiens
  siRNA target sequence for TFAP2BL1 (NM_172238.1,1426-1444).
gctacacttgtgaaacaga

SEQ ID NO: 13135 - DNA, 19 bp, Homo sapiens
  siRNA target sequence for TFAP2BL1 (NM_172238.1,1470-1488).
catcttgccagacaacata

SEQ ID NO: 13136 - DNA, 19 bp, Homo sapiens
  siRNA target sequence for TFAP2BL1 (NM_172238.1,1523-1541).
gatcctggcgaccaaacaa

SEQ ID NO: 13137 - DNA, 19 bp, Homo sapiens
  siRNA target sequence for TFAP2BL1 (NM_172238.1,1527-1545).
ctggcgaccaaacaaatct

SEQ ID NO: 13138 - DNA, 19 bp, Homo sapiens
  siRNA target sequence for TFAP2BL1 (NM_172238.1,1529-1547).
ggcgaccaaacaaatctgt

SEQ ID NO: 13139 - DNA, 19 bp, Homo sapiens
  siRNA target sequence for TFAP2BL1 (NM_172238.1,1530-1548).
gcgaccaaacaaatctgta

SEQ ID NO: 13140 - DNA, 19 bp, Homo sapiens
  siRNA target sequence for TFAP2BL1 (NM_172238.1,1560-1578).
gacctcttgagccaagata

SEQ ID NO: 13141 - DNA, 19 bp, Homo sapiens
  siRNA target sequence for TFAP2BL1 (NM_172238.1,1565-1583).
cttgagccaagatagatca

SEQ ID NO: 13142 - DNA, 19 bp, Homo sapiens
  siRNA target sequence for TFAP2BL1 (NM_172238.1,1595-1613).
ctccagacccactccaatt

SEQ ID NO: 13143 - DNA, 19 bp, Homo sapiens
  siRNA target sequence for TFAP2BL1 (NM_172238.1,1597-1615).
ccagacccactccaattct

SEQ ID NO: 13144 - DNA, 19 bp, Homo sapiens
  siRNA target sequence for TFAP2BL1 (NM_172238.1,1598-1616).
cagacccactccaattcta

SEQ ID NO: 13145 - DNA, 19 bp, Homo sapiens
  siRNA target sequence for TFAP2BL1 (NM_172238.1,1609-1627).
caattctagaccttgacat

SEQ ID NO: 13146 - DNA, 19 bp, Homo sapiens
  siRNA target sequence for TFAP2BL1 (NM_172238.1,1692-1710).
gctctaagcactttccaaa

SEQ ID NO: 13147 - DNA, 19 bp, Homo sapiens
  siRNA target sequence for TFAP2BL1 (NM_172238.1,1720-1738).
gtgaaatgctgaactactt

SEQ ID NO: 13148 - DNA, 19 bp, Homo sapiens
  siRNA target sequence for TFAP2BL1 (NM_172238.1,1727-1745).
gctgaactacttggaaaaa

SEQ ID NO: 13149 - DNA, 19 bp, Homo sapiens
  siRNA target sequence for TFAP2BL1 (NM_172238.1,1809-1827).
gctcccctgcggaaaactt

SEQ ID NO: 13150 - DNA, 19 bp, Homo sapiens
  siRNA target sequence for TFAP2BL1 (NM_172238.1,1838-1856).
cgtgaaagagggcaaaaca

SEQ ID NO: 13151 - DNA, 19 bp, Homo sapiens
  siRNA target sequence for TFAP2C (NM_003222.3,387-405).
cactggagtcgccgaatat

SEQ ID NO: 13152 - DNA, 19 bp, Homo sapiens
  siRNA target sequence for TFAP2C (NM_003222.3,804-822).
gcacgatcagacagtcatt

SEQ ID NO: 13153 - DNA, 19 bp, Homo sapiens
  siRNA target sequence for TFAP2C (NM_003222.3,942-960).
cctcagctctacgtctaaa

SEQ ID NO: 13154 - DNA, 19 bp, Homo sapiens
  siRNA target sequence for TFAP2C (NM_003222.3,943-961).
ctcagctctacgtctaaat

SEQ ID NO: 13155 - DNA, 19 bp, Homo sapiens
  siRNA target sequence for TFAP2C (NM_003222.3,950-968).
ctacgtctaaatacaaagt

SEQ ID NO: 13156 - DNA, 19 bp, Homo sapiens
  siRNA target sequence for TFAP2C (NM_003222.3,996-1014).
gtccccacctgaatgctta

SEQ ID NO: 13157 - DNA, 19 bp, Homo sapiens
  siRNA target sequence for TFAP2C (NM_003222.3,998-1016).
ccccacctgaatgcttaaa

SEQ ID NO: 13158 - DNA, 19 bp, Homo sapiens
  siRNA target sequence for TFAP2C (NM_003222.3,999-1017).
cccacctgaatgcttaaat

SEQ ID NO: 13159 - DNA, 19 bp, Homo sapiens
  siRNA target sequence for TFAP2C (NM_003222.3,1089-1107).
ggacaagattgggttgaat

SEQ ID NO: 13160 - DNA, 19 bp, Homo sapiens
  siRNA target sequence for TFAP2C (NM_003222.3,1092-1110).
caagattgggttgaatctt

SEQ ID NO: 13161 - DNA, 19 bp, Homo sapiens
  siRNA target sequence for TFAP2C (NM_003222.3,1140-1158).
gactctcctgacatcctta

SEQ ID NO: 13162 - DNA, 19 bp, Homo sapiens
  siRNA target sequence for TFAP2C (NM_003222.3,1146-1164).
cctgacatccttagtagaa

SEQ ID NO: 13163 - DNA, 19 bp, Homo sapiens
  siRNA target sequence for TFAP2C (NM_003222.3,1212-1230).
cgaatttcctagtaaacca

SEQ ID NO: 13164 - DNA, 19 bp, Homo sapiens
  siRNA target sequence for TFCP2 (NM_005653.3,482-500).
ctctggccgacgaagtgat

SEQ ID NO: 13165 - DNA, 19 bp, Homo sapiens
  siRNA target sequence for TFCP2 (NM_005653.3,486-504).
ggccgacgaagtgattgaa

SEQ ID NO: 13166 - DNA, 19 bp, Homo sapiens
  siRNA target sequence for TFCP2 (NM_005653.3,487-505).
gccgacgaagtgattgaat

SEQ ID NO: 13167 - DNA, 19 bp, Homo sapiens
  siRNA target sequence for TFCP2 (NM_005653.3,620-638).
cgagtttgcctcctgataa

SEQ ID NO: 13168 - DNA, 19 bp, Homo sapiens
  siRNA target sequence for TFCP2 (NM_005653.3,627-645).
gcctcctgataatgagaat

SEQ ID NO: 13169 - DNA, 19 bp, Homo sapiens
  siRNA target sequence for TFCP2 (NM_005653.3,709-727).
gaaaccctaacgtatctca

SEQ ID NO: 13170 - DNA, 19 bp, Homo sapiens
  siRNA target sequence for TFCP2 (NM_005653.3,713-731).
ccctaacgtatctcaatca

SEQ ID NO: 13171 - DNA, 19 bp, Homo sapiens
  siRNA target sequence for TFCP2 (NM_005653.3,714-732).
cctaacgtatctcaatcaa

SEQ ID NO: 13172 - DNA, 19 bp, Homo sapiens
  siRNA target sequence for TFCP2 (NM_005653.3,751-769).
cgaatgctagacaatagga

SEQ ID NO: 13173 - DNA, 19 bp, Homo sapiens
  siRNA target sequence for TFCP2 (NM_005653.3,752-770).
gaatgctagacaataggaa

SEQ ID NO: 13174 - DNA, 19 bp, Homo sapiens
  siRNA target sequence for TFCP2 (NM_005653.3,902-920).
gaattcttgacatagatat

SEQ ID NO: 13175 - DNA, 19 bp, Homo sapiens
  siRNA target sequence for TFCP2 (NM_005653.3,942-960).
cgatcctagggctaatcca

SEQ ID NO: 13176 - DNA, 19 bp, Homo sapiens
  siRNA target sequence for TFCP2 (NM_005653.3,943-961).
gatcctagggctaatccaa

SEQ ID NO: 13177 - DNA, 19 bp, Homo sapiens
  siRNA target sequence for TFCP2 (NM_005653.3,951-969).
ggctaatccaactcaacta

SEQ ID NO: 13178 - DNA, 19 bp, Homo sapiens
  siRNA target sequence for TFCP2 (NM_005653.3,952-970).
gctaatccaactcaactaa

SEQ ID NO: 13179 - DNA, 19 bp, Homo sapiens
  siRNA target sequence for TFCP2 (NM_005653.3,953-971).
ctaatccaactcaactaaa

SEQ ID NO: 13180 - DNA, 19 bp, Homo sapiens
  siRNA target sequence for TFCP2 (NM_005653.3,959-977).
caactcaactaaatacagt

SEQ ID NO: 13181 - DNA, 19 bp, Homo sapiens
  siRNA target sequence for TFCP2 (NM_005653.3,1021-1039).
caggtgcactgtattagca

SEQ ID NO: 13182 - DNA, 19 bp, Homo sapiens
  siRNA target sequence for TFCP2 (NM_005653.3,1044-1062).
gttcactatgaggaaacat

SEQ ID NO: 13183 - DNA, 19 bp, Homo sapiens
  siRNA target sequence for TFCP2 (NM_005653.3,1077-1095).
ggtgccattccgagtacaa

SEQ ID NO: 13184 - DNA, 19 bp, Homo sapiens
  siRNA target sequence for TFCP2 (NM_005653.3,1078-1096).
gtgccattccgagtacaaa

SEQ ID NO: 13185 - DNA, 19 bp, Homo sapiens
  siRNA target sequence for TFCP2 (NM_005653.3,1082-1100).
cattccgagtacaaataga

SEQ ID NO: 13186 - DNA, 19 bp, Homo sapiens
  siRNA target sequence for TFCP2 (NM_005653.3,1088-1106).
gagtacaaatagatacctt

SEQ ID NO: 13187 - DNA, 19 bp, Homo sapiens
  siRNA target sequence for TFCP2 (NM_005653.3,1300-1318).
cccgagatcacgtatgtca

SEQ ID NO: 13188 - DNA, 19 bp, Homo sapiens
  siRNA target sequence for TFCP2 (NM_005653.3,1301-1319).
ccgagatcacgtatgtcaa

SEQ ID NO: 13189 - DNA, 19 bp, Homo sapiens
  siRNA target sequence for TFCP2 (NM_005653.3,1302-1320).
cgagatcacgtatgtcaat

SEQ ID NO: 13190 - DNA, 19 bp, Homo sapiens
  siRNA target sequence for TFCP2 (NM_005653.3,1303-1321).
gagatcacgtatgtcaata

SEQ ID NO: 13191 - DNA, 19 bp, Homo sapiens
  siRNA target sequence for TFCP2 (NM_005653.3,1344-1362).
cagttcccatagcagtttt

SEQ ID NO: 13192 - DNA, 19 bp, Homo sapiens
  siRNA target sequence for TFCP2 (NM_005653.3,1461-1479).
gcagtggttgcatcgaaat

SEQ ID NO: 13193 - DNA, 19 bp, Homo sapiens
  siRNA target sequence for TFCP2 (NM_005653.3,1464-1482).
gtggttgcatcgaaatcgt

SEQ ID NO: 13194 - DNA, 19 bp, Homo sapiens
  siRNA target sequence for TFCP2 (NM_005653.3,1466-1484).
ggttgcatcgaaatcgttt

SEQ ID NO: 13195 - DNA, 19 bp, Homo sapiens
  siRNA target sequence for TFCP2 (NM_005653.3,1467-1485).
gttgcatcgaaatcgtttt

SEQ ID NO: 13196 - DNA, 19 bp, Homo sapiens
  siRNA target sequence for TFCP2 (NM_005653.3,1470-1488).
gcatcgaaatcgtttttct

SEQ ID NO: 13197 - DNA, 19 bp, Homo sapiens
  siRNA target sequence for TFCP2 (NM_005653.3,1471-1489).
catcgaaatcgtttttcta

SEQ ID NO: 13198 - DNA, 19 bp, Homo sapiens
  siRNA target sequence for TFCP2 (NM_005653.3,1474-1492).
cgaaatcgtttttctacat

SEQ ID NO: 13199 - DNA, 19 bp, Homo sapiens
  siRNA target sequence for TFCP2 (NM_005653.3,1480-1498).
cgtttttctacattcacaa

SEQ ID NO: 13200 - DNA, 19 bp, Homo sapiens
  siRNA target sequence for TFCP2 (NM_005653.3,1512-1530).
cttctcaggggcagattta

SEQ ID NO: 13201 - DNA, 19 bp, Homo sapiens
  siRNA target sequence for TFCP2 (NM_005653.3,1517-1535).
caggggcagatttattgaa

SEQ ID NO: 13202 - DNA, 19 bp, Homo sapiens
  siRNA target sequence for TFCP2 (NM_005653.3,1611-1629).
gatggtgcgtccaaggtta

SEQ ID NO: 13203 - DNA, 19 bp, Homo sapiens
  siRNA target sequence for TFCP2 (NM_005653.3,1615-1633).
gtgcgtccaaggttaacca

SEQ ID NO: 13204 - DNA, 19 bp, Homo sapiens
  siRNA target sequence for TFCP2 (NM_005653.3,1617-1635).
gcgtccaaggttaaccatt

SEQ ID NO: 13205 - DNA, 19 bp, Homo sapiens
  siRNA target sequence for TFCP2 (NM_005653.3,1618-1636).
cgtccaaggttaaccattt

SEQ ID NO: 13206 - DNA, 19 bp, Homo sapiens
  siRNA target sequence for TFCP2 (NM_005653.3,1619-1637).
gtccaaggttaaccattta

SEQ ID NO: 13207 - DNA, 19 bp, Homo sapiens
  siRNA target sequence for TFCP2 (NM_005653.3,1626-1644).
gttaaccatttatgtttgt

SEQ ID NO: 13208 - DNA, 19 bp, Homo sapiens
  siRNA target sequence for TFCP2 (NM_005653.3,1708-1726).
gatggagactcaaatggta

SEQ ID NO: 13209 - DNA, 19 bp, Homo sapiens
  siRNA target sequence for TFCP2 (NM_005653.3,1734-1752).
cgtttaccatgctatctat

SEQ ID NO: 13210 - DNA, 19 bp, Homo sapiens
  siRNA target sequence for TFCP2 (NM_005653.3,1740-1758).
ccatgctatctatctagaa

SEQ ID NO: 13211 - DNA, 19 bp, Homo sapiens
  siRNA target sequence for TFCP2 (NM_005653.3,1762-1780).
ctaacagctgttgaattga

SEQ ID NO: 13212 - DNA, 19 bp, Homo sapiens
  siRNA target sequence for TFCP2 (NM_005653.3,1817-1835).
gccagatcagccagattta

SEQ ID NO: 13213 - DNA, 19 bp, Homo sapiens
  siRNA target sequence for TFCP2 (NM_005653.3,1842-1860).
ggggccaacaggaattcat

SEQ ID NO: 13214 - DNA, 19 bp, Homo sapiens
  siRNA target sequence for TFCP2 (NM_005653.3,1931-1949).
cagaaaccaatgatagcta

SEQ ID NO: 13215 - DNA, 19 bp, Homo sapiens
  siRNA target sequence for TFCP2 (NM_005653.3,1937-1955).
ccaatgatagctatcatat

SEQ ID NO: 13216 - DNA, 19 bp, Homo sapiens
  siRNA target sequence for TFDP1 (NM_007111.3,217-235).
caaaagatgccggtctaat

SEQ ID NO: 13217 - DNA, 19 bp, Homo sapiens
  siRNA target sequence for TFDP1 (NM_007111.3,660-678).
gacaaccacatcttaccaa

SEQ ID NO: 13218 - DNA, 19 bp, Homo sapiens
  siRNA target sequence for TFDP1 (NM_007111.3,1234-1252).
ctgttggaggcgtgttcat

SEQ ID NO: 13219 - DNA, 19 bp, Homo sapiens
  siRNA target sequence for TFDP1 (NM_007111.3,1236-1254).
gttggaggcgtgttcatca

SEQ ID NO: 13220 - DNA, 19 bp, Homo sapiens
  siRNA target sequence for TFDP2 (NM_006286.1,186-204).
ctgattgggagtccatata

SEQ ID NO: 13221 - DNA, 19 bp, Homo sapiens
  siRNA target sequence for TFDP2 (NM_006286.1,207-225).
cctgcaccagcaatggtta

SEQ ID NO: 13222 - DNA, 19 bp, Homo sapiens
  siRNA target sequence for TFDP2 (NM_006286.1,221-239).
ggttactcagacacacata

SEQ ID NO: 13223 - DNA, 19 bp, Homo sapiens
  siRNA target sequence for TFDP2 (NM_006286.1,256-274).
gggtccctggtgatagaaa

SEQ ID NO: 13224 - DNA, 19 bp, Homo sapiens
  siRNA target sequence for TFDP2 (NM_006286.1,279-297).
gctagaaaatttatagact

SEQ ID NO: 13225 - DNA, 19 bp, Homo sapiens
  siRNA target sequence for TFDP2 (NM_006286.1,376-394).
gtgagaaagttcaacgaaa

SEQ ID NO: 13226 - DNA, 19 bp, Homo sapiens
  siRNA target sequence for TFDP2 (NM_006286.1,380-398).
gaaagttcaacgaaaaggt

SEQ ID NO: 13227 - DNA, 19 bp, Homo sapiens
  siRNA target sequence for TFDP2 (NM_006286.1,387-405).
caacgaaaaggtacaacat

SEQ ID NO: 13228 - DNA, 19 bp, Homo sapiens
  siRNA target sequence for TFDP2 (NM_006286.1,397-415).
gtacaacatcgtacaatga

SEQ ID NO: 13229 - DNA, 19 bp, Homo sapiens
  siRNA target sequence for TFDP2 (NM_006286.1,438-456).
gagttcaccaattcaaata

SEQ ID NO: 13230 - DNA, 19 bp, Homo sapiens
  siRNA target sequence for TFDP2 (NM_006286.1,443-461).
caccaattcaaataaccat

SEQ ID NO: 13231 - DNA, 19 bp, Homo sapiens
  siRNA target sequence for TFDP2 (NM_006286.1,445-463).
ccaattcaaataaccattt

SEQ ID NO: 13232 - DNA, 19 bp, Homo sapiens
  siRNA target sequence for TFDP2 (NM_006286.1,494-512).
gaacattaggcgaagagtt

SEQ ID NO: 13233 - DNA, 19 bp, Homo sapiens
  siRNA target sequence for TFDP2 (NM_006286.1,497-515).
cattaggcgaagagtttat

SEQ ID NO: 13234 - DNA, 19 bp, Homo sapiens
  siRNA target sequence for TFDP2 (NM_006286.1,536-554).
ggcaatgaacataatttca

SEQ ID NO: 13235 - DNA, 19 bp, Homo sapiens
  siRNA target sequence for TFDP2 (NM_006286.1,637-655).
ggcggatagaacggataaa

SEQ ID NO: 13236 - DNA, 19 bp, Homo sapiens
  siRNA target sequence for TFDP2 (NM_006286.1,640-658).
ggatagaacggataaagca

SEQ ID NO: 13237 - DNA, 19 bp, Homo sapiens
  siRNA target sequence for TFDP2 (NM_006286.1,710-728).
cctggtacagagaaatcga

SEQ ID NO: 13238 - DNA, 19 bp, Homo sapiens
  siRNA target sequence for TFDP2 (NM_006286.1,772-790).
ccattcagctgccattcat

SEQ ID NO: 13239 - DNA, 19 bp, Homo sapiens
  siRNA target sequence for TFDP2 (NM_006286.1,1019-1037).
cacaggaccttcttggtta

SEQ ID NO: 13240 - DNA, 19 bp, Homo sapiens
  siRNA target sequence for TFDP2 (NM_006286.1,1034-1052).
gttaaatcagggactactt

SEQ ID NO: 13241 - DNA, 19 bp, Homo sapiens
  siRNA target sequence for TFDP2 (NM_006286.1,1044-1062).
ggactacttctgaactcta

SEQ ID NO: 13242 - DNA, 19 bp, Homo sapiens
  siRNA target sequence for TFDP2 (NM_006286.1,1055-1073).
gaactctacccaatcagtt

SEQ ID NO: 13243 - DNA, 19 bp, Homo sapiens
  siRNA target sequence for TFDP2 (NM_006286.1,1119-1137).
gtaaaccaagggttatgct

SEQ ID NO: 13244 - DNA, 19 bp, Homo sapiens
  siRNA target sequence for TFDP2 (NM_006286.1,1235-1253).
gaccccctgttcgttcaat

SEQ ID NO: 13245 - DNA, 19 bp, Homo sapiens
  siRNA target sequence for TFDP2 (NM_006286.1,1237-1255).
ccccctgttcgttcaatga

SEQ ID NO: 13246 - DNA, 19 bp, Homo sapiens
  siRNA target sequence for TFDP2 (NM_006286.1,1238-1256).
cccctgttcgttcaatgat

SEQ ID NO: 13247 - DNA, 19 bp, Homo sapiens
  siRNA target sequence for TFDP2 (NM_006286.1,1240-1258).
cctgttcgttcaatgatga

SEQ ID NO: 13248 - DNA, 19 bp, Homo sapiens
  siRNA target sequence for TFDP2 (NM_006286.1,1241-1259).
ctgttcgttcaatgatgaa

SEQ ID NO: 13249 - DNA, 19 bp, Homo sapiens
  siRNA target sequence for TFDP2 (NM_006286.1,1243-1261).
gttcgttcaatgatgaaga

SEQ ID NO: 13250 - DNA, 19 bp, Homo sapiens
  siRNA target sequence for TFE3 (NM_006521.3,347-365).
ctgctcagcctgaactctt

SEQ ID NO: 13251 - DNA, 19 bp, Homo sapiens
  siRNA target sequence for TFE3 (NM_006521.3,352-370).
cagcctgaactctttgctt

SEQ ID NO: 13252 - DNA, 19 bp, Homo sapiens
  siRNA target sequence for TFE3 (NM_006521.3,461-479).
cgctcaagcctcccaatat

SEQ ID NO: 13253 - DNA, 19 bp, Homo sapiens
  siRNA target sequence for TFE3 (NM_006521.3,465-483).
caagcctcccaatatcact

SEQ ID NO: 13254 - DNA, 19 bp, Homo sapiens
  siRNA target sequence for TFE3 (NM_006521.3,1059-1077).
gttacaatgatgaaatgct

SEQ ID NO: 13255 - DNA, 19 bp, Homo sapiens
  siRNA target sequence for TFE3 (NM_006521.3,1134-1152).
cagggaatctgcttgatgt

SEQ ID NO: 13256 - DNA, 19 bp, Homo sapiens
  siRNA target sequence for TFE3 (NM_006521.3,1137-1155).
ggaatctgcttgatgtgta

SEQ ID NO: 13257 - DNA, 19 bp, Homo sapiens
  siRNA target sequence for TFE3 (NM_006521.3,1304-1322).
cgtcgcaggcgattcaaca

SEQ ID NO: 13258 - DNA, 19 bp, Homo sapiens
  siRNA target sequence for TFE3 (NM_006521.3,1305-1323).
gtcgcaggcgattcaacat

SEQ ID NO: 13259 - DNA, 19 bp, Homo sapiens
  siRNA target sequence for TFE3 (NM_006521.3,1307-1325).
cgcaggcgattcaacatta

SEQ ID NO: 13260 - DNA, 19 bp, Homo sapiens
  siRNA target sequence for TFE3 (NM_006521.3,1308-1326).
gcaggcgattcaacattaa

SEQ ID NO: 13261 - DNA, 19 bp, Homo sapiens
  siRNA target sequence for TFE3 (NM_006521.3,1311-1329).
ggcgattcaacattaacga

SEQ ID NO: 13262 - DNA, 19 bp, Homo sapiens
  siRNA target sequence for TFEB (NM_007162.1,381-399).
caacaggctgtcatgcatt

SEQ ID NO: 13263 - DNA, 19 bp, Homo sapiens
  siRNA target sequence for TFEB (NM_007162.1,777-795).
gatgtcattgacaacatta

SEQ ID NO: 13264 - DNA, 19 bp, Homo sapiens
  siRNA target sequence for TFEB (NM_007162.1,817-835).
gctacatcaatcctgaaat

SEQ ID NO: 13265 - DNA, 19 bp, Homo sapiens
  siRNA target sequence for TFEB (NM_007162.1,1039-1057).
gacgaaggttcaacatcaa

SEQ ID NO: 13266 - DNA, 19 bp, Homo sapiens
  siRNA target sequence for TFEB (NM_007162.1,1297-1315).
ccccgtccggcatgaacat

SEQ ID NO: 13267 - DNA, 19 bp, Homo sapiens
  siRNA target sequence for TFEC (NM_012252.1,203-221).
catcaatccaactcttaaa

SEQ ID NO: 13268 - DNA, 19 bp, Homo sapiens
  siRNA target sequence for TFEC (NM_012252.1,308-326).
cccactcaccaagttacta

SEQ ID NO: 13269 - DNA, 19 bp, Homo sapiens
  siRNA target sequence for TFEC (NM_012252.1,314-332).
caccaagttactagctatt

SEQ ID NO: 13270 - DNA, 19 bp, Homo sapiens
  siRNA target sequence for TFEC (NM_012252.1,358-376).
ggcatatggaggacgttat

SEQ ID NO: 13271 - DNA, 19 bp, Homo sapiens
  siRNA target sequence for TFEC (NM_012252.1,359-377).
gcatatggaggacgttatt

SEQ ID NO: 13272 - DNA, 19 bp, Homo sapiens
  siRNA target sequence for TFEC (NM_012252.1,368-386).
ggacgttattgaggatata

SEQ ID NO: 13273 - DNA, 19 bp, Homo sapiens
  siRNA target sequence for TFEC (NM_012252.1,369-387).
gacgttattgaggatataa

SEQ ID NO: 13274 - DNA, 19 bp, Homo sapiens
  siRNA target sequence for TFEC (NM_012252.1,421-439).
cagactctcctctgctaat

SEQ ID NO: 13275 - DNA, 19 bp, Homo sapiens
  siRNA target sequence for TFEC (NM_012252.1,425-443).
ctctcctctgctaatgcaa

SEQ ID NO: 13276 - DNA, 19 bp, Homo sapiens
  siRNA target sequence for TFEC (NM_012252.1,434-452).
gctaatgcaaagaacatta

SEQ ID NO: 13277 - DNA, 19 bp, Homo sapiens
  siRNA target sequence for TFEC (NM_012252.1,457-475).
gaagtattttggatgtgta

SEQ ID NO: 13278 - DNA, 19 bp, Homo sapiens
  siRNA target sequence for TFEC (NM_012252.1,490-508).
gaatttcaccaattaacat

SEQ ID NO: 13279 - DNA, 19 bp, Homo sapiens
  siRNA target sequence for TFEC (NM_012252.1,671-689).
cactcttattccaaagtct

SEQ ID NO: 13280 - DNA, 19 bp, Homo sapiens
  siRNA target sequence for TFEC (NM_012252.1,673-691).
ctcttattccaaagtctaa

SEQ ID NO: 13281 - DNA, 19 bp, Homo sapiens
  siRNA target sequence for TFEC (NM_012252.1,749-767).
caagtggctacaaaaagaa

SEQ ID NO: 13282 - DNA, 19 bp, Homo sapiens
  siRNA target sequence for TFEC (NM_012252.1,752-770).
gtggctacaaaaagaacaa

SEQ ID NO: 13283 - DNA, 19 bp, Homo sapiens
  siRNA target sequence for TFEC (NM_012252.1,839-857).
gattcaggaactagaaatt

SEQ ID NO: 13284 - DNA, 19 bp, Homo sapiens
  siRNA target sequence for TFEC (NM_012252.1,892-910).
cacttggcacggttgattt

SEQ ID NO: 13285 - DNA, 19 bp, Homo sapiens
  siRNA target sequence for TFEC (NM_012252.1,948-966).
cagaattcagtagactatt

SEQ ID NO: 13286 - DNA, 19 bp, Homo sapiens
  siRNA target sequence for TFEC (NM_012252.1,1004-1022).
gctctgtgatcaagctata

SEQ ID NO: 13287 - DNA, 19 bp, Homo sapiens
  siRNA target sequence for TFEC (NM_012252.1,1030-1048).
ctgatcctttgtcatactt

SEQ ID NO: 13288 - DNA, 19 bp, Homo sapiens
  siRNA target sequence for TFEC (NM_012252.1,1040-1058).
gtcatacttcacagattta

SEQ ID NO: 13289 - DNA, 19 bp, Homo sapiens
  siRNA target sequence for TFEC (NM_012252.1,1060-1078).
catttagtgctgcattgaa

SEQ ID NO: 13290 - DNA, 19 bp, Homo sapiens
  siRNA target sequence for TFEC (NM_012252.1,1090-1108).
gattggatggcatgctatt

SEQ ID NO: 13291 - DNA, 19 bp, Homo sapiens
  siRNA target sequence for TGIF (NM_003244.2,478-496).
gtatgagcaccgttacaat

SEQ ID NO: 13292 - DNA, 19 bp, Homo sapiens
  siRNA target sequence for TGIF (NM_003244.2,488-506).
cgttacaatgcctatcctt

SEQ ID NO: 13293 - DNA, 19 bp, Homo sapiens
  siRNA target sequence for TGIF (NM_003244.2,549-567).
ctacgctacaggtctgtaa

SEQ ID NO: 13294 - DNA, 19 bp, Homo sapiens
  siRNA target sequence for TGIF (NM_003244.2,626-644).
gatccaaatcagttcacaa

SEQ ID NO: 13295 - DNA, 19 bp, Homo sapiens
  siRNA target sequence for TGIF (NM_003244.2,652-670).
ccgtggggccaagatttct

SEQ ID NO: 13296 - DNA, 19 bp, Homo sapiens
  siRNA target sequence for TGIF (NM_003244.2,654-672).
gtggggccaagatttctga

SEQ ID NO: 13297 - DNA, 19 bp, Homo sapiens
  siRNA target sequence for TGIF (NM_003244.2,656-674).
ggggccaagatttctgaaa

SEQ ID NO: 13298 - DNA, 19 bp, Homo sapiens
  siRNA target sequence for TGIF (NM_003244.2,688-706).
gtccgtgatgggcatcaaa

SEQ ID NO: 13299 - DNA, 19 bp, Homo sapiens
  siRNA target sequence for TGIF (NM_003244.2,690-708).
ccgtgatgggcatcaaaaa

SEQ ID NO: 13300 - DNA, 19 bp, Homo sapiens
  siRNA target sequence for TGIF (NM_003244.2,692-710).
gtgatgggcatcaaaaact

SEQ ID NO: 13301 - DNA, 19 bp, Homo sapiens
  siRNA target sequence for TGIF (NM_003244.2,888-906).
cggtcggtgtgggacaaaa

SEQ ID NO: 13302 - DNA, 19 bp, Homo sapiens
  siRNA target sequence for TGIF (NM_003244.2,900-918).
gacaaaacacagatataca

SEQ ID NO: 13303 - DNA, 19 bp, Homo sapiens
  siRNA target sequence for TGIF (NM_003244.2,920-938).
cagatagcggccaaaaact

SEQ ID NO: 13304 - DNA, 19 bp, Homo sapiens
  siRNA target sequence for TGIF (NM_003244.2,984-1002).
gaccaagtacgaatacaca

SEQ ID NO: 13305 - DNA, 19 bp, Homo sapiens
  siRNA target sequence for TGIF (NM_170695.2,421-439).
gtgggctccccgcattgtt

SEQ ID NO: 13306 - DNA, 19 bp, Homo sapiens
  siRNA target sequence for TGIF (NM_170695.2,770-788).
gactcctggaaacaatgaa

SEQ ID NO: 13307 - DNA, 19 bp, Homo sapiens
  siRNA target sequence for TGIF (NM_173207.1,133-151).
gacttgctcgggcaaaagt

SEQ ID NO: 13308 - DNA, 19 bp, Homo sapiens
  siRNA target sequence for TGIF (NM_173207.1,164-182).
cgatcaagcctgacttcta

SEQ ID NO: 13309 - DNA, 19 bp, Homo sapiens
  siRNA target sequence for TGIF (NM_173207.1,175-193).
gacttctagccaaggtatt

SEQ ID NO: 13310 - DNA, 19 bp, Homo sapiens
  siRNA target sequence for TGIF (NM_173207.1,177-195).
cttctagccaaggtattgt

SEQ ID NO: 13311 - DNA, 19 bp, Homo sapiens
  siRNA target sequence for TGIF2 (NM_021809.4,338-356).
ctgtcagtgctgcaaatat

SEQ ID NO: 13312 - DNA, 19 bp, Homo sapiens
  siRNA target sequence for TGIF2 (NM_021809.4,340-358).
gtcagtgctgcaaatatgt

SEQ ID NO: 13313 - DNA, 19 bp, Homo sapiens
  siRNA target sequence for TGIF2 (NM_021809.4,344-362).
gtgctgcaaatatgtaact

SEQ ID NO: 13314 - DNA, 19 bp, Homo sapiens
  siRNA target sequence for TGIF2 (NM_021809.4,415-433).
caaagaccctaatcagttt

SEQ ID NO: 13315 - DNA, 19 bp, Homo sapiens
  siRNA target sequence for TGIF2 (NM_021809.4,422-440).
cctaatcagtttaccattt

SEQ ID NO: 13316 - DNA, 19 bp, Homo sapiens
  siRNA target sequence for TGIF2 (NM_021809.4,637-655).
ccctggtagcacacttact

SEQ ID NO: 13317 - DNA, 19 bp, Homo sapiens
  siRNA target sequence for TGIF2 (NM_021809.4,639-657).
ctggtagcacacttactct

SEQ ID NO: 13318 - DNA, 19 bp, Homo sapiens
  siRNA target sequence for THG-1 (NM_030935.3,770-788).
gaagaagagtagtttccaa

SEQ ID NO: 13319 - DNA, 19 bp, Homo sapiens
  siRNA target sequence for THG-1 (NM_030935.3,796-814).
gcgtcaccacggactatga

SEQ ID NO: 13320 - DNA, 19 bp, Homo sapiens
  siRNA target sequence for THG-1 (NM_030935.3,1572-1590).
gccagcctggttcacaaat

SEQ ID NO: 13321 - DNA, 19 bp, Homo sapiens
  siRNA target sequence for THG-1 (NM_030935.3,1574-1592).
cagcctggttcacaaatct

SEQ ID NO: 13322 - DNA, 19 bp, Homo sapiens
  siRNA target sequence for THG-1 (NM_030935.3,1665-1683).
ctagacagcgacgatgata

SEQ ID NO: 13323 - DNA, 19 bp, Homo sapiens
  siRNA target sequence for THG-1 (NM_030935.3,1696-1714).
gcctggttggcattgacaa

SEQ ID NO: 13324 - DNA, 19 bp, Homo sapiens
  siRNA target sequence for THG-1 (NM_030935.3,1700-1718).
ggttggcattgacaacaaa

SEQ ID NO: 13325 - DNA, 19 bp, Homo sapiens
  siRNA target sequence for THRA (NM_003250.4,602-620).
cagggtatatccctagtta

SEQ ID NO: 13326 - DNA, 19 bp, Homo sapiens
  siRNA target sequence for THRA (NM_003250.4,767-785).
gctgctgtgtcattgacaa

SEQ ID NO: 13327 - DNA, 19 bp, Homo sapiens
  siRNA target sequence for THRA (NM_003250.4,808-826).
ctgtgccgcttcaagaagt

SEQ ID NO: 13328 - DNA, 19 bp, Homo sapiens
  siRNA target sequence for THRA (NM_003250.4,1123-1141).
gccttcagcgagtttacca

SEQ ID NO: 13329 - DNA, 19 bp, Homo sapiens
  siRNA target sequence for THRA (NM_003250.4,1124-1142).
ccttcagcgagtttaccaa

SEQ ID NO: 13330 - DNA, 19 bp, Homo sapiens
  siRNA target sequence for THRA (NM_003250.4,1130-1148).
gcgagtttaccaagatcat

SEQ ID NO: 13331 - DNA, 19 bp, Homo sapiens
  siRNA target sequence for THRA (NM_003250.4,1132-1150).
gagtttaccaagatcatca

SEQ ID NO: 13332 - DNA, 19 bp, Homo sapiens
  siRNA target sequence for THRA (NM_003250.4,1368-1386).
ctccgacgccatctttgaa

SEQ ID NO: 13333 - DNA, 19 bp, Homo sapiens
  siRNA target sequence for THRA (NM_003250.4,1540-1558).
gtcaaccaccgcaaacaca

SEQ ID NO: 13334 - DNA, 19 bp, Homo sapiens
  siRNA target sequence for THRA (NM_003250.4,1545-1563).
ccaccgcaaacacaacatt

SEQ ID NO: 13335 - DNA, 19 bp, Homo sapiens
  siRNA target sequence for THRA (NM_003250.4,1603-1621).
gtgcagagttcgattctgt

SEQ ID NO: 13336 - DNA, 19 bp, Homo sapiens
  siRNA target sequence for THRB (NM_000461.2,292-310).
cccaacagtatgacagaaa

SEQ ID NO: 13337 - DNA, 19 bp, Homo sapiens
  siRNA target sequence for THRB (NM_000461.2,419-437).
ggcgcagcacgttgaaaaa

SEQ ID NO: 13338 - DNA, 19 bp, Homo sapiens
  siRNA target sequence for THRB (NM_000461.2,420-438).
gcgcagcacgttgaaaaat

SEQ ID NO: 13339 - DNA, 19 bp, Homo sapiens
  siRNA target sequence for THRB (NM_000461.2,422-440).
gcagcacgttgaaaaatga

SEQ ID NO: 13340 - DNA, 19 bp, Homo sapiens
  siRNA target sequence for THRB (NM_000461.2,423-441).
cagcacgttgaaaaatgaa

SEQ ID NO: 13341 - DNA, 19 bp, Homo sapiens
  siRNA target sequence for THRB (NM_000461.2,568-586).
gggtacatccccagttact

SEQ ID NO: 13342 - DNA, 19 bp, Homo sapiens
  siRNA target sequence for THRB (NM_000461.2,706-724).
ccatcctattcctgtaaat

SEQ ID NO: 13343 - DNA, 19 bp, Homo sapiens
  siRNA target sequence for THRB (NM_000461.2,731-749).
gaaaatgtgtcatagacaa

SEQ ID NO: 13344 - DNA, 19 bp, Homo sapiens
  siRNA target sequence for THRB (NM_000461.2,771-789).
ggaatgtcgctttaagaaa

SEQ ID NO: 13345 - DNA, 19 bp, Homo sapiens
  siRNA target sequence for THRB (NM_000461.2,772-790).
gaatgtcgctttaagaaat

SEQ ID NO: 13346 - DNA, 19 bp, Homo sapiens
  siRNA target sequence for THRB (NM_000461.2,799-817).
gttggcatggcaacagatt

SEQ ID NO: 13347 - DNA, 19 bp, Homo sapiens
  siRNA target sequence for THRB (NM_000461.2,803-821).
gcatggcaacagatttggt

SEQ ID NO: 13348 - DNA, 19 bp, Homo sapiens
  siRNA target sequence for THRB (NM_000461.2,936-954).
ggaatgggagctcatcaaa

SEQ ID NO: 13349 - DNA, 19 bp, Homo sapiens
  siRNA target sequence for THRB (NM_000461.2,937-955).
gaatgggagctcatcaaaa

SEQ ID NO: 13350 - DNA, 19 bp, Homo sapiens
  siRNA target sequence for THRB (NM_000461.2,941-959).
gggagctcatcaaaactgt

SEQ ID NO: 13351 - DNA, 19 bp, Homo sapiens
  siRNA target sequence for THRB (NM_000461.2,1036-1054).
ggacaagcaccaatagtca

SEQ ID NO: 13352 - DNA, 19 bp, Homo sapiens
  siRNA target sequence for THRB (NM_000461.2,1037-1055).
gacaagcaccaatagtcaa

SEQ ID NO: 13353 - DNA, 19 bp, Homo sapiens
  siRNA target sequence for THRB (NM_000461.2,1087-1105).
gccttcagccattttacaa

SEQ ID NO: 13354 - DNA, 19 bp, Homo sapiens
  siRNA target sequence for THRB (NM_000461.2,1089-1107).
cttcagccattttacaaaa

SEQ ID NO: 13355 - DNA, 19 bp, Homo sapiens
  siRNA target sequence for THRB (NM_000461.2,1135-1153).
gtggattttgccaaaaagt

SEQ ID NO: 13356 - DNA, 19 bp, Homo sapiens
  siRNA target sequence for THRB (NM_000461.2,1252-1270).
ccagaaagtgagactttaa

SEQ ID NO: 13357 - DNA, 19 bp, Homo sapiens
  siRNA target sequence for THRB (NM_000461.2,1445-1463).
cctgtgttgagagaataga

SEQ ID NO: 13358 - DNA, 19 bp, Homo sapiens
  siRNA target sequence for THRB (NM_000461.2,1519-1537).
caccacgtgacacactttt

SEQ ID NO: 13359 - DNA, 19 bp, Homo sapiens
  siRNA target sequence for THRB (NM_000461.2,1560-1578).
gacagatctgcggatgata

SEQ ID NO: 13360 - DNA, 19 bp, Homo sapiens
  siRNA target sequence for TIEG (NM_005655.1,157-175).
gcggaggaaagaatggaaa

SEQ ID NO: 13361 - DNA, 19 bp, Homo sapiens
  siRNA target sequence for TIEG (NM_005655.1,158-176).
cggaggaaagaatggaaat

SEQ ID NO: 13362 - DNA, 19 bp, Homo sapiens
  siRNA target sequence for TIEG (NM_005655.1,204-222).
gtattcctggaacaaaact

SEQ ID NO: 13363 - DNA, 19 bp, Homo sapiens
  siRNA target sequence for TIEG (NM_005655.1,278-296).
ggaagtctgattttaagaa

SEQ ID NO: 13364 - DNA, 19 bp, Homo sapiens
  siRNA target sequence for TIEG (NM_005655.1,461-479).
cgccatctactgtacactt

SEQ ID NO: 13365 - DNA, 19 bp, Homo sapiens
  siRNA target sequence for TIEG (NM_005655.1,464-482).
catctactgtacacttcaa

SEQ ID NO: 13366 - DNA, 19 bp, Homo sapiens
  siRNA target sequence for TIEG (NM_005655.1,624-642).
ccagacctgcccaatgaaa

SEQ ID NO: 13367 - DNA, 19 bp, Homo sapiens
  siRNA target sequence for TIEG (NM_005655.1,657-675).
caactatcagaacaattct

SEQ ID NO: 13368 - DNA, 19 bp, Homo sapiens
  siRNA target sequence for TIEG (NM_005655.1,683-701).
gaagaacccacctaaatgt

SEQ ID NO: 13369 - DNA, 19 bp, Homo sapiens
  siRNA target sequence for TIEG (NM_005655.1,686-704).
gaacccacctaaatgttga

SEQ ID NO: 13370 - DNA, 19 bp, Homo sapiens
  siRNA target sequence for TIEG (NM_005655.1,732-750).
cgctgtgtcaccaaacaga

SEQ ID NO: 13371 - DNA, 19 bp, Homo sapiens
  siRNA target sequence for TIEG (NM_005655.1,738-756).
gtcaccaaacagatccaaa

SEQ ID NO: 13372 - DNA, 19 bp, Homo sapiens
  siRNA target sequence for TIEG (NM_005655.1,749-767).
gatccaaatgtgagagaaa

SEQ ID NO: 13373 - DNA, 19 bp, Homo sapiens
  siRNA target sequence for TIEG (NM_005655.1,1061-1079).
ccaaaggcgctgtcatgtt

SEQ ID NO: 13374 - DNA, 19 bp, Homo sapiens
  siRNA target sequence for TIEG (NM_005655.1,1062-1080).
caaaggcgctgtcatgttt

SEQ ID NO: 13375 - DNA, 19 bp, Homo sapiens
  siRNA target sequence for TIEG (NM_005655.1,1093-1111).
cccgttgtgcagagttcaa

SEQ ID NO: 13376 - DNA, 19 bp, Homo sapiens
  siRNA target sequence for TIEG (NM_005655.1,1192-1210).
gtcactcctcagattgatt

SEQ ID NO: 13377 - DNA, 19 bp, Homo sapiens
  siRNA target sequence for TIEG (NM_005655.1,1194-1212).
cactcctcagattgattca

SEQ ID NO: 13378 - DNA, 19 bp, Homo sapiens
  siRNA target sequence for TIEG (NM_005655.1,1198-1216).
cctcagattgattcatcaa

SEQ ID NO: 13379 - DNA, 19 bp, Homo sapiens
  siRNA target sequence for TIEG (NM_005655.1,1203-1221).
gattgattcatcaaggata

SEQ ID NO: 13380 - DNA, 19 bp, Homo sapiens
  siRNA target sequence for TIEG (NM_005655.1,1246-1264).
ggatgtggcaagacatact

SEQ ID NO: 13381 - DNA, 19 bp, Homo sapiens
  siRNA target sequence for TIEG (NM_005655.1,1247-1265).
gatgtggcaagacatactt

SEQ ID NO: 13382 - DNA, 19 bp, Homo sapiens
  siRNA target sequence for TIEG (NM_005655.1,1347-1365).
gaggtttgcccgttctgat

SEQ ID NO: 13383 - DNA, 19 bp, Homo sapiens
  siRNA target sequence for TIX1 (NM_015035.2,540-558).
gaaccccagcagtactgat

SEQ ID NO: 13384 - DNA, 19 bp, Homo sapiens
  siRNA target sequence for TIX1 (NM_015035.2,579-597).
gcatcggagcactttagat

SEQ ID NO: 13385 - DNA, 19 bp, Homo sapiens
  siRNA target sequence for TIX1 (NM_015035.2,587-605).
gcactttagatggctattt

SEQ ID NO: 13386 - DNA, 19 bp, Homo sapiens
  siRNA target sequence for TIX1 (NM_015035.2,588-606).
cactttagatggctattta

SEQ ID NO: 13387 - DNA, 19 bp, Homo sapiens
  siRNA target sequence for TIX1 (NM_015035.2,595-613).
gatggctatttatattcct

SEQ ID NO: 13388 - DNA, 19 bp, Homo sapiens
  siRNA target sequence for TIX1 (NM_015035.2,636-654).
ccatgacatgacccaattt

SEQ ID NO: 13389 - DNA, 19 bp, Homo sapiens
  siRNA target sequence for TIX1 (NM_015035.2,647-665).
cccaatttgtgggacatat

SEQ ID NO: 13390 - DNA, 19 bp, Homo sapiens
  siRNA target sequence for TIX1 (NM_015035.2,649-667).
caatttgtgggacatatga

SEQ ID NO: 13391 - DNA, 19 bp, Homo sapiens
  siRNA target sequence for TIX1 (NM_015035.2,806-824).
ccaagccagacaatcatgt

SEQ ID NO: 13392 - DNA, 19 bp, Homo sapiens
  siRNA target sequence for TIX1 (NM_015035.2,904-922).
caggcagaaatcatcatta

SEQ ID NO: 13393 - DNA, 19 bp, Homo sapiens
  siRNA target sequence for TIX1 (NM_015035.2,1060-1078).
ggggaccattccttcatca

SEQ ID NO: 13394 - DNA, 19 bp, Homo sapiens
  siRNA target sequence for TIX1 (NM_015035.2,1061-1079).
gggaccattccttcatcaa

SEQ ID NO: 13395 - DNA, 19 bp, Homo sapiens
  siRNA target sequence for TIX1 (NM_015035.2,1062-1080).
ggaccattccttcatcaat

SEQ ID NO: 13396 - DNA, 19 bp, Homo sapiens
  siRNA target sequence for TIX1 (NM_015035.2,1290-1308).
cagcattccaacgtacaat

SEQ ID NO: 13397 - DNA, 19 bp, Homo sapiens
  siRNA target sequence for TIX1 (NM_015035.2,1372-1390).
gccgagctctgctatttga

SEQ ID NO: 13398 - DNA, 19 bp, Homo sapiens
  siRNA target sequence for TIX1 (NM_015035.2,1374-1392).
cgagctctgctatttgact

SEQ ID NO: 13399 - DNA, 19 bp, Homo sapiens
  siRNA target sequence for TIX1 (NM_015035.2,1534-1552).
cccacaattacggttctaa

SEQ ID NO: 13400 - DNA, 19 bp, Homo sapiens
  siRNA target sequence for TIX1 (NM_015035.2,1577-1595).
gcaatgtccagcatctcat

SEQ ID NO: 13401 - DNA, 19 bp, Homo sapiens
  siRNA target sequence for TIX1 (NM_015035.2,1681-1699).
gggttgcaagcaacaagtt

SEQ ID NO: 13402 - DNA, 19 bp, Homo sapiens
  siRNA target sequence for TIX1 (NM_015035.2,1739-1757).
caggtgtggcacccattaa

SEQ ID NO: 13403 - DNA, 19 bp, Homo sapiens
  siRNA target sequence for TIX1 (NM_015035.2,1741-1759).
ggtgtggcacccattaaca

SEQ ID NO: 13404 - DNA, 19 bp, Homo sapiens
  siRNA target sequence for TIX1 (NM_015035.2,1852-1870).
cttgatgctagcatctaca

SEQ ID NO: 13405 - DNA, 19 bp, Homo sapiens
  siRNA target sequence for TIX1 (NM_015035.2,1858-1876).
gctagcatctacaaaaata

SEQ ID NO: 13406 - DNA, 19 bp, Homo sapiens
  siRNA target sequence for TIX1 (NM_015035.2,1934-1952).
cagggcagagcgaagttga

SEQ ID NO: 13407 - DNA, 19 bp, Homo sapiens
  siRNA target sequence for TIX1 (NM_015035.2,1937-1955).
ggcagagcgaagttgaaca

SEQ ID NO: 13408 - DNA, 19 bp, Homo sapiens
  siRNA target sequence for TIX1 (NM_015035.2,2000-2018).
ggttcagtgatcgtagata

SEQ ID NO: 13409 - DNA, 19 bp, Homo sapiens
  siRNA target sequence for TIX1 (NM_015035.2,2331-2349).
gacccgacgagaaattgat

SEQ ID NO: 13410 - DNA, 19 bp, Homo sapiens
  siRNA target sequence for TIX1 (NM_015035.2,2341-2359).
gaaattgatagctggtttt

SEQ ID NO: 13411 - DNA, 19 bp, Homo sapiens
  siRNA target sequence for TIX1 (NM_015035.2,2542-2560).
gtcagccccattaaaatca

SEQ ID NO: 13412 - DNA, 19 bp, Homo sapiens
  siRNA target sequence for TIX1 (NM_015035.2,2632-2650).
gaggatgatgagtcaaaca

SEQ ID NO: 13413 - DNA, 19 bp, Homo sapiens
  siRNA target sequence for TIX1 (NM_015035.2,2744-2762).
caagcaaccaggactatga

SEQ ID NO: 13414 - DNA, 19 bp, Homo sapiens
  siRNA target sequence for TIX1 (NM_015035.2,2835-2853).
gaagaacggccaactcaaa

SEQ ID NO: 13415 - DNA, 19 bp, Homo sapiens
  siRNA target sequence for TIX1 (NM_015035.2,2850-2868).
caaatggtacgaagactat

SEQ ID NO: 13416 - DNA, 19 bp, Homo sapiens
  siRNA target sequence for TIX1 (NM_015035.2,2923-2941).
ctcctgcaggactattaca

SEQ ID NO: 13417 - DNA, 19 bp, Homo sapiens
  siRNA target sequence for TIX1 (NM_015035.2,2945-2963).
cacacaagatgctgtatga

SEQ ID NO: 13418 - DNA, 19 bp, Homo sapiens
  siRNA target sequence for TIX1 (NM_015035.2,3018-3036).
gcagtggtttgctgagaaa

SEQ ID NO: 13419 - DNA, 19 bp, Homo sapiens
  siRNA target sequence for TIX1 (NM_015035.2,3019-3037).
cagtggtttgctgagaaaa

SEQ ID NO: 13420 - DNA, 19 bp, Homo sapiens
  siRNA target sequence for TIX1 (NM_015035.2,3121-3139).
gggatgggtgacacctatt

SEQ ID NO: 13421 - DNA, 19 bp, Homo sapiens
  siRNA target sequence for TIX1 (NM_015035.2,3123-3141).
gatgggtgacacctattca

SEQ ID NO: 13422 - DNA, 19 bp, Homo sapiens
  siRNA target sequence for TIX1 (NM_015035.2,3227-3245).
gacgtcagctcgaaacaga

SEQ ID NO: 13423 - DNA, 19 bp, Homo sapiens
  siRNA target sequence for TLX1 (NM_005521.2,1055-1073).
cacgcagagcccattagct

SEQ ID NO: 13424 - DNA, 19 bp, Homo sapiens
  siRNA target sequence for TLX1 (NM_005521.2,1134-1152).
gcctccaggacggagaata

SEQ ID NO: 13425 - DNA, 19 bp, Homo sapiens
  siRNA target sequence for TLX1 (NM_005521.2,1169-1187).
gtcggaggcgcctacactt

SEQ ID NO: 13426 - DNA, 19 bp, Homo sapiens
  siRNA target sequence for TLX1 (NM_005521.2,1314-1332).
gctcctacaacgtgaacat

SEQ ID NO: 13427 - DNA, 19 bp, Homo sapiens
  siRNA target sequence for TLX1 (NM_005521.2,1552-1570).
gagtaaccgcagatacaca

SEQ ID NO: 13428 - DNA, 19 bp, Homo sapiens
  siRNA target sequence for TLX1 (NM_005521.2,1584-1602).
caggtcacccctatcagaa

SEQ ID NO: 13429 - DNA, 19 bp, Homo sapiens
  siRNA target sequence for TLX1 (NM_005521.2,1718-1736).
ctggccaaggcgctcaaaa

SEQ ID NO: 13430 - DNA, 19 bp, Homo sapiens
  siRNA target sequence for TLX1 (NM_005521.2,1956-1974).
ctgacgactcgaccaaaat

SEQ ID NO: 13431 - DNA, 19 bp, Homo sapiens
  siRNA target sequence for TLX1 (NM_005521.2,1958-1976).
gacgactcgaccaaaatca

SEQ ID NO: 13432 - DNA, 19 bp, Homo sapiens
  siRNA target sequence for TLX1 (NM_005521.2,1960-1978).
cgactcgaccaaaatcact

SEQ ID NO: 13433 - DNA, 19 bp, Homo sapiens
  siRNA target sequence for TLX1 (NM_005521.2,1961-1979).
gactcgaccaaaatcacta

SEQ ID NO: 13434 - DNA, 19 bp, Homo sapiens
  siRNA target sequence for TLX2 (NM_001534.2,526-544).
gacgcacaggtcaaaacgt

SEQ ID NO: 13435 - DNA, 19 bp, Homo sapiens
  siRNA target sequence for TNRC4 (NM_007185.2,936-954).
gatgtgccttcctgacata

SEQ ID NO: 13436 - DNA, 19 bp, Homo sapiens
  siRNA target sequence for TNRC4 (NM_007185.2,1115-1133).
gaggacgtccggaagatgt

SEQ ID NO: 13437 - DNA, 19 bp, Homo sapiens
  siRNA target sequence for TNRC4 (NM_007185.2,1117-1135).
ggacgtccggaagatgttt

SEQ ID NO: 13438 - DNA, 19 bp, Homo sapiens
  siRNA target sequence for TNRC4 (NM_007185.2,1919-1937).
cctgatggctgcaacatct

SEQ ID NO: 13439 - DNA, 19 bp, Homo sapiens
  siRNA target sequence for TNRC4 (NM_007185.2,1922-1940).
gatggctgcaacatcttca

SEQ ID NO: 13440 - DNA, 19 bp, Homo sapiens
  siRNA target sequence for TNRC4 (NM_007185.2,2011-2029).
ctcagccaaagtctttgtt

SEQ ID NO: 13441 - DNA, 19 bp, Homo sapiens
  siRNA target sequence for TNRC4 (NM_007185.2,2036-2054).
gccaccaatcaaagcaaat

SEQ ID NO: 13442 - DNA, 19 bp, Homo sapiens
  siRNA target sequence for TP53 (NM_000546.2,291-309).
ctgagtcaggaaacatttt

SEQ ID NO: 13443 - DNA, 19 bp, Homo sapiens
  siRNA target sequence for TP53 (NM_000546.2,352-370).
ccttgccgtcccaagcaat

SEQ ID NO: 13444 - DNA, 19 bp, Homo sapiens
  siRNA target sequence for TP53 (NM_000546.2,361-379).
cccaagcaatggatgattt

SEQ ID NO: 13445 - DNA, 19 bp, Homo sapiens
  siRNA target sequence for TP53 (NM_000546.2,363-381).
caagcaatggatgatttga

SEQ ID NO: 13446 - DNA, 19 bp, Homo sapiens
  siRNA target sequence for TP53 (NM_000546.2,383-401).
gctgtccccggacgatatt

SEQ ID NO: 13447 - DNA, 19 bp, Homo sapiens
  siRNA target sequence for TP53 (NM_000546.2,386-404).
gtccccggacgatattgaa

SEQ ID NO: 13448 - DNA, 19 bp, Homo sapiens
  siRNA target sequence for TP53 (NM_000546.2,388-406).
ccccggacgatattgaaca

SEQ ID NO: 13449 - DNA, 19 bp, Homo sapiens
  siRNA target sequence for TP53 (NM_000546.2,389-407).
cccggacgatattgaacaa

SEQ ID NO: 13450 - DNA, 19 bp, Homo sapiens
  siRNA target sequence for TP53 (NM_000546.2,390-408).
ccggacgatattgaacaat

SEQ ID NO: 13451 - DNA, 19 bp, Homo sapiens
  siRNA target sequence for TP53 (NM_000546.2,633-651).
cctgccctcaacaagatgt

SEQ ID NO: 13452 - DNA, 19 bp, Homo sapiens
  siRNA target sequence for TP53 (NM_000546.2,678-696).
gtgcagctgtgggttgatt

SEQ ID NO: 13453 - DNA, 19 bp, Homo sapiens
  siRNA target sequence for TP53 (NM_000546.2,786-804).
catgagcgctgctcagata

SEQ ID NO: 13454 - DNA, 19 bp, Homo sapiens
  siRNA target sequence for TP53 (NM_000546.2,937-955).
gtaccaccatccactacaa

SEQ ID NO: 13455 - DNA, 19 bp, Homo sapiens
  siRNA target sequence for TP53 (NM_000546.2,940-958).
ccaccatccactacaacta

SEQ ID NO: 13456 - DNA, 19 bp, Homo sapiens
  siRNA target sequence for TP53 (NM_000546.2,943-961).
ccatccactacaactacat

SEQ ID NO: 13457 - DNA, 19 bp, Homo sapiens
  siRNA target sequence for TP53 (NM_000546.2,1058-1076).
ctttgaggtgcgtgtttgt

SEQ ID NO: 13458 - DNA, 19 bp, Homo sapiens
  siRNA target sequence for TP53 (NM_000546.2,1215-1233).
ccactggatggagaatatt

SEQ ID NO: 13459 - DNA, 19 bp, Homo sapiens
  siRNA target sequence for TP53 (NM_000546.2,1255-1273).
gtgagcgcttcgagatgtt

SEQ ID NO: 13460 - DNA, 19 bp, Homo sapiens
  siRNA target sequence for TP53 (NM_000546.2,1376-1394).
gtctacctcccgccataaa

SEQ ID NO: 13461 - DNA, 19 bp, Homo sapiens
  siRNA target sequence for TP53 (NM_000546.2,1378-1396).
ctacctcccgccataaaaa

SEQ ID NO: 13462 - DNA, 19 bp, Homo sapiens
  siRNA target sequence for TP53 (NM_000546.2,1384-1402).
cccgccataaaaaactcat

SEQ ID NO: 13463 - DNA, 19 bp, Homo sapiens
  siRNA target sequence for TP53 (NM_000546.2,1387-1405).
gccataaaaaactcatgtt

SEQ ID NO: 13464 - DNA, 19 bp, Homo sapiens
  siRNA target sequence for TP73 (NM_005427.1,475-493).
ccggaccccaccactttga

SEQ ID NO: 13465 - DNA, 19 bp, Homo sapiens
  siRNA target sequence for TP73 (NM_005427.1,538-556).
cgtactccccgctcttgaa

SEQ ID NO: 13466 - DNA, 19 bp, Homo sapiens
  siRNA target sequence for TP73 (NM_005427.1,542-560).
ctccccgctcttgaagaaa

SEQ ID NO: 13467 - DNA, 19 bp, Homo sapiens
  siRNA target sequence for TP73 (NM_005427.1,755-773).
ccgcgtggaaggcaataat

SEQ ID NO: 13468 - DNA, 19 bp, Homo sapiens
  siRNA target sequence for TP73 (NM_005427.1,757-775).
gcgtggaaggcaataatct

SEQ ID NO: 13469 - DNA, 19 bp, Homo sapiens
  siRNA target sequence for TP73 (NM_005427.1,759-777).
gtggaaggcaataatctct

SEQ ID NO: 13470 - DNA, 19 bp, Homo sapiens
  siRNA target sequence for TP73 (NM_005427.1,840-858).
caggtggggacggaattca

SEQ ID NO: 13471 - DNA, 19 bp, Homo sapiens
  siRNA target sequence for TP73 (NM_005427.1,859-877).
ccaccatcctgtacaactt

SEQ ID NO: 13472 - DNA, 19 bp, Homo sapiens
  siRNA target sequence for TP73 (NM_005427.1,1338-1356).
gtcctctcgcccatgaaca

SEQ ID NO: 13473 - DNA, 19 bp, Homo sapiens
  siRNA target sequence for TP73 (NM_005427.1,1581-1599).
cccagcctcgtcagttttt

SEQ ID NO: 13474 - DNA, 19 bp, Homo sapiens
  siRNA target sequence for TP73 (NM_005427.1,1583-1601).
cagcctcgtcagtttttta

SEQ ID NO: 13475 - DNA, 19 bp, Homo sapiens
  siRNA target sequence for TP73 (NM_005427.1,1648-1666).
ggttacagagcatttacca

SEQ ID NO: 13476 - DNA, 19 bp, Homo sapiens
  siRNA target sequence for TP73L (NM_003722.3,215-233).
gagcacacagacaaatgaa

SEQ ID NO: 13477 - DNA, 19 bp, Homo sapiens
  siRNA target sequence for TP73L (NM_003722.3,273-291).
ctggaacagcctatatgtt

SEQ ID NO: 13478 - DNA, 19 bp, Homo sapiens
  siRNA target sequence for TP73L (NM_003722.3,297-315).
cagcccattgacttgaact

SEQ ID NO: 13479 - DNA, 19 bp, Homo sapiens
  siRNA target sequence for TP73L (NM_003722.3,333-351).
gaagatggtgcgacaaaca

SEQ ID NO: 13480 - DNA, 19 bp, Homo sapiens
  siRNA target sequence for TP73L (NM_003722.3,336-354).
gatggtgcgacaaacaaga

SEQ ID NO: 13481 - DNA, 19 bp, Homo sapiens
  siRNA target sequence for TP73L (NM_003722.3,340-358).
gtgcgacaaacaagattga

SEQ ID NO: 13482 - DNA, 19 bp, Homo sapiens
  siRNA target sequence for TP73L (NM_003722.3,343-361).
cgacaaacaagattgagat

SEQ ID NO: 13483 - DNA, 19 bp, Homo sapiens
  siRNA target sequence for TP73L (NM_003722.3,445-463).
gcatggaccagcagattca

SEQ ID NO: 13484 - DNA, 19 bp, Homo sapiens
  siRNA target sequence for TP73L (NM_003722.3,475-493).
cgtccaccagtccctataa

SEQ ID NO: 13485 - DNA, 19 bp, Homo sapiens
  siRNA target sequence for TP73L (NM_003722.3,667-685).
cgtattccactgaactgaa

SEQ ID NO: 13486 - DNA, 19 bp, Homo sapiens
  siRNA target sequence for TP73L (NM_003722.3,690-708).
ctctactgccaaattgcaa

SEQ ID NO: 13487 - DNA, 19 bp, Homo sapiens
  siRNA target sequence for TP73L (NM_003722.3,773-791).
gcctgtctacaaaaaagct

SEQ ID NO: 13488 - DNA, 19 bp, Homo sapiens
  siRNA target sequence for TP73L (NM_003722.3,831-849).
gagctgagccgtgaattca

SEQ ID NO: 13489 - DNA, 19 bp, Homo sapiens
  siRNA target sequence for TP73L (NM_003722.3,860-878).
gattgcccctcctagtcat

SEQ ID NO: 13490 - DNA, 19 bp, Homo sapiens
  siRNA target sequence for TP73L (NM_003722.3,864-882).
gcccctcctagtcatttga

SEQ ID NO: 13491 - DNA, 19 bp, Homo sapiens
  siRNA target sequence for TP73L (NM_003722.3,865-883).
cccctcctagtcatttgat

SEQ ID NO: 13492 - DNA, 19 bp, Homo sapiens
  siRNA target sequence for TP73L (NM_003722.3,988-1006).
cgacagtcttgtacaattt

SEQ ID NO: 13493 - DNA, 19 bp, Homo sapiens
  siRNA target sequence for TP73L (NM_003722.3,1034-1052).
gatgaaccgccgtccaatt

SEQ ID NO: 13494 - DNA, 19 bp, Homo sapiens
  siRNA target sequence for TP73L (NM_003722.3,1037-1055).
gaaccgccgtccaatttta

SEQ ID NO: 13495 - DNA, 19 bp, Homo sapiens
  siRNA target sequence for TP73L (NM_003722.3,1041-1059).
cgccgtccaattttaatca

SEQ ID NO: 13496 - DNA, 19 bp, Homo sapiens
  siRNA target sequence for TP73L (NM_003722.3,1042-1060).
gccgtccaattttaatcat

SEQ ID NO: 13497 - DNA, 19 bp, Homo sapiens
  siRNA target sequence for TP73L (NM_003722.3,1176-1194).
caagtttcggacagtacaa

SEQ ID NO: 13498 - DNA, 19 bp, Homo sapiens
  siRNA target sequence for TP73L (NM_003722.3,1236-1254).
catggtatccagatgacat

SEQ ID NO: 13499 - DNA, 19 bp, Homo sapiens
  siRNA target sequence for TP73L (NM_003722.3,1270-1288).
gatccccagatgatgaact

SEQ ID NO: 13500 - DNA, 19 bp, Homo sapiens
  siRNA target sequence for TP73L (NM_003722.3,1274-1292).
cccagatgatgaactgtta

SEQ ID NO: 13501 - DNA, 19 bp, Homo sapiens
  siRNA target sequence for TP73L (NM_003722.3,1278-1296).
gatgatgaactgttatact

SEQ ID NO: 13502 - DNA, 19 bp, Homo sapiens
  siRNA target sequence for TP73L (NM_003722.3,1453-1471).
ctccatcttcatatggtaa

SEQ ID NO: 13503 - DNA, 19 bp, Homo sapiens
  siRNA target sequence for TP73L (NM_003722.3,1516-1534).
cttctgtgagccagcttat

SEQ ID NO: 13504 - DNA, 19 bp, Homo sapiens
  siRNA target sequence for TP73L (NM_003722.3,1519-1537).
ctgtgagccagcttatcaa

SEQ ID NO: 13505 - DNA, 19 bp, Homo sapiens
  siRNA target sequence for TP73L (NM_003722.3,1765-1783).
catcatgtctggactattt

SEQ ID NO: 13506 - DNA, 19 bp, Homo sapiens
  siRNA target sequence for TP73L (NM_003722.3,1797-1815).
ctgaccaccatctatcaga

SEQ ID NO: 13507 - DNA, 19 bp, Homo sapiens
  siRNA target sequence for TP73L (NM_003722.3,1799-1817).
gaccaccatctatcagatt

SEQ ID NO: 13508 - DNA, 19 bp, Homo sapiens
  siRNA target sequence for TP73L (NM_003722.3,1990-2008).
ggggtgagcgtgttattga

SEQ ID NO: 13509 - DNA, 19 bp, Homo sapiens
  siRNA target sequence for TP73L (NM_003722.3,1991-2009).
gggtgagcgtgttattgat

SEQ ID NO: 13510 - DNA, 19 bp, Homo sapiens
  siRNA target sequence for TP73L (NM_003722.3,2060-2078).
gtggaatgacttcaacttt

SEQ ID NO: 13511 - DNA, 19 bp, Homo sapiens
  siRNA target sequence for TP73L (NM_003722.3,2062-2080).
ggaatgacttcaactttga

SEQ ID NO: 13512 - DNA, 19 bp, Homo sapiens
  siRNA target sequence for TRIM16 (NM_006470.2,492-510).
gcagtgaagtcctgtctaa

SEQ ID NO: 13513 - DNA, 19 bp, Homo sapiens
  siRNA target sequence for TRIM16 (NM_006470.2,512-530).
ctgcatggtgaattactgt

SEQ ID NO: 13514 - DNA, 19 bp, Homo sapiens
  siRNA target sequence for TRIM16 (NM_006470.2,547-565).
cgcatcaggtgaacatcaa

SEQ ID NO: 13515 - DNA, 19 bp, Homo sapiens
  siRNA target sequence for TRIM16 (NM_006470.2,548-566).
gcatcaggtgaacatcaaa

SEQ ID NO: 13516 - DNA, 19 bp, Homo sapiens
  siRNA target sequence for TRIM22 (NM_006074.2,350-368).
catagttgagagagtcaaa

SEQ ID NO: 13517 - DNA, 19 bp, Homo sapiens
  siRNA target sequence for TRIM22 (NM_006074.2,361-379).
gagtcaaagaggtcaagat

SEQ ID NO: 13518 - DNA, 19 bp, Homo sapiens
  siRNA target sequence for TRIM22 (NM_006074.2,410-428).
ctgtgagcaccatggaaaa

SEQ ID NO: 13519 - DNA, 19 bp, Homo sapiens
  siRNA target sequence for TRIM22 (NM_006074.2,1045-1063).
cgaatgttgctatttctgt

SEQ ID NO: 13520 - DNA, 19 bp, Homo sapiens
  siRNA target sequence for TRIM22 (NM_006074.2,1089-1107).
cgcacctgcacatttaaga

SEQ ID NO: 13521 - DNA, 19 bp, Homo sapiens
  siRNA target sequence for TRIM22 (NM_006074.2,1091-1109).
cacctgcacatttaagaat

SEQ ID NO: 13522 - DNA, 19 bp, Homo sapiens
  siRNA target sequence for TRIM22 (NM_006074.2,1145-1163).
cggctgccaatatttctct

SEQ ID NO: 13523 - DNA, 19 bp, Homo sapiens
  siRNA target sequence for TRIM22 (NM_006074.2,1214-1232).
cctgggcgtacacagtaaa

SEQ ID NO: 13524 - DNA, 19 bp, Homo sapiens
  siRNA target sequence for TRIM22 (NM_006074.2,1215-1233).
ctgggcgtacacagtaaaa

SEQ ID NO: 13525 - DNA, 19 bp, Homo sapiens
  siRNA target sequence for TRIM22 (NM_006074.2,1217-1235).
gggcgtacacagtaaaata

SEQ ID NO: 13526 - DNA, 19 bp, Homo sapiens
  siRNA target sequence for TRIM22 (NM_006074.2,1218-1236).
ggcgtacacagtaaaataa

SEQ ID NO: 13527 - DNA, 19 bp, Homo sapiens
  siRNA target sequence for TRIM22 (NM_006074.2,1237-1255).
gtagtctgaataaaaggaa

SEQ ID NO: 13528 - DNA, 19 bp, Homo sapiens
  siRNA target sequence for TRIM22 (NM_006074.2,1306-1324).
ccagatatagacctcaata

SEQ ID NO: 13529 - DNA, 19 bp, Homo sapiens
  siRNA target sequence for TRIM22 (NM_006074.2,1307-1325).
cagatatagacctcaatat

SEQ ID NO: 13530 - DNA, 19 bp, Homo sapiens
  siRNA target sequence for TRIM28 (NM_005762.2,828-846).
cgcaccagcgggtgaagta

SEQ ID NO: 13531 - DNA, 19 bp, Homo sapiens
  siRNA target sequence for TRIM28 (NM_005762.2,896-914).
ggtgaacgtactgtctatt

SEQ ID NO: 13532 - DNA, 19 bp, Homo sapiens
  siRNA target sequence for TRIM28 (NM_005762.2,899-917).
gaacgtactgtctattgca

SEQ ID NO: 13533 - DNA, 19 bp, Homo sapiens
  siRNA target sequence for TRIM28 (NM_005762.2,936-954).
cccttgtgctgttttgtga

SEQ ID NO: 13534 - DNA, 19 bp, Homo sapiens
  siRNA target sequence for TRIM28 (NM_005762.2,951-969).
gtgagagctgtgatactct

SEQ ID NO: 13535 - DNA, 19 bp, Homo sapiens
  siRNA target sequence for TRIM28 (NM_005762.2,1219-1237).
ccgtgtgctggtcaatgat

SEQ ID NO: 13536 - DNA, 19 bp, Homo sapiens
  siRNA target sequence for TRIM28 (NM_005762.2,1380-1398).
ctaagaagttgatctactt

SEQ ID NO: 13537 - DNA, 19 bp, Homo sapiens
  siRNA target sequence for TRIM28 (NM_005762.2,1443-1461).
cacatggcgagatgaagtt

SEQ ID NO: 13538 - DNA, 19 bp, Homo sapiens
  siRNA target sequence for TRIM28 (NM_005762.2,1520-1538).
gagcgtcctggcactaact

SEQ ID NO: 13539 - DNA, 19 bp, Homo sapiens
  siRNA target sequence for TRIM28 (NM_005762.2,1522-1540).
gcgtcctggcactaactca

SEQ ID NO: 13540 - DNA, 19 bp, Homo sapiens
  siRNA target sequence for TRIM28 (NM_005762.2,1523-1541).
cgtcctggcactaactcaa

SEQ ID NO: 13541 - DNA, 19 bp, Homo sapiens
  siRNA target sequence for TRIM28 (NM_005762.2,1834-1852).
ggactacaaccttattgtt

SEQ ID NO: 13542 - DNA, 19 bp, Homo sapiens
  siRNA target sequence for TRIM28 (NM_005762.2,1835-1853).
gactacaaccttattgtta

SEQ ID NO: 13543 - DNA, 19 bp, Homo sapiens
  siRNA target sequence for TRIM28 (NM_005762.2,2189-2207).
ccaggcgatctggttatgt

SEQ ID NO: 13544 - DNA, 19 bp, Homo sapiens
  siRNA target sequence for TRIM28 (NM_005762.2,2206-2224).
gtgcaaccagtgtgagttt

SEQ ID NO: 13545 - DNA, 19 bp, Homo sapiens
  siRNA target sequence for TRIM28 (NM_005762.2,2209-2227).
caaccagtgtgagttttgt

SEQ ID NO: 13546 - DNA, 19 bp, Homo sapiens
  siRNA target sequence for TRIM28 (NM_005762.2,2385-2403).
ccaaccagcggaaatgtga

SEQ ID NO: 13547 - DNA, 19 bp, Homo sapiens
  siRNA target sequence for TRIM28 (NM_005762.2,2589-2607).
gcatgttcaagcaattcaa

SEQ ID NO: 13548 - DNA, 19 bp, Homo sapiens
  siRNA target sequence for TRIM29 (NM_012101.2,354-372).
gacccatcatccagtttgt

SEQ ID NO: 13549 - DNA, 19 bp, Homo sapiens
  siRNA target sequence for TRIM29 (NM_012101.2,469-487).
gaagccacccgttaccttt

SEQ ID NO: 13550 - DNA, 19 bp, Homo sapiens
  siRNA target sequence for TRIM29 (NM_012101.2,500-518).
gagctgcgcaagtccattt

SEQ ID NO: 13551 - DNA, 19 bp, Homo sapiens
  siRNA target sequence for TRIM29 (NM_012101.2,849-867).
gcatctgctacctttgcat

SEQ ID NO: 13552 - DNA, 19 bp, Homo sapiens
  siRNA target sequence for TRIM29 (NM_012101.2,955-973).
gctgcagctcaagatcatt

SEQ ID NO: 13553 - DNA, 19 bp, Homo sapiens
  siRNA target sequence for TRIM29 (NM_012101.2,1236-1254).
gcgactctgtgttgtttct

SEQ ID NO: 13554 - DNA, 19 bp, Homo sapiens
  siRNA target sequence for TRIM29 (NM_012101.2,1265-1283).
ggtgcattgatgagcaatt

SEQ ID NO: 13555 - DNA, 19 bp, Homo sapiens
  siRNA target sequence for TRIM29 (NM_012101.2,1266-1284).
gtgcattgatgagcaatta

SEQ ID NO: 13556 - DNA, 19 bp, Homo sapiens
  siRNA target sequence for TRIM29 (NM_012101.2,1268-1286).
gcattgatgagcaattact

SEQ ID NO: 13557 - DNA, 19 bp, Homo sapiens
  siRNA target sequence for TRIM29 (NM_012101.2,1299-1317).
ccctgcccacctatcatgt

SEQ ID NO: 13558 - DNA, 19 bp, Homo sapiens
  siRNA target sequence for TRIM29 (NM_012101.2,1383-1401).
gcatgcgccacgttgagaa

SEQ ID NO: 13559 - DNA, 19 bp, Homo sapiens
  siRNA target sequence for TRIM29 (NM_012101.2,1388-1406).
cgccacgttgagaagatgt

SEQ ID NO: 13560 - DNA, 19 bp, Homo sapiens
  siRNA target sequence for TRIM29 (NM_012101.2,1413-1431).
cggacctgagccgtaactt

SEQ ID NO: 13561 - DNA, 19 bp, Homo sapiens
  siRNA target sequence for TRIM29 (NM_012101.2,1415-1433).
gacctgagccgtaacttca

SEQ ID NO: 13562 - DNA, 19 bp, Homo sapiens
  siRNA target sequence for TRIM29 (NM_012101.2,1417-1435).
cctgagccgtaacttcatt

SEQ ID NO: 13563 - DNA, 19 bp, Homo sapiens
  siRNA target sequence for TRIM29 (NM_012101.2,1460-1478).
ggtgaccatcgctatgtga

SEQ ID NO: 13564 - DNA, 19 bp, Homo sapiens
  siRNA target sequence for TRIM29 (NM_012101.2,1461-1479).
gtgaccatcgctatgtgaa

SEQ ID NO: 13565 - DNA, 19 bp, Homo sapiens
  siRNA target sequence for TRIM29 (NM_012101.2,1466-1484).
catcgctatgtgaacaact

SEQ ID NO: 13566 - DNA, 19 bp, Homo sapiens
  siRNA target sequence for TRIM29 (NM_012101.2,1469-1487).
cgctatgtgaacaactaca

SEQ ID NO: 13567 - DNA, 19 bp, Homo sapiens
  siRNA target sequence for TRIM29 (NM_012101.2,1518-1536).
cggacaccatgaagagata

SEQ ID NO: 13568 - DNA, 19 bp, Homo sapiens
  siRNA target sequence for TRIM29 (NM_012101.2,1520-1538).
gacaccatgaagagatact

SEQ ID NO: 13569 - DNA, 19 bp, Homo sapiens
  siRNA target sequence for TRIM29 (NM_012101.2,1559-1577).
ggtggggtccggacatcat

SEQ ID NO: 13570 - DNA, 19 bp, Homo sapiens
  siRNA target sequence for TRIM29 (NM_012101.2,1560-1578).
gtggggtccggacatcata

SEQ ID NO: 13571 - DNA, 19 bp, Homo sapiens
  siRNA target sequence for TRIM29 (NM_012101.2,1609-1627).
ggagaccacccagaagaat

SEQ ID NO: 13572 - DNA, 19 bp, Homo sapiens
  siRNA target sequence for TRIM29 (NM_012101.2,1624-1642).
gaatttcaacaatctctat

SEQ ID NO: 13573 - DNA, 19 bp, Homo sapiens
  siRNA target sequence for TRIM29 (NM_012101.2,1643-1661).
ggcaccaaaggtaactaca

SEQ ID NO: 13574 - DNA, 19 bp, Homo sapiens
  siRNA target sequence for TRIM29 (NM_012101.2,1789-1807).
ccagccccagacttggaaa

SEQ ID NO: 13575 - DNA, 19 bp, Homo sapiens
  siRNA target sequence for TRIM29 (NM_012101.2,1790-1808).
cagccccagacttggaaat

SEQ ID NO: 13576 - DNA, 19 bp, Homo sapiens
  siRNA target sequence for TRPS1 (NM_014112.1,656-674).
cccccctctgagaaacgtt

SEQ ID NO: 13577 - DNA, 19 bp, Homo sapiens
  siRNA target sequence for TRPS1 (NM_014112.1,695-713).
gatcctggagcctataggt

SEQ ID NO: 13578 - DNA, 19 bp, Homo sapiens
  siRNA target sequence for TRPS1 (NM_014112.1,701-719).
ggagcctataggtacagaa

SEQ ID NO: 13579 - DNA, 19 bp, Homo sapiens
  siRNA target sequence for TRPS1 (NM_014112.1,711-729).
ggtacagaaagcaaggtat

SEQ ID NO: 13580 - DNA, 19 bp, Homo sapiens
  siRNA target sequence for TRPS1 (NM_014112.1,725-743).
ggtatctggaaagaacaaa

SEQ ID NO: 13581 - DNA, 19 bp, Homo sapiens
  siRNA target sequence for TRPS1 (NM_014112.1,753-771).
gcagatcagatgtcagaaa

SEQ ID NO: 13582 - DNA, 19 bp, Homo sapiens
  siRNA target sequence for TRPS1 (NM_014112.1,828-846).
gttcaagatccatcttcta

SEQ ID NO: 13583 - DNA, 19 bp, Homo sapiens
  siRNA target sequence for TRPS1 (NM_014112.1,837-855).
ccatcttctagcagtaaga

SEQ ID NO: 13584 - DNA, 19 bp, Homo sapiens
  siRNA target sequence for TRPS1 (NM_014112.1,847-865).
gcagtaagaaggacttgaa

SEQ ID NO: 13585 - DNA, 19 bp, Homo sapiens
  siRNA target sequence for TRPS1 (NM_014112.1,848-866).
cagtaagaaggacttgaaa

SEQ ID NO: 13586 - DNA, 19 bp, Homo sapiens
  siRNA target sequence for TRPS1 (NM_014112.1,884-902).
gaaggctggcttcaattat

SEQ ID NO: 13587 - DNA, 19 bp, Homo sapiens
  siRNA target sequence for TRPS1 (NM_014112.1,888-906).
gctggcttcaattatgaaa

SEQ ID NO: 13588 - DNA, 19 bp, Homo sapiens
  siRNA target sequence for TRPS1 (NM_014112.1,931-949).
cctcctttccgcatgatga

SEQ ID NO: 13589 - DNA, 19 bp, Homo sapiens
  siRNA target sequence for TRPS1 (NM_014112.1,1196-1214).
cccacaagtgccttcagat

SEQ ID NO: 13590 - DNA, 19 bp, Homo sapiens
  siRNA target sequence for TRPS1 (NM_014112.1,1210-1228).
cagatgggggtgtaagact

SEQ ID NO: 13591 - DNA, 19 bp, Homo sapiens
  siRNA target sequence for TRPS1 (NM_014112.1,1243-1261).
ctgacttactggtgaatga

SEQ ID NO: 13592 - DNA, 19 bp, Homo sapiens
  siRNA target sequence for TRPS1 (NM_014112.1,1288-1306).
cagagcttcaggactttaa

SEQ ID NO: 13593 - DNA, 19 bp, Homo sapiens
  siRNA target sequence for TRPS1 (NM_014112.1,1310-1328).
caatatctgtggatatggt

SEQ ID NO: 13594 - DNA, 19 bp, Homo sapiens
  siRNA target sequence for TRPS1 (NM_014112.1,1341-1359).
gaccccacagatctgatta

SEQ ID NO: 13595 - DNA, 19 bp, Homo sapiens
  siRNA target sequence for TRPS1 (NM_014112.1,1345-1363).
ccacagatctgattaagca

SEQ ID NO: 13596 - DNA, 19 bp, Homo sapiens
  siRNA target sequence for TRPS1 (NM_014112.1,1362-1380).
cacttccgaaagtatcact

SEQ ID NO: 13597 - DNA, 19 bp, Homo sapiens
  siRNA target sequence for TRPS1 (NM_014112.1,1364-1382).
cttccgaaagtatcactta

SEQ ID NO: 13598 - DNA, 19 bp, Homo sapiens
  siRNA target sequence for TRPS1 (NM_014112.1,1481-1499).
ggtcaaccgttctgtgttt

SEQ ID NO: 13599 - DNA, 19 bp, Homo sapiens
  siRNA target sequence for TRPS1 (NM_014112.1,1482-1500).
gtcaaccgttctgtgtttt

SEQ ID NO: 13600 - DNA, 19 bp, Homo sapiens
  siRNA target sequence for TRPS1 (NM_014112.1,1484-1502).
caaccgttctgtgttttct

SEQ ID NO: 13601 - DNA, 19 bp, Homo sapiens
  siRNA target sequence for TRPS1 (NM_014112.1,1528-1546).
caaggcctgttttactaaa

SEQ ID NO: 13602 - DNA, 19 bp, Homo sapiens
  siRNA target sequence for TRPS1 (NM_014112.1,1616-1634).
ccaagggaacaccaagtat

SEQ ID NO: 13603 - DNA, 19 bp, Homo sapiens
  siRNA target sequence for TRPS1 (NM_014112.1,1628-1646).
caagtatttccgctgtaaa

SEQ ID NO: 13604 - DNA, 19 bp, Homo sapiens
  siRNA target sequence for TRPS1 (NM_014112.1,1670-1688).
caactcatccaccgaatta

SEQ ID NO: 13605 - DNA, 19 bp, Homo sapiens
  siRNA target sequence for TRPS1 (NM_014112.1,1673-1691).
ctcatccaccgaattagaa

SEQ ID NO: 13606 - DNA, 19 bp, Homo sapiens
  siRNA target sequence for TRPS1 (NM_014112.1,1675-1693).
catccaccgaattagaaca

SEQ ID NO: 13607 - DNA, 19 bp, Homo sapiens
  siRNA target sequence for TRPS1 (NM_014112.1,1678-1696).
ccaccgaattagaacaaca

SEQ ID NO: 13608 - DNA, 19 bp, Homo sapiens
  siRNA target sequence for TRPS1 (NM_014112.1,1681-1699).
ccgaattagaacaacattt

SEQ ID NO: 13609 - DNA, 19 bp, Homo sapiens
  siRNA target sequence for TRPS1 (NM_014112.1,1738-1756).
cctcctctgaggttgcaaa

SEQ ID NO: 13610 - DNA, 19 bp, Homo sapiens
  siRNA target sequence for TRPS1 (NM_014112.1,1739-1757).
ctcctctgaggttgcaaaa

SEQ ID NO: 13611 - DNA, 19 bp, Homo sapiens
  siRNA target sequence for TRPS1 (NM_014112.1,1781-1799).
gtccatccctgcacttcaa

SEQ ID NO: 13612 - DNA, 19 bp, Homo sapiens
  siRNA target sequence for TRPS1 (NM_014112.1,1873-1891).
ggtactcagtgcccataaa

SEQ ID NO: 13613 - DNA, 19 bp, Homo sapiens
  siRNA target sequence for TRPS1 (NM_014112.1,1895-1913).
cctcgattcctctagacaa

SEQ ID NO: 13614 - DNA, 19 bp, Homo sapiens
  siRNA target sequence for TRPS1 (NM_014112.1,1896-1914).
ctcgattcctctagacaaa

SEQ ID NO: 13615 - DNA, 19 bp, Homo sapiens
  siRNA target sequence for TRPS1 (NM_014112.1,1898-1916).
cgattcctctagacaaaat

SEQ ID NO: 13616 - DNA, 19 bp, Homo sapiens
  siRNA target sequence for TRPS1 (NM_014112.1,1931-1949).
cagttactactggtgtaaa

SEQ ID NO: 13617 - DNA, 19 bp, Homo sapiens
  siRNA target sequence for TRPS1 (NM_014112.1,1970-1988).
gtcatctagctcacttaaa

SEQ ID NO: 13618 - DNA, 19 bp, Homo sapiens
  siRNA target sequence for TRPS1 (NM_014112.1,1981-1999).
cacttaaactgctagaaca

SEQ ID NO: 13619 - DNA, 19 bp, Homo sapiens
  siRNA target sequence for TRPS1 (NM_014112.1,2034-2052).
ggccttaatccagagttaa

SEQ ID NO: 13620 - DNA, 19 bp, Homo sapiens
  siRNA target sequence for TRPS1 (NM_014112.1,2035-2053).
gccttaatccagagttaaa

SEQ ID NO: 13621 - DNA, 19 bp, Homo sapiens
  siRNA target sequence for TRPS1 (NM_014112.1,2066-2084).
caggggctctgtcattaat

SEQ ID NO: 13622 - DNA, 19 bp, Homo sapiens
  siRNA target sequence for TRPS1 (NM_014112.1,2068-2086).
ggggctctgtcattaatca

SEQ ID NO: 13623 - DNA, 19 bp, Homo sapiens
  siRNA target sequence for TRPS1 (NM_014112.1,2078-2096).
cattaatcagaatgatcta

SEQ ID NO: 13624 - DNA, 19 bp, Homo sapiens
  siRNA target sequence for TRPS1 (NM_014112.1,2087-2105).
gaatgatctagccaaaagt

SEQ ID NO: 13625 - DNA, 19 bp, Homo sapiens
  siRNA target sequence for TRPS1 (NM_014112.1,2140-2158).
gctcgagtggggctaaaaa

SEQ ID NO: 13626 - DNA, 19 bp, Homo sapiens
  siRNA target sequence for TRPS1 (NM_014112.1,2179-2197).
gagccgaggataatatggt

SEQ ID NO: 13627 - DNA, 19 bp, Homo sapiens
  siRNA target sequence for TRPS1 (NM_014112.1,2181-2199).
gccgaggataatatggtaa

SEQ ID NO: 13628 - DNA, 19 bp, Homo sapiens
  siRNA target sequence for TRPS1 (NM_014112.1,2195-2213).
ggtaacgagctataattgt

SEQ ID NO: 13629 - DNA, 19 bp, Homo sapiens
  siRNA target sequence for TRPS1 (NM_014112.1,2221-2239).
gtgacttccgatattccaa

SEQ ID NO: 13630 - DNA, 19 bp, Homo sapiens
  siRNA target sequence for TRPS1 (NM_014112.1,2223-2241).
gacttccgatattccaaaa

SEQ ID NO: 13631 - DNA, 19 bp, Homo sapiens
  siRNA target sequence for TRPS1 (NM_014112.1,2269-2287).
ggccacttctccgtcatta

SEQ ID NO: 13632 - DNA, 19 bp, Homo sapiens
  siRNA target sequence for TRPS1 (NM_014112.1,2270-2288).
gccacttctccgtcattat

SEQ ID NO: 13633 - DNA, 19 bp, Homo sapiens
  siRNA target sequence for TRPS1 (NM_014112.1,2298-2316).
cataacattcacaagtgta

SEQ ID NO: 13634 - DNA, 19 bp, Homo sapiens
  siRNA target sequence for TRPS1 (NM_014112.1,2461-2479).
gaagctcgcgagtcaaaca

SEQ ID NO: 13635 - DNA, 19 bp, Homo sapiens
  siRNA target sequence for TRPS1 (NM_014112.1,2464-2482).
gctcgcgagtcaaacatca

SEQ ID NO: 13636 - DNA, 19 bp, Homo sapiens
  siRNA target sequence for TRPS1 (NM_014112.1,2506-2524).
cccctgacgtagatgtact

SEQ ID NO: 13637 - DNA, 19 bp, Homo sapiens
  siRNA target sequence for TRPS1 (NM_014112.1,2554-2572).
cccaagcatcggatgtcaa

SEQ ID NO: 13638 - DNA, 19 bp, Homo sapiens
  siRNA target sequence for TRPS1 (NM_014112.1,2555-2573).
ccaagcatcggatgtcaaa

SEQ ID NO: 13639 - DNA, 19 bp, Homo sapiens
  siRNA target sequence for TRPS1 (NM_014112.1,2560-2578).
catcggatgtcaaacaaga

SEQ ID NO: 13640 - DNA, 19 bp, Homo sapiens
  siRNA target sequence for TRPS1 (NM_014112.1,2663-2681).
ccaagtggaagaagagatt

SEQ ID NO: 13641 - DNA, 19 bp, Homo sapiens
  siRNA target sequence for TRPS1 (NM_014112.1,2823-2841).
gacggtcatgccatatcca

SEQ ID NO: 13642 - DNA, 19 bp, Homo sapiens
  siRNA target sequence for TRPS1 (NM_014112.1,2957-2975).
ggacgggctcaaagagaaa

SEQ ID NO: 13643 - DNA, 19 bp, Homo sapiens
  siRNA target sequence for TRPS1 (NM_014112.1,3102-3120).
gagcagacaaagactctaa

SEQ ID NO: 13644 - DNA, 19 bp, Homo sapiens
  siRNA target sequence for TRPS1 (NM_014112.1,3146-3164).
ccatctggcgcgacctatt

SEQ ID NO: 13645 - DNA, 19 bp, Homo sapiens
  siRNA target sequence for TRPS1 (NM_014112.1,3147-3165).
catctggcgcgacctattt

SEQ ID NO: 13646 - DNA, 19 bp, Homo sapiens
  siRNA target sequence for TRPS1 (NM_014112.1,3252-3270).
gcatcgggagaaaacaagt

SEQ ID NO: 13647 - DNA, 19 bp, Homo sapiens
  siRNA target sequence for TRPS1 (NM_014112.1,3369-3387).
gcaaatggcggatatgtat

SEQ ID NO: 13648 - DNA, 19 bp, Homo sapiens
  siRNA target sequence for TRPS1 (NM_014112.1,3426-3444).
cccaggcctttaaacatca

SEQ ID NO: 13649 - DNA, 19 bp, Homo sapiens
  siRNA target sequence for TRPS1 (NM_014112.1,3430-3448).
ggcctttaaacatcattaa

SEQ ID NO: 13650 - DNA, 19 bp, Homo sapiens
  siRNA target sequence for TRPS1 (NM_014112.1,3455-3473).
caacggtgagcagattatt

SEQ ID NO: 13651 - DNA, 19 bp, Homo sapiens
  siRNA target sequence for TRPS1 (NM_014112.1,3459-3477).
ggtgagcagattattagga

SEQ ID NO: 13652 - DNA, 19 bp, Homo sapiens
  siRNA target sequence for TRPS1 (NM_014112.1,3552-3570).
gaggagcaagtcaatggaa

SEQ ID NO: 13653 - DNA, 19 bp, Homo sapiens
  siRNA target sequence for TRPS1 (NM_014112.1,3581-3599).
gaggaggtcagaagatcat

SEQ ID NO: 13654 - DNA, 19 bp, Homo sapiens
  siRNA target sequence for TRPS1 (NM_014112.1,3628-3646).
cactccccagcctaagtaa

SEQ ID NO: 13655 - DNA, 19 bp, Homo sapiens
  siRNA target sequence for TRPS1 (NM_014112.1,3634-3652).
ccagcctaagtaaatacga

SEQ ID NO: 13656 - DNA, 19 bp, Homo sapiens
  siRNA target sequence for TRPS1 (NM_014112.1,3654-3672).
gcccagggttcattgacta

SEQ ID NO: 13657 - DNA, 19 bp, Homo sapiens
  siRNA target sequence for TRPS1 (NM_014112.1,3708-3726).
caaactctggatattcaca

SEQ ID NO: 13658 - DNA, 19 bp, Homo sapiens
  siRNA target sequence for TRPS1 (NM_014112.1,3735-3753).
caacctttgcacattcaga

SEQ ID NO: 13659 - DNA, 19 bp, Homo sapiens
  siRNA target sequence for TRPS1 (NM_014112.1,3780-3798).
gatccaggaaatagttcat

SEQ ID NO: 13660 - DNA, 19 bp, Homo sapiens
  siRNA target sequence for TRPS1 (NM_014112.1,3829-3847).
gaggcagtcctatagaaaa

SEQ ID NO: 13661 - DNA, 19 bp, Homo sapiens
  siRNA target sequence for TRPS1 (NM_014112.1,3859-3877).
ctgcgaaacacccaaatta

SEQ ID NO: 13662 - DNA, 19 bp, Homo sapiens
  siRNA target sequence for TRPS1 (NM_014112.1,3905-3923).
gtaccagtacccacttttt

SEQ ID NO: 13663 - DNA, 19 bp, Homo sapiens
  siRNA target sequence for TRPS1 (NM_014112.1,3924-3942).
ggacttccctttgtacata

SEQ ID NO: 13664 - DNA, 19 bp, Homo sapiens
  siRNA target sequence for TRPS1 (NM_014112.1,3925-3943).
gacttccctttgtacataa

SEQ ID NO: 13665 - DNA, 19 bp, Homo sapiens
  siRNA target sequence for TRPS1 (NM_014112.1,3930-3948).
ccctttgtacataatgact

SEQ ID NO: 13666 - DNA, 19 bp, Homo sapiens
  siRNA target sequence for TRPS1 (NM_014112.1,3931-3949).
cctttgtacataatgactt

SEQ ID NO: 13667 - DNA, 19 bp, Homo sapiens
  siRNA target sequence for TRPS1 (NM_014112.1,3968-3986).
gctgcggttctggagtaaa

SEQ ID NO: 13668 - DNA, 19 bp, Homo sapiens
  siRNA target sequence for TRPS1 (NM_014112.1,3969-3987).
ctgcggttctggagtaaat

SEQ ID NO: 13669 - DNA, 19 bp, Homo sapiens
  siRNA target sequence for TRPS1 (NM_014112.1,3971-3989).
gcggttctggagtaaatat

SEQ ID NO: 13670 - DNA, 19 bp, Homo sapiens
  siRNA target sequence for TRPS1 (NM_014112.1,3972-3990).
cggttctggagtaaatata

SEQ ID NO: 13671 - DNA, 19 bp, Homo sapiens
  siRNA target sequence for TRPS1 (NM_014112.1,4003-4021).
ctgggaatccgcactactt

SEQ ID NO: 13672 - DNA, 19 bp, Homo sapiens
  siRNA target sequence for TRPS1 (NM_014112.1,4005-4023).
gggaatccgcactacttga

SEQ ID NO: 13673 - DNA, 19 bp, Homo sapiens
  siRNA target sequence for TRPS1 (NM_014112.1,4064-4082).
gccttatcccaccttcaat

SEQ ID NO: 13674 - DNA, 19 bp, Homo sapiens
  siRNA target sequence for TRPS1 (NM_014112.1,4066-4084).
cttatcccaccttcaatct

SEQ ID NO: 13675 - DNA, 19 bp, Homo sapiens
  siRNA target sequence for TRPS1 (NM_014112.1,4131-4149).
gatttggcgatcaagcatt

SEQ ID NO: 13676 - DNA, 19 bp, Homo sapiens
  siRNA target sequence for TRPS1 (NM_014112.1,4192-4210).
cgaaggcaccaccaaatgt

SEQ ID NO: 13677 - DNA, 19 bp, Homo sapiens
  siRNA target sequence for TRPS1 (NM_014112.1,4193-4211).
gaaggcaccaccaaatgta

SEQ ID NO: 13678 - DNA, 19 bp, Homo sapiens
  siRNA target sequence for TRPS1 (NM_014112.1,4221-4239).
ggtcccttgaatgtagtaa

SEQ ID NO: 13679 - DNA, 19 bp, Homo sapiens
  siRNA target sequence for TRPS1 (NM_014112.1,4222-4240).
gtcccttgaatgtagtaaa

SEQ ID NO: 13680 - DNA, 19 bp, Homo sapiens
  siRNA target sequence for TRPS1 (NM_014112.1,4314-4332).
gatgaagtgatgtatgctt

SEQ ID NO: 13681 - DNA, 19 bp, Homo sapiens
  siRNA target sequence for TRPS1 (NM_014112.1,4325-4343).
gtatgctttgcatatgagt

SEQ ID NO: 13682 - DNA, 19 bp, Homo sapiens
  siRNA target sequence for TRPS1 (NM_014112.1,4393-4411).
gcacggacaaatatgactt

SEQ ID NO: 13683 - DNA, 19 bp, Homo sapiens
  siRNA target sequence for TRPS1 (NM_014112.1,4398-4416).
gacaaatatgacttcacaa

SEQ ID NO: 13684 - DNA, 19 bp, Homo sapiens
  siRNA target sequence for TRPS1 (NM_014112.1,4430-4448).
gggcctgcataggaacaat

SEQ ID NO: 13685 - DNA, 19 bp, Homo sapiens
  siRNA target sequence for TSC22 (NM_006022.2,244-262).
cgatggatctaggagttta

SEQ ID NO: 13686 - DNA, 19 bp, Homo sapiens
  siRNA target sequence for TSC22 (NM_006022.2,263-281).
ccaactgagacatttttca

SEQ ID NO: 13687 - DNA, 19 bp, Homo sapiens
  siRNA target sequence for TSC22 (NM_006022.2,264-282).
caactgagacatttttcaa

SEQ ID NO: 13688 - DNA, 19 bp, Homo sapiens
  siRNA target sequence for TSC22 (NM_006022.2,317-335).
cgcttctgtgagacttgat

SEQ ID NO: 13689 - DNA, 19 bp, Homo sapiens
  siRNA target sequence for TSC22 (NM_006022.2,319-337).
cttctgtgagacttgataa

SEQ ID NO: 13690 - DNA, 19 bp, Homo sapiens
  siRNA target sequence for TSC22 (NM_006022.2,324-342).
gtgagacttgataatagct

SEQ ID NO: 13691 - DNA, 19 bp, Homo sapiens
  siRNA target sequence for TSC22 (NM_006022.2,349-367).
gtgcaagtgtggtagctat

SEQ ID NO: 13692 - DNA, 19 bp, Homo sapiens
  siRNA target sequence for TSC22 (NM_006022.2,352-370).
caagtgtggtagctattga

SEQ ID NO: 13693 - DNA, 19 bp, Homo sapiens
  siRNA target sequence for TSC22 (NM_006022.2,450-468).
gagcaaatcaaagaactaa

SEQ ID NO: 13694 - DNA, 19 bp, Homo sapiens
  siRNA target sequence for TSC22 (NM_183422.1,625-643).
gtaccggcgtcggtagtaa

SEQ ID NO: 13695 - DNA, 19 bp, Homo sapiens
  siRNA target sequence for TSC22 (NM_183422.1,636-654).
ggtagtaatgccacatctt

SEQ ID NO: 13696 - DNA, 19 bp, Homo sapiens
  siRNA target sequence for TSC22 (NM_183422.1,789-807).
ccaggcggaactcaaatga

SEQ ID NO: 13697 - DNA, 19 bp, Homo sapiens
  siRNA target sequence for TSC22 (NM_183422.1,790-808).
caggcggaactcaaatgaa

SEQ ID NO: 13698 - DNA, 19 bp, Homo sapiens
  siRNA target sequence for TSC22 (NM_183422.1,792-810).
ggcggaactcaaatgaaaa

SEQ ID NO: 13699 - DNA, 19 bp, Homo sapiens
  siRNA target sequence for TSC22 (NM_183422.1,793-811).
gcggaactcaaatgaaaaa

SEQ ID NO: 13700 - DNA, 19 bp, Homo sapiens
  siRNA target sequence for TSC22 (NM_183422.1,847-865).
ctcagatctccgctagtat

SEQ ID NO: 13701 - DNA, 19 bp, Homo sapiens
  siRNA target sequence for TSC22 (NM_183422.1,849-867).
cagatctccgctagtatca

SEQ ID NO: 13702 - DNA, 19 bp, Homo sapiens
  siRNA target sequence for TSC22 (NM_183422.1,858-876).
gctagtatcagctctaaca

SEQ ID NO: 13703 - DNA, 19 bp, Homo sapiens
  siRNA target sequence for TSC22 (NM_183422.1,859-877).
ctagtatcagctctaacaa

SEQ ID NO: 13704 - DNA, 19 bp, Homo sapiens
  siRNA target sequence for TSC22 (NM_183422.1,869-887).
ctctaacaacagtatagca

SEQ ID NO: 13705 - DNA, 19 bp, Homo sapiens
  siRNA target sequence for TSC22 (NM_183422.1,890-908).
ggacactgagagctatgat

SEQ ID NO: 13706 - DNA, 19 bp, Homo sapiens
  siRNA target sequence for TSC22 (NM_183422.1,893-911).
cactgagagctatgatgat

SEQ ID NO: 13707 - DNA, 19 bp, Homo sapiens
  siRNA target sequence for TSC22 (NM_183422.1,1100-1118).
ccttccacaacagaatgtt

SEQ ID NO: 13708 - DNA, 19 bp, Homo sapiens
  siRNA target sequence for TSC22 (NM_183422.1,1105-1123).
cacaacagaatgttgtgat

SEQ ID NO: 13709 - DNA, 19 bp, Homo sapiens
  siRNA target sequence for TSC22 (NM_183422.1,1221-1239).
gtggccagtgcatccatta

SEQ ID NO: 13710 - DNA, 19 bp, Homo sapiens
  siRNA target sequence for TSC22 (NM_183422.1,1251-1269).
ccctcaagcccagtatcta

SEQ ID NO: 13711 - DNA, 19 bp, Homo sapiens
  siRNA target sequence for TSC22 (NM_183422.1,1253-1271).
ctcaagcccagtatctaga

SEQ ID NO: 13712 - DNA, 19 bp, Homo sapiens
  siRNA target sequence for TSC22 (NM_183422.1,1255-1273).
caagcccagtatctagaaa

SEQ ID NO: 13713 - DNA, 19 bp, Homo sapiens
  siRNA target sequence for TSC22 (NM_183422.1,1258-1276).
gcccagtatctagaaaact

SEQ ID NO: 13714 - DNA, 19 bp, Homo sapiens
  siRNA target sequence for TSC22 (NM_183422.1,1370-1388).
gcgtgctccaagtactaca

SEQ ID NO: 13715 - DNA, 19 bp, Homo sapiens
  siRNA target sequence for TSC22 (NM_183422.1,1414-1432).
ctggcactagtacagtaaa

SEQ ID NO: 13716 - DNA, 19 bp, Homo sapiens
  siRNA target sequence for TSC22 (NM_183422.1,1454-1472).
gggtagttttaatcctaat

SEQ ID NO: 13717 - DNA, 19 bp, Homo sapiens
  siRNA target sequence for TSC22 (NM_183422.1,1563-1581).
ggtgttaatgtgaatatct

SEQ ID NO: 13718 - DNA, 19 bp, Homo sapiens
  siRNA target sequence for TSC22 (NM_183422.1,1588-1606).
gcatgggcaatggtactat

SEQ ID NO: 13719 - DNA, 19 bp, Homo sapiens
  siRNA target sequence for TSC22 (NM_183422.1,1589-1607).
catgggcaatggtactatt

SEQ ID NO: 13720 - DNA, 19 bp, Homo sapiens
  siRNA target sequence for TSC22 (NM_183422.1,1592-1610).
gggcaatggtactatttct

SEQ ID NO: 13721 - DNA, 19 bp, Homo sapiens
  siRNA target sequence for TSC22 (NM_183422.1,1593-1611).
ggcaatggtactatttctt

SEQ ID NO: 13722 - DNA, 19 bp, Homo sapiens
  siRNA target sequence for TSC22 (NM_183422.1,1686-1704).
caaccaacagttaacactt

SEQ ID NO: 13723 - DNA, 19 bp, Homo sapiens
  siRNA target sequence for TSC22 (NM_183422.1,1732-1750).
ctagttctgagccctttaa

SEQ ID NO: 13724 - DNA, 19 bp, Homo sapiens
  siRNA target sequence for TSC22 (NM_183422.1,1740-1758).
gagccctttaaaaaaggta

SEQ ID NO: 13725 - DNA, 19 bp, Homo sapiens
  siRNA target sequence for TSC22 (NM_183422.1,1762-1780).
ggacttgcactgagttcta

SEQ ID NO: 13726 - DNA, 19 bp, Homo sapiens
  siRNA target sequence for TSC22 (NM_183422.1,1809-1827).
gaaggtgtgctgataaata

SEQ ID NO: 13727 - DNA, 19 bp, Homo sapiens
  siRNA target sequence for TSC22 (NM_183422.1,1856-1874).
gatagaagtgacttctgaa

SEQ ID NO: 13728 - DNA, 19 bp, Homo sapiens
  siRNA target sequence for TSC22 (NM_183422.1,1916-1934).
cacactgagtcactataca

SEQ ID NO: 13729 - DNA, 19 bp, Homo sapiens
  siRNA target sequence for TSC22 (NM_183422.1,2032-2050).
gtgtgaccctccaacagat

SEQ ID NO: 13730 - DNA, 19 bp, Homo sapiens
  siRNA target sequence for TSC22 (NM_183422.1,2063-2081).
cactggtccacagagtatt

SEQ ID NO: 13731 - DNA, 19 bp, Homo sapiens
  siRNA target sequence for TSC22 (NM_183422.1,2118-2136).
cagatctcacaagtacaat

SEQ ID NO: 13732 - DNA, 19 bp, Homo sapiens
  siRNA target sequence for TSC22 (NM_183422.1,2120-2138).
gatctcacaagtacaatta

SEQ ID NO: 13733 - DNA, 19 bp, Homo sapiens
  siRNA target sequence for TSC22 (NM_183422.1,2153-2171).
gagctatcagcaaaagcaa

SEQ ID NO: 13734 - DNA, 19 bp, Homo sapiens
  siRNA target sequence for TSC22 (NM_183422.1,2222-2240).
ccagccatcgcctgtaaat

SEQ ID NO: 13735 - DNA, 19 bp, Homo sapiens
  siRNA target sequence for TSC22 (NM_183422.1,2265-2283).
ggtcagcagccttccattt

SEQ ID NO: 13736 - DNA, 19 bp, Homo sapiens
  siRNA target sequence for TSC22 (NM_183422.1,2268-2286).
cagcagccttccatttcca

SEQ ID NO: 13737 - DNA, 19 bp, Homo sapiens
  siRNA target sequence for TSC22 (NM_183422.1,2295-2313).
caaccccagctaccatatt

SEQ ID NO: 13738 - DNA, 19 bp, Homo sapiens
  siRNA target sequence for TSC22 (NM_183422.1,2353-2371).
caccaccaccccaacagtt

SEQ ID NO: 13739 - DNA, 19 bp, Homo sapiens
  siRNA target sequence for TSC22 (NM_183422.1,2356-2374).
caccaccccaacagttaca

SEQ ID NO: 13740 - DNA, 19 bp, Homo sapiens
  siRNA target sequence for TSC22 (NM_183422.1,2382-2400).
caacagcaaccaatggttt

SEQ ID NO: 13741 - DNA, 19 bp, Homo sapiens
  siRNA target sequence for TSC22 (NM_183422.1,2385-2403).
cagcaaccaatggtttcta

SEQ ID NO: 13742 - DNA, 19 bp, Homo sapiens
  siRNA target sequence for TSC22 (NM_183422.1,2387-2405).
gcaaccaatggtttctaca

SEQ ID NO: 13743 - DNA, 19 bp, Homo sapiens
  siRNA target sequence for TSC22 (NM_183422.1,2414-2432).
cccaggccatgtcaaatca

SEQ ID NO: 13744 - DNA, 19 bp, Homo sapiens
  siRNA target sequence for TSC22 (NM_183422.1,2416-2434).
caggccatgtcaaatcagt

SEQ ID NO: 13745 - DNA, 19 bp, Homo sapiens
  siRNA target sequence for TSC22 (NM_183422.1,2424-2442).
gtcaaatcagtgactcaaa

SEQ ID NO: 13746 - DNA, 19 bp, Homo sapiens
  siRNA target sequence for TSC22 (NM_183422.1,2449-2467).
cttcagagtatgtacaaca

SEQ ID NO: 13747 - DNA, 19 bp, Homo sapiens
  siRNA target sequence for TSC22 (NM_183422.1,2468-2486).
gcagccaattcttcaaaca

SEQ ID NO: 13748 - DNA, 19 bp, Homo sapiens
  siRNA target sequence for TSC22 (NM_183422.1,2667-2685).
ggcagtcagattgcaaata

SEQ ID NO: 13749 - DNA, 19 bp, Homo sapiens
  siRNA target sequence for TSC22 (NM_183422.1,2691-2709).
cagcaagcaaacataccta

SEQ ID NO: 13750 - DNA, 19 bp, Homo sapiens
  siRNA target sequence for TSC22 (NM_183422.1,2732-2750).
ccaggttccaccttcagtt

SEQ ID NO: 13751 - DNA, 19 bp, Homo sapiens
  siRNA target sequence for TSC22 (NM_183422.1,2733-2751).
caggttccaccttcagtta

SEQ ID NO: 13752 - DNA, 19 bp, Homo sapiens
  siRNA target sequence for TSC22 (NM_183422.1,2735-2753).
ggttccaccttcagttatt

SEQ ID NO: 13753 - DNA, 19 bp, Homo sapiens
  siRNA target sequence for TSC22 (NM_183422.1,2783-2801).
ggttccacctgctcaaact

SEQ ID NO: 13754 - DNA, 19 bp, Homo sapiens
  siRNA target sequence for TSC22 (NM_183422.1,2836-2854).
caagccttcctcaacaatt

SEQ ID NO: 13755 - DNA, 19 bp, Homo sapiens
  siRNA target sequence for TSC22 (NM_183422.1,2841-2859).
cttcctcaacaattggtta

SEQ ID NO: 13756 - DNA, 19 bp, Homo sapiens
  siRNA target sequence for TSC22 (NM_183422.1,2856-2874).
gttattgcatcccaaagtt

SEQ ID NO: 13757 - DNA, 19 bp, Homo sapiens
  siRNA target sequence for TSC22 (NM_183422.1,2894-2912).
ccagccacaaggagtagaa

SEQ ID NO: 13758 - DNA, 19 bp, Homo sapiens
  siRNA target sequence for TSC22 (NM_183422.1,2916-2934).
gtagctcaaggaattgttt

SEQ ID NO: 13759 - DNA, 19 bp, Homo sapiens
  siRNA target sequence for TSC22 (NM_183422.1,2920-2938).
ctcaaggaattgtttcaca

SEQ ID NO: 13760 - DNA, 19 bp, Homo sapiens
  siRNA target sequence for TSC22 (NM_183422.1,2940-2958).
cagttgcctgcagttagtt

SEQ ID NO: 13761 - DNA, 19 bp, Homo sapiens
  siRNA target sequence for TSC22 (NM_183422.1,2964-2982).
ccctctgctagtagtattt

SEQ ID NO: 13762 - DNA, 19 bp, Homo sapiens
  siRNA target sequence for TSC22 (NM_183422.1,2970-2988).
gctagtagtatttctgtta

SEQ ID NO: 13763 - DNA, 19 bp, Homo sapiens
  siRNA target sequence for TSC22 (NM_183422.1,3071-3089).
ccctgctacccaaaatggt

SEQ ID NO: 13764 - DNA, 19 bp, Homo sapiens
  siRNA target sequence for TSC22 (NM_183422.1,3072-3090).
cctgctacccaaaatggta

SEQ ID NO: 13765 - DNA, 19 bp, Homo sapiens
  siRNA target sequence for TSC22 (NM_183422.1,3073-3091).
ctgctacccaaaatggtaa

SEQ ID NO: 13766 - DNA, 19 bp, Homo sapiens
  siRNA target sequence for TSC22 (NM_183422.1,3075-3093).
gctacccaaaatggtaatt

SEQ ID NO: 13767 - DNA, 19 bp, Homo sapiens
  siRNA target sequence for TSC22 (NM_183422.1,3115-3133).
ctcccttgatagcaactaa

SEQ ID NO: 13768 - DNA, 19 bp, Homo sapiens
  siRNA target sequence for TSC22 (NM_183422.1,3117-3135).
cccttgatagcaactaata

SEQ ID NO: 13769 - DNA, 19 bp, Homo sapiens
  siRNA target sequence for TSC22 (NM_183422.1,3122-3140).
gatagcaactaatacaaat

SEQ ID NO: 13770 - DNA, 19 bp, Homo sapiens
  siRNA target sequence for TSC22 (NM_183422.1,3153-3171).
caacagataccactaagtt

SEQ ID NO: 13771 - DNA, 19 bp, Homo sapiens
  siRNA target sequence for TSC22 (NM_183422.1,3156-3174).
cagataccactaagttcta

SEQ ID NO: 13772 - DNA, 19 bp, Homo sapiens
  siRNA target sequence for TSC22 (NM_183422.1,3176-3194).
ccagttctccgcacaatca

SEQ ID NO: 13773 - DNA, 19 bp, Homo sapiens
  siRNA target sequence for TSC22 (NM_183422.1,3177-3195).
cagttctccgcacaatcat

SEQ ID NO: 13774 - DNA, 19 bp, Homo sapiens
  siRNA target sequence for TSC22 (NM_183422.1,3179-3197).
gttctccgcacaatcatta

SEQ ID NO: 13775 - DNA, 19 bp, Homo sapiens
  siRNA target sequence for TSC22 (NM_183422.1,3182-3200).
ctccgcacaatcattagct

SEQ ID NO: 13776 - DNA, 19 bp, Homo sapiens
  siRNA target sequence for TSC22 (NM_183422.1,3258-3276).
ggcttacctcagactatca

SEQ ID NO: 13777 - DNA, 19 bp, Homo sapiens
  siRNA target sequence for TULP4 (NM_020245.2,1462-1480).
gtgcaggagacgctactat

SEQ ID NO: 13778 - DNA, 19 bp, Homo sapiens
  siRNA target sequence for TULP4 (NM_020245.2,1464-1482).
gcaggagacgctactatga

SEQ ID NO: 13779 - DNA, 19 bp, Homo sapiens
  siRNA target sequence for TULP4 (NM_020245.2,1568-1586).
ccacagaggataaatttca

SEQ ID NO: 13780 - DNA, 19 bp, Homo sapiens
  siRNA target sequence for TULP4 (NM_020245.2,1569-1587).
cacagaggataaatttcaa

SEQ ID NO: 13781 - DNA, 19 bp, Homo sapiens
  siRNA target sequence for TULP4 (NM_020245.2,1662-1680).
cggacggaggcatattcgt

SEQ ID NO: 13782 - DNA, 19 bp, Homo sapiens
  siRNA target sequence for TULP4 (NM_020245.2,1733-1751).
gcgcaggtgagtgatttca

SEQ ID NO: 13783 - DNA, 19 bp, Homo sapiens
  siRNA target sequence for TULP4 (NM_020245.2,1756-1774).
gagccatgatggaactcaa

SEQ ID NO: 13784 - DNA, 19 bp, Homo sapiens
  siRNA target sequence for TULP4 (NM_020245.2,1832-1850).
cactggtcatccgaaatca

SEQ ID NO: 13785 - DNA, 19 bp, Homo sapiens
  siRNA target sequence for TULP4 (NM_020245.2,1917-1935).
ccgatgggcaggtgattgt

SEQ ID NO: 13786 - DNA, 19 bp, Homo sapiens
  siRNA target sequence for TULP4 (NM_020245.2,2298-2316).
ccaatggtccccttctgaa

SEQ ID NO: 13787 - DNA, 19 bp, Homo sapiens
  siRNA target sequence for TULP4 (NM_020245.2,2319-2337).
gtgccatggtcaagttcta

SEQ ID NO: 13788 - DNA, 19 bp, Homo sapiens
  siRNA target sequence for TULP4 (NM_020245.2,2323-2341).
catggtcaagttctacaat

SEQ ID NO: 13789 - DNA, 19 bp, Homo sapiens
  siRNA target sequence for TULP4 (NM_020245.2,2326-2344).
ggtcaagttctacaatgtt

SEQ ID NO: 13790 - DNA, 19 bp, Homo sapiens
  siRNA target sequence for TULP4 (NM_020245.2,2415-2433).
gggattcgaggctgttgat

SEQ ID NO: 13791 - DNA, 19 bp, Homo sapiens
  siRNA target sequence for TULP4 (NM_020245.2,2602-2620).
catcaagcccccaattcca

SEQ ID NO: 13792 - DNA, 19 bp, Homo sapiens
  siRNA target sequence for TULP4 (NM_020245.2,2618-2636).
ccagatccgaacaacatga

SEQ ID NO: 13793 - DNA, 19 bp, Homo sapiens
  siRNA target sequence for TULP4 (NM_020245.2,2799-2817).
ggccagagttcgtcatcat

SEQ ID NO: 13794 - DNA, 19 bp, Homo sapiens
  siRNA target sequence for TULP4 (NM_020245.2,3099-3117).
ctcggagagagtttccttt

SEQ ID NO: 13795 - DNA, 19 bp, Homo sapiens
  siRNA target sequence for TULP4 (NM_020245.2,3146-3164).
gctcaggtcacgtctaata

SEQ ID NO: 13796 - DNA, 19 bp, Homo sapiens
  siRNA target sequence for TULP4 (NM_020245.2,3147-3165).
ctcaggtcacgtctaatat

SEQ ID NO: 13797 - DNA, 19 bp, Homo sapiens
  siRNA target sequence for TULP4 (NM_020245.2,3149-3167).
caggtcacgtctaatatct

SEQ ID NO: 13798 - DNA, 19 bp, Homo sapiens
  siRNA target sequence for TULP4 (NM_020245.2,3168-3186).
ggggaaccaaatttaagat

SEQ ID NO: 13799 - DNA, 19 bp, Homo sapiens
  siRNA target sequence for TULP4 (NM_020245.2,3213-3231).
ccaacctcggtgcagtaat

SEQ ID NO: 13800 - DNA, 19 bp, Homo sapiens
  siRNA target sequence for TULP4 (NM_020245.2,3217-3235).
cctcggtgcagtaatctat

SEQ ID NO: 13801 - DNA, 19 bp, Homo sapiens
  siRNA target sequence for TULP4 (NM_020245.2,3218-3236).
ctcggtgcagtaatctata

SEQ ID NO: 13802 - DNA, 19 bp, Homo sapiens
  siRNA target sequence for TULP4 (NM_020245.2,3220-3238).
cggtgcagtaatctataaa

SEQ ID NO: 13803 - DNA, 19 bp, Homo sapiens
  siRNA target sequence for TULP4 (NM_020245.2,3307-3325).
ggactatattaatttacct

SEQ ID NO: 13804 - DNA, 19 bp, Homo sapiens
  siRNA target sequence for TULP4 (NM_020245.2,3415-3433).
cgtgaacatccctattgca

SEQ ID NO: 13805 - DNA, 19 bp, Homo sapiens
  siRNA target sequence for TULP4 (NM_020245.2,3805-3823).
ggacgcagtggtctttagt

SEQ ID NO: 13806 - DNA, 19 bp, Homo sapiens
  siRNA target sequence for TULP4 (NM_020245.2,4283-4301).
gcccagaggtccgacaata

SEQ ID NO: 13807 - DNA, 19 bp, Homo sapiens
  siRNA target sequence for TULP4 (NM_020245.2,4335-4353).
gtgaggctacgctcaagat

SEQ ID NO: 13808 - DNA, 19 bp, Homo sapiens
  siRNA target sequence for TULP4 (NM_020245.2,4791-4809).
ggcccaaccccttaaaact

SEQ ID NO: 13809 - DNA, 19 bp, Homo sapiens
  siRNA target sequence for TULP4 (NM_020245.2,4928-4946).
ccatatccaggaagctata

SEQ ID NO: 13810 - DNA, 19 bp, Homo sapiens
  siRNA target sequence for TULP4 (NM_020245.2,5100-5118).
gcagcacgtgctctagttt

SEQ ID NO: 13811 - DNA, 19 bp, Homo sapiens
  siRNA target sequence for TULP4 (NM_020245.2,5101-5119).
cagcacgtgctctagttta

SEQ ID NO: 13812 - DNA, 19 bp, Homo sapiens
  siRNA target sequence for TULP4 (NM_020245.2,5103-5121).
gcacgtgctctagtttaca

SEQ ID NO: 13813 - DNA, 19 bp, Homo sapiens
  siRNA target sequence for TULP4 (NM_020245.2,5449-5467).
gactttgagtgactttaat

SEQ ID NO: 13814 - DNA, 19 bp, Homo sapiens
  siRNA target sequence for TULP4 (NM_020245.2,5517-5535).
gtcagaaagaccaactgaa

SEQ ID NO: 13815 - DNA, 19 bp, Homo sapiens
  siRNA target sequence for TULP4 (NM_020245.2,5583-5601).
gcgagcctgagctgttcat

SEQ ID NO: 13816 - DNA, 19 bp, Homo sapiens
  siRNA target sequence for TULP4 (NM_020245.2,5604-5622).
gcggggatgagctcatgaa

SEQ ID NO: 13817 - DNA, 19 bp, Homo sapiens
  siRNA target sequence for TULP4 (NM_020245.2,5831-5849).
caggagtccgccaagaact

SEQ ID NO: 13818 - DNA, 19 bp, Homo sapiens
  siRNA target sequence for TULP4 (NM_020245.2,5881-5899).
gcagtttggacggattgat

SEQ ID NO: 13819 - DNA, 19 bp, Homo sapiens
  siRNA target sequence for TULP4 (NM_020245.2,5901-5919).
gcagtgcgtacattctaga

SEQ ID NO: 13820 - DNA, 19 bp, Homo sapiens
  siRNA target sequence for TULP4 (NM_020245.2,5904-5922).
gtgcgtacattctagactt

SEQ ID NO: 13821 - DNA, 19 bp, Homo sapiens
  siRNA target sequence for TULP4 (NM_020245.2,5972-5990).
gtgactcagcgcctcaaat

SEQ ID NO: 13822 - DNA, 19 bp, Homo sapiens
  siRNA target sequence for UBP1 (NM_014517.2,741-759).
caacgtcaccagcagtaaa

SEQ ID NO: 13823 - DNA, 19 bp, Homo sapiens
  siRNA target sequence for UBP1 (NM_014517.2,744-762).
cgtcaccagcagtaaaact

SEQ ID NO: 13824 - DNA, 19 bp, Homo sapiens
  siRNA target sequence for UBP1 (NM_014517.2,764-782).
catgatgaaacgcttactt

SEQ ID NO: 13825 - DNA, 19 bp, Homo sapiens
  siRNA target sequence for UBP1 (NM_014517.2,767-785).
gatgaaacgcttacttatt

SEQ ID NO: 13826 - DNA, 19 bp, Homo sapiens
  siRNA target sequence for UBP1 (NM_014517.2,770-788).
gaaacgcttacttatttga

SEQ ID NO: 13827 - DNA, 19 bp, Homo sapiens
  siRNA target sequence for UBP1 (NM_014517.2,850-868).
gatcaatggaaaattagta

SEQ ID NO: 13828 - DNA, 19 bp, Homo sapiens
  siRNA target sequence for UBP1 (NM_014517.2,877-895).
cataagggttgtattccat

SEQ ID NO: 13829 - DNA, 19 bp, Homo sapiens
  siRNA target sequence for UBP1 (NM_014517.2,893-911).
catgacagacggctacaat

SEQ ID NO: 13830 - DNA, 19 bp, Homo sapiens
  siRNA target sequence for UBP1 (NM_014517.2,1004-1022).
gacacaaggacgaatccaa

SEQ ID NO: 13831 - DNA, 19 bp, Homo sapiens
  siRNA target sequence for UBP1 (NM_014517.2,1014-1032).
cgaatccaagccagttaaa

SEQ ID NO: 13832 - DNA, 19 bp, Homo sapiens
  siRNA target sequence for UBP1 (NM_014517.2,1015-1033).
gaatccaagccagttaaat

SEQ ID NO: 13833 - DNA, 19 bp, Homo sapiens
  siRNA target sequence for UBP1 (NM_014517.2,1025-1043).
cagttaaatgcggttgaat

SEQ ID NO: 13834 - DNA, 19 bp, Homo sapiens
  siRNA target sequence for UBP1 (NM_014517.2,1065-1083).
gcacctctgctttcattca

SEQ ID NO: 13835 - DNA, 19 bp, Homo sapiens
  siRNA target sequence for UBP1 (NM_014517.2,1116-1134).
ggaagcacggaggtgaaaa

SEQ ID NO: 13836 - DNA, 19 bp, Homo sapiens
  siRNA target sequence for UBP1 (NM_014517.2,1185-1203).
gagaatacacagatcatct

SEQ ID NO: 13837 - DNA, 19 bp, Homo sapiens
  siRNA target sequence for UBP1 (NM_014517.2,1312-1330).
gtatcagccgtcctatgat

SEQ ID NO: 13838 - DNA, 19 bp, Homo sapiens
  siRNA target sequence for UBP1 (NM_014517.2,1475-1493).
gcccccacagcctatgtga

SEQ ID NO: 13839 - DNA, 19 bp, Homo sapiens
  siRNA target sequence for UBP1 (NM_014517.2,1476-1494).
cccccacagcctatgtgaa

SEQ ID NO: 13840 - DNA, 19 bp, Homo sapiens
  siRNA target sequence for UBP1 (NM_014517.2,1477-1495).
ccccacagcctatgtgaat

SEQ ID NO: 13841 - DNA, 19 bp, Homo sapiens
  siRNA target sequence for UBP1 (NM_014517.2,1601-1619).
cagacctctggtgaacaaa

SEQ ID NO: 13842 - DNA, 19 bp, Homo sapiens
  siRNA target sequence for UBP1 (NM_014517.2,1632-1650).
ctacgatccaggaaacaca

SEQ ID NO: 13843 - DNA, 19 bp, Homo sapiens
  siRNA target sequence for UBP1 (NM_014517.2,1658-1676).
ctgctcaaaaacagattct

SEQ ID NO: 13844 - DNA, 19 bp, Homo sapiens
  siRNA target sequence for UBP1 (NM_014517.2,1660-1678).
gctcaaaaacagattctct

SEQ ID NO: 13845 - DNA, 19 bp, Homo sapiens
  siRNA target sequence for UBP1 (NM_014517.2,1661-1679).
ctcaaaaacagattctctt

SEQ ID NO: 13846 - DNA, 19 bp, Homo sapiens
  siRNA target sequence for UBP1 (NM_014517.2,1707-1725).
caggtgccgacttattaaa

SEQ ID NO: 13847 - DNA, 19 bp, Homo sapiens
  siRNA target sequence for UBP1 (NM_014517.2,1710-1728).
gtgccgacttattaaaact

SEQ ID NO: 13848 - DNA, 19 bp, Homo sapiens
  siRNA target sequence for UBP1 (NM_014517.2,1712-1730).
gccgacttattaaaactga

SEQ ID NO: 13849 - DNA, 19 bp, Homo sapiens
  siRNA target sequence for UBP1 (NM_014517.2,1729-1747).
gacaaaggaggatttagtt

SEQ ID NO: 13850 - DNA, 19 bp, Homo sapiens
  siRNA target sequence for UBP1 (NM_014517.2,1755-1773).
gtggtgcagccgatggaat

SEQ ID NO: 13851 - DNA, 19 bp, Homo sapiens
  siRNA target sequence for UBP1 (NM_014517.2,1766-1784).
gatggaattcggctctata

SEQ ID NO: 13852 - DNA, 19 bp, Homo sapiens
  siRNA target sequence for UBP1 (NM_014517.2,1769-1787).
ggaattcggctctataatt

SEQ ID NO: 13853 - DNA, 19 bp, Homo sapiens
  siRNA target sequence for UBP1 (NM_014517.2,1805-1823).
gttagaccccgtttaacca

SEQ ID NO: 13854 - DNA, 19 bp, Homo sapiens
  siRNA target sequence for UBP1 (NM_014517.2,1812-1830).
cccgtttaaccatctatgt

SEQ ID NO: 13855 - DNA, 19 bp, Homo sapiens
  siRNA target sequence for UBP1 (NM_014517.2,1814-1832).
cgtttaaccatctatgtct

SEQ ID NO: 13856 - DNA, 19 bp, Homo sapiens
  siRNA target sequence for UBP1 (NM_014517.2,1903-1921).
cagtggggcaccctatgtt

SEQ ID NO: 13857 - DNA, 19 bp, Homo sapiens
  siRNA target sequence for UBP1 (NM_014517.2,1908-1926).
gggcaccctatgtttatca

SEQ ID NO: 13858 - DNA, 19 bp, Homo sapiens
  siRNA target sequence for UBP1 (NM_014517.2,1909-1927).
ggcaccctatgtttatcat

SEQ ID NO: 13859 - DNA, 19 bp, Homo sapiens
  siRNA target sequence for UBP1 (NM_014517.2,1914-1932).
cctatgtttatcatgcaat

SEQ ID NO: 13860 - DNA, 19 bp, Homo sapiens
  siRNA target sequence for UBP1 (NM_014517.2,1929-1947).
caatctacttggaagaaat

SEQ ID NO: 13861 - DNA, 19 bp, Homo sapiens
  siRNA target sequence for UBP1 (NM_014517.2,1973-1991).
cttgcgctggtgtttaata

SEQ ID NO: 13862 - DNA, 19 bp, Homo sapiens
  siRNA target sequence for UBP1 (NM_014517.2,2027-2045).
ggtcccaccggtattcaca

SEQ ID NO: 13863 - DNA, 19 bp, Homo sapiens
  siRNA target sequence for UBP1 (NM_014517.2,2028-2046).
gtcccaccggtattcacat

SEQ ID NO: 13864 - DNA, 19 bp, Homo sapiens
  siRNA target sequence for UBP1 (NM_014517.2,2031-2049).
ccaccggtattcacattct

SEQ ID NO: 13865 - DNA, 19 bp, Homo sapiens
  siRNA target sequence for UBP1 (NM_014517.2,2032-2050).
caccggtattcacattctt

SEQ ID NO: 13866 - DNA, 19 bp, Homo sapiens
  siRNA target sequence for UBP1 (NM_014517.2,2034-2052).
ccggtattcacattcttgt

SEQ ID NO: 13867 - DNA, 19 bp, Homo sapiens
  siRNA target sequence for UBP1 (NM_014517.2,2035-2053).
cggtattcacattcttgtt

SEQ ID NO: 13868 - DNA, 19 bp, Homo sapiens
  siRNA target sequence for UBP1 (NM_014517.2,2055-2073).
gtgatcagatggttcagaa

SEQ ID NO: 13869 - DNA, 19 bp, Homo sapiens
  siRNA target sequence for UHRF1 (NM_013282.2,268-286).
gaggtccgcctgaatgaca

SEQ ID NO: 13870 - DNA, 19 bp, Homo sapiens
  siRNA target sequence for UHRF1 (NM_013282.2,473-491).
cggaattggggctgtacaa

SEQ ID NO: 13871 - DNA, 19 bp, Homo sapiens
  siRNA target sequence for UHRF1 (NM_013282.2,667-685).
ggcgtggtccagatgaact

SEQ ID NO: 13872 - DNA, 19 bp, Homo sapiens
  siRNA target sequence for UHRF1 (NM_013282.2,748-766).
gtggtcatgctcaactaca

SEQ ID NO: 13873 - DNA, 19 bp, Homo sapiens
  siRNA target sequence for UHRF1 (NM_013282.2,941-959).
ggagccccatggttgacaa

SEQ ID NO: 13874 - DNA, 19 bp, Homo sapiens
  siRNA target sequence for UHRF1 (NM_013282.2,1164-1182).
ccctgagtgccggaatgat

SEQ ID NO: 13875 - DNA, 19 bp, Homo sapiens
  siRNA target sequence for UHRF1 (NM_013282.2,1560-1578).
cgcggaacagtcttgtgat

SEQ ID NO: 13876 - DNA, 19 bp, Homo sapiens
  siRNA target sequence for UHRF1 (NM_013282.2,1685-1703).
gggtggtgcgcaatgtcaa

SEQ ID NO: 13877 - DNA, 19 bp, Homo sapiens
  siRNA target sequence for UHRF1 (NM_013282.2,1744-1762).
cgctacgatggcatctaca

SEQ ID NO: 13878 - DNA, 19 bp, Homo sapiens
  siRNA target sequence for UHRF1 (NM_013282.2,1745-1763).
gctacgatggcatctacaa

SEQ ID NO: 13879 - DNA, 19 bp, Homo sapiens
  siRNA target sequence for UHRF1 (NM_013282.2,2207-2225).
gcagcccgttccagttgtt

SEQ ID NO: 13880 - DNA, 19 bp, Homo sapiens
  siRNA target sequence for USF2 (NM_003367.1,173-191).
cgttcggcgaccacaacat

SEQ ID NO: 13881 - DNA, 19 bp, Homo sapiens
  siRNA target sequence for USF2 (NM_003367.1,201-219).
gttccgcacagagacaaat

SEQ ID NO: 13882 - DNA, 19 bp, Homo sapiens
  siRNA target sequence for USF2 (NM_003367.1,483-501).
cagcggggaggcacgattt

SEQ ID NO: 13883 - DNA, 19 bp, Homo sapiens
  siRNA target sequence for USF2 (NM_003367.1,583-601).
cagttctacgtcatgatga

SEQ ID NO: 13884 - DNA, 19 bp, Homo sapiens
  siRNA target sequence for USF2 (NM_003367.1,648-666).
ccggacacacccttactct

SEQ ID NO: 13885 - DNA, 19 bp, Homo sapiens
  siRNA target sequence for USF2 (NM_003367.1,657-675).
cccttactctccaaaaatt

SEQ ID NO: 13886 - DNA, 19 bp, Homo sapiens
  siRNA target sequence for USF2 (NM_003367.1,659-677).
cttactctccaaaaattga

SEQ ID NO: 13887 - DNA, 19 bp, Homo sapiens
  siRNA target sequence for USF2 (NM_003367.1,761-779).
ggatcgtccagctttcgaa

SEQ ID NO: 13888 - DNA, 19 bp, Homo sapiens
  siRNA target sequence for USF2 (NM_003367.1,762-780).
gatcgtccagctttcgaaa

SEQ ID NO: 13889 - DNA, 19 bp, Homo sapiens
  siRNA target sequence for USF2 (NM_003367.1,810-828).
caagacgggagcgagtaaa

SEQ ID NO: 13890 - DNA, 19 bp, Homo sapiens
  siRNA target sequence for USF2 (NM_003367.1,813-831).
gacgggagcgagtaaagga

SEQ ID NO: 13891 - DNA, 19 bp, Homo sapiens
  siRNA target sequence for USF2 (NM_003367.1,842-860).
ccaaggcctgcgattacat

SEQ ID NO: 13892 - DNA, 19 bp, Homo sapiens
  siRNA target sequence for VAV1 (NM_005428.2,394-412).
cttcgatgtgcaggatttt

SEQ ID NO: 13893 - DNA, 19 bp, Homo sapiens
  siRNA target sequence for VAV1 (NM_005428.2,501-519).
gtgtaggtgatgaagacat

SEQ ID NO: 13894 - DNA, 19 bp, Homo sapiens
  siRNA target sequence for VAV1 (NM_005428.2,600-618).
cggaaggcgacgagatcta

SEQ ID NO: 13895 - DNA, 19 bp, Homo sapiens
  siRNA target sequence for VAV1 (NM_005428.2,821-839).
gacctgcttcgtgttcata

SEQ ID NO: 13896 - DNA, 19 bp, Homo sapiens
  siRNA target sequence for VAV1 (NM_005428.2,823-841).
cctgcttcgtgttcatact

SEQ ID NO: 13897 - DNA, 19 bp, Homo sapiens
  siRNA target sequence for VAV1 (NM_005428.2,833-851).
gttcatactcacttcctaa

SEQ ID NO: 13898 - DNA, 19 bp, Homo sapiens
  siRNA target sequence for VAV1 (NM_005428.2,1087-1105).
gcagcgagttctcaaatat

SEQ ID NO: 13899 - DNA, 19 bp, Homo sapiens
  siRNA target sequence for VAV1 (NM_005428.2,1235-1253).
ctgcgacagatcaccaatt

SEQ ID NO: 13900 - DNA, 19 bp, Homo sapiens
  siRNA target sequence for VAV1 (NM_005428.2,1239-1257).
gacagatcaccaatttcca

SEQ ID NO: 13901 - DNA, 19 bp, Homo sapiens
  siRNA target sequence for VAV1 (NM_005428.2,1421-1439).
gacctcaaggactttgtaa

SEQ ID NO: 13902 - DNA, 19 bp, Homo sapiens
  siRNA target sequence for VAV1 (NM_005428.2,1549-1567).
gttcttcaagacaagagaa

SEQ ID NO: 13903 - DNA, 19 bp, Homo sapiens
  siRNA target sequence for VAV1 (NM_005428.2,1632-1650).
ccgccaacgggcatgactt

SEQ ID NO: 13904 - DNA, 19 bp, Homo sapiens
  siRNA target sequence for VAV1 (NM_005428.2,1702-1720).
gcttagaggtaccttctat

SEQ ID NO: 13905 - DNA, 19 bp, Homo sapiens
  siRNA target sequence for VAV1 (NM_005428.2,1790-1808).
ggccgacatgggcaagatt

SEQ ID NO: 13906 - DNA, 19 bp, Homo sapiens
  siRNA target sequence for VAV1 (NM_005428.2,1791-1809).
gccgacatgggcaagattt

SEQ ID NO: 13907 - DNA, 19 bp, Homo sapiens
  siRNA target sequence for VAV1 (NM_005428.2,1805-1823).
gatttcccaggaactatga

SEQ ID NO: 13908 - DNA, 19 bp, Homo sapiens
  siRNA target sequence for VAV1 (NM_005428.2,2011-2029).
gggcagaaatacatctact

SEQ ID NO: 13909 - DNA, 19 bp, Homo sapiens
  siRNA target sequence for VAV1 (NM_005428.2,2016-2034).
gaaatacatctactaatga

SEQ ID NO: 13910 - DNA, 19 bp, Homo sapiens
  siRNA target sequence for VAV1 (NM_005428.2,2159-2177).
cgctcggacgggactttct

SEQ ID NO: 13911 - DNA, 19 bp, Homo sapiens
  siRNA target sequence for VAV1 (NM_005428.2,2160-2178).
gctcggacgggactttctt

SEQ ID NO: 13912 - DNA, 19 bp, Homo sapiens
  siRNA target sequence for VAV1 (NM_005428.2,2207-2225).
gaatttgccatcagcatta

SEQ ID NO: 13913 - DNA, 19 bp, Homo sapiens
  siRNA target sequence for VAV1 (NM_005428.2,2234-2252).
gtcgaggtcaagcacatta

SEQ ID NO: 13914 - DNA, 19 bp, Homo sapiens
  siRNA target sequence for VAV1 (NM_005428.2,2236-2254).
cgaggtcaagcacattaaa

SEQ ID NO: 13915 - DNA, 19 bp, Homo sapiens
  siRNA target sequence for VAV1 (NM_005428.2,2313-2331).
cggagctggtggagtttta

SEQ ID NO: 13916 - DNA, 19 bp, Homo sapiens
  siRNA target sequence for VAV1 (NM_005428.2,2457-2475).
ccaaagcccgctatgactt

SEQ ID NO: 13917 - DNA, 19 bp, Homo sapiens
  siRNA target sequence for VAV1 (NM_005428.2,2557-2575).
gtggcgaggggagatctat

SEQ ID NO: 13918 - DNA, 19 bp, Homo sapiens
  siRNA target sequence for VDR (NM_000376.1,203-221).
cgagccactggctttcact

SEQ ID NO: 13919 - DNA, 19 bp, Homo sapiens
  siRNA target sequence for VDR (NM_000376.1,368-386).
gtggacatcggcatgatga

SEQ ID NO: 13920 - DNA, 19 bp, Homo sapiens
  siRNA target sequence for VDR (NM_000376.1,577-595).
gcctccagttcgtgtgaat

SEQ ID NO: 13921 - DNA, 19 bp, Homo sapiens
  siRNA target sequence for VDR (NM_000376.1,579-597).
ctccagttcgtgtgaatga

SEQ ID NO: 13922 - DNA, 19 bp, Homo sapiens
  siRNA target sequence for VDR (NM_000376.1,806-824).
gctgacctggtcagttaca

SEQ ID NO: 13923 - DNA, 19 bp, Homo sapiens
  siRNA target sequence for VDR (NM_000376.1,815-833).
gtcagttacagcatccaaa

SEQ ID NO: 13924 - DNA, 19 bp, Homo sapiens
  siRNA target sequence for VDR (NM_000376.1,819-837).
gttacagcatccaaaaggt

SEQ ID NO: 13925 - DNA, 19 bp, Homo sapiens
  siRNA target sequence for VDR (NM_000376.1,853-871).
gatgataccaggattcaga

SEQ ID NO: 13926 - DNA, 19 bp, Homo sapiens
  siRNA target sequence for VDR (NM_000376.1,980-998).
ggcaaccaagactacaagt

SEQ ID NO: 13927 - DNA, 19 bp, Homo sapiens
  siRNA target sequence for VDR (NM_000376.1,981-999).
gcaaccaagactacaagta

SEQ ID NO: 13928 - DNA, 19 bp, Homo sapiens
  siRNA target sequence for VDR (NM_000376.1,1340-1358).
gagtgcagcatgaagctaa

SEQ ID NO: 13929 - DNA, 19 bp, Homo sapiens
  siRNA target sequence for VDR (NM_000376.1,1362-1380).
cccttgtgctcgaagtgtt

SEQ ID NO: 13930 - DNA, 19 bp, Homo sapiens
  siRNA target sequence for VDR (NM_000376.1,1363-1381).
ccttgtgctcgaagtgttt

SEQ ID NO: 13931 - DNA, 19 bp, Homo sapiens
  siRNA target sequence for VDR (NM_000376.1,1373-1391).
gaagtgtttggcaatgaga

SEQ ID NO: 13932 - DNA, 19 bp, Homo sapiens
  siRNA target sequence for VENTX2 (NM_014468.2,259-277).
gtaaggagccaaatacctt

SEQ ID NO: 13933 - DNA, 19 bp, Homo sapiens
  siRNA target sequence for VENTX2 (NM_014468.2,766-784).
cacagacgggggatgcatt

SEQ ID NO: 13934 - DNA, 19 bp, Homo sapiens
  siRNA target sequence for VSX1 (NM_014588.4,618-636).
gaaatgctggctgtgaaaa

SEQ ID NO: 13935 - DNA, 19 bp, Homo sapiens
  siRNA target sequence for VSX1 (NM_014588.4,910-928).
ggggctctgaccacttcaa

SEQ ID NO: 13936 - DNA, 19 bp, Homo sapiens
  siRNA target sequence for WT1 (NM_000378.2,590-608).
cgcctcactccttcatcaa

SEQ ID NO: 13937 - DNA, 19 bp, Homo sapiens
  siRNA target sequence for WT1 (NM_000378.2,593-611).
ctcactccttcatcaaaca

SEQ ID NO: 13938 - DNA, 19 bp, Homo sapiens
  siRNA target sequence for WT1 (NM_000378.2,1047-1065).
gccctacagcagtgacaat

SEQ ID NO: 13939 - DNA, 19 bp, Homo sapiens
  siRNA target sequence for WT1 (NM_000378.2,1058-1076).
gtgacaatttataccaaat

SEQ ID NO: 13940 - DNA, 19 bp, Homo sapiens
  siRNA target sequence for WT1 (NM_000378.2,1079-1097).
catcccagcttgaatgcat

SEQ ID NO: 13941 - DNA, 19 bp, Homo sapiens
  siRNA target sequence for WT1 (NM_000378.2,1148-1166).
ggtacgagagcgataacca

SEQ ID NO: 13942 - DNA, 19 bp, Homo sapiens
  siRNA target sequence for WT1 (NM_000378.2,1182-1200).
ctgcggagcccaatacaga

SEQ ID NO: 13943 - DNA, 19 bp, Homo sapiens
  siRNA target sequence for WT1 (NM_000378.2,1184-1202).
gcggagcccaatacagaat

SEQ ID NO: 13944 - DNA, 19 bp, Homo sapiens
  siRNA target sequence for WT1 (NM_000378.2,1185-1203).
cggagcccaatacagaata

SEQ ID NO: 13945 - DNA, 19 bp, Homo sapiens
  siRNA target sequence for WT1 (NM_000378.2,1324-1342).
ggctgcaataagagatatt

SEQ ID NO: 13946 - DNA, 19 bp, Homo sapiens
  siRNA target sequence for WT1 (NM_000378.2,1413-1431).
ggactgtgaacgaaggttt

SEQ ID NO: 13947 - DNA, 19 bp, Homo sapiens
  siRNA target sequence for WT1 (NM_000378.2,1414-1432).
gactgtgaacgaaggtttt

SEQ ID NO: 13948 - DNA, 19 bp, Homo sapiens
  siRNA target sequence for WT1 (NM_000378.2,1416-1434).
ctgtgaacgaaggttttct

SEQ ID NO: 13949 - DNA, 19 bp, Homo sapiens
  siRNA target sequence for WT1 (NM_000378.2,1464-1482).
gagacatacaggtgtgaaa

SEQ ID NO: 13950 - DNA, 19 bp, Homo sapiens
  siRNA target sequence for WT1 (NM_000378.2,1575-1593).
ctgtcggtggccaagttgt

SEQ ID NO: 13951 - DNA, 19 bp, Homo sapiens
  siRNA target sequence for XBP1 (NM_005080.2,80-98).
ccgacgggacccctaaagt

SEQ ID NO: 13952 - DNA, 19 bp, Homo sapiens
  siRNA target sequence for XBP1 (NM_005080.2,343-361).
gaacagcaagtggtagatt

SEQ ID NO: 13953 - DNA, 19 bp, Homo sapiens
  siRNA target sequence for XBP1 (NM_005080.2,348-366).
gcaagtggtagatttagaa

SEQ ID NO: 13954 - DNA, 19 bp, Homo sapiens
  siRNA target sequence for XBP1 (NM_005080.2,399-417).
gcttttacgagagaaaact

SEQ ID NO: 13955 - DNA, 19 bp, Homo sapiens
  siRNA target sequence for XBP1 (NM_005080.2,416-434).
ctcatggccttgtagttga

SEQ ID NO: 13956 - DNA, 19 bp, Homo sapiens
  siRNA target sequence for XBP1 (NM_005080.2,430-448).
gttgagaaccaggagttaa

SEQ ID NO: 13957 - DNA, 19 bp, Homo sapiens
  siRNA target sequence for XBP1 (NM_005080.2,615-633).
gattctggcggtattgact

SEQ ID NO: 13958 - DNA, 19 bp, Homo sapiens
  siRNA target sequence for XBP1 (NM_005080.2,623-641).
cggtattgactcttcagat

SEQ ID NO: 13959 - DNA, 19 bp, Homo sapiens
  siRNA target sequence for XBP1 (NM_005080.2,624-642).
ggtattgactcttcagatt

SEQ ID NO: 13960 - DNA, 19 bp, Homo sapiens
  siRNA target sequence for XBP1 (NM_005080.2,637-655).
cagattcagagtctgatat

SEQ ID NO: 13961 - DNA, 19 bp, Homo sapiens
  siRNA target sequence for XBP1 (NM_005080.2,681-699).
gacccagtcatgttcttca

SEQ ID NO: 13962 - DNA, 19 bp, Homo sapiens
  siRNA target sequence for YY1 (NM_003403.3,488-506).
cgggcgacaccctctacat

SEQ ID NO: 13963 - DNA, 19 bp, Homo sapiens
  siRNA target sequence for YY1 (NM_003403.3,855-873).
cggcttcgaggatcagatt

SEQ ID NO: 13964 - DNA, 19 bp, Homo sapiens
  siRNA target sequence for YY1 (NM_003403.3,906-924).
cgacgactacattgaacaa

SEQ ID NO: 13965 - DNA, 19 bp, Homo sapiens
  siRNA target sequence for YY1 (NM_003403.3,907-925).
gacgactacattgaacaaa

SEQ ID NO: 13966 - DNA, 19 bp, Homo sapiens
  siRNA target sequence for YY1 (NM_003403.3,1298-1316).
ccaaacaactggcagaatt

SEQ ID NO: 13967 - DNA, 19 bp, Homo sapiens
  siRNA target sequence for YY1 (NM_003403.3,1299-1317).
caaacaactggcagaattt

SEQ ID NO: 13968 - DNA, 19 bp, Homo sapiens
  siRNA target sequence for YY1 (NM_003403.3,1378-1396).
cataaaggctgcacaaaga

SEQ ID NO: 13969 - DNA, 19 bp, Homo sapiens
  siRNA target sequence for YY1 (NM_003403.3,1405-1423).
gataactcggccatgagaa

SEQ ID NO: 13970 - DNA, 19 bp, Homo sapiens
  siRNA target sequence for YY1 (NM_003403.3,1504-1522).
cgacaccaactggttcata

SEQ ID NO: 13971 - DNA, 19 bp, Homo sapiens
  siRNA target sequence for YY1 (NM_003403.3,1634-1652).
gccccttcgatggttgtaa

SEQ ID NO: 13972 - DNA, 19 bp, Homo sapiens
  siRNA target sequence for YY1 (NM_003403.3,1636-1654).
cccttcgatggttgtaata

SEQ ID NO: 13973 - DNA, 19 bp, Homo sapiens
  siRNA target sequence for YY1 (NM_003403.3,1637-1655).
ccttcgatggttgtaataa

SEQ ID NO: 13974 - DNA, 19 bp, Homo sapiens
  siRNA target sequence for YY1 (NM_003403.3,1642-1660).
gatggttgtaataagaagt

SEQ ID NO: 13975 - DNA, 19 bp, Homo sapiens
  siRNA target sequence for YY1 (NM_003403.3,1680-1698).
gaaatctcacatcttaaca

SEQ ID NO: 13976 - DNA, 19 bp, Homo sapiens
  siRNA target sequence for ZFH4 (NM_024721.2,57-75).
gactcccctcctatctcaa

SEQ ID NO: 13977 - DNA, 19 bp, Homo sapiens
  siRNA target sequence for ZFH4 (NM_024721.2,89-107).
gcagagcacatcaaagcta

SEQ ID NO: 13978 - DNA, 19 bp, Homo sapiens
  siRNA target sequence for ZFH4 (NM_024721.2,109-127).
gtggaacgacacaacttga

SEQ ID NO: 13979 - DNA, 19 bp, Homo sapiens
  siRNA target sequence for ZFH4 (NM_024721.2,111-129).
ggaacgacacaacttgata

SEQ ID NO: 13980 - DNA, 19 bp, Homo sapiens
  siRNA target sequence for ZFH4 (NM_024721.2,115-133).
cgacacaacttgataatga

SEQ ID NO: 13981 - DNA, 19 bp, Homo sapiens
  siRNA target sequence for ZFH4 (NM_024721.2,203-221).
ggatgagcgcaaaagtgaa

SEQ ID NO: 13982 - DNA, 19 bp, Homo sapiens
  siRNA target sequence for ZFH4 (NM_024721.2,279-297).
gagataccctgcaacgaat

SEQ ID NO: 13983 - DNA, 19 bp, Homo sapiens
  siRNA target sequence for ZFH4 (NM_024721.2,407-425).
cagtgacgtggaaaatcta

SEQ ID NO: 13984 - DNA, 19 bp, Homo sapiens
  siRNA target sequence for ZFH4 (NM_024721.2,446-464).
gcctgatgggtcagcatat

SEQ ID NO: 13985 - DNA, 19 bp, Homo sapiens
  siRNA target sequence for ZFH4 (NM_024721.2,447-465).
cctgatgggtcagcatata

SEQ ID NO: 13986 - DNA, 19 bp, Homo sapiens
  siRNA target sequence for ZFH4 (NM_024721.2,448-466).
ctgatgggtcagcatatat

SEQ ID NO: 13987 - DNA, 19 bp, Homo sapiens
  siRNA target sequence for ZFH4 (NM_024721.2,450-468).
gatgggtcagcatatataa

SEQ ID NO: 13988 - DNA, 19 bp, Homo sapiens
  siRNA target sequence for ZFH4 (NM_024721.2,498-516).
gcacagactggggcaaata

SEQ ID NO: 13989 - DNA, 19 bp, Homo sapiens
  siRNA target sequence for ZFH4 (NM_024721.2,503-521).
gactggggcaaatagcaaa

SEQ ID NO: 13990 - DNA, 19 bp, Homo sapiens
  siRNA target sequence for ZFH4 (NM_024721.2,508-526).
gggcaaatagcaaactctt

SEQ ID NO: 13991 - DNA, 19 bp, Homo sapiens
  siRNA target sequence for ZFH4 (NM_024721.2,640-658).
catccctcgggaaaccatt

SEQ ID NO: 13992 - DNA, 19 bp, Homo sapiens
  siRNA target sequence for ZFH4 (NM_024721.2,644-662).
cctcgggaaaccatttaca

SEQ ID NO: 13993 - DNA, 19 bp, Homo sapiens
  siRNA target sequence for ZFH4 (NM_024721.2,677-695).
cccaaatacctcagcatta

SEQ ID NO: 13994 - DNA, 19 bp, Homo sapiens
  siRNA target sequence for ZFH4 (NM_024721.2,706-724).
gtcctgtgttgcacagttt

SEQ ID NO: 13995 - DNA, 19 bp, Homo sapiens
  siRNA target sequence for ZFH4 (NM_024721.2,716-734).
gcacagtttccgtgtctat

SEQ ID NO: 13996 - DNA, 19 bp, Homo sapiens
  siRNA target sequence for ZFH4 (NM_024721.2,719-737).
cagtttccgtgtctatgat

SEQ ID NO: 13997 - DNA, 19 bp, Homo sapiens
  siRNA target sequence for ZFH4 (NM_024721.2,721-739).
gtttccgtgtctatgatct

SEQ ID NO: 13998 - DNA, 19 bp, Homo sapiens
  siRNA target sequence for ZFH4 (NM_024721.2,833-851).
caaattcgatggttgtgtt

SEQ ID NO: 13999 - DNA, 19 bp, Homo sapiens
  siRNA target sequence for ZFH4 (NM_024721.2,870-888).
cctgttttaatgtgtttct

SEQ ID NO: 14000 - DNA, 19 bp, Homo sapiens
  siRNA target sequence for ZFH4 (NM_024721.2,887-905).
cttgtgcaagttgtctttt

SEQ ID NO: 14001 - DNA, 19 bp, Homo sapiens
  siRNA target sequence for ZFH4 (NM_024721.2,971-989).
gcagaagctcctcagtaat

SEQ ID NO: 14002 - DNA, 19 bp, Homo sapiens
  siRNA target sequence for ZFH4 (NM_024721.2,972-990).
cagaagctcctcagtaata

SEQ ID NO: 14003 - DNA, 19 bp, Homo sapiens
  siRNA target sequence for ZFH4 (NM_024721.2,974-992).
gaagctcctcagtaataaa

SEQ ID NO: 14004 - DNA, 19 bp, Homo sapiens
  siRNA target sequence for ZFH4 (NM_024721.2,994-1012).
gcgtctccgccataataca

SEQ ID NO: 14005 - DNA, 19 bp, Homo sapiens
  siRNA target sequence for ZFH4 (NM_024721.2,1013-1031).
ggggattggcaaagacaaa

SEQ ID NO: 14006 - DNA, 19 bp, Homo sapiens
  siRNA target sequence for ZFH4 (NM_024721.2,1080-1098).
ccccatttttctactacaa

SEQ ID NO: 14007 - DNA, 19 bp, Homo sapiens
  siRNA target sequence for ZFH4 (NM_024721.2,1081-1099).
cccatttttctactacaaa

SEQ ID NO: 14008 - DNA, 19 bp, Homo sapiens
  siRNA target sequence for ZFH4 (NM_024721.2,1116-1134).
ccaaccttccgcggtttat

SEQ ID NO: 14009 - DNA, 19 bp, Homo sapiens
  siRNA target sequence for ZFH4 (NM_024721.2,1135-1153).
ggagcgcttttcatgttga

SEQ ID NO: 14010 - DNA, 19 bp, Homo sapiens
  siRNA target sequence for ZFH4 (NM_024721.2,1136-1154).
gagcgcttttcatgttgaa

SEQ ID NO: 14011 - DNA, 19 bp, Homo sapiens
  siRNA target sequence for ZFH4 (NM_024721.2,1173-1191).
gctggctttgccttcttaa

SEQ ID NO: 14012 - DNA, 19 bp, Homo sapiens
  siRNA target sequence for ZFH4 (NM_024721.2,1247-1265).
gccaaaggctgaagtgaat

SEQ ID NO: 14013 - DNA, 19 bp, Homo sapiens
  siRNA target sequence for ZFH4 (NM_024721.2,1290-1308).
gtgaacaccccaattacct

SEQ ID NO: 14014 - DNA, 19 bp, Homo sapiens
  siRNA target sequence for ZFH4 (NM_024721.2,1415-1433).
cggggagtgccctgtcaaa

SEQ ID NO: 14015 - DNA, 19 bp, Homo sapiens
  siRNA target sequence for ZFH4 (NM_024721.2,1416-1434).
ggggagtgccctgtcaaaa

SEQ ID NO: 14016 - DNA, 19 bp, Homo sapiens
  siRNA target sequence for ZFH4 (NM_024721.2,1418-1436).
ggagtgccctgtcaaaagt

SEQ ID NO: 14017 - DNA, 19 bp, Homo sapiens
  siRNA target sequence for ZFH4 (NM_024721.2,1475-1493).
gtactccaatgaacttgat

SEQ ID NO: 14018 - DNA, 19 bp, Homo sapiens
  siRNA target sequence for ZFH4 (NM_024721.2,1488-1506).
cttgatgacgaggaagtat

SEQ ID NO: 14019 - DNA, 19 bp, Homo sapiens
  siRNA target sequence for ZFH4 (NM_024721.2,1509-1527).
ggtgaactcaccgatagta

SEQ ID NO: 14020 - DNA, 19 bp, Homo sapiens
  siRNA target sequence for ZFH4 (NM_024721.2,1510-1528).
gtgaactcaccgatagtat

SEQ ID NO: 14021 - DNA, 19 bp, Homo sapiens
  siRNA target sequence for ZFH4 (NM_024721.2,1515-1533).
ctcaccgatagtattggta

SEQ ID NO: 14022 - DNA, 19 bp, Homo sapiens
  siRNA target sequence for ZFH4 (NM_024721.2,1519-1537).
ccgatagtattggtaacaa

SEQ ID NO: 14023 - DNA, 19 bp, Homo sapiens
  siRNA target sequence for ZFH4 (NM_024721.2,1525-1543).
gtattggtaacaaagattt

SEQ ID NO: 14024 - DNA, 19 bp, Homo sapiens
  siRNA target sequence for ZFH4 (NM_024721.2,1576-1594).
catccagtgtgctaaaatt

SEQ ID NO: 14025 - DNA, 19 bp, Homo sapiens
  siRNA target sequence for ZFH4 (NM_024721.2,1579-1597).
ccagtgtgctaaaatttat

SEQ ID NO: 14026 - DNA, 19 bp, Homo sapiens
  siRNA target sequence for ZFH4 (NM_024721.2,1580-1598).
cagtgtgctaaaatttatt

SEQ ID NO: 14027 - DNA, 19 bp, Homo sapiens
  siRNA target sequence for ZFH4 (NM_024721.2,1619-1637).
ctcggcgactgtttctgat

SEQ ID NO: 14028 - DNA, 19 bp, Homo sapiens
  siRNA target sequence for ZFH4 (NM_024721.2,1678-1696).
gtggcagtgttgctagtaa

SEQ ID NO: 14029 - DNA, 19 bp, Homo sapiens
  siRNA target sequence for ZFH4 (NM_024721.2,1680-1698).
ggcagtgttgctagtaact

SEQ ID NO: 14030 - DNA, 19 bp, Homo sapiens
  siRNA target sequence for ZFH4 (NM_024721.2,1921-1939).
ggtctcttggtggtcatat

SEQ ID NO: 14031 - DNA, 19 bp, Homo sapiens
  siRNA target sequence for ZFH4 (NM_024721.2,1929-1947).
ggtggtcatatgactatga

SEQ ID NO: 14032 - DNA, 19 bp, Homo sapiens
  siRNA target sequence for ZFH4 (NM_024721.2,2051-2069).
gccgggtggctcttgtgtt

SEQ ID NO: 14033 - DNA, 19 bp, Homo sapiens
  siRNA target sequence for ZFH4 (NM_024721.2,2052-2070).
ccgggtggctcttgtgttt

SEQ ID NO: 14034 - DNA, 19 bp, Homo sapiens
  siRNA target sequence for ZFH4 (NM_024721.2,2053-2071).
cgggtggctcttgtgttta

SEQ ID NO: 14035 - DNA, 19 bp, Homo sapiens
  siRNA target sequence for ZFH4 (NM_024721.2,2058-2076).
ggctcttgtgtttattgta

SEQ ID NO: 14036 - DNA, 19 bp, Homo sapiens
  siRNA target sequence for ZFH4 (NM_024721.2,2059-2077).
gctcttgtgtttattgtaa

SEQ ID NO: 14037 - DNA, 19 bp, Homo sapiens
  siRNA target sequence for ZFH4 (NM_024721.2,2116-2134).
gttacacgtgtggctataa

SEQ ID NO: 14038 - DNA, 19 bp, Homo sapiens
  siRNA target sequence for ZFH4 (NM_024721.2,2142-2160).
cgttgtgaggtttgtaact

SEQ ID NO: 14039 - DNA, 19 bp, Homo sapiens
  siRNA target sequence for ZFH4 (NM_024721.2,2143-2161).
gttgtgaggtttgtaacta

SEQ ID NO: 14040 - DNA, 19 bp, Homo sapiens
  siRNA target sequence for ZFH4 (NM_024721.2,2316-2334).
ccgtccaaacccaaacaga

SEQ ID NO: 14041 - DNA, 19 bp, Homo sapiens
  siRNA target sequence for ZFH4 (NM_024721.2,2342-2360).
ctggcggtgtgaagtttgt

SEQ ID NO: 14042 - DNA, 19 bp, Homo sapiens
  siRNA target sequence for ZFH4 (NM_024721.2,2345-2363).
gcggtgtgaagtttgtgat

SEQ ID NO: 14043 - DNA, 19 bp, Homo sapiens
  siRNA target sequence for ZFH4 (NM_024721.2,2408-2426).
cgaaaagcacatgcataat

SEQ ID NO: 14044 - DNA, 19 bp, Homo sapiens
  siRNA target sequence for ZFH4 (NM_024721.2,2493-2511).
gaagcagagctttatcagt

SEQ ID NO: 14045 - DNA, 19 bp, Homo sapiens
  siRNA target sequence for ZFH4 (NM_024721.2,2497-2515).
cagagctttatcagtacta

SEQ ID NO: 14046 - DNA, 19 bp, Homo sapiens
  siRNA target sequence for ZFH4 (NM_024721.2,2571-2589).
cagctgatgatcaatccat

SEQ ID NO: 14047 - DNA, 19 bp, Homo sapiens
  siRNA target sequence for ZFH4 (NM_024721.2,2633-2651).
cggagagctgtcaccttat

SEQ ID NO: 14048 - DNA, 19 bp, Homo sapiens
  siRNA target sequence for ZFH4 (NM_024721.2,2634-2652).
ggagagctgtcaccttata

SEQ ID NO: 14049 - DNA, 19 bp, Homo sapiens
  siRNA target sequence for ZFH4 (NM_024721.2,2635-2653).
gagagctgtcaccttatat

SEQ ID NO: 14050 - DNA, 19 bp, Homo sapiens
  siRNA target sequence for ZFH4 (NM_024721.2,2662-2680).
cagcgctgaagctattcca

SEQ ID NO: 14051 - DNA, 19 bp, Homo sapiens
  siRNA target sequence for ZFH4 (NM_024721.2,2713-2731).
gcctggaggccctaagtgt

SEQ ID NO: 14052 - DNA, 19 bp, Homo sapiens
  siRNA target sequence for ZFH4 (NM_024721.2,2765-2783).
ggaatggagggcagtaatt

SEQ ID NO: 14053 - DNA, 19 bp, Homo sapiens
  siRNA target sequence for ZFH4 (NM_024721.2,2844-2862).
ctacactgcaagactgata

SEQ ID NO: 14054 - DNA, 19 bp, Homo sapiens
  siRNA target sequence for ZFH4 (NM_024721.2,2880-2898).
caactggtggctcacatta

SEQ ID NO: 14055 - DNA, 19 bp, Homo sapiens
  siRNA target sequence for ZFH4 (NM_024721.2,2947-2965).
gcaaccctgttcacctaaa

SEQ ID NO: 14056 - DNA, 19 bp, Homo sapiens
  siRNA target sequence for ZFH4 (NM_024721.2,2951-2969).
ccctgttcacctaaaatgt

SEQ ID NO: 14057 - DNA, 19 bp, Homo sapiens
  siRNA target sequence for ZFH4 (NM_024721.2,2952-2970).
cctgttcacctaaaatgta

SEQ ID NO: 14058 - DNA, 19 bp, Homo sapiens
  siRNA target sequence for ZFH4 (NM_024721.2,2953-2971).
ctgttcacctaaaatgtaa

SEQ ID NO: 14059 - DNA, 19 bp, Homo sapiens
  siRNA target sequence for ZFH4 (NM_024721.2,2990-3008).
caacagtgtggataaatta

SEQ ID NO: 14060 - DNA, 19 bp, Homo sapiens
  siRNA target sequence for ZFH4 (NM_024721.2,3090-3108).
cccgaatcctgctattact

SEQ ID NO: 14061 - DNA, 19 bp, Homo sapiens
  siRNA target sequence for ZFH4 (NM_024721.2,3091-3109).
ccgaatcctgctattacta

SEQ ID NO: 14062 - DNA, 19 bp, Homo sapiens
  siRNA target sequence for ZFH4 (NM_024721.2,3093-3111).
gaatcctgctattactact

SEQ ID NO: 14063 - DNA, 19 bp, Homo sapiens
  siRNA target sequence for ZFH4 (NM_024721.2,3143-3161).
gttgaatctggtacaacat

SEQ ID NO: 14064 - DNA, 19 bp, Homo sapiens
  siRNA target sequence for ZFH4 (NM_024721.2,3276-3294).
ccaccaaatgagcttgaaa

SEQ ID NO: 14065 - DNA, 19 bp, Homo sapiens
  siRNA target sequence for ZFH4 (NM_024721.2,3310-3328).
ccaggacttgtgatgatga

SEQ ID NO: 14066 - DNA, 19 bp, Homo sapiens
  siRNA target sequence for ZFH4 (NM_024721.2,3311-3329).
caggacttgtgatgatgat

SEQ ID NO: 14067 - DNA, 19 bp, Homo sapiens
  siRNA target sequence for ZFH4 (NM_024721.2,3313-3331).
ggacttgtgatgatgatct

SEQ ID NO: 14068 - DNA, 19 bp, Homo sapiens
  siRNA target sequence for ZFH4 (NM_024721.2,3347-3365).
ggaggcagaaggagctatt

SEQ ID NO: 14069 - DNA, 19 bp, Homo sapiens
  siRNA target sequence for ZFH4 (NM_024721.2,3380-3398).
ggccgaggacgatgaaaaa

SEQ ID NO: 14070 - DNA, 19 bp, Homo sapiens
  siRNA target sequence for ZFH4 (NM_024721.2,3542-3560).
ctgtcatgaacagttctat

SEQ ID NO: 14071 - DNA, 19 bp, Homo sapiens
  siRNA target sequence for ZFH4 (NM_024721.2,3544-3562).
gtcatgaacagttctatca

SEQ ID NO: 14072 - DNA, 19 bp, Homo sapiens
  siRNA target sequence for ZFH4 (NM_024721.2,3546-3564).
catgaacagttctatcaat

SEQ ID NO: 14073 - DNA, 19 bp, Homo sapiens
  siRNA target sequence for ZFH4 (NM_024721.2,3554-3572).
gttctatcaatgtccttat

SEQ ID NO: 14074 - DNA, 19 bp, Homo sapiens
  siRNA target sequence for ZFH4 (NM_024721.2,3760-3778).
ctgtccctgatgtgatgat

SEQ ID NO: 14075 - DNA, 19 bp, Homo sapiens
  siRNA target sequence for ZFH4 (NM_024721.2,3771-3789).
gtgatgatgccaaacagta

SEQ ID NO: 14076 - DNA, 19 bp, Homo sapiens
  siRNA target sequence for ZFH4 (NM_024721.2,3852-3870).
gaggggtctgggaaatatt

SEQ ID NO: 14077 - DNA, 19 bp, Homo sapiens
  siRNA target sequence for ZFH4 (NM_024721.2,3854-3872).
ggggtctgggaaatattca

SEQ ID NO: 14078 - DNA, 19 bp, Homo sapiens
  siRNA target sequence for ZFH4 (NM_024721.2,3904-3922).
caggtctcgaggattcaaa

SEQ ID NO: 14079 - DNA, 19 bp, Homo sapiens
  siRNA target sequence for ZFH4 (NM_024721.2,3947-3965).
ggagcagaaaccgactaaa

SEQ ID NO: 14080 - DNA, 19 bp, Homo sapiens
  siRNA target sequence for ZFH4 (NM_024721.2,3950-3968).
gcagaaaccgactaaagaa

SEQ ID NO: 14081 - DNA, 19 bp, Homo sapiens
  siRNA target sequence for ZFH4 (NM_024721.2,4000-4018).
gcagtaaggatgtgaaaat

SEQ ID NO: 14082 - DNA, 19 bp, Homo sapiens
  siRNA target sequence for ZFH4 (NM_024721.2,4078-4096).
ctgaccgtcatgtctacaa

SEQ ID NO: 14083 - DNA, 19 bp, Homo sapiens
  siRNA target sequence for ZFH4 (NM_024721.2,4080-4098).
gaccgtcatgtctacaagt

SEQ ID NO: 14084 - DNA, 19 bp, Homo sapiens
  siRNA target sequence for ZFH4 (NM_024721.2,4082-4100).
ccgtcatgtctacaagtat

SEQ ID NO: 14085 - DNA, 19 bp, Homo sapiens
  siRNA target sequence for ZFH4 (NM_024721.2,4094-4112).
caagtatcgctgtaaccat

SEQ ID NO: 14086 - DNA, 19 bp, Homo sapiens
  siRNA target sequence for ZFH4 (NM_024721.2,4174-4192).
gggctgcgacaatgtgtaa

SEQ ID NO: 14087 - DNA, 19 bp, Homo sapiens
  siRNA target sequence for ZFH4 (NM_024721.2,4212-4230).
cgtacattccaggctttaa

SEQ ID NO: 14088 - DNA, 19 bp, Homo sapiens
  siRNA target sequence for ZFH4 (NM_024721.2,4213-4231).
gtacattccaggctttaaa

SEQ ID NO: 14089 - DNA, 19 bp, Homo sapiens
  siRNA target sequence for ZFH4 (NM_024721.2,4318-4336).
gggcagagagcgaaactat

SEQ ID NO: 14090 - DNA, 19 bp, Homo sapiens
  siRNA target sequence for ZFH4 (NM_024721.2,4320-4338).
gcagagagcgaaactatgt

SEQ ID NO: 14091 - DNA, 19 bp, Homo sapiens
  siRNA target sequence for ZFH4 (NM_024721.2,4410-4428).
cctgtaggaagtgatagta

SEQ ID NO: 14092 - DNA, 19 bp, Homo sapiens
  siRNA target sequence for ZFH4 (NM_024721.2,4459-4477).
caaagcggaccttaccttt

SEQ ID NO: 14093 - DNA, 19 bp, Homo sapiens
  siRNA target sequence for ZFH4 (NM_024721.2,4463-4481).
gcggaccttaccttttaga

SEQ ID NO: 14094 - DNA, 19 bp, Homo sapiens
  siRNA target sequence for ZFH4 (NM_024721.2,4465-4483).
ggaccttaccttttagaaa

SEQ ID NO: 14095 - DNA, 19 bp, Homo sapiens
  siRNA target sequence for ZFH4 (NM_024721.2,4515-4533).
gatccatctcgtccatata

SEQ ID NO: 14096 - DNA, 19 bp, Homo sapiens
  siRNA target sequence for ZFH4 (NM_024721.2,4518-4536).
ccatctcgtccatataaat

SEQ ID NO: 14097 - DNA, 19 bp, Homo sapiens
  siRNA target sequence for ZFH4 (NM_024721.2,4577-4595).
cttggtccactataattca

SEQ ID NO: 14098 - DNA, 19 bp, Homo sapiens
  siRNA target sequence for ZFH4 (NM_024721.2,4583-4601).
ccactataattcagtttct

SEQ ID NO: 14099 - DNA, 19 bp, Homo sapiens
  siRNA target sequence for ZFH4 (NM_024721.2,4602-4620).
cacttgcataagctgaaaa

SEQ ID NO: 14100 - DNA, 19 bp, Homo sapiens
  siRNA target sequence for ZFH4 (NM_024721.2,4718-4736).
ccaaagctcaacattggaa

SEQ ID NO: 14101 - DNA, 19 bp, Homo sapiens
  siRNA target sequence for ZFH4 (NM_024721.2,4719-4737).
caaagctcaacattggaaa

SEQ ID NO: 14102 - DNA, 19 bp, Homo sapiens
  siRNA target sequence for ZFH4 (NM_024721.2,4723-4741).
gctcaacattggaaatcca

SEQ ID NO: 14103 - DNA, 19 bp, Homo sapiens
  siRNA target sequence for ZFH4 (NM_024721.2,4750-4768).
ctgtgctccaccagacaaa

SEQ ID NO: 14104 - DNA, 19 bp, Homo sapiens
  siRNA target sequence for ZFH4 (NM_024721.2,4819-4837).
gcattgcagcaaatgtcaa

SEQ ID NO: 14105 - DNA, 19 bp, Homo sapiens
  siRNA target sequence for ZFH4 (NM_024721.2,4841-4859).
ccctggccaggggatgtta

SEQ ID NO: 14106 - DNA, 19 bp, Homo sapiens
  siRNA target sequence for ZFH4 (NM_024721.2,4843-4861).
ctggccaggggatgttaga

SEQ ID NO: 14107 - DNA, 19 bp, Homo sapiens
  siRNA target sequence for ZFH4 (NM_024721.2,4845-4863).
ggccaggggatgttagatt

SEQ ID NO: 14108 - DNA, 19 bp, Homo sapiens
  siRNA target sequence for ZFH4 (NM_024721.2,4856-4874).
gttagattccatgagttta

SEQ ID NO: 14109 - DNA, 19 bp, Homo sapiens
  siRNA target sequence for ZFH4 (NM_024721.2,4886-4904).
cagcaaagatacccattta

SEQ ID NO: 14110 - DNA, 19 bp, Homo sapiens
  siRNA target sequence for ZFH4 (NM_024721.2,4888-4906).
gcaaagatacccatttaga

SEQ ID NO: 14111 - DNA, 19 bp, Homo sapiens
  siRNA target sequence for ZFH4 (NM_024721.2,4997-5015).
gcaactacagcacgaatta

SEQ ID NO: 14112 - DNA, 19 bp, Homo sapiens
  siRNA target sequence for ZFH4 (NM_024721.2,5281-5299).
ctcaactccagatactaca

SEQ ID NO: 14113 - DNA, 19 bp, Homo sapiens
  siRNA target sequence for ZFH4 (NM_024721.2,5391-5409).
cagcaggcaagcaaattat

SEQ ID NO: 14114 - DNA, 19 bp, Homo sapiens
  siRNA target sequence for ZFH4 (NM_024721.2,5394-5412).
caggcaagcaaattattga

SEQ ID NO: 14115 - DNA, 19 bp, Homo sapiens
  siRNA target sequence for ZFH4 (NM_024721.2,5437-5455).
gtgcagactgccaaatcat

SEQ ID NO: 14116 - DNA, 19 bp, Homo sapiens
  siRNA target sequence for ZFH4 (NM_024721.2,5456-5474).
gaaggatgtgccatcttat

SEQ ID NO: 14117 - DNA, 19 bp, Homo sapiens
  siRNA target sequence for ZFH4 (NM_024721.2,5516-5534).
gcaggaatttataagtgaa

SEQ ID NO: 14118 - DNA, 19 bp, Homo sapiens
  siRNA target sequence for ZFH4 (NM_024721.2,5669-5687).
ggtcattcagtataacgaa

SEQ ID NO: 14119 - DNA, 19 bp, Homo sapiens
  siRNA target sequence for ZFH4 (NM_024721.2,5670-5688).
gtcattcagtataacgaaa

SEQ ID NO: 14120 - DNA, 19 bp, Homo sapiens
  siRNA target sequence for ZFH4 (NM_024721.2,5728-5746).
gcgaaaacactgacaaact

SEQ ID NO: 14121 - DNA, 19 bp, Homo sapiens
  siRNA target sequence for ZFH4 (NM_024721.2,5729-5747).
cgaaaacactgacaaacta

SEQ ID NO: 14122 - DNA, 19 bp, Homo sapiens
  siRNA target sequence for ZFH4 (NM_024721.2,5752-5770).
gtggaacatgtggtaaatt

SEQ ID NO: 14123 - DNA, 19 bp, Homo sapiens
  siRNA target sequence for ZFH4 (NM_024721.2,5808-5826).
catgtacatgggcaatttt

SEQ ID NO: 14124 - DNA, 19 bp, Homo sapiens
  siRNA target sequence for ZFH4 (NM_024721.2,5830-5848).
catatgcagcgctagaaaa

SEQ ID NO: 14125 - DNA, 19 bp, Homo sapiens
  siRNA target sequence for ZFH4 (NM_024721.2,5870-5888).
ggcctatgacaagctttat

SEQ ID NO: 14126 - DNA, 19 bp, Homo sapiens
  siRNA target sequence for ZFH4 (NM_024721.2,5879-5897).
caagctttatccaatttct

SEQ ID NO: 14127 - DNA, 19 bp, Homo sapiens
  siRNA target sequence for ZFH4 (NM_024721.2,5968-5986).
cttctatgggtcctgtaaa

SEQ ID NO: 14128 - DNA, 19 bp, Homo sapiens
  siRNA target sequence for ZFH4 (NM_024721.2,5971-5989).
ctatgggtcctgtaaagat

SEQ ID NO: 14129 - DNA, 19 bp, Homo sapiens
  siRNA target sequence for ZFH4 (NM_024721.2,6134-6152).
gccgctctttccttccatt

SEQ ID NO: 14130 - DNA, 19 bp, Homo sapiens
  siRNA target sequence for ZFH4 (NM_024721.2,6261-6279).
ggattagatcccaacttct

SEQ ID NO: 14131 - DNA, 19 bp, Homo sapiens
  siRNA target sequence for ZFH4 (NM_024721.2,6262-6280).
gattagatcccaacttctt

SEQ ID NO: 14132 - DNA, 19 bp, Homo sapiens
  siRNA target sequence for ZFH4 (NM_024721.2,6300-6318).
cgcccacggacaagaatta

SEQ ID NO: 14133 - DNA, 19 bp, Homo sapiens
  siRNA target sequence for ZFH4 (NM_024721.2,6302-6320).
cccacggacaagaattaca

SEQ ID NO: 14134 - DNA, 19 bp, Homo sapiens
  siRNA target sequence for ZFH4 (NM_024721.2,6343-6361).
gggcttattttgacattaa

SEQ ID NO: 14135 - DNA, 19 bp, Homo sapiens
  siRNA target sequence for ZFH4 (NM_024721.2,6344-6362).
ggcttattttgacattaat

SEQ ID NO: 14136 - DNA, 19 bp, Homo sapiens
  siRNA target sequence for ZFH4 (NM_024721.2,6415-6433).
cccaaaaagttatcaaaca

SEQ ID NO: 14137 - DNA, 19 bp, Homo sapiens
  siRNA target sequence for ZFH4 (NM_024721.2,6423-6441).
gttatcaaacactggttta

SEQ ID NO: 14138 - DNA, 19 bp, Homo sapiens
  siRNA target sequence for ZFH4 (NM_024721.2,6500-6518).
ccctcctataacggtttta

SEQ ID NO: 14139 - DNA, 19 bp, Homo sapiens
  siRNA target sequence for ZFH4 (NM_024721.2,6502-6520).
ctcctataacggttttaga

SEQ ID NO: 14140 - DNA, 19 bp, Homo sapiens
  siRNA target sequence for ZFH4 (NM_024721.2,6505-6523).
ctataacggttttagaaga

SEQ ID NO: 14141 - DNA, 19 bp, Homo sapiens
  siRNA target sequence for ZFH4 (NM_024721.2,6542-6560).
gcccacctctttagaacat

SEQ ID NO: 14142 - DNA, 19 bp, Homo sapiens
  siRNA target sequence for ZFH4 (NM_024721.2,6568-6586).
ctgatgcatcattcagtaa

SEQ ID NO: 14143 - DNA, 19 bp, Homo sapiens
  siRNA target sequence for ZFH4 (NM_024721.2,6570-6588).
gatgcatcattcagtaaaa

SEQ ID NO: 14144 - DNA, 19 bp, Homo sapiens
  siRNA target sequence for ZFH4 (NM_024721.2,6581-6599).
cagtaaaaggtcttctaga

SEQ ID NO: 14145 - DNA, 19 bp, Homo sapiens
  siRNA target sequence for ZFH4 (NM_024721.2,6595-6613).
ctagaacgagatttactga

SEQ ID NO: 14146 - DNA, 19 bp, Homo sapiens
  siRNA target sequence for ZFH4 (NM_024721.2,6649-6667).
caaacgcttacccaaaaga

SEQ ID NO: 14147 - DNA, 19 bp, Homo sapiens
  siRNA target sequence for ZFH4 (NM_024721.2,6704-6722).
gcctacccgggttattgtt

SEQ ID NO: 14148 - DNA, 19 bp, Homo sapiens
  siRNA target sequence for ZFH4 (NM_024721.2,6706-6724).
ctacccgggttattgttgt

SEQ ID NO: 14149 - DNA, 19 bp, Homo sapiens
  siRNA target sequence for ZFH4 (NM_024721.2,6712-6730).
gggttattgttgtatggtt

SEQ ID NO: 14150 - DNA, 19 bp, Homo sapiens
  siRNA target sequence for ZFH4 (NM_024721.2,6746-6764).
gaaagcacgaaagagttat

SEQ ID NO: 14151 - DNA, 19 bp, Homo sapiens
  siRNA target sequence for ZFH4 (NM_024721.2,6750-6768).
gcacgaaagagttatgaga

SEQ ID NO: 14152 - DNA, 19 bp, Homo sapiens
  siRNA target sequence for ZFH4 (NM_024721.2,6836-6854).
catgcagtaccagtgtaaa

SEQ ID NO: 14153 - DNA, 19 bp, Homo sapiens
  siRNA target sequence for ZFH4 (NM_024721.2,6840-6858).
cagtaccagtgtaaaaagt

SEQ ID NO: 14154 - DNA, 19 bp, Homo sapiens
  siRNA target sequence for ZFH4 (NM_024721.2,6874-6892).
ccaggatctttgacttgat

SEQ ID NO: 14155 - DNA, 19 bp, Homo sapiens
  siRNA target sequence for ZFH4 (NM_024721.2,7098-7116).
ccagaacctgagaagactt

SEQ ID NO: 14156 - DNA, 19 bp, Homo sapiens
  siRNA target sequence for ZFH4 (NM_024721.2,7109-7127).
gaagacttctccaaaacct

SEQ ID NO: 14157 - DNA, 19 bp, Homo sapiens
  siRNA target sequence for ZFH4 (NM_024721.2,7368-7386).
cctccacagttactacaat

SEQ ID NO: 14158 - DNA, 19 bp, Homo sapiens
  siRNA target sequence for ZFH4 (NM_024721.2,7369-7387).
ctccacagttactacaata

SEQ ID NO: 14159 - DNA, 19 bp, Homo sapiens
  siRNA target sequence for ZFH4 (NM_024721.2,7508-7526).
ggacatgccctacatgata

SEQ ID NO: 14160 - DNA, 19 bp, Homo sapiens
  siRNA target sequence for ZFH4 (NM_024721.2,7509-7527).
gacatgccctacatgatat

SEQ ID NO: 14161 - DNA, 19 bp, Homo sapiens
  siRNA target sequence for ZFH4 (NM_024721.2,7523-7541).
gatatttgaccccaacaat

SEQ ID NO: 14162 - DNA, 19 bp, Homo sapiens
  siRNA target sequence for ZFH4 (NM_024721.2,7567-7585).
gcagttccctcactcaaat

SEQ ID NO: 14163 - DNA, 19 bp, Homo sapiens
  siRNA target sequence for ZFH4 (NM_024721.2,7648-7666).
ggaaactagacgataaaga

SEQ ID NO: 14164 - DNA, 19 bp, Homo sapiens
  siRNA target sequence for ZFH4 (NM_024721.2,7653-7671).
ctagacgataaagaagata

SEQ ID NO: 14165 - DNA, 19 bp, Homo sapiens
  siRNA target sequence for ZFH4 (NM_024721.2,7658-7676).
cgataaagaagataataat

SEQ ID NO: 14166 - DNA, 19 bp, Homo sapiens
  siRNA target sequence for ZFH4 (NM_024721.2,7719-7737).
cgagataaacgcttgagaa

SEQ ID NO: 14167 - DNA, 19 bp, Homo sapiens
  siRNA target sequence for ZFH4 (NM_024721.2,7747-7765).
ccccggaacagctggaaat

SEQ ID NO: 14168 - DNA, 19 bp, Homo sapiens
  siRNA target sequence for ZFH4 (NM_024721.2,7750-7768).
cggaacagctggaaatact

SEQ ID NO: 14169 - DNA, 19 bp, Homo sapiens
  siRNA target sequence for ZFH4 (NM_024721.2,7752-7770).
gaacagctggaaatactct

SEQ ID NO: 14170 - DNA, 19 bp, Homo sapiens
  siRNA target sequence for ZFH4 (NM_024721.2,7757-7775).
gctggaaatactctatgaa

SEQ ID NO: 14171 - DNA, 19 bp, Homo sapiens
  siRNA target sequence for ZFH4 (NM_024721.2,7827-7845).
cgcgaagtcgggctgaaaa

SEQ ID NO: 14172 - DNA, 19 bp, Homo sapiens
  siRNA target sequence for ZFH4 (NM_024721.2,7828-7846).
gcgaagtcgggctgaaaaa

SEQ ID NO: 14173 - DNA, 19 bp, Homo sapiens
  siRNA target sequence for ZFH4 (NM_024721.2,7830-7848).
gaagtcgggctgaaaaaaa

SEQ ID NO: 14174 - DNA, 19 bp, Homo sapiens
  siRNA target sequence for ZFH4 (NM_024721.2,7949-7967).
ccgagccctgtttaaagca

SEQ ID NO: 14175 - DNA, 19 bp, Homo sapiens
  siRNA target sequence for ZFH4 (NM_024721.2,7950-7968).
cgagccctgtttaaagcaa

SEQ ID NO: 14176 - DNA, 19 bp, Homo sapiens
  siRNA target sequence for ZFH4 (NM_024721.2,7965-7983).
gcaaagtcggccttagaaa

SEQ ID NO: 14177 - DNA, 19 bp, Homo sapiens
  siRNA target sequence for ZFH4 (NM_024721.2,8040-8058).
ccaagccctttaatatcca

SEQ ID NO: 14178 - DNA, 19 bp, Homo sapiens
  siRNA target sequence for ZFH4 (NM_024721.2,8077-8095).
gcccacagaaatacatcta

SEQ ID NO: 14179 - DNA, 19 bp, Homo sapiens
  siRNA target sequence for ZFH4 (NM_024721.2,8144-8162).
gaatgaattggcttctaca

SEQ ID NO: 14180 - DNA, 19 bp, Homo sapiens
  siRNA target sequence for ZFH4 (NM_024721.2,8195-8213).
gtcaccgaagaatctttta

SEQ ID NO: 14181 - DNA, 19 bp, Homo sapiens
  siRNA target sequence for ZFH4 (NM_024721.2,8216-8234).
cccttcttcttttaaagca

SEQ ID NO: 14182 - DNA, 19 bp, Homo sapiens
  siRNA target sequence for ZFH4 (NM_024721.2,8277-8295).
gaggctgggtatgatcaaa

SEQ ID NO: 14183 - DNA, 19 bp, Homo sapiens
  siRNA target sequence for ZFH4 (NM_024721.2,8280-8298).
gctgggtatgatcaaaata

SEQ ID NO: 14184 - DNA, 19 bp, Homo sapiens
  siRNA target sequence for ZFH4 (NM_024721.2,8281-8299).
ctgggtatgatcaaaataa

SEQ ID NO: 14185 - DNA, 19 bp, Homo sapiens
  siRNA target sequence for ZFH4 (NM_024721.2,8310-8328).
gatgagacttcatcgatta

SEQ ID NO: 14186 - DNA, 19 bp, Homo sapiens
  siRNA target sequence for ZFH4 (NM_024721.2,8313-8331).
gagacttcatcgattaata

SEQ ID NO: 14187 - DNA, 19 bp, Homo sapiens
  siRNA target sequence for ZFH4 (NM_024721.2,8324-8342).
gattaatacggcaatcagt

SEQ ID NO: 14188 - DNA, 19 bp, Homo sapiens
  siRNA target sequence for ZFH4 (NM_024721.2,8354-8372).
cggagacgagggaaacact

SEQ ID NO: 14189 - DNA, 19 bp, Homo sapiens
  siRNA target sequence for ZFH4 (NM_024721.2,8392-8410).
gaagttccggagatgtgaa

SEQ ID NO: 14190 - DNA, 19 bp, Homo sapiens
  siRNA target sequence for ZFH4 (NM_024721.2,8479-8497).
cggaggtctgcgatgacaa

SEQ ID NO: 14191 - DNA, 19 bp, Homo sapiens
  siRNA target sequence for ZFH4 (NM_024721.2,8480-8498).
ggaggtctgcgatgacaaa

SEQ ID NO: 14192 - DNA, 19 bp, Homo sapiens
  siRNA target sequence for ZFH4 (NM_024721.2,8481-8499).
gaggtctgcgatgacaaat

SEQ ID NO: 14193 - DNA, 19 bp, Homo sapiens
  siRNA target sequence for ZFH4 (NM_024721.2,8488-8506).
gcgatgacaaatttctctt

SEQ ID NO: 14194 - DNA, 19 bp, Homo sapiens
  siRNA target sequence for ZFH4 (NM_024721.2,8489-8507).
cgatgacaaatttctcttt

SEQ ID NO: 14195 - DNA, 19 bp, Homo sapiens
  siRNA target sequence for ZFH4 (NM_024721.2,8521-8539).
catccatccatttcaatga

SEQ ID NO: 14196 - DNA, 19 bp, Homo sapiens
  siRNA target sequence for ZFH4 (NM_024721.2,8548-8566).
gcgaccacgaccaaagctt

SEQ ID NO: 14197 - DNA, 19 bp, Homo sapiens
  siRNA target sequence for ZFH4 (NM_024721.2,8549-8567).
cgaccacgaccaaagcttt

SEQ ID NO: 14198 - DNA, 19 bp, Homo sapiens
  siRNA target sequence for ZFH4 (NM_024721.2,8550-8568).
gaccacgaccaaagctttt

SEQ ID NO: 14199 - DNA, 19 bp, Homo sapiens
  siRNA target sequence for ZFH4 (NM_024721.2,8553-8571).
cacgaccaaagcttttaca

SEQ ID NO: 14200 - DNA, 19 bp, Homo sapiens
  siRNA target sequence for ZFH4 (NM_024721.2,8556-8574).
gaccaaagcttttacatca

SEQ ID NO: 14201 - DNA, 19 bp, Homo sapiens
  siRNA target sequence for ZFH4 (NM_024721.2,8650-8668).
gatccagcaatccctttaa

SEQ ID NO: 14202 - DNA, 19 bp, Homo sapiens
  siRNA target sequence for ZFH4 (NM_024721.2,8690-8708).
gggtcacaagcgttttcga

SEQ ID NO: 14203 - DNA, 19 bp, Homo sapiens
  siRNA target sequence for ZFH4 (NM_024721.2,8691-8709).
ggtcacaagcgttttcgaa

SEQ ID NO: 14204 - DNA, 19 bp, Homo sapiens
  siRNA target sequence for ZFH4 (NM_024721.2,8710-8728).
cgcaaatgagcaatcttca

SEQ ID NO: 14205 - DNA, 19 bp, Homo sapiens
  siRNA target sequence for ZFH4 (NM_024721.2,8735-8753).
ggttctcaaggcttgcttt

SEQ ID NO: 14206 - DNA, 19 bp, Homo sapiens
  siRNA target sequence for ZFH4 (NM_024721.2,8832-8850).
gtgtggttccaaaatgcaa

SEQ ID NO: 14207 - DNA, 19 bp, Homo sapiens
  siRNA target sequence for ZFH4 (NM_024721.2,8940-8958).
ctctgcggggtgaagtact

SEQ ID NO: 14208 - DNA, 19 bp, Homo sapiens
  siRNA target sequence for ZFH4 (NM_024721.2,9035-9053).
gctcgatcgggagaaagat

SEQ ID NO: 14209 - DNA, 19 bp, Homo sapiens
  siRNA target sequence for ZFH4 (NM_024721.2,9036-9054).
ctcgatcgggagaaagatt

SEQ ID NO: 14210 - DNA, 19 bp, Homo sapiens
  siRNA target sequence for ZFH4 (NM_024721.2,9039-9057).
gatcgggagaaagattact

SEQ ID NO: 14211 - DNA, 19 bp, Homo sapiens
  siRNA target sequence for ZFH4 (NM_024721.2,9092-9110).
gcaagaacttgatcgtata

SEQ ID NO: 14212 - DNA, 19 bp, Homo sapiens
  siRNA target sequence for ZFH4 (NM_024721.2,9093-9111).
caagaacttgatcgtataa

SEQ ID NO: 14213 - DNA, 19 bp, Homo sapiens
  siRNA target sequence for ZFH4 (NM_024721.2,9257-9275).
ctccttgccgggatttcca

SEQ ID NO: 14214 - DNA, 19 bp, Homo sapiens
  siRNA target sequence for ZFH4 (NM_024721.2,9264-9282).
ccgggatttccacaaaatt

SEQ ID NO: 14215 - DNA, 19 bp, Homo sapiens
  siRNA target sequence for ZFH4 (NM_024721.2,9267-9285).
ggatttccacaaaattcaa

SEQ ID NO: 14216 - DNA, 19 bp, Homo sapiens
  siRNA target sequence for ZFH4 (NM_024721.2,9302-9320).
gcttgggtttcctacttca

SEQ ID NO: 14217 - DNA, 19 bp, Homo sapiens
  siRNA target sequence for ZFH4 (NM_024721.2,9587-9605).
caaagttgtaggtgaaaca

SEQ ID NO: 14218 - DNA, 19 bp, Homo sapiens
  siRNA target sequence for ZFH4 (NM_024721.2,9604-9622).
cacatgtcgatcctattca

SEQ ID NO: 14219 - DNA, 19 bp, Homo sapiens
  siRNA target sequence for ZFH4 (NM_024721.2,9606-9624).
catgtcgatcctattcagt

SEQ ID NO: 14220 - DNA, 19 bp, Homo sapiens
  siRNA target sequence for ZFH4 (NM_024721.2,9652-9670).
gtgacccagcttcctttat

SEQ ID NO: 14221 - DNA, 19 bp, Homo sapiens
  siRNA target sequence for ZFH4 (NM_024721.2,9676-9694).
gacagttcttgccatactt

SEQ ID NO: 14222 - DNA, 19 bp, Homo sapiens
  siRNA target sequence for ZFH4 (NM_024721.2,9739-9757).
cagtgcaggggggatactt

SEQ ID NO: 14223 - DNA, 19 bp, Homo sapiens
  siRNA target sequence for ZFH4 (NM_024721.2,9974-9992).
ctccaacgatgcttcagaa

SEQ ID NO: 14224 - DNA, 19 bp, Homo sapiens
  siRNA target sequence for ZFH4 (NM_024721.2,10040-10058).
ccagttagaatccaaaagt

SEQ ID NO: 14225 - DNA, 19 bp, Homo sapiens
  siRNA target sequence for ZFH4 (NM_024721.2,10060-10078).
cagacttttcagacactta

SEQ ID NO: 14226 - DNA, 19 bp, Homo sapiens
  siRNA target sequence for ZFH4 (NM_024721.2,10064-10082).
cttttcagacacttacgtt

SEQ ID NO: 14227 - DNA, 19 bp, Homo sapiens
  siRNA target sequence for ZFH4 (NM_024721.2,10086-10104).
ccattcgtcaagtatgagt

SEQ ID NO: 14228 - DNA, 19 bp, Homo sapiens
  siRNA target sequence for ZFH4 (NM_024721.2,10091-10109).
cgtcaagtatgagtttata

SEQ ID NO: 14229 - DNA, 19 bp, Homo sapiens
  siRNA target sequence for ZFH4 (NM_024721.2,10092-10110).
gtcaagtatgagtttatat

SEQ ID NO: 14230 - DNA, 19 bp, Homo sapiens
  siRNA target sequence for ZFH4 (NM_024721.2,10114-10132).
gaaagtgccagatgatgtt

SEQ ID NO: 14231 - DNA, 19 bp, Homo sapiens
  siRNA target sequence for ZFH4 (NM_024721.2,10118-10136).
gtgccagatgatgtttact

SEQ ID NO: 14232 - DNA, 19 bp, Homo sapiens
  siRNA target sequence for ZFH4 (NM_024721.2,10145-10163).
cgccgcagtaaatcatcaa

SEQ ID NO: 14233 - DNA, 19 bp, Homo sapiens
  siRNA target sequence for ZFH4 (NM_024721.2,10146-10164).
gccgcagtaaatcatcaaa

SEQ ID NO: 14234 - DNA, 19 bp, Homo sapiens
  siRNA target sequence for ZFH4 (NM_024721.2,10147-10165).
ccgcagtaaatcatcaaaa

SEQ ID NO: 14235 - DNA, 19 bp, Homo sapiens
  siRNA target sequence for ZFH4 (NM_024721.2,10149-10167).
gcagtaaatcatcaaaagt

SEQ ID NO: 14236 - DNA, 19 bp, Homo sapiens
  siRNA target sequence for ZFH4 (NM_024721.2,10218-10236).
cgtgtcccagtcagcaaat

SEQ ID NO: 14237 - DNA, 19 bp, Homo sapiens
  siRNA target sequence for ZFH4 (NM_024721.2,10219-10237).
gtgtcccagtcagcaaata

SEQ ID NO: 14238 - DNA, 19 bp, Homo sapiens
  siRNA target sequence for ZFH4 (NM_024721.2,10250-10268).
ctgtgatgtggctatcagt

SEQ ID NO: 14239 - DNA, 19 bp, Homo sapiens
  siRNA target sequence for ZFH4 (NM_024721.2,10344-10362).
gccaaagagcatgttagat

SEQ ID NO: 14240 - DNA, 19 bp, Homo sapiens
  siRNA target sequence for ZFH4 (NM_024721.2,10469-10487).
gtcctggcctaatatcctt

SEQ ID NO: 14241 - DNA, 19 bp, Homo sapiens
  siRNA target sequence for ZFH4 (NM_024721.2,10475-10493).
gcctaatatccttttccaa

SEQ ID NO: 14242 - DNA, 19 bp, Homo sapiens
  siRNA target sequence for ZFH4 (NM_024721.2,10595-10613).
ctcactacccacagaaagt

SEQ ID NO: 14243 - DNA, 19 bp, Homo sapiens
  siRNA target sequence for ZFH4 (NM_024721.2,10698-10716).
ggcctagatggtaatttca

SEQ ID NO: 14244 - DNA, 19 bp, Homo sapiens
  siRNA target sequence for ZFH4 (NM_024721.2,10720-10738).
gcatccgaatggatatgtt

SEQ ID NO: 14245 - DNA, 19 bp, Homo sapiens
  siRNA target sequence for ZFHX1B (NM_014795.2,513-531).
gtgcaagaggcgcaaacaa

SEQ ID NO: 14246 - DNA, 19 bp, Homo sapiens
  siRNA target sequence for ZFHX1B (NM_014795.2,546-564).
gaaaaacgtggtgaactat

SEQ ID NO: 14247 - DNA, 19 bp, Homo sapiens
  siRNA target sequence for ZFHX1B (NM_014795.2,552-570).
cgtggtgaactatgacaat

SEQ ID NO: 14248 - DNA, 19 bp, Homo sapiens
  siRNA target sequence for ZFHX1B (NM_014795.2,555-573).
ggtgaactatgacaatgta

SEQ ID NO: 14249 - DNA, 19 bp, Homo sapiens
  siRNA target sequence for ZFHX1B (NM_014795.2,771-789).
gcacaacaacgagattcta

SEQ ID NO: 14250 - DNA, 19 bp, Homo sapiens
  siRNA target sequence for ZFHX1B (NM_014795.2,854-872).
cgatccagaccgcaattaa

SEQ ID NO: 14251 - DNA, 19 bp, Homo sapiens
  siRNA target sequence for ZFHX1B (NM_014795.2,892-910).
gcaaattgcacatcagatt

SEQ ID NO: 14252 - DNA, 19 bp, Homo sapiens
  siRNA target sequence for ZFHX1B (NM_014795.2,986-1004).
gcagtgacacagccattat

SEQ ID NO: 14253 - DNA, 19 bp, Homo sapiens
  siRNA target sequence for ZFHX1B (NM_014795.2,989-1007).
gtgacacagccattattta

SEQ ID NO: 14254 - DNA, 19 bp, Homo sapiens
  siRNA target sequence for ZFHX1B (NM_014795.2,1135-1153).
ggctacaagcgcttgacat

SEQ ID NO: 14255 - DNA, 19 bp, Homo sapiens
  siRNA target sequence for ZFHX1B (NM_014795.2,1176-1194).
ccgccacgagaagaatgaa

SEQ ID NO: 14256 - DNA, 19 bp, Homo sapiens
  siRNA target sequence for ZFHX1B (NM_014795.2,1282-1300).
gatcagcaccaaatgctaa

SEQ ID NO: 14257 - DNA, 19 bp, Homo sapiens
  siRNA target sequence for ZFHX1B (NM_014795.2,1309-1327).
gcaggtaatcgcaagttca

SEQ ID NO: 14258 - DNA, 19 bp, Homo sapiens
  siRNA target sequence for ZFHX1B (NM_014795.2,1312-1330).
ggtaatcgcaagttcaaat

SEQ ID NO: 14259 - DNA, 19 bp, Homo sapiens
  siRNA target sequence for ZFHX1B (NM_014795.2,1498-1516).
gtaaatggccgaatgagaa

SEQ ID NO: 14260 - DNA, 19 bp, Homo sapiens
  siRNA target sequence for ZFHX1B (NM_014795.2,1504-1522).
ggccgaatgagaaacaata

SEQ ID NO: 14261 - DNA, 19 bp, Homo sapiens
  siRNA target sequence for ZFHX1B (NM_014795.2,1505-1523).
gccgaatgagaaacaatat

SEQ ID NO: 14262 - DNA, 19 bp, Homo sapiens
  siRNA target sequence for ZFHX1B (NM_014795.2,1507-1525).
cgaatgagaaacaatatca

SEQ ID NO: 14263 - DNA, 19 bp, Homo sapiens
  siRNA target sequence for ZFHX1B (NM_014795.2,1532-1550).
gttcttcccctaattctgt

SEQ ID NO: 14264 - DNA, 19 bp, Homo sapiens
  siRNA target sequence for ZFHX1B (NM_014795.2,1602-1620).
gaatggaaaaccacttagt

SEQ ID NO: 14265 - DNA, 19 bp, Homo sapiens
  siRNA target sequence for ZFHX1B (NM_014795.2,1632-1650).
gacaggcttacttaaaatt

SEQ ID NO: 14266 - DNA, 19 bp, Homo sapiens
  siRNA target sequence for ZFHX1B (NM_014795.2,1655-1673).
cagaaccactagacttcaa

SEQ ID NO: 14267 - DNA, 19 bp, Homo sapiens
  siRNA target sequence for ZFHX1B (NM_014795.2,1660-1678).
ccactagacttcaatgact

SEQ ID NO: 14268 - DNA, 19 bp, Homo sapiens
  siRNA target sequence for ZFHX1B (NM_014795.2,1671-1689).
caatgactataaagttctt

SEQ ID NO: 14269 - DNA, 19 bp, Homo sapiens
  siRNA target sequence for ZFHX1B (NM_014795.2,1692-1710).
ggctacacacgggtttagt

SEQ ID NO: 14270 - DNA, 19 bp, Homo sapiens
  siRNA target sequence for ZFHX1B (NM_014795.2,1709-1727).
gtggcactagtccctttat

SEQ ID NO: 14271 - DNA, 19 bp, Homo sapiens
  siRNA target sequence for ZFHX1B (NM_014795.2,1711-1729).
ggcactagtccctttatga

SEQ ID NO: 14272 - DNA, 19 bp, Homo sapiens
  siRNA target sequence for ZFHX1B (NM_014795.2,1712-1730).
gcactagtccctttatgaa

SEQ ID NO: 14273 - DNA, 19 bp, Homo sapiens
  siRNA target sequence for ZFHX1B (NM_014795.2,1825-1843).
gggtttcccaccatgaata

SEQ ID NO: 14274 - DNA, 19 bp, Homo sapiens
  siRNA target sequence for ZFHX1B (NM_014795.2,1827-1845).
gtttcccaccatgaatagt

SEQ ID NO: 14275 - DNA, 19 bp, Homo sapiens
  siRNA target sequence for ZFHX1B (NM_014795.2,1832-1850).
ccaccatgaatagtaattt

SEQ ID NO: 14276 - DNA, 19 bp, Homo sapiens
  siRNA target sequence for ZFHX1B (NM_014795.2,1984-2002).
ggagttacttctcctaata

SEQ ID NO: 14277 - DNA, 19 bp, Homo sapiens
  siRNA target sequence for ZFHX1B (NM_014795.2,2017-2035).
cttccggtagtgagtcata

SEQ ID NO: 14278 - DNA, 19 bp, Homo sapiens
  siRNA target sequence for ZFHX1B (NM_014795.2,2032-2050).
cataatggtgccactaaaa

SEQ ID NO: 14279 - DNA, 19 bp, Homo sapiens
  siRNA target sequence for ZFHX1B (NM_014795.2,2038-2056).
ggtgccactaaaagtatta

SEQ ID NO: 14280 - DNA, 19 bp, Homo sapiens
  siRNA target sequence for ZFHX1B (NM_014795.2,2042-2060).
ccactaaaagtattattga

SEQ ID NO: 14281 - DNA, 19 bp, Homo sapiens
  siRNA target sequence for ZFHX1B (NM_014795.2,2051-2069).
gtattattgactatacgtt

SEQ ID NO: 14282 - DNA, 19 bp, Homo sapiens
  siRNA target sequence for ZFHX1B (NM_014795.2,2077-2095).
gtcaatgaagccaaagctt

SEQ ID NO: 14283 - DNA, 19 bp, Homo sapiens
  siRNA target sequence for ZFHX1B (NM_014795.2,2149-2167).
gagaagctacgtactttaa

SEQ ID NO: 14284 - DNA, 19 bp, Homo sapiens
  siRNA target sequence for ZFHX1B (NM_014795.2,2151-2169).
gaagctacgtactttaata

SEQ ID NO: 14285 - DNA, 19 bp, Homo sapiens
  siRNA target sequence for ZFHX1B (NM_014795.2,2154-2172).
gctacgtactttaatagat

SEQ ID NO: 14286 - DNA, 19 bp, Homo sapiens
  siRNA target sequence for ZFHX1B (NM_014795.2,2155-2173).
ctacgtactttaatagatt

SEQ ID NO: 14287 - DNA, 19 bp, Homo sapiens
  siRNA target sequence for ZFHX1B (NM_014795.2,2193-2211).
gattgagaaccacaacata

SEQ ID NO: 14288 - DNA, 19 bp, Homo sapiens
  siRNA target sequence for ZFHX1B (NM_014795.2,2225-2243).
catgccagttctgtaaaga

SEQ ID NO: 14289 - DNA, 19 bp, Homo sapiens
  siRNA target sequence for ZFHX1B (NM_014795.2,2278-2296).
gaacgttacctttgtaaga

SEQ ID NO: 14290 - DNA, 19 bp, Homo sapiens
  siRNA target sequence for ZFHX1B (NM_014795.2,2322-2340).
gcagcctcatgaaaacata

SEQ ID NO: 14291 - DNA, 19 bp, Homo sapiens
  siRNA target sequence for ZFHX1B (NM_014795.2,2345-2363).
ccaacaaagccggagtttt

SEQ ID NO: 14292 - DNA, 19 bp, Homo sapiens
  siRNA target sequence for ZFHX1B (NM_014795.2,2354-2372).
ccggagtttttgttgataa

SEQ ID NO: 14293 - DNA, 19 bp, Homo sapiens
  siRNA target sequence for ZFHX1B (NM_014795.2,2355-2373).
cggagtttttgttgataat

SEQ ID NO: 14294 - DNA, 19 bp, Homo sapiens
  siRNA target sequence for ZFHX1B (NM_014795.2,2357-2375).
gagtttttgttgataataa

SEQ ID NO: 14295 - DNA, 19 bp, Homo sapiens
  siRNA target sequence for ZFHX1B (NM_014795.2,2455-2473).
ctcaaagcatactatgcta

SEQ ID NO: 14296 - DNA, 19 bp, Homo sapiens
  siRNA target sequence for ZFHX1B (NM_014795.2,2461-2479).
gcatactatgctatgaaca

SEQ ID NO: 14297 - DNA, 19 bp, Homo sapiens
  siRNA target sequence for ZFHX1B (NM_014795.2,2493-2511).
cgatgaactgctgaaaatt

SEQ ID NO: 14298 - DNA, 19 bp, Homo sapiens
  siRNA target sequence for ZFHX1B (NM_014795.2,2523-2541).
gggccttcctcaggaattt

SEQ ID NO: 14299 - DNA, 19 bp, Homo sapiens
  siRNA target sequence for ZFHX1B (NM_014795.2,2620-2638).
ccgttagctcccaacagta

SEQ ID NO: 14300 - DNA, 19 bp, Homo sapiens
  siRNA target sequence for ZFHX1B (NM_014795.2,2621-2639).
cgttagctcccaacagtaa

SEQ ID NO: 14301 - DNA, 19 bp, Homo sapiens
  siRNA target sequence for ZFHX1B (NM_014795.2,2634-2652).
cagtaaccctcccacaaaa

SEQ ID NO: 14302 - DNA, 19 bp, Homo sapiens
  siRNA target sequence for ZFHX1B (NM_014795.2,2636-2654).
gtaaccctcccacaaaaga

SEQ ID NO: 14303 - DNA, 19 bp, Homo sapiens
  siRNA target sequence for ZFHX1B (NM_014795.2,2669-2687).
ggtctcctgtaaaacctat

SEQ ID NO: 14304 - DNA, 19 bp, Homo sapiens
  siRNA target sequence for ZFHX1B (NM_014795.2,2694-2712).
cataacatcaccatctata

SEQ ID NO: 14305 - DNA, 19 bp, Homo sapiens
  siRNA target sequence for ZFHX1B (NM_014795.2,2716-2734).
gaactccacaacagtgtta

SEQ ID NO: 14306 - DNA, 19 bp, Homo sapiens
  siRNA target sequence for ZFHX1B (NM_014795.2,2724-2742).
caacagtgttacgaattgt

SEQ ID NO: 14307 - DNA, 19 bp, Homo sapiens
  siRNA target sequence for ZFHX1B (NM_014795.2,2727-2745).
cagtgttacgaattgtgat

SEQ ID NO: 14308 - DNA, 19 bp, Homo sapiens
  siRNA target sequence for ZFHX1B (NM_014795.2,2746-2764).
cctcctctcaggctaacaa

SEQ ID NO: 14309 - DNA, 19 bp, Homo sapiens
  siRNA target sequence for ZFHX1B (NM_014795.2,2747-2765).
ctcctctcaggctaacaaa

SEQ ID NO: 14310 - DNA, 19 bp, Homo sapiens
  siRNA target sequence for ZFHX1B (NM_014795.2,2752-2770).
ctcaggctaacaaaacctt

SEQ ID NO: 14311 - DNA, 19 bp, Homo sapiens
  siRNA target sequence for ZFHX1B (NM_014795.2,2805-2823).
ggaccactccaggagtaat

SEQ ID NO: 14312 - DNA, 19 bp, Homo sapiens
  siRNA target sequence for ZFHX1B (NM_014795.2,2825-2843).
ctccttctcccttaaatct

SEQ ID NO: 14313 - DNA, 19 bp, Homo sapiens
  siRNA target sequence for ZFHX1B (NM_014795.2,2868-2886).
ccacagtagttcatacact

SEQ ID NO: 14314 - DNA, 19 bp, Homo sapiens
  siRNA target sequence for ZFHX1B (NM_014795.2,2920-2938).
gagcctttagacttgtcat

SEQ ID NO: 14315 - DNA, 19 bp, Homo sapiens
  siRNA target sequence for ZFHX1B (NM_014795.2,2922-2940).
gcctttagacttgtcatta

SEQ ID NO: 14316 - DNA, 19 bp, Homo sapiens
  siRNA target sequence for ZFHX1B (NM_014795.2,2996-3014).
ctagtagcatcagtttaga

SEQ ID NO: 14317 - DNA, 19 bp, Homo sapiens
  siRNA target sequence for ZFHX1B (NM_014795.2,3002-3020).
gcatcagtttagatcataa

SEQ ID NO: 14318 - DNA, 19 bp, Homo sapiens
  siRNA target sequence for ZFHX1B (NM_014795.2,3006-3024).
cagtttagatcataacagt

SEQ ID NO: 14319 - DNA, 19 bp, Homo sapiens
  siRNA target sequence for ZFHX1B (NM_014795.2,3142-3160).
ccatttagtgccaaacctt

SEQ ID NO: 14320 - DNA, 19 bp, Homo sapiens
  siRNA target sequence for ZFHX1B (NM_014795.2,3143-3161).
catttagtgccaaaccttt

SEQ ID NO: 14321 - DNA, 19 bp, Homo sapiens
  siRNA target sequence for ZFHX1B (NM_014795.2,3345-3363).
ccagcggaaacaaggattt

SEQ ID NO: 14322 - DNA, 19 bp, Homo sapiens
  siRNA target sequence for ZFHX1B (NM_014795.2,3382-3400).
ggagcacaagactacatgt

SEQ ID NO: 14323 - DNA, 19 bp, Homo sapiens
  siRNA target sequence for ZFHX1B (NM_014795.2,3396-3414).
catgtcaggcctagatgat

SEQ ID NO: 14324 - DNA, 19 bp, Homo sapiens
  siRNA target sequence for ZFHX1B (NM_014795.2,3440-3458).
ctcgcaaaaagatcaagaa

SEQ ID NO: 14325 - DNA, 19 bp, Homo sapiens
  siRNA target sequence for ZFHX1B (NM_014795.2,3471-3489).
catgtatgcatgtgactta

SEQ ID NO: 14326 - DNA, 19 bp, Homo sapiens
  siRNA target sequence for ZFHX1B (NM_014795.2,3484-3502).
gacttatgtgacaagacat

SEQ ID NO: 14327 - DNA, 19 bp, Homo sapiens
  siRNA target sequence for ZFHX1B (NM_014795.2,3515-3533).
gttcccttctgcgacataa

SEQ ID NO: 14328 - DNA, 19 bp, Homo sapiens
  siRNA target sequence for ZFHX1B (NM_014795.2,3518-3536).
cccttctgcgacataaata

SEQ ID NO: 14329 - DNA, 19 bp, Homo sapiens
  siRNA target sequence for ZFHX1B (NM_014795.2,3556-3574).
ccacatcagtgtcagattt

SEQ ID NO: 14330 - DNA, 19 bp, Homo sapiens
  siRNA target sequence for ZFHX1B (NM_014795.2,3559-3577).
catcagtgtcagatttgta

SEQ ID NO: 14331 - DNA, 19 bp, Homo sapiens
  siRNA target sequence for ZFHX1B (NM_014795.2,3811-3829).
gcttacttgcagagcatta

SEQ ID NO: 14332 - DNA, 19 bp, Homo sapiens
  siRNA target sequence for ZFHX1B (NM_014795.2,3851-3869).
cggaggagagggagagtat

SEQ ID NO: 14333 - DNA, 19 bp, Homo sapiens
  siRNA target sequence for ZFHX1B (NM_014795.2,4008-4026).
cgaaacgatacgagatgaa

SEQ ID NO: 14334 - DNA, 19 bp, Homo sapiens
  siRNA target sequence for ZFHX1B (NM_014795.2,4042-4060).
cactccatggacgatagtt

SEQ ID NO: 14335 - DNA, 19 bp, Homo sapiens
  siRNA target sequence for ZFHX1B (NM_014795.2,4058-4076).
gttcggaggatgggaaaat

SEQ ID NO: 14336 - DNA, 19 bp, Homo sapiens
  siRNA target sequence for ZFP29 (NM_017894.2,659-677).
gtggaggtgaccagtttgt

SEQ ID NO: 14337 - DNA, 19 bp, Homo sapiens
  siRNA target sequence for ZFP29 (NM_181877.2,673-691).
catgtttgagaatgaatca

SEQ ID NO: 14338 - DNA, 19 bp, Homo sapiens
  siRNA target sequence for ZFP29 (NM_181877.2,682-700).
gaatgaatcacgtaagata

SEQ ID NO: 14339 - DNA, 19 bp, Homo sapiens
  siRNA target sequence for ZFP29 (NM_181877.2,686-704).
gaatcacgtaagatattct

SEQ ID NO: 14340 - DNA, 19 bp, Homo sapiens
  siRNA target sequence for ZFP29 (NM_181877.2,1323-1341).
gcggcgaaagctttagtta

SEQ ID NO: 14341 - DNA, 19 bp, Homo sapiens
  siRNA target sequence for ZFP29 (NM_181877.2,1929-1947).
ggaactcagtcctcattat

SEQ ID NO: 14342 - DNA, 19 bp, Homo sapiens
  siRNA target sequence for ZFP36L1 (NM_004926.2,163-181).
cgacttgagcgaagtttta

SEQ ID NO: 14343 - DNA, 19 bp, Homo sapiens
  siRNA target sequence for ZFP36L1 (NM_004926.2,189-207).
gtaacaagatgctcaacta

SEQ ID NO: 14344 - DNA, 19 bp, Homo sapiens
  siRNA target sequence for ZFP36L1 (NM_004926.2,193-211).
caagatgctcaactatagt

SEQ ID NO: 14345 - DNA, 19 bp, Homo sapiens
  siRNA target sequence for ZFP36L1 (NM_004926.2,719-737).
cgcctccagcatagcttta

SEQ ID NO: 14346 - DNA, 19 bp, Homo sapiens
  siRNA target sequence for ZFP36L1 (NM_004926.2,722-740).
ctccagcatagctttagct

SEQ ID NO: 14347 - DNA, 19 bp, Homo sapiens
  siRNA target sequence for ZFP36L1 (NM_004926.2,724-742).
ccagcatagctttagcttt

SEQ ID NO: 14348 - DNA, 19 bp, Homo sapiens
  siRNA target sequence for ZFP36L1 (NM_004926.2,978-996).
ccgagtcccctcacatgtt

SEQ ID NO: 14349 - DNA, 19 bp, Homo sapiens
  siRNA target sequence for ZFP36L1 (NM_004926.2,979-997).
cgagtcccctcacatgttt

SEQ ID NO: 14350 - DNA, 19 bp, Homo sapiens
  siRNA target sequence for ZFP36L1 (NM_004926.2,1008-1026).
ccagccctcaggattctct

SEQ ID NO: 14351 - DNA, 19 bp, Homo sapiens
  siRNA target sequence for ZFP36L2 (NM_006887.3,581-599).
cctacggcacccttaagga

SEQ ID NO: 14352 - DNA, 19 bp, Homo sapiens
  siRNA target sequence for ZFP36L2 (NM_006887.3,851-869).
ctcgccatccgaagtacaa

SEQ ID NO: 14353 - DNA, 19 bp, Homo sapiens
  siRNA target sequence for ZFP36L2 (NM_006887.3,1654-1672).
gaccgcgacagctacctaa

SEQ ID NO: 14354 - DNA, 19 bp, Homo sapiens
  siRNA target sequence for ZFP37 (NM_003408.1,39-57).
ccagcggcgtccagattct

SEQ ID NO: 14355 - DNA, 19 bp, Homo sapiens
  siRNA target sequence for ZFP37 (NM_003408.1,45-63).
gcgtccagattctgacaaa

SEQ ID NO: 14356 - DNA, 19 bp, Homo sapiens
  siRNA target sequence for ZFP37 (NM_003408.1,324-342).
gtcaaggttgtccaagtaa

SEQ ID NO: 14357 - DNA, 19 bp, Homo sapiens
  siRNA target sequence for ZFP37 (NM_003408.1,658-676).
gtcattcaaccatagctta

SEQ ID NO: 14358 - DNA, 19 bp, Homo sapiens
  siRNA target sequence for ZFP37 (NM_003408.1,734-752).
catagctcatctgataagt

SEQ ID NO: 14359 - DNA, 19 bp, Homo sapiens
  siRNA target sequence for ZFP37 (NM_003408.1,741-759).
catctgataagtgtaacaa

SEQ ID NO: 14360 - DNA, 19 bp, Homo sapiens
  siRNA target sequence for ZFP37 (NM_003408.1,776-794).
gacaaattatgctgtcata

SEQ ID NO: 14361 - DNA, 19 bp, Homo sapiens
  siRNA target sequence for ZFP37 (NM_003408.1,778-796).
caaattatgctgtcatagt

SEQ ID NO: 14362 - DNA, 19 bp, Homo sapiens
  siRNA target sequence for ZFP37 (NM_003408.1,791-809).
catagttcatcccatatta

SEQ ID NO: 14363 - DNA, 19 bp, Homo sapiens
  siRNA target sequence for ZFP37 (NM_003408.1,851-869).
cccagccttagctcatcta

SEQ ID NO: 14364 - DNA, 19 bp, Homo sapiens
  siRNA target sequence for ZFP37 (NM_003408.1,937-955).
ccataaacaaggactcatt

SEQ ID NO: 14365 - DNA, 19 bp, Homo sapiens
  siRNA target sequence for ZFP37 (NM_003408.1,1281-1299).
catctcttaccgaacatgt

SEQ ID NO: 14366 - DNA, 19 bp, Homo sapiens
  siRNA target sequence for ZFP37 (NM_003408.1,1779-1797).
caaaatcacagcttgttat

SEQ ID NO: 14367 - DNA, 19 bp, Homo sapiens
  siRNA target sequence for ZFP37 (NM_003408.1,1869-1887).
catccctaaccaaacatgt

SEQ ID NO: 14368 - DNA, 19 bp, Homo sapiens
  siRNA target sequence for ZFP37 (NM_003408.1,1872-1890).
ccctaaccaaacatgtgaa

SEQ ID NO: 14369 - DNA, 19 bp, Homo sapiens
  siRNA target sequence for ZFP95 (NM_014569.2,229-247).
gaccgaatcccgagaagtt

SEQ ID NO: 14370 - DNA, 19 bp, Homo sapiens
  siRNA target sequence for ZFP95 (NM_014569.2,231-249).
ccgaatcccgagaagttat

SEQ ID NO: 14371 - DNA, 19 bp, Homo sapiens
  siRNA target sequence for ZFP95 (NM_014569.2,232-250).
cgaatcccgagaagttata

SEQ ID NO: 14372 - DNA, 19 bp, Homo sapiens
  siRNA target sequence for ZFP95 (NM_014569.2,237-255).
cccgagaagttatagactt

SEQ ID NO: 14373 - DNA, 19 bp, Homo sapiens
  siRNA target sequence for ZFP95 (NM_014569.2,238-256).
ccgagaagttatagactta

SEQ ID NO: 14374 - DNA, 19 bp, Homo sapiens
  siRNA target sequence for ZFP95 (NM_014569.2,348-366).
cgccaacgtttgagacttt

SEQ ID NO: 14375 - DNA, 19 bp, Homo sapiens
  siRNA target sequence for ZFP95 (NM_014569.2,349-367).
gccaacgtttgagactttt

SEQ ID NO: 14376 - DNA, 19 bp, Homo sapiens
  siRNA target sequence for ZFP95 (NM_014569.2,351-369).
caacgtttgagacttttta

SEQ ID NO: 14377 - DNA, 19 bp, Homo sapiens
  siRNA target sequence for ZFP95 (NM_014569.2,354-372).
cgtttgagactttttacca

SEQ ID NO: 14378 - DNA, 19 bp, Homo sapiens
  siRNA target sequence for ZFP95 (NM_014569.2,580-598).
ggcggtggccgtgatagaa

SEQ ID NO: 14379 - DNA, 19 bp, Homo sapiens
  siRNA target sequence for ZFP95 (NM_014569.2,581-599).
gcggtggccgtgatagaaa

SEQ ID NO: 14380 - DNA, 19 bp, Homo sapiens
  siRNA target sequence for ZFP95 (NM_014569.2,586-604).
ggccgtgatagaaaatata

SEQ ID NO: 14381 - DNA, 19 bp, Homo sapiens
  siRNA target sequence for ZFP95 (NM_014569.2,964-982).
ggagaactatgggagtatt

SEQ ID NO: 14382 - DNA, 19 bp, Homo sapiens
  siRNA target sequence for ZFP95 (NM_014569.2,967-985).
gaactatgggagtattact

SEQ ID NO: 14383 - DNA, 19 bp, Homo sapiens
  siRNA target sequence for ZFP95 (NM_014569.2,1021-1039).
catagtgaagcagatttct

SEQ ID NO: 14384 - DNA, 19 bp, Homo sapiens
  siRNA target sequence for ZFP95 (NM_014569.2,1198-1216).
ggatctggatgcaatcaca

SEQ ID NO: 14385 - DNA, 19 bp, Homo sapiens
  siRNA target sequence for ZFP95 (NM_014569.2,1286-1304).
ctccaagcctcaaacttta

SEQ ID NO: 14386 - DNA, 19 bp, Homo sapiens
  siRNA target sequence for ZFP95 (NM_014569.2,1539-1557).
gtcgccattcgcatctgat

SEQ ID NO: 14387 - DNA, 19 bp, Homo sapiens
  siRNA target sequence for ZFP95 (NM_014569.2,1661-1679).
gaagcagacatggaactat

SEQ ID NO: 14388 - DNA, 19 bp, Homo sapiens
  siRNA target sequence for ZFP95 (NM_014569.2,1669-1687).
catggaactatctggaaaa

SEQ ID NO: 14389 - DNA, 19 bp, Homo sapiens
  siRNA target sequence for ZFP95 (NM_014569.2,1689-1707).
cccaaagaaatgtttctca

SEQ ID NO: 14390 - DNA, 19 bp, Homo sapiens
  siRNA target sequence for ZFP95 (NM_014569.2,1784-1802).
ctaggacaaccatcttcaa

SEQ ID NO: 14391 - DNA, 19 bp, Homo sapiens
  siRNA target sequence for ZFP95 (NM_014569.2,1823-1841).
gtcccatatgtccacaaaa

SEQ ID NO: 14392 - DNA, 19 bp, Homo sapiens
  siRNA target sequence for ZFP95 (NM_014569.2,2220-2238).
gggaaatcttttttcagta

SEQ ID NO: 14393 - DNA, 19 bp, Homo sapiens
  siRNA target sequence for ZFP95 (NM_014569.2,2236-2254).
gtacgttagcctaattgaa

SEQ ID NO: 14394 - DNA, 19 bp, Homo sapiens
  siRNA target sequence for ZFP95 (NM_014569.2,2239-2257).
cgttagcctaattgaacat

SEQ ID NO: 14395 - DNA, 19 bp, Homo sapiens
  siRNA target sequence for ZFP95 (NM_014569.2,2263-2281).
gctccacatgggtcagaaa

SEQ ID NO: 14396 - DNA, 19 bp, Homo sapiens
  siRNA target sequence for ZFP95 (NM_014569.2,2309-2327).
gcatatagttggaacttga

SEQ ID NO: 14397 - DNA, 19 bp, Homo sapiens
  siRNA target sequence for ZFP95 (NM_014569.2,2319-2337).
ggaacttgacagtgattga

SEQ ID NO: 14398 - DNA, 19 bp, Homo sapiens
  siRNA target sequence for ZFP95 (NM_014569.2,2320-2338).
gaacttgacagtgattgaa

SEQ ID NO: 14399 - DNA, 19 bp, Homo sapiens
  siRNA target sequence for ZFP95 (NM_014569.2,2357-2375).
caagagcagccttatcagt

SEQ ID NO: 14400 - DNA, 19 bp, Homo sapiens
  siRNA target sequence for ZFP95 (NM_014569.2,2527-2545).
cacaaaatcccatcaatgt

SEQ ID NO: 14401 - DNA, 19 bp, Homo sapiens
  siRNA target sequence for ZFP95 (NM_014569.2,2697-2715).
cagatcccataaatacctt

SEQ ID NO: 14402 - DNA, 19 bp, Homo sapiens
  siRNA target sequence for ZFP95 (NM_014569.2,2699-2717).
gatcccataaataccttaa

SEQ ID NO: 14403 - DNA, 19 bp, Homo sapiens
  siRNA target sequence for ZHX1 (NM_007222.2,434-452).
gcaagcaggcgaaaatcaa

SEQ ID NO: 14404 - DNA, 19 bp, Homo sapiens
  siRNA target sequence for ZHX1 (NM_007222.2,488-506).
ccagaccttgagttgatat

SEQ ID NO: 14405 - DNA, 19 bp, Homo sapiens
  siRNA target sequence for ZHX1 (NM_007222.2,494-512).
cttgagttgatatcagatt

SEQ ID NO: 14406 - DNA, 19 bp, Homo sapiens
  siRNA target sequence for ZHX1 (NM_007222.2,499-517).
gttgatatcagatttggat

SEQ ID NO: 14407 - DNA, 19 bp, Homo sapiens
  siRNA target sequence for ZHX1 (NM_007222.2,530-548).
gtgcttacacctgtagaaa

SEQ ID NO: 14408 - DNA, 19 bp, Homo sapiens
  siRNA target sequence for ZHX1 (NM_007222.2,533-551).
cttacacctgtagaaaaca

SEQ ID NO: 14409 - DNA, 19 bp, Homo sapiens
  siRNA target sequence for ZHX1 (NM_007222.2,562-580).
gagtatctcaagtgatgaa

SEQ ID NO: 14410 - DNA, 19 bp, Homo sapiens
  siRNA target sequence for ZHX1 (NM_007222.2,702-720).
cggaacatcccaatgtagt

SEQ ID NO: 14411 - DNA, 19 bp, Homo sapiens
  siRNA target sequence for ZHX1 (NM_007222.2,712-730).
caatgtagtgctaaattca

SEQ ID NO: 14412 - DNA, 19 bp, Homo sapiens
  siRNA target sequence for ZHX1 (NM_007222.2,737-755).
gtttgtgtcgaatgcaatt

SEQ ID NO: 14413 - DNA, 19 bp, Homo sapiens
  siRNA target sequence for ZHX1 (NM_007222.2,741-759).
gtgtcgaatgcaattttct

SEQ ID NO: 14414 - DNA, 19 bp, Homo sapiens
  siRNA target sequence for ZHX1 (NM_007222.2,777-795).
cactttctgagcataatct

SEQ ID NO: 14415 - DNA, 19 bp, Homo sapiens
  siRNA target sequence for ZHX1 (NM_007222.2,783-801).
ctgagcataatctgaaata

SEQ ID NO: 14416 - DNA, 19 bp, Homo sapiens
  siRNA target sequence for ZHX1 (NM_007222.2,815-833).
gagaattttaagttgacta

SEQ ID NO: 14417 - DNA, 19 bp, Homo sapiens
  siRNA target sequence for ZHX1 (NM_007222.2,829-847).
gactatggtgaaacgtaat

SEQ ID NO: 14418 - DNA, 19 bp, Homo sapiens
  siRNA target sequence for ZHX1 (NM_007222.2,831-849).
ctatggtgaaacgtaataa

SEQ ID NO: 14419 - DNA, 19 bp, Homo sapiens
  siRNA target sequence for ZHX1 (NM_007222.2,842-860).
cgtaataaccagacaatct

SEQ ID NO: 14420 - DNA, 19 bp, Homo sapiens
  siRNA target sequence for ZHX1 (NM_007222.2,843-861).
gtaataaccagacaatctt

SEQ ID NO: 14421 - DNA, 19 bp, Homo sapiens
  siRNA target sequence for ZHX1 (NM_007222.2,851-869).
cagacaatctttgaacaaa

SEQ ID NO: 14422 - DNA, 19 bp, Homo sapiens
  siRNA target sequence for ZHX1 (NM_007222.2,853-871).
gacaatctttgaacaaaca

SEQ ID NO: 14423 - DNA, 19 bp, Homo sapiens
  siRNA target sequence for ZHX1 (NM_007222.2,855-873).
caatctttgaacaaacaat

SEQ ID NO: 14424 - DNA, 19 bp, Homo sapiens
  siRNA target sequence for ZHX1 (NM_007222.2,941-959).
gtttcttcttcgggaatat

SEQ ID NO: 14425 - DNA, 19 bp, Homo sapiens
  siRNA target sequence for ZHX1 (NM_007222.2,951-969).
cgggaatatctatcagtaa

SEQ ID NO: 14426 - DNA, 19 bp, Homo sapiens
  siRNA target sequence for ZHX1 (NM_007222.2,953-971).
ggaatatctatcagtaaaa

SEQ ID NO: 14427 - DNA, 19 bp, Homo sapiens
  siRNA target sequence for ZHX1 (NM_007222.2,1013-1031).
cggattgcagttcatcata

SEQ ID NO: 14428 - DNA, 19 bp, Homo sapiens
  siRNA target sequence for ZHX1 (NM_007222.2,1014-1032).
ggattgcagttcatcataa

SEQ ID NO: 14429 - DNA, 19 bp, Homo sapiens
  siRNA target sequence for ZHX1 (NM_007222.2,1077-1095).
cagaccgtgaagaaattgt

SEQ ID NO: 14430 - DNA, 19 bp, Homo sapiens
  siRNA target sequence for ZHX1 (NM_007222.2,1121-1139).
gaatctaatacaagtactt

SEQ ID NO: 14431 - DNA, 19 bp, Homo sapiens
  siRNA target sequence for ZHX1 (NM_007222.2,1233-1251).
ctgctcagcagaattctaa

SEQ ID NO: 14432 - DNA, 19 bp, Homo sapiens
  siRNA target sequence for ZHX1 (NM_007222.2,1236-1254).
ctcagcagaattctaattt

SEQ ID NO: 14433 - DNA, 19 bp, Homo sapiens
  siRNA target sequence for ZHX1 (NM_007222.2,1238-1256).
cagcagaattctaatttga

SEQ ID NO: 14434 - DNA, 19 bp, Homo sapiens
  siRNA target sequence for ZHX1 (NM_007222.2,1240-1258).
gcagaattctaatttgatt

SEQ ID NO: 14435 - DNA, 19 bp, Homo sapiens
  siRNA target sequence for ZHX1 (NM_007222.2,1265-1283).
gtcttaatccctgttaata

SEQ ID NO: 14436 - DNA, 19 bp, Homo sapiens
  siRNA target sequence for ZHX1 (NM_007222.2,1294-1312).
ctacaatgctgcattggat

SEQ ID NO: 14437 - DNA, 19 bp, Homo sapiens
  siRNA target sequence for ZHX1 (NM_007222.2,1403-1421).
gaggaacagatcaagatat

SEQ ID NO: 14438 - DNA, 19 bp, Homo sapiens
  siRNA target sequence for ZHX1 (NM_007222.2,1458-1476).
ggactcccgaggaagtaga

SEQ ID NO: 14439 - DNA, 19 bp, Homo sapiens
  siRNA target sequence for ZHX1 (NM_007222.2,1520-1538).
cctcagaccataactgtta

SEQ ID NO: 14440 - DNA, 19 bp, Homo sapiens
  siRNA target sequence for ZHX1 (NM_007222.2,1525-1543).
gaccataactgttattcct

SEQ ID NO: 14441 - DNA, 19 bp, Homo sapiens
  siRNA target sequence for ZHX1 (NM_007222.2,1559-1577).
gggagtaatggtttaccat

SEQ ID NO: 14442 - DNA, 19 bp, Homo sapiens
  siRNA target sequence for ZHX1 (NM_007222.2,1563-1581).
gtaatggtttaccatctat

SEQ ID NO: 14443 - DNA, 19 bp, Homo sapiens
  siRNA target sequence for ZHX1 (NM_007222.2,1611-1629).
ctggtctggtccttactca

SEQ ID NO: 14444 - DNA, 19 bp, Homo sapiens
  siRNA target sequence for ZHX1 (NM_007222.2,1651-1669).
gccagttacagcacctata

SEQ ID NO: 14445 - DNA, 19 bp, Homo sapiens
  siRNA target sequence for ZHX1 (NM_007222.2,1681-1699).
ggcaggcgttccaagtcaa

SEQ ID NO: 14446 - DNA, 19 bp, Homo sapiens
  siRNA target sequence for ZHX1 (NM_007222.2,1682-1700).
gcaggcgttccaagtcaaa

SEQ ID NO: 14447 - DNA, 19 bp, Homo sapiens
  siRNA target sequence for ZHX1 (NM_007222.2,1683-1701).
caggcgttccaagtcaaaa

SEQ ID NO: 14448 - DNA, 19 bp, Homo sapiens
  siRNA target sequence for ZHX1 (NM_007222.2,1687-1705).
cgttccaagtcaaaataat

SEQ ID NO: 14449 - DNA, 19 bp, Homo sapiens
  siRNA target sequence for ZHX1 (NM_007222.2,1828-1846).
cattcgggcaaaaaagaca

SEQ ID NO: 14450 - DNA, 19 bp, Homo sapiens
  siRNA target sequence for ZHX1 (NM_007222.2,1860-1878).
cagaattaaaagttagcta

SEQ ID NO: 14451 - DNA, 19 bp, Homo sapiens
  siRNA target sequence for ZHX1 (NM_007222.2,1937-1955).
ctgacgaaaggagagatta

SEQ ID NO: 14452 - DNA, 19 bp, Homo sapiens
  siRNA target sequence for ZHX1 (NM_007222.2,1984-2002).
ccagagaaattcaaagagt

SEQ ID NO: 14453 - DNA, 19 bp, Homo sapiens
  siRNA target sequence for ZHX1 (NM_007222.2,1989-2007).
gaaattcaaagagtaatca

SEQ ID NO: 14454 - DNA, 19 bp, Homo sapiens
  siRNA target sequence for ZHX1 (NM_007222.2,2008-2026).
gtgcttacatctcaacaat

SEQ ID NO: 14455 - DNA, 19 bp, Homo sapiens
  siRNA target sequence for ZHX1 (NM_007222.2,2010-2028).
gcttacatctcaacaatga

SEQ ID NO: 14456 - DNA, 19 bp, Homo sapiens
  siRNA target sequence for ZHX1 (NM_007222.2,2011-2029).
cttacatctcaacaatgat

SEQ ID NO: 14457 - DNA, 19 bp, Homo sapiens
  siRNA target sequence for ZHX1 (NM_007222.2,2068-2086).
cacggaatccccaactgtt

SEQ ID NO: 14458 - DNA, 19 bp, Homo sapiens
  siRNA target sequence for ZHX1 (NM_007222.2,2126-2144).
gactttactccccaaaagt

SEQ ID NO: 14459 - DNA, 19 bp, Homo sapiens
  siRNA target sequence for ZHX1 (NM_007222.2,2133-2151).
ctccccaaaagtttaaaga

SEQ ID NO: 14460 - DNA, 19 bp, Homo sapiens
  siRNA target sequence for ZHX1 (NM_007222.2,2229-2247).
ggttaagggcacaaaccaa

SEQ ID NO: 14461 - DNA, 19 bp, Homo sapiens
  siRNA target sequence for ZHX1 (NM_007222.2,2230-2248).
gttaagggcacaaaccaaa

SEQ ID NO: 14462 - DNA, 19 bp, Homo sapiens
  siRNA target sequence for ZHX1 (NM_007222.2,2261-2279).
gaaatcgatgcttggttta

SEQ ID NO: 14463 - DNA, 19 bp, Homo sapiens
  siRNA target sequence for ZHX1 (NM_007222.2,2742-2760).
ggggaccatcactcataaa

SEQ ID NO: 14464 - DNA, 19 bp, Homo sapiens
  siRNA target sequence for ZHX1 (NM_007222.2,2743-2761).
gggaccatcactcataaaa

SEQ ID NO: 14465 - DNA, 19 bp, Homo sapiens
  siRNA target sequence for ZHX1 (NM_007222.2,2744-2762).
ggaccatcactcataaaat

SEQ ID NO: 14466 - DNA, 19 bp, Homo sapiens
  siRNA target sequence for ZHX1 (NM_007222.2,2778-2796).
caatacttaaggattatta

SEQ ID NO: 14467 - DNA, 19 bp, Homo sapiens
  siRNA target sequence for ZHX1 (NM_007222.2,2825-2843).
gaccttgatgaacttgtta

SEQ ID NO: 14468 - DNA, 19 bp, Homo sapiens
  siRNA target sequence for ZHX1 (NM_007222.2,2837-2855).
cttgttaacaaatcacata

SEQ ID NO: 14469 - DNA, 19 bp, Homo sapiens
  siRNA target sequence for ZHX1 (NM_007222.2,2896-2914).
gagaagatcagaattaggt

SEQ ID NO: 14470 - DNA, 19 bp, Homo sapiens
  siRNA target sequence for ZHX1 (NM_007222.2,2898-2916).
gaagatcagaattaggtat

SEQ ID NO: 14471 - DNA, 19 bp, Homo sapiens
  siRNA target sequence for ZHX1 (NM_007222.2,2906-2924).
gaattaggtatagaattat

SEQ ID NO: 14472 - DNA, 19 bp, Homo sapiens
  siRNA target sequence for ZHX2 (NM_014943.2,512-530).
catggttcggacatcacaa

SEQ ID NO: 14473 - DNA, 19 bp, Homo sapiens
  siRNA target sequence for ZHX2 (NM_014943.2,515-533).
ggttcggacatcacaagta

SEQ ID NO: 14474 - DNA, 19 bp, Homo sapiens
  siRNA target sequence for ZHX2 (NM_014943.2,520-538).
ggacatcacaagtagtaga

SEQ ID NO: 14475 - DNA, 19 bp, Homo sapiens
  siRNA target sequence for ZHX2 (NM_014943.2,526-544).
cacaagtagtagaacaaga

SEQ ID NO: 14476 - DNA, 19 bp, Homo sapiens
  siRNA target sequence for ZHX2 (NM_014943.2,558-576).
gtagacagggccaaagaga

SEQ ID NO: 14477 - DNA, 19 bp, Homo sapiens
  siRNA target sequence for ZHX2 (NM_014943.2,614-632).
cagttgggcagcagaactt

SEQ ID NO: 14478 - DNA, 19 bp, Homo sapiens
  siRNA target sequence for ZHX2 (NM_014943.2,678-696).
ggggaaagccagtccaaaa

SEQ ID NO: 14479 - DNA, 19 bp, Homo sapiens
  siRNA target sequence for ZHX2 (NM_014943.2,679-697).
gggaaagccagtccaaaaa

SEQ ID NO: 14480 - DNA, 19 bp, Homo sapiens
  siRNA target sequence for ZHX2 (NM_014943.2,708-726).
ggttatgagtgcaaatact

SEQ ID NO: 14481 - DNA, 19 bp, Homo sapiens
  siRNA target sequence for ZHX2 (NM_014943.2,780-798).
catcccaacgtgattctca

SEQ ID NO: 14482 - DNA, 19 bp, Homo sapiens
  siRNA target sequence for ZHX2 (NM_014943.2,816-834).
gcagaatgtaacttcacaa

SEQ ID NO: 14483 - DNA, 19 bp, Homo sapiens
  siRNA target sequence for ZHX2 (NM_014943.2,905-923).
gttaattaaacgcaataat

SEQ ID NO: 14484 - DNA, 19 bp, Homo sapiens
  siRNA target sequence for ZHX2 (NM_014943.2,1011-1029).
gggatctcggtgagtaaaa

SEQ ID NO: 14485 - DNA, 19 bp, Homo sapiens
  siRNA target sequence for ZHX2 (NM_014943.2,1040-1058).
gaagcctggaaaaccaaaa

SEQ ID NO: 14486 - DNA, 19 bp, Homo sapiens
  siRNA target sequence for ZHX2 (NM_014943.2,1297-1315).
caaatgccacgatgatcaa

SEQ ID NO: 14487 - DNA, 19 bp, Homo sapiens
  siRNA target sequence for ZHX2 (NM_014943.2,1302-1320).
gccacgatgatcaactctt

SEQ ID NO: 14488 - DNA, 19 bp, Homo sapiens
  siRNA target sequence for ZHX2 (NM_014943.2,1306-1324).
cgatgatcaactctttcaa

SEQ ID NO: 14489 - DNA, 19 bp, Homo sapiens
  siRNA target sequence for ZHX2 (NM_014943.2,1870-1888).
ctgacgatgccgaggttta

SEQ ID NO: 14490 - DNA, 19 bp, Homo sapiens
  siRNA target sequence for ZHX2 (NM_014943.2,1947-1965).
caccgatatcggtgtcaaa

SEQ ID NO: 14491 - DNA, 19 bp, Homo sapiens
  siRNA target sequence for ZHX2 (NM_014943.2,2089-2107).
cacagggtcaggttaaaat

SEQ ID NO: 14492 - DNA, 19 bp, Homo sapiens
  siRNA target sequence for ZHX2 (NM_014943.2,2333-2351).
cggtgcccagttaacaagt

SEQ ID NO: 14493 - DNA, 19 bp, Homo sapiens
  siRNA target sequence for ZHX2 (NM_014943.2,2363-2381).
cccttcgccagcaattgca

SEQ ID NO: 14494 - DNA, 19 bp, Homo sapiens
  siRNA target sequence for ZHX2 (NM_014943.2,2477-2495).
cctggtccgaactgagatt

SEQ ID NO: 14495 - DNA, 19 bp, Homo sapiens
  siRNA target sequence for ZHX2 (NM_014943.2,2594-2612).
cgatgccgtagcaaggaaa

SEQ ID NO: 14496 - DNA, 19 bp, Homo sapiens
  siRNA target sequence for ZHX2 (NM_014943.2,2650-2668).
gtgatgtggttccacaata

SEQ ID NO: 14497 - DNA, 19 bp, Homo sapiens
  siRNA target sequence for ZHX2 (NM_014943.2,2714-2732).
ggtgaccagggtaaaagta

SEQ ID NO: 14498 - DNA, 19 bp, Homo sapiens
  siRNA target sequence for ZHX2 (NM_014943.2,2842-2860).
cgagcgttgtggattacgt

SEQ ID NO: 14499 - DNA, 19 bp, Homo sapiens
  siRNA target sequence for ZHX2 (NM_014943.2,2882-2900).
ggatgcgatctcagataga

SEQ ID NO: 14500 - DNA, 19 bp, Homo sapiens
  siRNA target sequence for ZHX2 (NM_014943.2,2883-2901).
gatgcgatctcagatagat

SEQ ID NO: 14501 - DNA, 19 bp, Homo sapiens
  siRNA target sequence for ZHX2 (NM_014943.2,2888-2906).
gatctcagatagatcagat

SEQ ID NO: 14502 - DNA, 19 bp, Homo sapiens
  siRNA target sequence for ZHX2 (NM_014943.2,2938-2956).
cggaactggctgaatcaga

SEQ ID NO: 14503 - DNA, 19 bp, Homo sapiens
  siRNA target sequence for ZNF11B (NM_006955.1,496-514).
catggacgtaagttctttt

SEQ ID NO: 14504 - DNA, 19 bp, Homo sapiens
  siRNA target sequence for ZNF11B (NM_006955.1,717-735).
gtcatcgtgagaacacttt

SEQ ID NO: 14505 - DNA, 19 bp, Homo sapiens
  siRNA target sequence for ZNF132 (NM_003433.1,501-519).
gtgtgggccattcttgaaa

SEQ ID NO: 14506 - DNA, 19 bp, Homo sapiens
  siRNA target sequence for ZNF133 (NM_003434.3,928-946).
gagaccctggagtgatcaa

SEQ ID NO: 14507 - DNA, 19 bp, Homo sapiens
  siRNA target sequence for ZNF133 (NM_003434.3,1063-1081).
cagaggggtggagttagaa

SEQ ID NO: 14508 - DNA, 19 bp, Homo sapiens
  siRNA target sequence for ZNF133 (NM_003434.3,1134-1152).
ggatagaagtcttaggatt

SEQ ID NO: 14509 - DNA, 19 bp, Homo sapiens
  siRNA target sequence for ZNF133 (NM_003434.3,1361-1379).
cggaagtcaacgctaatca

SEQ ID NO: 14510 - DNA, 19 bp, Homo sapiens
  siRNA target sequence for ZNF133 (NM_003434.3,1362-1380).
ggaagtcaacgctaatcat

SEQ ID NO: 14511 - DNA, 19 bp, Homo sapiens
  siRNA target sequence for ZNF133 (NM_003434.3,1363-1381).
gaagtcaacgctaatcata

SEQ ID NO: 14512 - DNA, 19 bp, Homo sapiens
  siRNA target sequence for ZNF133 (NM_003434.3,2187-2205).
gactgggctttggcaataa

SEQ ID NO: 14513 - DNA, 19 bp, Homo sapiens
  siRNA target sequence for ZNF133 (NM_003434.3,2454-2472).
ggcaaccttcggattcctt

SEQ ID NO: 14514 - DNA, 19 bp, Homo sapiens
  siRNA target sequence for ZNF133 (NM_003434.3,2455-2473).
gcaaccttcggattcctta

SEQ ID NO: 14515 - DNA, 19 bp, Homo sapiens
  siRNA target sequence for ZNF133 (NM_003434.3,2456-2474).
caaccttcggattccttat

SEQ ID NO: 14516 - DNA, 19 bp, Homo sapiens
  siRNA target sequence for ZNF133 (NM_003434.3,2459-2477).
ccttcggattccttatact

SEQ ID NO: 14517 - DNA, 19 bp, Homo sapiens
  siRNA target sequence for ZNF134 (NM_003435.1,616-634).
gtgaggcctcaattgtgaa

SEQ ID NO: 14518 - DNA, 19 bp, Homo sapiens
  siRNA target sequence for ZNF134 (NM_003435.1,630-648).
gtgaagaactgcacagtta

SEQ ID NO: 14519 - DNA, 19 bp, Homo sapiens
  siRNA target sequence for ZNF134 (NM_003435.1,638-656).
ctgcacagttagcaaagaa

SEQ ID NO: 14520 - DNA, 19 bp, Homo sapiens
  siRNA target sequence for ZNF134 (NM_003435.1,772-790).
ctgagagtggggatgcatt

SEQ ID NO: 14521 - DNA, 19 bp, Homo sapiens
  siRNA target sequence for ZNF134 (NM_003435.1,792-810).
catggtgaacaaatgcatt

SEQ ID NO: 14522 - DNA, 19 bp, Homo sapiens
  siRNA target sequence for ZNF134 (NM_003435.1,795-813).
ggtgaacaaatgcattaca

SEQ ID NO: 14523 - DNA, 19 bp, Homo sapiens
  siRNA target sequence for ZNF134 (NM_003435.1,1302-1320).
gagtcaaagccgtttgagt

SEQ ID NO: 14524 - DNA, 19 bp, Homo sapiens
  siRNA target sequence for ZNF134 (NM_003435.1,1345-1363).
gtcgaagttctgactatat

SEQ ID NO: 14525 - DNA, 19 bp, Homo sapiens
  siRNA target sequence for ZNF135 (NM_003436.2,320-338).
ggcggtggagtctagactt

SEQ ID NO: 14526 - DNA, 19 bp, Homo sapiens
  siRNA target sequence for ZNF135 (NM_003436.2,367-385).
ctagacccaaagtcaaact

SEQ ID NO: 14527 - DNA, 19 bp, Homo sapiens
  siRNA target sequence for ZNF135 (NM_003436.2,593-611).
gtttggggaaaacataagt

SEQ ID NO: 14528 - DNA, 19 bp, Homo sapiens
  siRNA target sequence for ZNF135 (NM_003436.2,626-644).
cccacatcaaccaatgact

SEQ ID NO: 14529 - DNA, 19 bp, Homo sapiens
  siRNA target sequence for ZNF135 (NM_003436.2,689-707).
ggagaagccagacctaaat

SEQ ID NO: 14530 - DNA, 19 bp, Homo sapiens
  siRNA target sequence for ZNF135 (NM_003436.2,692-710).
gaagccagacctaaatgtt

SEQ ID NO: 14531 - DNA, 19 bp, Homo sapiens
  siRNA target sequence for ZNF135 (NM_003436.2,699-717).
gacctaaatgttttacaga

SEQ ID NO: 14532 - DNA, 19 bp, Homo sapiens
  siRNA target sequence for ZNF135 (NM_003436.2,776-794).
cagctcagcacttatcgaa

SEQ ID NO: 14533 - DNA, 19 bp, Homo sapiens
  siRNA target sequence for ZNF135 (NM_003436.2,928-946).
ggaggaccttcaaccaaat

SEQ ID NO: 14534 - DNA, 19 bp, Homo sapiens
  siRNA target sequence for ZNF135 (NM_003436.2,1619-1637).
ctcgtccctcaccaaacat

SEQ ID NO: 14535 - DNA, 19 bp, Homo sapiens
  siRNA target sequence for ZNF137 (NM_003438.1,194-212).
cttcatactgtctaaggtt

SEQ ID NO: 14536 - DNA, 19 bp, Homo sapiens
  siRNA target sequence for ZNF137 (NM_003438.1,203-221).
gtctaaggtttctaatcaa

SEQ ID NO: 14537 - DNA, 19 bp, Homo sapiens
  siRNA target sequence for ZNF137 (NM_003438.1,301-319).
gtgggaagtcgtcactttt

SEQ ID NO: 14538 - DNA, 19 bp, Homo sapiens
  siRNA target sequence for ZNF137 (NM_003438.1,303-321).
gggaagtcgtcactttttt

SEQ ID NO: 14539 - DNA, 19 bp, Homo sapiens
  siRNA target sequence for ZNF137 (NM_003438.1,304-322).
ggaagtcgtcactttttta

SEQ ID NO: 14540 - DNA, 19 bp, Homo sapiens
  siRNA target sequence for ZNF137 (NM_003438.1,305-323).
gaagtcgtcacttttttat

SEQ ID NO: 14541 - DNA, 19 bp, Homo sapiens
  siRNA target sequence for ZNF137 (NM_003438.1,308-326).
gtcgtcacttttttatcat

SEQ ID NO: 14542 - DNA, 19 bp, Homo sapiens
  siRNA target sequence for ZNF137 (NM_003438.1,310-328).
cgtcacttttttatcatca

SEQ ID NO: 14543 - DNA, 19 bp, Homo sapiens
  siRNA target sequence for ZNF140 (NM_003440.2,881-899).
gtgaaaagagatctgtttt

SEQ ID NO: 14544 - DNA, 19 bp, Homo sapiens
  siRNA target sequence for ZNF140 (NM_003440.2,910-928).
gtcaagtggtgagatcaaa

SEQ ID NO: 14545 - DNA, 19 bp, Homo sapiens
  siRNA target sequence for ZNF140 (NM_003440.2,912-930).
caagtggtgagatcaaaga

SEQ ID NO: 14546 - DNA, 19 bp, Homo sapiens
  siRNA target sequence for ZNF140 (NM_003440.2,956-974).
gatgactcatcccagtatt

SEQ ID NO: 14547 - DNA, 19 bp, Homo sapiens
  siRNA target sequence for ZNF140 (NM_003440.2,959-977).
gactcatcccagtatttga

SEQ ID NO: 14548 - DNA, 19 bp, Homo sapiens
  siRNA target sequence for ZNF140 (NM_003440.2,998-1016).
caaggccctgtgtattcca

SEQ ID NO: 14549 - DNA, 19 bp, Homo sapiens
  siRNA target sequence for ZNF140 (NM_003440.2,1005-1023).
ctgtgtattccagttttaa

SEQ ID NO: 14550 - DNA, 19 bp, Homo sapiens
  siRNA target sequence for ZNF140 (NM_003440.2,1073-1091).
ggatgtattaggaaagtaa

SEQ ID NO: 14551 - DNA, 19 bp, Homo sapiens
  siRNA target sequence for ZNF140 (NM_003440.2,1077-1095).
gtattaggaaagtaacagt

SEQ ID NO: 14552 - DNA, 19 bp, Homo sapiens
  siRNA target sequence for ZNF140 (NM_003440.2,1109-1127).
gccctggctcaacatatga

SEQ ID NO: 14553 - DNA, 19 bp, Homo sapiens
  siRNA target sequence for ZNF140 (NM_003440.2,1110-1128).
ccctggctcaacatatgaa

SEQ ID NO: 14554 - DNA, 19 bp, Homo sapiens
  siRNA target sequence for ZNF140 (NM_003440.2,1111-1129).
cctggctcaacatatgaat

SEQ ID NO: 14555 - DNA, 19 bp, Homo sapiens
  siRNA target sequence for ZNF140 (NM_003440.2,1118-1136).
caacatatgaatatcagta

SEQ ID NO: 14556 - DNA, 19 bp, Homo sapiens
  siRNA target sequence for ZNF140 (NM_003440.2,1322-1340).
gagtgtaaggactgtaata

SEQ ID NO: 14557 - DNA, 19 bp, Homo sapiens
  siRNA target sequence for ZNF140 (NM_003440.2,1538-1556).
cgccaccagattacacata

SEQ ID NO: 14558 - DNA, 19 bp, Homo sapiens
  siRNA target sequence for ZNF140 (NM_003440.2,1540-1558).
ccaccagattacacatact

SEQ ID NO: 14559 - DNA, 19 bp, Homo sapiens
  siRNA target sequence for ZNF140 (NM_003440.2,1594-1612).
ggcatttcgccgtttctca

SEQ ID NO: 14560 - DNA, 19 bp, Homo sapiens
  siRNA target sequence for ZNF140 (NM_003440.2,1680-1698).
ctttccgttgtcactcatt

SEQ ID NO: 14561 - DNA, 19 bp, Homo sapiens
  siRNA target sequence for ZNF140 (NM_003440.2,1684-1702).
ccgttgtcactcattcctt

SEQ ID NO: 14562 - DNA, 19 bp, Homo sapiens
  siRNA target sequence for ZNF140 (NM_003440.2,1685-1703).
cgttgtcactcattcctta

SEQ ID NO: 14563 - DNA, 19 bp, Homo sapiens
  siRNA target sequence for ZNF140 (NM_003440.2,1686-1704).
gttgtcactcattccttat

SEQ ID NO: 14564 - DNA, 19 bp, Homo sapiens
  siRNA target sequence for ZNF140 (NM_003440.2,1689-1707).
gtcactcattccttattaa

SEQ ID NO: 14565 - DNA, 19 bp, Homo sapiens
  siRNA target sequence for ZNF140 (NM_003440.2,1826-1844).
gcgtgtgctgaatgtgata

SEQ ID NO: 14566 - DNA, 19 bp, Homo sapiens
  siRNA target sequence for ZNF140 (NM_003440.2,1827-1845).
cgtgtgctgaatgtgataa

SEQ ID NO: 14567 - DNA, 19 bp, Homo sapiens
  siRNA target sequence for ZNF140 (NM_003440.2,1861-1879).
cttttccctcattctacat

SEQ ID NO: 14568 - DNA, 19 bp, Homo sapiens
  siRNA target sequence for ZNF140 (NM_003440.2,1968-1986).
ggacacacactcttgacaa

SEQ ID NO: 14569 - DNA, 19 bp, Homo sapiens
  siRNA target sequence for ZNF140 (NM_003440.2,2007-2025).
catttaattaccactcatt

SEQ ID NO: 14570 - DNA, 19 bp, Homo sapiens
  siRNA target sequence for ZNF142 (NM_005081.1,911-929).
ctcttcaagacccatatgt

SEQ ID NO: 14571 - DNA, 19 bp, Homo sapiens
  siRNA target sequence for ZNF142 (NM_005081.1,935-953).
gagtgtaagcgctgcttta

SEQ ID NO: 14572 - DNA, 19 bp, Homo sapiens
  siRNA target sequence for ZNF142 (NM_005081.1,939-957).
gtaagcgctgctttaagaa

SEQ ID NO: 14573 - DNA, 19 bp, Homo sapiens
  siRNA target sequence for ZNF142 (NM_005081.1,1014-1032).
gccctaactgccagaagtt

SEQ ID NO: 14574 - DNA, 19 bp, Homo sapiens
  siRNA target sequence for ZNF142 (NM_005081.1,1203-1221).
ctgtctgccgtgaggaatt

SEQ ID NO: 14575 - DNA, 19 bp, Homo sapiens
  siRNA target sequence for ZNF142 (NM_005081.1,1335-1353).
gcaaggccttcattaagca

SEQ ID NO: 14576 - DNA, 19 bp, Homo sapiens
  siRNA target sequence for ZNF142 (NM_005081.1,1481-1499).
gattttgcttgttccaata

SEQ ID NO: 14577 - DNA, 19 bp, Homo sapiens
  siRNA target sequence for ZNF142 (NM_005081.1,1502-1520).
cacctattccgtaaacaca

SEQ ID NO: 14578 - DNA, 19 bp, Homo sapiens
  siRNA target sequence for ZNF142 (NM_005081.1,1591-1609).
ggcttaccaggatcatgta

SEQ ID NO: 14579 - DNA, 19 bp, Homo sapiens
  siRNA target sequence for ZNF142 (NM_005081.1,1688-1706).
cgacacatgcttctacata

SEQ ID NO: 14580 - DNA, 19 bp, Homo sapiens
  siRNA target sequence for ZNF142 (NM_005081.1,1751-1769).
cgagacgtgagctacctat

SEQ ID NO: 14581 - DNA, 19 bp, Homo sapiens
  siRNA target sequence for ZNF142 (NM_005081.1,1802-1820).
gattacatgtgcactgaat

SEQ ID NO: 14582 - DNA, 19 bp, Homo sapiens
  siRNA target sequence for ZNF142 (NM_005081.1,1877-1895).
ggggacctcaggtatcagt

SEQ ID NO: 14583 - DNA, 19 bp, Homo sapiens
  siRNA target sequence for ZNF142 (NM_005081.1,1993-2011).
cgcctgcaagcggaagtat

SEQ ID NO: 14584 - DNA, 19 bp, Homo sapiens
  siRNA target sequence for ZNF142 (NM_005081.1,1995-2013).
cctgcaagcggaagtatga

SEQ ID NO: 14585 - DNA, 19 bp, Homo sapiens
  siRNA target sequence for ZNF142 (NM_005081.1,2215-2233).
caaggcccatggctatgta

SEQ ID NO: 14586 - DNA, 19 bp, Homo sapiens
  siRNA target sequence for ZNF142 (NM_005081.1,2570-2588).
cttgaggaggtcactgaaa

SEQ ID NO: 14587 - DNA, 19 bp, Homo sapiens
  siRNA target sequence for ZNF142 (NM_005081.1,2639-2657).
gaaggaccagagctatcta

SEQ ID NO: 14588 - DNA, 19 bp, Homo sapiens
  siRNA target sequence for ZNF142 (NM_005081.1,2774-2792).
gtaggaaccttcaagacaa

SEQ ID NO: 14589 - DNA, 19 bp, Homo sapiens
  siRNA target sequence for ZNF142 (NM_005081.1,2829-2847).
ctgagtcagagtcattact

SEQ ID NO: 14590 - DNA, 19 bp, Homo sapiens
  siRNA target sequence for ZNF142 (NM_005081.1,3081-3099).
gcacccacctgctgaagaa

SEQ ID NO: 14591 - DNA, 19 bp, Homo sapiens
  siRNA target sequence for ZNF142 (NM_005081.1,3104-3122).
cctgttctactcagaaaga

SEQ ID NO: 14592 - DNA, 19 bp, Homo sapiens
  siRNA target sequence for ZNF142 (NM_005081.1,3105-3123).
ctgttctactcagaaagaa

SEQ ID NO: 14593 - DNA, 19 bp, Homo sapiens
  siRNA target sequence for ZNF142 (NM_005081.1,3500-3518).
gagcagggcaagtttcact

SEQ ID NO: 14594 - DNA, 19 bp, Homo sapiens
  siRNA target sequence for ZNF142 (NM_005081.1,3545-3563).
cggctctcctctattacct

SEQ ID NO: 14595 - DNA, 19 bp, Homo sapiens
  siRNA target sequence for ZNF142 (NM_005081.1,3710-3728).
gatacagttctggttcaaa

SEQ ID NO: 14596 - DNA, 19 bp, Homo sapiens
  siRNA target sequence for ZNF142 (NM_005081.1,3714-3732).
cagttctggttcaaaagca

SEQ ID NO: 14597 - DNA, 19 bp, Homo sapiens
  siRNA target sequence for ZNF142 (NM_005081.1,3745-3763).
cttctcctgccctacatgt

SEQ ID NO: 14598 - DNA, 19 bp, Homo sapiens
  siRNA target sequence for ZNF142 (NM_005081.1,3963-3981).
gtggcttcacctgtaaaca

SEQ ID NO: 14599 - DNA, 19 bp, Homo sapiens
  siRNA target sequence for ZNF142 (NM_005081.1,4043-4061).
cccttctgtgacttttcga

SEQ ID NO: 14600 - DNA, 19 bp, Homo sapiens
  siRNA target sequence for ZNF142 (NM_005081.1,4233-4251).
gctaccttcgccatgacat

SEQ ID NO: 14601 - DNA, 19 bp, Homo sapiens
  siRNA target sequence for ZNF142 (NM_005081.1,4611-4629).
gggtgggcctggtaaagca

SEQ ID NO: 14602 - DNA, 19 bp, Homo sapiens
  siRNA target sequence for ZNF142 (NM_005081.1,4705-4723).
gctacactgccccttttgt

SEQ ID NO: 14603 - DNA, 19 bp, Homo sapiens
  siRNA target sequence for ZNF142 (NM_005081.1,4776-4794).
ggggcactcgtctctacaa

SEQ ID NO: 14604 - DNA, 19 bp, Homo sapiens
  siRNA target sequence for ZNF142 (NM_005081.1,4778-4796).
ggcactcgtctctacaagt

SEQ ID NO: 14605 - DNA, 19 bp, Homo sapiens
  siRNA target sequence for ZNF142 (NM_005081.1,5115-5133).
gagaagcacgggctttcat

SEQ ID NO: 14606 - DNA, 19 bp, Homo sapiens
  siRNA target sequence for ZNF142 (NM_005081.1,5117-5135).
gaagcacgggctttcatgt

SEQ ID NO: 14607 - DNA, 19 bp, Homo sapiens
  siRNA target sequence for ZNF145 (NM_006006.3,407-425).
gcaccagcaagatgtttga

SEQ ID NO: 14608 - DNA, 19 bp, Homo sapiens
  siRNA target sequence for ZNF145 (NM_006006.3,429-447).
cctcttccaccgcaatagt

SEQ ID NO: 14609 - DNA, 19 bp, Homo sapiens
  siRNA target sequence for ZNF145 (NM_006006.3,432-450).
cttccaccgcaatagtcaa

SEQ ID NO: 14610 - DNA, 19 bp, Homo sapiens
  siRNA target sequence for ZNF145 (NM_006006.3,438-456).
ccgcaatagtcaacactat

SEQ ID NO: 14611 - DNA, 19 bp, Homo sapiens
  siRNA target sequence for ZNF145 (NM_006006.3,439-457).
cgcaatagtcaacactata

SEQ ID NO: 14612 - DNA, 19 bp, Homo sapiens
  siRNA target sequence for ZNF145 (NM_006006.3,441-459).
caatagtcaacactatact

SEQ ID NO: 14613 - DNA, 19 bp, Homo sapiens
  siRNA target sequence for ZNF145 (NM_006006.3,625-643).
gcctcagacgacaatgaca

SEQ ID NO: 14614 - DNA, 19 bp, Homo sapiens
  siRNA target sequence for ZNF145 (NM_006006.3,694-712).
gctcggtacctcaagaaca

SEQ ID NO: 14615 - DNA, 19 bp, Homo sapiens
  siRNA target sequence for ZNF145 (NM_006006.3,695-713).
ctcggtacctcaagaacat

SEQ ID NO: 14616 - DNA, 19 bp, Homo sapiens
  siRNA target sequence for ZNF145 (NM_006006.3,1118-1136).
gtgctagggagctacacta

SEQ ID NO: 14617 - DNA, 19 bp, Homo sapiens
  siRNA target sequence for ZNF145 (NM_006006.3,1475-1493).
gggtcgagcttcctgataa

SEQ ID NO: 14618 - DNA, 19 bp, Homo sapiens
  siRNA target sequence for ZNF145 (NM_006006.3,1643-1661).
gcggtgcacagttttcgaa

SEQ ID NO: 14619 - DNA, 19 bp, Homo sapiens
  siRNA target sequence for ZNF145 (NM_006006.3,1786-1804).
ggcgtgcgcagctacatct

SEQ ID NO: 14620 - DNA, 19 bp, Homo sapiens
  siRNA target sequence for ZNF145 (NM_006006.3,1830-1848).
cagccacacggctctcaaa

SEQ ID NO: 14621 - DNA, 19 bp, Homo sapiens
  siRNA target sequence for ZNF145 (NM_006006.3,2008-2026).
cagctggagacgcactata

SEQ ID NO: 14622 - DNA, 19 bp, Homo sapiens
  siRNA target sequence for ZNF147 (NM_005082.2,137-155).
ctccgtgcggccacaactt

SEQ ID NO: 14623 - DNA, 19 bp, Homo sapiens
  siRNA target sequence for ZNF147 (NM_005082.2,158-176).
gcgggtcgtgcctgaatga

SEQ ID NO: 14624 - DNA, 19 bp, Homo sapiens
  siRNA target sequence for ZNF147 (NM_005082.2,160-178).
gggtcgtgcctgaatgaga

SEQ ID NO: 14625 - DNA, 19 bp, Homo sapiens
  siRNA target sequence for ZNF147 (NM_005082.2,540-558).
caatcggctgcgggaattt

SEQ ID NO: 14626 - DNA, 19 bp, Homo sapiens
  siRNA target sequence for ZNF147 (NM_005082.2,544-562).
cggctgcgggaatttttct

SEQ ID NO: 14627 - DNA, 19 bp, Homo sapiens
  siRNA target sequence for ZNF147 (NM_005082.2,750-768).
gcggatgactgcaaacaga

SEQ ID NO: 14628 - DNA, 19 bp, Homo sapiens
  siRNA target sequence for ZNF147 (NM_005082.2,751-769).
cggatgactgcaaacagaa

SEQ ID NO: 14629 - DNA, 19 bp, Homo sapiens
  siRNA target sequence for ZNF147 (NM_005082.2,787-805).
caagaatacacggaaatga

SEQ ID NO: 14630 - DNA, 19 bp, Homo sapiens
  siRNA target sequence for ZNF147 (NM_005082.2,831-849).
cacctcgacaaggaagata

SEQ ID NO: 14631 - DNA, 19 bp, Homo sapiens
  siRNA target sequence for ZNF147 (NM_005082.2,864-882).
gagggtcaacagcaagttt

SEQ ID NO: 14632 - DNA, 19 bp, Homo sapiens
  siRNA target sequence for ZNF147 (NM_005082.2,876-894).
caagtttgacaccatttat

SEQ ID NO: 14633 - DNA, 19 bp, Homo sapiens
  siRNA target sequence for ZNF147 (NM_005082.2,965-983).
gggatgagttcgagtttct

SEQ ID NO: 14634 - DNA, 19 bp, Homo sapiens
  siRNA target sequence for ZNF147 (NM_005082.2,1045-1063).
ctgaaccacaagctgataa

SEQ ID NO: 14635 - DNA, 19 bp, Homo sapiens
  siRNA target sequence for ZNF147 (NM_005082.2,1079-1097).
gcaccatagacctcaaaaa

SEQ ID NO: 14636 - DNA, 19 bp, Homo sapiens
  siRNA target sequence for ZNF147 (NM_005082.2,1082-1100).
ccatagacctcaaaaacga

SEQ ID NO: 14637 - DNA, 19 bp, Homo sapiens
  siRNA target sequence for ZNF147 (NM_005082.2,1168-1186).
ccagcgtccacacacaaat

SEQ ID NO: 14638 - DNA, 19 bp, Homo sapiens
  siRNA target sequence for ZNF147 (NM_005082.2,1171-1189).
gcgtccacacacaaatcca

SEQ ID NO: 14639 - DNA, 19 bp, Homo sapiens
  siRNA target sequence for ZNF147 (NM_005082.2,1286-1304).
cggaacagttagtggattt

SEQ ID NO: 14640 - DNA, 19 bp, Homo sapiens
  siRNA target sequence for ZNF147 (NM_005082.2,1420-1438).
gagtattacattaaagtca

SEQ ID NO: 14641 - DNA, 19 bp, Homo sapiens
  siRNA target sequence for ZNF147 (NM_005082.2,1476-1494).
gtcagagtgctatacagta

SEQ ID NO: 14642 - DNA, 19 bp, Homo sapiens
  siRNA target sequence for ZNF147 (NM_005082.2,1531-1549).
catccccagaggttcacat

SEQ ID NO: 14643 - DNA, 19 bp, Homo sapiens
  siRNA target sequence for ZNF147 (NM_005082.2,1534-1552).
ccccagaggttcacatact

SEQ ID NO: 14644 - DNA, 19 bp, Homo sapiens
  siRNA target sequence for ZNF147 (NM_005082.2,1787-1805).
gggtgggcgtgcttctcaa

SEQ ID NO: 14645 - DNA, 19 bp, Homo sapiens
  siRNA target sequence for ZNF147 (NM_005082.2,1808-1826).
gtgaccacggctttgtcat

SEQ ID NO: 14646 - DNA, 19 bp, Homo sapiens
  siRNA target sequence for ZNF147 (NM_005082.2,1813-1831).
cacggctttgtcatcttct

SEQ ID NO: 14647 - DNA, 19 bp, Homo sapiens
  siRNA target sequence for ZNF147 (NM_005082.2,1849-1867).
gtccacctgatgtataagt

SEQ ID NO: 14648 - DNA, 19 bp, Homo sapiens
  siRNA target sequence for ZNF147 (NM_005082.2,1866-1884).
gttcagggtggactttact

SEQ ID NO: 14649 - DNA, 19 bp, Homo sapiens
  siRNA target sequence for ZNF154 (NM_003444.1,562-580).
ggggagcaatcaaatagca

SEQ ID NO: 14650 - DNA, 19 bp, Homo sapiens
  siRNA target sequence for ZNF154 (NM_003444.1,563-581).
gggagcaatcaaatagcaa

SEQ ID NO: 14651 - DNA, 19 bp, Homo sapiens
  siRNA target sequence for ZNF154 (NM_003444.1,564-582).
ggagcaatcaaatagcaaa

SEQ ID NO: 14652 - DNA, 19 bp, Homo sapiens
  siRNA target sequence for ZNF154 (NM_003444.1,632-650).
gagaacacacaaaagcatt

SEQ ID NO: 14653 - DNA, 19 bp, Homo sapiens
  siRNA target sequence for ZNF154 (NM_003444.1,862-880).
gcagtacgacctcatgaat

SEQ ID NO: 14654 - DNA, 19 bp, Homo sapiens
  siRNA target sequence for ZNF154 (NM_003444.1,1061-1079).
ggaagttttttacatatca

SEQ ID NO: 14655 - DNA, 19 bp, Homo sapiens
  siRNA target sequence for ZNF154 (NM_003444.1,1411-1429).
caaaattccggcctcatta

SEQ ID NO: 14656 - DNA, 19 bp, Homo sapiens
  siRNA target sequence for ZNF155 (NM_003445.2,543-561).
ggtctcaggactctatcat

SEQ ID NO: 14657 - DNA, 19 bp, Homo sapiens
  siRNA target sequence for ZNF155 (NM_003445.2,614-632).
ggactacccacaattcata

SEQ ID NO: 14658 - DNA, 19 bp, Homo sapiens
  siRNA target sequence for ZNF155 (NM_003445.2,1083-1101).
gtggtaagaccttctattt

SEQ ID NO: 14659 - DNA, 19 bp, Homo sapiens
  siRNA target sequence for ZNF155 (NM_003445.2,1085-1103).
ggtaagaccttctatttta

SEQ ID NO: 14660 - DNA, 19 bp, Homo sapiens
  siRNA target sequence for ZNF155 (NM_003445.2,1505-1523).
gggaagggctatgttacta

SEQ ID NO: 14661 - DNA, 19 bp, Homo sapiens
  siRNA target sequence for ZNF155 (NM_003445.2,1506-1524).
ggaagggctatgttactaa

SEQ ID NO: 14662 - DNA, 19 bp, Homo sapiens
  siRNA target sequence for ZNF155 (NM_003445.2,1511-1529).
ggctatgttactaagttta

SEQ ID NO: 14663 - DNA, 19 bp, Homo sapiens
  siRNA target sequence for ZNF155 (NM_003445.2,1512-1530).
gctatgttactaagtttaa

SEQ ID NO: 14664 - DNA, 19 bp, Homo sapiens
  siRNA target sequence for ZNF155 (NM_003445.2,1706-1724).
gaccagccgagagactata

SEQ ID NO: 14665 - DNA, 19 bp, Homo sapiens
  siRNA target sequence for ZNF155 (NM_003445.2,1708-1726).
ccagccgagagactatagt

SEQ ID NO: 14666 - DNA, 19 bp, Homo sapiens
  siRNA target sequence for ZNF157 (NM_003446.2,362-380).
ctcaggccatggttactca

SEQ ID NO: 14667 - DNA, 19 bp, Homo sapiens
  siRNA target sequence for ZNF157 (NM_003446.2,393-411).
ctgctgtgtggcaatggtt

SEQ ID NO: 14668 - DNA, 19 bp, Homo sapiens
  siRNA target sequence for ZNF157 (NM_003446.2,427-445).
ccctcaggcatgataatga

SEQ ID NO: 14669 - DNA, 19 bp, Homo sapiens
  siRNA target sequence for ZNF157 (NM_003446.2,528-546).
ggctttgttagacgtaaaa

SEQ ID NO: 14670 - DNA, 19 bp, Homo sapiens
  siRNA target sequence for ZNF157 (NM_003446.2,530-548).
ctttgttagacgtaaaaga

SEQ ID NO: 14671 - DNA, 19 bp, Homo sapiens
  siRNA target sequence for ZNF157 (NM_003446.2,679-697).
ccttcagtgcaagatcata

SEQ ID NO: 14672 - DNA, 19 bp, Homo sapiens
  siRNA target sequence for ZNF157 (NM_003446.2,780-798).
caactcatcctacatacaa

SEQ ID NO: 14673 - DNA, 19 bp, Homo sapiens
  siRNA target sequence for ZNF157 (NM_003446.2,783-801).
ctcatcctacatacaagaa

SEQ ID NO: 14674 - DNA, 19 bp, Homo sapiens
  siRNA target sequence for ZNF157 (NM_003446.2,1256-1274).
gtgtggtaatgctttctat

SEQ ID NO: 14675 - DNA, 19 bp, Homo sapiens
  siRNA target sequence for ZNF157 (NM_003446.2,1576-1594).
ggcgttgtacaatgaagaa

SEQ ID NO: 14676 - DNA, 19 bp, Homo sapiens
  siRNA target sequence for ZNF165 (NM_003447.2,1129-1147).
ggatgaaggacttctgata

SEQ ID NO: 14677 - DNA, 19 bp, Homo sapiens
  siRNA target sequence for ZNF165 (NM_003447.2,1181-1199).
caggacacttgcttacaga

SEQ ID NO: 14678 - DNA, 19 bp, Homo sapiens
  siRNA target sequence for ZNF165 (NM_003447.2,1399-1417).
gcaggcctgggtacatgaa

SEQ ID NO: 14679 - DNA, 19 bp, Homo sapiens
  siRNA target sequence for ZNF165 (NM_003447.2,1403-1421).
gcctgggtacatgaacatt

SEQ ID NO: 14680 - DNA, 19 bp, Homo sapiens
  siRNA target sequence for ZNF165 (NM_003447.2,1438-1456).
ggaggcagtgaccatacta

SEQ ID NO: 14681 - DNA, 19 bp, Homo sapiens
  siRNA target sequence for ZNF165 (NM_003447.2,1495-1513).
ggttcaagcccatgaacat

SEQ ID NO: 14682 - DNA, 19 bp, Homo sapiens
  siRNA target sequence for ZNF165 (NM_003447.2,1548-1566).
ctggaccagcacttaatgt

SEQ ID NO: 14683 - DNA, 19 bp, Homo sapiens
  siRNA target sequence for ZNF165 (NM_003447.2,1591-1609).
ggcccattttgattcatca

SEQ ID NO: 14684 - DNA, 19 bp, Homo sapiens
  siRNA target sequence for ZNF165 (NM_003447.2,1660-1678).
catgccaaagctggaaatt

SEQ ID NO: 14685 - DNA, 19 bp, Homo sapiens
  siRNA target sequence for ZNF165 (NM_003447.2,1720-1738).
ctcaggatacatatcagaa

SEQ ID NO: 14686 - DNA, 19 bp, Homo sapiens
  siRNA target sequence for ZNF165 (NM_003447.2,1775-1793).
ggcagggtaaagagacaat

SEQ ID NO: 14687 - DNA, 19 bp, Homo sapiens
  siRNA target sequence for ZNF165 (NM_003447.2,1917-1935).
gattaaatctgaactcaaa

SEQ ID NO: 14688 - DNA, 19 bp, Homo sapiens
  siRNA target sequence for ZNF165 (NM_003447.2,2079-2097).
ctaaacatgcagcagtttt

SEQ ID NO: 14689 - DNA, 19 bp, Homo sapiens
  siRNA target sequence for ZNF165 (NM_003447.2,2311-2329).
caacctgaactcacatctt

SEQ ID NO: 14690 - DNA, 19 bp, Homo sapiens
  siRNA target sequence for ZNF165 (NM_003447.2,2315-2333).
ctgaactcacatcttatca

SEQ ID NO: 14691 - DNA, 19 bp, Homo sapiens
  siRNA target sequence for ZNF165 (NM_003447.2,2395-2413).
ccgagtgagctcacatctt

SEQ ID NO: 14692 - DNA, 19 bp, Homo sapiens
  siRNA target sequence for ZNF165 (NM_003447.2,2408-2426).
catcttattcgacacttta

SEQ ID NO: 14693 - DNA, 19 bp, Homo sapiens
  siRNA target sequence for ZNF167 (NM_018651.1,197-215).
gcagtctccagaagaacta

SEQ ID NO: 14694 - DNA, 19 bp, Homo sapiens
  siRNA target sequence for ZNF167 (NM_018651.1,198-216).
cagtctccagaagaactat

SEQ ID NO: 14695 - DNA, 19 bp, Homo sapiens
  siRNA target sequence for ZNF167 (NM_018651.1,217-235).
cctcctgtctgcgaaatct

SEQ ID NO: 14696 - DNA, 19 bp, Homo sapiens
  siRNA target sequence for ZNF167 (NM_018651.1,241-259).
ctacacttcaggcaattgt

SEQ ID NO: 14697 - DNA, 19 bp, Homo sapiens
  siRNA target sequence for ZNF167 (NM_018651.1,244-262).
cacttcaggcaattgtgtt

SEQ ID NO: 14698 - DNA, 19 bp, Homo sapiens
  siRNA target sequence for ZNF167 (NM_018651.1,458-476).
ctgtggtggaggatttcca

SEQ ID NO: 14699 - DNA, 19 bp, Homo sapiens
  siRNA target sequence for ZNF167 (NM_018651.1,553-571).
ctgggtacaacaaaggaat

SEQ ID NO: 14700 - DNA, 19 bp, Homo sapiens
  siRNA target sequence for ZNF167 (NM_018651.1,661-679).
ggggacttcgctcaatgta

SEQ ID NO: 14701 - DNA, 19 bp, Homo sapiens
  siRNA target sequence for ZNF167 (NM_018651.1,663-681).
ggacttcgctcaatgtact

SEQ ID NO: 14702 - DNA, 19 bp, Homo sapiens
  siRNA target sequence for ZNF167 (NM_018651.1,664-682).
gacttcgctcaatgtactt

SEQ ID NO: 14703 - DNA, 19 bp, Homo sapiens
  siRNA target sequence for ZNF167 (NM_018651.1,773-791).
catatgaggacctatctgt

SEQ ID NO: 14704 - DNA, 19 bp, Homo sapiens
  siRNA target sequence for ZNF167 (NM_018651.1,884-902).
ccttggcaggtgagaacat

SEQ ID NO: 14705 - DNA, 19 bp, Homo sapiens
  siRNA target sequence for ZNF167 (NM_018651.1,890-908).
caggtgagaacatgatgaa

SEQ ID NO: 14706 - DNA, 19 bp, Homo sapiens
  siRNA target sequence for ZNF167 (NM_018651.1,1579-1597).
ggagaggcattcattcgaa

SEQ ID NO: 14707 - DNA, 19 bp, Homo sapiens
  siRNA target sequence for ZNF167 (NM_018651.1,1584-1602).
ggcattcattcgaagcaaa

SEQ ID NO: 14708 - DNA, 19 bp, Homo sapiens
  siRNA target sequence for ZNF167 (NM_018651.1,2323-2341).
ctggcttggtcagtttctt

SEQ ID NO: 14709 - DNA, 19 bp, Homo sapiens
  siRNA target sequence for ZNF174 (NM_003450.1,982-1000).
cagtgggtggccgtttgta

SEQ ID NO: 14710 - DNA, 19 bp, Homo sapiens
  siRNA target sequence for ZNF174 (NM_003450.1,998-1016).
gtatgcaggggcaaaaggt

SEQ ID NO: 14711 - DNA, 19 bp, Homo sapiens
  siRNA target sequence for ZNF174 (NM_003450.1,1418-1436).
gacattgcagggtggaata

SEQ ID NO: 14712 - DNA, 19 bp, Homo sapiens
  siRNA target sequence for ZNF174 (NM_003450.1,1420-1438).
cattgcagggtggaataca

SEQ ID NO: 14713 - DNA, 19 bp, Homo sapiens
  siRNA target sequence for ZNF174 (NM_003450.1,1437-1455).
catcagcagccccctaaaa

SEQ ID NO: 14714 - DNA, 19 bp, Homo sapiens
  siRNA target sequence for ZNF174 (NM_003450.1,1508-1526).
gcaaccgtttgcaacatct

SEQ ID NO: 14715 - DNA, 19 bp, Homo sapiens
  siRNA target sequence for ZNF174 (NM_003450.1,1509-1527).
caaccgtttgcaacatctt

SEQ ID NO: 14716 - DNA, 19 bp, Homo sapiens
  siRNA target sequence for ZNF175 (NM_007147.2,381-399).
gcctgctgatgtgaattta

SEQ ID NO: 14717 - DNA, 19 bp, Homo sapiens
  siRNA target sequence for ZNF175 (NM_007147.2,382-400).
cctgctgatgtgaatttat

SEQ ID NO: 14718 - DNA, 19 bp, Homo sapiens
  siRNA target sequence for ZNF175 (NM_007147.2,570-588).
cgcagtggggtatcacatt

SEQ ID NO: 14719 - DNA, 19 bp, Homo sapiens
  siRNA target sequence for ZNF175 (NM_007147.2,686-704).
ggcttgaaatcccacaaaa

SEQ ID NO: 14720 - DNA, 19 bp, Homo sapiens
  siRNA target sequence for ZNF175 (NM_007147.2,696-714).
cccacaaaaggagatttct

SEQ ID NO: 14721 - DNA, 19 bp, Homo sapiens
  siRNA target sequence for ZNF175 (NM_007147.2,767-785).
catggtgttccattttaga

SEQ ID NO: 14722 - DNA, 19 bp, Homo sapiens
  siRNA target sequence for ZNF175 (NM_007147.2,770-788).
ggtgttccattttagaaga

SEQ ID NO: 14723 - DNA, 19 bp, Homo sapiens
  siRNA target sequence for ZNF175 (NM_007147.2,799-817).
gatgctgaccgcacaaaga

SEQ ID NO: 14724 - DNA, 19 bp, Homo sapiens
  siRNA target sequence for ZNF175 (NM_007147.2,803-821).
ctgaccgcacaaagaaaga

SEQ ID NO: 14725 - DNA, 19 bp, Homo sapiens
  siRNA target sequence for ZNF175 (NM_007147.2,886-904).
gaaagcaattgtgaatata

SEQ ID NO: 14726 - DNA, 19 bp, Homo sapiens
  siRNA target sequence for ZNF175 (NM_007147.2,964-982).
cagaaatgttgcttattta

SEQ ID NO: 14727 - DNA, 19 bp, Homo sapiens
  siRNA target sequence for ZNF175 (NM_007147.2,1014-1032).
cggtcagaatgaaagcaat

SEQ ID NO: 14728 - DNA, 19 bp, Homo sapiens
  siRNA target sequence for ZNF175 (NM_007147.2,1060-1078).
gggtctggtcagctattca

SEQ ID NO: 14729 - DNA, 19 bp, Homo sapiens
  siRNA target sequence for ZNF175 (NM_007147.2,1093-1111).
gatgcctgcagcaagaata

SEQ ID NO: 14730 - DNA, 19 bp, Homo sapiens
  siRNA target sequence for ZNF175 (NM_007147.2,1156-1174).
gtctgtggccataaacagt

SEQ ID NO: 14731 - DNA, 19 bp, Homo sapiens
  siRNA target sequence for ZNF175 (NM_007147.2,1285-1303).
gtaggaaacctccatgaat

SEQ ID NO: 14732 - DNA, 19 bp, Homo sapiens
  siRNA target sequence for ZNF175 (NM_007147.2,1323-1341).
cttcatgccacaactaaaa

SEQ ID NO: 14733 - DNA, 19 bp, Homo sapiens
  siRNA target sequence for ZNF175 (NM_007147.2,1348-1366).
gtatatctgacagatcata

SEQ ID NO: 14734 - DNA, 19 bp, Homo sapiens
  siRNA target sequence for ZNF175 (NM_007147.2,1358-1376).
cagatcatacaggtgatat

SEQ ID NO: 14735 - DNA, 19 bp, Homo sapiens
  siRNA target sequence for ZNF175 (NM_007147.2,1428-1446).
gcttacgcaccagaaaaca

SEQ ID NO: 14736 - DNA, 19 bp, Homo sapiens
  siRNA target sequence for ZNF175 (NM_007147.2,1489-1507).
gcctttttccagatgttat

SEQ ID NO: 14737 - DNA, 19 bp, Homo sapiens
  siRNA target sequence for ZNF175 (NM_007147.2,1836-1854).
caagtcacagcttgatata

SEQ ID NO: 14738 - DNA, 19 bp, Homo sapiens
  siRNA target sequence for ZNF175 (NM_007147.2,2084-2102).
cttctaagtctcaattcaa

SEQ ID NO: 14739 - DNA, 19 bp, Homo sapiens
  siRNA target sequence for ZNF175 (NM_007147.2,2087-2105).
ctaagtctcaattcaaaga

SEQ ID NO: 14740 - DNA, 19 bp, Homo sapiens
  siRNA target sequence for ZNF175 (NM_007147.2,2268-2286).
gattacccatcaaagaact

SEQ ID NO: 14741 - DNA, 19 bp, Homo sapiens
  siRNA target sequence for ZNF187 (NM_152736.2,220-238).
cggcatgagtgtgaagtta

SEQ ID NO: 14742 - DNA, 19 bp, Homo sapiens
  siRNA target sequence for ZNF187 (NM_152736.2,222-240).
gcatgagtgtgaagttaca

SEQ ID NO: 14743 - DNA, 19 bp, Homo sapiens
  siRNA target sequence for ZNF187 (NM_152736.2,223-241).
catgagtgtgaagttacaa

SEQ ID NO: 14744 - DNA, 19 bp, Homo sapiens
  siRNA target sequence for ZNF187 (NM_152736.2,283-301).
gggaagcttattgtagtaa

SEQ ID NO: 14745 - DNA, 19 bp, Homo sapiens
  siRNA target sequence for ZNF187 (NM_152736.2,324-342).
gtcatctgggaaaatatct

SEQ ID NO: 14746 - DNA, 19 bp, Homo sapiens
  siRNA target sequence for ZNF187 (NM_152736.2,358-376).
cataatgagggctctaact

SEQ ID NO: 14747 - DNA, 19 bp, Homo sapiens
  siRNA target sequence for ZNF187 (NM_152736.2,427-445).
gaacgtgagcagagattca

SEQ ID NO: 14748 - DNA, 19 bp, Homo sapiens
  siRNA target sequence for ZNF187 (NM_152736.2,768-786).
gcgcagctctcaccttaat

SEQ ID NO: 14749 - DNA, 19 bp, Homo sapiens
  siRNA target sequence for ZNF187 (NM_152736.2,892-910).
cactccaaaagccatcaat

SEQ ID NO: 14750 - DNA, 19 bp, Homo sapiens
  siRNA target sequence for ZNF187 (NM_152736.2,1133-1151).
gatatcaccacaaagacaa

SEQ ID NO: 14751 - DNA, 19 bp, Homo sapiens
  siRNA target sequence for ZNF189 (NM_003452.2,305-323).
cgaaggggttgctgacatt

SEQ ID NO: 14752 - DNA, 19 bp, Homo sapiens
  siRNA target sequence for ZNF189 (NM_003452.2,306-324).
gaaggggttgctgacattt

SEQ ID NO: 14753 - DNA, 19 bp, Homo sapiens
  siRNA target sequence for ZNF189 (NM_003452.2,511-529).
ccacagggtgtaatagtta

SEQ ID NO: 14754 - DNA, 19 bp, Homo sapiens
  siRNA target sequence for ZNF189 (NM_003452.2,516-534).
gggtgtaatagttacaaga

SEQ ID NO: 14755 - DNA, 19 bp, Homo sapiens
  siRNA target sequence for ZNF189 (NM_003452.2,518-536).
gtgtaatagttacaagaat

SEQ ID NO: 14756 - DNA, 19 bp, Homo sapiens
  siRNA target sequence for ZNF189 (NM_003452.2,520-538).
gtaatagttacaagaatca

SEQ ID NO: 14757 - DNA, 19 bp, Homo sapiens
  siRNA target sequence for ZNF189 (NM_003452.2,583-601).
cttgttggtaggttagata

SEQ ID NO: 14758 - DNA, 19 bp, Homo sapiens
  siRNA target sequence for ZNF189 (NM_003452.2,687-705).
ccgtaaaagaccaaactca

SEQ ID NO: 14759 - DNA, 19 bp, Homo sapiens
  siRNA target sequence for ZNF189 (NM_003452.2,750-768).
ccgcaaggcccatttcatt

SEQ ID NO: 14760 - DNA, 19 bp, Homo sapiens
  siRNA target sequence for ZNF189 (NM_003452.2,827-845).
gttttagtcgcagttcatt

SEQ ID NO: 14761 - DNA, 19 bp, Homo sapiens
  siRNA target sequence for ZNF189 (NM_003452.2,833-851).
gtcgcagttcatttgttat

SEQ ID NO: 14762 - DNA, 19 bp, Homo sapiens
  siRNA target sequence for ZNF189 (NM_003452.2,836-854).
gcagttcatttgttattga

SEQ ID NO: 14763 - DNA, 19 bp, Homo sapiens
  siRNA target sequence for ZNF189 (NM_003452.2,837-855).
cagttcatttgttattgaa

SEQ ID NO: 14764 - DNA, 19 bp, Homo sapiens
  siRNA target sequence for ZNF189 (NM_003452.2,1005-1023).
gagaaggagccttgttaaa

SEQ ID NO: 14765 - DNA, 19 bp, Homo sapiens
  siRNA target sequence for ZNF189 (NM_003452.2,1007-1025).
gaaggagccttgttaaaca

SEQ ID NO: 14766 - DNA, 19 bp, Homo sapiens
  siRNA target sequence for ZNF189 (NM_003452.2,1158-1176).
gaagagctttagtcgaaat

SEQ ID NO: 14767 - DNA, 19 bp, Homo sapiens
  siRNA target sequence for ZNF189 (NM_003452.2,1252-1270).
cgattaagcacatacctta

SEQ ID NO: 14768 - DNA, 19 bp, Homo sapiens
  siRNA target sequence for ZNF189 (NM_003452.2,1253-1271).
gattaagcacataccttat

SEQ ID NO: 14769 - DNA, 19 bp, Homo sapiens
  siRNA target sequence for ZNF189 (NM_003452.2,1547-1565).
gggagaagacttatccata

SEQ ID NO: 14770 - DNA, 19 bp, Homo sapiens
  siRNA target sequence for ZNF189 (NM_003452.2,1554-1572).
gacttatccatacaatgaa

SEQ ID NO: 14771 - DNA, 19 bp, Homo sapiens
  siRNA target sequence for ZNF189 (NM_003452.2,1591-1609).
ccaaattgcagtcttgtta

SEQ ID NO: 14772 - DNA, 19 bp, Homo sapiens
  siRNA target sequence for ZNF189 (NM_003452.2,1623-1641).
ctaccctaaggagaaatct

SEQ ID NO: 14773 - DNA, 19 bp, Homo sapiens
  siRNA target sequence for ZNF189 (NM_003452.2,1673-1691).
gtgttagtgctcatcttgt

SEQ ID NO: 14774 - DNA, 19 bp, Homo sapiens
  siRNA target sequence for ZNF189 (NM_003452.2,1845-1863).
gctttgtaatcttattcga

SEQ ID NO: 14775 - DNA, 19 bp, Homo sapiens
  siRNA target sequence for ZNF189 (NM_003452.2,1928-1946).
ggaactcgggtcttattca

SEQ ID NO: 14776 - DNA, 19 bp, Homo sapiens
  siRNA target sequence for ZNF189 (NM_003452.2,1987-2005).
gagaagtgcgacaaaagtt

SEQ ID NO: 14777 - DNA, 19 bp, Homo sapiens
  siRNA target sequence for ZNF189 (NM_003452.2,2021-2039).
gtcttgtcaaccatcagaa

SEQ ID NO: 14778 - DNA, 19 bp, Homo sapiens
  siRNA target sequence for ZNF189 (NM_003452.2,2095-2113).
gcctttaattgccgtattt

SEQ ID NO: 14779 - DNA, 19 bp, Homo sapiens
  siRNA target sequence for ZNF189 (NM_003452.2,2105-2123).
gccgtatttctcttattca

SEQ ID NO: 14780 - DNA, 19 bp, Homo sapiens
  siRNA target sequence for ZNF189 (NM_003452.2,2137-2155).
cacacagcatggatgcaat

SEQ ID NO: 14781 - DNA, 19 bp, Homo sapiens
  siRNA target sequence for ZNF19 (NM_006961.2,270-288).
ctctgaaagctcaatacca

SEQ ID NO: 14782 - DNA, 19 bp, Homo sapiens
  siRNA target sequence for ZNF19 (NM_006961.2,510-528).
ggaccaaaaacgtctgtaa

SEQ ID NO: 14783 - DNA, 19 bp, Homo sapiens
  siRNA target sequence for ZNF19 (NM_006961.2,548-566).
gacagtgagtccacattaa

SEQ ID NO: 14784 - DNA, 19 bp, Homo sapiens
  siRNA target sequence for ZNF19 (NM_006961.2,552-570).
gtgagtccacattaatcca

SEQ ID NO: 14785 - DNA, 19 bp, Homo sapiens
  siRNA target sequence for ZNF19 (NM_006961.2,640-658).
cttcccagaaacacgtaat

SEQ ID NO: 14786 - DNA, 19 bp, Homo sapiens
  siRNA target sequence for ZNF19 (NM_006961.2,651-669).
cacgtaatgtggaaaagca

SEQ ID NO: 14787 - DNA, 19 bp, Homo sapiens
  siRNA target sequence for ZNF19 (NM_006961.2,766-784).
cagctacttttcttactat

SEQ ID NO: 14788 - DNA, 19 bp, Homo sapiens
  siRNA target sequence for ZNF19 (NM_006961.2,845-863).
gcctttaatggtaattctt

SEQ ID NO: 14789 - DNA, 19 bp, Homo sapiens
  siRNA target sequence for ZNF19 (NM_006961.2,925-943).
gcgagcctttaatgataat

SEQ ID NO: 14790 - DNA, 19 bp, Homo sapiens
  siRNA target sequence for ZNF19 (NM_006961.2,975-993).
gtggggacagaccctatta

SEQ ID NO: 14791 - DNA, 19 bp, Homo sapiens
  siRNA target sequence for ZNF19 (NM_006961.2,979-997).
ggacagaccctattactgt

SEQ ID NO: 14792 - DNA, 19 bp, Homo sapiens
  siRNA target sequence for ZNF19 (NM_006961.2,1020-1038).
cgagtagttccgagtttgt

SEQ ID NO: 14793 - DNA, 19 bp, Homo sapiens
  siRNA target sequence for ZNF19 (NM_006961.2,1021-1039).
gagtagttccgagtttgtt

SEQ ID NO: 14794 - DNA, 19 bp, Homo sapiens
  siRNA target sequence for ZNF19 (NM_006961.2,1023-1041).
gtagttccgagtttgttat

SEQ ID NO: 14795 - DNA, 19 bp, Homo sapiens
  siRNA target sequence for ZNF19 (NM_006961.2,1029-1047).
ccgagtttgttatacatca

SEQ ID NO: 14796 - DNA, 19 bp, Homo sapiens
  siRNA target sequence for ZNF19 (NM_006961.2,1092-1110).
gcaaagcttttgttggtaa

SEQ ID NO: 14797 - DNA, 19 bp, Homo sapiens
  siRNA target sequence for ZNF19 (NM_006961.2,1270-1288).
caattttcatacaaaacta

SEQ ID NO: 14798 - DNA, 19 bp, Homo sapiens
  siRNA target sequence for ZNF19 (NM_006961.2,1542-1560).
gtcaccttgagcatgtcta

SEQ ID NO: 14799 - DNA, 19 bp, Homo sapiens
  siRNA target sequence for ZNF192 (NM_006298.1,237-255).
ctgaagaggatcttgtaat

SEQ ID NO: 14800 - DNA, 19 bp, Homo sapiens
  siRNA target sequence for ZNF192 (NM_006298.1,290-308).
gaatctagtctgcatgaaa

SEQ ID NO: 14801 - DNA, 19 bp, Homo sapiens
  siRNA target sequence for ZNF192 (NM_006298.1,420-438).
ggctgaggccagatttgaa

SEQ ID NO: 14802 - DNA, 19 bp, Homo sapiens
  siRNA target sequence for ZNF192 (NM_006298.1,555-573).
ccctattagaggatttgga

SEQ ID NO: 14803 - DNA, 19 bp, Homo sapiens
  siRNA target sequence for ZNF192 (NM_006298.1,556-574).
cctattagaggatttggaa

SEQ ID NO: 14804 - DNA, 19 bp, Homo sapiens
  siRNA target sequence for ZNF192 (NM_006298.1,634-652).
ctgggaggaggtagtacat

SEQ ID NO: 14805 - DNA, 19 bp, Homo sapiens
  siRNA target sequence for ZNF192 (NM_006298.1,637-655).
ggaggaggtagtacattca

SEQ ID NO: 14806 - DNA, 19 bp, Homo sapiens
  siRNA target sequence for ZNF192 (NM_006298.1,734-752).
caagagagagccatgtcta

SEQ ID NO: 14807 - DNA, 19 bp, Homo sapiens
  siRNA target sequence for ZNF192 (NM_006298.1,859-877).
ggctgtgtcccttattcga

SEQ ID NO: 14808 - DNA, 19 bp, Homo sapiens
  siRNA target sequence for ZNF192 (NM_006298.1,984-1002).
gggaattagcttcaaaaca

SEQ ID NO: 14809 - DNA, 19 bp, Homo sapiens
  siRNA target sequence for ZNF193 (NM_006299.2,548-566).
gctcgatgaaccacaacat

SEQ ID NO: 14810 - DNA, 19 bp, Homo sapiens
  siRNA target sequence for ZNF193 (NM_006299.2,692-710).
gaagtgccattctattgga

SEQ ID NO: 14811 - DNA, 19 bp, Homo sapiens
  siRNA target sequence for ZNF193 (NM_006299.2,757-775).
ggaaagactgtcctaagat

SEQ ID NO: 14812 - DNA, 19 bp, Homo sapiens
  siRNA target sequence for ZNF193 (NM_006299.2,758-776).
gaaagactgtcctaagata

SEQ ID NO: 14813 - DNA, 19 bp, Homo sapiens
  siRNA target sequence for ZNF193 (NM_006299.2,780-798).
gaaccacatgggaaaatgt

SEQ ID NO: 14814 - DNA, 19 bp, Homo sapiens
  siRNA target sequence for ZNF193 (NM_006299.2,853-871).
gtgaacataaggataggat

SEQ ID NO: 14815 - DNA, 19 bp, Homo sapiens
  siRNA target sequence for ZNF193 (NM_006299.2,902-920).
ggggcaacacaaatgtgat

SEQ ID NO: 14816 - DNA, 19 bp, Homo sapiens
  siRNA target sequence for ZNF193 (NM_006299.2,1047-1065).
caccgaggaatccacaata

SEQ ID NO: 14817 - DNA, 19 bp, Homo sapiens
  siRNA target sequence for ZNF193 (NM_006299.2,1049-1067).
ccgaggaatccacaatata

SEQ ID NO: 14818 - DNA, 19 bp, Homo sapiens
  siRNA target sequence for ZNF193 (NM_006299.2,1051-1069).
gaggaatccacaatataca

SEQ ID NO: 14819 - DNA, 19 bp, Homo sapiens
  siRNA target sequence for ZNF193 (NM_006299.2,1054-1072).
gaatccacaatatacagaa

SEQ ID NO: 14820 - DNA, 19 bp, Homo sapiens
  siRNA target sequence for ZNF193 (NM_006299.2,1187-1205).
ctacagtcggcgttcattt

SEQ ID NO: 14821 - DNA, 19 bp, Homo sapiens
  siRNA target sequence for ZNF193 (NM_006299.2,1192-1210).
gtcggcgttcatttctcat

SEQ ID NO: 14822 - DNA, 19 bp, Homo sapiens
  siRNA target sequence for ZNF193 (NM_006299.2,1195-1213).
ggcgttcatttctcattga

SEQ ID NO: 14823 - DNA, 19 bp, Homo sapiens
  siRNA target sequence for ZNF193 (NM_006299.2,1196-1214).
gcgttcatttctcattgaa

SEQ ID NO: 14824 - DNA, 19 bp, Homo sapiens
  siRNA target sequence for ZNF197 (NM_006991.2,124-142).
ctcccacctacactttaga

SEQ ID NO: 14825 - DNA, 19 bp, Homo sapiens
  siRNA target sequence for ZNF197 (NM_006991.2,128-146).
cacctacactttagacaat

SEQ ID NO: 14826 - DNA, 19 bp, Homo sapiens
  siRNA target sequence for ZNF197 (NM_006991.2,130-148).
cctacactttagacaatta

SEQ ID NO: 14827 - DNA, 19 bp, Homo sapiens
  siRNA target sequence for ZNF197 (NM_006991.2,516-534).
ctgacctagtggcattcaa

SEQ ID NO: 14828 - DNA, 19 bp, Homo sapiens
  siRNA target sequence for ZNF197 (NM_006991.2,805-823).
gacatcaaagccaagtagt

SEQ ID NO: 14829 - DNA, 19 bp, Homo sapiens
  siRNA target sequence for ZNF197 (NM_006991.2,814-832).
gccaagtagttctcaaaga

SEQ ID NO: 14830 - DNA, 19 bp, Homo sapiens
  siRNA target sequence for ZNF197 (NM_006991.2,833-851).
gcagactctcataaaggaa

SEQ ID NO: 14831 - DNA, 19 bp, Homo sapiens
  siRNA target sequence for ZNF197 (NM_006991.2,838-856).
ctctcataaaggaacatca

SEQ ID NO: 14832 - DNA, 19 bp, Homo sapiens
  siRNA target sequence for ZNF197 (NM_006991.2,875-893).
gttccccaggtccttgatt

SEQ ID NO: 14833 - DNA, 19 bp, Homo sapiens
  siRNA target sequence for ZNF197 (NM_006991.2,879-897).
cccaggtccttgattttga

SEQ ID NO: 14834 - DNA, 19 bp, Homo sapiens
  siRNA target sequence for ZNF197 (NM_006991.2,902-920).
gagtgtgaatggcaagttt

SEQ ID NO: 14835 - DNA, 19 bp, Homo sapiens
  siRNA target sequence for ZNF197 (NM_006991.2,1057-1075).
gactttcggttcagctatt

SEQ ID NO: 14836 - DNA, 19 bp, Homo sapiens
  siRNA target sequence for ZNF197 (NM_006991.2,1063-1081).
cggttcagctatttctgaa

SEQ ID NO: 14837 - DNA, 19 bp, Homo sapiens
  siRNA target sequence for ZNF197 (NM_006991.2,1091-1109).
ggtactgaaggaaagaagt

SEQ ID NO: 14838 - DNA, 19 bp, Homo sapiens
  siRNA target sequence for ZNF197 (NM_006991.2,1229-1247).
cagcgttcgagccttctaa

SEQ ID NO: 14839 - DNA, 19 bp, Homo sapiens
  siRNA target sequence for ZNF197 (NM_006991.2,1233-1251).
gttcgagccttctaatgca

SEQ ID NO: 14840 - DNA, 19 bp, Homo sapiens
  siRNA target sequence for ZNF197 (NM_006991.2,1236-1254).
cgagccttctaatgcattt

SEQ ID NO: 14841 - DNA, 19 bp, Homo sapiens
  siRNA target sequence for ZNF197 (NM_006991.2,1317-1335).
gtgcttaccttctaaacca

SEQ ID NO: 14842 - DNA, 19 bp, Homo sapiens
  siRNA target sequence for ZNF197 (NM_006991.2,1398-1416).
ggcactcaggcctaattat

SEQ ID NO: 14843 - DNA, 19 bp, Homo sapiens
  siRNA target sequence for ZNF197 (NM_006991.2,1399-1417).
gcactcaggcctaattata

SEQ ID NO: 14844 - DNA, 19 bp, Homo sapiens
  siRNA target sequence for ZNF197 (NM_006991.2,1404-1422).
caggcctaattatacatct

SEQ ID NO: 14845 - DNA, 19 bp, Homo sapiens
  siRNA target sequence for ZNF197 (NM_006991.2,1406-1424).
ggcctaattatacatctaa

SEQ ID NO: 14846 - DNA, 19 bp, Homo sapiens
  siRNA target sequence for ZNF197 (NM_006991.2,1642-1660).
ctttgctcagaccacttat

SEQ ID NO: 14847 - DNA, 19 bp, Homo sapiens
  siRNA target sequence for ZNF197 (NM_006991.2,1646-1664).
gctcagaccacttatctta

SEQ ID NO: 14848 - DNA, 19 bp, Homo sapiens
  siRNA target sequence for ZNF197 (NM_006991.2,1737-1755).
gcaaaagcctcctcttaca

SEQ ID NO: 14849 - DNA, 19 bp, Homo sapiens
  siRNA target sequence for ZNF197 (NM_006991.2,1993-2011).
gagcctcattttacatcaa

SEQ ID NO: 14850 - DNA, 19 bp, Homo sapiens
  siRNA target sequence for ZNF197 (NM_006991.2,2055-2073).
gtaaggtcttcggttcaaa

SEQ ID NO: 14851 - DNA, 19 bp, Homo sapiens
  siRNA target sequence for ZNF197 (NM_006991.2,2059-2077).
ggtcttcggttcaaacaga

SEQ ID NO: 14852 - DNA, 19 bp, Homo sapiens
  siRNA target sequence for ZNF197 (NM_006991.2,2146-2164).
ctttattatgagcaaaagt

SEQ ID NO: 14853 - DNA, 19 bp, Homo sapiens
  siRNA target sequence for ZNF197 (NM_006991.2,2163-2181).
gttttatggtccatcagaa

SEQ ID NO: 14854 - DNA, 19 bp, Homo sapiens
  siRNA target sequence for ZNF197 (NM_006991.2,2440-2458).
cacgagggaaaaatcttat

SEQ ID NO: 14855 - DNA, 19 bp, Homo sapiens
  siRNA target sequence for ZNF197 (NM_006991.2,2648-2666).
gtccttacctctagtagaa

SEQ ID NO: 14856 - DNA, 19 bp, Homo sapiens
  siRNA target sequence for ZNF197 (NM_006991.2,2801-2819).
gacaagtgtaggaaatcct

SEQ ID NO: 14857 - DNA, 19 bp, Homo sapiens
  siRNA target sequence for ZNF197 (NM_006991.2,2879-2897).
gggtgtaatgattgtagta

SEQ ID NO: 14858 - DNA, 19 bp, Homo sapiens
  siRNA target sequence for ZNF197 (NM_006991.2,2880-2898).
ggtgtaatgattgtagtaa

SEQ ID NO: 14859 - DNA, 19 bp, Homo sapiens
  siRNA target sequence for ZNF197 (NM_006991.2,3058-3076).
caccaatgagtccaagatt

SEQ ID NO: 14860 - DNA, 19 bp, Homo sapiens
  siRNA target sequence for ZNF202 (NM_003455.1,29-47).
ccagaggaccaggatcttt

SEQ ID NO: 14861 - DNA, 19 bp, Homo sapiens
  siRNA target sequence for ZNF202 (NM_003455.1,278-296).
gtgctggaacaatttctta

SEQ ID NO: 14862 - DNA, 19 bp, Homo sapiens
  siRNA target sequence for ZNF202 (NM_003455.1,411-429).
gggtgactgtccatgttca

SEQ ID NO: 14863 - DNA, 19 bp, Homo sapiens
  siRNA target sequence for ZNF202 (NM_003455.1,451-469).
ggagacggtgcatttagga

SEQ ID NO: 14864 - DNA, 19 bp, Homo sapiens
  siRNA target sequence for ZNF202 (NM_003455.1,682-700).
gatggttgctcttcttact

SEQ ID NO: 14865 - DNA, 19 bp, Homo sapiens
  siRNA target sequence for ZNF202 (NM_003455.1,730-748).
ggatgtggccgtatgcttt

SEQ ID NO: 14866 - DNA, 19 bp, Homo sapiens
  siRNA target sequence for ZNF202 (NM_003455.1,731-749).
gatgtggccgtatgctttt

SEQ ID NO: 14867 - DNA, 19 bp, Homo sapiens
  siRNA target sequence for ZNF202 (NM_003455.1,1087-1105).
ggacaatccaggtagactt

SEQ ID NO: 14868 - DNA, 19 bp, Homo sapiens
  siRNA target sequence for ZNF202 (NM_003455.1,1088-1106).
gacaatccaggtagactta

SEQ ID NO: 14869 - DNA, 19 bp, Homo sapiens
  siRNA target sequence for ZNF202 (NM_003455.1,1136-1154).
caagtgaatagttttgtga

SEQ ID NO: 14870 - DNA, 19 bp, Homo sapiens
  siRNA target sequence for ZNF202 (NM_003455.1,1151-1169).
gtgaaccttcgggaaacta

SEQ ID NO: 14871 - DNA, 19 bp, Homo sapiens
  siRNA target sequence for ZNF202 (NM_003455.1,1354-1372).
gatgaacgcgccttacaaa

SEQ ID NO: 14872 - DNA, 19 bp, Homo sapiens
  siRNA target sequence for ZNF202 (NM_003455.1,1357-1375).
gaacgcgccttacaaatat

SEQ ID NO: 14873 - DNA, 19 bp, Homo sapiens
  siRNA target sequence for ZNF202 (NM_003455.1,1377-1395).
ccctaaaccggaagaattt

SEQ ID NO: 14874 - DNA, 19 bp, Homo sapiens
  siRNA target sequence for ZNF202 (NM_003455.1,1607-1625).
ggaggcaaaccctacttgt

SEQ ID NO: 14875 - DNA, 19 bp, Homo sapiens
  siRNA target sequence for ZNF202 (NM_003455.1,1784-1802).
ccctgccgatgcaacgaat

SEQ ID NO: 14876 - DNA, 19 bp, Homo sapiens
  siRNA target sequence for ZNF202 (NM_003455.1,1902-1920).
gcagaggatatcacttaat

SEQ ID NO: 14877 - DNA, 19 bp, Homo sapiens
  siRNA target sequence for ZNF206 (NM_032805.1,150-168).
ctctgcacaccaagaaaca

SEQ ID NO: 14878 - DNA, 19 bp, Homo sapiens
  siRNA target sequence for ZNF206 (NM_032805.1,314-332).
ccgctggattttagttgta

SEQ ID NO: 14879 - DNA, 19 bp, Homo sapiens
  siRNA target sequence for ZNF206 (NM_032805.1,950-968).
ccggagttgcagttcatct

SEQ ID NO: 14880 - DNA, 19 bp, Homo sapiens
  siRNA target sequence for ZNF206 (NM_032805.1,1928-1946).
caccgtttccgcaatagct

SEQ ID NO: 14881 - DNA, 19 bp, Homo sapiens
  siRNA target sequence for ZNF207 (NM_003457.1,232-250).
gccgtggtgctggtattgt

SEQ ID NO: 14882 - DNA, 19 bp, Homo sapiens
  siRNA target sequence for ZNF207 (NM_003457.1,233-251).
ccgtggtgctggtattgta

SEQ ID NO: 14883 - DNA, 19 bp, Homo sapiens
  siRNA target sequence for ZNF207 (NM_003457.1,234-252).
cgtggtgctggtattgtaa

SEQ ID NO: 14884 - DNA, 19 bp, Homo sapiens
  siRNA target sequence for ZNF207 (NM_003457.1,240-258).
gctggtattgtaatagaga

SEQ ID NO: 14885 - DNA, 19 bp, Homo sapiens
  siRNA target sequence for ZNF207 (NM_003457.1,249-267).
gtaatagagattttgatga

SEQ ID NO: 14886 - DNA, 19 bp, Homo sapiens
  siRNA target sequence for ZNF207 (NM_003457.1,348-366).
gcttagctattcattgcat

SEQ ID NO: 14887 - DNA, 19 bp, Homo sapiens
  siRNA target sequence for ZNF207 (NM_003457.1,359-377).
cattgcatgcaggtacata

SEQ ID NO: 14888 - DNA, 19 bp, Homo sapiens
  siRNA target sequence for ZNF207 (NM_003457.1,368-386).
caggtacataaagaaacaa

SEQ ID NO: 14889 - DNA, 19 bp, Homo sapiens
  siRNA target sequence for ZNF207 (NM_003457.1,384-402).
caatagatgccgtaccaaa

SEQ ID NO: 14890 - DNA, 19 bp, Homo sapiens
  siRNA target sequence for ZNF207 (NM_003457.1,389-407).
gatgccgtaccaaatgcaa

SEQ ID NO: 14891 - DNA, 19 bp, Homo sapiens
  siRNA target sequence for ZNF207 (NM_003457.1,414-432).
gaagaacagacatagagtt

SEQ ID NO: 14892 - DNA, 19 bp, Homo sapiens
  siRNA target sequence for ZNF207 (NM_003457.1,420-438).
cagacatagagttggaaat

SEQ ID NO: 14893 - DNA, 19 bp, Homo sapiens
  siRNA target sequence for ZNF207 (NM_003457.1,480-498).
gacgacgacttcttgaaca

SEQ ID NO: 14894 - DNA, 19 bp, Homo sapiens
  siRNA target sequence for ZNF207 (NM_003457.1,485-503).
cgacttcttgaacagaaaa

SEQ ID NO: 14895 - DNA, 19 bp, Homo sapiens
  siRNA target sequence for ZNF207 (NM_003457.1,567-585).
cagcctcaacttcatttca

SEQ ID NO: 14896 - DNA, 19 bp, Homo sapiens
  siRNA target sequence for ZNF207 (NM_003457.1,599-617).
caacctcagcaaggttata

SEQ ID NO: 14897 - DNA, 19 bp, Homo sapiens
  siRNA target sequence for ZNF207 (NM_003457.1,778-796).
gccacctggaccaggaata

SEQ ID NO: 14898 - DNA, 19 bp, Homo sapiens
  siRNA target sequence for ZNF207 (NM_003457.1,885-903).
cagcgccaggtattcttaa

SEQ ID NO: 14899 - DNA, 19 bp, Homo sapiens
  siRNA target sequence for ZNF207 (NM_003457.1,887-905).
gcgccaggtattcttaata

SEQ ID NO: 14900 - DNA, 19 bp, Homo sapiens
  siRNA target sequence for ZNF207 (NM_003457.1,1094-1112).
ggacctgttggtacagatt

SEQ ID NO: 14901 - DNA, 19 bp, Homo sapiens
  siRNA target sequence for ZNF207 (NM_003457.1,1107-1125).
cagatttcaaacccttaaa

SEQ ID NO: 14902 - DNA, 19 bp, Homo sapiens
  siRNA target sequence for ZNF207 (NM_003457.1,1159-1177).
gcctacattccctgcttat

SEQ ID NO: 14903 - DNA, 19 bp, Homo sapiens
  siRNA target sequence for ZNF207 (NM_003457.1,1164-1182).
cattccctgcttatacaca

SEQ ID NO: 14904 - DNA, 19 bp, Homo sapiens
  siRNA target sequence for ZNF207 (NM_003457.1,1232-1250).
gcggcttcaataacaagta

SEQ ID NO: 14905 - DNA, 19 bp, Homo sapiens
  siRNA target sequence for ZNF207 (NM_003457.1,1233-1251).
cggcttcaataacaagtaa

SEQ ID NO: 14906 - DNA, 19 bp, Homo sapiens
  siRNA target sequence for ZNF207 (NM_003457.1,1256-1274).
gctacacttacaacaacta

SEQ ID NO: 14907 - DNA, 19 bp, Homo sapiens
  siRNA target sequence for ZNF207 (NM_003457.1,1275-1293).
gtgcaaccagtaagttgat

SEQ ID NO: 14908 - DNA, 19 bp, Homo sapiens
  siRNA target sequence for ZNF207 (NM_003457.1,1326-1344).
gaagggcacagttacctaa

SEQ ID NO: 14909 - DNA, 19 bp, Homo sapiens
  siRNA target sequence for ZNF207 (NM_003457.1,1329-1347).
gggcacagttacctaagta

SEQ ID NO: 14910 - DNA, 19 bp, Homo sapiens
  siRNA target sequence for ZNF207 (NM_003457.1,1330-1348).
ggcacagttacctaagtat

SEQ ID NO: 14911 - DNA, 19 bp, Homo sapiens
  siRNA target sequence for ZNF207 (NM_003457.1,1341-1359).
ctaagtatcaacgtaatct

SEQ ID NO: 14912 - DNA, 19 bp, Homo sapiens
  siRNA target sequence for ZNF207 (NM_003457.1,1401-1419).
gaccaattggaggtatgat

SEQ ID NO: 14913 - DNA, 19 bp, Homo sapiens
  siRNA target sequence for ZNF207 (NM_003457.1,1468-1486).
gccacctcatggtcagtat

SEQ ID NO: 14914 - DNA, 19 bp, Homo sapiens
  siRNA target sequence for ZNF207 (NM_003457.1,1483-1501).
gtatggtggtcatcatcaa

SEQ ID NO: 14915 - DNA, 19 bp, Homo sapiens
  siRNA target sequence for ZNF207 (NM_003457.1,1599-1617).
gaatgagacctcctgtaat

SEQ ID NO: 14916 - DNA, 19 bp, Homo sapiens
  siRNA target sequence for ZNF211 (NM_006385.2,216-234).
gcttcggttcccatagcta

SEQ ID NO: 14917 - DNA, 19 bp, Homo sapiens
  siRNA target sequence for ZNF211 (NM_006385.2,239-257).
ggtgcttttcaaacttaca

SEQ ID NO: 14918 - DNA, 19 bp, Homo sapiens
  siRNA target sequence for ZNF211 (NM_006385.2,328-346).
ctcagaaacacctgtactt

SEQ ID NO: 14919 - DNA, 19 bp, Homo sapiens
  siRNA target sequence for ZNF211 (NM_006385.2,495-513).
gccgactcctgtgaaatat

SEQ ID NO: 14920 - DNA, 19 bp, Homo sapiens
  siRNA target sequence for ZNF211 (NM_006385.2,627-645).
caccagaggcagcacatta

SEQ ID NO: 14921 - DNA, 19 bp, Homo sapiens
  siRNA target sequence for ZNF211 (NM_006385.2,629-647).
ccagaggcagcacattaca

SEQ ID NO: 14922 - DNA, 19 bp, Homo sapiens
  siRNA target sequence for ZNF211 (NM_006385.2,669-687).
gtggacactgcctcgttta

SEQ ID NO: 14923 - DNA, 19 bp, Homo sapiens
  siRNA target sequence for ZNF211 (NM_006385.2,671-689).
ggacactgcctcgtttaca

SEQ ID NO: 14924 - DNA, 19 bp, Homo sapiens
  siRNA target sequence for ZNF211 (NM_006385.2,855-873).
cacaactggggaaaatgca

SEQ ID NO: 14925 - DNA, 19 bp, Homo sapiens
  siRNA target sequence for ZNF211 (NM_006385.2,879-897).
gcctttagccacatagaca

SEQ ID NO: 14926 - DNA, 19 bp, Homo sapiens
  siRNA target sequence for ZNF211 (NM_006385.2,963-981).
gcatgtacgcgaagatgta

SEQ ID NO: 14927 - DNA, 19 bp, Homo sapiens
  siRNA target sequence for ZNF211 (NM_006385.2,964-982).
catgtacgcgaagatgtaa

SEQ ID NO: 14928 - DNA, 19 bp, Homo sapiens
  siRNA target sequence for ZNF211 (NM_006385.2,973-991).
gaagatgtaacctcattca

SEQ ID NO: 14929 - DNA, 19 bp, Homo sapiens
  siRNA target sequence for ZNF211 (NM_006385.2,1127-1145).
gaaatcgtttagtcagata

SEQ ID NO: 14930 - DNA, 19 bp, Homo sapiens
  siRNA target sequence for ZNF211 (NM_006385.2,1560-1578).
catagctccaaccttaaga

SEQ ID NO: 14931 - DNA, 19 bp, Homo sapiens
  siRNA target sequence for ZNF213 (NM_004220.1,979-997).
gagacatcccattctattt

SEQ ID NO: 14932 - DNA, 19 bp, Homo sapiens
  siRNA target sequence for ZNF215 (NM_013250.1,592-610).
cagcctctgagcaagttga

SEQ ID NO: 14933 - DNA, 19 bp, Homo sapiens
  siRNA target sequence for ZNF215 (NM_013250.1,603-621).
caagttgatggctatctca

SEQ ID NO: 14934 - DNA, 19 bp, Homo sapiens
  siRNA target sequence for ZNF215 (NM_013250.1,606-624).
gttgatggctatctcaaaa

SEQ ID NO: 14935 - DNA, 19 bp, Homo sapiens
  siRNA target sequence for ZNF215 (NM_013250.1,609-627).
gatggctatctcaaaacct

SEQ ID NO: 14936 - DNA, 19 bp, Homo sapiens
  siRNA target sequence for ZNF215 (NM_013250.1,636-654).
gtctctacgtgaacaaaga

SEQ ID NO: 14937 - DNA, 19 bp, Homo sapiens
  siRNA target sequence for ZNF215 (NM_013250.1,661-679).
ctgagagcagatatgtctt

SEQ ID NO: 14938 - DNA, 19 bp, Homo sapiens
  siRNA target sequence for ZNF215 (NM_013250.1,719-737).
ctgaggcatctcgtcaaaa

SEQ ID NO: 14939 - DNA, 19 bp, Homo sapiens
  siRNA target sequence for ZNF215 (NM_013250.1,721-739).
gaggcatctcgtcaaaagt

SEQ ID NO: 14940 - DNA, 19 bp, Homo sapiens
  siRNA target sequence for ZNF215 (NM_013250.1,821-839).
gaccagagattcatacaaa

SEQ ID NO: 14941 - DNA, 19 bp, Homo sapiens
  siRNA target sequence for ZNF215 (NM_013250.1,879-897).
ggcaatcctgcctgaagaa

SEQ ID NO: 14942 - DNA, 19 bp, Homo sapiens
  siRNA target sequence for ZNF215 (NM_013250.1,881-899).
caatcctgcctgaagaagt

SEQ ID NO: 14943 - DNA, 19 bp, Homo sapiens
  siRNA target sequence for ZNF215 (NM_013250.1,898-916).
gtcaggacttgggtgaatt

SEQ ID NO: 14944 - DNA, 19 bp, Homo sapiens
  siRNA target sequence for ZNF215 (NM_013250.1,1188-1206).
gaattcattgcgtaaagca

SEQ ID NO: 14945 - DNA, 19 bp, Homo sapiens
  siRNA target sequence for ZNF215 (NM_013250.1,1197-1215).
gcgtaaagcacatctactt

SEQ ID NO: 14946 - DNA, 19 bp, Homo sapiens
  siRNA target sequence for ZNF215 (NM_013250.1,1232-1250).
gccttaagttggagagtaa

SEQ ID NO: 14947 - DNA, 19 bp, Homo sapiens
  siRNA target sequence for ZNF215 (NM_013250.1,1234-1252).
cttaagttggagagtaaga

SEQ ID NO: 14948 - DNA, 19 bp, Homo sapiens
  siRNA target sequence for ZNF215 (NM_013250.1,1328-1346).
catcccatggagtgattat

SEQ ID NO: 14949 - DNA, 19 bp, Homo sapiens
  siRNA target sequence for ZNF215 (NM_013250.1,1388-1406).
ggaaaggtgagaattggtt

SEQ ID NO: 14950 - DNA, 19 bp, Homo sapiens
  siRNA target sequence for ZNF215 (NM_013250.1,1389-1407).
gaaaggtgagaattggtta

SEQ ID NO: 14951 - DNA, 19 bp, Homo sapiens
  siRNA target sequence for ZNF215 (NM_013250.1,1440-1458).
gccacaagaggctttcatt

SEQ ID NO: 14952 - DNA, 19 bp, Homo sapiens
  siRNA target sequence for ZNF215 (NM_013250.1,1535-1553).
gctcaatttgtgctataca

SEQ ID NO: 14953 - DNA, 19 bp, Homo sapiens
  siRNA target sequence for ZNF215 (NM_013250.1,1536-1554).
ctcaatttgtgctatacaa

SEQ ID NO: 14954 - DNA, 19 bp, Homo sapiens
  siRNA target sequence for ZNF215 (NM_013250.1,1633-1651).
ggtaagcaacattcagaat

SEQ ID NO: 14955 - DNA, 19 bp, Homo sapiens
  siRNA target sequence for ZNF215 (NM_013250.1,1634-1652).
gtaagcaacattcagaata

SEQ ID NO: 14956 - DNA, 19 bp, Homo sapiens
  siRNA target sequence for ZNF215 (NM_013250.1,1660-1678).
gggaatgacttgagtttga

SEQ ID NO: 14957 - DNA, 19 bp, Homo sapiens
  siRNA target sequence for ZNF215 (NM_013250.1,1671-1689).
gagtttgagtacagatatt

SEQ ID NO: 14958 - DNA, 19 bp, Homo sapiens
  siRNA target sequence for ZNF215 (NM_013250.1,1684-1702).
gatattcgacaccaaaaaa

SEQ ID NO: 14959 - DNA, 19 bp, Homo sapiens
  siRNA target sequence for ZNF215 (NM_013250.1,1695-1713).
ccaaaaaagtcatactaca

SEQ ID NO: 14960 - DNA, 19 bp, Homo sapiens
  siRNA target sequence for ZNF215 (NM_013250.1,1696-1714).
caaaaaagtcatactacaa

SEQ ID NO: 14961 - DNA, 19 bp, Homo sapiens
  siRNA target sequence for ZNF215 (NM_013250.1,1747-1765).
gccttctgccgaagttcat

SEQ ID NO: 14962 - DNA, 19 bp, Homo sapiens
  siRNA target sequence for ZNF215 (NM_013250.1,1836-1854).
caaccgacgtacaaacctt

SEQ ID NO: 14963 - DNA, 19 bp, Homo sapiens
  siRNA target sequence for ZNF215 (NM_013250.1,1840-1858).
cgacgtacaaaccttacta

SEQ ID NO: 14964 - DNA, 19 bp, Homo sapiens
  siRNA target sequence for ZNF215 (NM_013250.1,1841-1859).
gacgtacaaaccttactaa

SEQ ID NO: 14965 - DNA, 19 bp, Homo sapiens
  siRNA target sequence for ZNF215 (NM_013250.1,1887-1905).
ggcctgcacaagcaataaa

SEQ ID NO: 14966 - DNA, 19 bp, Homo sapiens
  siRNA target sequence for ZNF215 (NM_013250.1,1888-1906).
gcctgcacaagcaataaat

SEQ ID NO: 14967 - DNA, 19 bp, Homo sapiens
  siRNA target sequence for ZNF215 (NM_013250.1,1890-1908).
ctgcacaagcaataaatgt

SEQ ID NO: 14968 - DNA, 19 bp, Homo sapiens
  siRNA target sequence for ZNF215 (NM_013250.1,1971-1989).
ctatcaatgtgttaactgt

SEQ ID NO: 14969 - DNA, 19 bp, Homo sapiens
  siRNA target sequence for ZNF215 (NM_013250.1,2007-2025).
gagctcctctcttattcga

SEQ ID NO: 14970 - DNA, 19 bp, Homo sapiens
  siRNA target sequence for ZNF215 (NM_013250.1,2023-2041).
cgacaccaaatgattcaca

SEQ ID NO: 14971 - DNA, 19 bp, Homo sapiens
  siRNA target sequence for ZNF217 (NM_006526.2,290-308).
ggaaacatgccaactcaat

SEQ ID NO: 14972 - DNA, 19 bp, Homo sapiens
  siRNA target sequence for ZNF217 (NM_006526.2,303-321).
ctcaatccctcttaatgta

SEQ ID NO: 14973 - DNA, 19 bp, Homo sapiens
  siRNA target sequence for ZNF217 (NM_006526.2,305-323).
caatccctcttaatgtaca

SEQ ID NO: 14974 - DNA, 19 bp, Homo sapiens
  siRNA target sequence for ZNF217 (NM_006526.2,374-392).
gaggatgccttgtcaatga

SEQ ID NO: 14975 - DNA, 19 bp, Homo sapiens
  siRNA target sequence for ZNF217 (NM_006526.2,376-394).
ggatgccttgtcaatgaaa

SEQ ID NO: 14976 - DNA, 19 bp, Homo sapiens
  siRNA target sequence for ZNF217 (NM_006526.2,391-409).
gaaagggaccgctgttgtt

SEQ ID NO: 14977 - DNA, 19 bp, Homo sapiens
  siRNA target sequence for ZNF217 (NM_006526.2,396-414).
ggaccgctgttgttccatt

SEQ ID NO: 14978 - DNA, 19 bp, Homo sapiens
  siRNA target sequence for ZNF217 (NM_006526.2,415-433).
ccgagctacacaagaaaaa

SEQ ID NO: 14979 - DNA, 19 bp, Homo sapiens
  siRNA target sequence for ZNF217 (NM_006526.2,452-470).
gggtatatgcccttggatt

SEQ ID NO: 14980 - DNA, 19 bp, Homo sapiens
  siRNA target sequence for ZNF217 (NM_006526.2,461-479).
cccttggattgcatgttct

SEQ ID NO: 14981 - DNA, 19 bp, Homo sapiens
  siRNA target sequence for ZNF217 (NM_006526.2,484-502).
ccagaccttcacacattca

SEQ ID NO: 14982 - DNA, 19 bp, Homo sapiens
  siRNA target sequence for ZNF217 (NM_006526.2,567-585).
gggttgaagcagagtatct

SEQ ID NO: 14983 - DNA, 19 bp, Homo sapiens
  siRNA target sequence for ZNF217 (NM_006526.2,569-587).
gttgaagcagagtatctca

SEQ ID NO: 14984 - DNA, 19 bp, Homo sapiens
  siRNA target sequence for ZNF217 (NM_006526.2,584-602).
ctcagtccgcttgataaaa

SEQ ID NO: 14985 - DNA, 19 bp, Homo sapiens
  siRNA target sequence for ZNF217 (NM_006526.2,586-604).
cagtccgcttgataaaagt

SEQ ID NO: 14986 - DNA, 19 bp, Homo sapiens
  siRNA target sequence for ZNF217 (NM_006526.2,588-606).
gtccgcttgataaaagtca

SEQ ID NO: 14987 - DNA, 19 bp, Homo sapiens
  siRNA target sequence for ZNF217 (NM_006526.2,664-682).
ggtatgtgggcagacattt

SEQ ID NO: 14988 - DNA, 19 bp, Homo sapiens
  siRNA target sequence for ZNF217 (NM_006526.2,669-687).
gtgggcagacatttagagt

SEQ ID NO: 14989 - DNA, 19 bp, Homo sapiens
  siRNA target sequence for ZNF217 (NM_006526.2,678-696).
catttagagtcgcttttga

SEQ ID NO: 14990 - DNA, 19 bp, Homo sapiens
  siRNA target sequence for ZNF217 (NM_006526.2,684-702).
gagtcgcttttgatgttga

SEQ ID NO: 14991 - DNA, 19 bp, Homo sapiens
  siRNA target sequence for ZNF217 (NM_006526.2,769-787).
ggagccttggtttcttaaa

SEQ ID NO: 14992 - DNA, 19 bp, Homo sapiens
  siRNA target sequence for ZNF217 (NM_006526.2,901-919).
catctcctctccttacaaa

SEQ ID NO: 14993 - DNA, 19 bp, Homo sapiens
  siRNA target sequence for ZNF217 (NM_006526.2,935-953).
ggcttcctatttccaaata

SEQ ID NO: 14994 - DNA, 19 bp, Homo sapiens
  siRNA target sequence for ZNF217 (NM_006526.2,979-997).
ggtgcacaccaaaaaaact

SEQ ID NO: 14995 - DNA, 19 bp, Homo sapiens
  siRNA target sequence for ZNF217 (NM_006526.2,1194-1212).
ccatttgccaagaagtgaa

SEQ ID NO: 14996 - DNA, 19 bp, Homo sapiens
  siRNA target sequence for ZNF217 (NM_006526.2,1354-1372).
ggacgcggatcccaagtta

SEQ ID NO: 14997 - DNA, 19 bp, Homo sapiens
  siRNA target sequence for ZNF217 (NM_006526.2,1716-1734).
caaattattacctcaatat

SEQ ID NO: 14998 - DNA, 19 bp, Homo sapiens
  siRNA target sequence for ZNF217 (NM_006526.2,1806-1824).
catctctgaggtatcactt

SEQ ID NO: 14999 - DNA, 19 bp, Homo sapiens
  siRNA target sequence for ZNF217 (NM_006526.2,1868-1886).
gtcaagaacgatggtaaaa

SEQ ID NO: 15000 - DNA, 19 bp, Homo sapiens
  siRNA target sequence for ZNF217 (NM_006526.2,1919-1937).
gacagtgcgcaaaccaaaa

SEQ ID NO: 15001 - DNA, 19 bp, Homo sapiens
  siRNA target sequence for ZNF217 (NM_006526.2,1921-1939).
cagtgcgcaaaccaaaaat

SEQ ID NO: 15002 - DNA, 19 bp, Homo sapiens
  siRNA target sequence for ZNF217 (NM_006526.2,1923-1941).
gtgcgcaaaccaaaaattt

SEQ ID NO: 15003 - DNA, 19 bp, Homo sapiens
  siRNA target sequence for ZNF217 (NM_006526.2,1983-2001).
cacctgcaaagcagcttaa

SEQ ID NO: 15004 - DNA, 19 bp, Homo sapiens
  siRNA target sequence for ZNF217 (NM_006526.2,2067-2085).
ctcaggatttccataaaaa

SEQ ID NO: 15005 - DNA, 19 bp, Homo sapiens
  siRNA target sequence for ZNF217 (NM_006526.2,2071-2089).
ggatttccataaaaatgca

SEQ ID NO: 15006 - DNA, 19 bp, Homo sapiens
  siRNA target sequence for ZNF217 (NM_006526.2,2133-2151).
cttacctggacctgttaaa

SEQ ID NO: 15007 - DNA, 19 bp, Homo sapiens
  siRNA target sequence for ZNF217 (NM_006526.2,2165-2183).
gttgaaactcaggcaaata

SEQ ID NO: 15008 - DNA, 19 bp, Homo sapiens
  siRNA target sequence for ZNF217 (NM_006526.2,2229-2247).
gcagtaccacccataacct

SEQ ID NO: 15009 - DNA, 19 bp, Homo sapiens
  siRNA target sequence for ZNF217 (NM_006526.2,2230-2248).
cagtaccacccataacctt

SEQ ID NO: 15010 - DNA, 19 bp, Homo sapiens
  siRNA target sequence for ZNF217 (NM_006526.2,2301-2319).
ggccaagtgtggattgtca

SEQ ID NO: 15011 - DNA, 19 bp, Homo sapiens
  siRNA target sequence for ZNF217 (NM_006526.2,2311-2329).
ggattgtcacgaaaaacct

SEQ ID NO: 15012 - DNA, 19 bp, Homo sapiens
  siRNA target sequence for ZNF217 (NM_006526.2,2312-2330).
gattgtcacgaaaaacctt

SEQ ID NO: 15013 - DNA, 19 bp, Homo sapiens
  siRNA target sequence for ZNF217 (NM_006526.2,2318-2336).
cacgaaaaacctttaaatt

SEQ ID NO: 15014 - DNA, 19 bp, Homo sapiens
  siRNA target sequence for ZNF217 (NM_006526.2,2340-2358).
ccgtgggggctcttcacaa

SEQ ID NO: 15015 - DNA, 19 bp, Homo sapiens
  siRNA target sequence for ZNF217 (NM_006526.2,2341-2359).
cgtgggggctcttcacaat

SEQ ID NO: 15016 - DNA, 19 bp, Homo sapiens
  siRNA target sequence for ZNF217 (NM_006526.2,2364-2382).
cggcaatttctttgagtaa

SEQ ID NO: 15017 - DNA, 19 bp, Homo sapiens
  siRNA target sequence for ZNF217 (NM_006526.2,2456-2474).
cagagactggagcataaat

SEQ ID NO: 15018 - DNA, 19 bp, Homo sapiens
  siRNA target sequence for ZNF217 (NM_006526.2,2460-2478).
gactggagcataaatacaa

SEQ ID NO: 15019 - DNA, 19 bp, Homo sapiens
  siRNA target sequence for ZNF217 (NM_006526.2,2501-2519).
cgaaacaagtccttgctta

SEQ ID NO: 15020 - DNA, 19 bp, Homo sapiens
  siRNA target sequence for ZNF217 (NM_006526.2,2547-2565).
cgttgctgggaaaagatgt

SEQ ID NO: 15021 - DNA, 19 bp, Homo sapiens
  siRNA target sequence for ZNF217 (NM_006526.2,2570-2588).
cccctctctagtttctgta

SEQ ID NO: 15022 - DNA, 19 bp, Homo sapiens
  siRNA target sequence for ZNF217 (NM_006526.2,2571-2589).
ccctctctagtttctgtaa

SEQ ID NO: 15023 - DNA, 19 bp, Homo sapiens
  siRNA target sequence for ZNF217 (NM_006526.2,2681-2699).
ctgacttcagggatagact

SEQ ID NO: 15024 - DNA, 19 bp, Homo sapiens
  siRNA target sequence for ZNF217 (NM_006526.2,2692-2710).
gatagactctagcacttta

SEQ ID NO: 15025 - DNA, 19 bp, Homo sapiens
  siRNA target sequence for ZNF217 (NM_006526.2,2816-2834).
cctgcaccggataagacaa

SEQ ID NO: 15026 - DNA, 19 bp, Homo sapiens
  siRNA target sequence for ZNF217 (NM_006526.2,2817-2835).
ctgcaccggataagacaaa

SEQ ID NO: 15027 - DNA, 19 bp, Homo sapiens
  siRNA target sequence for ZNF217 (NM_006526.2,2819-2837).
gcaccggataagacaaaaa

SEQ ID NO: 15028 - DNA, 19 bp, Homo sapiens
  siRNA target sequence for ZNF217 (NM_006526.2,2832-2850).
caaaaagacccgagacaaa

SEQ ID NO: 15029 - DNA, 19 bp, Homo sapiens
  siRNA target sequence for ZNF217 (NM_006526.2,2838-2856).
gacccgagacaaaattgaa

SEQ ID NO: 15030 - DNA, 19 bp, Homo sapiens
  siRNA target sequence for ZNF217 (NM_006526.2,2886-2904).
ccctcggcagcagtaacat

SEQ ID NO: 15031 - DNA, 19 bp, Homo sapiens
  siRNA target sequence for ZNF217 (NM_006526.2,2888-2906).
ctcggcagcagtaacatca

SEQ ID NO: 15032 - DNA, 19 bp, Homo sapiens
  siRNA target sequence for ZNF217 (NM_006526.2,2952-2970).
ctccgggaagagactattt

SEQ ID NO: 15033 - DNA, 19 bp, Homo sapiens
  siRNA target sequence for ZNF217 (NM_006526.2,2954-2972).
ccgggaagagactatttct

SEQ ID NO: 15034 - DNA, 19 bp, Homo sapiens
  siRNA target sequence for ZNF217 (NM_006526.2,2989-3007).
caatactgcagcagaattt

SEQ ID NO: 15035 - DNA, 19 bp, Homo sapiens
  siRNA target sequence for ZNF217 (NM_006526.2,3092-3110).
gaccttcccaagtaccata

SEQ ID NO: 15036 - DNA, 19 bp, Homo sapiens
  siRNA target sequence for ZNF217 (NM_006526.2,3164-3182).
gcgctgcctcccaaaccaa

SEQ ID NO: 15037 - DNA, 19 bp, Homo sapiens
  siRNA target sequence for ZNF217 (NM_006526.2,3199-3217).
cgaggtcgattctccaaat

SEQ ID NO: 15038 - DNA, 19 bp, Homo sapiens
  siRNA target sequence for ZNF217 (NM_006526.2,3294-3312).
gctcgacgttagaaggaaa

SEQ ID NO: 15039 - DNA, 19 bp, Homo sapiens
  siRNA target sequence for ZNF217 (NM_006526.2,3315-3333).
ggcctgtgtcatatcaaca

SEQ ID NO: 15040 - DNA, 19 bp, Homo sapiens
  siRNA target sequence for ZNF217 (NM_006526.2,3320-3338).
gtgtcatatcaacacttat

SEQ ID NO: 15041 - DNA, 19 bp, Homo sapiens
  siRNA target sequence for ZNF217 (NM_006526.2,3322-3340).
gtcatatcaacacttatct

SEQ ID NO: 15042 - DNA, 19 bp, Homo sapiens
  siRNA target sequence for ZNF217 (NM_006526.2,3324-3342).
catatcaacacttatctaa

SEQ ID NO: 15043 - DNA, 19 bp, Homo sapiens
  siRNA target sequence for ZNF217 (NM_006526.2,3353-3371).
caaaagagaaactatgaga

SEQ ID NO: 15044 - DNA, 19 bp, Homo sapiens
  siRNA target sequence for ZNF217 (NM_006526.2,3395-3413).
cgaccaaatgacaaaaaaa

SEQ ID NO: 15045 - DNA, 19 bp, Homo sapiens
  siRNA target sequence for ZNF219 (NM_016423.1,604-622).
cgcttccgcttcaactcta

SEQ ID NO: 15046 - DNA, 19 bp, Homo sapiens
  siRNA target sequence for ZNF219 (NM_016423.1,605-623).
gcttccgcttcaactctat

SEQ ID NO: 15047 - DNA, 19 bp, Homo sapiens
  siRNA target sequence for ZNF219 (NM_016423.1,909-927).
ctactgcaaaggcaagttt

SEQ ID NO: 15048 - DNA, 19 bp, Homo sapiens
  siRNA target sequence for ZNF219 (NM_016423.1,1247-1265).
gcggccagagctttacaca

SEQ ID NO: 15049 - DNA, 19 bp, Homo sapiens
  siRNA target sequence for ZNF219 (NM_016423.1,1833-1851).
cgccacgcaggaagagaat

SEQ ID NO: 15050 - DNA, 19 bp, Homo sapiens
  siRNA target sequence for ZNF219 (NM_016423.1,1912-1930).
cctttctgcggaaaatctt

SEQ ID NO: 15051 - DNA, 19 bp, Homo sapiens
  siRNA target sequence for ZNF219 (NM_016423.1,2022-2040).
gtccggctcgctcaagtat

SEQ ID NO: 15052 - DNA, 19 bp, Homo sapiens
  siRNA target sequence for ZNF219 (NM_016423.1,2024-2042).
ccggctcgctcaagtatca

SEQ ID NO: 15053 - DNA, 19 bp, Homo sapiens
  siRNA target sequence for ZNF232 (NM_014519.2,730-748).
gactaggatggctgtatca

SEQ ID NO: 15054 - DNA, 19 bp, Homo sapiens
  siRNA target sequence for ZNF232 (NM_014519.2,736-754).
gatggctgtatcactaaca

SEQ ID NO: 15055 - DNA, 19 bp, Homo sapiens
  siRNA target sequence for ZNF232 (NM_014519.2,826-844).
ggaacagtcttgtgagtat

SEQ ID NO: 15056 - DNA, 19 bp, Homo sapiens
  siRNA target sequence for ZNF232 (NM_014519.2,1075-1093).
gggacatcaccctaagagt

SEQ ID NO: 15057 - DNA, 19 bp, Homo sapiens
  siRNA target sequence for ZNF232 (NM_014519.2,1272-1290).
caaagagtgaacaggtata

SEQ ID NO: 15058 - DNA, 19 bp, Homo sapiens
  siRNA target sequence for ZNF232 (NM_014519.2,1332-1350).
ccaaggacaaaggatcatt

SEQ ID NO: 15059 - DNA, 19 bp, Homo sapiens
  siRNA target sequence for ZNF232 (NM_014519.2,1403-1421).
gctactgacacctctacat

SEQ ID NO: 15060 - DNA, 19 bp, Homo sapiens
  siRNA target sequence for ZNF232 (NM_014519.2,1404-1422).
ctactgacacctctacatt

SEQ ID NO: 15061 - DNA, 19 bp, Homo sapiens
  siRNA target sequence for ZNF232 (NM_014519.2,1432-1450).
ctctgagggtaccttagaa

SEQ ID NO: 15062 - DNA, 19 bp, Homo sapiens
  siRNA target sequence for ZNF232 (NM_014519.2,1517-1535).
cagatggttgtcatccata

SEQ ID NO: 15063 - DNA, 19 bp, Homo sapiens
  siRNA target sequence for ZNF232 (NM_014519.2,1522-1540).
ggttgtcatccataaggaa

SEQ ID NO: 15064 - DNA, 19 bp, Homo sapiens
  siRNA target sequence for ZNF232 (NM_014519.2,1761-1779).
gatggggtgctcatcttgt

SEQ ID NO: 15065 - DNA, 19 bp, Homo sapiens
  siRNA target sequence for ZNF232 (NM_014519.2,1764-1782).
ggggtgctcatcttgttca

SEQ ID NO: 15066 - DNA, 19 bp, Homo sapiens
  siRNA target sequence for ZNF232 (NM_014519.2,1933-1951).
gtgctcagagctcattaga

SEQ ID NO: 15067 - DNA, 19 bp, Homo sapiens
  siRNA target sequence for ZNF236 (NM_007345.1,264-282).
gaatgcggagaacactaat

SEQ ID NO: 15068 - DNA, 19 bp, Homo sapiens
  siRNA target sequence for ZNF236 (NM_007345.1,276-294).
cactaattatgcctatcaa

SEQ ID NO: 15069 - DNA, 19 bp, Homo sapiens
  siRNA target sequence for ZNF236 (NM_007345.1,278-296).
ctaattatgcctatcaagt

SEQ ID NO: 15070 - DNA, 19 bp, Homo sapiens
  siRNA target sequence for ZNF236 (NM_007345.1,287-305).
cctatcaagttccaaactt

SEQ ID NO: 15071 - DNA, 19 bp, Homo sapiens
  siRNA target sequence for ZNF236 (NM_007345.1,321-339).
ctgtctactatcttttcca

SEQ ID NO: 15072 - DNA, 19 bp, Homo sapiens
  siRNA target sequence for ZNF236 (NM_007345.1,368-386).
gggatcacgagcgaaatga

SEQ ID NO: 15073 - DNA, 19 bp, Homo sapiens
  siRNA target sequence for ZNF236 (NM_007345.1,370-388).
gatcacgagcgaaatgaca

SEQ ID NO: 15074 - DNA, 19 bp, Homo sapiens
  siRNA target sequence for ZNF236 (NM_007345.1,403-421).
gaccagtgcccccaaacat

SEQ ID NO: 15075 - DNA, 19 bp, Homo sapiens
  siRNA target sequence for ZNF236 (NM_007345.1,405-423).
ccagtgcccccaaacattt

SEQ ID NO: 15076 - DNA, 19 bp, Homo sapiens
  siRNA target sequence for ZNF236 (NM_007345.1,408-426).
gtgcccccaaacatttaat

SEQ ID NO: 15077 - DNA, 19 bp, Homo sapiens
  siRNA target sequence for ZNF236 (NM_007345.1,413-431).
cccaaacatttaatgttga

SEQ ID NO: 15078 - DNA, 19 bp, Homo sapiens
  siRNA target sequence for ZNF236 (NM_007345.1,476-494).
ctacctgccctgtgtgtaa

SEQ ID NO: 15079 - DNA, 19 bp, Homo sapiens
  siRNA target sequence for ZNF236 (NM_007345.1,507-525).
cagagtggctagtctcaaa

SEQ ID NO: 15080 - DNA, 19 bp, Homo sapiens
  siRNA target sequence for ZNF236 (NM_007345.1,518-536).
gtctcaaagcgcatattat

SEQ ID NO: 15081 - DNA, 19 bp, Homo sapiens
  siRNA target sequence for ZNF236 (NM_007345.1,522-540).
caaagcgcatattatgcta

SEQ ID NO: 15082 - DNA, 19 bp, Homo sapiens
  siRNA target sequence for ZNF236 (NM_007345.1,527-545).
cgcatattatgctacatga

SEQ ID NO: 15083 - DNA, 19 bp, Homo sapiens
  siRNA target sequence for ZNF236 (NM_007345.1,528-546).
gcatattatgctacatgaa

SEQ ID NO: 15084 - DNA, 19 bp, Homo sapiens
  siRNA target sequence for ZNF236 (NM_007345.1,529-547).
catattatgctacatgaaa

SEQ ID NO: 15085 - DNA, 19 bp, Homo sapiens
  siRNA target sequence for ZNF236 (NM_007345.1,709-727).
cacatgaagactcattaca

SEQ ID NO: 15086 - DNA, 19 bp, Homo sapiens
  siRNA target sequence for ZNF236 (NM_007345.1,726-744).
caaaattagggtatcaagt

SEQ ID NO: 15087 - DNA, 19 bp, Homo sapiens
  siRNA target sequence for ZNF236 (NM_007345.1,749-767).
ggtcttataaccggaatat

SEQ ID NO: 15088 - DNA, 19 bp, Homo sapiens
  siRNA target sequence for ZNF236 (NM_007345.1,752-770).
cttataaccggaatatcga

SEQ ID NO: 15089 - DNA, 19 bp, Homo sapiens
  siRNA target sequence for ZNF236 (NM_007345.1,828-846).
ccagttaacgcgacacatt

SEQ ID NO: 15090 - DNA, 19 bp, Homo sapiens
  siRNA target sequence for ZNF236 (NM_007345.1,829-847).
cagttaacgcgacacatta

SEQ ID NO: 15091 - DNA, 19 bp, Homo sapiens
  siRNA target sequence for ZNF236 (NM_007345.1,1042-1060).
ggtcctacctataactgta

SEQ ID NO: 15092 - DNA, 19 bp, Homo sapiens
  siRNA target sequence for ZNF236 (NM_007345.1,1056-1074).
ctgtacagaatgtagttgt

SEQ ID NO: 15093 - DNA, 19 bp, Homo sapiens
  siRNA target sequence for ZNF236 (NM_007345.1,1105-1123).
catatcagcaagatgcata

SEQ ID NO: 15094 - DNA, 19 bp, Homo sapiens
  siRNA target sequence for ZNF236 (NM_007345.1,1126-1144).
ggtgggccacagaattcaa

SEQ ID NO: 15095 - DNA, 19 bp, Homo sapiens
  siRNA target sequence for ZNF236 (NM_007345.1,1129-1147).
gggccacagaattcaacaa

SEQ ID NO: 15096 - DNA, 19 bp, Homo sapiens
  siRNA target sequence for ZNF236 (NM_007345.1,1132-1150).
ccacagaattcaacaagtt

SEQ ID NO: 15097 - DNA, 19 bp, Homo sapiens
  siRNA target sequence for ZNF236 (NM_007345.1,1357-1375).
ggcatcaaccaggacattt

SEQ ID NO: 15098 - DNA, 19 bp, Homo sapiens
  siRNA target sequence for ZNF236 (NM_007345.1,1420-1438).
gcagcacatcctaatgact

SEQ ID NO: 15099 - DNA, 19 bp, Homo sapiens
  siRNA target sequence for ZNF236 (NM_007345.1,1467-1485).
cgctcaaaacccagatgtt

SEQ ID NO: 15100 - DNA, 19 bp, Homo sapiens
  siRNA target sequence for ZNF236 (NM_007345.1,1468-1486).
gctcaaaacccagatgttt

SEQ ID NO: 15101 - DNA, 19 bp, Homo sapiens
  siRNA target sequence for ZNF236 (NM_007345.1,1480-1498).
gatgtttccagcgtttcaa

SEQ ID NO: 15102 - DNA, 19 bp, Homo sapiens
  siRNA target sequence for ZNF236 (NM_007345.1,1547-1565).
gcccggagaaactggataa

SEQ ID NO: 15103 - DNA, 19 bp, Homo sapiens
  siRNA target sequence for ZNF236 (NM_007345.1,1769-1787).
cgctgacagcgcacatcaa

SEQ ID NO: 15104 - DNA, 19 bp, Homo sapiens
  siRNA target sequence for ZNF236 (NM_007345.1,1798-1816).
ggcatcaaggcgttcaagt

SEQ ID NO: 15105 - DNA, 19 bp, Homo sapiens
  siRNA target sequence for ZNF236 (NM_007345.1,1882-1900).
ggagttagaccttttgctt

SEQ ID NO: 15106 - DNA, 19 bp, Homo sapiens
  siRNA target sequence for ZNF236 (NM_007345.1,1901-1919).
gtcctcactgtgacaaaaa

SEQ ID NO: 15107 - DNA, 19 bp, Homo sapiens
  siRNA target sequence for ZNF236 (NM_007345.1,1903-1921).
cctcactgtgacaaaaaat

SEQ ID NO: 15108 - DNA, 19 bp, Homo sapiens
  siRNA target sequence for ZNF236 (NM_007345.1,1925-1943).
gaacctcaggccataggaa

SEQ ID NO: 15109 - DNA, 19 bp, Homo sapiens
  siRNA target sequence for ZNF236 (NM_007345.1,1950-1968).
cattgcttcccactttaaa

SEQ ID NO: 15110 - DNA, 19 bp, Homo sapiens
  siRNA target sequence for ZNF236 (NM_007345.1,1962-1980).
ctttaaacatacggaatta

SEQ ID NO: 15111 - DNA, 19 bp, Homo sapiens
  siRNA target sequence for ZNF236 (NM_007345.1,1989-2007).
gaggcaccagcgtaaacct

SEQ ID NO: 15112 - DNA, 19 bp, Homo sapiens
  siRNA target sequence for ZNF236 (NM_007345.1,2061-2079).
ggaaccaatcctcataact

SEQ ID NO: 15113 - DNA, 19 bp, Homo sapiens
  siRNA target sequence for ZNF236 (NM_007345.1,2126-2144).
gctatttcaataataattt

SEQ ID NO: 15114 - DNA, 19 bp, Homo sapiens
  siRNA target sequence for ZNF236 (NM_007345.1,2155-2173).
gcagatagaccatacaagt

SEQ ID NO: 15115 - DNA, 19 bp, Homo sapiens
  siRNA target sequence for ZNF236 (NM_007345.1,2164-2182).
ccatacaagtgtttttact

SEQ ID NO: 15116 - DNA, 19 bp, Homo sapiens
  siRNA target sequence for ZNF236 (NM_007345.1,2181-2199).
ctgtcatcgtgcatataaa

SEQ ID NO: 15117 - DNA, 19 bp, Homo sapiens
  siRNA target sequence for ZNF236 (NM_007345.1,2183-2201).
gtcatcgtgcatataaaaa

SEQ ID NO: 15118 - DNA, 19 bp, Homo sapiens
  siRNA target sequence for ZNF236 (NM_007345.1,2185-2203).
catcgtgcatataaaaaat

SEQ ID NO: 15119 - DNA, 19 bp, Homo sapiens
  siRNA target sequence for ZNF236 (NM_007345.1,2188-2206).
cgtgcatataaaaaatctt

SEQ ID NO: 15120 - DNA, 19 bp, Homo sapiens
  siRNA target sequence for ZNF236 (NM_007345.1,2204-2222).
cttgccaccttaaacaaca

SEQ ID NO: 15121 - DNA, 19 bp, Homo sapiens
  siRNA target sequence for ZNF236 (NM_007345.1,2296-2314).
ctcaaagcacacatcagaa

SEQ ID NO: 15122 - DNA, 19 bp, Homo sapiens
  siRNA target sequence for ZNF236 (NM_007345.1,2407-2425).
gaccttcgtccctatatgt

SEQ ID NO: 15123 - DNA, 19 bp, Homo sapiens
  siRNA target sequence for ZNF236 (NM_007345.1,2409-2427).
ccttcgtccctatatgtgt

SEQ ID NO: 15124 - DNA, 19 bp, Homo sapiens
  siRNA target sequence for ZNF236 (NM_007345.1,2436-2454).
ccaaaaaacatttaagact

SEQ ID NO: 15125 - DNA, 19 bp, Homo sapiens
  siRNA target sequence for ZNF236 (NM_007345.1,2444-2462).
catttaagacttcactaaa

SEQ ID NO: 15126 - DNA, 19 bp, Homo sapiens
  siRNA target sequence for ZNF236 (NM_007345.1,2475-2493).
catgaaaacccacagatat

SEQ ID NO: 15127 - DNA, 19 bp, Homo sapiens
  siRNA target sequence for ZNF236 (NM_007345.1,2523-2541).
gcaggcagcctcgatagat

SEQ ID NO: 15128 - DNA, 19 bp, Homo sapiens
  siRNA target sequence for ZNF236 (NM_007345.1,2777-2795).
ggcacgtagaccagtttga

SEQ ID NO: 15129 - DNA, 19 bp, Homo sapiens
  siRNA target sequence for ZNF236 (NM_007345.1,2778-2796).
gcacgtagaccagtttgaa

SEQ ID NO: 15130 - DNA, 19 bp, Homo sapiens
  siRNA target sequence for ZNF236 (NM_007345.1,2835-2853).
gctaccccaaggttttaca

SEQ ID NO: 15131 - DNA, 19 bp, Homo sapiens
  siRNA target sequence for ZNF236 (NM_007345.1,2979-2997).
ctctgatgggatgaatgta

SEQ ID NO: 15132 - DNA, 19 bp, Homo sapiens
  siRNA target sequence for ZNF236 (NM_007345.1,3082-3100).
cagagcaggcgctcttaca

SEQ ID NO: 15133 - DNA, 19 bp, Homo sapiens
  siRNA target sequence for ZNF236 (NM_007345.1,3093-3111).
ctcttacaggtgtgactat

SEQ ID NO: 15134 - DNA, 19 bp, Homo sapiens
  siRNA target sequence for ZNF236 (NM_007345.1,3369-3387).
ggagggtttccgaactaca

SEQ ID NO: 15135 - DNA, 19 bp, Homo sapiens
  siRNA target sequence for ZNF236 (NM_007345.1,3379-3397).
cgaactacagtgcattgta

SEQ ID NO: 15136 - DNA, 19 bp, Homo sapiens
  siRNA target sequence for ZNF236 (NM_007345.1,3523-3541).
cgtcctgaggtcatcactt

SEQ ID NO: 15137 - DNA, 19 bp, Homo sapiens
  siRNA target sequence for ZNF236 (NM_007345.1,3747-3765).
gaggcatgttcgaatccat

SEQ ID NO: 15138 - DNA, 19 bp, Homo sapiens
  siRNA target sequence for ZNF236 (NM_007345.1,3978-3996).
ccgtacctcgggtagaaga

SEQ ID NO: 15139 - DNA, 19 bp, Homo sapiens
  siRNA target sequence for ZNF236 (NM_007345.1,3979-3997).
cgtacctcgggtagaagaa

SEQ ID NO: 15140 - DNA, 19 bp, Homo sapiens
  siRNA target sequence for ZNF236 (NM_007345.1,3980-3998).
gtacctcgggtagaagaaa

SEQ ID NO: 15141 - DNA, 19 bp, Homo sapiens
  siRNA target sequence for ZNF236 (NM_007345.1,4005-4023).
catgcagtttcattataaa

SEQ ID NO: 15142 - DNA, 19 bp, Homo sapiens
  siRNA target sequence for ZNF236 (NM_007345.1,4109-4127).
ctgacccaaacgtgtttat

SEQ ID NO: 15143 - DNA, 19 bp, Homo sapiens
  siRNA target sequence for ZNF236 (NM_007345.1,4111-4129).
gacccaaacgtgtttatca

SEQ ID NO: 15144 - DNA, 19 bp, Homo sapiens
  siRNA target sequence for ZNF236 (NM_007345.1,4114-4132).
ccaaacgtgtttatcatga

SEQ ID NO: 15145 - DNA, 19 bp, Homo sapiens
  siRNA target sequence for ZNF236 (NM_007345.1,4128-4146).
catgaacaactctgttcta

SEQ ID NO: 15146 - DNA, 19 bp, Homo sapiens
  siRNA target sequence for ZNF236 (NM_007345.1,4181-4199).
gactggtgggccaagctat

SEQ ID NO: 15147 - DNA, 19 bp, Homo sapiens
  siRNA target sequence for ZNF236 (NM_007345.1,4306-4324).
ggaccaaatgtacagattt

SEQ ID NO: 15148 - DNA, 19 bp, Homo sapiens
  siRNA target sequence for ZNF236 (NM_007345.1,4332-4350).
cgatgctgccagcattaat

SEQ ID NO: 15149 - DNA, 19 bp, Homo sapiens
  siRNA target sequence for ZNF236 (NM_007345.1,4339-4357).
gccagcattaataacatta

SEQ ID NO: 15150 - DNA, 19 bp, Homo sapiens
  siRNA target sequence for ZNF236 (NM_007345.1,4618-4636).
ctcactcaagtgatgactt

SEQ ID NO: 15151 - DNA, 19 bp, Homo sapiens
  siRNA target sequence for ZNF236 (NM_007345.1,4751-4769).
cggggtctccacaggaaat

SEQ ID NO: 15152 - DNA, 19 bp, Homo sapiens
  siRNA target sequence for ZNF236 (NM_007345.1,4752-4770).
ggggtctccacaggaaatt

SEQ ID NO: 15153 - DNA, 19 bp, Homo sapiens
  siRNA target sequence for ZNF236 (NM_007345.1,4753-4771).
gggtctccacaggaaatta

SEQ ID NO: 15154 - DNA, 19 bp, Homo sapiens
  siRNA target sequence for ZNF236 (NM_007345.1,4765-4783).
gaaattaccctgactatct

SEQ ID NO: 15155 - DNA, 19 bp, Homo sapiens
  siRNA target sequence for ZNF236 (NM_007345.1,4829-4847).
gatctgtggaggcattgta

SEQ ID NO: 15156 - DNA, 19 bp, Homo sapiens
  siRNA target sequence for ZNF236 (NM_007345.1,4832-4850).
ctgtggaggcattgtattt

SEQ ID NO: 15157 - DNA, 19 bp, Homo sapiens
  siRNA target sequence for ZNF236 (NM_007345.1,4852-4870).
gagaactccagcgacaaaa

SEQ ID NO: 15158 - DNA, 19 bp, Homo sapiens
  siRNA target sequence for ZNF236 (NM_007345.1,4854-4872).
gaactccagcgacaaaact

SEQ ID NO: 15159 - DNA, 19 bp, Homo sapiens
  siRNA target sequence for ZNF24 (NM_006965.1,183-201).
gaagaagattcaatactta

SEQ ID NO: 15160 - DNA, 19 bp, Homo sapiens
  siRNA target sequence for ZNF24 (NM_006965.1,265-283).
gcgaagagggatcaagtat

SEQ ID NO: 15161 - DNA, 19 bp, Homo sapiens
  siRNA target sequence for ZNF24 (NM_006965.1,416-434).
gacgcacacaaaagaacaa

SEQ ID NO: 15162 - DNA, 19 bp, Homo sapiens
  siRNA target sequence for ZNF24 (NM_006965.1,493-511).
cttgggttcgagatcatca

SEQ ID NO: 15163 - DNA, 19 bp, Homo sapiens
  siRNA target sequence for ZNF24 (NM_006965.1,574-592).
ctggacaaccggtttctct

SEQ ID NO: 15164 - DNA, 19 bp, Homo sapiens
  siRNA target sequence for ZNF24 (NM_006965.1,598-616).
gacgaaaacgggaagtact

SEQ ID NO: 15165 - DNA, 19 bp, Homo sapiens
  siRNA target sequence for ZNF24 (NM_006965.1,867-885).
cccaagggcaggtttgaaa

SEQ ID NO: 15166 - DNA, 19 bp, Homo sapiens
  siRNA target sequence for ZNF24 (NM_006965.1,869-887).
caagggcaggtttgaaaga

SEQ ID NO: 15167 - DNA, 19 bp, Homo sapiens
  siRNA target sequence for ZNF24 (NM_006965.1,901-919).
ctcgaaagaaacaacatat

SEQ ID NO: 15168 - DNA, 19 bp, Homo sapiens
  siRNA target sequence for ZNF24 (NM_006965.1,1028-1046).
cagccgaagttccattctt

SEQ ID NO: 15169 - DNA, 19 bp, Homo sapiens
  siRNA target sequence for ZNF24 (NM_006965.1,1030-1048).
gccgaagttccattcttgt

SEQ ID NO: 15170 - DNA, 19 bp, Homo sapiens
  siRNA target sequence for ZNF24 (NM_006965.1,1115-1133).
ccagaattcggggcttatt

SEQ ID NO: 15171 - DNA, 19 bp, Homo sapiens
  siRNA target sequence for ZNF24 (NM_006965.1,1116-1134).
cagaattcggggcttatta

SEQ ID NO: 15172 - DNA, 19 bp, Homo sapiens
  siRNA target sequence for ZNF24 (NM_006965.1,1118-1136).
gaattcggggcttattaat

SEQ ID NO: 15173 - DNA, 19 bp, Homo sapiens
  siRNA target sequence for ZNF24 (NM_006965.1,1193-1211).
gtatagtcaaagctcaaat

SEQ ID NO: 15174 - DNA, 19 bp, Homo sapiens
  siRNA target sequence for ZNF256 (NM_005773.2,368-386).
gagaacttgacacttacaa

SEQ ID NO: 15175 - DNA, 19 bp, Homo sapiens
  siRNA target sequence for ZNF256 (NM_005773.2,453-471).
gggtgtcacaggttaggat

SEQ ID NO: 15176 - DNA, 19 bp, Homo sapiens
  siRNA target sequence for ZNF256 (NM_005773.2,499-517).
gaccaacccctgtgagata

SEQ ID NO: 15177 - DNA, 19 bp, Homo sapiens
  siRNA target sequence for ZNF256 (NM_005773.2,525-543).
cagtcttgagacagatttt

SEQ ID NO: 15178 - DNA, 19 bp, Homo sapiens
  siRNA target sequence for ZNF256 (NM_005773.2,571-589).
ccatggtcagaaactgtat

SEQ ID NO: 15179 - DNA, 19 bp, Homo sapiens
  siRNA target sequence for ZNF256 (NM_005773.2,572-590).
catggtcagaaactgtata

SEQ ID NO: 15180 - DNA, 19 bp, Homo sapiens
  siRNA target sequence for ZNF256 (NM_005773.2,800-818).
gctcacaccagaaagaagt

SEQ ID NO: 15181 - DNA, 19 bp, Homo sapiens
  siRNA target sequence for ZNF256 (NM_005773.2,920-938).
caccagggagacctcatta

SEQ ID NO: 15182 - DNA, 19 bp, Homo sapiens
  siRNA target sequence for ZNF256 (NM_005773.2,932-950).
ctcattagggaaagatctt

SEQ ID NO: 15183 - DNA, 19 bp, Homo sapiens
  siRNA target sequence for ZNF256 (NM_005773.2,1356-1374).
ctggtacaaggccttatat

SEQ ID NO: 15184 - DNA, 19 bp, Homo sapiens
  siRNA target sequence for ZNF256 (NM_005773.2,1909-1927).
ccactctagcctcgttaaa

SEQ ID NO: 15185 - DNA, 19 bp, Homo sapiens
  siRNA target sequence for ZNF263 (NM_005741.3,886-904).
gtaaaggagagggcattat

SEQ ID NO: 15186 - DNA, 19 bp, Homo sapiens
  siRNA target sequence for ZNF263 (NM_005741.3,988-1006).
gaggacgtggcaatgtaca

SEQ ID NO: 15187 - DNA, 19 bp, Homo sapiens
  siRNA target sequence for ZNF263 (NM_005741.3,1025-1043).
ggcatcaggatcctagtaa

SEQ ID NO: 15188 - DNA, 19 bp, Homo sapiens
  siRNA target sequence for ZNF263 (NM_005741.3,1027-1045).
catcaggatcctagtaaga

SEQ ID NO: 15189 - DNA, 19 bp, Homo sapiens
  siRNA target sequence for ZNF263 (NM_005741.3,1062-1080).
cacggtgcaggagagttat

SEQ ID NO: 15190 - DNA, 19 bp, Homo sapiens
  siRNA target sequence for ZNF263 (NM_005741.3,1240-1258).
gaaggtgttccgtctgtat

SEQ ID NO: 15191 - DNA, 19 bp, Homo sapiens
  siRNA target sequence for ZNF263 (NM_005741.3,1449-1467).
gccaaagaaactccattta

SEQ ID NO: 15192 - DNA, 19 bp, Homo sapiens
  siRNA target sequence for ZNF263 (NM_005741.3,1450-1468).
ccaaagaaactccatttat

SEQ ID NO: 15193 - DNA, 19 bp, Homo sapiens
  siRNA target sequence for ZNF263 (NM_005741.3,1480-1498).
ggcaaaaatttctctaaca

SEQ ID NO: 15194 - DNA, 19 bp, Homo sapiens
  siRNA target sequence for ZNF263 (NM_005741.3,1481-1499).
gcaaaaatttctctaacaa

SEQ ID NO: 15195 - DNA, 19 bp, Homo sapiens
  siRNA target sequence for ZNF263 (NM_005741.3,1491-1509).
ctctaacaactcaaaccta

SEQ ID NO: 15196 - DNA, 19 bp, Homo sapiens
  siRNA target sequence for ZNF263 (NM_005741.3,1493-1511).
ctaacaactcaaacctaat

SEQ ID NO: 15197 - DNA, 19 bp, Homo sapiens
  siRNA target sequence for ZNF263 (NM_005741.3,1552-1570).
ggtgtggactgcactgaaa

SEQ ID NO: 15198 - DNA, 19 bp, Homo sapiens
  siRNA target sequence for ZNF263 (NM_005741.3,1555-1573).
gtggactgcactgaaatct

SEQ ID NO: 15199 - DNA, 19 bp, Homo sapiens
  siRNA target sequence for ZNF263 (NM_005741.3,1627-1645).
gcccacaagtgccttgaat

SEQ ID NO: 15200 - DNA, 19 bp, Homo sapiens
  siRNA target sequence for ZNF263 (NM_005741.3,1710-1728).
gccctatcagtgcaacatt

SEQ ID NO: 15201 - DNA, 19 bp, Homo sapiens
  siRNA target sequence for ZNF263 (NM_005741.3,1711-1729).
ccctatcagtgcaacattt

SEQ ID NO: 15202 - DNA, 19 bp, Homo sapiens
  siRNA target sequence for ZNF263 (NM_005741.3,1722-1740).
caacatttgcggaaaatgt

SEQ ID NO: 15203 - DNA, 19 bp, Homo sapiens
  siRNA target sequence for ZNF263 (NM_005741.3,1927-1945).
ctcgtcattcacgaaagaa

SEQ ID NO: 15204 - DNA, 19 bp, Homo sapiens
  siRNA target sequence for ZNF263 (NM_005741.3,1929-1947).
cgtcattcacgaaagaact

SEQ ID NO: 15205 - DNA, 19 bp, Homo sapiens
  siRNA target sequence for ZNF263 (NM_005741.3,1932-1950).
cattcacgaaagaactcat

SEQ ID NO: 15206 - DNA, 19 bp, Homo sapiens
  siRNA target sequence for ZNF263 (NM_005741.3,2166-2184).
ctctcatagatccaattta

SEQ ID NO: 15207 - DNA, 19 bp, Homo sapiens
  siRNA target sequence for ZNF263 (NM_005741.3,2168-2186).
ctcatagatccaatttaat

SEQ ID NO: 15208 - DNA, 19 bp, Homo sapiens
  siRNA target sequence for ZNF263 (NM_005741.3,2170-2188).
catagatccaatttaatca

SEQ ID NO: 15209 - DNA, 19 bp, Homo sapiens
  siRNA target sequence for ZNF263 (NM_005741.3,2336-2354).
ctcggagttcccgtcttat

SEQ ID NO: 15210 - DNA, 19 bp, Homo sapiens
  siRNA target sequence for ZNF263 (NM_005741.3,2338-2356).
cggagttcccgtcttatga

SEQ ID NO: 15211 - DNA, 19 bp, Homo sapiens
  siRNA target sequence for ZNF263 (NM_005741.3,2340-2358).
gagttcccgtcttatgagt

SEQ ID NO: 15212 - DNA, 19 bp, Homo sapiens
  siRNA target sequence for ZNF265 (NM_005455.2,55-73).
gatttgccctgacaaaaaa

SEQ ID NO: 15213 - DNA, 19 bp, Homo sapiens
  siRNA target sequence for ZNF265 (NM_005455.2,113-131).
cgatgtggtcgggagaaaa

SEQ ID NO: 15214 - DNA, 19 bp, Homo sapiens
  siRNA target sequence for ZNF265 (NM_005455.2,193-211).
gagccgaggcctatttagt

SEQ ID NO: 15215 - DNA, 19 bp, Homo sapiens
  siRNA target sequence for ZNF265 (NM_005455.2,201-219).
gcctatttagtgctaatga

SEQ ID NO: 15216 - DNA, 19 bp, Homo sapiens
  siRNA target sequence for ZNF265 (NM_005455.2,203-221).
ctatttagtgctaatgact

SEQ ID NO: 15217 - DNA, 19 bp, Homo sapiens
  siRNA target sequence for ZNF265 (NM_005455.2,213-231).
ctaatgactggcaatgtaa

SEQ ID NO: 15218 - DNA, 19 bp, Homo sapiens
  siRNA target sequence for ZNF265 (NM_005455.2,255-273).
ccagaagatcagagtgtaa

SEQ ID NO: 15219 - DNA, 19 bp, Homo sapiens
  siRNA target sequence for ZNF265 (NM_005455.2,256-274).
cagaagatcagagtgtaat

SEQ ID NO: 15220 - DNA, 19 bp, Homo sapiens
  siRNA target sequence for ZNF265 (NM_005455.2,258-276).
gaagatcagagtgtaatat

SEQ ID NO: 15221 - DNA, 19 bp, Homo sapiens
  siRNA target sequence for ZNF265 (NM_005455.2,277-295).
gtgtaatactccaaagtat

SEQ ID NO: 15222 - DNA, 19 bp, Homo sapiens
  siRNA target sequence for ZNF265 (NM_005455.2,327-345).
gtggttttaatgaaagaga

SEQ ID NO: 15223 - DNA, 19 bp, Homo sapiens
  siRNA target sequence for ZNF265 (NM_005455.2,389-407).
gatgagtttggacgtaaaa

SEQ ID NO: 15224 - DNA, 19 bp, Homo sapiens
  siRNA target sequence for ZNF265 (NM_005455.2,429-447).
cagttggtcctgcatctat

SEQ ID NO: 15225 - DNA, 19 bp, Homo sapiens
  siRNA target sequence for ZNF265 (NM_005455.2,438-456).
ctgcatctatattaaagga

SEQ ID NO: 15226 - DNA, 19 bp, Homo sapiens
  siRNA target sequence for ZNF265 (NM_005455.2,625-643).
ctcaaagtctcgatcttca

SEQ ID NO: 15227 - DNA, 19 bp, Homo sapiens
  siRNA target sequence for ZNF265 (NM_005455.2,631-649).
gtctcgatcttcacattca

SEQ ID NO: 15228 - DNA, 19 bp, Homo sapiens
  siRNA target sequence for ZNF265 (NM_005455.2,697-715).
caggtcccgttcaagaagt

SEQ ID NO: 15229 - DNA, 19 bp, Homo sapiens
  siRNA target sequence for ZNF265 (NM_005455.2,700-718).
gtcccgttcaagaagttct

SEQ ID NO: 15230 - DNA, 19 bp, Homo sapiens
  siRNA target sequence for ZNF265 (NM_005455.2,770-788).
cgtgggtcgaaatcaagat

SEQ ID NO: 15231 - DNA, 19 bp, Homo sapiens
  siRNA target sequence for ZNF265 (NM_005455.2,820-838).
cccacgaaaaagatcttat

SEQ ID NO: 15232 - DNA, 19 bp, Homo sapiens
  siRNA target sequence for ZNF265 (NM_005455.2,821-839).
ccacgaaaaagatcttatt

SEQ ID NO: 15233 - DNA, 19 bp, Homo sapiens
  siRNA target sequence for ZNF265 (NM_005455.2,824-842).
cgaaaaagatcttattcaa

SEQ ID NO: 15234 - DNA, 19 bp, Homo sapiens
  siRNA target sequence for ZNF265 (NM_005455.2,874-892).
gagaagtcgttctagatct

SEQ ID NO: 15235 - DNA, 19 bp, Homo sapiens
  siRNA target sequence for ZNF265 (NM_005455.2,881-899).
cgttctagatcttcttcat

SEQ ID NO: 15236 - DNA, 19 bp, Homo sapiens
  siRNA target sequence for ZNF265 (NM_005455.2,897-915).
catctggtgatcgcaaaaa

SEQ ID NO: 15237 - DNA, 19 bp, Homo sapiens
  siRNA target sequence for ZNF274 (NM_016324.2,536-554).
ccagatccaggccctatat

SEQ ID NO: 15238 - DNA, 19 bp, Homo sapiens
  siRNA target sequence for ZNF274 (NM_016324.2,539-557).
gatccaggccctatatgct

SEQ ID NO: 15239 - DNA, 19 bp, Homo sapiens
  siRNA target sequence for ZNF274 (NM_016324.2,652-670).
ggcagttccgttataagga

SEQ ID NO: 15240 - DNA, 19 bp, Homo sapiens
  siRNA target sequence for ZNF274 (NM_016324.2,1208-1226).
cagcctgaaagtacaagaa

SEQ ID NO: 15241 - DNA, 19 bp, Homo sapiens
  siRNA target sequence for ZNF274 (NM_016324.2,1240-1258).
gtgccttgtcctctacatt

SEQ ID NO: 15242 - DNA, 19 bp, Homo sapiens
  siRNA target sequence for ZNF274 (NM_016324.2,1243-1261).
ccttgtcctctacattaga

SEQ ID NO: 15243 - DNA, 19 bp, Homo sapiens
  siRNA target sequence for ZNF274 (NM_016324.2,1252-1270).
ctacattagaagatacctt

SEQ ID NO: 15244 - DNA, 19 bp, Homo sapiens
  siRNA target sequence for ZNF274 (NM_016324.2,1511-1529).
caaacgtgactcacaagtt

SEQ ID NO: 15245 - DNA, 19 bp, Homo sapiens
  siRNA target sequence for ZNF274 (NM_016324.2,1599-1617).
ggcaatggttgtaggaaaa

SEQ ID NO: 15246 - DNA, 19 bp, Homo sapiens
  siRNA target sequence for ZNF274 (NM_016324.2,1619-1637).
cttcagtcggagtactaaa

SEQ ID NO: 15247 - DNA, 19 bp, Homo sapiens
  siRNA target sequence for ZNF274 (NM_016324.2,1624-1642).
gtcggagtactaaacagat

SEQ ID NO: 15248 - DNA, 19 bp, Homo sapiens
  siRNA target sequence for ZNF274 (NM_016324.2,1626-1644).
cggagtactaaacagatta

SEQ ID NO: 15249 - DNA, 19 bp, Homo sapiens
  siRNA target sequence for ZNF274 (NM_016324.2,1630-1648).
gtactaaacagattacgtt

SEQ ID NO: 15250 - DNA, 19 bp, Homo sapiens
  siRNA target sequence for ZNF274 (NM_016324.2,1638-1656).
cagattacgtttataagaa

SEQ ID NO: 15251 - DNA, 19 bp, Homo sapiens
  siRNA target sequence for ZNF274 (NM_016324.2,1640-1658).
gattacgtttataagaatt

SEQ ID NO: 15252 - DNA, 19 bp, Homo sapiens
  siRNA target sequence for ZNF274 (NM_016324.2,1709-1727).
gaacccaagatacttttct

SEQ ID NO: 15253 - DNA, 19 bp, Homo sapiens
  siRNA target sequence for ZNF274 (NM_016324.2,2009-2027).
cccatatgcatgcaacaaa

SEQ ID NO: 15254 - DNA, 19 bp, Homo sapiens
  siRNA target sequence for ZNF274 (NM_016325.2,545-563).
gactgctggacctcaaaca

SEQ ID NO: 15255 - DNA, 19 bp, Homo sapiens
  siRNA target sequence for ZNF274 (NM_016325.2,631-649).
ctccagctggaccctaaat

SEQ ID NO: 15256 - DNA, 19 bp, Homo sapiens
  siRNA target sequence for ZNF274 (NM_016325.2,636-654).
gctggaccctaaattggat

SEQ ID NO: 15257 - DNA, 19 bp, Homo sapiens
  siRNA target sequence for ZNF274 (NM_016325.2,664-682).
gctgagagtcccctaatga

SEQ ID NO: 15258 - DNA, 19 bp, Homo sapiens
  siRNA target sequence for ZNF274 (NM_016325.2,667-685).
gagagtcccctaatgaaca

SEQ ID NO: 15259 - DNA, 19 bp, Homo sapiens
  siRNA target sequence for ZNF274 (NM_016325.2,671-689).
gtcccctaatgaacattga

SEQ ID NO: 15260 - DNA, 19 bp, Homo sapiens
  siRNA target sequence for ZNF274 (NM_133502.1,654-672).
gttagaggaggcagaagat

SEQ ID NO: 15261 - DNA, 19 bp, Homo sapiens
  siRNA target sequence for ZNF277 (NM_021994.1,197-215).
cagtcgggggtgtaggtta

SEQ ID NO: 15262 - DNA, 19 bp, Homo sapiens
  siRNA target sequence for ZNF277 (NM_021994.1,269-287).
gtggcaccaccactttaga

SEQ ID NO: 15263 - DNA, 19 bp, Homo sapiens
  siRNA target sequence for ZNF277 (NM_021994.1,462-480).
catcacagatttttgtagt

SEQ ID NO: 15264 - DNA, 19 bp, Homo sapiens
  siRNA target sequence for ZNF277 (NM_021994.1,497-515).
ccactgctccatttgaaga

SEQ ID NO: 15265 - DNA, 19 bp, Homo sapiens
  siRNA target sequence for ZNF277 (NM_021994.1,498-516).
cactgctccatttgaagaa

SEQ ID NO: 15266 - DNA, 19 bp, Homo sapiens
  siRNA target sequence for ZNF277 (NM_021994.1,534-552).
gttatgtgacgttttacca

SEQ ID NO: 15267 - DNA, 19 bp, Homo sapiens
  siRNA target sequence for ZNF277 (NM_021994.1,541-559).
gacgttttaccagaagata

SEQ ID NO: 15268 - DNA, 19 bp, Homo sapiens
  siRNA target sequence for ZNF277 (NM_021994.1,543-561).
cgttttaccagaagataga

SEQ ID NO: 15269 - DNA, 19 bp, Homo sapiens
  siRNA target sequence for ZNF277 (NM_021994.1,544-562).
gttttaccagaagatagaa

SEQ ID NO: 15270 - DNA, 19 bp, Homo sapiens
  siRNA target sequence for ZNF277 (NM_021994.1,646-664).
ggcgtttgtatgttttgca

SEQ ID NO: 15271 - DNA, 19 bp, Homo sapiens
  siRNA target sequence for ZNF277 (NM_021994.1,702-720).
ccacatggccagagaacat

SEQ ID NO: 15272 - DNA, 19 bp, Homo sapiens
  siRNA target sequence for ZNF277 (NM_021994.1,773-791).
gtacattacagaaaaagct

SEQ ID NO: 15273 - DNA, 19 bp, Homo sapiens
  siRNA target sequence for ZNF277 (NM_021994.1,875-893).
gtaagattaatcctaagaa

SEQ ID NO: 15274 - DNA, 19 bp, Homo sapiens
  siRNA target sequence for ZNF277 (NM_021994.1,944-962).
cgtgggaagaagttcagtt

SEQ ID NO: 15275 - DNA, 19 bp, Homo sapiens
  siRNA target sequence for ZNF277 (NM_021994.1,1027-1045).
gcctctgcagtctgcttat

SEQ ID NO: 15276 - DNA, 19 bp, Homo sapiens
  siRNA target sequence for ZNF277 (NM_021994.1,1034-1052).
cagtctgcttattttgtga

SEQ ID NO: 15277 - DNA, 19 bp, Homo sapiens
  siRNA target sequence for ZNF277 (NM_021994.1,1040-1058).
gcttattttgtgaaaagca

SEQ ID NO: 15278 - DNA, 19 bp, Homo sapiens
  siRNA target sequence for ZNF277 (NM_021994.1,1095-1113).
ggatgcacacgaatttgat

SEQ ID NO: 15279 - DNA, 19 bp, Homo sapiens
  siRNA target sequence for ZNF277 (NM_021994.1,1104-1122).
cgaatttgatcttctcaaa

SEQ ID NO: 15280 - DNA, 19 bp, Homo sapiens
  siRNA target sequence for ZNF277 (NM_021994.1,1156-1174).
caagtgaaactggtcaatt

SEQ ID NO: 15281 - DNA, 19 bp, Homo sapiens
  siRNA target sequence for ZNF277 (NM_021994.1,1211-1229).
gctgccatgtgaagttcaa

SEQ ID NO: 15282 - DNA, 19 bp, Homo sapiens
  siRNA target sequence for ZNF277 (NM_021994.1,1233-1251).
caaagcagacttaagaact

SEQ ID NO: 15283 - DNA, 19 bp, Homo sapiens
  siRNA target sequence for ZNF277 (NM_021994.1,1279-1297).
ctgctccccgatagaaaga

SEQ ID NO: 15284 - DNA, 19 bp, Homo sapiens
  siRNA target sequence for ZNF277 (NM_021994.1,1292-1310).
gaaagacgtgggatcaact

SEQ ID NO: 15285 - DNA, 19 bp, Homo sapiens
  siRNA target sequence for ZNF277 (NM_021994.1,1301-1319).
gggatcaactggagtatta

SEQ ID NO: 15286 - DNA, 19 bp, Homo sapiens
  siRNA target sequence for ZNF277 (NM_021994.1,1302-1320).
ggatcaactggagtattat

SEQ ID NO: 15287 - DNA, 19 bp, Homo sapiens
  siRNA target sequence for ZNF277 (NM_021994.1,1303-1321).
gatcaactggagtattatt

SEQ ID NO: 15288 - DNA, 19 bp, Homo sapiens
  siRNA target sequence for ZNF277 (NM_021994.1,1314-1332).
gtattattttccaacctat

SEQ ID NO: 15289 - DNA, 19 bp, Homo sapiens
  siRNA target sequence for ZNF277 (NM_021994.1,1408-1426).
cccatcatcagtgaagata

SEQ ID NO: 15290 - DNA, 19 bp, Homo sapiens
  siRNA target sequence for ZNF287 (NM_020653.1,434-452).
cgttctcaaatccttctaa

SEQ ID NO: 15291 - DNA, 19 bp, Homo sapiens
  siRNA target sequence for ZNF287 (NM_020653.1,477-495).
gtggaccctacaatgttga

SEQ ID NO: 15292 - DNA, 19 bp, Homo sapiens
  siRNA target sequence for ZNF287 (NM_020653.1,496-514).
gaaggaaatccttacttca

SEQ ID NO: 15293 - DNA, 19 bp, Homo sapiens
  siRNA target sequence for ZNF287 (NM_020653.1,500-518).
gaaatccttacttcaagat

SEQ ID NO: 15294 - DNA, 19 bp, Homo sapiens
  siRNA target sequence for ZNF287 (NM_020653.1,535-553).
gacctgtcgacagaatttt

SEQ ID NO: 15295 - DNA, 19 bp, Homo sapiens
  siRNA target sequence for ZNF287 (NM_020653.1,608-626).
cgagagctctgccttaagt

SEQ ID NO: 15296 - DNA, 19 bp, Homo sapiens
  siRNA target sequence for ZNF287 (NM_020653.1,710-728).
gttaggacttgggtaaagt

SEQ ID NO: 15297 - DNA, 19 bp, Homo sapiens
  siRNA target sequence for ZNF287 (NM_020653.1,794-812).
gaggaagctcctcaaaact

SEQ ID NO: 15298 - DNA, 19 bp, Homo sapiens
  siRNA target sequence for ZNF287 (NM_020653.1,797-815).
gaagctcctcaaaactcta

SEQ ID NO: 15299 - DNA, 19 bp, Homo sapiens
  siRNA target sequence for ZNF287 (NM_020653.1,959-977).
cgtcctgtgcagaaggaat

SEQ ID NO: 15300 - DNA, 19 bp, Homo sapiens
  siRNA target sequence for ZNF287 (NM_020653.1,989-1007).
gtgacgttacagaactatt

SEQ ID NO: 15301 - DNA, 19 bp, Homo sapiens
  siRNA target sequence for ZNF287 (NM_020653.1,993-1011).
cgttacagaactattggaa

SEQ ID NO: 15302 - DNA, 19 bp, Homo sapiens
  siRNA target sequence for ZNF287 (NM_020653.1,1044-1062).
caactgtgattcccatatt

SEQ ID NO: 15303 - DNA, 19 bp, Homo sapiens
  siRNA target sequence for ZNF287 (NM_020653.1,1047-1065).
ctgtgattcccatattgga

SEQ ID NO: 15304 - DNA, 19 bp, Homo sapiens
  siRNA target sequence for ZNF287 (NM_020653.1,1067-1085).
gaaccatggatggtgataa

SEQ ID NO: 15305 - DNA, 19 bp, Homo sapiens
  siRNA target sequence for ZNF287 (NM_020653.1,1074-1092).
ggatggtgataaaagaaat

SEQ ID NO: 15306 - DNA, 19 bp, Homo sapiens
  siRNA target sequence for ZNF287 (NM_020653.1,1143-1161).
cagtggaggatatgtctaa

SEQ ID NO: 15307 - DNA, 19 bp, Homo sapiens
  siRNA target sequence for ZNF287 (NM_020653.1,1156-1174).
gtctaaactcacaaaggaa

SEQ ID NO: 15308 - DNA, 19 bp, Homo sapiens
  siRNA target sequence for ZNF287 (NM_020653.1,1179-1197).
cccataccatcaaattaga

SEQ ID NO: 15309 - DNA, 19 bp, Homo sapiens
  siRNA target sequence for ZNF287 (NM_020653.1,1180-1198).
ccataccatcaaattagaa

SEQ ID NO: 15310 - DNA, 19 bp, Homo sapiens
  siRNA target sequence for ZNF287 (NM_020653.1,1290-1308).
cagtcctttcacaagaata

SEQ ID NO: 15311 - DNA, 19 bp, Homo sapiens
  siRNA target sequence for ZNF287 (NM_020653.1,1313-1331).
cctacagaagaatgtctta

SEQ ID NO: 15312 - DNA, 19 bp, Homo sapiens
  siRNA target sequence for ZNF287 (NM_020653.1,1366-1384).
gcattcaaacctaattgta

SEQ ID NO: 15313 - DNA, 19 bp, Homo sapiens
  siRNA target sequence for ZNF287 (NM_020653.1,1387-1405).
gtttgatacccaattagat

SEQ ID NO: 15314 - DNA, 19 bp, Homo sapiens
  siRNA target sequence for ZNF287 (NM_020653.1,1397-1415).
caattagataataaaactt

SEQ ID NO: 15315 - DNA, 19 bp, Homo sapiens
  siRNA target sequence for ZNF287 (NM_020653.1,1431-1449).
gcagggcaaccttcaatca

SEQ ID NO: 15316 - DNA, 19 bp, Homo sapiens
  siRNA target sequence for ZNF287 (NM_020653.1,1432-1450).
cagggcaaccttcaatcat

SEQ ID NO: 15317 - DNA, 19 bp, Homo sapiens
  siRNA target sequence for ZNF287 (NM_020653.1,1434-1452).
gggcaaccttcaatcatgt

SEQ ID NO: 15318 - DNA, 19 bp, Homo sapiens
  siRNA target sequence for ZNF287 (NM_020653.1,1453-1471).
ctcatatggtattgtacat

SEQ ID NO: 15319 - DNA, 19 bp, Homo sapiens
  siRNA target sequence for ZNF287 (NM_020653.1,1460-1478).
ggtattgtacataggaaaa

SEQ ID NO: 15320 - DNA, 19 bp, Homo sapiens
  siRNA target sequence for ZNF287 (NM_020653.1,1461-1479).
gtattgtacataggaaaat

SEQ ID NO: 15321 - DNA, 19 bp, Homo sapiens
  siRNA target sequence for ZNF287 (NM_020653.1,1544-1562).
ctcctgaaacaccaaagta

SEQ ID NO: 15322 - DNA, 19 bp, Homo sapiens
  siRNA target sequence for ZNF287 (NM_020653.1,1560-1578).
gtacccatgccaaagagaa

SEQ ID NO: 15323 - DNA, 19 bp, Homo sapiens
  siRNA target sequence for ZNF287 (NM_020653.1,1607-1625).
gagtttaggcatatctcat

SEQ ID NO: 15324 - DNA, 19 bp, Homo sapiens
  siRNA target sequence for ZNF287 (NM_020653.1,1615-1633).
gcatatctcatcccttatt

SEQ ID NO: 15325 - DNA, 19 bp, Homo sapiens
  siRNA target sequence for ZNF287 (NM_020653.1,1868-1886).
catagttcatcactgatta

SEQ ID NO: 15326 - DNA, 19 bp, Homo sapiens
  siRNA target sequence for ZNF287 (NM_020653.1,2027-2045).
gtgtttagtcagagtactt

SEQ ID NO: 15327 - DNA, 19 bp, Homo sapiens
  siRNA target sequence for ZNF287 (NM_020653.1,2531-2549).
gattttagccagagaacat

SEQ ID NO: 15328 - DNA, 19 bp, Homo sapiens
  siRNA target sequence for ZNF287 (NM_020653.1,2539-2557).
ccagagaacatgccttatt

SEQ ID NO: 15329 - DNA, 19 bp, Homo sapiens
  siRNA target sequence for ZNF287 (NM_020653.1,2661-2679).
caggtgccaaacatcgtaa

SEQ ID NO: 15330 - DNA, 19 bp, Homo sapiens
  siRNA target sequence for ZNF3 (NM_032924.2,1383-1401).
ggaatgtggaggaaagttt

SEQ ID NO: 15331 - DNA, 19 bp, Homo sapiens
  siRNA target sequence for ZNF3 (NM_032924.2,1393-1411).
ggaaagtttacctacagtt

SEQ ID NO: 15332 - DNA, 19 bp, Homo sapiens
  siRNA target sequence for ZNF3 (NM_032924.2,1488-1506).
gtacagctcggctcttgtt

SEQ ID NO: 15333 - DNA, 19 bp, Homo sapiens
  siRNA target sequence for ZNF3 (NM_032924.2,1574-1592).
gagttacgaccgagttaaa

SEQ ID NO: 15334 - DNA, 19 bp, Homo sapiens
  siRNA target sequence for ZNF3 (NM_032924.2,1576-1594).
gttacgaccgagttaaata

SEQ ID NO: 15335 - DNA, 19 bp, Homo sapiens
  siRNA target sequence for ZNF3 (NM_032924.2,1581-1599).
gaccgagttaaatatcaga

SEQ ID NO: 15336 - DNA, 19 bp, Homo sapiens
  siRNA target sequence for ZNF3 (NM_017715.1,391-409).
gggtcctactgggaagatt

SEQ ID NO: 15337 - DNA, 19 bp, Homo sapiens
  siRNA target sequence for ZNF3 (NM_017715.1,392-410).
ggtcctactgggaagattt

SEQ ID NO: 15338 - DNA, 19 bp, Homo sapiens
  siRNA target sequence for ZNF3 (NM_017715.1,571-589).
gaagcgagaaatataatga

SEQ ID NO: 15339 - DNA, 19 bp, Homo sapiens
  siRNA target sequence for ZNF3 (NM_017715.1,574-592).
gcgagaaatataatgattt

SEQ ID NO: 15340 - DNA, 19 bp, Homo sapiens
  siRNA target sequence for ZNF3 (NM_017715.1,609-627).
gtgaattccaaccttatct

SEQ ID NO: 15341 - DNA, 19 bp, Homo sapiens
  siRNA target sequence for ZNF3 (NM_017715.1,611-629).
gaattccaaccttatctca

SEQ ID NO: 15342 - DNA, 19 bp, Homo sapiens
  siRNA target sequence for ZNF3 (NM_017715.1,1200-1218).
cattctctgatgtttaaga

SEQ ID NO: 15343 - DNA, 19 bp, Homo sapiens
  siRNA target sequence for ZNF305 (NM_014724.1,188-206).
gaacctttggaagtaaaga

SEQ ID NO: 15344 - DNA, 19 bp, Homo sapiens
  siRNA target sequence for ZNF305 (NM_014724.1,236-254).
gattgggacctgcgtaaaa

SEQ ID NO: 15345 - DNA, 19 bp, Homo sapiens
  siRNA target sequence for ZNF305 (NM_014724.1,240-258).
gggacctgcgtaaaaacaa

SEQ ID NO: 15346 - DNA, 19 bp, Homo sapiens
  siRNA target sequence for ZNF305 (NM_014724.1,242-260).
gacctgcgtaaaaacaaca

SEQ ID NO: 15347 - DNA, 19 bp, Homo sapiens
  siRNA target sequence for ZNF305 (NM_014724.1,275-293).
gtcttccgtcagtacttca

SEQ ID NO: 15348 - DNA, 19 bp, Homo sapiens
  siRNA target sequence for ZNF305 (NM_014724.1,589-607).
gacggtacgtctacgaaaa

SEQ ID NO: 15349 - DNA, 19 bp, Homo sapiens
  siRNA target sequence for ZNF305 (NM_014724.1,591-609).
cggtacgtctacgaaaaga

SEQ ID NO: 15350 - DNA, 19 bp, Homo sapiens
  siRNA target sequence for ZNF305 (NM_014724.1,592-610).
ggtacgtctacgaaaagaa

SEQ ID NO: 15351 - DNA, 19 bp, Homo sapiens
  siRNA target sequence for ZNF305 (NM_014724.1,608-626).
gaaggagaacccagtatgt

SEQ ID NO: 15352 - DNA, 19 bp, Homo sapiens
  siRNA target sequence for ZNF305 (NM_014724.1,640-658).
gaaagcccagccaaagtat

SEQ ID NO: 15353 - DNA, 19 bp, Homo sapiens
  siRNA target sequence for ZNF305 (NM_014724.1,646-664).
ccagccaaagtatgaatct

SEQ ID NO: 15354 - DNA, 19 bp, Homo sapiens
  siRNA target sequence for ZNF305 (NM_014724.1,764-782).
gggaagacatccagtaaat

SEQ ID NO: 15355 - DNA, 19 bp, Homo sapiens
  siRNA target sequence for ZNF305 (NM_014724.1,766-784).
gaagacatccagtaaattt

SEQ ID NO: 15356 - DNA, 19 bp, Homo sapiens
  siRNA target sequence for ZNF305 (NM_014724.1,824-842).
cgtgaacctgaagaaataa

SEQ ID NO: 15357 - DNA, 19 bp, Homo sapiens
  siRNA target sequence for ZNF305 (NM_014724.1,857-875).
gcttgctccagagaagata

SEQ ID NO: 15358 - DNA, 19 bp, Homo sapiens
  siRNA target sequence for ZNF305 (NM_014724.1,878-896).
caacctacctgtgatgaaa

SEQ ID NO: 15359 - DNA, 19 bp, Homo sapiens
  siRNA target sequence for ZNF305 (NM_014724.1,919-937).
ctctgaccatactgaacat

SEQ ID NO: 15360 - DNA, 19 bp, Homo sapiens
  siRNA target sequence for ZNF305 (NM_014724.1,1000-1018).
gcactcacacctcatagaa

SEQ ID NO: 15361 - DNA, 19 bp, Homo sapiens
  siRNA target sequence for ZNF305 (NM_014724.1,1164-1182).
gccggtggtcagctcttaa

SEQ ID NO: 15362 - DNA, 19 bp, Homo sapiens
  siRNA target sequence for ZNF305 (NM_014724.1,1167-1185).
ggtggtcagctcttaacca

SEQ ID NO: 15363 - DNA, 19 bp, Homo sapiens
  siRNA target sequence for ZNF305 (NM_014724.1,1168-1186).
gtggtcagctcttaaccaa

SEQ ID NO: 15364 - DNA, 19 bp, Homo sapiens
  siRNA target sequence for ZNF305 (NM_014724.1,1257-1275).
caggcctctttcaccatat

SEQ ID NO: 15365 - DNA, 19 bp, Homo sapiens
  siRNA target sequence for ZNF305 (NM_014724.1,1306-1324).
gtgcactcagtgtaataaa

SEQ ID NO: 15366 - DNA, 19 bp, Homo sapiens
  siRNA target sequence for ZNF305 (NM_014724.1,1335-1353).
ggcgttccatacttactca

SEQ ID NO: 15367 - DNA, 19 bp, Homo sapiens
  siRNA target sequence for ZNF306 (NM_024493.1,151-169).
ggctagagaattaagtgaa

SEQ ID NO: 15368 - DNA, 19 bp, Homo sapiens
  siRNA target sequence for ZNF306 (NM_024493.1,611-629).
gccccagggtcacaaagta

SEQ ID NO: 15369 - DNA, 19 bp, Homo sapiens
  siRNA target sequence for ZNF306 (NM_024493.1,619-637).
gtcacaaagtagccaattt

SEQ ID NO: 15370 - DNA, 19 bp, Homo sapiens
  siRNA target sequence for ZNF306 (NM_024493.1,621-639).
cacaaagtagccaatttca

SEQ ID NO: 15371 - DNA, 19 bp, Homo sapiens
  siRNA target sequence for ZNF306 (NM_024493.1,777-795).
cccaggggttgttgaaagt

SEQ ID NO: 15372 - DNA, 19 bp, Homo sapiens
  siRNA target sequence for ZNF306 (NM_024493.1,850-868).
ggggaatctctgtagagat

SEQ ID NO: 15373 - DNA, 19 bp, Homo sapiens
  siRNA target sequence for ZNF306 (NM_024493.1,965-983).
gagcatgggaagatatcgt

SEQ ID NO: 15374 - DNA, 19 bp, Homo sapiens
  siRNA target sequence for ZNF306 (NM_024493.1,1085-1103).
cggcacatctgccatgaat

SEQ ID NO: 15375 - DNA, 19 bp, Homo sapiens
  siRNA target sequence for ZNF306 (NM_024493.1,1087-1105).
gcacatctgccatgaatgt

SEQ ID NO: 15376 - DNA, 19 bp, Homo sapiens
  siRNA target sequence for ZNF306 (NM_024493.1,1423-1441).
gtatcagtgcagtatgtgt

SEQ ID NO: 15377 - DNA, 19 bp, Homo sapiens
  siRNA target sequence for ZNF306 (NM_024493.1,1568-1586).
gttgaaactcccatgtctt

SEQ ID NO: 15378 - DNA, 19 bp, Homo sapiens
  siRNA target sequence for ZNF306 (NM_024493.1,1739-1757).
gtagggaaaaacatcctat

SEQ ID NO: 15379 - DNA, 19 bp, Homo sapiens
  siRNA target sequence for ZNF31 (NM_145238.2,360-378).
gtcgggactggaattgcat

SEQ ID NO: 15380 - DNA, 19 bp, Homo sapiens
  siRNA target sequence for ZNF31 (NM_145238.2,498-516).
ccttcccaatcacctaaat

SEQ ID NO: 15381 - DNA, 19 bp, Homo sapiens
  siRNA target sequence for ZNF31 (NM_145238.2,711-729).
gggagttccagtttcaaaa

SEQ ID NO: 15382 - DNA, 19 bp, Homo sapiens
  siRNA target sequence for ZNF31 (NM_145238.2,770-788).
ggggtctaagtcttataaa

SEQ ID NO: 15383 - DNA, 19 bp, Homo sapiens
  siRNA target sequence for ZNF31 (NM_145238.2,1136-1154).
gtacctgccccttctatga

SEQ ID NO: 15384 - DNA, 19 bp, Homo sapiens
  siRNA target sequence for ZNF31 (NM_145238.2,1316-1334).
ctggcctggtcaatgttga

SEQ ID NO: 15385 - DNA, 19 bp, Homo sapiens
  siRNA target sequence for ZNF31 (NM_145238.2,1374-1392).
gttccagagtcgtattgca

SEQ ID NO: 15386 - DNA, 19 bp, Homo sapiens
  siRNA target sequence for ZNF31 (NM_145238.2,1448-1466).
ccccattctcggaaaagct

SEQ ID NO: 15387 - DNA, 19 bp, Homo sapiens
  siRNA target sequence for ZNF31 (NM_145238.2,1449-1467).
cccattctcggaaaagctt

SEQ ID NO: 15388 - DNA, 19 bp, Homo sapiens
  siRNA target sequence for ZNF31 (NM_145238.2,1553-1571).
gtcgctacagattcaaaaa

SEQ ID NO: 15389 - DNA, 19 bp, Homo sapiens
  siRNA target sequence for ZNF31 (NM_145238.2,1613-1631).
cagggacatgccctttcta

SEQ ID NO: 15390 - DNA, 19 bp, Homo sapiens
  siRNA target sequence for ZNF31 (NM_145238.2,1881-1899).
gcctggagccttatcaaaa

SEQ ID NO: 15391 - DNA, 19 bp, Homo sapiens
  siRNA target sequence for ZNF31 (NM_145238.2,1882-1900).
cctggagccttatcaaaat

SEQ ID NO: 15392 - DNA, 19 bp, Homo sapiens
  siRNA target sequence for ZNF31 (NM_145238.2,2022-2040).
ggacttagaaaaacttatt

SEQ ID NO: 15393 - DNA, 19 bp, Homo sapiens
  siRNA target sequence for ZNF31 (NM_145238.2,2267-2285).
gctttagtgaccattctaa

SEQ ID NO: 15394 - DNA, 19 bp, Homo sapiens
  siRNA target sequence for ZNF31 (NM_145238.2,2391-2409).
ccacttgggaggaaatcct

SEQ ID NO: 15395 - DNA, 19 bp, Homo sapiens
  siRNA target sequence for ZNF31 (NM_145238.2,2461-2479).
gctcactggaggaattcta

SEQ ID NO: 15396 - DNA, 19 bp, Homo sapiens
  siRNA target sequence for ZNF31 (NM_145238.2,2510-2528).
gtatcagtaaggacttgaa

SEQ ID NO: 15397 - DNA, 19 bp, Homo sapiens
  siRNA target sequence for ZNF31 (NM_145238.2,2856-2874).
ccgttctaacctcattact

SEQ ID NO: 15398 - DNA, 19 bp, Homo sapiens
  siRNA target sequence for ZNF31 (NM_145238.2,2858-2876).
gttctaacctcattactca

SEQ ID NO: 15399 - DNA, 19 bp, Homo sapiens
  siRNA target sequence for ZNF323 (NM_030899.2,788-806).
gatgtatctttggattcta

SEQ ID NO: 15400 - DNA, 19 bp, Homo sapiens
  siRNA target sequence for ZNF323 (NM_030899.2,791-809).
gtatctttggattctaagt

SEQ ID NO: 15401 - DNA, 19 bp, Homo sapiens
  siRNA target sequence for ZNF323 (NM_030899.2,875-893).
cgccacaggtgcaatgaat

SEQ ID NO: 15402 - DNA, 19 bp, Homo sapiens
  siRNA target sequence for ZNF323 (NM_030899.2,1305-1323).
gcagtcagtgcagtaaact

SEQ ID NO: 15403 - DNA, 19 bp, Homo sapiens
  siRNA target sequence for ZNF323 (NM_030899.2,1329-1347).
gtaagcggacacttcttaa

SEQ ID NO: 15404 - DNA, 19 bp, Homo sapiens
  siRNA target sequence for ZNF323 (NM_030899.2,1333-1351).
gcggacacttcttaagaaa

SEQ ID NO: 15405 - DNA, 19 bp, Homo sapiens
  siRNA target sequence for ZNF33A (NM_006974.1,370-388).
ccatttaatgtggatgtaa

SEQ ID NO: 15406 - DNA, 19 bp, Homo sapiens
  siRNA target sequence for ZNF33A (NM_006974.1,802-820).
ccgtcaagggacaatcact

SEQ ID NO: 15407 - DNA, 19 bp, Homo sapiens
  siRNA target sequence for ZNF33A (NM_006974.1,803-821).
cgtcaagggacaatcacta

SEQ ID NO: 15408 - DNA, 19 bp, Homo sapiens
  siRNA target sequence for ZNF33A (NM_006974.1,804-822).
gtcaagggacaatcactat

SEQ ID NO: 15409 - DNA, 19 bp, Homo sapiens
  siRNA target sequence for ZNF33A (NM_006974.1,874-892).
cctcatggggtatctatga

SEQ ID NO: 15410 - DNA, 19 bp, Homo sapiens
  siRNA target sequence for ZNF33A (NM_006974.1,1349-1367).
gtgtgacttcgcaccttaa

SEQ ID NO: 15411 - DNA, 19 bp, Homo sapiens
  siRNA target sequence for ZNF33A (NM_006974.1,1355-1373).
cttcgcaccttaaagtaca

SEQ ID NO: 15412 - DNA, 19 bp, Homo sapiens
  siRNA target sequence for ZNF35 (NM_003420.2,311-329).
gtgcactccgagaacatca

SEQ ID NO: 15413 - DNA, 19 bp, Homo sapiens
  siRNA target sequence for ZNF35 (NM_003420.2,313-331).
gcactccgagaacatcaaa

SEQ ID NO: 15414 - DNA, 19 bp, Homo sapiens
  siRNA target sequence for ZNF35 (NM_003420.2,459-477).
cccttggcagctactcatt

SEQ ID NO: 15415 - DNA, 19 bp, Homo sapiens
  siRNA target sequence for ZNF35 (NM_003420.2,460-478).
ccttggcagctactcatta

SEQ ID NO: 15416 - DNA, 19 bp, Homo sapiens
  siRNA target sequence for ZNF35 (NM_003420.2,546-564).
ccaagaacctacagttact

SEQ ID NO: 15417 - DNA, 19 bp, Homo sapiens
  siRNA target sequence for ZNF35 (NM_003420.2,559-577).
gttactggttccaaaaact

SEQ ID NO: 15418 - DNA, 19 bp, Homo sapiens
  siRNA target sequence for ZNF35 (NM_003420.2,596-614).
gaaaaacccctcatcatat

SEQ ID NO: 15419 - DNA, 19 bp, Homo sapiens
  siRNA target sequence for ZNF35 (NM_003420.2,604-622).
cctcatcatatcagaaaga

SEQ ID NO: 15420 - DNA, 19 bp, Homo sapiens
  siRNA target sequence for ZNF35 (NM_003420.2,652-670).
gttaggagaagcttgtgaa

SEQ ID NO: 15421 - DNA, 19 bp, Homo sapiens
  siRNA target sequence for ZNF35 (NM_003420.2,744-762).
gtcacttacctgaaagctt

SEQ ID NO: 15422 - DNA, 19 bp, Homo sapiens
  siRNA target sequence for ZNF35 (NM_003420.2,821-839).
ggcgctgttaaaaatccaa

SEQ ID NO: 15423 - DNA, 19 bp, Homo sapiens
  siRNA target sequence for ZNF35 (NM_003420.2,1178-1196).
gtccacattacggaaaaat

SEQ ID NO: 15424 - DNA, 19 bp, Homo sapiens
  siRNA target sequence for ZNF35 (NM_003420.2,1183-1201).
cattacggaaaaatgctat

SEQ ID NO: 15425 - DNA, 19 bp, Homo sapiens
  siRNA target sequence for ZNF35 (NM_003420.2,1318-1336).
gagtgcaaatcttattgta

SEQ ID NO: 15426 - DNA, 19 bp, Homo sapiens
  siRNA target sequence for ZNF35 (NM_003420.2,1401-1419).
gtttttcacaccttattgt

SEQ ID NO: 15427 - DNA, 19 bp, Homo sapiens
  siRNA target sequence for ZNF35 (NM_003420.2,1573-1591).
ctcatacctacttattcat

SEQ ID NO: 15428 - DNA, 19 bp, Homo sapiens
  siRNA target sequence for ZNF38 (NM_145914.2,292-310).
cagtttgggtaccatgata

SEQ ID NO: 15429 - DNA, 19 bp, Homo sapiens
  siRNA target sequence for ZNF38 (NM_145914.2,546-564).
ctcaactcctccaaacgaa

SEQ ID NO: 15430 - DNA, 19 bp, Homo sapiens
  siRNA target sequence for ZNF38 (NM_145914.2,639-657).
cttggagaccagtcacaaa

SEQ ID NO: 15431 - DNA, 19 bp, Homo sapiens
  siRNA target sequence for ZNF38 (NM_145914.2,702-720).
gcaggagttcgctcaagat

SEQ ID NO: 15432 - DNA, 19 bp, Homo sapiens
  siRNA target sequence for ZNF38 (NM_145914.2,730-748).
gtccgagattgcagattga

SEQ ID NO: 15433 - DNA, 19 bp, Homo sapiens
  siRNA target sequence for ZNF38 (NM_145914.2,733-751).
cgagattgcagattgagta

SEQ ID NO: 15434 - DNA, 19 bp, Homo sapiens
  siRNA target sequence for ZNF38 (NM_145914.2,801-819).
gctcaaaggggatataatt

SEQ ID NO: 15435 - DNA, 19 bp, Homo sapiens
  siRNA target sequence for ZNF38 (NM_145914.2,821-839).
ctgtgattatcgccaataa

SEQ ID NO: 15436 - DNA, 19 bp, Homo sapiens
  siRNA target sequence for ZNF38 (NM_145914.2,825-843).
gattatcgccaataaacct

SEQ ID NO: 15437 - DNA, 19 bp, Homo sapiens
  siRNA target sequence for ZNF38 (NM_145914.2,862-880).
cagtgcgtaaaccttgaaa

SEQ ID NO: 15438 - DNA, 19 bp, Homo sapiens
  siRNA target sequence for ZNF38 (NM_145914.2,864-882).
gtgcgtaaaccttgaaaat

SEQ ID NO: 15439 - DNA, 19 bp, Homo sapiens
  siRNA target sequence for ZNF38 (NM_145914.2,866-884).
gcgtaaaccttgaaaatga

SEQ ID NO: 15440 - DNA, 19 bp, Homo sapiens
  siRNA target sequence for ZNF38 (NM_145914.2,913-931).
gcaggctccaagaaaggta

SEQ ID NO: 15441 - DNA, 19 bp, Homo sapiens
  siRNA target sequence for ZNF38 (NM_145914.2,921-939).
caagaaaggtagagaatca

SEQ ID NO: 15442 - DNA, 19 bp, Homo sapiens
  siRNA target sequence for ZNF38 (NM_145914.2,1210-1228).
gaagaggcgccatatcagt

SEQ ID NO: 15443 - DNA, 19 bp, Homo sapiens
  siRNA target sequence for ZNF38 (NM_145914.2,1503-1521).
ctgtagcaagtccaatctt

SEQ ID NO: 15444 - DNA, 19 bp, Homo sapiens
  siRNA target sequence for ZNF394 (NM_032164.2,253-271).
cccaacgcgacggactttt

SEQ ID NO: 15445 - DNA, 19 bp, Homo sapiens
  siRNA target sequence for ZNF394 (NM_032164.2,332-350).
gccggaccccgaaacttct

SEQ ID NO: 15446 - DNA, 19 bp, Homo sapiens
  siRNA target sequence for ZNF394 (NM_032164.2,735-753).
gttccgccgagtttggaaa

SEQ ID NO: 15447 - DNA, 19 bp, Homo sapiens
  siRNA target sequence for ZNF394 (NM_032164.2,958-976).
gcatctcagatgtcaataa

SEQ ID NO: 15448 - DNA, 19 bp, Homo sapiens
  siRNA target sequence for ZNF394 (NM_032164.2,971-989).
caataagaatggttccata

SEQ ID NO: 15449 - DNA, 19 bp, Homo sapiens
  siRNA target sequence for ZNF394 (NM_032164.2,1033-1051).
ggtgttccaaccttgttct

SEQ ID NO: 15450 - DNA, 19 bp, Homo sapiens
  siRNA target sequence for ZNF394 (NM_032164.2,1034-1052).
gtgttccaaccttgttcta

SEQ ID NO: 15451 - DNA, 19 bp, Homo sapiens
  siRNA target sequence for ZNF394 (NM_032164.2,1039-1057).
ccaaccttgttctatgtca

SEQ ID NO: 15452 - DNA, 19 bp, Homo sapiens
  siRNA target sequence for ZNF394 (NM_032164.2,1242-1260).
ggtaactgtgggaagagtt

SEQ ID NO: 15453 - DNA, 19 bp, Homo sapiens
  siRNA target sequence for ZNF394 (NM_032164.2,1397-1415).
gccgtacacctgtctgaaa

SEQ ID NO: 15454 - DNA, 19 bp, Homo sapiens
  siRNA target sequence for ZNF394 (NM_032164.2,1398-1416).
ccgtacacctgtctgaaat

SEQ ID NO: 15455 - DNA, 19 bp, Homo sapiens
  siRNA target sequence for ZNF394 (NM_032164.2,1424-1442).
gcgcttcaggcagaattca

SEQ ID NO: 15456 - DNA, 19 bp, Homo sapiens
  siRNA target sequence for ZNF394 (NM_032164.2,1433-1451).
gcagaattcacacctaaat

SEQ ID NO: 15457 - DNA, 19 bp, Homo sapiens
  siRNA target sequence for ZNF394 (NM_032164.2,1436-1454).
gaattcacacctaaatcgt

SEQ ID NO: 15458 - DNA, 19 bp, Homo sapiens
  siRNA target sequence for ZNF394 (NM_032164.2,1445-1463).
cctaaatcgtcatcaaagt

SEQ ID NO: 15459 - DNA, 19 bp, Homo sapiens
  siRNA target sequence for ZNF394 (NM_032164.2,1446-1464).
ctaaatcgtcatcaaagta

SEQ ID NO: 15460 - DNA, 19 bp, Homo sapiens
  siRNA target sequence for ZNF394 (NM_032164.2,1465-1483).
cccacagtagagacaaaca

SEQ ID NO: 15461 - DNA, 19 bp, Homo sapiens
  siRNA target sequence for ZNF394 (NM_032164.2,1501-1519).
gcggggaaacctgtcatat

SEQ ID NO: 15462 - DNA, 19 bp, Homo sapiens
  siRNA target sequence for ZNF394 (NM_032164.2,1502-1520).
cggggaaacctgtcatatt

SEQ ID NO: 15463 - DNA, 19 bp, Homo sapiens
  siRNA target sequence for ZNF394 (NM_032164.2,1503-1521).
ggggaaacctgtcatattt

SEQ ID NO: 15464 - DNA, 19 bp, Homo sapiens
  siRNA target sequence for ZNF394 (NM_032164.2,1683-1701).
cagagtgcaaccctcatta

SEQ ID NO: 15465 - DNA, 19 bp, Homo sapiens
  siRNA target sequence for ZNF394 (NM_032164.2,1685-1703).
gagtgcaaccctcattaaa

SEQ ID NO: 15466 - DNA, 19 bp, Homo sapiens
  siRNA target sequence for ZNF396 (NM_145756.1,155-173).
catcatcactcctaacaca

SEQ ID NO: 15467 - DNA, 19 bp, Homo sapiens
  siRNA target sequence for ZNF396 (NM_145756.1,184-202).
gagtgtaatgggattctga

SEQ ID NO: 15468 - DNA, 19 bp, Homo sapiens
  siRNA target sequence for ZNF396 (NM_145756.1,560-578).
gacgaaggaaggacatgat

SEQ ID NO: 15469 - DNA, 19 bp, Homo sapiens
  siRNA target sequence for ZNF396 (NM_145756.1,669-687).
ggagcttcagtccttaaga

SEQ ID NO: 15470 - DNA, 19 bp, Homo sapiens
  siRNA target sequence for ZNF396 (NM_145756.1,678-696).
gtccttaagaccacatgat

SEQ ID NO: 15471 - DNA, 19 bp, Homo sapiens
  siRNA target sequence for ZNF396 (NM_145756.1,680-698).
ccttaagaccacatgatga

SEQ ID NO: 15472 - DNA, 19 bp, Homo sapiens
  siRNA target sequence for ZNF396 (NM_145756.1,743-761).
cttctttaggcatagaact

SEQ ID NO: 15473 - DNA, 19 bp, Homo sapiens
  siRNA target sequence for ZNF396 (NM_145756.1,752-770).
gcatagaactgcattgcaa

SEQ ID NO: 15474 - DNA, 19 bp, Homo sapiens
  siRNA target sequence for ZNF396 (NM_145756.1,753-771).
catagaactgcattgcaat

SEQ ID NO: 15475 - DNA, 19 bp, Homo sapiens
  siRNA target sequence for ZNF396 (NM_145756.1,762-780).
gcattgcaatgtttccaat

SEQ ID NO: 15476 - DNA, 19 bp, Homo sapiens
  siRNA target sequence for ZNF396 (NM_145756.1,801-819).
ccagagttccacatataga

SEQ ID NO: 15477 - DNA, 19 bp, Homo sapiens
  siRNA target sequence for ZNF396 (NM_145756.1,810-828).
cacatatagaggaacctat

SEQ ID NO: 15478 - DNA, 19 bp, Homo sapiens
  siRNA target sequence for ZNF396 (NM_145756.1,818-836).
gaggaacctatgaacaaga

SEQ ID NO: 15479 - DNA, 19 bp, Homo sapiens
  siRNA target sequence for ZNF396 (NM_145756.1,1001-1019).
gaagcgcaattctgattca

SEQ ID NO: 15480 - DNA, 19 bp, Homo sapiens
  siRNA target sequence for ZNF396 (NM_145756.1,1024-1042).
cgacgaacccatactgatt

SEQ ID NO: 15481 - DNA, 19 bp, Homo sapiens
  siRNA target sequence for ZNF396 (NM_145756.1,1027-1045).
cgaacccatactgattcaa

SEQ ID NO: 15482 - DNA, 19 bp, Homo sapiens
  siRNA target sequence for ZNF396 (NM_145756.1,1028-1046).
gaacccatactgattcaaa

SEQ ID NO: 15483 - DNA, 19 bp, Homo sapiens
  siRNA target sequence for ZNF396 (NM_145756.1,1066-1084).
gaggcccaaaagaatatgt

SEQ ID NO: 15484 - DNA, 19 bp, Homo sapiens
  siRNA target sequence for ZNF396 (NM_145756.1,1072-1090).
caaaagaatatgtacttca

SEQ ID NO: 15485 - DNA, 19 bp, Homo sapiens
  siRNA target sequence for ZNF397 (NM_032347.1,177-195).
ggatcctccggaacaagaa

SEQ ID NO: 15486 - DNA, 19 bp, Homo sapiens
  siRNA target sequence for ZNF397 (NM_032347.1,182-200).
ctccggaacaagaactaat

SEQ ID NO: 15487 - DNA, 19 bp, Homo sapiens
  siRNA target sequence for ZNF397 (NM_032347.1,185-203).
cggaacaagaactaatact

SEQ ID NO: 15488 - DNA, 19 bp, Homo sapiens
  siRNA target sequence for ZNF397 (NM_032347.1,205-223).
gtgaaagtagaagataact

SEQ ID NO: 15489 - DNA, 19 bp, Homo sapiens
  siRNA target sequence for ZNF397 (NM_032347.1,211-229).
gtagaagataacttttcct

SEQ ID NO: 15490 - DNA, 19 bp, Homo sapiens
  siRNA target sequence for ZNF397 (NM_032347.1,262-280).
caatcctgccaagaattgt

SEQ ID NO: 15491 - DNA, 19 bp, Homo sapiens
  siRNA target sequence for ZNF397 (NM_032347.1,676-694).
ctttcccctaaaagtgatt

SEQ ID NO: 15492 - DNA, 19 bp, Homo sapiens
  siRNA target sequence for ZNF397 (NM_032347.1,721-739).
gagggcatctcagaagaaa

SEQ ID NO: 15493 - DNA, 19 bp, Homo sapiens
  siRNA target sequence for ZNF397 (NM_032347.1,767-785).
catttcgaggaattaagtt

SEQ ID NO: 15494 - DNA, 19 bp, Homo sapiens
  siRNA target sequence for ZNF397 (NM_032347.1,812-830).
ctatccgttgggaatgtgt

SEQ ID NO: 15495 - DNA, 19 bp, Homo sapiens
  siRNA target sequence for ZNF397 (NM_032347.1,827-845).
gtgtttctccaggaagttt

SEQ ID NO: 15496 - DNA, 19 bp, Homo sapiens
  siRNA target sequence for ZNF397 (NM_032347.1,862-880).
gctgctgaggctacacatt

SEQ ID NO: 15497 - DNA, 19 bp, Homo sapiens
  siRNA target sequence for ZNF397 (NM_032347.1,870-888).
ggctacacattcaacaatt

SEQ ID NO: 15498 - DNA, 19 bp, Homo sapiens
  siRNA target sequence for ZNF397 (NM_032347.1,893-911).
gctttgccatcaacacttt

SEQ ID NO: 15499 - DNA, 19 bp, Homo sapiens
  siRNA target sequence for ZNF41 (NM_007130.1,777-795).
ccataggagaagattcatt

SEQ ID NO: 15500 - DNA, 19 bp, Homo sapiens
  siRNA target sequence for ZNF41 (NM_007130.1,859-877).
gaataaccttttaagtcat

SEQ ID NO: 15501 - DNA, 19 bp, Homo sapiens
  siRNA target sequence for ZNF41 (NM_007130.1,873-891).
gtcatgtgaaagtattgat

SEQ ID NO: 15502 - DNA, 19 bp, Homo sapiens
  siRNA target sequence for ZNF41 (NM_007130.1,896-914).
gagaggggctatgaacata

SEQ ID NO: 15503 - DNA, 19 bp, Homo sapiens
  siRNA target sequence for ZNF41 (NM_007130.1,945-963).
ccaagcttgttccttcaat

SEQ ID NO: 15504 - DNA, 19 bp, Homo sapiens
  siRNA target sequence for ZNF41 (NM_007130.1,949-967).
gcttgttccttcaattaaa

SEQ ID NO: 15505 - DNA, 19 bp, Homo sapiens
  siRNA target sequence for ZNF41 (NM_007130.1,960-978).
caattaaaagactccataa

SEQ ID NO: 15506 - DNA, 19 bp, Homo sapiens
  siRNA target sequence for ZNF41 (NM_007130.1,974-992).
cataactgtgacacaattt

SEQ ID NO: 15507 - DNA, 19 bp, Homo sapiens
  siRNA target sequence for ZNF41 (NM_007130.1,983-1001).
gacacaattttgaagcata

SEQ ID NO: 15508 - DNA, 19 bp, Homo sapiens
  siRNA target sequence for ZNF41 (NM_007130.1,994-1012).
gaagcatactttaaactca

SEQ ID NO: 15509 - DNA, 19 bp, Homo sapiens
  siRNA target sequence for ZNF41 (NM_007130.1,1009-1027).
ctcacataatcataataga

SEQ ID NO: 15510 - DNA, 19 bp, Homo sapiens
  siRNA target sequence for ZNF41 (NM_007130.1,1112-1130).
gctaaaacaggagcaaatt

SEQ ID NO: 15511 - DNA, 19 bp, Homo sapiens
  siRNA target sequence for ZNF41 (NM_007130.1,1125-1143).
caaattcctgtgaacatga

SEQ ID NO: 15512 - DNA, 19 bp, Homo sapiens
  siRNA target sequence for ZNF41 (NM_007130.1,1134-1152).
gtgaacatgaccactatga

SEQ ID NO: 15513 - DNA, 19 bp, Homo sapiens
  siRNA target sequence for ZNF41 (NM_007130.1,1297-1315).
gtcccgtgaatgtgacaaa

SEQ ID NO: 15514 - DNA, 19 bp, Homo sapiens
  siRNA target sequence for ZNF41 (NM_007130.1,1310-1328).
gacaaaagcaacaaagtct

SEQ ID NO: 15515 - DNA, 19 bp, Homo sapiens
  siRNA target sequence for ZNF41 (NM_007130.1,1336-1354).
gaaaccccaggttgatgta

SEQ ID NO: 15516 - DNA, 19 bp, Homo sapiens
  siRNA target sequence for ZNF41 (NM_007130.1,1382-1400).
ccctatctgtgtactcaat

SEQ ID NO: 15517 - DNA, 19 bp, Homo sapiens
  siRNA target sequence for ZNF41 (NM_007130.1,1409-1427).
gtctttaccctcaaatcaa

SEQ ID NO: 15518 - DNA, 19 bp, Homo sapiens
  siRNA target sequence for ZNF41 (NM_007130.1,1420-1438).
caaatcaaacctcattaca

SEQ ID NO: 15519 - DNA, 19 bp, Homo sapiens
  siRNA target sequence for ZNF41 (NM_007130.1,2257-2275).
ccagaaatcgcacttcatt

SEQ ID NO: 15520 - DNA, 19 bp, Homo sapiens
  siRNA target sequence for ZNF41 (NM_007130.1,2267-2285).
cacttcattgcgcatcata

SEQ ID NO: 15521 - DNA, 19 bp, Homo sapiens
  siRNA target sequence for ZNF41 (NM_007130.1,2269-2287).
cttcattgcgcatcataga

SEQ ID NO: 15522 - DNA, 19 bp, Homo sapiens
  siRNA target sequence for ZNF41 (NM_007130.1,2419-2437).
cttcactgaccgatcaaat

SEQ ID NO: 15523 - DNA, 19 bp, Homo sapiens
  siRNA target sequence for ZNF41 (NM_007130.1,2426-2444).
gaccgatcaaatctcataa

SEQ ID NO: 15524 - DNA, 19 bp, Homo sapiens
  siRNA target sequence for ZNF41 (NM_007130.1,2593-2611).
ccagaaagccacactaagt

SEQ ID NO: 15525 - DNA, 19 bp, Homo sapiens
  siRNA target sequence for ZNF41 (NM_007130.1,2594-2612).
cagaaagccacactaagta

SEQ ID NO: 15526 - DNA, 19 bp, Homo sapiens
  siRNA target sequence for ZNF42 (NM_003422.2,585-603).
ggctgctgccctagtagat

SEQ ID NO: 15527 - DNA, 19 bp, Homo sapiens
  siRNA target sequence for ZNF42 (NM_003422.2,1044-1062).
cgcaggtccaggtagtgta

SEQ ID NO: 15528 - DNA, 19 bp, Homo sapiens
  siRNA target sequence for ZNF434 (NM_017810.2,952-970).
gacgctcctggctattctt

SEQ ID NO: 15529 - DNA, 19 bp, Homo sapiens
  siRNA target sequence for ZNF434 (NM_017810.2,955-973).
gctcctggctattcttagt

SEQ ID NO: 15530 - DNA, 19 bp, Homo sapiens
  siRNA target sequence for ZNF434 (NM_017810.2,956-974).
ctcctggctattcttagta

SEQ ID NO: 15531 - DNA, 19 bp, Homo sapiens
  siRNA target sequence for ZNF434 (NM_017810.2,959-977).
ctggctattcttagtagtt

SEQ ID NO: 15532 - DNA, 19 bp, Homo sapiens
  siRNA target sequence for ZNF434 (NM_017810.2,961-979).
ggctattcttagtagttct

SEQ ID NO: 15533 - DNA, 19 bp, Homo sapiens
  siRNA target sequence for ZNF434 (NM_017810.2,1139-1157).
gtgcctgagccttgtatct

SEQ ID NO: 15534 - DNA, 19 bp, Homo sapiens
  siRNA target sequence for ZNF434 (NM_017810.2,1165-1183).
ggaaatgaatgctctttca

SEQ ID NO: 15535 - DNA, 19 bp, Homo sapiens
  siRNA target sequence for ZNF434 (NM_017810.2,1230-1248).
gccaagaaggaagtgatat

SEQ ID NO: 15536 - DNA, 19 bp, Homo sapiens
  siRNA target sequence for ZNF434 (NM_017810.2,1351-1369).
ccaggaagtcaggaaacta

SEQ ID NO: 15537 - DNA, 19 bp, Homo sapiens
  siRNA target sequence for ZNF434 (NM_017810.2,1408-1426).
gttcaagaacgagattaaa

SEQ ID NO: 15538 - DNA, 19 bp, Homo sapiens
  siRNA target sequence for ZNF434 (NM_017810.2,1506-1524).
ggcactctgagctacaaaa

SEQ ID NO: 15539 - DNA, 19 bp, Homo sapiens
  siRNA target sequence for ZNF434 (NM_017810.2,1609-1627).
gatgagtcaccagagtttt

SEQ ID NO: 15540 - DNA, 19 bp, Homo sapiens
  siRNA target sequence for ZNF434 (NM_017810.2,1612-1630).
gagtcaccagagtttttgt

SEQ ID NO: 15541 - DNA, 19 bp, Homo sapiens
  siRNA target sequence for ZNF434 (NM_017810.2,1636-1654).
ggacaaagcctgtacacat

SEQ ID NO: 15542 - DNA, 19 bp, Homo sapiens
  siRNA target sequence for ZNF434 (NM_017810.2,1752-1770).
cctttagccgaagttctta

SEQ ID NO: 15543 - DNA, 19 bp, Homo sapiens
  siRNA target sequence for ZNF434 (NM_017810.2,1753-1771).
ctttagccgaagttcttat

SEQ ID NO: 15544 - DNA, 19 bp, Homo sapiens
  siRNA target sequence for ZNF434 (NM_017810.2,1758-1776).
gccgaagttcttatcttgt

SEQ ID NO: 15545 - DNA, 19 bp, Homo sapiens
  siRNA target sequence for ZNF434 (NM_017810.2,1759-1777).
ccgaagttcttatcttgtt

SEQ ID NO: 15546 - DNA, 19 bp, Homo sapiens
  siRNA target sequence for ZNF435 (NM_025231.1,176-194).
gattccagctcacaaaagt

SEQ ID NO: 15547 - DNA, 19 bp, Homo sapiens
  siRNA target sequence for ZNF435 (NM_025231.1,201-219).
ctcacaggagggaactcta

SEQ ID NO: 15548 - DNA, 19 bp, Homo sapiens
  siRNA target sequence for ZNF435 (NM_025231.1,203-221).
cacaggagggaactctata

SEQ ID NO: 15549 - DNA, 19 bp, Homo sapiens
  siRNA target sequence for ZNF435 (NM_025231.1,501-519).
cagaaagacgggacatact

SEQ ID NO: 15550 - DNA, 19 bp, Homo sapiens
  siRNA target sequence for ZNF435 (NM_025231.1,503-521).
gaaagacgggacatactca

SEQ ID NO: 15551 - DNA, 19 bp, Homo sapiens
  siRNA target sequence for ZNF435 (NM_025231.1,537-555).
ccttgggaaggccatatga

SEQ ID NO: 15552 - DNA, 19 bp, Homo sapiens
  siRNA target sequence for ZNF435 (NM_025231.1,538-556).
cttgggaaggccatatgaa

SEQ ID NO: 15553 - DNA, 19 bp, Homo sapiens
  siRNA target sequence for ZNF435 (NM_025231.1,541-559).
gggaaggccatatgaatca

SEQ ID NO: 15554 - DNA, 19 bp, Homo sapiens
  siRNA target sequence for ZNF435 (NM_025231.1,543-561).
gaaggccatatgaatcact

SEQ ID NO: 15555 - DNA, 19 bp, Homo sapiens
  siRNA target sequence for ZNF435 (NM_025231.1,569-587).
cagctccatcccaaaaaga

SEQ ID NO: 15556 - DNA, 19 bp, Homo sapiens
  siRNA target sequence for ZNF435 (NM_025231.1,642-660).
ctaagaatgaagagttgtt

SEQ ID NO: 15557 - DNA, 19 bp, Homo sapiens
  siRNA target sequence for ZNF435 (NM_025231.1,689-707).
gaattccttggggagataa

SEQ ID NO: 15558 - DNA, 19 bp, Homo sapiens
  siRNA target sequence for ZNF435 (NM_025231.1,736-754).
gcatcctaagtccaaagat

SEQ ID NO: 15559 - DNA, 19 bp, Homo sapiens
  siRNA target sequence for ZNF435 (NM_025231.1,737-755).
catcctaagtccaaagata

SEQ ID NO: 15560 - DNA, 19 bp, Homo sapiens
  siRNA target sequence for ZNF435 (NM_025231.1,792-810).
gggaaagaagacgatataa

SEQ ID NO: 15561 - DNA, 19 bp, Homo sapiens
  siRNA target sequence for ZNF435 (NM_025231.1,794-812).
gaaagaagacgatataaat

SEQ ID NO: 15562 - DNA, 19 bp, Homo sapiens
  siRNA target sequence for ZNF435 (NM_025231.1,937-955).
cattggacatcatagagta

SEQ ID NO: 15563 - DNA, 19 bp, Homo sapiens
  siRNA target sequence for ZNF45 (NM_003425.2,521-539).
ggcctaccacagttagaga

SEQ ID NO: 15564 - DNA, 19 bp, Homo sapiens
  siRNA target sequence for ZNF45 (NM_003425.2,589-607).
ctcaggagccaagaatcta

SEQ ID NO: 15565 - DNA, 19 bp, Homo sapiens
  siRNA target sequence for ZNF45 (NM_003425.2,650-668).
cctcatgaagagcttttct

SEQ ID NO: 15566 - DNA, 19 bp, Homo sapiens
  siRNA target sequence for ZNF45 (NM_003425.2,676-694).
gatctggcaacagattaca

SEQ ID NO: 15567 - DNA, 19 bp, Homo sapiens
  siRNA target sequence for ZNF45 (NM_003425.2,679-697).
ctggcaacagattacaaga

SEQ ID NO: 15568 - DNA, 19 bp, Homo sapiens
  siRNA target sequence for ZNF45 (NM_003425.2,761-779).
cgagatgatttgcactata

SEQ ID NO: 15569 - DNA, 19 bp, Homo sapiens
  siRNA target sequence for ZNF45 (NM_003425.2,762-780).
gagatgatttgcactataa

SEQ ID NO: 15570 - DNA, 19 bp, Homo sapiens
  siRNA target sequence for ZNF45 (NM_003425.2,785-803).
gagggattcagtaatcaga

SEQ ID NO: 15571 - DNA, 19 bp, Homo sapiens
  siRNA target sequence for ZNF45 (NM_003425.2,956-974).
gccttccgtcggttttcaa

SEQ ID NO: 15572 - DNA, 19 bp, Homo sapiens
  siRNA target sequence for ZNF45 (NM_003425.2,958-976).
cttccgtcggttttcaagt

SEQ ID NO: 15573 - DNA, 19 bp, Homo sapiens
  siRNA target sequence for ZNF45 (NM_003425.2,961-979).
ccgtcggttttcaagtctt

SEQ ID NO: 15574 - DNA, 19 bp, Homo sapiens
  siRNA target sequence for ZNF45 (NM_003425.2,995-1013).
gtccacagtagagcaaaat

SEQ ID NO: 15575 - DNA, 19 bp, Homo sapiens
  siRNA target sequence for ZNF45 (NM_003425.2,1032-1050).
gttacaggagttttagtca

SEQ ID NO: 15576 - DNA, 19 bp, Homo sapiens
  siRNA target sequence for ZNF45 (NM_003425.2,1146-1164).
gtcaagctcctctgatagt

SEQ ID NO: 15577 - DNA, 19 bp, Homo sapiens
  siRNA target sequence for ZNF45 (NM_003425.2,1151-1169).
gctcctctgatagttcata

SEQ ID NO: 15578 - DNA, 19 bp, Homo sapiens
  siRNA target sequence for ZNF45 (NM_003425.2,1383-1401).
gttacagctcacaccttaa

SEQ ID NO: 15579 - DNA, 19 bp, Homo sapiens
  siRNA target sequence for ZNF45 (NM_003425.2,1387-1405).
cagctcacaccttaatatt

SEQ ID NO: 15580 - DNA, 19 bp, Homo sapiens
  siRNA target sequence for ZNF45 (NM_003425.2,1389-1407).
gctcacaccttaatattca

SEQ ID NO: 15581 - DNA, 19 bp, Homo sapiens
  siRNA target sequence for ZNF45 (NM_003425.2,2357-2375).
ggtgacaaggactttcctt

SEQ ID NO: 15582 - DNA, 19 bp, Homo sapiens
  siRNA target sequence for ZNF494 (NM_152677.1,709-727).
ctaagaaccatatttcagt

SEQ ID NO: 15583 - DNA, 19 bp, Homo sapiens
  siRNA target sequence for ZNF494 (NM_152677.1,728-746).
gtgaaccatccgagaataa

SEQ ID NO: 15584 - DNA, 19 bp, Homo sapiens
  siRNA target sequence for ZNF494 (NM_152677.1,827-845).
gaatggtgctcaattcatt

SEQ ID NO: 15585 - DNA, 19 bp, Homo sapiens
  siRNA target sequence for ZNF494 (NM_152677.1,831-849).
ggtgctcaattcatttcaa

SEQ ID NO: 15586 - DNA, 19 bp, Homo sapiens
  siRNA target sequence for ZNF494 (NM_152677.1,852-870).
cagcaataattcatatgca

SEQ ID NO: 15587 - DNA, 19 bp, Homo sapiens
  siRNA target sequence for ZNF494 (NM_152677.1,863-881).
catatgcaaggcaggaatt

SEQ ID NO: 15588 - DNA, 19 bp, Homo sapiens
  siRNA target sequence for ZNF494 (NM_152677.1,873-891).
gcaggaattgcaaagactt

SEQ ID NO: 15589 - DNA, 19 bp, Homo sapiens
  siRNA target sequence for ZNF494 (NM_152677.1,876-894).
ggaattgcaaagactttat

SEQ ID NO: 15590 - DNA, 19 bp, Homo sapiens
  siRNA target sequence for ZNF494 (NM_152677.1,887-905).
gactttataggatctttca

SEQ ID NO: 15591 - DNA, 19 bp, Homo sapiens
  siRNA target sequence for ZNF494 (NM_152677.1,908-926).
catggctgcaaccagaaaa

SEQ ID NO: 15592 - DNA, 19 bp, Homo sapiens
  siRNA target sequence for ZNF494 (NM_152677.1,960-978).
cctggagcagtttatgatt

SEQ ID NO: 15593 - DNA, 19 bp, Homo sapiens
  siRNA target sequence for ZNF494 (NM_152677.1,1134-1152).
ggatatgcccttaagagat

SEQ ID NO: 15594 - DNA, 19 bp, Homo sapiens
  siRNA target sequence for ZNF494 (NM_152677.1,1221-1239).
ccagacttcccaagatact

SEQ ID NO: 15595 - DNA, 19 bp, Homo sapiens
  siRNA target sequence for ZNF494 (NM_152677.1,1230-1248).
ccaagatacttccttagaa

SEQ ID NO: 15596 - DNA, 19 bp, Homo sapiens
  siRNA target sequence for ZNF494 (NM_152677.1,1284-1302).
gaacagttcttcgaaaact

SEQ ID NO: 15597 - DNA, 19 bp, Homo sapiens
  siRNA target sequence for ZNF494 (NM_152677.1,1287-1305).
cagttcttcgaaaactact

SEQ ID NO: 15598 - DNA, 19 bp, Homo sapiens
  siRNA target sequence for ZNF494 (NM_152677.1,1295-1313).
cgaaaactactcgagtaaa

SEQ ID NO: 15599 - DNA, 19 bp, Homo sapiens
  siRNA target sequence for ZNF494 (NM_152677.1,1325-1343).
ctaatcaaggcaatcaaat

SEQ ID NO: 15600 - DNA, 19 bp, Homo sapiens
  siRNA target sequence for ZNF494 (NM_152677.1,1408-1426).
gacaacccatacaactcaa

SEQ ID NO: 15601 - DNA, 19 bp, Homo sapiens
  siRNA target sequence for ZNF494 (NM_152677.1,1410-1428).
caacccatacaactcaaaa

SEQ ID NO: 15602 - DNA, 19 bp, Homo sapiens
  siRNA target sequence for ZNF494 (NM_152677.1,1413-1431).
cccatacaactcaaaaaga

SEQ ID NO: 15603 - DNA, 19 bp, Homo sapiens
  siRNA target sequence for ZNF494 (NM_152677.1,1437-1455).
gctagtcactgctagatct

SEQ ID NO: 15604 - DNA, 19 bp, Homo sapiens
  siRNA target sequence for ZNF494 (NM_152677.1,1458-1476).
ggaagggtccataaatgga

SEQ ID NO: 15605 - DNA, 19 bp, Homo sapiens
  siRNA target sequence for ZNF494 (NM_152677.1,1506-1524).
gggagcagggtgtatctct

SEQ ID NO: 15606 - DNA, 19 bp, Homo sapiens
  siRNA target sequence for ZNF494 (NM_152677.1,1583-1601).
ccacatgtgaggtacatca

SEQ ID NO: 15607 - DNA, 19 bp, Homo sapiens
  siRNA target sequence for ZNF494 (NM_152677.1,1607-1625).
gatcccatggagtccaaaa

SEQ ID NO: 15608 - DNA, 19 bp, Homo sapiens
  siRNA target sequence for ZNF494 (NM_152677.1,1611-1629).
ccatggagtccaaaaatca

SEQ ID NO: 15609 - DNA, 19 bp, Homo sapiens
  siRNA target sequence for ZNF494 (NM_152677.1,1615-1633).
ggagtccaaaaatcataca

SEQ ID NO: 15610 - DNA, 19 bp, Homo sapiens
  siRNA target sequence for ZNF494 (NM_152677.1,1616-1634).
gagtccaaaaatcatacaa

SEQ ID NO: 15611 - DNA, 19 bp, Homo sapiens
  siRNA target sequence for ZNF494 (NM_152677.1,1647-1665).
ccccaaggtctttaagtat

SEQ ID NO: 15612 - DNA, 19 bp, Homo sapiens
  siRNA target sequence for ZNF494 (NM_152677.1,1649-1667).
ccaaggtctttaagtatct

SEQ ID NO: 15613 - DNA, 19 bp, Homo sapiens
  siRNA target sequence for ZNF494 (NM_152677.1,1662-1680).
gtatctctgtcacttatta

SEQ ID NO: 15614 - DNA, 19 bp, Homo sapiens
  siRNA target sequence for ZNF494 (NM_152677.1,1700-1718).
ggaatgagaggccatttgt

SEQ ID NO: 15615 - DNA, 19 bp, Homo sapiens
  siRNA target sequence for ZNF494 (NM_152677.1,1701-1719).
gaatgagaggccatttgtt

SEQ ID NO: 15616 - DNA, 19 bp, Homo sapiens
  siRNA target sequence for ZNF494 (NM_152677.1,1758-1776).
cctacgggtgcatcagata

SEQ ID NO: 15617 - DNA, 19 bp, Homo sapiens
  siRNA target sequence for ZNF494 (NM_152677.1,1759-1777).
ctacgggtgcatcagataa

SEQ ID NO: 15618 - DNA, 19 bp, Homo sapiens
  siRNA target sequence for ZNF495 (NM_024303.1,277-295).
cgtggaccctgagatttct

SEQ ID NO: 15619 - DNA, 19 bp, Homo sapiens
  siRNA target sequence for ZNF495 (NM_024303.1,559-577).
caccttccacggaaaggaa

SEQ ID NO: 15620 - DNA, 19 bp, Homo sapiens
  siRNA target sequence for ZNF495 (NM_024303.1,562-580).
cttccacggaaaggaatat

SEQ ID NO: 15621 - DNA, 19 bp, Homo sapiens
  siRNA target sequence for ZNF495 (NM_024303.1,1145-1163).
caagctgggatgaattcaa

SEQ ID NO: 15622 - DNA, 19 bp, Homo sapiens
  siRNA target sequence for ZNF495 (NM_024303.1,1149-1167).
ctgggatgaattcaattca

SEQ ID NO: 15623 - DNA, 19 bp, Homo sapiens
  siRNA target sequence for ZNF495 (NM_024303.1,1340-1358).
cgcttcatgcagcttatta

SEQ ID NO: 15624 - DNA, 19 bp, Homo sapiens
  siRNA target sequence for ZNF495 (NM_024303.1,1592-1610).
gccttcagtcggctgaaat

SEQ ID NO: 15625 - DNA, 19 bp, Homo sapiens
  siRNA target sequence for ZNF495 (NM_024303.1,1597-1615).
cagtcggctgaaattgtta

SEQ ID NO: 15626 - DNA, 19 bp, Homo sapiens
  siRNA target sequence for ZNF496 (NM_032752.1,490-508).
gtcttggctccgaaggaaa

SEQ ID NO: 15627 - DNA, 19 bp, Homo sapiens
  siRNA target sequence for ZNF496 (NM_032752.1,1127-1145).
ctccattcaaggacatgat

SEQ ID NO: 15628 - DNA, 19 bp, Homo sapiens
  siRNA target sequence for ZNF496 (NM_032752.1,1476-1494).
cggcaacccgcgatctcta

SEQ ID NO: 15629 - DNA, 19 bp, Homo sapiens
  siRNA target sequence for ZNF496 (NM_032752.1,1688-1706).
gtccgaactgtgggaaaat

SEQ ID NO: 15630 - DNA, 19 bp, Homo sapiens
  siRNA target sequence for ZNF496 (NM_032752.1,2081-2099).
ggcaccgcagccactttca

SEQ ID NO: 15631 - DNA, 19 bp, Homo sapiens
  siRNA target sequence for ZNF496 (NM_032752.1,2145-2163).
gagcttcacgcagaactat

SEQ ID NO: 15632 - DNA, 19 bp, Homo sapiens
  siRNA target sequence for ZNF70 (NM_021916.2,490-508).
gtgagacctttgcatttga

SEQ ID NO: 15633 - DNA, 19 bp, Homo sapiens
  siRNA target sequence for ZNF70 (NM_021916.2,512-530).
caggttagagtcacaacaa

SEQ ID NO: 15634 - DNA, 19 bp, Homo sapiens
  siRNA target sequence for ZNF70 (NM_021916.2,645-663).
gattacgaggggaatttca

SEQ ID NO: 15635 - DNA, 19 bp, Homo sapiens
  siRNA target sequence for ZNF70 (NM_021916.2,766-784).
gcatgtgtcagataatcca

SEQ ID NO: 15636 - DNA, 19 bp, Homo sapiens
  siRNA target sequence for ZNF70 (NM_021916.2,1090-1108).
ccctcacgcaacaccaaaa

SEQ ID NO: 15637 - DNA, 19 bp, Homo sapiens
  siRNA target sequence for ZNF70 (NM_021916.2,1178-1196).
cagaaaacacgagagaatt

SEQ ID NO: 15638 - DNA, 19 bp, Homo sapiens
  siRNA target sequence for ZNF70 (NM_021916.2,1676-1694).
cctcattgagcactataaa

SEQ ID NO: 15639 - DNA, 19 bp, Homo sapiens
  siRNA target sequence for ZNF70 (NM_021916.2,1677-1695).
ctcattgagcactataaaa

SEQ ID NO: 15640 - DNA, 19 bp, Homo sapiens
  siRNA target sequence for ZNF75 (NM_007131.1,618-636).
ctggaaatgatcatcctat

SEQ ID NO: 15641 - DNA, 19 bp, Homo sapiens
  siRNA target sequence for ZNF75 (NM_007131.1,620-638).
ggaaatgatcatcctatat

SEQ ID NO: 15642 - DNA, 19 bp, Homo sapiens
  siRNA target sequence for ZNF75 (NM_007131.1,666-684).
caggatgcgaagtatcaaa

SEQ ID NO: 15643 - DNA, 19 bp, Homo sapiens
  siRNA target sequence for ZNF75 (NM_007131.1,669-687).
gatgcgaagtatcaaaaaa

SEQ ID NO: 15644 - DNA, 19 bp, Homo sapiens
  siRNA target sequence for ZNF75 (NM_007131.1,819-837).
caaaacttatggatcttca

SEQ ID NO: 15645 - DNA, 19 bp, Homo sapiens
  siRNA target sequence for ZNF75 (NM_007131.1,1198-1216).
gccttatacgtgtagctta

SEQ ID NO: 15646 - DNA, 19 bp, Homo sapiens
  siRNA target sequence for ZNF75 (NM_007131.1,1199-1217).
ccttatacgtgtagcttat

SEQ ID NO: 15647 - DNA, 19 bp, Homo sapiens
  siRNA target sequence for ZNF80 (NM_007136.1,550-568).
gtctgcactcacaggtttt

SEQ ID NO: 15648 - DNA, 19 bp, Homo sapiens
  siRNA target sequence for ZNF80 (NM_007136.1,613-631).
cccagggaccaagtaaaga

SEQ ID NO: 15649 - DNA, 19 bp, Homo sapiens
  siRNA target sequence for ZNF80 (NM_007136.1,619-637).
gaccaagtaaagacacttt

SEQ ID NO: 15650 - DNA, 19 bp, Homo sapiens
  siRNA target sequence for ZNF80 (NM_007136.1,673-691).
gtgggagcgtgtttaacaa

SEQ ID NO: 15651 - DNA, 19 bp, Homo sapiens
  siRNA target sequence for ZNF80 (NM_007136.1,675-693).
gggagcgtgtttaacaaaa

SEQ ID NO: 15652 - DNA, 19 bp, Homo sapiens
  siRNA target sequence for ZNF80 (NM_007136.1,676-694).
ggagcgtgtttaacaaaaa

SEQ ID NO: 15653 - DNA, 19 bp, Homo sapiens
  siRNA target sequence for ZNF80 (NM_007136.1,1036-1054).
ccttaacccggcacatgaa

SEQ ID NO: 15654 - DNA, 19 bp, Homo sapiens
  siRNA target sequence for ZNF80 (NM_007136.1,1119-1137).
gttttcttccgacatagta

SEQ ID NO: 15655 - DNA, 19 bp, Homo sapiens
  siRNA target sequence for ZNF83 (NM_018300.2,608-626).
cccaccccaacgtatttct

SEQ ID NO: 15656 - DNA, 19 bp, Homo sapiens
  siRNA target sequence for ZNF83 (NM_018300.2,609-627).
ccaccccaacgtatttctt

SEQ ID NO: 15657 - DNA, 19 bp, Homo sapiens
  siRNA target sequence for ZNF83 (NM_018300.2,612-630).
ccccaacgtatttcttcta

SEQ ID NO: 15658 - DNA, 19 bp, Homo sapiens
  siRNA target sequence for ZNF83 (NM_018300.2,614-632).
ccaacgtatttcttctact

SEQ ID NO: 15659 - DNA, 19 bp, Homo sapiens
  siRNA target sequence for ZNF83 (NM_018300.2,640-658).
cccacatttctcatacata

SEQ ID NO: 15660 - DNA, 19 bp, Homo sapiens
  siRNA target sequence for ZNF83 (NM_018300.2,641-659).
ccacatttctcatacatat

SEQ ID NO: 15661 - DNA, 19 bp, Homo sapiens
  siRNA target sequence for ZNF83 (NM_018300.2,711-729).
gggacagaacactacaaat

SEQ ID NO: 15662 - DNA, 19 bp, Homo sapiens
  siRNA target sequence for ZNF83 (NM_018300.2,713-731).
gacagaacactacaaatgt

SEQ ID NO: 15663 - DNA, 19 bp, Homo sapiens
  siRNA target sequence for ZNF83 (NM_018300.2,756-774).
caaggcttacattttacta

SEQ ID NO: 15664 - DNA, 19 bp, Homo sapiens
  siRNA target sequence for ZNF83 (NM_018300.2,1750-1768).
ggaaggtcttcggtctaaa

SEQ ID NO: 15665 - DNA, 19 bp, Homo sapiens
  siRNA target sequence for ZNF83 (NM_018300.2,1923-1941).
ctcttccgcgacaattcat

SEQ ID NO: 15666 - DNA, 19 bp, Homo sapiens
  siRNA target sequence for ZNF83 (NM_018300.2,1925-1943).
cttccgcgacaattcatat

SEQ ID NO: 15667 - DNA, 19 bp, Homo sapiens
  siRNA target sequence for ZNF83 (NM_018300.2,1928-1946).
ccgcgacaattcatatctt

SEQ ID NO: 15668 - DNA, 19 bp, Homo sapiens
  siRNA target sequence for ZNF83 (NM_018300.2,1930-1948).
gcgacaattcatatcttgt

SEQ ID NO: 15669 - DNA, 19 bp, Homo sapiens
  siRNA target sequence for ZNF83 (NM_018300.2,1931-1949).
cgacaattcatatcttgta

SEQ ID NO: 15670 - DNA, 19 bp, Homo sapiens
  siRNA target sequence for ZNF83 (NM_018300.2,1968-1986).
gccggaaagaaatctaaca

SEQ ID NO: 15671 - DNA, 19 bp, Homo sapiens
  siRNA target sequence for ZNF83 (NM_018300.2,1970-1988).
cggaaagaaatctaacaca

SEQ ID NO: 15672 - DNA, 19 bp, Homo sapiens
  siRNA target sequence for ZNF85 (NM_003429.1,1017-1035).
cccttactacccatagaaa

SEQ ID NO: 15673 - DNA, 19 bp, Homo sapiens
  siRNA target sequence for ZNF9 (NM_003418.1,196-214).
cgtggcagaggtggtttta

SEQ ID NO: 15674 - DNA, 19 bp, Homo sapiens
  siRNA target sequence for ZNF9 (NM_003418.1,293-311).
ccaaggattgtgatcttca

SEQ ID NO: 15675 - DNA, 19 bp, Homo sapiens
  siRNA target sequence for ZNF9 (NM_003418.1,445-463).
gatgagcagaaatgctatt

SEQ ID NO: 15676 - DNA, 19 bp, Homo sapiens
  siRNA target sequence for ZNF9 (NM_003418.1,470-488).
gagaattcggacacattca

SEQ ID NO: 15677 - DNA, 19 bp, Homo sapiens
  siRNA target sequence for ZNF9 (NM_003418.1,472-490).
gaattcggacacattcaaa

SEQ ID NO: 15678 - DNA, 19 bp, Homo sapiens
  siRNA target sequence for ZNF9 (NM_003418.1,513-531).
ctataggtgtggtgaaact

SEQ ID NO: 15679 - DNA, 19 bp, Homo sapiens
  siRNA target sequence for ZNF9 (NM_003418.1,532-550).
ggtcatgtagccatcaact

SEQ ID NO: 15680 - DNA, 19 bp, Homo sapiens
  siRNA target sequence for ZNF9 (NM_003418.1,554-572).
gcaagacaagtgaagtcaa

SEQ ID NO: 15681 - DNA, 19 bp, Homo sapiens
  siRNA target sequence for ZNF9 (NM_003418.1,560-578).
caagtgaagtcaactgtta

SEQ ID NO: 15682 - DNA, 19 bp, Homo sapiens
  siRNA target sequence for ZNF9 (NM_003418.1,605-623).
cacgggaatgcacaattga

SEQ ID NO: 15683 - DNA, 19 bp, Homo sapiens
  siRNA target sequence for ZNF91 (NM_003430.1,688-706).
ccaacataaatgcgtttat

SEQ ID NO: 15684 - DNA, 19 bp, Homo sapiens
  siRNA target sequence for ZNF91 (NM_003430.1,3553-3571).
gaaaattcatactatcaca

SEQ ID NO: 15685 - DNA, 19 bp, Homo sapiens
  siRNA target sequence for ZNFN1A3 (NM_012481.3,123-141).
gaaagtgcagcggttttga

SEQ ID NO: 15686 - DNA, 19 bp, Homo sapiens
  siRNA target sequence for ZNFN1A3 (NM_012481.3,127-145).
gtgcagcggttttgaatga

SEQ ID NO: 15687 - DNA, 19 bp, Homo sapiens
  siRNA target sequence for ZNFN1A3 (NM_012481.3,129-147).
gcagcggttttgaatgact

SEQ ID NO: 15688 - DNA, 19 bp, Homo sapiens
  siRNA target sequence for ZNFN1A3 (NM_012481.3,130-148).
cagcggttttgaatgacta

SEQ ID NO: 15689 - DNA, 19 bp, Homo sapiens
  siRNA target sequence for ZNFN1A3 (NM_012481.3,144-162).
gactacagtttaaccaaat

SEQ ID NO: 15690 - DNA, 19 bp, Homo sapiens
  siRNA target sequence for ZNFN1A3 (NM_012481.3,325-343).
gctattcaagagaatataa

SEQ ID NO: 15691 - DNA, 19 bp, Homo sapiens
  siRNA target sequence for ZNFN1A3 (NM_012481.3,372-390).
catgttgtctcattcgata

SEQ ID NO: 15692 - DNA, 19 bp, Homo sapiens
  siRNA target sequence for ZNFN1A3 (NM_012481.3,375-393).
gttgtctcattcgatagta

SEQ ID NO: 15693 - DNA, 19 bp, Homo sapiens
  siRNA target sequence for ZNFN1A3 (NM_012481.3,399-417).
ccaaccagtggaaagatga

SEQ ID NO: 15694 - DNA, 19 bp, Homo sapiens
  siRNA target sequence for ZNFN1A3 (NM_012481.3,419-437).
ctgcgatgtgtgtggatta

SEQ ID NO: 15695 - DNA, 19 bp, Homo sapiens
  siRNA target sequence for ZNFN1A3 (NM_012481.3,423-441).
gatgtgtgtggattatcct

SEQ ID NO: 15696 - DNA, 19 bp, Homo sapiens
  siRNA target sequence for ZNFN1A3 (NM_012481.3,443-461).
catcagcttcaatgtctta

SEQ ID NO: 15697 - DNA, 19 bp, Homo sapiens
  siRNA target sequence for ZNFN1A3 (NM_012481.3,448-466).
gcttcaatgtcttaatggt

SEQ ID NO: 15698 - DNA, 19 bp, Homo sapiens
  siRNA target sequence for ZNFN1A3 (NM_012481.3,542-560).
cctcctccgccacattaaa

SEQ ID NO: 15699 - DNA, 19 bp, Homo sapiens
  siRNA target sequence for ZNFN1A3 (NM_012481.3,587-605).
gtgtcacctctgcaactat

SEQ ID NO: 15700 - DNA, 19 bp, Homo sapiens
  siRNA target sequence for ZNFN1A3 (NM_012481.3,602-620).
ctatgcatgccaaagaaga

SEQ ID NO: 15701 - DNA, 19 bp, Homo sapiens
  siRNA target sequence for ZNFN1A3 (NM_012481.3,624-642).
gcgctcacggggcatctta

SEQ ID NO: 15702 - DNA, 19 bp, Homo sapiens
  siRNA target sequence for ZNFN1A3 (NM_012481.3,633-651).
gggcatcttaggacacatt

SEQ ID NO: 15703 - DNA, 19 bp, Homo sapiens
  siRNA target sequence for ZNFN1A3 (NM_012481.3,728-746).
gcgctgccgtacatttctt

SEQ ID NO: 15704 - DNA, 19 bp, Homo sapiens
  siRNA target sequence for ZNFN1A3 (NM_012481.3,778-796).
cggaggcaagacacatcaa

SEQ ID NO: 15705 - DNA, 19 bp, Homo sapiens
  siRNA target sequence for ZNFN1A3 (NM_012481.3,849-867).
gtggcaaaacgaaaaagct

SEQ ID NO: 15706 - DNA, 19 bp, Homo sapiens
  siRNA target sequence for ZNFN1A3 (NM_012481.3,898-916).
gccactgctttgatgtcaa

SEQ ID NO: 15707 - DNA, 19 bp, Homo sapiens
  siRNA target sequence for ZNFN1A3 (NM_012481.3,902-920).
ctgctttgatgtcaactat

SEQ ID NO: 15708 - DNA, 19 bp, Homo sapiens
  siRNA target sequence for ZNFN1A3 (NM_012481.3,925-943).
caagttacatgtatgagaa

SEQ ID NO: 15709 - DNA, 19 bp, Homo sapiens
  siRNA target sequence for ZNFN1A3 (NM_012481.3,1057-1075).
cggagatggttccagttat

SEQ ID NO: 15710 - DNA, 19 bp, Homo sapiens
  siRNA target sequence for ZNFN1A3 (NM_012481.3,1059-1077).
gagatggttccagttatca

SEQ ID NO: 15711 - DNA, 19 bp, Homo sapiens
  siRNA target sequence for ZNFN1A3 (NM_012481.3,1190-1208).
cctctctcccaacaatagt

SEQ ID NO: 15712 - DNA, 19 bp, Homo sapiens
  siRNA target sequence for ZNFN1A3 (NM_012481.3,1249-1267).
gccagaatcacatctatca

SEQ ID NO: 15713 - DNA, 19 bp, Homo sapiens
  siRNA target sequence for ZNFN1A3 (NM_012481.3,1322-1340).
ggttccccgctcttacgaa

SEQ ID NO: 15714 - DNA, 19 bp, Homo sapiens
  siRNA target sequence for ZNFN1A3 (NM_012481.3,1366-1384).
caagagactccgtcaaagt

SEQ ID NO: 15715 - DNA, 19 bp, Homo sapiens
  siRNA target sequence for ZNFN1A3 (NM_012481.3,1369-1387).
gagactccgtcaaagtgat

SEQ ID NO: 15716 - DNA, 19 bp, Homo sapiens
  siRNA target sequence for ZNFN1A3 (NM_012481.3,1399-1417).
gggaggtgatggatgtgta

SEQ ID NO: 15717 - DNA, 19 bp, Homo sapiens
  siRNA target sequence for ZNFN1A3 (NM_012481.3,1492-1510).
gtgaccctttcgagtgtaa

SEQ ID NO: 15718 - DNA, 19 bp, Homo sapiens
  siRNA target sequence for ZNFN1A3 (NM_012481.3,1505-1523).
gtgtaacatgtgtggatat

SEQ ID NO: 15719 - DNA, 19 bp, Homo sapiens
  siRNA target sequence for ZNFN1A3 (NM_012481.3,1528-1546).
gccatgatcggtatgagtt

SEQ ID NO: 15720 - DNA, 19 bp, Homo sapiens
  siRNA target sequence for ZNFN1A4 (NM_022465.2,508-526).
cgtgattgtggaagattca

SEQ ID NO: 15721 - DNA, 19 bp, Homo sapiens
  siRNA target sequence for ZNFN1A4 (NM_022465.2,509-527).
gtgattgtggaagattcat

SEQ ID NO: 15722 - DNA, 19 bp, Homo sapiens
  siRNA target sequence for ZNFN1A4 (NM_022465.2,622-640).
ctgcggcatggtctgtatt

SEQ ID NO: 15723 - DNA, 19 bp, Homo sapiens
  siRNA target sequence for ZNFN1A4 (NM_022465.2,625-643).
cggcatggtctgtattgga

SEQ ID NO: 15724 - DNA, 19 bp, Homo sapiens
  siRNA target sequence for ZNFN1A4 (NM_022465.2,1107-1125).
gttccacaccccagaagtt

SEQ ID NO: 15725 - DNA, 19 bp, Homo sapiens
  siRNA target sequence for ZNFN1A4 (NM_022465.2,1156-1174).
ctcagacctcccctatgat

SEQ ID NO: 15726 - DNA, 19 bp, Homo sapiens
  siRNA target sequence for ZNFN1A4 (NM_022465.2,1286-1304).
cgccttccacccaccaatt

SEQ ID NO: 15727 - DNA, 19 bp, Homo sapiens
  siRNA target sequence for ZNFN1A4 (NM_022465.2,1754-1772).
gaccacgtcatgttcacta

SEQ ID NO: 15728 - DNA, 19 bp, Homo sapiens
  siRNA target sequence for ZNRD1 (NM_014596.4,192-210).
gtcggacctggatttctgt

SEQ ID NO: 15729 - DNA, 19 bp, Homo sapiens
  siRNA target sequence for ZNRD1 (NM_014596.4,304-322).
gggaaggttgtgaagactt

SEQ ID NO: 15730 - DNA, 19 bp, Homo sapiens
  siRNA target sequence for ZNRD1 (NM_014596.4,411-429).
ccctcgatgtggtcatgaa

SEQ ID NO: 15731 - DNA, 19 bp, Homo sapiens
  siRNA target sequence for ZNRD1 (NM_014596.4,464-482).
ccgatgaagggcaaactgt

SEQ ID NO: 15732 - DNA, 19 bp, Homo sapiens
  siRNA target sequence for ANKRD17 (NM_032217.3,513-531).
ggagtctttcattttggat

SEQ ID NO: 15733 - DNA, 19 bp, Homo sapiens
  siRNA target sequence for ANKRD17 (NM_032217.3,565-583).
gcttccaagttgctcttat

SEQ ID NO: 15734 - DNA, 19 bp, Homo sapiens
  siRNA target sequence for ANKRD17 (NM_032217.3,635-653).
ctagactggaagctttact

SEQ ID NO: 15735 - DNA, 19 bp, Homo sapiens
  siRNA target sequence for ANKRD17 (NM_032217.3,715-733).
gtacttcggaggttgacat

SEQ ID NO: 15736 - DNA, 19 bp, Homo sapiens
  siRNA target sequence for ANKRD17 (NM_032217.3,726-744).
gttgacatcgtctgttagt

SEQ ID NO: 15737 - DNA, 19 bp, Homo sapiens
  siRNA target sequence for ANKRD17 (NM_032217.3,840-858).
ctgttcagaaggagatgta

SEQ ID NO: 15738 - DNA, 19 bp, Homo sapiens
  siRNA target sequence for ANKRD17 (NM_032217.3,863-881).
ctgtgcgaaagttactcat

SEQ ID NO: 15739 - DNA, 19 bp, Homo sapiens
  siRNA target sequence for ANKRD17 (NM_032217.3,867-885).
gcgaaagttactcattgaa

SEQ ID NO: 15740 - DNA, 19 bp, Homo sapiens
  siRNA target sequence for ANKRD17 (NM_032217.3,879-897).
cattgaagggcgaagtgta

SEQ ID NO: 15741 - DNA, 19 bp, Homo sapiens
  siRNA target sequence for ANKRD17 (NM_032217.3,917-935).
gggagagcctcctttgttt

SEQ ID NO: 15742 - DNA, 19 bp, Homo sapiens
  siRNA target sequence for ANKRD17 (NM_032217.3,918-936).
ggagagcctcctttgttta

SEQ ID NO: 15743 - DNA, 19 bp, Homo sapiens
  siRNA target sequence for ANKRD17 (NM_032217.3,941-959).
gttctgctggatactatga

SEQ ID NO: 15744 - DNA, 19 bp, Homo sapiens
  siRNA target sequence for ANKRD17 (NM_032217.3,969-987).
ggttttgttggcaatgcat

SEQ ID NO: 15745 - DNA, 19 bp, Homo sapiens
  siRNA target sequence for ANKRD17 (NM_032217.3,975-993).
gttggcaatgcatgcaaat

SEQ ID NO: 15746 - DNA, 19 bp, Homo sapiens
  siRNA target sequence for ANKRD17 (NM_032217.3,1015-1033).
ggtgacattacacctttaa

SEQ ID NO: 15747 - DNA, 19 bp, Homo sapiens
  siRNA target sequence for ANKRD17 (NM_032217.3,1016-1034).
gtgacattacacctttaat

SEQ ID NO: 15748 - DNA, 19 bp, Homo sapiens
  siRNA target sequence for ANKRD17 (NM_032217.3,1052-1070).
gacatgtcaaaattgtgaa

SEQ ID NO: 15749 - DNA, 19 bp, Homo sapiens
  siRNA target sequence for ANKRD17 (NM_032217.3,1074-1092).
gctgctagctcataaagca

SEQ ID NO: 15750 - DNA, 19 bp, Homo sapiens
  siRNA target sequence for ANKRD17 (NM_032217.3,1081-1099).
gctcataaagcagatgtta

SEQ ID NO: 15751 - DNA, 19 bp, Homo sapiens
  siRNA target sequence for ANKRD17 (NM_032217.3,1117-1135).
ggcaatacagcacttacat

SEQ ID NO: 15752 - DNA, 19 bp, Homo sapiens
  siRNA target sequence for ANKRD17 (NM_032217.3,1142-1160).
gtgctggaggctatgtaga

SEQ ID NO: 15753 - DNA, 19 bp, Homo sapiens
  siRNA target sequence for ANKRD17 (NM_032217.3,1145-1163).
ctggaggctatgtagatgt

SEQ ID NO: 15754 - DNA, 19 bp, Homo sapiens
  siRNA target sequence for ANKRD17 (NM_032217.3,1148-1166).
gaggctatgtagatgttgt

SEQ ID NO: 15755 - DNA, 19 bp, Homo sapiens
  siRNA target sequence for ANKRD17 (NM_032217.3,1150-1168).
ggctatgtagatgttgtaa

SEQ ID NO: 15756 - DNA, 19 bp, Homo sapiens
  siRNA target sequence for ANKRD17 (NM_032217.3,1151-1169).
gctatgtagatgttgtaaa

SEQ ID NO: 15757 - DNA, 19 bp, Homo sapiens
  siRNA target sequence for ANKRD17 (NM_032217.3,1179-1197).
ggaatccggtgctagtatt

SEQ ID NO: 15758 - DNA, 19 bp, Homo sapiens
  siRNA target sequence for ANKRD17 (NM_032217.3,1190-1208).
ctagtattgaggaccataa

SEQ ID NO: 15759 - DNA, 19 bp, Homo sapiens
  siRNA target sequence for ANKRD17 (NM_032217.3,1193-1211).
gtattgaggaccataatga

SEQ ID NO: 15760 - DNA, 19 bp, Homo sapiens
  siRNA target sequence for ANKRD17 (NM_032217.3,1200-1218).
ggaccataatgaaaatggt

SEQ ID NO: 15761 - DNA, 19 bp, Homo sapiens
  siRNA target sequence for ANKRD17 (NM_032217.3,1217-1235).
gtcatacccctcttatgga

SEQ ID NO: 15762 - DNA, 19 bp, Homo sapiens
  siRNA target sequence for ANKRD17 (NM_032217.3,1291-1309).
ggcattaatacgcattcta

SEQ ID NO: 15763 - DNA, 19 bp, Homo sapiens
  siRNA target sequence for ANKRD17 (NM_032217.3,1292-1310).
gcattaatacgcattctaa

SEQ ID NO: 15764 - DNA, 19 bp, Homo sapiens
  siRNA target sequence for ANKRD17 (NM_032217.3,1293-1311).
cattaatacgcattctaat

SEQ ID NO: 15765 - DNA, 19 bp, Homo sapiens
  siRNA target sequence for ANKRD17 (NM_032217.3,1328-1346).
cccttaccttagcttgtta

SEQ ID NO: 15766 - DNA, 19 bp, Homo sapiens
  siRNA target sequence for ANKRD17 (NM_032217.3,1330-1348).
cttaccttagcttgttaca

SEQ ID NO: 15767 - DNA, 19 bp, Homo sapiens
  siRNA target sequence for ANKRD17 (NM_032217.3,1360-1378).
gagatggtgcgatttcttt

SEQ ID NO: 15768 - DNA, 19 bp, Homo sapiens
  siRNA target sequence for ANKRD17 (NM_032217.3,1365-1383).
ggtgcgatttcttttggaa

SEQ ID NO: 15769 - DNA, 19 bp, Homo sapiens
  siRNA target sequence for ANKRD17 (NM_032217.3,1446-1464).
ggatggccatgttgaagta

SEQ ID NO: 15770 - DNA, 19 bp, Homo sapiens
  siRNA target sequence for ANKRD17 (NM_032217.3,1557-1575).
ggaacttgcggctttactt

SEQ ID NO: 15771 - DNA, 19 bp, Homo sapiens
  siRNA target sequence for ANKRD17 (NM_032217.3,1678-1696).
ggtcaaggagcaaatatca

SEQ ID NO: 15772 - DNA, 19 bp, Homo sapiens
  siRNA target sequence for ANKRD17 (NM_032217.3,1805-1823).
ggtgttctacccctttaat

SEQ ID NO: 15773 - DNA, 19 bp, Homo sapiens
  siRNA target sequence for ANKRD17 (NM_032217.3,1839-1857).
gggtcatttggagttagtt

SEQ ID NO: 15774 - DNA, 19 bp, Homo sapiens
  siRNA target sequence for ANKRD17 (NM_032217.3,1840-1858).
ggtcatttggagttagtta

SEQ ID NO: 15775 - DNA, 19 bp, Homo sapiens
  siRNA target sequence for ANKRD17 (NM_032217.3,1841-1859).
gtcatttggagttagttaa

SEQ ID NO: 15776 - DNA, 19 bp, Homo sapiens
  siRNA target sequence for ANKRD17 (NM_032217.3,1843-1861).
catttggagttagttaaat

SEQ ID NO: 15777 - DNA, 19 bp, Homo sapiens
  siRNA target sequence for ANKRD17 (NM_032217.3,1848-1866).
ggagttagttaaatactta

SEQ ID NO: 15778 - DNA, 19 bp, Homo sapiens
  siRNA target sequence for ANKRD17 (NM_032217.3,1849-1867).
gagttagttaaatacttat

SEQ ID NO: 15779 - DNA, 19 bp, Homo sapiens
  siRNA target sequence for ANKRD17 (NM_032217.3,1906-1924).
ggggatacagcactaacat

SEQ ID NO: 15780 - DNA, 19 bp, Homo sapiens
  siRNA target sequence for ANKRD17 (NM_032217.3,1907-1925).
gggatacagcactaacata

SEQ ID NO: 15781 - DNA, 19 bp, Homo sapiens
  siRNA target sequence for ANKRD17 (NM_032217.3,1976-1994).
gcgcagatctggaacatga

SEQ ID NO: 15782 - DNA, 19 bp, Homo sapiens
  siRNA target sequence for ANKRD17 (NM_032217.3,1977-1995).
cgcagatctggaacatgaa

SEQ ID NO: 15783 - DNA, 19 bp, Homo sapiens
  siRNA target sequence for ANKRD17 (NM_032217.3,2074-2092).
ggagcgaatgtgaatagaa

SEQ ID NO: 15784 - DNA, 19 bp, Homo sapiens
  siRNA target sequence for ANKRD17 (NM_032217.3,2085-2103).
gaatagaaccacagctaat

SEQ ID NO: 15785 - DNA, 19 bp, Homo sapiens
  siRNA target sequence for ANKRD17 (NM_032217.3,2090-2108).
gaaccacagctaataatga

SEQ ID NO: 15786 - DNA, 19 bp, Homo sapiens
  siRNA target sequence for ANKRD17 (NM_032217.3,2099-2117).
ctaataatgaccatactgt

SEQ ID NO: 15787 - DNA, 19 bp, Homo sapiens
  siRNA target sequence for ANKRD17 (NM_032217.3,2149-2167).
gcagtggtggaactacttt

SEQ ID NO: 15788 - DNA, 19 bp, Homo sapiens
  siRNA target sequence for ANKRD17 (NM_032217.3,2150-2168).
cagtggtggaactactttt

SEQ ID NO: 15789 - DNA, 19 bp, Homo sapiens
  siRNA target sequence for ANKRD17 (NM_032217.3,2302-2320).
ccagatgtcactcagttaa

SEQ ID NO: 15790 - DNA, 19 bp, Homo sapiens
  siRNA target sequence for ANKRD17 (NM_032217.3,2325-2343).
cccatcccacgatttaaat

SEQ ID NO: 15791 - DNA, 19 bp, Homo sapiens
  siRNA target sequence for ANKRD17 (NM_032217.3,2403-2421).
caaaccacctgccaatgtt

SEQ ID NO: 15792 - DNA, 19 bp, Homo sapiens
  siRNA target sequence for ANKRD17 (NM_032217.3,2523-2541).
gtctccagagagcattgta

SEQ ID NO: 15793 - DNA, 19 bp, Homo sapiens
  siRNA target sequence for ANKRD17 (NM_032217.3,2547-2565).
ggctcagggaaagttaaca

SEQ ID NO: 15794 - DNA, 19 bp, Homo sapiens
  siRNA target sequence for ANKRD17 (NM_032217.3,2629-2647).
gctcatgctgaccaactta

SEQ ID NO: 15795 - DNA, 19 bp, Homo sapiens
  siRNA target sequence for ANKRD17 (NM_032217.3,2727-2745).
gaaagtagaacgagagtta

SEQ ID NO: 15796 - DNA, 19 bp, Homo sapiens
  siRNA target sequence for ANKRD17 (NM_032217.3,2737-2755).
cgagagttacaactgaaaa

SEQ ID NO: 15797 - DNA, 19 bp, Homo sapiens
  siRNA target sequence for ANKRD17 (NM_032217.3,2775-2793).
gcagtatctagaggttaaa

SEQ ID NO: 15798 - DNA, 19 bp, Homo sapiens
  siRNA target sequence for ANKRD17 (NM_032217.3,2834-2852).
gccaacacctgggattact

SEQ ID NO: 15799 - DNA, 19 bp, Homo sapiens
  siRNA target sequence for ANKRD17 (NM_032217.3,2835-2853).
ccaacacctgggattacta

SEQ ID NO: 15800 - DNA, 19 bp, Homo sapiens
  siRNA target sequence for ANKRD17 (NM_032217.3,2836-2854).
caacacctgggattactaa

SEQ ID NO: 15801 - DNA, 19 bp, Homo sapiens
  siRNA target sequence for ANKRD17 (NM_032217.3,2907-2925).
gcaagtggatcctgtttta

SEQ ID NO: 15802 - DNA, 19 bp, Homo sapiens
  siRNA target sequence for ANKRD17 (NM_032217.3,2911-2929).
gtggatcctgttttactta

SEQ ID NO: 15803 - DNA, 19 bp, Homo sapiens
  siRNA target sequence for ANKRD17 (NM_032217.3,3029-3047).
cagggtccatcgcaaatct

SEQ ID NO: 15804 - DNA, 19 bp, Homo sapiens
  siRNA target sequence for ANKRD17 (NM_032217.3,3031-3049).
gggtccatcgcaaatctta

SEQ ID NO: 15805 - DNA, 19 bp, Homo sapiens
  siRNA target sequence for ANKRD17 (NM_032217.3,3033-3051).
gtccatcgcaaatcttaca

SEQ ID NO: 15806 - DNA, 19 bp, Homo sapiens
  siRNA target sequence for ANKRD17 (NM_032217.3,3134-3152).
cacaacaagggttaatggt

SEQ ID NO: 15807 - DNA, 19 bp, Homo sapiens
  siRNA target sequence for ANKRD17 (NM_032217.3,3234-3252).
cactcctacccacagtatt

SEQ ID NO: 15808 - DNA, 19 bp, Homo sapiens
  siRNA target sequence for ANKRD17 (NM_032217.3,3281-3299).
caactccaagtcctatcat

SEQ ID NO: 15809 - DNA, 19 bp, Homo sapiens
  siRNA target sequence for ANKRD17 (NM_032217.3,3400-3418).
cacgaggaactggtacaaa

SEQ ID NO: 15810 - DNA, 19 bp, Homo sapiens
  siRNA target sequence for ANKRD17 (NM_032217.3,3402-3420).
cgaggaactggtacaaaca

SEQ ID NO: 15811 - DNA, 19 bp, Homo sapiens
  siRNA target sequence for ANKRD17 (NM_032217.3,3525-3543).
ggacaatggtgcagacatt

SEQ ID NO: 15812 - DNA, 19 bp, Homo sapiens
  siRNA target sequence for ANKRD17 (NM_032217.3,3609-3627).
ggtggtggagctattgtta

SEQ ID NO: 15813 - DNA, 19 bp, Homo sapiens
  siRNA target sequence for ANKRD17 (NM_032217.3,3697-3715).
ggctatgtgaacatcatca

SEQ ID NO: 15814 - DNA, 19 bp, Homo sapiens
  siRNA target sequence for ANKRD17 (NM_032217.3,3698-3716).
gctatgtgaacatcatcaa

SEQ ID NO: 15815 - DNA, 19 bp, Homo sapiens
  siRNA target sequence for ANKRD17 (NM_032217.3,3832-3850).
gacatgggctctgacataa

SEQ ID NO: 15816 - DNA, 19 bp, Homo sapiens
  siRNA target sequence for ANKRD17 (NM_032217.3,3908-3926).
gaactgaagtggttagtct

SEQ ID NO: 15817 - DNA, 19 bp, Homo sapiens
  siRNA target sequence for ANKRD17 (NM_032217.3,3919-3937).
gttagtcttctgcttgata

SEQ ID NO: 15818 - DNA, 19 bp, Homo sapiens
  siRNA target sequence for ANKRD17 (NM_032217.3,3968-3986).
ctggtctcacaccactaat

SEQ ID NO: 15819 - DNA, 19 bp, Homo sapiens
  siRNA target sequence for ANKRD17 (NM_032217.3,4011-4029).
ggaggtgggccgagttctt

SEQ ID NO: 15820 - DNA, 19 bp, Homo sapiens
  siRNA target sequence for ANKRD17 (NM_032217.3,4139-4157).
gcaggggagctcatattga

SEQ ID NO: 15821 - DNA, 19 bp, Homo sapiens
  siRNA target sequence for ANKRD17 (NM_032217.3,4140-4158).
caggggagctcatattgat

SEQ ID NO: 15822 - DNA, 19 bp, Homo sapiens
  siRNA target sequence for ANKRD17 (NM_032217.3,4143-4161).
gggagctcatattgatgta

SEQ ID NO: 15823 - DNA, 19 bp, Homo sapiens
  siRNA target sequence for ANKRD17 (NM_032217.3,4188-4206).
gtggctagcagcaaatggt

SEQ ID NO: 15824 - DNA, 19 bp, Homo sapiens
  siRNA target sequence for ANKRD17 (NM_032217.3,4212-4230).
cctcgatgtggttcagtta

SEQ ID NO: 15825 - DNA, 19 bp, Homo sapiens
  siRNA target sequence for ANKRD17 (NM_032217.3,4271-4289).
gcaagataactcctcttat

SEQ ID NO: 15826 - DNA, 19 bp, Homo sapiens
  siRNA target sequence for ANKRD17 (NM_032217.3,4314-4332).
gaaggtggtgcgctactta

SEQ ID NO: 15827 - DNA, 19 bp, Homo sapiens
  siRNA target sequence for ANKRD17 (NM_032217.3,4318-4336).
gtggtgcgctacttagtca

SEQ ID NO: 15828 - DNA, 19 bp, Homo sapiens
  siRNA target sequence for ANKRD17 (NM_032217.3,4320-4338).
ggtgcgctacttagtcaaa

SEQ ID NO: 15829 - DNA, 19 bp, Homo sapiens
  siRNA target sequence for ANKRD17 (NM_032217.3,4350-4368).
gtttccatcagattctgaa

SEQ ID NO: 15830 - DNA, 19 bp, Homo sapiens
  siRNA target sequence for ANKRD17 (NM_032217.3,4408-4426).
ctgaagaagtgtcatcttt

SEQ ID NO: 15831 - DNA, 19 bp, Homo sapiens
  siRNA target sequence for ANKRD17 (NM_032217.3,4542-4560).
ggctttggctgcgaaaaga

SEQ ID NO: 15832 - DNA, 19 bp, Homo sapiens
  siRNA target sequence for ANKRD17 (NM_032217.3,4544-4562).
ctttggctgcgaaaagaga

SEQ ID NO: 15833 - DNA, 19 bp, Homo sapiens
  siRNA target sequence for ANKRD17 (NM_032217.3,4730-4748).
ccactactaccataggtat

SEQ ID NO: 15834 - DNA, 19 bp, Homo sapiens
  siRNA target sequence for ANKRD17 (NM_032217.3,4731-4749).
cactactaccataggtata

SEQ ID NO: 15835 - DNA, 19 bp, Homo sapiens
  siRNA target sequence for ANKRD17 (NM_032217.3,4770-4788).
ggcaggttctcatggtaaa

SEQ ID NO: 15836 - DNA, 19 bp, Homo sapiens
  siRNA target sequence for ANKRD17 (NM_032217.3,4771-4789).
gcaggttctcatggtaaaa

SEQ ID NO: 15837 - DNA, 19 bp, Homo sapiens
  siRNA target sequence for ANKRD17 (NM_032217.3,4774-4792).
ggttctcatggtaaaagaa

SEQ ID NO: 15838 - DNA, 19 bp, Homo sapiens
  siRNA target sequence for ANKRD17 (NM_032217.3,4849-4867).
ccagaaaacgttcaaatta

SEQ ID NO: 15839 - DNA, 19 bp, Homo sapiens
  siRNA target sequence for ANKRD17 (NM_032217.3,4857-4875).
cgttcaaattatatttgat

SEQ ID NO: 15840 - DNA, 19 bp, Homo sapiens
  siRNA target sequence for ANKRD17 (NM_032217.3,4873-4891).
gatgatccactaccaattt

SEQ ID NO: 15841 - DNA, 19 bp, Homo sapiens
  siRNA target sequence for ANKRD17 (NM_032217.3,4879-4897).
ccactaccaatttcataca

SEQ ID NO: 15842 - DNA, 19 bp, Homo sapiens
  siRNA target sequence for ANKRD17 (NM_032217.3,4980-4998).
ctgcagcgatgaaagtagt

SEQ ID NO: 15843 - DNA, 19 bp, Homo sapiens
  siRNA target sequence for ANKRD17 (NM_032217.3,4982-5000).
gcagcgatgaaagtagtaa

SEQ ID NO: 15844 - DNA, 19 bp, Homo sapiens
  siRNA target sequence for ANKRD17 (NM_032217.3,5010-5028).
cagtcgtaagagtgacaat

SEQ ID NO: 15845 - DNA, 19 bp, Homo sapiens
  siRNA target sequence for ANKRD17 (NM_032217.3,5012-5030).
gtcgtaagagtgacaatca

SEQ ID NO: 15846 - DNA, 19 bp, Homo sapiens
  siRNA target sequence for ANKRD17 (NM_032217.3,5014-5032).
cgtaagagtgacaatcatt

SEQ ID NO: 15847 - DNA, 19 bp, Homo sapiens
  siRNA target sequence for ANKRD17 (NM_032217.3,5071-5089).
cagccatcagttcttgtta

SEQ ID NO: 15848 - DNA, 19 bp, Homo sapiens
  siRNA target sequence for ANKRD17 (NM_032217.3,5073-5091).
gccatcagttcttgttaca

SEQ ID NO: 15849 - DNA, 19 bp, Homo sapiens
  siRNA target sequence for ANKRD17 (NM_032217.3,5074-5092).
ccatcagttcttgttacat

SEQ ID NO: 15850 - DNA, 19 bp, Homo sapiens
  siRNA target sequence for ANKRD17 (NM_032217.3,5075-5093).
catcagttcttgttacatt

SEQ ID NO: 15851 - DNA, 19 bp, Homo sapiens
  siRNA target sequence for ANKRD17 (NM_032217.3,5161-5179).
gggaccagtaattctctat

SEQ ID NO: 15852 - DNA, 19 bp, Homo sapiens
  siRNA target sequence for ANKRD17 (NM_032217.3,5166-5184).
cagtaattctctatctact

SEQ ID NO: 15853 - DNA, 19 bp, Homo sapiens
  siRNA target sequence for ANKRD17 (NM_032217.3,5219-5237).
caaatgggaagttaacagt

SEQ ID NO: 15854 - DNA, 19 bp, Homo sapiens
  siRNA target sequence for ANKRD17 (NM_032217.3,5345-5363).
gaggaggctgtaatatcaa

SEQ ID NO: 15855 - DNA, 19 bp, Homo sapiens
  siRNA target sequence for ANKRD17 (NM_032217.3,5352-5370).
ctgtaatatcaatgctatt

SEQ ID NO: 15856 - DNA, 19 bp, Homo sapiens
  siRNA target sequence for ANKRD17 (NM_032217.3,5425-5443).
gaccggataatcactataa

SEQ ID NO: 15857 - DNA, 19 bp, Homo sapiens
  siRNA target sequence for ANKRD17 (NM_032217.3,5465-5483).
gacaagcaactcaattgat

SEQ ID NO: 15858 - DNA, 19 bp, Homo sapiens
  siRNA target sequence for ANKRD17 (NM_032217.3,5474-5492).
ctcaattgattaatgcttt

SEQ ID NO: 15859 - DNA, 19 bp, Homo sapiens
  siRNA target sequence for ANKRD17 (NM_032217.3,5493-5511).
gatcaaggatccagacaaa

SEQ ID NO: 15860 - DNA, 19 bp, Homo sapiens
  siRNA target sequence for ANKRD17 (NM_032217.3,5524-5542).
cttattccaaagaatcgtt

SEQ ID NO: 15861 - DNA, 19 bp, Homo sapiens
  siRNA target sequence for ANKRD17 (NM_032217.3,5702-5720).
ctcacaaaaccattaagaa

SEQ ID NO: 15862 - DNA, 19 bp, Homo sapiens
  siRNA target sequence for ANKRD17 (NM_032217.3,5739-5757).
gcctggttttccagtttct

SEQ ID NO: 15863 - DNA, 19 bp, Homo sapiens
  siRNA target sequence for ANKRD17 (NM_032217.3,5915-5933).
gccctgccagagctactaa

SEQ ID NO: 15864 - DNA, 19 bp, Homo sapiens
  siRNA target sequence for ANKRD17 (NM_032217.3,5917-5935).
cctgccagagctactaact

SEQ ID NO: 15865 - DNA, 19 bp, Homo sapiens
  siRNA target sequence for ANKRD17 (NM_032217.3,5952-5970).
ggtgcctcgccatagcaat

SEQ ID NO: 15866 - DNA, 19 bp, Homo sapiens
  siRNA target sequence for ANKRD17 (NM_032217.3,6095-6113).
ctgtccgaaggcagctttt

SEQ ID NO: 15867 - DNA, 19 bp, Homo sapiens
  siRNA target sequence for ANKRD17 (NM_032217.3,6115-6133).
gtcacagttgtgaagacat

SEQ ID NO: 15868 - DNA, 19 bp, Homo sapiens
  siRNA target sequence for ANKRD17 (NM_032217.3,6135-6153).
caatgccaccacaacaaca

SEQ ID NO: 15869 - DNA, 19 bp, Homo sapiens
  siRNA target sequence for ANKRD17 (NM_032217.3,6177-6195).
caacactgcacccacaaat

SEQ ID NO: 15870 - DNA, 19 bp, Homo sapiens
  siRNA target sequence for ANKRD17 (NM_032217.3,6223-6241).
gaacactatccagtatcat

SEQ ID NO: 15871 - DNA, 19 bp, Homo sapiens
  siRNA target sequence for ANKRD17 (NM_032217.3,6356-6374).
gtagtccaccagtagtaga

SEQ ID NO: 15872 - DNA, 19 bp, Homo sapiens
  siRNA target sequence for ANKRD17 (NM_032217.3,6445-6463).
caacctccgggatctgttt

SEQ ID NO: 15873 - DNA, 19 bp, Homo sapiens
  siRNA target sequence for ANKRD17 (NM_032217.3,6449-6467).
ctccgggatctgtttctca

SEQ ID NO: 15874 - DNA, 19 bp, Homo sapiens
  siRNA target sequence for ANKRD17 (NM_032217.3,6522-6540).
gactgttcctcctttagca

SEQ ID NO: 15875 - DNA, 19 bp, Homo sapiens
  siRNA target sequence for ANKRD17 (NM_032217.3,6529-6547).
cctcctttagcaacaagtt

SEQ ID NO: 15876 - DNA, 19 bp, Homo sapiens
  siRNA target sequence for ANKRD17 (NM_032217.3,6621-6639).
gcctactcctaaaatggaa

SEQ ID NO: 15877 - DNA, 19 bp, Homo sapiens
  siRNA target sequence for ANKRD17 (NM_032217.3,6772-6790).
cagctaccttcgaccttaa

SEQ ID NO: 15878 - DNA, 19 bp, Homo sapiens
  siRNA target sequence for ANKRD17 (NM_032217.3,6774-6792).
gctaccttcgaccttaagt

SEQ ID NO: 15879 - DNA, 19 bp, Homo sapiens
  siRNA target sequence for ANKRD17 (NM_032217.3,6775-6793).
ctaccttcgaccttaagta

SEQ ID NO: 15880 - DNA, 19 bp, Homo sapiens
  siRNA target sequence for ANKRD17 (NM_032217.3,6783-6801).
gaccttaagtacacaaagt

SEQ ID NO: 15881 - DNA, 19 bp, Homo sapiens
  siRNA target sequence for ANKRD17 (NM_032217.3,6800-6818).
gtgcttgtcagaattcagt

SEQ ID NO: 15882 - DNA, 19 bp, Homo sapiens
  siRNA target sequence for ANKRD17 (NM_032217.3,6852-6870).
cagtgcccccttaccattt

SEQ ID NO: 15883 - DNA, 19 bp, Homo sapiens
  siRNA target sequence for ANKRD17 (NM_032217.3,6871-6889).
gggccctttagcacattgt

SEQ ID NO: 15884 - DNA, 19 bp, Homo sapiens
  siRNA target sequence for ANKRD17 (NM_032217.3,6872-6890).
ggccctttagcacattgtt

SEQ ID NO: 15885 - DNA, 19 bp, Homo sapiens
  siRNA target sequence for ANKRD17 (NM_032217.3,6873-6891).
gccctttagcacattgttt

SEQ ID NO: 15886 - DNA, 19 bp, Homo sapiens
  siRNA target sequence for ANKRD17 (NM_032217.3,6875-6893).
cctttagcacattgtttga

SEQ ID NO: 15887 - DNA, 19 bp, Homo sapiens
  siRNA target sequence for ANKRD17 (NM_032217.3,6924-6942).
gggaggatctgttgtttca

SEQ ID NO: 15888 - DNA, 19 bp, Homo sapiens
  siRNA target sequence for ANKRD17 (NM_032217.3,6925-6943).
ggaggatctgttgtttcat

SEQ ID NO: 15889 - DNA, 19 bp, Homo sapiens
  siRNA target sequence for ANKRD17 (NM_032217.3,6990-7008).
gccaaattcagatccttta

SEQ ID NO: 15890 - DNA, 19 bp, Homo sapiens
  siRNA target sequence for ANKRD17 (NM_032217.3,6992-7010).
caaattcagatcctttaca

SEQ ID NO: 15891 - DNA, 19 bp, Homo sapiens
  siRNA target sequence for ANKRD17 (NM_032217.3,7037-7055).
gttttagaccaccattaca

SEQ ID NO: 15892 - DNA, 19 bp, Homo sapiens
  siRNA target sequence for ANKRD17 (NM_032217.3,7067-7085).
caagtccctcaggtattgt

SEQ ID NO: 15893 - DNA, 19 bp, Homo sapiens
  siRNA target sequence for ANKRD17 (NM_032217.3,7095-7113).
ctcgccatatggttctgta

SEQ ID NO: 15894 - DNA, 19 bp, Homo sapiens
  siRNA target sequence for ANKRD17 (NM_032217.3,7098-7116).
gccatatggttctgtaaca

SEQ ID NO: 15895 - DNA, 19 bp, Homo sapiens
  siRNA target sequence for ANKRD17 (NM_032217.3,7124-7142).
caacacatttgggaaactt

SEQ ID NO: 15896 - DNA, 19 bp, Homo sapiens
  siRNA target sequence for ANKRD17 (NM_032217.3,7202-7220).
ccgcagctgctaactttaa

SEQ ID NO: 15897 - DNA, 19 bp, Homo sapiens
  siRNA target sequence for ANKRD17 (NM_032217.3,7256-7274).
cgtgttcatcagcatcaaa

SEQ ID NO: 15898 - DNA, 19 bp, Homo sapiens
  siRNA target sequence for ANKRD17 (NM_032217.3,7336-7354).
gtaccgttagggtcagaaa

SEQ ID NO: 15899 - DNA, 19 bp, Homo sapiens
  siRNA target sequence for ANKRD17 (NM_032217.3,7448-7466).
ctgttattgggagcaattt

SEQ ID NO: 15900 - DNA, 19 bp, Homo sapiens
  siRNA target sequence for ANKRD17 (NM_032217.3,7458-7476).
gagcaatttgtctacatca

SEQ ID NO: 15901 - DNA, 19 bp, Homo sapiens
  siRNA target sequence for ANKRD17 (NM_032217.3,7545-7563).
ccctgggatgggaaatcct

SEQ ID NO: 15902 - DNA, 19 bp, Homo sapiens
  siRNA target sequence for ANKRD17 (NM_032217.3,7612-7630).
gcaatggagcgagatagta

SEQ ID NO: 15903 - DNA, 19 bp, Homo sapiens
  siRNA target sequence for ANKRD17 (NM_032217.3,7620-7638).
gcgagatagtacaggaatt

SEQ ID NO: 15904 - DNA, 19 bp, Homo sapiens
  siRNA target sequence for BRCA1 (NM_007294.1,152-170).
ctgctcttcgcgttgaaga

SEQ ID NO: 15905 - DNA, 19 bp, Homo sapiens
  siRNA target sequence for BRCA1 (NM_007294.1,155-173).
ctcttcgcgttgaagaagt

SEQ ID NO: 15906 - DNA, 19 bp, Homo sapiens
  siRNA target sequence for BRCA1 (NM_007294.1,160-178).
cgcgttgaagaagtacaaa

SEQ ID NO: 15907 - DNA, 19 bp, Homo sapiens
  siRNA target sequence for BRCA1 (NM_007294.1,251-269).
caaagtgtgaccacatatt

SEQ ID NO: 15908 - DNA, 19 bp, Homo sapiens
  siRNA target sequence for BRCA1 (NM_007294.1,257-275).
gtgaccacatattttgcaa

SEQ ID NO: 15909 - DNA, 19 bp, Homo sapiens
  siRNA target sequence for BRCA1 (NM_007294.1,281-299).
gcatgctgaaacttctcaa

SEQ ID NO: 15910 - DNA, 19 bp, Homo sapiens
  siRNA target sequence for BRCA1 (NM_007294.1,313-331).
ccttcacagtgtcctttat

SEQ ID NO: 15911 - DNA, 19 bp, Homo sapiens
  siRNA target sequence for BRCA1 (NM_007294.1,317-335).
cacagtgtcctttatgtaa

SEQ ID NO: 15912 - DNA, 19 bp, Homo sapiens
  siRNA target sequence for BRCA1 (NM_007294.1,319-337).
cagtgtcctttatgtaaga

SEQ ID NO: 15913 - DNA, 19 bp, Homo sapiens
  siRNA target sequence for BRCA1 (NM_007294.1,321-339).
gtgtcctttatgtaagaat

SEQ ID NO: 15914 - DNA, 19 bp, Homo sapiens
  siRNA target sequence for BRCA1 (NM_007294.1,332-350).
gtaagaatgatataaccaa

SEQ ID NO: 15915 - DNA, 19 bp, Homo sapiens
  siRNA target sequence for BRCA1 (NM_007294.1,361-379).
caagaaagtacgagattta

SEQ ID NO: 15916 - DNA, 19 bp, Homo sapiens
  siRNA target sequence for BRCA1 (NM_007294.1,371-389).
cgagatttagtcaacttgt

SEQ ID NO: 15917 - DNA, 19 bp, Homo sapiens
  siRNA target sequence for BRCA1 (NM_007294.1,372-390).
gagatttagtcaacttgtt

SEQ ID NO: 15918 - DNA, 19 bp, Homo sapiens
  siRNA target sequence for BRCA1 (NM_007294.1,374-392).
gatttagtcaacttgttga

SEQ ID NO: 15919 - DNA, 19 bp, Homo sapiens
  siRNA target sequence for BRCA1 (NM_007294.1,396-414).
gctattgaaaatcatttgt

SEQ ID NO: 15920 - DNA, 19 bp, Homo sapiens
  siRNA target sequence for BRCA1 (NM_007294.1,431-449).
caggtttggagtatgcaaa

SEQ ID NO: 15921 - DNA, 19 bp, Homo sapiens
  siRNA target sequence for BRCA1 (NM_007294.1,505-523).
gtttctatcatccaaagta

SEQ ID NO: 15922 - DNA, 19 bp, Homo sapiens
  siRNA target sequence for BRCA1 (NM_007294.1,533-551).
gaaaccgtgccaaaagact

SEQ ID NO: 15923 - DNA, 19 bp, Homo sapiens
  siRNA target sequence for BRCA1 (NM_007294.1,537-555).
ccgtgccaaaagacttcta

SEQ ID NO: 15924 - DNA, 19 bp, Homo sapiens
  siRNA target sequence for BRCA1 (NM_007294.1,558-576).
gagtgaacccgaaaatcct

SEQ ID NO: 15925 - DNA, 19 bp, Homo sapiens
  siRNA target sequence for BRCA1 (NM_007294.1,668-686).
cgtctgtctacattgaatt

SEQ ID NO: 15926 - DNA, 19 bp, Homo sapiens
  siRNA target sequence for BRCA1 (NM_007294.1,701-719).
ctgaagataccgttaataa

SEQ ID NO: 15927 - DNA, 19 bp, Homo sapiens
  siRNA target sequence for BRCA1 (NM_007294.1,710-728).
ccgttaataaggcaactta

SEQ ID NO: 15928 - DNA, 19 bp, Homo sapiens
  siRNA target sequence for BRCA1 (NM_007294.1,711-729).
cgttaataaggcaacttat

SEQ ID NO: 15929 - DNA, 19 bp, Homo sapiens
  siRNA target sequence for BRCA1 (NM_007294.1,736-754).
gtgggagatcaagaattgt

SEQ ID NO: 15930 - DNA, 19 bp, Homo sapiens
  siRNA target sequence for BRCA1 (NM_007294.1,738-756).
gggagatcaagaattgtta

SEQ ID NO: 15931 - DNA, 19 bp, Homo sapiens
  siRNA target sequence for BRCA1 (NM_007294.1,740-758).
gagatcaagaattgttaca

SEQ ID NO: 15932 - DNA, 19 bp, Homo sapiens
  siRNA target sequence for BRCA1 (NM_007294.1,780-798).
ggatgaaatcagtttggat

SEQ ID NO: 15933 - DNA, 19 bp, Homo sapiens
  siRNA target sequence for BRCA1 (NM_007294.1,827-845).
ctgagacggatgtaacaaa

SEQ ID NO: 15934 - DNA, 19 bp, Homo sapiens
  siRNA target sequence for BRCA1 (NM_007294.1,829-847).
gagacggatgtaacaaata

SEQ ID NO: 15935 - DNA, 19 bp, Homo sapiens
  siRNA target sequence for BRCA1 (NM_007294.1,831-849).
gacggatgtaacaaatact

SEQ ID NO: 15936 - DNA, 19 bp, Homo sapiens
  siRNA target sequence for BRCA1 (NM_007294.1,862-880).
cccagtaataatgatttga

SEQ ID NO: 15937 - DNA, 19 bp, Homo sapiens
  siRNA target sequence for BRCA1 (NM_007294.1,908-926).
ggcatccagaaaagtatca

SEQ ID NO: 15938 - DNA, 19 bp, Homo sapiens
  siRNA target sequence for BRCA1 (NM_007294.1,974-992).
ctcatgccagctcattaca

SEQ ID NO: 15939 - DNA, 19 bp, Homo sapiens
  siRNA target sequence for BRCA1 (NM_007294.1,993-1011).
gcatgagaacagcagttta

SEQ ID NO: 15940 - DNA, 19 bp, Homo sapiens
  siRNA target sequence for BRCA1 (NM_007294.1,994-1012).
catgagaacagcagtttat

SEQ ID NO: 15941 - DNA, 19 bp, Homo sapiens
  siRNA target sequence for BRCA1 (NM_007294.1,1004-1022).
gcagtttattactcactaa

SEQ ID NO: 15942 - DNA, 19 bp, Homo sapiens
  siRNA target sequence for BRCA1 (NM_007294.1,1005-1023).
cagtttattactcactaaa

SEQ ID NO: 15943 - DNA, 19 bp, Homo sapiens
  siRNA target sequence for BRCA1 (NM_007294.1,1007-1025).
gtttattactcactaaaga

SEQ ID NO: 15944 - DNA, 19 bp, Homo sapiens
  siRNA target sequence for BRCA1 (NM_007294.1,1081-1099).
gcaaggagccaacataaca

SEQ ID NO: 15945 - DNA, 19 bp, Homo sapiens
  siRNA target sequence for BRCA1 (NM_007294.1,1135-1153).
cggactcccagcacagaaa

SEQ ID NO: 15946 - DNA, 19 bp, Homo sapiens
  siRNA target sequence for BRCA1 (NM_007294.1,1227-1245).
gaatcctagagatactgaa

SEQ ID NO: 15947 - DNA, 19 bp, Homo sapiens
  siRNA target sequence for BRCA1 (NM_007294.1,1249-1267).
gttccttggataacactaa

SEQ ID NO: 15948 - DNA, 19 bp, Homo sapiens
  siRNA target sequence for BRCA1 (NM_007294.1,1252-1270).
ccttggataacactaaata

SEQ ID NO: 15949 - DNA, 19 bp, Homo sapiens
  siRNA target sequence for BRCA1 (NM_007294.1,1336-1354).
catgatggggagtctgaat

SEQ ID NO: 15950 - DNA, 19 bp, Homo sapiens
  siRNA target sequence for BRCA1 (NM_007294.1,1339-1357).
gatggggagtctgaatcaa

SEQ ID NO: 15951 - DNA, 19 bp, Homo sapiens
  siRNA target sequence for BRCA1 (NM_007294.1,1372-1390).
gatgtattggacgttctaa

SEQ ID NO: 15952 - DNA, 19 bp, Homo sapiens
  siRNA target sequence for BRCA1 (NM_007294.1,1444-1462).
gatcctcatgaggctttaa

SEQ ID NO: 15953 - DNA, 19 bp, Homo sapiens
  siRNA target sequence for BRCA1 (NM_007294.1,1447-1465).
cctcatgaggctttaatat

SEQ ID NO: 15954 - DNA, 19 bp, Homo sapiens
  siRNA target sequence for BRCA1 (NM_007294.1,1474-1492).
gaaagagttcactccaaat

SEQ ID NO: 15955 - DNA, 19 bp, Homo sapiens
  siRNA target sequence for BRCA1 (NM_007294.1,1487-1505).
ccaaatcagtagagagtaa

SEQ ID NO: 15956 - DNA, 19 bp, Homo sapiens
  siRNA target sequence for BRCA1 (NM_007294.1,1604-1622).
ctgagccacagataataca

SEQ ID NO: 15957 - DNA, 19 bp, Homo sapiens
  siRNA target sequence for BRCA1 (NM_007294.1,1624-1642).
gagcgtcccctcacaaata

SEQ ID NO: 15958 - DNA, 19 bp, Homo sapiens
  siRNA target sequence for BRCA1 (NM_007294.1,1626-1644).
gcgtcccctcacaaataaa

SEQ ID NO: 15959 - DNA, 19 bp, Homo sapiens
  siRNA target sequence for BRCA1 (NM_007294.1,1627-1645).
cgtcccctcacaaataaat

SEQ ID NO: 15960 - DNA, 19 bp, Homo sapiens
  siRNA target sequence for BRCA1 (NM_007294.1,1702-1720).
gcagatttggcagttcaaa

SEQ ID NO: 15961 - DNA, 19 bp, Homo sapiens
  siRNA target sequence for BRCA1 (NM_007294.1,1768-1786).
ggtcaagtgatgaatatta

SEQ ID NO: 15962 - DNA, 19 bp, Homo sapiens
  siRNA target sequence for BRCA1 (NM_007294.1,1787-1805).
ctaatagtggtcatgagaa

SEQ ID NO: 15963 - DNA, 19 bp, Homo sapiens
  siRNA target sequence for BRCA1 (NM_007294.1,1811-1829).
caaaaggtgattctattca

SEQ ID NO: 15964 - DNA, 19 bp, Homo sapiens
  siRNA target sequence for BRCA1 (NM_007294.1,1817-1835).
gtgattctattcagaatga

SEQ ID NO: 15965 - DNA, 19 bp, Homo sapiens
  siRNA target sequence for BRCA1 (NM_007294.1,1844-1862).
ctaacccaatagaatcact

SEQ ID NO: 15966 - DNA, 19 bp, Homo sapiens
  siRNA target sequence for BRCA1 (NM_007294.1,1850-1868).
caatagaatcactcgaaaa

SEQ ID NO: 15967 - DNA, 19 bp, Homo sapiens
  siRNA target sequence for BRCA1 (NM_007294.1,1870-1888).
gaatctgctttcaaaacga

SEQ ID NO: 15968 - DNA, 19 bp, Homo sapiens
  siRNA target sequence for BRCA1 (NM_007294.1,1897-1915).
cctataagcagcagtataa

SEQ ID NO: 15969 - DNA, 19 bp, Homo sapiens
  siRNA target sequence for BRCA1 (NM_007294.1,1907-1925).
gcagtataagcaatatgga

SEQ ID NO: 15970 - DNA, 19 bp, Homo sapiens
  siRNA target sequence for BRCA1 (NM_007294.1,1916-1934).
gcaatatggaactcgaatt

SEQ ID NO: 15971 - DNA, 19 bp, Homo sapiens
  siRNA target sequence for BRCA1 (NM_007294.1,1983-2001).
gtcttctaccaggcatatt

SEQ ID NO: 15972 - DNA, 19 bp, Homo sapiens
  siRNA target sequence for BRCA1 (NM_007294.1,2017-2035).
gtagtcagtagaaatctaa

SEQ ID NO: 15973 - DNA, 19 bp, Homo sapiens
  siRNA target sequence for BRCA1 (NM_007294.1,2042-2060).
ctaattgtactgaattgca

SEQ ID NO: 15974 - DNA, 19 bp, Homo sapiens
  siRNA target sequence for BRCA1 (NM_007294.1,2059-2077).
caaattgatagttgttcta

SEQ ID NO: 15975 - DNA, 19 bp, Homo sapiens
  siRNA target sequence for BRCA1 (NM_007294.1,2121-2139).
caggcacagcagaaaccta

SEQ ID NO: 15976 - DNA, 19 bp, Homo sapiens
  siRNA target sequence for BRCA1 (NM_007294.1,2129-2147).
gcagaaacctacaactcat

SEQ ID NO: 15977 - DNA, 19 bp, Homo sapiens
  siRNA target sequence for BRCA1 (NM_007294.1,2183-2201).
gtaacaagccaaatgaaca

SEQ ID NO: 15978 - DNA, 19 bp, Homo sapiens
  siRNA target sequence for BRCA1 (NM_007294.1,2191-2209).
ccaaatgaacagacaagta

SEQ ID NO: 15979 - DNA, 19 bp, Homo sapiens
  siRNA target sequence for BRCA1 (NM_007294.1,2260-2278).
ggttcttttactaagtgtt

SEQ ID NO: 15980 - DNA, 19 bp, Homo sapiens
  siRNA target sequence for BRCA1 (NM_007294.1,2279-2297).
caaataccagtgaacttaa

SEQ ID NO: 15981 - DNA, 19 bp, Homo sapiens
  siRNA target sequence for BRCA1 (NM_007294.1,2379-2397).
ccccaaagatctcatgtta

SEQ ID NO: 15982 - DNA, 19 bp, Homo sapiens
  siRNA target sequence for BRCA1 (NM_007294.1,2380-2398).
cccaaagatctcatgttaa

SEQ ID NO: 15983 - DNA, 19 bp, Homo sapiens
  siRNA target sequence for BRCA1 (NM_007294.1,2382-2400).
caaagatctcatgttaagt

SEQ ID NO: 15984 - DNA, 19 bp, Homo sapiens
  siRNA target sequence for BRCA1 (NM_007294.1,2415-2433).
gcaaactgaaagatctgta

SEQ ID NO: 15985 - DNA, 19 bp, Homo sapiens
  siRNA target sequence for BRCA1 (NM_007294.1,2434-2452).
gagagtagcagtatttcat

SEQ ID NO: 15986 - DNA, 19 bp, Homo sapiens
  siRNA target sequence for BRCA1 (NM_007294.1,2528-2546).
cagaaccaaataaatgtgt

SEQ ID NO: 15987 - DNA, 19 bp, Homo sapiens
  siRNA target sequence for BRCA1 (NM_007294.1,2547-2565).
gagtcagtgtgcagcattt

SEQ ID NO: 15988 - DNA, 19 bp, Homo sapiens
  siRNA target sequence for BRCA1 (NM_007294.1,2549-2567).
gtcagtgtgcagcatttga

SEQ ID NO: 15989 - DNA, 19 bp, Homo sapiens
  siRNA target sequence for BRCA1 (NM_007294.1,2587-2605).
catggttgttccaaagata

SEQ ID NO: 15990 - DNA, 19 bp, Homo sapiens
  siRNA target sequence for BRCA1 (NM_007294.1,2590-2608).
ggttgttccaaagataata

SEQ ID NO: 15991 - DNA, 19 bp, Homo sapiens
  siRNA target sequence for BRCA1 (NM_007294.1,2614-2632).
gacacagaaggctttaagt

SEQ ID NO: 15992 - DNA, 19 bp, Homo sapiens
  siRNA target sequence for BRCA1 (NM_007294.1,2616-2634).
cacagaaggctttaagtat

SEQ ID NO: 15993 - DNA, 19 bp, Homo sapiens
  siRNA target sequence for BRCA1 (NM_007294.1,2620-2638).
gaaggctttaagtatccat

SEQ ID NO: 15994 - DNA, 19 bp, Homo sapiens
  siRNA target sequence for BRCA1 (NM_007294.1,2635-2653).
ccattgggacatgaagtta

SEQ ID NO: 15995 - DNA, 19 bp, Homo sapiens
  siRNA target sequence for BRCA1 (NM_007294.1,2636-2654).
cattgggacatgaagttaa

SEQ ID NO: 15996 - DNA, 19 bp, Homo sapiens
  siRNA target sequence for BRCA1 (NM_007294.1,2701-2719).
gctcagtatttgcagaata

SEQ ID NO: 15997 - DNA, 19 bp, Homo sapiens
  siRNA target sequence for BRCA1 (NM_007294.1,2742-2760).
gtcatttgctccgttttca

SEQ ID NO: 15998 - DNA, 19 bp, Homo sapiens
  siRNA target sequence for BRCA1 (NM_007294.1,2828-2846).
gtccaaaagtcacttttga

SEQ ID NO: 15999 - DNA, 19 bp, Homo sapiens
  siRNA target sequence for BRCA1 (NM_007294.1,2830-2848).
ccaaaagtcacttttgaat

SEQ ID NO: 16000 - DNA, 19 bp, Homo sapiens
  siRNA target sequence for BRCA1 (NM_007294.1,2895-2913).
gcctgtacagacagttaat

SEQ ID NO: 16001 - DNA, 19 bp, Homo sapiens
  siRNA target sequence for BRCA1 (NM_007294.1,2896-2914).
cctgtacagacagttaata

SEQ ID NO: 16002 - DNA, 19 bp, Homo sapiens
  siRNA target sequence for BRCA1 (NM_007294.1,2943-2961).
gaaagataagccagttgat

SEQ ID NO: 16003 - DNA, 19 bp, Homo sapiens
  siRNA target sequence for BRCA1 (NM_007294.1,2988-3006).
ctctaggttttgtctatca

SEQ ID NO: 16004 - DNA, 19 bp, Homo sapiens
  siRNA target sequence for BRCA1 (NM_007294.1,3021-3039).
caacgaaactggactcatt

SEQ ID NO: 16005 - DNA, 19 bp, Homo sapiens
  siRNA target sequence for BRCA1 (NM_007294.1,3031-3049).
ggactcattactccaaata

SEQ ID NO: 16006 - DNA, 19 bp, Homo sapiens
  siRNA target sequence for BRCA1 (NM_007294.1,3085-3103).
ccactttttcccatcaagt

SEQ ID NO: 16007 - DNA, 19 bp, Homo sapiens
  siRNA target sequence for BRCA1 (NM_007294.1,3212-3230).
gcacaattagccgtaataa

SEQ ID NO: 16008 - DNA, 19 bp, Homo sapiens
  siRNA target sequence for BRCA1 (NM_007294.1,3215-3233).
caattagccgtaataacat

SEQ ID NO: 16009 - DNA, 19 bp, Homo sapiens
  siRNA target sequence for BRCA1 (NM_007294.1,3221-3239).
gccgtaataacattagaga

SEQ ID NO: 16010 - DNA, 19 bp, Homo sapiens
  siRNA target sequence for BRCA1 (NM_007294.1,3223-3241).
cgtaataacattagagaaa

SEQ ID NO: 16011 - DNA, 19 bp, Homo sapiens
  siRNA target sequence for BRCA1 (NM_007294.1,3277-3295).
gaagtaggttccagtacta

SEQ ID NO: 16012 - DNA, 19 bp, Homo sapiens
  siRNA target sequence for BRCA1 (NM_007294.1,3284-3302).
gttccagtactaatgaagt

SEQ ID NO: 16013 - DNA, 19 bp, Homo sapiens
  siRNA target sequence for BRCA1 (NM_007294.1,3325-3343).
ggttccagtgatgaaaaca

SEQ ID NO: 16014 - DNA, 19 bp, Homo sapiens
  siRNA target sequence for BRCA1 (NM_007294.1,3362-3380).
gaaacagagggccaaaatt

SEQ ID NO: 16015 - DNA, 19 bp, Homo sapiens
  siRNA target sequence for BRCA1 (NM_007294.1,3370-3388).
gggccaaaattgaatgcta

SEQ ID NO: 16016 - DNA, 19 bp, Homo sapiens
  siRNA target sequence for BRCA1 (NM_007294.1,3381-3399).
gaatgctatgcttagatta

SEQ ID NO: 16017 - DNA, 19 bp, Homo sapiens
  siRNA target sequence for BRCA1 (NM_007294.1,3408-3426).
gcaacctgaggtctataaa

SEQ ID NO: 16018 - DNA, 19 bp, Homo sapiens
  siRNA target sequence for BRCA1 (NM_007294.1,3412-3430).
cctgaggtctataaacaaa

SEQ ID NO: 16019 - DNA, 19 bp, Homo sapiens
  siRNA target sequence for BRCA1 (NM_007294.1,3417-3435).
ggtctataaacaaagtctt

SEQ ID NO: 16020 - DNA, 19 bp, Homo sapiens
  siRNA target sequence for BRCA1 (NM_007294.1,3449-3467).
gtaagcatcctgaaataaa

SEQ ID NO: 16021 - DNA, 19 bp, Homo sapiens
  siRNA target sequence for BRCA1 (NM_007294.1,3518-3536).
catatctgatttcagataa

SEQ ID NO: 16022 - DNA, 19 bp, Homo sapiens
  siRNA target sequence for BRCA1 (NM_007294.1,3546-3564).
gcctatgggaagtagtcat

SEQ ID NO: 16023 - DNA, 19 bp, Homo sapiens
  siRNA target sequence for BRCA1 (NM_007294.1,3562-3580).
catgcatctcaggtttgtt

SEQ ID NO: 16024 - DNA, 19 bp, Homo sapiens
  siRNA target sequence for BRCA1 (NM_007294.1,3587-3605).
cacctgatgacctgttaga

SEQ ID NO: 16025 - DNA, 19 bp, Homo sapiens
  siRNA target sequence for BRCA1 (NM_007294.1,3600-3618).
gttagatgatggtgaaata

SEQ ID NO: 16026 - DNA, 19 bp, Homo sapiens
  siRNA target sequence for BRCA1 (NM_007294.1,3610-3628).
ggtgaaataaaggaagata

SEQ ID NO: 16027 - DNA, 19 bp, Homo sapiens
  siRNA target sequence for BRCA1 (NM_007294.1,3714-3732).
ccctttcacccatacacat

SEQ ID NO: 16028 - DNA, 19 bp, Homo sapiens
  siRNA target sequence for BRCA1 (NM_007294.1,3715-3733).
cctttcacccatacacatt

SEQ ID NO: 16029 - DNA, 19 bp, Homo sapiens
  siRNA target sequence for BRCA1 (NM_007294.1,3716-3734).
ctttcacccatacacattt

SEQ ID NO: 16030 - DNA, 19 bp, Homo sapiens
  siRNA target sequence for BRCA1 (NM_007294.1,3774-3792).
ctcagaagagaacttatct

SEQ ID NO: 16031 - DNA, 19 bp, Homo sapiens
  siRNA target sequence for BRCA1 (NM_007294.1,3887-3905).
ccgagtgtctgtctaagaa

SEQ ID NO: 16032 - DNA, 19 bp, Homo sapiens
  siRNA target sequence for BRCA1 (NM_007294.1,3889-3907).
gagtgtctgtctaagaaca

SEQ ID NO: 16033 - DNA, 19 bp, Homo sapiens
  siRNA target sequence for BRCA1 (NM_007294.1,3948-3966).
ctgcagtaaccaggtaata

SEQ ID NO: 16034 - DNA, 19 bp, Homo sapiens
  siRNA target sequence for BRCA1 (NM_007294.1,3950-3968).
gcagtaaccaggtaatatt

SEQ ID NO: 16035 - DNA, 19 bp, Homo sapiens
  siRNA target sequence for BRCA1 (NM_007294.1,3991-4009).
caccttagtgaggaaacaa

SEQ ID NO: 16036 - DNA, 19 bp, Homo sapiens
  siRNA target sequence for BRCA1 (NM_007294.1,4076-4094).
cccaggatcctttcttgat

SEQ ID NO: 16037 - DNA, 19 bp, Homo sapiens
  siRNA target sequence for BRCA1 (NM_007294.1,4081-4099).
gatcctttcttgattggtt

SEQ ID NO: 16038 - DNA, 19 bp, Homo sapiens
  siRNA target sequence for BRCA1 (NM_007294.1,4089-4107).
cttgattggttcttccaaa

SEQ ID NO: 16039 - DNA, 19 bp, Homo sapiens
  siRNA target sequence for BRCA1 (NM_007294.1,4152-4170).
caaggaattggtttcagat

SEQ ID NO: 16040 - DNA, 19 bp, Homo sapiens
  siRNA target sequence for BRCA1 (NM_007294.1,4184-4202).
gaacgggcttggaagaaaa

SEQ ID NO: 16041 - DNA, 19 bp, Homo sapiens
  siRNA target sequence for BRCA1 (NM_007294.1,4187-4205).
cgggcttggaagaaaataa

SEQ ID NO: 16042 - DNA, 19 bp, Homo sapiens
  siRNA target sequence for BRCA1 (NM_007294.1,4331-4349).
gggataccatgcaacataa

SEQ ID NO: 16043 - DNA, 19 bp, Homo sapiens
  siRNA target sequence for BRCA1 (NM_007294.1,4425-4443).
ctacccttccatcataagt

SEQ ID NO: 16044 - DNA, 19 bp, Homo sapiens
  siRNA target sequence for BRCA1 (NM_007294.1,4573-4591).
gaggtgtctgcagatagtt

SEQ ID NO: 16045 - DNA, 19 bp, Homo sapiens
  siRNA target sequence for BRCA1 (NM_007294.1,4576-4594).
gtgtctgcagatagttcta

SEQ ID NO: 16046 - DNA, 19 bp, Homo sapiens
  siRNA target sequence for BRCA1 (NM_007294.1,4634-4652).
cttctaaatgcccatcatt

SEQ ID NO: 16047 - DNA, 19 bp, Homo sapiens
  siRNA target sequence for BRCA1 (NM_007294.1,4712-4730).
ctcaagaggagctcattaa

SEQ ID NO: 16048 - DNA, 19 bp, Homo sapiens
  siRNA target sequence for BRCA1 (NM_007294.1,4722-4740).
gctcattaaggttgttgat

SEQ ID NO: 16049 - DNA, 19 bp, Homo sapiens
  siRNA target sequence for BRCA1 (NM_007294.1,4774-4792).
cacgatttgacggaaacat

SEQ ID NO: 16050 - DNA, 19 bp, Homo sapiens
  siRNA target sequence for BRCA1 (NM_007294.1,4776-4794).
cgatttgacggaaacatct

SEQ ID NO: 16051 - DNA, 19 bp, Homo sapiens
  siRNA target sequence for BRCA1 (NM_007294.1,4777-4795).
gatttgacggaaacatctt

SEQ ID NO: 16052 - DNA, 19 bp, Homo sapiens
  siRNA target sequence for BRCA1 (NM_007294.1,4797-4815).
cttgccaaggcaagatcta

SEQ ID NO: 16053 - DNA, 19 bp, Homo sapiens
  siRNA target sequence for BRCA1 (NM_007294.1,4987-5005).
gctgctcatactactgata

SEQ ID NO: 16054 - DNA, 19 bp, Homo sapiens
  siRNA target sequence for BRCA1 (NM_007294.1,5006-5024).
ctgctgggtataatgcaat

SEQ ID NO: 16055 - DNA, 19 bp, Homo sapiens
  siRNA target sequence for BRCA1 (NM_007294.1,5155-5173).
caccacatcactttaacta

SEQ ID NO: 16056 - DNA, 19 bp, Homo sapiens
  siRNA target sequence for BRCA1 (NM_007294.1,5188-5206).
gagactactcatgttgtta

SEQ ID NO: 16057 - DNA, 19 bp, Homo sapiens
  siRNA target sequence for BRCA1 (NM_007294.1,5229-5247).
gtgtgaacggacactgaaa

SEQ ID NO: 16058 - DNA, 19 bp, Homo sapiens
  siRNA target sequence for BRCA1 (NM_007294.1,5233-5251).
gaacggacactgaaatatt

SEQ ID NO: 16059 - DNA, 19 bp, Homo sapiens
  siRNA target sequence for BRCA1 (NM_007294.1,5266-5284).
ggaggaaaatgggtagtta

SEQ ID NO: 16060 - DNA, 19 bp, Homo sapiens
  siRNA target sequence for BRCA1 (NM_007294.1,5270-5288).
gaaaatgggtagttagcta

SEQ ID NO: 16061 - DNA, 19 bp, Homo sapiens
  siRNA target sequence for BRCA1 (NM_007294.1,5295-5313).
ggtgacccagtctattaaa

SEQ ID NO: 16062 - DNA, 19 bp, Homo sapiens
  siRNA target sequence for BRCA1 (NM_007294.1,5325-5343).
gctgaatgagcatgatttt

SEQ ID NO: 16063 - DNA, 19 bp, Homo sapiens
  siRNA target sequence for BRCA1 (NM_007294.1,5424-5442).
cagggggctagaaatctgt

SEQ ID NO: 16064 - DNA, 19 bp, Homo sapiens
  siRNA target sequence for BRCA1 (NM_007294.1,5514-5532).
ggtgaaggagctttcatca

SEQ ID NO: 16065 - DNA, 19 bp, Homo sapiens
  siRNA target sequence for BRCA1 (NM_007294.1,5515-5533).
gtgaaggagctttcatcat

SEQ ID NO: 16066 - DNA, 19 bp, Homo sapiens
  siRNA target sequence for BRCA1 (NM_007294.1,5546-5564).
caggtgtccacccaattgt

SEQ ID NO: 16067 - DNA, 19 bp, Homo sapiens
  siRNA target sequence for DDB1 (NM_001923.2,180-198).
cttcggccgaagacttaaa

SEQ ID NO: 16068 - DNA, 19 bp, Homo sapiens
  siRNA target sequence for DDB1 (NM_001923.2,183-201).
cggccgaagacttaaacct

SEQ ID NO: 16069 - DNA, 19 bp, Homo sapiens
  siRNA target sequence for DDB1 (NM_001923.2,219-237).
cgagattagagatctatgt

SEQ ID NO: 16070 - DNA, 19 bp, Homo sapiens
  siRNA target sequence for DDB1 (NM_001923.2,274-292).
gggcatgtatgggaagatt

SEQ ID NO: 16071 - DNA, 19 bp, Homo sapiens
  siRNA target sequence for DDB1 (NM_001923.2,293-311).
gcggtcatggagcttttca

SEQ ID NO: 16072 - DNA, 19 bp, Homo sapiens
  siRNA target sequence for DDB1 (NM_001923.2,332-350).
gacctgctgtttatcttga

SEQ ID NO: 16073 - DNA, 19 bp, Homo sapiens
  siRNA target sequence for DDB1 (NM_001923.2,365-383).
gcctgcatcctggagtata

SEQ ID NO: 16074 - DNA, 19 bp, Homo sapiens
  siRNA target sequence for DDB1 (NM_001923.2,369-387).
gcatcctggagtataaaca

SEQ ID NO: 16075 - DNA, 19 bp, Homo sapiens
  siRNA target sequence for DDB1 (NM_001923.2,390-408).
gtggcgagagcattgacat

SEQ ID NO: 16076 - DNA, 19 bp, Homo sapiens
  siRNA target sequence for DDB1 (NM_001923.2,465-483).
gcattattggcatcattga

SEQ ID NO: 16077 - DNA, 19 bp, Homo sapiens
  siRNA target sequence for DDB1 (NM_001923.2,512-530).
ctctatgatggccttttca

SEQ ID NO: 16078 - DNA, 19 bp, Homo sapiens
  siRNA target sequence for DDB1 (NM_001923.2,529-547).
caaggttattccactagat

SEQ ID NO: 16079 - DNA, 19 bp, Homo sapiens
  siRNA target sequence for DDB1 (NM_001923.2,539-557).
ccactagatcgcgataata

SEQ ID NO: 16080 - DNA, 19 bp, Homo sapiens
  siRNA target sequence for DDB1 (NM_001923.2,540-558).
cactagatcgcgataataa

SEQ ID NO: 16081 - DNA, 19 bp, Homo sapiens
  siRNA target sequence for DDB1 (NM_001923.2,624-642).
gttgccaagcacctactat

SEQ ID NO: 16082 - DNA, 19 bp, Homo sapiens
  siRNA target sequence for DDB1 (NM_001923.2,636-654).
ctactatttgctttgtcta

SEQ ID NO: 16083 - DNA, 19 bp, Homo sapiens
  siRNA target sequence for DDB1 (NM_001923.2,700-718).
ccgagaaaaggaattcaat

SEQ ID NO: 16084 - DNA, 19 bp, Homo sapiens
  siRNA target sequence for DDB1 (NM_001923.2,701-719).
cgagaaaaggaattcaata

SEQ ID NO: 16085 - DNA, 19 bp, Homo sapiens
  siRNA target sequence for DDB1 (NM_001923.2,715-733).
caataagggcccttggaaa

SEQ ID NO: 16086 - DNA, 19 bp, Homo sapiens
  siRNA target sequence for DDB1 (NM_001923.2,814-832).
gtcaatcacctatcacaat

SEQ ID NO: 16087 - DNA, 19 bp, Homo sapiens
  siRNA target sequence for DDB1 (NM_001923.2,902-920).
gaccctaatggctcaagat

SEQ ID NO: 16088 - DNA, 19 bp, Homo sapiens
  siRNA target sequence for DDB1 (NM_001923.2,1047-1065).
gcttgacataccttgataa

SEQ ID NO: 16089 - DNA, 19 bp, Homo sapiens
  siRNA target sequence for DDB1 (NM_001923.2,1048-1066).
cttgacataccttgataat

SEQ ID NO: 16090 - DNA, 19 bp, Homo sapiens
  siRNA target sequence for DDB1 (NM_001923.2,1051-1069).
gacataccttgataatggt

SEQ ID NO: 16091 - DNA, 19 bp, Homo sapiens
  siRNA target sequence for DDB1 (NM_001923.2,1120-1138).
cgttgacagtaatgaacaa

SEQ ID NO: 16092 - DNA, 19 bp, Homo sapiens
  siRNA target sequence for DDB1 (NM_001923.2,1159-1177).
ggaaacctttaccaactta

SEQ ID NO: 16093 - DNA, 19 bp, Homo sapiens
  siRNA target sequence for DDB1 (NM_001923.2,1178-1196).
ggacccattgtcgatatgt

SEQ ID NO: 16094 - DNA, 19 bp, Homo sapiens
  siRNA target sequence for DDB1 (NM_001923.2,1239-1257).
cttgctctggggctttcaa

SEQ ID NO: 16095 - DNA, 19 bp, Homo sapiens
  siRNA target sequence for DDB1 (NM_001923.2,1272-1290).
ggatcatccggaatggaat

SEQ ID NO: 16096 - DNA, 19 bp, Homo sapiens
  siRNA target sequence for DDB1 (NM_001923.2,1348-1366).
gcggtctgaccctaatcgt

SEQ ID NO: 16097 - DNA, 19 bp, Homo sapiens
  siRNA target sequence for DDB1 (NM_001923.2,1378-1396).
cactttggtgctctctttt

SEQ ID NO: 16098 - DNA, 19 bp, Homo sapiens
  siRNA target sequence for DDB1 (NM_001923.2,1405-1423).
gacaagagttctcatgtta

SEQ ID NO: 16099 - DNA, 19 bp, Homo sapiens
  siRNA target sequence for DDB1 (NM_001923.2,1407-1425).
caagagttctcatgttaaa

SEQ ID NO: 16100 - DNA, 19 bp, Homo sapiens
  siRNA target sequence for DDB1 (NM_001923.2,1466-1484).
gatgatcagcagactttct

SEQ ID NO: 16101 - DNA, 19 bp, Homo sapiens
  siRNA target sequence for DDB1 (NM_001923.2,1469-1487).
gatcagcagactttcttct

SEQ ID NO: 16102 - DNA, 19 bp, Homo sapiens
  siRNA target sequence for DDB1 (NM_001923.2,1803-1821).
cggctcgtatcttgaagtt

SEQ ID NO: 16103 - DNA, 19 bp, Homo sapiens
  siRNA target sequence for DDB1 (NM_001923.2,1813-1831).
cttgaagttgccctctttt

SEQ ID NO: 16104 - DNA, 19 bp, Homo sapiens
  siRNA target sequence for DDB1 (NM_001923.2,1816-1834).
gaagttgccctcttttgaa

SEQ ID NO: 16105 - DNA, 19 bp, Homo sapiens
  siRNA target sequence for DDB1 (NM_001923.2,1929-1947).
gagatggagcgcttttcta

SEQ ID NO: 16106 - DNA, 19 bp, Homo sapiens
  siRNA target sequence for DDB1 (NM_001923.2,1931-1949).
gatggagcgcttttctact

SEQ ID NO: 16107 - DNA, 19 bp, Homo sapiens
  siRNA target sequence for DDB1 (NM_001923.2,2017-2035).
cgtattgaggacttttcgt

SEQ ID NO: 16108 - DNA, 19 bp, Homo sapiens
  siRNA target sequence for DDB1 (NM_001923.2,2050-2068).
caacgtctttgcttgttct

SEQ ID NO: 16109 - DNA, 19 bp, Homo sapiens
  siRNA target sequence for DDB1 (NM_001923.2,2075-2093).
cccactgtcatctatagca

SEQ ID NO: 16110 - DNA, 19 bp, Homo sapiens
  siRNA target sequence for DDB1 (NM_001923.2,2091-2109).
gcagcaaccacaaattggt

SEQ ID NO: 16111 - DNA, 19 bp, Homo sapiens
  siRNA target sequence for DDB1 (NM_001923.2,2143-2161).
catgtgtcccctcaattca

SEQ ID NO: 16112 - DNA, 19 bp, Homo sapiens
  siRNA target sequence for DDB1 (NM_001923.2,2146-2164).
gtgtcccctcaattcagat

SEQ ID NO: 16113 - DNA, 19 bp, Homo sapiens
  siRNA target sequence for DDB1 (NM_001923.2,2183-2201).
gcgctggccaacaatagca

SEQ ID NO: 16114 - DNA, 19 bp, Homo sapiens
  siRNA target sequence for DDB1 (NM_001923.2,2579-2597).
gaccccaacacttacttca

SEQ ID NO: 16115 - DNA, 19 bp, Homo sapiens
  siRNA target sequence for DDB1 (NM_001923.2,2766-2784).
gcacggtgcggctctatga

SEQ ID NO: 16116 - DNA, 19 bp, Homo sapiens
  siRNA target sequence for DDB1 (NM_001923.2,2811-2829).
ctgagtgcaaccactacaa

SEQ ID NO: 16117 - DNA, 19 bp, Homo sapiens
  siRNA target sequence for DDB1 (NM_001923.2,2813-2831).
gagtgcaaccactacaaca

SEQ ID NO: 16118 - DNA, 19 bp, Homo sapiens
  siRNA target sequence for DDB1 (NM_001923.2,2919-2937).
ccatggaaggaaactttga

SEQ ID NO: 16119 - DNA, 19 bp, Homo sapiens
  siRNA target sequence for DDB1 (NM_001923.2,2939-2957).
gagattgctcgagacttta

SEQ ID NO: 16120 - DNA, 19 bp, Homo sapiens
  siRNA target sequence for DDB1 (NM_001923.2,2941-2959).
gattgctcgagactttaat

SEQ ID NO: 16121 - DNA, 19 bp, Homo sapiens
  siRNA target sequence for DDB1 (NM_001923.2,3104-3122).
cacctgggcgagtttgtca

SEQ ID NO: 16122 - DNA, 19 bp, Homo sapiens
  siRNA target sequence for DDB1 (NM_001923.2,3106-3124).
cctgggcgagtttgtcaat

SEQ ID NO: 16123 - DNA, 19 bp, Homo sapiens
  siRNA target sequence for DDB1 (NM_001923.2,3111-3129).
gcgagtttgtcaatgtctt

SEQ ID NO: 16124 - DNA, 19 bp, Homo sapiens
  siRNA target sequence for DDB1 (NM_001923.2,3112-3130).
cgagtttgtcaatgtcttt

SEQ ID NO: 16125 - DNA, 19 bp, Homo sapiens
  siRNA target sequence for DDB1 (NM_001923.2,3202-3220).
cacggtcaacggcatgata

SEQ ID NO: 16126 - DNA, 19 bp, Homo sapiens
  siRNA target sequence for DDB1 (NM_001923.2,3271-3289).
gcagaatcgactcaataaa

SEQ ID NO: 16127 - DNA, 19 bp, Homo sapiens
  siRNA target sequence for DDB1 (NM_001923.2,3373-3391).
catcgacggtgacttgatt

SEQ ID NO: 16128 - DNA, 19 bp, Homo sapiens
  siRNA target sequence for DDB1 (NM_001923.2,3377-3395).
gacggtgacttgattgaga

SEQ ID NO: 16129 - DNA, 19 bp, Homo sapiens
  siRNA target sequence for DDB1 (NM_001923.2,3392-3410).
gagagtttcctggatatta

SEQ ID NO: 16130 - DNA, 19 bp, Homo sapiens
  siRNA target sequence for DDB1 (NM_001923.2,3427-3445).
ggaggtggtggcaaaccta

SEQ ID NO: 16131 - DNA, 19 bp, Homo sapiens
  siRNA target sequence for DDB1 (NM_001923.2,3433-3451).
ggtggcaaacctacagtat

SEQ ID NO: 16132 - DNA, 19 bp, Homo sapiens
  siRNA target sequence for DDB1 (NM_001923.2,3512-3530).
gagctaactcggatccatt

SEQ ID NO: 16133 - DNA, 19 bp, Homo sapiens
  siRNA target sequence for DDB2 (NM_000107.1,205-223).
gaagacctccgagattgta

SEQ ID NO: 16134 - DNA, 19 bp, Homo sapiens
  siRNA target sequence for DDB2 (NM_000107.1,208-226).
gacctccgagattgtatta

SEQ ID NO: 16135 - DNA, 19 bp, Homo sapiens
  siRNA target sequence for DDB2 (NM_000107.1,301-319).
cggtcctagcagaagatgt

SEQ ID NO: 16136 - DNA, 19 bp, Homo sapiens
  siRNA target sequence for DDB2 (NM_000107.1,469-487).
ggattcttaccggatatta

SEQ ID NO: 16137 - DNA, 19 bp, Homo sapiens
  siRNA target sequence for DDB2 (NM_000107.1,474-492).
cttaccggatattacaaaa

SEQ ID NO: 16138 - DNA, 19 bp, Homo sapiens
  siRNA target sequence for DDB2 (NM_000107.1,564-582).
gttccaaagggggagatat

SEQ ID NO: 16139 - DNA, 19 bp, Homo sapiens
  siRNA target sequence for DDB2 (NM_000107.1,648-666).
gcatcactgggctgaagtt

SEQ ID NO: 16140 - DNA, 19 bp, Homo sapiens
  siRNA target sequence for DDB2 (NM_000107.1,649-667).
catcactgggctgaagttt

SEQ ID NO: 16141 - DNA, 19 bp, Homo sapiens
  siRNA target sequence for DDB2 (NM_000107.1,714-732).
caactaggctgcaagactt

SEQ ID NO: 16142 - DNA, 19 bp, Homo sapiens
  siRNA target sequence for DDB2 (NM_000107.1,717-735).
ctaggctgcaagactttaa

SEQ ID NO: 16143 - DNA, 19 bp, Homo sapiens
  siRNA target sequence for DDB2 (NM_000107.1,738-756).
gcaacattctacgagtttt

SEQ ID NO: 16144 - DNA, 19 bp, Homo sapiens
  siRNA target sequence for DDB2 (NM_000107.1,739-757).
caacattctacgagttttt

SEQ ID NO: 16145 - DNA, 19 bp, Homo sapiens
  siRNA target sequence for DDB2 (NM_000107.1,923-941).
ctgaacccatgctgtgatt

SEQ ID NO: 16146 - DNA, 19 bp, Homo sapiens
  siRNA target sequence for DDB2 (NM_000107.1,951-969).
ccacagcctccgtagatca

SEQ ID NO: 16147 - DNA, 19 bp, Homo sapiens
  siRNA target sequence for DDB2 (NM_000107.1,952-970).
cacagcctccgtagatcaa

SEQ ID NO: 16148 - DNA, 19 bp, Homo sapiens
  siRNA target sequence for DDB2 (NM_000107.1,957-975).
cctccgtagatcaaacagt

SEQ ID NO: 16149 - DNA, 19 bp, Homo sapiens
  siRNA target sequence for DDB2 (NM_000107.1,1044-1062).
ctgtcaacgcagcttgttt

SEQ ID NO: 16150 - DNA, 19 bp, Homo sapiens
  siRNA target sequence for DDB2 (NM_000107.1,1048-1066).
caacgcagcttgtttcagt

SEQ ID NO: 16151 - DNA, 19 bp, Homo sapiens
  siRNA target sequence for DDB2 (NM_000107.1,1105-1123).
cgagatccgagtttactct

SEQ ID NO: 16152 - DNA, 19 bp, Homo sapiens
  siRNA target sequence for DDB2 (NM_000107.1,1215-1233).
gctacaacctcattgttgt

SEQ ID NO: 16153 - DNA, 19 bp, Homo sapiens
  siRNA target sequence for DDB2 (NM_000107.1,1237-1255).
ccgatacccagatcctaat

SEQ ID NO: 16154 - DNA, 19 bp, Homo sapiens
  siRNA target sequence for DDB2 (NM_000107.1,1263-1281).
gttgtaccccttatgaatt

SEQ ID NO: 16155 - DNA, 19 bp, Homo sapiens
  siRNA target sequence for DDB2 (NM_000107.1,1294-1312).
cgtgttcgatggaaactca

SEQ ID NO: 16156 - DNA, 19 bp, Homo sapiens
  siRNA target sequence for DDB2 (NM_000107.1,1343-1361).
gaatcttctggcatcagtt

SEQ ID NO: 16157 - DNA, 19 bp, Homo sapiens
  siRNA target sequence for DDB2 (NM_000107.1,1404-1422).
caatgggttaccacattct

SEQ ID NO: 16158 - DNA, 19 bp, Homo sapiens
  siRNA target sequence for DMC1 (NM_007068.2,227-245).
gaatctttgtttcaagata

SEQ ID NO: 16159 - DNA, 19 bp, Homo sapiens
  siRNA target sequence for DMC1 (NM_007068.2,231-249).
ctttgtttcaagatattga

SEQ ID NO: 16160 - DNA, 19 bp, Homo sapiens
  siRNA target sequence for DMC1 (NM_007068.2,310-328).
ctgtaccatcaaaggtata

SEQ ID NO: 16161 - DNA, 19 bp, Homo sapiens
  siRNA target sequence for DMC1 (NM_007068.2,312-330).
gtaccatcaaaggtataca

SEQ ID NO: 16162 - DNA, 19 bp, Homo sapiens
  siRNA target sequence for DMC1 (NM_007068.2,339-357).
caagaagagctctatgcaa

SEQ ID NO: 16163 - DNA, 19 bp, Homo sapiens
  siRNA target sequence for DMC1 (NM_007068.2,345-363).
gagctctatgcaatgtcaa

SEQ ID NO: 16164 - DNA, 19 bp, Homo sapiens
  siRNA target sequence for DMC1 (NM_007068.2,377-395).
gccaaagtagacaagatta

SEQ ID NO: 16165 - DNA, 19 bp, Homo sapiens
  siRNA target sequence for DMC1 (NM_007068.2,378-396).
ccaaagtagacaagattaa

SEQ ID NO: 16166 - DNA, 19 bp, Homo sapiens
  siRNA target sequence for DMC1 (NM_007068.2,398-416).
gaggcagcgaacaaactaa

SEQ ID NO: 16167 - DNA, 19 bp, Homo sapiens
  siRNA target sequence for DMC1 (NM_007068.2,400-418).
ggcagcgaacaaactaatt

SEQ ID NO: 16168 - DNA, 19 bp, Homo sapiens
  siRNA target sequence for DMC1 (NM_007068.2,402-420).
cagcgaacaaactaattga

SEQ ID NO: 16169 - DNA, 19 bp, Homo sapiens
  siRNA target sequence for DMC1 (NM_007068.2,426-444).
gattcttgactgcatttga

SEQ ID NO: 16170 - DNA, 19 bp, Homo sapiens
  siRNA target sequence for DMC1 (NM_007068.2,437-455).
gcatttgagtatagtgaaa

SEQ ID NO: 16171 - DNA, 19 bp, Homo sapiens
  siRNA target sequence for DMC1 (NM_007068.2,480-498).
ccaccgggagccaggaatt

SEQ ID NO: 16172 - DNA, 19 bp, Homo sapiens
  siRNA target sequence for DMC1 (NM_007068.2,484-502).
cgggagccaggaatttgat

SEQ ID NO: 16173 - DNA, 19 bp, Homo sapiens
  siRNA target sequence for DMC1 (NM_007068.2,485-503).
gggagccaggaatttgata

SEQ ID NO: 16174 - DNA, 19 bp, Homo sapiens
  siRNA target sequence for DMC1 (NM_007068.2,489-507).
gccaggaatttgataagtt

SEQ ID NO: 16175 - DNA, 19 bp, Homo sapiens
  siRNA target sequence for DMC1 (NM_007068.2,490-508).
ccaggaatttgataagtta

SEQ ID NO: 16176 - DNA, 19 bp, Homo sapiens
  siRNA target sequence for DMC1 (NM_007068.2,505-523).
gttactaggaggtggaatt

SEQ ID NO: 16177 - DNA, 19 bp, Homo sapiens
  siRNA target sequence for DMC1 (NM_007068.2,532-550).
ggcaattacagaagctttt

SEQ ID NO: 16178 - DNA, 19 bp, Homo sapiens
  siRNA target sequence for DMC1 (NM_007068.2,691-709).
cattgctgatcgctttaat

SEQ ID NO: 16179 - DNA, 19 bp, Homo sapiens
  siRNA target sequence for DMC1 (NM_007068.2,696-714).
ctgatcgctttaatgtaga

SEQ ID NO: 16180 - DNA, 19 bp, Homo sapiens
  siRNA target sequence for DMC1 (NM_007068.2,725-743).
gtactggacaacgtacttt

SEQ ID NO: 16181 - DNA, 19 bp, Homo sapiens
  siRNA target sequence for DMC1 (NM_007068.2,740-758).
ctttatgcacgtgcatata

SEQ ID NO: 16182 - DNA, 19 bp, Homo sapiens
  siRNA target sequence for DMC1 (NM_007068.2,753-771).
catatactagtgaacatca

SEQ ID NO: 16183 - DNA, 19 bp, Homo sapiens
  siRNA target sequence for DMC1 (NM_007068.2,775-793).
ggagctacttgattatgta

SEQ ID NO: 16184 - DNA, 19 bp, Homo sapiens
  siRNA target sequence for DMC1 (NM_007068.2,818-836).
ggcatcttcaagctattga

SEQ ID NO: 16185 - DNA, 19 bp, Homo sapiens
  siRNA target sequence for DMC1 (NM_007068.2,819-837).
gcatcttcaagctattgat

SEQ ID NO: 16186 - DNA, 19 bp, Homo sapiens
  siRNA target sequence for DMC1 (NM_007068.2,826-844).
caagctattgattatcgat

SEQ ID NO: 16187 - DNA, 19 bp, Homo sapiens
  siRNA target sequence for DMC1 (NM_007068.2,892-910).
ggccgaacggcagcaaaaa

SEQ ID NO: 16188 - DNA, 19 bp, Homo sapiens
  siRNA target sequence for DMC1 (NM_007068.2,894-912).
ccgaacggcagcaaaaatt

SEQ ID NO: 16189 - DNA, 19 bp, Homo sapiens
  siRNA target sequence for DMC1 (NM_007068.2,965-983).
gtttttgtgaccaatcaaa

SEQ ID NO: 16190 - DNA, 19 bp, Homo sapiens
  siRNA target sequence for DMC1 (NM_007068.2,1052-1070).
ctggctcatgcttcaacaa

SEQ ID NO: 16191 - DNA, 19 bp, Homo sapiens
  siRNA target sequence for DMC1 (NM_007068.2,1054-1072).
ggctcatgcttcaacaaca

SEQ ID NO: 16192 - DNA, 19 bp, Homo sapiens
  siRNA target sequence for DMC1 (NM_007068.2,1055-1073).
gctcatgcttcaacaacaa

SEQ ID NO: 16193 - DNA, 19 bp, Homo sapiens
  siRNA target sequence for DMC1 (NM_007068.2,1148-1166).
gaagccaccttcgcaataa

SEQ ID NO: 16194 - DNA, 19 bp, Homo sapiens
  siRNA target sequence for ERCC1 (NM_001983.1,253-271).
gcccttattccgatctaca

SEQ ID NO: 16195 - DNA, 19 bp, Homo sapiens
  siRNA target sequence for ERCC1 (NM_001983.1,465-483).
ggggcaatcccgtactgaa

SEQ ID NO: 16196 - DNA, 19 bp, Homo sapiens
  siRNA target sequence for ERCC1 (NM_001983.1,468-486).
gcaatcccgtactgaagtt

SEQ ID NO: 16197 - DNA, 19 bp, Homo sapiens
  siRNA target sequence for ERCC1 (NM_001983.1,504-522).
gggaatttggcgacgtaat

SEQ ID NO: 16198 - DNA, 19 bp, Homo sapiens
  siRNA target sequence for ERCC1 (NM_001983.1,505-523).
ggaatttggcgacgtaatt

SEQ ID NO: 16199 - DNA, 19 bp, Homo sapiens
  siRNA target sequence for ERCC1 (NM_001983.1,713-731).
ctggccgactgcacattga

SEQ ID NO: 16200 - DNA, 19 bp, Homo sapiens
  siRNA target sequence for ERCC1 (NM_001983.1,836-854).
gtctcccgggtgactgaat

SEQ ID NO: 16201 - DNA, 19 bp, Homo sapiens
  siRNA target sequence for ERCC1 (NM_001983.1,840-858).
cccgggtgactgaatgtct

SEQ ID NO: 16202 - DNA, 19 bp, Homo sapiens
  siRNA target sequence for ERCC1 (NM_001983.1,864-882).
ccgtgaagtcagtcaacaa

SEQ ID NO: 16203 - DNA, 19 bp, Homo sapiens
  siRNA target sequence for ERCC1 (NM_001983.1,865-883).
cgtgaagtcagtcaacaaa

SEQ ID NO: 16204 - DNA, 19 bp, Homo sapiens
  siRNA target sequence for ERCC1 (NM_001983.1,928-946).
gctcatcgccgcatcaaga

SEQ ID NO: 16205 - DNA, 19 bp, Homo sapiens
  siRNA target sequence for ERCC1 (NM_001983.1,931-949).
catcgccgcatcaagagaa

SEQ ID NO: 16206 - DNA, 19 bp, Homo sapiens
  siRNA target sequence for ERCC1 (NM_001983.1,934-952).
cgccgcatcaagagaagat

SEQ ID NO: 16207 - DNA, 19 bp, Homo sapiens
  siRNA target sequence for ERCC1 (NM_001983.1,1009-1027).
gcacgagcccttcttgaaa

SEQ ID NO: 16208 - DNA, 19 bp, Homo sapiens
  siRNA target sequence for ERCC1 (NM_001983.1,1012-1030).
cgagcccttcttgaaagta

SEQ ID NO: 16209 - DNA, 19 bp, Homo sapiens
  siRNA target sequence for ERCC3 (NM_000122.1,112-130).
gagcggaccgcgacaagaa

SEQ ID NO: 16210 - DNA, 19 bp, Homo sapiens
  siRNA target sequence for ERCC3 (NM_000122.1,136-154).
ccaggaagcggcactatga

SEQ ID NO: 16211 - DNA, 19 bp, Homo sapiens
  siRNA target sequence for ERCC3 (NM_000122.1,330-348).
gctcccgatggccatatct

SEQ ID NO: 16212 - DNA, 19 bp, Homo sapiens
  siRNA target sequence for ERCC3 (NM_000122.1,331-349).
ctcccgatggccatatctt

SEQ ID NO: 16213 - DNA, 19 bp, Homo sapiens
  siRNA target sequence for ERCC3 (NM_000122.1,333-351).
cccgatggccatatcttct

SEQ ID NO: 16214 - DNA, 19 bp, Homo sapiens
  siRNA target sequence for ERCC3 (NM_000122.1,334-352).
ccgatggccatatcttctt

SEQ ID NO: 16215 - DNA, 19 bp, Homo sapiens
  siRNA target sequence for ERCC3 (NM_000122.1,427-445).
cccatgtgcatgagtacaa

SEQ ID NO: 16216 - DNA, 19 bp, Homo sapiens
  siRNA target sequence for ERCC3 (NM_000122.1,428-446).
ccatgtgcatgagtacaaa

SEQ ID NO: 16217 - DNA, 19 bp, Homo sapiens
  siRNA target sequence for ERCC3 (NM_000122.1,432-450).
gtgcatgagtacaaactaa

SEQ ID NO: 16218 - DNA, 19 bp, Homo sapiens
  siRNA target sequence for ERCC3 (NM_000122.1,543-561).
gatggaattatgcagttta

SEQ ID NO: 16219 - DNA, 19 bp, Homo sapiens
  siRNA target sequence for ERCC3 (NM_000122.1,546-564).
ggaattatgcagtttatta

SEQ ID NO: 16220 - DNA, 19 bp, Homo sapiens
  siRNA target sequence for ERCC3 (NM_000122.1,547-565).
gaattatgcagtttattaa

SEQ ID NO: 16221 - DNA, 19 bp, Homo sapiens
  siRNA target sequence for ERCC3 (NM_000122.1,571-589).
gtactgtcagctatggaaa

SEQ ID NO: 16222 - DNA, 19 bp, Homo sapiens
  siRNA target sequence for ERCC3 (NM_000122.1,631-649).
gttgccaccctgatgtaat

SEQ ID NO: 16223 - DNA, 19 bp, Homo sapiens
  siRNA target sequence for ERCC3 (NM_000122.1,677-695).
ccgagaatgccgcttaaga

SEQ ID NO: 16224 - DNA, 19 bp, Homo sapiens
  siRNA target sequence for ERCC3 (NM_000122.1,678-696).
cgagaatgccgcttaagaa

SEQ ID NO: 16225 - DNA, 19 bp, Homo sapiens
  siRNA target sequence for ERCC3 (NM_000122.1,679-697).
gagaatgccgcttaagaaa

SEQ ID NO: 16226 - DNA, 19 bp, Homo sapiens
  siRNA target sequence for ERCC3 (NM_000122.1,681-699).
gaatgccgcttaagaaact

SEQ ID NO: 16227 - DNA, 19 bp, Homo sapiens
  siRNA target sequence for ERCC3 (NM_000122.1,731-749).
gactttcacaagcaaatct

SEQ ID NO: 16228 - DNA, 19 bp, Homo sapiens
  siRNA target sequence for ERCC3 (NM_000122.1,833-851).
ggacctgtttgacttctat

SEQ ID NO: 16229 - DNA, 19 bp, Homo sapiens
  siRNA target sequence for ERCC3 (NM_000122.1,887-905).
gacacagacagtgtctttt

SEQ ID NO: 16230 - DNA, 19 bp, Homo sapiens
  siRNA target sequence for ERCC3 (NM_000122.1,895-913).
cagtgtcttttgaagtcaa

SEQ ID NO: 16231 - DNA, 19 bp, Homo sapiens
  siRNA target sequence for ERCC3 (NM_000122.1,966-984).
ctgttggcagaatatgact

SEQ ID NO: 16232 - DNA, 19 bp, Homo sapiens
  siRNA target sequence for ERCC3 (NM_000122.1,1093-1111).
cacgttcgggggtcattgt

SEQ ID NO: 16233 - DNA, 19 bp, Homo sapiens
  siRNA target sequence for ERCC3 (NM_000122.1,1335-1353).
ggccacaccaccaaaaggt

SEQ ID NO: 16234 - DNA, 19 bp, Homo sapiens
  siRNA target sequence for ERCC3 (NM_000122.1,1478-1496).
ctgtaagctgggtttgact

SEQ ID NO: 16235 - DNA, 19 bp, Homo sapiens
  siRNA target sequence for ERCC3 (NM_000122.1,1501-1519).
ccctcgtccgcgaagatga

SEQ ID NO: 16236 - DNA, 19 bp, Homo sapiens
  siRNA target sequence for ERCC3 (NM_000122.1,1505-1523).
cgtccgcgaagatgacaaa

SEQ ID NO: 16237 - DNA, 19 bp, Homo sapiens
  siRNA target sequence for ERCC3 (NM_000122.1,1508-1526).
ccgcgaagatgacaaaatt

SEQ ID NO: 16238 - DNA, 19 bp, Homo sapiens
  siRNA target sequence for ERCC3 (NM_000122.1,1622-1640).
ggtctggtgccctatgtct

SEQ ID NO: 16239 - DNA, 19 bp, Homo sapiens
  siRNA target sequence for ERCC3 (NM_000122.1,1632-1650).
cctatgtctcctgaatttt

SEQ ID NO: 16240 - DNA, 19 bp, Homo sapiens
  siRNA target sequence for ERCC3 (NM_000122.1,1700-1718).
catgaaccccaacaaattt

SEQ ID NO: 16241 - DNA, 19 bp, Homo sapiens
  siRNA target sequence for ERCC3 (NM_000122.1,1703-1721).
gaaccccaacaaatttaga

SEQ ID NO: 16242 - DNA, 19 bp, Homo sapiens
  siRNA target sequence for ERCC3 (NM_000122.1,1720-1738).
gagcttgccagtttctgat

SEQ ID NO: 16243 - DNA, 19 bp, Homo sapiens
  siRNA target sequence for ERCC3 (NM_000122.1,1723-1741).
cttgccagtttctgatcaa

SEQ ID NO: 16244 - DNA, 19 bp, Homo sapiens
  siRNA target sequence for ERCC3 (NM_000122.1,1790-1808).
gtttgccctaaaggaatat

SEQ ID NO: 16245 - DNA, 19 bp, Homo sapiens
  siRNA target sequence for ERCC3 (NM_000122.1,1816-1834).
gactgaacaaaccctatat

SEQ ID NO: 16246 - DNA, 19 bp, Homo sapiens
  siRNA target sequence for ERCC3 (NM_000122.1,1818-1836).
ctgaacaaaccctatatct

SEQ ID NO: 16247 - DNA, 19 bp, Homo sapiens
  siRNA target sequence for ERCC3 (NM_000122.1,1846-1864).
cgtctcagggggaaaggat

SEQ ID NO: 16248 - DNA, 19 bp, Homo sapiens
  siRNA target sequence for ERCC3 (NM_000122.1,1883-1901).
caagcacaaccccaaaatt

SEQ ID NO: 16249 - DNA, 19 bp, Homo sapiens
  siRNA target sequence for ERCC3 (NM_000122.1,1887-1905).
cacaaccccaaaattaaca

SEQ ID NO: 16250 - DNA, 19 bp, Homo sapiens
  siRNA target sequence for ERCC3 (NM_000122.1,1922-1940).
ggtaggtgacacttcgttt

SEQ ID NO: 16251 - DNA, 19 bp, Homo sapiens
  siRNA target sequence for ERCC3 (NM_000122.1,1927-1945).
gtgacacttcgtttgatct

SEQ ID NO: 16252 - DNA, 19 bp, Homo sapiens
  siRNA target sequence for ERCC3 (NM_000122.1,1953-1971).
gcaaatgtcctcattcaga

SEQ ID NO: 16253 - DNA, 19 bp, Homo sapiens
  siRNA target sequence for ERCC3 (NM_000122.1,2019-2037).
cgggtgcttcgagctaaaa

SEQ ID NO: 16254 - DNA, 19 bp, Homo sapiens
  siRNA target sequence for ERCC3 (NM_000122.1,2020-2038).
gggtgcttcgagctaaaaa

SEQ ID NO: 16255 - DNA, 19 bp, Homo sapiens
  siRNA target sequence for ERCC3 (NM_000122.1,2021-2039).
ggtgcttcgagctaaaaaa

SEQ ID NO: 16256 - DNA, 19 bp, Homo sapiens
  siRNA target sequence for ERCC3 (NM_000122.1,2045-2063).
ggttgcagaagagtacaat

SEQ ID NO: 16257 - DNA, 19 bp, Homo sapiens
  siRNA target sequence for ERCC3 (NM_000122.1,2097-2115).
caggaaatggcttactcaa

SEQ ID NO: 16258 - DNA, 19 bp, Homo sapiens
  siRNA target sequence for ERCC3 (NM_000122.1,2132-2150).
cttggtagatcaaggttat

SEQ ID NO: 16259 - DNA, 19 bp, Homo sapiens
  siRNA target sequence for ERCC3 (NM_000122.1,2136-2154).
gtagatcaaggttatagct

SEQ ID NO: 16260 - DNA, 19 bp, Homo sapiens
  siRNA target sequence for ERCC3 (NM_000122.1,2190-2208).
gaagacttggcgttttcga

SEQ ID NO: 16261 - DNA, 19 bp, Homo sapiens
  siRNA target sequence for ERCC3 (NM_000122.1,2198-2216).
ggcgttttcgacaaaagaa

SEQ ID NO: 16262 - DNA, 19 bp, Homo sapiens
  siRNA target sequence for ERCC3 (NM_000122.1,2322-2340).
cgctttggcaccatgagtt

SEQ ID NO: 16263 - DNA, 19 bp, Homo sapiens
  siRNA target sequence for ERCC3 (NM_000122.1,2353-2371).
ccgacgacactgtgtacat

SEQ ID NO: 16264 - DNA, 19 bp, Homo sapiens
  siRNA target sequence for ERCC3 (NM_000122.1,2421-2439).
ctcttcaagcgctttagga

SEQ ID NO: 16265 - DNA, 19 bp, Homo sapiens
  siRNA target sequence for ERCC3 (NM_000122.1,2423-2441).
cttcaagcgctttaggaaa

SEQ ID NO: 16266 - DNA, 19 bp, Homo sapiens
  siRNA target sequence for FANCG (NM_004629.1,962-980).
gggacctggccttgttact

SEQ ID NO: 16267 - DNA, 19 bp, Homo sapiens
  siRNA target sequence for FANCG (NM_004629.1,963-981).
ggacctggccttgttacta

SEQ ID NO: 16268 - DNA, 19 bp, Homo sapiens
  siRNA target sequence for FANCG (NM_004629.1,1002-1020).
gagtggagcctctaaggat

SEQ ID NO: 16269 - DNA, 19 bp, Homo sapiens
  siRNA target sequence for FANCG (NM_004629.1,1013-1031).
ctaaggatctgctgttact

SEQ ID NO: 16270 - DNA, 19 bp, Homo sapiens
  siRNA target sequence for FANCG (NM_004629.1,1023-1041).
gctgttacttctgaaaact

SEQ ID NO: 16271 - DNA, 19 bp, Homo sapiens
  siRNA target sequence for FANCG (NM_004629.1,1046-1064).
gtcccccagctgaggaatt

SEQ ID NO: 16272 - DNA, 19 bp, Homo sapiens
  siRNA target sequence for FANCG (NM_004629.1,1260-1278).
ccgtaagatgggaaatcca

SEQ ID NO: 16273 - DNA, 19 bp, Homo sapiens
  siRNA target sequence for FANCG (NM_004629.1,1277-1295).
cacagagagcactgttgta

SEQ ID NO: 16274 - DNA, 19 bp, Homo sapiens
  siRNA target sequence for FANCG (NM_004629.1,1279-1297).
cagagagcactgttgtact

SEQ ID NO: 16275 - DNA, 19 bp, Homo sapiens
  siRNA target sequence for FANCG (NM_004629.1,1397-1415).
gtctggagctgctagttga

SEQ ID NO: 16276 - DNA, 19 bp, Homo sapiens
  siRNA target sequence for FANCG (NM_004629.1,1407-1425).
gctagttgaggccttgaat

SEQ ID NO: 16277 - DNA, 19 bp, Homo sapiens
  siRNA target sequence for FANCG (NM_004629.1,1458-1476).
cattgaggtagaattacta

SEQ ID NO: 16278 - DNA, 19 bp, Homo sapiens
  siRNA target sequence for FANCG (NM_004629.1,1667-1685).
gtatgcctgaggtgttttt

SEQ ID NO: 16279 - DNA, 19 bp, Homo sapiens
  siRNA target sequence for FANCG (NM_004629.1,1906-1924).
gcaattagtgaatttagca

SEQ ID NO: 16280 - DNA, 19 bp, Homo sapiens
  siRNA target sequence for FANCG (NM_004629.1,2069-2087).
ccagcggccaggataccaa

SEQ ID NO: 16281 - DNA, 19 bp, Homo sapiens
  siRNA target sequence for FANCG (NM_004629.1,2070-2088).
cagcggccaggataccaaa

SEQ ID NO: 16282 - DNA, 19 bp, Homo sapiens
  siRNA target sequence for FANCG (NM_004629.1,2115-2133).
gcagatgtgcccaggtaat

SEQ ID NO: 16283 - DNA, 19 bp, Homo sapiens
  siRNA target sequence for FANCG (NM_004629.1,2118-2136).
gatgtgcccaggtaatcga

SEQ ID NO: 16284 - DNA, 19 bp, Homo sapiens
  siRNA target sequence for FANCG (NM_004629.1,2126-2144).
caggtaatcgagacactta

SEQ ID NO: 16285 - DNA, 19 bp, Homo sapiens
  siRNA target sequence for FANCG (NM_004629.1,2128-2146).
ggtaatcgagacacttact

SEQ ID NO: 16286 - DNA, 19 bp, Homo sapiens
  siRNA target sequence for FANCG (NM_004629.1,2129-2147).
gtaatcgagacacttactt

SEQ ID NO: 16287 - DNA, 19 bp, Homo sapiens
  siRNA target sequence for FANCG (NM_004629.1,2225-2243).
ctaaggggtcacatgaaga

SEQ ID NO: 16288 - DNA, 19 bp, Homo sapiens
  siRNA target sequence for FANCG (NM_004629.1,2261-2279).
ccctgtacctagaaagcta

SEQ ID NO: 16289 - DNA, 19 bp, Homo sapiens
  siRNA target sequence for FANCG (NM_004629.1,2262-2280).
cctgtacctagaaagctat

SEQ ID NO: 16290 - DNA, 19 bp, Homo sapiens
  siRNA target sequence for FANCG (NM_004629.1,2306-2324).
gtgacgccttccttgaaga

SEQ ID NO: 16291 - DNA, 19 bp, Homo sapiens
  siRNA target sequence for FANCG (NM_004629.1,2310-2328).
cgccttccttgaagaattt

SEQ ID NO: 16292 - DNA, 19 bp, Homo sapiens
  siRNA target sequence for FEN1 (NM_004111.4,419-437).
gtgccatccgggagaatga

SEQ ID NO: 16293 - DNA, 19 bp, Homo sapiens
  siRNA target sequence for FEN1 (NM_004111.4,456-474).
ccgtaaggtggccattgat

SEQ ID NO: 16294 - DNA, 19 bp, Homo sapiens
  siRNA target sequence for FEN1 (NM_004111.4,466-484).
gccattgatgcctctatga

SEQ ID NO: 16295 - DNA, 19 bp, Homo sapiens
  siRNA target sequence for FEN1 (NM_004111.4,472-490).
gatgcctctatgagcattt

SEQ ID NO: 16296 - DNA, 19 bp, Homo sapiens
  siRNA target sequence for FEN1 (NM_004111.4,612-630).
gcccgtgtatgtctttgat

SEQ ID NO: 16297 - DNA, 19 bp, Homo sapiens
  siRNA target sequence for FEN1 (NM_004111.4,813-831).
catgggcatcccttatctt

SEQ ID NO: 16298 - DNA, 19 bp, Homo sapiens
  siRNA target sequence for FEN1 (NM_004111.4,871-889).
gtgaaggctggcaaagtct

SEQ ID NO: 16299 - DNA, 19 bp, Homo sapiens
  siRNA target sequence for FEN1 (NM_004111.4,1450-1468).
cccaagggatccactaaga

SEQ ID NO: 16300 - DNA, 19 bp, Homo sapiens
  siRNA target sequence for FEN1 (NM_004111.4,1451-1469).
ccaagggatccactaagaa

SEQ ID NO: 16301 - DNA, 19 bp, Homo sapiens
  siRNA target sequence for JTV1 (NM_006303.2,279-297).
gagtcccgccaagatgata

SEQ ID NO: 16302 - DNA, 19 bp, Homo sapiens
  siRNA target sequence for JTV1 (NM_006303.2,283-301).
cccgccaagatgatatttt

SEQ ID NO: 16303 - DNA, 19 bp, Homo sapiens
  siRNA target sequence for JTV1 (NM_006303.2,284-302).
ccgccaagatgatatttta

SEQ ID NO: 16304 - DNA, 19 bp, Homo sapiens
  siRNA target sequence for JTV1 (NM_006303.2,338-356).
cctctccaagatgattcaa

SEQ ID NO: 16305 - DNA, 19 bp, Homo sapiens
  siRNA target sequence for JTV1 (NM_006303.2,371-389).
cttggatgtaaccaacata

SEQ ID NO: 16306 - DNA, 19 bp, Homo sapiens
  siRNA target sequence for JTV1 (NM_006303.2,398-416).
ggatgagcccacgacttta

SEQ ID NO: 16307 - DNA, 19 bp, Homo sapiens
  siRNA target sequence for JTV1 (NM_006303.2,399-417).
gatgagcccacgactttaa

SEQ ID NO: 16308 - DNA, 19 bp, Homo sapiens
  siRNA target sequence for JTV1 (NM_006303.2,402-420).
gagcccacgactttaacca

SEQ ID NO: 16309 - DNA, 19 bp, Homo sapiens
  siRNA target sequence for JTV1 (NM_006303.2,421-439).
ccaatgcgctggacttgaa

SEQ ID NO: 16310 - DNA, 19 bp, Homo sapiens
  siRNA target sequence for JTV1 (NM_006303.2,422-440).
caatgcgctggacttgaat

SEQ ID NO: 16311 - DNA, 19 bp, Homo sapiens
  siRNA target sequence for JTV1 (NM_006303.2,427-445).
cgctggacttgaattcagt

SEQ ID NO: 16312 - DNA, 19 bp, Homo sapiens
  siRNA target sequence for JTV1 (NM_006303.2,590-608).
gagcgtgcctgaaaacctt

SEQ ID NO: 16313 - DNA, 19 bp, Homo sapiens
  siRNA target sequence for JTV1 (NM_006303.2,653-671).
ctatcagctgggattcact

SEQ ID NO: 16314 - DNA, 19 bp, Homo sapiens
  siRNA target sequence for JTV1 (NM_006303.2,657-675).
cagctgggattcactttaa

SEQ ID NO: 16315 - DNA, 19 bp, Homo sapiens
  siRNA target sequence for JTV1 (NM_006303.2,663-681).
ggattcactttaatttgga

SEQ ID NO: 16316 - DNA, 19 bp, Homo sapiens
  siRNA target sequence for JTV1 (NM_006303.2,689-707).
gccgaagacgcagatgaaa

SEQ ID NO: 16317 - DNA, 19 bp, Homo sapiens
  siRNA target sequence for JTV1 (NM_006303.2,691-709).
cgaagacgcagatgaaatt

SEQ ID NO: 16318 - DNA, 19 bp, Homo sapiens
  siRNA target sequence for JTV1 (NM_006303.2,771-789).
ctgtttggccagaagcata

SEQ ID NO: 16319 - DNA, 19 bp, Homo sapiens
  siRNA target sequence for JTV1 (NM_006303.2,773-791).
gtttggccagaagcataat

SEQ ID NO: 16320 - DNA, 19 bp, Homo sapiens
  siRNA target sequence for JTV1 (NM_006303.2,797-815).
caacgcaacccttatagat

SEQ ID NO: 16321 - DNA, 19 bp, Homo sapiens
  siRNA target sequence for JTV1 (NM_006303.2,825-843).
gatattgcgatttttcagt

SEQ ID NO: 16322 - DNA, 19 bp, Homo sapiens
  siRNA target sequence for JTV1 (NM_006303.2,876-894).
gttttccgctccatgaact

SEQ ID NO: 16323 - DNA, 19 bp, Homo sapiens
  siRNA target sequence for JTV1 (NM_006303.2,916-934).
ggctcgctgggaatgaact

SEQ ID NO: 16324 - DNA, 19 bp, Homo sapiens
  siRNA target sequence for MPG (NM_002434.1,192-210).
cgacggatggggcaaaaga

SEQ ID NO: 16325 - DNA, 19 bp, Homo sapiens
  siRNA target sequence for MPG (NM_002434.1,193-211).
gacggatggggcaaaagaa

SEQ ID NO: 16326 - DNA, 19 bp, Homo sapiens
  siRNA target sequence for MPG (NM_002434.1,353-371).
cccataccgcagcatctat

SEQ ID NO: 16327 - DNA, 19 bp, Homo sapiens
  siRNA target sequence for MPG (NM_002434.1,354-372).
ccataccgcagcatctatt

SEQ ID NO: 16328 - DNA, 19 bp, Homo sapiens
  siRNA target sequence for MPG (NM_002434.1,355-373).
cataccgcagcatctattt

SEQ ID NO: 16329 - DNA, 19 bp, Homo sapiens
  siRNA target sequence for MPG (NM_002434.1,359-377).
ccgcagcatctatttctca

SEQ ID NO: 16330 - DNA, 19 bp, Homo sapiens
  siRNA target sequence for MPG (NM_002434.1,360-378).
cgcagcatctatttctcaa

SEQ ID NO: 16331 - DNA, 19 bp, Homo sapiens
  siRNA target sequence for MPG (NM_002434.1,579-597).
cgcaaccgaggcatgttca

SEQ ID NO: 16332 - DNA, 19 bp, Homo sapiens
  siRNA target sequence for MPG (NM_002434.1,612-630).
ctgtacgtgtacatcattt

SEQ ID NO: 16333 - DNA, 19 bp, Homo sapiens
  siRNA target sequence for MPG (NM_002434.1,962-980).
gaaacccctccgcttctat

SEQ ID NO: 16334 - DNA, 19 bp, Homo sapiens
  siRNA target sequence for MSH2 (NM_000251.1,119-137).
cggcttcgtgcgcttcttt

SEQ ID NO: 16335 - DNA, 19 bp, Homo sapiens
  siRNA target sequence for MSH2 (NM_000251.1,121-139).
gcttcgtgcgcttctttca

SEQ ID NO: 16336 - DNA, 19 bp, Homo sapiens
  siRNA target sequence for MSH2 (NM_000251.1,247-265).
cccagggggtgatcaagta

SEQ ID NO: 16337 - DNA, 19 bp, Homo sapiens
  siRNA target sequence for MSH2 (NM_000251.1,328-346).
cttttgtaaaagatcttct

SEQ ID NO: 16338 - DNA, 19 bp, Homo sapiens
  siRNA target sequence for MSH2 (NM_000251.1,350-368).
ggttcgtcagtatagagtt

SEQ ID NO: 16339 - DNA, 19 bp, Homo sapiens
  siRNA target sequence for MSH2 (NM_000251.1,355-373).
gtcagtatagagttgaagt

SEQ ID NO: 16340 - DNA, 19 bp, Homo sapiens
  siRNA target sequence for MSH2 (NM_000251.1,404-422).
caaggagaatgattggtat

SEQ ID NO: 16341 - DNA, 19 bp, Homo sapiens
  siRNA target sequence for MSH2 (NM_000251.1,414-432).
gattggtatttggcatata

SEQ ID NO: 16342 - DNA, 19 bp, Homo sapiens
  siRNA target sequence for MSH2 (NM_000251.1,446-464).
caatctctctcagtttgaa

SEQ ID NO: 16343 - DNA, 19 bp, Homo sapiens
  siRNA target sequence for MSH2 (NM_000251.1,454-472).
ctcagtttgaagacattct

SEQ ID NO: 16344 - DNA, 19 bp, Homo sapiens
  siRNA target sequence for MSH2 (NM_000251.1,471-489).
ctctttggtaacaatgata

SEQ ID NO: 16345 - DNA, 19 bp, Homo sapiens
  siRNA target sequence for MSH2 (NM_000251.1,593-611).
gtgtgaattccctgataat

SEQ ID NO: 16346 - DNA, 19 bp, Homo sapiens
  siRNA target sequence for MSH2 (NM_000251.1,759-777).
gacttttccacaaaagaca

SEQ ID NO: 16347 - DNA, 19 bp, Homo sapiens
  siRNA target sequence for MSH2 (NM_000251.1,786-804).
gacctcaaccggttgttga

SEQ ID NO: 16348 - DNA, 19 bp, Homo sapiens
  siRNA target sequence for MSH2 (NM_000251.1,788-806).
cctcaaccggttgttgaaa

SEQ ID NO: 16349 - DNA, 19 bp, Homo sapiens
  siRNA target sequence for MSH2 (NM_000251.1,815-833).
gggagagcagatgaatagt

SEQ ID NO: 16350 - DNA, 19 bp, Homo sapiens
  siRNA target sequence for MSH2 (NM_000251.1,832-850).
gtgctgtattgccagaaat

SEQ ID NO: 16351 - DNA, 19 bp, Homo sapiens
  siRNA target sequence for MSH2 (NM_000251.1,854-872).
gaatcaggttgcagtttca

SEQ ID NO: 16352 - DNA, 19 bp, Homo sapiens
  siRNA target sequence for MSH2 (NM_000251.1,874-892).
cactgtctgcggtaatcaa

SEQ ID NO: 16353 - DNA, 19 bp, Homo sapiens
  siRNA target sequence for MSH2 (NM_000251.1,876-894).
ctgtctgcggtaatcaagt

SEQ ID NO: 16354 - DNA, 19 bp, Homo sapiens
  siRNA target sequence for MSH2 (NM_000251.1,878-896).
gtctgcggtaatcaagttt

SEQ ID NO: 16355 - DNA, 19 bp, Homo sapiens
  siRNA target sequence for MSH2 (NM_000251.1,880-898).
ctgcggtaatcaagttttt

SEQ ID NO: 16356 - DNA, 19 bp, Homo sapiens
  siRNA target sequence for MSH2 (NM_000251.1,883-901).
cggtaatcaagtttttaga

SEQ ID NO: 16357 - DNA, 19 bp, Homo sapiens
  siRNA target sequence for MSH2 (NM_000251.1,893-911).
gtttttagaactcttatca

SEQ ID NO: 16358 - DNA, 19 bp, Homo sapiens
  siRNA target sequence for MSH2 (NM_000251.1,900-918).
gaactcttatcagatgatt

SEQ ID NO: 16359 - DNA, 19 bp, Homo sapiens
  siRNA target sequence for MSH2 (NM_000251.1,930-948).
cagtttgaactgactactt

SEQ ID NO: 16360 - DNA, 19 bp, Homo sapiens
  siRNA target sequence for MSH2 (NM_000251.1,1050-1068).
gccttgctgaataagtgta

SEQ ID NO: 16361 - DNA, 19 bp, Homo sapiens
  siRNA target sequence for MSH2 (NM_000251.1,1110-1128).
cagcctctcatggataaga

SEQ ID NO: 16362 - DNA, 19 bp, Homo sapiens
  siRNA target sequence for MSH2 (NM_000251.1,1212-1230).
cgtcgattcccagatctta

SEQ ID NO: 16363 - DNA, 19 bp, Homo sapiens
  siRNA target sequence for MSH2 (NM_000251.1,1213-1231).
gtcgattcccagatcttaa

SEQ ID NO: 16364 - DNA, 19 bp, Homo sapiens
  siRNA target sequence for MSH2 (NM_000251.1,1232-1250).
ccgacttgccaagaagttt

SEQ ID NO: 16365 - DNA, 19 bp, Homo sapiens
  siRNA target sequence for MSH2 (NM_000251.1,1260-1278).
gcagcaaacttacaagatt

SEQ ID NO: 16366 - DNA, 19 bp, Homo sapiens
  siRNA target sequence for MSH2 (NM_000251.1,1284-1302).
cgactctatcagggtataa

SEQ ID NO: 16367 - DNA, 19 bp, Homo sapiens
  siRNA target sequence for MSH2 (NM_000251.1,1285-1303).
gactctatcagggtataaa

SEQ ID NO: 16368 - DNA, 19 bp, Homo sapiens
  siRNA target sequence for MSH2 (NM_000251.1,1289-1307).
ctatcagggtataaatcaa

SEQ ID NO: 16369 - DNA, 19 bp, Homo sapiens
  siRNA target sequence for MSH2 (NM_000251.1,1297-1315).
gtataaatcaactacctaa

SEQ ID NO: 16370 - DNA, 19 bp, Homo sapiens
  siRNA target sequence for MSH2 (NM_000251.1,1379-1397).
gactcctcttactgatctt

SEQ ID NO: 16371 - DNA, 19 bp, Homo sapiens
  siRNA target sequence for MSH2 (NM_000251.1,1457-1475).
ggaaaaccatgaattcctt

SEQ ID NO: 16372 - DNA, 19 bp, Homo sapiens
  siRNA target sequence for MSH2 (NM_000251.1,1467-1485).
gaattccttgtaaaacctt

SEQ ID NO: 16373 - DNA, 19 bp, Homo sapiens
  siRNA target sequence for MSH2 (NM_000251.1,1491-1509).
gatcctaatctcagtgaat

SEQ ID NO: 16374 - DNA, 19 bp, Homo sapiens
  siRNA target sequence for MSH2 (NM_000251.1,1538-1556).
gaagatgcagtcaacatta

SEQ ID NO: 16375 - DNA, 19 bp, Homo sapiens
  siRNA target sequence for MSH2 (NM_000251.1,1541-1559).
gatgcagtcaacattaata

SEQ ID NO: 16376 - DNA, 19 bp, Homo sapiens
  siRNA target sequence for MSH2 (NM_000251.1,1544-1562).
gcagtcaacattaataagt

SEQ ID NO: 16377 - DNA, 19 bp, Homo sapiens
  siRNA target sequence for MSH2 (NM_000251.1,1662-1680).
gtccttcgtaacaataaaa

SEQ ID NO: 16378 - DNA, 19 bp, Homo sapiens
  siRNA target sequence for MSH2 (NM_000251.1,1668-1686).
cgtaacaataaaaacttta

SEQ ID NO: 16379 - DNA, 19 bp, Homo sapiens
  siRNA target sequence for MSH2 (NM_000251.1,1727-1745).
cagcaaattgacttcttta

SEQ ID NO: 16380 - DNA, 19 bp, Homo sapiens
  siRNA target sequence for MSH2 (NM_000251.1,1785-1803).
gcccaggatgccattgtta

SEQ ID NO: 16381 - DNA, 19 bp, Homo sapiens
  siRNA target sequence for MSH2 (NM_000251.1,1786-1804).
cccaggatgccattgttaa

SEQ ID NO: 16382 - DNA, 19 bp, Homo sapiens
  siRNA target sequence for MSH2 (NM_000251.1,1787-1805).
ccaggatgccattgttaaa

SEQ ID NO: 16383 - DNA, 19 bp, Homo sapiens
  siRNA target sequence for MSH2 (NM_000251.1,1825-1843).
caggctatgtagaaccaat

SEQ ID NO: 16384 - DNA, 19 bp, Homo sapiens
  siRNA target sequence for MSH2 (NM_000251.1,1847-1865).
gacactcaatgatgtgtta

SEQ ID NO: 16385 - DNA, 19 bp, Homo sapiens
  siRNA target sequence for MSH2 (NM_000251.1,1888-1906).
gctttgctcacgtgtcaaa

SEQ ID NO: 16386 - DNA, 19 bp, Homo sapiens
  siRNA target sequence for MSH2 (NM_000251.1,1889-1907).
ctttgctcacgtgtcaaat

SEQ ID NO: 16387 - DNA, 19 bp, Homo sapiens
  siRNA target sequence for MSH2 (NM_000251.1,1979-1997).
caggcatgcttgtgttgaa

SEQ ID NO: 16388 - DNA, 19 bp, Homo sapiens
  siRNA target sequence for MSH2 (NM_000251.1,1981-1999).
ggcatgcttgtgttgaagt

SEQ ID NO: 16389 - DNA, 19 bp, Homo sapiens
  siRNA target sequence for MSH2 (NM_000251.1,1987-2005).
cttgtgttgaagttcaaga

SEQ ID NO: 16390 - DNA, 19 bp, Homo sapiens
  siRNA target sequence for MSH2 (NM_000251.1,2030-2048).
cgtatactttgaaaaagat

SEQ ID NO: 16391 - DNA, 19 bp, Homo sapiens
  siRNA target sequence for MSH2 (NM_000251.1,2075-2093).
ccccaatatgggaggtaaa

SEQ ID NO: 16392 - DNA, 19 bp, Homo sapiens
  siRNA target sequence for MSH2 (NM_000251.1,2076-2094).
cccaatatgggaggtaaat

SEQ ID NO: 16393 - DNA, 19 bp, Homo sapiens
  siRNA target sequence for MSH2 (NM_000251.1,2078-2096).
caatatgggaggtaaatca

SEQ ID NO: 16394 - DNA, 19 bp, Homo sapiens
  siRNA target sequence for MSH2 (NM_000251.1,2084-2102).
gggaggtaaatcaacatat

SEQ ID NO: 16395 - DNA, 19 bp, Homo sapiens
  siRNA target sequence for MSH2 (NM_000251.1,2085-2103).
ggaggtaaatcaacatata

SEQ ID NO: 16396 - DNA, 19 bp, Homo sapiens
  siRNA target sequence for MSH2 (NM_000251.1,2086-2104).
gaggtaaatcaacatatat

SEQ ID NO: 16397 - DNA, 19 bp, Homo sapiens
  siRNA target sequence for MSH2 (NM_000251.1,2107-2125).
gacaaactggggtgatagt

SEQ ID NO: 16398 - DNA, 19 bp, Homo sapiens
  siRNA target sequence for MSH2 (NM_000251.1,2113-2131).
ctggggtgatagtactcat

SEQ ID NO: 16399 - DNA, 19 bp, Homo sapiens
  siRNA target sequence for MSH2 (NM_000251.1,2132-2150).
ggcccaaattgggtgtttt

SEQ ID NO: 16400 - DNA, 19 bp, Homo sapiens
  siRNA target sequence for MSH2 (NM_000251.1,2134-2152).
cccaaattgggtgttttgt

SEQ ID NO: 16401 - DNA, 19 bp, Homo sapiens
  siRNA target sequence for MSH2 (NM_000251.1,2205-2223).
ggggctggtgacagtcaat

SEQ ID NO: 16402 - DNA, 19 bp, Homo sapiens
  siRNA target sequence for MSH2 (NM_000251.1,2206-2224).
gggctggtgacagtcaatt

SEQ ID NO: 16403 - DNA, 19 bp, Homo sapiens
  siRNA target sequence for MSH2 (NM_000251.1,2236-2254).
ccacgttcatggctgaaat

SEQ ID NO: 16404 - DNA, 19 bp, Homo sapiens
  siRNA target sequence for MSH2 (NM_000251.1,2287-2305).
ccaaagattcattaataat

SEQ ID NO: 16405 - DNA, 19 bp, Homo sapiens
  siRNA target sequence for MSH2 (NM_000251.1,2329-2347).
cttctacctacgatggatt

SEQ ID NO: 16406 - DNA, 19 bp, Homo sapiens
  siRNA target sequence for MSH2 (NM_000251.1,2340-2358).
gatggatttgggttagcat

SEQ ID NO: 16407 - DNA, 19 bp, Homo sapiens
  siRNA target sequence for MSH2 (NM_000251.1,2349-2367).
gggttagcatgggctatat

SEQ ID NO: 16408 - DNA, 19 bp, Homo sapiens
  siRNA target sequence for MSH2 (NM_000251.1,2351-2369).
gttagcatgggctatatca

SEQ ID NO: 16409 - DNA, 19 bp, Homo sapiens
  siRNA target sequence for MSH2 (NM_000251.1,2355-2373).
gcatgggctatatcagaat

SEQ ID NO: 16410 - DNA, 19 bp, Homo sapiens
  siRNA target sequence for MSH2 (NM_000251.1,2356-2374).
catgggctatatcagaata

SEQ ID NO: 16411 - DNA, 19 bp, Homo sapiens
  siRNA target sequence for MSH2 (NM_000251.1,2402-2420).
catgtttgcaacccatttt

SEQ ID NO: 16412 - DNA, 19 bp, Homo sapiens
  siRNA target sequence for MSH2 (NM_000251.1,2405-2423).
gtttgcaacccattttcat

SEQ ID NO: 16413 - DNA, 19 bp, Homo sapiens
  siRNA target sequence for MSH2 (NM_000251.1,2414-2432).
ccattttcatgaacttact

SEQ ID NO: 16414 - DNA, 19 bp, Homo sapiens
  siRNA target sequence for MSH2 (NM_000251.1,2431-2449).
ctgccttggccaatcagat

SEQ ID NO: 16415 - DNA, 19 bp, Homo sapiens
  siRNA target sequence for MSH2 (NM_000251.1,2488-2506).
ctgaagagaccttaactat

SEQ ID NO: 16416 - DNA, 19 bp, Homo sapiens
  siRNA target sequence for MSH2 (NM_000251.1,2493-2511).
gagaccttaactatgcttt

SEQ ID NO: 16417 - DNA, 19 bp, Homo sapiens
  siRNA target sequence for MSH2 (NM_000251.1,2495-2513).
gaccttaactatgctttat

SEQ ID NO: 16418 - DNA, 19 bp, Homo sapiens
  siRNA target sequence for MSH2 (NM_000251.1,2497-2515).
ccttaactatgctttatca

SEQ ID NO: 16419 - DNA, 19 bp, Homo sapiens
  siRNA target sequence for MSH2 (NM_000251.1,2647-2665).
cgcaaggatatgatatcat

SEQ ID NO: 16420 - DNA, 19 bp, Homo sapiens
  siRNA target sequence for MSH2 (NM_000251.1,2729-2747).
cctgtccaaggtgaaacaa

SEQ ID NO: 16421 - DNA, 19 bp, Homo sapiens
  siRNA target sequence for MSH2 (NM_000251.1,2750-2768).
gccctttactgaaatgtca

SEQ ID NO: 16422 - DNA, 19 bp, Homo sapiens
  siRNA target sequence for MSH2 (NM_000251.1,2796-2814).
cagctaaaagctgaagtaa

SEQ ID NO: 16423 - DNA, 19 bp, Homo sapiens
  siRNA target sequence for MSH2 (NM_000251.1,2798-2816).
gctaaaagctgaagtaata

SEQ ID NO: 16424 - DNA, 19 bp, Homo sapiens
  siRNA target sequence for MSH3 (NM_002439.1,81-99).
cggttttgagccgattctt

SEQ ID NO: 16425 - DNA, 19 bp, Homo sapiens
  siRNA target sequence for MSH3 (NM_002439.1,269-287).
gatgggcctgttaaaaaga

SEQ ID NO: 16426 - DNA, 19 bp, Homo sapiens
  siRNA target sequence for MSH3 (NM_002439.1,476-494).
ctgccaaaatgtactgatt

SEQ ID NO: 16427 - DNA, 19 bp, Homo sapiens
  siRNA target sequence for MSH3 (NM_002439.1,486-504).
gtactgattttgatgatat

SEQ ID NO: 16428 - DNA, 19 bp, Homo sapiens
  siRNA target sequence for MSH3 (NM_002439.1,542-560).
gattcgaaacgtcaaatta

SEQ ID NO: 16429 - DNA, 19 bp, Homo sapiens
  siRNA target sequence for MSH3 (NM_002439.1,589-607).
cagtcagtttggatcatca

SEQ ID NO: 16430 - DNA, 19 bp, Homo sapiens
  siRNA target sequence for MSH3 (NM_002439.1,639-657).
cttccaaatcagctaacaa

SEQ ID NO: 16431 - DNA, 19 bp, Homo sapiens
  siRNA target sequence for MSH3 (NM_002439.1,650-668).
gctaacaaacggtccaaaa

SEQ ID NO: 16432 - DNA, 19 bp, Homo sapiens
  siRNA target sequence for MSH3 (NM_002439.1,659-677).
cggtccaaaagcatctata

SEQ ID NO: 16433 - DNA, 19 bp, Homo sapiens
  siRNA target sequence for MSH3 (NM_002439.1,673-691).
ctatacgccgctagaatta

SEQ ID NO: 16434 - DNA, 19 bp, Homo sapiens
  siRNA target sequence for MSH3 (NM_002439.1,678-696).
cgccgctagaattacaata

SEQ ID NO: 16435 - DNA, 19 bp, Homo sapiens
  siRNA target sequence for MSH3 (NM_002439.1,680-698).
ccgctagaattacaataca

SEQ ID NO: 16436 - DNA, 19 bp, Homo sapiens
  siRNA target sequence for MSH3 (NM_002439.1,681-699).
cgctagaattacaatacat

SEQ ID NO: 16437 - DNA, 19 bp, Homo sapiens
  siRNA target sequence for MSH3 (NM_002439.1,682-700).
gctagaattacaatacata

SEQ ID NO: 16438 - DNA, 19 bp, Homo sapiens
  siRNA target sequence for MSH3 (NM_002439.1,737-755).
gtggaatgtggatataagt

SEQ ID NO: 16439 - DNA, 19 bp, Homo sapiens
  siRNA target sequence for MSH3 (NM_002439.1,746-764).
ggatataagtatagattct

SEQ ID NO: 16440 - DNA, 19 bp, Homo sapiens
  siRNA target sequence for MSH3 (NM_002439.1,786-804).
cagcccgagagctcaatat

SEQ ID NO: 16441 - DNA, 19 bp, Homo sapiens
  siRNA target sequence for MSH3 (NM_002439.1,788-806).
gcccgagagctcaatattt

SEQ ID NO: 16442 - DNA, 19 bp, Homo sapiens
  siRNA target sequence for MSH3 (NM_002439.1,789-807).
cccgagagctcaatattta

SEQ ID NO: 16443 - DNA, 19 bp, Homo sapiens
  siRNA target sequence for MSH3 (NM_002439.1,790-808).
ccgagagctcaatatttat

SEQ ID NO: 16444 - DNA, 19 bp, Homo sapiens
  siRNA target sequence for MSH3 (NM_002439.1,791-809).
cgagagctcaatatttatt

SEQ ID NO: 16445 - DNA, 19 bp, Homo sapiens
  siRNA target sequence for MSH3 (NM_002439.1,810-828).
gccatttagatcacaactt

SEQ ID NO: 16446 - DNA, 19 bp, Homo sapiens
  siRNA target sequence for MSH3 (NM_002439.1,811-829).
ccatttagatcacaacttt

SEQ ID NO: 16447 - DNA, 19 bp, Homo sapiens
  siRNA target sequence for MSH3 (NM_002439.1,812-830).
catttagatcacaacttta

SEQ ID NO: 16448 - DNA, 19 bp, Homo sapiens
  siRNA target sequence for MSH3 (NM_002439.1,826-844).
ctttatgacagcaagtata

SEQ ID NO: 16449 - DNA, 19 bp, Homo sapiens
  siRNA target sequence for MSH3 (NM_002439.1,846-864).
ctactcacagactgtttgt

SEQ ID NO: 16450 - DNA, 19 bp, Homo sapiens
  siRNA target sequence for MSH3 (NM_002439.1,875-893).
cgcctggtggcaaaaggat

SEQ ID NO: 16451 - DNA, 19 bp, Homo sapiens
  siRNA target sequence for MSH3 (NM_002439.1,877-895).
cctggtggcaaaaggatat

SEQ ID NO: 16452 - DNA, 19 bp, Homo sapiens
  siRNA target sequence for MSH3 (NM_002439.1,878-896).
ctggtggcaaaaggatata

SEQ ID NO: 16453 - DNA, 19 bp, Homo sapiens
  siRNA target sequence for MSH3 (NM_002439.1,1016-1034).
gatgtgaatcccctaatca

SEQ ID NO: 16454 - DNA, 19 bp, Homo sapiens
  siRNA target sequence for MSH3 (NM_002439.1,1183-1201).
cgaggttgtgtttgatagt

SEQ ID NO: 16455 - DNA, 19 bp, Homo sapiens
  siRNA target sequence for MSH3 (NM_002439.1,1184-1202).
gaggttgtgtttgatagtt

SEQ ID NO: 16456 - DNA, 19 bp, Homo sapiens
  siRNA target sequence for MSH3 (NM_002439.1,1229-1247).
ctagaaacccggatgtcaa

SEQ ID NO: 16457 - DNA, 19 bp, Homo sapiens
  siRNA target sequence for MSH3 (NM_002439.1,1281-1299).
ccttgtccgagcaaacaga

SEQ ID NO: 16458 - DNA, 19 bp, Homo sapiens
  siRNA target sequence for MSH3 (NM_002439.1,1309-1327).
ccacagagccacatctgtt

SEQ ID NO: 16459 - DNA, 19 bp, Homo sapiens
  siRNA target sequence for MSH3 (NM_002439.1,1310-1328).
cacagagccacatctgtta

SEQ ID NO: 16460 - DNA, 19 bp, Homo sapiens
  siRNA target sequence for MSH3 (NM_002439.1,1312-1330).
cagagccacatctgttagt

SEQ ID NO: 16461 - DNA, 19 bp, Homo sapiens
  siRNA target sequence for MSH3 (NM_002439.1,1314-1332).
gagccacatctgttagtgt

SEQ ID NO: 16462 - DNA, 19 bp, Homo sapiens
  siRNA target sequence for MSH3 (NM_002439.1,1344-1362).
gaattcgagtcgaaaggat

SEQ ID NO: 16463 - DNA, 19 bp, Homo sapiens
  siRNA target sequence for MSH3 (NM_002439.1,1349-1367).
cgagtcgaaaggatggata

SEQ ID NO: 16464 - DNA, 19 bp, Homo sapiens
  siRNA target sequence for MSH3 (NM_002439.1,1352-1370).
gtcgaaaggatggataaca

SEQ ID NO: 16465 - DNA, 19 bp, Homo sapiens
  siRNA target sequence for MSH3 (NM_002439.1,1403-1421).
gttacagagttttatgcaa

SEQ ID NO: 16466 - DNA, 19 bp, Homo sapiens
  siRNA target sequence for MSH3 (NM_002439.1,1433-1451).
gacatcaaaggttctcaaa

SEQ ID NO: 16467 - DNA, 19 bp, Homo sapiens
  siRNA target sequence for MSH3 (NM_002439.1,1461-1479).
gcattgttaacttagagaa

SEQ ID NO: 16468 - DNA, 19 bp, Homo sapiens
  siRNA target sequence for MSH3 (NM_002439.1,1475-1493).
gagaagcctgtgatttgct

SEQ ID NO: 16469 - DNA, 19 bp, Homo sapiens
  siRNA target sequence for MSH3 (NM_002439.1,1492-1510).
ctctttggctgccatcata

SEQ ID NO: 16470 - DNA, 19 bp, Homo sapiens
  siRNA target sequence for MSH3 (NM_002439.1,1500-1518).
ctgccatcataaaatacct

SEQ ID NO: 16471 - DNA, 19 bp, Homo sapiens
  siRNA target sequence for MSH3 (NM_002439.1,1548-1566).
ccaaacctgagaattttaa

SEQ ID NO: 16472 - DNA, 19 bp, Homo sapiens
  siRNA target sequence for MSH3 (NM_002439.1,1674-1692).
gggttttagaccacactaa

SEQ ID NO: 16473 - DNA, 19 bp, Homo sapiens
  siRNA target sequence for MSH3 (NM_002439.1,1675-1693).
ggttttagaccacactaaa

SEQ ID NO: 16474 - DNA, 19 bp, Homo sapiens
  siRNA target sequence for MSH3 (NM_002439.1,1682-1700).
gaccacactaaaacttcat

SEQ ID NO: 16475 - DNA, 19 bp, Homo sapiens
  siRNA target sequence for MSH3 (NM_002439.1,1684-1702).
ccacactaaaacttcattt

SEQ ID NO: 16476 - DNA, 19 bp, Homo sapiens
  siRNA target sequence for MSH3 (NM_002439.1,1703-1721).
gggagacggaagttaaaga

SEQ ID NO: 16477 - DNA, 19 bp, Homo sapiens
  siRNA target sequence for MSH3 (NM_002439.1,1732-1750).
ccagccactccttaaatta

SEQ ID NO: 16478 - DNA, 19 bp, Homo sapiens
  siRNA target sequence for MSH3 (NM_002439.1,1782-1800).
cggaagttctccattcaga

SEQ ID NO: 16479 - DNA, 19 bp, Homo sapiens
  siRNA target sequence for MSH3 (NM_002439.1,1783-1801).
ggaagttctccattcagaa

SEQ ID NO: 16480 - DNA, 19 bp, Homo sapiens
  siRNA target sequence for MSH3 (NM_002439.1,1784-1802).
gaagttctccattcagaat

SEQ ID NO: 16481 - DNA, 19 bp, Homo sapiens
  siRNA target sequence for MSH3 (NM_002439.1,1806-1824).
gtgtgtttggtcagataga

SEQ ID NO: 16482 - DNA, 19 bp, Homo sapiens
  siRNA target sequence for MSH3 (NM_002439.1,1836-1854).
gtaaattgcccgacataga

SEQ ID NO: 16483 - DNA, 19 bp, Homo sapiens
  siRNA target sequence for MSH3 (NM_002439.1,1860-1878).
gactctgtagcatttatca

SEQ ID NO: 16484 - DNA, 19 bp, Homo sapiens
  siRNA target sequence for MSH3 (NM_002439.1,1887-1905).
gttctacccaagagttctt

SEQ ID NO: 16485 - DNA, 19 bp, Homo sapiens
  siRNA target sequence for MSH3 (NM_002439.1,1890-1908).
ctacccaagagttcttctt

SEQ ID NO: 16486 - DNA, 19 bp, Homo sapiens
  siRNA target sequence for MSH3 (NM_002439.1,1893-1911).
cccaagagttcttcttgat

SEQ ID NO: 16487 - DNA, 19 bp, Homo sapiens
  siRNA target sequence for MSH3 (NM_002439.1,1903-1921).
cttcttgattgtcaaaact

SEQ ID NO: 16488 - DNA, 19 bp, Homo sapiens
  siRNA target sequence for MSH3 (NM_002439.1,1950-1968).
caataatacctgctgttaa

SEQ ID NO: 16489 - DNA, 19 bp, Homo sapiens
  siRNA target sequence for MSH3 (NM_002439.1,1987-2005).
cttgctccggaccgttatt

SEQ ID NO: 16490 - DNA, 19 bp, Homo sapiens
  siRNA target sequence for MSH3 (NM_002439.1,1990-2008).
gctccggaccgttatttta

SEQ ID NO: 16491 - DNA, 19 bp, Homo sapiens
  siRNA target sequence for MSH3 (NM_002439.1,1993-2011).
ccggaccgttattttagaa

SEQ ID NO: 16492 - DNA, 19 bp, Homo sapiens
  siRNA target sequence for MSH3 (NM_002439.1,1994-2012).
cggaccgttattttagaaa

SEQ ID NO: 16493 - DNA, 19 bp, Homo sapiens
  siRNA target sequence for MSH3 (NM_002439.1,1995-2013).
ggaccgttattttagaaat

SEQ ID NO: 16494 - DNA, 19 bp, Homo sapiens
  siRNA target sequence for MSH3 (NM_002439.1,1996-2014).
gaccgttattttagaaatt

SEQ ID NO: 16495 - DNA, 19 bp, Homo sapiens
  siRNA target sequence for MSH3 (NM_002439.1,2078-2096).
ggggataaaactgaattat

SEQ ID NO: 16496 - DNA, 19 bp, Homo sapiens
  siRNA target sequence for MSH3 (NM_002439.1,2159-2177).
gacgagatccgaatgcatt

SEQ ID NO: 16497 - DNA, 19 bp, Homo sapiens
  siRNA target sequence for MSH3 (NM_002439.1,2164-2182).
gatccgaatgcatttgcaa

SEQ ID NO: 16498 - DNA, 19 bp, Homo sapiens
  siRNA target sequence for MSH3 (NM_002439.1,2235-2253).
gacaggagtttatgataga

SEQ ID NO: 16499 - DNA, 19 bp, Homo sapiens
  siRNA target sequence for MSH3 (NM_002439.1,2239-2257).
ggagtttatgatagaaata

SEQ ID NO: 16500 - DNA, 19 bp, Homo sapiens
  siRNA target sequence for MSH3 (NM_002439.1,2260-2278).
gaactctgctgtatcttgt

SEQ ID NO: 16501 - DNA, 19 bp, Homo sapiens
  siRNA target sequence for MSH3 (NM_002439.1,2267-2285).
gctgtatcttgtataccaa

SEQ ID NO: 16502 - DNA, 19 bp, Homo sapiens
  siRNA target sequence for MSH3 (NM_002439.1,2283-2301).
caactgattgggtaaaggt

SEQ ID NO: 16503 - DNA, 19 bp, Homo sapiens
  siRNA target sequence for MSH3 (NM_002439.1,2323-2341).
ccgctttcactctcctttt

SEQ ID NO: 16504 - DNA, 19 bp, Homo sapiens
  siRNA target sequence for MSH3 (NM_002439.1,2324-2342).
cgctttcactctcctttta

SEQ ID NO: 16505 - DNA, 19 bp, Homo sapiens
  siRNA target sequence for MSH3 (NM_002439.1,2400-2418).
gtgctgaatggcttgattt

SEQ ID NO: 16506 - DNA, 19 bp, Homo sapiens
  siRNA target sequence for MSH3 (NM_002439.1,2425-2443).
gaaattcagtgaacattat

SEQ ID NO: 16507 - DNA, 19 bp, Homo sapiens
  siRNA target sequence for MSH3 (NM_002439.1,2527-2545).
ctgcagaccaactgtacaa

SEQ ID NO: 16508 - DNA, 19 bp, Homo sapiens
  siRNA target sequence for MSH3 (NM_002439.1,2529-2547).
gcagaccaactgtacaaga

SEQ ID NO: 16509 - DNA, 19 bp, Homo sapiens
  siRNA target sequence for MSH3 (NM_002439.1,2532-2550).
gaccaactgtacaagaaga

SEQ ID NO: 16510 - DNA, 19 bp, Homo sapiens
  siRNA target sequence for MSH3 (NM_002439.1,2574-2592).
gaaggcaccctgtgattga

SEQ ID NO: 16511 - DNA, 19 bp, Homo sapiens
  siRNA target sequence for MSH3 (NM_002439.1,2604-2622).
gagaacaggatcaatatgt

SEQ ID NO: 16512 - DNA, 19 bp, Homo sapiens
  siRNA target sequence for MSH3 (NM_002439.1,2621-2639).
gtcccaaataatacagatt

SEQ ID NO: 16513 - DNA, 19 bp, Homo sapiens
  siRNA target sequence for MSH3 (NM_002439.1,2690-2708).
ggaaagagctcctacataa

SEQ ID NO: 16514 - DNA, 19 bp, Homo sapiens
  siRNA target sequence for MSH3 (NM_002439.1,2691-2709).
gaaagagctcctacataaa

SEQ ID NO: 16515 - DNA, 19 bp, Homo sapiens
  siRNA target sequence for MSH3 (NM_002439.1,2695-2713).
gagctcctacataaaacaa

SEQ ID NO: 16516 - DNA, 19 bp, Homo sapiens
  siRNA target sequence for MSH3 (NM_002439.1,2697-2715).
gctcctacataaaacaagt

SEQ ID NO: 16517 - DNA, 19 bp, Homo sapiens
  siRNA target sequence for MSH3 (NM_002439.1,2698-2716).
ctcctacataaaacaagtt

SEQ ID NO: 16518 - DNA, 19 bp, Homo sapiens
  siRNA target sequence for MSH3 (NM_002439.1,2806-2824).
gggtgctgcagacaatata

SEQ ID NO: 16519 - DNA, 19 bp, Homo sapiens
  siRNA target sequence for MSH3 (NM_002439.1,2808-2826).
gtgctgcagacaatatata

SEQ ID NO: 16520 - DNA, 19 bp, Homo sapiens
  siRNA target sequence for MSH3 (NM_002439.1,2810-2828).
gctgcagacaatatatata

SEQ ID NO: 16521 - DNA, 19 bp, Homo sapiens
  siRNA target sequence for MSH3 (NM_002439.1,2811-2829).
ctgcagacaatatatataa

SEQ ID NO: 16522 - DNA, 19 bp, Homo sapiens
  siRNA target sequence for MSH3 (NM_002439.1,2838-2856).
gtacatttatggaagaact

SEQ ID NO: 16523 - DNA, 19 bp, Homo sapiens
  siRNA target sequence for MSH3 (NM_002439.1,2931-2949).
cgagcactcatgatggaat

SEQ ID NO: 16524 - DNA, 19 bp, Homo sapiens
  siRNA target sequence for MSH3 (NM_002439.1,2953-2971).
cattgcctatgctacactt

SEQ ID NO: 16525 - DNA, 19 bp, Homo sapiens
  siRNA target sequence for MSH3 (NM_002439.1,2958-2976).
cctatgctacacttgagta

SEQ ID NO: 16526 - DNA, 19 bp, Homo sapiens
  siRNA target sequence for MSH3 (NM_002439.1,2959-2977).
ctatgctacacttgagtat

SEQ ID NO: 16527 - DNA, 19 bp, Homo sapiens
  siRNA target sequence for MSH3 (NM_002439.1,2963-2981).
gctacacttgagtatttca

SEQ ID NO: 16528 - DNA, 19 bp, Homo sapiens
  siRNA target sequence for MSH3 (NM_002439.1,2964-2982).
ctacacttgagtatttcat

SEQ ID NO: 16529 - DNA, 19 bp, Homo sapiens
  siRNA target sequence for MSH3 (NM_002439.1,3016-3034).
ccattatccgccagtttgt

SEQ ID NO: 16530 - DNA, 19 bp, Homo sapiens
  siRNA target sequence for MSH3 (NM_002439.1,3117-3135).
caggcgcagcagaacaagt

SEQ ID NO: 16531 - DNA, 19 bp, Homo sapiens
  siRNA target sequence for MSH3 (NM_002439.1,3146-3164).
gtcaccttcctttaccaaa

SEQ ID NO: 16532 - DNA, 19 bp, Homo sapiens
  siRNA target sequence for MSH3 (NM_002439.1,3160-3178).
ccaaataactagaggaatt

SEQ ID NO: 16533 - DNA, 19 bp, Homo sapiens
  siRNA target sequence for MSH3 (NM_002439.1,3180-3198).
cagcaaggagttatggatt

SEQ ID NO: 16534 - DNA, 19 bp, Homo sapiens
  siRNA target sequence for MSH3 (NM_002439.1,3182-3200).
gcaaggagttatggattaa

SEQ ID NO: 16535 - DNA, 19 bp, Homo sapiens
  siRNA target sequence for MSH3 (NM_002439.1,3183-3201).
caaggagttatggattaaa

SEQ ID NO: 16536 - DNA, 19 bp, Homo sapiens
  siRNA target sequence for MSH3 (NM_002439.1,3205-3223).
ggctaaactagcagatgtt

SEQ ID NO: 16537 - DNA, 19 bp, Homo sapiens
  siRNA target sequence for MSH3 (NM_002439.1,3221-3239).
gttcctggagaaattttga

SEQ ID NO: 16538 - DNA, 19 bp, Homo sapiens
  siRNA target sequence for MSH3 (NM_002439.1,3269-3287).
gaaggattaataaatacga

SEQ ID NO: 16539 - DNA, 19 bp, Homo sapiens
  siRNA target sequence for MSH3 (NM_002439.1,3301-3319).
caagtattttgcaaagtta

SEQ ID NO: 16540 - DNA, 19 bp, Homo sapiens
  siRNA target sequence for MSH3 (NM_002439.1,3316-3334).
gttatggacgatgcataat

SEQ ID NO: 16541 - DNA, 19 bp, Homo sapiens
  siRNA target sequence for MSH4 (NM_002440.2,45-63).
ctgaggcctgagatctcat

SEQ ID NO: 16542 - DNA, 19 bp, Homo sapiens
  siRNA target sequence for MSH4 (NM_002440.2,282-300).
caaggttcatactttggaa

SEQ ID NO: 16543 - DNA, 19 bp, Homo sapiens
  siRNA target sequence for MSH4 (NM_002440.2,361-379).
cttctgcacgagatactaa

SEQ ID NO: 16544 - DNA, 19 bp, Homo sapiens
  siRNA target sequence for MSH4 (NM_002440.2,393-411).
cttaaaactccattgtcta

SEQ ID NO: 16545 - DNA, 19 bp, Homo sapiens
  siRNA target sequence for MSH4 (NM_002440.2,420-438).
cctcagagatcaggttata

SEQ ID NO: 16546 - DNA, 19 bp, Homo sapiens
  siRNA target sequence for MSH4 (NM_002440.2,421-439).
ctcagagatcaggttataa

SEQ ID NO: 16547 - DNA, 19 bp, Homo sapiens
  siRNA target sequence for MSH4 (NM_002440.2,423-441).
cagagatcaggttataaga

SEQ ID NO: 16548 - DNA, 19 bp, Homo sapiens
  siRNA target sequence for MSH4 (NM_002440.2,497-515).
ctccccatcagttattgta

SEQ ID NO: 16549 - DNA, 19 bp, Homo sapiens
  siRNA target sequence for MSH4 (NM_002440.2,600-618).
cagtttgcagacaacacaa

SEQ ID NO: 16550 - DNA, 19 bp, Homo sapiens
  siRNA target sequence for MSH4 (NM_002440.2,629-647).
ggtgatcactaaacttaaa

SEQ ID NO: 16551 - DNA, 19 bp, Homo sapiens
  siRNA target sequence for MSH4 (NM_002440.2,630-648).
gtgatcactaaacttaaaa

SEQ ID NO: 16552 - DNA, 19 bp, Homo sapiens
  siRNA target sequence for MSH4 (NM_002440.2,716-734).
cactctgatcacagaaaat

SEQ ID NO: 16553 - DNA, 19 bp, Homo sapiens
  siRNA target sequence for MSH4 (NM_002440.2,800-818).
cattgaacagttatgcata

SEQ ID NO: 16554 - DNA, 19 bp, Homo sapiens
  siRNA target sequence for MSH4 (NM_002440.2,842-860).
ggaggttcagtccaagtat

SEQ ID NO: 16555 - DNA, 19 bp, Homo sapiens
  siRNA target sequence for MSH4 (NM_002440.2,873-891).
gctgttgcagctttgttaa

SEQ ID NO: 16556 - DNA, 19 bp, Homo sapiens
  siRNA target sequence for MSH4 (NM_002440.2,965-983).
gacagccatgatagattca

SEQ ID NO: 16557 - DNA, 19 bp, Homo sapiens
  siRNA target sequence for MSH4 (NM_002440.2,990-1008).
gcccaaaaccttgaattgt

SEQ ID NO: 16558 - DNA, 19 bp, Homo sapiens
  siRNA target sequence for MSH4 (NM_002440.2,991-1009).
cccaaaaccttgaattgtt

SEQ ID NO: 16559 - DNA, 19 bp, Homo sapiens
  siRNA target sequence for MSH4 (NM_002440.2,992-1010).
ccaaaaccttgaattgtta

SEQ ID NO: 16560 - DNA, 19 bp, Homo sapiens
  siRNA target sequence for MSH4 (NM_002440.2,1023-1041).
gactataggaataatcaca

SEQ ID NO: 16561 - DNA, 19 bp, Homo sapiens
  siRNA target sequence for MSH4 (NM_002440.2,1040-1058).
cactctctttggtgttcta

SEQ ID NO: 16562 - DNA, 19 bp, Homo sapiens
  siRNA target sequence for MSH4 (NM_002440.2,1046-1064).
ctttggtgttctaaattat

SEQ ID NO: 16563 - DNA, 19 bp, Homo sapiens
  siRNA target sequence for MSH4 (NM_002440.2,1050-1068).
ggtgttctaaattatacta

SEQ ID NO: 16564 - DNA, 19 bp, Homo sapiens
  siRNA target sequence for MSH4 (NM_002440.2,1051-1069).
gtgttctaaattatactaa

SEQ ID NO: 16565 - DNA, 19 bp, Homo sapiens
  siRNA target sequence for MSH4 (NM_002440.2,1053-1071).
gttctaaattatactaaga

SEQ ID NO: 16566 - DNA, 19 bp, Homo sapiens
  siRNA target sequence for MSH4 (NM_002440.2,1087-1105).
gacgacttcgttctaatat

SEQ ID NO: 16567 - DNA, 19 bp, Homo sapiens
  siRNA target sequence for MSH4 (NM_002440.2,1089-1107).
cgacttcgttctaatatat

SEQ ID NO: 16568 - DNA, 19 bp, Homo sapiens
  siRNA target sequence for MSH4 (NM_002440.2,1112-1130).
gcctctagttgatattgaa

SEQ ID NO: 16569 - DNA, 19 bp, Homo sapiens
  siRNA target sequence for MSH4 (NM_002440.2,1113-1131).
cctctagttgatattgaaa

SEQ ID NO: 16570 - DNA, 19 bp, Homo sapiens
  siRNA target sequence for MSH4 (NM_002440.2,1128-1146).
gaaaccattaacatgagat

SEQ ID NO: 16571 - DNA, 19 bp, Homo sapiens
  siRNA target sequence for MSH4 (NM_002440.2,1139-1157).
catgagattagattgtgtt

SEQ ID NO: 16572 - DNA, 19 bp, Homo sapiens
  siRNA target sequence for MSH4 (NM_002440.2,1142-1160).
gagattagattgtgttcaa

SEQ ID NO: 16573 - DNA, 19 bp, Homo sapiens
  siRNA target sequence for MSH4 (NM_002440.2,1194-1212).
cttcaatcagttatatcaa

SEQ ID NO: 16574 - DNA, 19 bp, Homo sapiens
  siRNA target sequence for MSH4 (NM_002440.2,1210-1228).
caagatttcttgatacaga

SEQ ID NO: 16575 - DNA, 19 bp, Homo sapiens
  siRNA target sequence for MSH4 (NM_002440.2,1271-1289).
ggtcaatgctgctgaatca

SEQ ID NO: 16576 - DNA, 19 bp, Homo sapiens
  siRNA target sequence for MSH4 (NM_002440.2,1288-1306).
caaagataacaaatttaat

SEQ ID NO: 16577 - DNA, 19 bp, Homo sapiens
  siRNA target sequence for MSH4 (NM_002440.2,1335-1353).
gatcctttaaagattgcta

SEQ ID NO: 16578 - DNA, 19 bp, Homo sapiens
  siRNA target sequence for MSH4 (NM_002440.2,1361-1379).
ctgtaacacacctttatta

SEQ ID NO: 16579 - DNA, 19 bp, Homo sapiens
  siRNA target sequence for MSH4 (NM_002440.2,1406-1424).
caagaggtttggaatcata

SEQ ID NO: 16580 - DNA, 19 bp, Homo sapiens
  siRNA target sequence for MSH4 (NM_002440.2,1409-1427).
gaggtttggaatcatactt

SEQ ID NO: 16581 - DNA, 19 bp, Homo sapiens
  siRNA target sequence for MSH4 (NM_002440.2,1458-1476).
gcaagatacatgaaaggat

SEQ ID NO: 16582 - DNA, 19 bp, Homo sapiens
  siRNA target sequence for MSH4 (NM_002440.2,1506-1524).
gcagtgaggtctaacataa

SEQ ID NO: 16583 - DNA, 19 bp, Homo sapiens
  siRNA target sequence for MSH4 (NM_002440.2,1507-1525).
cagtgaggtctaacataaa

SEQ ID NO: 16584 - DNA, 19 bp, Homo sapiens
  siRNA target sequence for MSH4 (NM_002440.2,1511-1529).
gaggtctaacataaatgaa

SEQ ID NO: 16585 - DNA, 19 bp, Homo sapiens
  siRNA target sequence for MSH4 (NM_002440.2,1636-1654).
gctctgctcgaggattttt

SEQ ID NO: 16586 - DNA, 19 bp, Homo sapiens
  siRNA target sequence for MSH4 (NM_002440.2,1659-1677).
cagatgactacagattgta

SEQ ID NO: 16587 - DNA, 19 bp, Homo sapiens
  siRNA target sequence for MSH4 (NM_002440.2,1695-1713).
caacttccttcagaattta

SEQ ID NO: 16588 - DNA, 19 bp, Homo sapiens
  siRNA target sequence for MSH4 (NM_002440.2,1723-1741).
ctaaagtgaaaaattctta

SEQ ID NO: 16589 - DNA, 19 bp, Homo sapiens
  siRNA target sequence for MSH4 (NM_002440.2,1847-1865).
gatttatgaacatattcat

SEQ ID NO: 16590 - DNA, 19 bp, Homo sapiens
  siRNA target sequence for MSH4 (NM_002440.2,1888-1906).
ctgtgtcaatgctggatat

SEQ ID NO: 16591 - DNA, 19 bp, Homo sapiens
  siRNA target sequence for MSH4 (NM_002440.2,1892-1910).
gtcaatgctggatatgcta

SEQ ID NO: 16592 - DNA, 19 bp, Homo sapiens
  siRNA target sequence for MSH4 (NM_002440.2,1943-1961).
ctatgttcgaccagaattt

SEQ ID NO: 16593 - DNA, 19 bp, Homo sapiens
  siRNA target sequence for MSH4 (NM_002440.2,1953-1971).
ccagaatttactgatactt

SEQ ID NO: 16594 - DNA, 19 bp, Homo sapiens
  siRNA target sequence for MSH4 (NM_002440.2,1985-2003).
gggatggcatcctattctt

SEQ ID NO: 16595 - DNA, 19 bp, Homo sapiens
  siRNA target sequence for MSH4 (NM_002440.2,1991-2009).
gcatcctattcttgaaaaa

SEQ ID NO: 16596 - DNA, 19 bp, Homo sapiens
  siRNA target sequence for MSH4 (NM_002440.2,1995-2013).
cctattcttgaaaaaatat

SEQ ID NO: 16597 - DNA, 19 bp, Homo sapiens
  siRNA target sequence for MSH4 (NM_002440.2,2025-2043).
cctattgccaacaatacct

SEQ ID NO: 16598 - DNA, 19 bp, Homo sapiens
  siRNA target sequence for MSH4 (NM_002440.2,2026-2044).
ctattgccaacaataccta

SEQ ID NO: 16599 - DNA, 19 bp, Homo sapiens
  siRNA target sequence for MSH4 (NM_002440.2,2031-2049).
gccaacaatacctatgtta

SEQ ID NO: 16600 - DNA, 19 bp, Homo sapiens
  siRNA target sequence for MSH4 (NM_002440.2,2046-2064).
gttacagaagggagtaatt

SEQ ID NO: 16601 - DNA, 19 bp, Homo sapiens
  siRNA target sequence for MSH4 (NM_002440.2,2050-2068).
cagaagggagtaatttttt

SEQ ID NO: 16602 - DNA, 19 bp, Homo sapiens
  siRNA target sequence for MSH4 (NM_002440.2,2090-2108).
gagtggaaaatccacatat

SEQ ID NO: 16603 - DNA, 19 bp, Homo sapiens
  siRNA target sequence for MSH4 (NM_002440.2,2141-2159).
ccagattggatcatatgtt

SEQ ID NO: 16604 - DNA, 19 bp, Homo sapiens
  siRNA target sequence for MSH4 (NM_002440.2,2176-2194).
cctttagaattgctaaaca

SEQ ID NO: 16605 - DNA, 19 bp, Homo sapiens
  siRNA target sequence for MSH4 (NM_002440.2,2217-2235).
gatgatgatatcgaaacaa

SEQ ID NO: 16606 - DNA, 19 bp, Homo sapiens
  siRNA target sequence for MSH4 (NM_002440.2,2228-2246).
cgaaacaaattcatcaaca

SEQ ID NO: 16607 - DNA, 19 bp, Homo sapiens
  siRNA target sequence for MSH4 (NM_002440.2,2261-2279).
gaaagagatagcatatatt

SEQ ID NO: 16608 - DNA, 19 bp, Homo sapiens
  siRNA target sequence for MSH4 (NM_002440.2,2267-2285).
gatagcatatattctacat

SEQ ID NO: 16609 - DNA, 19 bp, Homo sapiens
  siRNA target sequence for MSH4 (NM_002440.2,2295-2313).
gacaaatcgctcatattaa

SEQ ID NO: 16610 - DNA, 19 bp, Homo sapiens
  siRNA target sequence for MSH4 (NM_002440.2,2297-2315).
caaatcgctcatattaatt

SEQ ID NO: 16611 - DNA, 19 bp, Homo sapiens
  siRNA target sequence for MSH4 (NM_002440.2,2302-2320).
cgctcatattaattgatga

SEQ ID NO: 16612 - DNA, 19 bp, Homo sapiens
  siRNA target sequence for MSH4 (NM_002440.2,2322-2340).
cttggcagaggtactaata

SEQ ID NO: 16613 - DNA, 19 bp, Homo sapiens
  siRNA target sequence for MSH4 (NM_002440.2,2335-2353).
ctaatacggaagaaggtat

SEQ ID NO: 16614 - DNA, 19 bp, Homo sapiens
  siRNA target sequence for MSH4 (NM_002440.2,2368-2386).
ctgtttgtgaatatctact

SEQ ID NO: 16615 - DNA, 19 bp, Homo sapiens
  siRNA target sequence for MSH4 (NM_002440.2,2385-2403).
ctgagcttaaaggcattta

SEQ ID NO: 16616 - DNA, 19 bp, Homo sapiens
  siRNA target sequence for MSH4 (NM_002440.2,2389-2407).
gcttaaaggcatttacact

SEQ ID NO: 16617 - DNA, 19 bp, Homo sapiens
  siRNA target sequence for MSH4 (NM_002440.2,2423-2441).
cctggaactatgccatatt

SEQ ID NO: 16618 - DNA, 19 bp, Homo sapiens
  siRNA target sequence for MSH4 (NM_002440.2,2446-2464).
ccctgtatcctaatgtaga

SEQ ID NO: 16619 - DNA, 19 bp, Homo sapiens
  siRNA target sequence for MSH4 (NM_002440.2,2447-2465).
cctgtatcctaatgtagaa

SEQ ID NO: 16620 - DNA, 19 bp, Homo sapiens
  siRNA target sequence for MSH4 (NM_002440.2,2525-2543).
gtatacctacaaactttct

SEQ ID NO: 16621 - DNA, 19 bp, Homo sapiens
  siRNA target sequence for MSH4 (NM_002440.2,2596-2614).
cacttccaccatcaattgt

SEQ ID NO: 16622 - DNA, 19 bp, Homo sapiens
  siRNA target sequence for MSH4 (NM_002440.2,2598-2616).
cttccaccatcaattgtct

SEQ ID NO: 16623 - DNA, 19 bp, Homo sapiens
  siRNA target sequence for MSH4 (NM_002440.2,2624-2642).
caaggaaatcacaactcaa

SEQ ID NO: 16624 - DNA, 19 bp, Homo sapiens
  siRNA target sequence for MSH4 (NM_002440.2,2628-2646).
gaaatcacaactcaaatta

SEQ ID NO: 16625 - DNA, 19 bp, Homo sapiens
  siRNA target sequence for MSH4 (NM_002440.2,2638-2656).
ctcaaattacgagacaaat

SEQ ID NO: 16626 - DNA, 19 bp, Homo sapiens
  siRNA target sequence for MSH4 (NM_002440.2,2715-2733).
gccactaggcttgttcaaa

SEQ ID NO: 16627 - DNA, 19 bp, Homo sapiens
  siRNA target sequence for MSH4 (NM_002440.2,2717-2735).
cactaggcttgttcaaact

SEQ ID NO: 16628 - DNA, 19 bp, Homo sapiens
  siRNA target sequence for MSH4 (NM_002440.2,2753-2771).
ggatccagacagtttacga

SEQ ID NO: 16629 - DNA, 19 bp, Homo sapiens
  siRNA target sequence for MSH4 (NM_002440.2,2754-2772).
gatccagacagtttacgaa

SEQ ID NO: 16630 - DNA, 19 bp, Homo sapiens
  siRNA target sequence for MSH4 (NM_002440.2,2757-2775).
ccagacagtttacgaatat

SEQ ID NO: 16631 - DNA, 19 bp, Homo sapiens
  siRNA target sequence for MSH4 (NM_002440.2,2758-2776).
cagacagtttacgaatata

SEQ ID NO: 16632 - DNA, 19 bp, Homo sapiens
  siRNA target sequence for MSH5 (NM_002441.2,414-432).
cttgggcattgcctactat

SEQ ID NO: 16633 - DNA, 19 bp, Homo sapiens
  siRNA target sequence for MSH5 (NM_002441.2,417-435).
gggcattgcctactatgat

SEQ ID NO: 16634 - DNA, 19 bp, Homo sapiens
  siRNA target sequence for MSH5 (NM_002441.2,418-436).
ggcattgcctactatgata

SEQ ID NO: 16635 - DNA, 19 bp, Homo sapiens
  siRNA target sequence for MSH5 (NM_002441.2,519-537).
caatccccagtctgttgtt

SEQ ID NO: 16636 - DNA, 19 bp, Homo sapiens
  siRNA target sequence for MSH5 (NM_002441.2,542-560).
gtgccaaacaggatgagaa

SEQ ID NO: 16637 - DNA, 19 bp, Homo sapiens
  siRNA target sequence for MSH5 (NM_002441.2,671-689).
gcctcctttctggaaacta

SEQ ID NO: 16638 - DNA, 19 bp, Homo sapiens
  siRNA target sequence for MSH5 (NM_002441.2,713-731).
ctgccactgagaaaatcct

SEQ ID NO: 16639 - DNA, 19 bp, Homo sapiens
  siRNA target sequence for MSH5 (NM_002441.2,798-816).
gttcctgggtcgaagaaga

SEQ ID NO: 16640 - DNA, 19 bp, Homo sapiens
  siRNA target sequence for MSH5 (NM_002441.2,812-830).
gaagaatcggggttgaact

SEQ ID NO: 16641 - DNA, 19 bp, Homo sapiens
  siRNA target sequence for MSH5 (NM_002441.2,821-839).
gggttgaactggaagacta

SEQ ID NO: 16642 - DNA, 19 bp, Homo sapiens
  siRNA target sequence for MSH5 (NM_002441.2,823-841).
gttgaactggaagactata

SEQ ID NO: 16643 - DNA, 19 bp, Homo sapiens
  siRNA target sequence for MSH5 (NM_002441.2,882-900).
gactcatctggtgaacata

SEQ ID NO: 16644 - DNA, 19 bp, Homo sapiens
  siRNA target sequence for MSH5 (NM_002441.2,884-902).
ctcatctggtgaacataga

SEQ ID NO: 16645 - DNA, 19 bp, Homo sapiens
  siRNA target sequence for MSH5 (NM_002441.2,1091-1109).
ctcgtctggacgtcattca

SEQ ID NO: 16646 - DNA, 19 bp, Homo sapiens
  siRNA target sequence for MSH5 (NM_002441.2,1093-1111).
cgtctggacgtcattcagt

SEQ ID NO: 16647 - DNA, 19 bp, Homo sapiens
  siRNA target sequence for MSH5 (NM_002441.2,1157-1175).
ggctcctgggtcacatcaa

SEQ ID NO: 16648 - DNA, 19 bp, Homo sapiens
  siRNA target sequence for MSH5 (NM_002441.2,1159-1177).
ctcctgggtcacatcaaga

SEQ ID NO: 16649 - DNA, 19 bp, Homo sapiens
  siRNA target sequence for MSH5 (NM_002441.2,1173-1191).
caagaacgtgcctctgatt

SEQ ID NO: 16650 - DNA, 19 bp, Homo sapiens
  siRNA target sequence for MSH5 (NM_002441.2,1192-1210).
ctgaaacgcatgaagttgt

SEQ ID NO: 16651 - DNA, 19 bp, Homo sapiens
  siRNA target sequence for MSH5 (NM_002441.2,1359-1377).
cagcctcattgggaaagta

SEQ ID NO: 16652 - DNA, 19 bp, Homo sapiens
  siRNA target sequence for MSH5 (NM_002441.2,1370-1388).
ggaaagtagtggactttga

SEQ ID NO: 16653 - DNA, 19 bp, Homo sapiens
  siRNA target sequence for MSH5 (NM_002441.2,1389-1407).
gggcagccttgctgaaaat

SEQ ID NO: 16654 - DNA, 19 bp, Homo sapiens
  siRNA target sequence for MSH5 (NM_002441.2,1428-1446).
catagatcctgaaattgat

SEQ ID NO: 16655 - DNA, 19 bp, Homo sapiens
  siRNA target sequence for MSH5 (NM_002441.2,1532-1550).
cttcatgcagtgtcatcta

SEQ ID NO: 16656 - DNA, 19 bp, Homo sapiens
  siRNA target sequence for MSH5 (NM_002441.2,1605-1623).
ggccagtgactttgagatt

SEQ ID NO: 16657 - DNA, 19 bp, Homo sapiens
  siRNA target sequence for MSH5 (NM_002441.2,1606-1624).
gccagtgactttgagatta

SEQ ID NO: 16658 - DNA, 19 bp, Homo sapiens
  siRNA target sequence for MSH5 (NM_002441.2,1607-1625).
ccagtgactttgagattaa

SEQ ID NO: 16659 - DNA, 19 bp, Homo sapiens
  siRNA target sequence for MSH5 (NM_002441.2,1654-1672).
gagaagctgcactatcgta

SEQ ID NO: 16660 - DNA, 19 bp, Homo sapiens
  siRNA target sequence for MSH5 (NM_002441.2,1784-1802).
ctgtcttaacccgagtatt

SEQ ID NO: 16661 - DNA, 19 bp, Homo sapiens
  siRNA target sequence for MSH5 (NM_002441.2,1852-1870).
cgggactatggctactcaa

SEQ ID NO: 16662 - DNA, 19 bp, Homo sapiens
  siRNA target sequence for MSH5 (NM_002441.2,2044-2062).
caggtaggcttgatcacat

SEQ ID NO: 16663 - DNA, 19 bp, Homo sapiens
  siRNA target sequence for MSH5 (NM_002441.2,2113-2131).
gcagtagacgccatcttca

SEQ ID NO: 16664 - DNA, 19 bp, Homo sapiens
  siRNA target sequence for MSH5 (NM_002441.2,2121-2139).
cgccatcttcacacgaatt

SEQ ID NO: 16665 - DNA, 19 bp, Homo sapiens
  siRNA target sequence for MSH5 (NM_002441.2,2123-2141).
ccatcttcacacgaattca

SEQ ID NO: 16666 - DNA, 19 bp, Homo sapiens
  siRNA target sequence for MSH5 (NM_002441.2,2124-2142).
catcttcacacgaattcat

SEQ ID NO: 16667 - DNA, 19 bp, Homo sapiens
  siRNA target sequence for MSH5 (NM_002441.2,2199-2217).
ggcgaaagcagtgaacaat

SEQ ID NO: 16668 - DNA, 19 bp, Homo sapiens
  siRNA target sequence for MSH5 (NM_002441.2,2229-2247).
gtcgctggtccttattgat

SEQ ID NO: 16669 - DNA, 19 bp, Homo sapiens
  siRNA target sequence for MSH5 (NM_002441.2,2238-2256).
ccttattgatgaatttgga

SEQ ID NO: 16670 - DNA, 19 bp, Homo sapiens
  siRNA target sequence for MSH5 (NM_002441.2,2398-2416).
cccctggtgcagtatttga

SEQ ID NO: 16671 - DNA, 19 bp, Homo sapiens
  siRNA target sequence for MSH5 (NM_002441.2,2442-2460).
cgatcttgtcttcttctat

SEQ ID NO: 16672 - DNA, 19 bp, Homo sapiens
  siRNA target sequence for MSH5 (NM_002441.2,2589-2607).
gcctgtcaaggatttgcta

SEQ ID NO: 16673 - DNA, 19 bp, Homo sapiens
  siRNA target sequence for MSH5 (NM_002441.2,2590-2608).
cctgtcaaggatttgctaa

SEQ ID NO: 16674 - DNA, 19 bp, Homo sapiens
  siRNA target sequence for MSH5 (NM_002441.2,2591-2609).
ctgtcaaggatttgctaaa

SEQ ID NO: 16675 - DNA, 19 bp, Homo sapiens
  siRNA target sequence for MSH5 (NM_002441.2,2622-2640).
ggaaaattgccagacatta

SEQ ID NO: 16676 - DNA, 19 bp, Homo sapiens
  siRNA target sequence for MSH5 (NM_002441.2,2630-2648).
gccagacattagtggataa

SEQ ID NO: 16677 - DNA, 19 bp, Homo sapiens
  siRNA target sequence for MSH6 (NM_000179.1,427-445).
ccctttgatggaacattca

SEQ ID NO: 16678 - DNA, 19 bp, Homo sapiens
  siRNA target sequence for MSH6 (NM_000179.1,464-482).
cagtccgtgttcatgtaca

SEQ ID NO: 16679 - DNA, 19 bp, Homo sapiens
  siRNA target sequence for MSH6 (NM_000179.1,469-487).
cgtgttcatgtacagtttt

SEQ ID NO: 16680 - DNA, 19 bp, Homo sapiens
  siRNA target sequence for MSH6 (NM_000179.1,563-581).
cccagaagggaggtcattt

SEQ ID NO: 16681 - DNA, 19 bp, Homo sapiens
  siRNA target sequence for MSH6 (NM_000179.1,564-582).
ccagaagggaggtcatttt

SEQ ID NO: 16682 - DNA, 19 bp, Homo sapiens
  siRNA target sequence for MSH6 (NM_000179.1,570-588).
gggaggtcatttttacagt

SEQ ID NO: 16683 - DNA, 19 bp, Homo sapiens
  siRNA target sequence for MSH6 (NM_000179.1,622-640).
gcagatgaagccttaaata

SEQ ID NO: 16684 - DNA, 19 bp, Homo sapiens
  siRNA target sequence for MSH6 (NM_000179.1,623-641).
cagatgaagccttaaataa

SEQ ID NO: 16685 - DNA, 19 bp, Homo sapiens
  siRNA target sequence for MSH6 (NM_000179.1,714-732).
ggtaggcacaacttacgta

SEQ ID NO: 16686 - DNA, 19 bp, Homo sapiens
  siRNA target sequence for MSH6 (NM_000179.1,719-737).
gcacaacttacgtaacaga

SEQ ID NO: 16687 - DNA, 19 bp, Homo sapiens
  siRNA target sequence for MSH6 (NM_000179.1,720-738).
cacaacttacgtaacagat

SEQ ID NO: 16688 - DNA, 19 bp, Homo sapiens
  siRNA target sequence for MSH6 (NM_000179.1,722-740).
caacttacgtaacagataa

SEQ ID NO: 16689 - DNA, 19 bp, Homo sapiens
  siRNA target sequence for MSH6 (NM_000179.1,804-822).
gcgaagtagccgccaaata

SEQ ID NO: 16690 - DNA, 19 bp, Homo sapiens
  siRNA target sequence for MSH6 (NM_000179.1,805-823).
cgaagtagccgccaaataa

SEQ ID NO: 16691 - DNA, 19 bp, Homo sapiens
  siRNA target sequence for MSH6 (NM_000179.1,829-847).
cgaagggtcatatcagatt

SEQ ID NO: 16692 - DNA, 19 bp, Homo sapiens
  siRNA target sequence for MSH6 (NM_000179.1,833-851).
gggtcatatcagattctga

SEQ ID NO: 16693 - DNA, 19 bp, Homo sapiens
  siRNA target sequence for MSH6 (NM_000179.1,954-972).
cctgaacagccctgtcaaa

SEQ ID NO: 16694 - DNA, 19 bp, Homo sapiens
  siRNA target sequence for MSH6 (NM_000179.1,957-975).
gaacagccctgtcaaagtt

SEQ ID NO: 16695 - DNA, 19 bp, Homo sapiens
  siRNA target sequence for MSH6 (NM_000179.1,976-994).
gctcgaaagcggaagagaa

SEQ ID NO: 16696 - DNA, 19 bp, Homo sapiens
  siRNA target sequence for MSH6 (NM_000179.1,977-995).
ctcgaaagcggaagagaat

SEQ ID NO: 16697 - DNA, 19 bp, Homo sapiens
  siRNA target sequence for MSH6 (NM_000179.1,1044-1062).
gccctcagccaccaaacaa

SEQ ID NO: 16698 - DNA, 19 bp, Homo sapiens
  siRNA target sequence for MSH6 (NM_000179.1,1056-1074).
caaacaagcaactagcatt

SEQ ID NO: 16699 - DNA, 19 bp, Homo sapiens
  siRNA target sequence for MSH6 (NM_000179.1,1060-1078).
caagcaactagcatttcat

SEQ ID NO: 16700 - DNA, 19 bp, Homo sapiens
  siRNA target sequence for MSH6 (NM_000179.1,1111-1129).
gcccctcaaaattctgaat

SEQ ID NO: 16701 - DNA, 19 bp, Homo sapiens
  siRNA target sequence for MSH6 (NM_000179.1,1166-1184).
gtcgccctactgtttggta

SEQ ID NO: 16702 - DNA, 19 bp, Homo sapiens
  siRNA target sequence for MSH6 (NM_000179.1,1172-1190).
ctactgtttggtatcatga

SEQ ID NO: 16703 - DNA, 19 bp, Homo sapiens
  siRNA target sequence for MSH6 (NM_000179.1,1177-1195).
gtttggtatcatgaaactt

SEQ ID NO: 16704 - DNA, 19 bp, Homo sapiens
  siRNA target sequence for MSH6 (NM_000179.1,1181-1199).
ggtatcatgaaactttaga

SEQ ID NO: 16705 - DNA, 19 bp, Homo sapiens
  siRNA target sequence for MSH6 (NM_000179.1,1193-1211).
ctttagaatggcttaagga

SEQ ID NO: 16706 - DNA, 19 bp, Homo sapiens
  siRNA target sequence for MSH6 (NM_000179.1,1242-1260).
gcctgatcaccccgatttt

SEQ ID NO: 16707 - DNA, 19 bp, Homo sapiens
  siRNA target sequence for MSH6 (NM_000179.1,1244-1262).
ctgatcaccccgattttga

SEQ ID NO: 16708 - DNA, 19 bp, Homo sapiens
  siRNA target sequence for MSH6 (NM_000179.1,1254-1272).
cgattttgatgcatctaca

SEQ ID NO: 16709 - DNA, 19 bp, Homo sapiens
  siRNA target sequence for MSH6 (NM_000179.1,1287-1305).
ggatttcctcaattcttgt

SEQ ID NO: 16710 - DNA, 19 bp, Homo sapiens
  siRNA target sequence for MSH6 (NM_000179.1,1319-1337).
ggaagtggtggcagattaa

SEQ ID NO: 16711 - DNA, 19 bp, Homo sapiens
  siRNA target sequence for MSH6 (NM_000179.1,1338-1356).
gtctcagaactttgatctt

SEQ ID NO: 16712 - DNA, 19 bp, Homo sapiens
  siRNA target sequence for MSH6 (NM_000179.1,1368-1386).
caaggtggggaaattttat

SEQ ID NO: 16713 - DNA, 19 bp, Homo sapiens
  siRNA target sequence for MSH6 (NM_000179.1,1423-1441).
gaactggggctggtattca

SEQ ID NO: 16714 - DNA, 19 bp, Homo sapiens
  siRNA target sequence for MSH6 (NM_000179.1,1428-1446).
ggggctggtattcatgaaa

SEQ ID NO: 16715 - DNA, 19 bp, Homo sapiens
  siRNA target sequence for MSH6 (NM_000179.1,1465-1483).
ggctttcctgaaattgcat

SEQ ID NO: 16716 - DNA, 19 bp, Homo sapiens
  siRNA target sequence for MSH6 (NM_000179.1,1481-1499).
catttggccgttattcaga

SEQ ID NO: 16717 - DNA, 19 bp, Homo sapiens
  siRNA target sequence for MSH6 (NM_000179.1,1560-1578).
gatggaggcacgatgtaga

SEQ ID NO: 16718 - DNA, 19 bp, Homo sapiens
  siRNA target sequence for MSH6 (NM_000179.1,1620-1638).
ggagatctgtaggatcatt

SEQ ID NO: 16719 - DNA, 19 bp, Homo sapiens
  siRNA target sequence for MSH6 (NM_000179.1,1640-1658).
ccaagggtacacagactta

SEQ ID NO: 16720 - DNA, 19 bp, Homo sapiens
  siRNA target sequence for MSH6 (NM_000179.1,1682-1700).
ctgagaactacagtaagta

SEQ ID NO: 16721 - DNA, 19 bp, Homo sapiens
  siRNA target sequence for MSH6 (NM_000179.1,1689-1707).
ctacagtaagtatcttctt

SEQ ID NO: 16722 - DNA, 19 bp, Homo sapiens
  siRNA target sequence for MSH6 (NM_000179.1,1740-1758).
ccatactcgtgcatatggt

SEQ ID NO: 16723 - DNA, 19 bp, Homo sapiens
  siRNA target sequence for MSH6 (NM_000179.1,1756-1774).
ggtgtgtgctttgttgata

SEQ ID NO: 16724 - DNA, 19 bp, Homo sapiens
  siRNA target sequence for MSH6 (NM_000179.1,1759-1777).
gtgtgctttgttgatactt

SEQ ID NO: 16725 - DNA, 19 bp, Homo sapiens
  siRNA target sequence for MSH6 (NM_000179.1,1816-1834).
cgccattgttcgagattta

SEQ ID NO: 16726 - DNA, 19 bp, Homo sapiens
  siRNA target sequence for MSH6 (NM_000179.1,1819-1837).
cattgttcgagatttagga

SEQ ID NO: 16727 - DNA, 19 bp, Homo sapiens
  siRNA target sequence for MSH6 (NM_000179.1,1836-1854).
gactctagtggcacactat

SEQ ID NO: 16728 - DNA, 19 bp, Homo sapiens
  siRNA target sequence for MSH6 (NM_000179.1,1855-1873).
cccccagtacaagttttat

SEQ ID NO: 16729 - DNA, 19 bp, Homo sapiens
  siRNA target sequence for MSH6 (NM_000179.1,1856-1874).
ccccagtacaagttttatt

SEQ ID NO: 16730 - DNA, 19 bp, Homo sapiens
  siRNA target sequence for MSH6 (NM_000179.1,1965-1983).
gttttgggatgcatccaaa

SEQ ID NO: 16731 - DNA, 19 bp, Homo sapiens
  siRNA target sequence for MSH6 (NM_000179.1,1972-1990).
gatgcatccaaaactttga

SEQ ID NO: 16732 - DNA, 19 bp, Homo sapiens
  siRNA target sequence for MSH6 (NM_000179.1,2049-2067).
gttaccccaggtgcttaaa

SEQ ID NO: 16733 - DNA, 19 bp, Homo sapiens
  siRNA target sequence for MSH6 (NM_000179.1,2053-2071).
ccccaggtgcttaaaggta

SEQ ID NO: 16734 - DNA, 19 bp, Homo sapiens
  siRNA target sequence for MSH6 (NM_000179.1,2054-2072).
cccaggtgcttaaaggtat

SEQ ID NO: 16735 - DNA, 19 bp, Homo sapiens
  siRNA target sequence for MSH6 (NM_000179.1,2058-2076).
ggtgcttaaaggtatgact

SEQ ID NO: 16736 - DNA, 19 bp, Homo sapiens
  siRNA target sequence for MSH6 (NM_000179.1,2059-2077).
gtgcttaaaggtatgactt

SEQ ID NO: 16737 - DNA, 19 bp, Homo sapiens
  siRNA target sequence for MSH6 (NM_000179.1,2246-2264).
caagatctggtgctatctt

SEQ ID NO: 16738 - DNA, 19 bp, Homo sapiens
  siRNA target sequence for MSH6 (NM_000179.1,2267-2285).
ccaaagcctatcaacgaat

SEQ ID NO: 16739 - DNA, 19 bp, Homo sapiens
  siRNA target sequence for MSH6 (NM_000179.1,2289-2307).
gctagatgcagtgacatta

SEQ ID NO: 16740 - DNA, 19 bp, Homo sapiens
  siRNA target sequence for MSH6 (NM_000179.1,2293-2311).
gatgcagtgacattaaaca

SEQ ID NO: 16741 - DNA, 19 bp, Homo sapiens
  siRNA target sequence for MSH6 (NM_000179.1,2296-2314).
gcagtgacattaaacaact

SEQ ID NO: 16742 - DNA, 19 bp, Homo sapiens
  siRNA target sequence for MSH6 (NM_000179.1,2348-2366).
ctgaaggaaccctactaga

SEQ ID NO: 16743 - DNA, 19 bp, Homo sapiens
  siRNA target sequence for MSH6 (NM_000179.1,2359-2377).
ctactagagagggttgata

SEQ ID NO: 16744 - DNA, 19 bp, Homo sapiens
  siRNA target sequence for MSH6 (NM_000179.1,2362-2380).
ctagagagggttgatactt

SEQ ID NO: 16745 - DNA, 19 bp, Homo sapiens
  siRNA target sequence for MSH6 (NM_000179.1,2381-2399).
gccatactccttttggtaa

SEQ ID NO: 16746 - DNA, 19 bp, Homo sapiens
  siRNA target sequence for MSH6 (NM_000179.1,2425-2443).
gccccactctgtaaccatt

SEQ ID NO: 16747 - DNA, 19 bp, Homo sapiens
  siRNA target sequence for MSH6 (NM_000179.1,2435-2453).
gtaaccattatgctattaa

SEQ ID NO: 16748 - DNA, 19 bp, Homo sapiens
  siRNA target sequence for MSH6 (NM_000179.1,2485-2503).
gttgtgcctgacaaaatct

SEQ ID NO: 16749 - DNA, 19 bp, Homo sapiens
  siRNA target sequence for MSH6 (NM_000179.1,2496-2514).
caaaatctccgaagttgta

SEQ ID NO: 16750 - DNA, 19 bp, Homo sapiens
  siRNA target sequence for MSH6 (NM_000179.1,2509-2527).
gttgtagagcttctaaaga

SEQ ID NO: 16751 - DNA, 19 bp, Homo sapiens
  siRNA target sequence for MSH6 (NM_000179.1,2544-2562).
gaggctactcagtaaaatt

SEQ ID NO: 16752 - DNA, 19 bp, Homo sapiens
  siRNA target sequence for MSH6 (NM_000179.1,2546-2564).
ggctactcagtaaaattca

SEQ ID NO: 16753 - DNA, 19 bp, Homo sapiens
  siRNA target sequence for MSH6 (NM_000179.1,2548-2566).
ctactcagtaaaattcata

SEQ ID NO: 16754 - DNA, 19 bp, Homo sapiens
  siRNA target sequence for MSH6 (NM_000179.1,2599-2617).
ccagacagcagggctataa

SEQ ID NO: 16755 - DNA, 19 bp, Homo sapiens
  siRNA target sequence for MSH6 (NM_000179.1,2600-2618).
cagacagcagggctataat

SEQ ID NO: 16756 - DNA, 19 bp, Homo sapiens
  siRNA target sequence for MSH6 (NM_000179.1,2604-2622).
cagcagggctataatgtat

SEQ ID NO: 16757 - DNA, 19 bp, Homo sapiens
  siRNA target sequence for MSH6 (NM_000179.1,2610-2628).
ggctataatgtatgaagaa

SEQ ID NO: 16758 - DNA, 19 bp, Homo sapiens
  siRNA target sequence for MSH6 (NM_000179.1,2611-2629).
gctataatgtatgaagaaa

SEQ ID NO: 16759 - DNA, 19 bp, Homo sapiens
  siRNA target sequence for MSH6 (NM_000179.1,2722-2740).
gctgatggttttaagtcta

SEQ ID NO: 16760 - DNA, 19 bp, Homo sapiens
  siRNA target sequence for MSH6 (NM_000179.1,2794-2812).
cctgatttgactgtagaat

SEQ ID NO: 16761 - DNA, 19 bp, Homo sapiens
  siRNA target sequence for MSH6 (NM_000179.1,2878-2896).
gcaggctttgactctgatt

SEQ ID NO: 16762 - DNA, 19 bp, Homo sapiens
  siRNA target sequence for MSH6 (NM_000179.1,2953-2971).
gagaaacagcgcaacagaa

SEQ ID NO: 16763 - DNA, 19 bp, Homo sapiens
  siRNA target sequence for MSH6 (NM_000179.1,2955-2973).
gaaacagcgcaacagaatt

SEQ ID NO: 16764 - DNA, 19 bp, Homo sapiens
  siRNA target sequence for MSH6 (NM_000179.1,2974-2992).
ggctgtaggaccatagtct

SEQ ID NO: 16765 - DNA, 19 bp, Homo sapiens
  siRNA target sequence for MSH6 (NM_000179.1,2975-2993).
gctgtaggaccatagtcta

SEQ ID NO: 16766 - DNA, 19 bp, Homo sapiens
  siRNA target sequence for MSH6 (NM_000179.1,2976-2994).
ctgtaggaccatagtctat

SEQ ID NO: 16767 - DNA, 19 bp, Homo sapiens
  siRNA target sequence for MSH6 (NM_000179.1,3061-3079).
gaagaatacgagttgaaat

SEQ ID NO: 16768 - DNA, 19 bp, Homo sapiens
  siRNA target sequence for MSH6 (NM_000179.1,3064-3082).
gaatacgagttgaaatcta

SEQ ID NO: 16769 - DNA, 19 bp, Homo sapiens
  siRNA target sequence for MSH6 (NM_000179.1,3084-3102).
caagaagggctgtaaacga

SEQ ID NO: 16770 - DNA, 19 bp, Homo sapiens
  siRNA target sequence for MSH6 (NM_000179.1,3100-3118).
cgatactggaccaaaacta

SEQ ID NO: 16771 - DNA, 19 bp, Homo sapiens
  siRNA target sequence for MSH6 (NM_000179.1,3105-3123).
ctggaccaaaactattgaa

SEQ ID NO: 16772 - DNA, 19 bp, Homo sapiens
  siRNA target sequence for MSH6 (NM_000179.1,3107-3125).
ggaccaaaactattgaaaa

SEQ ID NO: 16773 - DNA, 19 bp, Homo sapiens
  siRNA target sequence for MSH6 (NM_000179.1,3129-3147).
gttggctaatctcataaat

SEQ ID NO: 16774 - DNA, 19 bp, Homo sapiens
  siRNA target sequence for MSH6 (NM_000179.1,3132-3150).
ggctaatctcataaatgct

SEQ ID NO: 16775 - DNA, 19 bp, Homo sapiens
  siRNA target sequence for MSH6 (NM_000179.1,3154-3172).
gaacggagggatgtatcat

SEQ ID NO: 16776 - DNA, 19 bp, Homo sapiens
  siRNA target sequence for MSH6 (NM_000179.1,3157-3175).
cggagggatgtatcattga

SEQ ID NO: 16777 - DNA, 19 bp, Homo sapiens
  siRNA target sequence for MSH6 (NM_000179.1,3182-3200).
gcatgcggcgactgttcta

SEQ ID NO: 16778 - DNA, 19 bp, Homo sapiens
  siRNA target sequence for MSH6 (NM_000179.1,3183-3201).
catgcggcgactgttctat

SEQ ID NO: 16779 - DNA, 19 bp, Homo sapiens
  siRNA target sequence for MSH6 (NM_000179.1,3187-3205).
cggcgactgttctataact

SEQ ID NO: 16780 - DNA, 19 bp, Homo sapiens
  siRNA target sequence for MSH6 (NM_000179.1,3188-3206).
ggcgactgttctataactt

SEQ ID NO: 16781 - DNA, 19 bp, Homo sapiens
  siRNA target sequence for MSH6 (NM_000179.1,3189-3207).
gcgactgttctataacttt

SEQ ID NO: 16782 - DNA, 19 bp, Homo sapiens
  siRNA target sequence for MSH6 (NM_000179.1,3195-3213).
gttctataactttgataaa

SEQ ID NO: 16783 - DNA, 19 bp, Homo sapiens
  siRNA target sequence for MSH6 (NM_000179.1,3249-3267).
cgcagtgttggatgtttta

SEQ ID NO: 16784 - DNA, 19 bp, Homo sapiens
  siRNA target sequence for MSH6 (NM_000179.1,3253-3271).
gtgttggatgttttactgt

SEQ ID NO: 16785 - DNA, 19 bp, Homo sapiens
  siRNA target sequence for MSH6 (NM_000179.1,3268-3286).
ctgtgcctggctaactata

SEQ ID NO: 16786 - DNA, 19 bp, Homo sapiens
  siRNA target sequence for MSH6 (NM_000179.1,3345-3363).
ccccttcttagagcttaaa

SEQ ID NO: 16787 - DNA, 19 bp, Homo sapiens
  siRNA target sequence for MSH6 (NM_000179.1,3348-3366).
cttcttagagcttaaagga

SEQ ID NO: 16788 - DNA, 19 bp, Homo sapiens
  siRNA target sequence for MSH6 (NM_000179.1,3370-3388).
cgccatccttgcattacga

SEQ ID NO: 16789 - DNA, 19 bp, Homo sapiens
  siRNA target sequence for MSH6 (NM_000179.1,3376-3394).
ccttgcattacgaagactt

SEQ ID NO: 16790 - DNA, 19 bp, Homo sapiens
  siRNA target sequence for MSH6 (NM_000179.1,3377-3395).
cttgcattacgaagacttt

SEQ ID NO: 16791 - DNA, 19 bp, Homo sapiens
  siRNA target sequence for MSH6 (NM_000179.1,3380-3398).
gcattacgaagactttttt

SEQ ID NO: 16792 - DNA, 19 bp, Homo sapiens
  siRNA target sequence for MSH6 (NM_000179.1,3381-3399).
cattacgaagacttttttt

SEQ ID NO: 16793 - DNA, 19 bp, Homo sapiens
  siRNA target sequence for MSH6 (NM_000179.1,3478-3496).
cttgttactggaccaaata

SEQ ID NO: 16794 - DNA, 19 bp, Homo sapiens
  siRNA target sequence for MSH6 (NM_000179.1,3502-3520).
ggcaagtctacgcttatga

SEQ ID NO: 16795 - DNA, 19 bp, Homo sapiens
  siRNA target sequence for MSH6 (NM_000179.1,3504-3522).
caagtctacgcttatgaga

SEQ ID NO: 16796 - DNA, 19 bp, Homo sapiens
  siRNA target sequence for MSH6 (NM_000179.1,3579-3597).
gtgcaggctcacaccaatt

SEQ ID NO: 16797 - DNA, 19 bp, Homo sapiens
  siRNA target sequence for MSH6 (NM_000179.1,3581-3599).
gcaggctcacaccaattga

SEQ ID NO: 16798 - DNA, 19 bp, Homo sapiens
  siRNA target sequence for MSH6 (NM_000179.1,3585-3603).
gctcacaccaattgataga

SEQ ID NO: 16799 - DNA, 19 bp, Homo sapiens
  siRNA target sequence for MSH6 (NM_000179.1,3592-3610).
ccaattgatagagtgttta

SEQ ID NO: 16800 - DNA, 19 bp, Homo sapiens
  siRNA target sequence for MSH6 (NM_000179.1,3622-3640).
gcctcagacagaataatgt

SEQ ID NO: 16801 - DNA, 19 bp, Homo sapiens
  siRNA target sequence for MSH6 (NM_000179.1,3693-3711).
gcatgcaacagcacattct

SEQ ID NO: 16802 - DNA, 19 bp, Homo sapiens
  siRNA target sequence for MSH6 (NM_000179.1,3717-3735).
gcttgtggatgaattagga

SEQ ID NO: 16803 - DNA, 19 bp, Homo sapiens
  siRNA target sequence for MSH6 (NM_000179.1,3754-3772).
gatgggacggcaatagcaa

SEQ ID NO: 16804 - DNA, 19 bp, Homo sapiens
  siRNA target sequence for MSH6 (NM_000179.1,3759-3777).
gacggcaatagcaaatgca

SEQ ID NO: 16805 - DNA, 19 bp, Homo sapiens
  siRNA target sequence for MSH6 (NM_000179.1,3790-3808).
cttgctgagactataaaat

SEQ ID NO: 16806 - DNA, 19 bp, Homo sapiens
  siRNA target sequence for MSH6 (NM_000179.1,3869-3887).
ctgtgcgcctaggacatat

SEQ ID NO: 16807 - DNA, 19 bp, Homo sapiens
  siRNA target sequence for MSH6 (NM_000179.1,3888-3906).
ggcatgcatggtagaaaat

SEQ ID NO: 16808 - DNA, 19 bp, Homo sapiens
  siRNA target sequence for MSH6 (NM_000179.1,3919-3937).
cccagccaggagactatta

SEQ ID NO: 16809 - DNA, 19 bp, Homo sapiens
  siRNA target sequence for MSH6 (NM_000179.1,3923-3941).
gccaggagactattacgtt

SEQ ID NO: 16810 - DNA, 19 bp, Homo sapiens
  siRNA target sequence for MSH6 (NM_000179.1,3932-3950).
ctattacgttcctctataa

SEQ ID NO: 16811 - DNA, 19 bp, Homo sapiens
  siRNA target sequence for MSH6 (NM_000179.1,3961-3979).
ggagcttgtcctaaaagct

SEQ ID NO: 16812 - DNA, 19 bp, Homo sapiens
  siRNA target sequence for MSH6 (NM_000179.1,4065-4083).
gaatcagtcactacgatta

SEQ ID NO: 16813 - DNA, 19 bp, Homo sapiens
  siRNA target sequence for MSH6 (NM_000179.1,4078-4096).
cgattatttcgggaagttt

SEQ ID NO: 16814 - DNA, 19 bp, Homo sapiens
  siRNA target sequence for MSH6 (NM_000179.1,4127-4145).
ctgaagctgtccataaatt

SEQ ID NO: 16815 - DNA, 19 bp, Homo sapiens
  siRNA target sequence for MSH6 (NM_000179.1,4146-4164).
gctgactttgattaaggaa

SEQ ID NO: 16816 - DNA, 19 bp, Homo sapiens
  siRNA target sequence for N4BP2 (NM_018177.2,245-263).
cttccatgggtgagacaaa

SEQ ID NO: 16817 - DNA, 19 bp, Homo sapiens
  siRNA target sequence for N4BP2 (NM_018177.2,248-266).
ccatgggtgagacaaaagt

SEQ ID NO: 16818 - DNA, 19 bp, Homo sapiens
  siRNA target sequence for N4BP2 (NM_018177.2,252-270).
gggtgagacaaaagttgat

SEQ ID NO: 16819 - DNA, 19 bp, Homo sapiens
  siRNA target sequence for N4BP2 (NM_018177.2,254-272).
gtgagacaaaagttgatca

SEQ ID NO: 16820 - DNA, 19 bp, Homo sapiens
  siRNA target sequence for N4BP2 (NM_018177.2,277-295).
gaactcttcaccagtatct

SEQ ID NO: 16821 - DNA, 19 bp, Homo sapiens
  siRNA target sequence for N4BP2 (NM_018177.2,315-333).
ggatcctgatgtagtgtat

SEQ ID NO: 16822 - DNA, 19 bp, Homo sapiens
  siRNA target sequence for N4BP2 (NM_018177.2,316-334).
gatcctgatgtagtgtatt

SEQ ID NO: 16823 - DNA, 19 bp, Homo sapiens
  siRNA target sequence for N4BP2 (NM_018177.2,320-338).
ctgatgtagtgtatttgat

SEQ ID NO: 16824 - DNA, 19 bp, Homo sapiens
  siRNA target sequence for N4BP2 (NM_018177.2,336-354).
gatgctttctgaatgtgat

SEQ ID NO: 16825 - DNA, 19 bp, Homo sapiens
  siRNA target sequence for N4BP2 (NM_018177.2,371-389).
ctatggattgtctattaga

SEQ ID NO: 16826 - DNA, 19 bp, Homo sapiens
  siRNA target sequence for N4BP2 (NM_018177.2,398-416).
ccactgataccaagataga

SEQ ID NO: 16827 - DNA, 19 bp, Homo sapiens
  siRNA target sequence for N4BP2 (NM_018177.2,399-417).
cactgataccaagatagaa

SEQ ID NO: 16828 - DNA, 19 bp, Homo sapiens
  siRNA target sequence for N4BP2 (NM_018177.2,401-419).
ctgataccaagatagaaga

SEQ ID NO: 16829 - DNA, 19 bp, Homo sapiens
  siRNA target sequence for N4BP2 (NM_018177.2,506-524).
gtgaagattcaaaaatgga

SEQ ID NO: 16830 - DNA, 19 bp, Homo sapiens
  siRNA target sequence for N4BP2 (NM_018177.2,556-574).
ctggattccttaatacaga

SEQ ID NO: 16831 - DNA, 19 bp, Homo sapiens
  siRNA target sequence for N4BP2 (NM_018177.2,563-581).
ccttaatacagaatgcttt

SEQ ID NO: 16832 - DNA, 19 bp, Homo sapiens
  siRNA target sequence for N4BP2 (NM_018177.2,601-619).
cctgatgaccaagtatact

SEQ ID NO: 16833 - DNA, 19 bp, Homo sapiens
  siRNA target sequence for N4BP2 (NM_018177.2,607-625).
gaccaagtatactcatttt

SEQ ID NO: 16834 - DNA, 19 bp, Homo sapiens
  siRNA target sequence for N4BP2 (NM_018177.2,729-747).
cggtgaaaatttagagaat

SEQ ID NO: 16835 - DNA, 19 bp, Homo sapiens
  siRNA target sequence for N4BP2 (NM_018177.2,751-769).
ggttctactttaagtttaa

SEQ ID NO: 16836 - DNA, 19 bp, Homo sapiens
  siRNA target sequence for N4BP2 (NM_018177.2,779-797).
cttcacattcagttttgaa

SEQ ID NO: 16837 - DNA, 19 bp, Homo sapiens
  siRNA target sequence for N4BP2 (NM_018177.2,846-864).
ctacccggaagattctctt

SEQ ID NO: 16838 - DNA, 19 bp, Homo sapiens
  siRNA target sequence for N4BP2 (NM_018177.2,905-923).
gttgtagcagtctcaatca

SEQ ID NO: 16839 - DNA, 19 bp, Homo sapiens
  siRNA target sequence for N4BP2 (NM_018177.2,971-989).
ctgaagctcctgtagattt

SEQ ID NO: 16840 - DNA, 19 bp, Homo sapiens
  siRNA target sequence for N4BP2 (NM_018177.2,998-1016).
gtgaacctcaggcttgttt

SEQ ID NO: 16841 - DNA, 19 bp, Homo sapiens
  siRNA target sequence for N4BP2 (NM_018177.2,1000-1018).
gaacctcaggcttgtttaa

SEQ ID NO: 16842 - DNA, 19 bp, Homo sapiens
  siRNA target sequence for N4BP2 (NM_018177.2,1004-1022).
ctcaggcttgtttaaacct

SEQ ID NO: 16843 - DNA, 19 bp, Homo sapiens
  siRNA target sequence for N4BP2 (NM_018177.2,1067-1085).
ctcgggtctctgatgtgtt

SEQ ID NO: 16844 - DNA, 19 bp, Homo sapiens
  siRNA target sequence for N4BP2 (NM_018177.2,1071-1089).
ggtctctgatgtgtttcta

SEQ ID NO: 16845 - DNA, 19 bp, Homo sapiens
  siRNA target sequence for N4BP2 (NM_018177.2,1090-1108).
ccttccgaagggttcaact

SEQ ID NO: 16846 - DNA, 19 bp, Homo sapiens
  siRNA target sequence for N4BP2 (NM_018177.2,1091-1109).
cttccgaagggttcaactt

SEQ ID NO: 16847 - DNA, 19 bp, Homo sapiens
  siRNA target sequence for N4BP2 (NM_018177.2,1094-1112).
ccgaagggttcaacttcaa

SEQ ID NO: 16848 - DNA, 19 bp, Homo sapiens
  siRNA target sequence for N4BP2 (NM_018177.2,1144-1162).
gggaaggatgtgagttact

SEQ ID NO: 16849 - DNA, 19 bp, Homo sapiens
  siRNA target sequence for N4BP2 (NM_018177.2,1319-1337).
catttccaccctcagttat

SEQ ID NO: 16850 - DNA, 19 bp, Homo sapiens
  siRNA target sequence for N4BP2 (NM_018177.2,1387-1405).
gcttatcaagtacaagaaa

SEQ ID NO: 16851 - DNA, 19 bp, Homo sapiens
  siRNA target sequence for N4BP2 (NM_018177.2,1439-1457).
cttacgttggactagttct

SEQ ID NO: 16852 - DNA, 19 bp, Homo sapiens
  siRNA target sequence for N4BP2 (NM_018177.2,1443-1461).
cgttggactagttcttgtt

SEQ ID NO: 16853 - DNA, 19 bp, Homo sapiens
  siRNA target sequence for N4BP2 (NM_018177.2,1478-1496).
cgggatctggaaaatcttt

SEQ ID NO: 16854 - DNA, 19 bp, Homo sapiens
  siRNA target sequence for N4BP2 (NM_018177.2,1525-1543).
ccaagtggagtcattctta

SEQ ID NO: 16855 - DNA, 19 bp, Homo sapiens
  siRNA target sequence for N4BP2 (NM_018177.2,1571-1589).
gacagtaccagtttgatgt

SEQ ID NO: 16856 - DNA, 19 bp, Homo sapiens
  siRNA target sequence for N4BP2 (NM_018177.2,1617-1635).
gaaccagaatcgtgcaaaa

SEQ ID NO: 16857 - DNA, 19 bp, Homo sapiens
  siRNA target sequence for N4BP2 (NM_018177.2,1647-1665).
gaagaagatatctcctata

SEQ ID NO: 16858 - DNA, 19 bp, Homo sapiens
  siRNA target sequence for N4BP2 (NM_018177.2,1650-1668).
gaagatatctcctataatt

SEQ ID NO: 16859 - DNA, 19 bp, Homo sapiens
  siRNA target sequence for N4BP2 (NM_018177.2,1761-1779).
cacatggtggaagtttaaa

SEQ ID NO: 16860 - DNA, 19 bp, Homo sapiens
  siRNA target sequence for N4BP2 (NM_018177.2,1803-1821).
cattcatggggtaagcaaa

SEQ ID NO: 16861 - DNA, 19 bp, Homo sapiens
  siRNA target sequence for N4BP2 (NM_018177.2,1807-1825).
catggggtaagcaaagaaa

SEQ ID NO: 16862 - DNA, 19 bp, Homo sapiens
  siRNA target sequence for N4BP2 (NM_018177.2,1842-1860).
ggaacattatcaacgtttt

SEQ ID NO: 16863 - DNA, 19 bp, Homo sapiens
  siRNA target sequence for N4BP2 (NM_018177.2,1867-1885).
gtgccaataattatgagtt

SEQ ID NO: 16864 - DNA, 19 bp, Homo sapiens
  siRNA target sequence for N4BP2 (NM_018177.2,1886-1904).
cttcggttccagagaaaat

SEQ ID NO: 16865 - DNA, 19 bp, Homo sapiens
  siRNA target sequence for N4BP2 (NM_018177.2,1953-1971).
cccaagagacgatgaagat

SEQ ID NO: 16866 - DNA, 19 bp, Homo sapiens
  siRNA target sequence for N4BP2 (NM_018177.2,2040-2058).
gaatcttgatgtaaccaaa

SEQ ID NO: 16867 - DNA, 19 bp, Homo sapiens
  siRNA target sequence for N4BP2 (NM_018177.2,2072-2090).
ctgagaatgttgcatatct

SEQ ID NO: 16868 - DNA, 19 bp, Homo sapiens
  siRNA target sequence for N4BP2 (NM_018177.2,2074-2092).
gagaatgttgcatatctct

SEQ ID NO: 16869 - DNA, 19 bp, Homo sapiens
  siRNA target sequence for N4BP2 (NM_018177.2,2093-2111).
ctaatgcagatttaaacaa

SEQ ID NO: 16870 - DNA, 19 bp, Homo sapiens
  siRNA target sequence for N4BP2 (NM_018177.2,2166-2184).
ggaaactccacacatgtat

SEQ ID NO: 16871 - DNA, 19 bp, Homo sapiens
  siRNA target sequence for N4BP2 (NM_018177.2,2250-2268).
ggctgtaaaagggtatagt

SEQ ID NO: 16872 - DNA, 19 bp, Homo sapiens
  siRNA target sequence for N4BP2 (NM_018177.2,2251-2269).
gctgtaaaagggtatagta

SEQ ID NO: 16873 - DNA, 19 bp, Homo sapiens
  siRNA target sequence for N4BP2 (NM_018177.2,2273-2291).
ctgacacagatagttctat

SEQ ID NO: 16874 - DNA, 19 bp, Homo sapiens
  siRNA target sequence for N4BP2 (NM_018177.2,2338-2356).
gactgtgatcttgcaaata

SEQ ID NO: 16875 - DNA, 19 bp, Homo sapiens
  siRNA target sequence for N4BP2 (NM_018177.2,2340-2358).
ctgtgatcttgcaaatagt

SEQ ID NO: 16876 - DNA, 19 bp, Homo sapiens
  siRNA target sequence for N4BP2 (NM_018177.2,2357-2375).
gtggaccacttcaaaatga

SEQ ID NO: 16877 - DNA, 19 bp, Homo sapiens
  siRNA target sequence for N4BP2 (NM_018177.2,2470-2488).
ccaagacatgagctatcaa

SEQ ID NO: 16878 - DNA, 19 bp, Homo sapiens
  siRNA target sequence for N4BP2 (NM_018177.2,2474-2492).
gacatgagctatcaaattt

SEQ ID NO: 16879 - DNA, 19 bp, Homo sapiens
  siRNA target sequence for N4BP2 (NM_018177.2,2500-2518).
gactggccagttgataaga

SEQ ID NO: 16880 - DNA, 19 bp, Homo sapiens
  siRNA target sequence for N4BP2 (NM_018177.2,2502-2520).
ctggccagttgataagact

SEQ ID NO: 16881 - DNA, 19 bp, Homo sapiens
  siRNA target sequence for N4BP2 (NM_018177.2,2504-2522).
ggccagttgataagactat

SEQ ID NO: 16882 - DNA, 19 bp, Homo sapiens
  siRNA target sequence for N4BP2 (NM_018177.2,2505-2523).
gccagttgataagactatt

SEQ ID NO: 16883 - DNA, 19 bp, Homo sapiens
  siRNA target sequence for N4BP2 (NM_018177.2,2524-2542).
ggtcagaggacaaaaagga

SEQ ID NO: 16884 - DNA, 19 bp, Homo sapiens
  siRNA target sequence for N4BP2 (NM_018177.2,2567-2585).
ccgtacaaagcgacaaaaa

SEQ ID NO: 16885 - DNA, 19 bp, Homo sapiens
  siRNA target sequence for N4BP2 (NM_018177.2,2569-2587).
gtacaaagcgacaaaaagt

SEQ ID NO: 16886 - DNA, 19 bp, Homo sapiens
  siRNA target sequence for N4BP2 (NM_018177.2,2653-2671).
cgaggatctccacatgaaa

SEQ ID NO: 16887 - DNA, 19 bp, Homo sapiens
  siRNA target sequence for N4BP2 (NM_018177.2,2711-2729).
cagagccactcaatagcta

SEQ ID NO: 16888 - DNA, 19 bp, Homo sapiens
  siRNA target sequence for N4BP2 (NM_018177.2,2715-2733).
gccactcaatagctataaa

SEQ ID NO: 16889 - DNA, 19 bp, Homo sapiens
  siRNA target sequence for N4BP2 (NM_018177.2,2716-2734).
ccactcaatagctataaat

SEQ ID NO: 16890 - DNA, 19 bp, Homo sapiens
  siRNA target sequence for N4BP2 (NM_018177.2,2721-2739).
caatagctataaatatgat

SEQ ID NO: 16891 - DNA, 19 bp, Homo sapiens
  siRNA target sequence for N4BP2 (NM_018177.2,2726-2744).
gctataaatatgatgctta

SEQ ID NO: 16892 - DNA, 19 bp, Homo sapiens
  siRNA target sequence for N4BP2 (NM_018177.2,2778-2796).
gggtgactggccttcatct

SEQ ID NO: 16893 - DNA, 19 bp, Homo sapiens
  siRNA target sequence for N4BP2 (NM_018177.2,2787-2805).
gccttcatctgattcttta

SEQ ID NO: 16894 - DNA, 19 bp, Homo sapiens
  siRNA target sequence for N4BP2 (NM_018177.2,2832-2850).
gccaaagactggtttaagt

SEQ ID NO: 16895 - DNA, 19 bp, Homo sapiens
  siRNA target sequence for N4BP2 (NM_018177.2,2924-2942).
ggggcacaagctctcaaaa

SEQ ID NO: 16896 - DNA, 19 bp, Homo sapiens
  siRNA target sequence for N4BP2 (NM_018177.2,2961-2979).
ctccaatctaggaagttct

SEQ ID NO: 16897 - DNA, 19 bp, Homo sapiens
  siRNA target sequence for N4BP2 (NM_018177.2,3009-3027).
gagtcagacttgtctaagt

SEQ ID NO: 16898 - DNA, 19 bp, Homo sapiens
  siRNA target sequence for N4BP2 (NM_018177.2,3013-3031).
cagacttgtctaagtaaaa

SEQ ID NO: 16899 - DNA, 19 bp, Homo sapiens
  siRNA target sequence for N4BP2 (NM_018177.2,3048-3066).
cacatcgttgcctcttact

SEQ ID NO: 16900 - DNA, 19 bp, Homo sapiens
  siRNA target sequence for N4BP2 (NM_018177.2,3057-3075).
gcctcttacttttaccaat

SEQ ID NO: 16901 - DNA, 19 bp, Homo sapiens
  siRNA target sequence for N4BP2 (NM_018177.2,3072-3090).
caatagtgcaccaactgtt

SEQ ID NO: 16902 - DNA, 19 bp, Homo sapiens
  siRNA target sequence for N4BP2 (NM_018177.2,3262-3280).
ggaagattagatggattta

SEQ ID NO: 16903 - DNA, 19 bp, Homo sapiens
  siRNA target sequence for N4BP2 (NM_018177.2,3274-3292).
ggatttaagccgaaagttt

SEQ ID NO: 16904 - DNA, 19 bp, Homo sapiens
  siRNA target sequence for N4BP2 (NM_018177.2,3275-3293).
gatttaagccgaaagtttt

SEQ ID NO: 16905 - DNA, 19 bp, Homo sapiens
  siRNA target sequence for N4BP2 (NM_018177.2,3282-3300).
gccgaaagttttcaatatt

SEQ ID NO: 16906 - DNA, 19 bp, Homo sapiens
  siRNA target sequence for N4BP2 (NM_018177.2,3283-3301).
ccgaaagttttcaatatta

SEQ ID NO: 16907 - DNA, 19 bp, Homo sapiens
  siRNA target sequence for N4BP2 (NM_018177.2,3284-3302).
cgaaagttttcaatattaa

SEQ ID NO: 16908 - DNA, 19 bp, Homo sapiens
  siRNA target sequence for N4BP2 (NM_018177.2,3326-3344).
caattccatatagagtaat

SEQ ID NO: 16909 - DNA, 19 bp, Homo sapiens
  siRNA target sequence for N4BP2 (NM_018177.2,3332-3350).
catatagagtaatgtatga

SEQ ID NO: 16910 - DNA, 19 bp, Homo sapiens
  siRNA target sequence for N4BP2 (NM_018177.2,3359-3377).
cgtttgttgaagaaagtga

SEQ ID NO: 16911 - DNA, 19 bp, Homo sapiens
  siRNA target sequence for N4BP2 (NM_018177.2,3379-3397).
cttaccagtgcagatgaat

SEQ ID NO: 16912 - DNA, 19 bp, Homo sapiens
  siRNA target sequence for N4BP2 (NM_018177.2,3445-3463).
gaagccctgaaagacttat

SEQ ID NO: 16913 - DNA, 19 bp, Homo sapiens
  siRNA target sequence for N4BP2 (NM_018177.2,3449-3467).
ccctgaaagacttatatga

SEQ ID NO: 16914 - DNA, 19 bp, Homo sapiens
  siRNA target sequence for N4BP2 (NM_018177.2,3510-3528).
ggattctgaaactaagtta

SEQ ID NO: 16915 - DNA, 19 bp, Homo sapiens
  siRNA target sequence for N4BP2 (NM_018177.2,3541-3559).
gagtttgagaatttccaaa

SEQ ID NO: 16916 - DNA, 19 bp, Homo sapiens
  siRNA target sequence for N4BP2 (NM_018177.2,3593-3611).
ctctggggttgaatttgaa

SEQ ID NO: 16917 - DNA, 19 bp, Homo sapiens
  siRNA target sequence for N4BP2 (NM_018177.2,3672-3690).
ccatgggattggtattagt

SEQ ID NO: 16918 - DNA, 19 bp, Homo sapiens
  siRNA target sequence for N4BP2 (NM_018177.2,3673-3691).
catgggattggtattagta

SEQ ID NO: 16919 - DNA, 19 bp, Homo sapiens
  siRNA target sequence for N4BP2 (NM_018177.2,3764-3782).
ctgaaaaccatgaatcgat

SEQ ID NO: 16920 - DNA, 19 bp, Homo sapiens
  siRNA target sequence for N4BP2 (NM_018177.2,3772-3790).
catgaatcgatgacaagta

SEQ ID NO: 16921 - DNA, 19 bp, Homo sapiens
  siRNA target sequence for N4BP2 (NM_018177.2,3775-3793).
gaatcgatgacaagtatat

SEQ ID NO: 16922 - DNA, 19 bp, Homo sapiens
  siRNA target sequence for N4BP2 (NM_018177.2,3800-3818).
gtgctgctgtgggtctaaa

SEQ ID NO: 16923 - DNA, 19 bp, Homo sapiens
  siRNA target sequence for N4BP2 (NM_018177.2,3803-3821).
ctgctgtgggtctaaagaa

SEQ ID NO: 16924 - DNA, 19 bp, Homo sapiens
  siRNA target sequence for N4BP2 (NM_018177.2,3808-3826).
gtgggtctaaagaataata

SEQ ID NO: 16925 - DNA, 19 bp, Homo sapiens
  siRNA target sequence for N4BP2 (NM_018177.2,3810-3828).
gggtctaaagaataataat

SEQ ID NO: 16926 - DNA, 19 bp, Homo sapiens
  siRNA target sequence for N4BP2 (NM_018177.2,3847-3865).
caggaagaacttttatata

SEQ ID NO: 16927 - DNA, 19 bp, Homo sapiens
  siRNA target sequence for N4BP2 (NM_018177.2,3850-3868).
gaagaacttttatatagca

SEQ ID NO: 16928 - DNA, 19 bp, Homo sapiens
  siRNA target sequence for N4BP2 (NM_018177.2,3898-3916).
gctactactcctaaagata

SEQ ID NO: 16929 - DNA, 19 bp, Homo sapiens
  siRNA target sequence for N4BP2 (NM_018177.2,4007-4025).
ctagtacttcaaatcttga

SEQ ID NO: 16930 - DNA, 19 bp, Homo sapiens
  siRNA target sequence for N4BP2 (NM_018177.2,4156-4174).
ctaatggcaggaagtagtt

SEQ ID NO: 16931 - DNA, 19 bp, Homo sapiens
  siRNA target sequence for N4BP2 (NM_018177.2,4161-4179).
ggcaggaagtagtttatca

SEQ ID NO: 16932 - DNA, 19 bp, Homo sapiens
  siRNA target sequence for N4BP2 (NM_018177.2,4198-4216).
gataaaaccgagatattga

SEQ ID NO: 16933 - DNA, 19 bp, Homo sapiens
  siRNA target sequence for N4BP2 (NM_018177.2,4226-4244).
cagcgatggccaaatctct

SEQ ID NO: 16934 - DNA, 19 bp, Homo sapiens
  siRNA target sequence for N4BP2 (NM_018177.2,4331-4349).
ggtctctaacagttgaaga

SEQ ID NO: 16935 - DNA, 19 bp, Homo sapiens
  siRNA target sequence for N4BP2 (NM_018177.2,4332-4350).
gtctctaacagttgaagat

SEQ ID NO: 16936 - DNA, 19 bp, Homo sapiens
  siRNA target sequence for N4BP2 (NM_018177.2,4352-4370).
gtgtggttcatatagatct

SEQ ID NO: 16937 - DNA, 19 bp, Homo sapiens
  siRNA target sequence for N4BP2 (NM_018177.2,4356-4374).
ggttcatatagatctgaat

SEQ ID NO: 16938 - DNA, 19 bp, Homo sapiens
  siRNA target sequence for N4BP2 (NM_018177.2,4438-4456).
gtgtcttgtggcaagttta

SEQ ID NO: 16939 - DNA, 19 bp, Homo sapiens
  siRNA target sequence for N4BP2 (NM_018177.2,4564-4582).
ctacctttattggatcatt

SEQ ID NO: 16940 - DNA, 19 bp, Homo sapiens
  siRNA target sequence for N4BP2 (NM_018177.2,4664-4682).
gggagacccttatgtttga

SEQ ID NO: 16941 - DNA, 19 bp, Homo sapiens
  siRNA target sequence for N4BP2 (NM_018177.2,4665-4683).
ggagacccttatgtttgaa

SEQ ID NO: 16942 - DNA, 19 bp, Homo sapiens
  siRNA target sequence for N4BP2 (NM_018177.2,4666-4684).
gagacccttatgtttgaaa

SEQ ID NO: 16943 - DNA, 19 bp, Homo sapiens
  siRNA target sequence for N4BP2 (NM_018177.2,4691-4709).
gtgccactaaactaaagga

SEQ ID NO: 16944 - DNA, 19 bp, Homo sapiens
  siRNA target sequence for N4BP2 (NM_018177.2,4716-4734).
gctctttaagatatttcca

SEQ ID NO: 16945 - DNA, 19 bp, Homo sapiens
  siRNA target sequence for N4BP2 (NM_018177.2,4732-4750).
ccagccattaaccaaaatt

SEQ ID NO: 16946 - DNA, 19 bp, Homo sapiens
  siRNA target sequence for N4BP2 (NM_018177.2,4767-4785).
caaggaccacaactattca

SEQ ID NO: 16947 - DNA, 19 bp, Homo sapiens
  siRNA target sequence for N4BP2 (NM_018177.2,4770-4788).
ggaccacaactattcatta

SEQ ID NO: 16948 - DNA, 19 bp, Homo sapiens
  siRNA target sequence for N4BP2 (NM_018177.2,4773-4791).
ccacaactattcattagaa

SEQ ID NO: 16949 - DNA, 19 bp, Homo sapiens
  siRNA target sequence for N4BP2 (NM_018177.2,4894-4912).
ggccagaagtctaaagaga

SEQ ID NO: 16950 - DNA, 19 bp, Homo sapiens
  siRNA target sequence for N4BP2 (NM_018177.2,4946-4964).
caccaagtgaactgtcttt

SEQ ID NO: 16951 - DNA, 19 bp, Homo sapiens
  siRNA target sequence for N4BP2 (NM_018177.2,4971-4989).
ctttgagtacccagactat

SEQ ID NO: 16952 - DNA, 19 bp, Homo sapiens
  siRNA target sequence for N4BP2 (NM_018177.2,5150-5168).
ctgccatagagatctttga

SEQ ID NO: 16953 - DNA, 19 bp, Homo sapiens
  siRNA target sequence for N4BP2 (NM_018177.2,5158-5176).
gagatctttgagaaagtca

SEQ ID NO: 16954 - DNA, 19 bp, Homo sapiens
  siRNA target sequence for N4BP2 (NM_018177.2,5233-5251).
gctctagaacatttgatga

SEQ ID NO: 16955 - DNA, 19 bp, Homo sapiens
  siRNA target sequence for N4BP2 (NM_018177.2,5239-5257).
gaacatttgatgagagttt

SEQ ID NO: 16956 - DNA, 19 bp, Homo sapiens
  siRNA target sequence for N4BP2 (NM_018177.2,5416-5434).
ccagggtgcttgaaagtca

SEQ ID NO: 16957 - DNA, 19 bp, Homo sapiens
  siRNA target sequence for N4BP2 (NM_018177.2,5417-5435).
cagggtgcttgaaagtcat

SEQ ID NO: 16958 - DNA, 19 bp, Homo sapiens
  siRNA target sequence for N4BP2 (NM_018177.2,5423-5441).
gcttgaaagtcatgctaaa

SEQ ID NO: 16959 - DNA, 19 bp, Homo sapiens
  siRNA target sequence for NBS1 (NM_002485.3,179-197).
gtacgttgttggaaggaaa

SEQ ID NO: 16960 - DNA, 19 bp, Homo sapiens
  siRNA target sequence for NBS1 (NM_002485.3,227-245).
gtcgatcagccgaaatcat

SEQ ID NO: 16961 - DNA, 19 bp, Homo sapiens
  siRNA target sequence for NBS1 (NM_002485.3,237-255).
cgaaatcatgctgtgttaa

SEQ ID NO: 16962 - DNA, 19 bp, Homo sapiens
  siRNA target sequence for NBS1 (NM_002485.3,247-265).
ctgtgttaactgctaactt

SEQ ID NO: 16963 - DNA, 19 bp, Homo sapiens
  siRNA target sequence for NBS1 (NM_002485.3,259-277).
ctaacttttctgtaaccaa

SEQ ID NO: 16964 - DNA, 19 bp, Homo sapiens
  siRNA target sequence for NBS1 (NM_002485.3,270-288).
gtaaccaacctgagtcaaa

SEQ ID NO: 16965 - DNA, 19 bp, Homo sapiens
  siRNA target sequence for NBS1 (NM_002485.3,274-292).
ccaacctgagtcaaacaga

SEQ ID NO: 16966 - DNA, 19 bp, Homo sapiens
  siRNA target sequence for NBS1 (NM_002485.3,318-336).
gataattctaagtatggta

SEQ ID NO: 16967 - DNA, 19 bp, Homo sapiens
  siRNA target sequence for NBS1 (NM_002485.3,329-347).
gtatggtacctttgttaat

SEQ ID NO: 16968 - DNA, 19 bp, Homo sapiens
  siRNA target sequence for NBS1 (NM_002485.3,366-384).
ggcttttcccgaactttga

SEQ ID NO: 16969 - DNA, 19 bp, Homo sapiens
  siRNA target sequence for NBS1 (NM_002485.3,383-401).
gaagtcgggggatggtatt

SEQ ID NO: 16970 - DNA, 19 bp, Homo sapiens
  siRNA target sequence for NBS1 (NM_002485.3,386-404).
gtcgggggatggtattact

SEQ ID NO: 16971 - DNA, 19 bp, Homo sapiens
  siRNA target sequence for NBS1 (NM_002485.3,392-410).
ggatggtattacttttgga

SEQ ID NO: 16972 - DNA, 19 bp, Homo sapiens
  siRNA target sequence for NBS1 (NM_002485.3,418-436).
gaagtaaattcagaataga

SEQ ID NO: 16973 - DNA, 19 bp, Homo sapiens
  siRNA target sequence for NBS1 (NM_002485.3,421-439).
gtaaattcagaatagagta

SEQ ID NO: 16974 - DNA, 19 bp, Homo sapiens
  siRNA target sequence for NBS1 (NM_002485.3,517-535).
gaggatttactgtaaacaa

SEQ ID NO: 16975 - DNA, 19 bp, Homo sapiens
  siRNA target sequence for NBS1 (NM_002485.3,563-581).
catggtatcagtgaaagtt

SEQ ID NO: 16976 - DNA, 19 bp, Homo sapiens
  siRNA target sequence for NBS1 (NM_002485.3,573-591).
gtgaaagttaccattaaaa

SEQ ID NO: 16977 - DNA, 19 bp, Homo sapiens
  siRNA target sequence for NBS1 (NM_002485.3,605-623).
catttgtggacgtccaatt

SEQ ID NO: 16978 - DNA, 19 bp, Homo sapiens
  siRNA target sequence for NBS1 (NM_002485.3,610-628).
gtggacgtccaattgtaaa

SEQ ID NO: 16979 - DNA, 19 bp, Homo sapiens
  siRNA target sequence for NBS1 (NM_002485.3,675-693).
cagcctccacaaattgaaa

SEQ ID NO: 16980 - DNA, 19 bp, Homo sapiens
  siRNA target sequence for NBS1 (NM_002485.3,706-724).
ctcttgatgaaccatctat

SEQ ID NO: 16981 - DNA, 19 bp, Homo sapiens
  siRNA target sequence for NBS1 (NM_002485.3,849-867).
ggggaagctaggttgataa

SEQ ID NO: 16982 - DNA, 19 bp, Homo sapiens
  siRNA target sequence for NBS1 (NM_002485.3,859-877).
ggttgataacagaagagaa

SEQ ID NO: 16983 - DNA, 19 bp, Homo sapiens
  siRNA target sequence for NBS1 (NM_002485.3,907-925).
cgggaacgtgtgttgttga

SEQ ID NO: 16984 - DNA, 19 bp, Homo sapiens
  siRNA target sequence for NBS1 (NM_002485.3,908-926).
gggaacgtgtgttgttgat

SEQ ID NO: 16985 - DNA, 19 bp, Homo sapiens
  siRNA target sequence for NBS1 (NM_002485.3,909-927).
ggaacgtgtgttgttgata

SEQ ID NO: 16986 - DNA, 19 bp, Homo sapiens
  siRNA target sequence for NBS1 (NM_002485.3,976-994).
ggattcagtcaataatgga

SEQ ID NO: 16987 - DNA, 19 bp, Homo sapiens
  siRNA target sequence for NBS1 (NM_002485.3,977-995).
gattcagtcaataatggat

SEQ ID NO: 16988 - DNA, 19 bp, Homo sapiens
  siRNA target sequence for NBS1 (NM_002485.3,1007-1025).
gcaaggtcttagacctatt

SEQ ID NO: 16989 - DNA, 19 bp, Homo sapiens
  siRNA target sequence for NBS1 (NM_002485.3,1047-1065).
gcggtgattttcatgacta

SEQ ID NO: 16990 - DNA, 19 bp, Homo sapiens
  siRNA target sequence for NBS1 (NM_002485.3,1092-1110).
catcccagtacaggattaa

SEQ ID NO: 16991 - DNA, 19 bp, Homo sapiens
  siRNA target sequence for NBS1 (NM_002485.3,1143-1161).
ggcgtgtcagttgatgaaa

SEQ ID NO: 16992 - DNA, 19 bp, Homo sapiens
  siRNA target sequence for NBS1 (NM_002485.3,1144-1162).
gcgtgtcagttgatgaaaa

SEQ ID NO: 16993 - DNA, 19 bp, Homo sapiens
  siRNA target sequence for NBS1 (NM_002485.3,1145-1163).
cgtgtcagttgatgaaaaa

SEQ ID NO: 16994 - DNA, 19 bp, Homo sapiens
  siRNA target sequence for NBS1 (NM_002485.3,1148-1166).
gtcagttgatgaaaaacta

SEQ ID NO: 16995 - DNA, 19 bp, Homo sapiens
  siRNA target sequence for NBS1 (NM_002485.3,1179-1197).
ccagtgaacactacaacat

SEQ ID NO: 16996 - DNA, 19 bp, Homo sapiens
  siRNA target sequence for NBS1 (NM_002485.3,1184-1202).
gaacactacaacatacgta

SEQ ID NO: 16997 - DNA, 19 bp, Homo sapiens
  siRNA target sequence for NBS1 (NM_002485.3,1199-1217).
cgtagctgacacagaatca

SEQ ID NO: 16998 - DNA, 19 bp, Homo sapiens
  siRNA target sequence for NBS1 (NM_002485.3,1224-1242).
gcagatacatgggatttga

SEQ ID NO: 16999 - DNA, 19 bp, Homo sapiens
  siRNA target sequence for NBS1 (NM_002485.3,1302-1320).
caagatgcacccactgtaa

SEQ ID NO: 17000 - DNA, 19 bp, Homo sapiens
  siRNA target sequence for NBS1 (NM_002485.3,1317-1335).
gtaaaggagtcctgcaaaa

SEQ ID NO: 17001 - DNA, 19 bp, Homo sapiens
  siRNA target sequence for NBS1 (NM_002485.3,1354-1372).
gtatggtatcaaatacttt

SEQ ID NO: 17002 - DNA, 19 bp, Homo sapiens
  siRNA target sequence for NBS1 (NM_002485.3,1379-1397).
gatgagaatcccaaactat

SEQ ID NO: 17003 - DNA, 19 bp, Homo sapiens
  siRNA target sequence for NBS1 (NM_002485.3,1398-1416).
cagctttcaccaactaaat

SEQ ID NO: 17004 - DNA, 19 bp, Homo sapiens
  siRNA target sequence for NBS1 (NM_002485.3,1484-1502).
ctttcagccgtctaccaaa

SEQ ID NO: 17005 - DNA, 19 bp, Homo sapiens
  siRNA target sequence for NBS1 (NM_002485.3,1543-1561).
gcaaatcagcaagaataga

SEQ ID NO: 17006 - DNA, 19 bp, Homo sapiens
  siRNA target sequence for NBS1 (NM_002485.3,1560-1578).
gaaacgtcttgttctcttt

SEQ ID NO: 17007 - DNA, 19 bp, Homo sapiens
  siRNA target sequence for NBS1 (NM_002485.3,1564-1582).
cgtcttgttctcttttaga

SEQ ID NO: 17008 - DNA, 19 bp, Homo sapiens
  siRNA target sequence for NBS1 (NM_002485.3,1565-1583).
gtcttgttctcttttagaa

SEQ ID NO: 17009 - DNA, 19 bp, Homo sapiens
  siRNA target sequence for NBS1 (NM_002485.3,1646-1664).
gcctgtggacacaaactca

SEQ ID NO: 17010 - DNA, 19 bp, Homo sapiens
  siRNA target sequence for NBS1 (NM_002485.3,1794-1812).
gtattggaacagttattca

SEQ ID NO: 17011 - DNA, 19 bp, Homo sapiens
  siRNA target sequence for NBS1 (NM_002485.3,1814-1832).
ggacacaaaaccagagtta

SEQ ID NO: 17012 - DNA, 19 bp, Homo sapiens
  siRNA target sequence for NBS1 (NM_002485.3,1825-1843).
cagagttagaaattgatgt

SEQ ID NO: 17013 - DNA, 19 bp, Homo sapiens
  siRNA target sequence for NBS1 (NM_002485.3,1862-1880).
ggaagatgtcaatgttaga

SEQ ID NO: 17014 - DNA, 19 bp, Homo sapiens
  siRNA target sequence for NBS1 (NM_002485.3,1863-1881).
gaagatgtcaatgttagaa

SEQ ID NO: 17015 - DNA, 19 bp, Homo sapiens
  siRNA target sequence for NBS1 (NM_002485.3,1886-1904).
gccaaggatggatatagaa

SEQ ID NO: 17016 - DNA, 19 bp, Homo sapiens
  siRNA target sequence for NBS1 (NM_002485.3,1932-1950).
gtaccagaaagtagcaaaa

SEQ ID NO: 17017 - DNA, 19 bp, Homo sapiens
  siRNA target sequence for NBS1 (NM_002485.3,1972-1990).
ggaagaaacgtgaactcaa

SEQ ID NO: 17018 - DNA, 19 bp, Homo sapiens
  siRNA target sequence for NBS1 (NM_002485.3,2001-2019).
ctatggtcagctaaagaaa

SEQ ID NO: 17019 - DNA, 19 bp, Homo sapiens
  siRNA target sequence for NBS1 (NM_002485.3,2097-2115).
gtgattaaaaactctactt

SEQ ID NO: 17020 - DNA, 19 bp, Homo sapiens
  siRNA target sequence for NBS1 (NM_002485.3,2128-2146).
ctggcataaatgatgatta

SEQ ID NO: 17021 - DNA, 19 bp, Homo sapiens
  siRNA target sequence for NBS1 (NM_002485.3,2139-2157).
gatgattatggtcaactaa

SEQ ID NO: 17022 - DNA, 19 bp, Homo sapiens
  siRNA target sequence for NBS1 (NM_002485.3,2142-2160).
gattatggtcaactaaaaa

SEQ ID NO: 17023 - DNA, 19 bp, Homo sapiens
  siRNA target sequence for NBS1 (NM_002485.3,2151-2169).
caactaaaaaatttcaaga

SEQ ID NO: 17024 - DNA, 19 bp, Homo sapiens
  siRNA target sequence for NBS1 (NM_002485.3,2239-2257).
ctcatcatgctcgaaagaa

SEQ ID NO: 17025 - DNA, 19 bp, Homo sapiens
  siRNA target sequence for NBS1 (NM_002485.3,2241-2259).
catcatgctcgaaagaata

SEQ ID NO: 17026 - DNA, 19 bp, Homo sapiens
  siRNA target sequence for OGG1 (NM_002542.4,1296-1314).
catggggcatcgtactcta

SEQ ID NO: 17027 - DNA, 19 bp, Homo sapiens
  siRNA target sequence for OGG1 (NM_002542.4,1436-1454).
gtgtactagcggatcaagt

SEQ ID NO: 17028 - DNA, 19 bp, Homo sapiens
  siRNA target sequence for OGG1 (NM_002542.4,1438-1456).
gtactagcggatcaagtat

SEQ ID NO: 17029 - DNA, 19 bp, Homo sapiens
  siRNA target sequence for OGG1 (NM_002542.4,1666-1684).
cgacaagaccccatcgaat

SEQ ID NO: 17030 - DNA, 19 bp, Homo sapiens
  siRNA target sequence for OGG1 (NM_002542.4,1675-1693).
cccatcgaatgccttttct

SEQ ID NO: 17031 - DNA, 19 bp, Homo sapiens
  siRNA target sequence for OGG1 (NM_002542.4,1677-1695).
catcgaatgccttttctct

SEQ ID NO: 17032 - DNA, 19 bp, Homo sapiens
  siRNA target sequence for OGG1 (NM_002542.4,1772-1790).
ggctcatccagcttgatga

SEQ ID NO: 17033 - DNA, 19 bp, Homo sapiens
  siRNA target sequence for OGG1 (NM_002542.4,1773-1791).
gctcatccagcttgatgat

SEQ ID NO: 17034 - DNA, 19 bp, Homo sapiens
  siRNA target sequence for OGG1 (NM_002542.4,1947-1965).
gctacgagagtcctcatat

SEQ ID NO: 17035 - DNA, 19 bp, Homo sapiens
  siRNA target sequence for OGG1 (NM_002542.4,2030-2048).
gcctgatggccctagacaa

SEQ ID NO: 17036 - DNA, 19 bp, Homo sapiens
  siRNA target sequence for OGG1 (NM_002542.4,2062-2080).
cccgtggatgtccatatgt

SEQ ID NO: 17037 - DNA, 19 bp, Homo sapiens
  siRNA target sequence for OGG1 (NM_002542.4,2271-2289).
gcgcagaaagggttccaaa

SEQ ID NO: 17038 - DNA, 19 bp, Homo sapiens
  siRNA target sequence for OGG1 (NM_016820.2,2326-2344).
ggcaccctggacaaagaaa

SEQ ID NO: 17039 - DNA, 19 bp, Homo sapiens
  siRNA target sequence for OGG1 (NM_016820.2,2452-2470).
caaatcaagcagtcagttt

SEQ ID NO: 17040 - DNA, 19 bp, Homo sapiens
  siRNA target sequence for OGG1 (NM_016821.1,1264-1282).
ccttggcaatgcatttgat

SEQ ID NO: 17041 - DNA, 19 bp, Homo sapiens
  siRNA target sequence for OGG1 (NM_016821.1,1345-1363).
cgggagaggggattcacaa

SEQ ID NO: 17042 - DNA, 19 bp, Homo sapiens
  siRNA target sequence for OGG1 (NM_016821.1,1354-1372).
ggattcacaaggtgaagaa

SEQ ID NO: 17043 - DNA, 19 bp, Homo sapiens
  siRNA target sequence for OGG1 (NM_016821.1,1507-1525).
ggcctggccagtcaaagta

SEQ ID NO: 17044 - DNA, 19 bp, Homo sapiens
  siRNA target sequence for OGG1 (NM_016821.1,1509-1527).
cctggccagtcaaagtagt

SEQ ID NO: 17045 - DNA, 19 bp, Homo sapiens
  siRNA target sequence for OGG1 (NM_016821.1,1542-1560).
cagtaattggtcatgtgat

SEQ ID NO: 17046 - DNA, 19 bp, Homo sapiens
  siRNA target sequence for OGG1 (NM_016828.1,1275-1293).
gtcatcaccacttttatga

SEQ ID NO: 17047 - DNA, 19 bp, Homo sapiens
  siRNA target sequence for OGG1 (NM_016828.1,1306-1324).
cccataggctggatcagat

SEQ ID NO: 17048 - DNA, 19 bp, Homo sapiens
  siRNA target sequence for OGG1 (NM_016828.1,1343-1361).
gacttcttcctctagactt

SEQ ID NO: 17049 - DNA, 19 bp, Homo sapiens
  siRNA target sequence for PMS2L9 (NM_005395.1,425-443).
ctgtggggtatgattatca

SEQ ID NO: 17050 - DNA, 19 bp, Homo sapiens
  siRNA target sequence for PNKP (NM_007254.2,308-326).
ggagttaacccctcaacta

SEQ ID NO: 17051 - DNA, 19 bp, Homo sapiens
  siRNA target sequence for PNKP (NM_007254.2,685-703).
gatcttgtacccagagatt

SEQ ID NO: 17052 - DNA, 19 bp, Homo sapiens
  siRNA target sequence for PNKP (NM_007254.2,735-753).
gctacaagctggtgatctt

SEQ ID NO: 17053 - DNA, 19 bp, Homo sapiens
  siRNA target sequence for PNKP (NM_007254.2,929-947).
gacggcacgcccatatcca

SEQ ID NO: 17054 - DNA, 19 bp, Homo sapiens
  siRNA target sequence for PNKP (NM_007254.2,1114-1132).
cgagctcccagcctttgat

SEQ ID NO: 17055 - DNA, 19 bp, Homo sapiens
  siRNA target sequence for PNKP (NM_007254.2,1361-1379).
gtcgccatcgacaacacaa

SEQ ID NO: 17056 - DNA, 19 bp, Homo sapiens
  siRNA target sequence for POLH (NM_006502.1,300-318).
ggagcagcggcaaaatcct

SEQ ID NO: 17057 - DNA, 19 bp, Homo sapiens
  siRNA target sequence for POLH (NM_006502.1,307-325).
cggcaaaatcctcatttga

SEQ ID NO: 17058 - DNA, 19 bp, Homo sapiens
  siRNA target sequence for POLH (NM_006502.1,366-384).
gggtggtggaataattgca

SEQ ID NO: 17059 - DNA, 19 bp, Homo sapiens
  siRNA target sequence for POLH (NM_006502.1,409-427).
ggagtcactagaagtatgt

SEQ ID NO: 17060 - DNA, 19 bp, Homo sapiens
  siRNA target sequence for POLH (NM_006502.1,444-462).
gaagttatgtccagatctt

SEQ ID NO: 17061 - DNA, 19 bp, Homo sapiens
  siRNA target sequence for POLH (NM_006502.1,481-499).
gagtcccgtgggaaagcta

SEQ ID NO: 17062 - DNA, 19 bp, Homo sapiens
  siRNA target sequence for POLH (NM_006502.1,644-662).
ctatctcggcagacttgtt

SEQ ID NO: 17063 - DNA, 19 bp, Homo sapiens
  siRNA target sequence for POLH (NM_006502.1,663-681).
gccaagcacttacattgaa

SEQ ID NO: 17064 - DNA, 19 bp, Homo sapiens
  siRNA target sequence for POLH (NM_006502.1,735-753).
gcgaaaacaaggcttattt

SEQ ID NO: 17065 - DNA, 19 bp, Homo sapiens
  siRNA target sequence for POLH (NM_006502.1,762-780).
cgattctcttcagattgat

SEQ ID NO: 17066 - DNA, 19 bp, Homo sapiens
  siRNA target sequence for POLH (NM_006502.1,763-781).
gattctcttcagattgata

SEQ ID NO: 17067 - DNA, 19 bp, Homo sapiens
  siRNA target sequence for POLH (NM_006502.1,807-825).
caccgtgggagcagtgatt

SEQ ID NO: 17068 - DNA, 19 bp, Homo sapiens
  siRNA target sequence for POLH (NM_006502.1,809-827).
ccgtgggagcagtgattgt

SEQ ID NO: 17069 - DNA, 19 bp, Homo sapiens
  siRNA target sequence for POLH (NM_006502.1,872-890).
gttcagctggaatttcaca

SEQ ID NO: 17070 - DNA, 19 bp, Homo sapiens
  siRNA target sequence for POLH (NM_006502.1,938-956).
gccaaaccctggtttcaca

SEQ ID NO: 17071 - DNA, 19 bp, Homo sapiens
  siRNA target sequence for POLH (NM_006502.1,1020-1038).
gctaggggcctctgtcatt

SEQ ID NO: 17072 - DNA, 19 bp, Homo sapiens
  siRNA target sequence for POLH (NM_006502.1,1024-1042).
ggggcctctgtcattgaga

SEQ ID NO: 17073 - DNA, 19 bp, Homo sapiens
  siRNA target sequence for POLH (NM_006502.1,1025-1043).
gggcctctgtcattgagat

SEQ ID NO: 17074 - DNA, 19 bp, Homo sapiens
  siRNA target sequence for POLH (NM_006502.1,1116-1134).
gaatgggtcttggctatat

SEQ ID NO: 17075 - DNA, 19 bp, Homo sapiens
  siRNA target sequence for POLH (NM_006502.1,1137-1155).
catgtgccgagggattgaa

SEQ ID NO: 17076 - DNA, 19 bp, Homo sapiens
  siRNA target sequence for POLH (NM_006502.1,1140-1158).
gtgccgagggattgaacat

SEQ ID NO: 17077 - DNA, 19 bp, Homo sapiens
  siRNA target sequence for POLH (NM_006502.1,1142-1160).
gccgagggattgaacatga

SEQ ID NO: 17078 - DNA, 19 bp, Homo sapiens
  siRNA target sequence for POLH (NM_006502.1,1143-1161).
ccgagggattgaacatgat

SEQ ID NO: 17079 - DNA, 19 bp, Homo sapiens
  siRNA target sequence for POLH (NM_006502.1,1175-1193).
ggcaactacccaaaaccat

SEQ ID NO: 17080 - DNA, 19 bp, Homo sapiens
  siRNA target sequence for POLH (NM_006502.1,1190-1208).
ccattggctgtagtaagaa

SEQ ID NO: 17081 - DNA, 19 bp, Homo sapiens
  siRNA target sequence for POLH (NM_006502.1,1249-1267).
caatggtggctgttgcaat

SEQ ID NO: 17082 - DNA, 19 bp, Homo sapiens
  siRNA target sequence for POLH (NM_006502.1,1293-1311).
gactaaagaccgaaatgat

SEQ ID NO: 17083 - DNA, 19 bp, Homo sapiens
  siRNA target sequence for POLH (NM_006502.1,1300-1318).
gaccgaaatgataatgaca

SEQ ID NO: 17084 - DNA, 19 bp, Homo sapiens
  siRNA target sequence for POLH (NM_006502.1,1403-1421).
gctatgatgctcacaagat

SEQ ID NO: 17085 - DNA, 19 bp, Homo sapiens
  siRNA target sequence for POLH (NM_006502.1,1446-1464).
caagaactgtaatacttct

SEQ ID NO: 17086 - DNA, 19 bp, Homo sapiens
  siRNA target sequence for POLH (NM_006502.1,1486-1504).
cctcctctcacaatgcttt

SEQ ID NO: 17087 - DNA, 19 bp, Homo sapiens
  siRNA target sequence for POLH (NM_006502.1,1642-1660).
gcggtgacagccactaaga

SEQ ID NO: 17088 - DNA, 19 bp, Homo sapiens
  siRNA target sequence for POLH (NM_006502.1,1643-1661).
cggtgacagccactaagaa

SEQ ID NO: 17089 - DNA, 19 bp, Homo sapiens
  siRNA target sequence for POLH (NM_006502.1,1667-1685).
ccacgtctctggaatcatt

SEQ ID NO: 17090 - DNA, 19 bp, Homo sapiens
  siRNA target sequence for POLH (NM_006502.1,1670-1688).
cgtctctggaatcattctt

SEQ ID NO: 17091 - DNA, 19 bp, Homo sapiens
  siRNA target sequence for POLH (NM_006502.1,1782-1800).
gccctcattaccttttcaa

SEQ ID NO: 17092 - DNA, 19 bp, Homo sapiens
  siRNA target sequence for POLH (NM_006502.1,1783-1801).
ccctcattaccttttcaaa

SEQ ID NO: 17093 - DNA, 19 bp, Homo sapiens
  siRNA target sequence for POLH (NM_006502.1,1816-1834).
ggaactgagcccttcttta

SEQ ID NO: 17094 - DNA, 19 bp, Homo sapiens
  siRNA target sequence for POLH (NM_006502.1,1817-1835).
gaactgagcccttctttaa

SEQ ID NO: 17095 - DNA, 19 bp, Homo sapiens
  siRNA target sequence for POLH (NM_006502.1,1907-1925).
ggtccaactgtaaagcatt

SEQ ID NO: 17096 - DNA, 19 bp, Homo sapiens
  siRNA target sequence for POLH (NM_006502.1,1908-1926).
gtccaactgtaaagcatta

SEQ ID NO: 17097 - DNA, 19 bp, Homo sapiens
  siRNA target sequence for POLH (NM_006502.1,1911-1929).
caactgtaaagcattacca

SEQ ID NO: 17098 - DNA, 19 bp, Homo sapiens
  siRNA target sequence for POLH (NM_006502.1,1990-2008).
gaagaatcctctaaagcaa

SEQ ID NO: 17099 - DNA, 19 bp, Homo sapiens
  siRNA target sequence for POLH (NM_006502.1,2080-2098).
gaggtgactcagaaagcaa

SEQ ID NO: 17100 - DNA, 19 bp, Homo sapiens
  siRNA target sequence for POLH (NM_006502.1,2100-2118).
cccaaatccaagtcttcta

SEQ ID NO: 17101 - DNA, 19 bp, Homo sapiens
  siRNA target sequence for POLH (NM_006502.1,2335-2353).
ggcatgcaaacattggaat

SEQ ID NO: 17102 - DNA, 19 bp, Homo sapiens
  siRNA target sequence for POLQ (NM_006596.3,10-28).
caccgttttacgttcagaa

SEQ ID NO: 17103 - DNA, 19 bp, Homo sapiens
  siRNA target sequence for POLQ (NM_006596.3,35-53).
cgcttctacctttacaaaa

SEQ ID NO: 17104 - DNA, 19 bp, Homo sapiens
  siRNA target sequence for POLQ (NM_006596.3,55-73).
ggacaacacagatgcatta

SEQ ID NO: 17105 - DNA, 19 bp, Homo sapiens
  siRNA target sequence for POLQ (NM_006596.3,78-96).
gctcttggctcataacgat

SEQ ID NO: 17106 - DNA, 19 bp, Homo sapiens
  siRNA target sequence for POLQ (NM_006596.3,94-112).
gatccctggggtatattca

SEQ ID NO: 17107 - DNA, 19 bp, Homo sapiens
  siRNA target sequence for POLQ (NM_006596.3,184-202).
catattcctcacaatgcat

SEQ ID NO: 17108 - DNA, 19 bp, Homo sapiens
  siRNA target sequence for POLQ (NM_006596.3,199-217).
gcatgctggctaaaatgga

SEQ ID NO: 17109 - DNA, 19 bp, Homo sapiens
  siRNA target sequence for POLQ (NM_006596.3,236-254).
ccctgccctaccatcatat

SEQ ID NO: 17110 - DNA, 19 bp, Homo sapiens
  siRNA target sequence for POLQ (NM_006596.3,237-255).
cctgccctaccatcatata

SEQ ID NO: 17111 - DNA, 19 bp, Homo sapiens
  siRNA target sequence for POLQ (NM_006596.3,240-258).
gccctaccatcatatacta

SEQ ID NO: 17112 - DNA, 19 bp, Homo sapiens
  siRNA target sequence for POLQ (NM_006596.3,270-288).
gaaattatgctctattaga

SEQ ID NO: 17113 - DNA, 19 bp, Homo sapiens
  siRNA target sequence for POLQ (NM_006596.3,278-296).
gctctattagaaagtttga

SEQ ID NO: 17114 - DNA, 19 bp, Homo sapiens
  siRNA target sequence for POLQ (NM_006596.3,378-396).
gatcggccgagaagagttt

SEQ ID NO: 17115 - DNA, 19 bp, Homo sapiens
  siRNA target sequence for POLQ (NM_006596.3,766-784).
cttgtggcagaattactta

SEQ ID NO: 17116 - DNA, 19 bp, Homo sapiens
  siRNA target sequence for POLQ (NM_006596.3,772-790).
gcagaattacttattttga

SEQ ID NO: 17117 - DNA, 19 bp, Homo sapiens
  siRNA target sequence for POLQ (NM_006596.3,773-791).
cagaattacttattttgaa

SEQ ID NO: 17118 - DNA, 19 bp, Homo sapiens
  siRNA target sequence for POLQ (NM_006596.3,802-820).
gaaatgcggaagaaagctt

SEQ ID NO: 17119 - DNA, 19 bp, Homo sapiens
  siRNA target sequence for POLQ (NM_006596.3,928-946).
ccatcaaggcatttctctt

SEQ ID NO: 17120 - DNA, 19 bp, Homo sapiens
  siRNA target sequence for POLQ (NM_006596.3,958-976).
gcagtctgcacaattgaga

SEQ ID NO: 17121 - DNA, 19 bp, Homo sapiens
  siRNA target sequence for POLQ (NM_006596.3,977-995).
gagccaatggtctgatcaa

SEQ ID NO: 17122 - DNA, 19 bp, Homo sapiens
  siRNA target sequence for POLQ (NM_006596.3,997-1015).
cgcctcatagaggaaaata

SEQ ID NO: 17123 - DNA, 19 bp, Homo sapiens
  siRNA target sequence for POLQ (NM_006596.3,998-1016).
gcctcatagaggaaaataa

SEQ ID NO: 17124 - DNA, 19 bp, Homo sapiens
  siRNA target sequence for POLQ (NM_006596.3,1038-1056).
ggttgtggatgaattacat

SEQ ID NO: 17125 - DNA, 19 bp, Homo sapiens
  siRNA target sequence for POLQ (NM_006596.3,1039-1057).
gttgtggatgaattacata

SEQ ID NO: 17126 - DNA, 19 bp, Homo sapiens
  siRNA target sequence for POLQ (NM_006596.3,1079-1097).
ggtatctgctggaactttt

SEQ ID NO: 17127 - DNA, 19 bp, Homo sapiens
  siRNA target sequence for POLQ (NM_006596.3,1098-1116).
gctgaccaagatttgctat

SEQ ID NO: 17128 - DNA, 19 bp, Homo sapiens
  siRNA target sequence for POLQ (NM_006596.3,1099-1117).
ctgaccaagatttgctata

SEQ ID NO: 17129 - DNA, 19 bp, Homo sapiens
  siRNA target sequence for POLQ (NM_006596.3,1101-1119).
gaccaagatttgctatatt

SEQ ID NO: 17130 - DNA, 19 bp, Homo sapiens
  siRNA target sequence for POLQ (NM_006596.3,1166-1184).
ctaatgctgtgcaaatcgt

SEQ ID NO: 17131 - DNA, 19 bp, Homo sapiens
  siRNA target sequence for POLQ (NM_006596.3,1191-1209).
gagtgctacccttcctaat

SEQ ID NO: 17132 - DNA, 19 bp, Homo sapiens
  siRNA target sequence for POLQ (NM_006596.3,1193-1211).
gtgctacccttcctaattt

SEQ ID NO: 17133 - DNA, 19 bp, Homo sapiens
  siRNA target sequence for POLQ (NM_006596.3,1196-1214).
ctacccttcctaatttgga

SEQ ID NO: 17134 - DNA, 19 bp, Homo sapiens
  siRNA target sequence for POLQ (NM_006596.3,1262-1280).
gccctgtaccgcttttgga

SEQ ID NO: 17135 - DNA, 19 bp, Homo sapiens
  siRNA target sequence for POLQ (NM_006596.3,1271-1289).
cgcttttggagtcagtaaa

SEQ ID NO: 17136 - DNA, 19 bp, Homo sapiens
  siRNA target sequence for POLQ (NM_006596.3,1281-1299).
gtcagtaaaagttggaaat

SEQ ID NO: 17137 - DNA, 19 bp, Homo sapiens
  siRNA target sequence for POLQ (NM_006596.3,1361-1379).
gagatgaggaccatgttgt

SEQ ID NO: 17138 - DNA, 19 bp, Homo sapiens
  siRNA target sequence for POLQ (NM_006596.3,1363-1381).
gatgaggaccatgttgtta

SEQ ID NO: 17139 - DNA, 19 bp, Homo sapiens
  siRNA target sequence for POLQ (NM_006596.3,1368-1386).
ggaccatgttgttagttta

SEQ ID NO: 17140 - DNA, 19 bp, Homo sapiens
  siRNA target sequence for POLQ (NM_006596.3,1369-1387).
gaccatgttgttagtttat

SEQ ID NO: 17141 - DNA, 19 bp, Homo sapiens
  siRNA target sequence for POLQ (NM_006596.3,1388-1406).
gttatgagacgatttgtga

SEQ ID NO: 17142 - DNA, 19 bp, Homo sapiens
  siRNA target sequence for POLQ (NM_006596.3,1467-1485).
cattgctcgagagttttat

SEQ ID NO: 17143 - DNA, 19 bp, Homo sapiens
  siRNA target sequence for POLQ (NM_006596.3,1472-1490).
ctcgagagttttataatct

SEQ ID NO: 17144 - DNA, 19 bp, Homo sapiens
  siRNA target sequence for POLQ (NM_006596.3,1634-1652).
catggggagtagcatttca

SEQ ID NO: 17145 - DNA, 19 bp, Homo sapiens
  siRNA target sequence for POLQ (NM_006596.3,1720-1738).
gtcttggcggcaacttcta

SEQ ID NO: 17146 - DNA, 19 bp, Homo sapiens
  siRNA target sequence for POLQ (NM_006596.3,1722-1740).
cttggcggcaacttctact

SEQ ID NO: 17147 - DNA, 19 bp, Homo sapiens
  siRNA target sequence for POLQ (NM_006596.3,1726-1744).
gcggcaacttctactcttt

SEQ ID NO: 17148 - DNA, 19 bp, Homo sapiens
  siRNA target sequence for POLQ (NM_006596.3,1762-1780).
cctgcacgtcgtgtgatta

SEQ ID NO: 17149 - DNA, 19 bp, Homo sapiens
  siRNA target sequence for POLQ (NM_006596.3,1763-1781).
ctgcacgtcgtgtgattat

SEQ ID NO: 17150 - DNA, 19 bp, Homo sapiens
  siRNA target sequence for POLQ (NM_006596.3,1768-1786).
cgtcgtgtgattattcgaa

SEQ ID NO: 17151 - DNA, 19 bp, Homo sapiens
  siRNA target sequence for POLQ (NM_006596.3,1798-1816).
ggtggtcgacctctagata

SEQ ID NO: 17152 - DNA, 19 bp, Homo sapiens
  siRNA target sequence for POLQ (NM_006596.3,1799-1817).
gtggtcgacctctagatat

SEQ ID NO: 17153 - DNA, 19 bp, Homo sapiens
  siRNA target sequence for POLQ (NM_006596.3,1802-1820).
gtcgacctctagatattct

SEQ ID NO: 17154 - DNA, 19 bp, Homo sapiens
  siRNA target sequence for POLQ (NM_006596.3,1804-1822).
cgacctctagatattctta

SEQ ID NO: 17155 - DNA, 19 bp, Homo sapiens
  siRNA target sequence for POLQ (NM_006596.3,1808-1826).
ctctagatattcttactta

SEQ ID NO: 17156 - DNA, 19 bp, Homo sapiens
  siRNA target sequence for POLQ (NM_006596.3,1810-1828).
ctagatattcttacttata

SEQ ID NO: 17157 - DNA, 19 bp, Homo sapiens
  siRNA target sequence for POLQ (NM_006596.3,1868-1886).
cagtaggcgagagtatctt

SEQ ID NO: 17158 - DNA, 19 bp, Homo sapiens
  siRNA target sequence for POLQ (NM_006596.3,1873-1891).
ggcgagagtatcttaattt

SEQ ID NO: 17159 - DNA, 19 bp, Homo sapiens
  siRNA target sequence for POLQ (NM_006596.3,1875-1893).
cgagagtatcttaatttgt

SEQ ID NO: 17160 - DNA, 19 bp, Homo sapiens
  siRNA target sequence for POLQ (NM_006596.3,1876-1894).
gagagtatcttaatttgta

SEQ ID NO: 17161 - DNA, 19 bp, Homo sapiens
  siRNA target sequence for POLQ (NM_006596.3,1992-2010).
cagcatgatacgagctatt

SEQ ID NO: 17162 - DNA, 19 bp, Homo sapiens
  siRNA target sequence for POLQ (NM_006596.3,1994-2012).
gcatgatacgagctattct

SEQ ID NO: 17163 - DNA, 19 bp, Homo sapiens
  siRNA target sequence for POLQ (NM_006596.3,2006-2024).
ctattctggagataatagt

SEQ ID NO: 17164 - DNA, 19 bp, Homo sapiens
  siRNA target sequence for POLQ (NM_006596.3,2026-2044).
ggtggagtggcaagtacat

SEQ ID NO: 17165 - DNA, 19 bp, Homo sapiens
  siRNA target sequence for POLQ (NM_006596.3,2039-2057).
gtacatcacaagatatgca

SEQ ID NO: 17166 - DNA, 19 bp, Homo sapiens
  siRNA target sequence for POLQ (NM_006596.3,2045-2063).
cacaagatatgcatactta

SEQ ID NO: 17167 - DNA, 19 bp, Homo sapiens
  siRNA target sequence for POLQ (NM_006596.3,2075-2093).
catttttggctgcaagtat

SEQ ID NO: 17168 - DNA, 19 bp, Homo sapiens
  siRNA target sequence for POLQ (NM_006596.3,2082-2100).
ggctgcaagtatgaaagaa

SEQ ID NO: 17169 - DNA, 19 bp, Homo sapiens
  siRNA target sequence for POLQ (NM_006596.3,2248-2266).
ggttcggccactctttctt

SEQ ID NO: 17170 - DNA, 19 bp, Homo sapiens
  siRNA target sequence for POLQ (NM_006596.3,2272-2290).
ctttctccagctgatactt

SEQ ID NO: 17171 - DNA, 19 bp, Homo sapiens
  siRNA target sequence for POLQ (NM_006596.3,2278-2296).
ccagctgatactttagata

SEQ ID NO: 17172 - DNA, 19 bp, Homo sapiens
  siRNA target sequence for POLQ (NM_006596.3,2382-2400).
ggattggactactattgat

SEQ ID NO: 17173 - DNA, 19 bp, Homo sapiens
  siRNA target sequence for POLQ (NM_006596.3,2383-2401).
gattggactactattgatt

SEQ ID NO: 17174 - DNA, 19 bp, Homo sapiens
  siRNA target sequence for POLQ (NM_006596.3,2387-2405).
ggactactattgattggta

SEQ ID NO: 17175 - DNA, 19 bp, Homo sapiens
  siRNA target sequence for POLQ (NM_006596.3,2393-2411).
ctattgattggtatcgatt

SEQ ID NO: 17176 - DNA, 19 bp, Homo sapiens
  siRNA target sequence for POLQ (NM_006596.3,2398-2416).
gattggtatcgatttttct

SEQ ID NO: 17177 - DNA, 19 bp, Homo sapiens
  siRNA target sequence for POLQ (NM_006596.3,2402-2420).
ggtatcgatttttctgttt

SEQ ID NO: 17178 - DNA, 19 bp, Homo sapiens
  siRNA target sequence for POLQ (NM_006596.3,2488-2506).
gcccgttgtgtgaaaggaa

SEQ ID NO: 17179 - DNA, 19 bp, Homo sapiens
  siRNA target sequence for POLQ (NM_006596.3,2536-2554).
cgacaaatggccatccata

SEQ ID NO: 17180 - DNA, 19 bp, Homo sapiens
  siRNA target sequence for POLQ (NM_006596.3,2537-2555).
gacaaatggccatccataa

SEQ ID NO: 17181 - DNA, 19 bp, Homo sapiens
  siRNA target sequence for POLQ (NM_006596.3,2544-2562).
ggccatccataaaaggttt

SEQ ID NO: 17182 - DNA, 19 bp, Homo sapiens
  siRNA target sequence for POLQ (NM_006596.3,2545-2563).
gccatccataaaaggtttt

SEQ ID NO: 17183 - DNA, 19 bp, Homo sapiens
  siRNA target sequence for POLQ (NM_006596.3,2546-2564).
ccatccataaaaggttttt

SEQ ID NO: 17184 - DNA, 19 bp, Homo sapiens
  siRNA target sequence for POLQ (NM_006596.3,2565-2583).
caccagtcttgtgctatta

SEQ ID NO: 17185 - DNA, 19 bp, Homo sapiens
  siRNA target sequence for POLQ (NM_006596.3,2568-2586).
cagtcttgtgctattagat

SEQ ID NO: 17186 - DNA, 19 bp, Homo sapiens
  siRNA target sequence for POLQ (NM_006596.3,2599-2617).
gttcccttaagggaaataa

SEQ ID NO: 17187 - DNA, 19 bp, Homo sapiens
  siRNA target sequence for POLQ (NM_006596.3,2634-2652).
caatcgtgggcagattcaa

SEQ ID NO: 17188 - DNA, 19 bp, Homo sapiens
  siRNA target sequence for POLQ (NM_006596.3,2674-2692).
gtttatgcagggatgatta

SEQ ID NO: 17189 - DNA, 19 bp, Homo sapiens
  siRNA target sequence for POLQ (NM_006596.3,2708-2726).
gtctgggctggcacaacat

SEQ ID NO: 17190 - DNA, 19 bp, Homo sapiens
  siRNA target sequence for POLQ (NM_006596.3,2717-2735).
ggcacaacatggaactact

SEQ ID NO: 17191 - DNA, 19 bp, Homo sapiens
  siRNA target sequence for POLQ (NM_006596.3,2718-2736).
gcacaacatggaactacta

SEQ ID NO: 17192 - DNA, 19 bp, Homo sapiens
  siRNA target sequence for POLQ (NM_006596.3,2793-2811).
ggttcgggtatccttacta

SEQ ID NO: 17193 - DNA, 19 bp, Homo sapiens
  siRNA target sequence for POLQ (NM_006596.3,2794-2812).
gttcgggtatccttactaa

SEQ ID NO: 17194 - DNA, 19 bp, Homo sapiens
  siRNA target sequence for POLQ (NM_006596.3,2799-2817).
ggtatccttactaaatgct

SEQ ID NO: 17195 - DNA, 19 bp, Homo sapiens
  siRNA target sequence for POLQ (NM_006596.3,2820-2838).
gagagccagggttctctat

SEQ ID NO: 17196 - DNA, 19 bp, Homo sapiens
  siRNA target sequence for POLQ (NM_006596.3,2863-2881).
gaccttgctagagcaaata

SEQ ID NO: 17197 - DNA, 19 bp, Homo sapiens
  siRNA target sequence for POLQ (NM_006596.3,2972-2990).
gtcgcaatatgcgaactat

SEQ ID NO: 17198 - DNA, 19 bp, Homo sapiens
  siRNA target sequence for POLQ (NM_006596.3,2974-2992).
cgcaatatgcgaactatct

SEQ ID NO: 17199 - DNA, 19 bp, Homo sapiens
  siRNA target sequence for POLQ (NM_006596.3,3066-3084).
gcagcaggacttagttgaa

SEQ ID NO: 17200 - DNA, 19 bp, Homo sapiens
  siRNA target sequence for POLQ (NM_006596.3,3067-3085).
cagcaggacttagttgaaa

SEQ ID NO: 17201 - DNA, 19 bp, Homo sapiens
  siRNA target sequence for POLQ (NM_006596.3,3109-3127).
gccctgttacattctagta

SEQ ID NO: 17202 - DNA, 19 bp, Homo sapiens
  siRNA target sequence for POLQ (NM_006596.3,3111-3129).
cctgttacattctagtaca

SEQ ID NO: 17203 - DNA, 19 bp, Homo sapiens
  siRNA target sequence for POLQ (NM_006596.3,3131-3149).
gctcattgactcatagtga

SEQ ID NO: 17204 - DNA, 19 bp, Homo sapiens
  siRNA target sequence for POLQ (NM_006596.3,3142-3160).
catagtgagtccgaagtaa

SEQ ID NO: 17205 - DNA, 19 bp, Homo sapiens
  siRNA target sequence for POLQ (NM_006596.3,3146-3164).
gtgagtccgaagtaaagga

SEQ ID NO: 17206 - DNA, 19 bp, Homo sapiens
  siRNA target sequence for POLQ (NM_006596.3,3179-3197).
cccaaactaagagttctta

SEQ ID NO: 17207 - DNA, 19 bp, Homo sapiens
  siRNA target sequence for POLQ (NM_006596.3,3224-3242).
gtaacacaatatttagtga

SEQ ID NO: 17208 - DNA, 19 bp, Homo sapiens
  siRNA target sequence for POLQ (NM_006596.3,3239-3257).
gtgattcttatattaagca

SEQ ID NO: 17209 - DNA, 19 bp, Homo sapiens
  siRNA target sequence for POLQ (NM_006596.3,3241-3259).
gattcttatattaagcatt

SEQ ID NO: 17210 - DNA, 19 bp, Homo sapiens
  siRNA target sequence for POLQ (NM_006596.3,3263-3281).
caaatatagtgcaagactt

SEQ ID NO: 17211 - DNA, 19 bp, Homo sapiens
  siRNA target sequence for POLQ (NM_006596.3,3295-3313).
gagcatacaagttccttta

SEQ ID NO: 17212 - DNA, 19 bp, Homo sapiens
  siRNA target sequence for POLQ (NM_006596.3,3302-3320).
caagttcctttaattgtaa

SEQ ID NO: 17213 - DNA, 19 bp, Homo sapiens
  siRNA target sequence for POLQ (NM_006596.3,3327-3345).
gaatgggaatcaagaacat

SEQ ID NO: 17214 - DNA, 19 bp, Homo sapiens
  siRNA target sequence for POLQ (NM_006596.3,3371-3389).
gaaaacgggcctctttaga

SEQ ID NO: 17215 - DNA, 19 bp, Homo sapiens
  siRNA target sequence for POLQ (NM_006596.3,3376-3394).
cgggcctctttagatataa

SEQ ID NO: 17216 - DNA, 19 bp, Homo sapiens
  siRNA target sequence for POLQ (NM_006596.3,3377-3395).
gggcctctttagatataaa

SEQ ID NO: 17217 - DNA, 19 bp, Homo sapiens
  siRNA target sequence for POLQ (NM_006596.3,3378-3396).
ggcctctttagatataaat

SEQ ID NO: 17218 - DNA, 19 bp, Homo sapiens
  siRNA target sequence for POLQ (NM_006596.3,3428-3446).
ggaaaacaagtgataagaa

SEQ ID NO: 17219 - DNA, 19 bp, Homo sapiens
  siRNA target sequence for POLQ (NM_006596.3,3580-3598).
gactctggagcgtgtagaa

SEQ ID NO: 17220 - DNA, 19 bp, Homo sapiens
  siRNA target sequence for POLQ (NM_006596.3,3586-3604).
ggagcgtgtagaatccatt

SEQ ID NO: 17221 - DNA, 19 bp, Homo sapiens
  siRNA target sequence for POLQ (NM_006596.3,3590-3608).
cgtgtagaatccatttaca

SEQ ID NO: 17222 - DNA, 19 bp, Homo sapiens
  siRNA target sequence for POLQ (NM_006596.3,3591-3609).
gtgtagaatccatttacaa

SEQ ID NO: 17223 - DNA, 19 bp, Homo sapiens
  siRNA target sequence for POLQ (NM_006596.3,3613-3631).
cagactctgtctaatccta

SEQ ID NO: 17224 - DNA, 19 bp, Homo sapiens
  siRNA target sequence for POLQ (NM_006596.3,3619-3637).
ctgtctaatcctagtcttt

SEQ ID NO: 17225 - DNA, 19 bp, Homo sapiens
  siRNA target sequence for POLQ (NM_006596.3,3623-3641).
ctaatcctagtctttgtga

SEQ ID NO: 17226 - DNA, 19 bp, Homo sapiens
  siRNA target sequence for POLQ (NM_006596.3,3638-3656).
gtgaagacccgtttacctt

SEQ ID NO: 17227 - DNA, 19 bp, Homo sapiens
  siRNA target sequence for POLQ (NM_006596.3,3689-3707).
ggccatttgctaaaaatgt

SEQ ID NO: 17228 - DNA, 19 bp, Homo sapiens
  siRNA target sequence for POLQ (NM_006596.3,3780-3798).
cataacactaactaatgat

SEQ ID NO: 17229 - DNA, 19 bp, Homo sapiens
  siRNA target sequence for POLQ (NM_006596.3,3854-3872).
ccactagtgtggttagtga

SEQ ID NO: 17230 - DNA, 19 bp, Homo sapiens
  siRNA target sequence for POLQ (NM_006596.3,3857-3875).
ctagtgtggttagtgaaaa

SEQ ID NO: 17231 - DNA, 19 bp, Homo sapiens
  siRNA target sequence for POLQ (NM_006596.3,3964-3982).
catgacatccatccaatta

SEQ ID NO: 17232 - DNA, 19 bp, Homo sapiens
  siRNA target sequence for POLQ (NM_006596.3,3985-4003).
cagtacctgcgaaagcaat

SEQ ID NO: 17233 - DNA, 19 bp, Homo sapiens
  siRNA target sequence for POLQ (NM_006596.3,3990-4008).
cctgcgaaagcaatctcat

SEQ ID NO: 17234 - DNA, 19 bp, Homo sapiens
  siRNA target sequence for POLQ (NM_006596.3,3993-4011).
gcgaaagcaatctcatgaa

SEQ ID NO: 17235 - DNA, 19 bp, Homo sapiens
  siRNA target sequence for POLQ (NM_006596.3,4019-4037).
gcactattaccaaacagaa

SEQ ID NO: 17236 - DNA, 19 bp, Homo sapiens
  siRNA target sequence for POLQ (NM_006596.3,4064-4082).
gtgaagcagtcagtagtta

SEQ ID NO: 17237 - DNA, 19 bp, Homo sapiens
  siRNA target sequence for POLQ (NM_006596.3,4066-4084).
gaagcagtcagtagttaca

SEQ ID NO: 17238 - DNA, 19 bp, Homo sapiens
  siRNA target sequence for POLQ (NM_006596.3,4069-4087).
gcagtcagtagttacataa

SEQ ID NO: 17239 - DNA, 19 bp, Homo sapiens
  siRNA target sequence for POLQ (NM_006596.3,4083-4101).
cataaatagagactcaaat

SEQ ID NO: 17240 - DNA, 19 bp, Homo sapiens
  siRNA target sequence for POLQ (NM_006596.3,4106-4124).
ctatcaattgtgaaaggat

SEQ ID NO: 17241 - DNA, 19 bp, Homo sapiens
  siRNA target sequence for POLQ (NM_006596.3,4121-4139).
ggataaagcttaatacaga

SEQ ID NO: 17242 - DNA, 19 bp, Homo sapiens
  siRNA target sequence for POLQ (NM_006596.3,4162-4180).
caggcattaggagatgata

SEQ ID NO: 17243 - DNA, 19 bp, Homo sapiens
  siRNA target sequence for POLQ (NM_006596.3,4217-4235).
cagctggagcatttagcaa

SEQ ID NO: 17244 - DNA, 19 bp, Homo sapiens
  siRNA target sequence for POLQ (NM_006596.3,4244-4262).
gccagcatgagaattttct

SEQ ID NO: 17245 - DNA, 19 bp, Homo sapiens
  siRNA target sequence for POLQ (NM_006596.3,4289-4307).
caggtacttatacaacaaa

SEQ ID NO: 17246 - DNA, 19 bp, Homo sapiens
  siRNA target sequence for POLQ (NM_006596.3,4292-4310).
gtacttatacaacaaacaa

SEQ ID NO: 17247 - DNA, 19 bp, Homo sapiens
  siRNA target sequence for POLQ (NM_006596.3,4324-4342).
catgtttctgacttaggtt

SEQ ID NO: 17248 - DNA, 19 bp, Homo sapiens
  siRNA target sequence for POLQ (NM_006596.3,4339-4357).
ggtttagtcctctgtgatt

SEQ ID NO: 17249 - DNA, 19 bp, Homo sapiens
  siRNA target sequence for POLQ (NM_006596.3,4340-4358).
gtttagtcctctgtgattt

SEQ ID NO: 17250 - DNA, 19 bp, Homo sapiens
  siRNA target sequence for POLQ (NM_006596.3,4483-4501).
caacagaactcaatgaact

SEQ ID NO: 17251 - DNA, 19 bp, Homo sapiens
  siRNA target sequence for POLQ (NM_006596.3,4512-4530).
ggagtgtcacattcctttt

SEQ ID NO: 17252 - DNA, 19 bp, Homo sapiens
  siRNA target sequence for POLQ (NM_006596.3,4546-4564).
cctctaggagcgactaaga

SEQ ID NO: 17253 - DNA, 19 bp, Homo sapiens
  siRNA target sequence for POLQ (NM_006596.3,4547-4565).
ctctaggagcgactaagat

SEQ ID NO: 17254 - DNA, 19 bp, Homo sapiens
  siRNA target sequence for POLQ (NM_006596.3,4553-4571).
gagcgactaagatagatca

SEQ ID NO: 17255 - DNA, 19 bp, Homo sapiens
  siRNA target sequence for POLQ (NM_006596.3,4555-4573).
gcgactaagatagatcatt

SEQ ID NO: 17256 - DNA, 19 bp, Homo sapiens
  siRNA target sequence for POLQ (NM_006596.3,4584-4602).
gactgtaggtactatgaaa

SEQ ID NO: 17257 - DNA, 19 bp, Homo sapiens
  siRNA target sequence for POLQ (NM_006596.3,4586-4604).
ctgtaggtactatgaaaca

SEQ ID NO: 17258 - DNA, 19 bp, Homo sapiens
  siRNA target sequence for POLQ (NM_006596.3,4637-4655).
ctccagaaagcccgatttt

SEQ ID NO: 17259 - DNA, 19 bp, Homo sapiens
  siRNA target sequence for POLQ (NM_006596.3,4650-4668).
gattttccattctccaata

SEQ ID NO: 17260 - DNA, 19 bp, Homo sapiens
  siRNA target sequence for POLQ (NM_006596.3,4720-4738).
gattcacaattaaatagtt

SEQ ID NO: 17261 - DNA, 19 bp, Homo sapiens
  siRNA target sequence for POLQ (NM_006596.3,4724-4742).
cacaattaaatagttttct

SEQ ID NO: 17262 - DNA, 19 bp, Homo sapiens
  siRNA target sequence for POLQ (NM_006596.3,4766-4784).
ctgtgaaaccagttatact

SEQ ID NO: 17263 - DNA, 19 bp, Homo sapiens
  siRNA target sequence for POLQ (NM_006596.3,4783-4801).
cttctgattcctcaaaaga

SEQ ID NO: 17264 - DNA, 19 bp, Homo sapiens
  siRNA target sequence for POLQ (NM_006596.3,4860-4878).
gagtgatagtttactattt

SEQ ID NO: 17265 - DNA, 19 bp, Homo sapiens
  siRNA target sequence for POLQ (NM_006596.3,4862-4880).
gtgatagtttactatttga

SEQ ID NO: 17266 - DNA, 19 bp, Homo sapiens
  siRNA target sequence for POLQ (NM_006596.3,4883-4901).
gcttcagtgatgactatct

SEQ ID NO: 17267 - DNA, 19 bp, Homo sapiens
  siRNA target sequence for POLQ (NM_006596.3,4884-4902).
cttcagtgatgactatcta

SEQ ID NO: 17268 - DNA, 19 bp, Homo sapiens
  siRNA target sequence for POLQ (NM_006596.3,4951-4969).
gaagtaacatcaaaccatt

SEQ ID NO: 17269 - DNA, 19 bp, Homo sapiens
  siRNA target sequence for POLQ (NM_006596.3,4958-4976).
catcaaaccattttagtga

SEQ ID NO: 17270 - DNA, 19 bp, Homo sapiens
  siRNA target sequence for POLQ (NM_006596.3,4985-5003).
gtctacaagaagacctaat

SEQ ID NO: 17271 - DNA, 19 bp, Homo sapiens
  siRNA target sequence for POLQ (NM_006596.3,4987-5005).
ctacaagaagacctaatta

SEQ ID NO: 17272 - DNA, 19 bp, Homo sapiens
  siRNA target sequence for POLQ (NM_006596.3,5046-5064).
gttgacttgttccaatgat

SEQ ID NO: 17273 - DNA, 19 bp, Homo sapiens
  siRNA target sequence for POLQ (NM_006596.3,5049-5067).
gacttgttccaatgatgaa

SEQ ID NO: 17274 - DNA, 19 bp, Homo sapiens
  siRNA target sequence for POLQ (NM_006596.3,5062-5080).
gatgaatctattatatttt

SEQ ID NO: 17275 - DNA, 19 bp, Homo sapiens
  siRNA target sequence for POLQ (NM_006596.3,5118-5136).
caatgtggatatatttcct

SEQ ID NO: 17276 - DNA, 19 bp, Homo sapiens
  siRNA target sequence for POLQ (NM_006596.3,5148-5166).
gaatcatactgtagtatct

SEQ ID NO: 17277 - DNA, 19 bp, Homo sapiens
  siRNA target sequence for POLQ (NM_006596.3,5165-5183).
ctcctagagcattagaact

SEQ ID NO: 17278 - DNA, 19 bp, Homo sapiens
  siRNA target sequence for POLQ (NM_006596.3,5269-5287).
gggaccaggcaaaatcatt

SEQ ID NO: 17279 - DNA, 19 bp, Homo sapiens
  siRNA target sequence for POLQ (NM_006596.3,5271-5289).
gaccaggcaaaatcattca

SEQ ID NO: 17280 - DNA, 19 bp, Homo sapiens
  siRNA target sequence for POLQ (NM_006596.3,5273-5291).
ccaggcaaaatcattcatt

SEQ ID NO: 17281 - DNA, 19 bp, Homo sapiens
  siRNA target sequence for POLQ (NM_006596.3,5302-5320).
ggggcatcatttgatctaa

SEQ ID NO: 17282 - DNA, 19 bp, Homo sapiens
  siRNA target sequence for POLQ (NM_006596.3,5304-5322).
ggcatcatttgatctaagt

SEQ ID NO: 17283 - DNA, 19 bp, Homo sapiens
  siRNA target sequence for POLQ (NM_006596.3,5321-5339).
gtccaggactgcaaaggat

SEQ ID NO: 17284 - DNA, 19 bp, Homo sapiens
  siRNA target sequence for POLQ (NM_006596.3,5327-5345).
gactgcaaaggattttaga

SEQ ID NO: 17285 - DNA, 19 bp, Homo sapiens
  siRNA target sequence for POLQ (NM_006596.3,5350-5368).
gtatccagtcctctagaaa

SEQ ID NO: 17286 - DNA, 19 bp, Homo sapiens
  siRNA target sequence for POLQ (NM_006596.3,5535-5553).
caatgccaatcatgatgaa

SEQ ID NO: 17287 - DNA, 19 bp, Homo sapiens
  siRNA target sequence for POLQ (NM_006596.3,5561-5579).
ccctcttacctcgtaaaga

SEQ ID NO: 17288 - DNA, 19 bp, Homo sapiens
  siRNA target sequence for POLQ (NM_006596.3,5565-5583).
cttacctcgtaaagaaagt

SEQ ID NO: 17289 - DNA, 19 bp, Homo sapiens
  siRNA target sequence for POLQ (NM_006596.3,5679-5697).
cccttggaaaactaataat

SEQ ID NO: 17290 - DNA, 19 bp, Homo sapiens
  siRNA target sequence for POLQ (NM_006596.3,5681-5699).
cttggaaaactaataatgt

SEQ ID NO: 17291 - DNA, 19 bp, Homo sapiens
  siRNA target sequence for POLQ (NM_006596.3,5704-5722).
caacctggtgaaagttatt

SEQ ID NO: 17292 - DNA, 19 bp, Homo sapiens
  siRNA target sequence for POLQ (NM_006596.3,5729-5747).
gctcaccttcagatattaa

SEQ ID NO: 17293 - DNA, 19 bp, Homo sapiens
  siRNA target sequence for POLQ (NM_006596.3,5730-5748).
ctcaccttcagatattaaa

SEQ ID NO: 17294 - DNA, 19 bp, Homo sapiens
  siRNA target sequence for POLQ (NM_006596.3,5810-5828).
caagcttttcacttcagtt

SEQ ID NO: 17295 - DNA, 19 bp, Homo sapiens
  siRNA target sequence for POLQ (NM_006596.3,5861-5879).
caagcagttcagaaagttt

SEQ ID NO: 17296 - DNA, 19 bp, Homo sapiens
  siRNA target sequence for POLQ (NM_006596.3,5870-5888).
cagaaagtttgtccataat

SEQ ID NO: 17297 - DNA, 19 bp, Homo sapiens
  siRNA target sequence for POLQ (NM_006596.3,5896-5914).
gcaagtgaccaaaatcttt

SEQ ID NO: 17298 - DNA, 19 bp, Homo sapiens
  siRNA target sequence for POLQ (NM_006596.3,5911-5929).
cttttccaaacattcatta

SEQ ID NO: 17299 - DNA, 19 bp, Homo sapiens
  siRNA target sequence for POLQ (NM_006596.3,5938-5956).
cggtgcaaaaagcgatttt

SEQ ID NO: 17300 - DNA, 19 bp, Homo sapiens
  siRNA target sequence for POLQ (NM_006596.3,5965-5983).
ctggcttgtgaaaagatta

SEQ ID NO: 17301 - DNA, 19 bp, Homo sapiens
  siRNA target sequence for POLQ (NM_006596.3,5972-5990).
gtgaaaagattagaagttt

SEQ ID NO: 17302 - DNA, 19 bp, Homo sapiens
  siRNA target sequence for POLQ (NM_006596.3,6011-6029).
ctattggcagtaggtttaa

SEQ ID NO: 17303 - DNA, 19 bp, Homo sapiens
  siRNA target sequence for POLQ (NM_006596.3,6035-6053).
ctagctcacctcaggaaat

SEQ ID NO: 17304 - DNA, 19 bp, Homo sapiens
  siRNA target sequence for POLQ (NM_006596.3,6048-6066).
ggaaattcctattagagat

SEQ ID NO: 17305 - DNA, 19 bp, Homo sapiens
  siRNA target sequence for POLQ (NM_006596.3,6056-6074).
ctattagagatgatggatt

SEQ ID NO: 17306 - DNA, 19 bp, Homo sapiens
  siRNA target sequence for POLQ (NM_006596.3,6130-6148).
ggaagggatgcctattatt

SEQ ID NO: 17307 - DNA, 19 bp, Homo sapiens
  siRNA target sequence for POLQ (NM_006596.3,6156-6174).
gcagaaggaacaaaagcat

SEQ ID NO: 17308 - DNA, 19 bp, Homo sapiens
  siRNA target sequence for POLQ (NM_006596.3,6191-6209).
gtttggttccaccttcttt

SEQ ID NO: 17309 - DNA, 19 bp, Homo sapiens
  siRNA target sequence for POLQ (NM_006596.3,6195-6213).
ggttccaccttctttagat

SEQ ID NO: 17310 - DNA, 19 bp, Homo sapiens
  siRNA target sequence for POLQ (NM_006596.3,6237-6255).
gatgtggtaccttcaatct

SEQ ID NO: 17311 - DNA, 19 bp, Homo sapiens
  siRNA target sequence for POLQ (NM_006596.3,6257-6275).
gcttgcgaaaggaatctga

SEQ ID NO: 17312 - DNA, 19 bp, Homo sapiens
  siRNA target sequence for POLQ (NM_006596.3,6258-6276).
cttgcgaaaggaatctgat

SEQ ID NO: 17313 - DNA, 19 bp, Homo sapiens
  siRNA target sequence for POLQ (NM_006596.3,6301-6319).
gacttcatccagagctata

SEQ ID NO: 17314 - DNA, 19 bp, Homo sapiens
  siRNA target sequence for POLQ (NM_006596.3,6312-6330).
gagctataaaattcttctt

SEQ ID NO: 17315 - DNA, 19 bp, Homo sapiens
  siRNA target sequence for POLQ (NM_006596.3,6351-6369).
ggagcaaagttatgaagat

SEQ ID NO: 17316 - DNA, 19 bp, Homo sapiens
  siRNA target sequence for POLQ (NM_006596.3,6375-6393).
ggtggcatgctggttacta

SEQ ID NO: 17317 - DNA, 19 bp, Homo sapiens
  siRNA target sequence for POLQ (NM_006596.3,6406-6424).
caggagccgactcttcata

SEQ ID NO: 17318 - DNA, 19 bp, Homo sapiens
  siRNA target sequence for POLQ (NM_006596.3,6411-6429).
gccgactcttcatagcata

SEQ ID NO: 17319 - DNA, 19 bp, Homo sapiens
  siRNA target sequence for POLQ (NM_006596.3,6414-6432).
gactcttcatagcatagtt

SEQ ID NO: 17320 - DNA, 19 bp, Homo sapiens
  siRNA target sequence for POLQ (NM_006596.3,6477-6495).
gaccagccaagggattcaa

SEQ ID NO: 17321 - DNA, 19 bp, Homo sapiens
  siRNA target sequence for POLQ (NM_006596.3,6522-6540).
gcattctgggcgatacaga

SEQ ID NO: 17322 - DNA, 19 bp, Homo sapiens
  siRNA target sequence for POLQ (NM_006596.3,6653-6671).
gcttggccttgctagaact

SEQ ID NO: 17323 - DNA, 19 bp, Homo sapiens
  siRNA target sequence for POLQ (NM_006596.3,6654-6672).
cttggccttgctagaacta

SEQ ID NO: 17324 - DNA, 19 bp, Homo sapiens
  siRNA target sequence for POLQ (NM_006596.3,6707-6725).
gtcagaaacatataatgca

SEQ ID NO: 17325 - DNA, 19 bp, Homo sapiens
  siRNA target sequence for POLQ (NM_006596.3,6747-6765).
gacccaggcctatcaacta

SEQ ID NO: 17326 - DNA, 19 bp, Homo sapiens
  siRNA target sequence for POLQ (NM_006596.3,6799-6817).
gacatcgctgaggttttat

SEQ ID NO: 17327 - DNA, 19 bp, Homo sapiens
  siRNA target sequence for POLQ (NM_006596.3,6828-6846).
gaagttgcccccaaataga

SEQ ID NO: 17328 - DNA, 19 bp, Homo sapiens
  siRNA target sequence for POLQ (NM_006596.3,6837-6855).
cccaaatagagagatgaaa

SEQ ID NO: 17329 - DNA, 19 bp, Homo sapiens
  siRNA target sequence for POLQ (NM_006596.3,6901-6919).
gacaatggacgcaagctaa

SEQ ID NO: 17330 - DNA, 19 bp, Homo sapiens
  siRNA target sequence for POLQ (NM_006596.3,6929-6947).
gacagttcagcactagtaa

SEQ ID NO: 17331 - DNA, 19 bp, Homo sapiens
  siRNA target sequence for POLQ (NM_006596.3,6938-6956).
gcactagtaaggacgtttt

SEQ ID NO: 17332 - DNA, 19 bp, Homo sapiens
  siRNA target sequence for POLQ (NM_006596.3,6939-6957).
cactagtaaggacgtttta

SEQ ID NO: 17333 - DNA, 19 bp, Homo sapiens
  siRNA target sequence for POLQ (NM_006596.3,6941-6959).
ctagtaaggacgttttaaa

SEQ ID NO: 17334 - DNA, 19 bp, Homo sapiens
  siRNA target sequence for POLQ (NM_006596.3,6985-7003).
ccaggcttgatattagaat

SEQ ID NO: 17335 - DNA, 19 bp, Homo sapiens
  siRNA target sequence for POLQ (NM_006596.3,7005-7023).
gagaagaatcactaatgct

SEQ ID NO: 17336 - DNA, 19 bp, Homo sapiens
  siRNA target sequence for POLQ (NM_006596.3,7007-7025).
gaagaatcactaatgctat

SEQ ID NO: 17337 - DNA, 19 bp, Homo sapiens
  siRNA target sequence for POLQ (NM_006596.3,7044-7062).
ccttcagcgggaaaagtgt

SEQ ID NO: 17338 - DNA, 19 bp, Homo sapiens
  siRNA target sequence for POLQ (NM_006596.3,7048-7066).
cagcgggaaaagtgtctta

SEQ ID NO: 17339 - DNA, 19 bp, Homo sapiens
  siRNA target sequence for POLQ (NM_006596.3,7050-7068).
gcgggaaaagtgtcttaat

SEQ ID NO: 17340 - DNA, 19 bp, Homo sapiens
  siRNA target sequence for POLQ (NM_006596.3,7113-7131).
cactgctacaggacgaata

SEQ ID NO: 17341 - DNA, 19 bp, Homo sapiens
  siRNA target sequence for POLQ (NM_006596.3,7179-7197).
caaaatgccaacactagta

SEQ ID NO: 17342 - DNA, 19 bp, Homo sapiens
  siRNA target sequence for POLQ (NM_006596.3,7267-7285).
ggtttcagcgtgaatccta

SEQ ID NO: 17343 - DNA, 19 bp, Homo sapiens
  siRNA target sequence for POLQ (NM_006596.3,7413-7431).
gaggatcttggctcattta

SEQ ID NO: 17344 - DNA, 19 bp, Homo sapiens
  siRNA target sequence for POLQ (NM_006596.3,7434-7452).
ccatgatcgtcgtctcatt

SEQ ID NO: 17345 - DNA, 19 bp, Homo sapiens
  siRNA target sequence for POLQ (NM_006596.3,7444-7462).
cgtctcattcaagtgttaa

SEQ ID NO: 17346 - DNA, 19 bp, Homo sapiens
  siRNA target sequence for POLQ (NM_006596.3,7548-7566).
ggcaaaacagatttgctat

SEQ ID NO: 17347 - DNA, 19 bp, Homo sapiens
  siRNA target sequence for POLQ (NM_006596.3,7563-7581).
ctatgggatcatttatgga

SEQ ID NO: 17348 - DNA, 19 bp, Homo sapiens
  siRNA target sequence for POLQ (NM_006596.3,7630-7648).
gctgcatgctatattgact

SEQ ID NO: 17349 - DNA, 19 bp, Homo sapiens
  siRNA target sequence for POLQ (NM_006596.3,7658-7676).
ccagatacacagggattaa

SEQ ID NO: 17350 - DNA, 19 bp, Homo sapiens
  siRNA target sequence for POLQ (NM_006596.3,7661-7679).
gatacacagggattaatca

SEQ ID NO: 17351 - DNA, 19 bp, Homo sapiens
  siRNA target sequence for POLQ (NM_006596.3,7690-7708).
gagacagtgaagaattgta

SEQ ID NO: 17352 - DNA, 19 bp, Homo sapiens
  siRNA target sequence for POLQ (NM_006596.3,7717-7735).
ggatttgttcagaccattt

SEQ ID NO: 17353 - DNA, 19 bp, Homo sapiens
  siRNA target sequence for POLQ (NM_006596.3,7718-7736).
gatttgttcagaccatttt

SEQ ID NO: 17354 - DNA, 19 bp, Homo sapiens
  siRNA target sequence for POLQ (NM_006596.3,7768-7786).
gacaacaacccttatcgta

SEQ ID NO: 17355 - DNA, 19 bp, Homo sapiens
  siRNA target sequence for POLQ (NM_006596.3,7770-7788).
caacaacccttatcgtaaa

SEQ ID NO: 17356 - DNA, 19 bp, Homo sapiens
  siRNA target sequence for POLQ (NM_006596.3,7773-7791).
caacccttatcgtaaagct

SEQ ID NO: 17357 - DNA, 19 bp, Homo sapiens
  siRNA target sequence for POLQ (NM_006596.3,7796-7814).
ctgagcgtcaagctatcaa

SEQ ID NO: 17358 - DNA, 19 bp, Homo sapiens
  siRNA target sequence for POLQ (NM_006596.3,7798-7816).
gagcgtcaagctatcaaca

SEQ ID NO: 17359 - DNA, 19 bp, Homo sapiens
  siRNA target sequence for POLQ (NM_006596.3,7801-7819).
cgtcaagctatcaacacaa

SEQ ID NO: 17360 - DNA, 19 bp, Homo sapiens
  siRNA target sequence for POLQ (NM_006596.3,7829-7847).
gatcagcagctgatattgt

SEQ ID NO: 17361 - DNA, 19 bp, Homo sapiens
  siRNA target sequence for POLQ (NM_006596.3,7834-7852).
gcagctgatattgtcaaaa

SEQ ID NO: 17362 - DNA, 19 bp, Homo sapiens
  siRNA target sequence for POLQ (NM_006596.3,7948-7966).
ggattgtcacgaaagagaa

SEQ ID NO: 17363 - DNA, 19 bp, Homo sapiens
  siRNA target sequence for POLQ (NM_006596.3,7949-7967).
gattgtcacgaaagagaaa

SEQ ID NO: 17364 - DNA, 19 bp, Homo sapiens
  siRNA target sequence for RAD1 (NM_002853.2,384-402).
gccagccttgacaacgtta

SEQ ID NO: 17365 - DNA, 19 bp, Homo sapiens
  siRNA target sequence for RAD1 (NM_002853.2,388-406).
gccttgacaacgttaggaa

SEQ ID NO: 17366 - DNA, 19 bp, Homo sapiens
  siRNA target sequence for RAD1 (NM_002853.2,389-407).
ccttgacaacgttaggaat

SEQ ID NO: 17367 - DNA, 19 bp, Homo sapiens
  siRNA target sequence for RAD1 (NM_002853.2,393-411).
gacaacgttaggaatctct

SEQ ID NO: 17368 - DNA, 19 bp, Homo sapiens
  siRNA target sequence for RAD1 (NM_002853.2,412-430).
ccactatcttgaaagctat

SEQ ID NO: 17369 - DNA, 19 bp, Homo sapiens
  siRNA target sequence for RAD1 (NM_002853.2,413-431).
cactatcttgaaagctatt

SEQ ID NO: 17370 - DNA, 19 bp, Homo sapiens
  siRNA target sequence for RAD1 (NM_002853.2,448-466).
ccacgtgtttcgcaactaa

SEQ ID NO: 17371 - DNA, 19 bp, Homo sapiens
  siRNA target sequence for RAD1 (NM_002853.2,449-467).
cacgtgtttcgcaactaaa

SEQ ID NO: 17372 - DNA, 19 bp, Homo sapiens
  siRNA target sequence for RAD1 (NM_002853.2,451-469).
cgtgtttcgcaactaaaaa

SEQ ID NO: 17373 - DNA, 19 bp, Homo sapiens
  siRNA target sequence for RAD1 (NM_002853.2,452-470).
gtgtttcgcaactaaaaat

SEQ ID NO: 17374 - DNA, 19 bp, Homo sapiens
  siRNA target sequence for RAD1 (NM_002853.2,500-518).
gtgtgtgcaagcaaatgct

SEQ ID NO: 17375 - DNA, 19 bp, Homo sapiens
  siRNA target sequence for RAD1 (NM_002853.2,561-579).
gagtctgttacttttcgaa

SEQ ID NO: 17376 - DNA, 19 bp, Homo sapiens
  siRNA target sequence for RAD1 (NM_002853.2,591-609).
gtccttttagactgtttat

SEQ ID NO: 17377 - DNA, 19 bp, Homo sapiens
  siRNA target sequence for RAD1 (NM_002853.2,594-612).
cttttagactgtttatcta

SEQ ID NO: 17378 - DNA, 19 bp, Homo sapiens
  siRNA target sequence for RAD1 (NM_002853.2,640-658).
ctttaactgcacttcgaat

SEQ ID NO: 17379 - DNA, 19 bp, Homo sapiens
  siRNA target sequence for RAD1 (NM_002853.2,646-664).
ctgcacttcgaatgtgtta

SEQ ID NO: 17380 - DNA, 19 bp, Homo sapiens
  siRNA target sequence for RAD1 (NM_002853.2,659-677).
gtgttaccaaggttatggt

SEQ ID NO: 17381 - DNA, 19 bp, Homo sapiens
  siRNA target sequence for RAD1 (NM_002853.2,661-679).
gttaccaaggttatggtta

SEQ ID NO: 17382 - DNA, 19 bp, Homo sapiens
  siRNA target sequence for RAD1 (NM_002853.2,670-688).
gttatggttaccctttgat

SEQ ID NO: 17383 - DNA, 19 bp, Homo sapiens
  siRNA target sequence for RAD1 (NM_002853.2,770-788).
ctgcagcaccaatgttatt

SEQ ID NO: 17384 - DNA, 19 bp, Homo sapiens
  siRNA target sequence for RAD1 (NM_002853.2,772-790).
gcagcaccaatgttattaa

SEQ ID NO: 17385 - DNA, 19 bp, Homo sapiens
  siRNA target sequence for RAD1 (NM_002853.2,812-830).
ggggctccgtgaagcattt

SEQ ID NO: 17386 - DNA, 19 bp, Homo sapiens
  siRNA target sequence for RAD1 (NM_002853.2,874-892).
ctcctgacaagccttattt

SEQ ID NO: 17387 - DNA, 19 bp, Homo sapiens
  siRNA target sequence for RAD1 (NM_002853.2,876-894).
cctgacaagccttatttca

SEQ ID NO: 17388 - DNA, 19 bp, Homo sapiens
  siRNA target sequence for RAD1 (NM_002853.2,929-947).
ccttgactatcccaaagat

SEQ ID NO: 17389 - DNA, 19 bp, Homo sapiens
  siRNA target sequence for RAD1 (NM_002853.2,973-991).
gtaatcagacccaagtcaa

SEQ ID NO: 17390 - DNA, 19 bp, Homo sapiens
  siRNA target sequence for RAD1 (NM_002853.2,984-1002).
caagtcaacagatacaaga

SEQ ID NO: 17391 - DNA, 19 bp, Homo sapiens
  siRNA target sequence for RAD1 (NM_002853.2,1018-1036).
cctctacaaaggcattagt

SEQ ID NO: 17392 - DNA, 19 bp, Homo sapiens
  siRNA target sequence for RAD1 (NM_002853.2,1029-1047).
gcattagtcctatcttgta

SEQ ID NO: 17393 - DNA, 19 bp, Homo sapiens
  siRNA target sequence for RAD1 (NM_002853.2,1030-1048).
cattagtcctatcttgtaa

SEQ ID NO: 17394 - DNA, 19 bp, Homo sapiens
  siRNA target sequence for RAD1 (NM_002853.2,1035-1053).
gtcctatcttgtaaggtat

SEQ ID NO: 17395 - DNA, 19 bp, Homo sapiens
  siRNA target sequence for RAD1 (NM_002853.2,1038-1056).
ctatcttgtaaggtatcta

SEQ ID NO: 17396 - DNA, 19 bp, Homo sapiens
  siRNA target sequence for RAD1 (NM_002853.2,1050-1068).
gtatctattcggacagata

SEQ ID NO: 17397 - DNA, 19 bp, Homo sapiens
  siRNA target sequence for RAD1 (NM_002853.2,1072-1090).
gaggcttcctttcattaca

SEQ ID NO: 17398 - DNA, 19 bp, Homo sapiens
  siRNA target sequence for RAD1 (NM_002853.2,1080-1098).
ctttcattacagtatatga

SEQ ID NO: 17399 - DNA, 19 bp, Homo sapiens
  siRNA target sequence for RAD1 (NM_002853.2,1107-1125).
gaagatggacaaatatgtt

SEQ ID NO: 17400 - DNA, 19 bp, Homo sapiens
  siRNA target sequence for RAD18 (NM_020165.2,116-134).
ggcagtcatgaagacaata

SEQ ID NO: 17401 - DNA, 19 bp, Homo sapiens
  siRNA target sequence for RAD18 (NM_020165.2,118-136).
cagtcatgaagacaataga

SEQ ID NO: 17402 - DNA, 19 bp, Homo sapiens
  siRNA target sequence for RAD18 (NM_020165.2,153-171).
ggaatttgcttcgagtatt

SEQ ID NO: 17403 - DNA, 19 bp, Homo sapiens
  siRNA target sequence for RAD18 (NM_020165.2,161-179).
cttcgagtatttcaacatt

SEQ ID NO: 17404 - DNA, 19 bp, Homo sapiens
  siRNA target sequence for RAD18 (NM_020165.2,193-211).
ctcagtgttcacataacta

SEQ ID NO: 17405 - DNA, 19 bp, Homo sapiens
  siRNA target sequence for RAD18 (NM_020165.2,195-213).
cagtgttcacataactact

SEQ ID NO: 17406 - DNA, 19 bp, Homo sapiens
  siRNA target sequence for RAD18 (NM_020165.2,212-230).
ctgctctctctgtataaga

SEQ ID NO: 17407 - DNA, 19 bp, Homo sapiens
  siRNA target sequence for RAD18 (NM_020165.2,280-298).
cagagccggatctgaaaaa

SEQ ID NO: 17408 - DNA, 19 bp, Homo sapiens
  siRNA target sequence for RAD18 (NM_020165.2,293-311).
gaaaaataaccgcatatta

SEQ ID NO: 17409 - DNA, 19 bp, Homo sapiens
  siRNA target sequence for RAD18 (NM_020165.2,332-350).
gaattttgcacggaatcat

SEQ ID NO: 17410 - DNA, 19 bp, Homo sapiens
  siRNA target sequence for RAD18 (NM_020165.2,411-429).
cttgctgtcaaagtatata

SEQ ID NO: 17411 - DNA, 19 bp, Homo sapiens
  siRNA target sequence for RAD18 (NM_020165.2,438-456).
gcctccagacagtctttaa

SEQ ID NO: 17412 - DNA, 19 bp, Homo sapiens
  siRNA target sequence for RAD18 (NM_020165.2,495-513).
gaaatgagtggttctacat

SEQ ID NO: 17413 - DNA, 19 bp, Homo sapiens
  siRNA target sequence for RAD18 (NM_020165.2,508-526).
ctacatcagagttgttgat

SEQ ID NO: 17414 - DNA, 19 bp, Homo sapiens
  siRNA target sequence for RAD18 (NM_020165.2,511-529).
catcagagttgttgataaa

SEQ ID NO: 17415 - DNA, 19 bp, Homo sapiens
  siRNA target sequence for RAD18 (NM_020165.2,514-532).
cagagttgttgataaaaga

SEQ ID NO: 17416 - DNA, 19 bp, Homo sapiens
  siRNA target sequence for RAD18 (NM_020165.2,516-534).
gagttgttgataaaagaaa

SEQ ID NO: 17417 - DNA, 19 bp, Homo sapiens
  siRNA target sequence for RAD18 (NM_020165.2,584-602).
caaagagacacgttctgta

SEQ ID NO: 17418 - DNA, 19 bp, Homo sapiens
  siRNA target sequence for RAD18 (NM_020165.2,650-668).
ctcgacatccactttgaaa

SEQ ID NO: 17419 - DNA, 19 bp, Homo sapiens
  siRNA target sequence for RAD18 (NM_020165.2,652-670).
cgacatccactttgaaaca

SEQ ID NO: 17420 - DNA, 19 bp, Homo sapiens
  siRNA target sequence for RAD18 (NM_020165.2,690-708).
cctgtttgcggggttaaca

SEQ ID NO: 17421 - DNA, 19 bp, Homo sapiens
  siRNA target sequence for RAD18 (NM_020165.2,691-709).
ctgtttgcggggttaacat

SEQ ID NO: 17422 - DNA, 19 bp, Homo sapiens
  siRNA target sequence for RAD18 (NM_020165.2,718-736).
gtcacattaataagcattt

SEQ ID NO: 17423 - DNA, 19 bp, Homo sapiens
  siRNA target sequence for RAD18 (NM_020165.2,745-763).
gtttatcacgcgaagagaa

SEQ ID NO: 17424 - DNA, 19 bp, Homo sapiens
  siRNA target sequence for RAD18 (NM_020165.2,797-815).
gaagccgctgcccaaaact

SEQ ID NO: 17425 - DNA, 19 bp, Homo sapiens
  siRNA target sequence for RAD18 (NM_020165.2,801-819).
ccgctgcccaaaactgtat

SEQ ID NO: 17426 - DNA, 19 bp, Homo sapiens
  siRNA target sequence for RAD18 (NM_020165.2,802-820).
cgctgcccaaaactgtata

SEQ ID NO: 17427 - DNA, 19 bp, Homo sapiens
  siRNA target sequence for RAD18 (NM_020165.2,803-821).
gctgcccaaaactgtatat

SEQ ID NO: 17428 - DNA, 19 bp, Homo sapiens
  siRNA target sequence for RAD18 (NM_020165.2,806-824).
gcccaaaactgtatataat

SEQ ID NO: 17429 - DNA, 19 bp, Homo sapiens
  siRNA target sequence for RAD18 (NM_020165.2,828-846).
ctctctgatcgtgatttaa

SEQ ID NO: 17430 - DNA, 19 bp, Homo sapiens
  siRNA target sequence for RAD18 (NM_020165.2,854-872).
gctaaaagagcatggatta

SEQ ID NO: 17431 - DNA, 19 bp, Homo sapiens
  siRNA target sequence for RAD18 (NM_020165.2,855-873).
ctaaaagagcatggattat

SEQ ID NO: 17432 - DNA, 19 bp, Homo sapiens
  siRNA target sequence for RAD18 (NM_020165.2,863-881).
gcatggattatctattcaa

SEQ ID NO: 17433 - DNA, 19 bp, Homo sapiens
  siRNA target sequence for RAD18 (NM_020165.2,938-956).
ccaatgcgatgctttgcat

SEQ ID NO: 17434 - DNA, 19 bp, Homo sapiens
  siRNA target sequence for RAD18 (NM_020165.2,943-961).
gcgatgctttgcatcctaa

SEQ ID NO: 17435 - DNA, 19 bp, Homo sapiens
  siRNA target sequence for RAD18 (NM_020165.2,944-962).
cgatgctttgcatcctaaa

SEQ ID NO: 17436 - DNA, 19 bp, Homo sapiens
  siRNA target sequence for RAD18 (NM_020165.2,1004-1022).
gactaggatgcgtcttgaa

SEQ ID NO: 17437 - DNA, 19 bp, Homo sapiens
  siRNA target sequence for RAD18 (NM_020165.2,1015-1033).
gtcttgaagctagtaaact

SEQ ID NO: 17438 - DNA, 19 bp, Homo sapiens
  siRNA target sequence for RAD18 (NM_020165.2,1017-1035).
cttgaagctagtaaactca

SEQ ID NO: 17439 - DNA, 19 bp, Homo sapiens
  siRNA target sequence for RAD18 (NM_020165.2,1023-1041).
gctagtaaactcaatgaaa

SEQ ID NO: 17440 - DNA, 19 bp, Homo sapiens
  siRNA target sequence for RAD18 (NM_020165.2,1091-1109).
ccacagtaaatatcgtaaa

SEQ ID NO: 17441 - DNA, 19 bp, Homo sapiens
  siRNA target sequence for RAD18 (NM_020165.2,1096-1114).
gtaaatatcgtaaaaaaca

SEQ ID NO: 17442 - DNA, 19 bp, Homo sapiens
  siRNA target sequence for RAD18 (NM_020165.2,1221-1239).
gaaaagctatcttctgtat

SEQ ID NO: 17443 - DNA, 19 bp, Homo sapiens
  siRNA target sequence for RAD18 (NM_020165.2,1240-1258).
gcatgggacaggaagataa

SEQ ID NO: 17444 - DNA, 19 bp, Homo sapiens
  siRNA target sequence for RAD18 (NM_020165.2,1241-1259).
catgggacaggaagataat

SEQ ID NO: 17445 - DNA, 19 bp, Homo sapiens
  siRNA target sequence for RAD18 (NM_020165.2,1334-1352).
ggattcttctagctgtatt

SEQ ID NO: 17446 - DNA, 19 bp, Homo sapiens
  siRNA target sequence for RAD18 (NM_020165.2,1345-1363).
gctgtattgatattcaaga

SEQ ID NO: 17447 - DNA, 19 bp, Homo sapiens
  siRNA target sequence for RAD18 (NM_020165.2,1348-1366).
gtattgatattcaagaagt

SEQ ID NO: 17448 - DNA, 19 bp, Homo sapiens
  siRNA target sequence for RAD18 (NM_020165.2,1380-1398).
gaatcagattcatgcaata

SEQ ID NO: 17449 - DNA, 19 bp, Homo sapiens
  siRNA target sequence for RAD18 (NM_020165.2,1403-1421).
cagttcagacatcataaga

SEQ ID NO: 17450 - DNA, 19 bp, Homo sapiens
  siRNA target sequence for RAD18 (NM_020165.2,1410-1428).
gacatcataagagatcttt

SEQ ID NO: 17451 - DNA, 19 bp, Homo sapiens
  siRNA target sequence for RAD18 (NM_020165.2,1443-1461).
gcctgggaagcatcacata

SEQ ID NO: 17452 - DNA, 19 bp, Homo sapiens
  siRNA target sequence for RAD18 (NM_020165.2,1456-1474).
cacataaaaacgatcttca

SEQ ID NO: 17453 - DNA, 19 bp, Homo sapiens
  siRNA target sequence for RAD18 (NM_020165.2,1508-1526).
cacaagagccgctgaaagt

SEQ ID NO: 17454 - DNA, 19 bp, Homo sapiens
  siRNA target sequence for RAD18 (NM_020165.2,1539-1557).
ccaagaaacaagcgtaata

SEQ ID NO: 17455 - DNA, 19 bp, Homo sapiens
  siRNA target sequence for RAD51 (NM_002875.2,423-441).
ccaaagaaggagctaataa

SEQ ID NO: 17456 - DNA, 19 bp, Homo sapiens
  siRNA target sequence for RAD51 (NM_002875.2,428-446).
gaaggagctaataaatatt

SEQ ID NO: 17457 - DNA, 19 bp, Homo sapiens
  siRNA target sequence for RAD51 (NM_002875.2,457-475).
gtgaagccaaagctgataa

SEQ ID NO: 17458 - DNA, 19 bp, Homo sapiens
  siRNA target sequence for RAD51 (NM_002875.2,490-508).
cagctaaattagttccaat

SEQ ID NO: 17459 - DNA, 19 bp, Homo sapiens
  siRNA target sequence for RAD51 (NM_002875.2,541-559).
ggcggtcagagatcataca

SEQ ID NO: 17460 - DNA, 19 bp, Homo sapiens
  siRNA target sequence for RAD51 (NM_002875.2,543-561).
cggtcagagatcatacaga

SEQ ID NO: 17461 - DNA, 19 bp, Homo sapiens
  siRNA target sequence for RAD51 (NM_002875.2,549-567).
gagatcatacagattacta

SEQ ID NO: 17462 - DNA, 19 bp, Homo sapiens
  siRNA target sequence for RAD51 (NM_002875.2,571-589).
gctccaaagagcttgacaa

SEQ ID NO: 17463 - DNA, 19 bp, Homo sapiens
  siRNA target sequence for RAD51 (NM_002875.2,581-599).
gcttgacaaactacttcaa

SEQ ID NO: 17464 - DNA, 19 bp, Homo sapiens
  siRNA target sequence for RAD51 (NM_002875.2,594-612).
cttcaaggtggaattgaga

SEQ ID NO: 17465 - DNA, 19 bp, Homo sapiens
  siRNA target sequence for RAD51 (NM_002875.2,604-622).
gaattgagactggatctat

SEQ ID NO: 17466 - DNA, 19 bp, Homo sapiens
  siRNA target sequence for RAD51 (NM_002875.2,615-633).
ggatctatcacagaaatgt

SEQ ID NO: 17467 - DNA, 19 bp, Homo sapiens
  siRNA target sequence for RAD51 (NM_002875.2,738-756).
gacactgagggtaccttta

SEQ ID NO: 17468 - DNA, 19 bp, Homo sapiens
  siRNA target sequence for RAD51 (NM_002875.2,802-820).
gcagtgatgtcctggataa

SEQ ID NO: 17469 - DNA, 19 bp, Homo sapiens
  siRNA target sequence for RAD51 (NM_002875.2,815-833).
ggataatgtagcatatgct

SEQ ID NO: 17470 - DNA, 19 bp, Homo sapiens
  siRNA target sequence for RAD51 (NM_002875.2,887-905).
gatggtagaatctaggtat

SEQ ID NO: 17471 - DNA, 19 bp, Homo sapiens
  siRNA target sequence for RAD51 (NM_002875.2,898-916).
ctaggtatgcactgcttat

SEQ ID NO: 17472 - DNA, 19 bp, Homo sapiens
  siRNA target sequence for RAD51 (NM_002875.2,901-919).
ggtatgcactgcttattgt

SEQ ID NO: 17473 - DNA, 19 bp, Homo sapiens
  siRNA target sequence for RAD51 (NM_002875.2,1016-1034).
gcgactcgctgatgagttt

SEQ ID NO: 17474 - DNA, 19 bp, Homo sapiens
  siRNA target sequence for RAD51 (NM_002875.2,1035-1053).
ggtgtagcagtggtaatca

SEQ ID NO: 17475 - DNA, 19 bp, Homo sapiens
  siRNA target sequence for RAD51 (NM_002875.2,1076-1094).
ggatggagcagcgatgttt

SEQ ID NO: 17476 - DNA, 19 bp, Homo sapiens
  siRNA target sequence for RAD51 (NM_002875.2,1113-1131).
cctattggaggaaatatca

SEQ ID NO: 17477 - DNA, 19 bp, Homo sapiens
  siRNA target sequence for RAD51 (NM_002875.2,1114-1132).
ctattggaggaaatatcat

SEQ ID NO: 17478 - DNA, 19 bp, Homo sapiens
  siRNA target sequence for RAD51 (NM_002875.2,1219-1237).
ctgaagctgaagctatgtt

SEQ ID NO: 17479 - DNA, 19 bp, Homo sapiens
  siRNA target sequence for RAD51C (NM_002876.2,56-74).
cgttccgctttgaaatgca

SEQ ID NO: 17480 - DNA, 19 bp, Homo sapiens
  siRNA target sequence for RAD51C (NM_002876.2,173-191).
ccgagcttagcaaagaagt

SEQ ID NO: 17481 - DNA, 19 bp, Homo sapiens
  siRNA target sequence for RAD51C (NM_002876.2,174-192).
cgagcttagcaaagaagtt

SEQ ID NO: 17482 - DNA, 19 bp, Homo sapiens
  siRNA target sequence for RAD51C (NM_002876.2,280-298).
gagtcacacaagaagtgta

SEQ ID NO: 17483 - DNA, 19 bp, Homo sapiens
  siRNA target sequence for RAD51C (NM_002876.2,348-366).
cttctgttcagcactagat

SEQ ID NO: 17484 - DNA, 19 bp, Homo sapiens
  siRNA target sequence for RAD51C (NM_002876.2,351-369).
ctgttcagcactagatgat

SEQ ID NO: 17485 - DNA, 19 bp, Homo sapiens
  siRNA target sequence for RAD51C (NM_002876.2,377-395).
ggggtggagtgcccttaat

SEQ ID NO: 17486 - DNA, 19 bp, Homo sapiens
  siRNA target sequence for RAD51C (NM_002876.2,379-397).
ggtggagtgcccttaatga

SEQ ID NO: 17487 - DNA, 19 bp, Homo sapiens
  siRNA target sequence for RAD51C (NM_002876.2,425-443).
gtgttggaaaaacacaatt

SEQ ID NO: 17488 - DNA, 19 bp, Homo sapiens
  siRNA target sequence for RAD51C (NM_058216.1,471-489).
gataccagaatgttttgga

SEQ ID NO: 17489 - DNA, 19 bp, Homo sapiens
  siRNA target sequence for RAD51C (NM_058216.1,495-513).
ggcaggtgaagcagttttt

SEQ ID NO: 17490 - DNA, 19 bp, Homo sapiens
  siRNA target sequence for RAD51C (NM_058216.1,496-514).
gcaggtgaagcagttttta

SEQ ID NO: 17491 - DNA, 19 bp, Homo sapiens
  siRNA target sequence for RAD51C (NM_058216.1,521-539).
cagagggaagttttatggt

SEQ ID NO: 17492 - DNA, 19 bp, Homo sapiens
  siRNA target sequence for RAD51C (NM_058216.1,526-544).
ggaagttttatggttgata

SEQ ID NO: 17493 - DNA, 19 bp, Homo sapiens
  siRNA target sequence for RAD51C (NM_058216.1,530-548).
gttttatggttgatagagt

SEQ ID NO: 17494 - DNA, 19 bp, Homo sapiens
  siRNA target sequence for RAD51C (NM_058216.1,576-594).
gcaccttcagcttatagca

SEQ ID NO: 17495 - DNA, 19 bp, Homo sapiens
  siRNA target sequence for RAD51C (NM_058216.1,586-604).
cttatagcagaaaaacaca

SEQ ID NO: 17496 - DNA, 19 bp, Homo sapiens
  siRNA target sequence for RAD51C (NM_058216.1,631-649).
gaggatttcactcttgata

SEQ ID NO: 17497 - DNA, 19 bp, Homo sapiens
  siRNA target sequence for RAD51C (NM_058216.1,683-701).
gtgactacacagagttact

SEQ ID NO: 17498 - DNA, 19 bp, Homo sapiens
  siRNA target sequence for RAD51C (NM_058216.1,696-714).
gttactggcacaagtttat

SEQ ID NO: 17499 - DNA, 19 bp, Homo sapiens
  siRNA target sequence for RAD51C (NM_058216.1,743-761).
caaaggttcgactagtgat

SEQ ID NO: 17500 - DNA, 19 bp, Homo sapiens
  siRNA target sequence for RAD51C (NM_058216.1,759-777).
gatagtggatggtattgct

SEQ ID NO: 17501 - DNA, 19 bp, Homo sapiens
  siRNA target sequence for RAD51C (NM_058216.1,809-827).
ctcttcgtactcggttatt

SEQ ID NO: 17502 - DNA, 19 bp, Homo sapiens
  siRNA target sequence for RAD51C (NM_058216.1,811-829).
cttcgtactcggttattaa

SEQ ID NO: 17503 - DNA, 19 bp, Homo sapiens
  siRNA target sequence for RAD51C (NM_058216.1,835-853).
ctagcccagcaaatgatca

SEQ ID NO: 17504 - DNA, 19 bp, Homo sapiens
  siRNA target sequence for RAD51C (NM_058216.1,897-915).
gatgacaacaaagattgat

SEQ ID NO: 17505 - DNA, 19 bp, Homo sapiens
  siRNA target sequence for RAD51C (NM_058216.1,957-975).
gggacatgctgctacaata

SEQ ID NO: 17506 - DNA, 19 bp, Homo sapiens
  siRNA target sequence for RAD51C (NM_058216.1,967-985).
gctacaatacggctaatct

SEQ ID NO: 17507 - DNA, 19 bp, Homo sapiens
  siRNA target sequence for RAD51C (NM_058216.1,968-986).
ctacaatacggctaatctt

SEQ ID NO: 17508 - DNA, 19 bp, Homo sapiens
  siRNA target sequence for RAD51C (NM_058216.1,988-1006).
cattgggaccgaaagcaaa

SEQ ID NO: 17509 - DNA, 19 bp, Homo sapiens
  siRNA target sequence for RAD51C (NM_058216.1,992-1010).
gggaccgaaagcaaaggtt

SEQ ID NO: 17510 - DNA, 19 bp, Homo sapiens
  siRNA target sequence for RAD51C (NM_058216.1,1007-1025).
ggttggcaacattgtacaa

SEQ ID NO: 17511 - DNA, 19 bp, Homo sapiens
  siRNA target sequence for RAD51C (NM_058216.1,1046-1064).
gcacagtactgtttcaaat

SEQ ID NO: 17512 - DNA, 19 bp, Homo sapiens
  siRNA target sequence for RAD51C (NM_058216.1,1093-1111).
gttacttctgcatgttcat

SEQ ID NO: 17513 - DNA, 19 bp, Homo sapiens
  siRNA target sequence for RAD51L1 (NM_002877.3,74-92).
ctaaaacgagtgggtttat

SEQ ID NO: 17514 - DNA, 19 bp, Homo sapiens
  siRNA target sequence for RAD51L1 (NM_002877.3,111-129).
gtctgagtagacatcagat

SEQ ID NO: 17515 - DNA, 19 bp, Homo sapiens
  siRNA target sequence for RAD51L1 (NM_002877.3,138-156).
gtcaggactttttatgtct

SEQ ID NO: 17516 - DNA, 19 bp, Homo sapiens
  siRNA target sequence for RAD51L1 (NM_002877.3,159-177).
ccccactggagcttatgaa

SEQ ID NO: 17517 - DNA, 19 bp, Homo sapiens
  siRNA target sequence for RAD51L1 (NM_002877.3,181-199).
gactggtctgagttatcga

SEQ ID NO: 17518 - DNA, 19 bp, Homo sapiens
  siRNA target sequence for RAD51L1 (NM_002877.3,203-221).
gtccatgaacttctatgta

SEQ ID NO: 17519 - DNA, 19 bp, Homo sapiens
  siRNA target sequence for RAD51L1 (NM_002877.3,256-274).
ggcttatgggataaaagca

SEQ ID NO: 17520 - DNA, 19 bp, Homo sapiens
  siRNA target sequence for RAD51L1 (NM_002877.3,292-310).
ctcaccagcattcttatct

SEQ ID NO: 17521 - DNA, 19 bp, Homo sapiens
  siRNA target sequence for RAD51L1 (NM_002877.3,387-405).
caggttgtggaaaaactca

SEQ ID NO: 17522 - DNA, 19 bp, Homo sapiens
  siRNA target sequence for RAD51L1 (NM_002877.3,395-413).
ggaaaaactcagttttgta

SEQ ID NO: 17523 - DNA, 19 bp, Homo sapiens
  siRNA target sequence for RAD51L1 (NM_002877.3,444-462).
ccaacatgggaggattaga

SEQ ID NO: 17524 - DNA, 19 bp, Homo sapiens
  siRNA target sequence for RAD51L1 (NM_002877.3,482-500).
gacacagagtctgcattta

SEQ ID NO: 17525 - DNA, 19 bp, Homo sapiens
  siRNA target sequence for RAD51L1 (NM_002877.3,531-549).
cccgttttcccagatattt

SEQ ID NO: 17526 - DNA, 19 bp, Homo sapiens
  siRNA target sequence for RAD51L1 (NM_002877.3,533-551).
cgttttcccagatatttta

SEQ ID NO: 17527 - DNA, 19 bp, Homo sapiens
  siRNA target sequence for RAD51L1 (NM_002877.3,620-638).
gttctacaaaggattgaat

SEQ ID NO: 17528 - DNA, 19 bp, Homo sapiens
  siRNA target sequence for RAD51L1 (NM_002877.3,712-730).
ggagtttgatgcacaactt

SEQ ID NO: 17529 - DNA, 19 bp, Homo sapiens
  siRNA target sequence for RAD51L1 (NM_002877.3,715-733).
gtttgatgcacaacttcaa

SEQ ID NO: 17530 - DNA, 19 bp, Homo sapiens
  siRNA target sequence for RAD51L1 (NM_002877.3,770-788).
gaggcatcctccttgaagt

SEQ ID NO: 17531 - DNA, 19 bp, Homo sapiens
  siRNA target sequence for RAD51L1 (NM_002877.3,773-791).
gcatcctccttgaagtatt

SEQ ID NO: 17532 - DNA, 19 bp, Homo sapiens
  siRNA target sequence for RAD51L1 (NM_002877.3,815-833).
gttatcttgacgaatcaga

SEQ ID NO: 17533 - DNA, 19 bp, Homo sapiens
  siRNA target sequence for RAD51L1 (NM_002877.3,820-838).
cttgacgaatcagattaca

SEQ ID NO: 17534 - DNA, 19 bp, Homo sapiens
  siRNA target sequence for RAD51L1 (NM_002877.3,877-895).
ggtgtctccagctgatgat

SEQ ID NO: 17535 - DNA, 19 bp, Homo sapiens
  siRNA target sequence for RAD51L1 (NM_002877.3,878-896).
gtgtctccagctgatgatt

SEQ ID NO: 17536 - DNA, 19 bp, Homo sapiens
  siRNA target sequence for RAD51L1 (NM_002877.3,934-952).
gatagccgcactaggaaat

SEQ ID NO: 17537 - DNA, 19 bp, Homo sapiens
  siRNA target sequence for RAD51L1 (NM_002877.3,938-956).
gccgcactaggaaatacct

SEQ ID NO: 17538 - DNA, 19 bp, Homo sapiens
  siRNA target sequence for RAD51L1 (NM_002877.3,1075-1093).
ggaaggcctggttcttcaa

SEQ ID NO: 17539 - DNA, 19 bp, Homo sapiens
  siRNA target sequence for RAD51L3 (NM_002878.2,377-395).
cagaaatgtggcttgtctt

SEQ ID NO: 17540 - DNA, 19 bp, Homo sapiens
  siRNA target sequence for RAD51L3 (NM_002878.2,591-609).
gcaaaactcaggtatgtct

SEQ ID NO: 17541 - DNA, 19 bp, Homo sapiens
  siRNA target sequence for RAD51L3 (NM_002878.2,630-648).
cccatggcctgcagcaaaa

SEQ ID NO: 17542 - DNA, 19 bp, Homo sapiens
  siRNA target sequence for RAD51L3 (NM_002878.2,640-658).
gcagcaaaacgtcctatat

SEQ ID NO: 17543 - DNA, 19 bp, Homo sapiens
  siRNA target sequence for RAD51L3 (NM_002878.2,643-661).
gcaaaacgtcctatatgta

SEQ ID NO: 17544 - DNA, 19 bp, Homo sapiens
  siRNA target sequence for RAD51L3 (NM_002878.2,652-670).
cctatatgtagattccaat

SEQ ID NO: 17545 - DNA, 19 bp, Homo sapiens
  siRNA target sequence for RAD51L3 (NM_002878.2,757-775).
ccaggtggtgcatgcattt

SEQ ID NO: 17546 - DNA, 19 bp, Homo sapiens
  siRNA target sequence for RAD51L3 (NM_002878.2,761-779).
gtggtgcatgcatttgaca

SEQ ID NO: 17547 - DNA, 19 bp, Homo sapiens
  siRNA target sequence for RAD51L3 (NM_002878.2,920-938).
gaaggcttggccttgatga

SEQ ID NO: 17548 - DNA, 19 bp, Homo sapiens
  siRNA target sequence for RAD51L3 (NM_002878.2,994-1012).
ggtgaccaaccacataact

SEQ ID NO: 17549 - DNA, 19 bp, Homo sapiens
  siRNA target sequence for RAD51L3 (NM_002878.2,1132-1150).
ggcgtgtctggccaaatct

SEQ ID NO: 17550 - DNA, 19 bp, Homo sapiens
  siRNA target sequence for RAD51L3 (NM_002878.2,1133-1151).
gcgtgtctggccaaatctt

SEQ ID NO: 17551 - DNA, 19 bp, Homo sapiens
  siRNA target sequence for REV1L (NM_016316.1,230-248).
gaggaagcgagctgaaaat

SEQ ID NO: 17552 - DNA, 19 bp, Homo sapiens
  siRNA target sequence for REV1L (NM_016316.1,233-251).
gaagcgagctgaaaatgat

SEQ ID NO: 17553 - DNA, 19 bp, Homo sapiens
  siRNA target sequence for REV1L (NM_016316.1,335-353).
ggatgggacttcatctaca

SEQ ID NO: 17554 - DNA, 19 bp, Homo sapiens
  siRNA target sequence for REV1L (NM_016316.1,336-354).
gatgggacttcatctacaa

SEQ ID NO: 17555 - DNA, 19 bp, Homo sapiens
  siRNA target sequence for REV1L (NM_016316.1,339-357).
gggacttcatctacaattt

SEQ ID NO: 17556 - DNA, 19 bp, Homo sapiens
  siRNA target sequence for REV1L (NM_016316.1,340-358).
ggacttcatctacaatttt

SEQ ID NO: 17557 - DNA, 19 bp, Homo sapiens
  siRNA target sequence for REV1L (NM_016316.1,341-359).
gacttcatctacaattttt

SEQ ID NO: 17558 - DNA, 19 bp, Homo sapiens
  siRNA target sequence for REV1L (NM_016316.1,361-379).
gtggagttgccatctatgt

SEQ ID NO: 17559 - DNA, 19 bp, Homo sapiens
  siRNA target sequence for REV1L (NM_016316.1,364-382).
gagttgccatctatgttaa

SEQ ID NO: 17560 - DNA, 19 bp, Homo sapiens
  siRNA target sequence for REV1L (NM_016316.1,369-387).
gccatctatgttaatggat

SEQ ID NO: 17561 - DNA, 19 bp, Homo sapiens
  siRNA target sequence for REV1L (NM_016316.1,374-392).
ctatgttaatggatacaca

SEQ ID NO: 17562 - DNA, 19 bp, Homo sapiens
  siRNA target sequence for REV1L (NM_016316.1,396-414).
ccttccgctgaggaattga

SEQ ID NO: 17563 - DNA, 19 bp, Homo sapiens
  siRNA target sequence for REV1L (NM_016316.1,400-418).
ccgctgaggaattgagaaa

SEQ ID NO: 17564 - DNA, 19 bp, Homo sapiens
  siRNA target sequence for REV1L (NM_016316.1,401-419).
cgctgaggaattgagaaaa

SEQ ID NO: 17565 - DNA, 19 bp, Homo sapiens
  siRNA target sequence for REV1L (NM_016316.1,431-449).
gcatggaggtcaataccat

SEQ ID NO: 17566 - DNA, 19 bp, Homo sapiens
  siRNA target sequence for REV1L (NM_016316.1,450-468).
gtatattattccagatcta

SEQ ID NO: 17567 - DNA, 19 bp, Homo sapiens
  siRNA target sequence for REV1L (NM_016316.1,674-692).
gccaggtccaagcaatata

SEQ ID NO: 17568 - DNA, 19 bp, Homo sapiens
  siRNA target sequence for REV1L (NM_016316.1,701-719).
gctcaacaacagggtaaat

SEQ ID NO: 17569 - DNA, 19 bp, Homo sapiens
  siRNA target sequence for REV1L (NM_016316.1,712-730).
gggtaaatcacatcgttaa

SEQ ID NO: 17570 - DNA, 19 bp, Homo sapiens
  siRNA target sequence for REV1L (NM_016316.1,714-732).
gtaaatcacatcgttaaga

SEQ ID NO: 17571 - DNA, 19 bp, Homo sapiens
  siRNA target sequence for REV1L (NM_016316.1,770-788).
gaacagttggaatgaagaa

SEQ ID NO: 17572 - DNA, 19 bp, Homo sapiens
  siRNA target sequence for REV1L (NM_016316.1,827-845).
gacctctccgggaaggaaa

SEQ ID NO: 17573 - DNA, 19 bp, Homo sapiens
  siRNA target sequence for REV1L (NM_016316.1,871-889).
ggagcactgccatttttaa

SEQ ID NO: 17574 - DNA, 19 bp, Homo sapiens
  siRNA target sequence for REV1L (NM_016316.1,872-890).
gagcactgccatttttaat

SEQ ID NO: 17575 - DNA, 19 bp, Homo sapiens
  siRNA target sequence for REV1L (NM_016316.1,875-893).
cactgccatttttaatgga

SEQ ID NO: 17576 - DNA, 19 bp, Homo sapiens
  siRNA target sequence for REV1L (NM_016316.1,904-922).
gctctaatggtgccttaaa

SEQ ID NO: 17577 - DNA, 19 bp, Homo sapiens
  siRNA target sequence for REV1L (NM_016316.1,1081-1099).
ggaatccacacagaactaa

SEQ ID NO: 17578 - DNA, 19 bp, Homo sapiens
  siRNA target sequence for REV1L (NM_016316.1,1195-1213).
cagtatctacgtttagcaa

SEQ ID NO: 17579 - DNA, 19 bp, Homo sapiens
  siRNA target sequence for REV1L (NM_016316.1,1301-1319).
gtggaagtgtgaattgact

SEQ ID NO: 17580 - DNA, 19 bp, Homo sapiens
  siRNA target sequence for REV1L (NM_016316.1,1311-1329).
gaattgactgagtttgtca

SEQ ID NO: 17581 - DNA, 19 bp, Homo sapiens
  siRNA target sequence for REV1L (NM_016316.1,1328-1346).
caataccctacaaagacaa

SEQ ID NO: 17582 - DNA, 19 bp, Homo sapiens
  siRNA target sequence for REV1L (NM_016316.1,1396-1414).
gcaggtctgcacttgttgt

SEQ ID NO: 17583 - DNA, 19 bp, Homo sapiens
  siRNA target sequence for REV1L (NM_016316.1,1397-1415).
caggtctgcacttgttgta

SEQ ID NO: 17584 - DNA, 19 bp, Homo sapiens
  siRNA target sequence for REV1L (NM_016316.1,1453-1471).
gacatcagagctgtataat

SEQ ID NO: 17585 - DNA, 19 bp, Homo sapiens
  siRNA target sequence for REV1L (NM_016316.1,1497-1515).
gtatcagtgggtatacgaa

SEQ ID NO: 17586 - DNA, 19 bp, Homo sapiens
  siRNA target sequence for REV1L (NM_016316.1,1513-1531).
gaaatagaccagatctcaa

SEQ ID NO: 17587 - DNA, 19 bp, Homo sapiens
  siRNA target sequence for REV1L (NM_016316.1,1539-1557).
ccagtggctgttacaagta

SEQ ID NO: 17588 - DNA, 19 bp, Homo sapiens
  siRNA target sequence for REV1L (NM_016316.1,1540-1558).
cagtggctgttacaagtaa

SEQ ID NO: 17589 - DNA, 19 bp, Homo sapiens
  siRNA target sequence for REV1L (NM_016316.1,1602-1620).
cagctggagtggcagtatt

SEQ ID NO: 17590 - DNA, 19 bp, Homo sapiens
  siRNA target sequence for REV1L (NM_016316.1,1650-1668).
gcagatataccagattcat

SEQ ID NO: 17591 - DNA, 19 bp, Homo sapiens
  siRNA target sequence for REV1L (NM_016316.1,1684-1702).
cagattctgcgcaagcaaa

SEQ ID NO: 17592 - DNA, 19 bp, Homo sapiens
  siRNA target sequence for REV1L (NM_016316.1,1690-1708).
ctgcgcaagcaaatggaat

SEQ ID NO: 17593 - DNA, 19 bp, Homo sapiens
  siRNA target sequence for REV1L (NM_016316.1,1693-1711).
cgcaagcaaatggaattga

SEQ ID NO: 17594 - DNA, 19 bp, Homo sapiens
  siRNA target sequence for REV1L (NM_016316.1,1768-1786).
gcattaagaacggaatgtt

SEQ ID NO: 17595 - DNA, 19 bp, Homo sapiens
  siRNA target sequence for REV1L (NM_016316.1,1784-1802).
gttttttgggcatgctaaa

SEQ ID NO: 17596 - DNA, 19 bp, Homo sapiens
  siRNA target sequence for REV1L (NM_016316.1,1821-1839).
caagctgttccatacgatt

SEQ ID NO: 17597 - DNA, 19 bp, Homo sapiens
  siRNA target sequence for REV1L (NM_016316.1,1825-1843).
ctgttccatacgattttca

SEQ ID NO: 17598 - DNA, 19 bp, Homo sapiens
  siRNA target sequence for REV1L (NM_016316.1,1831-1849).
catacgattttcatgcata

SEQ ID NO: 17599 - DNA, 19 bp, Homo sapiens
  siRNA target sequence for REV1L (NM_016316.1,1854-1872).
gaagtcgcacaaacattgt

SEQ ID NO: 17600 - DNA, 19 bp, Homo sapiens
  siRNA target sequence for REV1L (NM_016316.1,1859-1877).
cgcacaaacattgtatgaa

SEQ ID NO: 17601 - DNA, 19 bp, Homo sapiens
  siRNA target sequence for REV1L (NM_016316.1,1888-1906).
gctacactcataacattga

SEQ ID NO: 17602 - DNA, 19 bp, Homo sapiens
  siRNA target sequence for REV1L (NM_016316.1,1889-1907).
ctacactcataacattgaa

SEQ ID NO: 17603 - DNA, 19 bp, Homo sapiens
  siRNA target sequence for REV1L (NM_016316.1,1923-1941).
gaagcgctggtagacatta

SEQ ID NO: 17604 - DNA, 19 bp, Homo sapiens
  siRNA target sequence for REV1L (NM_016316.1,1950-1968).
cttgcagagaccaaactta

SEQ ID NO: 17605 - DNA, 19 bp, Homo sapiens
  siRNA target sequence for REV1L (NM_016316.1,1989-2007).
gctgttcgtatggaaatca

SEQ ID NO: 17606 - DNA, 19 bp, Homo sapiens
  siRNA target sequence for REV1L (NM_016316.1,2028-2046).
gcctctgttggaattggtt

SEQ ID NO: 17607 - DNA, 19 bp, Homo sapiens
  siRNA target sequence for REV1L (NM_016316.1,2060-2078).
ggctagaatggcaactaga

SEQ ID NO: 17608 - DNA, 19 bp, Homo sapiens
  siRNA target sequence for REV1L (NM_016316.1,2061-2079).
gctagaatggcaactagaa

SEQ ID NO: 17609 - DNA, 19 bp, Homo sapiens
  siRNA target sequence for REV1L (NM_016316.1,2062-2080).
ctagaatggcaactagaaa

SEQ ID NO: 17610 - DNA, 19 bp, Homo sapiens
  siRNA target sequence for REV1L (NM_016316.1,2141-2159).
ccagctagtgaccaatcta

SEQ ID NO: 17611 - DNA, 19 bp, Homo sapiens
  siRNA target sequence for REV1L (NM_016316.1,2160-2178).
ccaggagttggacattcaa

SEQ ID NO: 17612 - DNA, 19 bp, Homo sapiens
  siRNA target sequence for REV1L (NM_016316.1,2166-2184).
gttggacattcaatggaat

SEQ ID NO: 17613 - DNA, 19 bp, Homo sapiens
  siRNA target sequence for REV1L (NM_016316.1,2170-2188).
gacattcaatggaatctaa

SEQ ID NO: 17614 - DNA, 19 bp, Homo sapiens
  siRNA target sequence for REV1L (NM_016316.1,2217-2235).
ggagacttgcagtatatga

SEQ ID NO: 17615 - DNA, 19 bp, Homo sapiens
  siRNA target sequence for REV1L (NM_016316.1,2346-2364).
gtttcagctgagatcaact

SEQ ID NO: 17616 - DNA, 19 bp, Homo sapiens
  siRNA target sequence for REV1L (NM_016316.1,2363-2381).
ctatggaataaggtttact

SEQ ID NO: 17617 - DNA, 19 bp, Homo sapiens
  siRNA target sequence for REV1L (NM_016316.1,2456-2474).
gaagggtaaacgtctaact

SEQ ID NO: 17618 - DNA, 19 bp, Homo sapiens
  siRNA target sequence for REV1L (NM_016316.1,2466-2484).
cgtctaactctcaaaatca

SEQ ID NO: 17619 - DNA, 19 bp, Homo sapiens
  siRNA target sequence for REV1L (NM_016316.1,2467-2485).
gtctaactctcaaaatcat

SEQ ID NO: 17620 - DNA, 19 bp, Homo sapiens
  siRNA target sequence for REV1L (NM_016316.1,2549-2567).
cattgccaggactgtaact

SEQ ID NO: 17621 - DNA, 19 bp, Homo sapiens
  siRNA target sequence for REV1L (NM_016316.1,2568-2586).
cttgaccaggcaacagata

SEQ ID NO: 17622 - DNA, 19 bp, Homo sapiens
  siRNA target sequence for REV1L (NM_016316.1,2606-2624).
ggcgatgctaaacatgttt

SEQ ID NO: 17623 - DNA, 19 bp, Homo sapiens
  siRNA target sequence for REV1L (NM_016316.1,2608-2626).
cgatgctaaacatgtttca

SEQ ID NO: 17624 - DNA, 19 bp, Homo sapiens
  siRNA target sequence for REV1L (NM_016316.1,2621-2639).
gtttcatacaatgaaacta

SEQ ID NO: 17625 - DNA, 19 bp, Homo sapiens
  siRNA target sequence for REV1L (NM_016316.1,2665-2683).
ggattcacgtgaatcagtt

SEQ ID NO: 17626 - DNA, 19 bp, Homo sapiens
  siRNA target sequence for REV1L (NM_016316.1,2733-2751).
cagtcaagccactttccta

SEQ ID NO: 17627 - DNA, 19 bp, Homo sapiens
  siRNA target sequence for REV1L (NM_016316.1,2841-2859).
gtggatctggaaatatcat

SEQ ID NO: 17628 - DNA, 19 bp, Homo sapiens
  siRNA target sequence for REV1L (NM_016316.1,2907-2925).
ccgaccagtcctgatacta

SEQ ID NO: 17629 - DNA, 19 bp, Homo sapiens
  siRNA target sequence for REV1L (NM_016316.1,2908-2926).
cgaccagtcctgatactaa

SEQ ID NO: 17630 - DNA, 19 bp, Homo sapiens
  siRNA target sequence for REV1L (NM_016316.1,2974-2992).
gtgtgcagtcgagacttaa

SEQ ID NO: 17631 - DNA, 19 bp, Homo sapiens
  siRNA target sequence for REV1L (NM_016316.1,2983-3001).
cgagacttaacctgagtat

SEQ ID NO: 17632 - DNA, 19 bp, Homo sapiens
  siRNA target sequence for REV1L (NM_016316.1,2984-3002).
gagacttaacctgagtata

SEQ ID NO: 17633 - DNA, 19 bp, Homo sapiens
  siRNA target sequence for REV1L (NM_016316.1,3023-3041).
gctggatcagtctgtttta

SEQ ID NO: 17634 - DNA, 19 bp, Homo sapiens
  siRNA target sequence for REV1L (NM_016316.1,3055-3073).
ctgatctccgggaacaagt

SEQ ID NO: 17635 - DNA, 19 bp, Homo sapiens
  siRNA target sequence for REV1L (NM_016316.1,3171-3189).
gggacagtcttgttgcaaa

SEQ ID NO: 17636 - DNA, 19 bp, Homo sapiens
  siRNA target sequence for REV1L (NM_016316.1,3172-3190).
ggacagtcttgttgcaaat

SEQ ID NO: 17637 - DNA, 19 bp, Homo sapiens
  siRNA target sequence for REV1L (NM_016316.1,3173-3191).
gacagtcttgttgcaaata

SEQ ID NO: 17638 - DNA, 19 bp, Homo sapiens
  siRNA target sequence for REV1L (NM_016316.1,3193-3211).
cagaacctcaagaatcgaa

SEQ ID NO: 17639 - DNA, 19 bp, Homo sapiens
  siRNA target sequence for REV1L (NM_016316.1,3209-3227).
gaacagtgacgcaggaata

SEQ ID NO: 17640 - DNA, 19 bp, Homo sapiens
  siRNA target sequence for REV1L (NM_016316.1,3216-3234).
gacgcaggaataaatttaa

SEQ ID NO: 17641 - DNA, 19 bp, Homo sapiens
  siRNA target sequence for REV1L (NM_016316.1,3238-3256).
cccttccagcattttcaca

SEQ ID NO: 17642 - DNA, 19 bp, Homo sapiens
  siRNA target sequence for REV1L (NM_016316.1,3305-3323).
gctgaaagcagcgtatgat

SEQ ID NO: 17643 - DNA, 19 bp, Homo sapiens
  siRNA target sequence for REV1L (NM_016316.1,3313-3331).
cagcgtatgatcaaagaca

SEQ ID NO: 17644 - DNA, 19 bp, Homo sapiens
  siRNA target sequence for REV1L (NM_016316.1,3315-3333).
gcgtatgatcaaagacaaa

SEQ ID NO: 17645 - DNA, 19 bp, Homo sapiens
  siRNA target sequence for REV1L (NM_016316.1,3370-3388).
gcgcatctgtgccaaagaa

SEQ ID NO: 17646 - DNA, 19 bp, Homo sapiens
  siRNA target sequence for REV1L (NM_016316.1,3494-3512).
gcttaacagtcctgcaaaa

SEQ ID NO: 17647 - DNA, 19 bp, Homo sapiens
  siRNA target sequence for REV1L (NM_016316.1,3495-3513).
cttaacagtcctgcaaaaa

SEQ ID NO: 17648 - DNA, 19 bp, Homo sapiens
  siRNA target sequence for REV1L (NM_016316.1,3532-3550).
gcagtccccagaagttaat

SEQ ID NO: 17649 - DNA, 19 bp, Homo sapiens
  siRNA target sequence for REV1L (NM_016316.1,3533-3551).
cagtccccagaagttaatt

SEQ ID NO: 17650 - DNA, 19 bp, Homo sapiens
  siRNA target sequence for REV1L (NM_016316.1,3535-3553).
gtccccagaagttaattga

SEQ ID NO: 17651 - DNA, 19 bp, Homo sapiens
  siRNA target sequence for REV1L (NM_016316.1,3545-3563).
gttaattgatgggtttcta

SEQ ID NO: 17652 - DNA, 19 bp, Homo sapiens
  siRNA target sequence for REV1L (NM_016316.1,3624-3642).
gtgccaggcctttctagtt

SEQ ID NO: 17653 - DNA, 19 bp, Homo sapiens
  siRNA target sequence for REV1L (NM_016316.1,3785-3803).
gaaatactgtactgatcta

SEQ ID NO: 17654 - DNA, 19 bp, Homo sapiens
  siRNA target sequence for REV1L (NM_016316.1,3793-3811).
gtactgatctaatagaaga

SEQ ID NO: 17655 - DNA, 19 bp, Homo sapiens
  siRNA target sequence for REV1L (NM_016316.1,3871-3889).
cggtggaatcggtttggaa

SEQ ID NO: 17656 - DNA, 19 bp, Homo sapiens
  siRNA target sequence for REV1L (NM_016316.1,3872-3890).
ggtggaatcggtttggaat

SEQ ID NO: 17657 - DNA, 19 bp, Homo sapiens
  siRNA target sequence for REV1L (NM_016316.1,3886-3904).
ggaatatggcatttgactt

SEQ ID NO: 17658 - DNA, 19 bp, Homo sapiens
  siRNA target sequence for REV1L (NM_016316.1,3923-3941).
ggtggttttacaacaaact

SEQ ID NO: 17659 - DNA, 19 bp, Homo sapiens
  siRNA target sequence for REV1L (NM_016316.1,3926-3944).
ggttttacaacaaacttat

SEQ ID NO: 17660 - DNA, 19 bp, Homo sapiens
  siRNA target sequence for TIAF1 (NM_004740.2,182-200).
gccgggtccaggttcttaa

SEQ ID NO: 17661 - DNA, 19 bp, Homo sapiens
  siRNA target sequence for TIAF1 (NM_004740.2,184-202).
cgggtccaggttcttaaga

SEQ ID NO: 17662 - DNA, 19 bp, Homo sapiens
  siRNA target sequence for TIAF1 (NM_004740.2,186-204).
ggtccaggttcttaagaat

SEQ ID NO: 17663 - DNA, 19 bp, Homo sapiens
  siRNA target sequence for TIAF1 (NM_004740.2,297-315).
caccccaccctctttgtct

SEQ ID NO: 17664 - DNA, 19 bp, Homo sapiens
  siRNA target sequence for TIAF1 (NM_004740.2,329-347).
gcaatgacctatttaaggt

SEQ ID NO: 17665 - DNA, 19 bp, Homo sapiens
  siRNA target sequence for TIAF1 (NM_004740.2,330-348).
caatgacctatttaaggta

SEQ ID NO: 17666 - DNA, 19 bp, Homo sapiens
  siRNA target sequence for TIAF1 (NM_004740.2,410-428).
caggtggtctggaccataa

SEQ ID NO: 17667 - DNA, 19 bp, Homo sapiens
  siRNA target sequence for TIAF1 (NM_004740.2,413-431).
gtggtctggaccataaact

SEQ ID NO: 17668 - DNA, 19 bp, Homo sapiens
  siRNA target sequence for TIAF1 (NM_078471.2,333-351).
cctccaagcgtgaatccaa

SEQ ID NO: 17669 - DNA, 19 bp, Homo sapiens
  siRNA target sequence for TIAF1 (NM_078471.2,406-424).
cctgcacctgactgacatt

SEQ ID NO: 17670 - DNA, 19 bp, Homo sapiens
  siRNA target sequence for TIAF1 (NM_078471.2,419-437).
gacattgactccgatagta

SEQ ID NO: 17671 - DNA, 19 bp, Homo sapiens
  siRNA target sequence for TIAF1 (NM_078471.2,458-476).
gactcgggccacctaagta

SEQ ID NO: 17672 - DNA, 19 bp, Homo sapiens
  siRNA target sequence for TIAF1 (NM_078471.2,620-638).
gatgagagcgcctcagaaa

SEQ ID NO: 17673 - DNA, 19 bp, Homo sapiens
  siRNA target sequence for TIAF1 (NM_078471.2,759-777).
cccctgagctagtgactaa

SEQ ID NO: 17674 - DNA, 19 bp, Homo sapiens
  siRNA target sequence for TIAF1 (NM_078471.2,1001-1019).
gatcgactggtggagatta

SEQ ID NO: 17675 - DNA, 19 bp, Homo sapiens
  siRNA target sequence for TIAF1 (NM_078471.2,1171-1189).
gccatccgatgcgaaaaca

SEQ ID NO: 17676 - DNA, 19 bp, Homo sapiens
  siRNA target sequence for TIAF1 (NM_078471.2,1646-1664).
cgtcaggatcagtcaatca

SEQ ID NO: 17677 - DNA, 19 bp, Homo sapiens
  siRNA target sequence for TIAF1 (NM_078471.2,1647-1665).
gtcaggatcagtcaatcat

SEQ ID NO: 17678 - DNA, 19 bp, Homo sapiens
  siRNA target sequence for TIAF1 (NM_078471.2,1900-1918).
ctccattcagacaatgctt

SEQ ID NO: 17679 - DNA, 19 bp, Homo sapiens
  siRNA target sequence for TIAF1 (NM_078471.2,1959-1977).
ccacattcaacgtcttcta

SEQ ID NO: 17680 - DNA, 19 bp, Homo sapiens
  siRNA target sequence for TIAF1 (NM_078471.2,2093-2111).
gcagctcagcagtttagta

SEQ ID NO: 17681 - DNA, 19 bp, Homo sapiens
  siRNA target sequence for TIAF1 (NM_078471.2,2139-2157).
gcatctcccccgatgaaca

SEQ ID NO: 17682 - DNA, 19 bp, Homo sapiens
  siRNA target sequence for TIAF1 (NM_078471.2,2402-2420).
gggacaggcccgaaactga

SEQ ID NO: 17683 - DNA, 19 bp, Homo sapiens
  siRNA target sequence for TIAF1 (NM_078471.2,2480-2498).
ctcgtctccctggtgaata

SEQ ID NO: 17684 - DNA, 19 bp, Homo sapiens
  siRNA target sequence for TIAF1 (NM_078471.2,2669-2687).
caggagttggaaagataca

SEQ ID NO: 17685 - DNA, 19 bp, Homo sapiens
  siRNA target sequence for TIAF1 (NM_078471.2,2870-2888).
ctcctggagcgccttttct

SEQ ID NO: 17686 - DNA, 19 bp, Homo sapiens
  siRNA target sequence for TIAF1 (NM_078471.2,2946-2964).
gcaaaccacaccactttct

SEQ ID NO: 17687 - DNA, 19 bp, Homo sapiens
  siRNA target sequence for TIAF1 (NM_078471.2,3215-3233).
ggcatggcggctgtcaaaa

SEQ ID NO: 17688 - DNA, 19 bp, Homo sapiens
  siRNA target sequence for TIAF1 (NM_078471.2,3216-3234).
gcatggcggctgtcaaaaa

SEQ ID NO: 17689 - DNA, 19 bp, Homo sapiens
  siRNA target sequence for TIAF1 (NM_078471.2,3292-3310).
gaagtcaaagctgcatttt

SEQ ID NO: 17690 - DNA, 19 bp, Homo sapiens
  siRNA target sequence for TIAF1 (NM_078471.2,3498-3516).
gcatgtaccgccaaggtta

SEQ ID NO: 17691 - DNA, 19 bp, Homo sapiens
  siRNA target sequence for TIAF1 (NM_078471.2,3570-3588).
cgcacctgaccaagaaaca

SEQ ID NO: 17692 - DNA, 19 bp, Homo sapiens
  siRNA target sequence for TIAF1 (NM_078471.2,3724-3742).
ggagcagcgggatgaacaa

SEQ ID NO: 17693 - DNA, 19 bp, Homo sapiens
  siRNA target sequence for TIAF1 (NM_078471.2,3740-3758).
caaaccagcaggaacctaa

SEQ ID NO: 17694 - DNA, 19 bp, Homo sapiens
  siRNA target sequence for TIAF1 (NM_078471.2,3794-3812).
cgccagcacttcaagaaga

SEQ ID NO: 17695 - DNA, 19 bp, Homo sapiens
  siRNA target sequence for TIAF1 (NM_078471.2,3831-3849).
ccattcgctgtgtacagaa

SEQ ID NO: 17696 - DNA, 19 bp, Homo sapiens
  siRNA target sequence for TIAF1 (NM_078471.2,3836-3854).
cgctgtgtacagaagaaca

SEQ ID NO: 17697 - DNA, 19 bp, Homo sapiens
  siRNA target sequence for TIAF1 (NM_078471.2,3884-3902).
ccctggtggaagcttttta

SEQ ID NO: 17698 - DNA, 19 bp, Homo sapiens
  siRNA target sequence for TIAF1 (NM_078471.2,3912-3930).
ggcccctcatcgaagtaca

SEQ ID NO: 17699 - DNA, 19 bp, Homo sapiens
  siRNA target sequence for TIAF1 (NM_078471.2,3940-3958).
ggagcagatccggaacaaa

SEQ ID NO: 17700 - DNA, 19 bp, Homo sapiens
  siRNA target sequence for TIAF1 (NM_078471.2,4075-4093).
gacagatgagcgtaacaca

SEQ ID NO: 17701 - DNA, 19 bp, Homo sapiens
  siRNA target sequence for TIAF1 (NM_078471.2,4258-4276).
cggggaagtggatgatgat

SEQ ID NO: 17702 - DNA, 19 bp, Homo sapiens
  siRNA target sequence for TIAF1 (NM_078471.2,4745-4763).
gagctccaggacatttctt

SEQ ID NO: 17703 - DNA, 19 bp, Homo sapiens
  siRNA target sequence for TIAF1 (NM_078471.2,4983-5001).
ggcagtcgtgtcagaagaa

SEQ ID NO: 17704 - DNA, 19 bp, Homo sapiens
  siRNA target sequence for TIAF1 (NM_078471.2,4985-5003).
cagtcgtgtcagaagaagt

SEQ ID NO: 17705 - DNA, 19 bp, Homo sapiens
  siRNA target sequence for TIAF1 (NM_078471.2,5388-5406).
gccttcagcgtgagaagaa

SEQ ID NO: 17706 - DNA, 19 bp, Homo sapiens
  siRNA target sequence for TIAF1 (NM_078471.2,5389-5407).
ccttcagcgtgagaagaat

SEQ ID NO: 17707 - DNA, 19 bp, Homo sapiens
  siRNA target sequence for TIAF1 (NM_078471.2,5441-5459).
gacatgaacgaattgatga

SEQ ID NO: 17708 - DNA, 19 bp, Homo sapiens
  siRNA target sequence for TIAF1 (NM_078471.2,5665-5683).
gacacgcctggagtttgaa

SEQ ID NO: 17709 - DNA, 19 bp, Homo sapiens
  siRNA target sequence for TIAF1 (NM_078471.2,5714-5732).
gctagccgtctcaaggaaa

SEQ ID NO: 17710 - DNA, 19 bp, Homo sapiens
  siRNA target sequence for TIAF1 (NM_078471.2,5715-5733).
ctagccgtctcaaggaaaa

SEQ ID NO: 17711 - DNA, 19 bp, Homo sapiens
  siRNA target sequence for TIAF1 (NM_078471.2,5933-5951).
ctgcaggctgacctaaagt

SEQ ID NO: 17712 - DNA, 19 bp, Homo sapiens
  siRNA target sequence for TIAF1 (NM_078471.2,6038-6056).
caggacatggtgacaaagt

SEQ ID NO: 17713 - DNA, 19 bp, Homo sapiens
  siRNA target sequence for TIAF1 (NM_078471.2,6040-6058).
ggacatggtgacaaagtat

SEQ ID NO: 17714 - DNA, 19 bp, Homo sapiens
  siRNA target sequence for TIAF1 (NM_078471.2,6163-6181).
caaggcagcttctgatgat

SEQ ID NO: 17715 - DNA, 19 bp, Homo sapiens
  siRNA target sequence for TIAF1 (NM_078471.2,6229-6247).
ccctgatcggtcagatgat

SEQ ID NO: 17716 - DNA, 19 bp, Homo sapiens
  siRNA target sequence for TIAF1 (NM_078471.2,6231-6249).
ctgatcggtcagatgatga

SEQ ID NO: 17717 - DNA, 19 bp, Homo sapiens
  siRNA target sequence for TIAF1 (NM_078471.2,6279-6297).
cgcgatactcccacagtta

SEQ ID NO: 17718 - DNA, 19 bp, Homo sapiens
  siRNA target sequence for TIAF1 (NM_078471.2,6280-6298).
gcgatactcccacagttat

SEQ ID NO: 17719 - DNA, 19 bp, Homo sapiens
  siRNA target sequence for TIAF1 (NM_078471.2,6282-6300).
gatactcccacagttatct

SEQ ID NO: 17720 - DNA, 19 bp, Homo sapiens
  siRNA target sequence for TIAF1 (NM_078471.2,6321-6339).
ccaagctgacggagactaa

SEQ ID NO: 17721 - DNA, 19 bp, Homo sapiens
  siRNA target sequence for XPA (NM_000380.2,234-252).
ggaggcatggctaatgtaa

SEQ ID NO: 17722 - DNA, 19 bp, Homo sapiens
  siRNA target sequence for XPA (NM_000380.2,235-253).
gaggcatggctaatgtaaa

SEQ ID NO: 17723 - DNA, 19 bp, Homo sapiens
  siRNA target sequence for XPA (NM_000380.2,280-298).
gaggaggcttcattttaga

SEQ ID NO: 17724 - DNA, 19 bp, Homo sapiens
  siRNA target sequence for XPA (NM_000380.2,349-367).
gacctgttatggaatttga

SEQ ID NO: 17725 - DNA, 19 bp, Homo sapiens
  siRNA target sequence for XPA (NM_000380.2,414-432).
cttatgaaccactttgatt

SEQ ID NO: 17726 - DNA, 19 bp, Homo sapiens
  siRNA target sequence for XPA (NM_000380.2,429-447).
gatttgccaacttgtgata

SEQ ID NO: 17727 - DNA, 19 bp, Homo sapiens
  siRNA target sequence for XPA (NM_000380.2,454-472).
gagatgctgatgataaaca

SEQ ID NO: 17728 - DNA, 19 bp, Homo sapiens
  siRNA target sequence for XPA (NM_000380.2,465-483).
gataaacacaagcttataa

SEQ ID NO: 17729 - DNA, 19 bp, Homo sapiens
  siRNA target sequence for XPA (NM_000380.2,473-491).
caagcttataaccaaaaca

SEQ ID NO: 17730 - DNA, 19 bp, Homo sapiens
  siRNA target sequence for XPA (NM_000380.2,515-533).
gaaagactgtgatttagaa

SEQ ID NO: 17731 - DNA, 19 bp, Homo sapiens
  siRNA target sequence for XPA (NM_000380.2,544-562).
cacctcttaaatttattgt

SEQ ID NO: 17732 - DNA, 19 bp, Homo sapiens
  siRNA target sequence for XPA (NM_000380.2,569-587).
gaatccacatcattcacaa

SEQ ID NO: 17733 - DNA, 19 bp, Homo sapiens
  siRNA target sequence for XPA (NM_000380.2,589-607).
ggggtgatatgaaactcta

SEQ ID NO: 17734 - DNA, 19 bp, Homo sapiens
  siRNA target sequence for XPA (NM_000380.2,592-610).
gtgatatgaaactctactt

SEQ ID NO: 17735 - DNA, 19 bp, Homo sapiens
  siRNA target sequence for XPA (NM_000380.2,603-621).
ctctacttaaagttacaga

SEQ ID NO: 17736 - DNA, 19 bp, Homo sapiens
  siRNA target sequence for XPA (NM_000380.2,626-644).
gaagaggtctcttgaagtt

SEQ ID NO: 17737 - DNA, 19 bp, Homo sapiens
  siRNA target sequence for XPA (NM_000380.2,646-664).
ggggtagtcaagaagcatt

SEQ ID NO: 17738 - DNA, 19 bp, Homo sapiens
  siRNA target sequence for XPA (NM_000380.2,647-665).
gggtagtcaagaagcatta

SEQ ID NO: 17739 - DNA, 19 bp, Homo sapiens
  siRNA target sequence for XPA (NM_000380.2,770-788).
gaaaagggagacgattgtt

SEQ ID NO: 17740 - DNA, 19 bp, Homo sapiens
  siRNA target sequence for XPA (NM_000380.2,775-793).
gggagacgattgttcatca

SEQ ID NO: 17741 - DNA, 19 bp, Homo sapiens
  siRNA target sequence for XPA (NM_000380.2,828-846).
gacatgtaccgtaagactt

SEQ ID NO: 17742 - DNA, 19 bp, Homo sapiens
  siRNA target sequence for XPA (NM_000380.2,837-855).
cgtaagacttgtactatgt

SEQ ID NO: 17743 - DNA, 19 bp, Homo sapiens
  siRNA target sequence for XPA (NM_000380.2,856-874).
gtggccatgaactgacata

SEQ ID NO: 17744 - DNA, 19 bp, Homo sapiens
  siRNA target sequence for XPC (NM_004628.2,58-76).
gaactgcgcagccagaaat

SEQ ID NO: 17745 - DNA, 19 bp, Homo sapiens
  siRNA target sequence for XPC (NM_004628.2,61-79).
ctgcgcagccagaaatcca

SEQ ID NO: 17746 - DNA, 19 bp, Homo sapiens
  siRNA target sequence for XPC (NM_004628.2,238-256).
gtggccaaggtgactgtta

SEQ ID NO: 17747 - DNA, 19 bp, Homo sapiens
  siRNA target sequence for XPC (NM_004628.2,246-264).
ggtgactgttaaatctgaa

SEQ ID NO: 17748 - DNA, 19 bp, Homo sapiens
  siRNA target sequence for XPC (NM_004628.2,247-265).
gtgactgttaaatctgaaa

SEQ ID NO: 17749 - DNA, 19 bp, Homo sapiens
  siRNA target sequence for XPC (NM_004628.2,307-325).
gacctcagggactttccaa

SEQ ID NO: 17750 - DNA, 19 bp, Homo sapiens
  siRNA target sequence for XPC (NM_004628.2,354-372).
gagaggggctaccatgaat

SEQ ID NO: 17751 - DNA, 19 bp, Homo sapiens
  siRNA target sequence for XPC (NM_004628.2,356-374).
gaggggctaccatgaatga

SEQ ID NO: 17752 - DNA, 19 bp, Homo sapiens
  siRNA target sequence for XPC (NM_004628.2,529-547).
caggcgaagacaagagaaa

SEQ ID NO: 17753 - DNA, 19 bp, Homo sapiens
  siRNA target sequence for XPC (NM_004628.2,567-585).
ggagtttgagacatatctt

SEQ ID NO: 17754 - DNA, 19 bp, Homo sapiens
  siRNA target sequence for XPC (NM_004628.2,586-604).
cggagggcgatgaaacgtt

SEQ ID NO: 17755 - DNA, 19 bp, Homo sapiens
  siRNA target sequence for XPC (NM_004628.2,587-605).
ggagggcgatgaaacgttt

SEQ ID NO: 17756 - DNA, 19 bp, Homo sapiens
  siRNA target sequence for XPC (NM_004628.2,590-608).
gggcgatgaaacgtttcaa

SEQ ID NO: 17757 - DNA, 19 bp, Homo sapiens
  siRNA target sequence for XPC (NM_004628.2,591-609).
ggcgatgaaacgtttcaat

SEQ ID NO: 17758 - DNA, 19 bp, Homo sapiens
  siRNA target sequence for XPC (NM_004628.2,592-610).
gcgatgaaacgtttcaata

SEQ ID NO: 17759 - DNA, 19 bp, Homo sapiens
  siRNA target sequence for XPC (NM_004628.2,593-611).
cgatgaaacgtttcaataa

SEQ ID NO: 17760 - DNA, 19 bp, Homo sapiens
  siRNA target sequence for XPC (NM_004628.2,654-672).
gctagcaaatggcttctat

SEQ ID NO: 17761 - DNA, 19 bp, Homo sapiens
  siRNA target sequence for XPC (NM_004628.2,658-676).
gcaaatggcttctatcgaa

SEQ ID NO: 17762 - DNA, 19 bp, Homo sapiens
  siRNA target sequence for XPC (NM_004628.2,664-682).
ggcttctatcgaaataaca

SEQ ID NO: 17763 - DNA, 19 bp, Homo sapiens
  siRNA target sequence for XPC (NM_004628.2,665-683).
gcttctatcgaaataacat

SEQ ID NO: 17764 - DNA, 19 bp, Homo sapiens
  siRNA target sequence for XPC (NM_004628.2,787-805).
gtgaagtggttcattggaa

SEQ ID NO: 17765 - DNA, 19 bp, Homo sapiens
  siRNA target sequence for XPC (NM_004628.2,798-816).
cattggaacatttacagtt

SEQ ID NO: 17766 - DNA, 19 bp, Homo sapiens
  siRNA target sequence for XPC (NM_004628.2,849-867).
cctgcagactacattggaa

SEQ ID NO: 17767 - DNA, 19 bp, Homo sapiens
  siRNA target sequence for XPC (NM_004628.2,870-888).
gagatttgctatttactct

SEQ ID NO: 17768 - DNA, 19 bp, Homo sapiens
  siRNA target sequence for XPC (NM_004628.2,912-930).
ccatatattcttactgatt

SEQ ID NO: 17769 - DNA, 19 bp, Homo sapiens
  siRNA target sequence for XPC (NM_004628.2,951-969).
gacccggctggtattgtct

SEQ ID NO: 17770 - DNA, 19 bp, Homo sapiens
  siRNA target sequence for XPC (NM_004628.2,966-984).
gtctctacagccaattcct

SEQ ID NO: 17771 - DNA, 19 bp, Homo sapiens
  siRNA target sequence for XPC (NM_004628.2,1064-1082).
ccagccaagttctagaaaa

SEQ ID NO: 17772 - DNA, 19 bp, Homo sapiens
  siRNA target sequence for XPC (NM_004628.2,1287-1305).
ggcctccagggtgtcttat

SEQ ID NO: 17773 - DNA, 19 bp, Homo sapiens
  siRNA target sequence for XPC (NM_004628.2,1288-1306).
gcctccagggtgtcttata

SEQ ID NO: 17774 - DNA, 19 bp, Homo sapiens
  siRNA target sequence for XPC (NM_004628.2,1289-1307).
cctccagggtgtcttataa

SEQ ID NO: 17775 - DNA, 19 bp, Homo sapiens
  siRNA target sequence for XPC (NM_004628.2,1290-1308).
ctccagggtgtcttataaa

SEQ ID NO: 17776 - DNA, 19 bp, Homo sapiens
  siRNA target sequence for XPC (NM_004628.2,1292-1310).
ccagggtgtcttataaaga

SEQ ID NO: 17777 - DNA, 19 bp, Homo sapiens
  siRNA target sequence for XPC (NM_004628.2,1632-1650).
ggaaaagtgggtatgtgta

SEQ ID NO: 17778 - DNA, 19 bp, Homo sapiens
  siRNA target sequence for XPC (NM_004628.2,1678-1696).
cctctgacctgttacaagt

SEQ ID NO: 17779 - DNA, 19 bp, Homo sapiens
  siRNA target sequence for XPC (NM_004628.2,1679-1697).
ctctgacctgttacaagta

SEQ ID NO: 17780 - DNA, 19 bp, Homo sapiens
  siRNA target sequence for XPC (NM_004628.2,1919-1937).
ccactgccattggcttata

SEQ ID NO: 17781 - DNA, 19 bp, Homo sapiens
  siRNA target sequence for XPC (NM_004628.2,1924-1942).
gccattggcttatataaga

SEQ ID NO: 17782 - DNA, 19 bp, Homo sapiens
  siRNA target sequence for XPC (NM_004628.2,1965-1983).
gcggcatctcctgaaatat

SEQ ID NO: 17783 - DNA, 19 bp, Homo sapiens
  siRNA target sequence for XPC (NM_004628.2,2103-2121).
ggtgaggcttggagaagta

SEQ ID NO: 17784 - DNA, 19 bp, Homo sapiens
  siRNA target sequence for XPC (NM_004628.2,2130-2148).
gatggtgaaaggcttttct

SEQ ID NO: 17785 - DNA, 19 bp, Homo sapiens
  siRNA target sequence for XPC (NM_004628.2,2181-2199).
ccagctgcgggaagaaaat

SEQ ID NO: 17786 - DNA, 19 bp, Homo sapiens
  siRNA target sequence for XPC (NM_004628.2,2222-2240).
ggcagacagaggagtatca

SEQ ID NO: 17787 - DNA, 19 bp, Homo sapiens
  siRNA target sequence for XPC (NM_004628.2,2451-2469).
cgtctgcgaggaattcaaa

SEQ ID NO: 17788 - DNA, 19 bp, Homo sapiens
  siRNA target sequence for XPC (NM_004628.2,2729-2747).
ctcaaaaccgagaagatga

SEQ ID NO: 17789 - DNA, 19 bp, Homo sapiens
  siRNA target sequence for XPC (NM_004628.2,2810-2828).
cccacctgttcccatttga

SEQ ID NO: 17790 - DNA, 19 bp, Homo sapiens
  siRNA target sequence for XRCC1 (NM_006297.1,338-356).
gcgctggggagcaagacta

SEQ ID NO: 17791 - DNA, 19 bp, Homo sapiens
  siRNA target sequence for XRCC1 (NM_006297.1,339-357).
cgctggggagcaagactat

SEQ ID NO: 17792 - DNA, 19 bp, Homo sapiens
  siRNA target sequence for XRCC1 (NM_006297.1,364-382).
cttctggtcacctcatctt

SEQ ID NO: 17793 - DNA, 19 bp, Homo sapiens
  siRNA target sequence for XRCC1 (NM_006297.1,367-385).
ctggtcacctcatctttca

SEQ ID NO: 17794 - DNA, 19 bp, Homo sapiens
  siRNA target sequence for XRCC1 (NM_006297.1,420-438).
caaccgcgttcgcatgttt

SEQ ID NO: 17795 - DNA, 19 bp, Homo sapiens
  siRNA target sequence for XRCC1 (NM_006297.1,475-493).
cgctgggaccgggtcaaaa

SEQ ID NO: 17796 - DNA, 19 bp, Homo sapiens
  siRNA target sequence for XRCC1 (NM_006297.1,477-495).
ctgggaccgggtcaaaatt

SEQ ID NO: 17797 - DNA, 19 bp, Homo sapiens
  siRNA target sequence for XRCC1 (NM_006297.1,479-497).
gggaccgggtcaaaattgt

SEQ ID NO: 17798 - DNA, 19 bp, Homo sapiens
  siRNA target sequence for XRCC1 (NM_006297.1,480-498).
ggaccgggtcaaaattgtt

SEQ ID NO: 17799 - DNA, 19 bp, Homo sapiens
  siRNA target sequence for XRCC1 (NM_006297.1,481-499).
gaccgggtcaaaattgttt

SEQ ID NO: 17800 - DNA, 19 bp, Homo sapiens
  siRNA target sequence for XRCC1 (NM_006297.1,537-555).
gagttttgtacggtttcat

SEQ ID NO: 17801 - DNA, 19 bp, Homo sapiens
  siRNA target sequence for XRCC1 (NM_006297.1,1737-1755).
gggcaagcacttctttctt

SEQ ID NO: 17802 - DNA, 19 bp, Homo sapiens
  siRNA target sequence for XRCC1 (NM_006297.1,1738-1756).
ggcaagcacttctttcttt

SEQ ID NO: 17803 - DNA, 19 bp, Homo sapiens
  siRNA target sequence for XRCC1 (NM_006297.1,1739-1757).
gcaagcacttctttcttta

SEQ ID NO: 17804 - DNA, 19 bp, Homo sapiens
  siRNA target sequence for XRCC1 (NM_006297.1,1836-1854).
gagtgaccgggttcagttt

SEQ ID NO: 17805 - DNA, 19 bp, Homo sapiens
  siRNA target sequence for XRCC1 (NM_006297.1,1840-1858).
gaccgggttcagtttgtga

SEQ ID NO: 17806 - DNA, 19 bp, Homo sapiens
  siRNA target sequence for XRCC1 (NM_006297.1,1927-1945).
cgtccccgatggatctaca

SEQ ID NO: 17807 - DNA, 19 bp, Homo sapiens
  siRNA target sequence for XRCC1 (NM_006297.1,1930-1948).
ccccgatggatctacagtt

SEQ ID NO: 17808 - DNA, 19 bp, Homo sapiens
  siRNA target sequence for XRCC2 (NM_005431.1,266-284).
cctaacagcacgatgtata

SEQ ID NO: 17809 - DNA, 19 bp, Homo sapiens
  siRNA target sequence for XRCC2 (NM_005431.1,280-298).
gtatacttcccaaatcaga

SEQ ID NO: 17810 - DNA, 19 bp, Homo sapiens
  siRNA target sequence for XRCC2 (NM_005431.1,348-366).
gatatgctccggctagtta

SEQ ID NO: 17811 - DNA, 19 bp, Homo sapiens
  siRNA target sequence for XRCC2 (NM_005431.1,353-371).
gctccggctagttacaatt

SEQ ID NO: 17812 - DNA, 19 bp, Homo sapiens
  siRNA target sequence for XRCC2 (NM_005431.1,448-466).
gtagtagcacccacttact

SEQ ID NO: 17813 - DNA, 19 bp, Homo sapiens
  siRNA target sequence for XRCC2 (NM_005431.1,451-469).
gtagcacccacttacttct

SEQ ID NO: 17814 - DNA, 19 bp, Homo sapiens
  siRNA target sequence for XRCC2 (NM_005431.1,483-501).
ctagaaagtatgttttgta

SEQ ID NO: 17815 - DNA, 19 bp, Homo sapiens
  siRNA target sequence for XRCC2 (NM_005431.1,530-548).
ggatagcctgtcagctttt

SEQ ID NO: 17816 - DNA, 19 bp, Homo sapiens
  siRNA target sequence for XRCC2 (NM_005431.1,594-612).
gagtctactctgaggaaat

SEQ ID NO: 17817 - DNA, 19 bp, Homo sapiens
  siRNA target sequence for XRCC2 (NM_005431.1,596-614).
gtctactctgaggaaatgt

SEQ ID NO: 17818 - DNA, 19 bp, Homo sapiens
  siRNA target sequence for XRCC2 (NM_005431.1,629-647).
gaagcttgtaaatgactat

SEQ ID NO: 17819 - DNA, 19 bp, Homo sapiens
  siRNA target sequence for XRCC2 (NM_005431.1,642-660).
gactatcgcctggttcttt

SEQ ID NO: 17820 - DNA, 19 bp, Homo sapiens
  siRNA target sequence for XRCC2 (NM_005431.1,648-666).
cgcctggttctttttgcaa

SEQ ID NO: 17821 - DNA, 19 bp, Homo sapiens
  siRNA target sequence for XRCC2 (NM_005431.1,663-681).
gcaacgacacaaactataa

SEQ ID NO: 17822 - DNA, 19 bp, Homo sapiens
  siRNA target sequence for XRCC2 (NM_005431.1,664-682).
caacgacacaaactataat

SEQ ID NO: 17823 - DNA, 19 bp, Homo sapiens
  siRNA target sequence for XRCC2 (NM_005431.1,692-710).
ctcgagctcatcagaagaa

SEQ ID NO: 17824 - DNA, 19 bp, Homo sapiens
  siRNA target sequence for XRCC2 (NM_005431.1,736-754).
gtgatgtggacatagacta

SEQ ID NO: 17825 - DNA, 19 bp, Homo sapiens
  siRNA target sequence for XRCC2 (NM_005431.1,746-764).
catagactacagaccttat

SEQ ID NO: 17826 - DNA, 19 bp, Homo sapiens
  siRNA target sequence for XRCC2 (NM_005431.1,750-768).
gactacagaccttatctct

SEQ ID NO: 17827 - DNA, 19 bp, Homo sapiens
  siRNA target sequence for XRCC2 (NM_005431.1,789-807).
gtgaagcacaggatgtttt

SEQ ID NO: 17828 - DNA, 19 bp, Homo sapiens
  siRNA target sequence for XRCC2 (NM_005431.1,835-853).
gcaaccaattttcattagt

SEQ ID NO: 17829 - DNA, 19 bp, Homo sapiens
  siRNA target sequence for XRCC2 (NM_005431.1,847-865).
cattagtttcacgttgttt

SEQ ID NO: 17830 - DNA, 19 bp, Homo sapiens
  siRNA target sequence for XRCC2 (NM_005431.1,858-876).
cgttgtttaaaaagtaaca

SEQ ID NO: 17831 - DNA, 19 bp, Homo sapiens
  siRNA target sequence for XRCC3 (NM_005432.2,371-389).
ggacctgaatcccagaatt

SEQ ID NO: 17832 - DNA, 19 bp, Homo sapiens
  siRNA target sequence for XRCC3 (NM_005432.2,372-390).
gacctgaatcccagaatta

SEQ ID NO: 17833 - DNA, 19 bp, Homo sapiens
  siRNA target sequence for XRCC3 (NM_005432.2,383-401).
cagaattattgctgcaatt

SEQ ID NO: 17834 - DNA, 19 bp, Homo sapiens
  siRNA target sequence for XRCC3 (NM_005432.2,385-403).
gaattattgctgcaattaa

SEQ ID NO: 17835 - DNA, 19 bp, Homo sapiens
  siRNA target sequence for XRCC3 (NM_005432.2,421-439).
cggtaaaggaggttttaca

SEQ ID NO: 17836 - DNA, 19 bp, Homo sapiens
  siRNA target sequence for XRCC3 (NM_005432.2,423-441).
gtaaaggaggttttacact

SEQ ID NO: 17837 - DNA, 19 bp, Homo sapiens
  siRNA target sequence for XRCC3 (NM_005432.2,505-523).
gaacggcctccttacactt

SEQ ID NO: 17838 - DNA, 19 bp, Homo sapiens
  siRNA target sequence for XRCC3 (NM_005432.2,525-543).
cggggaagcagcatcctta

SEQ ID NO: 17839 - DNA, 19 bp, Homo sapiens
  siRNA target sequence for XRCC3 (NM_005432.2,1002-1020).
gccccattccgctgtgaat

SEQ ID NO: 17840 - DNA, 19 bp, Homo sapiens
  siRNA target sequence for XRCC3 (NM_005432.2,1003-1021).
ccccattccgctgtgaatt

SEQ ID NO: 17841 - DNA, 19 bp, Homo sapiens
  siRNA target sequence for ASF1A (NM_014034.1,301-319).
gacttggaatggaaaatta

SEQ ID NO: 17842 - DNA, 19 bp, Homo sapiens
  siRNA target sequence for ASF1A (NM_014034.1,341-359).
gtgaagaatacgatcaagt

SEQ ID NO: 17843 - DNA, 19 bp, Homo sapiens
  siRNA target sequence for ASF1A (NM_014034.1,343-361).
gaagaatacgatcaagttt

SEQ ID NO: 17844 - DNA, 19 bp, Homo sapiens
  siRNA target sequence for ASF1A (NM_014034.1,388-406).
cccgcaggaaggcatatgt

SEQ ID NO: 17845 - DNA, 19 bp, Homo sapiens
  siRNA target sequence for ASF1A (NM_014034.1,390-408).
cgcaggaaggcatatgttt

SEQ ID NO: 17846 - DNA, 19 bp, Homo sapiens
  siRNA target sequence for ASF1A (NM_014034.1,464-482).
gcgtaactgttgtgctaat

SEQ ID NO: 17847 - DNA, 19 bp, Homo sapiens
  siRNA target sequence for ASF1A (NM_014034.1,477-495).
gctaattacttgtacctat

SEQ ID NO: 17848 - DNA, 19 bp, Homo sapiens
  siRNA target sequence for ASF1A (NM_014034.1,491-509).
cctatcgaggacaagaatt

SEQ ID NO: 17849 - DNA, 19 bp, Homo sapiens
  siRNA target sequence for ASF1A (NM_014034.1,521-539).
gctattatgtaaataatga

SEQ ID NO: 17850 - DNA, 19 bp, Homo sapiens
  siRNA target sequence for ASF1A (NM_014034.1,574-592).
gtaaaaccagacttttcta

SEQ ID NO: 17851 - DNA, 19 bp, Homo sapiens
  siRNA target sequence for ASF1A (NM_014034.1,628-646).
gtcacaagattccacatta

SEQ ID NO: 17852 - DNA, 19 bp, Homo sapiens
  siRNA target sequence for ASF1A (NM_014034.1,630-648).
cacaagattccacattaat

SEQ ID NO: 17853 - DNA, 19 bp, Homo sapiens
  siRNA target sequence for ASF1A (NM_014034.1,684-702).
gagcagtaatccaaatcta

SEQ ID NO: 17854 - DNA, 19 bp, Homo sapiens
  siRNA target sequence for ASF1A (NM_014034.1,686-704).
gcagtaatccaaatctaca

SEQ ID NO: 17855 - DNA, 19 bp, Homo sapiens
  siRNA target sequence for ASF1A (NM_014034.1,744-762).
gggatggtccacatcagaa

SEQ ID NO: 17856 - DNA, 19 bp, Homo sapiens
  siRNA target sequence for ASF1A (NM_014034.1,755-773).
catcagaaaactcactaaa

SEQ ID NO: 17857 - DNA, 19 bp, Homo sapiens
  siRNA target sequence for ASF1A (NM_014034.1,765-783).
ctcactaaatgtcatgtta

SEQ ID NO: 17858 - DNA, 19 bp, Homo sapiens
  siRNA target sequence for BAF53A (NM_004301.2,188-206).
gtacgggggagatgaagtt

SEQ ID NO: 17859 - DNA, 19 bp, Homo sapiens
  siRNA target sequence for BAF53A (NM_004301.2,320-338).
cggaagcacattaatggaa

SEQ ID NO: 17860 - DNA, 19 bp, Homo sapiens
  siRNA target sequence for BAF53A (NM_004301.2,365-383).
cggtcccacctactacata

SEQ ID NO: 17861 - DNA, 19 bp, Homo sapiens
  siRNA target sequence for BAF53A (NM_004301.2,367-385).
gtcccacctactacataga

SEQ ID NO: 17862 - DNA, 19 bp, Homo sapiens
  siRNA target sequence for BAF53A (NM_004301.2,371-389).
cacctactacatagatact

SEQ ID NO: 17863 - DNA, 19 bp, Homo sapiens
  siRNA target sequence for BAF53A (NM_004301.2,373-391).
cctactacatagatactaa

SEQ ID NO: 17864 - DNA, 19 bp, Homo sapiens
  siRNA target sequence for BAF53A (NM_004301.2,374-392).
ctactacatagatactaat

SEQ ID NO: 17865 - DNA, 19 bp, Homo sapiens
  siRNA target sequence for BAF53A (NM_004301.2,377-395).
ctacatagatactaatgct

SEQ ID NO: 17866 - DNA, 19 bp, Homo sapiens
  siRNA target sequence for BAF53A (NM_004301.2,399-417).
cgtgttccgagggagaata

SEQ ID NO: 17867 - DNA, 19 bp, Homo sapiens
  siRNA target sequence for BAF53A (NM_004301.2,400-418).
gtgttccgagggagaatat

SEQ ID NO: 17868 - DNA, 19 bp, Homo sapiens
  siRNA target sequence for BAF53A (NM_004301.2,413-431).
gaatatggaggccatttca

SEQ ID NO: 17869 - DNA, 19 bp, Homo sapiens
  siRNA target sequence for BAF53A (NM_004301.2,475-493).
ctattttggatcataccta

SEQ ID NO: 17870 - DNA, 19 bp, Homo sapiens
  siRNA target sequence for BAF53A (NM_004301.2,663-681).
cgttctactgggctgattt

SEQ ID NO: 17871 - DNA, 19 bp, Homo sapiens
  siRNA target sequence for BAF53A (NM_004301.2,664-682).
gttctactgggctgatttt

SEQ ID NO: 17872 - DNA, 19 bp, Homo sapiens
  siRNA target sequence for BAF53A (NM_004301.2,667-685).
ctactgggctgattttgga

SEQ ID NO: 17873 - DNA, 19 bp, Homo sapiens
  siRNA target sequence for BAF53A (NM_004301.2,695-713).
cactcataccactgcaatt

SEQ ID NO: 17874 - DNA, 19 bp, Homo sapiens
  siRNA target sequence for BAF53A (NM_004301.2,735-753).
cttcaacaaggcattgtga

SEQ ID NO: 17875 - DNA, 19 bp, Homo sapiens
  siRNA target sequence for BAF53A (NM_004301.2,765-783).
gctggagactttattacta

SEQ ID NO: 17876 - DNA, 19 bp, Homo sapiens
  siRNA target sequence for BAF53A (NM_004301.2,913-931).
cgaggtcttggcacaatta

SEQ ID NO: 17877 - DNA, 19 bp, Homo sapiens
  siRNA target sequence for BAF53A (NM_004301.2,914-932).
gaggtcttggcacaattat

SEQ ID NO: 17878 - DNA, 19 bp, Homo sapiens
  siRNA target sequence for BAF53A (NM_004301.2,916-934).
ggtcttggcacaattatat

SEQ ID NO: 17879 - DNA, 19 bp, Homo sapiens
  siRNA target sequence for BAF53A (NM_004301.2,943-961).
gtgttatccaggattttca

SEQ ID NO: 17880 - DNA, 19 bp, Homo sapiens
  siRNA target sequence for BAF53A (NM_004301.2,969-987).
gtacttcaagtgtcagatt

SEQ ID NO: 17881 - DNA, 19 bp, Homo sapiens
  siRNA target sequence for BAF53A (NM_004301.2,980-998).
gtcagattcaacttatgat

SEQ ID NO: 17882 - DNA, 19 bp, Homo sapiens
  siRNA target sequence for BAF53A (NM_004301.2,1021-1039).
caactgttcattatgaatt

SEQ ID NO: 17883 - DNA, 19 bp, Homo sapiens
  siRNA target sequence for BAF53A (NM_004301.2,1065-1083).
ggtgcagagcggctaaaga

SEQ ID NO: 17884 - DNA, 19 bp, Homo sapiens
  siRNA target sequence for BAF53A (NM_004301.2,1066-1084).
gtgcagagcggctaaagat

SEQ ID NO: 17885 - DNA, 19 bp, Homo sapiens
  siRNA target sequence for BAF53A (NM_004301.2,1109-1127).
caatgtaaaggggttatca

SEQ ID NO: 17886 - DNA, 19 bp, Homo sapiens
  siRNA target sequence for BAF53A (NM_004301.2,1118-1136).
ggggttatcaggaaacaca

SEQ ID NO: 17887 - DNA, 19 bp, Homo sapiens
  siRNA target sequence for BAF53A (NM_004301.2,1200-1218).
ggtctctatggcagtgtaa

SEQ ID NO: 17888 - DNA, 19 bp, Homo sapiens
  siRNA target sequence for BAF53A (NM_004301.2,1201-1219).
gtctctatggcagtgtaat

SEQ ID NO: 17889 - DNA, 19 bp, Homo sapiens
  siRNA target sequence for BAF53A (NM_004301.2,1224-1242).
gcaggaggaaacacactaa

SEQ ID NO: 17890 - DNA, 19 bp, Homo sapiens
  siRNA target sequence for BAF53A (NM_004301.2,1225-1243).
caggaggaaacacactaat

SEQ ID NO: 17891 - DNA, 19 bp, Homo sapiens
  siRNA target sequence for BAF53A (NM_004301.2,1235-1253).
cacactaatacagagtttt

SEQ ID NO: 17892 - DNA, 19 bp, Homo sapiens
  siRNA target sequence for BAF53A (NM_004301.2,1293-1311).
ccaagtatgcggttgaaat

SEQ ID NO: 17893 - DNA, 19 bp, Homo sapiens
  siRNA target sequence for BAF53A (NM_004301.2,1294-1312).
caagtatgcggttgaaatt

SEQ ID NO: 17894 - DNA, 19 bp, Homo sapiens
  siRNA target sequence for BAF53A (NM_004301.2,1297-1315).
gtatgcggttgaaattgat

SEQ ID NO: 17895 - DNA, 19 bp, Homo sapiens
  siRNA target sequence for BAF53A (NM_004301.2,1302-1320).
cggttgaaattgattgcaa

SEQ ID NO: 17896 - DNA, 19 bp, Homo sapiens
  siRNA target sequence for BAF53A (NM_004301.2,1340-1358).
gaggtttagctcatggatt

SEQ ID NO: 17897 - DNA, 19 bp, Homo sapiens
  siRNA target sequence for BAF53A (NM_004301.2,1378-1396).
ctttgggtacctttcaaca

SEQ ID NO: 17898 - DNA, 19 bp, Homo sapiens
  siRNA target sequence for CBX3 (NM_007276.3,114-132).
ggcctccaacaaaactaca

SEQ ID NO: 17899 - DNA, 19 bp, Homo sapiens
  siRNA target sequence for CBX3 (NM_007276.3,115-133).
gcctccaacaaaactacat

SEQ ID NO: 17900 - DNA, 19 bp, Homo sapiens
  siRNA target sequence for CBX4 (NM_003655.1,264-282).
gaggctggtcgcccaaata

SEQ ID NO: 17901 - DNA, 19 bp, Homo sapiens
  siRNA target sequence for CBX4 (NM_003655.1,266-284).
ggctggtcgcccaaatata

SEQ ID NO: 17902 - DNA, 19 bp, Homo sapiens
  siRNA target sequence for CBX4 (NM_003655.1,406-424).
ggtgcaggtgcctaccttt

SEQ ID NO: 17903 - DNA, 19 bp, Homo sapiens
  siRNA target sequence for CBX4 (NM_003655.1,421-439).
ctttgcccgtcgttccaat

SEQ ID NO: 17904 - DNA, 19 bp, Homo sapiens
  siRNA target sequence for CBX4 (NM_003655.1,647-665).
cagcccgaccccaaaatgt

SEQ ID NO: 17905 - DNA, 19 bp, Homo sapiens
  siRNA target sequence for CBX4 (NM_003655.1,893-911).
gggattgggggcaagatga

SEQ ID NO: 17906 - DNA, 19 bp, Homo sapiens
  siRNA target sequence for CBX4 (NM_003655.1,900-918).
ggggcaagatgaagatagt

SEQ ID NO: 17907 - DNA, 19 bp, Homo sapiens
  siRNA target sequence for CBX4 (NM_003655.1,947-965).
gtgatcgtgatgagcaaat

SEQ ID NO: 17908 - DNA, 19 bp, Homo sapiens
  siRNA target sequence for CBX4 (NM_003655.1,983-1001).
caggcggtgaagatcaagt

SEQ ID NO: 17909 - DNA, 19 bp, Homo sapiens
  siRNA target sequence for CBX4 (NM_003655.1,1073-1091).
cctgccgacaggactttta

SEQ ID NO: 17910 - DNA, 19 bp, Homo sapiens
  siRNA target sequence for CBX4 (NM_003655.1,1074-1092).
ctgccgacaggacttttaa

SEQ ID NO: 17911 - DNA, 19 bp, Homo sapiens
  siRNA target sequence for CBX4 (NM_003655.1,1076-1094).
gccgacaggacttttaaaa

SEQ ID NO: 17912 - DNA, 19 bp, Homo sapiens
  siRNA target sequence for CBX4 (NM_003655.1,1361-1379).
gccgtcggcctgaatctct

SEQ ID NO: 17913 - DNA, 19 bp, Homo sapiens
  siRNA target sequence for CBX4 (NM_003655.1,1565-1583).
ctggatgaacccatagact

SEQ ID NO: 17914 - DNA, 19 bp, Homo sapiens
  siRNA target sequence for CBX4 (NM_003655.1,1762-1780).
gcccttctttgggaatata

SEQ ID NO: 17915 - DNA, 19 bp, Homo sapiens
  siRNA target sequence for CBX4 (NM_003655.1,1806-1824).
gcctcaccgttactttcaa

SEQ ID NO: 17916 - DNA, 19 bp, Homo sapiens
  siRNA target sequence for CBX5 (NM_012117.1,230-248).
gggacaagtggaatatcta

SEQ ID NO: 17917 - DNA, 19 bp, Homo sapiens
  siRNA target sequence for CBX5 (NM_012117.1,286-304).
gggaacctgagaaaaactt

SEQ ID NO: 17918 - DNA, 19 bp, Homo sapiens
  siRNA target sequence for CBX5 (NM_012117.1,306-324).
gattgccctgagctaattt

SEQ ID NO: 17919 - DNA, 19 bp, Homo sapiens
  siRNA target sequence for CBX5 (NM_012117.1,418-436).
caaacagtgccgatgacat

SEQ ID NO: 17920 - DNA, 19 bp, Homo sapiens
  siRNA target sequence for CBX5 (NM_012117.1,534-552).
ggtgatttaatgttcctaa

SEQ ID NO: 17921 - DNA, 19 bp, Homo sapiens
  siRNA target sequence for CBX5 (NM_012117.1,537-555).
gatttaatgttcctaatga

SEQ ID NO: 17922 - DNA, 19 bp, Homo sapiens
  siRNA target sequence for CBX5 (NM_012117.1,591-609).
gcaaaagaagctaatgtga

SEQ ID NO: 17923 - DNA, 19 bp, Homo sapiens
  siRNA target sequence for CBX5 (NM_012117.1,646-664).
gactgacatggcatgcata

SEQ ID NO: 17924 - DNA, 19 bp, Homo sapiens
  siRNA target sequence for CBX6 (NM_014292.2,123-141).
gggtgggcgatcaagtaca

SEQ ID NO: 17925 - DNA, 19 bp, Homo sapiens
  siRNA target sequence for CBX6 (NM_014292.2,632-650).
ctcgcggaaccgcgttata

SEQ ID NO: 17926 - DNA, 19 bp, Homo sapiens
  siRNA target sequence for CBX7 (NM_175709.1,148-166).
gcgtgcggaagggtaaagt

SEQ ID NO: 17927 - DNA, 19 bp, Homo sapiens
  siRNA target sequence for CBX7 (NM_175709.1,514-532).
cccgaaaggcccacaagta

SEQ ID NO: 17928 - DNA, 19 bp, Homo sapiens
  siRNA target sequence for CBX7 (NM_175709.1,537-555).
cggctctcgcgcaagaagt

SEQ ID NO: 17929 - DNA, 19 bp, Homo sapiens
  siRNA target sequence for CBX7 (NM_175709.1,538-556).
ggctctcgcgcaagaagtt

SEQ ID NO: 17930 - DNA, 19 bp, Homo sapiens
  siRNA target sequence for CBX8 (NM_020649.1,157-175).
cggaaaggacgcatggaat

SEQ ID NO: 17931 - DNA, 19 bp, Homo sapiens
  siRNA target sequence for CBX8 (NM_020649.1,193-211).
ggatggtcgcagaagtaca

SEQ ID NO: 17932 - DNA, 19 bp, Homo sapiens
  siRNA target sequence for CBX8 (NM_020649.1,455-473).
gggagggccttcgaaacat

SEQ ID NO: 17933 - DNA, 19 bp, Homo sapiens
  siRNA target sequence for CBX8 (NM_020649.1,1184-1202).
cggacgtgacctcaaactt

SEQ ID NO: 17934 - DNA, 19 bp, Homo sapiens
  siRNA target sequence for CBX8 (NM_020649.1,1185-1203).
ggacgtgacctcaaacttt

SEQ ID NO: 17935 - DNA, 19 bp, Homo sapiens
  siRNA target sequence for CBX8 (NM_020649.1,1186-1204).
gacgtgacctcaaactttt

SEQ ID NO: 17936 - DNA, 19 bp, Homo sapiens
  siRNA target sequence for CBX8 (NM_020649.1,1206-1224).
gaccgtcaccattaaggaa

SEQ ID NO: 17937 - DNA, 19 bp, Homo sapiens
  siRNA target sequence for CBX8 (NM_020649.1,1230-1248).
cacggaccaaggctttttt

SEQ ID NO: 17938 - DNA, 19 bp, Homo sapiens
  siRNA target sequence for CBX8 (NM_020649.1,1232-1250).
cggaccaaggcttttttaa

SEQ ID NO: 17939 - DNA, 19 bp, Homo sapiens
  siRNA target sequence for CBX8 (NM_020649.1,1233-1251).
ggaccaaggcttttttaaa

SEQ ID NO: 17940 - DNA, 19 bp, Homo sapiens
  siRNA target sequence for CDYL (NM_004824.2,306-324).
cccgctttacaggttgaaa

SEQ ID NO: 17941 - DNA, 19 bp, Homo sapiens
  siRNA target sequence for CDYL (NM_004824.2,310-328).
ctttacaggttgaaaggat

SEQ ID NO: 17942 - DNA, 19 bp, Homo sapiens
  siRNA target sequence for CDYL (NM_004824.2,598-616).
ggaaagaccacgaatccaa

SEQ ID NO: 17943 - DNA, 19 bp, Homo sapiens
  siRNA target sequence for CDYL (NM_004824.2,699-717).
gcgaagtcaggtatcaaga

SEQ ID NO: 17944 - DNA, 19 bp, Homo sapiens
  siRNA target sequence for CDYL (NM_004824.2,726-744).
cctaaaagccccgttaaga

SEQ ID NO: 17945 - DNA, 19 bp, Homo sapiens
  siRNA target sequence for CDYL (NM_004824.2,753-771).
gcagtggacggctttcaga

SEQ ID NO: 17946 - DNA, 19 bp, Homo sapiens
  siRNA target sequence for CDYL (NM_004824.2,772-790).
gcgagagccctgagaaact

SEQ ID NO: 17947 - DNA, 19 bp, Homo sapiens
  siRNA target sequence for CDYL (NM_004824.2,991-1009).
ctccgttcatggatgcatt

SEQ ID NO: 17948 - DNA, 19 bp, Homo sapiens
  siRNA target sequence for CDYL (NM_004824.2,993-1011).
ccgttcatggatgcattaa

SEQ ID NO: 17949 - DNA, 19 bp, Homo sapiens
  siRNA target sequence for CDYL (NM_004824.2,995-1013).
gttcatggatgcattaaca

SEQ ID NO: 17950 - DNA, 19 bp, Homo sapiens
  siRNA target sequence for CDYL (NM_004824.2,1137-1155).
gaaagtgcctacagataca

SEQ ID NO: 17951 - DNA, 19 bp, Homo sapiens
  siRNA target sequence for CDYL (NM_004824.2,1183-1201).
gcttcacccacatcttgtt

SEQ ID NO: 17952 - DNA, 19 bp, Homo sapiens
  siRNA target sequence for CDYL (NM_004824.2,1211-1229).
gtcctcagagaataactca

SEQ ID NO: 17953 - DNA, 19 bp, Homo sapiens
  siRNA target sequence for CDYL (NM_004824.2,1220-1238).
gaataactcactaaatcca

SEQ ID NO: 17954 - DNA, 19 bp, Homo sapiens
  siRNA target sequence for CDYL (NM_004824.2,1314-1332).
gttggcagcgtcttctgtt

SEQ ID NO: 17955 - DNA, 19 bp, Homo sapiens
  siRNA target sequence for CDYL (NM_004824.2,1330-1348).
gttgtggacttgactttat

SEQ ID NO: 17956 - DNA, 19 bp, Homo sapiens
  siRNA target sequence for CDYL (NM_004824.2,1333-1351).
gtggacttgactttattta

SEQ ID NO: 17957 - DNA, 19 bp, Homo sapiens
  siRNA target sequence for CDYL (NM_004824.2,1393-1411).
ctaaaatggcagaagctat

SEQ ID NO: 17958 - DNA, 19 bp, Homo sapiens
  siRNA target sequence for CDYL (NM_004824.2,1412-1430).
cagaaacttcgtgaatact

SEQ ID NO: 17959 - DNA, 19 bp, Homo sapiens
  siRNA target sequence for CDYL (NM_004824.2,1451-1469).
cattattgtagcagtcaat

SEQ ID NO: 17960 - DNA, 19 bp, Homo sapiens
  siRNA target sequence for CDYL (NM_004824.2,1483-1501).
gtctaggagcatctatatt

SEQ ID NO: 17961 - DNA, 19 bp, Homo sapiens
  siRNA target sequence for CDYL (NM_004824.2,1515-1533).
gtggtttgggctaatgaaa

SEQ ID NO: 17962 - DNA, 19 bp, Homo sapiens
  siRNA target sequence for CDYL (NM_004824.2,1582-1600).
gctgttctaccgttatgtt

SEQ ID NO: 17963 - DNA, 19 bp, Homo sapiens
  siRNA target sequence for CDYL (NM_004824.2,1583-1601).
ctgttctaccgttatgttt

SEQ ID NO: 17964 - DNA, 19 bp, Homo sapiens
  siRNA target sequence for CDYL (NM_004824.2,1592-1610).
cgttatgtttcccaagata

SEQ ID NO: 17965 - DNA, 19 bp, Homo sapiens
  siRNA target sequence for CDYL (NM_004824.2,1593-1611).
gttatgtttcccaagataa

SEQ ID NO: 17966 - DNA, 19 bp, Homo sapiens
  siRNA target sequence for CDYL (NM_004824.2,1791-1809).
ctcgtgcgctgcaacatga

SEQ ID NO: 17967 - DNA, 19 bp, Homo sapiens
  siRNA target sequence for CDYL (NM_004824.2,1877-1895).
ggggatggactccatgtta

SEQ ID NO: 17968 - DNA, 19 bp, Homo sapiens
  siRNA target sequence for CDYL (NM_004824.2,1884-1902).
gactccatgttaaagtact

SEQ ID NO: 17969 - DNA, 19 bp, Homo sapiens
  siRNA target sequence for CDYL2 (NM_152342.1,177-195).
gtatcttatccgatggaaa

SEQ ID NO: 17970 - DNA, 19 bp, Homo sapiens
  siRNA target sequence for CDYL2 (NM_152342.1,350-368).
gaggcccgtcggttgagaa

SEQ ID NO: 17971 - DNA, 19 bp, Homo sapiens
  siRNA target sequence for CDYL2 (NM_152342.1,353-371).
gcccgtcggttgagaaact

SEQ ID NO: 17972 - DNA, 19 bp, Homo sapiens
  siRNA target sequence for CDYL2 (NM_152342.1,355-373).
ccgtcggttgagaaactgt

SEQ ID NO: 17973 - DNA, 19 bp, Homo sapiens
  siRNA target sequence for CDYL2 (NM_152342.1,415-433).
cataaacggaagcgaatta

SEQ ID NO: 17974 - DNA, 19 bp, Homo sapiens
  siRNA target sequence for CDYL2 (NM_152342.1,497-515).
ccaccaagacggtgtctta

SEQ ID NO: 17975 - DNA, 19 bp, Homo sapiens
  siRNA target sequence for CDYL2 (NM_152342.1,538-556).
caaataatgcccctgaaaa

SEQ ID NO: 17976 - DNA, 19 bp, Homo sapiens
  siRNA target sequence for CDYL2 (NM_152342.1,628-646).
catcagcctggcttggatt

SEQ ID NO: 17977 - DNA, 19 bp, Homo sapiens
  siRNA target sequence for CDYL2 (NM_152342.1,638-656).
gcttggatttgaatgatca

SEQ ID NO: 17978 - DNA, 19 bp, Homo sapiens
  siRNA target sequence for CDYL2 (NM_152342.1,655-673).
catgttggagagcaagata

SEQ ID NO: 17979 - DNA, 19 bp, Homo sapiens
  siRNA target sequence for CDYL2 (NM_152342.1,790-808).
gactacgtctttgacaaaa

SEQ ID NO: 17980 - DNA, 19 bp, Homo sapiens
  siRNA target sequence for CDYL2 (NM_152342.1,819-837).
cagtgtccgccagaatgaa

SEQ ID NO: 17981 - DNA, 19 bp, Homo sapiens
  siRNA target sequence for CDYL2 (NM_152342.1,905-923).
gtcagacctcggataacaa

SEQ ID NO: 17982 - DNA, 19 bp, Homo sapiens
  siRNA target sequence for CDYL2 (NM_152342.1,1031-1049).
gcggcctggattattccta

SEQ ID NO: 17983 - DNA, 19 bp, Homo sapiens
  siRNA target sequence for CDYL2 (NM_152342.1,1036-1054).
ctggattattcctacctaa

SEQ ID NO: 17984 - DNA, 19 bp, Homo sapiens
  siRNA target sequence for CDYL2 (NM_152342.1,1315-1333).
gtcgcgctggccaatgaga

SEQ ID NO: 17985 - DNA, 19 bp, Homo sapiens
  siRNA target sequence for CDYL2 (NM_152342.1,1457-1475).
gcagtgccgtggtgttaga

SEQ ID NO: 17986 - DNA, 19 bp, Homo sapiens
  siRNA target sequence for CDYL2 (NM_152342.1,1468-1486).
gtgttagaggagtccaaat

SEQ ID NO: 17987 - DNA, 19 bp, Homo sapiens
  siRNA target sequence for CENPA (NM_001809.2,312-330).
gagcacacacctcttgata

SEQ ID NO: 17988 - DNA, 19 bp, Homo sapiens
  siRNA target sequence for CENPA (NM_001809.2,317-335).
cacacctcttgataaggaa

SEQ ID NO: 17989 - DNA, 19 bp, Homo sapiens
  siRNA target sequence for CENPA (NM_001809.2,380-398).
ctcgtggtgtggacttcaa

SEQ ID NO: 17990 - DNA, 19 bp, Homo sapiens
  siRNA target sequence for CENPA (NM_001809.2,382-400).
cgtggtgtggacttcaatt

SEQ ID NO: 17991 - DNA, 19 bp, Homo sapiens
  siRNA target sequence for CENPA (NM_001809.2,413-431).
ccctattggccctacaaga

SEQ ID NO: 17992 - DNA, 19 bp, Homo sapiens
  siRNA target sequence for CENPA (NM_001809.2,434-452).
cagcagaagcatttctagt

SEQ ID NO: 17993 - DNA, 19 bp, Homo sapiens
  siRNA target sequence for CENPA (NM_001809.2,471-489).
ctatctcctcaccttacat

SEQ ID NO: 17994 - DNA, 19 bp, Homo sapiens
  siRNA target sequence for CENPB (NM_001810.4,584-602).
ccgagaccagtctatggta

SEQ ID NO: 17995 - DNA, 19 bp, Homo sapiens
  siRNA target sequence for CENPB (NM_001810.4,1348-1366).
gaggagggtgatgttgata

SEQ ID NO: 17996 - DNA, 19 bp, Homo sapiens
  siRNA target sequence for CHAF1A (NM_005483.1,69-87).
cagttaagaagttaataca

SEQ ID NO: 17997 - DNA, 19 bp, Homo sapiens
  siRNA target sequence for CHAF1A (NM_005483.1,100-118).
gtttaagcgcctgaatctt

SEQ ID NO: 17998 - DNA, 19 bp, Homo sapiens
  siRNA target sequence for CHAF1A (NM_005483.1,159-177).
gtacttctgtgcaaagtaa

SEQ ID NO: 17999 - DNA, 19 bp, Homo sapiens
  siRNA target sequence for CHAF1A (NM_005483.1,227-245).
gtgggttctgacatagact

SEQ ID NO: 18000 - DNA, 19 bp, Homo sapiens
  siRNA target sequence for CHAF1A (NM_005483.1,229-247).
gggttctgacatagacttt

SEQ ID NO: 18001 - DNA, 19 bp, Homo sapiens
  siRNA target sequence for CHAF1A (NM_005483.1,230-248).
ggttctgacatagacttta

SEQ ID NO: 18002 - DNA, 19 bp, Homo sapiens
  siRNA target sequence for CHAF1A (NM_005483.1,265-283).
cgggaagggtcccttagat

SEQ ID NO: 18003 - DNA, 19 bp, Homo sapiens
  siRNA target sequence for CHAF1A (NM_005483.1,266-284).
gggaagggtcccttagata

SEQ ID NO: 18004 - DNA, 19 bp, Homo sapiens
  siRNA target sequence for CHAF1A (NM_005483.1,267-285).
ggaagggtcccttagataa

SEQ ID NO: 18005 - DNA, 19 bp, Homo sapiens
  siRNA target sequence for CHAF1A (NM_005483.1,272-290).
ggtcccttagataactttt

SEQ ID NO: 18006 - DNA, 19 bp, Homo sapiens
  siRNA target sequence for CHAF1A (NM_005483.1,275-293).
cccttagataactttttaa

SEQ ID NO: 18007 - DNA, 19 bp, Homo sapiens
  siRNA target sequence for CHAF1A (NM_005483.1,318-336).
gccagagcacagtcatcat

SEQ ID NO: 18008 - DNA, 19 bp, Homo sapiens
  siRNA target sequence for CHAF1A (NM_005483.1,319-337).
ccagagcacagtcatcatt

SEQ ID NO: 18009 - DNA, 19 bp, Homo sapiens
  siRNA target sequence for CHAF1A (NM_005483.1,452-470).
gatcagcaggggttgttga

SEQ ID NO: 18010 - DNA, 19 bp, Homo sapiens
  siRNA target sequence for CHAF1A (NM_005483.1,474-492).
ccattcagaacgacaagtt

SEQ ID NO: 18011 - DNA, 19 bp, Homo sapiens
  siRNA target sequence for CHAF1A (NM_005483.1,484-502).
cgacaagttggcatttcct

SEQ ID NO: 18012 - DNA, 19 bp, Homo sapiens
  siRNA target sequence for CHAF1A (NM_005483.1,575-593).
ggcgactcccaggaatgtt

SEQ ID NO: 18013 - DNA, 19 bp, Homo sapiens
  siRNA target sequence for CHAF1A (NM_005483.1,728-746).
gtgagaccaccgcaaatca

SEQ ID NO: 18014 - DNA, 19 bp, Homo sapiens
  siRNA target sequence for CHAF1A (NM_005483.1,792-810).
gtgaggtgctggaatcttt

SEQ ID NO: 18015 - DNA, 19 bp, Homo sapiens
  siRNA target sequence for CHAF1A (NM_005483.1,931-949).
cacgcccctccgcagaata

SEQ ID NO: 18016 - DNA, 19 bp, Homo sapiens
  siRNA target sequence for CHAF1A (NM_005483.1,934-952).
gcccctccgcagaataact

SEQ ID NO: 18017 - DNA, 19 bp, Homo sapiens
  siRNA target sequence for CHAF1A (NM_005483.1,935-953).
cccctccgcagaataacta

SEQ ID NO: 18018 - DNA, 19 bp, Homo sapiens
  siRNA target sequence for CHAF1A (NM_005483.1,938-956).
ctccgcagaataactaaga

SEQ ID NO: 18019 - DNA, 19 bp, Homo sapiens
  siRNA target sequence for CHAF1A (NM_005483.1,945-963).
gaataactaagaaattcgt

SEQ ID NO: 18020 - DNA, 19 bp, Homo sapiens
  siRNA target sequence for CHAF1A (NM_005483.1,1227-1245).
ccctggaggctaaacttga

SEQ ID NO: 18021 - DNA, 19 bp, Homo sapiens
  siRNA target sequence for CHAF1A (NM_005483.1,1372-1390).
cggctcctgtgggaagttt

SEQ ID NO: 18022 - DNA, 19 bp, Homo sapiens
  siRNA target sequence for CHAF1A (NM_005483.1,1384-1402).
gaagtttgccccctttgaa

SEQ ID NO: 18023 - DNA, 19 bp, Homo sapiens
  siRNA target sequence for CHAF1A (NM_005483.1,1432-1450).
gcgtcggaccgctttccat

SEQ ID NO: 18024 - DNA, 19 bp, Homo sapiens
  siRNA target sequence for CHAF1A (NM_005483.1,1496-1514).
ggcgagttctccttcttga

SEQ ID NO: 18025 - DNA, 19 bp, Homo sapiens
  siRNA target sequence for CHAF1A (NM_005483.1,1564-1582).
cacccggaatgcagatatt

SEQ ID NO: 18026 - DNA, 19 bp, Homo sapiens
  siRNA target sequence for CHAF1A (NM_005483.1,1698-1716).
ggggtacctggaataagaa

SEQ ID NO: 18027 - DNA, 19 bp, Homo sapiens
  siRNA target sequence for CHAF1A (NM_005483.1,1941-1959).
ccgaccctgagaaccataa

SEQ ID NO: 18028 - DNA, 19 bp, Homo sapiens
  siRNA target sequence for CHAF1A (NM_005483.1,2354-2372).
gccgccatcccctctaagt

SEQ ID NO: 18029 - DNA, 19 bp, Homo sapiens
  siRNA target sequence for CHAF1A (NM_005483.1,2375-2393).
cggctcaagcggctcattt

SEQ ID NO: 18030 - DNA, 19 bp, Homo sapiens
  siRNA target sequence for CHAF1A (NM_005483.1,2394-2412).
ccgagaactcagtgtatga

SEQ ID NO: 18031 - DNA, 19 bp, Homo sapiens
  siRNA target sequence for CHAF1A (NM_005483.1,2619-2637).
gcatcacccaattcatgaa

SEQ ID NO: 18032 - DNA, 19 bp, Homo sapiens
  siRNA target sequence for CHAF1A (NM_005483.1,2714-2732).
gaggagggcgactgtatga

SEQ ID NO: 18033 - DNA, 19 bp, Homo sapiens
  siRNA target sequence for CHAF1B (NM_005441.1,65-83).
gaaagtcatcacttgtgaa

SEQ ID NO: 18034 - DNA, 19 bp, Homo sapiens
  siRNA target sequence for CHAF1B (NM_005441.1,187-205).
ggatctggaaggtagaaaa

SEQ ID NO: 18035 - DNA, 19 bp, Homo sapiens
  siRNA target sequence for CHAF1B (NM_005441.1,217-235).
gaaaagccatcgtggaatt

SEQ ID NO: 18036 - DNA, 19 bp, Homo sapiens
  siRNA target sequence for CHAF1B (NM_005441.1,269-287).
caatgttgtgcgtttttct

SEQ ID NO: 18037 - DNA, 19 bp, Homo sapiens
  siRNA target sequence for CHAF1B (NM_005441.1,340-358).
ggaaggtgaatgataacaa

SEQ ID NO: 18038 - DNA, 19 bp, Homo sapiens
  siRNA target sequence for CHAF1B (NM_005441.1,472-490).
gggcaactgatgggaattt

SEQ ID NO: 18039 - DNA, 19 bp, Homo sapiens
  siRNA target sequence for CHAF1B (NM_005441.1,474-492).
gcaactgatgggaatttaa

SEQ ID NO: 18040 - DNA, 19 bp, Homo sapiens
  siRNA target sequence for CHAF1B (NM_005441.1,510-528).
gataacacagccatcatat

SEQ ID NO: 18041 - DNA, 19 bp, Homo sapiens
  siRNA target sequence for CHAF1B (NM_005441.1,543-561).
ggacaaaagatatcaattt

SEQ ID NO: 18042 - DNA, 19 bp, Homo sapiens
  siRNA target sequence for CHAF1B (NM_005441.1,602-620).
ccctttgggtcaatatgtt

SEQ ID NO: 18043 - DNA, 19 bp, Homo sapiens
  siRNA target sequence for CHAF1B (NM_005441.1,642-660).
gtgctgcgagtatacagta

SEQ ID NO: 18044 - DNA, 19 bp, Homo sapiens
  siRNA target sequence for CHAF1B (NM_005441.1,644-662).
gctgcgagtatacagtata

SEQ ID NO: 18045 - DNA, 19 bp, Homo sapiens
  siRNA target sequence for CHAF1B (NM_005441.1,648-666).
cgagtatacagtatacaga

SEQ ID NO: 18046 - DNA, 19 bp, Homo sapiens
  siRNA target sequence for CHAF1B (NM_005441.1,649-667).
gagtatacagtatacagaa

SEQ ID NO: 18047 - DNA, 19 bp, Homo sapiens
  siRNA target sequence for CHAF1B (NM_005441.1,668-686).
gaagcgtgtggctttcaat

SEQ ID NO: 18048 - DNA, 19 bp, Homo sapiens
  siRNA target sequence for CHAF1B (NM_005441.1,671-689).
gcgtgtggctttcaatgtt

SEQ ID NO: 18049 - DNA, 19 bp, Homo sapiens
  siRNA target sequence for CHAF1B (NM_005441.1,672-690).
cgtgtggctttcaatgttt

SEQ ID NO: 18050 - DNA, 19 bp, Homo sapiens
  siRNA target sequence for CHAF1B (NM_005441.1,730-748).
gaagctaccggatgtttca

SEQ ID NO: 18051 - DNA, 19 bp, Homo sapiens
  siRNA target sequence for CHAF1B (NM_005441.1,773-791).
ccgtagactgagtttcact

SEQ ID NO: 18052 - DNA, 19 bp, Homo sapiens
  siRNA target sequence for CHAF1B (NM_005441.1,938-956).
ctgctgtccggtctacttt

SEQ ID NO: 18053 - DNA, 19 bp, Homo sapiens
  siRNA target sequence for CHAF1B (NM_005441.1,940-958).
gctgtccggtctactttga

SEQ ID NO: 18054 - DNA, 19 bp, Homo sapiens
  siRNA target sequence for CHAF1B (NM_005441.1,943-961).
gtccggtctactttgaact

SEQ ID NO: 18055 - DNA, 19 bp, Homo sapiens
  siRNA target sequence for CHAF1B (NM_005441.1,1034-1052).
ggattccgtgcttctgtat

SEQ ID NO: 18056 - DNA, 19 bp, Homo sapiens
  siRNA target sequence for CHAF1B (NM_005441.1,1062-1080).
cagtccttcccttttggtt

SEQ ID NO: 18057 - DNA, 19 bp, Homo sapiens
  siRNA target sequence for CHAF1B (NM_005441.1,1072-1090).
cttttggttacgtgtctaa

SEQ ID NO: 18058 - DNA, 19 bp, Homo sapiens
  siRNA target sequence for CHAF1B (NM_005441.1,1078-1096).
gttacgtgtctaatataca

SEQ ID NO: 18059 - DNA, 19 bp, Homo sapiens
  siRNA target sequence for CHAF1B (NM_005441.1,1160-1178).
ggacggttactgctcattt

SEQ ID NO: 18060 - DNA, 19 bp, Homo sapiens
  siRNA target sequence for CHAF1B (NM_005441.1,1164-1182).
ggttactgctcatttgtga

SEQ ID NO: 18061 - DNA, 19 bp, Homo sapiens
  siRNA target sequence for CHAF1B (NM_005441.1,1183-1201).
catttgagaaagatgaact

SEQ ID NO: 18062 - DNA, 19 bp, Homo sapiens
  siRNA target sequence for CHAF1B (NM_005441.1,1218-1236).
gagaagccagttttgaaca

SEQ ID NO: 18063 - DNA, 19 bp, Homo sapiens
  siRNA target sequence for CHAF1B (NM_005441.1,1235-1253).
catgagaactcctgataca

SEQ ID NO: 18064 - DNA, 19 bp, Homo sapiens
  siRNA target sequence for CHAF1B (NM_005441.1,1415-1433).
catcactcctgctgtcaaa

SEQ ID NO: 18065 - DNA, 19 bp, Homo sapiens
  siRNA target sequence for CHAF1B (NM_005441.1,1466-1484).
cctgcagcccagtagtcaa

SEQ ID NO: 18066 - DNA, 19 bp, Homo sapiens
  siRNA target sequence for CHAF1B (NM_005441.1,1470-1488).
cagcccagtagtcaaaaca

SEQ ID NO: 18067 - DNA, 19 bp, Homo sapiens
  siRNA target sequence for CHAF1B (NM_005441.1,1472-1490).
gcccagtagtcaaaacaca

SEQ ID NO: 18068 - DNA, 19 bp, Homo sapiens
  siRNA target sequence for CHAF1B (NM_005441.1,1473-1491).
cccagtagtcaaaacacaa

SEQ ID NO: 18069 - DNA, 19 bp, Homo sapiens
  siRNA target sequence for CHAF1B (NM_005441.1,1474-1492).
ccagtagtcaaaacacaaa

SEQ ID NO: 18070 - DNA, 19 bp, Homo sapiens
  siRNA target sequence for CHAF1B (NM_005441.1,1544-1562).
gacaacaccccggagaata

SEQ ID NO: 18071 - DNA, 19 bp, Homo sapiens
  siRNA target sequence for CHAF1B (NM_005441.1,1549-1567).
caccccggagaataaactt

SEQ ID NO: 18072 - DNA, 19 bp, Homo sapiens
  siRNA target sequence for CHAF1B (NM_005441.1,1551-1569).
ccccggagaataaacttaa

SEQ ID NO: 18073 - DNA, 19 bp, Homo sapiens
  siRNA target sequence for CHAF1B (NM_005441.1,1583-1601).
ggacactccaccaagttct

SEQ ID NO: 18074 - DNA, 19 bp, Homo sapiens
  siRNA target sequence for CHAF1B (NM_005441.1,1616-1634).
gatttccaccccttctaca

SEQ ID NO: 18075 - DNA, 19 bp, Homo sapiens
  siRNA target sequence for CHAF1B (NM_005441.1,1672-1690).
gcagtcccccagagctaaa

SEQ ID NO: 18076 - DNA, 19 bp, Homo sapiens
  siRNA target sequence for CHD1 (NM_001270.1,360-378).
cagacacttcccgagaaaa

SEQ ID NO: 18077 - DNA, 19 bp, Homo sapiens
  siRNA target sequence for CHD1 (NM_001270.1,370-388).
ccgagaaaacaaagttcaa

SEQ ID NO: 18078 - DNA, 19 bp, Homo sapiens
  siRNA target sequence for CHD1 (NM_001270.1,456-474).
gatctgcaatcctcaagaa

SEQ ID NO: 18079 - DNA, 19 bp, Homo sapiens
  siRNA target sequence for CHD1 (NM_001270.1,503-521).
catcaagcctcatctaata

SEQ ID NO: 18080 - DNA, 19 bp, Homo sapiens
  siRNA target sequence for CHD1 (NM_001270.1,599-617).
gatgaagattggcaaatgt

SEQ ID NO: 18081 - DNA, 19 bp, Homo sapiens
  siRNA target sequence for CHD1 (NM_001270.1,702-720).
ctgattatgagccaaaaaa

SEQ ID NO: 18082 - DNA, 19 bp, Homo sapiens
  siRNA target sequence for CHD1 (NM_001270.1,740-758).
cctcaaaatagatctaagt

SEQ ID NO: 18083 - DNA, 19 bp, Homo sapiens
  siRNA target sequence for CHD1 (NM_001270.1,839-857).
gataatgataaaagaagtt

SEQ ID NO: 18084 - DNA, 19 bp, Homo sapiens
  siRNA target sequence for CHD1 (NM_001270.1,860-878).
cgtcgccaagcaactgtta

SEQ ID NO: 18085 - DNA, 19 bp, Homo sapiens
  siRNA target sequence for CHD1 (NM_001270.1,861-879).
gtcgccaagcaactgttaa

SEQ ID NO: 18086 - DNA, 19 bp, Homo sapiens
  siRNA target sequence for CHD1 (NM_001270.1,1022-1040).
gctactggtgctactacaa

SEQ ID NO: 18087 - DNA, 19 bp, Homo sapiens
  siRNA target sequence for CHD1 (NM_001270.1,1100-1118).
ccaggagagattcagtatt

SEQ ID NO: 18088 - DNA, 19 bp, Homo sapiens
  siRNA target sequence for CHD1 (NM_001270.1,1101-1119).
caggagagattcagtattt

SEQ ID NO: 18089 - DNA, 19 bp, Homo sapiens
  siRNA target sequence for CHD1 (NM_001270.1,1103-1121).
ggagagattcagtatttaa

SEQ ID NO: 18090 - DNA, 19 bp, Homo sapiens
  siRNA target sequence for CHD1 (NM_001270.1,1106-1124).
gagattcagtatttaatta

SEQ ID NO: 18091 - DNA, 19 bp, Homo sapiens
  siRNA target sequence for CHD1 (NM_001270.1,1175-1193).
ctcaagcagcagaatgtta

SEQ ID NO: 18092 - DNA, 19 bp, Homo sapiens
  siRNA target sequence for CHD1 (NM_001270.1,1177-1195).
caagcagcagaatgttaga

SEQ ID NO: 18093 - DNA, 19 bp, Homo sapiens
  siRNA target sequence for CHD1 (NM_001270.1,1307-1325).
gatgatctacataaacagt

SEQ ID NO: 18094 - DNA, 19 bp, Homo sapiens
  siRNA target sequence for CHD1 (NM_001270.1,1341-1359).
gtataattgctcattccaa

SEQ ID NO: 18095 - DNA, 19 bp, Homo sapiens
  siRNA target sequence for CHD1 (NM_001270.1,1366-1384).
gtcagcagctggttatcct

SEQ ID NO: 18096 - DNA, 19 bp, Homo sapiens
  siRNA target sequence for CHD1 (NM_001270.1,1371-1389).
cagctggttatcctgatta

SEQ ID NO: 18097 - DNA, 19 bp, Homo sapiens
  siRNA target sequence for CHD1 (NM_001270.1,1373-1391).
gctggttatcctgattatt

SEQ ID NO: 18098 - DNA, 19 bp, Homo sapiens
  siRNA target sequence for CHD1 (NM_001270.1,1376-1394).
ggttatcctgattattact

SEQ ID NO: 18099 - DNA, 19 bp, Homo sapiens
  siRNA target sequence for CHD1 (NM_001270.1,1382-1400).
cctgattattactgcaaat

SEQ ID NO: 18100 - DNA, 19 bp, Homo sapiens
  siRNA target sequence for CHD1 (NM_001270.1,1402-1420).
gcagggccttccatactca

SEQ ID NO: 18101 - DNA, 19 bp, Homo sapiens
  siRNA target sequence for CHD1 (NM_001270.1,1442-1460).
gctctcatttccaaaaagt

SEQ ID NO: 18102 - DNA, 19 bp, Homo sapiens
  siRNA target sequence for CHD1 (NM_001270.1,1509-1527).
ctccttttaaagattgcaa

SEQ ID NO: 18103 - DNA, 19 bp, Homo sapiens
  siRNA target sequence for CHD1 (NM_001270.1,1564-1582).
gaagcagccatcctatatt

SEQ ID NO: 18104 - DNA, 19 bp, Homo sapiens
  siRNA target sequence for CHD1 (NM_001270.1,1586-1604).
ggacatgagggcttagaat

SEQ ID NO: 18105 - DNA, 19 bp, Homo sapiens
  siRNA target sequence for CHD1 (NM_001270.1,1595-1613).
ggcttagaattaagagatt

SEQ ID NO: 18106 - DNA, 19 bp, Homo sapiens
  siRNA target sequence for CHD1 (NM_001270.1,1596-1614).
gcttagaattaagagatta

SEQ ID NO: 18107 - DNA, 19 bp, Homo sapiens
  siRNA target sequence for CHD1 (NM_001270.1,1710-1728).
cgatctcatttctgaatta

SEQ ID NO: 18108 - DNA, 19 bp, Homo sapiens
  siRNA target sequence for CHD1 (NM_001270.1,1745-1763).
caattatatggaccttttt

SEQ ID NO: 18109 - DNA, 19 bp, Homo sapiens
  siRNA target sequence for CHD1 (NM_001270.1,1772-1790).
gtaccgctctccactctta

SEQ ID NO: 18110 - DNA, 19 bp, Homo sapiens
  siRNA target sequence for CHD1 (NM_001270.1,1775-1793).
ccgctctccactcttactt

SEQ ID NO: 18111 - DNA, 19 bp, Homo sapiens
  siRNA target sequence for CHD1 (NM_001270.1,1811-1829).
cagacttgggcttctcaaa

SEQ ID NO: 18112 - DNA, 19 bp, Homo sapiens
  siRNA target sequence for CHD1 (NM_001270.1,1864-1882).
cagaaacatgataagaact

SEQ ID NO: 18113 - DNA, 19 bp, Homo sapiens
  siRNA target sequence for CHD1 (NM_001270.1,1906-1924).
caaacggttaaaatttaat

SEQ ID NO: 18114 - DNA, 19 bp, Homo sapiens
  siRNA target sequence for CHD1 (NM_001270.1,1910-1928).
cggttaaaatttaatatat

SEQ ID NO: 18115 - DNA, 19 bp, Homo sapiens
  siRNA target sequence for CHD1 (NM_001270.1,1930-1948).
gttaacaacttatgaaatt

SEQ ID NO: 18116 - DNA, 19 bp, Homo sapiens
  siRNA target sequence for CHD1 (NM_001270.1,1965-1983).
cattccttggaggtctaaa

SEQ ID NO: 18117 - DNA, 19 bp, Homo sapiens
  siRNA target sequence for CHD1 (NM_001270.1,1977-1995).
gtctaaattgggcatttat

SEQ ID NO: 18118 - DNA, 19 bp, Homo sapiens
  siRNA target sequence for CHD1 (NM_001270.1,1987-2005).
ggcatttataggtgttgat

SEQ ID NO: 18119 - DNA, 19 bp, Homo sapiens
  siRNA target sequence for CHD1 (NM_001270.1,1989-2007).
catttataggtgttgatga

SEQ ID NO: 18120 - DNA, 19 bp, Homo sapiens
  siRNA target sequence for CHD1 (NM_001270.1,2003-2021).
gatgaagcacaccgattaa

SEQ ID NO: 18121 - DNA, 19 bp, Homo sapiens
  siRNA target sequence for CHD1 (NM_001270.1,2006-2024).
gaagcacaccgattaaaga

SEQ ID NO: 18122 - DNA, 19 bp, Homo sapiens
  siRNA target sequence for CHD1 (NM_001270.1,2010-2028).
cacaccgattaaagaatga

SEQ ID NO: 18123 - DNA, 19 bp, Homo sapiens
  siRNA target sequence for CHD1 (NM_001270.1,2030-2048).
gactcccttctgtataaaa

SEQ ID NO: 18124 - DNA, 19 bp, Homo sapiens
  siRNA target sequence for CHD1 (NM_001270.1,2067-2085).
ccaatcatcgtctccttat

SEQ ID NO: 18125 - DNA, 19 bp, Homo sapiens
  siRNA target sequence for CHD1 (NM_001270.1,2120-2138).
ctctggtctttgctacatt

SEQ ID NO: 18126 - DNA, 19 bp, Homo sapiens
  siRNA target sequence for CHD1 (NM_001270.1,2124-2142).
ggtctttgctacatttcat

SEQ ID NO: 18127 - DNA, 19 bp, Homo sapiens
  siRNA target sequence for CHD1 (NM_001270.1,2191-2209).
caaagggagagaatatggt

SEQ ID NO: 18128 - DNA, 19 bp, Homo sapiens
  siRNA target sequence for CHD1 (NM_001270.1,2197-2215).
gagagaatatggttatgca

SEQ ID NO: 18129 - DNA, 19 bp, Homo sapiens
  siRNA target sequence for CHD1 (NM_001270.1,2243-2261).
ctgttacgccgagttaaga

SEQ ID NO: 18130 - DNA, 19 bp, Homo sapiens
  siRNA target sequence for CHD1 (NM_001270.1,2245-2263).
gttacgccgagttaagaaa

SEQ ID NO: 18131 - DNA, 19 bp, Homo sapiens
  siRNA target sequence for CHD1 (NM_001270.1,2250-2268).
gccgagttaagaaagatgt

SEQ ID NO: 18132 - DNA, 19 bp, Homo sapiens
  siRNA target sequence for CHD1 (NM_001270.1,2287-2305).
caaggttgagcagatttta

SEQ ID NO: 18133 - DNA, 19 bp, Homo sapiens
  siRNA target sequence for CHD1 (NM_001270.1,2290-2308).
ggttgagcagattttaaga

SEQ ID NO: 18134 - DNA, 19 bp, Homo sapiens
  siRNA target sequence for CHD1 (NM_001270.1,2291-2309).
gttgagcagattttaagaa

SEQ ID NO: 18135 - DNA, 19 bp, Homo sapiens
  siRNA target sequence for CHD1 (NM_001270.1,2317-2335).
gagtgctttacagaaacaa

SEQ ID NO: 18136 - DNA, 19 bp, Homo sapiens
  siRNA target sequence for CHD1 (NM_001270.1,2346-2364).
ggattttaactaggaatta

SEQ ID NO: 18137 - DNA, 19 bp, Homo sapiens
  siRNA target sequence for CHD1 (NM_001270.1,2400-2418).
caggctttttgaacattat

SEQ ID NO: 18138 - DNA, 19 bp, Homo sapiens
  siRNA target sequence for CHD1 (NM_001270.1,2443-2461).
ccattgctacctcattaaa

SEQ ID NO: 18139 - DNA, 19 bp, Homo sapiens
  siRNA target sequence for CHD1 (NM_001270.1,2455-2473).
cattaaaccaccagataat

SEQ ID NO: 18140 - DNA, 19 bp, Homo sapiens
  siRNA target sequence for CHD1 (NM_001270.1,2462-2480).
ccaccagataataatgaat

SEQ ID NO: 18141 - DNA, 19 bp, Homo sapiens
  siRNA target sequence for CHD1 (NM_001270.1,2494-2512).
ggaggccttacaacactta

SEQ ID NO: 18142 - DNA, 19 bp, Homo sapiens
  siRNA target sequence for CHD1 (NM_001270.1,2495-2513).
gaggccttacaacacttaa

SEQ ID NO: 18143 - DNA, 19 bp, Homo sapiens
  siRNA target sequence for CHD1 (NM_001270.1,2497-2515).
ggccttacaacacttaatt

SEQ ID NO: 18144 - DNA, 19 bp, Homo sapiens
  siRNA target sequence for CHD1 (NM_001270.1,2516-2534).
cgtagtagcggaaaattga

SEQ ID NO: 18145 - DNA, 19 bp, Homo sapiens
  siRNA target sequence for CHD1 (NM_001270.1,2517-2535).
gtagtagcggaaaattgat

SEQ ID NO: 18146 - DNA, 19 bp, Homo sapiens
  siRNA target sequence for CHD1 (NM_001270.1,2520-2538).
gtagcggaaaattgattct

SEQ ID NO: 18147 - DNA, 19 bp, Homo sapiens
  siRNA target sequence for CHD1 (NM_001270.1,2523-2541).
gcggaaaattgattcttct

SEQ ID NO: 18148 - DNA, 19 bp, Homo sapiens
  siRNA target sequence for CHD1 (NM_001270.1,2570-2588).
cgaggcaatcgagttctta

SEQ ID NO: 18149 - DNA, 19 bp, Homo sapiens
  siRNA target sequence for CHD1 (NM_001270.1,2571-2589).
gaggcaatcgagttcttat

SEQ ID NO: 18150 - DNA, 19 bp, Homo sapiens
  siRNA target sequence for CHD1 (NM_001270.1,2573-2591).
ggcaatcgagttcttattt

SEQ ID NO: 18151 - DNA, 19 bp, Homo sapiens
  siRNA target sequence for CHD1 (NM_001270.1,2574-2592).
gcaatcgagttcttatttt

SEQ ID NO: 18152 - DNA, 19 bp, Homo sapiens
  siRNA target sequence for CHD1 (NM_001270.1,2602-2620).
ggtgcggatgttagatata

SEQ ID NO: 18153 - DNA, 19 bp, Homo sapiens
  siRNA target sequence for CHD1 (NM_001270.1,2605-2623).
gcggatgttagatatactt

SEQ ID NO: 18154 - DNA, 19 bp, Homo sapiens
  siRNA target sequence for CHD1 (NM_001270.1,2642-2660).
cgtcaattcccctttcaaa

SEQ ID NO: 18155 - DNA, 19 bp, Homo sapiens
  siRNA target sequence for CHD1 (NM_001270.1,2691-2709).
ggaaacaagctctagatca

SEQ ID NO: 18156 - DNA, 19 bp, Homo sapiens
  siRNA target sequence for CHD1 (NM_001270.1,2692-2710).
gaaacaagctctagatcat

SEQ ID NO: 18157 - DNA, 19 bp, Homo sapiens
  siRNA target sequence for CHD1 (NM_001270.1,2696-2714).
caagctctagatcatttta

SEQ ID NO: 18158 - DNA, 19 bp, Homo sapiens
  siRNA target sequence for CHD1 (NM_001270.1,2718-2736).
ctgagggatcagaggattt

SEQ ID NO: 18159 - DNA, 19 bp, Homo sapiens
  siRNA target sequence for CHD1 (NM_001270.1,2720-2738).
gagggatcagaggattttt

SEQ ID NO: 18160 - DNA, 19 bp, Homo sapiens
  siRNA target sequence for CHD1 (NM_001270.1,2762-2780).
ggaggtctagggattaatt

SEQ ID NO: 18161 - DNA, 19 bp, Homo sapiens
  siRNA target sequence for CHD1 (NM_001270.1,2848-2866).
ggctagagcccatcgaatt

SEQ ID NO: 18162 - DNA, 19 bp, Homo sapiens
  siRNA target sequence for CHD1 (NM_001270.1,2904-2922).
caaagggatcagttgaaga

SEQ ID NO: 18163 - DNA, 19 bp, Homo sapiens
  siRNA target sequence for CHD1 (NM_001270.1,2993-3011).
gggaagacagtactacata

SEQ ID NO: 18164 - DNA, 19 bp, Homo sapiens
  siRNA target sequence for CHD1 (NM_001270.1,3014-3032).
ggttctgccccatcaagtt

SEQ ID NO: 18165 - DNA, 19 bp, Homo sapiens
  siRNA target sequence for CHD1 (NM_001270.1,3053-3071).
gagttatcagccattttaa

SEQ ID NO: 18166 - DNA, 19 bp, Homo sapiens
  siRNA target sequence for CHD1 (NM_001270.1,3223-3241).
ggttgccaacttctcaaat

SEQ ID NO: 18167 - DNA, 19 bp, Homo sapiens
  siRNA target sequence for CHD1 (NM_001270.1,3224-3242).
gttgccaacttctcaaata

SEQ ID NO: 18168 - DNA, 19 bp, Homo sapiens
  siRNA target sequence for CHD1 (NM_001270.1,3229-3247).
caacttctcaaatatggat

SEQ ID NO: 18169 - DNA, 19 bp, Homo sapiens
  siRNA target sequence for CHD1 (NM_001270.1,3419-3437).
gaagggaggcgcagtagaa

SEQ ID NO: 18170 - DNA, 19 bp, Homo sapiens
  siRNA target sequence for CHD1 (NM_001270.1,3422-3440).
gggaggcgcagtagaagta

SEQ ID NO: 18171 - DNA, 19 bp, Homo sapiens
  siRNA target sequence for CHD1 (NM_001270.1,3453-3471).
gatctgatagtgattccat

SEQ ID NO: 18172 - DNA, 19 bp, Homo sapiens
  siRNA target sequence for CHD1 (NM_001270.1,3513-3531).
ctattcctcgggagaatat

SEQ ID NO: 18173 - DNA, 19 bp, Homo sapiens
  siRNA target sequence for CHD1 (NM_001270.1,3521-3539).
cgggagaatattaaaggat

SEQ ID NO: 18174 - DNA, 19 bp, Homo sapiens
  siRNA target sequence for CHD1 (NM_001270.1,3549-3567).
cagaaattaggcggtttat

SEQ ID NO: 18175 - DNA, 19 bp, Homo sapiens
  siRNA target sequence for CHD1 (NM_001270.1,3560-3578).
cggtttatcaagagctata

SEQ ID NO: 18176 - DNA, 19 bp, Homo sapiens
  siRNA target sequence for CHD1 (NM_001270.1,3561-3579).
ggtttatcaagagctataa

SEQ ID NO: 18177 - DNA, 19 bp, Homo sapiens
  siRNA target sequence for CHD1 (NM_001270.1,3571-3589).
gagctataagaaatttggt

SEQ ID NO: 18178 - DNA, 19 bp, Homo sapiens
  siRNA target sequence for CHD1 (NM_001270.1,3587-3605).
ggtggtcctctggaaagat

SEQ ID NO: 18179 - DNA, 19 bp, Homo sapiens
  siRNA target sequence for CHD1 (NM_001270.1,3591-3609).
gtcctctggaaagattaga

SEQ ID NO: 18180 - DNA, 19 bp, Homo sapiens
  siRNA target sequence for CHD1 (NM_001270.1,3598-3616).
ggaaagattagatgcaatt

SEQ ID NO: 18181 - DNA, 19 bp, Homo sapiens
  siRNA target sequence for CHD1 (NM_001270.1,3618-3636).
ctcgagatgctgagttagt

SEQ ID NO: 18182 - DNA, 19 bp, Homo sapiens
  siRNA target sequence for CHD1 (NM_001270.1,3626-3644).
gctgagttagttgataagt

SEQ ID NO: 18183 - DNA, 19 bp, Homo sapiens
  siRNA target sequence for CHD1 (NM_001270.1,3660-3678).
gacgactgggagaattggt

SEQ ID NO: 18184 - DNA, 19 bp, Homo sapiens
  siRNA target sequence for CHD1 (NM_001270.1,3671-3689).
gaattggtacataatggtt

SEQ ID NO: 18185 - DNA, 19 bp, Homo sapiens
  siRNA target sequence for CHD1 (NM_001270.1,3677-3695).
gtacataatggttgcatta

SEQ ID NO: 18186 - DNA, 19 bp, Homo sapiens
  siRNA target sequence for CHD1 (NM_001270.1,3735-3753).
gtggtagactcggaaaagt

SEQ ID NO: 18187 - DNA, 19 bp, Homo sapiens
  siRNA target sequence for CHD1 (NM_001270.1,3737-3755).
ggtagactcggaaaagtga

SEQ ID NO: 18188 - DNA, 19 bp, Homo sapiens
  siRNA target sequence for CHD1 (NM_001270.1,3738-3756).
gtagactcggaaaagtgaa

SEQ ID NO: 18189 - DNA, 19 bp, Homo sapiens
  siRNA target sequence for CHD1 (NM_001270.1,3758-3776).
ggtccaacattccgaatat

SEQ ID NO: 18190 - DNA, 19 bp, Homo sapiens
  siRNA target sequence for CHD1 (NM_001270.1,3838-3856).
caaatccattccttctgat

SEQ ID NO: 18191 - DNA, 19 bp, Homo sapiens
  siRNA target sequence for CHD1 (NM_001270.1,3892-3910).
cacaaaggcagctcatttt

SEQ ID NO: 18192 - DNA, 19 bp, Homo sapiens
  siRNA target sequence for CHD1 (NM_001270.1,3894-3912).
caaaggcagctcattttga

SEQ ID NO: 18193 - DNA, 19 bp, Homo sapiens
  siRNA target sequence for CHD1 (NM_001270.1,3898-3916).
ggcagctcattttgatata

SEQ ID NO: 18194 - DNA, 19 bp, Homo sapiens
  siRNA target sequence for CHD1 (NM_001270.1,3929-3947).
gaagatgattccaatttgt

SEQ ID NO: 18195 - DNA, 19 bp, Homo sapiens
  siRNA target sequence for CHD1 (NM_001270.1,3932-3950).
gatgattccaatttgttaa

SEQ ID NO: 18196 - DNA, 19 bp, Homo sapiens
  siRNA target sequence for CHD1 (NM_001270.1,3946-3964).
gttaattggcatctatgaa

SEQ ID NO: 18197 - DNA, 19 bp, Homo sapiens
  siRNA target sequence for CHD1 (NM_001270.1,3953-3971).
ggcatctatgaatatggat

SEQ ID NO: 18198 - DNA, 19 bp, Homo sapiens
  siRNA target sequence for CHD1 (NM_001270.1,3954-3972).
gcatctatgaatatggata

SEQ ID NO: 18199 - DNA, 19 bp, Homo sapiens
  siRNA target sequence for CHD1 (NM_001270.1,3955-3973).
catctatgaatatggatat

SEQ ID NO: 18200 - DNA, 19 bp, Homo sapiens
  siRNA target sequence for CHD1 (NM_001270.1,4009-4027).
cagtctaacacacaagatt

SEQ ID NO: 18201 - DNA, 19 bp, Homo sapiens
  siRNA target sequence for CHD1 (NM_001270.1,4031-4049).
ccagatgatcccgataaaa

SEQ ID NO: 18202 - DNA, 19 bp, Homo sapiens
  siRNA target sequence for CHD1 (NM_001270.1,4032-4050).
cagatgatcccgataaaaa

SEQ ID NO: 18203 - DNA, 19 bp, Homo sapiens
  siRNA target sequence for CHD1 (NM_001270.1,4084-4102).
ctacctcatcaaattactt

SEQ ID NO: 18204 - DNA, 19 bp, Homo sapiens
  siRNA target sequence for CHD1 (NM_001270.1,4087-4105).
cctcatcaaattacttagt

SEQ ID NO: 18205 - DNA, 19 bp, Homo sapiens
  siRNA target sequence for CHD1 (NM_001270.1,4090-4108).
catcaaattacttagtaga

SEQ ID NO: 18206 - DNA, 19 bp, Homo sapiens
  siRNA target sequence for CHD1 (NM_001270.1,4298-4316).
gaaagatccaagaaatctt

SEQ ID NO: 18207 - DNA, 19 bp, Homo sapiens
  siRNA target sequence for CHD1 (NM_001270.1,4499-4517).
catactagacaatgtttaa

SEQ ID NO: 18208 - DNA, 19 bp, Homo sapiens
  siRNA target sequence for CHD1 (NM_001270.1,4532-4550).
catatcacagaatgtctaa

SEQ ID NO: 18209 - DNA, 19 bp, Homo sapiens
  siRNA target sequence for CHD1 (NM_001270.1,4541-4559).
gaatgtctaaaagagtata

SEQ ID NO: 18210 - DNA, 19 bp, Homo sapiens
  siRNA target sequence for CHD1 (NM_001270.1,4714-4732).
gaatcctcacgtgattaga

SEQ ID NO: 18211 - DNA, 19 bp, Homo sapiens
  siRNA target sequence for CHD1 (NM_001270.1,4736-4754).
ccagatgtggaaagattaa

SEQ ID NO: 18212 - DNA, 19 bp, Homo sapiens
  siRNA target sequence for CHD1 (NM_001270.1,4798-4816).
ctctgatagacacttaact

SEQ ID NO: 18213 - DNA, 19 bp, Homo sapiens
  siRNA target sequence for CHD1 (NM_001270.1,4841-4859).
cgacatcagggagattctt

SEQ ID NO: 18214 - DNA, 19 bp, Homo sapiens
  siRNA target sequence for CHD1 (NM_001270.1,4844-4862).
catcagggagattcttaca

SEQ ID NO: 18215 - DNA, 19 bp, Homo sapiens
  siRNA target sequence for CHD1 (NM_001270.1,4847-4865).
cagggagattcttacaaaa

SEQ ID NO: 18216 - DNA, 19 bp, Homo sapiens
  siRNA target sequence for CHD1 (NM_001270.1,4849-4867).
gggagattcttacaaaaaa

SEQ ID NO: 18217 - DNA, 19 bp, Homo sapiens
  siRNA target sequence for CHD1 (NM_001270.1,4879-4897).
gaaaagaccctattcttct

SEQ ID NO: 18218 - DNA, 19 bp, Homo sapiens
  siRNA target sequence for CHD1 (NM_001270.1,5001-5019).
gagatcacaggtcaaattt

SEQ ID NO: 18219 - DNA, 19 bp, Homo sapiens
  siRNA target sequence for CHD1 (NM_001270.1,5024-5042).
ggaagtttaaaagatagat

SEQ ID NO: 18220 - DNA, 19 bp, Homo sapiens
  siRNA target sequence for CHD1 (NM_001270.1,5065-5083).
ctcagatcatcggttacat

SEQ ID NO: 18221 - DNA, 19 bp, Homo sapiens
  siRNA target sequence for CHD1 (NM_001270.1,5090-5108).
caccggtcaagttctgaat

SEQ ID NO: 18222 - DNA, 19 bp, Homo sapiens
  siRNA target sequence for CHD1 (NM_001270.1,5092-5110).
ccggtcaagttctgaatat

SEQ ID NO: 18223 - DNA, 19 bp, Homo sapiens
  siRNA target sequence for CHD1 (NM_001270.1,5093-5111).
cggtcaagttctgaatata

SEQ ID NO: 18224 - DNA, 19 bp, Homo sapiens
  siRNA target sequence for CHD1 (NM_001270.1,5105-5123).
gaatatacgcaccataaat

SEQ ID NO: 18225 - DNA, 19 bp, Homo sapiens
  siRNA target sequence for CHD1 (NM_001270.1,5185-5203).
ccctaggtcaccactagat

SEQ ID NO: 18226 - DNA, 19 bp, Homo sapiens
  siRNA target sequence for CHD1 (NM_001270.1,5187-5205).
ctaggtcaccactagatca

SEQ ID NO: 18227 - DNA, 19 bp, Homo sapiens
  siRNA target sequence for CHD1 (NM_001270.1,5272-5290).
ctggagtagtcggaaaaca

SEQ ID NO: 18228 - DNA, 19 bp, Homo sapiens
  siRNA target sequence for CHD2 (NM_001271.1,911-929).
cgaatcagcaggttccaaa

SEQ ID NO: 18229 - DNA, 19 bp, Homo sapiens
  siRNA target sequence for CHD2 (NM_001271.1,982-1000).
ggatagctgatgtgaagaa

SEQ ID NO: 18230 - DNA, 19 bp, Homo sapiens
  siRNA target sequence for CHD2 (NM_001271.1,1056-1074).
caagaaccatcgcgattta

SEQ ID NO: 18231 - DNA, 19 bp, Homo sapiens
  siRNA target sequence for CHD2 (NM_001271.1,1066-1084).
cgcgatttaatattaagga

SEQ ID NO: 18232 - DNA, 19 bp, Homo sapiens
  siRNA target sequence for CHD2 (NM_001271.1,1067-1085).
gcgatttaatattaaggaa

SEQ ID NO: 18233 - DNA, 19 bp, Homo sapiens
  siRNA target sequence for CHD2 (NM_001271.1,1104-1122).
gagagtgggagcccaaaaa

SEQ ID NO: 18234 - DNA, 19 bp, Homo sapiens
  siRNA target sequence for CHD2 (NM_001271.1,1267-1285).
ccaaacctcgtgttaaaaa

SEQ ID NO: 18235 - DNA, 19 bp, Homo sapiens
  siRNA target sequence for CHD2 (NM_001271.1,1374-1392).
cgtcgaagagcggctaaaa

SEQ ID NO: 18236 - DNA, 19 bp, Homo sapiens
  siRNA target sequence for CHD2 (NM_001271.1,1375-1393).
gtcgaagagcggctaaaaa

SEQ ID NO: 18237 - DNA, 19 bp, Homo sapiens
  siRNA target sequence for CHD2 (NM_001271.1,1378-1396).
gaagagcggctaaaaacgt

SEQ ID NO: 18238 - DNA, 19 bp, Homo sapiens
  siRNA target sequence for CHD2 (NM_001271.1,1383-1401).
gcggctaaaaacgttagtt

SEQ ID NO: 18239 - DNA, 19 bp, Homo sapiens
  siRNA target sequence for CHD2 (NM_001271.1,1384-1402).
cggctaaaaacgttagtta

SEQ ID NO: 18240 - DNA, 19 bp, Homo sapiens
  siRNA target sequence for CHD2 (NM_001271.1,1386-1404).
gctaaaaacgttagttaca

SEQ ID NO: 18241 - DNA, 19 bp, Homo sapiens
  siRNA target sequence for CHD2 (NM_001271.1,1394-1412).
cgttagttacaaagaagat

SEQ ID NO: 18242 - DNA, 19 bp, Homo sapiens
  siRNA target sequence for CHD2 (NM_001271.1,1434-1452).
gatgatctcattgaaatga

SEQ ID NO: 18243 - DNA, 19 bp, Homo sapiens
  siRNA target sequence for CHD2 (NM_001271.1,1464-1482).
gttgatgaacagcaagata

SEQ ID NO: 18244 - DNA, 19 bp, Homo sapiens
  siRNA target sequence for CHD2 (NM_001271.1,1476-1494).
caagataatagtgaaacta

SEQ ID NO: 18245 - DNA, 19 bp, Homo sapiens
  siRNA target sequence for CHD2 (NM_001271.1,1492-1510).
ctattgaaaaggtcttaga

SEQ ID NO: 18246 - DNA, 19 bp, Homo sapiens
  siRNA target sequence for CHD2 (NM_001271.1,1577-1595).
cgaccctagtggtgacttt

SEQ ID NO: 18247 - DNA, 19 bp, Homo sapiens
  siRNA target sequence for CHD2 (NM_001271.1,1581-1599).
cctagtggtgactttgaca

SEQ ID NO: 18248 - DNA, 19 bp, Homo sapiens
  siRNA target sequence for CHD2 (NM_001271.1,1703-1721).
gaagggcctaaaaaaacta

SEQ ID NO: 18249 - DNA, 19 bp, Homo sapiens
  siRNA target sequence for CHD2 (NM_001271.1,1811-1829).
gctggcttcagagttgaat

SEQ ID NO: 18250 - DNA, 19 bp, Homo sapiens
  siRNA target sequence for CHD2 (NM_001271.1,1814-1832).
ggcttcagagttgaataaa

SEQ ID NO: 18251 - DNA, 19 bp, Homo sapiens
  siRNA target sequence for CHD2 (NM_001271.1,1833-1851).
cagtatcagatagtagaaa

SEQ ID NO: 18252 - DNA, 19 bp, Homo sapiens
  siRNA target sequence for CHD2 (NM_001271.1,1879-1897).
ctacattgggtcaaacaga

SEQ ID NO: 18253 - DNA, 19 bp, Homo sapiens
  siRNA target sequence for CHD2 (NM_001271.1,1882-1900).
cattgggtcaaacagattt

SEQ ID NO: 18254 - DNA, 19 bp, Homo sapiens
  siRNA target sequence for CHD2 (NM_001271.1,1916-1934).
gaagccggcaccctcaaat

SEQ ID NO: 18255 - DNA, 19 bp, Homo sapiens
  siRNA target sequence for CHD2 (NM_001271.1,1928-1946).
ctcaaatgagcccgaatat

SEQ ID NO: 18256 - DNA, 19 bp, Homo sapiens
  siRNA target sequence for CHD2 (NM_001271.1,1930-1948).
caaatgagcccgaatatct

SEQ ID NO: 18257 - DNA, 19 bp, Homo sapiens
  siRNA target sequence for CHD2 (NM_001271.1,1935-1953).
gagcccgaatatctatgta

SEQ ID NO: 18258 - DNA, 19 bp, Homo sapiens
  siRNA target sequence for CHD2 (NM_001271.1,1937-1955).
gcccgaatatctatgtaaa

SEQ ID NO: 18259 - DNA, 19 bp, Homo sapiens
  siRNA target sequence for CHD2 (NM_001271.1,1958-1976).
gatgggactcccctattca

SEQ ID NO: 18260 - DNA, 19 bp, Homo sapiens
  siRNA target sequence for CHD2 (NM_001271.1,1999-2017).
ccctcattggaaagaaatt

SEQ ID NO: 18261 - DNA, 19 bp, Homo sapiens
  siRNA target sequence for CHD2 (NM_001271.1,2098-2116).
gaccacgatttgtagcttt

SEQ ID NO: 18262 - DNA, 19 bp, Homo sapiens
  siRNA target sequence for CHD2 (NM_001271.1,2100-2118).
ccacgatttgtagctttaa

SEQ ID NO: 18263 - DNA, 19 bp, Homo sapiens
  siRNA target sequence for CHD2 (NM_001271.1,2101-2119).
cacgatttgtagctttaaa

SEQ ID NO: 18264 - DNA, 19 bp, Homo sapiens
  siRNA target sequence for CHD2 (NM_001271.1,2120-2138).
gaaacaacctgcatattta

SEQ ID NO: 18265 - DNA, 19 bp, Homo sapiens
  siRNA target sequence for CHD2 (NM_001271.1,2169-2187).
cagctagaaggtctaaact

SEQ ID NO: 18266 - DNA, 19 bp, Homo sapiens
  siRNA target sequence for CHD2 (NM_001271.1,2201-2219).
ctggtgcaaaaataatagt

SEQ ID NO: 18267 - DNA, 19 bp, Homo sapiens
  siRNA target sequence for CHD2 (NM_001271.1,2254-2272).
ccatccagaccatatcatt

SEQ ID NO: 18268 - DNA, 19 bp, Homo sapiens
  siRNA target sequence for CHD2 (NM_001271.1,2316-2334).
cttatagtcgtccctttat

SEQ ID NO: 18269 - DNA, 19 bp, Homo sapiens
  siRNA target sequence for CHD2 (NM_001271.1,2371-2389).
gggcaccagagattaacgt

SEQ ID NO: 18270 - DNA, 19 bp, Homo sapiens
  siRNA target sequence for CHD2 (NM_001271.1,2372-2390).
ggcaccagagattaacgta

SEQ ID NO: 18271 - DNA, 19 bp, Homo sapiens
  siRNA target sequence for CHD2 (NM_001271.1,2411-2429).
gatgagcagaaatacgata

SEQ ID NO: 18272 - DNA, 19 bp, Homo sapiens
  siRNA target sequence for CHD2 (NM_001271.1,2468-2486).
gaagttcaacgcacttata

SEQ ID NO: 18273 - DNA, 19 bp, Homo sapiens
  siRNA target sequence for CHD2 (NM_001271.1,2471-2489).
gttcaacgcacttataaca

SEQ ID NO: 18274 - DNA, 19 bp, Homo sapiens
  siRNA target sequence for CHD2 (NM_001271.1,2474-2492).
caacgcacttataacaaca

SEQ ID NO: 18275 - DNA, 19 bp, Homo sapiens
  siRNA target sequence for CHD2 (NM_001271.1,2477-2495).
cgcacttataacaacatat

SEQ ID NO: 18276 - DNA, 19 bp, Homo sapiens
  siRNA target sequence for CHD2 (NM_001271.1,2479-2497).
cacttataacaacatatga

SEQ ID NO: 18277 - DNA, 19 bp, Homo sapiens
  siRNA target sequence for CHD2 (NM_001271.1,2518-2536).
ctgtgctgggcagtattaa

SEQ ID NO: 18278 - DNA, 19 bp, Homo sapiens
  siRNA target sequence for CHD2 (NM_001271.1,2563-2581).
cccatcggttgaagaatga

SEQ ID NO: 18279 - DNA, 19 bp, Homo sapiens
  siRNA target sequence for CHD2 (NM_001271.1,2580-2598).
gatgactctttattgtata

SEQ ID NO: 18280 - DNA, 19 bp, Homo sapiens
  siRNA target sequence for CHD2 (NM_001271.1,2760-2778).
ggctaccagagtcttcata

SEQ ID NO: 18281 - DNA, 19 bp, Homo sapiens
  siRNA target sequence for CHD2 (NM_001271.1,2796-2814).
cttctccggagagtcaaaa

SEQ ID NO: 18282 - DNA, 19 bp, Homo sapiens
  siRNA target sequence for CHD2 (NM_001271.1,2944-2962).
gcagcacatctggttttct

SEQ ID NO: 18283 - DNA, 19 bp, Homo sapiens
  siRNA target sequence for CHD2 (NM_001271.1,2945-2963).
cagcacatctggttttctt

SEQ ID NO: 18284 - DNA, 19 bp, Homo sapiens
  siRNA target sequence for CHD2 (NM_001271.1,2948-2966).
cacatctggttttcttaat

SEQ ID NO: 18285 - DNA, 19 bp, Homo sapiens
  siRNA target sequence for CHD2 (NM_001271.1,3124-3142).
gggggaatcgagtgcttat

SEQ ID NO: 18286 - DNA, 19 bp, Homo sapiens
  siRNA target sequence for CHD2 (NM_001271.1,3126-3144).
gggaatcgagtgcttatct

SEQ ID NO: 18287 - DNA, 19 bp, Homo sapiens
  siRNA target sequence for CHD2 (NM_001271.1,3127-3145).
ggaatcgagtgcttatctt

SEQ ID NO: 18288 - DNA, 19 bp, Homo sapiens
  siRNA target sequence for CHD2 (NM_001271.1,3174-3192).
ctggctgaatacctaacta

SEQ ID NO: 18289 - DNA, 19 bp, Homo sapiens
  siRNA target sequence for CHD2 (NM_001271.1,3176-3194).
ggctgaatacctaactatt

SEQ ID NO: 18290 - DNA, 19 bp, Homo sapiens
  siRNA target sequence for CHD2 (NM_001271.1,3177-3195).
gctgaatacctaactatta

SEQ ID NO: 18291 - DNA, 19 bp, Homo sapiens
  siRNA target sequence for CHD2 (NM_001271.1,3185-3203).
cctaactattaaacactat

SEQ ID NO: 18292 - DNA, 19 bp, Homo sapiens
  siRNA target sequence for CHD2 (NM_001271.1,3251-3269).
ggcactggaccacttcaat

SEQ ID NO: 18293 - DNA, 19 bp, Homo sapiens
  siRNA target sequence for CHD2 (NM_001271.1,3343-3361).
cggacacagtcgtcatctt

SEQ ID NO: 18294 - DNA, 19 bp, Homo sapiens
  siRNA target sequence for CHD2 (NM_001271.1,3547-3565).
gccggacgatcctggaaaa

SEQ ID NO: 18295 - DNA, 19 bp, Homo sapiens
  siRNA target sequence for CHD2 (NM_001271.1,3571-3589).
caggaaggtccaactcaaa

SEQ ID NO: 18296 - DNA, 19 bp, Homo sapiens
  siRNA target sequence for CHD2 (NM_001271.1,3710-3728).
ggctgaaacgagagagaat

SEQ ID NO: 18297 - DNA, 19 bp, Homo sapiens
  siRNA target sequence for CHD2 (NM_001271.1,3739-3757).
caagtgcaacagatgaact

SEQ ID NO: 18298 - DNA, 19 bp, Homo sapiens
  siRNA target sequence for CHD2 (NM_001271.1,3742-3760).
gtgcaacagatgaacttct

SEQ ID NO: 18299 - DNA, 19 bp, Homo sapiens
  siRNA target sequence for CHD2 (NM_001271.1,4083-4101).
gacctcgtggagggattta

SEQ ID NO: 18300 - DNA, 19 bp, Homo sapiens
  siRNA target sequence for CHD2 (NM_001271.1,4085-4103).
cctcgtggagggatttact

SEQ ID NO: 18301 - DNA, 19 bp, Homo sapiens
  siRNA target sequence for CHD2 (NM_001271.1,4110-4128).
gagatccgaaggttcatca

SEQ ID NO: 18302 - DNA, 19 bp, Homo sapiens
  siRNA target sequence for CHD2 (NM_001271.1,4120-4138).
ggttcatcaaggcttataa

SEQ ID NO: 18303 - DNA, 19 bp, Homo sapiens
  siRNA target sequence for CHD2 (NM_001271.1,4127-4145).
caaggcttataagaagttt

SEQ ID NO: 18304 - DNA, 19 bp, Homo sapiens
  siRNA target sequence for CHD2 (NM_001271.1,4321-4339).
ggagaggtccaacaatcaa

SEQ ID NO: 18305 - DNA, 19 bp, Homo sapiens
  siRNA target sequence for CHD2 (NM_001271.1,4324-4342).
gaggtccaacaatcaagat

SEQ ID NO: 18306 - DNA, 19 bp, Homo sapiens
  siRNA target sequence for CHD2 (NM_001271.1,4326-4344).
ggtccaacaatcaagatat

SEQ ID NO: 18307 - DNA, 19 bp, Homo sapiens
  siRNA target sequence for CHD2 (NM_001271.1,4345-4363).
ccggagttcaggttaatgt

SEQ ID NO: 18308 - DNA, 19 bp, Homo sapiens
  siRNA target sequence for CHD2 (NM_001271.1,4356-4374).
gttaatgtgaaatccatta

SEQ ID NO: 18309 - DNA, 19 bp, Homo sapiens
  siRNA target sequence for CHD2 (NM_001271.1,4395-4413).
gagatgctgcataaatcta

SEQ ID NO: 18310 - DNA, 19 bp, Homo sapiens
  siRNA target sequence for CHD2 (NM_001271.1,4448-4466).
cttaacctgtcgtgtcaaa

SEQ ID NO: 18311 - DNA, 19 bp, Homo sapiens
  siRNA target sequence for CHD2 (NM_001271.1,4468-4486).
ctgcacattttgatgtaga

SEQ ID NO: 18312 - DNA, 19 bp, Homo sapiens
  siRNA target sequence for CHD2 (NM_001271.1,4514-4532).
gttgctggggatttatgaa

SEQ ID NO: 18313 - DNA, 19 bp, Homo sapiens
  siRNA target sequence for CHD2 (NM_001271.1,4566-4584).
gacccagagcttaaattaa

SEQ ID NO: 18314 - DNA, 19 bp, Homo sapiens
  siRNA target sequence for CHD2 (NM_001271.1,4570-4588).
cagagcttaaattaactga

SEQ ID NO: 18315 - DNA, 19 bp, Homo sapiens
  siRNA target sequence for CHD2 (NM_001271.1,4574-4592).
gcttaaattaactgacaaa

SEQ ID NO: 18316 - DNA, 19 bp, Homo sapiens
  siRNA target sequence for CHD2 (NM_001271.1,4600-4618).
cggtggagacagataaaaa

SEQ ID NO: 18317 - DNA, 19 bp, Homo sapiens
  siRNA target sequence for CHD2 (NM_001271.1,4638-4656).
cagacccgagcggattact

SEQ ID NO: 18318 - DNA, 19 bp, Homo sapiens
  siRNA target sequence for CHD2 (NM_001271.1,4642-4660).
cccgagcggattacttgtt

SEQ ID NO: 18319 - DNA, 19 bp, Homo sapiens
  siRNA target sequence for CHD2 (NM_001271.1,4644-4662).
cgagcggattacttgttga

SEQ ID NO: 18320 - DNA, 19 bp, Homo sapiens
  siRNA target sequence for CHD2 (NM_001271.1,4645-4663).
gagcggattacttgttgaa

SEQ ID NO: 18321 - DNA, 19 bp, Homo sapiens
  siRNA target sequence for CHD2 (NM_001271.1,4731-4749).
cggaagcctcgggtaaaga

SEQ ID NO: 18322 - DNA, 19 bp, Homo sapiens
  siRNA target sequence for CHD2 (NM_001271.1,4976-4994).
gaaagagaagcctaaaagt

SEQ ID NO: 18323 - DNA, 19 bp, Homo sapiens
  siRNA target sequence for CHD2 (NM_001271.1,5001-5019).
gccaaatcttcgagtaaat

SEQ ID NO: 18324 - DNA, 19 bp, Homo sapiens
  siRNA target sequence for CHD2 (NM_001271.1,5029-5047).
ctcagggtcctgtccatat

SEQ ID NO: 18325 - DNA, 19 bp, Homo sapiens
  siRNA target sequence for CHD2 (NM_001271.1,5031-5049).
cagggtcctgtccatatta

SEQ ID NO: 18326 - DNA, 19 bp, Homo sapiens
  siRNA target sequence for CHD2 (NM_001271.1,5033-5051).
gggtcctgtccatattaca

SEQ ID NO: 18327 - DNA, 19 bp, Homo sapiens
  siRNA target sequence for CHD2 (NM_001271.1,5131-5149).
ggatgaggcccgtgaaaaa

SEQ ID NO: 18328 - DNA, 19 bp, Homo sapiens
  siRNA target sequence for CHD2 (NM_001271.1,5182-5200).
ggctcaacgtgcaagaaca

SEQ ID NO: 18329 - DNA, 19 bp, Homo sapiens
  siRNA target sequence for CHD2 (NM_001271.1,5243-5261).
gatagccgagtgccttaaa

SEQ ID NO: 18330 - DNA, 19 bp, Homo sapiens
  siRNA target sequence for CHD2 (NM_001271.1,5296-5314).
ggaggaacctatggatttt

SEQ ID NO: 18331 - DNA, 19 bp, Homo sapiens
  siRNA target sequence for CHD2 (NM_001271.1,5316-5334).
gtttccaagtttacagaat

SEQ ID NO: 18332 - DNA, 19 bp, Homo sapiens
  siRNA target sequence for CHD2 (NM_001271.1,5340-5358).
gctcgaaaactgcataagt

SEQ ID NO: 18333 - DNA, 19 bp, Homo sapiens
  siRNA target sequence for CHD2 (NM_001271.1,5341-5359).
ctcgaaaactgcataagtt

SEQ ID NO: 18334 - DNA, 19 bp, Homo sapiens
  siRNA target sequence for CHD2 (NM_001271.1,5429-5447).
gggtaagaaaccatttcgt

SEQ ID NO: 18335 - DNA, 19 bp, Homo sapiens
  siRNA target sequence for CHD2 (NM_001271.1,5465-5483).
cagccgggactctctgata

SEQ ID NO: 18336 - DNA, 19 bp, Homo sapiens
  siRNA target sequence for CHD2 (NM_001271.1,5470-5488).
gggactctctgatatctca

SEQ ID NO: 18337 - DNA, 19 bp, Homo sapiens
  siRNA target sequence for CHD2 (NM_001271.1,5562-5580).
cacccaagagataactaca

SEQ ID NO: 18338 - DNA, 19 bp, Homo sapiens
  siRNA target sequence for CHD2 (NM_001271.1,5564-5582).
cccaagagataactacaat

SEQ ID NO: 18339 - DNA, 19 bp, Homo sapiens
  siRNA target sequence for CHD2 (NM_001271.1,5594-5612).
gagacacttcagtaatgca

SEQ ID NO: 18340 - DNA, 19 bp, Homo sapiens
  siRNA target sequence for CHD2 (NM_001271.1,5683-5701).
gcgacaggcaccatcagta

SEQ ID NO: 18341 - DNA, 19 bp, Homo sapiens
  siRNA target sequence for CHD2 (NM_001271.1,5713-5731).
ggtacaaggaccaccatta

SEQ ID NO: 18342 - DNA, 19 bp, Homo sapiens
  siRNA target sequence for CHD2 (NM_001271.1,5714-5732).
gtacaaggaccaccattat

SEQ ID NO: 18343 - DNA, 19 bp, Homo sapiens
  siRNA target sequence for CHD2 (NM_001271.1,5734-5752).
gggaccggcgacatatgga

SEQ ID NO: 18344 - DNA, 19 bp, Homo sapiens
  siRNA target sequence for CHD2 (NM_001271.1,5735-5753).
ggaccggcgacatatggat

SEQ ID NO: 18345 - DNA, 19 bp, Homo sapiens
  siRNA target sequence for CHD2 (NM_001271.1,5756-5774).
ccaccgttccggaagctat

SEQ ID NO: 18346 - DNA, 19 bp, Homo sapiens
  siRNA target sequence for CHD2 (NM_001271.1,5770-5788).
gctatcgacccaacaacat

SEQ ID NO: 18347 - DNA, 19 bp, Homo sapiens
  siRNA target sequence for CHD2 (NM_001271.1,5832-5850).
caccggggacacagagatt

SEQ ID NO: 18348 - DNA, 19 bp, Homo sapiens
  siRNA target sequence for CHD2 (NM_001271.1,5841-5859).
cacagagattattatgaca

SEQ ID NO: 18349 - DNA, 19 bp, Homo sapiens
  siRNA target sequence for CHD5 (NM_015557.1,231-249).
ccgtgagccttcctaagaa

SEQ ID NO: 18350 - DNA, 19 bp, Homo sapiens
  siRNA target sequence for CHD5 (NM_015557.1,233-251).
gtgagccttcctaagaaga

SEQ ID NO: 18351 - DNA, 19 bp, Homo sapiens
  siRNA target sequence for CHD5 (NM_015557.1,372-390).
gtgactactccccgaataa

SEQ ID NO: 18352 - DNA, 19 bp, Homo sapiens
  siRNA target sequence for CHD5 (NM_015557.1,374-392).
gactactccccgaataaaa

SEQ ID NO: 18353 - DNA, 19 bp, Homo sapiens
  siRNA target sequence for CHD5 (NM_015557.1,608-626).
ccactcattgccaagaaga

SEQ ID NO: 18354 - DNA, 19 bp, Homo sapiens
  siRNA target sequence for CHD5 (NM_015557.1,865-883).
gatcaaaggctccaaagat

SEQ ID NO: 18355 - DNA, 19 bp, Homo sapiens
  siRNA target sequence for CHD5 (NM_015557.1,1100-1118).
gatggtgacggctatgaga

SEQ ID NO: 18356 - DNA, 19 bp, Homo sapiens
  siRNA target sequence for CHD5 (NM_015557.1,1699-1717).
gtaccacacggtgatgtat

SEQ ID NO: 18357 - DNA, 19 bp, Homo sapiens
  siRNA target sequence for CHD5 (NM_015557.1,1887-1905).
gaatcctgaaccatagctt

SEQ ID NO: 18358 - DNA, 19 bp, Homo sapiens
  siRNA target sequence for CHD5 (NM_015557.1,1892-1910).
ctgaaccatagctttgaca

SEQ ID NO: 18359 - DNA, 19 bp, Homo sapiens
  siRNA target sequence for CHD5 (NM_015557.1,1968-1986).
cctgggagatcgatgacat

SEQ ID NO: 18360 - DNA, 19 bp, Homo sapiens
  siRNA target sequence for CHD5 (NM_015557.1,2391-2409).
gggaacgcgagtttgagat

SEQ ID NO: 18361 - DNA, 19 bp, Homo sapiens
  siRNA target sequence for CHD5 (NM_015557.1,2471-2489).
cgggagaacgagttttcct

SEQ ID NO: 18362 - DNA, 19 bp, Homo sapiens
  siRNA target sequence for CHD5 (NM_015557.1,2521-2539).
ggtattccgtatgaagaaa

SEQ ID NO: 18363 - DNA, 19 bp, Homo sapiens
  siRNA target sequence for CHD5 (NM_015557.1,2727-2745).
ggaccccccttcagaacaa

SEQ ID NO: 18364 - DNA, 19 bp, Homo sapiens
  siRNA target sequence for CHD5 (NM_015557.1,2986-3004).
catcctcacacggaacttt

SEQ ID NO: 18365 - DNA, 19 bp, Homo sapiens
  siRNA target sequence for CHD5 (NM_015557.1,3038-3056).
gtatcgctgctcaacatca

SEQ ID NO: 18366 - DNA, 19 bp, Homo sapiens
  siRNA target sequence for CHD5 (NM_015557.1,3341-3359).
gaggcaatcgacagattca

SEQ ID NO: 18367 - DNA, 19 bp, Homo sapiens
  siRNA target sequence for CHD5 (NM_015557.1,4612-4630).
cggggtcatgtcactagtt

SEQ ID NO: 18368 - DNA, 19 bp, Homo sapiens
  siRNA target sequence for CHD5 (NM_015557.1,4655-4673).
catgtcaacgggaagtaca

SEQ ID NO: 18369 - DNA, 19 bp, Homo sapiens
  siRNA target sequence for CHD5 (NM_015557.1,4883-4901).
cttccagccgccttggata

SEQ ID NO: 18370 - DNA, 19 bp, Homo sapiens
  siRNA target sequence for CHD5 (NM_015557.1,5122-5140).
gaaggagcccattgaaaca

SEQ ID NO: 18371 - DNA, 19 bp, Homo sapiens
  siRNA target sequence for CHD5 (NM_015557.1,5277-5295).
ctgtatcctctgggaaaat

SEQ ID NO: 18372 - DNA, 19 bp, Homo sapiens
  siRNA target sequence for CHD5 (NM_015557.1,5279-5297).
gtatcctctgggaaaatct

SEQ ID NO: 18373 - DNA, 19 bp, Homo sapiens
  siRNA target sequence for CHD5 (NM_015557.1,5852-5870).
ggctcctcccagatgtaca

SEQ ID NO: 18374 - DNA, 19 bp, Homo sapiens
  siRNA target sequence for CHD5 (NM_015557.1,5861-5879).
cagatgtacagcaacaact

SEQ ID NO: 18375 - DNA, 19 bp, Homo sapiens
  siRNA target sequence for CHD5 (NM_015557.1,5904-5922).
gaccgggagggattgtcaa

SEQ ID NO: 18376 - DNA, 19 bp, Homo sapiens
  siRNA target sequence for CHD5 (NM_015557.1,5907-5925).
cgggagggattgtcaacta

SEQ ID NO: 18377 - DNA, 19 bp, Homo sapiens
  siRNA target sequence for CHD5 (NM_015557.1,5945-5963).
ccctatgtgaccgatatct

SEQ ID NO: 18378 - DNA, 19 bp, Homo sapiens
  siRNA target sequence for CHD6 (NM_032221.3,247-265).
gtctgatgcctctgtcaat

SEQ ID NO: 18379 - DNA, 19 bp, Homo sapiens
  siRNA target sequence for CHD6 (NM_032221.3,258-276).
ctgtcaattttgactacaa

SEQ ID NO: 18380 - DNA, 19 bp, Homo sapiens
  siRNA target sequence for CHD6 (NM_032221.3,607-625).
ggagccgaagcaaaaagat

SEQ ID NO: 18381 - DNA, 19 bp, Homo sapiens
  siRNA target sequence for CHD6 (NM_032221.3,887-905).
cgctcgggaaggcaagtaa

SEQ ID NO: 18382 - DNA, 19 bp, Homo sapiens
  siRNA target sequence for CHD6 (NM_032221.3,899-917).
caagtaaagcgcagaaaat

SEQ ID NO: 18383 - DNA, 19 bp, Homo sapiens
  siRNA target sequence for CHD6 (NM_032221.3,958-976).
ggaaacaattgctgttctt

SEQ ID NO: 18384 - DNA, 19 bp, Homo sapiens
  siRNA target sequence for CHD6 (NM_032221.3,1066-1084).
gatcctggcatctaagact

SEQ ID NO: 18385 - DNA, 19 bp, Homo sapiens
  siRNA target sequence for CHD6 (NM_032221.3,1124-1142).
gagctgttctacgttaagt

SEQ ID NO: 18386 - DNA, 19 bp, Homo sapiens
  siRNA target sequence for CHD6 (NM_032221.3,1129-1147).
gttctacgttaagtataga

SEQ ID NO: 18387 - DNA, 19 bp, Homo sapiens
  siRNA target sequence for CHD6 (NM_032221.3,1132-1150).
ctacgttaagtatagaaat

SEQ ID NO: 18388 - DNA, 19 bp, Homo sapiens
  siRNA target sequence for CHD6 (NM_032221.3,1135-1153).
cgttaagtatagaaatttt

SEQ ID NO: 18389 - DNA, 19 bp, Homo sapiens
  siRNA target sequence for CHD6 (NM_032221.3,1206-1224).
gcatcgcacagaagatcaa

SEQ ID NO: 18390 - DNA, 19 bp, Homo sapiens
  siRNA target sequence for CHD6 (NM_032221.3,1219-1237).
gatcaagcgatttaggaat

SEQ ID NO: 18391 - DNA, 19 bp, Homo sapiens
  siRNA target sequence for CHD6 (NM_032221.3,1222-1240).
caagcgatttaggaataaa

SEQ ID NO: 18392 - DNA, 19 bp, Homo sapiens
  siRNA target sequence for CHD6 (NM_032221.3,1225-1243).
gcgatttaggaataaacaa

SEQ ID NO: 18393 - DNA, 19 bp, Homo sapiens
  siRNA target sequence for CHD6 (NM_032221.3,1247-1265).
cagatgaagcacattttta

SEQ ID NO: 18394 - DNA, 19 bp, Homo sapiens
  siRNA target sequence for CHD6 (NM_032221.3,1266-1284).
cggagcctgatgaagactt

SEQ ID NO: 18395 - DNA, 19 bp, Homo sapiens
  siRNA target sequence for CHD6 (NM_032221.3,1272-1290).
ctgatgaagacttgttcaa

SEQ ID NO: 18396 - DNA, 19 bp, Homo sapiens
  siRNA target sequence for CHD6 (NM_032221.3,1282-1300).
cttgttcaatccagactat

SEQ ID NO: 18397 - DNA, 19 bp, Homo sapiens
  siRNA target sequence for CHD6 (NM_032221.3,1353-1371).
gggaggaggtaacacatta

SEQ ID NO: 18398 - DNA, 19 bp, Homo sapiens
  siRNA target sequence for CHD6 (NM_032221.3,1381-1399).
gtggtgctcactaccatat

SEQ ID NO: 18399 - DNA, 19 bp, Homo sapiens
  siRNA target sequence for CHD6 (NM_032221.3,1512-1530).
cctggcagaaacttgagaa

SEQ ID NO: 18400 - DNA, 19 bp, Homo sapiens
  siRNA target sequence for CHD6 (NM_032221.3,1526-1544).
gagaagtctcgcgagtata

SEQ ID NO: 18401 - DNA, 19 bp, Homo sapiens
  siRNA target sequence for CHD6 (NM_032221.3,1535-1553).
cgcgagtataagaacagta

SEQ ID NO: 18402 - DNA, 19 bp, Homo sapiens
  siRNA target sequence for CHD6 (NM_032221.3,1536-1554).
gcgagtataagaacagtaa

SEQ ID NO: 18403 - DNA, 19 bp, Homo sapiens
  siRNA target sequence for CHD6 (NM_032221.3,1703-1721).
cacggcccttttctcatta

SEQ ID NO: 18404 - DNA, 19 bp, Homo sapiens
  siRNA target sequence for CHD6 (NM_032221.3,1765-1783).
gacatggacagagatgaat

SEQ ID NO: 18405 - DNA, 19 bp, Homo sapiens
  siRNA target sequence for CHD6 (NM_032221.3,1889-1907).
cacgtcgtcatcacaacat

SEQ ID NO: 18406 - DNA, 19 bp, Homo sapiens
  siRNA target sequence for CHD6 (NM_032221.3,1891-1909).
cgtcgtcatcacaacattt

SEQ ID NO: 18407 - DNA, 19 bp, Homo sapiens
  siRNA target sequence for CHD6 (NM_032221.3,1894-1912).
cgtcatcacaacatttgaa

SEQ ID NO: 18408 - DNA, 19 bp, Homo sapiens
  siRNA target sequence for CHD6 (NM_032221.3,1949-1967).
cactggagctgtgtgataa

SEQ ID NO: 18409 - DNA, 19 bp, Homo sapiens
  siRNA target sequence for CHD6 (NM_032221.3,1953-1971).
ggagctgtgtgataattga

SEQ ID NO: 18410 - DNA, 19 bp, Homo sapiens
  siRNA target sequence for CHD6 (NM_032221.3,2009-2027).
ctggagggtctaaagctta

SEQ ID NO: 18411 - DNA, 19 bp, Homo sapiens
  siRNA target sequence for CHD6 (NM_032221.3,2024-2042).
cttatggccctggaacata

SEQ ID NO: 18412 - DNA, 19 bp, Homo sapiens
  siRNA target sequence for CHD6 (NM_032221.3,2136-2154).
ccgctttcttggaggaatt

SEQ ID NO: 18413 - DNA, 19 bp, Homo sapiens
  siRNA target sequence for CHD6 (NM_032221.3,2137-2155).
cgctttcttggaggaattt

SEQ ID NO: 18414 - DNA, 19 bp, Homo sapiens
  siRNA target sequence for CHD6 (NM_032221.3,2191-2209).
gcagtctatcctaaaacca

SEQ ID NO: 18415 - DNA, 19 bp, Homo sapiens
  siRNA target sequence for CHD6 (NM_032221.3,2257-2275).
caaacaagagacgatcatt

SEQ ID NO: 18416 - DNA, 19 bp, Homo sapiens
  siRNA target sequence for CHD6 (NM_032221.3,2352-2370).
gggcaaatcagcacaacat

SEQ ID NO: 18417 - DNA, 19 bp, Homo sapiens
  siRNA target sequence for CHD6 (NM_032221.3,2401-2419).
gaggaagtgctgtaaccat

SEQ ID NO: 18418 - DNA, 19 bp, Homo sapiens
  siRNA target sequence for CHD6 (NM_032221.3,2481-2499).
ctgatgcccctgactttca

SEQ ID NO: 18419 - DNA, 19 bp, Homo sapiens
  siRNA target sequence for CHD6 (NM_032221.3,2520-2538).
cagcaggaaagcttgtgtt

SEQ ID NO: 18420 - DNA, 19 bp, Homo sapiens
  siRNA target sequence for CHD6 (NM_032221.3,2530-2548).
gcttgtgttgattgataaa

SEQ ID NO: 18421 - DNA, 19 bp, Homo sapiens
  siRNA target sequence for CHD6 (NM_032221.3,2650-2668).
cacctatgagcgaattgat

SEQ ID NO: 18422 - DNA, 19 bp, Homo sapiens
  siRNA target sequence for CHD6 (NM_032221.3,2700-2718).
ccatcgaccggttctgtaa

SEQ ID NO: 18423 - DNA, 19 bp, Homo sapiens
  siRNA target sequence for CHD6 (NM_032221.3,2918-2936).
gagcgcgagatgtttgaca

SEQ ID NO: 18424 - DNA, 19 bp, Homo sapiens
  siRNA target sequence for CHD6 (NM_032221.3,2967-2985).
ctgttcttcaggacatcaa

SEQ ID NO: 18425 - DNA, 19 bp, Homo sapiens
  siRNA target sequence for CHD6 (NM_032221.3,3007-3025).
ggtacagcagctctcaaaa

SEQ ID NO: 18426 - DNA, 19 bp, Homo sapiens
  siRNA target sequence for CHD6 (NM_032221.3,3046-3064).
ccggaaaggtgcttatgga

SEQ ID NO: 18427 - DNA, 19 bp, Homo sapiens
  siRNA target sequence for CHD6 (NM_032221.3,3057-3075).
cttatggagccttaatgga

SEQ ID NO: 18428 - DNA, 19 bp, Homo sapiens
  siRNA target sequence for CHD6 (NM_032221.3,3097-3115).
gttctgtgaagaagacata

SEQ ID NO: 18429 - DNA, 19 bp, Homo sapiens
  siRNA target sequence for CHD6 (NM_032221.3,3226-3244).
cttagatgatcctaacttt

SEQ ID NO: 18430 - DNA, 19 bp, Homo sapiens
  siRNA target sequence for CHD6 (NM_032221.3,3247-3265).
gcagaaatgggctaaaata

SEQ ID NO: 18431 - DNA, 19 bp, Homo sapiens
  siRNA target sequence for CHD6 (NM_032221.3,3367-3385).
cgagctcatggagttttca

SEQ ID NO: 18432 - DNA, 19 bp, Homo sapiens
  siRNA target sequence for CHD6 (NM_032221.3,3420-3438).
gatccaggcgcctcaatga

SEQ ID NO: 18433 - DNA, 19 bp, Homo sapiens
  siRNA target sequence for CHD6 (NM_032221.3,3424-3442).
caggcgcctcaatgacaaa

SEQ ID NO: 18434 - DNA, 19 bp, Homo sapiens
  siRNA target sequence for CHD6 (NM_032221.3,3537-3555).
gattcaagtggcatctgaa

SEQ ID NO: 18435 - DNA, 19 bp, Homo sapiens
  siRNA target sequence for CHD6 (NM_032221.3,3593-3611).
gtgtactgtgtcaagcatt

SEQ ID NO: 18436 - DNA, 19 bp, Homo sapiens
  siRNA target sequence for CHD6 (NM_032221.3,3652-3670).
gatcacacctaccaaagat

SEQ ID NO: 18437 - DNA, 19 bp, Homo sapiens
  siRNA target sequence for CHD6 (NM_032221.3,3744-3762).
cgaagaaccagttgctaat

SEQ ID NO: 18438 - DNA, 19 bp, Homo sapiens
  siRNA target sequence for CHD6 (NM_032221.3,3844-3862).
caaacagcactgcaacaaa

SEQ ID NO: 18439 - DNA, 19 bp, Homo sapiens
  siRNA target sequence for CHD6 (NM_032221.3,3883-3901).
gctgtactacctaaaagct

SEQ ID NO: 18440 - DNA, 19 bp, Homo sapiens
  siRNA target sequence for CHD6 (NM_032221.3,4020-4038).
ccgataagtcacttctcat

SEQ ID NO: 18441 - DNA, 19 bp, Homo sapiens
  siRNA target sequence for CHD6 (NM_032221.3,4021-4039).
cgataagtcacttctcatt

SEQ ID NO: 18442 - DNA, 19 bp, Homo sapiens
  siRNA target sequence for CHD6 (NM_032221.3,4041-4059).
gcgtgttcaagcatggtta

SEQ ID NO: 18443 - DNA, 19 bp, Homo sapiens
  siRNA target sequence for CHD6 (NM_032221.3,4042-4060).
cgtgttcaagcatggttat

SEQ ID NO: 18444 - DNA, 19 bp, Homo sapiens
  siRNA target sequence for CHD6 (NM_032221.3,4271-4289).
ggcgtttttagcgaaaaga

SEQ ID NO: 18445 - DNA, 19 bp, Homo sapiens
  siRNA target sequence for CHD6 (NM_032221.3,4272-4290).
gcgtttttagcgaaaagaa

SEQ ID NO: 18446 - DNA, 19 bp, Homo sapiens
  siRNA target sequence for CHD6 (NM_032221.3,4374-4392).
gacgtctggtcactgttta

SEQ ID NO: 18447 - DNA, 19 bp, Homo sapiens
  siRNA target sequence for CHD6 (NM_032221.3,4458-4476).
gggttcaggaagagatgtt

SEQ ID NO: 18448 - DNA, 19 bp, Homo sapiens
  siRNA target sequence for CHD6 (NM_032221.3,4460-4478).
gttcaggaagagatgttca

SEQ ID NO: 18449 - DNA, 19 bp, Homo sapiens
  siRNA target sequence for CHD6 (NM_032221.3,4536-4554).
gagaacaagcagacttcta

SEQ ID NO: 18450 - DNA, 19 bp, Homo sapiens
  siRNA target sequence for CHD6 (NM_032221.3,4538-4556).
gaacaagcagacttctata

SEQ ID NO: 18451 - DNA, 19 bp, Homo sapiens
  siRNA target sequence for CHD6 (NM_032221.3,4541-4559).
caagcagacttctatagaa

SEQ ID NO: 18452 - DNA, 19 bp, Homo sapiens
  siRNA target sequence for CHD6 (NM_032221.3,4569-4587).
cctttggtgttgtttacga

SEQ ID NO: 18453 - DNA, 19 bp, Homo sapiens
  siRNA target sequence for CHD6 (NM_032221.3,4570-4588).
ctttggtgttgtttacgat

SEQ ID NO: 18454 - DNA, 19 bp, Homo sapiens
  siRNA target sequence for CHD6 (NM_032221.3,4612-4630).
gacacagttccgcatcatt

SEQ ID NO: 18455 - DNA, 19 bp, Homo sapiens
  siRNA target sequence for CHD6 (NM_032221.3,4659-4677).
gcctggaacagtattttta

SEQ ID NO: 18456 - DNA, 19 bp, Homo sapiens
  siRNA target sequence for CHD6 (NM_032221.3,4933-4951).
catcggcactgccaaacat

SEQ ID NO: 18457 - DNA, 19 bp, Homo sapiens
  siRNA target sequence for CHD6 (NM_032221.3,5005-5023).
ggatgcctatagaaactat

SEQ ID NO: 18458 - DNA, 19 bp, Homo sapiens
  siRNA target sequence for CHD6 (NM_032221.3,5020-5038).
ctatgcccagcataaaaga

SEQ ID NO: 18459 - DNA, 19 bp, Homo sapiens
  siRNA target sequence for CHD6 (NM_032221.3,5078-5096).
cagaccaactccaagttat

SEQ ID NO: 18460 - DNA, 19 bp, Homo sapiens
  siRNA target sequence for CHD6 (NM_032221.3,5080-5098).
gaccaactccaagttatat

SEQ ID NO: 18461 - DNA, 19 bp, Homo sapiens
  siRNA target sequence for CHD6 (NM_032221.3,5082-5100).
ccaactccaagttatatga

SEQ ID NO: 18462 - DNA, 19 bp, Homo sapiens
  siRNA target sequence for CHD6 (NM_032221.3,5083-5101).
caactccaagttatatgaa

SEQ ID NO: 18463 - DNA, 19 bp, Homo sapiens
  siRNA target sequence for CHD6 (NM_032221.3,5086-5104).
ctccaagttatatgaatct

SEQ ID NO: 18464 - DNA, 19 bp, Homo sapiens
  siRNA target sequence for CHD6 (NM_032221.3,5105-5123).
cttacatattctcaaatga

SEQ ID NO: 18465 - DNA, 19 bp, Homo sapiens
  siRNA target sequence for CHD6 (NM_032221.3,5288-5306).
gagagcatgatgtatggta

SEQ ID NO: 18466 - DNA, 19 bp, Homo sapiens
  siRNA target sequence for CHD6 (NM_032221.3,5342-5360).
gagagcccaagtaccaata

SEQ ID NO: 18467 - DNA, 19 bp, Homo sapiens
  siRNA target sequence for CHD6 (NM_032221.3,5346-5364).
gcccaagtaccaatactga

SEQ ID NO: 18468 - DNA, 19 bp, Homo sapiens
  siRNA target sequence for CHD6 (NM_032221.3,5375-5393).
gatgttattaccatctcaa

SEQ ID NO: 18469 - DNA, 19 bp, Homo sapiens
  siRNA target sequence for CHD6 (NM_032221.3,5386-5404).
catctcaataagcaaagat

SEQ ID NO: 18470 - DNA, 19 bp, Homo sapiens
  siRNA target sequence for CHD6 (NM_032221.3,5421-5439).
gtggccctgaggcagaaat

SEQ ID NO: 18471 - DNA, 19 bp, Homo sapiens
  siRNA target sequence for CHD6 (NM_032221.3,5441-5459).
gcttctggccctactttta

SEQ ID NO: 18472 - DNA, 19 bp, Homo sapiens
  siRNA target sequence for CHD6 (NM_032221.3,5442-5460).
cttctggccctacttttat

SEQ ID NO: 18473 - DNA, 19 bp, Homo sapiens
  siRNA target sequence for CHD6 (NM_032221.3,5481-5499).
gagtagctcaagcaaacat

SEQ ID NO: 18474 - DNA, 19 bp, Homo sapiens
  siRNA target sequence for CHD6 (NM_032221.3,5483-5501).
gtagctcaagcaaacatca

SEQ ID NO: 18475 - DNA, 19 bp, Homo sapiens
  siRNA target sequence for CHD6 (NM_032221.3,5648-5666).
gtagatatgtgcagtctta

SEQ ID NO: 18476 - DNA, 19 bp, Homo sapiens
  siRNA target sequence for CHD6 (NM_032221.3,5692-5710).
gtcatcagatcagcaatta

SEQ ID NO: 18477 - DNA, 19 bp, Homo sapiens
  siRNA target sequence for CHD6 (NM_032221.3,5697-5715).
cagatcagcaattaattga

SEQ ID NO: 18478 - DNA, 19 bp, Homo sapiens
  siRNA target sequence for CHD6 (NM_032221.3,5699-5717).
gatcagcaattaattgatt

SEQ ID NO: 18479 - DNA, 19 bp, Homo sapiens
  siRNA target sequence for CHD6 (NM_032221.3,5733-5751).
gcttagaaagtaaattgat

SEQ ID NO: 18480 - DNA, 19 bp, Homo sapiens
  siRNA target sequence for CHD6 (NM_032221.3,5832-5850).
gggaaaggccagaggtatt

SEQ ID NO: 18481 - DNA, 19 bp, Homo sapiens
  siRNA target sequence for CHD6 (NM_032221.3,5855-5873).
ctcacggagcccactacta

SEQ ID NO: 18482 - DNA, 19 bp, Homo sapiens
  siRNA target sequence for CHD6 (NM_032221.3,5859-5877).
cggagcccactactaacat

SEQ ID NO: 18483 - DNA, 19 bp, Homo sapiens
  siRNA target sequence for CHD6 (NM_032221.3,5861-5879).
gagcccactactaacatct

SEQ ID NO: 18484 - DNA, 19 bp, Homo sapiens
  siRNA target sequence for CHD6 (NM_032221.3,5864-5882).
cccactactaacatctcaa

SEQ ID NO: 18485 - DNA, 19 bp, Homo sapiens
  siRNA target sequence for CHD6 (NM_032221.3,6019-6037).
gcatggcctcgagaatgat

SEQ ID NO: 18486 - DNA, 19 bp, Homo sapiens
  siRNA target sequence for CHD6 (NM_032221.3,6023-6041).
ggcctcgagaatgatgaat

SEQ ID NO: 18487 - DNA, 19 bp, Homo sapiens
  siRNA target sequence for CHD6 (NM_032221.3,6024-6042).
gcctcgagaatgatgaatt

SEQ ID NO: 18488 - DNA, 19 bp, Homo sapiens
  siRNA target sequence for CHD6 (NM_032221.3,6025-6043).
cctcgagaatgatgaattt

SEQ ID NO: 18489 - DNA, 19 bp, Homo sapiens
  siRNA target sequence for CHD6 (NM_032221.3,6132-6150).
catcacagccgtttaaagt

SEQ ID NO: 18490 - DNA, 19 bp, Homo sapiens
  siRNA target sequence for CHD6 (NM_032221.3,6186-6204).
gtgcagaggggcaaaacgt

SEQ ID NO: 18491 - DNA, 19 bp, Homo sapiens
  siRNA target sequence for CHD6 (NM_032221.3,6188-6206).
gcagaggggcaaaacgttt

SEQ ID NO: 18492 - DNA, 19 bp, Homo sapiens
  siRNA target sequence for CHD6 (NM_032221.3,6202-6220).
cgttttccccacatatcct

SEQ ID NO: 18493 - DNA, 19 bp, Homo sapiens
  siRNA target sequence for CHD6 (NM_032221.3,6286-6304).
cggaaactgccatagtcaa

SEQ ID NO: 18494 - DNA, 19 bp, Homo sapiens
  siRNA target sequence for CHD6 (NM_032221.3,6292-6310).
ctgccatagtcaagattat

SEQ ID NO: 18495 - DNA, 19 bp, Homo sapiens
  siRNA target sequence for CHD6 (NM_032221.3,6332-6350).
gagagcaagagctcaacat

SEQ ID NO: 18496 - DNA, 19 bp, Homo sapiens
  siRNA target sequence for CHD6 (NM_032221.3,6388-6406).
ggctcgagctcccactatt

SEQ ID NO: 18497 - DNA, 19 bp, Homo sapiens
  siRNA target sequence for CHD6 (NM_032221.3,6452-6470).
ccaaaggaccgcgtgataa

SEQ ID NO: 18498 - DNA, 19 bp, Homo sapiens
  siRNA target sequence for CHD6 (NM_032221.3,6453-6471).
caaaggaccgcgtgataat

SEQ ID NO: 18499 - DNA, 19 bp, Homo sapiens
  siRNA target sequence for CHD6 (NM_032221.3,6551-6569).
ctgcccaccccggtattaa

SEQ ID NO: 18500 - DNA, 19 bp, Homo sapiens
  siRNA target sequence for CHD6 (NM_032221.3,6709-6727).
caggcgtccctatgagttt

SEQ ID NO: 18501 - DNA, 19 bp, Homo sapiens
  siRNA target sequence for CHD6 (NM_032221.3,6711-6729).
ggcgtccctatgagtttga

SEQ ID NO: 18502 - DNA, 19 bp, Homo sapiens
  siRNA target sequence for CHD6 (NM_032221.3,6885-6903).
gcgccagcacccctaagat

SEQ ID NO: 18503 - DNA, 19 bp, Homo sapiens
  siRNA target sequence for CHD6 (NM_032221.3,6886-6904).
cgccagcacccctaagatt

SEQ ID NO: 18504 - DNA, 19 bp, Homo sapiens
  siRNA target sequence for CHD6 (NM_032221.3,6980-6998).
gtgactggacagattgtca

SEQ ID NO: 18505 - DNA, 19 bp, Homo sapiens
  siRNA target sequence for CHD6 (NM_032221.3,6986-7004).
ggacagattgtcaatggaa

SEQ ID NO: 18506 - DNA, 19 bp, Homo sapiens
  siRNA target sequence for CHD6 (NM_032221.3,7039-7057).
gagagggaggcggaaacat

SEQ ID NO: 18507 - DNA, 19 bp, Homo sapiens
  siRNA target sequence for CHD6 (NM_032221.3,7044-7062).
ggaggcggaaacatgttga

SEQ ID NO: 18508 - DNA, 19 bp, Homo sapiens
  siRNA target sequence for CHD6 (NM_032221.3,7045-7063).
gaggcggaaacatgttgaa

SEQ ID NO: 18509 - DNA, 19 bp, Homo sapiens
  siRNA target sequence for CHD6 (NM_032221.3,7098-7116).
cacttcaggcgggaatctt

SEQ ID NO: 18510 - DNA, 19 bp, Homo sapiens
  siRNA target sequence for CHD6 (NM_032221.3,7273-7291).
ggctgactactccttagaa

SEQ ID NO: 18511 - DNA, 19 bp, Homo sapiens
  siRNA target sequence for CHD6 (NM_032221.3,7570-7588).
ggggccactgttcatgaat

SEQ ID NO: 18512 - DNA, 19 bp, Homo sapiens
  siRNA target sequence for CHD6 (NM_032221.3,7613-7631).
gtaggacttcagaacatga

SEQ ID NO: 18513 - DNA, 19 bp, Homo sapiens
  siRNA target sequence for CHD6 (NM_032221.3,7700-7718).
ggtgaagaggtcaaaagta

SEQ ID NO: 18514 - DNA, 19 bp, Homo sapiens
  siRNA target sequence for CHD6 (NM_032221.3,7826-7844).
gctccggcgtctctatcaa

SEQ ID NO: 18515 - DNA, 19 bp, Homo sapiens
  siRNA target sequence for CHD6 (NM_032221.3,7966-7984).
gtctgaacctgcaataact

SEQ ID NO: 18516 - DNA, 19 bp, Homo sapiens
  siRNA target sequence for CHD6 (NM_032221.3,7970-7988).
gaacctgcaataactacta

SEQ ID NO: 18517 - DNA, 19 bp, Homo sapiens
  siRNA target sequence for CHD6 (NM_032221.3,7973-7991).
cctgcaataactactagta

SEQ ID NO: 18518 - DNA, 19 bp, Homo sapiens
  siRNA target sequence for CHD6 (NM_032221.3,8000-8018).
gcttttaacccatttctca

SEQ ID NO: 18519 - DNA, 19 bp, Homo sapiens
  siRNA target sequence for CHD6 (NM_032221.3,8101-8119).
ggccagacactcggaaata

SEQ ID NO: 18520 - DNA, 19 bp, Homo sapiens
  siRNA target sequence for CHD6 (NM_032221.3,8103-8121).
ccagacactcggaaatagt

SEQ ID NO: 18521 - DNA, 19 bp, Homo sapiens
  siRNA target sequence for CHD6 (NM_032221.3,8104-8122).
cagacactcggaaatagta

SEQ ID NO: 18522 - DNA, 19 bp, Homo sapiens
  siRNA target sequence for CHD6 (NM_032221.3,8254-8272).
gcccgcagagagagaacat

SEQ ID NO: 18523 - DNA, 19 bp, Homo sapiens
  siRNA target sequence for CHD6 (NM_032221.3,8288-8306).
gagggggcactcaaagact

SEQ ID NO: 18524 - DNA, 19 bp, Homo sapiens
  siRNA target sequence for EZH1 (NM_001991.2,139-157).
cccctacctccaaatgtat

SEQ ID NO: 18525 - DNA, 19 bp, Homo sapiens
  siRNA target sequence for EZH1 (NM_001991.2,194-212).
gcgacttcgacaacttaaa

SEQ ID NO: 18526 - DNA, 19 bp, Homo sapiens
  siRNA target sequence for EZH1 (NM_001991.2,318-336).
caacctgttcagtcaatga

SEQ ID NO: 18527 - DNA, 19 bp, Homo sapiens
  siRNA target sequence for EZH1 (NM_001991.2,351-369).
cacccttttctcaaaaagt

SEQ ID NO: 18528 - DNA, 19 bp, Homo sapiens
  siRNA target sequence for EZH1 (NM_001991.2,393-411).
ggatttgcaagccaacata

SEQ ID NO: 18529 - DNA, 19 bp, Homo sapiens
  siRNA target sequence for EZH1 (NM_001991.2,394-412).
gatttgcaagccaacatat

SEQ ID NO: 18530 - DNA, 19 bp, Homo sapiens
  siRNA target sequence for EZH1 (NM_001991.2,438-456).
gcattggttcccatcatgt

SEQ ID NO: 18531 - DNA, 19 bp, Homo sapiens
  siRNA target sequence for EZH1 (NM_001991.2,439-457).
cattggttcccatcatgta

SEQ ID NO: 18532 - DNA, 19 bp, Homo sapiens
  siRNA target sequence for EZH1 (NM_001991.2,498-516).
gagacggttttgtgcaata

SEQ ID NO: 18533 - DNA, 19 bp, Homo sapiens
  siRNA target sequence for EZH1 (NM_001991.2,500-518).
gacggttttgtgcaatatt

SEQ ID NO: 18534 - DNA, 19 bp, Homo sapiens
  siRNA target sequence for EZH1 (NM_001991.2,618-636).
cctggatccgttctgatta

SEQ ID NO: 18535 - DNA, 19 bp, Homo sapiens
  siRNA target sequence for EZH1 (NM_001991.2,660-678).
gtcgatgccctgaatcagt

SEQ ID NO: 18536 - DNA, 19 bp, Homo sapiens
  siRNA target sequence for EZH1 (NM_001991.2,764-782).
gagaaagcgacatgctatt

SEQ ID NO: 18537 - DNA, 19 bp, Homo sapiens
  siRNA target sequence for EZH1 (NM_001991.2,766-784).
gaaagcgacatgctattga

SEQ ID NO: 18538 - DNA, 19 bp, Homo sapiens
  siRNA target sequence for EZH1 (NM_001991.2,824-842).
catgatcttcagtgcaatt

SEQ ID NO: 18539 - DNA, 19 bp, Homo sapiens
  siRNA target sequence for EZH1 (NM_001991.2,845-863).
ctcaatgttccctgagaat

SEQ ID NO: 18540 - DNA, 19 bp, Homo sapiens
  siRNA target sequence for EZH1 (NM_001991.2,884-902).
ggagaggtatcgagaacta

SEQ ID NO: 18541 - DNA, 19 bp, Homo sapiens
  siRNA target sequence for EZH1 (NM_001991.2,885-903).
gagaggtatcgagaactaa

SEQ ID NO: 18542 - DNA, 19 bp, Homo sapiens
  siRNA target sequence for EZH1 (NM_001991.2,887-905).
gaggtatcgagaactaaca

SEQ ID NO: 18543 - DNA, 19 bp, Homo sapiens
  siRNA target sequence for EZH1 (NM_001991.2,889-907).
ggtatcgagaactaacaga

SEQ ID NO: 18544 - DNA, 19 bp, Homo sapiens
  siRNA target sequence for EZH1 (NM_001991.2,1059-1077).
catgccacccctaatgtat

SEQ ID NO: 18545 - DNA, 19 bp, Homo sapiens
  siRNA target sequence for EZH1 (NM_001991.2,1062-1080).
gccacccctaatgtatata

SEQ ID NO: 18546 - DNA, 19 bp, Homo sapiens
  siRNA target sequence for EZH1 (NM_001991.2,1064-1082).
cacccctaatgtatataaa

SEQ ID NO: 18547 - DNA, 19 bp, Homo sapiens
  siRNA target sequence for EZH1 (NM_001991.2,1074-1092).
gtatataaacgcaagaata

SEQ ID NO: 18548 - DNA, 19 bp, Homo sapiens
  siRNA target sequence for EZH1 (NM_001991.2,1126-1144).
cagactgcttccttttgct

SEQ ID NO: 18549 - DNA, 19 bp, Homo sapiens
  siRNA target sequence for EZH1 (NM_001991.2,1207-1225).
ggagaaggcaccacatagt

SEQ ID NO: 18550 - DNA, 19 bp, Homo sapiens
  siRNA target sequence for EZH1 (NM_001991.2,1513-1531).
cgtgcaagcaggtctttca

SEQ ID NO: 18551 - DNA, 19 bp, Homo sapiens
  siRNA target sequence for EZH1 (NM_001991.2,1567-1585).
caacagatgagctcatgaa

SEQ ID NO: 18552 - DNA, 19 bp, Homo sapiens
  siRNA target sequence for EZH1 (NM_001991.2,1663-1681).
cttccacacaagtgtacaa

SEQ ID NO: 18553 - DNA, 19 bp, Homo sapiens
  siRNA target sequence for EZH1 (NM_001991.2,1730-1748).
ctgcatcatgactcagaat

SEQ ID NO: 18554 - DNA, 19 bp, Homo sapiens
  siRNA target sequence for EZH1 (NM_001991.2,1732-1750).
gcatcatgactcagaattt

SEQ ID NO: 18555 - DNA, 19 bp, Homo sapiens
  siRNA target sequence for EZH1 (NM_001991.2,1797-1815).
cctggctgtcgctgtaaga

SEQ ID NO: 18556 - DNA, 19 bp, Homo sapiens
  siRNA target sequence for EZH1 (NM_001991.2,1993-2011).
gatggggcaccttcataaa

SEQ ID NO: 18557 - DNA, 19 bp, Homo sapiens
  siRNA target sequence for EZH1 (NM_001991.2,2083-2101).
gacgcggaaaggtctatga

SEQ ID NO: 18558 - DNA, 19 bp, Homo sapiens
  siRNA target sequence for EZH1 (NM_001991.2,2085-2103).
cgcggaaaggtctatgaca

SEQ ID NO: 18559 - DNA, 19 bp, Homo sapiens
  siRNA target sequence for EZH1 (NM_001991.2,2086-2104).
gcggaaaggtctatgacaa

SEQ ID NO: 18560 - DNA, 19 bp, Homo sapiens
  siRNA target sequence for EZH1 (NM_001991.2,2087-2105).
cggaaaggtctatgacaaa

SEQ ID NO: 18561 - DNA, 19 bp, Homo sapiens
  siRNA target sequence for EZH1 (NM_001991.2,2126-2144).
caacctcaataatgatttt

SEQ ID NO: 18562 - DNA, 19 bp, Homo sapiens
  siRNA target sequence for EZH1 (NM_001991.2,2129-2147).
cctcaataatgattttgta

SEQ ID NO: 18563 - DNA, 19 bp, Homo sapiens
  siRNA target sequence for EZH1 (NM_001991.2,2162-2180).
gaaaggaaacaaaattcga

SEQ ID NO: 18564 - DNA, 19 bp, Homo sapiens
  siRNA target sequence for EZH1 (NM_001991.2,2240-2258).
ccatcggattgggatcttt

SEQ ID NO: 18565 - DNA, 19 bp, Homo sapiens
  siRNA target sequence for HTATIP (NM_006388.2,434-452).
cggctggacctaaagaaga

SEQ ID NO: 18566 - DNA, 19 bp, Homo sapiens
  siRNA target sequence for HTATIP (NM_006388.2,473-491).
gccaagacccccactaaga

SEQ ID NO: 18567 - DNA, 19 bp, Homo sapiens
  siRNA target sequence for HTATIP (NM_006388.2,800-818).
ccaggacggaagcgaaaat

SEQ ID NO: 18568 - DNA, 19 bp, Homo sapiens
  siRNA target sequence for HTATIP (NM_006388.2,803-821).
ggacggaagcgaaaatcga

SEQ ID NO: 18569 - DNA, 19 bp, Homo sapiens
  siRNA target sequence for HTATIP (NM_006388.2,804-822).
gacggaagcgaaaatcgaa

SEQ ID NO: 18570 - DNA, 19 bp, Homo sapiens
  siRNA target sequence for HTATIP (NM_006388.2,806-824).
cggaagcgaaaatcgaatt

SEQ ID NO: 18571 - DNA, 19 bp, Homo sapiens
  siRNA target sequence for HTATIP (NM_006388.2,808-826).
gaagcgaaaatcgaattgt

SEQ ID NO: 18572 - DNA, 19 bp, Homo sapiens
  siRNA target sequence for HTATIP (NM_006388.2,926-944).
gtcacccggatgaagaaca

SEQ ID NO: 18573 - DNA, 19 bp, Homo sapiens
  siRNA target sequence for HTATIP (NM_006388.2,974-992).
ctcaagccgtggtacttct

SEQ ID NO: 18574 - DNA, 19 bp, Homo sapiens
  siRNA target sequence for HTATIP (NM_006388.2,1144-1162).
catctccttctttgagatt

SEQ ID NO: 18575 - DNA, 19 bp, Homo sapiens
  siRNA target sequence for HTATIP (NM_006388.2,1163-1181).
gatggacgtaagaacaaga

SEQ ID NO: 18576 - DNA, 19 bp, Homo sapiens
  siRNA target sequence for HTATIP (NM_006388.2,1169-1187).
cgtaagaacaagagttatt

SEQ ID NO: 18577 - DNA, 19 bp, Homo sapiens
  siRNA target sequence for HTATIP (NM_006388.2,1200-1218).
gtcttttggccaagtgttt

SEQ ID NO: 18578 - DNA, 19 bp, Homo sapiens
  siRNA target sequence for HTATIP (NM_006388.2,1264-1282).
ctacgtcatgacagagtat

SEQ ID NO: 18579 - DNA, 19 bp, Homo sapiens
  siRNA target sequence for HTATIP (NM_006388.2,1268-1286).
gtcatgacagagtatgact

SEQ ID NO: 18580 - DNA, 19 bp, Homo sapiens
  siRNA target sequence for HTATIP (NM_006388.2,1405-1423).
gatcgagttcagctatgaa

SEQ ID NO: 18581 - DNA, 19 bp, Homo sapiens
  siRNA target sequence for HTATIP (NM_006388.2,1478-1496).
ggcctcctatcctatcgaa

SEQ ID NO: 18582 - DNA, 19 bp, Homo sapiens
  siRNA target sequence for HTATIP (NM_006388.2,1564-1582).
gatcaccatcaatgagatt

SEQ ID NO: 18583 - DNA, 19 bp, Homo sapiens
  siRNA target sequence for HTATIP (NM_006388.2,1570-1588).
catcaatgagattagtgaa

SEQ ID NO: 18584 - DNA, 19 bp, Homo sapiens
  siRNA target sequence for ING1L (NM_001564.1,238-256).
gcgagagctggacaacaaa

SEQ ID NO: 18585 - DNA, 19 bp, Homo sapiens
  siRNA target sequence for ING1L (NM_001564.1,239-257).
cgagagctggacaacaaat

SEQ ID NO: 18586 - DNA, 19 bp, Homo sapiens
  siRNA target sequence for ING1L (NM_001564.1,253-271).
caaatatcaagaaacgtta

SEQ ID NO: 18587 - DNA, 19 bp, Homo sapiens
  siRNA target sequence for ING1L (NM_001564.1,267-285).
cgttaaaggaaattgatga

SEQ ID NO: 18588 - DNA, 19 bp, Homo sapiens
  siRNA target sequence for ING1L (NM_001564.1,268-286).
gttaaaggaaattgatgat

SEQ ID NO: 18589 - DNA, 19 bp, Homo sapiens
  siRNA target sequence for ING1L (NM_001564.1,352-370).
gagagcactaattaatagt

SEQ ID NO: 18590 - DNA, 19 bp, Homo sapiens
  siRNA target sequence for ING1L (NM_001564.1,354-372).
gagcactaattaatagtca

SEQ ID NO: 18591 - DNA, 19 bp, Homo sapiens
  siRNA target sequence for ING1L (NM_001564.1,412-430).
gctcgaattggtggaaaat

SEQ ID NO: 18592 - DNA, 19 bp, Homo sapiens
  siRNA target sequence for ING1L (NM_001564.1,424-442).
ggaaaatcgggcaagacaa

SEQ ID NO: 18593 - DNA, 19 bp, Homo sapiens
  siRNA target sequence for ING1L (NM_001564.1,483-501).
gtgaacgagcctcagataa

SEQ ID NO: 18594 - DNA, 19 bp, Homo sapiens
  siRNA target sequence for ING1L (NM_001564.1,488-506).
cgagcctcagataaagcaa

SEQ ID NO: 18595 - DNA, 19 bp, Homo sapiens
  siRNA target sequence for ING1L (NM_001564.1,489-507).
gagcctcagataaagcaaa

SEQ ID NO: 18596 - DNA, 19 bp, Homo sapiens
  siRNA target sequence for ING1L (NM_001564.1,520-538).
ccaaccagaaagatcttca

SEQ ID NO: 18597 - DNA, 19 bp, Homo sapiens
  siRNA target sequence for ING1L (NM_001564.1,561-579).
ccagtgaaagccgtgattt

SEQ ID NO: 18598 - DNA, 19 bp, Homo sapiens
  siRNA target sequence for ING1L (NM_001564.1,562-580).
cagtgaaagccgtgattta

SEQ ID NO: 18599 - DNA, 19 bp, Homo sapiens
  siRNA target sequence for ING1L (NM_001564.1,725-743).
cctacatactgcttatgca

SEQ ID NO: 18600 - DNA, 19 bp, Homo sapiens
  siRNA target sequence for ING1L (NM_001564.1,726-744).
ctacatactgcttatgcaa

SEQ ID NO: 18601 - DNA, 19 bp, Homo sapiens
  siRNA target sequence for ING1L (NM_001564.1,751-769).
gtcttatggggagatgata

SEQ ID NO: 18602 - DNA, 19 bp, Homo sapiens
  siRNA target sequence for ING1L (NM_001564.1,766-784).
gataggatgtgacaatgaa

SEQ ID NO: 18603 - DNA, 19 bp, Homo sapiens
  siRNA target sequence for ING1L (NM_001564.1,822-840).
cacttacctataaaccaaa

SEQ ID NO: 18604 - DNA, 19 bp, Homo sapiens
  siRNA target sequence for ING1L (NM_001564.1,836-854).
ccaaaggggaaatggtatt

SEQ ID NO: 18605 - DNA, 19 bp, Homo sapiens
  siRNA target sequence for MGC10561 (NM_032647.2,144-162).
cggctggtcctccaaacat

SEQ ID NO: 18606 - DNA, 19 bp, Homo sapiens
  siRNA target sequence for MGC10561 (NM_032647.2,145-163).
ggctggtcctccaaacata

SEQ ID NO: 18607 - DNA, 19 bp, Homo sapiens
  siRNA target sequence for MORF4L1 (NM_006791.1,818-836).
gggtacccagctactctat

SEQ ID NO: 18608 - DNA, 19 bp, Homo sapiens
  siRNA target sequence for MPO (NM_000250.1,576-594).
gtggcgaaggccattcaat

SEQ ID NO: 18609 - DNA, 19 bp, Homo sapiens
  siRNA target sequence for MPO (NM_000250.1,578-596).
ggcgaaggccattcaatgt

SEQ ID NO: 18610 - DNA, 19 bp, Homo sapiens
  siRNA target sequence for MPO (NM_000250.1,580-598).
cgaaggccattcaatgtca

SEQ ID NO: 18611 - DNA, 19 bp, Homo sapiens
  siRNA target sequence for MPO (NM_000250.1,916-934).
gagcgctcactcatgttca

SEQ ID NO: 18612 - DNA, 19 bp, Homo sapiens
  siRNA target sequence for MPO (NM_000250.1,1608-1626).
cacgtaccgttcctacaat

SEQ ID NO: 18613 - DNA, 19 bp, Homo sapiens
  siRNA target sequence for MPO (NM_000250.1,1610-1628).
cgtaccgttcctacaatga

SEQ ID NO: 18614 - DNA, 19 bp, Homo sapiens
  siRNA target sequence for MPO (NM_000250.1,1846-1864).
ctgaatcgtcagaaccaaa

SEQ ID NO: 18615 - DNA, 19 bp, Homo sapiens
  siRNA target sequence for MPO (NM_000250.1,1848-1866).
gaatcgtcagaaccaaatt

SEQ ID NO: 18616 - DNA, 19 bp, Homo sapiens
  siRNA target sequence for MPO (NM_000250.1,2197-2215).
gatggtgatcggttttggt

SEQ ID NO: 18617 - DNA, 19 bp, Homo sapiens
  siRNA target sequence for MPO (NM_000250.1,2300-2318).
gcatcaccaccgtgtctaa

SEQ ID NO: 18618 - DNA, 19 bp, Homo sapiens
  siRNA target sequence for MPO (NM_000250.1,2306-2324).
ccaccgtgtctaagaacaa

SEQ ID NO: 18619 - DNA, 19 bp, Homo sapiens
  siRNA target sequence for MYST1 (NM_032188.1,225-243).
ggcattctgctgaagtgat

SEQ ID NO: 18620 - DNA, 19 bp, Homo sapiens
  siRNA target sequence for MYST1 (NM_032188.1,266-284).
gagggccgagaggaattct

SEQ ID NO: 18621 - DNA, 19 bp, Homo sapiens
  siRNA target sequence for MYST1 (NM_032188.1,268-286).
gggccgagaggaattctat

SEQ ID NO: 18622 - DNA, 19 bp, Homo sapiens
  siRNA target sequence for MYST1 (NM_032188.1,270-288).
gccgagaggaattctatgt

SEQ ID NO: 18623 - DNA, 19 bp, Homo sapiens
  siRNA target sequence for MYST1 (NM_032188.1,447-465).
gcaagcatgatgagatcaa

SEQ ID NO: 18624 - DNA, 19 bp, Homo sapiens
  siRNA target sequence for MYST1 (NM_032188.1,466-484).
ccatgtgcagaagacttat

SEQ ID NO: 18625 - DNA, 19 bp, Homo sapiens
  siRNA target sequence for MYST1 (NM_032188.1,531-549).
cgatcaccaaggtgaagta

SEQ ID NO: 18626 - DNA, 19 bp, Homo sapiens
  siRNA target sequence for MYST1 (NM_032188.1,563-581).
cacatcgggaactacgaaa

SEQ ID NO: 18627 - DNA, 19 bp, Homo sapiens
  siRNA target sequence for MYST1 (NM_032188.1,565-583).
catcgggaactacgaaatt

SEQ ID NO: 18628 - DNA, 19 bp, Homo sapiens
  siRNA target sequence for MYST1 (NM_032188.1,568-586).
cgggaactacgaaattgat

SEQ ID NO: 18629 - DNA, 19 bp, Homo sapiens
  siRNA target sequence for MYST1 (NM_032188.1,578-596).
gaaattgatgcctggtatt

SEQ ID NO: 18630 - DNA, 19 bp, Homo sapiens
  siRNA target sequence for MYST1 (NM_032188.1,600-618).
caccattccccgaagacta

SEQ ID NO: 18631 - DNA, 19 bp, Homo sapiens
  siRNA target sequence for MYST1 (NM_032188.1,654-672).
gcctcaagtacatgaaata

SEQ ID NO: 18632 - DNA, 19 bp, Homo sapiens
  siRNA target sequence for MYST1 (NM_032188.1,655-673).
cctcaagtacatgaaatat

SEQ ID NO: 18633 - DNA, 19 bp, Homo sapiens
  siRNA target sequence for MYST1 (NM_032188.1,770-788).
gatggcaaagaccataaga

SEQ ID NO: 18634 - DNA, 19 bp, Homo sapiens
  siRNA target sequence for MYST1 (NM_032188.1,774-792).
gcaaagaccataagattta

SEQ ID NO: 18635 - DNA, 19 bp, Homo sapiens
  siRNA target sequence for MYST1 (NM_032188.1,854-872).
gtggagccgttcgtctttt

SEQ ID NO: 18636 - DNA, 19 bp, Homo sapiens
  siRNA target sequence for MYST1 (NM_032188.1,857-875).
gagccgttcgtcttttaca

SEQ ID NO: 18637 - DNA, 19 bp, Homo sapiens
  siRNA target sequence for MYST1 (NM_032188.1,937-955).
gtccccggatggaaacaat

SEQ ID NO: 18638 - DNA, 19 bp, Homo sapiens
  siRNA target sequence for MYST1 (NM_032188.1,1185-1203).
gtatcacccaaaatgacat

SEQ ID NO: 18639 - DNA, 19 bp, Homo sapiens
  siRNA target sequence for NCOA6 (NM_014071.2,559-577).
gtccagcaagctaaaagta

SEQ ID NO: 18640 - DNA, 19 bp, Homo sapiens
  siRNA target sequence for NCOA6 (NM_014071.2,561-579).
ccagcaagctaaaagtaca

SEQ ID NO: 18641 - DNA, 19 bp, Homo sapiens
  siRNA target sequence for NCOA6 (NM_014071.2,600-618).
gcgtgcgtgtgacattcaa

SEQ ID NO: 18642 - DNA, 19 bp, Homo sapiens
  siRNA target sequence for NCOA6 (NM_014071.2,670-688).
ccagcagcttcgggattta

SEQ ID NO: 18643 - DNA, 19 bp, Homo sapiens
  siRNA target sequence for NCOA6 (NM_014071.2,680-698).
cgggatttagggattctct

SEQ ID NO: 18644 - DNA, 19 bp, Homo sapiens
  siRNA target sequence for NCOA6 (NM_014071.2,690-708).
ggattctctccgttcagat

SEQ ID NO: 18645 - DNA, 19 bp, Homo sapiens
  siRNA target sequence for NCOA6 (NM_014071.2,691-709).
gattctctccgttcagatt

SEQ ID NO: 18646 - DNA, 19 bp, Homo sapiens
  siRNA target sequence for NCOA6 (NM_014071.2,754-772).
ccaagatgtgagaatgaat

SEQ ID NO: 18647 - DNA, 19 bp, Homo sapiens
  siRNA target sequence for NCOA6 (NM_014071.2,778-796).
catgggagctggaaattca

SEQ ID NO: 18648 - DNA, 19 bp, Homo sapiens
  siRNA target sequence for NCOA6 (NM_014071.2,824-842).
gcaagtggtccaggaataa

SEQ ID NO: 18649 - DNA, 19 bp, Homo sapiens
  siRNA target sequence for NCOA6 (NM_014071.2,1011-1029).
gtcatccctcaggatcttt

SEQ ID NO: 18650 - DNA, 19 bp, Homo sapiens
  siRNA target sequence for NCOA6 (NM_014071.2,1073-1091).
caaatgaacccagctaatt

SEQ ID NO: 18651 - DNA, 19 bp, Homo sapiens
  siRNA target sequence for NCOA6 (NM_014071.2,1223-1241).
ggaattcgaccccagttta

SEQ ID NO: 18652 - DNA, 19 bp, Homo sapiens
  siRNA target sequence for NCOA6 (NM_014071.2,1393-1411).
ccaggcaagaccatcctta

SEQ ID NO: 18653 - DNA, 19 bp, Homo sapiens
  siRNA target sequence for NCOA6 (NM_014071.2,1473-1491).
cacaagcccacacaaactt

SEQ ID NO: 18654 - DNA, 19 bp, Homo sapiens
  siRNA target sequence for NCOA6 (NM_014071.2,1647-1665).
cctccccaacggttaacca

SEQ ID NO: 18655 - DNA, 19 bp, Homo sapiens
  siRNA target sequence for NCOA6 (NM_014071.2,1648-1666).
ctccccaacggttaaccaa

SEQ ID NO: 18656 - DNA, 19 bp, Homo sapiens
  siRNA target sequence for NCOA6 (NM_014071.2,1653-1671).
caacggttaaccaaactca

SEQ ID NO: 18657 - DNA, 19 bp, Homo sapiens
  siRNA target sequence for NCOA6 (NM_014071.2,1685-1703).
ccaaggccacctcaaaata

SEQ ID NO: 18658 - DNA, 19 bp, Homo sapiens
  siRNA target sequence for NCOA6 (NM_014071.2,1686-1704).
caaggccacctcaaaataa

SEQ ID NO: 18659 - DNA, 19 bp, Homo sapiens
  siRNA target sequence for NCOA6 (NM_014071.2,1740-1758).
ctccgggtcggaatcctat

SEQ ID NO: 18660 - DNA, 19 bp, Homo sapiens
  siRNA target sequence for NCOA6 (NM_014071.2,1744-1762).
gggtcggaatcctatggtt

SEQ ID NO: 18661 - DNA, 19 bp, Homo sapiens
  siRNA target sequence for NCOA6 (NM_014071.2,1749-1767).
ggaatcctatggttcaaca

SEQ ID NO: 18662 - DNA, 19 bp, Homo sapiens
  siRNA target sequence for NCOA6 (NM_014071.2,1819-1837).
ggggccacagagtttacat

SEQ ID NO: 18663 - DNA, 19 bp, Homo sapiens
  siRNA target sequence for NCOA6 (NM_014071.2,1889-1907).
caggccaatccgaacttta

SEQ ID NO: 18664 - DNA, 19 bp, Homo sapiens
  siRNA target sequence for NCOA6 (NM_014071.2,1893-1911).
ccaatccgaactttatgca

SEQ ID NO: 18665 - DNA, 19 bp, Homo sapiens
  siRNA target sequence for NCOA6 (NM_014071.2,1894-1912).
caatccgaactttatgcaa

SEQ ID NO: 18666 - DNA, 19 bp, Homo sapiens
  siRNA target sequence for NCOA6 (NM_014071.2,1960-1978).
ccctcagctgcaagcaaat

SEQ ID NO: 18667 - DNA, 19 bp, Homo sapiens
  siRNA target sequence for NCOA6 (NM_014071.2,1966-1984).
gctgcaagcaaatcaaaat

SEQ ID NO: 18668 - DNA, 19 bp, Homo sapiens
  siRNA target sequence for NCOA6 (NM_014071.2,2118-2136).
ctggggttcctcaagtgaa

SEQ ID NO: 18669 - DNA, 19 bp, Homo sapiens
  siRNA target sequence for NCOA6 (NM_014071.2,2190-2208).
gcatgcaccagcaaatcgt

SEQ ID NO: 18670 - DNA, 19 bp, Homo sapiens
  siRNA target sequence for NCOA6 (NM_014071.2,2400-2418).
cgccacataaccagatgat

SEQ ID NO: 18671 - DNA, 19 bp, Homo sapiens
  siRNA target sequence for NCOA6 (NM_014071.2,2421-2439).
ggcctcaggggcaggtttt

SEQ ID NO: 18672 - DNA, 19 bp, Homo sapiens
  siRNA target sequence for NCOA6 (NM_014071.2,2464-2482).
gcagattatgaccaatcaa

SEQ ID NO: 18673 - DNA, 19 bp, Homo sapiens
  siRNA target sequence for NCOA6 (NM_014071.2,2465-2483).
cagattatgaccaatcaaa

SEQ ID NO: 18674 - DNA, 19 bp, Homo sapiens
  siRNA target sequence for NCOA6 (NM_014071.2,2535-2553).
cgggaccagcccagataat

SEQ ID NO: 18675 - DNA, 19 bp, Homo sapiens
  siRNA target sequence for NCOA6 (NM_014071.2,2630-2648).
caagggcctgtgaacaaca

SEQ ID NO: 18676 - DNA, 19 bp, Homo sapiens
  siRNA target sequence for NCOA6 (NM_014071.2,2736-2754).
ctactacagcaaataacga

SEQ ID NO: 18677 - DNA, 19 bp, Homo sapiens
  siRNA target sequence for NCOA6 (NM_014071.2,2745-2763).
caaataacgatgtcagttt

SEQ ID NO: 18678 - DNA, 19 bp, Homo sapiens
  siRNA target sequence for NCOA6 (NM_014071.2,2776-2794).
gcctgatgttagcattcaa

SEQ ID NO: 18679 - DNA, 19 bp, Homo sapiens
  siRNA target sequence for NCOA6 (NM_014071.2,2778-2796).
ctgatgttagcattcaaca

SEQ ID NO: 18680 - DNA, 19 bp, Homo sapiens
  siRNA target sequence for NCOA6 (NM_014071.2,2780-2798).
gatgttagcattcaacaaa

SEQ ID NO: 18681 - DNA, 19 bp, Homo sapiens
  siRNA target sequence for NCOA6 (NM_014071.2,2864-2882).
ggccatgggatgtctttca

SEQ ID NO: 18682 - DNA, 19 bp, Homo sapiens
  siRNA target sequence for NCOA6 (NM_014071.2,2865-2883).
gccatgggatgtctttcaa

SEQ ID NO: 18683 - DNA, 19 bp, Homo sapiens
  siRNA target sequence for NCOA6 (NM_014071.2,2898-2916).
gagctcccaatggaaatca

SEQ ID NO: 18684 - DNA, 19 bp, Homo sapiens
  siRNA target sequence for NCOA6 (NM_014071.2,2900-2918).
gctcccaatggaaatcaga

SEQ ID NO: 18685 - DNA, 19 bp, Homo sapiens
  siRNA target sequence for NCOA6 (NM_014071.2,2940-2958).
gcttcccagtcaataagga

SEQ ID NO: 18686 - DNA, 19 bp, Homo sapiens
  siRNA target sequence for NCOA6 (NM_014071.2,2941-2959).
cttcccagtcaataaggat

SEQ ID NO: 18687 - DNA, 19 bp, Homo sapiens
  siRNA target sequence for NCOA6 (NM_014071.2,2973-2991).
gcccattgttggtcaactt

SEQ ID NO: 18688 - DNA, 19 bp, Homo sapiens
  siRNA target sequence for NCOA6 (NM_014071.2,2974-2992).
cccattgttggtcaactta

SEQ ID NO: 18689 - DNA, 19 bp, Homo sapiens
  siRNA target sequence for NCOA6 (NM_014071.2,2975-2993).
ccattgttggtcaacttat

SEQ ID NO: 18690 - DNA, 19 bp, Homo sapiens
  siRNA target sequence for NCOA6 (NM_014071.2,2976-2994).
cattgttggtcaacttatt

SEQ ID NO: 18691 - DNA, 19 bp, Homo sapiens
  siRNA target sequence for NCOA6 (NM_014071.2,2989-3007).
cttattgcagagtgacata

SEQ ID NO: 18692 - DNA, 19 bp, Homo sapiens
  siRNA target sequence for NCOA6 (NM_014071.2,3179-3197).
ggaattaacttggataact

SEQ ID NO: 18693 - DNA, 19 bp, Homo sapiens
  siRNA target sequence for NCOA6 (NM_014071.2,3226-3244).
ccggccaccaggttatcct

SEQ ID NO: 18694 - DNA, 19 bp, Homo sapiens
  siRNA target sequence for NCOA6 (NM_014071.2,3227-3245).
cggccaccaggttatcctt

SEQ ID NO: 18695 - DNA, 19 bp, Homo sapiens
  siRNA target sequence for NCOA6 (NM_014071.2,3243-3261).
cttctcaaccagttgaaca

SEQ ID NO: 18696 - DNA, 19 bp, Homo sapiens
  siRNA target sequence for NCOA6 (NM_014071.2,3439-3457).
gcagcaggatcccaaatca

SEQ ID NO: 18697 - DNA, 19 bp, Homo sapiens
  siRNA target sequence for NCOA6 (NM_014071.2,3442-3460).
gcaggatcccaaatcagtt

SEQ ID NO: 18698 - DNA, 19 bp, Homo sapiens
  siRNA target sequence for NCOA6 (NM_014071.2,3462-3480).
ggcttccagtctctcaaaa

SEQ ID NO: 18699 - DNA, 19 bp, Homo sapiens
  siRNA target sequence for NCOA6 (NM_014071.2,3463-3481).
gcttccagtctctcaaaat

SEQ ID NO: 18700 - DNA, 19 bp, Homo sapiens
  siRNA target sequence for NCOA6 (NM_014071.2,3588-3606).
caccatcacctgataaaca

SEQ ID NO: 18701 - DNA, 19 bp, Homo sapiens
  siRNA target sequence for NCOA6 (NM_014071.2,3769-3787).
catgccttcacatgtagta

SEQ ID NO: 18702 - DNA, 19 bp, Homo sapiens
  siRNA target sequence for NCOA6 (NM_014071.2,3772-3790).
gccttcacatgtagtactt

SEQ ID NO: 18703 - DNA, 19 bp, Homo sapiens
  siRNA target sequence for NCOA6 (NM_014071.2,3785-3803).
gtacttccccagaatcagt

SEQ ID NO: 18704 - DNA, 19 bp, Homo sapiens
  siRNA target sequence for NCOA6 (NM_014071.2,3835-3853).
gcccctttcagcaactcaa

SEQ ID NO: 18705 - DNA, 19 bp, Homo sapiens
  siRNA target sequence for NCOA6 (NM_014071.2,3866-3884).
cagcaaccccctgtaaatt

SEQ ID NO: 18706 - DNA, 19 bp, Homo sapiens
  siRNA target sequence for NCOA6 (NM_014071.2,3937-3955).
gacatctaggcccaaaaca

SEQ ID NO: 18707 - DNA, 19 bp, Homo sapiens
  siRNA target sequence for NCOA6 (NM_014071.2,4106-4124).
cctaggccaaatttaaaca

SEQ ID NO: 18708 - DNA, 19 bp, Homo sapiens
  siRNA target sequence for NCOA6 (NM_014071.2,4142-4160).
ggcctaaatccaacaactt

SEQ ID NO: 18709 - DNA, 19 bp, Homo sapiens
  siRNA target sequence for NCOA6 (NM_014071.2,4143-4161).
gcctaaatccaacaacttt

SEQ ID NO: 18710 - DNA, 19 bp, Homo sapiens
  siRNA target sequence for NCOA6 (NM_014071.2,4171-4189).
cgggcaagcaccttcaaat

SEQ ID NO: 18711 - DNA, 19 bp, Homo sapiens
  siRNA target sequence for NCOA6 (NM_014071.2,4173-4191).
ggcaagcaccttcaaatct

SEQ ID NO: 18712 - DNA, 19 bp, Homo sapiens
  siRNA target sequence for NCOA6 (NM_014071.2,4174-4192).
gcaagcaccttcaaatctt

SEQ ID NO: 18713 - DNA, 19 bp, Homo sapiens
  siRNA target sequence for NCOA6 (NM_014071.2,4175-4193).
caagcaccttcaaatctta

SEQ ID NO: 18714 - DNA, 19 bp, Homo sapiens
  siRNA target sequence for NCOA6 (NM_014071.2,4198-4216).
gaatccttccaattttgct

SEQ ID NO: 18715 - DNA, 19 bp, Homo sapiens
  siRNA target sequence for NCOA6 (NM_014071.2,4238-4256).
gattctgtggtagtgaatt

SEQ ID NO: 18716 - DNA, 19 bp, Homo sapiens
  siRNA target sequence for NCOA6 (NM_014071.2,4351-4369).
ccctgggaggcaaaattca

SEQ ID NO: 18717 - DNA, 19 bp, Homo sapiens
  siRNA target sequence for NCOA6 (NM_014071.2,4390-4408).
ggcctctcagacaaatgca

SEQ ID NO: 18718 - DNA, 19 bp, Homo sapiens
  siRNA target sequence for NCOA6 (NM_014071.2,4407-4425).
cagccctattgcagaatgt

SEQ ID NO: 18719 - DNA, 19 bp, Homo sapiens
  siRNA target sequence for NCOA6 (NM_014071.2,4426-4444).
ggagttgccgagaaatgta

SEQ ID NO: 18720 - DNA, 19 bp, Homo sapiens
  siRNA target sequence for NCOA6 (NM_014071.2,4510-4528).
gaatcctcagaattctact

SEQ ID NO: 18721 - DNA, 19 bp, Homo sapiens
  siRNA target sequence for NCOA6 (NM_014071.2,4542-4560).
cagttgggggtgttgttga

SEQ ID NO: 18722 - DNA, 19 bp, Homo sapiens
  siRNA target sequence for NCOA6 (NM_014071.2,4550-4568).
ggtgttgttgaggataaca

SEQ ID NO: 18723 - DNA, 19 bp, Homo sapiens
  siRNA target sequence for NCOA6 (NM_014071.2,4551-4569).
gtgttgttgaggataacaa

SEQ ID NO: 18724 - DNA, 19 bp, Homo sapiens
  siRNA target sequence for NCOA6 (NM_014071.2,4583-4601).
gtgcctcaggacagtgatt

SEQ ID NO: 18725 - DNA, 19 bp, Homo sapiens
  siRNA target sequence for NCOA6 (NM_014071.2,4592-4610).
gacagtgattgccagaatt

SEQ ID NO: 18726 - DNA, 19 bp, Homo sapiens
  siRNA target sequence for NCOA6 (NM_014071.2,4628-4646).
caggtaaacattgaactaa

SEQ ID NO: 18727 - DNA, 19 bp, Homo sapiens
  siRNA target sequence for NCOA6 (NM_014071.2,4630-4648).
ggtaaacattgaactaaaa

SEQ ID NO: 18728 - DNA, 19 bp, Homo sapiens
  siRNA target sequence for NCOA6 (NM_014071.2,4652-4670).
gtccctgcccaagaagtta

SEQ ID NO: 18729 - DNA, 19 bp, Homo sapiens
  siRNA target sequence for NCOA6 (NM_014071.2,4707-4725).
ggcagccttcggatcctaa

SEQ ID NO: 18730 - DNA, 19 bp, Homo sapiens
  siRNA target sequence for NCOA6 (NM_014071.2,4711-4729).
gccttcggatcctaacaaa

SEQ ID NO: 18731 - DNA, 19 bp, Homo sapiens
  siRNA target sequence for NCOA6 (NM_014071.2,4713-4731).
cttcggatcctaacaaact

SEQ ID NO: 18732 - DNA, 19 bp, Homo sapiens
  siRNA target sequence for NCOA6 (NM_014071.2,4734-4752).
ccagtgtcgaagagaacaa

SEQ ID NO: 18733 - DNA, 19 bp, Homo sapiens
  siRNA target sequence for NCOA6 (NM_014071.2,4735-4753).
cagtgtcgaagagaacaaa

SEQ ID NO: 18734 - DNA, 19 bp, Homo sapiens
  siRNA target sequence for NCOA6 (NM_014071.2,4782-4800).
caccaacatcgttaagtca

SEQ ID NO: 18735 - DNA, 19 bp, Homo sapiens
  siRNA target sequence for NCOA6 (NM_014071.2,4788-4806).
catcgttaagtcaacttct

SEQ ID NO: 18736 - DNA, 19 bp, Homo sapiens
  siRNA target sequence for NCOA6 (NM_014071.2,4791-4809).
cgttaagtcaacttcttga

SEQ ID NO: 18737 - DNA, 19 bp, Homo sapiens
  siRNA target sequence for NCOA6 (NM_014071.2,4818-4836).
gagctcccaatgtgacaat

SEQ ID NO: 18738 - DNA, 19 bp, Homo sapiens
  siRNA target sequence for NCOA6 (NM_014071.2,4820-4838).
gctcccaatgtgacaatta

SEQ ID NO: 18739 - DNA, 19 bp, Homo sapiens
  siRNA target sequence for NCOA6 (NM_014071.2,4821-4839).
ctcccaatgtgacaattaa

SEQ ID NO: 18740 - DNA, 19 bp, Homo sapiens
  siRNA target sequence for NCOA6 (NM_014071.2,4889-4907).
gaggacctcaaaaaagcat

SEQ ID NO: 18741 - DNA, 19 bp, Homo sapiens
  siRNA target sequence for NCOA6 (NM_014071.2,4938-4956).
cttctaaagaaccttctaa

SEQ ID NO: 18742 - DNA, 19 bp, Homo sapiens
  siRNA target sequence for NCOA6 (NM_014071.2,4949-4967).
ccttctaattccctaaact

SEQ ID NO: 18743 - DNA, 19 bp, Homo sapiens
  siRNA target sequence for NCOA6 (NM_014071.2,4997-5015).
cttgtgcatcccgaattga

SEQ ID NO: 18744 - DNA, 19 bp, Homo sapiens
  siRNA target sequence for NCOA6 (NM_014071.2,5044-5062).
catccctccagtaatgtca

SEQ ID NO: 18745 - DNA, 19 bp, Homo sapiens
  siRNA target sequence for NCOA6 (NM_014071.2,5100-5118).
ccccaaatcaaataactgt

SEQ ID NO: 18746 - DNA, 19 bp, Homo sapiens
  siRNA target sequence for NCOA6 (NM_014071.2,5140-5158).
cacaacttcagctaacaca

SEQ ID NO: 18747 - DNA, 19 bp, Homo sapiens
  siRNA target sequence for NCOA6 (NM_014071.2,5183-5201).
cagtctgcattgatgtcaa

SEQ ID NO: 18748 - DNA, 19 bp, Homo sapiens
  siRNA target sequence for NCOA6 (NM_014071.2,5223-5241).
cgggtagcaaggttatggt

SEQ ID NO: 18749 - DNA, 19 bp, Homo sapiens
  siRNA target sequence for NCOA6 (NM_014071.2,5224-5242).
gggtagcaaggttatggtt

SEQ ID NO: 18750 - DNA, 19 bp, Homo sapiens
  siRNA target sequence for NCOA6 (NM_014071.2,5313-5331).
cctcaataattcaggttat

SEQ ID NO: 18751 - DNA, 19 bp, Homo sapiens
  siRNA target sequence for NCOA6 (NM_014071.2,5406-5424).
cagttgttggccctttaca

SEQ ID NO: 18752 - DNA, 19 bp, Homo sapiens
  siRNA target sequence for NCOA6 (NM_014071.2,5423-5441).
cacatacctcagaacataa

SEQ ID NO: 18753 - DNA, 19 bp, Homo sapiens
  siRNA target sequence for NCOA6 (NM_014071.2,5481-5499).
gtagtcctgctccaaacat

SEQ ID NO: 18754 - DNA, 19 bp, Homo sapiens
  siRNA target sequence for NCOA6 (NM_014071.2,5748-5766).
gcccagtctcgtctagtaa

SEQ ID NO: 18755 - DNA, 19 bp, Homo sapiens
  siRNA target sequence for NCOA6 (NM_014071.2,5809-5827).
caaggcatgtaagaaagtt

SEQ ID NO: 18756 - DNA, 19 bp, Homo sapiens
  siRNA target sequence for NCOA6 (NM_014071.2,5812-5830).
ggcatgtaagaaagttaca

SEQ ID NO: 18757 - DNA, 19 bp, Homo sapiens
  siRNA target sequence for NCOA6 (NM_014071.2,6058-6076).
cagtgtacgctcgatagta

SEQ ID NO: 18758 - DNA, 19 bp, Homo sapiens
  siRNA target sequence for NCOA6 (NM_014071.2,6106-6124).
cgccgtaccgaccacaaaa

SEQ ID NO: 18759 - DNA, 19 bp, Homo sapiens
  siRNA target sequence for NCOA6 (NM_014071.2,6107-6125).
gccgtaccgaccacaaaaa

SEQ ID NO: 18760 - DNA, 19 bp, Homo sapiens
  siRNA target sequence for NCOA6 (NM_014071.2,6110-6128).
gtaccgaccacaaaaagca

SEQ ID NO: 18761 - DNA, 19 bp, Homo sapiens
  siRNA target sequence for NCOA6 (NM_014071.2,6186-6204).
gatcccatccagaacttct

SEQ ID NO: 18762 - DNA, 19 bp, Homo sapiens
  siRNA target sequence for NCOA6 (NM_014071.2,6216-6234).
ccccgtcgcagaatttagt

SEQ ID NO: 18763 - DNA, 19 bp, Homo sapiens
  siRNA target sequence for NCOA6 (NM_014071.2,6218-6236).
ccgtcgcagaatttagtct

SEQ ID NO: 18764 - DNA, 19 bp, Homo sapiens
  siRNA target sequence for NCOA6 (NM_014071.2,6293-6311).
gtaaatgctgccatagtct

SEQ ID NO: 18765 - DNA, 19 bp, Homo sapiens
  siRNA target sequence for NCOA6 (NM_014071.2,6322-6340).
cagtgagcccaaagagata

SEQ ID NO: 18766 - DNA, 19 bp, Homo sapiens
  siRNA target sequence for NCOA6 (NM_014071.2,6328-6346).
gcccaaagagatagttgaa

SEQ ID NO: 18767 - DNA, 19 bp, Homo sapiens
  siRNA target sequence for NCOA6 (NM_014071.2,6477-6495).
ccagtgcggtgcaatccaa

SEQ ID NO: 18768 - DNA, 19 bp, Homo sapiens
  siRNA target sequence for NCOA6 (NM_014071.2,6492-6510).
ccaagcgaagaaaatccaa

SEQ ID NO: 18769 - DNA, 19 bp, Homo sapiens
  siRNA target sequence for NSBP1 (NM_030763.1,131-149).
caggttgtctgctatgctt

SEQ ID NO: 18770 - DNA, 19 bp, Homo sapiens
  siRNA target sequence for NSBP1 (NM_030763.1,162-180).
ccagaggtgaagcctaaaa

SEQ ID NO: 18771 - DNA, 19 bp, Homo sapiens
  siRNA target sequence for NSBP1 (NM_030763.1,165-183).
gaggtgaagcctaaaagaa

SEQ ID NO: 18772 - DNA, 19 bp, Homo sapiens
  siRNA target sequence for NSBP1 (NM_030763.1,167-185).
ggtgaagcctaaaagaaca

SEQ ID NO: 18773 - DNA, 19 bp, Homo sapiens
  siRNA target sequence for NSBP1 (NM_030763.1,221-239).
gatggaagaaaacatagat

SEQ ID NO: 18774 - DNA, 19 bp, Homo sapiens
  siRNA target sequence for NSBP1 (NM_030763.1,333-351).
gaggcaccagcttctgaaa

SEQ ID NO: 18775 - DNA, 19 bp, Homo sapiens
  siRNA target sequence for NSBP1 (NM_030763.1,896-914).
ggagccacagagtattgtt

SEQ ID NO: 18776 - DNA, 19 bp, Homo sapiens
  siRNA target sequence for PB1 (NM_018165.2,150-168).
gtgccatgaactctataat

SEQ ID NO: 18777 - DNA, 19 bp, Homo sapiens
  siRNA target sequence for PB1 (NM_018165.2,154-172).
catgaactctataatacca

SEQ ID NO: 18778 - DNA, 19 bp, Homo sapiens
  siRNA target sequence for PB1 (NM_018165.2,170-188).
ccatccgagactataagga

SEQ ID NO: 18779 - DNA, 19 bp, Homo sapiens
  siRNA target sequence for PB1 (NM_018165.2,171-189).
catccgagactataaggat

SEQ ID NO: 18780 - DNA, 19 bp, Homo sapiens
  siRNA target sequence for PB1 (NM_018165.2,239-257).
gaaatcaaccagactatta

SEQ ID NO: 18781 - DNA, 19 bp, Homo sapiens
  siRNA target sequence for PB1 (NM_018165.2,436-454).
cttcgaacaagaaatgagt

SEQ ID NO: 18782 - DNA, 19 bp, Homo sapiens
  siRNA target sequence for PB1 (NM_018165.2,530-548).
gatcttctccagcttactt

SEQ ID NO: 18783 - DNA, 19 bp, Homo sapiens
  siRNA target sequence for PB1 (NM_018165.2,579-597).
catagttgtagctacaaat

SEQ ID NO: 18784 - DNA, 19 bp, Homo sapiens
  siRNA target sequence for PB1 (NM_018165.2,583-601).
gttgtagctacaaatccat

SEQ ID NO: 18785 - DNA, 19 bp, Homo sapiens
  siRNA target sequence for PB1 (NM_018165.2,598-616).
ccatcaggacgtctcatta

SEQ ID NO: 18786 - DNA, 19 bp, Homo sapiens
  siRNA target sequence for PB1 (NM_018165.2,636-654).
gccttctaaagtgcaatat

SEQ ID NO: 18787 - DNA, 19 bp, Homo sapiens
  siRNA target sequence for PB1 (NM_018165.2,648-666).
gcaatatccagattattat

SEQ ID NO: 18788 - DNA, 19 bp, Homo sapiens
  siRNA target sequence for PB1 (NM_018165.2,722-740).
gaagctacaaaagtattca

SEQ ID NO: 18789 - DNA, 19 bp, Homo sapiens
  siRNA target sequence for PB1 (NM_018165.2,793-811).
gagcctggctctcaagtat

SEQ ID NO: 18790 - DNA, 19 bp, Homo sapiens
  siRNA target sequence for PB1 (NM_018165.2,816-834).
ggatgcaaattcaattaaa

SEQ ID NO: 18791 - DNA, 19 bp, Homo sapiens
  siRNA target sequence for PB1 (NM_018165.2,855-873).
ggctgaaattgaacatcat

SEQ ID NO: 18792 - DNA, 19 bp, Homo sapiens
  siRNA target sequence for PB1 (NM_018165.2,881-899).
ctaagtcaagtcttcgaat

SEQ ID NO: 18793 - DNA, 19 bp, Homo sapiens
  siRNA target sequence for PB1 (NM_018165.2,890-908).
gtcttcgaatgagtaataa

SEQ ID NO: 18794 - DNA, 19 bp, Homo sapiens
  siRNA target sequence for PB1 (NM_018165.2,892-910).
cttcgaatgagtaataaaa

SEQ ID NO: 18795 - DNA, 19 bp, Homo sapiens
  siRNA target sequence for PB1 (NM_018165.2,916-934).
gtacaaggaggtcgtttat

SEQ ID NO: 18796 - DNA, 19 bp, Homo sapiens
  siRNA target sequence for PB1 (NM_018165.2,925-943).
ggtcgtttatcagcaatta

SEQ ID NO: 18797 - DNA, 19 bp, Homo sapiens
  siRNA target sequence for PB1 (NM_018165.2,928-946).
cgtttatcagcaattacaa

SEQ ID NO: 18798 - DNA, 19 bp, Homo sapiens
  siRNA target sequence for PB1 (NM_018165.2,992-1010).
ctgctgcacgctatgaaga

SEQ ID NO: 18799 - DNA, 19 bp, Homo sapiens
  siRNA target sequence for PB1 (NM_018165.2,1088-1106).
ggagttgtcggaataacca

SEQ ID NO: 18800 - DNA, 19 bp, Homo sapiens
  siRNA target sequence for PB1 (NM_018165.2,1089-1107).
gagttgtcggaataaccaa

SEQ ID NO: 18801 - DNA, 19 bp, Homo sapiens
  siRNA target sequence for PB1 (NM_018165.2,1113-1131).
gctaatagctgaacctttt

SEQ ID NO: 18802 - DNA, 19 bp, Homo sapiens
  siRNA target sequence for PB1 (NM_018165.2,1114-1132).
ctaatagctgaaccttttt

SEQ ID NO: 18803 - DNA, 19 bp, Homo sapiens
  siRNA target sequence for PB1 (NM_018165.2,1120-1138).
gctgaacctttttaccatt

SEQ ID NO: 18804 - DNA, 19 bp, Homo sapiens
  siRNA target sequence for PB1 (NM_018165.2,1201-1219).
cagatccgaacaaaactga

SEQ ID NO: 18805 - DNA, 19 bp, Homo sapiens
  siRNA target sequence for PB1 (NM_018165.2,1290-1308).
ctataatgtgcccaattca

SEQ ID NO: 18806 - DNA, 19 bp, Homo sapiens
  siRNA target sequence for PB1 (NM_018165.2,1311-1329).
catctacaagcgagttcta

SEQ ID NO: 18807 - DNA, 19 bp, Homo sapiens
  siRNA target sequence for PB1 (NM_018165.2,1314-1332).
ctacaagcgagttctaaaa

SEQ ID NO: 18808 - DNA, 19 bp, Homo sapiens
  siRNA target sequence for PB1 (NM_018165.2,1327-1345).
ctaaaattgcagcaagtta

SEQ ID NO: 18809 - DNA, 19 bp, Homo sapiens
  siRNA target sequence for PB1 (NM_018165.2,1471-1489).
cgaatgaaaatcttattca

SEQ ID NO: 18810 - DNA, 19 bp, Homo sapiens
  siRNA target sequence for PB1 (NM_018165.2,1482-1500).
cttattcaatgttgttctt

SEQ ID NO: 18811 - DNA, 19 bp, Homo sapiens
  siRNA target sequence for PB1 (NM_018165.2,1535-1553).
gtgacctatttatggttaa

SEQ ID NO: 18812 - DNA, 19 bp, Homo sapiens
  siRNA target sequence for PB1 (NM_018165.2,1539-1557).
cctatttatggttaaacca

SEQ ID NO: 18813 - DNA, 19 bp, Homo sapiens
  siRNA target sequence for PB1 (NM_018165.2,1596-1614).
ggagccaatggacttgaaa

SEQ ID NO: 18814 - DNA, 19 bp, Homo sapiens
  siRNA target sequence for PB1 (NM_018165.2,1597-1615).
gagccaatggacttgaaaa

SEQ ID NO: 18815 - DNA, 19 bp, Homo sapiens
  siRNA target sequence for PB1 (NM_018165.2,1624-1642).
cataacatccgcaatgaca

SEQ ID NO: 18816 - DNA, 19 bp, Homo sapiens
  siRNA target sequence for PB1 (NM_018165.2,1629-1647).
catccgcaatgacaaatat

SEQ ID NO: 18817 - DNA, 19 bp, Homo sapiens
  siRNA target sequence for PB1 (NM_018165.2,1632-1650).
ccgcaatgacaaatatgct

SEQ ID NO: 18818 - DNA, 19 bp, Homo sapiens
  siRNA target sequence for PB1 (NM_018165.2,1713-1731).
ggagggctcccaggtttat

SEQ ID NO: 18819 - DNA, 19 bp, Homo sapiens
  siRNA target sequence for PB1 (NM_018165.2,1714-1732).
gagggctcccaggtttata

SEQ ID NO: 18820 - DNA, 19 bp, Homo sapiens
  siRNA target sequence for PB1 (NM_018165.2,1716-1734).
gggctcccaggtttataat

SEQ ID NO: 18821 - DNA, 19 bp, Homo sapiens
  siRNA target sequence for PB1 (NM_018165.2,1718-1736).
gctcccaggtttataatga

SEQ ID NO: 18822 - DNA, 19 bp, Homo sapiens
  siRNA target sequence for PB1 (NM_018165.2,1719-1737).
ctcccaggtttataatgat

SEQ ID NO: 18823 - DNA, 19 bp, Homo sapiens
  siRNA target sequence for PB1 (NM_018165.2,1839-1857).
gagtggcatttctcctaaa

SEQ ID NO: 18824 - DNA, 19 bp, Homo sapiens
  siRNA target sequence for PB1 (NM_018165.2,1912-1930).
gtaaagaactatactgata

SEQ ID NO: 18825 - DNA, 19 bp, Homo sapiens
  siRNA target sequence for PB1 (NM_018165.2,1962-1980).
gaggcttccctctagatct

SEQ ID NO: 18826 - DNA, 19 bp, Homo sapiens
  siRNA target sequence for PB1 (NM_018165.2,1979-1997).
ctgagttgcctgactacta

SEQ ID NO: 18827 - DNA, 19 bp, Homo sapiens
  siRNA target sequence for PB1 (NM_018165.2,1992-2010).
ctactatctgactattaaa

SEQ ID NO: 18828 - DNA, 19 bp, Homo sapiens
  siRNA target sequence for PB1 (NM_018165.2,2125-2143).
gagccggagtctttgatct

SEQ ID NO: 18829 - DNA, 19 bp, Homo sapiens
  siRNA target sequence for PB1 (NM_018165.2,2128-2146).
ccggagtctttgatctaca

SEQ ID NO: 18830 - DNA, 19 bp, Homo sapiens
  siRNA target sequence for PB1 (NM_018165.2,2129-2147).
cggagtctttgatctacaa

SEQ ID NO: 18831 - DNA, 19 bp, Homo sapiens
  siRNA target sequence for PB1 (NM_018165.2,2153-2171).
ctcttgttctacacaaagt

SEQ ID NO: 18832 - DNA, 19 bp, Homo sapiens
  siRNA target sequence for PB1 (NM_018165.2,2300-2318).
gatgctacagcgattcttt

SEQ ID NO: 18833 - DNA, 19 bp, Homo sapiens
  siRNA target sequence for PB1 (NM_018165.2,2304-2322).
ctacagcgattctttagca

SEQ ID NO: 18834 - DNA, 19 bp, Homo sapiens
  siRNA target sequence for PB1 (NM_018165.2,2310-2328).
cgattctttagcagaaatt

SEQ ID NO: 18835 - DNA, 19 bp, Homo sapiens
  siRNA target sequence for PB1 (NM_018165.2,2335-2353).
gtggatcccaactttccta

SEQ ID NO: 18836 - DNA, 19 bp, Homo sapiens
  siRNA target sequence for PB1 (NM_018165.2,2360-2378).
caccccttacatttgacat

SEQ ID NO: 18837 - DNA, 19 bp, Homo sapiens
  siRNA target sequence for PB1 (NM_018165.2,2404-2422).
cgctaccgtcggcttgatt

SEQ ID NO: 18838 - DNA, 19 bp, Homo sapiens
  siRNA target sequence for PB1 (NM_018165.2,2405-2423).
gctaccgtcggcttgattt

SEQ ID NO: 18839 - DNA, 19 bp, Homo sapiens
  siRNA target sequence for PB1 (NM_018165.2,2406-2424).
ctaccgtcggcttgattta

SEQ ID NO: 18840 - DNA, 19 bp, Homo sapiens
  siRNA target sequence for PB1 (NM_018165.2,2409-2427).
ccgtcggcttgatttattt

SEQ ID NO: 18841 - DNA, 19 bp, Homo sapiens
  siRNA target sequence for PB1 (NM_018165.2,2411-2429).
gtcggcttgatttatttca

SEQ ID NO: 18842 - DNA, 19 bp, Homo sapiens
  siRNA target sequence for PB1 (NM_018165.2,2466-2484).
gatgaatcggacagattca

SEQ ID NO: 18843 - DNA, 19 bp, Homo sapiens
  siRNA target sequence for PB1 (NM_018165.2,2533-2551).
cgtgatgaactctgcaaaa

SEQ ID NO: 18844 - DNA, 19 bp, Homo sapiens
  siRNA target sequence for PB1 (NM_018165.2,2572-2590).
ccggcactcagctatacca

SEQ ID NO: 18845 - DNA, 19 bp, Homo sapiens
  siRNA target sequence for PB1 (NM_018165.2,2580-2598).
cagctataccacaaaacat

SEQ ID NO: 18846 - DNA, 19 bp, Homo sapiens
  siRNA target sequence for PB1 (NM_018165.2,2582-2600).
gctataccacaaaacattt

SEQ ID NO: 18847 - DNA, 19 bp, Homo sapiens
  siRNA target sequence for PB1 (NM_018165.2,2731-2749).
ggcttacatcgcacataca

SEQ ID NO: 18848 - DNA, 19 bp, Homo sapiens
  siRNA target sequence for PB1 (NM_018165.2,2751-2769).
ccaggactgtagctttaaa

SEQ ID NO: 18849 - DNA, 19 bp, Homo sapiens
  siRNA target sequence for PB1 (NM_018165.2,2819-2837).
ccaacctacaaccacatat

SEQ ID NO: 18850 - DNA, 19 bp, Homo sapiens
  siRNA target sequence for PB1 (NM_018165.2,2831-2849).
cacatatcgtctgtattga

SEQ ID NO: 18851 - DNA, 19 bp, Homo sapiens
  siRNA target sequence for PB1 (NM_018165.2,2883-2901).
gttgtatggctgttggttt

SEQ ID NO: 18852 - DNA, 19 bp, Homo sapiens
  siRNA target sequence for PB1 (NM_018165.2,2897-2915).
ggttttaccgaccaaatga

SEQ ID NO: 18853 - DNA, 19 bp, Homo sapiens
  siRNA target sequence for PB1 (NM_018165.2,2923-2941).
cacctggctacacgaaaat

SEQ ID NO: 18854 - DNA, 19 bp, Homo sapiens
  siRNA target sequence for PB1 (NM_018165.2,2925-2943).
cctggctacacgaaaattt

SEQ ID NO: 18855 - DNA, 19 bp, Homo sapiens
  siRNA target sequence for PB1 (NM_018165.2,2928-2946).
ggctacacgaaaatttcta

SEQ ID NO: 18856 - DNA, 19 bp, Homo sapiens
  siRNA target sequence for PB1 (NM_018165.2,3005-3023).
gcaagtgtgtggtcatgtt

SEQ ID NO: 18857 - DNA, 19 bp, Homo sapiens
  siRNA target sequence for PB1 (NM_018165.2,3011-3029).
gtgtggtcatgtttgtcaa

SEQ ID NO: 18858 - DNA, 19 bp, Homo sapiens
  siRNA target sequence for PB1 (NM_018165.2,3016-3034).
gtcatgtttgtcaaggaat

SEQ ID NO: 18859 - DNA, 19 bp, Homo sapiens
  siRNA target sequence for PB1 (NM_018165.2,3060-3078).
ccgagatgaggatgttttt

SEQ ID NO: 18860 - DNA, 19 bp, Homo sapiens
  siRNA target sequence for PB1 (NM_018165.2,3081-3099).
ctgtgaatcacggtattct

SEQ ID NO: 18861 - DNA, 19 bp, Homo sapiens
  siRNA target sequence for PB1 (NM_018165.2,3091-3109).
cggtattctgccaaaacca

SEQ ID NO: 18862 - DNA, 19 bp, Homo sapiens
  siRNA target sequence for PB1 (NM_018165.2,3092-3110).
ggtattctgccaaaaccaa

SEQ ID NO: 18863 - DNA, 19 bp, Homo sapiens
  siRNA target sequence for PB1 (NM_018165.2,3190-3208).
gttcgcgtggcctctgtat

SEQ ID NO: 18864 - DNA, 19 bp, Homo sapiens
  siRNA target sequence for PB1 (NM_018165.2,3266-3284).
gagctgaagacaattttaa

SEQ ID NO: 18865 - DNA, 19 bp, Homo sapiens
  siRNA target sequence for PB1 (NM_018165.2,3428-3446).
ctcgtgtgggcagaattga

SEQ ID NO: 18866 - DNA, 19 bp, Homo sapiens
  siRNA target sequence for PB1 (NM_018165.2,3460-3478).
cgagatggagctgcatatt

SEQ ID NO: 18867 - DNA, 19 bp, Homo sapiens
  siRNA target sequence for PB1 (NM_018165.2,3463-3481).
gatggagctgcatattttt

SEQ ID NO: 18868 - DNA, 19 bp, Homo sapiens
  siRNA target sequence for PB1 (NM_018165.2,3514-3532).
gagcatgagcccacaaaaa

SEQ ID NO: 18869 - DNA, 19 bp, Homo sapiens
  siRNA target sequence for PB1 (NM_018165.2,3534-3552).
gttctacaaaaaagaagta

SEQ ID NO: 18870 - DNA, 19 bp, Homo sapiens
  siRNA target sequence for PB1 (NM_018165.2,3578-3596).
gccccatgacatgtattct

SEQ ID NO: 18871 - DNA, 19 bp, Homo sapiens
  siRNA target sequence for PB1 (NM_018165.2,3635-3653).
cctgcaggccaactgaaat

SEQ ID NO: 18872 - DNA, 19 bp, Homo sapiens
  siRNA target sequence for PB1 (NM_018165.2,3677-3695).
gtgagagccgctacaatga

SEQ ID NO: 18873 - DNA, 19 bp, Homo sapiens
  siRNA target sequence for PB1 (NM_018165.2,3679-3697).
gagagccgctacaatgaga

SEQ ID NO: 18874 - DNA, 19 bp, Homo sapiens
  siRNA target sequence for PB1 (NM_018165.2,3735-3753).
gttttcactctctgctaaa

SEQ ID NO: 18875 - DNA, 19 bp, Homo sapiens
  siRNA target sequence for PB1 (NM_018165.2,3746-3764).
ctgctaaagtggtagatga

SEQ ID NO: 18876 - DNA, 19 bp, Homo sapiens
  siRNA target sequence for PB1 (NM_018165.2,3848-3866).
ctaaatttgccgagttaga

SEQ ID NO: 18877 - DNA, 19 bp, Homo sapiens
  siRNA target sequence for PB1 (NM_018165.2,4037-4055).
ccaaacggaaaatcaacat

SEQ ID NO: 18878 - DNA, 19 bp, Homo sapiens
  siRNA target sequence for PB1 (NM_018165.2,4138-4156).
cgcctggtggggacagaat

SEQ ID NO: 18879 - DNA, 19 bp, Homo sapiens
  siRNA target sequence for PB1 (NM_018165.2,4240-4258).
ccagttgatggccttgtta

SEQ ID NO: 18880 - DNA, 19 bp, Homo sapiens
  siRNA target sequence for PB1 (NM_018165.2,4564-4582).
gaggcctacctgaaataca

SEQ ID NO: 18881 - DNA, 19 bp, Homo sapiens
  siRNA target sequence for PB1 (NM_018165.2,4566-4584).
ggcctacctgaaatacatt

SEQ ID NO: 18882 - DNA, 19 bp, Homo sapiens
  siRNA target sequence for PB1 (NM_018165.2,4643-4661).
gaagacgcgacgtccattt

SEQ ID NO: 18883 - DNA, 19 bp, Homo sapiens
  siRNA target sequence for PB1 (NM_018165.2,4653-4671).
cgtccatttgtcgaaagaa

SEQ ID NO: 18884 - DNA, 19 bp, Homo sapiens
  siRNA target sequence for PB1 (NM_018165.2,4742-4760).
ggcgccttcgagatttgat

SEQ ID NO: 18885 - DNA, 19 bp, Homo sapiens
  siRNA target sequence for PB1 (NM_018313.2,1079-1097).
gcaagtattaccgtaataa

SEQ ID NO: 18886 - DNA, 19 bp, Homo sapiens
  siRNA target sequence for PB1 (NM_018313.2,1080-1098).
caagtattaccgtaataaa

SEQ ID NO: 18887 - DNA, 19 bp, Homo sapiens
  siRNA target sequence for PB1 (NM_018313.2,1083-1101).
gtattaccgtaataaaaga

SEQ ID NO: 18888 - DNA, 19 bp, Homo sapiens
  siRNA target sequence for RBP1L1 (NM_016374.4,479-497).
gatgagcctccctatttga

SEQ ID NO: 18889 - DNA, 19 bp, Homo sapiens
  siRNA target sequence for RBP1L1 (NM_016374.4,553-571).
caagacagcaaaaagactt

SEQ ID NO: 18890 - DNA, 19 bp, Homo sapiens
  siRNA target sequence for RBP1L1 (NM_016374.4,584-602).
gtgacatttagacatgatt

SEQ ID NO: 18891 - DNA, 19 bp, Homo sapiens
  siRNA target sequence for RBP1L1 (NM_016374.4,673-691).
gaatcttgatggtgcatat

SEQ ID NO: 18892 - DNA, 19 bp, Homo sapiens
  siRNA target sequence for RBP1L1 (NM_016374.4,893-911).
ggaagaagatctaatcata

SEQ ID NO: 18893 - DNA, 19 bp, Homo sapiens
  siRNA target sequence for RBP1L1 (NM_016374.4,894-912).
gaagaagatctaatcatat

SEQ ID NO: 18894 - DNA, 19 bp, Homo sapiens
  siRNA target sequence for RBP1L1 (NM_016374.4,980-998).
ctactaggcaaagttgtat

SEQ ID NO: 18895 - DNA, 19 bp, Homo sapiens
  siRNA target sequence for RBP1L1 (NM_016374.4,988-1006).
caaagttgtatgtgtagat

SEQ ID NO: 18896 - DNA, 19 bp, Homo sapiens
  siRNA target sequence for RBP1L1 (NM_016374.4,992-1010).
gttgtatgtgtagattaca

SEQ ID NO: 18897 - DNA, 19 bp, Homo sapiens
  siRNA target sequence for RBP1L1 (NM_016374.4,995-1013).
gtatgtgtagattacatta

SEQ ID NO: 18898 - DNA, 19 bp, Homo sapiens
  siRNA target sequence for RBP1L1 (NM_016374.4,1052-1070).
gtggtttgtcctgattgta

SEQ ID NO: 18899 - DNA, 19 bp, Homo sapiens
  siRNA target sequence for RBP1L1 (NM_016374.4,1073-1091).
gatgagattgctgtaaaaa

SEQ ID NO: 18900 - DNA, 19 bp, Homo sapiens
  siRNA target sequence for RBP1L1 (NM_016374.4,1082-1100).
gctgtaaaaaaggacaata

SEQ ID NO: 18901 - DNA, 19 bp, Homo sapiens
  siRNA target sequence for RBP1L1 (NM_016374.4,1151-1169).
gatgtccatgaaattacta

SEQ ID NO: 18902 - DNA, 19 bp, Homo sapiens
  siRNA target sequence for RBP1L1 (NM_016374.4,1253-1271).
gctaactggaagactgaat

SEQ ID NO: 18903 - DNA, 19 bp, Homo sapiens
  siRNA target sequence for RBP1L1 (NM_016374.4,1430-1448).
gatagaggtacacctatta

SEQ ID NO: 18904 - DNA, 19 bp, Homo sapiens
  siRNA target sequence for RBP1L1 (NM_016374.4,1434-1452).
gaggtacacctattaacaa

SEQ ID NO: 18905 - DNA, 19 bp, Homo sapiens
  siRNA target sequence for RBP1L1 (NM_016374.4,1457-1475).
cctgtacttggatatcgaa

SEQ ID NO: 18906 - DNA, 19 bp, Homo sapiens
  siRNA target sequence for RBP1L1 (NM_016374.4,1458-1476).
ctgtacttggatatcgaaa

SEQ ID NO: 18907 - DNA, 19 bp, Homo sapiens
  siRNA target sequence for RBP1L1 (NM_016374.4,1460-1478).
gtacttggatatcgaaatt

SEQ ID NO: 18908 - DNA, 19 bp, Homo sapiens
  siRNA target sequence for RBP1L1 (NM_016374.4,1463-1481).
cttggatatcgaaatttga

SEQ ID NO: 18909 - DNA, 19 bp, Homo sapiens
  siRNA target sequence for RBP1L1 (NM_016374.4,1593-1611).
cagctgcaggatacaatgt

SEQ ID NO: 18910 - DNA, 19 bp, Homo sapiens
  siRNA target sequence for RBP1L1 (NM_016374.4,1665-1683).
ccaacattgaatttcagat

SEQ ID NO: 18911 - DNA, 19 bp, Homo sapiens
  siRNA target sequence for RBP1L1 (NM_016374.4,1684-1702).
ggcattgccagagaaagtt

SEQ ID NO: 18912 - DNA, 19 bp, Homo sapiens
  siRNA target sequence for RBP1L1 (NM_016374.4,1686-1704).
cattgccagagaaagttgt

SEQ ID NO: 18913 - DNA, 19 bp, Homo sapiens
  siRNA target sequence for RBP1L1 (NM_016374.4,1720-1738).
ggagtgtgaaaatgtaaaa

SEQ ID NO: 18914 - DNA, 19 bp, Homo sapiens
  siRNA target sequence for RBP1L1 (NM_016374.4,1795-1813).
ggagaggaatataatacca

SEQ ID NO: 18915 - DNA, 19 bp, Homo sapiens
  siRNA target sequence for RBP1L1 (NM_016374.4,1796-1814).
gagaggaatataataccaa

SEQ ID NO: 18916 - DNA, 19 bp, Homo sapiens
  siRNA target sequence for RBP1L1 (NM_016374.4,1801-1819).
gaatataataccaagagaa

SEQ ID NO: 18917 - DNA, 19 bp, Homo sapiens
  siRNA target sequence for RBP1L1 (NM_016374.4,1865-1883).
ccctctctgggaagtaaaa

SEQ ID NO: 18918 - DNA, 19 bp, Homo sapiens
  siRNA target sequence for RBP1L1 (NM_016374.4,1866-1884).
cctctctgggaagtaaaaa

SEQ ID NO: 18919 - DNA, 19 bp, Homo sapiens
  siRNA target sequence for RBP1L1 (NM_016374.4,1895-1913).
gaatctatacctacacatt

SEQ ID NO: 18920 - DNA, 19 bp, Homo sapiens
  siRNA target sequence for RBP1L1 (NM_016374.4,1984-2002).
cacaactagggtagatgaa

SEQ ID NO: 18921 - DNA, 19 bp, Homo sapiens
  siRNA target sequence for RBP1L1 (NM_016374.4,1997-2015).
gatgaatccctcaacataa

SEQ ID NO: 18922 - DNA, 19 bp, Homo sapiens
  siRNA target sequence for RBP1L1 (NM_016374.4,2200-2218).
gtatggacgagggaaaaat

SEQ ID NO: 18923 - DNA, 19 bp, Homo sapiens
  siRNA target sequence for RBP1L1 (NM_016374.4,2231-2249).
gaagctagtattaaagatt

SEQ ID NO: 18924 - DNA, 19 bp, Homo sapiens
  siRNA target sequence for RBP1L1 (NM_016374.4,2261-2279).
ggtggagaggtcctttact

SEQ ID NO: 18925 - DNA, 19 bp, Homo sapiens
  siRNA target sequence for RBP1L1 (NM_016374.4,2273-2291).
ctttacttggtgcattact

SEQ ID NO: 18926 - DNA, 19 bp, Homo sapiens
  siRNA target sequence for RBP1L1 (NM_016374.4,2284-2302).
gcattactgcggatggaat

SEQ ID NO: 18927 - DNA, 19 bp, Homo sapiens
  siRNA target sequence for RBP1L1 (NM_016374.4,2292-2310).
gcggatggaatgtgagata

SEQ ID NO: 18928 - DNA, 19 bp, Homo sapiens
  siRNA target sequence for RBP1L1 (NM_016374.4,2343-2361).
gacctgctgataaaaatgt

SEQ ID NO: 18929 - DNA, 19 bp, Homo sapiens
  siRNA target sequence for RBP1L1 (NM_016374.4,2458-2476).
cttgtccaaaccaccattt

SEQ ID NO: 18930 - DNA, 19 bp, Homo sapiens
  siRNA target sequence for RBP1L1 (NM_016374.4,2481-2499).
caaatccatctcctgaaat

SEQ ID NO: 18931 - DNA, 19 bp, Homo sapiens
  siRNA target sequence for RBP1L1 (NM_016374.4,2486-2504).
ccatctcctgaaatggtat

SEQ ID NO: 18932 - DNA, 19 bp, Homo sapiens
  siRNA target sequence for RBP1L1 (NM_016374.4,2518-2536).
cactgatgccaaaaactct

SEQ ID NO: 18933 - DNA, 19 bp, Homo sapiens
  siRNA target sequence for RBP1L1 (NM_016374.4,2522-2540).
gatgccaaaaactctgata

SEQ ID NO: 18934 - DNA, 19 bp, Homo sapiens
  siRNA target sequence for RBP1L1 (NM_016374.4,2561-2579).
gaaattacttcgatcctta

SEQ ID NO: 18935 - DNA, 19 bp, Homo sapiens
  siRNA target sequence for RBP1L1 (NM_016374.4,2572-2590).
gatccttaatggacttcaa

SEQ ID NO: 18936 - DNA, 19 bp, Homo sapiens
  siRNA target sequence for RBP1L1 (NM_016374.4,2637-2655).
gtgctcaagacatggataa

SEQ ID NO: 18937 - DNA, 19 bp, Homo sapiens
  siRNA target sequence for RBP1L1 (NM_016374.4,2639-2657).
gctcaagacatggataata

SEQ ID NO: 18938 - DNA, 19 bp, Homo sapiens
  siRNA target sequence for RBP1L1 (NM_016374.4,2668-2686).
ggaatctaagattgatcat

SEQ ID NO: 18939 - DNA, 19 bp, Homo sapiens
  siRNA target sequence for RBP1L1 (NM_016374.4,2669-2687).
gaatctaagattgatcatt

SEQ ID NO: 18940 - DNA, 19 bp, Homo sapiens
  siRNA target sequence for RBP1L1 (NM_016374.4,2681-2699).
gatcatttgaccaacaaca

SEQ ID NO: 18941 - DNA, 19 bp, Homo sapiens
  siRNA target sequence for RBP1L1 (NM_016374.4,2700-2718).
gaaatgatcttatttcaaa

SEQ ID NO: 18942 - DNA, 19 bp, Homo sapiens
  siRNA target sequence for RBP1L1 (NM_016374.4,2765-2783).
gcagatttggtaatatcca

SEQ ID NO: 18943 - DNA, 19 bp, Homo sapiens
  siRNA target sequence for RBP1L1 (NM_016374.4,2825-2843).
gaagtattatccgaagata

SEQ ID NO: 18944 - DNA, 19 bp, Homo sapiens
  siRNA target sequence for RBP1L1 (NM_016374.4,2893-2911).
ggacacaacagataaatct

SEQ ID NO: 18945 - DNA, 19 bp, Homo sapiens
  siRNA target sequence for RBP1L1 (NM_016374.4,2894-2912).
gacacaacagataaatctt

SEQ ID NO: 18946 - DNA, 19 bp, Homo sapiens
  siRNA target sequence for RBP1L1 (NM_016374.4,2940-2958).
gaaggtattgcaatacaga

SEQ ID NO: 18947 - DNA, 19 bp, Homo sapiens
  siRNA target sequence for RBP1L1 (NM_016374.4,3078-3096).
caaagatgacaccaactaa

SEQ ID NO: 18948 - DNA, 19 bp, Homo sapiens
  siRNA target sequence for RBP1L1 (NM_016374.4,3082-3100).
gatgacaccaactaagaaa

SEQ ID NO: 18949 - DNA, 19 bp, Homo sapiens
  siRNA target sequence for RBP1L1 (NM_016374.4,3087-3105).
caccaactaagaaatacaa

SEQ ID NO: 18950 - DNA, 19 bp, Homo sapiens
  siRNA target sequence for RBP1L1 (NM_016374.4,3134-3152).
cggacaactggtttctatt

SEQ ID NO: 18951 - DNA, 19 bp, Homo sapiens
  siRNA target sequence for RBP1L1 (NM_016374.4,3136-3154).
gacaactggtttctattca

SEQ ID NO: 18952 - DNA, 19 bp, Homo sapiens
  siRNA target sequence for RBP1L1 (NM_016374.4,3167-3185).
gtggcagaaaaaaggatta

SEQ ID NO: 18953 - DNA, 19 bp, Homo sapiens
  siRNA target sequence for RBP1L1 (NM_016374.4,3222-3240).
gcagggccaaagatcgaaa

SEQ ID NO: 18954 - DNA, 19 bp, Homo sapiens
  siRNA target sequence for RBP1L1 (NM_016374.4,3223-3241).
cagggccaaagatcgaaaa

SEQ ID NO: 18955 - DNA, 19 bp, Homo sapiens
  siRNA target sequence for RBP1L1 (NM_016374.4,3226-3244).
ggccaaagatcgaaaagat

SEQ ID NO: 18956 - DNA, 19 bp, Homo sapiens
  siRNA target sequence for RBP1L1 (NM_016374.4,3262-3280).
gggacagtggcctaaaaaa

SEQ ID NO: 18957 - DNA, 19 bp, Homo sapiens
  siRNA target sequence for RBP1L1 (NM_016374.4,3399-3417).
gttcacccagtgtagaact

SEQ ID NO: 18958 - DNA, 19 bp, Homo sapiens
  siRNA target sequence for RBP1L1 (NM_016374.4,3404-3422).
cccagtgtagaactagaaa

SEQ ID NO: 18959 - DNA, 19 bp, Homo sapiens
  siRNA target sequence for RBP1L1 (NM_016374.4,3405-3423).
ccagtgtagaactagaaaa

SEQ ID NO: 18960 - DNA, 19 bp, Homo sapiens
  siRNA target sequence for RBP1L1 (NM_016374.4,3431-3449).
ccagtcaatgtcgatagta

SEQ ID NO: 18961 - DNA, 19 bp, Homo sapiens
  siRNA target sequence for RBP1L1 (NM_016374.4,3432-3450).
cagtcaatgtcgatagtaa

SEQ ID NO: 18962 - DNA, 19 bp, Homo sapiens
  siRNA target sequence for RBP1L1 (NM_016374.4,3442-3460).
cgatagtaaacccattgaa

SEQ ID NO: 18963 - DNA, 19 bp, Homo sapiens
  siRNA target sequence for RBP1L1 (NM_016374.4,3475-3493).
ggtcaatgacagaaaagca

SEQ ID NO: 18964 - DNA, 19 bp, Homo sapiens
  siRNA target sequence for RBP1L1 (NM_016374.4,3500-3518).
ccaagtagtggcagtaatt

SEQ ID NO: 18965 - DNA, 19 bp, Homo sapiens
  siRNA target sequence for RBP1L1 (NM_016374.4,3511-3529).
cagtaattcagtgctaaat

SEQ ID NO: 18966 - DNA, 19 bp, Homo sapiens
  siRNA target sequence for RBP1L1 (NM_016374.4,3554-3572).
ccttcatcagtcactgtaa

SEQ ID NO: 18967 - DNA, 19 bp, Homo sapiens
  siRNA target sequence for RBP1L1 (NM_016374.4,3584-3602).
cggcagcagtcttctgtaa

SEQ ID NO: 18968 - DNA, 19 bp, Homo sapiens
  siRNA target sequence for RBP1L1 (NM_016374.4,3635-3653).
gaggttcgaagtatcaaga

SEQ ID NO: 18969 - DNA, 19 bp, Homo sapiens
  siRNA target sequence for RBP1L1 (NM_016374.4,3641-3659).
cgaagtatcaagagtgaaa

SEQ ID NO: 18970 - DNA, 19 bp, Homo sapiens
  siRNA target sequence for RBP1L1 (NM_016374.4,3645-3663).
gtatcaagagtgaaactga

SEQ ID NO: 18971 - DNA, 19 bp, Homo sapiens
  siRNA target sequence for RBP1L1 (NM_016374.4,3669-3687).
caattgaggtggatagtgt

SEQ ID NO: 18972 - DNA, 19 bp, Homo sapiens
  siRNA target sequence for RBP1L1 (NM_016374.4,3710-3728).
cagtctgaagggaatagct

SEQ ID NO: 18973 - DNA, 19 bp, Homo sapiens
  siRNA target sequence for RBP1L1 (NM_016374.4,3752-3770).
gtgagctcaagcagtagta

SEQ ID NO: 18974 - DNA, 19 bp, Homo sapiens
  siRNA target sequence for RBP1L1 (NM_016374.4,3804-3822).
gtacaggtcagaaaagagt

SEQ ID NO: 18975 - DNA, 19 bp, Homo sapiens
  siRNA target sequence for RBP1L1 (NM_016374.4,3879-3897).
caacagtggtaaacaacaa

SEQ ID NO: 18976 - DNA, 19 bp, Homo sapiens
  siRNA target sequence for RBP1L1 (NM_016374.4,3904-3922).
gggaaaaggcacaaatagt

SEQ ID NO: 18977 - DNA, 19 bp, Homo sapiens
  siRNA target sequence for RBP1L1 (NM_016374.4,3966-3984).
gtcagccagtcaaatcagt

SEQ ID NO: 18978 - DNA, 19 bp, Homo sapiens
  siRNA target sequence for RBP1L1 (NM_016374.4,3983-4001).
gtttccactggaatgaagt

SEQ ID NO: 18979 - DNA, 19 bp, Homo sapiens
  siRNA target sequence for RBP1L1 (NM_016374.4,3992-4010).
ggaatgaagtctcatagta

SEQ ID NO: 18980 - DNA, 19 bp, Homo sapiens
  siRNA target sequence for RBP1L1 (NM_016374.4,4000-4018).
gtctcatagtaccaaatct

SEQ ID NO: 18981 - DNA, 19 bp, Homo sapiens
  siRNA target sequence for RBP1L1 (NM_016374.4,4078-4096).
caaggaacccagtaatcga

SEQ ID NO: 18982 - DNA, 19 bp, Homo sapiens
  siRNA target sequence for RBP1L1 (NM_016374.4,4081-4099).
ggaacccagtaatcgatta

SEQ ID NO: 18983 - DNA, 19 bp, Homo sapiens
  siRNA target sequence for RBP1L1 (NM_016374.4,4094-4112).
cgattacccaaagtttaca

SEQ ID NO: 18984 - DNA, 19 bp, Homo sapiens
  siRNA target sequence for RBP1L1 (NM_016374.4,4126-4144).
gatgtcggacctggaaaat

SEQ ID NO: 18985 - DNA, 19 bp, Homo sapiens
  siRNA target sequence for RBP1L1 (NM_016374.4,4152-4170).
gtgccgaacgcatcacaat

SEQ ID NO: 18986 - DNA, 19 bp, Homo sapiens
  siRNA target sequence for RBP1L1 (NM_016374.4,4155-4173).
ccgaacgcatcacaattct

SEQ ID NO: 18987 - DNA, 19 bp, Homo sapiens
  siRNA target sequence for RBP1L1 (NM_016374.4,4161-4179).
gcatcacaattcttcaaga

SEQ ID NO: 18988 - DNA, 19 bp, Homo sapiens
  siRNA target sequence for RBP1L1 (NM_016374.4,4162-4180).
catcacaattcttcaagaa

SEQ ID NO: 18989 - DNA, 19 bp, Homo sapiens
  siRNA target sequence for RBP1L1 (NM_016374.4,4241-4259).
cggaggagaaagcgtttaa

SEQ ID NO: 18990 - DNA, 19 bp, Homo sapiens
  siRNA target sequence for RBP1L1 (NM_016374.4,4363-4381).
gtccagcgcatcacaaaat

SEQ ID NO: 18991 - DNA, 19 bp, Homo sapiens
  siRNA target sequence for RBP1L1 (NM_016374.4,4366-4384).
cagcgcatcacaaaatgga

SEQ ID NO: 18992 - DNA, 19 bp, Homo sapiens
  siRNA target sequence for RBP1L1 (NM_031371.2,2046-2064).
ctggatacgatgaatggat

SEQ ID NO: 18993 - DNA, 19 bp, Homo sapiens
  siRNA target sequence for SMARCC1 (NM_003074.2,194-212).
cgcaggcctagctgtttat

SEQ ID NO: 18994 - DNA, 19 bp, Homo sapiens
  siRNA target sequence for SMARCC1 (NM_003074.2,324-342).
gcggatgctcctaccaata

SEQ ID NO: 18995 - DNA, 19 bp, Homo sapiens
  siRNA target sequence for SMARCC1 (NM_003074.2,325-343).
cggatgctcctaccaataa

SEQ ID NO: 18996 - DNA, 19 bp, Homo sapiens
  siRNA target sequence for SMARCC1 (NM_003074.2,327-345).
gatgctcctaccaataaaa

SEQ ID NO: 18997 - DNA, 19 bp, Homo sapiens
  siRNA target sequence for SMARCC1 (NM_003074.2,425-443).
caaactccctgcaaagtgt

SEQ ID NO: 18998 - DNA, 19 bp, Homo sapiens
  siRNA target sequence for SMARCC1 (NM_003074.2,483-501).
cttggggctgcttacaagt

SEQ ID NO: 18999 - DNA, 19 bp, Homo sapiens
  siRNA target sequence for SMARCC1 (NM_003074.2,486-504).
ggggctgcttacaagtata

SEQ ID NO: 19000 - DNA, 19 bp, Homo sapiens
  siRNA target sequence for SMARCC1 (NM_003074.2,488-506).
ggctgcttacaagtataaa

SEQ ID NO: 19001 - DNA, 19 bp, Homo sapiens
  siRNA target sequence for SMARCC1 (NM_003074.2,544-562).
catctcgaatggatcgtaa

SEQ ID NO: 19002 - DNA, 19 bp, Homo sapiens
  siRNA target sequence for SMARCC1 (NM_003074.2,547-565).
ctcgaatggatcgtaatgt

SEQ ID NO: 19003 - DNA, 19 bp, Homo sapiens
  siRNA target sequence for SMARCC1 (NM_003074.2,597-615).
gtgcagaacaattgtttga

SEQ ID NO: 19004 - DNA, 19 bp, Homo sapiens
  siRNA target sequence for SMARCC1 (NM_003074.2,656-674).
gttggctaacaaattgaaa

SEQ ID NO: 19005 - DNA, 19 bp, Homo sapiens
  siRNA target sequence for SMARCC1 (NM_003074.2,687-705).
cgacatcagggaacattta

SEQ ID NO: 19006 - DNA, 19 bp, Homo sapiens
  siRNA target sequence for SMARCC1 (NM_003074.2,697-715).
gaacatttacggatgagaa

SEQ ID NO: 19007 - DNA, 19 bp, Homo sapiens
  siRNA target sequence for SMARCC1 (NM_003074.2,778-796).
gaccggtgatgagaaaaga

SEQ ID NO: 19008 - DNA, 19 bp, Homo sapiens
  siRNA target sequence for SMARCC1 (NM_003074.2,828-846).
ccagacagctatgatactt

SEQ ID NO: 19009 - DNA, 19 bp, Homo sapiens
  siRNA target sequence for SMARCC1 (NM_003074.2,840-858).
gatacttgggtccatagta

SEQ ID NO: 19010 - DNA, 19 bp, Homo sapiens
  siRNA target sequence for SMARCC1 (NM_003074.2,844-862).
cttgggtccatagtaatga

SEQ ID NO: 19011 - DNA, 19 bp, Homo sapiens
  siRNA target sequence for SMARCC1 (NM_003074.2,848-866).
ggtccatagtaatgatgtt

SEQ ID NO: 19012 - DNA, 19 bp, Homo sapiens
  siRNA target sequence for SMARCC1 (NM_003074.2,911-929).
ggttcatgtgaaatggatt

SEQ ID NO: 19013 - DNA, 19 bp, Homo sapiens
  siRNA target sequence for SMARCC1 (NM_003074.2,912-930).
gttcatgtgaaatggattt

SEQ ID NO: 19014 - DNA, 19 bp, Homo sapiens
  siRNA target sequence for SMARCC1 (NM_003074.2,925-943).
ggattttggacactgatat

SEQ ID NO: 19015 - DNA, 19 bp, Homo sapiens
  siRNA target sequence for SMARCC1 (NM_003074.2,992-1010).
gaagcctgtgagttttcgt

SEQ ID NO: 19016 - DNA, 19 bp, Homo sapiens
  siRNA target sequence for SMARCC1 (NM_003074.2,1013-1031).
gcggatttcaaccaagaat

SEQ ID NO: 19017 - DNA, 19 bp, Homo sapiens
  siRNA target sequence for SMARCC1 (NM_003074.2,1015-1033).
ggatttcaaccaagaatga

SEQ ID NO: 19018 - DNA, 19 bp, Homo sapiens
  siRNA target sequence for SMARCC1 (NM_003074.2,1016-1034).
gatttcaaccaagaatgaa

SEQ ID NO: 19019 - DNA, 19 bp, Homo sapiens
  siRNA target sequence for SMARCC1 (NM_003074.2,1083-1101).
gctcgaaagaggaaacatt

SEQ ID NO: 19020 - DNA, 19 bp, Homo sapiens
  siRNA target sequence for SMARCC1 (NM_003074.2,1178-1196).
gaagcgcagaagtcagaaa

SEQ ID NO: 19021 - DNA, 19 bp, Homo sapiens
  siRNA target sequence for SMARCC1 (NM_003074.2,1212-1230).
gaagatctaaccaaggata

SEQ ID NO: 19022 - DNA, 19 bp, Homo sapiens
  siRNA target sequence for SMARCC1 (NM_003074.2,1243-1261).
cacctgtacccaatataga

SEQ ID NO: 19023 - DNA, 19 bp, Homo sapiens
  siRNA target sequence for SMARCC1 (NM_003074.2,1246-1264).
ctgtacccaatatagaaga

SEQ ID NO: 19024 - DNA, 19 bp, Homo sapiens
  siRNA target sequence for SMARCC1 (NM_003074.2,1275-1293).
cccaaaaatgtgaacctaa

SEQ ID NO: 19025 - DNA, 19 bp, Homo sapiens
  siRNA target sequence for SMARCC1 (NM_003074.2,1284-1302).
gtgaacctaaagaaagata

SEQ ID NO: 19026 - DNA, 19 bp, Homo sapiens
  siRNA target sequence for SMARCC1 (NM_003074.2,1286-1304).
gaacctaaagaaagatagt

SEQ ID NO: 19027 - DNA, 19 bp, Homo sapiens
  siRNA target sequence for SMARCC1 (NM_003074.2,1289-1307).
cctaaagaaagatagtgaa

SEQ ID NO: 19028 - DNA, 19 bp, Homo sapiens
  siRNA target sequence for SMARCC1 (NM_003074.2,1327-1345).
gaactgtagcggatctaga

SEQ ID NO: 19029 - DNA, 19 bp, Homo sapiens
  siRNA target sequence for SMARCC1 (NM_003074.2,1330-1348).
ctgtagcggatctagatga

SEQ ID NO: 19030 - DNA, 19 bp, Homo sapiens
  siRNA target sequence for SMARCC1 (NM_003074.2,1422-1440).
gttgaccttggggaagata

SEQ ID NO: 19031 - DNA, 19 bp, Homo sapiens
  siRNA target sequence for SMARCC1 (NM_003074.2,1449-1467).
gagcagaccaatcacatta

SEQ ID NO: 19032 - DNA, 19 bp, Homo sapiens
  siRNA target sequence for SMARCC1 (NM_003074.2,1451-1469).
gcagaccaatcacattatt

SEQ ID NO: 19033 - DNA, 19 bp, Homo sapiens
  siRNA target sequence for SMARCC1 (NM_003074.2,1454-1472).
gaccaatcacattattatt

SEQ ID NO: 19034 - DNA, 19 bp, Homo sapiens
  siRNA target sequence for SMARCC1 (NM_003074.2,1457-1475).
caatcacattattattcct

SEQ ID NO: 19035 - DNA, 19 bp, Homo sapiens
  siRNA target sequence for SMARCC1 (NM_003074.2,1482-1500).
gcatcatggtttgattata

SEQ ID NO: 19036 - DNA, 19 bp, Homo sapiens
  siRNA target sequence for SMARCC1 (NM_003074.2,1483-1501).
catcatggtttgattataa

SEQ ID NO: 19037 - DNA, 19 bp, Homo sapiens
  siRNA target sequence for SMARCC1 (NM_003074.2,1622-1640).
cccccaagagtatttaact

SEQ ID NO: 19038 - DNA, 19 bp, Homo sapiens
  siRNA target sequence for SMARCC1 (NM_003074.2,1623-1641).
ccccaagagtatttaacta

SEQ ID NO: 19039 - DNA, 19 bp, Homo sapiens
  siRNA target sequence for SMARCC1 (NM_003074.2,1709-1727).
gcagtggggactcgttaat

SEQ ID NO: 19040 - DNA, 19 bp, Homo sapiens
  siRNA target sequence for SMARCC1 (NM_003074.2,1710-1728).
cagtggggactcgttaatt

SEQ ID NO: 19041 - DNA, 19 bp, Homo sapiens
  siRNA target sequence for SMARCC1 (NM_003074.2,1714-1732).
ggggactcgttaattacca

SEQ ID NO: 19042 - DNA, 19 bp, Homo sapiens
  siRNA target sequence for SMARCC1 (NM_003074.2,1715-1733).
gggactcgttaattaccaa

SEQ ID NO: 19043 - DNA, 19 bp, Homo sapiens
  siRNA target sequence for SMARCC1 (NM_003074.2,1854-1872).
gctcaacagatgctaaatt

SEQ ID NO: 19044 - DNA, 19 bp, Homo sapiens
  siRNA target sequence for SMARCC1 (NM_003074.2,1918-1936).
gtctccgtactgacattta

SEQ ID NO: 19045 - DNA, 19 bp, Homo sapiens
  siRNA target sequence for SMARCC1 (NM_003074.2,1920-1938).
ctccgtactgacatttact

SEQ ID NO: 19046 - DNA, 19 bp, Homo sapiens
  siRNA target sequence for SMARCC1 (NM_003074.2,2025-2043).
gagatgtacaaggatgatt

SEQ ID NO: 19047 - DNA, 19 bp, Homo sapiens
  siRNA target sequence for SMARCC1 (NM_003074.2,2048-2066).
caaagtgtcggaacatgtt

SEQ ID NO: 19048 - DNA, 19 bp, Homo sapiens
  siRNA target sequence for SMARCC1 (NM_003074.2,2121-2139).
gacccataccttgagaatt

SEQ ID NO: 19049 - DNA, 19 bp, Homo sapiens
  siRNA target sequence for SMARCC1 (NM_003074.2,2123-2141).
cccataccttgagaattca

SEQ ID NO: 19050 - DNA, 19 bp, Homo sapiens
  siRNA target sequence for SMARCC1 (NM_003074.2,2303-2321).
ggtaccactggaattggtt

SEQ ID NO: 19051 - DNA, 19 bp, Homo sapiens
  siRNA target sequence for SMARCC1 (NM_003074.2,2326-2344).
ctcatgtcaagaaagtaca

SEQ ID NO: 19052 - DNA, 19 bp, Homo sapiens
  siRNA target sequence for SMARCC1 (NM_003074.2,2589-2607).
gtgagtgaggataccaaat

SEQ ID NO: 19053 - DNA, 19 bp, Homo sapiens
  siRNA target sequence for SMARCC1 (NM_003074.2,2591-2609).
gagtgaggataccaaatca

SEQ ID NO: 19054 - DNA, 19 bp, Homo sapiens
  siRNA target sequence for SMARCC1 (NM_003074.2,2593-2611).
gtgaggataccaaatcaga

SEQ ID NO: 19055 - DNA, 19 bp, Homo sapiens
  siRNA target sequence for SMARCC1 (NM_003074.2,2637-2655).
gaactcactgatacatgta

SEQ ID NO: 19056 - DNA, 19 bp, Homo sapiens
  siRNA target sequence for SMARCC1 (NM_003074.2,2846-2864).
caaacttcgacattttgaa

SEQ ID NO: 19057 - DNA, 19 bp, Homo sapiens
  siRNA target sequence for SMARCC1 (NM_003074.2,2914-2932).
ggcagcagttgcttactga

SEQ ID NO: 19058 - DNA, 19 bp, Homo sapiens
  siRNA target sequence for SMARCC1 (NM_003074.2,2915-2933).
gcagcagttgcttactgaa

SEQ ID NO: 19059 - DNA, 19 bp, Homo sapiens
  siRNA target sequence for SMARCC1 (NM_003074.2,2925-2943).
cttactgaacgccaaaact

SEQ ID NO: 19060 - DNA, 19 bp, Homo sapiens
  siRNA target sequence for SMARCC1 (NM_003074.2,2960-2978).
gaagtatgctgaattacga

SEQ ID NO: 19061 - DNA, 19 bp, Homo sapiens
  siRNA target sequence for SMARCC1 (NM_003074.2,3085-3103).
gcatgatgcctcatcaaca

SEQ ID NO: 19062 - DNA, 19 bp, Homo sapiens
  siRNA target sequence for SMARCC1 (NM_003074.2,3203-3221).
catgccaggccgcatgatt

SEQ ID NO: 19063 - DNA, 19 bp, Homo sapiens
  siRNA target sequence for SMARCC1 (NM_003074.2,3282-3300).
ccaatgccaggaaacatct

SEQ ID NO: 19064 - DNA, 19 bp, Homo sapiens
  siRNA target sequence for SMARCC2 (NM_003075.2,117-135).
ctgtggctcggcaagaact

SEQ ID NO: 19065 - DNA, 19 bp, Homo sapiens
  siRNA target sequence for SMARCC2 (NM_003075.2,181-199).
ctagcctggttgtacagtt

SEQ ID NO: 19066 - DNA, 19 bp, Homo sapiens
  siRNA target sequence for SMARCC2 (NM_003075.2,189-207).
gttgtacagttgctacaat

SEQ ID NO: 19067 - DNA, 19 bp, Homo sapiens
  siRNA target sequence for SMARCC2 (NM_003075.2,238-256).
gcaatgcaccgctcactaa

SEQ ID NO: 19068 - DNA, 19 bp, Homo sapiens
  siRNA target sequence for SMARCC2 (NM_003075.2,239-257).
caatgcaccgctcactaaa

SEQ ID NO: 19069 - DNA, 19 bp, Homo sapiens
  siRNA target sequence for SMARCC2 (NM_003075.2,260-278).
gccgatcaaatgtttccta

SEQ ID NO: 19070 - DNA, 19 bp, Homo sapiens
  siRNA target sequence for SMARCC2 (NM_003075.2,295-313).
gctccttgtgccacattct

SEQ ID NO: 19071 - DNA, 19 bp, Homo sapiens
  siRNA target sequence for SMARCC2 (NM_003075.2,312-330).
cttgcagctgcctacaaat

SEQ ID NO: 19072 - DNA, 19 bp, Homo sapiens
  siRNA target sequence for SMARCC2 (NM_003075.2,318-336).
gctgcctacaaattcaaga

SEQ ID NO: 19073 - DNA, 19 bp, Homo sapiens
  siRNA target sequence for SMARCC2 (NM_003075.2,439-457).
gcctgtctcgacctaacat

SEQ ID NO: 19074 - DNA, 19 bp, Homo sapiens
  siRNA target sequence for SMARCC2 (NM_003075.2,440-458).
cctgtctcgacctaacatt

SEQ ID NO: 19075 - DNA, 19 bp, Homo sapiens
  siRNA target sequence for SMARCC2 (NM_003075.2,441-459).
ctgtctcgacctaacattt

SEQ ID NO: 19076 - DNA, 19 bp, Homo sapiens
  siRNA target sequence for SMARCC2 (NM_003075.2,445-463).
ctcgacctaacatttttct

SEQ ID NO: 19077 - DNA, 19 bp, Homo sapiens
  siRNA target sequence for SMARCC2 (NM_003075.2,481-499).
ccaaactactagggaaatt

SEQ ID NO: 19078 - DNA, 19 bp, Homo sapiens
  siRNA target sequence for SMARCC2 (NM_003075.2,482-500).
caaactactagggaaatta

SEQ ID NO: 19079 - DNA, 19 bp, Homo sapiens
  siRNA target sequence for SMARCC2 (NM_003075.2,526-544).
gaacagtcactgaggataa

SEQ ID NO: 19080 - DNA, 19 bp, Homo sapiens
  siRNA target sequence for SMARCC2 (NM_003075.2,603-621).
gtacgaccagtcatgaaga

SEQ ID NO: 19081 - DNA, 19 bp, Homo sapiens
  siRNA target sequence for SMARCC2 (NM_003075.2,649-667).
gctactatcctgacagtta

SEQ ID NO: 19082 - DNA, 19 bp, Homo sapiens
  siRNA target sequence for SMARCC2 (NM_003075.2,676-694).
ggatcccagcgagtgaaat

SEQ ID NO: 19083 - DNA, 19 bp, Homo sapiens
  siRNA target sequence for SMARCC2 (NM_003075.2,677-695).
gatcccagcgagtgaaatt

SEQ ID NO: 19084 - DNA, 19 bp, Homo sapiens
  siRNA target sequence for SMARCC2 (NM_003075.2,717-735).
ccaactcctgagaaaccta

SEQ ID NO: 19085 - DNA, 19 bp, Homo sapiens
  siRNA target sequence for SMARCC2 (NM_003075.2,889-907).
cagatcgacgggacaagaa

SEQ ID NO: 19086 - DNA, 19 bp, Homo sapiens
  siRNA target sequence for SMARCC2 (NM_003075.2,1070-1088).
ctcaccagtccccaatgta

SEQ ID NO: 19087 - DNA, 19 bp, Homo sapiens
  siRNA target sequence for SMARCC2 (NM_003075.2,1072-1090).
caccagtccccaatgtaga

SEQ ID NO: 19088 - DNA, 19 bp, Homo sapiens
  siRNA target sequence for SMARCC2 (NM_003075.2,1323-1341).
gcctggtttgactacaata

SEQ ID NO: 19089 - DNA, 19 bp, Homo sapiens
  siRNA target sequence for SMARCC2 (NM_003075.2,1325-1343).
ctggtttgactacaatagt

SEQ ID NO: 19090 - DNA, 19 bp, Homo sapiens
  siRNA target sequence for SMARCC2 (NM_003075.2,1418-1436).
cctggcctatcgaaacttt

SEQ ID NO: 19091 - DNA, 19 bp, Homo sapiens
  siRNA target sequence for SMARCC2 (NM_003075.2,1419-1437).
ctggcctatcgaaacttta

SEQ ID NO: 19092 - DNA, 19 bp, Homo sapiens
  siRNA target sequence for SMARCC2 (NM_003075.2,1457-1475).
gaacccccaagagtatctt

SEQ ID NO: 19093 - DNA, 19 bp, Homo sapiens
  siRNA target sequence for SMARCC2 (NM_003075.2,1545-1563).
gaacagtggggtcttatta

SEQ ID NO: 19094 - DNA, 19 bp, Homo sapiens
  siRNA target sequence for SMARCC2 (NM_003075.2,1548-1566).
cagtggggtcttattaact

SEQ ID NO: 19095 - DNA, 19 bp, Homo sapiens
  siRNA target sequence for SMARCC2 (NM_003075.2,1687-1705).
cctctgcttcccaacaaat

SEQ ID NO: 19096 - DNA, 19 bp, Homo sapiens
  siRNA target sequence for SMARCC2 (NM_003075.2,1690-1708).
ctgcttcccaacaaatgct

SEQ ID NO: 19097 - DNA, 19 bp, Homo sapiens
  siRNA target sequence for SMARCC2 (NM_003075.2,1759-1777).
ggctgcgcacagacatgta

SEQ ID NO: 19098 - DNA, 19 bp, Homo sapiens
  siRNA target sequence for SMARCC2 (NM_003075.2,1929-1947).
gacgagtgcatcttgcatt

SEQ ID NO: 19099 - DNA, 19 bp, Homo sapiens
  siRNA target sequence for SMARCC2 (NM_003075.2,1931-1949).
cgagtgcatcttgcatttt

SEQ ID NO: 19100 - DNA, 19 bp, Homo sapiens
  siRNA target sequence for SMARCC2 (NM_003075.2,2782-2800).
gagaagcactggagtatca

SEQ ID NO: 19101 - DNA, 19 bp, Homo sapiens
  siRNA target sequence for SMARCC2 (NM_003075.2,3180-3198).
ccgttccccaaccaacaaa

SEQ ID NO: 19102 - DNA, 19 bp, Homo sapiens
  siRNA target sequence for SMARCC2 (NM_003075.2,3195-3213).
caaactcctccctcaatga

SEQ ID NO: 19103 - DNA, 19 bp, Homo sapiens
  siRNA target sequence for SMARCC2 (NM_003075.2,3320-3338).
catcccatttggtagtcta

SEQ ID NO: 19104 - DNA, 19 bp, Homo sapiens
  siRNA target sequence for SMARCC2 (NM_003075.2,3336-3354).
ctagctgactccatcagta

SEQ ID NO: 19105 - DNA, 19 bp, Homo sapiens
  siRNA target sequence for SMARCC2 (NM_003075.2,3446-3464).
catggcgaaccctctacat

SEQ ID NO: 19106 - DNA, 19 bp, Homo sapiens
  siRNA target sequence for SMARCE1 (NM_003079.3,285-303).
ctggtatcacgattccaaa

SEQ ID NO: 19107 - DNA, 19 bp, Homo sapiens
  siRNA target sequence for SMARCE1 (NM_003079.3,668-686).
gatgatggcttttcaatga

SEQ ID NO: 19108 - DNA, 19 bp, Homo sapiens
  siRNA target sequence for SMARCE1 (NM_003079.3,906-924).
gcacagattcatttaacaa

SEQ ID NO: 19109 - DNA, 19 bp, Homo sapiens
  siRNA target sequence for SMARCE1 (NM_003079.3,1262-1280).
ggaaccagtgatagtaaca

SEQ ID NO: 19110 - DNA, 19 bp, Homo sapiens
  siRNA target sequence for SUV39H1 (NM_003173.1,136-154).
cctgccctcggtatctcta

SEQ ID NO: 19111 - DNA, 19 bp, Homo sapiens
  siRNA target sequence for SUV39H1 (NM_003173.1,137-155).
ctgccctcggtatctctaa

SEQ ID NO: 19112 - DNA, 19 bp, Homo sapiens
  siRNA target sequence for SUV39H1 (NM_003173.1,139-157).
gccctcggtatctctaaga

SEQ ID NO: 19113 - DNA, 19 bp, Homo sapiens
  siRNA target sequence for SUV39H1 (NM_003173.1,152-170).
ctaagaggaacctctatga

SEQ ID NO: 19114 - DNA, 19 bp, Homo sapiens
  siRNA target sequence for SUV39H1 (NM_003173.1,159-177).
gaacctctatgactttgaa

SEQ ID NO: 19115 - DNA, 19 bp, Homo sapiens
  siRNA target sequence for SUV39H1 (NM_003173.1,181-199).
gagtacctgtgcgattaca

SEQ ID NO: 19116 - DNA, 19 bp, Homo sapiens
  siRNA target sequence for SUV39H1 (NM_003173.1,187-205).
ctgtgcgattacaagaaga

SEQ ID NO: 19117 - DNA, 19 bp, Homo sapiens
  siRNA target sequence for SUV39H1 (NM_003173.1,209-227).
gcgaacaggaatattacct

SEQ ID NO: 19118 - DNA, 19 bp, Homo sapiens
  siRNA target sequence for SUV39H1 (NM_003173.1,231-249).
gaaatggcgtggatatcca

SEQ ID NO: 19119 - DNA, 19 bp, Homo sapiens
  siRNA target sequence for SUV39H1 (NM_003173.1,268-286).
gagccacggcagaatctca

SEQ ID NO: 19120 - DNA, 19 bp, Homo sapiens
  siRNA target sequence for SUV39H1 (NM_003173.1,343-361).
cggcaccaccggtcaaaga

SEQ ID NO: 19121 - DNA, 19 bp, Homo sapiens
  siRNA target sequence for SUV39H1 (NM_003173.1,473-491).
gacgcatcactgtagagaa

SEQ ID NO: 19122 - DNA, 19 bp, Homo sapiens
  siRNA target sequence for SUV39H1 (NM_003173.1,636-654).
ggcgtcactgcacaagttt

SEQ ID NO: 19123 - DNA, 19 bp, Homo sapiens
  siRNA target sequence for SUV39H1 (NM_003173.1,732-750).
ctatgactgcccaaatcgt

SEQ ID NO: 19124 - DNA, 19 bp, Homo sapiens
  siRNA target sequence for SUV39H1 (NM_003173.1,972-990).
cgtggatgccgcctactat

SEQ ID NO: 19125 - DNA, 19 bp, Homo sapiens
  siRNA target sequence for SUV39H1 (NM_003173.1,982-1000).
gcctactatggcaacatct

SEQ ID NO: 19126 - DNA, 19 bp, Homo sapiens
  siRNA target sequence for SUV39H1 (NM_003173.1,992-1010).
gcaacatctcccactttgt

SEQ ID NO: 19127 - DNA, 19 bp, Homo sapiens
  siRNA target sequence for SUV39H1 (NM_003173.1,1038-1056).
ggtgtacaacgtcttcata

SEQ ID NO: 19128 - DNA, 19 bp, Homo sapiens
  siRNA target sequence for SUV39H1 (NM_003173.1,1120-1138).
gaggagctcacctttgatt

SEQ ID NO: 19129 - DNA, 19 bp, Homo sapiens
  siRNA target sequence for SUV39H1 (NM_003173.1,1176-1194).
ccgcatggactccaacttt

SEQ ID NO: 19130 - DNA, 19 bp, Homo sapiens
  siRNA target sequence for SUV39H1 (NM_003173.1,1224-1242).
gaagcgggtccgtattgaa

SEQ ID NO: 19131 - DNA, 19 bp, Homo sapiens
  siRNA target sequence for SUV39H1 (NM_003173.1,1229-1247).
gggtccgtattgaatgcaa

SEQ ID NO: 19132 - DNA, 19 bp, Homo sapiens
  siRNA target sequence for SUV39H2 (NM_024670.3,259-277).
ggatggccagattctacaa

SEQ ID NO: 19133 - DNA, 19 bp, Homo sapiens
  siRNA target sequence for SUV39H2 (NM_024670.3,311-329).
cgttactgcttcagcaatt

SEQ ID NO: 19134 - DNA, 19 bp, Homo sapiens
  siRNA target sequence for SUV39H2 (NM_024670.3,332-350).
ctaatgacaagcataatta

SEQ ID NO: 19135 - DNA, 19 bp, Homo sapiens
  siRNA target sequence for SUV39H2 (NM_024670.3,413-431).
ctgccattgctgagtacat

SEQ ID NO: 19136 - DNA, 19 bp, Homo sapiens
  siRNA target sequence for SUV39H2 (NM_024670.3,545-563).
caccttcagacttctatta

SEQ ID NO: 19137 - DNA, 19 bp, Homo sapiens
  siRNA target sequence for SUV39H2 (NM_024670.3,586-604).
cctggaatcagcttagtca

SEQ ID NO: 19138 - DNA, 19 bp, Homo sapiens
  siRNA target sequence for SUV39H2 (NM_024670.3,587-605).
ctggaatcagcttagtcaa

SEQ ID NO: 19139 - DNA, 19 bp, Homo sapiens
  siRNA target sequence for SUV39H2 (NM_024670.3,670-688).
ggagttcttttggcttata

SEQ ID NO: 19140 - DNA, 19 bp, Homo sapiens
  siRNA target sequence for SUV39H2 (NM_024670.3,673-691).
gttcttttggcttataata

SEQ ID NO: 19141 - DNA, 19 bp, Homo sapiens
  siRNA target sequence for SUV39H2 (NM_024670.3,716-734).
ctggtactcccatctatga

SEQ ID NO: 19142 - DNA, 19 bp, Homo sapiens
  siRNA target sequence for SUV39H2 (NM_024670.3,718-736).
ggtactcccatctatgaat

SEQ ID NO: 19143 - DNA, 19 bp, Homo sapiens
  siRNA target sequence for SUV39H2 (NM_024670.3,761-779).
ctgattgtcccaataggat

SEQ ID NO: 19144 - DNA, 19 bp, Homo sapiens
  siRNA target sequence for SUV39H2 (NM_024670.3,767-785).
gtcccaataggattgtaca

SEQ ID NO: 19145 - DNA, 19 bp, Homo sapiens
  siRNA target sequence for SUV39H2 (NM_024670.3,769-787).
cccaataggattgtacaaa

SEQ ID NO: 19146 - DNA, 19 bp, Homo sapiens
  siRNA target sequence for SUV39H2 (NM_024670.3,810-828).
catctttcgaactagcaat

SEQ ID NO: 19147 - DNA, 19 bp, Homo sapiens
  siRNA target sequence for SUV39H2 (NM_024670.3,830-848).
gacgtggctggggtgtaaa

SEQ ID NO: 19148 - DNA, 19 bp, Homo sapiens
  siRNA target sequence for SUV39H2 (NM_024670.3,842-860).
gtgtaaagacccttgtgaa

SEQ ID NO: 19149 - DNA, 19 bp, Homo sapiens
  siRNA target sequence for SUV39H2 (NM_024670.3,892-910).
gttggagaggtaatcacaa

SEQ ID NO: 19150 - DNA, 19 bp, Homo sapiens
  siRNA target sequence for SUV39H2 (NM_024670.3,900-918).
ggtaatcacaagtgaagaa

SEQ ID NO: 19151 - DNA, 19 bp, Homo sapiens
  siRNA target sequence for SUV39H2 (NM_024670.3,926-944).
gacgaggacagttctatga

SEQ ID NO: 19152 - DNA, 19 bp, Homo sapiens
  siRNA target sequence for SUV39H2 (NM_024670.3,951-969).
gggaatcacgtatctcttt

SEQ ID NO: 19153 - DNA, 19 bp, Homo sapiens
  siRNA target sequence for SUV39H2 (NM_024670.3,953-971).
gaatcacgtatctctttga

SEQ ID NO: 19154 - DNA, 19 bp, Homo sapiens
  siRNA target sequence for SUV39H2 (NM_024670.3,1009-1027).
gctcgatacggcaatgtgt

SEQ ID NO: 19155 - DNA, 19 bp, Homo sapiens
  siRNA target sequence for SUV39H2 (NM_024670.3,1017-1035).
cggcaatgtgtctcatttt

SEQ ID NO: 19156 - DNA, 19 bp, Homo sapiens
  siRNA target sequence for SUV39H2 (NM_024670.3,1063-1081).
caggtgttcaatgttttca

SEQ ID NO: 19157 - DNA, 19 bp, Homo sapiens
  siRNA target sequence for SUV39H2 (NM_024670.3,1099-1117).
cgtcttccccgaatagcat

SEQ ID NO: 19158 - DNA, 19 bp, Homo sapiens
  siRNA target sequence for SUV39H2 (NM_024670.3,1100-1118).
gtcttccccgaatagcatt

SEQ ID NO: 19159 - DNA, 19 bp, Homo sapiens
  siRNA target sequence for SUV39H2 (NM_024670.3,1152-1170).
gctgacttttgattatcaa

SEQ ID NO: 19160 - DNA, 19 bp, Homo sapiens
  siRNA target sequence for SUV39H2 (NM_024670.3,1153-1171).
ctgacttttgattatcaaa

SEQ ID NO: 19161 - DNA, 19 bp, Homo sapiens
  siRNA target sequence for SUV39H2 (NM_024670.3,1177-1195).
ggttctggagatatatctt

SEQ ID NO: 19162 - DNA, 19 bp, Homo sapiens
  siRNA target sequence for SUV39H2 (NM_024670.3,1229-1247).
gggtcagaacagtatgtaa

SEQ ID NO: 19163 - DNA, 19 bp, Homo sapiens
  siRNA target sequence for BRCA2 (NM_000059.1,292-310).
gcagatttaggaccaataa

SEQ ID NO: 19164 - DNA, 19 bp, Homo sapiens
  siRNA target sequence for BRCA2 (NM_000059.1,301-319).
ggaccaataagtcttaatt

SEQ ID NO: 19165 - DNA, 19 bp, Homo sapiens
  siRNA target sequence for BRCA2 (NM_000059.1,304-322).
ccaataagtcttaattggt

SEQ ID NO: 19166 - DNA, 19 bp, Homo sapiens
  siRNA target sequence for BRCA2 (NM_000059.1,311-329).
gtcttaattggtttgaaga

SEQ ID NO: 19167 - DNA, 19 bp, Homo sapiens
  siRNA target sequence for BRCA2 (NM_000059.1,340-358).
gaagctccaccctataatt

SEQ ID NO: 19168 - DNA, 19 bp, Homo sapiens
  siRNA target sequence for BRCA2 (NM_000059.1,393-411).
caattacgaaccaaaccta

SEQ ID NO: 19169 - DNA, 19 bp, Homo sapiens
  siRNA target sequence for BRCA2 (NM_000059.1,422-440).
cacaaaggaaaccatctta

SEQ ID NO: 19170 - DNA, 19 bp, Homo sapiens
  siRNA target sequence for BRCA2 (NM_000059.1,455-473).
caactccaataatattcaa

SEQ ID NO: 19171 - DNA, 19 bp, Homo sapiens
  siRNA target sequence for BRCA2 (NM_000059.1,458-476).
ctccaataatattcaaaga

SEQ ID NO: 19172 - DNA, 19 bp, Homo sapiens
  siRNA target sequence for BRCA2 (NM_000059.1,553-571).
gttcccaatagtagacata

SEQ ID NO: 19173 - DNA, 19 bp, Homo sapiens
  siRNA target sequence for BRCA2 (NM_000059.1,628-646).
cttctaaattcttgtctta

SEQ ID NO: 19174 - DNA, 19 bp, Homo sapiens
  siRNA target sequence for BRCA2 (NM_000059.1,664-682).
ctacaatgtacacatgtaa

SEQ ID NO: 19175 - DNA, 19 bp, Homo sapiens
  siRNA target sequence for BRCA2 (NM_000059.1,724-742).
catacaccaaagtttgtga

SEQ ID NO: 19176 - DNA, 19 bp, Homo sapiens
  siRNA target sequence for BRCA2 (NM_000059.1,744-762).
gggtcgtcagacaccaaaa

SEQ ID NO: 19177 - DNA, 19 bp, Homo sapiens
  siRNA target sequence for BRCA2 (NM_000059.1,748-766).
cgtcagacaccaaaacata

SEQ ID NO: 19178 - DNA, 19 bp, Homo sapiens
  siRNA target sequence for BRCA2 (NM_000059.1,749-767).
gtcagacaccaaaacatat

SEQ ID NO: 19179 - DNA, 19 bp, Homo sapiens
  siRNA target sequence for BRCA2 (NM_000059.1,785-803).
ctgaggtggatcctgatat

SEQ ID NO: 19180 - DNA, 19 bp, Homo sapiens
  siRNA target sequence for BRCA2 (NM_000059.1,829-847).
ccacccacccttagttcta

SEQ ID NO: 19181 - DNA, 19 bp, Homo sapiens
  siRNA target sequence for BRCA2 (NM_000059.1,842-860).
gttctactgtgctcatagt

SEQ ID NO: 19182 - DNA, 19 bp, Homo sapiens
  siRNA target sequence for BRCA2 (NM_000059.1,848-866).
ctgtgctcatagtcagaaa

SEQ ID NO: 19183 - DNA, 19 bp, Homo sapiens
  siRNA target sequence for BRCA2 (NM_000059.1,852-870).
gctcatagtcagaaatgaa

SEQ ID NO: 19184 - DNA, 19 bp, Homo sapiens
  siRNA target sequence for BRCA2 (NM_000059.1,898-916).
gatactactgctaatgtga

SEQ ID NO: 19185 - DNA, 19 bp, Homo sapiens
  siRNA target sequence for BRCA2 (NM_000059.1,913-931).
gtgaaaagctatttttcca

SEQ ID NO: 19186 - DNA, 19 bp, Homo sapiens
  siRNA target sequence for BRCA2 (NM_000059.1,920-938).
gctatttttccaatcatga

SEQ ID NO: 19187 - DNA, 19 bp, Homo sapiens
  siRNA target sequence for BRCA2 (NM_000059.1,921-939).
ctatttttccaatcatgat

SEQ ID NO: 19188 - DNA, 19 bp, Homo sapiens
  siRNA target sequence for BRCA2 (NM_000059.1,1079-1097).
gaaagtcaatgccaaatgt

SEQ ID NO: 19189 - DNA, 19 bp, Homo sapiens
  siRNA target sequence for BRCA2 (NM_000059.1,1141-1159).
gaagatagtttttcattat

SEQ ID NO: 19190 - DNA, 19 bp, Homo sapiens
  siRNA target sequence for BRCA2 (NM_000059.1,1172-1190).
gtagaacaaaaaatctaca

SEQ ID NO: 19191 - DNA, 19 bp, Homo sapiens
  siRNA target sequence for BRCA2 (NM_000059.1,1235-1253).
caaacgctgatgaatgtga

SEQ ID NO: 19192 - DNA, 19 bp, Homo sapiens
  siRNA target sequence for BRCA2 (NM_000059.1,1297-1315).
gaagtggaaccaaatgata

SEQ ID NO: 19193 - DNA, 19 bp, Homo sapiens
  siRNA target sequence for BRCA2 (NM_000059.1,1307-1325).
caaatgatactgatccatt

SEQ ID NO: 19194 - DNA, 19 bp, Homo sapiens
  siRNA target sequence for BRCA2 (NM_000059.1,1404-1422).
ctgtgaatggtctcaacta

SEQ ID NO: 19195 - DNA, 19 bp, Homo sapiens
  siRNA target sequence for BRCA2 (NM_000059.1,1425-1443).
cctttcaggtctaaatgga

SEQ ID NO: 19196 - DNA, 19 bp, Homo sapiens
  siRNA target sequence for BRCA2 (NM_000059.1,1484-1502).
gtgaccaaaatatttcaga

SEQ ID NO: 19197 - DNA, 19 bp, Homo sapiens
  siRNA target sequence for BRCA2 (NM_000059.1,1577-1595).
ctagcctaccaaaatcaga

SEQ ID NO: 19198 - DNA, 19 bp, Homo sapiens
  siRNA target sequence for BRCA2 (NM_000059.1,1644-1662).
gcatcttgaatctcataca

SEQ ID NO: 19199 - DNA, 19 bp, Homo sapiens
  siRNA target sequence for BRCA2 (NM_000059.1,1686-1704).
ggcaatatctggaacttct

SEQ ID NO: 19200 - DNA, 19 bp, Homo sapiens
  siRNA target sequence for BRCA2 (NM_000059.1,1723-1741).
cagggtatcaaaaagtcta

SEQ ID NO: 19201 - DNA, 19 bp, Homo sapiens
  siRNA target sequence for BRCA2 (NM_000059.1,1760-1778).
cacctaaagagactttcaa

SEQ ID NO: 19202 - DNA, 19 bp, Homo sapiens
  siRNA target sequence for BRCA2 (NM_000059.1,1800-1818).
gactgatccaaactttaaa

SEQ ID NO: 19203 - DNA, 19 bp, Homo sapiens
  siRNA target sequence for BRCA2 (NM_000059.1,1878-1896).
ggactccttatgtccaaat

SEQ ID NO: 19204 - DNA, 19 bp, Homo sapiens
  siRNA target sequence for BRCA2 (NM_000059.1,1879-1897).
gactccttatgtccaaatt

SEQ ID NO: 19205 - DNA, 19 bp, Homo sapiens
  siRNA target sequence for BRCA2 (NM_000059.1,1884-1902).
cttatgtccaaatttaatt

SEQ ID NO: 19206 - DNA, 19 bp, Homo sapiens
  siRNA target sequence for BRCA2 (NM_000059.1,1926-1944).
caccacacagaattctgta

SEQ ID NO: 19207 - DNA, 19 bp, Homo sapiens
  siRNA target sequence for BRCA2 (NM_000059.1,1931-1949).
cacagaattctgtagcttt

SEQ ID NO: 19208 - DNA, 19 bp, Homo sapiens
  siRNA target sequence for BRCA2 (NM_000059.1,2073-2091).
ctgttcagcccagtttgaa

SEQ ID NO: 19209 - DNA, 19 bp, Homo sapiens
  siRNA target sequence for BRCA2 (NM_000059.1,2129-2147).
ctgattcaggtttattgca

SEQ ID NO: 19210 - DNA, 19 bp, Homo sapiens
  siRNA target sequence for BRCA2 (NM_000059.1,2162-2180).
gaagctgttcacagaatga

SEQ ID NO: 19211 - DNA, 19 bp, Homo sapiens
  siRNA target sequence for BRCA2 (NM_000059.1,2188-2206).
gaaccaactttgtccttaa

SEQ ID NO: 19212 - DNA, 19 bp, Homo sapiens
  siRNA target sequence for BRCA2 (NM_000059.1,2191-2209).
ccaactttgtccttaacta

SEQ ID NO: 19213 - DNA, 19 bp, Homo sapiens
  siRNA target sequence for BRCA2 (NM_000059.1,2248-2266).
gaaacatgttctaataata

SEQ ID NO: 19214 - DNA, 19 bp, Homo sapiens
  siRNA target sequence for BRCA2 (NM_000059.1,2252-2270).
catgttctaataatacagt

SEQ ID NO: 19215 - DNA, 19 bp, Homo sapiens
  siRNA target sequence for BRCA2 (NM_000059.1,2336-2354).
ccccagaagctgattctct

SEQ ID NO: 19216 - DNA, 19 bp, Homo sapiens
  siRNA target sequence for BRCA2 (NM_000059.1,2443-2461).
cacccagtacaacattcaa

SEQ ID NO: 19217 - DNA, 19 bp, Homo sapiens
  siRNA target sequence for BRCA2 (NM_000059.1,2472-2490).
cagtgatactgactttcaa

SEQ ID NO: 19218 - DNA, 19 bp, Homo sapiens
  siRNA target sequence for BRCA2 (NM_000059.1,2552-2570).
ccaaggatgttctgtcaaa

SEQ ID NO: 19219 - DNA, 19 bp, Homo sapiens
  siRNA target sequence for BRCA2 (NM_000059.1,2565-2583).
gtcaaacctagtcatgatt

SEQ ID NO: 19220 - DNA, 19 bp, Homo sapiens
  siRNA target sequence for BRCA2 (NM_000059.1,2571-2589).
cctagtcatgatttctaga

SEQ ID NO: 19221 - DNA, 19 bp, Homo sapiens
  siRNA target sequence for BRCA2 (NM_000059.1,2588-2606).
gaggcaaagaatcatacaa

SEQ ID NO: 19222 - DNA, 19 bp, Homo sapiens
  siRNA target sequence for BRCA2 (NM_000059.1,2612-2630).
cagacaagctcaaaggtaa

SEQ ID NO: 19223 - DNA, 19 bp, Homo sapiens
  siRNA target sequence for BRCA2 (NM_000059.1,2619-2637).
gctcaaaggtaacaattat

SEQ ID NO: 19224 - DNA, 19 bp, Homo sapiens
  siRNA target sequence for BRCA2 (NM_000059.1,2642-2660).
ctgatgttgaattaaccaa

SEQ ID NO: 19225 - DNA, 19 bp, Homo sapiens
  siRNA target sequence for BRCA2 (NM_000059.1,2644-2662).
gatgttgaattaaccaaaa

SEQ ID NO: 19226 - DNA, 19 bp, Homo sapiens
  siRNA target sequence for BRCA2 (NM_000059.1,2647-2665).
gttgaattaaccaaaaata

SEQ ID NO: 19227 - DNA, 19 bp, Homo sapiens
  siRNA target sequence for BRCA2 (NM_000059.1,2683-2701).
caagatgtatgtgctttaa

SEQ ID NO: 19228 - DNA, 19 bp, Homo sapiens
  siRNA target sequence for BRCA2 (NM_000059.1,2773-2791).
gtacaattcaaccaaaaca

SEQ ID NO: 19229 - DNA, 19 bp, Homo sapiens
  siRNA target sequence for BRCA2 (NM_000059.1,2776-2794).
caattcaaccaaaacacaa

SEQ ID NO: 19230 - DNA, 19 bp, Homo sapiens
  siRNA target sequence for BRCA2 (NM_000059.1,2862-2880).
ctctgaagaacttttctca

SEQ ID NO: 19231 - DNA, 19 bp, Homo sapiens
  siRNA target sequence for BRCA2 (NM_000059.1,2901-2919).
cttccaagtagctaatgaa

SEQ ID NO: 19232 - DNA, 19 bp, Homo sapiens
  siRNA target sequence for BRCA2 (NM_000059.1,2908-2926).
gtagctaatgaaaggaata

SEQ ID NO: 19233 - DNA, 19 bp, Homo sapiens
  siRNA target sequence for BRCA2 (NM_000059.1,2922-2940).
gaataatcttgctttagga

SEQ ID NO: 19234 - DNA, 19 bp, Homo sapiens
  siRNA target sequence for BRCA2 (NM_000059.1,2963-2981).
cagacttgacttgtgtaaa

SEQ ID NO: 19235 - DNA, 19 bp, Homo sapiens
  siRNA target sequence for BRCA2 (NM_000059.1,2967-2985).
cttgacttgtgtaaacgaa

SEQ ID NO: 19236 - DNA, 19 bp, Homo sapiens
  siRNA target sequence for BRCA2 (NM_000059.1,2975-2993).
gtgtaaacgaacccatttt

SEQ ID NO: 19237 - DNA, 19 bp, Homo sapiens
  siRNA target sequence for BRCA2 (NM_000059.1,2977-2995).
gtaaacgaacccattttca

SEQ ID NO: 19238 - DNA, 19 bp, Homo sapiens
  siRNA target sequence for BRCA2 (NM_000059.1,2997-3015).
gaactctaccatggtttta

SEQ ID NO: 19239 - DNA, 19 bp, Homo sapiens
  siRNA target sequence for BRCA2 (NM_000059.1,3040-3058).
gcaacccaagtgtcaatta

SEQ ID NO: 19240 - DNA, 19 bp, Homo sapiens
  siRNA target sequence for BRCA2 (NM_000059.1,3044-3062).
cccaagtgtcaattaaaaa

SEQ ID NO: 19241 - DNA, 19 bp, Homo sapiens
  siRNA target sequence for BRCA2 (NM_000059.1,3101-3119).
gtgtaaagcagcatataaa

SEQ ID NO: 19242 - DNA, 19 bp, Homo sapiens
  siRNA target sequence for BRCA2 (NM_000059.1,3123-3141).
gactctaggtcaagattta

SEQ ID NO: 19243 - DNA, 19 bp, Homo sapiens
  siRNA target sequence for BRCA2 (NM_000059.1,3155-3173).
ccttgaatatagataaaat

SEQ ID NO: 19244 - DNA, 19 bp, Homo sapiens
  siRNA target sequence for BRCA2 (NM_000059.1,3201-3219).
caaatgggcaggactctta

SEQ ID NO: 19245 - DNA, 19 bp, Homo sapiens
  siRNA target sequence for BRCA2 (NM_000059.1,3211-3229).
ggactcttaggtccaattt

SEQ ID NO: 19246 - DNA, 19 bp, Homo sapiens
  siRNA target sequence for BRCA2 (NM_000059.1,3216-3234).
cttaggtccaatttcaaat

SEQ ID NO: 19247 - DNA, 19 bp, Homo sapiens
  siRNA target sequence for BRCA2 (NM_000059.1,3220-3238).
ggtccaatttcaaatcaca

SEQ ID NO: 19248 - DNA, 19 bp, Homo sapiens
  siRNA target sequence for BRCA2 (NM_000059.1,3282-3300).
gctctctgaacataacatt

SEQ ID NO: 19249 - DNA, 19 bp, Homo sapiens
  siRNA target sequence for BRCA2 (NM_000059.1,3334-3352).
gaacaatatcctactagtt

SEQ ID NO: 19250 - DNA, 19 bp, Homo sapiens
  siRNA target sequence for BRCA2 (NM_000059.1,3350-3368).
gtttagcttgtgttgaaat

SEQ ID NO: 19251 - DNA, 19 bp, Homo sapiens
  siRNA target sequence for BRCA2 (NM_000059.1,3377-3395).
ccttggcattagataatca

SEQ ID NO: 19252 - DNA, 19 bp, Homo sapiens
  siRNA target sequence for BRCA2 (NM_000059.1,3378-3396).
cttggcattagataatcaa

SEQ ID NO: 19253 - DNA, 19 bp, Homo sapiens
  siRNA target sequence for BRCA2 (NM_000059.1,3388-3406).
gataatcaaaagaaactga

SEQ ID NO: 19254 - DNA, 19 bp, Homo sapiens
  siRNA target sequence for BRCA2 (NM_000059.1,3417-3435).
gtcaattaatactgtatct

SEQ ID NO: 19255 - DNA, 19 bp, Homo sapiens
  siRNA target sequence for BRCA2 (NM_000059.1,3449-3467).
gtagtgtagttgtttctga

SEQ ID NO: 19256 - DNA, 19 bp, Homo sapiens
  siRNA target sequence for BRCA2 (NM_000059.1,3454-3472).
gtagttgtttctgattgta

SEQ ID NO: 19257 - DNA, 19 bp, Homo sapiens
  siRNA target sequence for BRCA2 (NM_000059.1,3464-3482).
ctgattgtaaaaatagtca

SEQ ID NO: 19258 - DNA, 19 bp, Homo sapiens
  siRNA target sequence for BRCA2 (NM_000059.1,3466-3484).
gattgtaaaaatagtcata

SEQ ID NO: 19259 - DNA, 19 bp, Homo sapiens
  siRNA target sequence for BRCA2 (NM_000059.1,3514-3532).
gattttaattcaaaccata

SEQ ID NO: 19260 - DNA, 19 bp, Homo sapiens
  siRNA target sequence for BRCA2 (NM_000059.1,3552-3570).
ggcagaaattacagaactt

SEQ ID NO: 19261 - DNA, 19 bp, Homo sapiens
  siRNA target sequence for BRCA2 (NM_000059.1,3563-3581).
cagaactttctactatatt

SEQ ID NO: 19262 - DNA, 19 bp, Homo sapiens
  siRNA target sequence for BRCA2 (NM_000059.1,3596-3614).
gtcagtttgaatttactca

SEQ ID NO: 19263 - DNA, 19 bp, Homo sapiens
  siRNA target sequence for BRCA2 (NM_000059.1,3661-3679).
cctgaaaaccagatgacta

SEQ ID NO: 19264 - DNA, 19 bp, Homo sapiens
  siRNA target sequence for BRCA2 (NM_000059.1,3662-3680).
ctgaaaaccagatgactat

SEQ ID NO: 19265 - DNA, 19 bp, Homo sapiens
  siRNA target sequence for BRCA2 (NM_000059.1,3664-3682).
gaaaaccagatgactatct

SEQ ID NO: 19266 - DNA, 19 bp, Homo sapiens
  siRNA target sequence for BRCA2 (NM_000059.1,3806-3824).
ctggcctgttgaaaaatga

SEQ ID NO: 19267 - DNA, 19 bp, Homo sapiens
  siRNA target sequence for BRCA2 (NM_000059.1,3808-3826).
ggcctgttgaaaaatgact

SEQ ID NO: 19268 - DNA, 19 bp, Homo sapiens
  siRNA target sequence for BRCA2 (NM_000059.1,3873-3891).
gtttaggggcttttattct

SEQ ID NO: 19269 - DNA, 19 bp, Homo sapiens
  siRNA target sequence for BRCA2 (NM_000059.1,3985-4003).
gcagaggtacatccaataa

SEQ ID NO: 19270 - DNA, 19 bp, Homo sapiens
  siRNA target sequence for BRCA2 (NM_000059.1,3988-4006).
gaggtacatccaataagtt

SEQ ID NO: 19271 - DNA, 19 bp, Homo sapiens
  siRNA target sequence for BRCA2 (NM_000059.1,3991-4009).
gtacatccaataagtttat

SEQ ID NO: 19272 - DNA, 19 bp, Homo sapiens
  siRNA target sequence for BRCA2 (NM_000059.1,4128-4146).
gactactggcacttttgtt

SEQ ID NO: 19273 - DNA, 19 bp, Homo sapiens
  siRNA target sequence for BRCA2 (NM_000059.1,4282-4300).
gatgaaacggacttgctat

SEQ ID NO: 19274 - DNA, 19 bp, Homo sapiens
  siRNA target sequence for BRCA2 (NM_000059.1,4289-4307).
cggacttgctatttactga

SEQ ID NO: 19275 - DNA, 19 bp, Homo sapiens
  siRNA target sequence for BRCA2 (NM_000059.1,4290-4308).
ggacttgctatttactgat

SEQ ID NO: 19276 - DNA, 19 bp, Homo sapiens
  siRNA target sequence for BRCA2 (NM_000059.1,4353-4371).
gggaaacactcagattaaa

SEQ ID NO: 19277 - DNA, 19 bp, Homo sapiens
  siRNA target sequence for BRCA2 (NM_000059.1,4420-4438).
gcatgtcatggtaatactt

SEQ ID NO: 19278 - DNA, 19 bp, Homo sapiens
  siRNA target sequence for BRCA2 (NM_000059.1,4424-4442).
gtcatggtaatacttcaaa

SEQ ID NO: 19279 - DNA, 19 bp, Homo sapiens
  siRNA target sequence for BRCA2 (NM_000059.1,4426-4444).
catggtaatacttcaaata

SEQ ID NO: 19280 - DNA, 19 bp, Homo sapiens
  siRNA target sequence for BRCA2 (NM_000059.1,4430-4448).
gtaatacttcaaataaaga

SEQ ID NO: 19281 - DNA, 19 bp, Homo sapiens
  siRNA target sequence for BRCA2 (NM_000059.1,4450-4468).
cagttaactgctactaaaa

SEQ ID NO: 19282 - DNA, 19 bp, Homo sapiens
  siRNA target sequence for BRCA2 (NM_000059.1,4463-4481).
ctaaaacggagcaaaatat

SEQ ID NO: 19283 - DNA, 19 bp, Homo sapiens
  siRNA target sequence for BRCA2 (NM_000059.1,4492-4510).
gagacttctgatacatttt

SEQ ID NO: 19284 - DNA, 19 bp, Homo sapiens
  siRNA target sequence for BRCA2 (NM_000059.1,4519-4537).
gcaagtgggaaaaatatta

SEQ ID NO: 19285 - DNA, 19 bp, Homo sapiens
  siRNA target sequence for BRCA2 (NM_000059.1,4538-4556).
gtgtcgccaaagagtcatt

SEQ ID NO: 19286 - DNA, 19 bp, Homo sapiens
  siRNA target sequence for BRCA2 (NM_000059.1,4540-4558).
gtcgccaaagagtcattta

SEQ ID NO: 19287 - DNA, 19 bp, Homo sapiens
  siRNA target sequence for BRCA2 (NM_000059.1,4542-4560).
cgccaaagagtcatttaat

SEQ ID NO: 19288 - DNA, 19 bp, Homo sapiens
  siRNA target sequence for BRCA2 (NM_000059.1,4543-4561).
gccaaagagtcatttaata

SEQ ID NO: 19289 - DNA, 19 bp, Homo sapiens
  siRNA target sequence for BRCA2 (NM_000059.1,4647-4665).
caaaatggacattctaagt

SEQ ID NO: 19290 - DNA, 19 bp, Homo sapiens
  siRNA target sequence for BRCA2 (NM_000059.1,4671-4689).
ggaaacagacatagttaaa

SEQ ID NO: 19291 - DNA, 19 bp, Homo sapiens
  siRNA target sequence for BRCA2 (NM_000059.1,4753-4771).
caacccgaacgtgatgaaa

SEQ ID NO: 19292 - DNA, 19 bp, Homo sapiens
  siRNA target sequence for BRCA2 (NM_000059.1,4756-4774).
cccgaacgtgatgaaaaga

SEQ ID NO: 19293 - DNA, 19 bp, Homo sapiens
  siRNA target sequence for BRCA2 (NM_000059.1,4757-4775).
ccgaacgtgatgaaaagat

SEQ ID NO: 19294 - DNA, 19 bp, Homo sapiens
  siRNA target sequence for BRCA2 (NM_000059.1,4805-4823).
cagctagcgggaaaaaagt

SEQ ID NO: 19295 - DNA, 19 bp, Homo sapiens
  siRNA target sequence for BRCA2 (NM_000059.1,4807-4825).
gctagcgggaaaaaagtta

SEQ ID NO: 19296 - DNA, 19 bp, Homo sapiens
  siRNA target sequence for BRCA2 (NM_000059.1,4811-4829).
gcgggaaaaaagttaaaat

SEQ ID NO: 19297 - DNA, 19 bp, Homo sapiens
  siRNA target sequence for BRCA2 (NM_000059.1,4822-4840).
gttaaaattgcaaaggaat

SEQ ID NO: 19298 - DNA, 19 bp, Homo sapiens
  siRNA target sequence for BRCA2 (NM_000059.1,4879-4897).
caaggtactagtgaaatca

SEQ ID NO: 19299 - DNA, 19 bp, Homo sapiens
  siRNA target sequence for BRCA2 (NM_000059.1,5010-5028).
gcagaattctctcaataat

SEQ ID NO: 19300 - DNA, 19 bp, Homo sapiens
  siRNA target sequence for BRCA2 (NM_000059.1,5022-5040).
caataatgataaaaacctt

SEQ ID NO: 19301 - DNA, 19 bp, Homo sapiens
  siRNA target sequence for BRCA2 (NM_000059.1,5059-5077).
gtgccacctaagctcttaa

SEQ ID NO: 19302 - DNA, 19 bp, Homo sapiens
  siRNA target sequence for BRCA2 (NM_000059.1,5061-5079).
gccacctaagctcttaagt

SEQ ID NO: 19303 - DNA, 19 bp, Homo sapiens
  siRNA target sequence for BRCA2 (NM_000059.1,5065-5083).
cctaagctcttaagtgata

SEQ ID NO: 19304 - DNA, 19 bp, Homo sapiens
  siRNA target sequence for BRCA2 (NM_000059.1,5070-5088).
gctcttaagtgataattta

SEQ ID NO: 19305 - DNA, 19 bp, Homo sapiens
  siRNA target sequence for BRCA2 (NM_000059.1,5073-5091).
cttaagtgataatttatgt

SEQ ID NO: 19306 - DNA, 19 bp, Homo sapiens
  siRNA target sequence for BRCA2 (NM_000059.1,5230-5248).
gccttagctttttacacaa

SEQ ID NO: 19307 - DNA, 19 bp, Homo sapiens
  siRNA target sequence for BRCA2 (NM_000059.1,5303-5321).
ggcttagagaaggaatatt

SEQ ID NO: 19308 - DNA, 19 bp, Homo sapiens
  siRNA target sequence for BRCA2 (NM_000059.1,5304-5322).
gcttagagaaggaatattt

SEQ ID NO: 19309 - DNA, 19 bp, Homo sapiens
  siRNA target sequence for BRCA2 (NM_000059.1,5339-5357).
gaataaatactgcagatta

SEQ ID NO: 19310 - DNA, 19 bp, Homo sapiens
  siRNA target sequence for BRCA2 (NM_000059.1,5350-5368).
gcagattatgtaggaaatt

SEQ ID NO: 19311 - DNA, 19 bp, Homo sapiens
  siRNA target sequence for BRCA2 (NM_000059.1,5391-5409).
cagtactatagctgaaaat

SEQ ID NO: 19312 - DNA, 19 bp, Homo sapiens
  siRNA target sequence for BRCA2 (NM_000059.1,5396-5414).
ctatagctgaaaatgacaa

SEQ ID NO: 19313 - DNA, 19 bp, Homo sapiens
  siRNA target sequence for BRCA2 (NM_000059.1,5422-5440).
ctctccgaaaaacaagata

SEQ ID NO: 19314 - DNA, 19 bp, Homo sapiens
  siRNA target sequence for BRCA2 (NM_000059.1,5424-5442).
ctccgaaaaacaagatact

SEQ ID NO: 19315 - DNA, 19 bp, Homo sapiens
  siRNA target sequence for BRCA2 (NM_000059.1,5426-5444).
ccgaaaaacaagatactta

SEQ ID NO: 19316 - DNA, 19 bp, Homo sapiens
  siRNA target sequence for BRCA2 (NM_000059.1,5427-5445).
cgaaaaacaagatacttat

SEQ ID NO: 19317 - DNA, 19 bp, Homo sapiens
  siRNA target sequence for BRCA2 (NM_000059.1,5450-5468).
gtaacagtagcatgtctaa

SEQ ID NO: 19318 - DNA, 19 bp, Homo sapiens
  siRNA target sequence for BRCA2 (NM_000059.1,5488-5506).
gatgaggtatataatgatt

SEQ ID NO: 19319 - DNA, 19 bp, Homo sapiens
  siRNA target sequence for BRCA2 (NM_000059.1,5540-5558).
gtattgagccagtattgaa

SEQ ID NO: 19320 - DNA, 19 bp, Homo sapiens
  siRNA target sequence for BRCA2 (NM_000059.1,5580-5598).
cactagtttttccaaagta

SEQ ID NO: 19321 - DNA, 19 bp, Homo sapiens
  siRNA target sequence for BRCA2 (NM_000059.1,5592-5610).
caaagtaatatccaatgta

SEQ ID NO: 19322 - DNA, 19 bp, Homo sapiens
  siRNA target sequence for BRCA2 (NM_000059.1,5623-5641).
gcatacccacaaactgtaa

SEQ ID NO: 19323 - DNA, 19 bp, Homo sapiens
  siRNA target sequence for BRCA2 (NM_000059.1,5628-5646).
cccacaaactgtaaatgaa

SEQ ID NO: 19324 - DNA, 19 bp, Homo sapiens
  siRNA target sequence for BRCA2 (NM_000059.1,5706-5724).
cattaaattgtccatatct

SEQ ID NO: 19325 - DNA, 19 bp, Homo sapiens
  siRNA target sequence for BRCA2 (NM_000059.1,5742-5760).
ggtagggccacctgcattt

SEQ ID NO: 19326 - DNA, 19 bp, Homo sapiens
  siRNA target sequence for BRCA2 (NM_000059.1,5767-5785).
gccagtggtaaaatcgttt

SEQ ID NO: 19327 - DNA, 19 bp, Homo sapiens
  siRNA target sequence for BRCA2 (NM_000059.1,5781-5799).
cgtttgtgtttcacatgaa

SEQ ID NO: 19328 - DNA, 19 bp, Homo sapiens
  siRNA target sequence for BRCA2 (NM_000059.1,5859-5877).
caacgagaataaatcaaaa

SEQ ID NO: 19329 - DNA, 19 bp, Homo sapiens
  siRNA target sequence for BRCA2 (NM_000059.1,5910-5928).
cgaggcattggatgattca

SEQ ID NO: 19330 - DNA, 19 bp, Homo sapiens
  siRNA target sequence for BRCA2 (NM_000059.1,5966-5984).
gtagcacgcattcacataa

SEQ ID NO: 19331 - DNA, 19 bp, Homo sapiens
  siRNA target sequence for BRCA2 (NM_000059.1,5969-5987).
gcacgcattcacataaggt

SEQ ID NO: 19332 - DNA, 19 bp, Homo sapiens
  siRNA target sequence for BRCA2 (NM_000059.1,5970-5988).
cacgcattcacataaggtt

SEQ ID NO: 19333 - DNA, 19 bp, Homo sapiens
  siRNA target sequence for BRCA2 (NM_000059.1,5972-5990).
cgcattcacataaggtttt

SEQ ID NO: 19334 - DNA, 19 bp, Homo sapiens
  siRNA target sequence for BRCA2 (NM_000059.1,5986-6004).
gtttttgctgacattcaga

SEQ ID NO: 19335 - DNA, 19 bp, Homo sapiens
  siRNA target sequence for BRCA2 (NM_000059.1,6041-6059).
gattggagaaagtttctaa

SEQ ID NO: 19336 - DNA, 19 bp, Homo sapiens
  siRNA target sequence for BRCA2 (NM_000059.1,6084-6102).
ggaaacttcagatatatgt

SEQ ID NO: 19337 - DNA, 19 bp, Homo sapiens
  siRNA target sequence for BRCA2 (NM_000059.1,6129-6147).
gtcagtctcatctgcaaat

SEQ ID NO: 19338 - DNA, 19 bp, Homo sapiens
  siRNA target sequence for BRCA2 (NM_000059.1,6133-6151).
gtctcatctgcaaatactt

SEQ ID NO: 19339 - DNA, 19 bp, Homo sapiens
  siRNA target sequence for BRCA2 (NM_000059.1,6189-6207).
ggtatcagatgcttcatta

SEQ ID NO: 19340 - DNA, 19 bp, Homo sapiens
  siRNA target sequence for BRCA2 (NM_000059.1,6313-6331).
gaaaatactgctatacgta

SEQ ID NO: 19341 - DNA, 19 bp, Homo sapiens
  siRNA target sequence for BRCA2 (NM_000059.1,6328-6346).
cgtactccagaacatttaa

SEQ ID NO: 19342 - DNA, 19 bp, Homo sapiens
  siRNA target sequence for BRCA2 (NM_000059.1,6329-6347).
gtactccagaacatttaat

SEQ ID NO: 19343 - DNA, 19 bp, Homo sapiens
  siRNA target sequence for BRCA2 (NM_000059.1,6409-6427).
gcaagtggaaagcaagttt

SEQ ID NO: 19344 - DNA, 19 bp, Homo sapiens
  siRNA target sequence for BRCA2 (NM_000059.1,6440-6458).
gttccttacacaaagttaa

SEQ ID NO: 19345 - DNA, 19 bp, Homo sapiens
  siRNA target sequence for BRCA2 (NM_000059.1,6450-6468).
caaagttaagggagtgtta

SEQ ID NO: 19346 - DNA, 19 bp, Homo sapiens
  siRNA target sequence for BRCA2 (NM_000059.1,6486-6504).
cagaactgagcatagtctt

SEQ ID NO: 19347 - DNA, 19 bp, Homo sapiens
  siRNA target sequence for BRCA2 (NM_000059.1,6491-6509).
ctgagcatagtcttcacta

SEQ ID NO: 19348 - DNA, 19 bp, Homo sapiens
  siRNA target sequence for BRCA2 (NM_000059.1,6495-6513).
gcatagtcttcactattca

SEQ ID NO: 19349 - DNA, 19 bp, Homo sapiens
  siRNA target sequence for BRCA2 (NM_000059.1,6512-6530).
cacctacgtctagacaaaa

SEQ ID NO: 19350 - DNA, 19 bp, Homo sapiens
  siRNA target sequence for BRCA2 (NM_000059.1,6515-6533).
ctacgtctagacaaaatgt

SEQ ID NO: 19351 - DNA, 19 bp, Homo sapiens
  siRNA target sequence for BRCA2 (NM_000059.1,6544-6562).
cttcctcgtgttgataaga

SEQ ID NO: 19352 - DNA, 19 bp, Homo sapiens
  siRNA target sequence for BRCA2 (NM_000059.1,6547-6565).
cctcgtgttgataagagaa

SEQ ID NO: 19353 - DNA, 19 bp, Homo sapiens
  siRNA target sequence for BRCA2 (NM_000059.1,6548-6566).
ctcgtgttgataagagaaa

SEQ ID NO: 19354 - DNA, 19 bp, Homo sapiens
  siRNA target sequence for BRCA2 (NM_000059.1,6910-6928).
gtagaaattgctaaagctt

SEQ ID NO: 19355 - DNA, 19 bp, Homo sapiens
  siRNA target sequence for BRCA2 (NM_000059.1,6968-6986).
gtcatgccacacattctct

SEQ ID NO: 19356 - DNA, 19 bp, Homo sapiens
  siRNA target sequence for BRCA2 (NM_000059.1,6970-6988).
catgccacacattctcttt

SEQ ID NO: 19357 - DNA, 19 bp, Homo sapiens
  siRNA target sequence for BRCA2 (NM_000059.1,7014-7032).
ggttttgtcaaattcaaga

SEQ ID NO: 19358 - DNA, 19 bp, Homo sapiens
  siRNA target sequence for BRCA2 (NM_000059.1,7015-7033).
gttttgtcaaattcaagaa

SEQ ID NO: 19359 - DNA, 19 bp, Homo sapiens
  siRNA target sequence for BRCA2 (NM_000059.1,7046-7064).
gaggagagccccttatctt

SEQ ID NO: 19360 - DNA, 19 bp, Homo sapiens
  siRNA target sequence for BRCA2 (NM_000059.1,7066-7084).
gtgggagaaccctcaatca

SEQ ID NO: 19361 - DNA, 19 bp, Homo sapiens
  siRNA target sequence for BRCA2 (NM_000059.1,7069-7087).
ggagaaccctcaatcaaaa

SEQ ID NO: 19362 - DNA, 19 bp, Homo sapiens
  siRNA target sequence for BRCA2 (NM_000059.1,7169-7187).
caataaaagatcgaagatt

SEQ ID NO: 19363 - DNA, 19 bp, Homo sapiens
  siRNA target sequence for BRCA2 (NM_000059.1,7225-7243).
gtaccctttcgcacaacta

SEQ ID NO: 19364 - DNA, 19 bp, Homo sapiens
  siRNA target sequence for BRCA2 (NM_000059.1,7241-7259).
ctaaggaacgtcaagagat

SEQ ID NO: 19365 - DNA, 19 bp, Homo sapiens
  siRNA target sequence for BRCA2 (NM_000059.1,7252-7270).
caagagatacagaatccaa

SEQ ID NO: 19366 - DNA, 19 bp, Homo sapiens
  siRNA target sequence for BRCA2 (NM_000059.1,7286-7304).
gtcaagaatttctgtctaa

SEQ ID NO: 19367 - DNA, 19 bp, Homo sapiens
  siRNA target sequence for BRCA2 (NM_000059.1,7297-7315).
ctgtctaaatctcatttgt

SEQ ID NO: 19368 - DNA, 19 bp, Homo sapiens
  siRNA target sequence for BRCA2 (NM_000059.1,7301-7319).
ctaaatctcatttgtatga

SEQ ID NO: 19369 - DNA, 19 bp, Homo sapiens
  siRNA target sequence for BRCA2 (NM_000059.1,7430-7448).
gaccaaccaaagtctttgt

SEQ ID NO: 19370 - DNA, 19 bp, Homo sapiens
  siRNA target sequence for BRCA2 (NM_000059.1,7493-7511).
gtgttaggaatattaactt

SEQ ID NO: 19371 - DNA, 19 bp, Homo sapiens
  siRNA target sequence for BRCA2 (NM_000059.1,7657-7675).
cctttagatttaattacaa

SEQ ID NO: 19372 - DNA, 19 bp, Homo sapiens
  siRNA target sequence for BRCA2 (NM_000059.1,7688-7706).
ccagagatatacaggatat

SEQ ID NO: 19373 - DNA, 19 bp, Homo sapiens
  siRNA target sequence for BRCA2 (NM_000059.1,7707-7725).
gcgaattaagaagaaacaa

SEQ ID NO: 19374 - DNA, 19 bp, Homo sapiens
  siRNA target sequence for BRCA2 (NM_000059.1,7751-7769).
gcagtctgtatcttgcaaa

SEQ ID NO: 19375 - DNA, 19 bp, Homo sapiens
  siRNA target sequence for BRCA2 (NM_000059.1,7776-7794).
cactctgcctcgaatctct

SEQ ID NO: 19376 - DNA, 19 bp, Homo sapiens
  siRNA target sequence for BRCA2 (NM_000059.1,7782-7800).
gcctcgaatctctctgaaa

SEQ ID NO: 19377 - DNA, 19 bp, Homo sapiens
  siRNA target sequence for BRCA2 (NM_000059.1,7822-7840).
ccctctgcgtgttctcata

SEQ ID NO: 19378 - DNA, 19 bp, Homo sapiens
  siRNA target sequence for BRCA2 (NM_000059.1,7823-7841).
cctctgcgtgttctcataa

SEQ ID NO: 19379 - DNA, 19 bp, Homo sapiens
  siRNA target sequence for BRCA2 (NM_000059.1,7824-7842).
ctctgcgtgttctcataaa

SEQ ID NO: 19380 - DNA, 19 bp, Homo sapiens
  siRNA target sequence for BRCA2 (NM_000059.1,7826-7844).
ctgcgtgttctcataaaca

SEQ ID NO: 19381 - DNA, 19 bp, Homo sapiens
  siRNA target sequence for BRCA2 (NM_000059.1,7837-7855).
cataaacagctgtatacgt

SEQ ID NO: 19382 - DNA, 19 bp, Homo sapiens
  siRNA target sequence for BRCA2 (NM_000059.1,7853-7871).
cgtatggcgtttctaaaca

SEQ ID NO: 19383 - DNA, 19 bp, Homo sapiens
  siRNA target sequence for BRCA2 (NM_000059.1,7854-7872).
gtatggcgtttctaaacat

SEQ ID NO: 19384 - DNA, 19 bp, Homo sapiens
  siRNA target sequence for BRCA2 (NM_000059.1,7860-7878).
cgtttctaaacattgcata

SEQ ID NO: 19385 - DNA, 19 bp, Homo sapiens
  siRNA target sequence for BRCA2 (NM_000059.1,7861-7879).
gtttctaaacattgcataa

SEQ ID NO: 19386 - DNA, 19 bp, Homo sapiens
  siRNA target sequence for BRCA2 (NM_000059.1,8053-8071).
ggtgtggatccaaagctta

SEQ ID NO: 19387 - DNA, 19 bp, Homo sapiens
  siRNA target sequence for BRCA2 (NM_000059.1,8054-8072).
gtgtggatccaaagcttat

SEQ ID NO: 19388 - DNA, 19 bp, Homo sapiens
  siRNA target sequence for BRCA2 (NM_000059.1,8056-8074).
gtggatccaaagcttattt

SEQ ID NO: 19389 - DNA, 19 bp, Homo sapiens
  siRNA target sequence for BRCA2 (NM_000059.1,8059-8077).
gatccaaagcttatttcta

SEQ ID NO: 19390 - DNA, 19 bp, Homo sapiens
  siRNA target sequence for BRCA2 (NM_000059.1,8095-8113).
cactatagatggatcatat

SEQ ID NO: 19391 - DNA, 19 bp, Homo sapiens
  siRNA target sequence for BRCA2 (NM_000059.1,8143-8161).
cctaaggaatttgctaata

SEQ ID NO: 19392 - DNA, 19 bp, Homo sapiens
  siRNA target sequence for BRCA2 (NM_000059.1,8181-8199).
ggtgcttcttcaactaaaa

SEQ ID NO: 19393 - DNA, 19 bp, Homo sapiens
  siRNA target sequence for BRCA2 (NM_000059.1,8202-8220).
cagatatgatacggaaatt

SEQ ID NO: 19394 - DNA, 19 bp, Homo sapiens
  siRNA target sequence for BRCA2 (NM_000059.1,8204-8222).
gatatgatacggaaattga

SEQ ID NO: 19395 - DNA, 19 bp, Homo sapiens
  siRNA target sequence for BRCA2 (NM_000059.1,8209-8227).
gatacggaaattgatagaa

SEQ ID NO: 19396 - DNA, 19 bp, Homo sapiens
  siRNA target sequence for BRCA2 (NM_000059.1,8228-8246).
gcagaagatcggctataaa

SEQ ID NO: 19397 - DNA, 19 bp, Homo sapiens
  siRNA target sequence for BRCA2 (NM_000059.1,8229-8247).
cagaagatcggctataaaa

SEQ ID NO: 19398 - DNA, 19 bp, Homo sapiens
  siRNA target sequence for BRCA2 (NM_000059.1,8231-8249).
gaagatcggctataaaaaa

SEQ ID NO: 19399 - DNA, 19 bp, Homo sapiens
  siRNA target sequence for BRCA2 (NM_000059.1,8234-8252).
gatcggctataaaaaagat

SEQ ID NO: 19400 - DNA, 19 bp, Homo sapiens
  siRNA target sequence for BRCA2 (NM_000059.1,8237-8255).
cggctataaaaaagataat

SEQ ID NO: 19401 - DNA, 19 bp, Homo sapiens
  siRNA target sequence for BRCA2 (NM_000059.1,8319-8337).
cgcaaatatatctgaaact

SEQ ID NO: 19402 - DNA, 19 bp, Homo sapiens
  siRNA target sequence for BRCA2 (NM_000059.1,8408-8426).
ctgttaaggcccagttaga

SEQ ID NO: 19403 - DNA, 19 bp, Homo sapiens
  siRNA target sequence for BRCA2 (NM_000059.1,8436-8454).
cttagctgtcttaaagaat

SEQ ID NO: 19404 - DNA, 19 bp, Homo sapiens
  siRNA target sequence for BRCA2 (NM_000059.1,8537-8555).
ccccagaatctcttatgtt

SEQ ID NO: 19405 - DNA, 19 bp, Homo sapiens
  siRNA target sequence for BRCA2 (NM_000059.1,8578-8596).
cggcctgctcgctggtata

SEQ ID NO: 19406 - DNA, 19 bp, Homo sapiens
  siRNA target sequence for BRCA2 (NM_000059.1,8581-8599).
cctgctcgctggtatacca

SEQ ID NO: 19407 - DNA, 19 bp, Homo sapiens
  siRNA target sequence for BRCA2 (NM_000059.1,8582-8600).
ctgctcgctggtataccaa

SEQ ID NO: 19408 - DNA, 19 bp, Homo sapiens
  siRNA target sequence for BRCA2 (NM_000059.1,8638-8656).
cccttatcatcgcttttca

SEQ ID NO: 19409 - DNA, 19 bp, Homo sapiens
  siRNA target sequence for BRCA2 (NM_000059.1,8640-8658).
cttatcatcgcttttcagt

SEQ ID NO: 19410 - DNA, 19 bp, Homo sapiens
  siRNA target sequence for BRCA2 (NM_000059.1,8674-8692).
ggttgtgttgatgtaatta

SEQ ID NO: 19411 - DNA, 19 bp, Homo sapiens
  siRNA target sequence for BRCA2 (NM_000059.1,8745-8763).
catatttcgcaatgaaaga

SEQ ID NO: 19412 - DNA, 19 bp, Homo sapiens
  siRNA target sequence for BRCA2 (NM_000059.1,8812-8830).
ctagaagccttattcacta

SEQ ID NO: 19413 - DNA, 19 bp, Homo sapiens
  siRNA target sequence for BRCA2 (NM_000059.1,8815-8833).
gaagccttattcactaaaa

SEQ ID NO: 19414 - DNA, 19 bp, Homo sapiens
  siRNA target sequence for BRCA2 (NM_000059.1,8884-8902).
ccatcacgtgcactaacaa

SEQ ID NO: 19415 - DNA, 19 bp, Homo sapiens
  siRNA target sequence for BRCA2 (NM_000059.1,8907-8925).
gcaagttcgtgctttgcaa

SEQ ID NO: 19416 - DNA, 19 bp, Homo sapiens
  siRNA target sequence for BRCA2 (NM_000059.1,8972-8990).
cttaccttgagggttattt

SEQ ID NO: 19417 - DNA, 19 bp, Homo sapiens
  siRNA target sequence for BRCA2 (NM_000059.1,8976-8994).
ccttgagggttatttcagt

SEQ ID NO: 19418 - DNA, 19 bp, Homo sapiens
  siRNA target sequence for BRCA2 (NM_000059.1,9000-9018).
gcagttaagagccttgaat

SEQ ID NO: 19419 - DNA, 19 bp, Homo sapiens
  siRNA target sequence for BRCA2 (NM_000059.1,9003-9021).
gttaagagccttgaataat

SEQ ID NO: 19420 - DNA, 19 bp, Homo sapiens
  siRNA target sequence for BRCA2 (NM_000059.1,9028-9046).
caaatgttgaatgataaga

SEQ ID NO: 19421 - DNA, 19 bp, Homo sapiens
  siRNA target sequence for BRCA2 (NM_000059.1,9033-9051).
gttgaatgataagaaacaa

SEQ ID NO: 19422 - DNA, 19 bp, Homo sapiens
  siRNA target sequence for BRCA2 (NM_000059.1,9081-9099).
catggaatctgctgaacaa

SEQ ID NO: 19423 - DNA, 19 bp, Homo sapiens
  siRNA target sequence for BRCA2 (NM_000059.1,9135-9153).
gtggaagttgcgtattgta

SEQ ID NO: 19424 - DNA, 19 bp, Homo sapiens
  siRNA target sequence for BRCA2 (NM_000059.1,9141-9159).
gttgcgtattgtaagctat

SEQ ID NO: 19425 - DNA, 19 bp, Homo sapiens
  siRNA target sequence for BRCA2 (NM_000059.1,9145-9163).
cgtattgtaagctattcaa

SEQ ID NO: 19426 - DNA, 19 bp, Homo sapiens
  siRNA target sequence for BRCA2 (NM_000059.1,9311-9329).
cagcgacaaaaaaaactca

SEQ ID NO: 19427 - DNA, 19 bp, Homo sapiens
  siRNA target sequence for BRCA2 (NM_000059.1,9340-9358).
ctaccggtttcagatgaaa

SEQ ID NO: 19428 - DNA, 19 bp, Homo sapiens
  siRNA target sequence for BRCA2 (NM_000059.1,9343-9361).
ccggtttcagatgaaattt

SEQ ID NO: 19429 - DNA, 19 bp, Homo sapiens
  siRNA target sequence for BRCA2 (NM_000059.1,9380-9398).
cacgggagccccttcactt

SEQ ID NO: 19430 - DNA, 19 bp, Homo sapiens
  siRNA target sequence for BRCA2 (NM_000059.1,9434-9452).
gttctgaggtggacctaat

SEQ ID NO: 19431 - DNA, 19 bp, Homo sapiens
  siRNA target sequence for BRCA2 (NM_000059.1,9439-9457).
gaggtggacctaataggat

SEQ ID NO: 19432 - DNA, 19 bp, Homo sapiens
  siRNA target sequence for BRCA2 (NM_000059.1,9490-9508).
gcccctttcgtctatttgt

SEQ ID NO: 19433 - DNA, 19 bp, Homo sapiens
  siRNA target sequence for BRCA2 (NM_000059.1,9492-9510).
ccctttcgtctatttgtca

SEQ ID NO: 19434 - DNA, 19 bp, Homo sapiens
  siRNA target sequence for BRCA2 (NM_000059.1,9507-9525).
gtcagacgaatgttacaat

SEQ ID NO: 19435 - DNA, 19 bp, Homo sapiens
  siRNA target sequence for BRCA2 (NM_000059.1,9509-9527).
cagacgaatgttacaattt

SEQ ID NO: 19436 - DNA, 19 bp, Homo sapiens
  siRNA target sequence for BRCA2 (NM_000059.1,9552-9570).
ccttaatgaggacattatt

SEQ ID NO: 19437 - DNA, 19 bp, Homo sapiens
  siRNA target sequence for BRCA2 (NM_000059.1,9553-9571).
cttaatgaggacattatta

SEQ ID NO: 19438 - DNA, 19 bp, Homo sapiens
  siRNA target sequence for BRCA2 (NM_000059.1,9609-9627).
gcgaccagaatccaaatca

SEQ ID NO: 19439 - DNA, 19 bp, Homo sapiens
  siRNA target sequence for BRCA2 (NM_000059.1,9727-9745).
gagaatattgacatacttt

SEQ ID NO: 19440 - DNA, 19 bp, Homo sapiens
  siRNA target sequence for BRCA2 (NM_000059.1,9771-9789).
gcatatactgcatgcaaat

SEQ ID NO: 19441 - DNA, 19 bp, Homo sapiens
  siRNA target sequence for BRCA2 (NM_000059.1,9798-9816).
gtggtccaccccaactaaa

SEQ ID NO: 19442 - DNA, 19 bp, Homo sapiens
  siRNA target sequence for BRCA2 (NM_000059.1,9808-9826).
ccaactaaagactgtactt

SEQ ID NO: 19443 - DNA, 19 bp, Homo sapiens
  siRNA target sequence for BRCA2 (NM_000059.1,9830-9848).
ggccgtacactgctcaaat

SEQ ID NO: 19444 - DNA, 19 bp, Homo sapiens
  siRNA target sequence for BRCA2 (NM_000059.1,9832-9850).
ccgtacactgctcaaatca

SEQ ID NO: 19445 - DNA, 19 bp, Homo sapiens
  siRNA target sequence for BRCA2 (NM_000059.1,9833-9851).
cgtacactgctcaaatcat

SEQ ID NO: 19446 - DNA, 19 bp, Homo sapiens
  siRNA target sequence for BRCA2 (NM_000059.1,9884-9902).
ctcctaattgtgagatata

SEQ ID NO: 19447 - DNA, 19 bp, Homo sapiens
  siRNA target sequence for BRCA2 (NM_000059.1,9886-9904).
cctaattgtgagatatatt

SEQ ID NO: 19448 - DNA, 19 bp, Homo sapiens
  siRNA target sequence for BRCA2 (NM_000059.1,9907-9925).
caaagtcctttatcacttt

SEQ ID NO: 19449 - DNA, 19 bp, Homo sapiens
  siRNA target sequence for BRCA2 (NM_000059.1,10050-10068).
gagtagactgcctttacct

SEQ ID NO: 19450 - DNA, 19 bp, Homo sapiens
  siRNA target sequence for BRCA2 (NM_000059.1,10072-10090).
cctgttagtcccatttgta

SEQ ID NO: 19451 - DNA, 19 bp, Homo sapiens
  siRNA target sequence for BRCA2 (NM_000059.1,10075-10093).
gttagtcccatttgtacat

SEQ ID NO: 19452 - DNA, 19 bp, Homo sapiens
  siRNA target sequence for BRCA2 (NM_000059.1,10079-10097).
gtcccatttgtacatttgt

SEQ ID NO: 19453 - DNA, 19 bp, Homo sapiens
  siRNA target sequence for BRCA2 (NM_000059.1,10133-10151).
ggagttgtggcaccaaata

SEQ ID NO: 19454 - DNA, 19 bp, Homo sapiens
  siRNA target sequence for BRCA2 (NM_000059.1,10241-10259).
caatagctgacgaagaact

SEQ ID NO: 19455 - DNA, 19 bp, Homo sapiens
  siRNA target sequence for BRCA2 (NM_000059.1,10346-10364).
ccaccagttcagaagatta

SEQ ID NO: 19456 - DNA, 19 bp, Homo sapiens
  siRNA target sequence for BRCA2 (NM_000059.1,10349-10367).
ccagttcagaagattatct

SEQ ID NO: 19457 - DNA, 19 bp, Homo sapiens
  siRNA target sequence for BRCA2 (NM_000059.1,10372-10390).
ctgaaacgacgttgtacta

SEQ ID NO: 19458 - DNA, 19 bp, Homo sapiens
  siRNA target sequence for BRCA2 (NM_000059.1,10374-10392).
gaaacgacgttgtactaca

SEQ ID NO: 19459 - DNA, 19 bp, Homo sapiens
  siRNA target sequence for BRCA2 (NM_000059.1,10420-10438).
caggccagtacggaagaat

SEQ ID NO: 19460 - DNA, 19 bp, Homo sapiens
  siRNA target sequence for BRCA2 (NM_000059.1,10422-10440).
ggccagtacggaagaatgt

SEQ ID NO: 19461 - DNA, 19 bp, Homo sapiens
  siRNA target sequence for BRCA2 (NM_000059.1,10424-10442).
ccagtacggaagaatgtga

SEQ ID NO: 19462 - DNA, 19 bp, Homo sapiens
  siRNA target sequence for BRCA2 (NM_000059.1,10453-10471).
caggacacaattacaacta

SEQ ID NO: 19463 - DNA, 19 bp, Homo sapiens
  siRNA target sequence for BRCA2 (NM_000059.1,10455-10473).
ggacacaattacaactaaa

SEQ ID NO: 19464 - DNA, 19 bp, Homo sapiens
  siRNA target sequence for BRCA2 (NM_000059.1,10456-10474).
gacacaattacaactaaaa

SEQ ID NO: 19465 - DNA, 19 bp, Homo sapiens
  siRNA target sequence for ERCC5 (NM_000123.1,276-294).
ctggctgttgatattagca

SEQ ID NO: 19466 - DNA, 19 bp, Homo sapiens
  siRNA target sequence for ERCC5 (NM_000123.1,278-296).
ggctgttgatattagcatt

SEQ ID NO: 19467 - DNA, 19 bp, Homo sapiens
  siRNA target sequence for ERCC5 (NM_000123.1,285-303).
gatattagcatttggttaa

SEQ ID NO: 19468 - DNA, 19 bp, Homo sapiens
  siRNA target sequence for ERCC5 (NM_000123.1,298-316).
ggttaaaccaagcacttaa

SEQ ID NO: 19469 - DNA, 19 bp, Homo sapiens
  siRNA target sequence for ERCC5 (NM_000123.1,327-345).
gatcgccatgggaactcaa

SEQ ID NO: 19470 - DNA, 19 bp, Homo sapiens
  siRNA target sequence for ERCC5 (NM_000123.1,331-349).
gccatgggaactcaataga

SEQ ID NO: 19471 - DNA, 19 bp, Homo sapiens
  siRNA target sequence for ERCC5 (NM_000123.1,333-351).
catgggaactcaatagaaa

SEQ ID NO: 19472 - DNA, 19 bp, Homo sapiens
  siRNA target sequence for ERCC5 (NM_000123.1,375-393).
catcggctctgcaaactct

SEQ ID NO: 19473 - DNA, 19 bp, Homo sapiens
  siRNA target sequence for ERCC5 (NM_000123.1,378-396).
cggctctgcaaactcttat

SEQ ID NO: 19474 - DNA, 19 bp, Homo sapiens
  siRNA target sequence for ERCC5 (NM_000123.1,383-401).
ctgcaaactcttatttttt

SEQ ID NO: 19475 - DNA, 19 bp, Homo sapiens
  siRNA target sequence for ERCC5 (NM_000123.1,392-410).
cttattttttcgaattcgt

SEQ ID NO: 19476 - DNA, 19 bp, Homo sapiens
  siRNA target sequence for ERCC5 (NM_000123.1,429-447).
ggggatgctccactattga

SEQ ID NO: 19477 - DNA, 19 bp, Homo sapiens
  siRNA target sequence for ERCC5 (NM_000123.1,430-448).
gggatgctccactattgaa

SEQ ID NO: 19478 - DNA, 19 bp, Homo sapiens
  siRNA target sequence for ERCC5 (NM_000123.1,436-454).
ctccactattgaagaaaca

SEQ ID NO: 19479 - DNA, 19 bp, Homo sapiens
  siRNA target sequence for ERCC5 (NM_000123.1,511-529).
cgacagagaagcttctgaa

SEQ ID NO: 19480 - DNA, 19 bp, Homo sapiens
  siRNA target sequence for ERCC5 (NM_000123.1,582-600).
gaagcactacccagtctta

SEQ ID NO: 19481 - DNA, 19 bp, Homo sapiens
  siRNA target sequence for ERCC5 (NM_000123.1,613-631).
gagaaaacgacctctatgt

SEQ ID NO: 19482 - DNA, 19 bp, Homo sapiens
  siRNA target sequence for ERCC5 (NM_000123.1,626-644).
ctatgttttgcctccttta

SEQ ID NO: 19483 - DNA, 19 bp, Homo sapiens
  siRNA target sequence for ERCC5 (NM_000123.1,692-710).
gcaagaaagaatgaatcaa

SEQ ID NO: 19484 - DNA, 19 bp, Homo sapiens
  siRNA target sequence for ERCC5 (NM_000123.1,718-736).
cattacaggaagagttctt

SEQ ID NO: 19485 - DNA, 19 bp, Homo sapiens
  siRNA target sequence for ERCC5 (NM_000123.1,745-763).
ctcaagcgatagatattga

SEQ ID NO: 19486 - DNA, 19 bp, Homo sapiens
  siRNA target sequence for ERCC5 (NM_000123.1,747-765).
caagcgatagatattgagt

SEQ ID NO: 19487 - DNA, 19 bp, Homo sapiens
  siRNA target sequence for ERCC5 (NM_000123.1,801-819).
catgaaatcttgactgata

SEQ ID NO: 19488 - DNA, 19 bp, Homo sapiens
  siRNA target sequence for ERCC5 (NM_000123.1,833-851).
caagcgcagaagaacatta

SEQ ID NO: 19489 - DNA, 19 bp, Homo sapiens
  siRNA target sequence for ERCC5 (NM_000123.1,836-854).
gcgcagaagaacattattt

SEQ ID NO: 19490 - DNA, 19 bp, Homo sapiens
  siRNA target sequence for ERCC5 (NM_000123.1,844-862).
gaacattatttgaagcaat

SEQ ID NO: 19491 - DNA, 19 bp, Homo sapiens
  siRNA target sequence for ERCC5 (NM_000123.1,897-915).
ctcaaaggcttgcttaaaa

SEQ ID NO: 19492 - DNA, 19 bp, Homo sapiens
  siRNA target sequence for ERCC5 (NM_000123.1,904-922).
gcttgcttaaaaagaacta

SEQ ID NO: 19493 - DNA, 19 bp, Homo sapiens
  siRNA target sequence for ERCC5 (NM_000123.1,920-938).
ctatctgaaccagcatata

SEQ ID NO: 19494 - DNA, 19 bp, Homo sapiens
  siRNA target sequence for ERCC5 (NM_000123.1,980-998).
catccgaaggcagtatgaa

SEQ ID NO: 19495 - DNA, 19 bp, Homo sapiens
  siRNA target sequence for ERCC5 (NM_000123.1,1050-1068).
gacacttcacattacatct

SEQ ID NO: 19496 - DNA, 19 bp, Homo sapiens
  siRNA target sequence for ERCC5 (NM_000123.1,1054-1072).
cttcacattacatcttgat

SEQ ID NO: 19497 - DNA, 19 bp, Homo sapiens
  siRNA target sequence for ERCC5 (NM_000123.1,1067-1085).
cttgataaaaggtattcaa

SEQ ID NO: 19498 - DNA, 19 bp, Homo sapiens
  siRNA target sequence for ERCC5 (NM_000123.1,1329-1347).
gtagacgaaggctccatat

SEQ ID NO: 19499 - DNA, 19 bp, Homo sapiens
  siRNA target sequence for ERCC5 (NM_000123.1,1354-1372).
ggactctttcagccattaa

SEQ ID NO: 19500 - DNA, 19 bp, Homo sapiens
  siRNA target sequence for ERCC5 (NM_000123.1,1443-1461).
gcagaagaaatgcgtataa

SEQ ID NO: 19501 - DNA, 19 bp, Homo sapiens
  siRNA target sequence for ERCC5 (NM_000123.1,1444-1462).
cagaagaaatgcgtataaa

SEQ ID NO: 19502 - DNA, 19 bp, Homo sapiens
  siRNA target sequence for ERCC5 (NM_000123.1,1478-1496).
cagtgatgaaggacttaaa

SEQ ID NO: 19503 - DNA, 19 bp, Homo sapiens
  siRNA target sequence for ERCC5 (NM_000123.1,1480-1498).
gtgatgaaggacttaaagt

SEQ ID NO: 19504 - DNA, 19 bp, Homo sapiens
  siRNA target sequence for ERCC5 (NM_000123.1,1565-1583).
gcacgtagccagcactaat

SEQ ID NO: 19505 - DNA, 19 bp, Homo sapiens
  siRNA target sequence for ERCC5 (NM_000123.1,1604-1622).
ctcagttccaaaagaacaa

SEQ ID NO: 19506 - DNA, 19 bp, Homo sapiens
  siRNA target sequence for ERCC5 (NM_000123.1,1657-1675).
cgataagtgatgagtctat

SEQ ID NO: 19507 - DNA, 19 bp, Homo sapiens
  siRNA target sequence for ERCC5 (NM_000123.1,1672-1690).
ctatgattaaggacagaaa

SEQ ID NO: 19508 - DNA, 19 bp, Homo sapiens
  siRNA target sequence for ERCC5 (NM_000123.1,1714-1732).
cagtggttagacatagtga

SEQ ID NO: 19509 - DNA, 19 bp, Homo sapiens
  siRNA target sequence for ERCC5 (NM_000123.1,1737-1755).
cctgggctcccgaatggaa

SEQ ID NO: 19510 - DNA, 19 bp, Homo sapiens
  siRNA target sequence for ERCC5 (NM_000123.1,1777-1795).
caacttgtacaaattctgt

SEQ ID NO: 19511 - DNA, 19 bp, Homo sapiens
  siRNA target sequence for ERCC5 (NM_000123.1,1827-1845).
gagcagcagaacgaacttt

SEQ ID NO: 19512 - DNA, 19 bp, Homo sapiens
  siRNA target sequence for ERCC5 (NM_000123.1,1839-1857).
gaactttgcccatatgaga

SEQ ID NO: 19513 - DNA, 19 bp, Homo sapiens
  siRNA target sequence for ERCC5 (NM_000123.1,1854-1872).
gagagtaaattcgattctt

SEQ ID NO: 19514 - DNA, 19 bp, Homo sapiens
  siRNA target sequence for ERCC5 (NM_000123.1,1856-1874).
gagtaaattcgattcttct

SEQ ID NO: 19515 - DNA, 19 bp, Homo sapiens
  siRNA target sequence for ERCC5 (NM_000123.1,1935-1953).
cctgtcagtttgcaagaaa

SEQ ID NO: 19516 - DNA, 19 bp, Homo sapiens
  siRNA target sequence for ERCC5 (NM_000123.1,1938-1956).
gtcagtttgcaagaaacaa

SEQ ID NO: 19517 - DNA, 19 bp, Homo sapiens
  siRNA target sequence for ERCC5 (NM_000123.1,1946-1964).
gcaagaaacaagtagcata

SEQ ID NO: 19518 - DNA, 19 bp, Homo sapiens
  siRNA target sequence for ERCC5 (NM_000123.1,1954-1972).
caagtagcatagtaagtgt

SEQ ID NO: 19519 - DNA, 19 bp, Homo sapiens
  siRNA target sequence for ERCC5 (NM_000123.1,1973-1991).
cccttcagaggcagtagat

SEQ ID NO: 19520 - DNA, 19 bp, Homo sapiens
  siRNA target sequence for ERCC5 (NM_000123.1,1997-2015).
ggaaaatgtggtgtcattt

SEQ ID NO: 19521 - DNA, 19 bp, Homo sapiens
  siRNA target sequence for ERCC5 (NM_000123.1,2101-2119).
caaaggccgtggaaccaat

SEQ ID NO: 19522 - DNA, 19 bp, Homo sapiens
  siRNA target sequence for ERCC5 (NM_000123.1,2107-2125).
ccgtggaaccaatggaaat

SEQ ID NO: 19523 - DNA, 19 bp, Homo sapiens
  siRNA target sequence for ERCC5 (NM_000123.1,2112-2130).
gaaccaatggaaattgact

SEQ ID NO: 19524 - DNA, 19 bp, Homo sapiens
  siRNA target sequence for ERCC5 (NM_000123.1,2168-2186).
gcaaagtgtgattagtgat

SEQ ID NO: 19525 - DNA, 19 bp, Homo sapiens
  siRNA target sequence for ERCC5 (NM_000123.1,2219-2237).
caaacctccctcagaacaa

SEQ ID NO: 19526 - DNA, 19 bp, Homo sapiens
  siRNA target sequence for ERCC5 (NM_000123.1,2361-2379).
gaagattcgctccatgaat

SEQ ID NO: 19527 - DNA, 19 bp, Homo sapiens
  siRNA target sequence for ERCC5 (NM_000123.1,2485-2503).
ctgtcaccggacagatgtt

SEQ ID NO: 19528 - DNA, 19 bp, Homo sapiens
  siRNA target sequence for ERCC5 (NM_000123.1,2652-2670).
cggcatgtctatagaaact

SEQ ID NO: 19529 - DNA, 19 bp, Homo sapiens
  siRNA target sequence for ERCC5 (NM_000123.1,2731-2749).
gattggaccggaataagtt

SEQ ID NO: 19530 - DNA, 19 bp, Homo sapiens
  siRNA target sequence for ERCC5 (NM_000123.1,2735-2753).
ggaccggaataagttaata

SEQ ID NO: 19531 - DNA, 19 bp, Homo sapiens
  siRNA target sequence for ERCC5 (NM_000123.1,2738-2756).
ccggaataagttaataaat

SEQ ID NO: 19532 - DNA, 19 bp, Homo sapiens
  siRNA target sequence for ERCC5 (NM_000123.1,2776-2794).
gtgattataccgaaggaat

SEQ ID NO: 19533 - DNA, 19 bp, Homo sapiens
  siRNA target sequence for ERCC5 (NM_000123.1,2796-2814).
ccaactgtgggttgtgtaa

SEQ ID NO: 19534 - DNA, 19 bp, Homo sapiens
  siRNA target sequence for ERCC5 (NM_000123.1,2809-2827).
gtgtaaccgccatggaaat

SEQ ID NO: 19535 - DNA, 19 bp, Homo sapiens
  siRNA target sequence for ERCC5 (NM_000123.1,2816-2834).
cgccatggaaattctcaat

SEQ ID NO: 19536 - DNA, 19 bp, Homo sapiens
  siRNA target sequence for ERCC5 (NM_000123.1,2852-2870).
cctggaacctctcctaaaa

SEQ ID NO: 19537 - DNA, 19 bp, Homo sapiens
  siRNA target sequence for ERCC5 (NM_000123.1,2856-2874).
gaacctctcctaaaattct

SEQ ID NO: 19538 - DNA, 19 bp, Homo sapiens
  siRNA target sequence for ERCC5 (NM_000123.1,2885-2903).
gcatgaagctcaaaaaaat

SEQ ID NO: 19539 - DNA, 19 bp, Homo sapiens
  siRNA target sequence for ERCC5 (NM_000123.1,3060-3078).
ctcgacaaaattagagaat

SEQ ID NO: 19540 - DNA, 19 bp, Homo sapiens
  siRNA target sequence for ERCC5 (NM_000123.1,3104-3122).
cagaacgaagacagatgaa

SEQ ID NO: 19541 - DNA, 19 bp, Homo sapiens
  siRNA target sequence for ERCC5 (NM_000123.1,3109-3127).
cgaagacagatgaatctct

SEQ ID NO: 19542 - DNA, 19 bp, Homo sapiens
  siRNA target sequence for ERCC5 (NM_000123.1,3113-3131).
gacagatgaatctctgttt

SEQ ID NO: 19543 - DNA, 19 bp, Homo sapiens
  siRNA target sequence for ERCC5 (NM_000123.1,3161-3179).
gacacagctccgaattgat

SEQ ID NO: 19544 - DNA, 19 bp, Homo sapiens
  siRNA target sequence for ERCC5 (NM_000123.1,3171-3189).
cgaattgattccttcttta

SEQ ID NO: 19545 - DNA, 19 bp, Homo sapiens
  siRNA target sequence for ERCC5 (NM_000123.1,3210-3228).
gaagatgctaaacgtatta

SEQ ID NO: 19546 - DNA, 19 bp, Homo sapiens
  siRNA target sequence for ERCC5 (NM_000123.1,3213-3231).
gatgctaaacgtattaaga

SEQ ID NO: 19547 - DNA, 19 bp, Homo sapiens
  siRNA target sequence for ERCC5 (NM_000123.1,3249-3267).
gctgtgacatgtatgctaa

SEQ ID NO: 19548 - DNA, 19 bp, Homo sapiens
  siRNA target sequence for ERCC5 (NM_000123.1,3254-3272).
gacatgtatgctaaggaaa

SEQ ID NO: 19549 - DNA, 19 bp, Homo sapiens
  siRNA target sequence for ERCC5 (NM_000123.1,3310-3328).
ctgttgccatggagaaaga

SEQ ID NO: 19550 - DNA, 19 bp, Homo sapiens
  siRNA target sequence for ERCC5 (NM_000123.1,3370-3388).
gaggcataacaaatacctt

SEQ ID NO: 19551 - DNA, 19 bp, Homo sapiens
  siRNA target sequence for ERCC5 (NM_000123.1,3416-3434).
gaggctttcagattctaaa

SEQ ID NO: 19552 - DNA, 19 bp, Homo sapiens
  siRNA target sequence for ERCC5 (NM_000123.1,3440-3458).
gaatacatgcggtggattt

SEQ ID NO: 19553 - DNA, 19 bp, Homo sapiens
  siRNA target sequence for ERCC5 (NM_000123.1,3552-3570).
gcgaaagagccaaaaacca

SEQ ID NO: 19554 - DNA, 19 bp, Homo sapiens
  siRNA target sequence for ERCC5 (NM_000123.1,3629-3647).
caccagcagctctagtgat

SEQ ID NO: 19555 - DNA, 19 bp, Homo sapiens
  siRNA target sequence for ERCC5 (NM_000123.1,3634-3652).
gcagctctagtgatagtga

SEQ ID NO: 19556 - DNA, 19 bp, Homo sapiens
  siRNA target sequence for ERCC5 (NM_000123.1,3686-3704).
gaccgccagatctgtgttt

SEQ ID NO: 19557 - DNA, 19 bp, Homo sapiens
  siRNA target sequence for ERCC5 (NM_000123.1,3727-3745).
gacgtgcgaggggaagaaa

SEQ ID NO: 19558 - DNA, 19 bp, Homo sapiens
  siRNA target sequence for HNRPDL (NM_005463.2,628-646).
ctccgctcccgctacttta

SEQ ID NO: 19559 - DNA, 19 bp, Homo sapiens
  siRNA target sequence for HNRPDL (NM_005463.2,921-939).
ccgacagctccgtcactat

SEQ ID NO: 19560 - DNA, 19 bp, Homo sapiens
  siRNA target sequence for HNRPDL (NM_005463.2,930-948).
ccgtcactatggaggatat

SEQ ID NO: 19561 - DNA, 19 bp, Homo sapiens
  siRNA target sequence for HNRPDL (NM_005463.2,932-950).
gtcactatggaggatatga

SEQ ID NO: 19562 - DNA, 19 bp, Homo sapiens
  siRNA target sequence for HNRPDL (NM_005463.2,1010-1028).
cagcaggatgacggtaaaa

SEQ ID NO: 19563 - DNA, 19 bp, Homo sapiens
  siRNA target sequence for HNRPDL (NM_005463.2,1013-1031).
caggatgacggtaaaatgt

SEQ ID NO: 19564 - DNA, 19 bp, Homo sapiens
  siRNA target sequence for HNRPDL (NM_005463.2,1100-1118).
gttgtagactgcacaatta

SEQ ID NO: 19565 - DNA, 19 bp, Homo sapiens
  siRNA target sequence for HNRPDL (NM_005463.2,1127-1145).
ccagtcactgggagatcaa

SEQ ID NO: 19566 - DNA, 19 bp, Homo sapiens
  siRNA target sequence for HNRPDL (NM_005463.2,1176-1194).
ctgctagtgttgataaggt

SEQ ID NO: 19567 - DNA, 19 bp, Homo sapiens
  siRNA target sequence for HNRPDL (NM_005463.2,1178-1196).
gctagtgttgataaggttt

SEQ ID NO: 19568 - DNA, 19 bp, Homo sapiens
  siRNA target sequence for HNRPDL (NM_005463.2,1179-1197).
ctagtgttgataaggtttt

SEQ ID NO: 19569 - DNA, 19 bp, Homo sapiens
  siRNA target sequence for HNRPDL (NM_005463.2,1219-1237).
ggatggcaaattgatagat

SEQ ID NO: 19570 - DNA, 19 bp, Homo sapiens
  siRNA target sequence for HNRPDL (NM_005463.2,1295-1313).
ggattgagcccggatactt

SEQ ID NO: 19571 - DNA, 19 bp, Homo sapiens
  siRNA target sequence for HNRPDL (NM_005463.2,1300-1318).
gagcccggatacttctgaa

SEQ ID NO: 19572 - DNA, 19 bp, Homo sapiens
  siRNA target sequence for HNRPDL (NM_005463.2,1370-1388).
cttcccatggatacaaaaa

SEQ ID NO: 19573 - DNA, 19 bp, Homo sapiens
  siRNA target sequence for HNRPDL (NM_005463.2,1476-1494).
gttctgggaagtgtgaaat

SEQ ID NO: 19574 - DNA, 19 bp, Homo sapiens
  siRNA target sequence for HNRPDL (NM_005463.2,1598-1616).
cgaggtcagggccaaaact

SEQ ID NO: 19575 - DNA, 19 bp, Homo sapiens
  siRNA target sequence for HNRPDL (NM_005463.2,1626-1644).
gatttaataactattatga

SEQ ID NO: 19576 - DNA, 19 bp, Homo sapiens
  siRNA target sequence for HNRPDL (NM_005463.2,1676-1694).
ggtggtgatcaaaactata

SEQ ID NO: 19577 - DNA, 19 bp, Homo sapiens
  siRNA target sequence for HNRPDL (NM_005463.2,1698-1716).
gctatggcggatatgatta

SEQ ID NO: 19578 - DNA, 19 bp, Homo sapiens
  siRNA target sequence for HNRPDL (NM_005463.2,1699-1717).
ctatggcggatatgattat

SEQ ID NO: 19579 - DNA, 19 bp, Homo sapiens
  siRNA target sequence for HNRPDL (NM_005463.2,1712-1730).
gattatactgggtataact

SEQ ID NO: 19580 - DNA, 19 bp, Homo sapiens
  siRNA target sequence for HNRPDL (NM_005463.2,1806-1824).
ggggtggcaatcaccaaaa

SEQ ID NO: 19581 - DNA, 19 bp, Homo sapiens
  siRNA target sequence for HNRPDL (NM_005463.2,1808-1826).
ggtggcaatcaccaaaaca

SEQ ID NO: 19582 - DNA, 19 bp, Homo sapiens
  siRNA target sequence for IGHMBP2 (NM_002180.1,275-293).
gcagctcttcccagtaaca

SEQ ID NO: 19583 - DNA, 19 bp, Homo sapiens
  siRNA target sequence for IGHMBP2 (NM_002180.1,284-302).
cccagtaacagctttactt

SEQ ID NO: 19584 - DNA, 19 bp, Homo sapiens
  siRNA target sequence for IGHMBP2 (NM_002180.1,294-312).
gctttacttctggtgatat

SEQ ID NO: 19585 - DNA, 19 bp, Homo sapiens
  siRNA target sequence for IGHMBP2 (NM_002180.1,319-337).
cctgtacgatgctgctaat

SEQ ID NO: 19586 - DNA, 19 bp, Homo sapiens
  siRNA target sequence for IGHMBP2 (NM_002180.1,467-485).
gccaatgatgtcacttaca

SEQ ID NO: 19587 - DNA, 19 bp, Homo sapiens
  siRNA target sequence for IGHMBP2 (NM_002180.1,478-496).
cacttacaggcgactgaaa

SEQ ID NO: 19588 - DNA, 19 bp, Homo sapiens
  siRNA target sequence for IGHMBP2 (NM_002180.1,480-498).
cttacaggcgactgaaaaa

SEQ ID NO: 19589 - DNA, 19 bp, Homo sapiens
  siRNA target sequence for IGHMBP2 (NM_002180.1,501-519).
ccctgattgctctaaagaa

SEQ ID NO: 19590 - DNA, 19 bp, Homo sapiens
  siRNA target sequence for IGHMBP2 (NM_002180.1,509-527).
gctctaaagaagtatcatt

SEQ ID NO: 19591 - DNA, 19 bp, Homo sapiens
  siRNA target sequence for IGHMBP2 (NM_002180.1,537-555).
cctcctcactcatagaagt

SEQ ID NO: 19592 - DNA, 19 bp, Homo sapiens
  siRNA target sequence for IGHMBP2 (NM_002180.1,579-597).
gtcctgccagtgaaataca

SEQ ID NO: 19593 - DNA, 19 bp, Homo sapiens
  siRNA target sequence for IGHMBP2 (NM_002180.1,714-732).
cgactgtggttgagatcat

SEQ ID NO: 19594 - DNA, 19 bp, Homo sapiens
  siRNA target sequence for IGHMBP2 (NM_002180.1,741-759).
ctgtgaaacaaggcttaaa

SEQ ID NO: 19595 - DNA, 19 bp, Homo sapiens
  siRNA target sequence for IGHMBP2 (NM_002180.1,883-901).
ctccctggatgcggtttta

SEQ ID NO: 19596 - DNA, 19 bp, Homo sapiens
  siRNA target sequence for IGHMBP2 (NM_002180.1,1088-1106).
gtggtccttgcaacaaaca

SEQ ID NO: 19597 - DNA, 19 bp, Homo sapiens
  siRNA target sequence for IGHMBP2 (NM_002180.1,1090-1108).
ggtccttgcaacaaacaca

SEQ ID NO: 19598 - DNA, 19 bp, Homo sapiens
  siRNA target sequence for IGHMBP2 (NM_002180.1,1377-1395).
gcatgcaccaggctatcat

SEQ ID NO: 19599 - DNA, 19 bp, Homo sapiens
  siRNA target sequence for IGHMBP2 (NM_002180.1,1656-1674).
ctgtggtctcgccatacaa

SEQ ID NO: 19600 - DNA, 19 bp, Homo sapiens
  siRNA target sequence for IGHMBP2 (NM_002180.1,1715-1733).
caccctgagcttgaaatca

SEQ ID NO: 19601 - DNA, 19 bp, Homo sapiens
  siRNA target sequence for IGHMBP2 (NM_002180.1,1718-1736).
cctgagcttgaaatcaagt

SEQ ID NO: 19602 - DNA, 19 bp, Homo sapiens
  siRNA target sequence for IGHMBP2 (NM_002180.1,1896-1914).
ctgtcaacaaccatgcatt

SEQ ID NO: 19603 - DNA, 19 bp, Homo sapiens
  siRNA target sequence for IGHMBP2 (NM_002180.1,1955-1973).
gtacgcacggcctttgagt

SEQ ID NO: 19604 - DNA, 19 bp, Homo sapiens
  siRNA target sequence for IGHMBP2 (NM_002180.1,1982-2000).
gatattgtcccagaaaact

SEQ ID NO: 19605 - DNA, 19 bp, Homo sapiens
  siRNA target sequence for IGHMBP2 (NM_002180.1,2313-2331).
ggctgcgggtccaccaaat

SEQ ID NO: 19606 - DNA, 19 bp, Homo sapiens
  siRNA target sequence for IGHMBP2 (NM_002180.1,2717-2735).
gccgttaaggctgataaca

SEQ ID NO: 19607 - DNA, 19 bp, Homo sapiens
  siRNA target sequence for KHDRBS1 (NM_006559.1,378-396).
ccacagcctcggtcaagat

SEQ ID NO: 19608 - DNA, 19 bp, Homo sapiens
  siRNA target sequence for KHDRBS1 (NM_006559.1,638-656).
ggaccacaagggaatacaa

SEQ ID NO: 19609 - DNA, 19 bp, Homo sapiens
  siRNA target sequence for KHDRBS1 (NM_006559.1,639-657).
gaccacaagggaatacaat

SEQ ID NO: 19610 - DNA, 19 bp, Homo sapiens
  siRNA target sequence for KHDRBS1 (NM_006559.1,680-698).
ggtgcaaagatctctgtat

SEQ ID NO: 19611 - DNA, 19 bp, Homo sapiens
  siRNA target sequence for KHDRBS1 (NM_006559.1,681-699).
gtgcaaagatctctgtatt

SEQ ID NO: 19612 - DNA, 19 bp, Homo sapiens
  siRNA target sequence for KHDRBS1 (NM_006559.1,819-837).
gtgaggcttatgctcttat

SEQ ID NO: 19613 - DNA, 19 bp, Homo sapiens
  siRNA target sequence for KHDRBS1 (NM_006559.1,875-893).
ccggatatgatggatgata

SEQ ID NO: 19614 - DNA, 19 bp, Homo sapiens
  siRNA target sequence for KHDRBS1 (NM_006559.1,876-894).
cggatatgatggatgatat

SEQ ID NO: 19615 - DNA, 19 bp, Homo sapiens
  siRNA target sequence for KHDRBS1 (NM_006559.1,878-896).
gatatgatggatgatatct

SEQ ID NO: 19616 - DNA, 19 bp, Homo sapiens
  siRNA target sequence for KHDRBS1 (NM_006559.1,895-913).
ctgtcaggagcaatttcta

SEQ ID NO: 19617 - DNA, 19 bp, Homo sapiens
  siRNA target sequence for KHDRBS1 (NM_006559.1,911-929).
ctagagctgtcctacttga

SEQ ID NO: 19618 - DNA, 19 bp, Homo sapiens
  siRNA target sequence for KHDRBS1 (NM_006559.1,1157-1175).
ggcatccagaggatacctt

SEQ ID NO: 19619 - DNA, 19 bp, Homo sapiens
  siRNA target sequence for KHDRBS1 (NM_006559.1,1158-1176).
gcatccagaggataccttt

SEQ ID NO: 19620 - DNA, 19 bp, Homo sapiens
  siRNA target sequence for KHDRBS1 (NM_006559.1,1223-1241).
gatacatacgcagaacaaa

SEQ ID NO: 19621 - DNA, 19 bp, Homo sapiens
  siRNA target sequence for KHDRBS1 (NM_006559.1,1227-1245).
catacgcagaacaaagtta

SEQ ID NO: 19622 - DNA, 19 bp, Homo sapiens
  siRNA target sequence for KHDRBS1 (NM_006559.1,1231-1249).
cgcagaacaaagttacgaa

SEQ ID NO: 19623 - DNA, 19 bp, Homo sapiens
  siRNA target sequence for KHDRBS1 (NM_006559.1,1250-1268).
ggctacgaaggctattaca

SEQ ID NO: 19624 - DNA, 19 bp, Homo sapiens
  siRNA target sequence for KHDRBS1 (NM_006559.1,1275-1293).
gtcaaggggactcagaata

SEQ ID NO: 19625 - DNA, 19 bp, Homo sapiens
  siRNA target sequence for KHDRBS1 (NM_006559.1,1285-1303).
ctcagaatattatgactat

SEQ ID NO: 19626 - DNA, 19 bp, Homo sapiens
  siRNA target sequence for KHDRBS1 (NM_006559.1,1305-1323).
gacatggggaggttcaaga

SEQ ID NO: 19627 - DNA, 19 bp, Homo sapiens
  siRNA target sequence for KHDRBS1 (NM_006559.1,1310-1328).
ggggaggttcaagattctt

SEQ ID NO: 19628 - DNA, 19 bp, Homo sapiens
  siRNA target sequence for KHDRBS1 (NM_006559.1,1311-1329).
gggaggttcaagattctta

SEQ ID NO: 19629 - DNA, 19 bp, Homo sapiens
  siRNA target sequence for KHDRBS1 (NM_006559.1,1312-1330).
ggaggttcaagattcttat

SEQ ID NO: 19630 - DNA, 19 bp, Homo sapiens
  siRNA target sequence for KHDRBS1 (NM_006559.1,1315-1333).
ggttcaagattcttatgaa

SEQ ID NO: 19631 - DNA, 19 bp, Homo sapiens
  siRNA target sequence for KHDRBS1 (NM_006559.1,1417-1435).
gcacccatatggacgttat

SEQ ID NO: 19632 - DNA, 19 bp, Homo sapiens
  siRNA target sequence for KHDRBS1 (NM_006559.1,1418-1436).
cacccatatggacgttatt

SEQ ID NO: 19633 - DNA, 19 bp, Homo sapiens
  siRNA target sequence for PC4 (NM_006713.2,269-287).
cgttagtgttcgcgatttt

SEQ ID NO: 19634 - DNA, 19 bp, Homo sapiens
  siRNA target sequence for PC4 (NM_006713.2,270-288).
gttagtgttcgcgatttta

SEQ ID NO: 19635 - DNA, 19 bp, Homo sapiens
  siRNA target sequence for PCBP1 (NM_006196.2,192-210).
gactgaaagtggactaaat

SEQ ID NO: 19636 - DNA, 19 bp, Homo sapiens
  siRNA target sequence for PCBP1 (NM_006196.2,196-214).
gaaagtggactaaatgtga

SEQ ID NO: 19637 - DNA, 19 bp, Homo sapiens
  siRNA target sequence for PCBP1 (NM_006196.2,517-535).
gggaaaggcgggtgtaaga

SEQ ID NO: 19638 - DNA, 19 bp, Homo sapiens
  siRNA target sequence for PCBP1 (NM_006196.2,518-536).
ggaaaggcgggtgtaagat

SEQ ID NO: 19639 - DNA, 19 bp, Homo sapiens
  siRNA target sequence for PCBP1 (NM_006196.2,524-542).
gcgggtgtaagatcaaaga

SEQ ID NO: 19640 - DNA, 19 bp, Homo sapiens
  siRNA target sequence for PCBP1 (NM_006196.2,526-544).
gggtgtaagatcaaagaga

SEQ ID NO: 19641 - DNA, 19 bp, Homo sapiens
  siRNA target sequence for PCBP1 (NM_006196.2,891-909).
gaaccaggtggcaagacaa

SEQ ID NO: 19642 - DNA, 19 bp, Homo sapiens
  siRNA target sequence for PCBP1 (NM_006196.2,941-959).
ccggattcgccggaattga

SEQ ID NO: 19643 - DNA, 19 bp, Homo sapiens
  siRNA target sequence for PCBP1 (NM_006196.2,943-961).
ggattcgccggaattgact

SEQ ID NO: 19644 - DNA, 19 bp, Homo sapiens
  siRNA target sequence for PCBP1 (NM_006196.2,1010-1028).
ctcaaaccacccatgaact

SEQ ID NO: 19645 - DNA, 19 bp, Homo sapiens
  siRNA target sequence for PCBP1 (NM_006196.2,1027-1045).
ctcaccattccaaataact

SEQ ID NO: 19646 - DNA, 19 bp, Homo sapiens
  siRNA target sequence for PCBP1 (NM_006196.2,1029-1047).
caccattccaaataactta

SEQ ID NO: 19647 - DNA, 19 bp, Homo sapiens
  siRNA target sequence for PCBP1 (NM_006196.2,1031-1049).
ccattccaaataacttaat

SEQ ID NO: 19648 - DNA, 19 bp, Homo sapiens
  siRNA target sequence for PCBP1 (NM_006196.2,1066-1084).
cgccaaggcgccaacatta

SEQ ID NO: 19649 - DNA, 19 bp, Homo sapiens
  siRNA target sequence for PCBP1 (NM_006196.2,1067-1085).
gccaaggcgccaacattaa

SEQ ID NO: 19650 - DNA, 19 bp, Homo sapiens
  siRNA target sequence for PCBP1 (NM_006196.2,1068-1086).
ccaaggcgccaacattaat

SEQ ID NO: 19651 - DNA, 19 bp, Homo sapiens
  siRNA target sequence for PCBP1 (NM_006196.2,1170-1188).
ctctgctgccagtattagt

SEQ ID NO: 19652 - DNA, 19 bp, Homo sapiens
  siRNA target sequence for PCBP1 (NM_006196.2,1187-1205).
gtctggcccagtatctaat

SEQ ID NO: 19653 - DNA, 19 bp, Homo sapiens
  siRNA target sequence for PIR51 (NM_006479.2,54-72).
gtgcggcctgtgagacata

SEQ ID NO: 19654 - DNA, 19 bp, Homo sapiens
  siRNA target sequence for PIR51 (NM_006479.2,57-75).
cggcctgtgagacataaga

SEQ ID NO: 19655 - DNA, 19 bp, Homo sapiens
  siRNA target sequence for PIR51 (NM_006479.2,58-76).
ggcctgtgagacataagaa

SEQ ID NO: 19656 - DNA, 19 bp, Homo sapiens
  siRNA target sequence for PIR51 (NM_006479.2,163-181).
cagcaccaaaggagttaaa

SEQ ID NO: 19657 - DNA, 19 bp, Homo sapiens
  siRNA target sequence for PIR51 (NM_006479.2,259-277).
ggatggctttagatgacaa

SEQ ID NO: 19658 - DNA, 19 bp, Homo sapiens
  siRNA target sequence for PIR51 (NM_006479.2,278-296).
gctctaccagagagactta

SEQ ID NO: 19659 - DNA, 19 bp, Homo sapiens
  siRNA target sequence for PIR51 (NM_006479.2,384-402).
ggcagtagtaaaatagaaa

SEQ ID NO: 19660 - DNA, 19 bp, Homo sapiens
  siRNA target sequence for PIR51 (NM_006479.2,417-435).
cctcatatctctaattgca

SEQ ID NO: 19661 - DNA, 19 bp, Homo sapiens
  siRNA target sequence for PIR51 (NM_006479.2,433-451).
gcagtgtagccagtgatta

SEQ ID NO: 19662 - DNA, 19 bp, Homo sapiens
  siRNA target sequence for PIR51 (NM_006479.2,434-452).
cagtgtagccagtgattat

SEQ ID NO: 19663 - DNA, 19 bp, Homo sapiens
  siRNA target sequence for PIR51 (NM_006479.2,436-454).
gtgtagccagtgattattt

SEQ ID NO: 19664 - DNA, 19 bp, Homo sapiens
  siRNA target sequence for PIR51 (NM_006479.2,441-459).
gccagtgattatttagatt

SEQ ID NO: 19665 - DNA, 19 bp, Homo sapiens
  siRNA target sequence for PIR51 (NM_006479.2,714-732).
gtaaaatccccagtagaaa

SEQ ID NO: 19666 - DNA, 19 bp, Homo sapiens
  siRNA target sequence for PIR51 (NM_006479.2,789-807).
gctccagctgccgtcaaat

SEQ ID NO: 19667 - DNA, 19 bp, Homo sapiens
  siRNA target sequence for PIR51 (NM_006479.2,793-811).
cagctgccgtcaaatcaga

SEQ ID NO: 19668 - DNA, 19 bp, Homo sapiens
  siRNA target sequence for PIR51 (NM_006479.2,795-813).
gctgccgtcaaatcagaat

SEQ ID NO: 19669 - DNA, 19 bp, Homo sapiens
  siRNA target sequence for PIR51 (NM_006479.2,799-817).
ccgtcaaatcagaatctca

SEQ ID NO: 19670 - DNA, 19 bp, Homo sapiens
  siRNA target sequence for PIR51 (NM_006479.2,818-836).
gtccttgccaaaaaaggtt

SEQ ID NO: 19671 - DNA, 19 bp, Homo sapiens
  siRNA target sequence for PIR51 (NM_006479.2,998-1016).
ccttggcttgtccagatta

SEQ ID NO: 19672 - DNA, 19 bp, Homo sapiens
  siRNA target sequence for POLG2 (NM_007215.1,508-526).
cagtgccttcaggttagtt

SEQ ID NO: 19673 - DNA, 19 bp, Homo sapiens
  siRNA target sequence for POLG2 (NM_007215.1,533-551).
gaaactctacgcgaaatct

SEQ ID NO: 19674 - DNA, 19 bp, Homo sapiens
  siRNA target sequence for POLG2 (NM_007215.1,543-561).
gcgaaatcttgcaagacaa

SEQ ID NO: 19675 - DNA, 19 bp, Homo sapiens
  siRNA target sequence for POLG2 (NM_007215.1,544-562).
cgaaatcttgcaagacaaa

SEQ ID NO: 19676 - DNA, 19 bp, Homo sapiens
  siRNA target sequence for POLG2 (NM_007215.1,598-616).
gaacgtattaaaaacttct

SEQ ID NO: 19677 - DNA, 19 bp, Homo sapiens
  siRNA target sequence for POLG2 (NM_007215.1,645-663).
gtgccttggaacactatgt

SEQ ID NO: 19678 - DNA, 19 bp, Homo sapiens
  siRNA target sequence for POLG2 (NM_007215.1,647-665).
gccttggaacactatgtta

SEQ ID NO: 19679 - DNA, 19 bp, Homo sapiens
  siRNA target sequence for POLG2 (NM_007215.1,648-666).
ccttggaacactatgttaa

SEQ ID NO: 19680 - DNA, 19 bp, Homo sapiens
  siRNA target sequence for POLG2 (NM_007215.1,669-687).
gcctggatctggtaaacaa

SEQ ID NO: 19681 - DNA, 19 bp, Homo sapiens
  siRNA target sequence for POLG2 (NM_007215.1,740-758).
gacactaagcagatacgaa

SEQ ID NO: 19682 - DNA, 19 bp, Homo sapiens
  siRNA target sequence for POLG2 (NM_007215.1,742-760).
cactaagcagatacgaaat

SEQ ID NO: 19683 - DNA, 19 bp, Homo sapiens
  siRNA target sequence for POLG2 (NM_007215.1,755-773).
cgaaatggtgttaaaagta

SEQ ID NO: 19684 - DNA, 19 bp, Homo sapiens
  siRNA target sequence for POLG2 (NM_007215.1,784-802).
gactgaagcttcgttagta

SEQ ID NO: 19685 - DNA, 19 bp, Homo sapiens
  siRNA target sequence for POLG2 (NM_007215.1,791-809).
gcttcgttagtatggttta

SEQ ID NO: 19686 - DNA, 19 bp, Homo sapiens
  siRNA target sequence for POLG2 (NM_007215.1,881-899).
gccatgagtccatctaact

SEQ ID NO: 19687 - DNA, 19 bp, Homo sapiens
  siRNA target sequence for POLG2 (NM_007215.1,963-981).
cctggggaaaggagttaat

SEQ ID NO: 19688 - DNA, 19 bp, Homo sapiens
  siRNA target sequence for POLG2 (NM_007215.1,964-982).
ctggggaaaggagttaata

SEQ ID NO: 19689 - DNA, 19 bp, Homo sapiens
  siRNA target sequence for POLG2 (NM_007215.1,966-984).
ggggaaaggagttaataga

SEQ ID NO: 19690 - DNA, 19 bp, Homo sapiens
  siRNA target sequence for POLG2 (NM_007215.1,1032-1050).
gcaatgtgtctaaattaca

SEQ ID NO: 19691 - DNA, 19 bp, Homo sapiens
  siRNA target sequence for POLG2 (NM_007215.1,1052-1070).
ggccgagatggacgaaaaa

SEQ ID NO: 19692 - DNA, 19 bp, Homo sapiens
  siRNA target sequence for POLG2 (NM_007215.1,1053-1071).
gccgagatggacgaaaaaa

SEQ ID NO: 19693 - DNA, 19 bp, Homo sapiens
  siRNA target sequence for POLG2 (NM_007215.1,1079-1097).
ccttgtgttctctctgtaa

SEQ ID NO: 19694 - DNA, 19 bp, Homo sapiens
  siRNA target sequence for POLG2 (NM_007215.1,1080-1098).
cttgtgttctctctgtaaa

SEQ ID NO: 19695 - DNA, 19 bp, Homo sapiens
  siRNA target sequence for POLG2 (NM_007215.1,1120-1138).
gctggcctacctctatgat

SEQ ID NO: 19696 - DNA, 19 bp, Homo sapiens
  siRNA target sequence for POLG2 (NM_007215.1,1121-1139).
ctggcctacctctatgatt

SEQ ID NO: 19697 - DNA, 19 bp, Homo sapiens
  siRNA target sequence for POLG2 (NM_007215.1,1208-1226).
ccttgtttagcccctatta

SEQ ID NO: 19698 - DNA, 19 bp, Homo sapiens
  siRNA target sequence for POLG2 (NM_007215.1,1209-1227).
cttgtttagcccctattaa

SEQ ID NO: 19699 - DNA, 19 bp, Homo sapiens
  siRNA target sequence for POLG2 (NM_007215.1,1212-1230).
gtttagcccctattaaggt

SEQ ID NO: 19700 - DNA, 19 bp, Homo sapiens
  siRNA target sequence for POLG2 (NM_007215.1,1274-1292).
gtttgtcaagggctattta

SEQ ID NO: 19701 - DNA, 19 bp, Homo sapiens
  siRNA target sequence for POLG2 (NM_007215.1,1278-1296).
gtcaagggctatttaatga

SEQ ID NO: 19702 - DNA, 19 bp, Homo sapiens
  siRNA target sequence for POLG2 (NM_007215.1,1284-1302).
ggctatttaatgagttact

SEQ ID NO: 19703 - DNA, 19 bp, Homo sapiens
  siRNA target sequence for POLG2 (NM_007215.1,1285-1303).
gctatttaatgagttacta

SEQ ID NO: 19704 - DNA, 19 bp, Homo sapiens
  siRNA target sequence for POLG2 (NM_007215.1,1317-1335).
ctgtgtggcctggttattt

SEQ ID NO: 19705 - DNA, 19 bp, Homo sapiens
  siRNA target sequence for POLG2 (NM_007215.1,1321-1339).
gtggcctggttatttggaa

SEQ ID NO: 19706 - DNA, 19 bp, Homo sapiens
  siRNA target sequence for POLG2 (NM_007215.1,1351-1369).
ctcattggaacaactttat

SEQ ID NO: 19707 - DNA, 19 bp, Homo sapiens
  siRNA target sequence for POLG2 (NM_007215.1,1477-1495).
gatgcatatatccaaatta

SEQ ID NO: 19708 - DNA, 19 bp, Homo sapiens
  siRNA target sequence for RAD23A (NM_005053.2,116-134).
gtcaccatcacgctcaaaa

SEQ ID NO: 19709 - DNA, 19 bp, Homo sapiens
  siRNA target sequence for RAD23A (NM_005053.2,180-198).
cggtgaaggtgctaaagga

SEQ ID NO: 19710 - DNA, 19 bp, Homo sapiens
  siRNA target sequence for RAD23A (NM_005053.2,232-250).
ccccgtggctggacagaaa

SEQ ID NO: 19711 - DNA, 19 bp, Homo sapiens
  siRNA target sequence for RAD23A (NM_005053.2,603-621).
cgatgctgacggagatcat

SEQ ID NO: 19712 - DNA, 19 bp, Homo sapiens
  siRNA target sequence for RAD23A (NM_005053.2,901-919).
ggagaaccctcagctttta

SEQ ID NO: 19713 - DNA, 19 bp, Homo sapiens
  siRNA target sequence for RAD23A (NM_005053.2,1127-1145).
gcctatttcgcgtgtgaaa

SEQ ID NO: 19714 - DNA, 19 bp, Homo sapiens
  siRNA target sequence for RAD23A (NM_005053.2,1128-1146).
cctatttcgcgtgtgaaaa

SEQ ID NO: 19715 - DNA, 19 bp, Homo sapiens
  siRNA target sequence for RAD23A (NM_005053.2,1129-1147).
ctatttcgcgtgtgaaaaa

SEQ ID NO: 19716 - DNA, 19 bp, Homo sapiens
  siRNA target sequence for RAD23A (NM_005053.2,1136-1154).
gcgtgtgaaaaaaatgaga

SEQ ID NO: 19717 - DNA, 19 bp, Homo sapiens
  siRNA target sequence for RAD23B (NM_002874.2,470-488).
cagtagcaggtcaaaaatt

SEQ ID NO: 19718 - DNA, 19 bp, Homo sapiens
  siRNA target sequence for RAD23B (NM_002874.2,472-490).
gtagcaggtcaaaaattaa

SEQ ID NO: 19719 - DNA, 19 bp, Homo sapiens
  siRNA target sequence for RAD23B (NM_002874.2,475-493).
gcaggtcaaaaattaattt

SEQ ID NO: 19720 - DNA, 19 bp, Homo sapiens
  siRNA target sequence for RAD23B (NM_002874.2,770-788).
ctagtgcagctaaacaaga

SEQ ID NO: 19721 - DNA, 19 bp, Homo sapiens
  siRNA target sequence for RAD23B (NM_002874.2,863-881).
cttctcggtcaaacctttt

SEQ ID NO: 19722 - DNA, 19 bp, Homo sapiens
  siRNA target sequence for RAD23B (NM_002874.2,866-884).
ctcggtcaaacctttttga

SEQ ID NO: 19723 - DNA, 19 bp, Homo sapiens
  siRNA target sequence for RAD23B (NM_002874.2,869-887).
ggtcaaacctttttgaaga

SEQ ID NO: 19724 - DNA, 19 bp, Homo sapiens
  siRNA target sequence for RAD23B (NM_002874.2,910-928).
ggtcagtcttacgagaata

SEQ ID NO: 19725 - DNA, 19 bp, Homo sapiens
  siRNA target sequence for RAD23B (NM_002874.2,911-929).
gtcagtcttacgagaatat

SEQ ID NO: 19726 - DNA, 19 bp, Homo sapiens
  siRNA target sequence for RAD23B (NM_002874.2,915-933).
gtcttacgagaatatggta

SEQ ID NO: 19727 - DNA, 19 bp, Homo sapiens
  siRNA target sequence for RAD23B (NM_002874.2,931-949).
gtaactgagatcatgtcaa

SEQ ID NO: 19728 - DNA, 19 bp, Homo sapiens
  siRNA target sequence for RAD23B (NM_002874.2,1008-1026).
cagagcagtggagtatctt

SEQ ID NO: 19729 - DNA, 19 bp, Homo sapiens
  siRNA target sequence for RAD23B (NM_002874.2,1010-1028).
gagcagtggagtatctttt

SEQ ID NO: 19730 - DNA, 19 bp, Homo sapiens
  siRNA target sequence for RAD23B (NM_002874.2,1166-1184).
gaggacatccccttgaatt

SEQ ID NO: 19731 - DNA, 19 bp, Homo sapiens
  siRNA target sequence for RAD23B (NM_002874.2,1191-1209).
gaatcagcctcagtttcaa

SEQ ID NO: 19732 - DNA, 19 bp, Homo sapiens
  siRNA target sequence for RAD23B (NM_002874.2,1242-1260).
cttgcttccagcgttacta

SEQ ID NO: 19733 - DNA, 19 bp, Homo sapiens
  siRNA target sequence for RAD23B (NM_002874.2,1263-1281).
gcagataggtcgagagaat

SEQ ID NO: 19734 - DNA, 19 bp, Homo sapiens
  siRNA target sequence for RAD23B (NM_002874.2,1271-1289).
gtcgagagaatcctcaatt

SEQ ID NO: 19735 - DNA, 19 bp, Homo sapiens
  siRNA target sequence for RAD23B (NM_002874.2,1274-1292).
gagagaatcctcaattact

SEQ ID NO: 19736 - DNA, 19 bp, Homo sapiens
  siRNA target sequence for RAD23B (NM_002874.2,1305-1323).
ccaacaccaggagcatttt

SEQ ID NO: 19737 - DNA, 19 bp, Homo sapiens
  siRNA target sequence for RAD23B (NM_002874.2,1412-1430).
gtggtcatatgaactacat

SEQ ID NO: 19738 - DNA, 19 bp, Homo sapiens
  siRNA target sequence for RAD23B (NM_002874.2,1415-1433).
gtcatatgaactacattca

SEQ ID NO: 19739 - DNA, 19 bp, Homo sapiens
  siRNA target sequence for RAD23B (NM_002874.2,1466-1484).
ggttaaaggcattaggatt

SEQ ID NO: 19740 - DNA, 19 bp, Homo sapiens
  siRNA target sequence for RAD23B (NM_002874.2,1467-1485).
gttaaaggcattaggattt

SEQ ID NO: 19741 - DNA, 19 bp, Homo sapiens
  siRNA target sequence for RAD23B (NM_002874.2,1500-1518).
gatacaagcgtattttgct

SEQ ID NO: 19742 - DNA, 19 bp, Homo sapiens
  siRNA target sequence for RAD23B (NM_002874.2,1539-1557).
ggctgccaattttcttcta

SEQ ID NO: 19743 - DNA, 19 bp, Homo sapiens
  siRNA target sequence for RBMS1 (NM_002897.2,620-638).
ggaatcaacagaaaaatgt

SEQ ID NO: 19744 - DNA, 19 bp, Homo sapiens
  siRNA target sequence for RBMS1 (NM_002897.2,696-714).
gcccccacagaacctttat

SEQ ID NO: 19745 - DNA, 19 bp, Homo sapiens
  siRNA target sequence for RBMS1 (NM_002897.2,697-715).
cccccacagaacctttatt

SEQ ID NO: 19746 - DNA, 19 bp, Homo sapiens
  siRNA target sequence for RBMS1 (NM_002897.2,699-717).
cccacagaacctttattgt

SEQ ID NO: 19747 - DNA, 19 bp, Homo sapiens
  siRNA target sequence for RBMS1 (NM_002897.2,703-721).
cagaacctttattgtgtaa

SEQ ID NO: 19748 - DNA, 19 bp, Homo sapiens
  siRNA target sequence for RBMS1 (NM_002897.2,778-796).
gaagaccatggcatagaga

SEQ ID NO: 19749 - DNA, 19 bp, Homo sapiens
  siRNA target sequence for RBMS1 (NM_002897.2,801-819).
gaggctggaatgacactta

SEQ ID NO: 19750 - DNA, 19 bp, Homo sapiens
  siRNA target sequence for RBMS1 (NM_002897.2,829-847).
caactacagctgctataca

SEQ ID NO: 19751 - DNA, 19 bp, Homo sapiens
  siRNA target sequence for RBMS1 (NM_002897.2,887-905).
ccgaatgatcactcaaact

SEQ ID NO: 19752 - DNA, 19 bp, Homo sapiens
  siRNA target sequence for RBMS1 (NM_002897.2,896-914).
cactcaaacttctattaca

SEQ ID NO: 19753 - DNA, 19 bp, Homo sapiens
  siRNA target sequence for RBMS1 (NM_002897.2,968-986).
gcaacctcaaccatatatt

SEQ ID NO: 19754 - DNA, 19 bp, Homo sapiens
  siRNA target sequence for RBMS1 (NM_002897.2,1036-1054).
cactacagcccgcatcaat

SEQ ID NO: 19755 - DNA, 19 bp, Homo sapiens
  siRNA target sequence for RBMS1 (NM_002897.2,1041-1059).
cagcccgcatcaatgatca

SEQ ID NO: 19756 - DNA, 19 bp, Homo sapiens
  siRNA target sequence for RBMS1 (NM_002897.2,1095-1113).
ggcagcaccggaacataca

SEQ ID NO: 19757 - DNA, 19 bp, Homo sapiens
  siRNA target sequence for RBMS1 (NM_002897.2,1096-1114).
gcagcaccggaacatacat

SEQ ID NO: 19758 - DNA, 19 bp, Homo sapiens
  siRNA target sequence for RBMS1 (NM_002897.2,1214-1232).
ggctgtcgagacgtctaat

SEQ ID NO: 19759 - DNA, 19 bp, Homo sapiens
  siRNA target sequence for RBMS1 (NM_002897.2,1216-1234).
ctgtcgagacgtctaatga

SEQ ID NO: 19760 - DNA, 19 bp, Homo sapiens
  siRNA target sequence for RBMS1 (NM_002897.2,1233-1251).
gaccattctccatatacct

SEQ ID NO: 19761 - DNA, 19 bp, Homo sapiens
  siRNA target sequence for RBMS1 (NM_002897.2,1243-1261).
catatacctttcaacctaa

SEQ ID NO: 19762 - DNA, 19 bp, Homo sapiens
  siRNA target sequence for RPA1 (NM_002945.2,88-106).
gaagggggatacaaacata

SEQ ID NO: 19763 - DNA, 19 bp, Homo sapiens
  siRNA target sequence for RPA1 (NM_002945.2,127-145).
caacatccgtcccattact

SEQ ID NO: 19764 - DNA, 19 bp, Homo sapiens
  siRNA target sequence for RPA1 (NM_002945.2,139-157).
cattactacggggaatagt

SEQ ID NO: 19765 - DNA, 19 bp, Homo sapiens
  siRNA target sequence for RPA1 (NM_002945.2,185-203).
gatggattgaacactctat

SEQ ID NO: 19766 - DNA, 19 bp, Homo sapiens
  siRNA target sequence for RPA1 (NM_002945.2,198-216).
ctctatcctctttcatgtt

SEQ ID NO: 19767 - DNA, 19 bp, Homo sapiens
  siRNA target sequence for RPA1 (NM_002945.2,234-252).
ctctcgtggaggaagaaca

SEQ ID NO: 19768 - DNA, 19 bp, Homo sapiens
  siRNA target sequence for RPA1 (NM_002945.2,239-257).
gtggaggaagaacaattgt

SEQ ID NO: 19769 - DNA, 19 bp, Homo sapiens
  siRNA target sequence for RPA1 (NM_002945.2,273-291).
gccagattcacagatttat

SEQ ID NO: 19770 - DNA, 19 bp, Homo sapiens
  siRNA target sequence for RPA1 (NM_002945.2,274-292).
ccagattcacagatttatt

SEQ ID NO: 19771 - DNA, 19 bp, Homo sapiens
  siRNA target sequence for RPA1 (NM_002945.2,315-333).
ggagagtagttatcttgat

SEQ ID NO: 19772 - DNA, 19 bp, Homo sapiens
  siRNA target sequence for RPA1 (NM_002945.2,382-400).
caatccagtgccctataat

SEQ ID NO: 19773 - DNA, 19 bp, Homo sapiens
  siRNA target sequence for RPA1 (NM_002945.2,487-505).
ctcgggaatgggttctact

SEQ ID NO: 19774 - DNA, 19 bp, Homo sapiens
  siRNA target sequence for RPA1 (NM_002945.2,490-508).
gggaatgggttctactgtt

SEQ ID NO: 19775 - DNA, 19 bp, Homo sapiens
  siRNA target sequence for RPA1 (NM_002945.2,623-641).
cagtccaagtggaccattt

SEQ ID NO: 19776 - DNA, 19 bp, Homo sapiens
  siRNA target sequence for RPA1 (NM_002945.2,625-643).
gtccaagtggaccatttgt

SEQ ID NO: 19777 - DNA, 19 bp, Homo sapiens
  siRNA target sequence for RPA1 (NM_002945.2,644-662).
gctcgtgttaccaacaaaa

SEQ ID NO: 19778 - DNA, 19 bp, Homo sapiens
  siRNA target sequence for RPA1 (NM_002945.2,742-760).
ccgagctacagctttcaat

SEQ ID NO: 19779 - DNA, 19 bp, Homo sapiens
  siRNA target sequence for RPA1 (NM_002945.2,744-762).
gagctacagctttcaatga

SEQ ID NO: 19780 - DNA, 19 bp, Homo sapiens
  siRNA target sequence for RPA1 (NM_002945.2,783-801).
ctcttattgaagtgaacaa

SEQ ID NO: 19781 - DNA, 19 bp, Homo sapiens
  siRNA target sequence for RPA1 (NM_002945.2,821-839).
ggcaccctgaagattgcta

SEQ ID NO: 19782 - DNA, 19 bp, Homo sapiens
  siRNA target sequence for RPA1 (NM_002945.2,844-862).
gcagttcacagctgttaaa

SEQ ID NO: 19783 - DNA, 19 bp, Homo sapiens
  siRNA target sequence for RPA1 (NM_002945.2,847-865).
gttcacagctgttaaaaat

SEQ ID NO: 19784 - DNA, 19 bp, Homo sapiens
  siRNA target sequence for RPA1 (NM_002945.2,868-886).
ctacgagatgaccttcaat

SEQ ID NO: 19785 - DNA, 19 bp, Homo sapiens
  siRNA target sequence for RPA1 (NM_002945.2,913-931).
ggacgaccatcatttacct

SEQ ID NO: 19786 - DNA, 19 bp, Homo sapiens
  siRNA target sequence for RPA1 (NM_002945.2,914-932).
gacgaccatcatttaccta

SEQ ID NO: 19787 - DNA, 19 bp, Homo sapiens
  siRNA target sequence for RPA1 (NM_002945.2,929-947).
cctacggttcagtttgatt

SEQ ID NO: 19788 - DNA, 19 bp, Homo sapiens
  siRNA target sequence for RPA1 (NM_002945.2,930-948).
ctacggttcagtttgattt

SEQ ID NO: 19789 - DNA, 19 bp, Homo sapiens
  siRNA target sequence for RPA1 (NM_002945.2,959-977).
gatgacctcgagaacaagt

SEQ ID NO: 19790 - DNA, 19 bp, Homo sapiens
  siRNA target sequence for RPA1 (NM_002945.2,976-994).
gtcgaaagactcacttgta

SEQ ID NO: 19791 - DNA, 19 bp, Homo sapiens
  siRNA target sequence for RPA1 (NM_002945.2,978-996).
cgaaagactcacttgtaga

SEQ ID NO: 19792 - DNA, 19 bp, Homo sapiens
  siRNA target sequence for RPA1 (NM_002945.2,1018-1036).
ctatgaagacgccactaaa

SEQ ID NO: 19793 - DNA, 19 bp, Homo sapiens
  siRNA target sequence for RPA1 (NM_002945.2,1022-1040).
gaagacgccactaaaatca

SEQ ID NO: 19794 - DNA, 19 bp, Homo sapiens
  siRNA target sequence for RPA1 (NM_002945.2,1048-1066).
gtctaacaacagagaagtt

SEQ ID NO: 19795 - DNA, 19 bp, Homo sapiens
  siRNA target sequence for RPA1 (NM_002945.2,1162-1180).
gcccgtgttggctatcaaa

SEQ ID NO: 19796 - DNA, 19 bp, Homo sapiens
  siRNA target sequence for RPA1 (NM_002945.2,1181-1199).
ggagcccgagtctctgatt

SEQ ID NO: 19797 - DNA, 19 bp, Homo sapiens
  siRNA target sequence for RPA1 (NM_002945.2,1182-1200).
gagcccgagtctctgattt

SEQ ID NO: 19798 - DNA, 19 bp, Homo sapiens
  siRNA target sequence for RPA1 (NM_002945.2,1214-1232).
ctctccgtgctgtcttcaa

SEQ ID NO: 19799 - DNA, 19 bp, Homo sapiens
  siRNA target sequence for RPA1 (NM_002945.2,1225-1243).
gtcttcaagcactatcatt

SEQ ID NO: 19800 - DNA, 19 bp, Homo sapiens
  siRNA target sequence for RPA1 (NM_002945.2,1258-1276).
cccagaggcctataagctt

SEQ ID NO: 19801 - DNA, 19 bp, Homo sapiens
  siRNA target sequence for RPA1 (NM_002945.2,1343-1361).
ggagtcggagggagtaaca

SEQ ID NO: 19802 - DNA, 19 bp, Homo sapiens
  siRNA target sequence for RPA1 (NM_002945.2,1363-1381).
caactggaaaaccttgtat

SEQ ID NO: 19803 - DNA, 19 bp, Homo sapiens
  siRNA target sequence for RPA1 (NM_002945.2,1412-1430).
gacaagccggactacttta

SEQ ID NO: 19804 - DNA, 19 bp, Homo sapiens
  siRNA target sequence for RPA1 (NM_002945.2,1414-1432).
caagccggactactttagt

SEQ ID NO: 19805 - DNA, 19 bp, Homo sapiens
  siRNA target sequence for RPA1 (NM_002945.2,1417-1435).
gccggactactttagttct

SEQ ID NO: 19806 - DNA, 19 bp, Homo sapiens
  siRNA target sequence for RPA1 (NM_002945.2,1487-1505).
ccgactcaggactgcaata

SEQ ID NO: 19807 - DNA, 19 bp, Homo sapiens
  siRNA target sequence for RPA1 (NM_002945.2,1488-1506).
cgactcaggactgcaataa

SEQ ID NO: 19808 - DNA, 19 bp, Homo sapiens
  siRNA target sequence for RPA1 (NM_002945.2,1491-1509).
ctcaggactgcaataagaa

SEQ ID NO: 19809 - DNA, 19 bp, Homo sapiens
  siRNA target sequence for RPA1 (NM_002945.2,1546-1564).
gaagtgcgacaccgaattt

SEQ ID NO: 19810 - DNA, 19 bp, Homo sapiens
  siRNA target sequence for RPA1 (NM_002945.2,1676-1694).
gcttatcttggggaattaa

SEQ ID NO: 19811 - DNA, 19 bp, Homo sapiens
  siRNA target sequence for RPA1 (NM_002945.2,1736-1754).
gccaacttccgatctttca

SEQ ID NO: 19812 - DNA, 19 bp, Homo sapiens
  siRNA target sequence for RPA1 (NM_002945.2,1737-1755).
ccaacttccgatctttcat

SEQ ID NO: 19813 - DNA, 19 bp, Homo sapiens
  siRNA target sequence for RPA1 (NM_002945.2,1738-1756).
caacttccgatctttcata

SEQ ID NO: 19814 - DNA, 19 bp, Homo sapiens
  siRNA target sequence for RPA1 (NM_002945.2,1744-1762).
ccgatctttcatattcaga

SEQ ID NO: 19815 - DNA, 19 bp, Homo sapiens
  siRNA target sequence for RPA1 (NM_002945.2,1786-1804).
caacgacgagtctcgaatt

SEQ ID NO: 19816 - DNA, 19 bp, Homo sapiens
  siRNA target sequence for RPA2 (NM_002946.3,285-303).
gtggaacagtggattcgaa

SEQ ID NO: 19817 - DNA, 19 bp, Homo sapiens
  siRNA target sequence for RPA2 (NM_002946.3,291-309).
cagtggattcgaaagctat

SEQ ID NO: 19818 - DNA, 19 bp, Homo sapiens
  siRNA target sequence for RPA2 (NM_002946.3,376-394).
ccttctcaagccgaaaaga

SEQ ID NO: 19819 - DNA, 19 bp, Homo sapiens
  siRNA target sequence for RPA2 (NM_002946.3,404-422).
cccgagcccagcacattgt

SEQ ID NO: 19820 - DNA, 19 bp, Homo sapiens
  siRNA target sequence for RPA2 (NM_002946.3,449-467).
ctgccactttggttgatga

SEQ ID NO: 19821 - DNA, 19 bp, Homo sapiens
  siRNA target sequence for RPA2 (NM_002946.3,482-500).
ggaatgttgagatttcaca

SEQ ID NO: 19822 - DNA, 19 bp, Homo sapiens
  siRNA target sequence for RPA2 (NM_002946.3,534-552).
gaaggctccaaccaacatt

SEQ ID NO: 19823 - DNA, 19 bp, Homo sapiens
  siRNA target sequence for RPA2 (NM_002946.3,537-555).
ggctccaaccaacattgtt

SEQ ID NO: 19824 - DNA, 19 bp, Homo sapiens
  siRNA target sequence for RPA2 (NM_002946.3,538-556).
gctccaaccaacattgttt

SEQ ID NO: 19825 - DNA, 19 bp, Homo sapiens
  siRNA target sequence for RPA2 (NM_002946.3,539-557).
ctccaaccaacattgttta

SEQ ID NO: 19826 - DNA, 19 bp, Homo sapiens
  siRNA target sequence for RPA2 (NM_002946.3,668-686).
caggccacctgagatcttt

SEQ ID NO: 19827 - DNA, 19 bp, Homo sapiens
  siRNA target sequence for RPA2 (NM_002946.3,701-719).
gcctggtagcctttaagat

SEQ ID NO: 19828 - DNA, 19 bp, Homo sapiens
  siRNA target sequence for RPA2 (NM_002946.3,703-721).
ctggtagcctttaagatca

SEQ ID NO: 19829 - DNA, 19 bp, Homo sapiens
  siRNA target sequence for RPA2 (NM_002946.3,776-794).
cacacatggtactaagcaa

SEQ ID NO: 19830 - DNA, 19 bp, Homo sapiens
  siRNA target sequence for RPA2 (NM_002946.3,944-962).
gacctgaagggttgaactt

SEQ ID NO: 19831 - DNA, 19 bp, Homo sapiens
  siRNA target sequence for RPA2 (NM_002946.3,1031-1049).
gcaatgaggggcacatcta

SEQ ID NO: 19832 - DNA, 19 bp, Homo sapiens
  siRNA target sequence for RPA2 (NM_002946.3,1032-1050).
caatgaggggcacatctat

SEQ ID NO: 19833 - DNA, 19 bp, Homo sapiens
  siRNA target sequence for RPA2 (NM_002946.3,1038-1056).
ggggcacatctattctact

SEQ ID NO: 19834 - DNA, 19 bp, Homo sapiens
  siRNA target sequence for RPA2 (NM_002946.3,1063-1081).
gatgaccattttaaatcca

SEQ ID NO: 19835 - DNA, 19 bp, Homo sapiens
  siRNA target sequence for RPA3 (NM_002947.2,1284-1302).
catcccaccggaaaaatgt

SEQ ID NO: 19836 - DNA, 19 bp, Homo sapiens
  siRNA target sequence for RPA3 (NM_002947.2,1288-1306).
ccaccggaaaaatgtttat

SEQ ID NO: 19837 - DNA, 19 bp, Homo sapiens
  siRNA target sequence for RPA3 (NM_002947.2,1289-1307).
caccggaaaaatgtttatt

SEQ ID NO: 19838 - DNA, 19 bp, Homo sapiens
  siRNA target sequence for RPA3 (NM_002947.2,1346-1364).
gatggaaccccttgatgaa

SEQ ID NO: 19839 - DNA, 19 bp, Homo sapiens
  siRNA target sequence for RPA3 (NM_002947.2,1349-1367).
ggaaccccttgatgaagaa

SEQ ID NO: 19840 - DNA, 19 bp, Homo sapiens
  siRNA target sequence for RPA3 (NM_002947.2,1412-1430).
caccatcttgtgtacatct

SEQ ID NO: 19841 - DNA, 19 bp, Homo sapiens
  siRNA target sequence for RPA3 (NM_002947.2,1426-1444).
catcttatgtccagtttaa

SEQ ID NO: 19842 - DNA, 19 bp, Homo sapiens
  siRNA target sequence for RPA3 (NM_002947.2,1527-1545).
gggattgtgcaacatgatt

SEQ ID NO: 19843 - DNA, 19 bp, Homo sapiens
  siRNA target sequence for SMUG1 (NM_014311.1,479-497).
ctccccaagagcatcctaa

SEQ ID NO: 19844 - DNA, 19 bp, Homo sapiens
  siRNA target sequence for SMUG1 (NM_014311.1,483-501).
ccaagagcatcctaaacga

SEQ ID NO: 19845 - DNA, 19 bp, Homo sapiens
  siRNA target sequence for SMUG1 (NM_014311.1,603-621).
ctgttttgtccacaatcta

SEQ ID NO: 19846 - DNA, 19 bp, Homo sapiens
  siRNA target sequence for SMUG1 (NM_014311.1,922-940).
ctgccactgctgttgaaat

SEQ ID NO: 19847 - DNA, 19 bp, Homo sapiens
  siRNA target sequence for SSBP1 (NM_003143.1,81-99).
gtttcgaagacctgtatta

SEQ ID NO: 19848 - DNA, 19 bp, Homo sapiens
  siRNA target sequence for SSBP1 (NM_003143.1,102-120).
ggtacttcgtcagtttgta

SEQ ID NO: 19849 - DNA, 19 bp, Homo sapiens
  siRNA target sequence for SSBP1 (NM_003143.1,103-121).
gtacttcgtcagtttgtaa

SEQ ID NO: 19850 - DNA, 19 bp, Homo sapiens
  siRNA target sequence for SSBP1 (NM_003143.1,124-142).
catgagtccgaaacaacta

SEQ ID NO: 19851 - DNA, 19 bp, Homo sapiens
  siRNA target sequence for SSBP1 (NM_003143.1,168-186).
gaatcgtgtgcacttactt

SEQ ID NO: 19852 - DNA, 19 bp, Homo sapiens
  siRNA target sequence for SSBP1 (NM_003143.1,251-269).
ctctagcaactaatgagat

SEQ ID NO: 19853 - DNA, 19 bp, Homo sapiens
  siRNA target sequence for SSBP1 (NM_003143.1,272-290).
ggcgatcaggggatagtga

SEQ ID NO: 19854 - DNA, 19 bp, Homo sapiens
  siRNA target sequence for SSBP1 (NM_003143.1,273-291).
gcgatcaggggatagtgaa

SEQ ID NO: 19855 - DNA, 19 bp, Homo sapiens
  siRNA target sequence for SSBP1 (NM_003143.1,278-296).
caggggatagtgaagttta

SEQ ID NO: 19856 - DNA, 19 bp, Homo sapiens
  siRNA target sequence for SSBP1 (NM_003143.1,281-299).
gggatagtgaagtttacca

SEQ ID NO: 19857 - DNA, 19 bp, Homo sapiens
  siRNA target sequence for SSBP1 (NM_003143.1,301-319).
ctgggtgatgtcagtcaaa

SEQ ID NO: 19858 - DNA, 19 bp, Homo sapiens
  siRNA target sequence for SSBP1 (NM_003143.1,307-325).
gatgtcagtcaaaagacaa

SEQ ID NO: 19859 - DNA, 19 bp, Homo sapiens
  siRNA target sequence for SSBP1 (NM_003143.1,310-328).
gtcagtcaaaagacaacat

SEQ ID NO: 19860 - DNA, 19 bp, Homo sapiens
  siRNA target sequence for SSBP1 (NM_003143.1,329-347).
ggcacagaatatcagtatt

SEQ ID NO: 19861 - DNA, 19 bp, Homo sapiens
  siRNA target sequence for SSBP1 (NM_003143.1,362-380).
gagacgtggcatatcaata

SEQ ID NO: 19862 - DNA, 19 bp, Homo sapiens
  siRNA target sequence for SSBP1 (NM_003143.1,367-385).
gtggcatatcaatatgtga

SEQ ID NO: 19863 - DNA, 19 bp, Homo sapiens
  siRNA target sequence for SSBP1 (NM_003143.1,370-388).
gcatatcaatatgtgaaaa

SEQ ID NO: 19864 - DNA, 19 bp, Homo sapiens
  siRNA target sequence for SSBP1 (NM_003143.1,470-488).
caatcatagctgataatat

SEQ ID NO: 19865 - DNA, 19 bp, Homo sapiens
  siRNA target sequence for SSBP2 (NM_012446.2,274-292).
gttagcactctacgtatat

SEQ ID NO: 19866 - DNA, 19 bp, Homo sapiens
  siRNA target sequence for SSBP2 (NM_012446.2,279-297).
cactctacgtatatgaata

SEQ ID NO: 19867 - DNA, 19 bp, Homo sapiens
  siRNA target sequence for SSBP2 (NM_012446.2,572-590).
gggttctttcagcctttta

SEQ ID NO: 19868 - DNA, 19 bp, Homo sapiens
  siRNA target sequence for SSBP2 (NM_012446.2,621-639).
ccccattgaggatacctaa

SEQ ID NO: 19869 - DNA, 19 bp, Homo sapiens
  siRNA target sequence for SSBP2 (NM_012446.2,622-640).
cccattgaggatacctaat

SEQ ID NO: 19870 - DNA, 19 bp, Homo sapiens
  siRNA target sequence for SSBP2 (NM_012446.2,624-642).
cattgaggatacctaatca

SEQ ID NO: 19871 - DNA, 19 bp, Homo sapiens
  siRNA target sequence for SSBP2 (NM_012446.2,726-744).
gtgggccaatgcagagaat

SEQ ID NO: 19872 - DNA, 19 bp, Homo sapiens
  siRNA target sequence for SSBP2 (NM_012446.2,768-786).
ccttaggaccacagaacta

SEQ ID NO: 19873 - DNA, 19 bp, Homo sapiens
  siRNA target sequence for SSBP2 (NM_012446.2,769-787).
cttaggaccacagaactat

SEQ ID NO: 19874 - DNA, 19 bp, Homo sapiens
  siRNA target sequence for SSBP2 (NM_012446.2,993-1011).
caaccaactctggtgataa

SEQ ID NO: 19875 - DNA, 19 bp, Homo sapiens
  siRNA target sequence for SSBP2 (NM_012446.2,1000-1018).
ctctggtgataacatgtat

SEQ ID NO: 19876 - DNA, 19 bp, Homo sapiens
  siRNA target sequence for SSBP2 (NM_012446.2,1043-1061).
ggacctaacagacctaatt

SEQ ID NO: 19877 - DNA, 19 bp, Homo sapiens
  siRNA target sequence for SSBP2 (NM_012446.2,1107-1125).
gaatggagtcacatcacat

SEQ ID NO: 19878 - DNA, 19 bp, Homo sapiens
  siRNA target sequence for SSBP2 (NM_012446.2,1143-1161).
caggagatatggacagtat

SEQ ID NO: 19879 - DNA, 19 bp, Homo sapiens
  siRNA target sequence for SSBP3 (NM_018070.2,1027-1045).
gtgacaacatctacacaat

SEQ ID NO: 19880 - DNA, 19 bp, Homo sapiens
  siRNA target sequence for SSBP3 (NM_145716.1,455-473).
cacagtcagccttttatgt

SEQ ID NO: 19881 - DNA, 19 bp, Homo sapiens
  siRNA target sequence for SSBP4 (NM_032627.1,280-298).
gttggcgctgtacgtttat

SEQ ID NO: 19882 - DNA, 19 bp, Homo sapiens
  siRNA target sequence for SSBP4 (NM_032627.1,284-302).
gcgctgtacgtttatgagt

SEQ ID NO: 19883 - DNA, 19 bp, Homo sapiens
  siRNA target sequence for SSBP4 (NM_032627.1,285-303).
cgctgtacgtttatgagta

SEQ ID NO: 19884 - DNA, 19 bp, Homo sapiens
  siRNA target sequence for SSBP4 (NM_032627.1,1077-1095).
gcgaaaacatgtacactat

SEQ ID NO: 19885 - DNA, 19 bp, Homo sapiens
  siRNA target sequence for SSBP4 (NM_032627.1,1079-1097).
gaaaacatgtacactatca

SEQ ID NO: 19886 - DNA, 19 bp, Homo sapiens
  siRNA target sequence for SSBP4 (NM_032627.1,1332-1350).
cgttcccgagcgaaagcta

SEQ ID NO: 19887 - DNA, 19 bp, Homo sapiens
  siRNA target sequence for TAF15 (NM_003487.2,117-135).
gggggtgagcagcaaagtt

SEQ ID NO: 19888 - DNA, 19 bp, Homo sapiens
  siRNA target sequence for TAF15 (NM_003487.2,118-136).
ggggtgagcagcaaagtta

SEQ ID NO: 19889 - DNA, 19 bp, Homo sapiens
  siRNA target sequence for TAF15 (NM_003487.2,119-137).
gggtgagcagcaaagttat

SEQ ID NO: 19890 - DNA, 19 bp, Homo sapiens
  siRNA target sequence for TAF15 (NM_003487.2,123-141).
gagcagcaaagttattcta

SEQ ID NO: 19891 - DNA, 19 bp, Homo sapiens
  siRNA target sequence for TAF15 (NM_003487.2,128-146).
gcaaagttattctacctat

SEQ ID NO: 19892 - DNA, 19 bp, Homo sapiens
  siRNA target sequence for TAF15 (NM_003487.2,167-185).
ctatggacaagcatcacaa

SEQ ID NO: 19893 - DNA, 19 bp, Homo sapiens
  siRNA target sequence for TAF15 (NM_003487.2,172-190).
gacaagcatcacaaagcta

SEQ ID NO: 19894 - DNA, 19 bp, Homo sapiens
  siRNA target sequence for TAF15 (NM_003487.2,239-257).
cggttactccagttatgga

SEQ ID NO: 19895 - DNA, 19 bp, Homo sapiens
  siRNA target sequence for TAF15 (NM_003487.2,283-301).
gttatgagaatcaaaagca

SEQ ID NO: 19896 - DNA, 19 bp, Homo sapiens
  siRNA target sequence for TAF15 (NM_003487.2,294-312).
caaaagcagagctcatata

SEQ ID NO: 19897 - DNA, 19 bp, Homo sapiens
  siRNA target sequence for TAF15 (NM_003487.2,313-331).
gccagcaaccatataataa

SEQ ID NO: 19898 - DNA, 19 bp, Homo sapiens
  siRNA target sequence for TAF15 (NM_003487.2,342-360).
cagcaaaacatggaatcat

SEQ ID NO: 19899 - DNA, 19 bp, Homo sapiens
  siRNA target sequence for TAF15 (NM_003487.2,400-418).
cagactatggtcaacaaga

SEQ ID NO: 19900 - DNA, 19 bp, Homo sapiens
  siRNA target sequence for TAF15 (NM_003487.2,404-422).
ctatggtcaacaagattca

SEQ ID NO: 19901 - DNA, 19 bp, Homo sapiens
  siRNA target sequence for TAF15 (NM_003487.2,431-449).
gcagtcaggctatgatcaa

SEQ ID NO: 19902 - DNA, 19 bp, Homo sapiens
  siRNA target sequence for TAF15 (NM_003487.2,491-509).
gcatgattcctatagtcaa

SEQ ID NO: 19903 - DNA, 19 bp, Homo sapiens
  siRNA target sequence for TAF15 (NM_003487.2,492-510).
catgattcctatagtcaaa

SEQ ID NO: 19904 - DNA, 19 bp, Homo sapiens
  siRNA target sequence for TAF15 (NM_003487.2,580-598).
gtaggtatggagaagataa

SEQ ID NO: 19905 - DNA, 19 bp, Homo sapiens
  siRNA target sequence for TAF15 (NM_003487.2,633-651).
gggcgtgggggatatgaca

SEQ ID NO: 19906 - DNA, 19 bp, Homo sapiens
  siRNA target sequence for TAF15 (NM_003487.2,692-710).
ccgcggtggcttcaaaaat

SEQ ID NO: 19907 - DNA, 19 bp, Homo sapiens
  siRNA target sequence for TAF15 (NM_003487.2,693-711).
cgcggtggcttcaaaaatt

SEQ ID NO: 19908 - DNA, 19 bp, Homo sapiens
  siRNA target sequence for TAF15 (NM_003487.2,694-712).
gcggtggcttcaaaaattt

SEQ ID NO: 19909 - DNA, 19 bp, Homo sapiens
  siRNA target sequence for TAF15 (NM_003487.2,695-713).
cggtggcttcaaaaatttt

SEQ ID NO: 19910 - DNA, 19 bp, Homo sapiens
  siRNA target sequence for TAF15 (NM_003487.2,806-824).
gggtgtgtctacagatcaa

SEQ ID NO: 19911 - DNA, 19 bp, Homo sapiens
  siRNA target sequence for TAF15 (NM_003487.2,808-826).
gtgtgtctacagatcaagt

SEQ ID NO: 19912 - DNA, 19 bp, Homo sapiens
  siRNA target sequence for TAF15 (NM_003487.2,822-840).
caagttggggagttcttta

SEQ ID NO: 19913 - DNA, 19 bp, Homo sapiens
  siRNA target sequence for TAF15 (NM_003487.2,872-890).
gaccggaaaaccaatgata

SEQ ID NO: 19914 - DNA, 19 bp, Homo sapiens
  siRNA target sequence for TAF15 (NM_003487.2,875-893).
cggaaaaccaatgataaat

SEQ ID NO: 19915 - DNA, 19 bp, Homo sapiens
  siRNA target sequence for TAF15 (NM_003487.2,1005-1023).
ggcaacatcattaaagtgt

SEQ ID NO: 19916 - DNA, 19 bp, Homo sapiens
  siRNA target sequence for TAF15 (NM_003487.2,1164-1182).
ccgtcatgcggaaatatga

SEQ ID NO: 19917 - DNA, 19 bp, Homo sapiens
  siRNA target sequence for TAF15 (NM_003487.2,1383-1401).
ggctacagcggagatagaa

SEQ ID NO: 19918 - DNA, 19 bp, Homo sapiens
  siRNA target sequence for TAF15 (NM_003487.2,1385-1403).
ctacagcggagatagaagt

SEQ ID NO: 19919 - DNA, 19 bp, Homo sapiens
  siRNA target sequence for TAF15 (NM_139215.1,258-276).
caaagtcagtcaggttatt

SEQ ID NO: 19920 - DNA, 19 bp, Homo sapiens
  siRNA target sequence for WBP11 (NM_016312.2,507-525).
cagaagagggctcaactta

SEQ ID NO: 19921 - DNA, 19 bp, Homo sapiens
  siRNA target sequence for WBP11 (NM_016312.2,516-534).
gctcaacttagccaatatt

SEQ ID NO: 19922 - DNA, 19 bp, Homo sapiens
  siRNA target sequence for WBP11 (NM_016312.2,841-859).
ctcgtaggcgagatgaaga

SEQ ID NO: 19923 - DNA, 19 bp, Homo sapiens
  siRNA target sequence for WBP11 (NM_016312.2,847-865).
ggcgagatgaagacatgtt

SEQ ID NO: 19924 - DNA, 19 bp, Homo sapiens
  siRNA target sequence for WBP11 (NM_016312.2,848-866).
gcgagatgaagacatgtta

SEQ ID NO: 19925 - DNA, 19 bp, Homo sapiens
  siRNA target sequence for WBP11 (NM_016312.2,1005-1023).
gaaagtgacggggatgaat

SEQ ID NO: 19926 - DNA, 19 bp, Homo sapiens
  siRNA target sequence for WBP11 (NM_016312.2,1009-1027).
gtgacggggatgaatttgt

SEQ ID NO: 19927 - DNA, 19 bp, Homo sapiens
  siRNA target sequence for WBP11 (NM_016312.2,1788-1806).
cgacccaaggcggatgata

SEQ ID NO: 19928 - DNA, 19 bp, Homo sapiens
  siRNA target sequence for WBP11 (NM_016312.2,1791-1809).
cccaaggcggatgatacaa

SEQ ID NO: 19929 - DNA, 19 bp, Homo sapiens
  siRNA target sequence for WBP11 (NM_016312.2,1793-1811).
caaggcggatgatacaagt

SEQ ID NO: 19930 - DNA, 19 bp, Homo sapiens
  siRNA target sequence for CGGBP1 (NM_003663.2,359-377).
ggagcgatttgtagtaaca

SEQ ID NO: 19931 - DNA, 19 bp, Homo sapiens
  siRNA target sequence for CGGBP1 (NM_003663.2,385-403).
ctgctcgaaaccgttctaa

SEQ ID NO: 19932 - DNA, 19 bp, Homo sapiens
  siRNA target sequence for CGGBP1 (NM_003663.2,428-446).
ggatcgagtcactgagttt

SEQ ID NO: 19933 - DNA, 19 bp, Homo sapiens
  siRNA target sequence for CGGBP1 (NM_003663.2,490-508).
cttgcaatgtggttctgaa

SEQ ID NO: 19934 - DNA, 19 bp, Homo sapiens
  siRNA target sequence for CGGBP1 (NM_003663.2,532-550).
gtgaccacctcaagtcaaa

SEQ ID NO: 19935 - DNA, 19 bp, Homo sapiens
  siRNA target sequence for CGGBP1 (NM_003663.2,608-626).
gcccctaactgcatctctt

SEQ ID NO: 19936 - DNA, 19 bp, Homo sapiens
  siRNA target sequence for CGGBP1 (NM_003663.2,640-658).
ctgcgcaaacagagaaagt

SEQ ID NO: 19937 - DNA, 19 bp, Homo sapiens
  siRNA target sequence for CGGBP1 (NM_003663.2,642-660).
gcgcaaacagagaaagtca

SEQ ID NO: 19938 - DNA, 19 bp, Homo sapiens
  siRNA target sequence for CGGBP1 (NM_003663.2,661-679).
gtgttatccaggactttgt

SEQ ID NO: 19939 - DNA, 19 bp, Homo sapiens
  siRNA target sequence for CGGBP1 (NM_003663.2,729-747).
gcagtccgtgctttcctat

SEQ ID NO: 19940 - DNA, 19 bp, Homo sapiens
  siRNA target sequence for CGGBP1 (NM_003663.2,812-830).
gatggatatgagaatgaga

SEQ ID NO: 19941 - DNA, 19 bp, Homo sapiens
  siRNA target sequence for G22P1 (NM_001469.2,2059-2077).
gcttcgcttcacatacaga

SEQ ID NO: 19942 - DNA, 19 bp, Homo sapiens
  siRNA target sequence for G22P1 (NM_001469.2,2060-2078).
cttcgcttcacatacagaa

SEQ ID NO: 19943 - DNA, 19 bp, Homo sapiens
  siRNA target sequence for HLF (NM_002126.3,505-523).
ccctgaatcccacctttat

SEQ ID NO: 19944 - DNA, 19 bp, Homo sapiens
  siRNA target sequence for HLF (NM_002126.3,584-602).
ccacgaagacgcatttagt

SEQ ID NO: 19945 - DNA, 19 bp, Homo sapiens
  siRNA target sequence for HLF (NM_002126.3,587-605).
cgaagacgcatttagtaaa

SEQ ID NO: 19946 - DNA, 19 bp, Homo sapiens
  siRNA target sequence for HLF (NM_002126.3,591-609).
gacgcatttagtaaagata

SEQ ID NO: 19947 - DNA, 19 bp, Homo sapiens
  siRNA target sequence for HLF (NM_002126.3,593-611).
cgcatttagtaaagataaa

SEQ ID NO: 19948 - DNA, 19 bp, Homo sapiens
  siRNA target sequence for HLF (NM_002126.3,702-720).
ccctatgacggagatactt

SEQ ID NO: 19949 - DNA, 19 bp, Homo sapiens
  siRNA target sequence for HLF (NM_002126.3,740-758).
cctggaggagtttttgtca

SEQ ID NO: 19950 - DNA, 19 bp, Homo sapiens
  siRNA target sequence for HLF (NM_002126.3,941-959).
gccagcaaaccgcaataca

SEQ ID NO: 19951 - DNA, 19 bp, Homo sapiens
  siRNA target sequence for HLF (NM_002126.3,1167-1185).
gcaaggcgcagaaagaaca

SEQ ID NO: 19952 - DNA, 19 bp, Homo sapiens
  siRNA target sequence for HLF (NM_002126.3,1316-1334).
caaatgcaagaacatactt

SEQ ID NO: 19953 - DNA, 19 bp, Homo sapiens
  siRNA target sequence for HLF (NM_002126.3,1325-1343).
gaacatacttgccaagtat

SEQ ID NO: 19954 - DNA, 19 bp, Homo sapiens
  siRNA target sequence for IFI16 (NM_005531.1,535-553).
ggaccagccctatcaagaa

SEQ ID NO: 19955 - DNA, 19 bp, Homo sapiens
  siRNA target sequence for IFI16 (NM_005531.1,809-827).
ctgagaacccgaaaacagt

SEQ ID NO: 19956 - DNA, 19 bp, Homo sapiens
  siRNA target sequence for IFI16 (NM_005531.1,819-837).
gaaaacagtggccaaatgt

SEQ ID NO: 19957 - DNA, 19 bp, Homo sapiens
  siRNA target sequence for IFI16 (NM_005531.1,840-858).
ggtaactcccagaagaaat

SEQ ID NO: 19958 - DNA, 19 bp, Homo sapiens
  siRNA target sequence for IFI16 (NM_005531.1,864-882).
ccaaaaacgcccagtgata

SEQ ID NO: 19959 - DNA, 19 bp, Homo sapiens
  siRNA target sequence for IFI16 (NM_005531.1,885-903).
gaaggtactgagtacaaca

SEQ ID NO: 19960 - DNA, 19 bp, Homo sapiens
  siRNA target sequence for IFI16 (NM_005531.1,1217-1235).
gggtatttatgctacataa

SEQ ID NO: 19961 - DNA, 19 bp, Homo sapiens
  siRNA target sequence for IFI16 (NM_005531.1,1228-1246).
ctacataagaaaacagtaa

SEQ ID NO: 19962 - DNA, 19 bp, Homo sapiens
  siRNA target sequence for IFI16 (NM_005531.1,1266-1284).
cgaaattcaggatgataga

SEQ ID NO: 19963 - DNA, 19 bp, Homo sapiens
  siRNA target sequence for IFI16 (NM_005531.1,1488-1506).
gcgtcagcttccatatcct

SEQ ID NO: 19964 - DNA, 19 bp, Homo sapiens
  siRNA target sequence for IFI16 (NM_005531.1,1489-1507).
cgtcagcttccatatcctt

SEQ ID NO: 19965 - DNA, 19 bp, Homo sapiens
  siRNA target sequence for IFI16 (NM_005531.1,1607-1625).
caatctccaaaatgaatga

SEQ ID NO: 19966 - DNA, 19 bp, Homo sapiens
  siRNA target sequence for IFI16 (NM_005531.1,1843-1861).
ctgaacgcaacagaatcat

SEQ ID NO: 19967 - DNA, 19 bp, Homo sapiens
  siRNA target sequence for IFI16 (NM_005531.1,1845-1863).
gaacgcaacagaatcattt

SEQ ID NO: 19968 - DNA, 19 bp, Homo sapiens
  siRNA target sequence for IFI16 (NM_005531.1,1924-1942).
gtcttccgagtgaaggttt

SEQ ID NO: 19969 - DNA, 19 bp, Homo sapiens
  siRNA target sequence for IFI16 (NM_005531.1,1980-1998).
gatcattgccatagcaaat

SEQ ID NO: 19970 - DNA, 19 bp, Homo sapiens
  siRNA target sequence for IFI16 (NM_005531.1,2022-2040).
ggaggtatatcctttcaca

SEQ ID NO: 19971 - DNA, 19 bp, Homo sapiens
  siRNA target sequence for IFI16 (NM_005531.1,2076-2094).
gatcccaaaaggattgatt

SEQ ID NO: 19972 - DNA, 19 bp, Homo sapiens
  siRNA target sequence for IFI16 (NM_005531.1,2101-2119).
gccagcgtaactcctaaaa

SEQ ID NO: 19973 - DNA, 19 bp, Homo sapiens
  siRNA target sequence for IFI16 (NM_005531.1,2106-2124).
cgtaactcctaaaatcaat

SEQ ID NO: 19974 - DNA, 19 bp, Homo sapiens
  siRNA target sequence for IFI16 (NM_005531.1,2127-2145).
gctttgctcacaaactaaa

SEQ ID NO: 19975 - DNA, 19 bp, Homo sapiens
  siRNA target sequence for IFI16 (NM_005531.1,2192-2210).
ggggtgaattcacttatta

SEQ ID NO: 19976 - DNA, 19 bp, Homo sapiens
  siRNA target sequence for IFI16 (NM_005531.1,2193-2211).
gggtgaattcacttattat

SEQ ID NO: 19977 - DNA, 19 bp, Homo sapiens
  siRNA target sequence for IFI16 (NM_005531.1,2343-2361).
gttgagatctgtaattcat

SEQ ID NO: 19978 - DNA, 19 bp, Homo sapiens
  siRNA target sequence for IFI16 (NM_005531.1,2348-2366).
gatctgtaattcatagtca

SEQ ID NO: 19979 - DNA, 19 bp, Homo sapiens
  siRNA target sequence for IFI16 (NM_005531.1,2365-2383).
cacatcaaggtcatcaaga

SEQ ID NO: 19980 - DNA, 19 bp, Homo sapiens
  siRNA target sequence for IFI16 (NM_005531.1,2428-2446).
gaaacttcaccagactttt

SEQ ID NO: 19981 - DNA, 19 bp, Homo sapiens
  siRNA target sequence for MRE11A (NM_005590.2,174-192).
cagatgcacttgatgatga

SEQ ID NO: 19982 - DNA, 19 bp, Homo sapiens
  siRNA target sequence for MRE11A (NM_005590.2,380-398).
catacctgcctcgagttat

SEQ ID NO: 19983 - DNA, 19 bp, Homo sapiens
  siRNA target sequence for MRE11A (NM_005590.2,385-403).
ctgcctcgagttattaaga

SEQ ID NO: 19984 - DNA, 19 bp, Homo sapiens
  siRNA target sequence for MRE11A (NM_005590.2,387-405).
gcctcgagttattaagaaa

SEQ ID NO: 19985 - DNA, 19 bp, Homo sapiens
  siRNA target sequence for MRE11A (NM_005590.2,391-409).
cgagttattaagaaaatat

SEQ ID NO: 19986 - DNA, 19 bp, Homo sapiens
  siRNA target sequence for MRE11A (NM_005590.2,422-440).
cggcctgtccagtttgaaa

SEQ ID NO: 19987 - DNA, 19 bp, Homo sapiens
  siRNA target sequence for MRE11A (NM_005590.2,447-465).
gtgatcagtcagtcaactt

SEQ ID NO: 19988 - DNA, 19 bp, Homo sapiens
  siRNA target sequence for MRE11A (NM_005590.2,500-518).
gatggcaacctcaacattt

SEQ ID NO: 19989 - DNA, 19 bp, Homo sapiens
  siRNA target sequence for MRE11A (NM_005590.2,617-635).
cactttggacgttcaatgt

SEQ ID NO: 19990 - DNA, 19 bp, Homo sapiens
  siRNA target sequence for MRE11A (NM_005590.2,652-670).
cattagtccggttttgctt

SEQ ID NO: 19991 - DNA, 19 bp, Homo sapiens
  siRNA target sequence for MRE11A (NM_005590.2,682-700).
cacaaagattgcgctatat

SEQ ID NO: 19992 - DNA, 19 bp, Homo sapiens
  siRNA target sequence for MRE11A (NM_005590.2,688-706).
gattgcgctatatggttta

SEQ ID NO: 19993 - DNA, 19 bp, Homo sapiens
  siRNA target sequence for MRE11A (NM_005590.2,692-710).
gcgctatatggtttaggat

SEQ ID NO: 19994 - DNA, 19 bp, Homo sapiens
  siRNA target sequence for MRE11A (NM_005590.2,719-737).
gatgaaaggctctatcgaa

SEQ ID NO: 19995 - DNA, 19 bp, Homo sapiens
  siRNA target sequence for MRE11A (NM_005590.2,728-746).
ctctatcgaatgtttgtca

SEQ ID NO: 19996 - DNA, 19 bp, Homo sapiens
  siRNA target sequence for MRE11A (NM_005590.2,730-748).
ctatcgaatgtttgtcaat

SEQ ID NO: 19997 - DNA, 19 bp, Homo sapiens
  siRNA target sequence for MRE11A (NM_005590.2,779-797).
gatgagaactcttggttta

SEQ ID NO: 19998 - DNA, 19 bp, Homo sapiens
  siRNA target sequence for MRE11A (NM_005590.2,823-841).
gagtaaacatggaagtact

SEQ ID NO: 19999 - DNA, 19 bp, Homo sapiens
  siRNA target sequence for MRE11A (NM_005590.2,869-887).
gacttcattgatcttgtta

SEQ ID NO: 20000 - DNA, 19 bp, Homo sapiens
  siRNA target sequence for MRE11A (NM_005590.2,967-985).
ctcagtggttacttctctt

SEQ ID NO: 20001 - DNA, 19 bp, Homo sapiens
  siRNA target sequence for MRE11A (NM_005590.2,1013-1031).
gttggtttgctgcgtatta

SEQ ID NO: 20002 - DNA, 19 bp, Homo sapiens
  siRNA target sequence for MRE11A (NM_005590.2,1087-1105).
catggaggatattgttcta

SEQ ID NO: 20003 - DNA, 19 bp, Homo sapiens
  siRNA target sequence for MRE11A (NM_005590.2,1106-1124).
gctaatcatccagacattt

SEQ ID NO: 20004 - DNA, 19 bp, Homo sapiens
  siRNA target sequence for MRE11A (NM_005590.2,1129-1147).
cccagataatcctaaagta

SEQ ID NO: 20005 - DNA, 19 bp, Homo sapiens
  siRNA target sequence for MRE11A (NM_005590.2,1253-1271).
cgactgcgagtggactata

SEQ ID NO: 20006 - DNA, 19 bp, Homo sapiens
  siRNA target sequence for MRE11A (NM_005590.2,1321-1339).
ggatcgggtagctaatcca

SEQ ID NO: 20007 - DNA, 19 bp, Homo sapiens
  siRNA target sequence for MRE11A (NM_005590.2,1322-1340).
gatcgggtagctaatccaa

SEQ ID NO: 20008 - DNA, 19 bp, Homo sapiens
  siRNA target sequence for MRE11A (NM_005590.2,1396-1414).
gatcaactttgggaaactt

SEQ ID NO: 20009 - DNA, 19 bp, Homo sapiens
  siRNA target sequence for MRE11A (NM_005590.2,1499-1517).
ctctcactgctaacagaaa

SEQ ID NO: 20010 - DNA, 19 bp, Homo sapiens
  siRNA target sequence for MRE11A (NM_005590.2,1605-1623).
cacagcgatttcttaaaga

SEQ ID NO: 20011 - DNA, 19 bp, Homo sapiens
  siRNA target sequence for MRE11A (NM_005590.2,1634-1652).
gatgccctcgaagacaaaa

SEQ ID NO: 20012 - DNA, 19 bp, Homo sapiens
  siRNA target sequence for MRE11A (NM_005590.2,1638-1656).
ccctcgaagacaaaatcga

SEQ ID NO: 20013 - DNA, 19 bp, Homo sapiens
  siRNA target sequence for MRE11A (NM_005590.2,1660-1678).
ggaggtacgtcgtttcaga

SEQ ID NO: 20014 - DNA, 19 bp, Homo sapiens
  siRNA target sequence for MRE11A (NM_005590.2,1664-1682).
gtacgtcgtttcagagaaa

SEQ ID NO: 20015 - DNA, 19 bp, Homo sapiens
  siRNA target sequence for MRE11A (NM_005590.2,1793-1811).
gaccttatgagtatagatt

SEQ ID NO: 20016 - DNA, 19 bp, Homo sapiens
  siRNA target sequence for MRE11A (NM_005590.2,1795-1813).
ccttatgagtatagattta

SEQ ID NO: 20017 - DNA, 19 bp, Homo sapiens
  siRNA target sequence for MRE11A (NM_005590.2,1815-1833).
cagaacagatggctaatga

SEQ ID NO: 20018 - DNA, 19 bp, Homo sapiens
  siRNA target sequence for MRE11A (NM_005590.2,1826-1844).
gctaatgactctgatgata

SEQ ID NO: 20019 - DNA, 19 bp, Homo sapiens
  siRNA target sequence for MRE11A (NM_005590.2,1940-1958).
ggaagagcctttaaatcta

SEQ ID NO: 20020 - DNA, 19 bp, Homo sapiens
  siRNA target sequence for MRE11A (NM_005590.2,1976-1994).
cgaaatgtcactactaaga

SEQ ID NO: 20021 - DNA, 19 bp, Homo sapiens
  siRNA target sequence for MRE11A (NM_005590.2,1986-2004).
ctactaagaattattcaga

SEQ ID NO: 20022 - DNA, 19 bp, Homo sapiens
  siRNA target sequence for MRE11A (NM_005590.2,2053-2071).
cacttcaaagacagatcaa

SEQ ID NO: 20023 - DNA, 19 bp, Homo sapiens
  siRNA target sequence for MRE11A (NM_005590.2,2085-2103).
catcatccagcaaaatcat

SEQ ID NO: 20024 - DNA, 19 bp, Homo sapiens
  siRNA target sequence for MRE11A (NM_005590.2,2101-2119).
catgtcccagagtcaagta

SEQ ID NO: 20025 - DNA, 19 bp, Homo sapiens
  siRNA target sequence for MRE11A (NM_005590.2,2107-2125).
ccagagtcaagtatcgaaa

SEQ ID NO: 20026 - DNA, 19 bp, Homo sapiens
  siRNA target sequence for MRE11A (NM_005590.2,2117-2135).
gtatcgaaaggggttgatt

SEQ ID NO: 20027 - DNA, 19 bp, Homo sapiens
  siRNA target sequence for MRE11A (NM_005590.2,2121-2139).
cgaaaggggttgattttga

SEQ ID NO: 20028 - DNA, 19 bp, Homo sapiens
  siRNA target sequence for MRE11A (NM_005590.2,2122-2140).
gaaaggggttgattttgaa

SEQ ID NO: 20029 - DNA, 19 bp, Homo sapiens
  siRNA target sequence for MRE11A (NM_005590.2,2126-2144).
ggggttgattttgaatcaa

SEQ ID NO: 20030 - DNA, 19 bp, Homo sapiens
  siRNA target sequence for MRE11A (NM_005590.2,2159-2177).
gatgatccttttatgaaca

SEQ ID NO: 20031 - DNA, 19 bp, Homo sapiens
  siRNA target sequence for MRE11A (NM_005590.2,2178-2196).
ctagttctttaagaagaaa

SEQ ID NO: 20032 - DNA, 19 bp, Homo sapiens
  siRNA target sequence for MRE11A (NM_005591.2,1967-1985).
cccgtagcaggaactcaaa

SEQ ID NO: 20033 - DNA, 19 bp, Homo sapiens
  siRNA target sequence for MRE11A (NM_005591.2,1993-2011).
gtgtcagcatctagaaata

SEQ ID NO: 20034 - DNA, 19 bp, Homo sapiens
  siRNA target sequence for MRE11A (NM_005591.2,2006-2024).
gaaatatgtctattataga

SEQ ID NO: 20035 - DNA, 19 bp, Homo sapiens
  siRNA target sequence for MRE11A (NM_005591.2,2023-2041).
gatgcctttaaatctacaa

SEQ ID NO: 20036 - DNA, 19 bp, Homo sapiens
  siRNA target sequence for MTERF (NM_006980.2,92-110).
cttaggacaaacaagcatt

SEQ ID NO: 20037 - DNA, 19 bp, Homo sapiens
  siRNA target sequence for MTERF (NM_006980.2,152-170).
cctctggcatatgagaaat

SEQ ID NO: 20038 - DNA, 19 bp, Homo sapiens
  siRNA target sequence for MTERF (NM_006980.2,153-171).
ctctggcatatgagaaata

SEQ ID NO: 20039 - DNA, 19 bp, Homo sapiens
  siRNA target sequence for MTERF (NM_006980.2,157-175).
ggcatatgagaaataactt

SEQ ID NO: 20040 - DNA, 19 bp, Homo sapiens
  siRNA target sequence for MTERF (NM_006980.2,173-191).
ctttctctttggttcaaga

SEQ ID NO: 20041 - DNA, 19 bp, Homo sapiens
  siRNA target sequence for MTERF (NM_006980.2,271-289).
cagacagtgagcctttgaa

SEQ ID NO: 20042 - DNA, 19 bp, Homo sapiens
  siRNA target sequence for MTERF (NM_006980.2,294-312).
gaggacctactgaaaaact

SEQ ID NO: 20043 - DNA, 19 bp, Homo sapiens
  siRNA target sequence for MTERF (NM_006980.2,296-314).
ggacctactgaaaaactta

SEQ ID NO: 20044 - DNA, 19 bp, Homo sapiens
  siRNA target sequence for MTERF (NM_006980.2,300-318).
ctactgaaaaacttactta

SEQ ID NO: 20045 - DNA, 19 bp, Homo sapiens
  siRNA target sequence for MTERF (NM_006980.2,315-333).
cttactatgggagtagata

SEQ ID NO: 20046 - DNA, 19 bp, Homo sapiens
  siRNA target sequence for MTERF (NM_006980.2,319-337).
ctatgggagtagatattga

SEQ ID NO: 20047 - DNA, 19 bp, Homo sapiens
  siRNA target sequence for MTERF (NM_006980.2,437-455).
gatcgctagcatcatatca

SEQ ID NO: 20048 - DNA, 19 bp, Homo sapiens
  siRNA target sequence for MTERF (NM_006980.2,440-458).
cgctagcatcatatcaaga

SEQ ID NO: 20049 - DNA, 19 bp, Homo sapiens
  siRNA target sequence for MTERF (NM_006980.2,441-459).
gctagcatcatatcaagat

SEQ ID NO: 20050 - DNA, 19 bp, Homo sapiens
  siRNA target sequence for MTERF (NM_006980.2,442-460).
ctagcatcatatcaagata

SEQ ID NO: 20051 - DNA, 19 bp, Homo sapiens
  siRNA target sequence for MTERF (NM_006980.2,475-493).
cacgtactcccgagaatct

SEQ ID NO: 20052 - DNA, 19 bp, Homo sapiens
  siRNA target sequence for MTERF (NM_006980.2,477-495).
cgtactcccgagaatcttt

SEQ ID NO: 20053 - DNA, 19 bp, Homo sapiens
  siRNA target sequence for MTERF (NM_006980.2,481-499).
ctcccgagaatctttcaaa

SEQ ID NO: 20054 - DNA, 19 bp, Homo sapiens
  siRNA target sequence for MTERF (NM_006980.2,506-524).
ggatctgtggagaaagatt

SEQ ID NO: 20055 - DNA, 19 bp, Homo sapiens
  siRNA target sequence for MTERF (NM_006980.2,582-600).
cggtccaataacaacctaa

SEQ ID NO: 20056 - DNA, 19 bp, Homo sapiens
  siRNA target sequence for MTERF (NM_006980.2,583-601).
ggtccaataacaacctaaa

SEQ ID NO: 20057 - DNA, 19 bp, Homo sapiens
  siRNA target sequence for MTERF (NM_006980.2,587-605).
caataacaacctaaactta

SEQ ID NO: 20058 - DNA, 19 bp, Homo sapiens
  siRNA target sequence for MTERF (NM_006980.2,678-696).
cctcgtaccttctccaata

SEQ ID NO: 20059 - DNA, 19 bp, Homo sapiens
  siRNA target sequence for MTERF (NM_006980.2,682-700).
gtaccttctccaatagtct

SEQ ID NO: 20060 - DNA, 19 bp, Homo sapiens
  siRNA target sequence for MTERF (NM_006980.2,686-704).
cttctccaatagtcttgat

SEQ ID NO: 20061 - DNA, 19 bp, Homo sapiens
  siRNA target sequence for MTERF (NM_006980.2,691-709).
ccaatagtcttgatctgaa

SEQ ID NO: 20062 - DNA, 19 bp, Homo sapiens
  siRNA target sequence for MTERF (NM_006980.2,692-710).
caatagtcttgatctgaat

SEQ ID NO: 20063 - DNA, 19 bp, Homo sapiens
  siRNA target sequence for MTERF (NM_006980.2,697-715).
gtcttgatctgaataaaca

SEQ ID NO: 20064 - DNA, 19 bp, Homo sapiens
  siRNA target sequence for MTERF (NM_006980.2,731-749).
gcaggcagccggtttgtca

SEQ ID NO: 20065 - DNA, 19 bp, Homo sapiens
  siRNA target sequence for MTERF (NM_006980.2,746-764).
gtcattgggtcacaatgat

SEQ ID NO: 20066 - DNA, 19 bp, Homo sapiens
  siRNA target sequence for MTERF (NM_006980.2,762-780).
gatcccgcagattttgtca

SEQ ID NO: 20067 - DNA, 19 bp, Homo sapiens
  siRNA target sequence for MTERF (NM_006980.2,827-845).
gcgggtgaaagctaacatt

SEQ ID NO: 20068 - DNA, 19 bp, Homo sapiens
  siRNA target sequence for MTERF (NM_006980.2,829-847).
gggtgaaagctaacattga

SEQ ID NO: 20069 - DNA, 19 bp, Homo sapiens
  siRNA target sequence for MTERF (NM_006980.2,831-849).
gtgaaagctaacattgaat

SEQ ID NO: 20070 - DNA, 19 bp, Homo sapiens
  siRNA target sequence for MTERF (NM_006980.2,846-864).
gaattcttacggtcaactt

SEQ ID NO: 20071 - DNA, 19 bp, Homo sapiens
  siRNA target sequence for MTERF (NM_006980.2,851-869).
cttacggtcaactttcaat

SEQ ID NO: 20072 - DNA, 19 bp, Homo sapiens
  siRNA target sequence for MTERF (NM_006980.2,855-873).
cggtcaactttcaatttga

SEQ ID NO: 20073 - DNA, 19 bp, Homo sapiens
  siRNA target sequence for MTERF (NM_006980.2,882-900).
gaactgctggttctgatat

SEQ ID NO: 20074 - DNA, 19 bp, Homo sapiens
  siRNA target sequence for MTERF (NM_006980.2,921-939).
ctagacctttccaatgact

SEQ ID NO: 20075 - DNA, 19 bp, Homo sapiens
  siRNA target sequence for MTERF (NM_006980.2,946-964).
gaagaagctacgcaaacat

SEQ ID NO: 20076 - DNA, 19 bp, Homo sapiens
  siRNA target sequence for MTERF (NM_006980.2,952-970).
gctacgcaaacatcaaaga

SEQ ID NO: 20077 - DNA, 19 bp, Homo sapiens
  siRNA target sequence for MTERF (NM_006980.2,1002-1020).
gaggtacagaagtttgtct

SEQ ID NO: 20078 - DNA, 19 bp, Homo sapiens
  siRNA target sequence for MTERF (NM_006980.2,1005-1023).
gtacagaagtttgtcttaa

SEQ ID NO: 20079 - DNA, 19 bp, Homo sapiens
  siRNA target sequence for MTERF (NM_006980.2,1099-1117).
gcatttcacaaataatcga

SEQ ID NO: 20080 - DNA, 19 bp, Homo sapiens
  siRNA target sequence for MTERF (NM_006980.2,1100-1118).
catttcacaaataatcgaa

SEQ ID NO: 20081 - DNA, 19 bp, Homo sapiens
  siRNA target sequence for MTERF (NM_006980.2,1122-1140).
cctcgggttctggattcaa

SEQ ID NO: 20082 - DNA, 19 bp, Homo sapiens
  siRNA target sequence for MTERF (NM_006980.2,1133-1151).
ggattcaagcataagtact

SEQ ID NO: 20083 - DNA, 19 bp, Homo sapiens
  siRNA target sequence for MTERF (NM_006980.2,1134-1152).
gattcaagcataagtactt

SEQ ID NO: 20084 - DNA, 19 bp, Homo sapiens
  siRNA target sequence for MTERF (NM_006980.2,1159-1177).
gtcgaatcaaagaattggt

SEQ ID NO: 20085 - DNA, 19 bp, Homo sapiens
  siRNA target sequence for MTERF (NM_006980.2,1161-1179).
cgaatcaaagaattggtaa

SEQ ID NO: 20086 - DNA, 19 bp, Homo sapiens
  siRNA target sequence for MTERF (NM_006980.2,1182-1200).
gctggctgtaacttgagta

SEQ ID NO: 20087 - DNA, 19 bp, Homo sapiens
  siRNA target sequence for MTERF (NM_006980.2,1185-1203).
ggctgtaacttgagtactt

SEQ ID NO: 20088 - DNA, 19 bp, Homo sapiens
  siRNA target sequence for MTERF (NM_006980.2,1186-1204).
gctgtaacttgagtacttt

SEQ ID NO: 20089 - DNA, 19 bp, Homo sapiens
  siRNA target sequence for MTERF (NM_006980.2,1189-1207).
gtaacttgagtactttaaa

SEQ ID NO: 20090 - DNA, 19 bp, Homo sapiens
  siRNA target sequence for NP220 (NM_014497.2,317-335).
gtcgagacccaggtttaat

SEQ ID NO: 20091 - DNA, 19 bp, Homo sapiens
  siRNA target sequence for NP220 (NM_014497.2,421-439).
ctatgggtctcccaagatt

SEQ ID NO: 20092 - DNA, 19 bp, Homo sapiens
  siRNA target sequence for NP220 (NM_014497.2,452-470).
gagagcacgtggaattcca

SEQ ID NO: 20093 - DNA, 19 bp, Homo sapiens
  siRNA target sequence for NP220 (NM_014497.2,483-501).
ggccatgaatcttatcaga

SEQ ID NO: 20094 - DNA, 19 bp, Homo sapiens
  siRNA target sequence for NP220 (NM_014497.2,521-539).
gaatgttcaggtaactcaa

SEQ ID NO: 20095 - DNA, 19 bp, Homo sapiens
  siRNA target sequence for NP220 (NM_014497.2,616-634).
gtagccggtgggatgatga

SEQ ID NO: 20096 - DNA, 19 bp, Homo sapiens
  siRNA target sequence for NP220 (NM_014497.2,625-643).
gggatgatgagcctcatat

SEQ ID NO: 20097 - DNA, 19 bp, Homo sapiens
  siRNA target sequence for NP220 (NM_014497.2,626-644).
ggatgatgagcctcatata

SEQ ID NO: 20098 - DNA, 19 bp, Homo sapiens
  siRNA target sequence for NP220 (NM_014497.2,673-691).
ctgtaacacaggttacaga

SEQ ID NO: 20099 - DNA, 19 bp, Homo sapiens
  siRNA target sequence for NP220 (NM_014497.2,732-750).
gcctcaagtatcttagcaa

SEQ ID NO: 20100 - DNA, 19 bp, Homo sapiens
  siRNA target sequence for NP220 (NM_014497.2,787-805).
gtcgctatcctgatgaaca

SEQ ID NO: 20101 - DNA, 19 bp, Homo sapiens
  siRNA target sequence for NP220 (NM_014497.2,790-808).
gctatcctgatgaacaact

SEQ ID NO: 20102 - DNA, 19 bp, Homo sapiens
  siRNA target sequence for NP220 (NM_014497.2,791-809).
ctatcctgatgaacaacta

SEQ ID NO: 20103 - DNA, 19 bp, Homo sapiens
  siRNA target sequence for NP220 (NM_014497.2,804-822).
caactaactcctgaaaata

SEQ ID NO: 20104 - DNA, 19 bp, Homo sapiens
  siRNA target sequence for NP220 (NM_014497.2,866-884).
ccgattacctaatttacct

SEQ ID NO: 20105 - DNA, 19 bp, Homo sapiens
  siRNA target sequence for NP220 (NM_014497.2,867-885).
cgattacctaatttacctt

SEQ ID NO: 20106 - DNA, 19 bp, Homo sapiens
  siRNA target sequence for NP220 (NM_014497.2,921-939).
gcagtttcaagtaatgtga

SEQ ID NO: 20107 - DNA, 19 bp, Homo sapiens
  siRNA target sequence for NP220 (NM_014497.2,928-946).
caagtaatgtgatcgatta

SEQ ID NO: 20108 - DNA, 19 bp, Homo sapiens
  siRNA target sequence for NP220 (NM_014497.2,973-991).
cagaagatccacttgaagt

SEQ ID NO: 20109 - DNA, 19 bp, Homo sapiens
  siRNA target sequence for NP220 (NM_014497.2,981-999).
ccacttgaagtacgtattt

SEQ ID NO: 20110 - DNA, 19 bp, Homo sapiens
  siRNA target sequence for NP220 (NM_014497.2,982-1000).
cacttgaagtacgtattta

SEQ ID NO: 20111 - DNA, 19 bp, Homo sapiens
  siRNA target sequence for NP220 (NM_014497.2,1020-1038).
gatgaggtcgagaatgaat

SEQ ID NO: 20112 - DNA, 19 bp, Homo sapiens
  siRNA target sequence for NP220 (NM_014497.2,1026-1044).
gtcgagaatgaatttcagt

SEQ ID NO: 20113 - DNA, 19 bp, Homo sapiens
  siRNA target sequence for NP220 (NM_014497.2,1071-1089).
cccaatccaaatgtgatat

SEQ ID NO: 20114 - DNA, 19 bp, Homo sapiens
  siRNA target sequence for NP220 (NM_014497.2,1137-1155).
cccggtgagtcctccaata

SEQ ID NO: 20115 - DNA, 19 bp, Homo sapiens
  siRNA target sequence for NP220 (NM_014497.2,1138-1156).
ccggtgagtcctccaataa

SEQ ID NO: 20116 - DNA, 19 bp, Homo sapiens
  siRNA target sequence for NP220 (NM_014497.2,1139-1157).
cggtgagtcctccaataat

SEQ ID NO: 20117 - DNA, 19 bp, Homo sapiens
  siRNA target sequence for NP220 (NM_014497.2,1150-1168).
ccaataatcggtccttttt

SEQ ID NO: 20118 - DNA, 19 bp, Homo sapiens
  siRNA target sequence for NP220 (NM_014497.2,1190-1208).
gatgtcaggcttacacatt

SEQ ID NO: 20119 - DNA, 19 bp, Homo sapiens
  siRNA target sequence for NP220 (NM_014497.2,1193-1211).
gtcaggcttacacatttca

SEQ ID NO: 20120 - DNA, 19 bp, Homo sapiens
  siRNA target sequence for NP220 (NM_014497.2,1243-1261).
ccgtcaaccaatccattaa

SEQ ID NO: 20121 - DNA, 19 bp, Homo sapiens
  siRNA target sequence for NP220 (NM_014497.2,1247-1265).
caaccaatccattaaccaa

SEQ ID NO: 20122 - DNA, 19 bp, Homo sapiens
  siRNA target sequence for NP220 (NM_014497.2,1274-1292).
ccagacaatgagtcaatct

SEQ ID NO: 20123 - DNA, 19 bp, Homo sapiens
  siRNA target sequence for NP220 (NM_014497.2,1306-1324).
ctatgaaccagcaaccttt

SEQ ID NO: 20124 - DNA, 19 bp, Homo sapiens
  siRNA target sequence for NP220 (NM_014497.2,1320-1338).
cctttttcgtcggaattaa

SEQ ID NO: 20125 - DNA, 19 bp, Homo sapiens
  siRNA target sequence for NP220 (NM_014497.2,1321-1339).
ctttttcgtcggaattaat

SEQ ID NO: 20126 - DNA, 19 bp, Homo sapiens
  siRNA target sequence for NP220 (NM_014497.2,1382-1400).
gattaattcatctaacgta

SEQ ID NO: 20127 - DNA, 19 bp, Homo sapiens
  siRNA target sequence for NP220 (NM_014497.2,1397-1415).
cgtacatgttggatcaaga

SEQ ID NO: 20128 - DNA, 19 bp, Homo sapiens
  siRNA target sequence for NP220 (NM_014497.2,1462-1480).
ctccctttggtattgtgaa

SEQ ID NO: 20129 - DNA, 19 bp, Homo sapiens
  siRNA target sequence for NP220 (NM_014497.2,1531-1549).
gacttccaactccttctat

SEQ ID NO: 20130 - DNA, 19 bp, Homo sapiens
  siRNA target sequence for NP220 (NM_014497.2,1533-1551).
cttccaactccttctatga

SEQ ID NO: 20131 - DNA, 19 bp, Homo sapiens
  siRNA target sequence for NP220 (NM_014497.2,1537-1555).
caactccttctatgatgaa

SEQ ID NO: 20132 - DNA, 19 bp, Homo sapiens
  siRNA target sequence for NP220 (NM_014497.2,1542-1560).
ccttctatgatgaatgatt

SEQ ID NO: 20133 - DNA, 19 bp, Homo sapiens
  siRNA target sequence for NP220 (NM_014497.2,1604-1622).
gtgtaacgtagaatgtagt

SEQ ID NO: 20134 - DNA, 19 bp, Homo sapiens
  siRNA target sequence for NP220 (NM_014497.2,1637-1655).
gattcagcatcaaaataca

SEQ ID NO: 20135 - DNA, 19 bp, Homo sapiens
  siRNA target sequence for NP220 (NM_014497.2,1678-1696).
gacagttacgtcaacagta

SEQ ID NO: 20136 - DNA, 19 bp, Homo sapiens
  siRNA target sequence for NP220 (NM_014497.2,1764-1782).
ccacgaagacgttctcatt

SEQ ID NO: 20137 - DNA, 19 bp, Homo sapiens
  siRNA target sequence for NP220 (NM_014497.2,1787-1805).
cagtcctaggcgttctaga

SEQ ID NO: 20138 - DNA, 19 bp, Homo sapiens
  siRNA target sequence for NP220 (NM_014497.2,1791-1809).
cctaggcgttctagaagat

SEQ ID NO: 20139 - DNA, 19 bp, Homo sapiens
  siRNA target sequence for NP220 (NM_014497.2,1810-1828).
caagctcaagtcacagatt

SEQ ID NO: 20140 - DNA, 19 bp, Homo sapiens
  siRNA target sequence for NP220 (NM_014497.2,1835-1853).
gtctcgaagcccaatgcat

SEQ ID NO: 20141 - DNA, 19 bp, Homo sapiens
  siRNA target sequence for NP220 (NM_014497.2,1837-1855).
ctcgaagcccaatgcatta

SEQ ID NO: 20142 - DNA, 19 bp, Homo sapiens
  siRNA target sequence for NP220 (NM_014497.2,1839-1857).
cgaagcccaatgcattaca

SEQ ID NO: 20143 - DNA, 19 bp, Homo sapiens
  siRNA target sequence for NP220 (NM_014497.2,1843-1861).
gcccaatgcattacatgta

SEQ ID NO: 20144 - DNA, 19 bp, Homo sapiens
  siRNA target sequence for NP220 (NM_014497.2,1844-1862).
cccaatgcattacatgtat

SEQ ID NO: 20145 - DNA, 19 bp, Homo sapiens
  siRNA target sequence for NP220 (NM_014497.2,1845-1863).
ccaatgcattacatgtata

SEQ ID NO: 20146 - DNA, 19 bp, Homo sapiens
  siRNA target sequence for NP220 (NM_014497.2,1892-1910).
ccatcgtttcatttctaga

SEQ ID NO: 20147 - DNA, 19 bp, Homo sapiens
  siRNA target sequence for NP220 (NM_014497.2,1925-1943).
cagatcccgttcaccatat

SEQ ID NO: 20148 - DNA, 19 bp, Homo sapiens
  siRNA target sequence for NP220 (NM_014497.2,1930-1948).
cccgttcaccatatcgaat

SEQ ID NO: 20149 - DNA, 19 bp, Homo sapiens
  siRNA target sequence for NP220 (NM_014497.2,1931-1949).
ccgttcaccatatcgaatt

SEQ ID NO: 20150 - DNA, 19 bp, Homo sapiens
  siRNA target sequence for NP220 (NM_014497.2,1932-1950).
cgttcaccatatcgaatta

SEQ ID NO: 20151 - DNA, 19 bp, Homo sapiens
  siRNA target sequence for NP220 (NM_014497.2,1944-1962).
cgaattagaaatccattta

SEQ ID NO: 20152 - DNA, 19 bp, Homo sapiens
  siRNA target sequence for NP220 (NM_014497.2,1963-1981).
gaggtagtccaaaatgctt

SEQ ID NO: 20153 - DNA, 19 bp, Homo sapiens
  siRNA target sequence for NP220 (NM_014497.2,2044-2062).
cattagaagatgtagtaca

SEQ ID NO: 20154 - DNA, 19 bp, Homo sapiens
  siRNA target sequence for NP220 (NM_014497.2,2072-2090).
gcatgggacagaatttaat

SEQ ID NO: 20155 - DNA, 19 bp, Homo sapiens
  siRNA target sequence for NP220 (NM_014497.2,2133-2151).
gcacaaaagcctaaaacta

SEQ ID NO: 20156 - DNA, 19 bp, Homo sapiens
  siRNA target sequence for NP220 (NM_014497.2,2178-2196).
cctacaagcgctacaaaga

SEQ ID NO: 20157 - DNA, 19 bp, Homo sapiens
  siRNA target sequence for NP220 (NM_014497.2,2186-2204).
cgctacaaagagtgattca

SEQ ID NO: 20158 - DNA, 19 bp, Homo sapiens
  siRNA target sequence for NP220 (NM_014497.2,2211-2229).
ggaggacattctattcgtt

SEQ ID NO: 20159 - DNA, 19 bp, Homo sapiens
  siRNA target sequence for NP220 (NM_014497.2,2230-2248).
gtaaatcaaagaatcttga

SEQ ID NO: 20160 - DNA, 19 bp, Homo sapiens
  siRNA target sequence for NP220 (NM_014497.2,2253-2271).
gacactttgtcagaatgta

SEQ ID NO: 20161 - DNA, 19 bp, Homo sapiens
  siRNA target sequence for NP220 (NM_014497.2,2303-2321).
gcgaaagcttcggaaagaa

SEQ ID NO: 20162 - DNA, 19 bp, Homo sapiens
  siRNA target sequence for NP220 (NM_014497.2,2337-2355).
ggttcggttcttcttataa

SEQ ID NO: 20163 - DNA, 19 bp, Homo sapiens
  siRNA target sequence for NP220 (NM_014497.2,2342-2360).
ggttcttcttataactgaa

SEQ ID NO: 20164 - DNA, 19 bp, Homo sapiens
  siRNA target sequence for NP220 (NM_014497.2,2343-2361).
gttcttcttataactgaat

SEQ ID NO: 20165 - DNA, 19 bp, Homo sapiens
  siRNA target sequence for NP220 (NM_014497.2,2432-2450).
cctaattgttccatataga

SEQ ID NO: 20166 - DNA, 19 bp, Homo sapiens
  siRNA target sequence for NP220 (NM_014497.2,2433-2451).
ctaattgttccatatagaa

SEQ ID NO: 20167 - DNA, 19 bp, Homo sapiens
  siRNA target sequence for NP220 (NM_014497.2,2457-2475).
gcttacctagaaatggaat

SEQ ID NO: 20168 - DNA, 19 bp, Homo sapiens
  siRNA target sequence for NP220 (NM_014497.2,2458-2476).
cttacctagaaatggaatt

SEQ ID NO: 20169 - DNA, 19 bp, Homo sapiens
  siRNA target sequence for NP220 (NM_014497.2,2484-2502).
gcaattactgcaattatga

SEQ ID NO: 20170 - DNA, 19 bp, Homo sapiens
  siRNA target sequence for NP220 (NM_014497.2,2491-2509).
ctgcaattatgaagtacat

SEQ ID NO: 20171 - DNA, 19 bp, Homo sapiens
  siRNA target sequence for NP220 (NM_014497.2,2520-2538).
cctcttacgataaaaggaa

SEQ ID NO: 20172 - DNA, 19 bp, Homo sapiens
  siRNA target sequence for NP220 (NM_014497.2,2521-2539).
ctcttacgataaaaggaaa

SEQ ID NO: 20173 - DNA, 19 bp, Homo sapiens
  siRNA target sequence for NP220 (NM_014497.2,2523-2541).
cttacgataaaaggaaaaa

SEQ ID NO: 20174 - DNA, 19 bp, Homo sapiens
  siRNA target sequence for NP220 (NM_014497.2,2619-2637).
gtatctgcatctaccttaa

SEQ ID NO: 20175 - DNA, 19 bp, Homo sapiens
  siRNA target sequence for NP220 (NM_014497.2,2641-2659).
gagatgcagatgcttcaaa

SEQ ID NO: 20176 - DNA, 19 bp, Homo sapiens
  siRNA target sequence for NP220 (NM_014497.2,2661-2679).
gctgttgaaattgttactt

SEQ ID NO: 20177 - DNA, 19 bp, Homo sapiens
  siRNA target sequence for NP220 (NM_014497.2,2664-2682).
gttgaaattgttacttcaa

SEQ ID NO: 20178 - DNA, 19 bp, Homo sapiens
  siRNA target sequence for NP220 (NM_014497.2,2667-2685).
gaaattgttacttcaactt

SEQ ID NO: 20179 - DNA, 19 bp, Homo sapiens
  siRNA target sequence for NP220 (NM_014497.2,2721-2739).
gccaaagtaaacaaatcta

SEQ ID NO: 20180 - DNA, 19 bp, Homo sapiens
  siRNA target sequence for NP220 (NM_014497.2,2771-2789).
ggtaacggtagctgttaaa

SEQ ID NO: 20181 - DNA, 19 bp, Homo sapiens
  siRNA target sequence for NP220 (NM_014497.2,2776-2794).
cggtagctgttaaaggtaa

SEQ ID NO: 20182 - DNA, 19 bp, Homo sapiens
  siRNA target sequence for NP220 (NM_014497.2,2777-2795).
ggtagctgttaaaggtaat

SEQ ID NO: 20183 - DNA, 19 bp, Homo sapiens
  siRNA target sequence for NP220 (NM_014497.2,2790-2808).
ggtaataaagcttcaatca

SEQ ID NO: 20184 - DNA, 19 bp, Homo sapiens
  siRNA target sequence for NP220 (NM_014497.2,2791-2809).
gtaataaagcttcaatcaa

SEQ ID NO: 20185 - DNA, 19 bp, Homo sapiens
  siRNA target sequence for NP220 (NM_014497.2,2878-2896).
ctaacaaacctgtgactat

SEQ ID NO: 20186 - DNA, 19 bp, Homo sapiens
  siRNA target sequence for NP220 (NM_014497.2,2889-2907).
gtgactataccagaaaact

SEQ ID NO: 20187 - DNA, 19 bp, Homo sapiens
  siRNA target sequence for NP220 (NM_014497.2,2891-2909).
gactataccagaaaactct

SEQ ID NO: 20188 - DNA, 19 bp, Homo sapiens
  siRNA target sequence for NP220 (NM_014497.2,2918-2936).
gaccagtattgaagtcaaa

SEQ ID NO: 20189 - DNA, 19 bp, Homo sapiens
  siRNA target sequence for NP220 (NM_014497.2,2948-2966).
ctgtgctaaagaagctatt

SEQ ID NO: 20190 - DNA, 19 bp, Homo sapiens
  siRNA target sequence for NP220 (NM_014497.2,3039-3057).
gtctctaatttgcctaata

SEQ ID NO: 20191 - DNA, 19 bp, Homo sapiens
  siRNA target sequence for NP220 (NM_014497.2,3050-3068).
gcctaataaaggatattct

SEQ ID NO: 20192 - DNA, 19 bp, Homo sapiens
  siRNA target sequence for NP220 (NM_014497.2,3061-3079).
gatattctgtagaagaagt

SEQ ID NO: 20193 - DNA, 19 bp, Homo sapiens
  siRNA target sequence for NP220 (NM_014497.2,3075-3093).
gaagtttatgacttagcaa

SEQ ID NO: 20194 - DNA, 19 bp, Homo sapiens
  siRNA target sequence for NP220 (NM_014497.2,3102-3120).
ggtggtttaaaggatatct

SEQ ID NO: 20195 - DNA, 19 bp, Homo sapiens
  siRNA target sequence for NP220 (NM_014497.2,3168-3186).
gctgctgagtctatggtaa

SEQ ID NO: 20196 - DNA, 19 bp, Homo sapiens
  siRNA target sequence for NP220 (NM_014497.2,3169-3187).
ctgctgagtctatggtaaa

SEQ ID NO: 20197 - DNA, 19 bp, Homo sapiens
  siRNA target sequence for NP220 (NM_014497.2,3171-3189).
gctgagtctatggtaaaat

SEQ ID NO: 20198 - DNA, 19 bp, Homo sapiens
  siRNA target sequence for NP220 (NM_014497.2,3176-3194).
gtctatggtaaaattttat

SEQ ID NO: 20199 - DNA, 19 bp, Homo sapiens
  siRNA target sequence for NP220 (NM_014497.2,3196-3214).
cctgcttcccagtattgat

SEQ ID NO: 20200 - DNA, 19 bp, Homo sapiens
  siRNA target sequence for NP220 (NM_014497.2,3238-3256).
gtatggctcctgaaaacat

SEQ ID NO: 20201 - DNA, 19 bp, Homo sapiens
  siRNA target sequence for NP220 (NM_014497.2,3308-3326).
cccagaggcaaacatagat

SEQ ID NO: 20202 - DNA, 19 bp, Homo sapiens
  siRNA target sequence for NP220 (NM_014497.2,3339-3357).
cgatttgtacatcttgata

SEQ ID NO: 20203 - DNA, 19 bp, Homo sapiens
  siRNA target sequence for NP220 (NM_014497.2,3397-3415).
gacttcagtttggaaaagt

SEQ ID NO: 20204 - DNA, 19 bp, Homo sapiens
  siRNA target sequence for NP220 (NM_014497.2,3414-3432).
gtggatcaccatgtattca

SEQ ID NO: 20205 - DNA, 19 bp, Homo sapiens
  siRNA target sequence for NP220 (NM_014497.2,3422-3440).
ccatgtattcataagtaat

SEQ ID NO: 20206 - DNA, 19 bp, Homo sapiens
  siRNA target sequence for NP220 (NM_014497.2,3449-3467).
ggcaattcttcagttagat

SEQ ID NO: 20207 - DNA, 19 bp, Homo sapiens
  siRNA target sequence for NP220 (NM_014497.2,3472-3490).
ctgaatctgctcagtcaat

SEQ ID NO: 20208 - DNA, 19 bp, Homo sapiens
  siRNA target sequence for NP220 (NM_014497.2,3474-3492).
gaatctgctcagtcaatgt

SEQ ID NO: 20209 - DNA, 19 bp, Homo sapiens
  siRNA target sequence for NP220 (NM_014497.2,3480-3498).
gctcagtcaatgtatagct

SEQ ID NO: 20210 - DNA, 19 bp, Homo sapiens
  siRNA target sequence for NP220 (NM_014497.2,3481-3499).
ctcagtcaatgtatagctt

SEQ ID NO: 20211 - DNA, 19 bp, Homo sapiens
  siRNA target sequence for NP220 (NM_014497.2,3566-3584).
cttaccagaggtgcaaatt

SEQ ID NO: 20212 - DNA, 19 bp, Homo sapiens
  siRNA target sequence for NP220 (NM_014497.2,3629-3647).
cagtccaattgatgaaagt

SEQ ID NO: 20213 - DNA, 19 bp, Homo sapiens
  siRNA target sequence for NP220 (NM_014497.2,3650-3668).
ggtgcaaacagcaactgat

SEQ ID NO: 20214 - DNA, 19 bp, Homo sapiens
  siRNA target sequence for NP220 (NM_014497.2,3651-3669).
gtgcaaacagcaactgata

SEQ ID NO: 20215 - DNA, 19 bp, Homo sapiens
  siRNA target sequence for NP220 (NM_014497.2,3664-3682).
ctgatagtccctctgttaa

SEQ ID NO: 20216 - DNA, 19 bp, Homo sapiens
  siRNA target sequence for NP220 (NM_014497.2,3673-3691).
cctctgttaaacctaatga

SEQ ID NO: 20217 - DNA, 19 bp, Homo sapiens
  siRNA target sequence for NP220 (NM_014497.2,3859-3877).
catccgcttcagtcagtat

SEQ ID NO: 20218 - DNA, 19 bp, Homo sapiens
  siRNA target sequence for NP220 (NM_014497.2,3862-3880).
ccgcttcagtcagtattga

SEQ ID NO: 20219 - DNA, 19 bp, Homo sapiens
  siRNA target sequence for NP220 (NM_014497.2,3863-3881).
cgcttcagtcagtattgaa

SEQ ID NO: 20220 - DNA, 19 bp, Homo sapiens
  siRNA target sequence for NP220 (NM_014497.2,3865-3883).
cttcagtcagtattgaaca

SEQ ID NO: 20221 - DNA, 19 bp, Homo sapiens
  siRNA target sequence for NP220 (NM_014497.2,3868-3886).
cagtcagtattgaacaatt

SEQ ID NO: 20222 - DNA, 19 bp, Homo sapiens
  siRNA target sequence for NP220 (NM_014497.2,3872-3890).
cagtattgaacaattcact

SEQ ID NO: 20223 - DNA, 19 bp, Homo sapiens
  siRNA target sequence for NP220 (NM_014497.2,3897-3915).
gccgaggagtgtgctttaa

SEQ ID NO: 20224 - DNA, 19 bp, Homo sapiens
  siRNA target sequence for NP220 (NM_014497.2,3898-3916).
ccgaggagtgtgctttaaa

SEQ ID NO: 20225 - DNA, 19 bp, Homo sapiens
  siRNA target sequence for NP220 (NM_014497.2,3899-3917).
cgaggagtgtgctttaaat

SEQ ID NO: 20226 - DNA, 19 bp, Homo sapiens
  siRNA target sequence for NP220 (NM_014497.2,4119-4137).
gaaactgtttcggaaatat

SEQ ID NO: 20227 - DNA, 19 bp, Homo sapiens
  siRNA target sequence for NP220 (NM_014497.2,4157-4175).
gacgttagtaccaggaatt

SEQ ID NO: 20228 - DNA, 19 bp, Homo sapiens
  siRNA target sequence for NP220 (NM_014497.2,4430-4448).
gcctgatgaaactagtaaa

SEQ ID NO: 20229 - DNA, 19 bp, Homo sapiens
  siRNA target sequence for NP220 (NM_014497.2,4431-4449).
cctgatgaaactagtaaaa

SEQ ID NO: 20230 - DNA, 19 bp, Homo sapiens
  siRNA target sequence for NP220 (NM_014497.2,4437-4455).
gaaactagtaaaactagta

SEQ ID NO: 20231 - DNA, 19 bp, Homo sapiens
  siRNA target sequence for NP220 (NM_014497.2,4458-4476).
ctggctgtatcagatgtat

SEQ ID NO: 20232 - DNA, 19 bp, Homo sapiens
  siRNA target sequence for NP220 (NM_014497.2,4460-4478).
ggctgtatcagatgtatct

SEQ ID NO: 20233 - DNA, 19 bp, Homo sapiens
  siRNA target sequence for NP220 (NM_014497.2,4461-4479).
gctgtatcagatgtatcta

SEQ ID NO: 20234 - DNA, 19 bp, Homo sapiens
  siRNA target sequence for NP220 (NM_014497.2,4473-4491).
gtatctagcagtaaaccaa

SEQ ID NO: 20235 - DNA, 19 bp, Homo sapiens
  siRNA target sequence for NP220 (NM_014497.2,4734-4752).
ctgcaaggcaagctttcta

SEQ ID NO: 20236 - DNA, 19 bp, Homo sapiens
  siRNA target sequence for NP220 (NM_014497.2,4757-4775).
ggattacagagatataaca

SEQ ID NO: 20237 - DNA, 19 bp, Homo sapiens
  siRNA target sequence for NP220 (NM_014497.2,4797-4815).
gctagaccttccatcatga

SEQ ID NO: 20238 - DNA, 19 bp, Homo sapiens
  siRNA target sequence for NP220 (NM_014497.2,4798-4816).
ctagaccttccatcatgaa

SEQ ID NO: 20239 - DNA, 19 bp, Homo sapiens
  siRNA target sequence for NP220 (NM_014497.2,4824-4842).
gacagcaacaataagactt

SEQ ID NO: 20240 - DNA, 19 bp, Homo sapiens
  siRNA target sequence for NP220 (NM_014497.2,4881-4899).
ggtagaagttccaaatcta

SEQ ID NO: 20241 - DNA, 19 bp, Homo sapiens
  siRNA target sequence for NP220 (NM_014497.2,4882-4900).
gtagaagttccaaatctaa

SEQ ID NO: 20242 - DNA, 19 bp, Homo sapiens
  siRNA target sequence for NP220 (NM_014497.2,4897-4915).
ctaaagaggagccattatt

SEQ ID NO: 20243 - DNA, 19 bp, Homo sapiens
  siRNA target sequence for NP220 (NM_014497.2,4942-4960).
ctgtggatgaggttataga

SEQ ID NO: 20244 - DNA, 19 bp, Homo sapiens
  siRNA target sequence for NP220 (NM_014497.2,4952-4970).
ggttatagaagaagtgaat

SEQ ID NO: 20245 - DNA, 19 bp, Homo sapiens
  siRNA target sequence for NP220 (NM_014497.2,4981-4999).
ccaagcagaatccactaaa

SEQ ID NO: 20246 - DNA, 19 bp, Homo sapiens
  siRNA target sequence for NP220 (NM_014497.2,5094-5112).
ggagaactatcttttgtga

SEQ ID NO: 20247 - DNA, 19 bp, Homo sapiens
  siRNA target sequence for NP220 (NM_014497.2,5281-5299).
cccacagtgaacctaaaga

SEQ ID NO: 20248 - DNA, 19 bp, Homo sapiens
  siRNA target sequence for NP220 (NM_014497.2,5354-5372).
ggtaactgtggatgaaatt

SEQ ID NO: 20249 - DNA, 19 bp, Homo sapiens
  siRNA target sequence for NP220 (NM_014497.2,5381-5399).
ggaagagctacctttgaat

SEQ ID NO: 20250 - DNA, 19 bp, Homo sapiens
  siRNA target sequence for NP220 (NM_014497.2,5400-5418).
gagtcagcagacataactt

SEQ ID NO: 20251 - DNA, 19 bp, Homo sapiens
  siRNA target sequence for NP220 (NM_014497.2,5402-5420).
gtcagcagacataactttt

SEQ ID NO: 20252 - DNA, 19 bp, Homo sapiens
  siRNA target sequence for NP220 (NM_014497.2,5462-5480).
ggattccattggcttcatt

SEQ ID NO: 20253 - DNA, 19 bp, Homo sapiens
  siRNA target sequence for NP220 (NM_014497.2,5492-5510).
gcccgaagacccttctact

SEQ ID NO: 20254 - DNA, 19 bp, Homo sapiens
  siRNA target sequence for NP220 (NM_014497.2,5493-5511).
cccgaagacccttctactt

SEQ ID NO: 20255 - DNA, 19 bp, Homo sapiens
  siRNA target sequence for NP220 (NM_014497.2,5494-5512).
ccgaagacccttctacttt

SEQ ID NO: 20256 - DNA, 19 bp, Homo sapiens
  siRNA target sequence for NP220 (NM_014497.2,5495-5513).
cgaagacccttctacttta

SEQ ID NO: 20257 - DNA, 19 bp, Homo sapiens
  siRNA target sequence for NP220 (NM_014497.2,5499-5517).
gacccttctactttagtta

SEQ ID NO: 20258 - DNA, 19 bp, Homo sapiens
  siRNA target sequence for NP220 (NM_014497.2,5561-5579).
gactttggatgaagtaact

SEQ ID NO: 20259 - DNA, 19 bp, Homo sapiens
  siRNA target sequence for NP220 (NM_014497.2,5592-5610).
gactctctggcggatttta

SEQ ID NO: 20260 - DNA, 19 bp, Homo sapiens
  siRNA target sequence for NP220 (NM_014497.2,5596-5614).
ctctggcggattttaacaa

SEQ ID NO: 20261 - DNA, 19 bp, Homo sapiens
  siRNA target sequence for NP220 (NM_014497.2,5789-5807).
ccaagtgggtccagtaaat

SEQ ID NO: 20262 - DNA, 19 bp, Homo sapiens
  siRNA target sequence for NP220 (NM_014497.2,5793-5811).
gtgggtccagtaaatgaga

SEQ ID NO: 20263 - DNA, 19 bp, Homo sapiens
  siRNA target sequence for NP220 (NM_014497.2,5829-5847).
ctaaaaaccatgattgaaa

SEQ ID NO: 20264 - DNA, 19 bp, Homo sapiens
  siRNA target sequence for NP220 (NM_014497.2,5840-5858).
gattgaaagacacttaaca

SEQ ID NO: 20265 - DNA, 19 bp, Homo sapiens
  siRNA target sequence for NP220 (NM_014497.2,5868-5886).
ccaaccaagagagttagaa

SEQ ID NO: 20266 - DNA, 19 bp, Homo sapiens
  siRNA target sequence for NP220 (NM_014497.2,5951-5969).
ccagatgagtgaagttgat

SEQ ID NO: 20267 - DNA, 19 bp, Homo sapiens
  siRNA target sequence for NP220 (NM_014497.2,6059-6077).
ccctgaggaattagacttt

SEQ ID NO: 20268 - DNA, 19 bp, Homo sapiens
  siRNA target sequence for NP220 (NM_014497.2,6065-6083).
ggaattagactttcttgta

SEQ ID NO: 20269 - DNA, 19 bp, Homo sapiens
  siRNA target sequence for NP220 (NM_014497.2,6093-6111).
ggattcttctgtccaattt

SEQ ID NO: 20270 - DNA, 19 bp, Homo sapiens
  siRNA target sequence for NP220 (NM_014497.2,6154-6172).
gcaagagtacacgtcataa

SEQ ID NO: 20271 - DNA, 19 bp, Homo sapiens
  siRNA target sequence for NP220 (NM_014497.2,6158-6176).
gagtacacgtcataagcaa

SEQ ID NO: 20272 - DNA, 19 bp, Homo sapiens
  siRNA target sequence for NP220 (NM_014497.2,6166-6184).
gtcataagcaaaatactga

SEQ ID NO: 20273 - DNA, 19 bp, Homo sapiens
  siRNA target sequence for SAFB (NM_002967.2,259-277).
gtggtaatcctgacgaaat

SEQ ID NO: 20274 - DNA, 19 bp, Homo sapiens
  siRNA target sequence for SAFB (NM_002967.2,262-280).
gtaatcctgacgaaattga

SEQ ID NO: 20275 - DNA, 19 bp, Homo sapiens
  siRNA target sequence for SAFB (NM_002967.2,286-304).
cctccgagggaaacaagaa

SEQ ID NO: 20276 - DNA, 19 bp, Homo sapiens
  siRNA target sequence for SAFB (NM_002967.2,362-380).
cgggctggaggaaaactct

SEQ ID NO: 20277 - DNA, 19 bp, Homo sapiens
  siRNA target sequence for SAFB (NM_002967.2,527-545).
gtccctgtcggatagtaga

SEQ ID NO: 20278 - DNA, 19 bp, Homo sapiens
  siRNA target sequence for SAFB (NM_002967.2,606-624).
gacaaagaaactataaaca

SEQ ID NO: 20279 - DNA, 19 bp, Homo sapiens
  siRNA target sequence for SAFB (NM_002967.2,640-658).
catctgacttcactatatt

SEQ ID NO: 20280 - DNA, 19 bp, Homo sapiens
  siRNA target sequence for SAFB (NM_002967.2,643-661).
ctgacttcactatattaca

SEQ ID NO: 20281 - DNA, 19 bp, Homo sapiens
  siRNA target sequence for SAFB (NM_002967.2,1209-1227).
gaagatgactcggatacaa

SEQ ID NO: 20282 - DNA, 19 bp, Homo sapiens
  siRNA target sequence for SAFB (NM_002967.2,1306-1324).
gagctacagatttgaagaa

SEQ ID NO: 20283 - DNA, 19 bp, Homo sapiens
  siRNA target sequence for SAFB (NM_002967.2,1355-1373).
cgccaaggttgtgacaaat

SEQ ID NO: 20284 - DNA, 19 bp, Homo sapiens
  siRNA target sequence for SAFB (NM_002967.2,1390-1408).
ctcgctgttacggttttgt

SEQ ID NO: 20285 - DNA, 19 bp, Homo sapiens
  siRNA target sequence for SAFB (NM_002967.2,1392-1410).
cgctgttacggttttgtca

SEQ ID NO: 20286 - DNA, 19 bp, Homo sapiens
  siRNA target sequence for SAFB (NM_002967.2,1422-1440).
gcagaagaggccacaaaat

SEQ ID NO: 20287 - DNA, 19 bp, Homo sapiens
  siRNA target sequence for SAFB (NM_002967.2,1428-1446).
gaggccacaaaatgcatta

SEQ ID NO: 20288 - DNA, 19 bp, Homo sapiens
  siRNA target sequence for SAFB (NM_002967.2,1462-1480).
cggagctccacggaaagat

SEQ ID NO: 20289 - DNA, 19 bp, Homo sapiens
  siRNA target sequence for SAFB (NM_002967.2,1464-1482).
gagctccacggaaagatga

SEQ ID NO: 20290 - DNA, 19 bp, Homo sapiens
  siRNA target sequence for SAFB (NM_002967.2,1467-1485).
ctccacggaaagatgatct

SEQ ID NO: 20291 - DNA, 19 bp, Homo sapiens
  siRNA target sequence for SAFB (NM_002967.2,1664-1682).
ggaccaagatgatcagaaa

SEQ ID NO: 20292 - DNA, 19 bp, Homo sapiens
  siRNA target sequence for SAFB (NM_002967.2,1698-1716).
cgatctcgagccacaaagt

SEQ ID NO: 20293 - DNA, 19 bp, Homo sapiens
  siRNA target sequence for SAFB (NM_002967.2,1730-1748).
gaccgaacggactgtagta

SEQ ID NO: 20294 - DNA, 19 bp, Homo sapiens
  siRNA target sequence for SAFB (NM_002967.2,1732-1750).
ccgaacggactgtagtaat

SEQ ID NO: 20295 - DNA, 19 bp, Homo sapiens
  siRNA target sequence for SAFB (NM_002967.2,1760-1778).
caaaggggtgcctgtgatt

SEQ ID NO: 20296 - DNA, 19 bp, Homo sapiens
  siRNA target sequence for SAFB (NM_002967.2,1765-1783).
gggtgcctgtgattagtgt

SEQ ID NO: 20297 - DNA, 19 bp, Homo sapiens
  siRNA target sequence for SAFB (NM_002967.2,1766-1784).
ggtgcctgtgattagtgta

SEQ ID NO: 20298 - DNA, 19 bp, Homo sapiens
  siRNA target sequence for SAFB (NM_002967.2,1769-1787).
gcctgtgattagtgtaaaa

SEQ ID NO: 20299 - DNA, 19 bp, Homo sapiens
  siRNA target sequence for SAFB (NM_002967.2,2247-2265).
ctggatgagcgctaccatt

SEQ ID NO: 20300 - DNA, 19 bp, Homo sapiens
  siRNA target sequence for SAFB (NM_002967.2,2255-2273).
gcgctaccattctgacttt

SEQ ID NO: 20301 - DNA, 19 bp, Homo sapiens
  siRNA target sequence for SAFB (NM_002967.2,2256-2274).
cgctaccattctgacttta

SEQ ID NO: 20302 - DNA, 19 bp, Homo sapiens
  siRNA target sequence for SAFB (NM_002967.2,2257-2275).
gctaccattctgactttaa

SEQ ID NO: 20303 - DNA, 19 bp, Homo sapiens
  siRNA target sequence for XRCC5 (NM_021141.2,82-100).
ggctttaccatgagtaact

SEQ ID NO: 20304 - DNA, 19 bp, Homo sapiens
  siRNA target sequence for XRCC5 (NM_021141.2,110-128).
gtatagaatccccatttga

SEQ ID NO: 20305 - DNA, 19 bp, Homo sapiens
  siRNA target sequence for XRCC5 (NM_021141.2,130-148).
caagcaaagaaggtgataa

SEQ ID NO: 20306 - DNA, 19 bp, Homo sapiens
  siRNA target sequence for XRCC5 (NM_021141.2,183-201).
caaggatgagattgcttta

SEQ ID NO: 20307 - DNA, 19 bp, Homo sapiens
  siRNA target sequence for XRCC5 (NM_021141.2,196-214).
gctttagtcctgtttggta

SEQ ID NO: 20308 - DNA, 19 bp, Homo sapiens
  siRNA target sequence for XRCC5 (NM_021141.2,241-259).
ggtggggatcagtatcaga

SEQ ID NO: 20309 - DNA, 19 bp, Homo sapiens
  siRNA target sequence for XRCC5 (NM_021141.2,242-260).
gtggggatcagtatcagaa

SEQ ID NO: 20310 - DNA, 19 bp, Homo sapiens
  siRNA target sequence for XRCC5 (NM_021141.2,245-263).
gggatcagtatcagaacat

SEQ ID NO: 20311 - DNA, 19 bp, Homo sapiens
  siRNA target sequence for XRCC5 (NM_021141.2,374-392).
gcatggatgtgattcaaca

SEQ ID NO: 20312 - DNA, 19 bp, Homo sapiens
  siRNA target sequence for XRCC5 (NM_021141.2,375-393).
catggatgtgattcaacat

SEQ ID NO: 20313 - DNA, 19 bp, Homo sapiens
  siRNA target sequence for XRCC5 (NM_021141.2,450-468).
cagccgattcagcaaaagt

SEQ ID NO: 20314 - DNA, 19 bp, Homo sapiens
  siRNA target sequence for XRCC5 (NM_021141.2,467-485).
gtcagctggatattataat

SEQ ID NO: 20315 - DNA, 19 bp, Homo sapiens
  siRNA target sequence for XRCC5 (NM_021141.2,503-521).
gtgacatctccctgcaatt

SEQ ID NO: 20316 - DNA, 19 bp, Homo sapiens
  siRNA target sequence for XRCC5 (NM_021141.2,605-623).
cctttccactaaaaggaat

SEQ ID NO: 20317 - DNA, 19 bp, Homo sapiens
  siRNA target sequence for XRCC5 (NM_021141.2,606-624).
ctttccactaaaaggaatt

SEQ ID NO: 20318 - DNA, 19 bp, Homo sapiens
  siRNA target sequence for XRCC5 (NM_021141.2,620-638).
gaattaccgaacagcaaaa

SEQ ID NO: 20319 - DNA, 19 bp, Homo sapiens
  siRNA target sequence for XRCC5 (NM_021141.2,644-662).
gtcttgagatagtgaaaat

SEQ ID NO: 20320 - DNA, 19 bp, Homo sapiens
  siRNA target sequence for XRCC5 (NM_021141.2,972-990).
gttccgctatggaagtgat

SEQ ID NO: 20321 - DNA, 19 bp, Homo sapiens
  siRNA target sequence for XRCC5 (NM_021141.2,977-995).
gctatggaagtgatatagt

SEQ ID NO: 20322 - DNA, 19 bp, Homo sapiens
  siRNA target sequence for XRCC5 (NM_021141.2,988-1006).
gatatagttcctttctcta

SEQ ID NO: 20323 - DNA, 19 bp, Homo sapiens
  siRNA target sequence for XRCC5 (NM_021141.2,1101-1119).
catgggaaatcaagttcta

SEQ ID NO: 20324 - DNA, 19 bp, Homo sapiens
  siRNA target sequence for XRCC5 (NM_021141.2,1180-1198).
gctttggatgacttagaca

SEQ ID NO: 20325 - DNA, 19 bp, Homo sapiens
  siRNA target sequence for XRCC5 (NM_021141.2,1200-1218).
ggtggccatagttcgatat

SEQ ID NO: 20326 - DNA, 19 bp, Homo sapiens
  siRNA target sequence for XRCC5 (NM_021141.2,1203-1221).
ggccatagttcgatatgct

SEQ ID NO: 20327 - DNA, 19 bp, Homo sapiens
  siRNA target sequence for XRCC5 (NM_021141.2,1204-1222).
gccatagttcgatatgctt

SEQ ID NO: 20328 - DNA, 19 bp, Homo sapiens
  siRNA target sequence for XRCC5 (NM_021141.2,1205-1223).
ccatagttcgatatgctta

SEQ ID NO: 20329 - DNA, 19 bp, Homo sapiens
  siRNA target sequence for XRCC5 (NM_021141.2,1213-1231).
cgatatgcttatgacaaaa

SEQ ID NO: 20330 - DNA, 19 bp, Homo sapiens
  siRNA target sequence for XRCC5 (NM_021141.2,1250-1268).
gcgtggcttttcctcatat

SEQ ID NO: 20331 - DNA, 19 bp, Homo sapiens
  siRNA target sequence for XRCC5 (NM_021141.2,1261-1279).
cctcatatcaagcataact

SEQ ID NO: 20332 - DNA, 19 bp, Homo sapiens
  siRNA target sequence for XRCC5 (NM_021141.2,1262-1280).
ctcatatcaagcataacta

SEQ ID NO: 20333 - DNA, 19 bp, Homo sapiens
  siRNA target sequence for XRCC5 (NM_021141.2,1272-1290).
gcataactatgagtgttta

SEQ ID NO: 20334 - DNA, 19 bp, Homo sapiens
  siRNA target sequence for XRCC5 (NM_021141.2,1318-1336).
gacttgcggcaatacatgt

SEQ ID NO: 20335 - DNA, 19 bp, Homo sapiens
  siRNA target sequence for XRCC5 (NM_021141.2,1320-1338).
cttgcggcaatacatgttt

SEQ ID NO: 20336 - DNA, 19 bp, Homo sapiens
  siRNA target sequence for XRCC5 (NM_021141.2,1323-1341).
gcggcaatacatgttttca

SEQ ID NO: 20337 - DNA, 19 bp, Homo sapiens
  siRNA target sequence for XRCC5 (NM_021141.2,1480-1498).
ccaaatcctcgatttcaga

SEQ ID NO: 20338 - DNA, 19 bp, Homo sapiens
  siRNA target sequence for XRCC5 (NM_021141.2,1487-1505).
ctcgatttcagagattatt

SEQ ID NO: 20339 - DNA, 19 bp, Homo sapiens
  siRNA target sequence for XRCC5 (NM_021141.2,1490-1508).
gatttcagagattatttca

SEQ ID NO: 20340 - DNA, 19 bp, Homo sapiens
  siRNA target sequence for XRCC5 (NM_021141.2,1588-1606).
cccgctgaggtgacaacaa

SEQ ID NO: 20341 - DNA, 19 bp, Homo sapiens
  siRNA target sequence for XRCC5 (NM_021141.2,1589-1607).
ccgctgaggtgacaacaaa

SEQ ID NO: 20342 - DNA, 19 bp, Homo sapiens
  siRNA target sequence for XRCC5 (NM_021141.2,1637-1655).
ccctttttcctctgattga

SEQ ID NO: 20343 - DNA, 19 bp, Homo sapiens
  siRNA target sequence for XRCC5 (NM_021141.2,1960-1978).
cgggaagaagccattaagt

SEQ ID NO: 20344 - DNA, 19 bp, Homo sapiens
  siRNA target sequence for XRCC5 (NM_021141.2,1987-2005).
gagcagcgctttaacaact

SEQ ID NO: 20345 - DNA, 19 bp, Homo sapiens
  siRNA target sequence for XRCC5 (NM_021141.2,2198-2216).
gtggtgatgtggacgattt

SEQ ID NO: 20346 - DNA, 19 bp, Homo sapiens
  siRNA target sequence for XRCC5 (NM_021141.2,2200-2218).
ggtgatgtggacgatttat

SEQ ID NO: 20347 - DNA, 19 bp, Homo sapiens
  siRNA target sequence for XRCC5 (NM_021141.2,2201-2219).
gtgatgtggacgatttatt

SEQ ID NO: 20348 - DNA, 19 bp, Homo sapiens
  siRNA target sequence for MBD2 (NM_003927.3,747-765).
gcaagagcgatgtctacta

SEQ ID NO: 20349 - DNA, 19 bp, Homo sapiens
  siRNA target sequence for MBD2 (NM_003927.3,809-827).
gcaaggtacctgggaaata

SEQ ID NO: 20350 - DNA, 19 bp, Homo sapiens
  siRNA target sequence for MBD2 (NM_003927.3,813-831).
ggtacctgggaaatactgt

SEQ ID NO: 20351 - DNA, 19 bp, Homo sapiens
  siRNA target sequence for MBD2 (NM_003927.3,814-832).
gtacctgggaaatactgtt

SEQ ID NO: 20352 - DNA, 19 bp, Homo sapiens
  siRNA target sequence for MBD2 (NM_003927.3,817-835).
cctgggaaatactgttgat

SEQ ID NO: 20353 - DNA, 19 bp, Homo sapiens
  siRNA target sequence for MBD2 (NM_003927.3,833-851).
gatctcagcagttttgact

SEQ ID NO: 20354 - DNA, 19 bp, Homo sapiens
  siRNA target sequence for MBD2 (NM_003927.3,904-922).
gcgaaacgatcctctcaat

SEQ ID NO: 20355 - DNA, 19 bp, Homo sapiens
  siRNA target sequence for MBD2 (NM_003927.3,910-928).
cgatcctctcaatcaaaat

SEQ ID NO: 20356 - DNA, 19 bp, Homo sapiens
  siRNA target sequence for MBD2 (NM_003927.3,951-969).
caacattgccaattagaca

SEQ ID NO: 20357 - DNA, 19 bp, Homo sapiens
  siRNA target sequence for MBD2 (NM_003927.3,966-984).
gacaaacagcatcaatttt

SEQ ID NO: 20358 - DNA, 19 bp, Homo sapiens
  siRNA target sequence for MBD2 (NM_003927.3,1006-1024).
cacaaatcatcctagtaat

SEQ ID NO: 20359 - DNA, 19 bp, Homo sapiens
  siRNA target sequence for MBD2 (NM_003927.3,1020-1038).
gtaataaagtgaaatcaga

SEQ ID NO: 20360 - DNA, 19 bp, Homo sapiens
  siRNA target sequence for MBD2 (NM_003927.3,1084-1102).
gaggctacaaggacttagt

SEQ ID NO: 20361 - DNA, 19 bp, Homo sapiens
  siRNA target sequence for MBD2 (NM_003927.3,1298-1316).
cccctctgcaaagctttta

SEQ ID NO: 20362 - DNA, 19 bp, Homo sapiens
  siRNA target sequence for MBD2 (NM_003927.3,1358-1376).
cagcaagtacgcaagaaat

SEQ ID NO: 20363 - DNA, 19 bp, Homo sapiens
  siRNA target sequence for MBD2 (NM_003927.3,1386-1404).
cactgatggcagacatctt

SEQ ID NO: 20364 - DNA, 19 bp, Homo sapiens
  siRNA target sequence for MBD4 (NM_003925.1,275-293).
cctccgcaaagaagatgtt

SEQ ID NO: 20365 - DNA, 19 bp, Homo sapiens
  siRNA target sequence for MBD4 (NM_003925.1,451-469).
gagttgtgaagcaaaggtt

SEQ ID NO: 20366 - DNA, 19 bp, Homo sapiens
  siRNA target sequence for MBD4 (NM_003925.1,487-505).
gaagatttgatgtgtactt

SEQ ID NO: 20367 - DNA, 19 bp, Homo sapiens
  siRNA target sequence for MBD4 (NM_003925.1,524-542).
gaagttcagatccaaaagt

SEQ ID NO: 20368 - DNA, 19 bp, Homo sapiens
  siRNA target sequence for MBD4 (NM_003925.1,530-548).
cagatccaaaagttcactt

SEQ ID NO: 20369 - DNA, 19 bp, Homo sapiens
  siRNA target sequence for MBD4 (NM_003925.1,541-559).
gttcacttgctaattatct

SEQ ID NO: 20370 - DNA, 19 bp, Homo sapiens
  siRNA target sequence for MBD4 (NM_003925.1,549-567).
gctaattatcttcacaaaa

SEQ ID NO: 20371 - DNA, 19 bp, Homo sapiens
  siRNA target sequence for MBD4 (NM_003925.1,580-598).
ctcttaagccagaagattt

SEQ ID NO: 20372 - DNA, 19 bp, Homo sapiens
  siRNA target sequence for MBD4 (NM_003925.1,622-640).
ggggtatcaagtcaagata

SEQ ID NO: 20373 - DNA, 19 bp, Homo sapiens
  siRNA target sequence for MBD4 (NM_003925.1,623-641).
gggtatcaagtcaagatat

SEQ ID NO: 20374 - DNA, 19 bp, Homo sapiens
  siRNA target sequence for MBD4 (NM_003925.1,624-642).
ggtatcaagtcaagatata

SEQ ID NO: 20375 - DNA, 19 bp, Homo sapiens
  siRNA target sequence for MBD4 (NM_003925.1,684-702).
caaagtaacaattcaaact

SEQ ID NO: 20376 - DNA, 19 bp, Homo sapiens
  siRNA target sequence for MBD4 (NM_003925.1,740-758).
gtttatgccgccaagtagt

SEQ ID NO: 20377 - DNA, 19 bp, Homo sapiens
  siRNA target sequence for MBD4 (NM_003925.1,746-764).
gccgccaagtagtagttca

SEQ ID NO: 20378 - DNA, 19 bp, Homo sapiens
  siRNA target sequence for MBD4 (NM_003925.1,783-801).
ggactctctaactttactt

SEQ ID NO: 20379 - DNA, 19 bp, Homo sapiens
  siRNA target sequence for MBD4 (NM_003925.1,828-846).
gagggtgttgatgatgtta

SEQ ID NO: 20380 - DNA, 19 bp, Homo sapiens
  siRNA target sequence for MBD4 (NM_003925.1,831-849).
ggtgttgatgatgttaact

SEQ ID NO: 20381 - DNA, 19 bp, Homo sapiens
  siRNA target sequence for MBD4 (NM_003925.1,934-952).
gctgttcaggttttgttca

SEQ ID NO: 20382 - DNA, 19 bp, Homo sapiens
  siRNA target sequence for MBD4 (NM_003925.1,935-953).
ctgttcaggttttgttcaa

SEQ ID NO: 20383 - DNA, 19 bp, Homo sapiens
  siRNA target sequence for MBD4 (NM_003925.1,1029-1047).
gatagaactgtctgcattt

SEQ ID NO: 20384 - DNA, 19 bp, Homo sapiens
  siRNA target sequence for MBD4 (NM_003925.1,1162-1180).
cttctggcatcataaacaa

SEQ ID NO: 20385 - DNA, 19 bp, Homo sapiens
  siRNA target sequence for MBD4 (NM_003925.1,1165-1183).
ctggcatcataaacaaatt

SEQ ID NO: 20386 - DNA, 19 bp, Homo sapiens
  siRNA target sequence for MBD4 (NM_003925.1,1240-1258).
ctgaagaaatcggaacaaa

SEQ ID NO: 20387 - DNA, 19 bp, Homo sapiens
  siRNA target sequence for MBD4 (NM_003925.1,1385-1403).
catcccacgaacacagata

SEQ ID NO: 20388 - DNA, 19 bp, Homo sapiens
  siRNA target sequence for MBD4 (NM_003925.1,1389-1407).
ccacgaacacagatagaaa

SEQ ID NO: 20389 - DNA, 19 bp, Homo sapiens
  siRNA target sequence for MBD4 (NM_003925.1,1465-1483).
cacgacgtaaagcctttaa

SEQ ID NO: 20390 - DNA, 19 bp, Homo sapiens
  siRNA target sequence for MBD4 (NM_003925.1,1467-1485).
cgacgtaaagcctttaaga

SEQ ID NO: 20391 - DNA, 19 bp, Homo sapiens
  siRNA target sequence for MBD4 (NM_003925.1,1494-1512).
cctcctcggtcacctttta

SEQ ID NO: 20392 - DNA, 19 bp, Homo sapiens
  siRNA target sequence for MBD4 (NM_003925.1,1498-1516).
ctcggtcaccttttaatct

SEQ ID NO: 20393 - DNA, 19 bp, Homo sapiens
  siRNA target sequence for MBD4 (NM_003925.1,1515-1533).
ctcgttcaagaaacacttt

SEQ ID NO: 20394 - DNA, 19 bp, Homo sapiens
  siRNA target sequence for MBD4 (NM_003925.1,1550-1568).
gcttctcatcgctactata

SEQ ID NO: 20395 - DNA, 19 bp, Homo sapiens
  siRNA target sequence for MBD4 (NM_003925.1,1551-1569).
cttctcatcgctactatat

SEQ ID NO: 20396 - DNA, 19 bp, Homo sapiens
  siRNA target sequence for MBD4 (NM_003925.1,1559-1577).
cgctactatatttctcaat

SEQ ID NO: 20397 - DNA, 19 bp, Homo sapiens
  siRNA target sequence for MBD4 (NM_003925.1,1597-1615).
caatacctgtgctttggaa

SEQ ID NO: 20398 - DNA, 19 bp, Homo sapiens
  siRNA target sequence for MBD4 (NM_003925.1,1704-1722).
gatcttcgggcaaaaacca

SEQ ID NO: 20399 - DNA, 19 bp, Homo sapiens
  siRNA target sequence for MBD4 (NM_003925.1,1714-1732).
caaaaaccattgtcaagtt

SEQ ID NO: 20400 - DNA, 19 bp, Homo sapiens
  siRNA target sequence for MBD4 (NM_003925.1,1754-1772).
gcagtggaagtatccaatt

SEQ ID NO: 20401 - DNA, 19 bp, Homo sapiens
  siRNA target sequence for MBD4 (NM_003925.1,1802-1820).
cgactcttaccgaattttt

SEQ ID NO: 20402 - DNA, 19 bp, Homo sapiens
  siRNA target sequence for MBD4 (NM_003925.1,1803-1821).
gactcttaccgaatttttt

SEQ ID NO: 20403 - DNA, 19 bp, Homo sapiens
  siRNA target sequence for MBD4 (NM_003925.1,1805-1823).
ctcttaccgaattttttgt

SEQ ID NO: 20404 - DNA, 19 bp, Homo sapiens
  siRNA target sequence for MBD4 (NM_003925.1,1851-1869).
gaagaccacaaattaaata

SEQ ID NO: 20405 - DNA, 19 bp, Homo sapiens
  siRNA target sequence for MLH3 (NM_014381.1,123-141).
gtgcttgtcagttgaagta

SEQ ID NO: 20406 - DNA, 19 bp, Homo sapiens
  siRNA target sequence for MLH3 (NM_014381.1,125-143).
gcttgtcagttgaagtaca

SEQ ID NO: 20407 - DNA, 19 bp, Homo sapiens
  siRNA target sequence for MLH3 (NM_014381.1,255-273).
ggaaaccttccaagttcaa

SEQ ID NO: 20408 - DNA, 19 bp, Homo sapiens
  siRNA target sequence for MLH3 (NM_014381.1,265-283).
caagttcaagtgatagaca

SEQ ID NO: 20409 - DNA, 19 bp, Homo sapiens
  siRNA target sequence for MLH3 (NM_014381.1,294-312).
gatggggagtgatgatgta

SEQ ID NO: 20410 - DNA, 19 bp, Homo sapiens
  siRNA target sequence for MLH3 (NM_014381.1,369-387).
gaatccaaggttttatggt

SEQ ID NO: 20411 - DNA, 19 bp, Homo sapiens
  siRNA target sequence for MLH3 (NM_014381.1,399-417).
ggccttggcaaatattgct

SEQ ID NO: 20412 - DNA, 19 bp, Homo sapiens
  siRNA target sequence for MLH3 (NM_014381.1,456-474).
caggacaatgaaaactttt

SEQ ID NO: 20413 - DNA, 19 bp, Homo sapiens
  siRNA target sequence for MLH3 (NM_014381.1,550-568).
gtaacagtgtataacctat

SEQ ID NO: 20414 - DNA, 19 bp, Homo sapiens
  siRNA target sequence for MLH3 (NM_014381.1,621-639).
gaaggttaggcagagaata

SEQ ID NO: 20415 - DNA, 19 bp, Homo sapiens
  siRNA target sequence for MLH3 (NM_014381.1,624-642).
ggttaggcagagaatagaa

SEQ ID NO: 20416 - DNA, 19 bp, Homo sapiens
  siRNA target sequence for MLH3 (NM_014381.1,730-748).
gacgtatgttcccgatttt

SEQ ID NO: 20417 - DNA, 19 bp, Homo sapiens
  siRNA target sequence for MLH3 (NM_014381.1,732-750).
cgtatgttcccgattttgt

SEQ ID NO: 20418 - DNA, 19 bp, Homo sapiens
  siRNA target sequence for MLH3 (NM_014381.1,737-755).
gttcccgattttgtcaaat

SEQ ID NO: 20419 - DNA, 19 bp, Homo sapiens
  siRNA target sequence for MLH3 (NM_014381.1,740-758).
cccgattttgtcaaattta

SEQ ID NO: 20420 - DNA, 19 bp, Homo sapiens
  siRNA target sequence for MLH3 (NM_014381.1,766-784).
ggaaagtcccaaaagctaa

SEQ ID NO: 20421 - DNA, 19 bp, Homo sapiens
  siRNA target sequence for MLH3 (NM_014381.1,814-832).
gagcttagtggctatatca

SEQ ID NO: 20422 - DNA, 19 bp, Homo sapiens
  siRNA target sequence for MLH3 (NM_014381.1,833-851).
gctctgaagcacattacaa

SEQ ID NO: 20423 - DNA, 19 bp, Homo sapiens
  siRNA target sequence for MLH3 (NM_014381.1,899-917).
caaagctacataaactcat

SEQ ID NO: 20424 - DNA, 19 bp, Homo sapiens
  siRNA target sequence for MLH3 (NM_014381.1,1004-1022).
ggtctaccccagaactcta

SEQ ID NO: 20425 - DNA, 19 bp, Homo sapiens
  siRNA target sequence for MLH3 (NM_014381.1,1005-1023).
gtctaccccagaactctat

SEQ ID NO: 20426 - DNA, 19 bp, Homo sapiens
  siRNA target sequence for MLH3 (NM_014381.1,1013-1031).
cagaactctatggcatata

SEQ ID NO: 20427 - DNA, 19 bp, Homo sapiens
  siRNA target sequence for MLH3 (NM_014381.1,1018-1036).
ctctatggcatatatgtaa

SEQ ID NO: 20428 - DNA, 19 bp, Homo sapiens
  siRNA target sequence for MLH3 (NM_014381.1,1284-1302).
ccaggaagcatgtaataat

SEQ ID NO: 20429 - DNA, 19 bp, Homo sapiens
  siRNA target sequence for MLH3 (NM_014381.1,1309-1327).
gattcctatgagatgttta

SEQ ID NO: 20430 - DNA, 19 bp, Homo sapiens
  siRNA target sequence for MLH3 (NM_014381.1,1313-1331).
cctatgagatgtttaattt

SEQ ID NO: 20431 - DNA, 19 bp, Homo sapiens
  siRNA target sequence for MLH3 (NM_014381.1,1332-1350).
gcagtcaaaagctgtgaaa

SEQ ID NO: 20432 - DNA, 19 bp, Homo sapiens
  siRNA target sequence for MLH3 (NM_014381.1,1358-1376).
ctactgcagaaaacgtaaa

SEQ ID NO: 20433 - DNA, 19 bp, Homo sapiens
  siRNA target sequence for MLH3 (NM_014381.1,1372-1390).
gtaaacacacagagttcta

SEQ ID NO: 20434 - DNA, 19 bp, Homo sapiens
  siRNA target sequence for MLH3 (NM_014381.1,1451-1469).
gtggtccaggccatagcaa

SEQ ID NO: 20435 - DNA, 19 bp, Homo sapiens
  siRNA target sequence for MLH3 (NM_014381.1,1453-1471).
ggtccaggccatagcaaaa

SEQ ID NO: 20436 - DNA, 19 bp, Homo sapiens
  siRNA target sequence for MLH3 (NM_014381.1,1456-1474).
ccaggccatagcaaaatga

SEQ ID NO: 20437 - DNA, 19 bp, Homo sapiens
  siRNA target sequence for MLH3 (NM_014381.1,1475-1493).
cagagccatctttacaaaa

SEQ ID NO: 20438 - DNA, 19 bp, Homo sapiens
  siRNA target sequence for MLH3 (NM_014381.1,1502-1520).
gctcttgctcagaatcaaa

SEQ ID NO: 20439 - DNA, 19 bp, Homo sapiens
  siRNA target sequence for MLH3 (NM_014381.1,1676-1694).
gtgggcaggatctagaaat

SEQ ID NO: 20440 - DNA, 19 bp, Homo sapiens
  siRNA target sequence for MLH3 (NM_014381.1,1678-1696).
gggcaggatctagaaatat

SEQ ID NO: 20441 - DNA, 19 bp, Homo sapiens
  siRNA target sequence for MLH3 (NM_014381.1,1698-1716).
gaaagaaagtactactgtt

SEQ ID NO: 20442 - DNA, 19 bp, Homo sapiens
  siRNA target sequence for MLH3 (NM_014381.1,1729-1747).
gccaacatcttgaaaaata

SEQ ID NO: 20443 - DNA, 19 bp, Homo sapiens
  siRNA target sequence for MLH3 (NM_014381.1,1810-1828).
ccttttgcaacaacattat

SEQ ID NO: 20444 - DNA, 19 bp, Homo sapiens
  siRNA target sequence for MLH3 (NM_014381.1,1904-1922).
gttatgggcgagttaaatt

SEQ ID NO: 20445 - DNA, 19 bp, Homo sapiens
  siRNA target sequence for MLH3 (NM_014381.1,1928-1946).
ccactggctttataactca

SEQ ID NO: 20446 - DNA, 19 bp, Homo sapiens
  siRNA target sequence for MLH3 (NM_014381.1,1929-1947).
cactggctttataactcat

SEQ ID NO: 20447 - DNA, 19 bp, Homo sapiens
  siRNA target sequence for MLH3 (NM_014381.1,1934-1952).
gctttataactcatgtagt

SEQ ID NO: 20448 - DNA, 19 bp, Homo sapiens
  siRNA target sequence for MLH3 (NM_014381.1,1943-1961).
ctcatgtagtacaaaatga

SEQ ID NO: 20449 - DNA, 19 bp, Homo sapiens
  siRNA target sequence for MLH3 (NM_014381.1,2017-2035).
cccacacgtgcccaagaaa

SEQ ID NO: 20450 - DNA, 19 bp, Homo sapiens
  siRNA target sequence for MLH3 (NM_014381.1,2083-2101).
gatttagccagcactttaa

SEQ ID NO: 20451 - DNA, 19 bp, Homo sapiens
  siRNA target sequence for MLH3 (NM_014381.1,2094-2112).
cactttaagtaaagaatct

SEQ ID NO: 20452 - DNA, 19 bp, Homo sapiens
  siRNA target sequence for MLH3 (NM_014381.1,2113-2131).
ggtcaattgcccaacaaaa

SEQ ID NO: 20453 - DNA, 19 bp, Homo sapiens
  siRNA target sequence for MLH3 (NM_014381.1,2138-2156).
gcagaacgaatataagtta

SEQ ID NO: 20454 - DNA, 19 bp, Homo sapiens
  siRNA target sequence for MLH3 (NM_014381.1,2139-2157).
cagaacgaatataagttat

SEQ ID NO: 20455 - DNA, 19 bp, Homo sapiens
  siRNA target sequence for MLH3 (NM_014381.1,2170-2188).
gaacctacagcaacttata

SEQ ID NO: 20456 - DNA, 19 bp, Homo sapiens
  siRNA target sequence for MLH3 (NM_014381.1,2208-2226).
ggaaggtagcaaaaaatca

SEQ ID NO: 20457 - DNA, 19 bp, Homo sapiens
  siRNA target sequence for MLH3 (NM_014381.1,2233-2251).
gattgcatattatctgata

SEQ ID NO: 20458 - DNA, 19 bp, Homo sapiens
  siRNA target sequence for MLH3 (NM_014381.1,2257-2275).
ccctctttcccctggtata

SEQ ID NO: 20459 - DNA, 19 bp, Homo sapiens
  siRNA target sequence for MLH3 (NM_014381.1,2261-2279).
ctttcccctggtatagaca

SEQ ID NO: 20460 - DNA, 19 bp, Homo sapiens
  siRNA target sequence for MLH3 (NM_014381.1,2270-2288).
ggtatagacacgtttccaa

SEQ ID NO: 20461 - DNA, 19 bp, Homo sapiens
  siRNA target sequence for MLH3 (NM_014381.1,2360-2378).
cacagctaggatctttaga

SEQ ID NO: 20462 - DNA, 19 bp, Homo sapiens
  siRNA target sequence for MLH3 (NM_014381.1,2362-2380).
cagctaggatctttagaga

SEQ ID NO: 20463 - DNA, 19 bp, Homo sapiens
  siRNA target sequence for MLH3 (NM_014381.1,2379-2397).
gaagtttaagaggcaatat

SEQ ID NO: 20464 - DNA, 19 bp, Homo sapiens
  siRNA target sequence for MLH3 (NM_014381.1,2392-2410).
caatatgggaaggttgaaa

SEQ ID NO: 20465 - DNA, 19 bp, Homo sapiens
  siRNA target sequence for MLH3 (NM_014381.1,2534-2552).
ctactatggagcatagtga

SEQ ID NO: 20466 - DNA, 19 bp, Homo sapiens
  siRNA target sequence for MLH3 (NM_014381.1,2544-2562).
gcatagtgattcagatagt

SEQ ID NO: 20467 - DNA, 19 bp, Homo sapiens
  siRNA target sequence for MLH3 (NM_014381.1,2545-2563).
catagtgattcagatagta

SEQ ID NO: 20468 - DNA, 19 bp, Homo sapiens
  siRNA target sequence for MLH3 (NM_014381.1,2612-2630).
ccaaggatgaagattgttt

SEQ ID NO: 20469 - DNA, 19 bp, Homo sapiens
  siRNA target sequence for MLH3 (NM_014381.1,2643-2661).
gcctagtttgagagaaagt

SEQ ID NO: 20470 - DNA, 19 bp, Homo sapiens
  siRNA target sequence for MLH3 (NM_014381.1,2676-2694).
ggagttatctctctttaat

SEQ ID NO: 20471 - DNA, 19 bp, Homo sapiens
  siRNA target sequence for MLH3 (NM_014381.1,2677-2695).
gagttatctctctttaata

SEQ ID NO: 20472 - DNA, 19 bp, Homo sapiens
  siRNA target sequence for MLH3 (NM_014381.1,2715-2733).
gaagtcatctgaatcacta

SEQ ID NO: 20473 - DNA, 19 bp, Homo sapiens
  siRNA target sequence for MLH3 (NM_014381.1,2725-2743).
gaatcactagcctctaaat

SEQ ID NO: 20474 - DNA, 19 bp, Homo sapiens
  siRNA target sequence for MLH3 (NM_014381.1,2754-2772).
gaagggttccgaaagagaa

SEQ ID NO: 20475 - DNA, 19 bp, Homo sapiens
  siRNA target sequence for MLH3 (NM_014381.1,2759-2777).
gttccgaaagagaaactca

SEQ ID NO: 20476 - DNA, 19 bp, Homo sapiens
  siRNA target sequence for MLH3 (NM_014381.1,2787-2805).
gatgatgagtcgttttaat

SEQ ID NO: 20477 - DNA, 19 bp, Homo sapiens
  siRNA target sequence for MLH3 (NM_014381.1,2790-2808).
gatgagtcgttttaatgaa

SEQ ID NO: 20478 - DNA, 19 bp, Homo sapiens
  siRNA target sequence for MLH3 (NM_014381.1,2847-2865).
gtgcagtgtgttaacacaa

SEQ ID NO: 20479 - DNA, 19 bp, Homo sapiens
  siRNA target sequence for MLH3 (NM_014381.1,2936-2954).
ccacacaggataattcctt

SEQ ID NO: 20480 - DNA, 19 bp, Homo sapiens
  siRNA target sequence for MLH3 (NM_014381.1,2943-2961).
ggataattcctttaataaa

SEQ ID NO: 20481 - DNA, 19 bp, Homo sapiens
  siRNA target sequence for MLH3 (NM_014381.1,3000-3018).
ctgtgtgatatcagaaact

SEQ ID NO: 20482 - DNA, 19 bp, Homo sapiens
  siRNA target sequence for MLH3 (NM_014381.1,3011-3029).
cagaaactcctttggtatt

SEQ ID NO: 20483 - DNA, 19 bp, Homo sapiens
  siRNA target sequence for MLH3 (NM_014381.1,3020-3038).
ctttggtattgccctataa

SEQ ID NO: 20484 - DNA, 19 bp, Homo sapiens
  siRNA target sequence for MLH3 (NM_014381.1,3220-3238).
gagtcaaacacgtgttgtt

SEQ ID NO: 20485 - DNA, 19 bp, Homo sapiens
  siRNA target sequence for MLH3 (NM_014381.1,3275-3293).
gaatggtttatgtcaacaa

SEQ ID NO: 20486 - DNA, 19 bp, Homo sapiens
  siRNA target sequence for MLH3 (NM_014381.1,3371-3389).
ctgtggatgttgtacttga

SEQ ID NO: 20487 - DNA, 19 bp, Homo sapiens
  siRNA target sequence for MLH3 (NM_014381.1,3402-3420).
gtacaggtgtcaacctttt

SEQ ID NO: 20488 - DNA, 19 bp, Homo sapiens
  siRNA target sequence for MLH3 (NM_014381.1,3425-3443).
gcgaccttgttcttccttt

SEQ ID NO: 20489 - DNA, 19 bp, Homo sapiens
  siRNA target sequence for MLH3 (NM_014381.1,3472-3490).
gtgatgagacaggataaca

SEQ ID NO: 20490 - DNA, 19 bp, Homo sapiens
  siRNA target sequence for MLH3 (NM_014381.1,3518-3536).
gcgaatcgcttcagtcttt

SEQ ID NO: 20491 - DNA, 19 bp, Homo sapiens
  siRNA target sequence for MLH3 (NM_014381.1,3520-3538).
gaatcgcttcagtctttgt

SEQ ID NO: 20492 - DNA, 19 bp, Homo sapiens
  siRNA target sequence for MLH3 (NM_014381.1,3608-3626).
ctgagagcttagcagttaa

SEQ ID NO: 20493 - DNA, 19 bp, Homo sapiens
  siRNA target sequence for MLH3 (NM_014381.1,3688-3706).
ctccagcaagtagataaca

SEQ ID NO: 20494 - DNA, 19 bp, Homo sapiens
  siRNA target sequence for MLH3 (NM_014381.1,3785-3803).
gctctggtcggaaaaaatt

SEQ ID NO: 20495 - DNA, 19 bp, Homo sapiens
  siRNA target sequence for MLH3 (NM_014381.1,3786-3804).
ctctggtcggaaaaaatta

SEQ ID NO: 20496 - DNA, 19 bp, Homo sapiens
  siRNA target sequence for MLH3 (NM_014381.1,3788-3806).
ctggtcggaaaaaattact

SEQ ID NO: 20497 - DNA, 19 bp, Homo sapiens
  siRNA target sequence for MLH3 (NM_014381.1,3790-3808).
ggtcggaaaaaattactgt

SEQ ID NO: 20498 - DNA, 19 bp, Homo sapiens
  siRNA target sequence for MLH3 (NM_014381.1,3824-3842).
ctccgctagagataacagt

SEQ ID NO: 20499 - DNA, 19 bp, Homo sapiens
  siRNA target sequence for MLH3 (NM_014381.1,3853-3871).
caaaggagactcttatggt

SEQ ID NO: 20500 - DNA, 19 bp, Homo sapiens
  siRNA target sequence for MLH3 (NM_014381.1,3945-3963).
gggaaaagtaccactatgt

SEQ ID NO: 20501 - DNA, 19 bp, Homo sapiens
  siRNA target sequence for MLH3 (NM_014381.1,3946-3964).
ggaaaagtaccactatgtt

SEQ ID NO: 20502 - DNA, 19 bp, Homo sapiens
  siRNA target sequence for MLH3 (NM_014381.1,4004-4022).
ctactgtgaccaagagtat

SEQ ID NO: 20503 - DNA, 19 bp, Homo sapiens
  siRNA target sequence for MLH3 (NM_014381.1,4017-4035).
gagtattgtggaggaattt

SEQ ID NO: 20504 - DNA, 19 bp, Homo sapiens
  siRNA target sequence for MLH3 (NM_014381.1,4127-4145).
gccatggggccattaagtt

SEQ ID NO: 20505 - DNA, 19 bp, Homo sapiens
  siRNA target sequence for MLH3 (NM_014381.1,4128-4146).
ccatggggccattaagttt

SEQ ID NO: 20506 - DNA, 19 bp, Homo sapiens
  siRNA target sequence for MLH3 (NM_014381.1,4129-4147).
catggggccattaagttta

SEQ ID NO: 20507 - DNA, 19 bp, Homo sapiens
  siRNA target sequence for MLH3 (NM_014381.1,4133-4151).
gggccattaagtttaatga

SEQ ID NO: 20508 - DNA, 19 bp, Homo sapiens
  siRNA target sequence for MLH3 (NM_014381.1,4134-4152).
ggccattaagtttaatgat

SEQ ID NO: 20509 - DNA, 19 bp, Homo sapiens
  siRNA target sequence for MLH3 (NM_014381.1,4167-4185).
ggaaagttgccgccttatt

SEQ ID NO: 20510 - DNA, 19 bp, Homo sapiens
  siRNA target sequence for MLH3 (NM_014381.1,4242-4260).
gctgccgttagctgacata

SEQ ID NO: 20511 - DNA, 19 bp, Homo sapiens
  siRNA target sequence for MLH3 (NM_014381.1,4324-4342).
gcctggcgtctctttggaa

SEQ ID NO: 20512 - DNA, 19 bp, Homo sapiens
  siRNA target sequence for ORC2L (NM_006190.3,287-305).
gatgctggaggttcacttt

SEQ ID NO: 20513 - DNA, 19 bp, Homo sapiens
  siRNA target sequence for ORC2L (NM_006190.3,315-333).
gatgatgttcttaatcaca

SEQ ID NO: 20514 - DNA, 19 bp, Homo sapiens
  siRNA target sequence for ORC2L (NM_006190.3,449-467).
cttaaaagatcagaactat

SEQ ID NO: 20515 - DNA, 19 bp, Homo sapiens
  siRNA target sequence for ORC2L (NM_006190.3,516-534).
gctacaggtggtggaaata

SEQ ID NO: 20516 - DNA, 19 bp, Homo sapiens
  siRNA target sequence for ORC2L (NM_006190.3,517-535).
ctacaggtggtggaaataa

SEQ ID NO: 20517 - DNA, 19 bp, Homo sapiens
  siRNA target sequence for ORC2L (NM_006190.3,622-640).
cattcagtttgaagaatga

SEQ ID NO: 20518 - DNA, 19 bp, Homo sapiens
  siRNA target sequence for ORC2L (NM_006190.3,639-657).
gatcctgagattacgataa

SEQ ID NO: 20519 - DNA, 19 bp, Homo sapiens
  siRNA target sequence for ORC2L (NM_006190.3,643-661).
ctgagattacgataaacgt

SEQ ID NO: 20520 - DNA, 19 bp, Homo sapiens
  siRNA target sequence for ORC2L (NM_006190.3,698-716).
ggttcaaccgaagaacaat

SEQ ID NO: 20521 - DNA, 19 bp, Homo sapiens
  siRNA target sequence for ORC2L (NM_006190.3,741-759).
gcacctcgtagtctaagaa

SEQ ID NO: 20522 - DNA, 19 bp, Homo sapiens
  siRNA target sequence for ORC2L (NM_006190.3,742-760).
cacctcgtagtctaagaaa

SEQ ID NO: 20523 - DNA, 19 bp, Homo sapiens
  siRNA target sequence for ORC2L (NM_006190.3,789-807).
gacagtgaaagcgaatatt

SEQ ID NO: 20524 - DNA, 19 bp, Homo sapiens
  siRNA target sequence for ORC2L (NM_006190.3,858-876).
gacactaatgcagtcatat

SEQ ID NO: 20525 - DNA, 19 bp, Homo sapiens
  siRNA target sequence for ORC2L (NM_006190.3,887-905).
gattcaagctcagaataga

SEQ ID NO: 20526 - DNA, 19 bp, Homo sapiens
  siRNA target sequence for ORC2L (NM_006190.3,894-912).
gctcagaatagagtagttt

SEQ ID NO: 20527 - DNA, 19 bp, Homo sapiens
  siRNA target sequence for ORC2L (NM_006190.3,994-1012).
ctcacagcagttcaaaagt

SEQ ID NO: 20528 - DNA, 19 bp, Homo sapiens
  siRNA target sequence for ORC2L (NM_006190.3,998-1016).
cagcagttcaaaagtttta

SEQ ID NO: 20529 - DNA, 19 bp, Homo sapiens
  siRNA target sequence for ORC2L (NM_006190.3,1064-1082).
gcaaactttgcgtaactta

SEQ ID NO: 20530 - DNA, 19 bp, Homo sapiens
  siRNA target sequence for ORC2L (NM_006190.3,1065-1083).
caaactttgcgtaacttat

SEQ ID NO: 20531 - DNA, 19 bp, Homo sapiens
  siRNA target sequence for ORC2L (NM_006190.3,1108-1126).
ctgccgaacttaaacaact

SEQ ID NO: 20532 - DNA, 19 bp, Homo sapiens
  siRNA target sequence for ORC2L (NM_006190.3,1110-1128).
gccgaacttaaacaactaa

SEQ ID NO: 20533 - DNA, 19 bp, Homo sapiens
  siRNA target sequence for ORC2L (NM_006190.3,1111-1129).
ccgaacttaaacaactaaa

SEQ ID NO: 20534 - DNA, 19 bp, Homo sapiens
  siRNA target sequence for ORC2L (NM_006190.3,1112-1130).
cgaacttaaacaactaaat

SEQ ID NO: 20535 - DNA, 19 bp, Homo sapiens
  siRNA target sequence for ORC2L (NM_006190.3,1180-1198).
ggttcaacattgtgcttta

SEQ ID NO: 20536 - DNA, 19 bp, Homo sapiens
  siRNA target sequence for ORC2L (NM_006190.3,1181-1199).
gttcaacattgtgctttat

SEQ ID NO: 20537 - DNA, 19 bp, Homo sapiens
  siRNA target sequence for ORC2L (NM_006190.3,1184-1202).
caacattgtgctttatggt

SEQ ID NO: 20538 - DNA, 19 bp, Homo sapiens
  siRNA target sequence for ORC2L (NM_006190.3,1205-1223).
gggttctaagagagattta

SEQ ID NO: 20539 - DNA, 19 bp, Homo sapiens
  siRNA target sequence for ORC2L (NM_006190.3,1207-1225).
gttctaagagagatttact

SEQ ID NO: 20540 - DNA, 19 bp, Homo sapiens
  siRNA target sequence for ORC2L (NM_006190.3,1210-1228).
ctaagagagatttactaga

SEQ ID NO: 20541 - DNA, 19 bp, Homo sapiens
  siRNA target sequence for ORC2L (NM_006190.3,1243-1261).
ctatgctgcaagattccat

SEQ ID NO: 20542 - DNA, 19 bp, Homo sapiens
  siRNA target sequence for ORC2L (NM_006190.3,1301-1319).
gaaatcagtcctgaattct

SEQ ID NO: 20543 - DNA, 19 bp, Homo sapiens
  siRNA target sequence for ORC2L (NM_006190.3,1346-1364).
gggtactttccgcagtata

SEQ ID NO: 20544 - DNA, 19 bp, Homo sapiens
  siRNA target sequence for ORC2L (NM_006190.3,1348-1366).
gtactttccgcagtatact

SEQ ID NO: 20545 - DNA, 19 bp, Homo sapiens
  siRNA target sequence for ORC2L (NM_006190.3,1371-1389).
cagctagactggatagtaa

SEQ ID NO: 20546 - DNA, 19 bp, Homo sapiens
  siRNA target sequence for ORC2L (NM_006190.3,1379-1397).
ctggatagtaaacaaattt

SEQ ID NO: 20547 - DNA, 19 bp, Homo sapiens
  siRNA target sequence for ORC2L (NM_006190.3,1428-1446).
ctcatccacaatttggata

SEQ ID NO: 20548 - DNA, 19 bp, Homo sapiens
  siRNA target sequence for ORC2L (NM_006190.3,1493-1511).
gtcatctttgcataacatt

SEQ ID NO: 20549 - DNA, 19 bp, Homo sapiens
  siRNA target sequence for ORC2L (NM_006190.3,1560-1578).
catgcaaagcagagtcttt

SEQ ID NO: 20550 - DNA, 19 bp, Homo sapiens
  siRNA target sequence for ORC2L (NM_006190.3,1586-1604).
gctctggtatgaaactact

SEQ ID NO: 20551 - DNA, 19 bp, Homo sapiens
  siRNA target sequence for ORC2L (NM_006190.3,1587-1605).
ctctggtatgaaactacta

SEQ ID NO: 20552 - DNA, 19 bp, Homo sapiens
  siRNA target sequence for ORC2L (NM_006190.3,1589-1607).
ctggtatgaaactactaca

SEQ ID NO: 20553 - DNA, 19 bp, Homo sapiens
  siRNA target sequence for ORC2L (NM_006190.3,1591-1609).
ggtatgaaactactacata

SEQ ID NO: 20554 - DNA, 19 bp, Homo sapiens
  siRNA target sequence for ORC2L (NM_006190.3,1606-1624).
catacagtccttatactga

SEQ ID NO: 20555 - DNA, 19 bp, Homo sapiens
  siRNA target sequence for ORC2L (NM_006190.3,1610-1628).
cagtccttatactgaagaa

SEQ ID NO: 20556 - DNA, 19 bp, Homo sapiens
  siRNA target sequence for ORC2L (NM_006190.3,1675-1693).
cacttagctcccttactca

SEQ ID NO: 20557 - DNA, 19 bp, Homo sapiens
  siRNA target sequence for ORC2L (NM_006190.3,1735-1753).
ggctactaataaaatacca

SEQ ID NO: 20558 - DNA, 19 bp, Homo sapiens
  siRNA target sequence for ORC2L (NM_006190.3,1764-1782).
caggataacccttcttaca

SEQ ID NO: 20559 - DNA, 19 bp, Homo sapiens
  siRNA target sequence for ORC2L (NM_006190.3,1766-1784).
ggataacccttcttacatt

SEQ ID NO: 20560 - DNA, 19 bp, Homo sapiens
  siRNA target sequence for ORC2L (NM_006190.3,1823-1841).
ggcattcctcgtcaatagt

SEQ ID NO: 20561 - DNA, 19 bp, Homo sapiens
  siRNA target sequence for ORC2L (NM_006190.3,1825-1843).
cattcctcgtcaatagtga

SEQ ID NO: 20562 - DNA, 19 bp, Homo sapiens
  siRNA target sequence for ORC2L (NM_006190.3,1857-1875).
gcccagttaactgaattta

SEQ ID NO: 20563 - DNA, 19 bp, Homo sapiens
  siRNA target sequence for ORC2L (NM_006190.3,1906-1924).
gaactgatggagtagagta

SEQ ID NO: 20564 - DNA, 19 bp, Homo sapiens
  siRNA target sequence for ORC2L (NM_006190.3,1914-1932).
ggagtagagtatttattaa

SEQ ID NO: 20565 - DNA, 19 bp, Homo sapiens
  siRNA target sequence for ORC2L (NM_006190.3,1938-1956).
gttgataatggaacattga

SEQ ID NO: 20566 - DNA, 19 bp, Homo sapiens
  siRNA target sequence for ORC2L (NM_006190.3,1947-1965).
ggaacattgactgatttct

SEQ ID NO: 20567 - DNA, 19 bp, Homo sapiens
  siRNA target sequence for ORC3L (NM_012381.2,48-66).
gctacgtcctcgatgtcta

SEQ ID NO: 20568 - DNA, 19 bp, Homo sapiens
  siRNA target sequence for ORC3L (NM_012381.2,49-67).
ctacgtcctcgatgtctaa

SEQ ID NO: 20569 - DNA, 19 bp, Homo sapiens
  siRNA target sequence for ORC3L (NM_012381.2,62-80).
gtctaagggttgctttgtt

SEQ ID NO: 20570 - DNA, 19 bp, Homo sapiens
  siRNA target sequence for ORC3L (NM_012381.2,114-132).
ctgccaatagaggactatt

SEQ ID NO: 20571 - DNA, 19 bp, Homo sapiens
  siRNA target sequence for ORC3L (NM_012381.2,116-134).
gccaatagaggactatttt

SEQ ID NO: 20572 - DNA, 19 bp, Homo sapiens
  siRNA target sequence for ORC3L (NM_012381.2,117-135).
ccaatagaggactatttta

SEQ ID NO: 20573 - DNA, 19 bp, Homo sapiens
  siRNA target sequence for ORC3L (NM_012381.2,118-136).
caatagaggactattttaa

SEQ ID NO: 20574 - DNA, 19 bp, Homo sapiens
  siRNA target sequence for ORC3L (NM_012381.2,161-179).
cagtaagcttcgattcgaa

SEQ ID NO: 20575 - DNA, 19 bp, Homo sapiens
  siRNA target sequence for ORC3L (NM_012381.2,167-185).
gcttcgattcgaaacttat

SEQ ID NO: 20576 - DNA, 19 bp, Homo sapiens
  siRNA target sequence for ORC3L (NM_012381.2,171-189).
cgattcgaaacttatcagt

SEQ ID NO: 20577 - DNA, 19 bp, Homo sapiens
  siRNA target sequence for ORC3L (NM_012381.2,172-190).
gattcgaaacttatcagtt

SEQ ID NO: 20578 - DNA, 19 bp, Homo sapiens
  siRNA target sequence for ORC3L (NM_012381.2,176-194).
cgaaacttatcagttgata

SEQ ID NO: 20579 - DNA, 19 bp, Homo sapiens
  siRNA target sequence for ORC3L (NM_012381.2,200-218).
gcagatgaaatctgaaaat

SEQ ID NO: 20580 - DNA, 19 bp, Homo sapiens
  siRNA target sequence for ORC3L (NM_012381.2,312-330).
gacttgggcggtcaaataa

SEQ ID NO: 20581 - DNA, 19 bp, Homo sapiens
  siRNA target sequence for ORC3L (NM_012381.2,314-332).
cttgggcggtcaaataaaa

SEQ ID NO: 20582 - DNA, 19 bp, Homo sapiens
  siRNA target sequence for ORC3L (NM_012381.2,318-336).
ggcggtcaaataaaactca

SEQ ID NO: 20583 - DNA, 19 bp, Homo sapiens
  siRNA target sequence for ORC3L (NM_012381.2,346-364).
caactgctgctcttgttct

SEQ ID NO: 20584 - DNA, 19 bp, Homo sapiens
  siRNA target sequence for ORC3L (NM_012381.2,392-410).
gacattcggaagtctaaca

SEQ ID NO: 20585 - DNA, 19 bp, Homo sapiens
  siRNA target sequence for ORC3L (NM_012381.2,394-412).
cattcggaagtctaacaga

SEQ ID NO: 20586 - DNA, 19 bp, Homo sapiens
  siRNA target sequence for ORC3L (NM_012381.2,409-427).
cagaggcccttcagaataa

SEQ ID NO: 20587 - DNA, 19 bp, Homo sapiens
  siRNA target sequence for ORC3L (NM_012381.2,422-440).
gaataatgtcacaccatat

SEQ ID NO: 20588 - DNA, 19 bp, Homo sapiens
  siRNA target sequence for ORC3L (NM_012381.2,433-451).
caccatatgtagtctcatt

SEQ ID NO: 20589 - DNA, 19 bp, Homo sapiens
  siRNA target sequence for ORC3L (NM_012381.2,446-464).
ctcattgcaagctaaagat

SEQ ID NO: 20590 - DNA, 19 bp, Homo sapiens
  siRNA target sequence for ORC3L (NM_012381.2,509-527).
gatggactgctgtgtagat

SEQ ID NO: 20591 - DNA, 19 bp, Homo sapiens
  siRNA target sequence for ORC3L (NM_012381.2,512-530).
ggactgctgtgtagatata

SEQ ID NO: 20592 - DNA, 19 bp, Homo sapiens
  siRNA target sequence for ORC3L (NM_012381.2,520-538).
gtgtagatataaaatccaa

SEQ ID NO: 20593 - DNA, 19 bp, Homo sapiens
  siRNA target sequence for ORC3L (NM_012381.2,552-570).
gttcacgtcacccaaagaa

SEQ ID NO: 20594 - DNA, 19 bp, Homo sapiens
  siRNA target sequence for ORC3L (NM_012381.2,557-575).
cgtcacccaaagaaagaca

SEQ ID NO: 20595 - DNA, 19 bp, Homo sapiens
  siRNA target sequence for ORC3L (NM_012381.2,568-586).
gaaagacacattattcaat

SEQ ID NO: 20596 - DNA, 19 bp, Homo sapiens
  siRNA target sequence for ORC3L (NM_012381.2,592-610).
cactttccagttggtatat

SEQ ID NO: 20597 - DNA, 19 bp, Homo sapiens
  siRNA target sequence for ORC3L (NM_012381.2,679-697).
ctcctcctgttgtcgttat

SEQ ID NO: 20598 - DNA, 19 bp, Homo sapiens
  siRNA target sequence for ORC3L (NM_012381.2,681-699).
cctcctgttgtcgttatct

SEQ ID NO: 20599 - DNA, 19 bp, Homo sapiens
  siRNA target sequence for ORC3L (NM_012381.2,682-700).
ctcctgttgtcgttatctt

SEQ ID NO: 20600 - DNA, 19 bp, Homo sapiens
  siRNA target sequence for ORC3L (NM_012381.2,684-702).
cctgttgtcgttatcttga

SEQ ID NO: 20601 - DNA, 19 bp, Homo sapiens
  siRNA target sequence for ORC3L (NM_012381.2,715-733).
gctttgccacaaaagtact

SEQ ID NO: 20602 - DNA, 19 bp, Homo sapiens
  siRNA target sequence for ORC3L (NM_012381.2,716-734).
ctttgccacaaaagtacta

SEQ ID NO: 20603 - DNA, 19 bp, Homo sapiens
  siRNA target sequence for ORC3L (NM_012381.2,724-742).
caaaagtactacaagactt

SEQ ID NO: 20604 - DNA, 19 bp, Homo sapiens
  siRNA target sequence for ORC3L (NM_012381.2,801-819).
gccacatctcctattatca

SEQ ID NO: 20605 - DNA, 19 bp, Homo sapiens
  siRNA target sequence for ORC3L (NM_012381.2,837-855).
catgcagtatcatctctat

SEQ ID NO: 20606 - DNA, 19 bp, Homo sapiens
  siRNA target sequence for ORC3L (NM_012381.2,901-919).
ctacggtactcgataagct

SEQ ID NO: 20607 - DNA, 19 bp, Homo sapiens
  siRNA target sequence for ORC3L (NM_012381.2,909-927).
ctcgataagctacttctta

SEQ ID NO: 20608 - DNA, 19 bp, Homo sapiens
  siRNA target sequence for ORC3L (NM_012381.2,911-929).
cgataagctacttcttaca

SEQ ID NO: 20609 - DNA, 19 bp, Homo sapiens
  siRNA target sequence for ORC3L (NM_012381.2,912-930).
gataagctacttcttacaa

SEQ ID NO: 20610 - DNA, 19 bp, Homo sapiens
  siRNA target sequence for ORC3L (NM_012381.2,1069-1087).
gtgtcctgtgctgtaatct

SEQ ID NO: 20611 - DNA, 19 bp, Homo sapiens
  siRNA target sequence for ORC3L (NM_012381.2,1142-1160).
ccgacgtctaccatctttt

SEQ ID NO: 20612 - DNA, 19 bp, Homo sapiens
  siRNA target sequence for ORC3L (NM_012381.2,1143-1161).
cgacgtctaccatctttta

SEQ ID NO: 20613 - DNA, 19 bp, Homo sapiens
  siRNA target sequence for ORC3L (NM_012381.2,1146-1164).
cgtctaccatcttttagga

SEQ ID NO: 20614 - DNA, 19 bp, Homo sapiens
  siRNA target sequence for ORC3L (NM_012381.2,1162-1180).
ggaggtacgtggaaaagca

SEQ ID NO: 20615 - DNA, 19 bp, Homo sapiens
  siRNA target sequence for ORC3L (NM_012381.2,1163-1181).
gaggtacgtggaaaagcaa

SEQ ID NO: 20616 - DNA, 19 bp, Homo sapiens
  siRNA target sequence for ORC3L (NM_012381.2,1205-1223).
cttgaccaatgagagatat

SEQ ID NO: 20617 - DNA, 19 bp, Homo sapiens
  siRNA target sequence for ORC3L (NM_012381.2,1353-1371).
gagttgtactgtacatgtt

SEQ ID NO: 20618 - DNA, 19 bp, Homo sapiens
  siRNA target sequence for ORC3L (NM_012381.2,1472-1490).
caaggtttttaagtcttat

SEQ ID NO: 20619 - DNA, 19 bp, Homo sapiens
  siRNA target sequence for ORC3L (NM_012381.2,1550-1568).
gagcctcgatgaaaccaaa

SEQ ID NO: 20620 - DNA, 19 bp, Homo sapiens
  siRNA target sequence for ORC3L (NM_012381.2,1610-1628).
gaagacagacctctatcat

SEQ ID NO: 20621 - DNA, 19 bp, Homo sapiens
  siRNA target sequence for ORC3L (NM_012381.2,1613-1631).
gacagacctctatcatctt

SEQ ID NO: 20622 - DNA, 19 bp, Homo sapiens
  siRNA target sequence for ORC3L (NM_012381.2,1626-1644).
catcttcagaagtccttat

SEQ ID NO: 20623 - DNA, 19 bp, Homo sapiens
  siRNA target sequence for ORC3L (NM_012381.2,1632-1650).
cagaagtccttattggaaa

SEQ ID NO: 20624 - DNA, 19 bp, Homo sapiens
  siRNA target sequence for ORC3L (NM_012381.2,1676-1694).
gcaaaccaaatttgaagta

SEQ ID NO: 20625 - DNA, 19 bp, Homo sapiens
  siRNA target sequence for ORC3L (NM_012381.2,1726-1744).
gtctagtgagagaatacct

SEQ ID NO: 20626 - DNA, 19 bp, Homo sapiens
  siRNA target sequence for ORC3L (NM_012381.2,1801-1819).
cccttcgtgagcatttaaa

SEQ ID NO: 20627 - DNA, 19 bp, Homo sapiens
  siRNA target sequence for ORC3L (NM_012381.2,1841-1859).
ccatactgcactcaacaat

SEQ ID NO: 20628 - DNA, 19 bp, Homo sapiens
  siRNA target sequence for ORC3L (NM_012381.2,1846-1864).
ctgcactcaacaatcctta

SEQ ID NO: 20629 - DNA, 19 bp, Homo sapiens
  siRNA target sequence for ORC3L (NM_012381.2,1985-2003).
ctggtcagaggcttttgca

SEQ ID NO: 20630 - DNA, 19 bp, Homo sapiens
  siRNA target sequence for ORC3L (NM_012381.2,2072-2090).
ccatgctcggtttattaga

SEQ ID NO: 20631 - DNA, 19 bp, Homo sapiens
  siRNA target sequence for ORC3L (NM_012381.2,2089-2107).
gagctgtttctgaactaga

SEQ ID NO: 20632 - DNA, 19 bp, Homo sapiens
  siRNA target sequence for ORC3L (NM_012381.2,2147-2165).
ccatgtggcaagactaaca

SEQ ID NO: 20633 - DNA, 19 bp, Homo sapiens
  siRNA target sequence for ORC3L (NM_012381.2,2148-2166).
catgtggcaagactaacat

SEQ ID NO: 20634 - DNA, 19 bp, Homo sapiens
  siRNA target sequence for ORC4L (NM_002552.2,166-184).
cagtcgtaaatcaaagagt

SEQ ID NO: 20635 - DNA, 19 bp, Homo sapiens
  siRNA target sequence for ORC4L (NM_002552.2,168-186).
gtcgtaaatcaaagagtaa

SEQ ID NO: 20636 - DNA, 19 bp, Homo sapiens
  siRNA target sequence for ORC4L (NM_002552.2,170-188).
cgtaaatcaaagagtaaca

SEQ ID NO: 20637 - DNA, 19 bp, Homo sapiens
  siRNA target sequence for ORC4L (NM_002552.2,177-195).
caaagagtaacagcttaat

SEQ ID NO: 20638 - DNA, 19 bp, Homo sapiens
  siRNA target sequence for ORC4L (NM_002552.2,225-243).
gaattttacgtgaaagatt

SEQ ID NO: 20639 - DNA, 19 bp, Homo sapiens
  siRNA target sequence for ORC4L (NM_002552.2,248-266).
cgtcagagtccacatagta

SEQ ID NO: 20640 - DNA, 19 bp, Homo sapiens
  siRNA target sequence for ORC4L (NM_002552.2,253-271).
gagtccacatagtaaccta

SEQ ID NO: 20641 - DNA, 19 bp, Homo sapiens
  siRNA target sequence for ORC4L (NM_002552.2,275-293).
ggagtgcaagtacaataca

SEQ ID NO: 20642 - DNA, 19 bp, Homo sapiens
  siRNA target sequence for ORC4L (NM_002552.2,281-299).
caagtacaatacaaacact

SEQ ID NO: 20643 - DNA, 19 bp, Homo sapiens
  siRNA target sequence for ORC4L (NM_002552.2,337-355).
gagtaactctgtccttatt

SEQ ID NO: 20644 - DNA, 19 bp, Homo sapiens
  siRNA target sequence for ORC4L (NM_002552.2,339-357).
gtaactctgtccttattat

SEQ ID NO: 20645 - DNA, 19 bp, Homo sapiens
  siRNA target sequence for ORC4L (NM_002552.2,462-480).
gactgctgcagatcaatga

SEQ ID NO: 20646 - DNA, 19 bp, Homo sapiens
  siRNA target sequence for ORC4L (NM_002552.2,481-499).
caaaatcgccctaaaggaa

SEQ ID NO: 20647 - DNA, 19 bp, Homo sapiens
  siRNA target sequence for ORC4L (NM_002552.2,615-633).
gcccagtgatcttcatatt

SEQ ID NO: 20648 - DNA, 19 bp, Homo sapiens
  siRNA target sequence for ORC4L (NM_002552.2,616-634).
cccagtgatcttcatatta

SEQ ID NO: 20649 - DNA, 19 bp, Homo sapiens
  siRNA target sequence for ORC4L (NM_002552.2,618-636).
cagtgatcttcatattaga

SEQ ID NO: 20650 - DNA, 19 bp, Homo sapiens
  siRNA target sequence for ORC4L (NM_002552.2,625-643).
cttcatattagatgaattt

SEQ ID NO: 20651 - DNA, 19 bp, Homo sapiens
  siRNA target sequence for ORC4L (NM_002552.2,734-752).
cttacatgtagattggata

SEQ ID NO: 20652 - DNA, 19 bp, Homo sapiens
  siRNA target sequence for ORC4L (NM_002552.2,794-812).
caccggcagatacacttaa

SEQ ID NO: 20653 - DNA, 19 bp, Homo sapiens
  siRNA target sequence for ORC4L (NM_002552.2,797-815).
cggcagatacacttaatga

SEQ ID NO: 20654 - DNA, 19 bp, Homo sapiens
  siRNA target sequence for ORC4L (NM_002552.2,800-818).
cagatacacttaatgaatt

SEQ ID NO: 20655 - DNA, 19 bp, Homo sapiens
  siRNA target sequence for ORC4L (NM_002552.2,808-826).
cttaatgaattcatttggt

SEQ ID NO: 20656 - DNA, 19 bp, Homo sapiens
  siRNA target sequence for ORC4L (NM_002552.2,824-842).
ggttttccacagtatgtta

SEQ ID NO: 20657 - DNA, 19 bp, Homo sapiens
  siRNA target sequence for ORC4L (NM_002552.2,825-843).
gttttccacagtatgttaa

SEQ ID NO: 20658 - DNA, 19 bp, Homo sapiens
  siRNA target sequence for ORC4L (NM_002552.2,875-893).
gagtttccagacaaggttt

SEQ ID NO: 20659 - DNA, 19 bp, Homo sapiens
  siRNA target sequence for ORC4L (NM_002552.2,922-940).
gtatctctcagaagataga

SEQ ID NO: 20660 - DNA, 19 bp, Homo sapiens
  siRNA target sequence for ORC4L (NM_002552.2,942-960).
gtgtgcaagaagtactaca

SEQ ID NO: 20661 - DNA, 19 bp, Homo sapiens
  siRNA target sequence for ORC4L (NM_002552.2,953-971).
gtactacagaagcatttca

SEQ ID NO: 20662 - DNA, 19 bp, Homo sapiens
  siRNA target sequence for ORC4L (NM_002552.2,990-1008).
ggtcattacacatgctatt

SEQ ID NO: 20663 - DNA, 19 bp, Homo sapiens
  siRNA target sequence for ORC4L (NM_002552.2,1004-1022).
ctattgatgcttgctttaa

SEQ ID NO: 20664 - DNA, 19 bp, Homo sapiens
  siRNA target sequence for ORC4L (NM_002552.2,1009-1027).
gatgcttgctttaaatcga

SEQ ID NO: 20665 - DNA, 19 bp, Homo sapiens
  siRNA target sequence for ORC4L (NM_002552.2,1032-1050).
cagcatcgcacccatttat

SEQ ID NO: 20666 - DNA, 19 bp, Homo sapiens
  siRNA target sequence for ORC4L (NM_002552.2,1053-1071).
ctgccgtagatctaatgga

SEQ ID NO: 20667 - DNA, 19 bp, Homo sapiens
  siRNA target sequence for ORC4L (NM_002552.2,1089-1107).
gcatggactcgaaagcaaa

SEQ ID NO: 20668 - DNA, 19 bp, Homo sapiens
  siRNA target sequence for ORC4L (NM_002552.2,1090-1108).
catggactcgaaagcaaat

SEQ ID NO: 20669 - DNA, 19 bp, Homo sapiens
  siRNA target sequence for ORC4L (NM_002552.2,1096-1114).
ctcgaaagcaaatattgta

SEQ ID NO: 20670 - DNA, 19 bp, Homo sapiens
  siRNA target sequence for ORC4L (NM_002552.2,1098-1116).
cgaaagcaaatattgtaca

SEQ ID NO: 20671 - DNA, 19 bp, Homo sapiens
  siRNA target sequence for ORC4L (NM_002552.2,1121-1139).
ctatcagtcttggaaatct

SEQ ID NO: 20672 - DNA, 19 bp, Homo sapiens
  siRNA target sequence for ORC4L (NM_002552.2,1132-1150).
ggaaatctgtcttataata

SEQ ID NO: 20673 - DNA, 19 bp, Homo sapiens
  siRNA target sequence for ORC4L (NM_002552.2,1199-1217).
caaatggtctataatgagt

SEQ ID NO: 20674 - DNA, 19 bp, Homo sapiens
  siRNA target sequence for ORC4L (NM_002552.2,1237-1255).
gaaagcacattccgtttat

SEQ ID NO: 20675 - DNA, 19 bp, Homo sapiens
  siRNA target sequence for ORC4L (NM_002552.2,1242-1260).
cacattccgtttataattt

SEQ ID NO: 20676 - DNA, 19 bp, Homo sapiens
  siRNA target sequence for ORC4L (NM_002552.2,1292-1310).
cacttgcagcaattagaat

SEQ ID NO: 20677 - DNA, 19 bp, Homo sapiens
  siRNA target sequence for ORC4L (NM_002552.2,1372-1390).
gcttttggataatactcaa

SEQ ID NO: 20678 - DNA, 19 bp, Homo sapiens
  siRNA target sequence for ORC5L (NM_002553.2,236-254).
gaaagacctatgtaacaca

SEQ ID NO: 20679 - DNA, 19 bp, Homo sapiens
  siRNA target sequence for ORC5L (NM_002553.2,242-260).
cctatgtaacacaaacgtt

SEQ ID NO: 20680 - DNA, 19 bp, Homo sapiens
  siRNA target sequence for ORC5L (NM_002553.2,247-265).
gtaacacaaacgttgttga

SEQ ID NO: 20681 - DNA, 19 bp, Homo sapiens
  siRNA target sequence for ORC5L (NM_002553.2,277-295).
ctcccacatgtgtttgtga

SEQ ID NO: 20682 - DNA, 19 bp, Homo sapiens
  siRNA target sequence for ORC5L (NM_002553.2,280-298).
ccacatgtgtttgtgaatt

SEQ ID NO: 20683 - DNA, 19 bp, Homo sapiens
  siRNA target sequence for ORC5L (NM_002553.2,301-319).
gttgaatgctttacattga

SEQ ID NO: 20684 - DNA, 19 bp, Homo sapiens
  siRNA target sequence for ORC5L (NM_002553.2,322-340).
ctgcttttggaacaaattt

SEQ ID NO: 20685 - DNA, 19 bp, Homo sapiens
  siRNA target sequence for ORC5L (NM_002553.2,376-394).
ggatgttctactgaaataa

SEQ ID NO: 20686 - DNA, 19 bp, Homo sapiens
  siRNA target sequence for ORC5L (NM_002553.2,412-430).
gactttgttcgcttgttta

SEQ ID NO: 20687 - DNA, 19 bp, Homo sapiens
  siRNA target sequence for ORC5L (NM_002553.2,414-432).
ctttgttcgcttgtttaaa

SEQ ID NO: 20688 - DNA, 19 bp, Homo sapiens
  siRNA target sequence for ORC5L (NM_002553.2,484-502).
gataaagcagagtatctaa

SEQ ID NO: 20689 - DNA, 19 bp, Homo sapiens
  siRNA target sequence for ORC5L (NM_002553.2,624-642).
ctttgagccgtttgtctta

SEQ ID NO: 20690 - DNA, 19 bp, Homo sapiens
  siRNA target sequence for ORC5L (NM_002553.2,678-696).
gatcctgtcccatgatcat

SEQ ID NO: 20691 - DNA, 19 bp, Homo sapiens
  siRNA target sequence for ORC5L (NM_002553.2,728-746).
cctacattaacattcttct

SEQ ID NO: 20692 - DNA, 19 bp, Homo sapiens
  siRNA target sequence for ORC5L (NM_002553.2,742-760).
cttcttggagttttctaca

SEQ ID NO: 20693 - DNA, 19 bp, Homo sapiens
  siRNA target sequence for ORC5L (NM_002553.2,788-806).
gacatctggcagtacttaa

SEQ ID NO: 20694 - DNA, 19 bp, Homo sapiens
  siRNA target sequence for ORC5L (NM_002553.2,790-808).
catctggcagtacttaatt

SEQ ID NO: 20695 - DNA, 19 bp, Homo sapiens
  siRNA target sequence for ORC5L (NM_002553.2,853-871).
cgtgatactcgcaaactgt

SEQ ID NO: 20696 - DNA, 19 bp, Homo sapiens
  siRNA target sequence for ORC5L (NM_002553.2,862-880).
cgcaaactgtggagaaata

SEQ ID NO: 20697 - DNA, 19 bp, Homo sapiens
  siRNA target sequence for ORC5L (NM_002553.2,913-931).
gtttatctcagggaaatat

SEQ ID NO: 20698 - DNA, 19 bp, Homo sapiens
  siRNA target sequence for ORC5L (NM_002553.2,989-1007).
gcctctcagcgcatactca

SEQ ID NO: 20699 - DNA, 19 bp, Homo sapiens
  siRNA target sequence for ORC5L (NM_002553.2,990-1008).
cctctcagcgcatactcat

SEQ ID NO: 20700 - DNA, 19 bp, Homo sapiens
  siRNA target sequence for ORC5L (NM_002553.2,1012-1030).
gaacttccatattactcta

SEQ ID NO: 20701 - DNA, 19 bp, Homo sapiens
  siRNA target sequence for ORC5L (NM_002553.2,1015-1033).
cttccatattactctaagt

SEQ ID NO: 20702 - DNA, 19 bp, Homo sapiens
  siRNA target sequence for ORC5L (NM_002553.2,1026-1044).
ctctaagttcattctaatt

SEQ ID NO: 20703 - DNA, 19 bp, Homo sapiens
  siRNA target sequence for ORC5L (NM_002553.2,1046-1064).
ctgcataccttgcttcata

SEQ ID NO: 20704 - DNA, 19 bp, Homo sapiens
  siRNA target sequence for ORC5L (NM_002553.2,1048-1066).
gcataccttgcttcataca

SEQ ID NO: 20705 - DNA, 19 bp, Homo sapiens
  siRNA target sequence for ORC5L (NM_002553.2,1049-1067).
cataccttgcttcatacaa

SEQ ID NO: 20706 - DNA, 19 bp, Homo sapiens
  siRNA target sequence for ORC5L (NM_002553.2,1178-1196).
catttccactagacagatt

SEQ ID NO: 20707 - DNA, 19 bp, Homo sapiens
  siRNA target sequence for ORC5L (NM_002553.2,1186-1204).
ctagacagattattagcaa

SEQ ID NO: 20708 - DNA, 19 bp, Homo sapiens
  siRNA target sequence for ORC5L (NM_002553.2,1189-1207).
gacagattattagcaatat

SEQ ID NO: 20709 - DNA, 19 bp, Homo sapiens
  siRNA target sequence for ORC5L (NM_002553.2,1234-1252).
gctccaacagcaaatattt

SEQ ID NO: 20710 - DNA, 19 bp, Homo sapiens
  siRNA target sequence for ORC5L (NM_002553.2,1318-1336).
gatggaccaaaatacaaat

SEQ ID NO: 20711 - DNA, 19 bp, Homo sapiens
  siRNA target sequence for ORC5L (NM_002553.2,1321-1339).
ggaccaaaatacaaatgca

SEQ ID NO: 20712 - DNA, 19 bp, Homo sapiens
  siRNA target sequence for ORC5L (NM_002553.2,1353-1371).
cttcatcagagctattgca

SEQ ID NO: 20713 - DNA, 19 bp, Homo sapiens
  siRNA target sequence for ORC5L (NM_002553.2,1370-1388).
caaggacggtgaactttga

SEQ ID NO: 20714 - DNA, 19 bp, Homo sapiens
  siRNA target sequence for ORC5L (NM_002553.2,1373-1391).
ggacggtgaactttgacat

SEQ ID NO: 20715 - DNA, 19 bp, Homo sapiens
  siRNA target sequence for ORC5L (NM_002553.2,1376-1394).
cggtgaactttgacataat

SEQ ID NO: 20716 - DNA, 19 bp, Homo sapiens
  siRNA target sequence for ORC5L (NM_181747.1,997-1015).
ggaagtattgagacagtta

SEQ ID NO: 20717 - DNA, 19 bp, Homo sapiens
  siRNA target sequence for ORC5L (NM_181747.1,1008-1026).
gacagttaccggagatact

SEQ ID NO: 20718 - DNA, 19 bp, Homo sapiens
  siRNA target sequence for ORC5L (NM_181747.1,1028-1046).
cttcagctaattatcaaga

SEQ ID NO: 20719 - DNA, 19 bp, Homo sapiens
  siRNA target sequence for ORC5L (NM_181747.1,1033-1051).
gctaattatcaagatacta

SEQ ID NO: 20720 - DNA, 19 bp, Homo sapiens
  siRNA target sequence for ORC5L (NM_181747.1,1034-1052).
ctaattatcaagatactaa

SEQ ID NO: 20721 - DNA, 19 bp, Homo sapiens
  siRNA target sequence for TERF2 (NM_005652.2,421-439).
gattgctgcgggttatgca

SEQ ID NO: 20722 - DNA, 19 bp, Homo sapiens
  siRNA target sequence for TERF2 (NM_005652.2,440-458).
gtgtctgtcgcggattgaa

SEQ ID NO: 20723 - DNA, 19 bp, Homo sapiens
  siRNA target sequence for TERF2 (NM_005652.2,539-557).
gattaaaacggaatttaca

SEQ ID NO: 20724 - DNA, 19 bp, Homo sapiens
  siRNA target sequence for TERF2 (NM_005652.2,570-588).
gtggtcgaatccagtagaa

SEQ ID NO: 20725 - DNA, 19 bp, Homo sapiens
  siRNA target sequence for TERF2 (NM_005652.2,572-590).
ggtcgaatccagtagaaaa

SEQ ID NO: 20726 - DNA, 19 bp, Homo sapiens
  siRNA target sequence for TERF2 (NM_005652.2,603-621).
gctgctgtcattatttgta

SEQ ID NO: 20727 - DNA, 19 bp, Homo sapiens
  siRNA target sequence for TERF2 (NM_005652.2,607-625).
ctgtcattatttgtatcaa

SEQ ID NO: 20728 - DNA, 19 bp, Homo sapiens
  siRNA target sequence for TERF2 (NM_005652.2,864-882).
gagtccgctgcctcaagta

SEQ ID NO: 20729 - DNA, 19 bp, Homo sapiens
  siRNA target sequence for TERF2 (NM_005652.2,866-884).
gtccgctgcctcaagtaca

SEQ ID NO: 20730 - DNA, 19 bp, Homo sapiens
  siRNA target sequence for TERF2 (NM_005652.2,960-978).
cctccaaccaccattggaa

SEQ ID NO: 20731 - DNA, 19 bp, Homo sapiens
  siRNA target sequence for TERF2 (NM_005652.2,1089-1107).
gcatcaccagccctcaaaa

SEQ ID NO: 20732 - DNA, 19 bp, Homo sapiens
  siRNA target sequence for TERF2 (NM_005652.2,1184-1202).
gaacaagcgcatgacaata

SEQ ID NO: 20733 - DNA, 19 bp, Homo sapiens
  siRNA target sequence for TERF2 (NM_005652.2,1315-1333).
ccctccctggagagaagaa

SEQ ID NO: 20734 - DNA, 19 bp, Homo sapiens
  siRNA target sequence for TERF2 (NM_005652.2,1352-1370).
caagtggaacagctctaat

SEQ ID NO: 20735 - DNA, 19 bp, Homo sapiens
  siRNA target sequence for TERF2 (NM_005652.2,1363-1381).
gctctaatggggttgaaga

SEQ ID NO: 20736 - DNA, 19 bp, Homo sapiens
  siRNA target sequence for TERF2 (NM_005652.2,1364-1382).
ctctaatggggttgaagaa

SEQ ID NO: 20737 - DNA, 19 bp, Homo sapiens
  siRNA target sequence for TERF2 (NM_005652.2,1568-1586).
ccgaacagctgtgatgatt

SEQ ID NO: 20738 - DNA, 19 bp, Homo sapiens
  siRNA target sequence for TERF2 (NM_005652.2,1569-1587).
cgaacagctgtgatgatta

SEQ ID NO: 20739 - DNA, 19 bp, Homo sapiens
  siRNA target sequence for TERF2 (NM_005652.2,1593-1611).
cgctggcggaccatgaaaa

SEQ ID NO: 20740 - DNA, 19 bp, Homo sapiens
  siRNA target sequence for TERF2 (NM_005652.2,1597-1615).
ggcggaccatgaaaagact

SEQ ID NO: 20741 - DNA, 19 bp, Homo sapiens
  siRNA target sequence for TERF2 (NM_005652.2,1598-1616).
gcggaccatgaaaagactt

SEQ ID NO: 20742 - DNA, 19 bp, Homo sapiens
  siRNA target sequence for TERT (NM_003219.1,653-671).
gaacgggcctggaaccata

SEQ ID NO: 20743 - DNA, 19 bp, Homo sapiens
  siRNA target sequence for TERT (NM_003219.1,1132-1150).
gctcgtggagaccatcttt

SEQ ID NO: 20744 - DNA, 19 bp, Homo sapiens
  siRNA target sequence for TERT (NM_003219.1,1744-1762).
cacggagaccacgtttcaa

SEQ ID NO: 20745 - DNA, 19 bp, Homo sapiens
  siRNA target sequence for TERT (NM_003219.1,1746-1764).
cggagaccacgtttcaaaa

SEQ ID NO: 20746 - DNA, 19 bp, Homo sapiens
  siRNA target sequence for TERT (NM_003219.1,1748-1766).
gagaccacgtttcaaaaga

SEQ ID NO: 20747 - DNA, 19 bp, Homo sapiens
  siRNA target sequence for TERT (NM_003219.1,1797-1815).
ggagcaagttgcaaagcat

SEQ ID NO: 20748 - DNA, 19 bp, Homo sapiens
  siRNA target sequence for TERT (NM_003219.1,1983-2001).
gaacgttccgcagagaaaa

SEQ ID NO: 20749 - DNA, 19 bp, Homo sapiens
  siRNA target sequence for TERT (NM_003219.1,2163-2181).
cgcctgagctgtactttgt

SEQ ID NO: 20750 - DNA, 19 bp, Homo sapiens
  siRNA target sequence for TERT (NM_003219.1,2165-2183).
cctgagctgtactttgtca

SEQ ID NO: 20751 - DNA, 19 bp, Homo sapiens
  siRNA target sequence for TERT (NM_003219.1,2166-2184).
ctgagctgtactttgtcaa

SEQ ID NO: 20752 - DNA, 19 bp, Homo sapiens
  siRNA target sequence for TERT (NM_003219.1,2318-2336).
gtccgcaaggccttcaaga

SEQ ID NO: 20753 - DNA, 19 bp, Homo sapiens
  siRNA target sequence for TERT (NM_003219.1,2648-2666).
cgtttggtggatgatttct

SEQ ID NO: 20754 - DNA, 19 bp, Homo sapiens
  siRNA target sequence for TERT (NM_003219.1,2797-2815).
gggtggcacggcttttgtt

SEQ ID NO: 20755 - DNA, 19 bp, Homo sapiens
  siRNA target sequence for TERT (NM_003219.1,2799-2817).
gtggcacggcttttgttca

SEQ ID NO: 20756 - DNA, 19 bp, Homo sapiens
  siRNA target sequence for TERT (NM_003219.1,2802-2820).
gcacggcttttgttcagat

SEQ ID NO: 20757 - DNA, 19 bp, Homo sapiens
  siRNA target sequence for TERT (NM_003219.1,2962-2980).
catgcgtcgcaaactcttt

SEQ ID NO: 20758 - DNA, 19 bp, Homo sapiens
  siRNA target sequence for TERT (NM_003219.1,3042-3060).
cggtgtgcaccaacatcta

SEQ ID NO: 20759 - DNA, 19 bp, Homo sapiens
  siRNA target sequence for TERT (NM_003219.1,3113-3131).
ccatttcatcagcaagttt

SEQ ID NO: 20760 - DNA, 19 bp, Homo sapiens
  siRNA target sequence for TERT (NM_003219.1,3270-3288).
ggctgtgccaccaagcatt

SEQ ID NO: 20761 - DNA, 19 bp, Homo sapiens
  siRNA target sequence for KIF2C (NM_006845.2,91-109).
cccggtctcgctatcaaga

SEQ ID NO: 20762 - DNA, 19 bp, Homo sapiens
  siRNA target sequence for KIF2C (NM_006845.2,92-110).
ccggtctcgctatcaagat

SEQ ID NO: 20763 - DNA, 19 bp, Homo sapiens
  siRNA target sequence for KIF2C (NM_006845.2,105-123).
caagatccaacgcagtaat

SEQ ID NO: 20764 - DNA, 19 bp, Homo sapiens
  siRNA target sequence for KIF2C (NM_006845.2,111-129).
ccaacgcagtaatggttta

SEQ ID NO: 20765 - DNA, 19 bp, Homo sapiens
  siRNA target sequence for KIF2C (NM_006845.2,112-130).
caacgcagtaatggtttaa

SEQ ID NO: 20766 - DNA, 19 bp, Homo sapiens
  siRNA target sequence for KIF2C (NM_006845.2,116-134).
gcagtaatggtttaattca

SEQ ID NO: 20767 - DNA, 19 bp, Homo sapiens
  siRNA target sequence for KIF2C (NM_006845.2,295-313).
cccttgcaggaaaatgtaa

SEQ ID NO: 20768 - DNA, 19 bp, Homo sapiens
  siRNA target sequence for KIF2C (NM_006845.2,335-353).
gatccgtcaactccaaaat

SEQ ID NO: 20769 - DNA, 19 bp, Homo sapiens
  siRNA target sequence for KIF2C (NM_006845.2,470-488).
cccgcaagcagttttcagt

SEQ ID NO: 20770 - DNA, 19 bp, Homo sapiens
  siRNA target sequence for KIF2C (NM_006845.2,612-630).
ctcagttcggaggaaatca

SEQ ID NO: 20771 - DNA, 19 bp, Homo sapiens
  siRNA target sequence for KIF2C (NM_006845.2,715-733).
caggagtatgacagtagtt

SEQ ID NO: 20772 - DNA, 19 bp, Homo sapiens
  siRNA target sequence for KIF2C (NM_006845.2,717-735).
ggagtatgacagtagtttt

SEQ ID NO: 20773 - DNA, 19 bp, Homo sapiens
  siRNA target sequence for KIF2C (NM_006845.2,743-761).
gggaatttgcccgaatgat

SEQ ID NO: 20774 - DNA, 19 bp, Homo sapiens
  siRNA target sequence for KIF2C (NM_006845.2,744-762).
ggaatttgcccgaatgatt

SEQ ID NO: 20775 - DNA, 19 bp, Homo sapiens
  siRNA target sequence for KIF2C (NM_006845.2,751-769).
gcccgaatgattaaagaat

SEQ ID NO: 20776 - DNA, 19 bp, Homo sapiens
  siRNA target sequence for KIF2C (NM_006845.2,752-770).
cccgaatgattaaagaatt

SEQ ID NO: 20777 - DNA, 19 bp, Homo sapiens
  siRNA target sequence for KIF2C (NM_006845.2,773-791).
gggctactttggaatgtca

SEQ ID NO: 20778 - DNA, 19 bp, Homo sapiens
  siRNA target sequence for KIF2C (NM_006845.2,783-801).
ggaatgtcatccacttact

SEQ ID NO: 20779 - DNA, 19 bp, Homo sapiens
  siRNA target sequence for KIF2C (NM_006845.2,784-802).
gaatgtcatccacttacta

SEQ ID NO: 20780 - DNA, 19 bp, Homo sapiens
  siRNA target sequence for KIF2C (NM_006845.2,812-830).
ctatcgaagagcacagaat

SEQ ID NO: 20781 - DNA, 19 bp, Homo sapiens
  siRNA target sequence for KIF2C (NM_006845.2,845-863).
ggaaacgcccactgaataa

SEQ ID NO: 20782 - DNA, 19 bp, Homo sapiens
  siRNA target sequence for KIF2C (NM_006845.2,914-932).
gtctcctcttggtacatga

SEQ ID NO: 20783 - DNA, 19 bp, Homo sapiens
  siRNA target sequence for KIF2C (NM_006845.2,925-943).
gtacatgaacccaagttga

SEQ ID NO: 20784 - DNA, 19 bp, Homo sapiens
  siRNA target sequence for KIF2C (NM_006845.2,1010-1028).
cttcgaatgaagttgtcta

SEQ ID NO: 20785 - DNA, 19 bp, Homo sapiens
  siRNA target sequence for KIF2C (NM_006845.2,1105-1123).
ggaagtggcaagacacata

SEQ ID NO: 20786 - DNA, 19 bp, Homo sapiens
  siRNA target sequence for KIF2C (NM_006845.2,1109-1127).
gtggcaagacacatactat

SEQ ID NO: 20787 - DNA, 19 bp, Homo sapiens
  siRNA target sequence for KIF2C (NM_006845.2,1230-1248).
gttgggcctggaagtctat

SEQ ID NO: 20788 - DNA, 19 bp, Homo sapiens
  siRNA target sequence for KIF2C (NM_006845.2,1359-1377).
ggagcatctggttaactct

SEQ ID NO: 20789 - DNA, 19 bp, Homo sapiens
  siRNA target sequence for KIF2C (NM_006845.2,1465-1483).
cacgcgtgcttccaaatta

SEQ ID NO: 20790 - DNA, 19 bp, Homo sapiens
  siRNA target sequence for KIF2C (NM_006845.2,1467-1485).
cgcgtgcttccaaattatt

SEQ ID NO: 20791 - DNA, 19 bp, Homo sapiens
  siRNA target sequence for KIF2C (NM_006845.2,1469-1487).
cgtgcttccaaattattct

SEQ ID NO: 20792 - DNA, 19 bp, Homo sapiens
  siRNA target sequence for KIF2C (NM_006845.2,1588-1606).
gagggcgcagaaatcaaca

SEQ ID NO: 20793 - DNA, 19 bp, Homo sapiens
  siRNA target sequence for KIF2C (NM_006845.2,1591-1609).
ggcgcagaaatcaacaaga

SEQ ID NO: 20794 - DNA, 19 bp, Homo sapiens
  siRNA target sequence for KIF2C (NM_006845.2,1757-1775).
gcataagctcctgtgaata

SEQ ID NO: 20795 - DNA, 19 bp, Homo sapiens
  siRNA target sequence for KIF2C (NM_006845.2,1895-1913).
cgctgattccaggcaattt

SEQ ID NO: 20796 - DNA, 19 bp, Homo sapiens
  siRNA target sequence for KIF2C (NM_006845.2,1896-1914).
gctgattccaggcaattta

SEQ ID NO: 20797 - DNA, 19 bp, Homo sapiens
  siRNA target sequence for KIF2C (NM_006845.2,1944-1962).
gatgtccagctttaacgaa

SEQ ID NO: 20798 - DNA, 19 bp, Homo sapiens
  siRNA target sequence for KIF2C (NM_006845.2,2116-2134).
gcccagcaagccaagcatt

SEQ ID NO: 20799 - DNA, 19 bp, Homo sapiens
  siRNA target sequence for KIF2C (NM_006845.2,2117-2135).
cccagcaagccaagcattt

SEQ ID NO: 20800 - DNA, 19 bp, Homo sapiens
  siRNA target sequence for KIF2C (NM_006845.2,2121-2139).
gcaagccaagcatttctca

SEQ ID NO: 20801 - DNA, 19 bp, Homo sapiens
  siRNA target sequence for KIF2C (NM_006845.2,2138-2156).
cagccctgcgagatgtcat

SEQ ID NO: 20802 - DNA, 19 bp, Homo sapiens
  siRNA target sequence for KIF2C (NM_006845.2,2141-2159).
ccctgcgagatgtcatcaa

SEQ ID NO: 20803 - DNA, 19 bp, Homo sapiens
  siRNA target sequence for KIF2C (NM_006845.2,2188-2206).
gagcaggctagcagacaaa

SEQ ID NO: 20804 - DNA, 19 bp, Homo sapiens
  siRNA target sequence for KIF2C (NM_006845.2,2190-2208).
gcaggctagcagacaaata

SEQ ID NO: 20805 - DNA, 19 bp, Homo sapiens
  siRNA target sequence for KIF2C (NM_006845.2,2194-2212).
gctagcagacaaataagca

SEQ ID NO: 20806 - DNA, 19 bp, Homo sapiens
  siRNA target sequence for ZW10 (NM_004724.2,43-61).
ctcgttcgtgacagaagtt

SEQ ID NO: 20807 - DNA, 19 bp, Homo sapiens
  siRNA target sequence for ZW10 (NM_004724.2,45-63).
cgttcgtgacagaagtttt

SEQ ID NO: 20808 - DNA, 19 bp, Homo sapiens
  siRNA target sequence for ZW10 (NM_004724.2,146-164).
gaggtgtgcaatatgatta

SEQ ID NO: 20809 - DNA, 19 bp, Homo sapiens
  siRNA target sequence for ZW10 (NM_004724.2,149-167).
gtgtgcaatatgattagca

SEQ ID NO: 20810 - DNA, 19 bp, Homo sapiens
  siRNA target sequence for ZW10 (NM_004724.2,165-183).
gcaagaagtacagtgaatt

SEQ ID NO: 20811 - DNA, 19 bp, Homo sapiens
  siRNA target sequence for ZW10 (NM_004724.2,223-241).
ggtggataagctatctgaa

SEQ ID NO: 20812 - DNA, 19 bp, Homo sapiens
  siRNA target sequence for ZW10 (NM_004724.2,284-302).
cgggatcttcacgtatcaa

SEQ ID NO: 20813 - DNA, 19 bp, Homo sapiens
  siRNA target sequence for ZW10 (NM_004724.2,295-313).
cgtatcaaccggtgaattt

SEQ ID NO: 20814 - DNA, 19 bp, Homo sapiens
  siRNA target sequence for ZW10 (NM_004724.2,296-314).
gtatcaaccggtgaattta

SEQ ID NO: 20815 - DNA, 19 bp, Homo sapiens
  siRNA target sequence for ZW10 (NM_004724.2,304-322).
cggtgaatttacagactta

SEQ ID NO: 20816 - DNA, 19 bp, Homo sapiens
  siRNA target sequence for ZW10 (NM_004724.2,341-359).
gactcagttgtcctaagtt

SEQ ID NO: 20817 - DNA, 19 bp, Homo sapiens
  siRNA target sequence for ZW10 (NM_004724.2,353-371).
ctaagtttgcttaaacagt

SEQ ID NO: 20818 - DNA, 19 bp, Homo sapiens
  siRNA target sequence for ZW10 (NM_004724.2,389-407).
gctattgaagaatataatt

SEQ ID NO: 20819 - DNA, 19 bp, Homo sapiens
  siRNA target sequence for ZW10 (NM_004724.2,398-416).
gaatataattgtgcattaa

SEQ ID NO: 20820 - DNA, 19 bp, Homo sapiens
  siRNA target sequence for ZW10 (NM_004724.2,577-595).
gtggcagaagctgattgta

SEQ ID NO: 20821 - DNA, 19 bp, Homo sapiens
  siRNA target sequence for ZW10 (NM_004724.2,601-619).
gttcccaccatcaaaagat

SEQ ID NO: 20822 - DNA, 19 bp, Homo sapiens
  siRNA target sequence for ZW10 (NM_004724.2,617-635).
gataccagcagtttggaat

SEQ ID NO: 20823 - DNA, 19 bp, Homo sapiens
  siRNA target sequence for ZW10 (NM_004724.2,625-643).
cagtttggaatcttaccta

SEQ ID NO: 20824 - DNA, 19 bp, Homo sapiens
  siRNA target sequence for ZW10 (NM_004724.2,743-761).
gaactacacagcaagctta

SEQ ID NO: 20825 - DNA, 19 bp, Homo sapiens
  siRNA target sequence for ZW10 (NM_004724.2,850-868).
catagttattattcgtttt

SEQ ID NO: 20826 - DNA, 19 bp, Homo sapiens
  siRNA target sequence for ZW10 (NM_004724.2,869-887).
gaatctataatgactaact

SEQ ID NO: 20827 - DNA, 19 bp, Homo sapiens
  siRNA target sequence for ZW10 (NM_004724.2,880-898).
gactaacttggaatatcca

SEQ ID NO: 20828 - DNA, 19 bp, Homo sapiens
  siRNA target sequence for ZW10 (NM_004724.2,1095-1113).
caaatagcagcaaattaca

SEQ ID NO: 20829 - DNA, 19 bp, Homo sapiens
  siRNA target sequence for ZW10 (NM_004724.2,1101-1119).
gcagcaaattacagcaata

SEQ ID NO: 20830 - DNA, 19 bp, Homo sapiens
  siRNA target sequence for ZW10 (NM_004724.2,1114-1132).
gcaatatgaagagatcata

SEQ ID NO: 20831 - DNA, 19 bp, Homo sapiens
  siRNA target sequence for ZW10 (NM_004724.2,1210-1228).
cgctcgtaacatcaattct

SEQ ID NO: 20832 - DNA, 19 bp, Homo sapiens
  siRNA target sequence for ZW10 (NM_004724.2,1212-1230).
ctcgtaacatcaattctca

SEQ ID NO: 20833 - DNA, 19 bp, Homo sapiens
  siRNA target sequence for ZW10 (NM_004724.2,1214-1232).
cgtaacatcaattctcatt

SEQ ID NO: 20834 - DNA, 19 bp, Homo sapiens
  siRNA target sequence for ZW10 (NM_004724.2,1295-1313).
cataacactgtgaagatta

SEQ ID NO: 20835 - DNA, 19 bp, Homo sapiens
  siRNA target sequence for ZW10 (NM_004724.2,1347-1365).
ccactcctgatgaggataa

SEQ ID NO: 20836 - DNA, 19 bp, Homo sapiens
  siRNA target sequence for ZW10 (NM_004724.2,1353-1371).
ctgatgaggataacaaact

SEQ ID NO: 20837 - DNA, 19 bp, Homo sapiens
  siRNA target sequence for ZW10 (NM_004724.2,1395-1413).
ctcagtaccacgaagtgat

SEQ ID NO: 20838 - DNA, 19 bp, Homo sapiens
  siRNA target sequence for ZW10 (NM_004724.2,1399-1417).
gtaccacgaagtgatgaat

SEQ ID NO: 20839 - DNA, 19 bp, Homo sapiens
  siRNA target sequence for ZW10 (NM_004724.2,1402-1420).
ccacgaagtgatgaattta

SEQ ID NO: 20840 - DNA, 19 bp, Homo sapiens
  siRNA target sequence for ZW10 (NM_004724.2,1434-1452).
cattggaccaacattcctt

SEQ ID NO: 20841 - DNA, 19 bp, Homo sapiens
  siRNA target sequence for ZW10 (NM_004724.2,1439-1457).
gaccaacattccttttcct

SEQ ID NO: 20842 - DNA, 19 bp, Homo sapiens
  siRNA target sequence for ZW10 (NM_004724.2,1459-1477).
gcccacatgccgtatcagt

SEQ ID NO: 20843 - DNA, 19 bp, Homo sapiens
  siRNA target sequence for ZW10 (NM_004724.2,1504-1522).
cgcctatcagactttacta

SEQ ID NO: 20844 - DNA, 19 bp, Homo sapiens
  siRNA target sequence for ZW10 (NM_004724.2,1525-1543).
ggcaacaaccagtagtgat

SEQ ID NO: 20845 - DNA, 19 bp, Homo sapiens
  siRNA target sequence for ZW10 (NM_004724.2,1642-1660).
ccagttggctgctattcat

SEQ ID NO: 20846 - DNA, 19 bp, Homo sapiens
  siRNA target sequence for ZW10 (NM_004724.2,1652-1670).
gctattcatcacaacaact

SEQ ID NO: 20847 - DNA, 19 bp, Homo sapiens
  siRNA target sequence for ZW10 (NM_004724.2,1661-1679).
cacaacaactgtatgtaca

SEQ ID NO: 20848 - DNA, 19 bp, Homo sapiens
  siRNA target sequence for ZW10 (NM_004724.2,1721-1739).
cgtcttgcccccattcttt

SEQ ID NO: 20849 - DNA, 19 bp, Homo sapiens
  siRNA target sequence for ZW10 (NM_004724.2,1819-1837).
ggcacagaaaggtgaactt

SEQ ID NO: 20850 - DNA, 19 bp, Homo sapiens
  siRNA target sequence for ZW10 (NM_004724.2,1879-1897).
cgatgaagagaattattct

SEQ ID NO: 20851 - DNA, 19 bp, Homo sapiens
  siRNA target sequence for ZW10 (NM_004724.2,1919-1937).
caggtactgcaccaactaa

SEQ ID NO: 20852 - DNA, 19 bp, Homo sapiens
  siRNA target sequence for ZW10 (NM_004724.2,1922-1940).
gtactgcaccaactaaaga

SEQ ID NO: 20853 - DNA, 19 bp, Homo sapiens
  siRNA target sequence for ZW10 (NM_004724.2,1964-1982).
gtcctgccagtgaatatat

SEQ ID NO: 20854 - DNA, 19 bp, Homo sapiens
  siRNA target sequence for ZW10 (NM_004724.2,1970-1988).
ccagtgaatatatattgca

SEQ ID NO: 20855 - DNA, 19 bp, Homo sapiens
  siRNA target sequence for ZW10 (NM_004724.2,1992-2010).
ctatggggactttactcaa

SEQ ID NO: 20856 - DNA, 19 bp, Homo sapiens
  siRNA target sequence for ZW10 (NM_004724.2,1996-2014).
ggggactttactcaataca

SEQ ID NO: 20857 - DNA, 19 bp, Homo sapiens
  siRNA target sequence for ZW10 (NM_004724.2,2045-2063).
gccctagaggacatatcta

SEQ ID NO: 20858 - DNA, 19 bp, Homo sapiens
  siRNA target sequence for ZW10 (NM_004724.2,2047-2065).
cctagaggacatatctact

SEQ ID NO: 20859 - DNA, 19 bp, Homo sapiens
  siRNA target sequence for ZW10 (NM_004724.2,2053-2071).
ggacatatctactgaagat

SEQ ID NO: 20860 - DNA, 19 bp, Homo sapiens
  siRNA target sequence for ZW10 (NM_004724.2,2064-2082).
ctgaagatggtgataggtt

SEQ ID NO: 20861 - DNA, 19 bp, Homo sapiens
  siRNA target sequence for ZW10 (NM_004724.2,2066-2084).
gaagatggtgataggttat

SEQ ID NO: 20862 - DNA, 19 bp, Homo sapiens
  siRNA target sequence for ZW10 (NM_004724.2,2072-2090).
ggtgataggttatattcct

SEQ ID NO: 20863 - DNA, 19 bp, Homo sapiens
  siRNA target sequence for ZW10 (NM_004724.2,2075-2093).
gataggttatattccttat

SEQ ID NO: 20864 - DNA, 19 bp, Homo sapiens
  siRNA target sequence for ZW10 (NM_004724.2,2129-2147).
gcacctttatctgaagaaa

SEQ ID NO: 20865 - DNA, 19 bp, Homo sapiens
  siRNA target sequence for ZW10 (NM_004724.2,2180-2198).
gtctatgtgccaaaatgga

SEQ ID NO: 20866 - DNA, 19 bp, Homo sapiens
  siRNA target sequence for HMGA2 (NM_003483.3,1102-1120).
gaaatggccacaacaagtt

SEQ ID NO: 20867 - DNA, 19 bp, Homo sapiens
  siRNA target sequence for TP53BP1 (NM_005657.1,187-205).
gaagtcagttggattcaga

SEQ ID NO: 20868 - DNA, 19 bp, Homo sapiens
  siRNA target sequence for TP53BP1 (NM_005657.1,261-279).
caggttctagaggatgatt

SEQ ID NO: 20869 - DNA, 19 bp, Homo sapiens
  siRNA target sequence for TP53BP1 (NM_005657.1,280-298).
ctggttctcacttcagtat

SEQ ID NO: 20870 - DNA, 19 bp, Homo sapiens
  siRNA target sequence for TP53BP1 (NM_005657.1,304-322).
ctcgacaccttcctaatct

SEQ ID NO: 20871 - DNA, 19 bp, Homo sapiens
  siRNA target sequence for TP53BP1 (NM_005657.1,321-339).
ctccagacgcacaaagaaa

SEQ ID NO: 20872 - DNA, 19 bp, Homo sapiens
  siRNA target sequence for TP53BP1 (NM_005657.1,326-344).
gacgcacaaagaaaatcct

SEQ ID NO: 20873 - DNA, 19 bp, Homo sapiens
  siRNA target sequence for TP53BP1 (NM_005657.1,359-377).
gtccaatcctgaacaaaca

SEQ ID NO: 20874 - DNA, 19 bp, Homo sapiens
  siRNA target sequence for TP53BP1 (NM_005657.1,387-405).
gaacgaggagacggtaata

SEQ ID NO: 20875 - DNA, 19 bp, Homo sapiens
  siRNA target sequence for TP53BP1 (NM_005657.1,398-416).
cggtaatagtgggttcaat

SEQ ID NO: 20876 - DNA, 19 bp, Homo sapiens
  siRNA target sequence for TP53BP1 (NM_005657.1,444-462).
gaccctgtggattcttcta

SEQ ID NO: 20877 - DNA, 19 bp, Homo sapiens
  siRNA target sequence for TP53BP1 (NM_005657.1,618-636).
gatacttcaggcaatacta

SEQ ID NO: 20878 - DNA, 19 bp, Homo sapiens
  siRNA target sequence for TP53BP1 (NM_005657.1,700-718).
cccagagccaggatgttga

SEQ ID NO: 20879 - DNA, 19 bp, Homo sapiens
  siRNA target sequence for TP53BP1 (NM_005657.1,706-724).
gccaggatgttgaggaaaa

SEQ ID NO: 20880 - DNA, 19 bp, Homo sapiens
  siRNA target sequence for TP53BP1 (NM_005657.1,708-726).
caggatgttgaggaaaata

SEQ ID NO: 20881 - DNA, 19 bp, Homo sapiens
  siRNA target sequence for TP53BP1 (NM_005657.1,814-832).
ctgcaattaagcatgaaga

SEQ ID NO: 20882 - DNA, 19 bp, Homo sapiens
  siRNA target sequence for TP53BP1 (NM_005657.1,831-849).
gaacagtccaacgaagata

SEQ ID NO: 20883 - DNA, 19 bp, Homo sapiens
  siRNA target sequence for TP53BP1 (NM_005657.1,901-919).
gtaaggatgtacatgttgt

SEQ ID NO: 20884 - DNA, 19 bp, Homo sapiens
  siRNA target sequence for TP53BP1 (NM_005657.1,1012-1030).
ctgcacaagaacttatgga

SEQ ID NO: 20885 - DNA, 19 bp, Homo sapiens
  siRNA target sequence for TP53BP1 (NM_005657.1,1059-1077).
gagcctgaggttttgtcaa

SEQ ID NO: 20886 - DNA, 19 bp, Homo sapiens
  siRNA target sequence for TP53BP1 (NM_005657.1,1091-1109).
gtttgaccagagcaataaa

SEQ ID NO: 20887 - DNA, 19 bp, Homo sapiens
  siRNA target sequence for TP53BP1 (NM_005657.1,1100-1118).
gagcaataaaacagtatct

SEQ ID NO: 20888 - DNA, 19 bp, Homo sapiens
  siRNA target sequence for TP53BP1 (NM_005657.1,1210-1228).
gtcagaggtcccttgttca

SEQ ID NO: 20889 - DNA, 19 bp, Homo sapiens
  siRNA target sequence for TP53BP1 (NM_005657.1,1241-1259).
cacgaattcttcagatctt

SEQ ID NO: 20890 - DNA, 19 bp, Homo sapiens
  siRNA target sequence for TP53BP1 (NM_005657.1,1285-1303).
gatctactccttttatcgt

SEQ ID NO: 20891 - DNA, 19 bp, Homo sapiens
  siRNA target sequence for TP53BP1 (NM_005657.1,1349-1367).
ggacacgtcagtgttatct

SEQ ID NO: 20892 - DNA, 19 bp, Homo sapiens
  siRNA target sequence for TP53BP1 (NM_005657.1,1352-1370).
cacgtcagtgttatctgaa

SEQ ID NO: 20893 - DNA, 19 bp, Homo sapiens
  siRNA target sequence for TP53BP1 (NM_005657.1,1440-1458).
ctgcctgagtccactgtat

SEQ ID NO: 20894 - DNA, 19 bp, Homo sapiens
  siRNA target sequence for TP53BP1 (NM_005657.1,1464-1482).
caagcctcaacaccaatat

SEQ ID NO: 20895 - DNA, 19 bp, Homo sapiens
  siRNA target sequence for TP53BP1 (NM_005657.1,1534-1552).
ctcagttttctcatgacat

SEQ ID NO: 20896 - DNA, 19 bp, Homo sapiens
  siRNA target sequence for TP53BP1 (NM_005657.1,1565-1583).
cccaagtctggaagaacaa

SEQ ID NO: 20897 - DNA, 19 bp, Homo sapiens
  siRNA target sequence for TP53BP1 (NM_005657.1,1566-1584).
ccaagtctggaagaacaat

SEQ ID NO: 20898 - DNA, 19 bp, Homo sapiens
  siRNA target sequence for TP53BP1 (NM_005657.1,1602-1620).
gatggagatatgcatagtt

SEQ ID NO: 20899 - DNA, 19 bp, Homo sapiens
  siRNA target sequence for TP53BP1 (NM_005657.1,1605-1623).
ggagatatgcatagttcat

SEQ ID NO: 20900 - DNA, 19 bp, Homo sapiens
  siRNA target sequence for TP53BP1 (NM_005657.1,1628-1646).
gacagttgagtgttctaaa

SEQ ID NO: 20901 - DNA, 19 bp, Homo sapiens
  siRNA target sequence for TP53BP1 (NM_005657.1,1651-1669).
cagagattgaaccaaagaa

SEQ ID NO: 20902 - DNA, 19 bp, Homo sapiens
  siRNA target sequence for TP53BP1 (NM_005657.1,1677-1695).
gaggatcttgggctatctt

SEQ ID NO: 20903 - DNA, 19 bp, Homo sapiens
  siRNA target sequence for TP53BP1 (NM_005657.1,1712-1730).
caagttgatgctttctaca

SEQ ID NO: 20904 - DNA, 19 bp, Homo sapiens
  siRNA target sequence for TP53BP1 (NM_005657.1,1715-1733).
gttgatgctttctacaagt

SEQ ID NO: 20905 - DNA, 19 bp, Homo sapiens
  siRNA target sequence for TP53BP1 (NM_005657.1,1721-1739).
gctttctacaagtgaatat

SEQ ID NO: 20906 - DNA, 19 bp, Homo sapiens
  siRNA target sequence for TP53BP1 (NM_005657.1,1722-1740).
ctttctacaagtgaatata

SEQ ID NO: 20907 - DNA, 19 bp, Homo sapiens
  siRNA target sequence for TP53BP1 (NM_005657.1,1726-1744).
ctacaagtgaatatagtca

SEQ ID NO: 20908 - DNA, 19 bp, Homo sapiens
  siRNA target sequence for TP53BP1 (NM_005657.1,1762-1780).
gcttgagttctcacagaat

SEQ ID NO: 20909 - DNA, 19 bp, Homo sapiens
  siRNA target sequence for TP53BP1 (NM_005657.1,1766-1784).
gagttctcacagaattgat

SEQ ID NO: 20910 - DNA, 19 bp, Homo sapiens
  siRNA target sequence for TP53BP1 (NM_005657.1,1855-1873).
ctgctgaaaatgatagtat

SEQ ID NO: 20911 - DNA, 19 bp, Homo sapiens
  siRNA target sequence for TP53BP1 (NM_005657.1,1951-1969).
ccagggatgacattagtat

SEQ ID NO: 20912 - DNA, 19 bp, Homo sapiens
  siRNA target sequence for TP53BP1 (NM_005657.1,1955-1973).
ggatgacattagtatttta

SEQ ID NO: 20913 - DNA, 19 bp, Homo sapiens
  siRNA target sequence for TP53BP1 (NM_005657.1,2003-2021).
ggtagcagaagatgtttgt

SEQ ID NO: 20914 - DNA, 19 bp, Homo sapiens
  siRNA target sequence for TP53BP1 (NM_005657.1,2081-2099).
ggcactttctagtgtgtta

SEQ ID NO: 20915 - DNA, 19 bp, Homo sapiens
  siRNA target sequence for TP53BP1 (NM_005657.1,2241-2259).
cacctttctctgactgaaa

SEQ ID NO: 20916 - DNA, 19 bp, Homo sapiens
  siRNA target sequence for TP53BP1 (NM_005657.1,2272-2290).
ggttgtgtcttcaaaagga

SEQ ID NO: 20917 - DNA, 19 bp, Homo sapiens
  siRNA target sequence for TP53BP1 (NM_005657.1,2325-2343).
gttgaaaccagtgtgatta

SEQ ID NO: 20918 - DNA, 19 bp, Homo sapiens
  siRNA target sequence for TP53BP1 (NM_005657.1,2332-2350).
ccagtgtgattagtattga

SEQ ID NO: 20919 - DNA, 19 bp, Homo sapiens
  siRNA target sequence for TP53BP1 (NM_005657.1,2333-2351).
cagtgtgattagtattgat

SEQ ID NO: 20920 - DNA, 19 bp, Homo sapiens
  siRNA target sequence for TP53BP1 (NM_005657.1,2356-2374).
ctcaaaagttggcaatact

SEQ ID NO: 20921 - DNA, 19 bp, Homo sapiens
  siRNA target sequence for TP53BP1 (NM_005657.1,2367-2385).
gcaatacttgaccaagaat

SEQ ID NO: 20922 - DNA, 19 bp, Homo sapiens
  siRNA target sequence for TP53BP1 (NM_005657.1,2560-2578).
catgtgctgagaatagatt

SEQ ID NO: 20923 - DNA, 19 bp, Homo sapiens
  siRNA target sequence for TP53BP1 (NM_005657.1,2565-2583).
gctgagaatagattagaca

SEQ ID NO: 20924 - DNA, 19 bp, Homo sapiens
  siRNA target sequence for TP53BP1 (NM_005657.1,2643-2661).
gaacctgtagagcaagatt

SEQ ID NO: 20925 - DNA, 19 bp, Homo sapiens
  siRNA target sequence for TP53BP1 (NM_005657.1,2687-2705).
gagagcagatgatccttta

SEQ ID NO: 20926 - DNA, 19 bp, Homo sapiens
  siRNA target sequence for TP53BP1 (NM_005657.1,2749-2767).
caagtaattcattaacaga

SEQ ID NO: 20927 - DNA, 19 bp, Homo sapiens
  siRNA target sequence for TP53BP1 (NM_005657.1,2771-2789).
ctcaaaaatggctaatgca

SEQ ID NO: 20928 - DNA, 19 bp, Homo sapiens
  siRNA target sequence for TP53BP1 (NM_005657.1,2899-2917).
ctaaagaaggtgatatcat

SEQ ID NO: 20929 - DNA, 19 bp, Homo sapiens
  siRNA target sequence for TP53BP1 (NM_005657.1,2932-2950).
gtgcaaccccacctcttat

SEQ ID NO: 20930 - DNA, 19 bp, Homo sapiens
  siRNA target sequence for TP53BP1 (NM_005657.1,2975-2993).
gagacacagtactcctatt

SEQ ID NO: 20931 - DNA, 19 bp, Homo sapiens
  siRNA target sequence for TP53BP1 (NM_005657.1,2979-2997).
cacagtactcctattggta

SEQ ID NO: 20932 - DNA, 19 bp, Homo sapiens
  siRNA target sequence for TP53BP1 (NM_005657.1,2986-3004).
ctcctattggtattagcaa

SEQ ID NO: 20933 - DNA, 19 bp, Homo sapiens
  siRNA target sequence for TP53BP1 (NM_005657.1,3059-3077).
gacccatgatcccatactt

SEQ ID NO: 20934 - DNA, 19 bp, Homo sapiens
  siRNA target sequence for TP53BP1 (NM_005657.1,3200-3218).
gcctgcaactggtgaaaga

SEQ ID NO: 20935 - DNA, 19 bp, Homo sapiens
  siRNA target sequence for TP53BP1 (NM_005657.1,3405-3423).
gagggtgaccatacaatca

SEQ ID NO: 20936 - DNA, 19 bp, Homo sapiens
  siRNA target sequence for TP53BP1 (NM_005657.1,3437-3455).
gcctatgaagcccattagt

SEQ ID NO: 20937 - DNA, 19 bp, Homo sapiens
  siRNA target sequence for TP53BP1 (NM_005657.1,3484-3502).
cccagaagatggtcataca

SEQ ID NO: 20938 - DNA, 19 bp, Homo sapiens
  siRNA target sequence for TP53BP1 (NM_005657.1,3561-3579).
gaaggacggagtactaata

SEQ ID NO: 20939 - DNA, 19 bp, Homo sapiens
  siRNA target sequence for TP53BP1 (NM_005657.1,3565-3583).
gacggagtactaataagga

SEQ ID NO: 20940 - DNA, 19 bp, Homo sapiens
  siRNA target sequence for TP53BP1 (NM_005657.1,3567-3585).
cggagtactaataaggaaa

SEQ ID NO: 20941 - DNA, 19 bp, Homo sapiens
  siRNA target sequence for TP53BP1 (NM_005657.1,3606-3624).
gaaaggcccagccaaaata

SEQ ID NO: 20942 - DNA, 19 bp, Homo sapiens
  siRNA target sequence for TP53BP1 (NM_005657.1,3679-3697).
cagcaacccagactataaa

SEQ ID NO: 20943 - DNA, 19 bp, Homo sapiens
  siRNA target sequence for TP53BP1 (NM_005657.1,3918-3936).
cttgtcactcgtgtcatta

SEQ ID NO: 20944 - DNA, 19 bp, Homo sapiens
  siRNA target sequence for TP53BP1 (NM_005657.1,3923-3941).
cactcgtgtcattacagat

SEQ ID NO: 20945 - DNA, 19 bp, Homo sapiens
  siRNA target sequence for TP53BP1 (NM_005657.1,3930-3948).
gtcattacagatgtgtatt

SEQ ID NO: 20946 - DNA, 19 bp, Homo sapiens
  siRNA target sequence for TP53BP1 (NM_005657.1,3989-4007).
gactgaagagccaattgta

SEQ ID NO: 20947 - DNA, 19 bp, Homo sapiens
  siRNA target sequence for TP53BP1 (NM_005657.1,4017-4035).
gagtgtgaaactgaagttt

SEQ ID NO: 20948 - DNA, 19 bp, Homo sapiens
  siRNA target sequence for TP53BP1 (NM_005657.1,4201-4219).
ggacagaacccgcagattt

SEQ ID NO: 20949 - DNA, 19 bp, Homo sapiens
  siRNA target sequence for TP53BP1 (NM_005657.1,4462-4480).
caccagatgataaatcctt

SEQ ID NO: 20950 - DNA, 19 bp, Homo sapiens
  siRNA target sequence for TP53BP1 (NM_005657.1,4589-4607).
cccttctgatggcttagat

SEQ ID NO: 20951 - DNA, 19 bp, Homo sapiens
  siRNA target sequence for TP53BP1 (NM_005657.1,4608-4626).
gcctcctctccaggaaata

SEQ ID NO: 20952 - DNA, 19 bp, Homo sapiens
  siRNA target sequence for TP53BP1 (NM_005657.1,4660-4678).
catccaatggctactttta

SEQ ID NO: 20953 - DNA, 19 bp, Homo sapiens
  siRNA target sequence for TP53BP1 (NM_005657.1,4664-4682).
caatggctacttttactct

SEQ ID NO: 20954 - DNA, 19 bp, Homo sapiens
  siRNA target sequence for TP53BP1 (NM_005657.1,4701-4719).
gtcggagctgggaagtata

SEQ ID NO: 20955 - DNA, 19 bp, Homo sapiens
  siRNA target sequence for TP53BP1 (NM_005657.1,4703-4721).
cggagctgggaagtataaa

SEQ ID NO: 20956 - DNA, 19 bp, Homo sapiens
  siRNA target sequence for TP53BP1 (NM_005657.1,4704-4722).
ggagctgggaagtataaat

SEQ ID NO: 20957 - DNA, 19 bp, Homo sapiens
  siRNA target sequence for TP53BP1 (NM_005657.1,4738-4756).
ggtacgaatgtgatgtgtt

SEQ ID NO: 20958 - DNA, 19 bp, Homo sapiens
  siRNA target sequence for TP53BP1 (NM_005657.1,4810-4828).
ccctctcggaggatgagta

SEQ ID NO: 20959 - DNA, 19 bp, Homo sapiens
  siRNA target sequence for TP53BP1 (NM_005657.1,4877-4895).
gtactacagcattgaaaaa

SEQ ID NO: 20960 - DNA, 19 bp, Homo sapiens
  siRNA target sequence for TP53BP1 (NM_005657.1,4899-4917).
ggccaaagaaagtggtata

SEQ ID NO: 20961 - DNA, 19 bp, Homo sapiens
  siRNA target sequence for TP53BP1 (NM_005657.1,4982-5000).
cccctatgaagcagtaaca

SEQ ID NO: 20962 - DNA, 19 bp, Homo sapiens
  siRNA target sequence for TP53BP1 (NM_005657.1,4992-5010).
gcagtaacacctcttacaa

SEQ ID NO: 20963 - DNA, 19 bp, Homo sapiens
  siRNA target sequence for TP53BP1 (NM_005657.1,5019-5037).
gatatcagcttagacaatt

SEQ ID NO: 20964 - DNA, 19 bp, Homo sapiens
  siRNA target sequence for TP53BP1 (NM_005657.1,5113-5131).
caacccctacccgaaagat

SEQ ID NO: 20965 - DNA, 19 bp, Homo sapiens
  siRNA target sequence for TP53BP1 (NM_005657.1,5225-5243).
caagtctgccacagtaaaa

SEQ ID NO: 20966 - DNA, 19 bp, Homo sapiens
  siRNA target sequence for TP53BP1 (NM_005657.1,5228-5246).
gtctgccacagtaaaacct

SEQ ID NO: 20967 - DNA, 19 bp, Homo sapiens
  siRNA target sequence for TP53BP1 (NM_005657.1,5518-5536).
caggagctggctatatcct

SEQ ID NO: 20968 - DNA, 19 bp, Homo sapiens
  siRNA target sequence for TP53BP1 (NM_005657.1,5526-5544).
ggctatatccttgaagatt

SEQ ID NO: 20969 - DNA, 19 bp, Homo sapiens
  siRNA target sequence for TP53BP1 (NM_005657.1,5527-5545).
gctatatccttgaagattt

SEQ ID NO: 20970 - DNA, 19 bp, Homo sapiens
  siRNA target sequence for TP53BP1 (NM_005657.1,5568-5586).
gcttaccagtgtcttctaa

SEQ ID NO: 20971 - DNA, 19 bp, Homo sapiens
  siRNA target sequence for TP53BP1 (NM_005657.1,5602-5620).
gtcgaacccggaagtactt

SEQ ID NO: 20972 - DNA, 19 bp, Homo sapiens
  siRNA target sequence for TP53BP1 (NM_005657.1,5628-5646).
cttgccagtgggattcctt

SEQ ID NO: 20973 - DNA, 19 bp, Homo sapiens
  siRNA target sequence for TP53BP1 (NM_005657.1,5655-5673).
catgtctgggtccatgata

SEQ ID NO: 20974 - DNA, 19 bp, Homo sapiens
  siRNA target sequence for TP53BP1 (NM_005657.1,5658-5676).
gtctgggtccatgatagtt

SEQ ID NO: 20975 - DNA, 19 bp, Homo sapiens
  siRNA target sequence for TP53BP1 (NM_005657.1,5691-5709).
ctccagaactaccgtaatt

SEQ ID NO: 20976 - DNA, 19 bp, Homo sapiens
  siRNA target sequence for TP53BP1 (NM_005657.1,5693-5711).
ccagaactaccgtaattat

SEQ ID NO: 20977 - DNA, 19 bp, Homo sapiens
  siRNA target sequence for TP53BP1 (NM_005657.1,5756-5774).
ctggcaaccccgtgaaaat

SEQ ID NO: 20978 - DNA, 19 bp, Homo sapiens
  siRNA target sequence for TP53BP1 (NM_005657.1,5759-5777).
gcaaccccgtgaaaatcct

SEQ ID NO: 20979 - DNA, 19 bp, Homo sapiens
  siRNA target sequence for TP53BP1 (NM_005657.1,5871-5889).
gtgaagcagcaccattcaa

SEQ ID NO: 20980 - DNA, 19 bp, Homo sapiens
  siRNA target sequence for TP53BP1 (NM_005657.1,5873-5891).
gaagcagcaccattcaagt

SEQ ID NO: 20981 - DNA, 19 bp, Homo sapiens
  siRNA target sequence for TP53BP1 (NM_005657.1,5883-5901).
cattcaagtgcccataaca

SEQ ID NO: 20982 - DNA, 19 bp, Homo sapiens
  siRNA target sequence for TP53BP1 (NM_005657.1,5890-5908).
gtgcccataacaaagatat

SEQ ID NO: 20983 - DNA, 19 bp, Homo sapiens
  siRNA target sequence for TP53BP1 (NM_005657.1,5911-5929).
ctttaggggtatttgatgt

SEQ ID NO: 20984 - DNA, 19 bp, Homo sapiens
  siRNA target sequence for TP53BP1 (NM_005657.1,6014-6032).
gatccagtgcctcattgtt

SEQ ID NO: 20985 - DNA, 19 bp, Homo sapiens
  siRNA target sequence for TP53BP1 (NM_005657.1,6034-6052).
gggagagaattggattcaa

SEQ ID NO: 20986 - DNA, 19 bp, Homo sapiens
  siRNA target sequence for ZBP1 (NM_030776.1,209-227).
gaaggccaccttgaacaaa

SEQ ID NO: 20987 - DNA, 19 bp, Homo sapiens
  siRNA target sequence for ZBP1 (NM_030776.1,252-270).
ctggctccccggtgaaact

SEQ ID NO: 20988 - DNA, 19 bp, Homo sapiens
  siRNA target sequence for ZBP1 (NM_030776.1,320-338).
gtcctctaccgaatgaaaa

SEQ ID NO: 20989 - DNA, 19 bp, Homo sapiens
  siRNA target sequence for ZBP1 (NM_030776.1,503-521).
cgggaggaagacatctaca

SEQ ID NO: 20990 - DNA, 19 bp, Homo sapiens
  siRNA target sequence for ZBP1 (NM_030776.1,514-532).
catctacaggtttctcaaa

SEQ ID NO: 20991 - DNA, 19 bp, Homo sapiens
  siRNA target sequence for ZBP1 (NM_030776.1,596-614).
gtgaaccgagacttgtaca

SEQ ID NO: 20992 - DNA, 19 bp, Homo sapiens
  siRNA target sequence for ZBP1 (NM_030776.1,654-672).
ccaaagcatggacgattta

SEQ ID NO: 20993 - DNA, 19 bp, Homo sapiens
  siRNA target sequence for ZBP1 (NM_030776.1,667-685).
gatttaccgcccagaagat

SEQ ID NO: 20994 - DNA, 19 bp, Homo sapiens
  siRNA target sequence for ZBP1 (NM_030776.1,725-743).
cacaatccaatcaacatga

SEQ ID NO: 20995 - DNA, 19 bp, Homo sapiens
  siRNA target sequence for ZBP1 (NM_030776.1,765-783).
gctggatttccattgcaaa

SEQ ID NO: 20996 - DNA, 19 bp, Homo sapiens
  siRNA target sequence for ZBP1 (NM_030776.1,803-821).
ggacacgggaacatcatta

SEQ ID NO: 20997 - DNA, 19 bp, Homo sapiens
  siRNA target sequence for ZBP1 (NM_030776.1,806-824).
cacgggaacatcattacaa

SEQ ID NO: 20998 - DNA, 19 bp, Homo sapiens
  siRNA target sequence for ZBP1 (NM_030776.1,861-879).
cacgccacctcccttcaat

SEQ ID NO: 20999 - DNA, 19 bp, Homo sapiens
  siRNA target sequence for ZBP1 (NM_030776.1,900-918).
cttgggggaccctagttga

SEQ ID NO: 21000 - DNA, 19 bp, Homo sapiens
  siRNA target sequence for ZBP1 (NM_030776.1,1072-1090).
cccagaagcttcgtttgaa

SEQ ID NO: 21001 - DNA, 19 bp, Homo sapiens
  siRNA target sequence for ZBP1 (NM_030776.1,1080-1098).
cttcgtttgaagcaagaat

SEQ ID NO: 21002 - DNA, 19 bp, Homo sapiens
  siRNA target sequence for ZBP1 (NM_030776.1,1277-1295).
cgtcccgcagacacacaat

SEQ ID NO: 21003 - DNA, 19 bp, Homo sapiens
  siRNA target sequence for ZBP1 (NM_030776.1,1356-1374).
cccccaagctggaaactat

SEQ ID NO: 21004 - DNA, 19 bp, Homo sapiens
  siRNA target sequence for ZBP1 (NM_030776.1,1360-1378).
caagctggaaactatgact

SEQ ID NO: 21005 - DNA, 19 bp, Homo sapiens
  siRNA target sequence for CGBP (NM_014593.1,304-322).
gagaatgcgcccatctact

SEQ ID NO: 21006 - DNA, 19 bp, Homo sapiens
  siRNA target sequence for CGBP (NM_014593.1,329-347).
gccgcaaaccggacatcaa

SEQ ID NO: 21007 - DNA, 19 bp, Homo sapiens
  siRNA target sequence for CGBP (NM_014593.1,331-349).
cgcaaaccggacatcaact

SEQ ID NO: 21008 - DNA, 19 bp, Homo sapiens
  siRNA target sequence for CGBP (NM_014593.1,484-502).
cgctatcggcacaagaagt

SEQ ID NO: 21009 - DNA, 19 bp, Homo sapiens
  siRNA target sequence for CGBP (NM_014593.1,874-892).
cgggaatcgtacaagtact

SEQ ID NO: 21010 - DNA, 19 bp, Homo sapiens
  siRNA target sequence for CGBP (NM_014593.1,875-893).
gggaatcgtacaagtactt

SEQ ID NO: 21011 - DNA, 19 bp, Homo sapiens
  siRNA target sequence for CGBP (NM_014593.1,992-1010).
ggcgcatccgtgaagatga

SEQ ID NO: 21012 - DNA, 19 bp, Homo sapiens
  siRNA target sequence for CGBP (NM_014593.1,1012-1030).
ggggcagtggcgtcatcaa

SEQ ID NO: 21013 - DNA, 19 bp, Homo sapiens
  siRNA target sequence for CGBP (NM_014593.1,1746-1764).
gcgctgctacgccaagtat

SEQ ID NO: 21014 - DNA, 19 bp, Homo sapiens
  siRNA target sequence for CGBP (NM_014593.1,1748-1766).
gctgctacgccaagtatga

SEQ ID NO: 21015 - DNA, 19 bp, Homo sapiens
  siRNA target sequence for CGBP (NM_014593.1,1843-1861).
cctcagagcaaaacatact

SEQ ID NO: 21016 - DNA, 19 bp, Homo sapiens
  siRNA target sequence for CGBP (NM_014593.1,1937-1955).
cccttgtacgtgatgtctt

SEQ ID NO: 21017 - DNA, 19 bp, Homo sapiens
  siRNA target sequence for CGBP (NM_014593.1,1993-2011).
cagtgcaatcgccattact

SEQ ID NO: 21018 - DNA, 19 bp, Homo sapiens
  siRNA target sequence for CGBP (NM_014593.1,2101-2119).
gtgcgcacagccatgacaa

SEQ ID NO: 21019 - DNA, 19 bp, Homo sapiens
  siRNA target sequence for 3\\'HEXO (NM_153332.2,222-240).
ccagtcccgaggaaactca

SEQ ID NO: 21020 - DNA, 19 bp, Homo sapiens
  siRNA target sequence for 3\\'HEXO (NM_153332.2,223-241).
cagtcccgaggaaactcaa

SEQ ID NO: 21021 - DNA, 19 bp, Homo sapiens
  siRNA target sequence for 3\\'HEXO (NM_153332.2,267-285).
caaaaggatccaagttcat

SEQ ID NO: 21022 - DNA, 19 bp, Homo sapiens
  siRNA target sequence for 3\\'HEXO (NM_153332.2,307-325).
cagtgacccggtttacaaa

SEQ ID NO: 21023 - DNA, 19 bp, Homo sapiens
  siRNA target sequence for 3\\'HEXO (NM_153332.2,313-331).
cccggtttacaaagagatt

SEQ ID NO: 21024 - DNA, 19 bp, Homo sapiens
  siRNA target sequence for 3\\'HEXO (NM_153332.2,340-358).
gaatggctgtattaataga

SEQ ID NO: 21025 - DNA, 19 bp, Homo sapiens
  siRNA target sequence for 3\\'HEXO (NM_153332.2,371-389).
gaactcagagctaagcttt

SEQ ID NO: 21026 - DNA, 19 bp, Homo sapiens
  siRNA target sequence for 3\\'HEXO (NM_153332.2,378-396).
gagctaagctttcagaatt

SEQ ID NO: 21027 - DNA, 19 bp, Homo sapiens
  siRNA target sequence for 3\\'HEXO (NM_153332.2,413-431).
ggagtaaaggatgttctaa

SEQ ID NO: 21028 - DNA, 19 bp, Homo sapiens
  siRNA target sequence for 3\\'HEXO (NM_153332.2,414-432).
gagtaaaggatgttctaaa

SEQ ID NO: 21029 - DNA, 19 bp, Homo sapiens
  siRNA target sequence for 3\\'HEXO (NM_153332.2,433-451).
gaagagactgaaaaactat

SEQ ID NO: 21030 - DNA, 19 bp, Homo sapiens
  siRNA target sequence for 3\\'HEXO (NM_153332.2,483-501).
gcaattttgctgacagtta

SEQ ID NO: 21031 - DNA, 19 bp, Homo sapiens
  siRNA target sequence for 3\\'HEXO (NM_153332.2,587-605).
ccggttgttttactgaata

SEQ ID NO: 21032 - DNA, 19 bp, Homo sapiens
  siRNA target sequence for 3\\'HEXO (NM_153332.2,606-624).
cgcatactttagaaataga

SEQ ID NO: 21033 - DNA, 19 bp, Homo sapiens
  siRNA target sequence for 3\\'HEXO (NM_153332.2,628-646).
cacgtttcagcagtatgta

SEQ ID NO: 21034 - DNA, 19 bp, Homo sapiens
  siRNA target sequence for 3\\'HEXO (NM_153332.2,640-658).
gtatgtaagaccagagatt

SEQ ID NO: 21035 - DNA, 19 bp, Homo sapiens
  siRNA target sequence for 3\\'HEXO (NM_153332.2,682-700).
catcagtctaactggaatt

SEQ ID NO: 21036 - DNA, 19 bp, Homo sapiens
  siRNA target sequence for 3\\'HEXO (NM_153332.2,685-703).
cagtctaactggaattact

SEQ ID NO: 21037 - DNA, 19 bp, Homo sapiens
  siRNA target sequence for 3\\'HEXO (NM_153332.2,729-747).
ccttccctcaggtactaaa

SEQ ID NO: 21038 - DNA, 19 bp, Homo sapiens
  siRNA target sequence for 3\\'HEXO (NM_153332.2,730-748).
cttccctcaggtactaaaa

SEQ ID NO: 21039 - DNA, 19 bp, Homo sapiens
  siRNA target sequence for 3\\'HEXO (NM_153332.2,782-800).
ggaacaaagtataaatact

SEQ ID NO: 21040 - DNA, 19 bp, Homo sapiens
  siRNA target sequence for 3\\'HEXO (NM_153332.2,790-808).
gtataaatactcactttta

SEQ ID NO: 21041 - DNA, 19 bp, Homo sapiens
  siRNA target sequence for 3\\'HEXO (NM_153332.2,815-833).
ggttcttgggatatgagta

SEQ ID NO: 21042 - DNA, 19 bp, Homo sapiens
  siRNA target sequence for 3\\'HEXO (NM_153332.2,816-834).
gttcttgggatatgagtaa

SEQ ID NO: 21043 - DNA, 19 bp, Homo sapiens
  siRNA target sequence for 3\\'HEXO (NM_153332.2,884-902).
gcgaaaaagtggatcaata

SEQ ID NO: 21044 - DNA, 19 bp, Homo sapiens
  siRNA target sequence for 3\\'HEXO (NM_153332.2,898-916).
caatattcggaagtcatat

SEQ ID NO: 21045 - DNA, 19 bp, Homo sapiens
  siRNA target sequence for 3\\'HEXO (NM_153332.2,943-961).
ccaaaccaaactgacaata

SEQ ID NO: 21046 - DNA, 19 bp, Homo sapiens
  siRNA target sequence for 3\\'HEXO (NM_153332.2,944-962).
caaaccaaactgacaataa

SEQ ID NO: 21047 - DNA, 19 bp, Homo sapiens
  siRNA target sequence for 3\\'HEXO (NM_153332.2,1005-1023).
gtggtcttgatgactctaa

SEQ ID NO: 21048 - DNA, 19 bp, Homo sapiens
  siRNA target sequence for 3\\'HEXO (NM_153332.2,1008-1026).
gtcttgatgactctaagaa

SEQ ID NO: 21049 - DNA, 19 bp, Homo sapiens
  siRNA target sequence for 3\\'HEXO (NM_153332.2,1024-1042).
gaatatcgcccgaatagca

SEQ ID NO: 21050 - DNA, 19 bp, Homo sapiens
  siRNA target sequence for 3\\'HEXO (NM_153332.2,1032-1050).
cccgaatagcagttcgaat

SEQ ID NO: 21051 - DNA, 19 bp, Homo sapiens
  siRNA target sequence for 3\\'HEXO (NM_153332.2,1062-1080).
ggtgtgaactccgaatcaa

SEQ ID NO: 21052 - DNA, 19 bp, Homo sapiens
  siRNA target sequence for 3\\'HEXO (NM_153332.2,1070-1088).
ctccgaatcaacgagaaaa

SEQ ID NO: 21053 - DNA, 19 bp, Homo sapiens
  siRNA target sequence for 3\\'HEXO (NM_153332.2,1114-1132).
gtcctcttccttaccaata

SEQ ID NO: 21054 - DNA, 19 bp, Homo sapiens
  siRNA target sequence for 3\\'HEXO (NM_153332.2,1146-1164).
caccacaaatgccacattt

SEQ ID NO: 21055 - DNA, 19 bp, Homo sapiens
  siRNA target sequence for ABI-2 (NM_005759.3,179-197).
gaacgggtggccgattact

SEQ ID NO: 21056 - DNA, 19 bp, Homo sapiens
  siRNA target sequence for ABI-2 (NM_005759.3,189-207).
ccgattactgcgagaacaa

SEQ ID NO: 21057 - DNA, 19 bp, Homo sapiens
  siRNA target sequence for ABI-2 (NM_005759.3,256-274).
ctacaccacccaatcctta

SEQ ID NO: 21058 - DNA, 19 bp, Homo sapiens
  siRNA target sequence for ABI-2 (NM_005759.3,265-283).
ccaatccttagcaagtgtt

SEQ ID NO: 21059 - DNA, 19 bp, Homo sapiens
  siRNA target sequence for ABI-2 (NM_005759.3,275-293).
gcaagtgttgcctatctga

SEQ ID NO: 21060 - DNA, 19 bp, Homo sapiens
  siRNA target sequence for ABI-2 (NM_005759.3,276-294).
caagtgttgcctatctgat

SEQ ID NO: 21061 - DNA, 19 bp, Homo sapiens
  siRNA target sequence for ABI-2 (NM_005759.3,279-297).
gtgttgcctatctgataaa

SEQ ID NO: 21062 - DNA, 19 bp, Homo sapiens
  siRNA target sequence for ABI-2 (NM_005759.3,350-368).
cgaaggatggaatcttcaa

SEQ ID NO: 21063 - DNA, 19 bp, Homo sapiens
  siRNA target sequence for ABI-2 (NM_005759.3,354-372).
ggatggaatcttcaatcaa

SEQ ID NO: 21064 - DNA, 19 bp, Homo sapiens
  siRNA target sequence for ABI-2 (NM_005759.3,355-373).
gatggaatcttcaatcaat

SEQ ID NO: 21065 - DNA, 19 bp, Homo sapiens
  siRNA target sequence for ABI-2 (NM_005759.3,387-405).
cagttgatattcataaaga

SEQ ID NO: 21066 - DNA, 19 bp, Homo sapiens
  siRNA target sequence for ABI-2 (NM_005759.3,456-474).
caaggacacataagattat

SEQ ID NO: 21067 - DNA, 19 bp, Homo sapiens
  siRNA target sequence for ABI-2 (NM_005759.3,491-509).
gaacgaccagttcgttata

SEQ ID NO: 21068 - DNA, 19 bp, Homo sapiens
  siRNA target sequence for ABI-2 (NM_005759.3,494-512).
cgaccagttcgttatatta

SEQ ID NO: 21069 - DNA, 19 bp, Homo sapiens
  siRNA target sequence for ABI-2 (NM_005759.3,519-537).
ctattgactatacaattct

SEQ ID NO: 21070 - DNA, 19 bp, Homo sapiens
  siRNA target sequence for ABI-2 (NM_005759.3,526-544).
ctatacaattctagatgat

SEQ ID NO: 21071 - DNA, 19 bp, Homo sapiens
  siRNA target sequence for ABI-2 (NM_005759.3,625-643).
ccctagtccccctatgtca

SEQ ID NO: 21072 - DNA, 19 bp, Homo sapiens
  siRNA target sequence for ABI-2 (NM_005759.3,696-714).
gtcctccagtggtaccaaa

SEQ ID NO: 21073 - DNA, 19 bp, Homo sapiens
  siRNA target sequence for ABI-2 (NM_005759.3,701-719).
ccagtggtaccaaatgatt

SEQ ID NO: 21074 - DNA, 19 bp, Homo sapiens
  siRNA target sequence for ABI-2 (NM_005759.3,702-720).
cagtggtaccaaatgatta

SEQ ID NO: 21075 - DNA, 19 bp, Homo sapiens
  siRNA target sequence for ABI-2 (NM_005759.3,706-724).
ggtaccaaatgattacgta

SEQ ID NO: 21076 - DNA, 19 bp, Homo sapiens
  siRNA target sequence for ABI-2 (NM_005759.3,725-743).
cctagcccaacccgtaata

SEQ ID NO: 21077 - DNA, 19 bp, Homo sapiens
  siRNA target sequence for ABI-2 (NM_005759.3,726-744).
ctagcccaacccgtaatat

SEQ ID NO: 21078 - DNA, 19 bp, Homo sapiens
  siRNA target sequence for ABI-2 (NM_005759.3,772-790).
gacagcttctgtgaatcaa

SEQ ID NO: 21079 - DNA, 19 bp, Homo sapiens
  siRNA target sequence for ABI-2 (NM_005759.3,776-794).
gcttctgtgaatcaaagaa

SEQ ID NO: 21080 - DNA, 19 bp, Homo sapiens
  siRNA target sequence for ABI-2 (NM_005759.3,777-795).
cttctgtgaatcaaagaaa

SEQ ID NO: 21081 - DNA, 19 bp, Homo sapiens
  siRNA target sequence for ABI-2 (NM_005759.3,933-951).
gtcatcctgtacagttcta

SEQ ID NO: 21082 - DNA, 19 bp, Homo sapiens
  siRNA target sequence for ABI-2 (NM_005759.3,944-962).
cagttctacagcatgaata

SEQ ID NO: 21083 - DNA, 19 bp, Homo sapiens
  siRNA target sequence for ABI-2 (NM_005759.3,997-1015).
gggctcgttgccctataga

SEQ ID NO: 21084 - DNA, 19 bp, Homo sapiens
  siRNA target sequence for ABI-2 (NM_005759.3,1041-1059).
caagccttcagaatcagat

SEQ ID NO: 21085 - DNA, 19 bp, Homo sapiens
  siRNA target sequence for ABI-2 (NM_005759.3,1057-1075).
gatgaatggaggacctttt

SEQ ID NO: 21086 - DNA, 19 bp, Homo sapiens
  siRNA target sequence for ABI-2 (NM_005759.3,1291-1309).
gtatagtgatccttatgct

SEQ ID NO: 21087 - DNA, 19 bp, Homo sapiens
  siRNA target sequence for ABI-2 (NM_005759.3,1326-1344).
gggctccacgttcttactt

SEQ ID NO: 21088 - DNA, 19 bp, Homo sapiens
  siRNA target sequence for ABI-2 (NM_005759.3,1331-1349).
ccacgttcttacttggaaa

SEQ ID NO: 21089 - DNA, 19 bp, Homo sapiens
  siRNA target sequence for ABI-2 (NM_005759.3,1332-1350).
cacgttcttacttggaaaa

SEQ ID NO: 21090 - DNA, 19 bp, Homo sapiens
  siRNA target sequence for ABI-2 (NM_005759.3,1446-1464).
gttggtatgagggagttat

SEQ ID NO: 21091 - DNA, 19 bp, Homo sapiens
  siRNA target sequence for ABI-2 (NM_005759.3,1502-1520).
gagtctatcatgcattatt

SEQ ID NO: 21092 - DNA, 19 bp, Homo sapiens
  siRNA target sequence for ABL1 (NM_005157.2,418-436).
ctcgtcctccagctgttat

SEQ ID NO: 21093 - DNA, 19 bp, Homo sapiens
  siRNA target sequence for ABL1 (NM_005157.2,420-438).
cgtcctccagctgttatct

SEQ ID NO: 21094 - DNA, 19 bp, Homo sapiens
  siRNA target sequence for ABL1 (NM_005157.2,457-475).
gccagtagcatctgacttt

SEQ ID NO: 21095 - DNA, 19 bp, Homo sapiens
  siRNA target sequence for ABL1 (NM_005157.2,581-599).
gtggccagtggagataaca

SEQ ID NO: 21096 - DNA, 19 bp, Homo sapiens
  siRNA target sequence for ABL1 (NM_005157.2,583-601).
ggccagtggagataacact

SEQ ID NO: 21097 - DNA, 19 bp, Homo sapiens
  siRNA target sequence for ABL1 (NM_005157.2,628-646).
ccgggtcttaggctataat

SEQ ID NO: 21098 - DNA, 19 bp, Homo sapiens
  siRNA target sequence for ABL1 (NM_005157.2,630-648).
gggtcttaggctataatca

SEQ ID NO: 21099 - DNA, 19 bp, Homo sapiens
  siRNA target sequence for ABL1 (NM_005157.2,634-652).
cttaggctataatcacaat

SEQ ID NO: 21100 - DNA, 19 bp, Homo sapiens
  siRNA target sequence for ABL1 (NM_005157.2,660-678).
ggtgtgaagcccaaaccaa

SEQ ID NO: 21101 - DNA, 19 bp, Homo sapiens
  siRNA target sequence for ABL1 (NM_005157.2,661-679).
gtgtgaagcccaaaccaaa

SEQ ID NO: 21102 - DNA, 19 bp, Homo sapiens
  siRNA target sequence for ABL1 (NM_005157.2,763-781).
ccgcaatgccgctgagtat

SEQ ID NO: 21103 - DNA, 19 bp, Homo sapiens
  siRNA target sequence for ABL1 (NM_005157.2,784-802).
gctgagcagcgggatcaat

SEQ ID NO: 21104 - DNA, 19 bp, Homo sapiens
  siRNA target sequence for ABL1 (NM_005157.2,850-868).
catctcgctgagatacgaa

SEQ ID NO: 21105 - DNA, 19 bp, Homo sapiens
  siRNA target sequence for ABL1 (NM_005157.2,866-884).
gaagggagggtgtaccatt

SEQ ID NO: 21106 - DNA, 19 bp, Homo sapiens
  siRNA target sequence for ABL1 (NM_005157.2,869-887).
gggagggtgtaccattaca

SEQ ID NO: 21107 - DNA, 19 bp, Homo sapiens
  siRNA target sequence for ABL1 (NM_005157.2,889-907).
gatcaacactgcttctgat

SEQ ID NO: 21108 - DNA, 19 bp, Homo sapiens
  siRNA target sequence for ABL1 (NM_005157.2,949-967).
ggccgagttggttcatcat

SEQ ID NO: 21109 - DNA, 19 bp, Homo sapiens
  siRNA target sequence for ABL1 (NM_005157.2,951-969).
ccgagttggttcatcatca

SEQ ID NO: 21110 - DNA, 19 bp, Homo sapiens
  siRNA target sequence for ABL1 (NM_005157.2,952-970).
cgagttggttcatcatcat

SEQ ID NO: 21111 - DNA, 19 bp, Homo sapiens
  siRNA target sequence for ABL1 (NM_005157.2,955-973).
gttggttcatcatcattca

SEQ ID NO: 21112 - DNA, 19 bp, Homo sapiens
  siRNA target sequence for ABL1 (NM_005157.2,991-1009).
catcaccacgctccattat

SEQ ID NO: 21113 - DNA, 19 bp, Homo sapiens
  siRNA target sequence for ABL1 (NM_005157.2,1024-1042).
caacaagcccactgtctat

SEQ ID NO: 21114 - DNA, 19 bp, Homo sapiens
  siRNA target sequence for ABL1 (NM_005157.2,1227-1245).
cagtcatgaaagagatcaa

SEQ ID NO: 21115 - DNA, 19 bp, Homo sapiens
  siRNA target sequence for ABL1 (NM_005157.2,1624-1642).
cgacgtctgggcatttgga

SEQ ID NO: 21116 - DNA, 19 bp, Homo sapiens
  siRNA target sequence for ABL1 (NM_005157.2,1633-1651).
ggcatttggagtattgctt

SEQ ID NO: 21117 - DNA, 19 bp, Homo sapiens
  siRNA target sequence for ABL1 (NM_005157.2,2073-2091).
cattgctccctcgaaaaga

SEQ ID NO: 21118 - DNA, 19 bp, Homo sapiens
  siRNA target sequence for ABL1 (NM_005157.2,2129-2147).
cgccttctccccaaagaca

SEQ ID NO: 21119 - DNA, 19 bp, Homo sapiens
  siRNA target sequence for ABL1 (NM_005157.2,2144-2162).
gacaaaaagaccaacttgt

SEQ ID NO: 21120 - DNA, 19 bp, Homo sapiens
  siRNA target sequence for ABL1 (NM_005157.2,2589-2607).
ccacgggaagacagtttga

SEQ ID NO: 21121 - DNA, 19 bp, Homo sapiens
  siRNA target sequence for ABL1 (NM_005157.2,2687-2705).
gtgacccgaggcacagtaa

SEQ ID NO: 21122 - DNA, 19 bp, Homo sapiens
  siRNA target sequence for ABL1 (NM_005157.2,2794-2812).
gcccaacctgactccaaaa

SEQ ID NO: 21123 - DNA, 19 bp, Homo sapiens
  siRNA target sequence for ABL1 (NM_005157.2,3370-3388).
cttcatccctctcatatca

SEQ ID NO: 21124 - DNA, 19 bp, Homo sapiens
  siRNA target sequence for ABL1 (NM_005157.2,3578-3596).
gattccatccagcaaatga

SEQ ID NO: 21125 - DNA, 19 bp, Homo sapiens
  siRNA target sequence for ABL1 (NM_005157.2,3716-3734).
ctcagttcggtgaaggaaa

SEQ ID NO: 21126 - DNA, 19 bp, Homo sapiens
  siRNA target sequence for ABL1 (NM_007313.1,110-128).
cacactgcaatgtttttgt

SEQ ID NO: 21127 - DNA, 19 bp, Homo sapiens
  siRNA target sequence for ACINUS (NM_014977.1,383-401).
gtaatcgaggggtagagta

SEQ ID NO: 21128 - DNA, 19 bp, Homo sapiens
  siRNA target sequence for ACINUS (NM_014977.1,720-738).
gagccagaacagtttcata

SEQ ID NO: 21129 - DNA, 19 bp, Homo sapiens
  siRNA target sequence for ACINUS (NM_014977.1,948-966).
ctcaatttctgaagagaaa

SEQ ID NO: 21130 - DNA, 19 bp, Homo sapiens
  siRNA target sequence for ACINUS (NM_014977.1,997-1015).
ggagaaagacgatcatcta

SEQ ID NO: 21131 - DNA, 19 bp, Homo sapiens
  siRNA target sequence for ACINUS (NM_014977.1,1107-1125).
ggtcagagcagatcgaaat

SEQ ID NO: 21132 - DNA, 19 bp, Homo sapiens
  siRNA target sequence for ACINUS (NM_014977.1,1112-1130).
gagcagatcgaaatttgaa

SEQ ID NO: 21133 - DNA, 19 bp, Homo sapiens
  siRNA target sequence for ACINUS (NM_014977.1,1114-1132).
gcagatcgaaatttgaaaa

SEQ ID NO: 21134 - DNA, 19 bp, Homo sapiens
  siRNA target sequence for ACINUS (NM_014977.1,1219-1237).
gcaccaatcctgaaagagt

SEQ ID NO: 21135 - DNA, 19 bp, Homo sapiens
  siRNA target sequence for ACINUS (NM_014977.1,1251-1269).
ggaagagatacctagagta

SEQ ID NO: 21136 - DNA, 19 bp, Homo sapiens
  siRNA target sequence for ACINUS (NM_014977.1,1252-1270).
gaagagatacctagagtaa

SEQ ID NO: 21137 - DNA, 19 bp, Homo sapiens
  siRNA target sequence for ACINUS (NM_014977.1,1454-1472).
cttcacaaggcttaaagga

SEQ ID NO: 21138 - DNA, 19 bp, Homo sapiens
  siRNA target sequence for ACINUS (NM_014977.1,1620-1638).
gctccatagcgaagaagaa

SEQ ID NO: 21139 - DNA, 19 bp, Homo sapiens
  siRNA target sequence for ACINUS (NM_014977.1,1621-1639).
ctccatagcgaagaagaaa

SEQ ID NO: 21140 - DNA, 19 bp, Homo sapiens
  siRNA target sequence for ACINUS (NM_014977.1,1703-1721).
ctgacaccagggagctatt

SEQ ID NO: 21141 - DNA, 19 bp, Homo sapiens
  siRNA target sequence for ACINUS (NM_014977.1,1707-1725).
caccagggagctattagta

SEQ ID NO: 21142 - DNA, 19 bp, Homo sapiens
  siRNA target sequence for ACINUS (NM_014977.1,1710-1728).
cagggagctattagtatct

SEQ ID NO: 21143 - DNA, 19 bp, Homo sapiens
  siRNA target sequence for ACINUS (NM_014977.1,1712-1730).
gggagctattagtatctca

SEQ ID NO: 21144 - DNA, 19 bp, Homo sapiens
  siRNA target sequence for ACINUS (NM_014977.1,1904-1922).
ctcagcccctccctctaaa

SEQ ID NO: 21145 - DNA, 19 bp, Homo sapiens
  siRNA target sequence for ACINUS (NM_014977.1,1910-1928).
ccctccctctaaaaattga

SEQ ID NO: 21146 - DNA, 19 bp, Homo sapiens
  siRNA target sequence for ACINUS (NM_014977.1,2020-2038).
ctcccaagccacagattga

SEQ ID NO: 21147 - DNA, 19 bp, Homo sapiens
  siRNA target sequence for ACINUS (NM_014977.1,2037-2055).
gaaacagtcagctgattca

SEQ ID NO: 21148 - DNA, 19 bp, Homo sapiens
  siRNA target sequence for ACINUS (NM_014977.1,2085-2103).
ctccagttctagatcaaga

SEQ ID NO: 21149 - DNA, 19 bp, Homo sapiens
  siRNA target sequence for ACINUS (NM_014977.1,2211-2229).
gatgggctccagatcaaca

SEQ ID NO: 21150 - DNA, 19 bp, Homo sapiens
  siRNA target sequence for ACINUS (NM_014977.1,2768-2786).
gctcgctgcccaaatcatt

SEQ ID NO: 21151 - DNA, 19 bp, Homo sapiens
  siRNA target sequence for ACINUS (NM_014977.1,2771-2789).
cgctgcccaaatcattcaa

SEQ ID NO: 21152 - DNA, 19 bp, Homo sapiens
  siRNA target sequence for ACINUS (NM_014977.1,2823-2841).
ggtgccagctggaaacagt

SEQ ID NO: 21153 - DNA, 19 bp, Homo sapiens
  siRNA target sequence for ACINUS (NM_014977.1,2919-2937).
cagtatcaccactgaatca

SEQ ID NO: 21154 - DNA, 19 bp, Homo sapiens
  siRNA target sequence for ACINUS (NM_014977.1,3061-3079).
gacaaggggctgaaaatat

SEQ ID NO: 21155 - DNA, 19 bp, Homo sapiens
  siRNA target sequence for ACINUS (NM_014977.1,3212-3230).
cacctgcagagcatgaagt

SEQ ID NO: 21156 - DNA, 19 bp, Homo sapiens
  siRNA target sequence for ACINUS (NM_014977.1,3240-3258).
gactttaggagatacctta

SEQ ID NO: 21157 - DNA, 19 bp, Homo sapiens
  siRNA target sequence for ACINUS (NM_014977.1,3255-3273).
cttaactcgacgttccatt

SEQ ID NO: 21158 - DNA, 19 bp, Homo sapiens
  siRNA target sequence for ACINUS (NM_014977.1,3282-3300).
gaagtccggagtttccatt

SEQ ID NO: 21159 - DNA, 19 bp, Homo sapiens
  siRNA target sequence for ACINUS (NM_014977.1,3287-3305).
ccggagtttccattaccat

SEQ ID NO: 21160 - DNA, 19 bp, Homo sapiens
  siRNA target sequence for ACINUS (NM_014977.1,3288-3306).
cggagtttccattaccatt

SEQ ID NO: 21161 - DNA, 19 bp, Homo sapiens
  siRNA target sequence for ACINUS (NM_014977.1,3384-3402).
ggtccgtcctttcacttta

SEQ ID NO: 21162 - DNA, 19 bp, Homo sapiens
  siRNA target sequence for ACINUS (NM_014977.1,3398-3416).
ctttaggccagctaaagga

SEQ ID NO: 21163 - DNA, 19 bp, Homo sapiens
  siRNA target sequence for ACINUS (NM_014977.1,3452-3470).
ccttctggattgacaagat

SEQ ID NO: 21164 - DNA, 19 bp, Homo sapiens
  siRNA target sequence for ACINUS (NM_014977.1,3463-3481).
gacaagatcaaatctcatt

SEQ ID NO: 21165 - DNA, 19 bp, Homo sapiens
  siRNA target sequence for ACINUS (NM_014977.1,3468-3486).
gatcaaatctcattgcttt

SEQ ID NO: 21166 - DNA, 19 bp, Homo sapiens
  siRNA target sequence for ACINUS (NM_014977.1,3529-3547).
gctctgcacggggtcaaat

SEQ ID NO: 21167 - DNA, 19 bp, Homo sapiens
  siRNA target sequence for ACINUS (NM_014977.1,3555-3573).
gtccaatcccaaattcctt

SEQ ID NO: 21168 - DNA, 19 bp, Homo sapiens
  siRNA target sequence for ACINUS (NM_014977.1,3591-3609).
gcaagatgagctggattat

SEQ ID NO: 21169 - DNA, 19 bp, Homo sapiens
  siRNA target sequence for ACINUS (NM_014977.1,3625-3643).
gtggaccgtccctctgaaa

SEQ ID NO: 21170 - DNA, 19 bp, Homo sapiens
  siRNA target sequence for ACINUS (NM_014977.1,3627-3645).
ggaccgtccctctgaaact

SEQ ID NO: 21171 - DNA, 19 bp, Homo sapiens
  siRNA target sequence for ACINUS (NM_014977.1,3628-3646).
gaccgtccctctgaaacta

SEQ ID NO: 21172 - DNA, 19 bp, Homo sapiens
  siRNA target sequence for ACINUS (NM_014977.1,3885-3903).
ggaacgtgcgaagtctaaa

SEQ ID NO: 21173 - DNA, 19 bp, Homo sapiens
  siRNA target sequence for ACINUS (NM_014977.1,3889-3907).
cgtgcgaagtctaaagaaa

SEQ ID NO: 21174 - DNA, 19 bp, Homo sapiens
  siRNA target sequence for ACINUS (NM_014977.1,3890-3908).
gtgcgaagtctaaagaaaa

SEQ ID NO: 21175 - DNA, 19 bp, Homo sapiens
  siRNA target sequence for ACINUS (NM_014977.1,4020-4038).
cagccagatcgttcagaaa

SEQ ID NO: 21176 - DNA, 19 bp, Homo sapiens
  siRNA target sequence for ACINUS (NM_014977.1,4022-4040).
gccagatcgttcagaaaga

SEQ ID NO: 21177 - DNA, 19 bp, Homo sapiens
  siRNA target sequence for ADPRT (NM_001618.2,164-182).
cggagtcttcggataagct

SEQ ID NO: 21178 - DNA, 19 bp, Homo sapiens
  siRNA target sequence for ADPRT (NM_001618.2,273-291).
ggtgcagtcgcccatgttt

SEQ ID NO: 21179 - DNA, 19 bp, Homo sapiens
  siRNA target sequence for ADPRT (NM_001618.2,276-294).
gcagtcgcccatgtttgat

SEQ ID NO: 21180 - DNA, 19 bp, Homo sapiens
  siRNA target sequence for ADPRT (NM_001618.2,281-299).
cgcccatgtttgatggaaa

SEQ ID NO: 21181 - DNA, 19 bp, Homo sapiens
  siRNA target sequence for ADPRT (NM_001618.2,447-465).
caaaggccaggatggaatt

SEQ ID NO: 21182 - DNA, 19 bp, Homo sapiens
  siRNA target sequence for ADPRT (NM_001618.2,451-469).
ggccaggatggaattggta

SEQ ID NO: 21183 - DNA, 19 bp, Homo sapiens
  siRNA target sequence for ADPRT (NM_001618.2,537-555).
ggggtgtatggagaagata

SEQ ID NO: 21184 - DNA, 19 bp, Homo sapiens
  siRNA target sequence for ADPRT (NM_001618.2,539-557).
ggtgtatggagaagataga

SEQ ID NO: 21185 - DNA, 19 bp, Homo sapiens
  siRNA target sequence for ADPRT (NM_001618.2,540-558).
gtgtatggagaagatagaa

SEQ ID NO: 21186 - DNA, 19 bp, Homo sapiens
  siRNA target sequence for ADPRT (NM_001618.2,634-652).
catccaggctgctttgtca

SEQ ID NO: 21187 - DNA, 19 bp, Homo sapiens
  siRNA target sequence for ADPRT (NM_001618.2,816-834).
ggcgaagaagaaatctaaa

SEQ ID NO: 21188 - DNA, 19 bp, Homo sapiens
  siRNA target sequence for ADPRT (NM_001618.2,1055-1073).
cgggtcagctggtcttcaa

SEQ ID NO: 21189 - DNA, 19 bp, Homo sapiens
  siRNA target sequence for ADPRT (NM_001618.2,1171-1189).
gaattccgagaaatctctt

SEQ ID NO: 21190 - DNA, 19 bp, Homo sapiens
  siRNA target sequence for ADPRT (NM_001618.2,1315-1333).
gcagataagccattatcca

SEQ ID NO: 21191 - DNA, 19 bp, Homo sapiens
  siRNA target sequence for ADPRT (NM_001618.2,1316-1334).
cagataagccattatccaa

SEQ ID NO: 21192 - DNA, 19 bp, Homo sapiens
  siRNA target sequence for ADPRT (NM_001618.2,1364-1382).
cccggaacaaggatgaagt

SEQ ID NO: 21193 - DNA, 19 bp, Homo sapiens
  siRNA target sequence for ADPRT (NM_001618.2,1657-1675).
ggggctgcgctctccaaaa

SEQ ID NO: 21194 - DNA, 19 bp, Homo sapiens
  siRNA target sequence for ADPRT (NM_001618.2,1658-1676).
gggctgcgctctccaaaaa

SEQ ID NO: 21195 - DNA, 19 bp, Homo sapiens
  siRNA target sequence for ADPRT (NM_001618.2,1696-1714).
gaggaaggtatcaacaaat

SEQ ID NO: 21196 - DNA, 19 bp, Homo sapiens
  siRNA target sequence for ADPRT (NM_001618.2,1832-1850).
gcctggtggacatcgttaa

SEQ ID NO: 21197 - DNA, 19 bp, Homo sapiens
  siRNA target sequence for ADPRT (NM_001618.2,1833-1851).
cctggtggacatcgttaaa

SEQ ID NO: 21198 - DNA, 19 bp, Homo sapiens
  siRNA target sequence for ADPRT (NM_001618.2,1836-1854).
ggtggacatcgttaaagga

SEQ ID NO: 21199 - DNA, 19 bp, Homo sapiens
  siRNA target sequence for ADPRT (NM_001618.2,1837-1855).
gtggacatcgttaaaggaa

SEQ ID NO: 21200 - DNA, 19 bp, Homo sapiens
  siRNA target sequence for ADPRT (NM_001618.2,1852-1870).
ggaaccaactcctactaca

SEQ ID NO: 21201 - DNA, 19 bp, Homo sapiens
  siRNA target sequence for ADPRT (NM_001618.2,1853-1871).
gaaccaactcctactacaa

SEQ ID NO: 21202 - DNA, 19 bp, Homo sapiens
  siRNA target sequence for ADPRT (NM_001618.2,1941-1959).
ggtgatcggtagcaacaaa

SEQ ID NO: 21203 - DNA, 19 bp, Homo sapiens
  siRNA target sequence for ADPRT (NM_001618.2,2031-2049).
cgcttggcactccaaaaat

SEQ ID NO: 21204 - DNA, 19 bp, Homo sapiens
  siRNA target sequence for ADPRT (NM_001618.2,2032-2050).
gcttggcactccaaaaatt

SEQ ID NO: 21205 - DNA, 19 bp, Homo sapiens
  siRNA target sequence for ADPRT (NM_001618.2,2170-2188).
gacctcatcaagatgatct

SEQ ID NO: 21206 - DNA, 19 bp, Homo sapiens
  siRNA target sequence for ADPRT (NM_001618.2,2343-2361).
gatcctggatctctcaaat

SEQ ID NO: 21207 - DNA, 19 bp, Homo sapiens
  siRNA target sequence for ADPRT (NM_001618.2,2403-2421).
gcctccgctcctgaacaat

SEQ ID NO: 21208 - DNA, 19 bp, Homo sapiens
  siRNA target sequence for ADPRT (NM_001618.2,2538-2556).
ctatgagaagctcaaaact

SEQ ID NO: 21209 - DNA, 19 bp, Homo sapiens
  siRNA target sequence for ADPRT (NM_001618.2,2568-2586).
ggttgacagagattctgaa

SEQ ID NO: 21210 - DNA, 19 bp, Homo sapiens
  siRNA target sequence for ADPRT (NM_001618.2,2642-2660).
cgtatgacttggaagtcat

SEQ ID NO: 21211 - DNA, 19 bp, Homo sapiens
  siRNA target sequence for ADPRT (NM_001618.2,2652-2670).
ggaagtcatcgatatcttt

SEQ ID NO: 21212 - DNA, 19 bp, Homo sapiens
  siRNA target sequence for ADPRT (NM_001618.2,2653-2671).
gaagtcatcgatatcttta

SEQ ID NO: 21213 - DNA, 19 bp, Homo sapiens
  siRNA target sequence for ADPRT (NM_001618.2,2687-2705).
gcgaatgccagcgttacaa

SEQ ID NO: 21214 - DNA, 19 bp, Homo sapiens
  siRNA target sequence for ADPRT (NM_001618.2,2699-2717).
gttacaagccctttaagca

SEQ ID NO: 21215 - DNA, 19 bp, Homo sapiens
  siRNA target sequence for ADPRT (NM_001618.2,2707-2725).
ccctttaagcagcttcata

SEQ ID NO: 21216 - DNA, 19 bp, Homo sapiens
  siRNA target sequence for ADPRT (NM_001618.2,2812-2830).
cccgtgacaggctacatgt

SEQ ID NO: 21217 - DNA, 19 bp, Homo sapiens
  siRNA target sequence for ADPRT (NM_001618.2,2813-2831).
ccgtgacaggctacatgtt

SEQ ID NO: 21218 - DNA, 19 bp, Homo sapiens
  siRNA target sequence for ADPRT (NM_001618.2,2829-2847).
gtttggtaaagggatctat

SEQ ID NO: 21219 - DNA, 19 bp, Homo sapiens
  siRNA target sequence for ADPRT (NM_001618.2,2897-2915).
gagacccaataggcttaat

SEQ ID NO: 21220 - DNA, 19 bp, Homo sapiens
  siRNA target sequence for ADPRT (NM_001618.2,3028-3046).
gatccttcagctaacatta

SEQ ID NO: 21221 - DNA, 19 bp, Homo sapiens
  siRNA target sequence for ADPRT (NM_001618.2,3070-3088).
cttgggaccgggatttcat

SEQ ID NO: 21222 - DNA, 19 bp, Homo sapiens
  siRNA target sequence for ADPRT (NM_001618.2,3100-3118).
gacacctctctactatata

SEQ ID NO: 21223 - DNA, 19 bp, Homo sapiens
  siRNA target sequence for ADPRT (NM_001618.2,3104-3122).
cctctctactatataacga

SEQ ID NO: 21224 - DNA, 19 bp, Homo sapiens
  siRNA target sequence for ADPRT (NM_001618.2,3120-3138).
cgagtacattgtctatgat

SEQ ID NO: 21225 - DNA, 19 bp, Homo sapiens
  siRNA target sequence for ADPRT (NM_001618.2,3121-3139).
gagtacattgtctatgata

SEQ ID NO: 21226 - DNA, 19 bp, Homo sapiens
  siRNA target sequence for ADPRT (NM_001618.2,3123-3141).
gtacattgtctatgatatt

SEQ ID NO: 21227 - DNA, 19 bp, Homo sapiens
  siRNA target sequence for ADPRT (NM_001618.2,3143-3161).
ctcaggtaaatctgaagta

SEQ ID NO: 21228 - DNA, 19 bp, Homo sapiens
  siRNA target sequence for ADPRT (NM_001618.2,3166-3184).
ctgaaactgaaattcaatt

SEQ ID NO: 21229 - DNA, 19 bp, Homo sapiens
  siRNA target sequence for ADPRTL2 (NM_005484.2,308-326).
ggggaaggctcatgtgtat

SEQ ID NO: 21230 - DNA, 19 bp, Homo sapiens
  siRNA target sequence for ADPRTL2 (NM_005484.2,311-329).
gaaggctcatgtgtattgt

SEQ ID NO: 21231 - DNA, 19 bp, Homo sapiens
  siRNA target sequence for ADPRTL2 (NM_005484.2,342-360).
gtctatgatgtcatgctaa

SEQ ID NO: 21232 - DNA, 19 bp, Homo sapiens
  siRNA target sequence for ADPRTL2 (NM_005484.2,348-366).
gatgtcatgctaaatcaga

SEQ ID NO: 21233 - DNA, 19 bp, Homo sapiens
  siRNA target sequence for ADPRTL2 (NM_005484.2,420-438).
gatgcccagaggaacttca

SEQ ID NO: 21234 - DNA, 19 bp, Homo sapiens
  siRNA target sequence for ADPRTL2 (NM_005484.2,482-500).
cagcctggtggcttgttca

SEQ ID NO: 21235 - DNA, 19 bp, Homo sapiens
  siRNA target sequence for ADPRTL2 (NM_005484.2,492-510).
gcttgttcaggcaatctca

SEQ ID NO: 21236 - DNA, 19 bp, Homo sapiens
  siRNA target sequence for ADPRTL2 (NM_005484.2,493-511).
cttgttcaggcaatctcaa

SEQ ID NO: 21237 - DNA, 19 bp, Homo sapiens
  siRNA target sequence for ADPRTL2 (NM_005484.2,496-514).
gttcaggcaatctcaacaa

SEQ ID NO: 21238 - DNA, 19 bp, Homo sapiens
  siRNA target sequence for ADPRTL2 (NM_005484.2,543-561).
cttgacaaaacgaaaaaca

SEQ ID NO: 21239 - DNA, 19 bp, Homo sapiens
  siRNA target sequence for ADPRTL2 (NM_005484.2,570-588).
gatcgagaaaagtttgaga

SEQ ID NO: 21240 - DNA, 19 bp, Homo sapiens
  siRNA target sequence for ADPRTL2 (NM_005484.2,590-608).
ggtgcctggaaaatatgat

SEQ ID NO: 21241 - DNA, 19 bp, Homo sapiens
  siRNA target sequence for ADPRTL2 (NM_005484.2,591-609).
gtgcctggaaaatatgata

SEQ ID NO: 21242 - DNA, 19 bp, Homo sapiens
  siRNA target sequence for ADPRTL2 (NM_005484.2,620-638).
ggactatgccaccaatact

SEQ ID NO: 21243 - DNA, 19 bp, Homo sapiens
  siRNA target sequence for ADPRTL2 (NM_005484.2,691-709).
cagagtcacagctagatct

SEQ ID NO: 21244 - DNA, 19 bp, Homo sapiens
  siRNA target sequence for ADPRTL2 (NM_005484.2,708-726).
cttcgggtacaggagttaa

SEQ ID NO: 21245 - DNA, 19 bp, Homo sapiens
  siRNA target sequence for ADPRTL2 (NM_005484.2,711-729).
cgggtacaggagttaataa

SEQ ID NO: 21246 - DNA, 19 bp, Homo sapiens
  siRNA target sequence for ADPRTL2 (NM_005484.2,712-730).
gggtacaggagttaataaa

SEQ ID NO: 21247 - DNA, 19 bp, Homo sapiens
  siRNA target sequence for ADPRTL2 (NM_005484.2,714-732).
gtacaggagttaataaagt

SEQ ID NO: 21248 - DNA, 19 bp, Homo sapiens
  siRNA target sequence for ADPRTL2 (NM_005484.2,720-738).
gagttaataaagttgatct

SEQ ID NO: 21249 - DNA, 19 bp, Homo sapiens
  siRNA target sequence for ADPRTL2 (NM_005484.2,776-794).
gaagtataataccaagaaa

SEQ ID NO: 21250 - DNA, 19 bp, Homo sapiens
  siRNA target sequence for ADPRTL2 (NM_005484.2,831-849).
gcaggttaccagtctctta

SEQ ID NO: 21251 - DNA, 19 bp, Homo sapiens
  siRNA target sequence for ADPRTL2 (NM_005484.2,832-850).
caggttaccagtctcttaa

SEQ ID NO: 21252 - DNA, 19 bp, Homo sapiens
  siRNA target sequence for ADPRTL2 (NM_005484.2,834-852).
ggttaccagtctcttaaga

SEQ ID NO: 21253 - DNA, 19 bp, Homo sapiens
  siRNA target sequence for ADPRTL2 (NM_005484.2,922-940).
ccaggattccgcatgactt

SEQ ID NO: 21254 - DNA, 19 bp, Homo sapiens
  siRNA target sequence for ADPRTL2 (NM_005484.2,1014-1032).
ggagacattgaaattgcta

SEQ ID NO: 21255 - DNA, 19 bp, Homo sapiens
  siRNA target sequence for ADPRTL2 (NM_005484.2,1029-1047).
gctattaagctggtgaaaa

SEQ ID NO: 21256 - DNA, 19 bp, Homo sapiens
  siRNA target sequence for ADPRTL2 (NM_005484.2,1070-1088).
cccattggaccaacactat

SEQ ID NO: 21257 - DNA, 19 bp, Homo sapiens
  siRNA target sequence for ADPRTL2 (NM_005484.2,1071-1089).
ccattggaccaacactata

SEQ ID NO: 21258 - DNA, 19 bp, Homo sapiens
  siRNA target sequence for ADPRTL2 (NM_005484.2,1079-1097).
ccaacactatagaaaccta

SEQ ID NO: 21259 - DNA, 19 bp, Homo sapiens
  siRNA target sequence for ADPRTL2 (NM_005484.2,1113-1131).
ccccttgaccatgaaagtt

SEQ ID NO: 21260 - DNA, 19 bp, Homo sapiens
  siRNA target sequence for ADPRTL2 (NM_005484.2,1176-1194).
cccacacacagcgactata

SEQ ID NO: 21261 - DNA, 19 bp, Homo sapiens
  siRNA target sequence for ADPRTL2 (NM_005484.2,1180-1198).
cacacagcgactataccat

SEQ ID NO: 21262 - DNA, 19 bp, Homo sapiens
  siRNA target sequence for ADPRTL2 (NM_005484.2,1284-1302).
catggttccaggatgagta

SEQ ID NO: 21263 - DNA, 19 bp, Homo sapiens
  siRNA target sequence for ADPRTL2 (NM_005484.2,1287-1305).
ggttccaggatgagtaact

SEQ ID NO: 21264 - DNA, 19 bp, Homo sapiens
  siRNA target sequence for ADPRTL2 (NM_005484.2,1300-1318).
gtaactgggtgggaatctt

SEQ ID NO: 21265 - DNA, 19 bp, Homo sapiens
  siRNA target sequence for ADPRTL2 (NM_005484.2,1319-1337).
gagccatgggcttcgaatt

SEQ ID NO: 21266 - DNA, 19 bp, Homo sapiens
  siRNA target sequence for ADPRTL2 (NM_005484.2,1354-1372).
ccatcacaggttacatgtt

SEQ ID NO: 21267 - DNA, 19 bp, Homo sapiens
  siRNA target sequence for ADPRTL2 (NM_005484.2,1355-1373).
catcacaggttacatgttt

SEQ ID NO: 21268 - DNA, 19 bp, Homo sapiens
  siRNA target sequence for ADPRTL2 (NM_005484.2,1402-1420).
cttccaagagtgccaatta

SEQ ID NO: 21269 - DNA, 19 bp, Homo sapiens
  siRNA target sequence for ADPRTL2 (NM_005484.2,1428-1446).
gcctctcgcctaaagaata

SEQ ID NO: 21270 - DNA, 19 bp, Homo sapiens
  siRNA target sequence for ADPRTL2 (NM_005484.2,1430-1448).
ctctcgcctaaagaataca

SEQ ID NO: 21271 - DNA, 19 bp, Homo sapiens
  siRNA target sequence for ADPRTL2 (NM_005484.2,1474-1492).
ctctaggtcagtgtaatga

SEQ ID NO: 21272 - DNA, 19 bp, Homo sapiens
  siRNA target sequence for ADPRTL2 (NM_005484.2,1480-1498).
gtcagtgtaatgaactact

SEQ ID NO: 21273 - DNA, 19 bp, Homo sapiens
  siRNA target sequence for ADPRTL2 (NM_005484.2,1494-1512).
ctactagaggccaatccta

SEQ ID NO: 21274 - DNA, 19 bp, Homo sapiens
  siRNA target sequence for ADPRTL2 (NM_005484.2,1601-1619).
gagtacagtgccattagga

SEQ ID NO: 21275 - DNA, 19 bp, Homo sapiens
  siRNA target sequence for ADPRTL2 (NM_005484.2,1653-1671).
ggttataccctcaactaca

SEQ ID NO: 21276 - DNA, 19 bp, Homo sapiens
  siRNA target sequence for ADPRTL2 (NM_005484.2,1661-1679).
cctcaactacaatgaatat

SEQ ID NO: 21277 - DNA, 19 bp, Homo sapiens
  siRNA target sequence for ADPRTL2 (NM_005484.2,1667-1685).
ctacaatgaatatattgta

SEQ ID NO: 21278 - DNA, 19 bp, Homo sapiens
  siRNA target sequence for ADPRTL2 (NM_005484.2,1701-1719).
gtccgtatgcggtaccttt

SEQ ID NO: 21279 - DNA, 19 bp, Homo sapiens
  siRNA target sequence for ADPRTL2 (NM_005484.2,1703-1721).
ccgtatgcggtacctttta

SEQ ID NO: 21280 - DNA, 19 bp, Homo sapiens
  siRNA target sequence for ADPRTL2 (NM_005484.2,1704-1722).
cgtatgcggtaccttttaa

SEQ ID NO: 21281 - DNA, 19 bp, Homo sapiens
  siRNA target sequence for ADPRTL2 (NM_005484.2,1709-1727).
gcggtaccttttaaaggtt

SEQ ID NO: 21282 - DNA, 19 bp, Homo sapiens
  siRNA target sequence for AKAP8 (NM_005858.2,139-157).
ggccagctggcaaggttat

SEQ ID NO: 21283 - DNA, 19 bp, Homo sapiens
  siRNA target sequence for AKAP8 (NM_005858.2,141-159).
ccagctggcaaggttatga

SEQ ID NO: 21284 - DNA, 19 bp, Homo sapiens
  siRNA target sequence for AKAP8 (NM_005858.2,308-326).
gagccatgcaccgacaatt

SEQ ID NO: 21285 - DNA, 19 bp, Homo sapiens
  siRNA target sequence for AKAP8 (NM_005858.2,449-467).
ccgttcgagtcctatgact

SEQ ID NO: 21286 - DNA, 19 bp, Homo sapiens
  siRNA target sequence for AKAP8 (NM_005858.2,975-993).
ggaagcagttccaacttta

SEQ ID NO: 21287 - DNA, 19 bp, Homo sapiens
  siRNA target sequence for AKAP8 (NM_005858.2,1207-1225).
ccgtgcagccgacagaatt

SEQ ID NO: 21288 - DNA, 19 bp, Homo sapiens
  siRNA target sequence for AKAP8 (NM_005858.2,1209-1227).
gtgcagccgacagaattca

SEQ ID NO: 21289 - DNA, 19 bp, Homo sapiens
  siRNA target sequence for AKAP8 (NM_005858.2,1211-1229).
gcagccgacagaattcagt

SEQ ID NO: 21290 - DNA, 19 bp, Homo sapiens
  siRNA target sequence for AKAP8 (NM_005858.2,1212-1230).
cagccgacagaattcagtt

SEQ ID NO: 21291 - DNA, 19 bp, Homo sapiens
  siRNA target sequence for AKAP8 (NM_005858.2,1226-1244).
cagtttgcctgttctgtat

SEQ ID NO: 21292 - DNA, 19 bp, Homo sapiens
  siRNA target sequence for AKAP8 (NM_005858.2,1246-1264).
caagttccgtagctttgat

SEQ ID NO: 21293 - DNA, 19 bp, Homo sapiens
  siRNA target sequence for AKAP8 (NM_005858.2,1257-1275).
gctttgatgacgaagagat

SEQ ID NO: 21294 - DNA, 19 bp, Homo sapiens
  siRNA target sequence for AKAP8 (NM_005858.2,1307-1325).
gagaccctgcggttcataa

SEQ ID NO: 21295 - DNA, 19 bp, Homo sapiens
  siRNA target sequence for AKAP8 (NM_005858.2,1354-1372).
gttcctccaggaatacatt

SEQ ID NO: 21296 - DNA, 19 bp, Homo sapiens
  siRNA target sequence for AKAP8 (NM_005858.2,1505-1523).
ctggcctgcgacatgctaa

SEQ ID NO: 21297 - DNA, 19 bp, Homo sapiens
  siRNA target sequence for AKAP8 (NM_005858.2,1507-1525).
ggcctgcgacatgctaatt

SEQ ID NO: 21298 - DNA, 19 bp, Homo sapiens
  siRNA target sequence for AKAP8 (NM_005858.2,1510-1528).
ctgcgacatgctaattcct

SEQ ID NO: 21299 - DNA, 19 bp, Homo sapiens
  siRNA target sequence for AKAP8 (NM_005858.2,1563-1581).
ccgtggaccacaatcacaa

SEQ ID NO: 21300 - DNA, 19 bp, Homo sapiens
  siRNA target sequence for AKAP8 (NM_005858.2,1693-1711).
ccctttcaccagtgaaact

SEQ ID NO: 21301 - DNA, 19 bp, Homo sapiens
  siRNA target sequence for AKAP8 (NM_005858.2,1695-1713).
ctttcaccagtgaaactgt

SEQ ID NO: 21302 - DNA, 19 bp, Homo sapiens
  siRNA target sequence for AKAP8 (NM_005858.2,1699-1717).
caccagtgaaactgttgat

SEQ ID NO: 21303 - DNA, 19 bp, Homo sapiens
  siRNA target sequence for AKAP8 (NM_005858.2,1953-1971).
gtggaacggcacatgagaa

SEQ ID NO: 21304 - DNA, 19 bp, Homo sapiens
  siRNA target sequence for AKAP8 (NM_005858.2,2120-2138).
gacgctgttcccacagaat

SEQ ID NO: 21305 - DNA, 19 bp, Homo sapiens
  siRNA target sequence for ALF (NM_006872.2,124-142).
gaaggagttcggaatctat

SEQ ID NO: 21306 - DNA, 19 bp, Homo sapiens
  siRNA target sequence for ALF (NM_006872.2,154-172).
ggtatagaggaacaagttt

SEQ ID NO: 21307 - DNA, 19 bp, Homo sapiens
  siRNA target sequence for ALF (NM_006872.2,155-173).
gtatagaggaacaagtttt

SEQ ID NO: 21308 - DNA, 19 bp, Homo sapiens
  siRNA target sequence for ALF (NM_006872.2,190-208).
ctctgggaaaccaaggttt

SEQ ID NO: 21309 - DNA, 19 bp, Homo sapiens
  siRNA target sequence for ALF (NM_006872.2,204-222).
ggttttgcagtctaaagca

SEQ ID NO: 21310 - DNA, 19 bp, Homo sapiens
  siRNA target sequence for ALF (NM_006872.2,220-238).
gcaacagaagacttcttca

SEQ ID NO: 21311 - DNA, 19 bp, Homo sapiens
  siRNA target sequence for ALF (NM_006872.2,249-267).
ccaatcacctctgtttact

SEQ ID NO: 21312 - DNA, 19 bp, Homo sapiens
  siRNA target sequence for ALF (NM_006872.2,285-303).
cttgcaccaaacattgcaa

SEQ ID NO: 21313 - DNA, 19 bp, Homo sapiens
  siRNA target sequence for ALF (NM_006872.2,305-323).
cgtcaacagcatcattagt

SEQ ID NO: 21314 - DNA, 19 bp, Homo sapiens
  siRNA target sequence for ALF (NM_006872.2,361-379).
gcagaactgggcacttcaa

SEQ ID NO: 21315 - DNA, 19 bp, Homo sapiens
  siRNA target sequence for ALF (NM_006872.2,362-380).
cagaactgggcacttcaaa

SEQ ID NO: 21316 - DNA, 19 bp, Homo sapiens
  siRNA target sequence for ALF (NM_006872.2,364-382).
gaactgggcacttcaaact

SEQ ID NO: 21317 - DNA, 19 bp, Homo sapiens
  siRNA target sequence for ALF (NM_006872.2,435-453).
gacactacagactgtatct

SEQ ID NO: 21318 - DNA, 19 bp, Homo sapiens
  siRNA target sequence for ALF (NM_006872.2,446-464).
ctgtatctggtcaccttta

SEQ ID NO: 21319 - DNA, 19 bp, Homo sapiens
  siRNA target sequence for ALF (NM_006872.2,448-466).
gtatctggtcacctttata

SEQ ID NO: 21320 - DNA, 19 bp, Homo sapiens
  siRNA target sequence for ALF (NM_006872.2,558-576).
gccttcagtaatacaaact

SEQ ID NO: 21321 - DNA, 19 bp, Homo sapiens
  siRNA target sequence for ALF (NM_006872.2,600-618).
gtctcttcaagcaactact

SEQ ID NO: 21322 - DNA, 19 bp, Homo sapiens
  siRNA target sequence for ALF (NM_006872.2,667-685).
ccttctgggccagtagata

SEQ ID NO: 21323 - DNA, 19 bp, Homo sapiens
  siRNA target sequence for ALF (NM_006872.2,676-694).
ccagtagataggaaacact

SEQ ID NO: 21324 - DNA, 19 bp, Homo sapiens
  siRNA target sequence for ALF (NM_006872.2,677-695).
cagtagataggaaacactt

SEQ ID NO: 21325 - DNA, 19 bp, Homo sapiens
  siRNA target sequence for ALF (NM_006872.2,705-723).
caccagtgatatacttgta

SEQ ID NO: 21326 - DNA, 19 bp, Homo sapiens
  siRNA target sequence for ALF (NM_006872.2,748-766).
gtgcctgaagctttgttgt

SEQ ID NO: 21327 - DNA, 19 bp, Homo sapiens
  siRNA target sequence for ALF (NM_006872.2,792-810).
cagtcttccaggtgttgta

SEQ ID NO: 21328 - DNA, 19 bp, Homo sapiens
  siRNA target sequence for ALF (NM_006872.2,794-812).
gtcttccaggtgttgtatt

SEQ ID NO: 21329 - DNA, 19 bp, Homo sapiens
  siRNA target sequence for ALF (NM_006872.2,818-836).
cacaggtctctcaaacaaa

SEQ ID NO: 21330 - DNA, 19 bp, Homo sapiens
  siRNA target sequence for ALF (NM_006872.2,822-840).
ggtctctcaaacaaattct

SEQ ID NO: 21331 - DNA, 19 bp, Homo sapiens
  siRNA target sequence for ALF (NM_006872.2,823-841).
gtctctcaaacaaattcta

SEQ ID NO: 21332 - DNA, 19 bp, Homo sapiens
  siRNA target sequence for ALF (NM_006872.2,866-884).
cagctagcatggctcaaaa

SEQ ID NO: 21333 - DNA, 19 bp, Homo sapiens
  siRNA target sequence for ALF (NM_006872.2,869-887).
ctagcatggctcaaaatct

SEQ ID NO: 21334 - DNA, 19 bp, Homo sapiens
  siRNA target sequence for ALF (NM_006872.2,928-946).
caccagcacgtgactgata

SEQ ID NO: 21335 - DNA, 19 bp, Homo sapiens
  siRNA target sequence for ALF (NM_006872.2,930-948).
ccagcacgtgactgatatt

SEQ ID NO: 21336 - DNA, 19 bp, Homo sapiens
  siRNA target sequence for ALF (NM_006872.2,980-998).
gatgtgattctgtaaagca

SEQ ID NO: 21337 - DNA, 19 bp, Homo sapiens
  siRNA target sequence for ALF (NM_006872.2,1055-1073).
ctcaggtggatttaagcat

SEQ ID NO: 21338 - DNA, 19 bp, Homo sapiens
  siRNA target sequence for ALF (NM_006872.2,1071-1089).
cattcgggttactgatgat

SEQ ID NO: 21339 - DNA, 19 bp, Homo sapiens
  siRNA target sequence for ALF (NM_006872.2,1114-1132).
gatggaagcggtgatacat

SEQ ID NO: 21340 - DNA, 19 bp, Homo sapiens
  siRNA target sequence for ALF (NM_006872.2,1256-1274).
ccacaaacagtagtgataa

SEQ ID NO: 21341 - DNA, 19 bp, Homo sapiens
  siRNA target sequence for ALF (NM_006872.2,1276-1294).
gaagaccctcaagtaaaca

SEQ ID NO: 21342 - DNA, 19 bp, Homo sapiens
  siRNA target sequence for ALF (NM_006872.2,1281-1299).
ccctcaagtaaacattgta

SEQ ID NO: 21343 - DNA, 19 bp, Homo sapiens
  siRNA target sequence for ALF (NM_006872.2,1353-1371).
cctgtttgacacggataat

SEQ ID NO: 21344 - DNA, 19 bp, Homo sapiens
  siRNA target sequence for ALF (NM_006872.2,1380-1398).
ctgtcagtatgataagatt

SEQ ID NO: 21345 - DNA, 19 bp, Homo sapiens
  siRNA target sequence for ALF (NM_006872.2,1382-1400).
gtcagtatgataagattca

SEQ ID NO: 21346 - DNA, 19 bp, Homo sapiens
  siRNA target sequence for ALF (NM_006872.2,1402-1420).
cgaagcaagaacaaatgga

SEQ ID NO: 21347 - DNA, 19 bp, Homo sapiens
  siRNA target sequence for ALF (NM_006872.2,1460-1478).
gagactatgtatttgcaaa

SEQ ID NO: 21348 - DNA, 19 bp, Homo sapiens
  siRNA target sequence for ALF (NM_172196.1,1402-1420).
ccaagaaggacatcgttta

SEQ ID NO: 21349 - DNA, 19 bp, Homo sapiens
  siRNA target sequence for ALG1 (NM_019109.2,342-360).
gtacttcaggctatgtact

SEQ ID NO: 21350 - DNA, 19 bp, Homo sapiens
  siRNA target sequence for ALG1 (NM_019109.2,466-484).
gaagcaagctcgtcattga

SEQ ID NO: 21351 - DNA, 19 bp, Homo sapiens
  siRNA target sequence for ALG1 (NM_019109.2,479-497).
cattgactggcacaactat

SEQ ID NO: 21352 - DNA, 19 bp, Homo sapiens
  siRNA target sequence for ALG1 (NM_019109.2,553-571).
ccaagtggtacgagaagtt

SEQ ID NO: 21353 - DNA, 19 bp, Homo sapiens
  siRNA target sequence for ALG1 (NM_019109.2,557-575).
gtggtacgagaagttcttt

SEQ ID NO: 21354 - DNA, 19 bp, Homo sapiens
  siRNA target sequence for ALG1 (NM_019109.2,593-611).
gaacctgtgtgttaccaat

SEQ ID NO: 21355 - DNA, 19 bp, Homo sapiens
  siRNA target sequence for ALG1 (NM_019109.2,597-615).
ctgtgtgttaccaatgcta

SEQ ID NO: 21356 - DNA, 19 bp, Homo sapiens
  siRNA target sequence for ALG1 (NM_019109.2,621-639).
gaagacctggcggataact

SEQ ID NO: 21357 - DNA, 19 bp, Homo sapiens
  siRNA target sequence for ALTE (NM_004729.1,688-706).
cccagccggaagtacatct

SEQ ID NO: 21358 - DNA, 19 bp, Homo sapiens
  siRNA target sequence for ALTE (NM_004729.1,1148-1166).
gcaaactggtggagtactt

SEQ ID NO: 21359 - DNA, 19 bp, Homo sapiens
  siRNA target sequence for ALTE (NM_004729.1,1586-1604).
cgcccgagatcgacatgtt

SEQ ID NO: 21360 - DNA, 19 bp, Homo sapiens
  siRNA target sequence for ALTE (NM_004729.1,1587-1605).
gcccgagatcgacatgttt

SEQ ID NO: 21361 - DNA, 19 bp, Homo sapiens
  siRNA target sequence for ALTE (NM_004729.1,1589-1607).
ccgagatcgacatgtttct

SEQ ID NO: 21362 - DNA, 19 bp, Homo sapiens
  siRNA target sequence for ALTE (NM_004729.1,1591-1609).
gagatcgacatgtttctca

SEQ ID NO: 21363 - DNA, 19 bp, Homo sapiens
  siRNA target sequence for ANKRD1 (NM_014391.2,414-432).
ggggagcaacagtggaaaa

SEQ ID NO: 21364 - DNA, 19 bp, Homo sapiens
  siRNA target sequence for ANKRD1 (NM_014391.2,484-502).
caaagcttgaaaatttaga

SEQ ID NO: 21365 - DNA, 19 bp, Homo sapiens
  siRNA target sequence for ANKRD1 (NM_014391.2,606-624).
gatgtgcctacgtttctga

SEQ ID NO: 21366 - DNA, 19 bp, Homo sapiens
  siRNA target sequence for ANKRD1 (NM_014391.2,674-692).
caagaacaatccagatgtt

SEQ ID NO: 21367 - DNA, 19 bp, Homo sapiens
  siRNA target sequence for ANKRD1 (NM_014391.2,746-764).
ggcaattgtggagaagtta

SEQ ID NO: 21368 - DNA, 19 bp, Homo sapiens
  siRNA target sequence for ANKRD1 (NM_014391.2,748-766).
caattgtggagaagttaat

SEQ ID NO: 21369 - DNA, 19 bp, Homo sapiens
  siRNA target sequence for ANKRD1 (NM_014391.2,771-789).
gctggagcccagatcgaat

SEQ ID NO: 21370 - DNA, 19 bp, Homo sapiens
  siRNA target sequence for ANKRD1 (NM_014391.2,772-790).
ctggagcccagatcgaatt

SEQ ID NO: 21371 - DNA, 19 bp, Homo sapiens
  siRNA target sequence for ANKRD1 (NM_014391.2,785-803).
cgaattccgtgatatgctt

SEQ ID NO: 21372 - DNA, 19 bp, Homo sapiens
  siRNA target sequence for ANKRD1 (NM_014391.2,945-963).
gagtgcgcggagcatctta

SEQ ID NO: 21373 - DNA, 19 bp, Homo sapiens
  siRNA target sequence for ANKRD1 (NM_014391.2,1030-1048).
gactgaaccgctataagat

SEQ ID NO: 21374 - DNA, 19 bp, Homo sapiens
  siRNA target sequence for ANKRD1 (NM_014391.2,1032-1050).
ctgaaccgctataagatga

SEQ ID NO: 21375 - DNA, 19 bp, Homo sapiens
  siRNA target sequence for ANKRD1 (NM_014391.2,1052-1070).
ccgactcctgattatgtat

SEQ ID NO: 21376 - DNA, 19 bp, Homo sapiens
  siRNA target sequence for APEX1 (NM_001641.2,543-561).
gggcttcgagcctggatta

SEQ ID NO: 21377 - DNA, 19 bp, Homo sapiens
  siRNA target sequence for APEX1 (NM_001641.2,544-562).
ggcttcgagcctggattaa

SEQ ID NO: 21378 - DNA, 19 bp, Homo sapiens
  siRNA target sequence for APEX1 (NM_001641.2,571-589).
gattagattgggtaaagga

SEQ ID NO: 21379 - DNA, 19 bp, Homo sapiens
  siRNA target sequence for APEX1 (NM_001641.2,587-605).
ggaagaagccccagatata

SEQ ID NO: 21380 - DNA, 19 bp, Homo sapiens
  siRNA target sequence for APEX1 (NM_001641.2,591-609).
gaagccccagatatactgt

SEQ ID NO: 21381 - DNA, 19 bp, Homo sapiens
  siRNA target sequence for APEX1 (NM_001641.2,612-630).
cttcaagagaccaaatgtt

SEQ ID NO: 21382 - DNA, 19 bp, Homo sapiens
  siRNA target sequence for APEX1 (NM_001641.2,665-683).
gcctggactctctcatcaa

SEQ ID NO: 21383 - DNA, 19 bp, Homo sapiens
  siRNA target sequence for APEX1 (NM_001641.2,667-685).
ctggactctctcatcaata

SEQ ID NO: 21384 - DNA, 19 bp, Homo sapiens
  siRNA target sequence for APEX1 (NM_001641.2,669-687).
ggactctctcatcaatact

SEQ ID NO: 21385 - DNA, 19 bp, Homo sapiens
  siRNA target sequence for APEX1 (NM_001641.2,739-757).
gccagtgcccactcaaagt

SEQ ID NO: 21386 - DNA, 19 bp, Homo sapiens
  siRNA target sequence for APEX1 (NM_001641.2,741-759).
cagtgcccactcaaagttt

SEQ ID NO: 21387 - DNA, 19 bp, Homo sapiens
  siRNA target sequence for APEX1 (NM_001641.2,743-761).
gtgcccactcaaagtttct

SEQ ID NO: 21388 - DNA, 19 bp, Homo sapiens
  siRNA target sequence for APEX1 (NM_001641.2,800-818).
ggtgattgtggctgaattt

SEQ ID NO: 21389 - DNA, 19 bp, Homo sapiens
  siRNA target sequence for APEX1 (NM_001641.2,830-848).
gctggtaacagcatatgta

SEQ ID NO: 21390 - DNA, 19 bp, Homo sapiens
  siRNA target sequence for APEX1 (NM_001641.2,965-983).
caatgtggcacatgaagaa

SEQ ID NO: 21391 - DNA, 19 bp, Homo sapiens
  siRNA target sequence for APEX1 (NM_001641.2,1043-1061).
ccaaggcttcggggaatta

SEQ ID NO: 21392 - DNA, 19 bp, Homo sapiens
  siRNA target sequence for APEX1 (NM_001641.2,1074-1092).
ccactggctgacagcttta

SEQ ID NO: 21393 - DNA, 19 bp, Homo sapiens
  siRNA target sequence for APEX1 (NM_001641.2,1126-1144).
ccttttggacttatatgat

SEQ ID NO: 21394 - DNA, 19 bp, Homo sapiens
  siRNA target sequence for APEX1 (NM_001641.2,1145-1163).
gaatgctcgatccaagaat

SEQ ID NO: 21395 - DNA, 19 bp, Homo sapiens
  siRNA target sequence for APEX1 (NM_001641.2,1164-1182).
gttggttggcgccttgatt

SEQ ID NO: 21396 - DNA, 19 bp, Homo sapiens
  siRNA target sequence for APEX1 (NM_001641.2,1167-1185).
ggttggcgccttgattact

SEQ ID NO: 21397 - DNA, 19 bp, Homo sapiens
  siRNA target sequence for APEX1 (NM_001641.2,1168-1186).
gttggcgccttgattactt

SEQ ID NO: 21398 - DNA, 19 bp, Homo sapiens
  siRNA target sequence for APEX1 (NM_001641.2,1171-1189).
ggcgccttgattacttttt

SEQ ID NO: 21399 - DNA, 19 bp, Homo sapiens
  siRNA target sequence for APEX1 (NM_001641.2,1190-1208).
gttgtcccactctctgtta

SEQ ID NO: 21400 - DNA, 19 bp, Homo sapiens
  siRNA target sequence for APLP2 (NM_001642.1,189-207).
caatgccggaacaggattt

SEQ ID NO: 21401 - DNA, 19 bp, Homo sapiens
  siRNA target sequence for APLP2 (NM_001642.1,209-227).
ctgttgctgagcctcaaat

SEQ ID NO: 21402 - DNA, 19 bp, Homo sapiens
  siRNA target sequence for APLP2 (NM_001642.1,358-376).
ccagagctacagatcacaa

SEQ ID NO: 21403 - DNA, 19 bp, Homo sapiens
  siRNA target sequence for APLP2 (NM_001642.1,388-406).
gcaaaccagcgggttagta

SEQ ID NO: 21404 - DNA, 19 bp, Homo sapiens
  siRNA target sequence for APLP2 (NM_001642.1,389-407).
caaaccagcgggttagtat

SEQ ID NO: 21405 - DNA, 19 bp, Homo sapiens
  siRNA target sequence for APLP2 (NM_001642.1,394-412).
cagcgggttagtattgaca

SEQ ID NO: 21406 - DNA, 19 bp, Homo sapiens
  siRNA target sequence for APLP2 (NM_001642.1,416-434).
ggtgccggagggacaaaaa

SEQ ID NO: 21407 - DNA, 19 bp, Homo sapiens
  siRNA target sequence for APLP2 (NM_001642.1,419-437).
gccggagggacaaaaagca

SEQ ID NO: 21408 - DNA, 19 bp, Homo sapiens
  siRNA target sequence for APLP2 (NM_001642.1,420-438).
ccggagggacaaaaagcaa

SEQ ID NO: 21409 - DNA, 19 bp, Homo sapiens
  siRNA target sequence for APLP2 (NM_001642.1,421-439).
cggagggacaaaaagcaat

SEQ ID NO: 21410 - DNA, 19 bp, Homo sapiens
  siRNA target sequence for APLP2 (NM_001642.1,468-486).
gtgtctcgtgggtgaattt

SEQ ID NO: 21411 - DNA, 19 bp, Homo sapiens
  siRNA target sequence for APLP2 (NM_001642.1,470-488).
gtctcgtgggtgaatttgt

SEQ ID NO: 21412 - DNA, 19 bp, Homo sapiens
  siRNA target sequence for APLP2 (NM_001642.1,474-492).
cgtgggtgaatttgtaagt

SEQ ID NO: 21413 - DNA, 19 bp, Homo sapiens
  siRNA target sequence for APLP2 (NM_001642.1,567-585).
ctggcacacggtagtcaaa

SEQ ID NO: 21414 - DNA, 19 bp, Homo sapiens
  siRNA target sequence for APLP2 (NM_001642.1,569-587).
ggcacacggtagtcaaaga

SEQ ID NO: 21415 - DNA, 19 bp, Homo sapiens
  siRNA target sequence for APLP2 (NM_001642.1,604-622).
ggaatgaccttatatagct

SEQ ID NO: 21416 - DNA, 19 bp, Homo sapiens
  siRNA target sequence for APLP2 (NM_001642.1,605-623).
gaatgaccttatatagcta

SEQ ID NO: 21417 - DNA, 19 bp, Homo sapiens
  siRNA target sequence for APLP2 (NM_001642.1,681-699).
ccctcagacaaagattatt

SEQ ID NO: 21418 - DNA, 19 bp, Homo sapiens
  siRNA target sequence for APLP2 (NM_001642.1,685-703).
cagacaaagattattggat

SEQ ID NO: 21419 - DNA, 19 bp, Homo sapiens
  siRNA target sequence for APLP2 (NM_001642.1,874-892).
gtggaggaccgagattact

SEQ ID NO: 21420 - DNA, 19 bp, Homo sapiens
  siRNA target sequence for APLP2 (NM_001642.1,877-895).
gaggaccgagattactact

SEQ ID NO: 21421 - DNA, 19 bp, Homo sapiens
  siRNA target sequence for APLP2 (NM_001642.1,879-897).
ggaccgagattactactat

SEQ ID NO: 21422 - DNA, 19 bp, Homo sapiens
  siRNA target sequence for APLP2 (NM_001642.1,883-901).
cgagattactactatgaca

SEQ ID NO: 21423 - DNA, 19 bp, Homo sapiens
  siRNA target sequence for APLP2 (NM_001642.1,963-981).
gtcagacaaggaaattact

SEQ ID NO: 21424 - DNA, 19 bp, Homo sapiens
  siRNA target sequence for APLP2 (NM_001642.1,1070-1088).
gaaagtgcgtgcgctttat

SEQ ID NO: 21425 - DNA, 19 bp, Homo sapiens
  siRNA target sequence for APLP2 (NM_001642.1,1077-1095).
cgtgcgctttatatatggt

SEQ ID NO: 21426 - DNA, 19 bp, Homo sapiens
  siRNA target sequence for APLP2 (NM_001642.1,1123-1141).
gagtctgaggattattgta

SEQ ID NO: 21427 - DNA, 19 bp, Homo sapiens
  siRNA target sequence for APLP2 (NM_001642.1,1179-1197).
gccaaccaatgatgttgat

SEQ ID NO: 21428 - DNA, 19 bp, Homo sapiens
  siRNA target sequence for APLP2 (NM_001642.1,1181-1199).
caaccaatgatgttgatgt

SEQ ID NO: 21429 - DNA, 19 bp, Homo sapiens
  siRNA target sequence for APLP2 (NM_001642.1,1184-1202).
ccaatgatgttgatgtgta

SEQ ID NO: 21430 - DNA, 19 bp, Homo sapiens
  siRNA target sequence for APLP2 (NM_001642.1,1282-1300).
cgaatggacagggtaaaga

SEQ ID NO: 21431 - DNA, 19 bp, Homo sapiens
  siRNA target sequence for APLP2 (NM_001642.1,1316-1334).
cagagcttcaagctaagaa

SEQ ID NO: 21432 - DNA, 19 bp, Homo sapiens
  siRNA target sequence for APLP2 (NM_001642.1,1371-1389).
cttccaagccatggttaaa

SEQ ID NO: 21433 - DNA, 19 bp, Homo sapiens
  siRNA target sequence for APLP2 (NM_001642.1,1379-1397).
ccatggttaaagctttaga

SEQ ID NO: 21434 - DNA, 19 bp, Homo sapiens
  siRNA target sequence for APLP2 (NM_001642.1,1563-1581).
ccgtgctgagaacaaagat

SEQ ID NO: 21435 - DNA, 19 bp, Homo sapiens
  siRNA target sequence for APLP2 (NM_001642.1,1572-1590).
gaacaaagatcgcttacat

SEQ ID NO: 21436 - DNA, 19 bp, Homo sapiens
  siRNA target sequence for APLP2 (NM_001642.1,1664-1682).
cacatctccacgtgattga

SEQ ID NO: 21437 - DNA, 19 bp, Homo sapiens
  siRNA target sequence for APLP2 (NM_001642.1,1713-1731).
ctacaaagtaccttatgta

SEQ ID NO: 21438 - DNA, 19 bp, Homo sapiens
  siRNA target sequence for APLP2 (NM_001642.1,1792-1810).
cagttcactgcctcaatct

SEQ ID NO: 21439 - DNA, 19 bp, Homo sapiens
  siRNA target sequence for APLP2 (NM_001642.1,1923-1941).
gttgtaccacccaatgaaa

SEQ ID NO: 21440 - DNA, 19 bp, Homo sapiens
  siRNA target sequence for APLP2 (NM_001642.1,1926-1944).
gtaccacccaatgaaaaaa

SEQ ID NO: 21441 - DNA, 19 bp, Homo sapiens
  siRNA target sequence for APLP2 (NM_001642.1,1977-1995).
gatcggtgccgaagagaaa

SEQ ID NO: 21442 - DNA, 19 bp, Homo sapiens
  siRNA target sequence for APLP2 (NM_001642.1,1981-1999).
ggtgccgaagagaaagtga

SEQ ID NO: 21443 - DNA, 19 bp, Homo sapiens
  siRNA target sequence for APLP2 (NM_001642.1,1984-2002).
gccgaagagaaagtgatta

SEQ ID NO: 21444 - DNA, 19 bp, Homo sapiens
  siRNA target sequence for APLP2 (NM_001642.1,2050-2068).
gatgttaaggaaatgattt

SEQ ID NO: 21445 - DNA, 19 bp, Homo sapiens
  siRNA target sequence for APLP2 (NM_001642.1,2323-2341).
gagaaccccacctacaaat

SEQ ID NO: 21446 - DNA, 19 bp, Homo sapiens
  siRNA target sequence for APOB48R (NM_018690.1,286-304).
ggggagctcagctgtagaa

SEQ ID NO: 21447 - DNA, 19 bp, Homo sapiens
  siRNA target sequence for APOB48R (NM_018690.1,883-901).
ggccagggcaattttagat

SEQ ID NO: 21448 - DNA, 19 bp, Homo sapiens
  siRNA target sequence for APOB48R (NM_018690.1,1976-1994).
gaccgagagtctgaactat

SEQ ID NO: 21449 - DNA, 19 bp, Homo sapiens
  siRNA target sequence for APOB48R (NM_018690.1,1978-1996).
ccgagagtctgaactatca

SEQ ID NO: 21450 - DNA, 19 bp, Homo sapiens
  siRNA target sequence for APOB48R (NM_018690.1,2349-2367).
gctgggactcgaaagaaaa

SEQ ID NO: 21451 - DNA, 19 bp, Homo sapiens
  siRNA target sequence for APOB48R (NM_018690.1,2352-2370).
gggactcgaaagaaaagga

SEQ ID NO: 21452 - DNA, 19 bp, Homo sapiens
  siRNA target sequence for APOB48R (NM_018690.1,2353-2371).
ggactcgaaagaaaaggaa

SEQ ID NO: 21453 - DNA, 19 bp, Homo sapiens
  siRNA target sequence for APRIN (NM_015032.1,4374-4392).
ctctcctgtcgatgatatt

SEQ ID NO: 21454 - DNA, 19 bp, Homo sapiens
  siRNA target sequence for APRIN (NM_015032.1,4413-4431).
ggaggaagtttctacagta

SEQ ID NO: 21455 - DNA, 19 bp, Homo sapiens
  siRNA target sequence for ARAP3 (NM_022481.4,791-809).
gtcttcagccctaaatact

SEQ ID NO: 21456 - DNA, 19 bp, Homo sapiens
  siRNA target sequence for ARAP3 (NM_022481.4,793-811).
cttcagccctaaatactgt

SEQ ID NO: 21457 - DNA, 19 bp, Homo sapiens
  siRNA target sequence for ARAP3 (NM_022481.4,1116-1134).
ggagactccaccctcttat

SEQ ID NO: 21458 - DNA, 19 bp, Homo sapiens
  siRNA target sequence for ARAP3 (NM_022481.4,1247-1265).
ctcccctcagggaaactat

SEQ ID NO: 21459 - DNA, 19 bp, Homo sapiens
  siRNA target sequence for ARAP3 (NM_022481.4,1296-1314).
gggaggagtctgatgtact

SEQ ID NO: 21460 - DNA, 19 bp, Homo sapiens
  siRNA target sequence for ARAP3 (NM_022481.4,1297-1315).
ggaggagtctgatgtactt

SEQ ID NO: 21461 - DNA, 19 bp, Homo sapiens
  siRNA target sequence for ARAP3 (NM_022481.4,1338-1356).
cctaagggtgtgatacctt

SEQ ID NO: 21462 - DNA, 19 bp, Homo sapiens
  siRNA target sequence for ARAP3 (NM_022481.4,1339-1357).
ctaagggtgtgataccttt

SEQ ID NO: 21463 - DNA, 19 bp, Homo sapiens
  siRNA target sequence for ARAP3 (NM_022481.4,1353-1371).
cctttgactgccattgaga

SEQ ID NO: 21464 - DNA, 19 bp, Homo sapiens
  siRNA target sequence for ARAP3 (NM_022481.4,1354-1372).
ctttgactgccattgagat

SEQ ID NO: 21465 - DNA, 19 bp, Homo sapiens
  siRNA target sequence for ARAP3 (NM_022481.4,1381-1399).
gcagcaaggacaacaagtt

SEQ ID NO: 21466 - DNA, 19 bp, Homo sapiens
  siRNA target sequence for ARAP3 (NM_022481.4,1694-1712).
gaccaagagtcgaagcttt

SEQ ID NO: 21467 - DNA, 19 bp, Homo sapiens
  siRNA target sequence for ARAP3 (NM_022481.4,1893-1911).
gattgggctgctgtcaatt

SEQ ID NO: 21468 - DNA, 19 bp, Homo sapiens
  siRNA target sequence for ARAP3 (NM_022481.4,1997-2015).
cacgagtgtctggagtaat

SEQ ID NO: 21469 - DNA, 19 bp, Homo sapiens
  siRNA target sequence for ARAP3 (NM_022481.4,1999-2017).
cgagtgtctggagtaatga

SEQ ID NO: 21470 - DNA, 19 bp, Homo sapiens
  siRNA target sequence for ARAP3 (NM_022481.4,2002-2020).
gtgtctggagtaatgagat

SEQ ID NO: 21471 - DNA, 19 bp, Homo sapiens
  siRNA target sequence for ARAP3 (NM_022481.4,2006-2024).
ctggagtaatgagatagta

SEQ ID NO: 21472 - DNA, 19 bp, Homo sapiens
  siRNA target sequence for ARAP3 (NM_022481.4,2008-2026).
ggagtaatgagatagtaca

SEQ ID NO: 21473 - DNA, 19 bp, Homo sapiens
  siRNA target sequence for ARAP3 (NM_022481.4,2011-2029).
gtaatgagatagtacagtt

SEQ ID NO: 21474 - DNA, 19 bp, Homo sapiens
  siRNA target sequence for ARAP3 (NM_022481.4,2084-2102).
cccaggtgagggactacat

SEQ ID NO: 21475 - DNA, 19 bp, Homo sapiens
  siRNA target sequence for ARAP3 (NM_022481.4,2177-2195).
ccctcagtacccagatcat

SEQ ID NO: 21476 - DNA, 19 bp, Homo sapiens
  siRNA target sequence for ARAP3 (NM_022481.4,2178-2196).
cctcagtacccagatcata

SEQ ID NO: 21477 - DNA, 19 bp, Homo sapiens
  siRNA target sequence for ARAP3 (NM_022481.4,2351-2369).
ctcccctggtgtgtacaat

SEQ ID NO: 21478 - DNA, 19 bp, Homo sapiens
  siRNA target sequence for ARAP3 (NM_022481.4,2376-2394).
gtggtgcgtgctacttaca

SEQ ID NO: 21479 - DNA, 19 bp, Homo sapiens
  siRNA target sequence for ARAP3 (NM_022481.4,2411-2429).
cagtcccgtcagcaacaaa

SEQ ID NO: 21480 - DNA, 19 bp, Homo sapiens
  siRNA target sequence for ARAP3 (NM_022481.4,2549-2567).
gccccaggatattgtatgt

SEQ ID NO: 21481 - DNA, 19 bp, Homo sapiens
  siRNA target sequence for ARAP3 (NM_022481.4,2551-2569).
cccaggatattgtatgtct

SEQ ID NO: 21482 - DNA, 19 bp, Homo sapiens
  siRNA target sequence for ARAP3 (NM_022481.4,2639-2657).
ggggaggatccagcatttt

SEQ ID NO: 21483 - DNA, 19 bp, Homo sapiens
  siRNA target sequence for ARAP3 (NM_022481.4,3123-3141).
gtggatgcctgcatcagtt

SEQ ID NO: 21484 - DNA, 19 bp, Homo sapiens
  siRNA target sequence for ARAP3 (NM_022481.4,3256-3274).
gaccaggggagcactttgt

SEQ ID NO: 21485 - DNA, 19 bp, Homo sapiens
  siRNA target sequence for ARAP3 (NM_022481.4,3392-3410).
cctggagaaatataaagat

SEQ ID NO: 21486 - DNA, 19 bp, Homo sapiens
  siRNA target sequence for ARAP3 (NM_022481.4,3454-3472).
ccctcattgggcatctcta

SEQ ID NO: 21487 - DNA, 19 bp, Homo sapiens
  siRNA target sequence for ARAP3 (NM_022481.4,3455-3473).
cctcattgggcatctctat

SEQ ID NO: 21488 - DNA, 19 bp, Homo sapiens
  siRNA target sequence for ARAP3 (NM_022481.4,3470-3488).
ctatcgggtgcagaaatgt

SEQ ID NO: 21489 - DNA, 19 bp, Homo sapiens
  siRNA target sequence for ARAP3 (NM_022481.4,3604-3622).
gctacatctctgtctttga

SEQ ID NO: 21490 - DNA, 19 bp, Homo sapiens
  siRNA target sequence for ARAP3 (NM_022481.4,3611-3629).
ctctgtctttgatatcgat

SEQ ID NO: 21491 - DNA, 19 bp, Homo sapiens
  siRNA target sequence for ARAP3 (NM_022481.4,3651-3669).
gacttggaggtcagtctta

SEQ ID NO: 21492 - DNA, 19 bp, Homo sapiens
  siRNA target sequence for ARAP3 (NM_022481.4,3911-3929).
cttagagcaggctttacaa

SEQ ID NO: 21493 - DNA, 19 bp, Homo sapiens
  siRNA target sequence for ARAP3 (NM_022481.4,3961-3979).
ccctgctcttgaaaaaagt

SEQ ID NO: 21494 - DNA, 19 bp, Homo sapiens
  siRNA target sequence for ARAP3 (NM_022481.4,4194-4212).
ctgggaatccgcaagaagt

SEQ ID NO: 21495 - DNA, 19 bp, Homo sapiens
  siRNA target sequence for ARAP3 (NM_022481.4,4196-4214).
gggaatccgcaagaagtta

SEQ ID NO: 21496 - DNA, 19 bp, Homo sapiens
  siRNA target sequence for ARAP3 (NM_022481.4,4197-4215).
ggaatccgcaagaagttaa

SEQ ID NO: 21497 - DNA, 19 bp, Homo sapiens
  siRNA target sequence for ARAP3 (NM_022481.4,4198-4216).
gaatccgcaagaagttaaa

SEQ ID NO: 21498 - DNA, 19 bp, Homo sapiens
  siRNA target sequence for ARAP3 (NM_022481.4,4234-4252).
gcttcacattgatactaga

SEQ ID NO: 21499 - DNA, 19 bp, Homo sapiens
  siRNA target sequence for ARAP3 (NM_022481.4,4303-4321).
ggaccaccagcatccttaa

SEQ ID NO: 21500 - DNA, 19 bp, Homo sapiens
  siRNA target sequence for ARAP3 (NM_022481.4,4462-4480).
ccctgcggcgactacacaa

SEQ ID NO: 21501 - DNA, 19 bp, Homo sapiens
  siRNA target sequence for ARAP3 (NM_022481.4,4486-4504).
ggaccctgtccatgttctt

SEQ ID NO: 21502 - DNA, 19 bp, Homo sapiens
  siRNA target sequence for ARAP3 (NM_022481.4,4591-4609).
gggccttccctgagttgat

SEQ ID NO: 21503 - DNA, 19 bp, Homo sapiens
  siRNA target sequence for ARFGAP1 (NM_018209.2,342-360).
ctggtgggaatgctaagtt

SEQ ID NO: 21504 - DNA, 19 bp, Homo sapiens
  siRNA target sequence for ARFGAP1 (NM_018209.2,376-394).
gtctcaggaggattacgat

SEQ ID NO: 21505 - DNA, 19 bp, Homo sapiens
  siRNA target sequence for ARFGAP1 (NM_018209.2,589-607).
ctcggacaaggcttttgaa

SEQ ID NO: 21506 - DNA, 19 bp, Homo sapiens
  siRNA target sequence for ARFGAP1 (NM_018209.2,679-697).
gccaccgcctcagaagaaa

SEQ ID NO: 21507 - DNA, 19 bp, Homo sapiens
  siRNA target sequence for ARFGAP1 (NM_018209.2,794-812).
ggcgctacaaagtttggat

SEQ ID NO: 21508 - DNA, 19 bp, Homo sapiens
  siRNA target sequence for ARFGAP1 (NM_018209.2,975-993).
gggacgtcaccaccttttt

SEQ ID NO: 21509 - DNA, 19 bp, Homo sapiens
  siRNA target sequence for ARFGAP1 (NM_018209.2,1055-1073).
ggtctggaccacttccaaa

SEQ ID NO: 21510 - DNA, 19 bp, Homo sapiens
  siRNA target sequence for ARFGAP1 (NM_018209.2,1056-1074).
gtctggaccacttccaaaa

SEQ ID NO: 21511 - DNA, 19 bp, Homo sapiens
  siRNA target sequence for ARFGAP1 (NM_018209.2,1066-1084).
cttccaaaacagcaacata

SEQ ID NO: 21512 - DNA, 19 bp, Homo sapiens
  siRNA target sequence for ARFGAP1 (NM_175609.1,814-832).
ccaagcgagtcagaagttt

SEQ ID NO: 21513 - DNA, 19 bp, Homo sapiens
  siRNA target sequence for ARFGAP1 (NM_175609.1,815-833).
caagcgagtcagaagtttt

SEQ ID NO: 21514 - DNA, 19 bp, Homo sapiens
  siRNA target sequence for ARFGAP3 (NM_014570.3,123-141).
ccagcaagcaggacatctt

SEQ ID NO: 21515 - DNA, 19 bp, Homo sapiens
  siRNA target sequence for ARFGAP3 (NM_014570.3,161-179).
cgctcggtgcccactaaca

SEQ ID NO: 21516 - DNA, 19 bp, Homo sapiens
  siRNA target sequence for ARFGAP3 (NM_014570.3,162-180).
gctcggtgcccactaacaa

SEQ ID NO: 21517 - DNA, 19 bp, Homo sapiens
  siRNA target sequence for ARFGAP3 (NM_014570.3,171-189).
ccactaacaaggtgtgttt

SEQ ID NO: 21518 - DNA, 19 bp, Homo sapiens
  siRNA target sequence for ARFGAP3 (NM_014570.3,172-190).
cactaacaaggtgtgtttt

SEQ ID NO: 21519 - DNA, 19 bp, Homo sapiens
  siRNA target sequence for ARFGAP3 (NM_014570.3,174-192).
ctaacaaggtgtgttttga

SEQ ID NO: 21520 - DNA, 19 bp, Homo sapiens
  siRNA target sequence for ARFGAP3 (NM_014570.3,270-288).
ggtcacttggtgttcactt

SEQ ID NO: 21521 - DNA, 19 bp, Homo sapiens
  siRNA target sequence for ARFGAP3 (NM_014570.3,275-293).
cttggtgttcacttgagtt

SEQ ID NO: 21522 - DNA, 19 bp, Homo sapiens
  siRNA target sequence for ARFGAP3 (NM_014570.3,279-297).
gtgttcacttgagttttat

SEQ ID NO: 21523 - DNA, 19 bp, Homo sapiens
  siRNA target sequence for ARFGAP3 (NM_014570.3,284-302).
cacttgagttttattcgat

SEQ ID NO: 21524 - DNA, 19 bp, Homo sapiens
  siRNA target sequence for ARFGAP3 (NM_014570.3,289-307).
gagttttattcgatctaca

SEQ ID NO: 21525 - DNA, 19 bp, Homo sapiens
  siRNA target sequence for ARFGAP3 (NM_014570.3,364-382).
cgctagtgcatcttccttt

SEQ ID NO: 21526 - DNA, 19 bp, Homo sapiens
  siRNA target sequence for ARFGAP3 (NM_014570.3,365-383).
gctagtgcatcttcctttt

SEQ ID NO: 21527 - DNA, 19 bp, Homo sapiens
  siRNA target sequence for ARFGAP3 (NM_014570.3,369-387).
gtgcatcttccttttttca

SEQ ID NO: 21528 - DNA, 19 bp, Homo sapiens
  siRNA target sequence for ARFGAP3 (NM_014570.3,395-413).
gggtgttccaccaatgaca

SEQ ID NO: 21529 - DNA, 19 bp, Homo sapiens
  siRNA target sequence for ARFGAP3 (NM_014570.3,434-452).
cgtgctgctcagctctata

SEQ ID NO: 21530 - DNA, 19 bp, Homo sapiens
  siRNA target sequence for ARFGAP3 (NM_014570.3,443-461).
cagctctatagggagaaaa

SEQ ID NO: 21531 - DNA, 19 bp, Homo sapiens
  siRNA target sequence for ARFGAP3 (NM_014570.3,696-714).
caagtgtggaaggtcttaa

SEQ ID NO: 21532 - DNA, 19 bp, Homo sapiens
  siRNA target sequence for ARFGAP3 (NM_014570.3,708-726).
gtcttaatgtaccaacaaa

SEQ ID NO: 21533 - DNA, 19 bp, Homo sapiens
  siRNA target sequence for ARFGAP3 (NM_014570.3,720-738).
caacaaaggctactttaga

SEQ ID NO: 21534 - DNA, 19 bp, Homo sapiens
  siRNA target sequence for ARFGAP3 (NM_014570.3,737-755).
gaggtatcctctatcataa

SEQ ID NO: 21535 - DNA, 19 bp, Homo sapiens
  siRNA target sequence for ARFGAP3 (NM_014570.3,740-758).
gtatcctctatcataaaaa

SEQ ID NO: 21536 - DNA, 19 bp, Homo sapiens
  siRNA target sequence for ARFGAP3 (NM_014570.3,789-807).
gggccaaaaaaggaagttt

SEQ ID NO: 21537 - DNA, 19 bp, Homo sapiens
  siRNA target sequence for ARFGAP3 (NM_014570.3,893-911).
ctggccaaggtggtatcta

SEQ ID NO: 21538 - DNA, 19 bp, Homo sapiens
  siRNA target sequence for ARFGAP3 (NM_014570.3,895-913).
ggccaaggtggtatctaaa

SEQ ID NO: 21539 - DNA, 19 bp, Homo sapiens
  siRNA target sequence for ARFGAP3 (NM_014570.3,933-951).
cattacgattagcctataa

SEQ ID NO: 21540 - DNA, 19 bp, Homo sapiens
  siRNA target sequence for ARFGAP3 (NM_014570.3,946-964).
ctataaggatcttgaaatt

SEQ ID NO: 21541 - DNA, 19 bp, Homo sapiens
  siRNA target sequence for ARFGAP3 (NM_014570.3,979-997).
cgaaaagatgaacattagt

SEQ ID NO: 21542 - DNA, 19 bp, Homo sapiens
  siRNA target sequence for ARFGAP3 (NM_014570.3,988-1006).
gaacattagtggcaaaaaa

SEQ ID NO: 21543 - DNA, 19 bp, Homo sapiens
  siRNA target sequence for ARFGAP3 (NM_014570.3,1025-1043).
ctcggcatgggatttggaa

SEQ ID NO: 21544 - DNA, 19 bp, Homo sapiens
  siRNA target sequence for ARFGAP3 (NM_014570.3,1027-1045).
cggcatgggatttggaaat

SEQ ID NO: 21545 - DNA, 19 bp, Homo sapiens
  siRNA target sequence for ARFGAP3 (NM_014570.3,1053-1071).
gtgttatttcacattcagt

SEQ ID NO: 21546 - DNA, 19 bp, Homo sapiens
  siRNA target sequence for ARFGAP3 (NM_014570.3,1106-1124).
cccattatggcaaaaccaa

SEQ ID NO: 21547 - DNA, 19 bp, Homo sapiens
  siRNA target sequence for ARFGAP3 (NM_014570.3,1139-1157).
gatgacagtgacgattcat

SEQ ID NO: 21548 - DNA, 19 bp, Homo sapiens
  siRNA target sequence for ARFGAP3 (NM_014570.3,1229-1247).
gacagttcagattcctatt

SEQ ID NO: 21549 - DNA, 19 bp, Homo sapiens
  siRNA target sequence for ARFGAP3 (NM_014570.3,1317-1335).
ctcgccgcaagccagatta

SEQ ID NO: 21550 - DNA, 19 bp, Homo sapiens
  siRNA target sequence for ARFGAP3 (NM_014570.3,1320-1338).
gccgcaagccagattatga

SEQ ID NO: 21551 - DNA, 19 bp, Homo sapiens
  siRNA target sequence for ARFGAP3 (NM_014570.3,1389-1407).
ccatttcatcagatatgta

SEQ ID NO: 21552 - DNA, 19 bp, Homo sapiens
  siRNA target sequence for ARFGAP3 (NM_014570.3,1466-1484).
gcaagttcctccataagct

SEQ ID NO: 21553 - DNA, 19 bp, Homo sapiens
  siRNA target sequence for ARFGAP3 (NM_014570.3,1560-1578).
ccgacatggcgcagttcaa

SEQ ID NO: 21554 - DNA, 19 bp, Homo sapiens
  siRNA target sequence for ARFGAP3 (NM_014570.3,1588-1606).
gagatcggttgctggaaaa

SEQ ID NO: 21555 - DNA, 19 bp, Homo sapiens
  siRNA target sequence for ARFGAP3 (NM_014570.3,1590-1608).
gatcggttgctggaaaact

SEQ ID NO: 21556 - DNA, 19 bp, Homo sapiens
  siRNA target sequence for ARFGAP3 (NM_014570.3,1609-1627).
ctccgtctttgctaatgga

SEQ ID NO: 21557 - DNA, 19 bp, Homo sapiens
  siRNA target sequence for ARFGAP3 (NM_014570.3,1626-1644).
gagtcgtgacttcaattca

SEQ ID NO: 21558 - DNA, 19 bp, Homo sapiens
  siRNA target sequence for ASH1L (NM_018489.1,317-335).
ctagaaatactgctatgtt

SEQ ID NO: 21559 - DNA, 19 bp, Homo sapiens
  siRNA target sequence for ASH1L (NM_018489.1,349-367).
gattccgaaggtttttcaa

SEQ ID NO: 21560 - DNA, 19 bp, Homo sapiens
  siRNA target sequence for ASH1L (NM_018489.1,392-410).
ctggcacattggtcagtaa

SEQ ID NO: 21561 - DNA, 19 bp, Homo sapiens
  siRNA target sequence for ASH1L (NM_018489.1,394-412).
ggcacattggtcagtaaga

SEQ ID NO: 21562 - DNA, 19 bp, Homo sapiens
  siRNA target sequence for ASH1L (NM_018489.1,396-414).
cacattggtcagtaagaga

SEQ ID NO: 21563 - DNA, 19 bp, Homo sapiens
  siRNA target sequence for ASH1L (NM_018489.1,463-481).
cggaatcgagaaagaaaca

SEQ ID NO: 21564 - DNA, 19 bp, Homo sapiens
  siRNA target sequence for ASH1L (NM_018489.1,480-498).
catcgaagctgggaaagat

SEQ ID NO: 21565 - DNA, 19 bp, Homo sapiens
  siRNA target sequence for ASH1L (NM_018489.1,483-501).
cgaagctgggaaagatgat

SEQ ID NO: 21566 - DNA, 19 bp, Homo sapiens
  siRNA target sequence for ASH1L (NM_018489.1,488-506).
ctgggaaagatgatggttt

SEQ ID NO: 21567 - DNA, 19 bp, Homo sapiens
  siRNA target sequence for ASH1L (NM_018489.1,577-595).
ggcctccaggctaagagaa

SEQ ID NO: 21568 - DNA, 19 bp, Homo sapiens
  siRNA target sequence for ASH1L (NM_018489.1,583-601).
caggctaagagaactaaaa

SEQ ID NO: 21569 - DNA, 19 bp, Homo sapiens
  siRNA target sequence for ASH1L (NM_018489.1,634-652).
cgacctgccataaaaacaa

SEQ ID NO: 21570 - DNA, 19 bp, Homo sapiens
  siRNA target sequence for ASH1L (NM_018489.1,638-656).
ctgccataaaaacaactat

SEQ ID NO: 21571 - DNA, 19 bp, Homo sapiens
  siRNA target sequence for ASH1L (NM_018489.1,640-658).
gccataaaaacaactatta

SEQ ID NO: 21572 - DNA, 19 bp, Homo sapiens
  siRNA target sequence for ASH1L (NM_018489.1,685-703).
ggaaagatgacggatgaaa

SEQ ID NO: 21573 - DNA, 19 bp, Homo sapiens
  siRNA target sequence for ASH1L (NM_018489.1,695-713).
cggatgaaaagaatgaaca

SEQ ID NO: 21574 - DNA, 19 bp, Homo sapiens
  siRNA target sequence for ASH1L (NM_018489.1,727-745).
cgagacccttcaaagttgt

SEQ ID NO: 21575 - DNA, 19 bp, Homo sapiens
  siRNA target sequence for ASH1L (NM_018489.1,728-746).
gagacccttcaaagttgta

SEQ ID NO: 21576 - DNA, 19 bp, Homo sapiens
  siRNA target sequence for ASH1L (NM_018489.1,902-920).
gtagccgggatcctgattt

SEQ ID NO: 21577 - DNA, 19 bp, Homo sapiens
  siRNA target sequence for ASH1L (NM_018489.1,905-923).
gccgggatcctgatttaaa

SEQ ID NO: 21578 - DNA, 19 bp, Homo sapiens
  siRNA target sequence for ASH1L (NM_018489.1,924-942).
ggacagagcattacttaat

SEQ ID NO: 21579 - DNA, 19 bp, Homo sapiens
  siRNA target sequence for ASH1L (NM_018489.1,946-964).
ggaactagtgtaacagaaa

SEQ ID NO: 21580 - DNA, 19 bp, Homo sapiens
  siRNA target sequence for ASH1L (NM_018489.1,1038-1056).
cactacagcaggattggtt

SEQ ID NO: 21581 - DNA, 19 bp, Homo sapiens
  siRNA target sequence for ASH1L (NM_018489.1,1043-1061).
cagcaggattggttagcaa

SEQ ID NO: 21582 - DNA, 19 bp, Homo sapiens
  siRNA target sequence for ASH1L (NM_018489.1,1048-1066).
ggattggttagcaaggatt

SEQ ID NO: 21583 - DNA, 19 bp, Homo sapiens
  siRNA target sequence for ASH1L (NM_018489.1,1049-1067).
gattggttagcaaggattt

SEQ ID NO: 21584 - DNA, 19 bp, Homo sapiens
  siRNA target sequence for ASH1L (NM_018489.1,1054-1072).
gttagcaaggatttgatca

SEQ ID NO: 21585 - DNA, 19 bp, Homo sapiens
  siRNA target sequence for ASH1L (NM_018489.1,1091-1109).
ctgtagctggaataataca

SEQ ID NO: 21586 - DNA, 19 bp, Homo sapiens
  siRNA target sequence for ASH1L (NM_018489.1,1140-1158).
cacagcagttggattggta

SEQ ID NO: 21587 - DNA, 19 bp, Homo sapiens
  siRNA target sequence for ASH1L (NM_018489.1,1240-1258).
ggcactacagcggtattca

SEQ ID NO: 21588 - DNA, 19 bp, Homo sapiens
  siRNA target sequence for ASH1L (NM_018489.1,1241-1259).
gcactacagcggtattcat

SEQ ID NO: 21589 - DNA, 19 bp, Homo sapiens
  siRNA target sequence for ASH1L (NM_018489.1,1242-1260).
cactacagcggtattcatt

SEQ ID NO: 21590 - DNA, 19 bp, Homo sapiens
  siRNA target sequence for ASH1L (NM_018489.1,1244-1262).
ctacagcggtattcattaa

SEQ ID NO: 21591 - DNA, 19 bp, Homo sapiens
  siRNA target sequence for ASH1L (NM_018489.1,1247-1265).
cagcggtattcattaataa

SEQ ID NO: 21592 - DNA, 19 bp, Homo sapiens
  siRNA target sequence for ASH1L (NM_018489.1,1249-1267).
gcggtattcattaataaaa

SEQ ID NO: 21593 - DNA, 19 bp, Homo sapiens
  siRNA target sequence for ASH1L (NM_018489.1,1332-1350).
gctaggaattggtattgtt

SEQ ID NO: 21594 - DNA, 19 bp, Homo sapiens
  siRNA target sequence for ASH1L (NM_018489.1,1354-1372).
ggtttagtgcataaagagt

SEQ ID NO: 21595 - DNA, 19 bp, Homo sapiens
  siRNA target sequence for ASH1L (NM_018489.1,1397-1415).
ctgtggttggactggttaa

SEQ ID NO: 21596 - DNA, 19 bp, Homo sapiens
  siRNA target sequence for ASH1L (NM_018489.1,1401-1419).
ggttggactggttaataaa

SEQ ID NO: 21597 - DNA, 19 bp, Homo sapiens
  siRNA target sequence for ASH1L (NM_018489.1,1562-1580).
gtaaagatgccataaacct

SEQ ID NO: 21598 - DNA, 19 bp, Homo sapiens
  siRNA target sequence for ASH1L (NM_018489.1,1612-1630).
ccgcttaaggcttcttgta

SEQ ID NO: 21599 - DNA, 19 bp, Homo sapiens
  siRNA target sequence for ASH1L (NM_018489.1,1614-1632).
gcttaaggcttcttgtagt

SEQ ID NO: 21600 - DNA, 19 bp, Homo sapiens
  siRNA target sequence for ASH1L (NM_018489.1,1615-1633).
cttaaggcttcttgtagta

SEQ ID NO: 21601 - DNA, 19 bp, Homo sapiens
  siRNA target sequence for ASH1L (NM_018489.1,1625-1643).
cttgtagtacaaacatcaa

SEQ ID NO: 21602 - DNA, 19 bp, Homo sapiens
  siRNA target sequence for ASH1L (NM_018489.1,1808-1826).
gcattcagcaagacagttt

SEQ ID NO: 21603 - DNA, 19 bp, Homo sapiens
  siRNA target sequence for ASH1L (NM_018489.1,1832-1850).
ccagtgaaaagggatctta

SEQ ID NO: 21604 - DNA, 19 bp, Homo sapiens
  siRNA target sequence for ASH1L (NM_018489.1,1833-1851).
cagtgaaaagggatcttat

SEQ ID NO: 21605 - DNA, 19 bp, Homo sapiens
  siRNA target sequence for ASH1L (NM_018489.1,1873-1891).
cagcctcctgtatattgca

SEQ ID NO: 21606 - DNA, 19 bp, Homo sapiens
  siRNA target sequence for ASH1L (NM_018489.1,1890-1908).
cacttctccggactttaaa

SEQ ID NO: 21607 - DNA, 19 bp, Homo sapiens
  siRNA target sequence for ASH1L (NM_018489.1,1915-1933).
ggtgcttctgatgtatcta

SEQ ID NO: 21608 - DNA, 19 bp, Homo sapiens
  siRNA target sequence for ASH1L (NM_018489.1,1935-1953).
cgctaaatccccattcagt

SEQ ID NO: 21609 - DNA, 19 bp, Homo sapiens
  siRNA target sequence for ASH1L (NM_018489.1,1982-2000).
catcacctactgtatctgt

SEQ ID NO: 21610 - DNA, 19 bp, Homo sapiens
  siRNA target sequence for ASH1L (NM_018489.1,1985-2003).
cacctactgtatctgttaa

SEQ ID NO: 21611 - DNA, 19 bp, Homo sapiens
  siRNA target sequence for ASH1L (NM_018489.1,2013-2031).
cagaagtccccctgaaact

SEQ ID NO: 21612 - DNA, 19 bp, Homo sapiens
  siRNA target sequence for ASH1L (NM_018489.1,2053-2071).
ccattacttttaagttcta

SEQ ID NO: 21613 - DNA, 19 bp, Homo sapiens
  siRNA target sequence for ASH1L (NM_018489.1,2066-2084).
gttctactacagaactaat

SEQ ID NO: 21614 - DNA, 19 bp, Homo sapiens
  siRNA target sequence for ASH1L (NM_018489.1,2069-2087).
ctactacagaactaatcga

SEQ ID NO: 21615 - DNA, 19 bp, Homo sapiens
  siRNA target sequence for ASH1L (NM_018489.1,2085-2103).
cgaagaaatttctgaatct

SEQ ID NO: 21616 - DNA, 19 bp, Homo sapiens
  siRNA target sequence for ASH1L (NM_018489.1,2112-2130).
gaaccagtttacttctgaa

SEQ ID NO: 21617 - DNA, 19 bp, Homo sapiens
  siRNA target sequence for ASH1L (NM_018489.1,2126-2144).
ctgaaagtacccacttgaa

SEQ ID NO: 21618 - DNA, 19 bp, Homo sapiens
  siRNA target sequence for ASH1L (NM_018489.1,2156-2174).
ggtcagttggtcatagtat

SEQ ID NO: 21619 - DNA, 19 bp, Homo sapiens
  siRNA target sequence for ASH1L (NM_018489.1,2157-2175).
gtcagttggtcatagtata

SEQ ID NO: 21620 - DNA, 19 bp, Homo sapiens
  siRNA target sequence for ASH1L (NM_018489.1,2161-2179).
gttggtcatagtataagta

SEQ ID NO: 21621 - DNA, 19 bp, Homo sapiens
  siRNA target sequence for ASH1L (NM_018489.1,2165-2183).
gtcatagtataagtattga

SEQ ID NO: 21622 - DNA, 19 bp, Homo sapiens
  siRNA target sequence for ASH1L (NM_018489.1,2171-2189).
gtataagtattgaatgtaa

SEQ ID NO: 21623 - DNA, 19 bp, Homo sapiens
  siRNA target sequence for ASH1L (NM_018489.1,2216-2234).
caaaaactacccatataga

SEQ ID NO: 21624 - DNA, 19 bp, Homo sapiens
  siRNA target sequence for ASH1L (NM_018489.1,2233-2251).
gatattccaagaataagct

SEQ ID NO: 21625 - DNA, 19 bp, Homo sapiens
  siRNA target sequence for ASH1L (NM_018489.1,2284-2302).
gaatccagcattcatacta

SEQ ID NO: 21626 - DNA, 19 bp, Homo sapiens
  siRNA target sequence for ASH1L (NM_018489.1,2314-2332).
gttgttaacttcactagtt

SEQ ID NO: 21627 - DNA, 19 bp, Homo sapiens
  siRNA target sequence for ASH1L (NM_018489.1,2317-2335).
gttaacttcactagtttat

SEQ ID NO: 21628 - DNA, 19 bp, Homo sapiens
  siRNA target sequence for ASH1L (NM_018489.1,2395-2413).
gttgctgaaagcctaagta

SEQ ID NO: 21629 - DNA, 19 bp, Homo sapiens
  siRNA target sequence for ASH1L (NM_018489.1,2421-2439).
gcagtccaaaccattaaaa

SEQ ID NO: 21630 - DNA, 19 bp, Homo sapiens
  siRNA target sequence for ASH1L (NM_018489.1,2487-2505).
cacatgccggtctccaaaa

SEQ ID NO: 21631 - DNA, 19 bp, Homo sapiens
  siRNA target sequence for ASH1L (NM_018489.1,2506-2524).
gggctagaattagaaagat

SEQ ID NO: 21632 - DNA, 19 bp, Homo sapiens
  siRNA target sequence for ASH1L (NM_018489.1,2508-2526).
gctagaattagaaagatca

SEQ ID NO: 21633 - DNA, 19 bp, Homo sapiens
  siRNA target sequence for ASH1L (NM_018489.1,2546-2564).
catgtagctcactatcaaa

SEQ ID NO: 21634 - DNA, 19 bp, Homo sapiens
  siRNA target sequence for ASH1L (NM_018489.1,2552-2570).
gctcactatcaaatagtaa

SEQ ID NO: 21635 - DNA, 19 bp, Homo sapiens
  siRNA target sequence for ASH1L (NM_018489.1,2553-2571).
ctcactatcaaatagtaat

SEQ ID NO: 21636 - DNA, 19 bp, Homo sapiens
  siRNA target sequence for ASH1L (NM_018489.1,2577-2595).
gccagccaagtttatgaaa

SEQ ID NO: 21637 - DNA, 19 bp, Homo sapiens
  siRNA target sequence for ASH1L (NM_018489.1,2603-2621).
gacccccttcatttgtaga

SEQ ID NO: 21638 - DNA, 19 bp, Homo sapiens
  siRNA target sequence for ASH1L (NM_018489.1,2606-2624).
ccccttcatttgtagatca

SEQ ID NO: 21639 - DNA, 19 bp, Homo sapiens
  siRNA target sequence for ASH1L (NM_018489.1,2612-2630).
catttgtagatcatgactt

SEQ ID NO: 21640 - DNA, 19 bp, Homo sapiens
  siRNA target sequence for ASH1L (NM_018489.1,2638-2656).
cgccgattgccaaagttga

SEQ ID NO: 21641 - DNA, 19 bp, Homo sapiens
  siRNA target sequence for ASH1L (NM_018489.1,2647-2665).
ccaaagttgagcaaatcca

SEQ ID NO: 21642 - DNA, 19 bp, Homo sapiens
  siRNA target sequence for ASH1L (NM_018489.1,2683-2701).
ctcttagctgatagtgaaa

SEQ ID NO: 21643 - DNA, 19 bp, Homo sapiens
  siRNA target sequence for ASH1L (NM_018489.1,2689-2707).
gctgatagtgaaaaaccat

SEQ ID NO: 21644 - DNA, 19 bp, Homo sapiens
  siRNA target sequence for ASH1L (NM_018489.1,2698-2716).
gaaaaaccatctcataagt

SEQ ID NO: 21645 - DNA, 19 bp, Homo sapiens
  siRNA target sequence for ASH1L (NM_018489.1,2717-2735).
cttttgctactcacaaact

SEQ ID NO: 21646 - DNA, 19 bp, Homo sapiens
  siRNA target sequence for ASH1L (NM_018489.1,2750-2768).
gtgtctctagtgacctttt

SEQ ID NO: 21647 - DNA, 19 bp, Homo sapiens
  siRNA target sequence for ASH1L (NM_018489.1,2752-2770).
gtctctagtgaccttttgt

SEQ ID NO: 21648 - DNA, 19 bp, Homo sapiens
  siRNA target sequence for ASH1L (NM_018489.1,2759-2777).
gtgaccttttgtctgatat

SEQ ID NO: 21649 - DNA, 19 bp, Homo sapiens
  siRNA target sequence for ASH1L (NM_018489.1,2893-2911).
gaacaagaacccccaattt

SEQ ID NO: 21650 - DNA, 19 bp, Homo sapiens
  siRNA target sequence for ASH1L (NM_018489.1,3148-3166).
gacctagatgacagtcata

SEQ ID NO: 21651 - DNA, 19 bp, Homo sapiens
  siRNA target sequence for ASH1L (NM_018489.1,3167-3185).
ggccaagtgtctgtagtat

SEQ ID NO: 21652 - DNA, 19 bp, Homo sapiens
  siRNA target sequence for ASH1L (NM_018489.1,3169-3187).
ccaagtgtctgtagtatga

SEQ ID NO: 21653 - DNA, 19 bp, Homo sapiens
  siRNA target sequence for ASH1L (NM_018489.1,3351-3369).
gcaatccaaactccataat

SEQ ID NO: 21654 - DNA, 19 bp, Homo sapiens
  siRNA target sequence for ASH1L (NM_018489.1,3352-3370).
caatccaaactccataata

SEQ ID NO: 21655 - DNA, 19 bp, Homo sapiens
  siRNA target sequence for ASH1L (NM_018489.1,3361-3379).
ctccataatacggtatcaa

SEQ ID NO: 21656 - DNA, 19 bp, Homo sapiens
  siRNA target sequence for ASH1L (NM_018489.1,3363-3381).
ccataatacggtatcaagt

SEQ ID NO: 21657 - DNA, 19 bp, Homo sapiens
  siRNA target sequence for ASH1L (NM_018489.1,3464-3482).
gtcgcaaaccaaaaactgt

SEQ ID NO: 21658 - DNA, 19 bp, Homo sapiens
  siRNA target sequence for ASH1L (NM_018489.1,3555-3573).
gtcagcattaggacagatt

SEQ ID NO: 21659 - DNA, 19 bp, Homo sapiens
  siRNA target sequence for ASH1L (NM_018489.1,3579-3597).
cccattactgccttcatct

SEQ ID NO: 21660 - DNA, 19 bp, Homo sapiens
  siRNA target sequence for ASH1L (NM_018489.1,3588-3606).
gccttcatctgctagtagt

SEQ ID NO: 21661 - DNA, 19 bp, Homo sapiens
  siRNA target sequence for ASH1L (NM_018489.1,3589-3607).
ccttcatctgctagtagtt

SEQ ID NO: 21662 - DNA, 19 bp, Homo sapiens
  siRNA target sequence for ASH1L (NM_018489.1,3599-3617).
ctagtagttctgagattct

SEQ ID NO: 21663 - DNA, 19 bp, Homo sapiens
  siRNA target sequence for ASH1L (NM_018489.1,3612-3630).
gattcttccatcacctatt

SEQ ID NO: 21664 - DNA, 19 bp, Homo sapiens
  siRNA target sequence for ASH1L (NM_018489.1,3616-3634).
cttccatcacctatttgct

SEQ ID NO: 21665 - DNA, 19 bp, Homo sapiens
  siRNA target sequence for ASH1L (NM_018489.1,3658-3676).
ggtcagagccctgtaagta

SEQ ID NO: 21666 - DNA, 19 bp, Homo sapiens
  siRNA target sequence for ASH1L (NM_018489.1,3663-3681).
gagccctgtaagtagtgat

SEQ ID NO: 21667 - DNA, 19 bp, Homo sapiens
  siRNA target sequence for ASH1L (NM_018489.1,3709-3727).
ccatatttgcatttacact

SEQ ID NO: 21668 - DNA, 19 bp, Homo sapiens
  siRNA target sequence for ASH1L (NM_018489.1,3731-3749).
gacagggcagtatgattca

SEQ ID NO: 21669 - DNA, 19 bp, Homo sapiens
  siRNA target sequence for ASH1L (NM_018489.1,3868-3886).
ccaatcagtgagtctcata

SEQ ID NO: 21670 - DNA, 19 bp, Homo sapiens
  siRNA target sequence for ASH1L (NM_018489.1,3894-3912).
gaccattcccagtgatagt

SEQ ID NO: 21671 - DNA, 19 bp, Homo sapiens
  siRNA target sequence for ASH1L (NM_018489.1,4025-4043).
cagtgctaagcagtcttaa

SEQ ID NO: 21672 - DNA, 19 bp, Homo sapiens
  siRNA target sequence for ASH1L (NM_018489.1,4029-4047).
gctaagcagtcttaaagaa

SEQ ID NO: 21673 - DNA, 19 bp, Homo sapiens
  siRNA target sequence for ASH1L (NM_018489.1,4215-4233).
gatcactcatcgaagtcat

SEQ ID NO: 21674 - DNA, 19 bp, Homo sapiens
  siRNA target sequence for ASH1L (NM_018489.1,4255-4273).
ctgccaactatctttcgaa

SEQ ID NO: 21675 - DNA, 19 bp, Homo sapiens
  siRNA target sequence for ASH1L (NM_018489.1,4259-4277).
caactatctttcgaatcaa

SEQ ID NO: 21676 - DNA, 19 bp, Homo sapiens
  siRNA target sequence for ASH1L (NM_018489.1,4262-4280).
ctatctttcgaatcaactt

SEQ ID NO: 21677 - DNA, 19 bp, Homo sapiens
  siRNA target sequence for ASH1L (NM_018489.1,4318-4336).
cctttgcactacattcgaa

SEQ ID NO: 21678 - DNA, 19 bp, Homo sapiens
  siRNA target sequence for ASH1L (NM_018489.1,4319-4337).
ctttgcactacattcgaaa

SEQ ID NO: 21679 - DNA, 19 bp, Homo sapiens
  siRNA target sequence for ASH1L (NM_018489.1,4329-4347).
cattcgaaaacctgactta

SEQ ID NO: 21680 - DNA, 19 bp, Homo sapiens
  siRNA target sequence for ASH1L (NM_018489.1,4358-4376).
gagggagaccccctaagat

SEQ ID NO: 21681 - DNA, 19 bp, Homo sapiens
  siRNA target sequence for ASH1L (NM_018489.1,4360-4378).
gggagaccccctaagatga

SEQ ID NO: 21682 - DNA, 19 bp, Homo sapiens
  siRNA target sequence for ASH1L (NM_018489.1,4391-4409).
ctgaaatgccttttatgca

SEQ ID NO: 21683 - DNA, 19 bp, Homo sapiens
  siRNA target sequence for ASH1L (NM_018489.1,4484-4502).
cagctgctcccataggatt

SEQ ID NO: 21684 - DNA, 19 bp, Homo sapiens
  siRNA target sequence for ASH1L (NM_018489.1,4489-4507).
gctcccataggattaggtt

SEQ ID NO: 21685 - DNA, 19 bp, Homo sapiens
  siRNA target sequence for ASH1L (NM_018489.1,4490-4508).
ctcccataggattaggtta

SEQ ID NO: 21686 - DNA, 19 bp, Homo sapiens
  siRNA target sequence for ASH1L (NM_018489.1,4494-4512).
cataggattaggttactat

SEQ ID NO: 21687 - DNA, 19 bp, Homo sapiens
  siRNA target sequence for ASH1L (NM_018489.1,4498-4516).
ggattaggttactatggaa

SEQ ID NO: 21688 - DNA, 19 bp, Homo sapiens
  siRNA target sequence for ASH1L (NM_018489.1,4595-4613).
ctggtcatttacttctcaa

SEQ ID NO: 21689 - DNA, 19 bp, Homo sapiens
  siRNA target sequence for ASH1L (NM_018489.1,4611-4629).
caatcctgccaaataccat

SEQ ID NO: 21690 - DNA, 19 bp, Homo sapiens
  siRNA target sequence for ASH1L (NM_018489.1,4615-4633).
cctgccaaataccataaga

SEQ ID NO: 21691 - DNA, 19 bp, Homo sapiens
  siRNA target sequence for ASH1L (NM_018489.1,4795-4813).
gaacaaccccaggtttcta

SEQ ID NO: 21692 - DNA, 19 bp, Homo sapiens
  siRNA target sequence for ASH1L (NM_018489.1,4831-4849).
cgatctgtcctggaatctt

SEQ ID NO: 21693 - DNA, 19 bp, Homo sapiens
  siRNA target sequence for ASH1L (NM_018489.1,4847-4865).
ctttgaagcgctatagatt

SEQ ID NO: 21694 - DNA, 19 bp, Homo sapiens
  siRNA target sequence for ASH1L (NM_018489.1,4851-4869).
gaagcgctatagatttgga

SEQ ID NO: 21695 - DNA, 19 bp, Homo sapiens
  siRNA target sequence for ASH1L (NM_018489.1,4857-4875).
ctatagatttggaaaggat

SEQ ID NO: 21696 - DNA, 19 bp, Homo sapiens
  siRNA target sequence for ASH1L (NM_018489.1,4882-4900).
ggagagcgatataagcata

SEQ ID NO: 21697 - DNA, 19 bp, Homo sapiens
  siRNA target sequence for ASH1L (NM_018489.1,4883-4901).
gagagcgatataagcataa

SEQ ID NO: 21698 - DNA, 19 bp, Homo sapiens
  siRNA target sequence for ASH1L (NM_018489.1,4888-4906).
cgatataagcataaggaaa

SEQ ID NO: 21699 - DNA, 19 bp, Homo sapiens
  siRNA target sequence for ASH1L (NM_018489.1,4981-4999).
caccgagagccttcagaat

SEQ ID NO: 21700 - DNA, 19 bp, Homo sapiens
  siRNA target sequence for ASH1L (NM_018489.1,4984-5002).
cgagagccttcagaatcta

SEQ ID NO: 21701 - DNA, 19 bp, Homo sapiens
  siRNA target sequence for ASH1L (NM_018489.1,5018-5036).
gattgcagacacctttaca

SEQ ID NO: 21702 - DNA, 19 bp, Homo sapiens
  siRNA target sequence for ASH1L (NM_018489.1,5097-5115).
gccagccagcagtgatgaa

SEQ ID NO: 21703 - DNA, 19 bp, Homo sapiens
  siRNA target sequence for ASH1L (NM_018489.1,5103-5121).
cagcagtgatgaacataca

SEQ ID NO: 21704 - DNA, 19 bp, Homo sapiens
  siRNA target sequence for ASH1L (NM_018489.1,5105-5123).
gcagtgatgaacatacaaa

SEQ ID NO: 21705 - DNA, 19 bp, Homo sapiens
  siRNA target sequence for ASH1L (NM_018489.1,5110-5128).
gatgaacatacaaaccttt

SEQ ID NO: 21706 - DNA, 19 bp, Homo sapiens
  siRNA target sequence for ASH1L (NM_018489.1,5177-5195).
gccggaagaaattaactga

SEQ ID NO: 21707 - DNA, 19 bp, Homo sapiens
  siRNA target sequence for ASH1L (NM_018489.1,5215-5233).
gcacaggacacttcactaa

SEQ ID NO: 21708 - DNA, 19 bp, Homo sapiens
  siRNA target sequence for ASH1L (NM_018489.1,5216-5234).
cacaggacacttcactaaa

SEQ ID NO: 21709 - DNA, 19 bp, Homo sapiens
  siRNA target sequence for ASH1L (NM_018489.1,5358-5376).
ccggaaaaggtcttcatct

SEQ ID NO: 21710 - DNA, 19 bp, Homo sapiens
  siRNA target sequence for ASH1L (NM_018489.1,5381-5399).
gtacttcttcaacagtaaa

SEQ ID NO: 21711 - DNA, 19 bp, Homo sapiens
  siRNA target sequence for ASH1L (NM_018489.1,5496-5514).
catggagaaaagtattgat

SEQ ID NO: 21712 - DNA, 19 bp, Homo sapiens
  siRNA target sequence for ASH1L (NM_018489.1,5642-5660).
gcatctcactcctatctga

SEQ ID NO: 21713 - DNA, 19 bp, Homo sapiens
  siRNA target sequence for ASH1L (NM_018489.1,5648-5666).
cactcctatctgaaaagtt

SEQ ID NO: 21714 - DNA, 19 bp, Homo sapiens
  siRNA target sequence for ASH1L (NM_018489.1,5650-5668).
ctcctatctgaaaagttga

SEQ ID NO: 21715 - DNA, 19 bp, Homo sapiens
  siRNA target sequence for ASH1L (NM_018489.1,5653-5671).
ctatctgaaaagttgacaa

SEQ ID NO: 21716 - DNA, 19 bp, Homo sapiens
  siRNA target sequence for ASH1L (NM_018489.1,5675-5693).
gctgttccccccatcatat

SEQ ID NO: 21717 - DNA, 19 bp, Homo sapiens
  siRNA target sequence for ASH1L (NM_018489.1,5678-5696).
gttccccccatcatatcaa

SEQ ID NO: 21718 - DNA, 19 bp, Homo sapiens
  siRNA target sequence for ASH1L (NM_018489.1,5699-5717).
gaagtgtagtggaagctat

SEQ ID NO: 21719 - DNA, 19 bp, Homo sapiens
  siRNA target sequence for ASH1L (NM_018489.1,5722-5740).
cgccaagctcggaaaatgt

SEQ ID NO: 21720 - DNA, 19 bp, Homo sapiens
  siRNA target sequence for ASH1L (NM_018489.1,5728-5746).
gctcggaaaatgtgcaatt

SEQ ID NO: 21721 - DNA, 19 bp, Homo sapiens
  siRNA target sequence for ASH1L (NM_018489.1,5729-5747).
ctcggaaaatgtgcaatta

SEQ ID NO: 21722 - DNA, 19 bp, Homo sapiens
  siRNA target sequence for ASH1L (NM_018489.1,5824-5842).
gccaggacagggaataact

SEQ ID NO: 21723 - DNA, 19 bp, Homo sapiens
  siRNA target sequence for ASH1L (NM_018489.1,5825-5843).
ccaggacagggaataactt

SEQ ID NO: 21724 - DNA, 19 bp, Homo sapiens
  siRNA target sequence for ASH1L (NM_018489.1,5881-5899).
cttcaggctgtcgtatcaa

SEQ ID NO: 21725 - DNA, 19 bp, Homo sapiens
  siRNA target sequence for ASH1L (NM_018489.1,5886-5904).
ggctgtcgtatcaatgcaa

SEQ ID NO: 21726 - DNA, 19 bp, Homo sapiens
  siRNA target sequence for ASH1L (NM_018489.1,5926-5944).
gtcaacccagaattgaaca

SEQ ID NO: 21727 - DNA, 19 bp, Homo sapiens
  siRNA target sequence for ASH1L (NM_018489.1,5975-5993).
gtcctgacacagttacaga

SEQ ID NO: 21728 - DNA, 19 bp, Homo sapiens
  siRNA target sequence for ASH1L (NM_018489.1,5984-6002).
cagttacagatgtaattga

SEQ ID NO: 21729 - DNA, 19 bp, Homo sapiens
  siRNA target sequence for ASH1L (NM_018489.1,6004-6022).
gctgttgttcagagtgtaa

SEQ ID NO: 21730 - DNA, 19 bp, Homo sapiens
  siRNA target sequence for ASH1L (NM_018489.1,6190-6208).
ccttctgaacctgaaagta

SEQ ID NO: 21731 - DNA, 19 bp, Homo sapiens
  siRNA target sequence for ASH1L (NM_018489.1,6251-6269).
ccccacgtcccccaaagaa

SEQ ID NO: 21732 - DNA, 19 bp, Homo sapiens
  siRNA target sequence for ASH1L (NM_018489.1,6260-6278).
ccccaaagaagaagtatca

SEQ ID NO: 21733 - DNA, 19 bp, Homo sapiens
  siRNA target sequence for ASH1L (NM_018489.1,6289-6307).
ctgtattctgacgtttaca

SEQ ID NO: 21734 - DNA, 19 bp, Homo sapiens
  siRNA target sequence for ASH1L (NM_018489.1,6324-6342).
gagtcgattgatccaatta

SEQ ID NO: 21735 - DNA, 19 bp, Homo sapiens
  siRNA target sequence for ASH1L (NM_018489.1,6326-6344).
gtcgattgatccaattaaa

SEQ ID NO: 21736 - DNA, 19 bp, Homo sapiens
  siRNA target sequence for ASH1L (NM_018489.1,6328-6346).
cgattgatccaattaaaga

SEQ ID NO: 21737 - DNA, 19 bp, Homo sapiens
  siRNA target sequence for ASH1L (NM_018489.1,6395-6413).
cagcgcccattcatgttgt

SEQ ID NO: 21738 - DNA, 19 bp, Homo sapiens
  siRNA target sequence for ASH1L (NM_018489.1,6401-6419).
ccattcatgttgtgttttt

SEQ ID NO: 21739 - DNA, 19 bp, Homo sapiens
  siRNA target sequence for ASH1L (NM_018489.1,6456-6474).
cttccagcttccttatgat

SEQ ID NO: 21740 - DNA, 19 bp, Homo sapiens
  siRNA target sequence for ASH1L (NM_018489.1,6462-6480).
gcttccttatgatatcctt

SEQ ID NO: 21741 - DNA, 19 bp, Homo sapiens
  siRNA target sequence for ASH1L (NM_018489.1,6482-6500).
ggcagtggaaacacaatca

SEQ ID NO: 21742 - DNA, 19 bp, Homo sapiens
  siRNA target sequence for ASH1L (NM_018489.1,6515-6533).
cagatgtcccactatataa

SEQ ID NO: 21743 - DNA, 19 bp, Homo sapiens
  siRNA target sequence for ASH1L (NM_018489.1,6517-6535).
gatgtcccactatataaga

SEQ ID NO: 21744 - DNA, 19 bp, Homo sapiens
  siRNA target sequence for ASH1L (NM_018489.1,6520-6538).
gtcccactatataagaaaa

SEQ ID NO: 21745 - DNA, 19 bp, Homo sapiens
  siRNA target sequence for ASH1L (NM_018489.1,6522-6540).
cccactatataagaaaatt

SEQ ID NO: 21746 - DNA, 19 bp, Homo sapiens
  siRNA target sequence for ASH1L (NM_018489.1,6545-6563).
caaatgtctacgttgatgt

SEQ ID NO: 21747 - DNA, 19 bp, Homo sapiens
  siRNA target sequence for ASH1L (NM_018489.1,6583-6601).
gaagctaccacctgtaact

SEQ ID NO: 21748 - DNA, 19 bp, Homo sapiens
  siRNA target sequence for ASH1L (NM_018489.1,6624-6642).
caggaagggctgtgttgat

SEQ ID NO: 21749 - DNA, 19 bp, Homo sapiens
  siRNA target sequence for ASH1L (NM_018489.1,6648-6666).
cctcaatagaatgatcttt

SEQ ID NO: 21750 - DNA, 19 bp, Homo sapiens
  siRNA target sequence for ASH1L (NM_018489.1,6670-6688).
gagtgttcccccaacactt

SEQ ID NO: 21751 - DNA, 19 bp, Homo sapiens
  siRNA target sequence for ASH1L (NM_018489.1,6741-6759).
gcaatgtctagaacgattt

SEQ ID NO: 21752 - DNA, 19 bp, Homo sapiens
  siRNA target sequence for ASH1L (NM_018489.1,6811-6829).
gggcagttcatcattgaat

SEQ ID NO: 21753 - DNA, 19 bp, Homo sapiens
  siRNA target sequence for ASH1L (NM_018489.1,6812-6830).
ggcagttcatcattgaata

SEQ ID NO: 21754 - DNA, 19 bp, Homo sapiens
  siRNA target sequence for ASH1L (NM_018489.1,6816-6834).
gttcatcattgaataccta

SEQ ID NO: 21755 - DNA, 19 bp, Homo sapiens
  siRNA target sequence for ASH1L (NM_018489.1,6926-6944).
ggatggtgattgacagtta

SEQ ID NO: 21756 - DNA, 19 bp, Homo sapiens
  siRNA target sequence for ASH1L (NM_018489.1,6941-6959).
gttaccgcatgggaaatga

SEQ ID NO: 21757 - DNA, 19 bp, Homo sapiens
  siRNA target sequence for ASH1L (NM_018489.1,6961-6979).
gcccgattcatcaaccata

SEQ ID NO: 21758 - DNA, 19 bp, Homo sapiens
  siRNA target sequence for ASH1L (NM_018489.1,7010-7028).
ggtctgttaatggagtata

SEQ ID NO: 21759 - DNA, 19 bp, Homo sapiens
  siRNA target sequence for ASH1L (NM_018489.1,7067-7085).
ggactgaactcacttatga

SEQ ID NO: 21760 - DNA, 19 bp, Homo sapiens
  siRNA target sequence for ASH1L (NM_018489.1,7070-7088).
ctgaactcacttatgatta

SEQ ID NO: 21761 - DNA, 19 bp, Homo sapiens
  siRNA target sequence for ASH1L (NM_018489.1,7077-7095).
cacttatgattataacttt

SEQ ID NO: 21762 - DNA, 19 bp, Homo sapiens
  siRNA target sequence for ASH1L (NM_018489.1,7167-7185).
caagagtcagcgtgtgaat

SEQ ID NO: 21763 - DNA, 19 bp, Homo sapiens
  siRNA target sequence for ASH1L (NM_018489.1,7213-7231).
cccatggccacacacaaaa

SEQ ID NO: 21764 - DNA, 19 bp, Homo sapiens
  siRNA target sequence for ASH1L (NM_018489.1,7218-7236).
ggccacacacaaaaaatct

SEQ ID NO: 21765 - DNA, 19 bp, Homo sapiens
  siRNA target sequence for ASH1L (NM_018489.1,7235-7253).
ctggacggtcaaaagagaa

SEQ ID NO: 21766 - DNA, 19 bp, Homo sapiens
  siRNA target sequence for ASH1L (NM_018489.1,7334-7352).
gattgaccccccaattaca

SEQ ID NO: 21767 - DNA, 19 bp, Homo sapiens
  siRNA target sequence for ASH1L (NM_018489.1,7340-7358).
ccccccaattacagatgaa

SEQ ID NO: 21768 - DNA, 19 bp, Homo sapiens
  siRNA target sequence for ASH1L (NM_018489.1,7372-7390).
cgtgaaaggaactttgtgt

SEQ ID NO: 21769 - DNA, 19 bp, Homo sapiens
  siRNA target sequence for ASH1L (NM_018489.1,7380-7398).
gaactttgtgttaaagcat

SEQ ID NO: 21770 - DNA, 19 bp, Homo sapiens
  siRNA target sequence for ASH1L (NM_018489.1,7387-7405).
gtgttaaagcatcatgtat

SEQ ID NO: 21771 - DNA, 19 bp, Homo sapiens
  siRNA target sequence for ASH1L (NM_018489.1,7413-7431).
ccgaaactgggagaagatt

SEQ ID NO: 21772 - DNA, 19 bp, Homo sapiens
  siRNA target sequence for ASH1L (NM_018489.1,7422-7440).
ggagaagattcgtcaaaaa

SEQ ID NO: 21773 - DNA, 19 bp, Homo sapiens
  siRNA target sequence for ASH1L (NM_018489.1,7450-7468).
gtaaagcacaccagtgata

SEQ ID NO: 21774 - DNA, 19 bp, Homo sapiens
  siRNA target sequence for ASH1L (NM_018489.1,7513-7531).
cgagatgatgggaatatca

SEQ ID NO: 21775 - DNA, 19 bp, Homo sapiens
  siRNA target sequence for ASH1L (NM_018489.1,7566-7584).
gcagacagctcgatctgtt

SEQ ID NO: 21776 - DNA, 19 bp, Homo sapiens
  siRNA target sequence for ASH1L (NM_018489.1,7639-7657).
cgcctagcccagatcttca

SEQ ID NO: 21777 - DNA, 19 bp, Homo sapiens
  siRNA target sequence for ASH1L (NM_018489.1,7640-7658).
gcctagcccagatcttcaa

SEQ ID NO: 21778 - DNA, 19 bp, Homo sapiens
  siRNA target sequence for ASH1L (NM_018489.1,7647-7665).
ccagatcttcaaagaaatt

SEQ ID NO: 21779 - DNA, 19 bp, Homo sapiens
  siRNA target sequence for ASH1L (NM_018489.1,7648-7666).
cagatcttcaaagaaattt

SEQ ID NO: 21780 - DNA, 19 bp, Homo sapiens
  siRNA target sequence for ASH1L (NM_018489.1,7669-7687).
gatggtatcatctcttata

SEQ ID NO: 21781 - DNA, 19 bp, Homo sapiens
  siRNA target sequence for ASH1L (NM_018489.1,7770-7788).
ctctgatcccctagatctt

SEQ ID NO: 21782 - DNA, 19 bp, Homo sapiens
  siRNA target sequence for ASH1L (NM_018489.1,7772-7790).
ctgatcccctagatcttat

SEQ ID NO: 21783 - DNA, 19 bp, Homo sapiens
  siRNA target sequence for ASH1L (NM_018489.1,7783-7801).
gatcttatcaccatagaga

SEQ ID NO: 21784 - DNA, 19 bp, Homo sapiens
  siRNA target sequence for ASH1L (NM_018489.1,7846-7864).
gctgacatgctcaaagtct

SEQ ID NO: 21785 - DNA, 19 bp, Homo sapiens
  siRNA target sequence for ASH1L (NM_018489.1,7867-7885).
cggaatgctgagaagtact

SEQ ID NO: 21786 - DNA, 19 bp, Homo sapiens
  siRNA target sequence for ASH1L (NM_018489.1,7899-7917).
cccagttgggagagatgtt

SEQ ID NO: 21787 - DNA, 19 bp, Homo sapiens
  siRNA target sequence for ASH1L (NM_018489.1,7922-7940).
gtctacgaaaggcctatta

SEQ ID NO: 21788 - DNA, 19 bp, Homo sapiens
  siRNA target sequence for ASH1L (NM_018489.1,8049-8067).
gaaggacgacgatgttatt

SEQ ID NO: 21789 - DNA, 19 bp, Homo sapiens
  siRNA target sequence for ASH1L (NM_018489.1,8059-8077).
gatgttattcgctgtatct

SEQ ID NO: 21790 - DNA, 19 bp, Homo sapiens
  siRNA target sequence for ASH1L (NM_018489.1,8164-8182).
gatgtggagcactaccttt

SEQ ID NO: 21791 - DNA, 19 bp, Homo sapiens
  siRNA target sequence for ASH1L (NM_018489.1,8258-8276).
gtgtctacttcatctgttt

SEQ ID NO: 21792 - DNA, 19 bp, Homo sapiens
  siRNA target sequence for ASH1L (NM_018489.1,8365-8383).
cagtcctatcgactgttat

SEQ ID NO: 21793 - DNA, 19 bp, Homo sapiens
  siRNA target sequence for ASH1L (NM_018489.1,8367-8385).
gtcctatcgactgttatct

SEQ ID NO: 21794 - DNA, 19 bp, Homo sapiens
  siRNA target sequence for ASH1L (NM_018489.1,8369-8387).
cctatcgactgttatctca

SEQ ID NO: 21795 - DNA, 19 bp, Homo sapiens
  siRNA target sequence for ASH1L (NM_018489.1,8374-8392).
cgactgttatctcacatta

SEQ ID NO: 21796 - DNA, 19 bp, Homo sapiens
  siRNA target sequence for ASH1L (NM_018489.1,8407-8425).
gacatctttcgcattgaga

SEQ ID NO: 21797 - DNA, 19 bp, Homo sapiens
  siRNA target sequence for ASH1L (NM_018489.1,8458-8476).
gcctttggtcaccattatt

SEQ ID NO: 21798 - DNA, 19 bp, Homo sapiens
  siRNA target sequence for ASH1L (NM_018489.1,8459-8477).
cctttggtcaccattattt

SEQ ID NO: 21799 - DNA, 19 bp, Homo sapiens
  siRNA target sequence for ASH1L (NM_018489.1,8504-8522).
catcccgtcggttctatca

SEQ ID NO: 21800 - DNA, 19 bp, Homo sapiens
  siRNA target sequence for ASH1L (NM_018489.1,8507-8525).
cccgtcggttctatcataa

SEQ ID NO: 21801 - DNA, 19 bp, Homo sapiens
  siRNA target sequence for ASH1L (NM_018489.1,8508-8526).
ccgtcggttctatcataat

SEQ ID NO: 21802 - DNA, 19 bp, Homo sapiens
  siRNA target sequence for ASH1L (NM_018489.1,8514-8532).
gttctatcataatgaacta

SEQ ID NO: 21803 - DNA, 19 bp, Homo sapiens
  siRNA target sequence for ASH1L (NM_018489.1,8536-8554).
cgggtgccactctatgaga

SEQ ID NO: 21804 - DNA, 19 bp, Homo sapiens
  siRNA target sequence for ASH1L (NM_018489.1,8541-8559).
gccactctatgagatcatt

SEQ ID NO: 21805 - DNA, 19 bp, Homo sapiens
  siRNA target sequence for ASH1L (NM_018489.1,8585-8603).
gctgtgtgttggaccttta

SEQ ID NO: 21806 - DNA, 19 bp, Homo sapiens
  siRNA target sequence for ASH1L (NM_018489.1,8590-8608).
gtgttggacctttatacgt

SEQ ID NO: 21807 - DNA, 19 bp, Homo sapiens
  siRNA target sequence for ASH1L (NM_018489.1,8592-8610).
gttggacctttatacgtat

SEQ ID NO: 21808 - DNA, 19 bp, Homo sapiens
  siRNA target sequence for ASH1L (NM_018489.1,8595-8613).
ggacctttatacgtattgt

SEQ ID NO: 21809 - DNA, 19 bp, Homo sapiens
  siRNA target sequence for ASH1L (NM_018489.1,8598-8616).
cctttatacgtattgtaaa

SEQ ID NO: 21810 - DNA, 19 bp, Homo sapiens
  siRNA target sequence for ASH1L (NM_018489.1,8618-8636).
ggagacccaaaggagtaaa

SEQ ID NO: 21811 - DNA, 19 bp, Homo sapiens
  siRNA target sequence for ASH1L (NM_018489.1,8638-8656).
gagcaagatgtgtacatct

SEQ ID NO: 21812 - DNA, 19 bp, Homo sapiens
  siRNA target sequence for ASH1L (NM_018489.1,8657-8675).
gtgattatcggcttgacaa

SEQ ID NO: 21813 - DNA, 19 bp, Homo sapiens
  siRNA target sequence for ASH1L (NM_018489.1,8794-8812).
gtcccagacaactacaaga

SEQ ID NO: 21814 - DNA, 19 bp, Homo sapiens
  siRNA target sequence for ASH1L (NM_018489.1,8849-8867).
caaagccacccctaaaaga

SEQ ID NO: 21815 - DNA, 19 bp, Homo sapiens
  siRNA target sequence for ASH1L (NM_018489.1,8888-8906).
ctctacccttgattgaaga

SEQ ID NO: 21816 - DNA, 19 bp, Homo sapiens
  siRNA target sequence for ASH1L (NM_018489.1,8985-9003).
cgtcagtgagggtgaaaaa

SEQ ID NO: 21817 - DNA, 19 bp, Homo sapiens
  siRNA target sequence for ASH1L (NM_018489.1,9051-9069).
ggaacgacggcataaccaa

SEQ ID NO: 21818 - DNA, 19 bp, Homo sapiens
  siRNA target sequence for ASH1L (NM_018489.1,9093-9111).
gctcaatctccttgaaaaa

SEQ ID NO: 21819 - DNA, 19 bp, Homo sapiens
  siRNA target sequence for ASH1L (NM_018489.1,9172-9190).
ctgcgaaggcgtactttgt

SEQ ID NO: 21820 - DNA, 19 bp, Homo sapiens
  siRNA target sequence for ASH1L (NM_018489.1,9174-9192).
gcgaaggcgtactttgttt

SEQ ID NO: 21821 - DNA, 19 bp, Homo sapiens
  siRNA target sequence for ASH1L (NM_018489.1,9175-9193).
cgaaggcgtactttgttta

SEQ ID NO: 21822 - DNA, 19 bp, Homo sapiens
  siRNA target sequence for ASH1L (NM_018489.1,9196-9214).
ccagaaaacagctttcgaa

SEQ ID NO: 21823 - DNA, 19 bp, Homo sapiens
  siRNA target sequence for ATF2 (NM_001880.2,271-289).
caagttacatgtgaattct

SEQ ID NO: 21824 - DNA, 19 bp, Homo sapiens
  siRNA target sequence for ATF2 (NM_001880.2,353-371).
ggatgtggccagcgtttta

SEQ ID NO: 21825 - DNA, 19 bp, Homo sapiens
  siRNA target sequence for ATF2 (NM_001880.2,357-375).
gtggccagcgttttaccaa

SEQ ID NO: 21826 - DNA, 19 bp, Homo sapiens
  siRNA target sequence for ATF2 (NM_001880.2,428-446).
ggtccagcacgtaatgaca

SEQ ID NO: 21827 - DNA, 19 bp, Homo sapiens
  siRNA target sequence for ATF2 (NM_001880.2,526-544).
ggcgagtccatttgagaat

SEQ ID NO: 21828 - DNA, 19 bp, Homo sapiens
  siRNA target sequence for ATF2 (NM_001880.2,534-552).
catttgagaatgaattcaa

SEQ ID NO: 21829 - DNA, 19 bp, Homo sapiens
  siRNA target sequence for ATF2 (NM_001880.2,600-618).
ctcttgcaacacctatcat

SEQ ID NO: 21830 - DNA, 19 bp, Homo sapiens
  siRNA target sequence for ATF2 (NM_001880.2,602-620).
cttgcaacacctatcataa

SEQ ID NO: 21831 - DNA, 19 bp, Homo sapiens
  siRNA target sequence for ATF2 (NM_001880.2,605-623).
gcaacacctatcataagaa

SEQ ID NO: 21832 - DNA, 19 bp, Homo sapiens
  siRNA target sequence for ATF2 (NM_001880.2,612-630).
ctatcataagaagcaaaat

SEQ ID NO: 21833 - DNA, 19 bp, Homo sapiens
  siRNA target sequence for ATF2 (NM_001880.2,776-794).
cccaatgtgctgcttacaa

SEQ ID NO: 21834 - DNA, 19 bp, Homo sapiens
  siRNA target sequence for ATF2 (NM_001880.2,795-813).
gttctgactcaagtgtaat

SEQ ID NO: 21835 - DNA, 19 bp, Homo sapiens
  siRNA target sequence for ATF2 (NM_001880.2,916-934).
gttacatcttcctaatgga

SEQ ID NO: 21836 - DNA, 19 bp, Homo sapiens
  siRNA target sequence for ATF2 (NM_001880.2,940-958).
catgcctgttgctattcct

SEQ ID NO: 21837 - DNA, 19 bp, Homo sapiens
  siRNA target sequence for ATF2 (NM_001880.2,963-981).
caattacaagttctaatgt

SEQ ID NO: 21838 - DNA, 19 bp, Homo sapiens
  siRNA target sequence for ATF2 (NM_001880.2,1018-1036).
caccatggtgcctagtgtt

SEQ ID NO: 21839 - DNA, 19 bp, Homo sapiens
  siRNA target sequence for ATF2 (NM_001880.2,1132-1150).
caatggtgatactgtcaaa

SEQ ID NO: 21840 - DNA, 19 bp, Homo sapiens
  siRNA target sequence for ATF2 (NM_001880.2,1154-1172).
catggtagcggattggtta

SEQ ID NO: 21841 - DNA, 19 bp, Homo sapiens
  siRNA target sequence for ATF2 (NM_001880.2,1191-1209).
ctcgaccgcagtcattaca

SEQ ID NO: 21842 - DNA, 19 bp, Homo sapiens
  siRNA target sequence for ATF2 (NM_001880.2,1217-1235).
gccacatccactacagaaa

SEQ ID NO: 21843 - DNA, 19 bp, Homo sapiens
  siRNA target sequence for ATF2 (NM_001880.2,1291-1309).
gagaagagcagctaacgaa

SEQ ID NO: 21844 - DNA, 19 bp, Homo sapiens
  siRNA target sequence for ATF2 (NM_001880.2,1310-1328).
gatcctgatgaaaaaagga

SEQ ID NO: 21845 - DNA, 19 bp, Homo sapiens
  siRNA target sequence for ATF2 (NM_001880.2,1359-1377).
cttcaagatgccgacaaaa

SEQ ID NO: 21846 - DNA, 19 bp, Homo sapiens
  siRNA target sequence for ATF2 (NM_001880.2,1389-1407).
gggttcagtctttagagaa

SEQ ID NO: 21847 - DNA, 19 bp, Homo sapiens
  siRNA target sequence for ATF2 (NM_001880.2,1412-1430).
gctgaagacttgagttcat

SEQ ID NO: 21848 - DNA, 19 bp, Homo sapiens
  siRNA target sequence for ATF2 (NM_001880.2,1420-1438).
cttgagttcattaaatggt

SEQ ID NO: 21849 - DNA, 19 bp, Homo sapiens
  siRNA target sequence for ATF2 (NM_001880.2,1496-1514).
cttctggctcataaagatt

SEQ ID NO: 21850 - DNA, 19 bp, Homo sapiens
  siRNA target sequence for ATF2 (NM_001880.2,1545-1563).
gctatcatactgctgataa

SEQ ID NO: 21851 - DNA, 19 bp, Homo sapiens
  siRNA target sequence for ATF2 (NM_001880.2,1591-1609).
gccgagtagtccacataca

SEQ ID NO: 21852 - DNA, 19 bp, Homo sapiens
  siRNA target sequence for ATF2 (NM_001880.2,1594-1612).
gagtagtccacatacagaa

SEQ ID NO: 21853 - DNA, 19 bp, Homo sapiens
  siRNA target sequence for ATF2 (NM_001880.2,1599-1617).
gtccacatacagaagctat

SEQ ID NO: 21854 - DNA, 19 bp, Homo sapiens
  siRNA target sequence for ATF2 (NM_001880.2,1602-1620).
cacatacagaagctataca

SEQ ID NO: 21855 - DNA, 19 bp, Homo sapiens
  siRNA target sequence for ATF2 (NM_001880.2,1610-1628).
gaagctatacagcatagtt

SEQ ID NO: 21856 - DNA, 19 bp, Homo sapiens
  siRNA target sequence for ATF2 (NM_001880.2,1725-1743).
ctctttcacagatcgttat

SEQ ID NO: 21857 - DNA, 19 bp, Homo sapiens
  siRNA target sequence for ATF5 (NM_012068.2,382-400).
gggatggctcgtagactat

SEQ ID NO: 21858 - DNA, 19 bp, Homo sapiens
  siRNA target sequence for ATF5 (NM_012068.2,603-621).
cacctgacctggaagctat

SEQ ID NO: 21859 - DNA, 19 bp, Homo sapiens
  siRNA target sequence for ATF5 (NM_012068.2,939-957).
gaggggaccgcaagcaaaa

SEQ ID NO: 21860 - DNA, 19 bp, Homo sapiens
  siRNA target sequence for ATM (NM_000051.2,192-210).
gagtctagtacttaatgat

SEQ ID NO: 21861 - DNA, 19 bp, Homo sapiens
  siRNA target sequence for ATM (NM_000051.2,219-237).
ctgctgccgtcaactagaa

SEQ ID NO: 21862 - DNA, 19 bp, Homo sapiens
  siRNA target sequence for ATM (NM_000051.2,222-240).
ctgccgtcaactagaacat

SEQ ID NO: 21863 - DNA, 19 bp, Homo sapiens
  siRNA target sequence for ATM (NM_000051.2,224-242).
gccgtcaactagaacatga

SEQ ID NO: 21864 - DNA, 19 bp, Homo sapiens
  siRNA target sequence for ATM (NM_000051.2,225-243).
ccgtcaactagaacatgat

SEQ ID NO: 21865 - DNA, 19 bp, Homo sapiens
  siRNA target sequence for ATM (NM_000051.2,226-244).
cgtcaactagaacatgata

SEQ ID NO: 21866 - DNA, 19 bp, Homo sapiens
  siRNA target sequence for ATM (NM_000051.2,292-310).
cgagatcctgaaacaatta

SEQ ID NO: 21867 - DNA, 19 bp, Homo sapiens
  siRNA target sequence for ATM (NM_000051.2,316-334).
ctagatcggcattcagatt

SEQ ID NO: 21868 - DNA, 19 bp, Homo sapiens
  siRNA target sequence for ATM (NM_000051.2,501-519).
catcaaatgtgcaaacaga

SEQ ID NO: 21869 - DNA, 19 bp, Homo sapiens
  siRNA target sequence for ATM (NM_000051.2,530-548).
ggctaaaatgtcaagaact

SEQ ID NO: 21870 - DNA, 19 bp, Homo sapiens
  siRNA target sequence for ATM (NM_000051.2,564-582).
ggatacagtgaaagattca

SEQ ID NO: 21871 - DNA, 19 bp, Homo sapiens
  siRNA target sequence for ATM (NM_000051.2,573-591).
gaaagattcatctaatggt

SEQ ID NO: 21872 - DNA, 19 bp, Homo sapiens
  siRNA target sequence for ATM (NM_000051.2,581-599).
catctaatggtgctattta

SEQ ID NO: 21873 - DNA, 19 bp, Homo sapiens
  siRNA target sequence for ATM (NM_000051.2,605-623).
ctgattgtagcaacatact

SEQ ID NO: 21874 - DNA, 19 bp, Homo sapiens
  siRNA target sequence for ATM (NM_000051.2,670-688).
cagcaacagtggttagaat

SEQ ID NO: 21875 - DNA, 19 bp, Homo sapiens
  siRNA target sequence for ATM (NM_000051.2,740-758).
gagttttagtggctagaat

SEQ ID NO: 21876 - DNA, 19 bp, Homo sapiens
  siRNA target sequence for ATM (NM_000051.2,788-806).
ctcagactgacggattaaa

SEQ ID NO: 21877 - DNA, 19 bp, Homo sapiens
  siRNA target sequence for ATM (NM_000051.2,794-812).
ctgacggattaaattccaa

SEQ ID NO: 21878 - DNA, 19 bp, Homo sapiens
  siRNA target sequence for ATM (NM_000051.2,841-859).
cagtgtgcgagacaagaaa

SEQ ID NO: 21879 - DNA, 19 bp, Homo sapiens
  siRNA target sequence for ATM (NM_000051.2,861-879).
gagctcttcaggtctaaat

SEQ ID NO: 21880 - DNA, 19 bp, Homo sapiens
  siRNA target sequence for ATM (NM_000051.2,866-884).
cttcaggtctaaatcatat

SEQ ID NO: 21881 - DNA, 19 bp, Homo sapiens
  siRNA target sequence for ATM (NM_000051.2,899-917).
ctatcttcctcaagacttt

SEQ ID NO: 21882 - DNA, 19 bp, Homo sapiens
  siRNA target sequence for ATM (NM_000051.2,931-949).
cgaattcgagtgtgtgaat

SEQ ID NO: 21883 - DNA, 19 bp, Homo sapiens
  siRNA target sequence for ATM (NM_000051.2,987-1005).
gactcaacataggcttaat

SEQ ID NO: 21884 - DNA, 19 bp, Homo sapiens
  siRNA target sequence for ATM (NM_000051.2,989-1007).
ctcaacataggcttaatga

SEQ ID NO: 21885 - DNA, 19 bp, Homo sapiens
  siRNA target sequence for ATM (NM_000051.2,1070-1088).
gagccaaaacccaagaaaa

SEQ ID NO: 21886 - DNA, 19 bp, Homo sapiens
  siRNA target sequence for ATM (NM_000051.2,1090-1108).
ggtgcttatgaatcaacaa

SEQ ID NO: 21887 - DNA, 19 bp, Homo sapiens
  siRNA target sequence for ATM (NM_000051.2,1091-1109).
gtgcttatgaatcaacaaa

SEQ ID NO: 21888 - DNA, 19 bp, Homo sapiens
  siRNA target sequence for ATM (NM_000051.2,1141-1159).
ctgctagtgaatgagataa

SEQ ID NO: 21889 - DNA, 19 bp, Homo sapiens
  siRNA target sequence for ATM (NM_000051.2,1143-1161).
gctagtgaatgagataagt

SEQ ID NO: 21890 - DNA, 19 bp, Homo sapiens
  siRNA target sequence for ATM (NM_000051.2,1147-1165).
gtgaatgagataagtcata

SEQ ID NO: 21891 - DNA, 19 bp, Homo sapiens
  siRNA target sequence for ATM (NM_000051.2,1182-1200).
gtattcttcaggatttcgt

SEQ ID NO: 21892 - DNA, 19 bp, Homo sapiens
  siRNA target sequence for ATM (NM_000051.2,1187-1205).
cttcaggatttcgtaatat

SEQ ID NO: 21893 - DNA, 19 bp, Homo sapiens
  siRNA target sequence for ATM (NM_000051.2,1207-1225).
gccgtcaaagaaaatttga

SEQ ID NO: 21894 - DNA, 19 bp, Homo sapiens
  siRNA target sequence for ATM (NM_000051.2,1208-1226).
ccgtcaaagaaaatttgat

SEQ ID NO: 21895 - DNA, 19 bp, Homo sapiens
  siRNA target sequence for ATM (NM_000051.2,1251-1269).
ccaggtttttaatgaagat

SEQ ID NO: 21896 - DNA, 19 bp, Homo sapiens
  siRNA target sequence for ATM (NM_000051.2,1357-1375).
gaactaggctgggaagtaa

SEQ ID NO: 21897 - DNA, 19 bp, Homo sapiens
  siRNA target sequence for ATM (NM_000051.2,1360-1378).
ctaggctgggaagtaataa

SEQ ID NO: 21898 - DNA, 19 bp, Homo sapiens
  siRNA target sequence for ATM (NM_000051.2,1367-1385).
gggaagtaataaaagatca

SEQ ID NO: 21899 - DNA, 19 bp, Homo sapiens
  siRNA target sequence for ATM (NM_000051.2,1395-1413).
gtcacagaatgattttgat

SEQ ID NO: 21900 - DNA, 19 bp, Homo sapiens
  siRNA target sequence for ATM (NM_000051.2,1429-1447).
cagattgcaacccaattaa

SEQ ID NO: 21901 - DNA, 19 bp, Homo sapiens
  siRNA target sequence for ATM (NM_000051.2,1431-1449).
gattgcaacccaattaata

SEQ ID NO: 21902 - DNA, 19 bp, Homo sapiens
  siRNA target sequence for ATM (NM_000051.2,1435-1453).
gcaacccaattaatatcaa

SEQ ID NO: 21903 - DNA, 19 bp, Homo sapiens
  siRNA target sequence for ATM (NM_000051.2,1476-1494).
ctgtgagctgtctccatta

SEQ ID NO: 21904 - DNA, 19 bp, Homo sapiens
  siRNA target sequence for ATM (NM_000051.2,1478-1496).
gtgagctgtctccattact

SEQ ID NO: 21905 - DNA, 19 bp, Homo sapiens
  siRNA target sequence for ATM (NM_000051.2,1480-1498).
gagctgtctccattactga

SEQ ID NO: 21906 - DNA, 19 bp, Homo sapiens
  siRNA target sequence for ATM (NM_000051.2,1487-1505).
ctccattactgatgatact

SEQ ID NO: 21907 - DNA, 19 bp, Homo sapiens
  siRNA target sequence for ATM (NM_000051.2,1489-1507).
ccattactgatgatactat

SEQ ID NO: 21908 - DNA, 19 bp, Homo sapiens
  siRNA target sequence for ATM (NM_000051.2,1535-1553).
gggaacgtacaccatatgt

SEQ ID NO: 21909 - DNA, 19 bp, Homo sapiens
  siRNA target sequence for ATM (NM_000051.2,1537-1555).
gaacgtacaccatatgtgt

SEQ ID NO: 21910 - DNA, 19 bp, Homo sapiens
  siRNA target sequence for ATM (NM_000051.2,1603-1621).
ctagaaagctcacaaaagt

SEQ ID NO: 21911 - DNA, 19 bp, Homo sapiens
  siRNA target sequence for ATM (NM_000051.2,1610-1628).
gctcacaaaagtcagattt

SEQ ID NO: 21912 - DNA, 19 bp, Homo sapiens
  siRNA target sequence for ATM (NM_000051.2,1611-1629).
ctcacaaaagtcagattta

SEQ ID NO: 21913 - DNA, 19 bp, Homo sapiens
  siRNA target sequence for ATM (NM_000051.2,1662-1680).
ctttcgtggtataagttct

SEQ ID NO: 21914 - DNA, 19 bp, Homo sapiens
  siRNA target sequence for ATM (NM_000051.2,1718-1736).
ccataattcagggtagttt

SEQ ID NO: 21915 - DNA, 19 bp, Homo sapiens
  siRNA target sequence for ATM (NM_000051.2,1738-1756).
gttgaggttgacagagaat

SEQ ID NO: 21916 - DNA, 19 bp, Homo sapiens
  siRNA target sequence for ATM (NM_000051.2,1751-1769).
gagaattctggaagttatt

SEQ ID NO: 21917 - DNA, 19 bp, Homo sapiens
  siRNA target sequence for ATM (NM_000051.2,1798-1816).
cctgcagtatgctgtttga

SEQ ID NO: 21918 - DNA, 19 bp, Homo sapiens
  siRNA target sequence for ATM (NM_000051.2,1861-1879).
ggaatagagcaaaatatgt

SEQ ID NO: 21919 - DNA, 19 bp, Homo sapiens
  siRNA target sequence for ATM (NM_000051.2,1885-1903).
gtaaatagaagcttttctt

SEQ ID NO: 21920 - DNA, 19 bp, Homo sapiens
  siRNA target sequence for ATM (NM_000051.2,1901-1919).
ctttaaaggaatcaataat

SEQ ID NO: 21921 - DNA, 19 bp, Homo sapiens
  siRNA target sequence for ATM (NM_000051.2,1920-1938).
gaaatggctcttattctat

SEQ ID NO: 21922 - DNA, 19 bp, Homo sapiens
  siRNA target sequence for ATM (NM_000051.2,1925-1943).
ggctcttattctatcagtt

SEQ ID NO: 21923 - DNA, 19 bp, Homo sapiens
  siRNA target sequence for ATM (NM_000051.2,1941-1959).
gttagagggtgacttagaa

SEQ ID NO: 21924 - DNA, 19 bp, Homo sapiens
  siRNA target sequence for ATM (NM_000051.2,1948-1966).
ggtgacttagaaaatagca

SEQ ID NO: 21925 - DNA, 19 bp, Homo sapiens
  siRNA target sequence for ATM (NM_000051.2,2023-2041).
cttgtgagtctcactatga

SEQ ID NO: 21926 - DNA, 19 bp, Homo sapiens
  siRNA target sequence for ATM (NM_000051.2,2070-2088).
ccaaagcgtgccagaatgt

SEQ ID NO: 21927 - DNA, 19 bp, Homo sapiens
  siRNA target sequence for ATM (NM_000051.2,2170-2188).
gactttttaaccattgtga

SEQ ID NO: 21928 - DNA, 19 bp, Homo sapiens
  siRNA target sequence for ATM (NM_000051.2,2263-2281).
cgctgtcttctgggattat

SEQ ID NO: 21929 - DNA, 19 bp, Homo sapiens
  siRNA target sequence for ATM (NM_000051.2,2290-2308).
cttctgaataattactcat

SEQ ID NO: 21930 - DNA, 19 bp, Homo sapiens
  siRNA target sequence for ATM (NM_000051.2,2339-2357).
ggtgttcacgtcttttggt

SEQ ID NO: 21931 - DNA, 19 bp, Homo sapiens
  siRNA target sequence for ATM (NM_000051.2,2487-2505).
gacaaatgaggaattcaga

SEQ ID NO: 21932 - DNA, 19 bp, Homo sapiens
  siRNA target sequence for ATM (NM_000051.2,2504-2522).
gaattggttccttgagaaa

SEQ ID NO: 21933 - DNA, 19 bp, Homo sapiens
  siRNA target sequence for ATM (NM_000051.2,2509-2527).
ggttccttgagaaatatga

SEQ ID NO: 21934 - DNA, 19 bp, Homo sapiens
  siRNA target sequence for ATM (NM_000051.2,2542-2560).
cgttgcttgagcaactgta

SEQ ID NO: 21935 - DNA, 19 bp, Homo sapiens
  siRNA target sequence for ATM (NM_000051.2,2591-2609).
gctttttcctgcgattgtt

SEQ ID NO: 21936 - DNA, 19 bp, Homo sapiens
  siRNA target sequence for ATM (NM_000051.2,2592-2610).
ctttttcctgcgattgtta

SEQ ID NO: 21937 - DNA, 19 bp, Homo sapiens
  siRNA target sequence for ATM (NM_000051.2,2598-2616).
cctgcgattgttaacatca

SEQ ID NO: 21938 - DNA, 19 bp, Homo sapiens
  siRNA target sequence for ATM (NM_000051.2,2599-2617).
ctgcgattgttaacatcaa

SEQ ID NO: 21939 - DNA, 19 bp, Homo sapiens
  siRNA target sequence for ATM (NM_000051.2,2629-2647).
gacattgcagatatttgta

SEQ ID NO: 21940 - DNA, 19 bp, Homo sapiens
  siRNA target sequence for ATM (NM_000051.2,2680-2698).
gaccgtggagaagtagaat

SEQ ID NO: 21941 - DNA, 19 bp, Homo sapiens
  siRNA target sequence for ATM (NM_000051.2,2699-2717).
caatggaagatgatactaa

SEQ ID NO: 21942 - DNA, 19 bp, Homo sapiens
  siRNA target sequence for ATM (NM_000051.2,2745-2763).
gtcatccatgaatctattt

SEQ ID NO: 21943 - DNA, 19 bp, Homo sapiens
  siRNA target sequence for ATM (NM_000051.2,2766-2784).
cgattaccctgatagtagt

SEQ ID NO: 21944 - DNA, 19 bp, Homo sapiens
  siRNA target sequence for ATM (NM_000051.2,2772-2790).
ccctgatagtagtgttagt

SEQ ID NO: 21945 - DNA, 19 bp, Homo sapiens
  siRNA target sequence for ATM (NM_000051.2,2774-2792).
ctgatagtagtgttagtga

SEQ ID NO: 21946 - DNA, 19 bp, Homo sapiens
  siRNA target sequence for ATM (NM_000051.2,2780-2798).
gtagtgttagtgatgcaaa

SEQ ID NO: 21947 - DNA, 19 bp, Homo sapiens
  siRNA target sequence for ATM (NM_000051.2,2819-2837).
gtaccataggtgccattaa

SEQ ID NO: 21948 - DNA, 19 bp, Homo sapiens
  siRNA target sequence for ATM (NM_000051.2,2823-2841).
cataggtgccattaatcct

SEQ ID NO: 21949 - DNA, 19 bp, Homo sapiens
  siRNA target sequence for ATM (NM_000051.2,2859-2877).
gtcaaagcaagatctactt

SEQ ID NO: 21950 - DNA, 19 bp, Homo sapiens
  siRNA target sequence for ATM (NM_000051.2,2865-2883).
gcaagatctacttttctta

SEQ ID NO: 21951 - DNA, 19 bp, Homo sapiens
  siRNA target sequence for ATM (NM_000051.2,2869-2887).
gatctacttttcttagaca

SEQ ID NO: 21952 - DNA, 19 bp, Homo sapiens
  siRNA target sequence for ATM (NM_000051.2,2940-2958).
ctttagggcagctgatatt

SEQ ID NO: 21953 - DNA, 19 bp, Homo sapiens
  siRNA target sequence for ATM (NM_000051.2,2950-2968).
gctgatattcggaggaaat

SEQ ID NO: 21954 - DNA, 19 bp, Homo sapiens
  siRNA target sequence for ATM (NM_000051.2,2951-2969).
ctgatattcggaggaaatt

SEQ ID NO: 21955 - DNA, 19 bp, Homo sapiens
  siRNA target sequence for ATM (NM_000051.2,2953-2971).
gatattcggaggaaattgt

SEQ ID NO: 21956 - DNA, 19 bp, Homo sapiens
  siRNA target sequence for ATM (NM_000051.2,2991-3009).
cacgctagaacctaccaaa

SEQ ID NO: 21957 - DNA, 19 bp, Homo sapiens
  siRNA target sequence for ATM (NM_000051.2,3021-3039).
gcatatgtatctaatgctt

SEQ ID NO: 21958 - DNA, 19 bp, Homo sapiens
  siRNA target sequence for ATM (NM_000051.2,3063-3081).
gtaccccttgccaatggaa

SEQ ID NO: 21959 - DNA, 19 bp, Homo sapiens
  siRNA target sequence for ATM (NM_000051.2,3130-3148).
cgtcgtgaccaagatgttt

SEQ ID NO: 21960 - DNA, 19 bp, Homo sapiens
  siRNA target sequence for ATM (NM_000051.2,3235-3253).
ggacagtttcttacagtaa

SEQ ID NO: 21961 - DNA, 19 bp, Homo sapiens
  siRNA target sequence for ATM (NM_000051.2,3275-3293).
caaaggagaggaaatatat

SEQ ID NO: 21962 - DNA, 19 bp, Homo sapiens
  siRNA target sequence for ATM (NM_000051.2,3337-3355).
cttgaggctgatccttatt

SEQ ID NO: 21963 - DNA, 19 bp, Homo sapiens
  siRNA target sequence for ATM (NM_000051.2,3458-3476).
cagagtcaatcaatagatt

SEQ ID NO: 21964 - DNA, 19 bp, Homo sapiens
  siRNA target sequence for ATM (NM_000051.2,3483-3501).
ggacacgaagggagattct

SEQ ID NO: 21965 - DNA, 19 bp, Homo sapiens
  siRNA target sequence for ATM (NM_000051.2,3601-3619).
gctgagaaccctgaaactt

SEQ ID NO: 21966 - DNA, 19 bp, Homo sapiens
  siRNA target sequence for ATM (NM_000051.2,3602-3620).
ctgagaaccctgaaacttt

SEQ ID NO: 21967 - DNA, 19 bp, Homo sapiens
  siRNA target sequence for ATM (NM_000051.2,3606-3624).
gaaccctgaaactttggat

SEQ ID NO: 21968 - DNA, 19 bp, Homo sapiens
  siRNA target sequence for ATM (NM_000051.2,3621-3639).
ggatgaaatttataataga

SEQ ID NO: 21969 - DNA, 19 bp, Homo sapiens
  siRNA target sequence for ATM (NM_000051.2,3656-3674).
cgttgatagctgtggtttt

SEQ ID NO: 21970 - DNA, 19 bp, Homo sapiens
  siRNA target sequence for ATM (NM_000051.2,3683-3701).
gccctatctgcgaaaaaca

SEQ ID NO: 21971 - DNA, 19 bp, Homo sapiens
  siRNA target sequence for ATM (NM_000051.2,3704-3722).
ctttgtttgccctgtgtaa

SEQ ID NO: 21972 - DNA, 19 bp, Homo sapiens
  siRNA target sequence for ATM (NM_000051.2,3745-3763).
gaacctcaccttgtgaaaa

SEQ ID NO: 21973 - DNA, 19 bp, Homo sapiens
  siRNA target sequence for ATM (NM_000051.2,3794-3812).
gatatagacgtttagaaga

SEQ ID NO: 21974 - DNA, 19 bp, Homo sapiens
  siRNA target sequence for ATM (NM_000051.2,3821-3839).
catctcatttagattatct

SEQ ID NO: 21975 - DNA, 19 bp, Homo sapiens
  siRNA target sequence for ATM (NM_000051.2,3852-3870).
gctaaatcttcaagatact

SEQ ID NO: 21976 - DNA, 19 bp, Homo sapiens
  siRNA target sequence for ATM (NM_000051.2,3914-3932).
caaatattgaggatttcta

SEQ ID NO: 21977 - DNA, 19 bp, Homo sapiens
  siRNA target sequence for ATM (NM_000051.2,3922-3940).
gaggatttctatagatctt

SEQ ID NO: 21978 - DNA, 19 bp, Homo sapiens
  siRNA target sequence for ATM (NM_000051.2,3924-3942).
ggatttctatagatcttgt

SEQ ID NO: 21979 - DNA, 19 bp, Homo sapiens
  siRNA target sequence for ATM (NM_000051.2,3998-4016).
ccattgctaatcagattca

SEQ ID NO: 21980 - DNA, 19 bp, Homo sapiens
  siRNA target sequence for ATM (NM_000051.2,4021-4039).
gactggaaaagtcttctaa

SEQ ID NO: 21981 - DNA, 19 bp, Homo sapiens
  siRNA target sequence for ATM (NM_000051.2,4036-4054).
ctaacagactgctttccaa

SEQ ID NO: 21982 - DNA, 19 bp, Homo sapiens
  siRNA target sequence for ATM (NM_000051.2,4130-4148).
ctgctaccaaggtctatga

SEQ ID NO: 21983 - DNA, 19 bp, Homo sapiens
  siRNA target sequence for ATM (NM_000051.2,4132-4150).
gctaccaaggtctatgata

SEQ ID NO: 21984 - DNA, 19 bp, Homo sapiens
  siRNA target sequence for ATM (NM_000051.2,4133-4151).
ctaccaaggtctatgatat

SEQ ID NO: 21985 - DNA, 19 bp, Homo sapiens
  siRNA target sequence for ATM (NM_000051.2,4140-4158).
ggtctatgatatgcttaaa

SEQ ID NO: 21986 - DNA, 19 bp, Homo sapiens
  siRNA target sequence for ATM (NM_000051.2,4141-4159).
gtctatgatatgcttaaaa

SEQ ID NO: 21987 - DNA, 19 bp, Homo sapiens
  siRNA target sequence for ATM (NM_000051.2,4213-4231).
gagattgtggtggagttat

SEQ ID NO: 21988 - DNA, 19 bp, Homo sapiens
  siRNA target sequence for ATM (NM_000051.2,4290-4308).
cttttcaggggatttggat

SEQ ID NO: 21989 - DNA, 19 bp, Homo sapiens
  siRNA target sequence for ATM (NM_000051.2,4305-4323).
ggatcctgctcctaatcca

SEQ ID NO: 21990 - DNA, 19 bp, Homo sapiens
  siRNA target sequence for ATM (NM_000051.2,4361-4379).
cctatatcagcaattgtca

SEQ ID NO: 21991 - DNA, 19 bp, Homo sapiens
  siRNA target sequence for ATM (NM_000051.2,4362-4380).
ctatatcagcaattgtcat

SEQ ID NO: 21992 - DNA, 19 bp, Homo sapiens
  siRNA target sequence for ATM (NM_000051.2,4416-4434).
caaaagccctgattcctat

SEQ ID NO: 21993 - DNA, 19 bp, Homo sapiens
  siRNA target sequence for ATM (NM_000051.2,4421-4439).
gccctgattcctatcagaa

SEQ ID NO: 21994 - DNA, 19 bp, Homo sapiens
  siRNA target sequence for ATM (NM_000051.2,4431-4449).
ctatcagaaaattcttctt

SEQ ID NO: 21995 - DNA, 19 bp, Homo sapiens
  siRNA target sequence for ATM (NM_000051.2,4468-4486).
gctgaaacaaataatgttt

SEQ ID NO: 21996 - DNA, 19 bp, Homo sapiens
  siRNA target sequence for ATM (NM_000051.2,4469-4487).
ctgaaacaaataatgttta

SEQ ID NO: 21997 - DNA, 19 bp, Homo sapiens
  siRNA target sequence for ATM (NM_000051.2,4579-4597).
gttcttcgagacgttattt

SEQ ID NO: 21998 - DNA, 19 bp, Homo sapiens
  siRNA target sequence for ATM (NM_000051.2,4582-4600).
cttcgagacgttatttata

SEQ ID NO: 21999 - DNA, 19 bp, Homo sapiens
  siRNA target sequence for ATM (NM_000051.2,4585-4603).
cgagacgttatttatactt

SEQ ID NO: 22000 - DNA, 19 bp, Homo sapiens
  siRNA target sequence for ATM (NM_000051.2,4586-4604).
gagacgttatttatacttt

SEQ ID NO: 22001 - DNA, 19 bp, Homo sapiens
  siRNA target sequence for ATM (NM_000051.2,4601-4619).
ctttgattcactatatcaa

SEQ ID NO: 22002 - DNA, 19 bp, Homo sapiens
  siRNA target sequence for ATM (NM_000051.2,4617-4635).
caaccaaaggccttcttgt

SEQ ID NO: 22003 - DNA, 19 bp, Homo sapiens
  siRNA target sequence for ATM (NM_000051.2,4638-4656).
catggatgtgtcattacgt

SEQ ID NO: 22004 - DNA, 19 bp, Homo sapiens
  siRNA target sequence for ATM (NM_000051.2,4662-4680).
ctccctttgttgtgactta

SEQ ID NO: 22005 - DNA, 19 bp, Homo sapiens
  siRNA target sequence for ATM (NM_000051.2,4694-4712).
gccagacagccgtgactta

SEQ ID NO: 22006 - DNA, 19 bp, Homo sapiens
  siRNA target sequence for ATM (NM_000051.2,4696-4714).
cagacagccgtgacttact

SEQ ID NO: 22007 - DNA, 19 bp, Homo sapiens
  siRNA target sequence for ATM (NM_000051.2,4698-4716).
gacagccgtgacttactgt

SEQ ID NO: 22008 - DNA, 19 bp, Homo sapiens
  siRNA target sequence for ATM (NM_000051.2,4700-4718).
cagccgtgacttactgtaa

SEQ ID NO: 22009 - DNA, 19 bp, Homo sapiens
  siRNA target sequence for ATM (NM_000051.2,4704-4722).
cgtgacttactgtaaggat

SEQ ID NO: 22010 - DNA, 19 bp, Homo sapiens
  siRNA target sequence for ATM (NM_000051.2,4757-4775).
cacttataccccttgtgta

SEQ ID NO: 22011 - DNA, 19 bp, Homo sapiens
  siRNA target sequence for ATM (NM_000051.2,4806-4824).
ggacttgttgaaatactta

SEQ ID NO: 22012 - DNA, 19 bp, Homo sapiens
  siRNA target sequence for ATM (NM_000051.2,4825-4843).
gtgatagataacaaggata

SEQ ID NO: 22013 - DNA, 19 bp, Homo sapiens
  siRNA target sequence for ATM (NM_000051.2,4860-4878).
cacgattaagcttttagat

SEQ ID NO: 22014 - DNA, 19 bp, Homo sapiens
  siRNA target sequence for ATM (NM_000051.2,4940-4958).
gtagaggacccttttcact

SEQ ID NO: 22015 - DNA, 19 bp, Homo sapiens
  siRNA target sequence for ATM (NM_000051.2,4959-4977).
cttggaggaaattaaccat

SEQ ID NO: 22016 - DNA, 19 bp, Homo sapiens
  siRNA target sequence for ATM (NM_000051.2,4999-5017).
gatgcacttccattgacaa

SEQ ID NO: 22017 - DNA, 19 bp, Homo sapiens
  siRNA target sequence for ATM (NM_000051.2,5018-5036).
gacttgaaggactaaagga

SEQ ID NO: 22018 - DNA, 19 bp, Homo sapiens
  siRNA target sequence for ATM (NM_000051.2,5045-5063).
gacaactggaactacataa

SEQ ID NO: 22019 - DNA, 19 bp, Homo sapiens
  siRNA target sequence for ATM (NM_000051.2,5070-5088).
gatggtggacattatgaga

SEQ ID NO: 22020 - DNA, 19 bp, Homo sapiens
  siRNA target sequence for ATM (NM_000051.2,5085-5103).
gagagcttctcaggataat

SEQ ID NO: 22021 - DNA, 19 bp, Homo sapiens
  siRNA target sequence for ATM (NM_000051.2,5114-5132).
ggattatggtgaaactagt

SEQ ID NO: 22022 - DNA, 19 bp, Homo sapiens
  siRNA target sequence for ATM (NM_000051.2,5115-5133).
gattatggtgaaactagtt

SEQ ID NO: 22023 - DNA, 19 bp, Homo sapiens
  siRNA target sequence for ATM (NM_000051.2,5122-5140).
gtgaaactagttgtcaatt

SEQ ID NO: 22024 - DNA, 19 bp, Homo sapiens
  siRNA target sequence for ATM (NM_000051.2,5153-5171).
ccaagatggcaataaacca

SEQ ID NO: 22025 - DNA, 19 bp, Homo sapiens
  siRNA target sequence for ATM (NM_000051.2,5216-5234).
gagaagtgggtcctataga

SEQ ID NO: 22026 - DNA, 19 bp, Homo sapiens
  siRNA target sequence for ATM (NM_000051.2,5218-5236).
gaagtgggtcctatagatt

SEQ ID NO: 22027 - DNA, 19 bp, Homo sapiens
  siRNA target sequence for ATM (NM_000051.2,5224-5242).
ggtcctatagatttctcta

SEQ ID NO: 22028 - DNA, 19 bp, Homo sapiens
  siRNA target sequence for ATM (NM_000051.2,5240-5258).
ctaccatagctatacaaca

SEQ ID NO: 22029 - DNA, 19 bp, Homo sapiens
  siRNA target sequence for ATM (NM_000051.2,5249-5267).
ctatacaacatagtaaaga

SEQ ID NO: 22030 - DNA, 19 bp, Homo sapiens
  siRNA target sequence for ATM (NM_000051.2,5285-5303).
cccttaagttatttgaaga

SEQ ID NO: 22031 - DNA, 19 bp, Homo sapiens
  siRNA target sequence for ATM (NM_000051.2,5355-5373).
ggtagaagattgtgtcaaa

SEQ ID NO: 22032 - DNA, 19 bp, Homo sapiens
  siRNA target sequence for ATM (NM_000051.2,5406-5424).
cattttagccacaaagact

SEQ ID NO: 22033 - DNA, 19 bp, Homo sapiens
  siRNA target sequence for ATM (NM_000051.2,5432-5450).
gtttctgggagatttataa

SEQ ID NO: 22034 - DNA, 19 bp, Homo sapiens
  siRNA target sequence for ATM (NM_000051.2,5465-5483).
caatgctggcctatctaca

SEQ ID NO: 22035 - DNA, 19 bp, Homo sapiens
  siRNA target sequence for ATM (NM_000051.2,5473-5491).
gcctatctacagcctttta

SEQ ID NO: 22036 - DNA, 19 bp, Homo sapiens
  siRNA target sequence for ATM (NM_000051.2,5475-5493).
ctatctacagccttttaga

SEQ ID NO: 22037 - DNA, 19 bp, Homo sapiens
  siRNA target sequence for ATM (NM_000051.2,5573-5591).
ggattcctctaagtgaaaa

SEQ ID NO: 22038 - DNA, 19 bp, Homo sapiens
  siRNA target sequence for ATM (NM_000051.2,5708-5726).
ctgtacttccatacttgat

SEQ ID NO: 22039 - DNA, 19 bp, Homo sapiens
  siRNA target sequence for ATM (NM_000051.2,5716-5734).
ccatacttgattcatgata

SEQ ID NO: 22040 - DNA, 19 bp, Homo sapiens
  siRNA target sequence for ATM (NM_000051.2,5880-5898).
ccgatgctgtttggataaa

SEQ ID NO: 22041 - DNA, 19 bp, Homo sapiens
  siRNA target sequence for ATM (NM_000051.2,5881-5899).
cgatgctgtttggataaaa

SEQ ID NO: 22042 - DNA, 19 bp, Homo sapiens
  siRNA target sequence for ATM (NM_000051.2,5920-5938).
gctgttgtggactacatga

SEQ ID NO: 22043 - DNA, 19 bp, Homo sapiens
  siRNA target sequence for ATM (NM_000051.2,5928-5946).
ggactacatgagaagacaa

SEQ ID NO: 22044 - DNA, 19 bp, Homo sapiens
  siRNA target sequence for ATM (NM_000051.2,6107-6125).
gaagtcttgcatttgaaga

SEQ ID NO: 22045 - DNA, 19 bp, Homo sapiens
  siRNA target sequence for ATM (NM_000051.2,6226-6244).
ggggagccagatagtttgt

SEQ ID NO: 22046 - DNA, 19 bp, Homo sapiens
  siRNA target sequence for ATM (NM_000051.2,6228-6246).
ggagccagatagtttgtat

SEQ ID NO: 22047 - DNA, 19 bp, Homo sapiens
  siRNA target sequence for ATM (NM_000051.2,6264-6282).
gatgttacaacccattact

SEQ ID NO: 22048 - DNA, 19 bp, Homo sapiens
  siRNA target sequence for ATM (NM_000051.2,6281-6299).
ctagactacgaacatatga

SEQ ID NO: 22049 - DNA, 19 bp, Homo sapiens
  siRNA target sequence for ATM (NM_000051.2,6284-6302).
gactacgaacatatgaaca

SEQ ID NO: 22050 - DNA, 19 bp, Homo sapiens
  siRNA target sequence for ATM (NM_000051.2,6315-6333).
gggcaaagccctagtaaca

SEQ ID NO: 22051 - DNA, 19 bp, Homo sapiens
  siRNA target sequence for ATM (NM_000051.2,6316-6334).
ggcaaagccctagtaacat

SEQ ID NO: 22052 - DNA, 19 bp, Homo sapiens
  siRNA target sequence for ATM (NM_000051.2,6317-6335).
gcaaagccctagtaacata

SEQ ID NO: 22053 - DNA, 19 bp, Homo sapiens
  siRNA target sequence for ATM (NM_000051.2,6318-6336).
caaagccctagtaacatat

SEQ ID NO: 22054 - DNA, 19 bp, Homo sapiens
  siRNA target sequence for ATM (NM_000051.2,6403-6421).
ggactctgccatattcttt

SEQ ID NO: 22055 - DNA, 19 bp, Homo sapiens
  siRNA target sequence for ATM (NM_000051.2,6412-6430).
catattctttccgtctatt

SEQ ID NO: 22056 - DNA, 19 bp, Homo sapiens
  siRNA target sequence for ATM (NM_000051.2,6422-6440).
ccgtctatttaaaaggatt

SEQ ID NO: 22057 - DNA, 19 bp, Homo sapiens
  siRNA target sequence for ATM (NM_000051.2,6426-6444).
ctatttaaaaggattggat

SEQ ID NO: 22058 - DNA, 19 bp, Homo sapiens
  siRNA target sequence for ATM (NM_000051.2,6461-6479).
ggtgtcctgaactagaaga

SEQ ID NO: 22059 - DNA, 19 bp, Homo sapiens
  siRNA target sequence for ATM (NM_000051.2,6464-6482).
gtcctgaactagaagaact

SEQ ID NO: 22060 - DNA, 19 bp, Homo sapiens
  siRNA target sequence for ATM (NM_000051.2,6576-6594).
caatgctctacaatctcta

SEQ ID NO: 22061 - DNA, 19 bp, Homo sapiens
  siRNA target sequence for ATM (NM_000051.2,6630-6648).
caaatatgccagagtaaaa

SEQ ID NO: 22062 - DNA, 19 bp, Homo sapiens
  siRNA target sequence for ATM (NM_000051.2,6747-6765).
ggagcttttctcaagatca

SEQ ID NO: 22063 - DNA, 19 bp, Homo sapiens
  siRNA target sequence for ATM (NM_000051.2,6776-6794).
gacaactctctgaagtata

SEQ ID NO: 22064 - DNA, 19 bp, Homo sapiens
  siRNA target sequence for ATM (NM_000051.2,6861-6879).
ggctctacgcacagtcatt

SEQ ID NO: 22065 - DNA, 19 bp, Homo sapiens
  siRNA target sequence for ATM (NM_000051.2,6863-6881).
ctctacgcacagtcatttt

SEQ ID NO: 22066 - DNA, 19 bp, Homo sapiens
  siRNA target sequence for ATM (NM_000051.2,6907-6925).
gacaactcacaaagagaat

SEQ ID NO: 22067 - DNA, 19 bp, Homo sapiens
  siRNA target sequence for ATM (NM_000051.2,6912-6930).
ctcacaaagagaatgtatt

SEQ ID NO: 22068 - DNA, 19 bp, Homo sapiens
  siRNA target sequence for ATM (NM_000051.2,6942-6960).
caccaaacaccttgtagaa

SEQ ID NO: 22069 - DNA, 19 bp, Homo sapiens
  siRNA target sequence for ATM (NM_000051.2,6965-6983).
ctatactggccagaacttt

SEQ ID NO: 22070 - DNA, 19 bp, Homo sapiens
  siRNA target sequence for ATM (NM_000051.2,6997-7015).
ctccctgaaagggcaatat

SEQ ID NO: 22071 - DNA, 19 bp, Homo sapiens
  siRNA target sequence for ATM (NM_000051.2,6999-7017).
ccctgaaagggcaatattt

SEQ ID NO: 22072 - DNA, 19 bp, Homo sapiens
  siRNA target sequence for ATM (NM_000051.2,7007-7025).
gggcaatatttcaaattaa

SEQ ID NO: 22073 - DNA, 19 bp, Homo sapiens
  siRNA target sequence for ATM (NM_000051.2,7008-7026).
ggcaatatttcaaattaaa

SEQ ID NO: 22074 - DNA, 19 bp, Homo sapiens
  siRNA target sequence for ATM (NM_000051.2,7118-7136).
gtattctcaagcaaatgat

SEQ ID NO: 22075 - DNA, 19 bp, Homo sapiens
  siRNA target sequence for ATM (NM_000051.2,7123-7141).
ctcaagcaaatgatcaaga

SEQ ID NO: 22076 - DNA, 19 bp, Homo sapiens
  siRNA target sequence for ATM (NM_000051.2,7171-7189).
cccagcctaaaacttacat

SEQ ID NO: 22077 - DNA, 19 bp, Homo sapiens
  siRNA target sequence for ATM (NM_000051.2,7254-7272).
catcatgcagacctatcta

SEQ ID NO: 22078 - DNA, 19 bp, Homo sapiens
  siRNA target sequence for ATM (NM_000051.2,7341-7359).
gaaggcatttctctcatta

SEQ ID NO: 22079 - DNA, 19 bp, Homo sapiens
  siRNA target sequence for ATM (NM_000051.2,7353-7371).
ctcattagcccggttttca

SEQ ID NO: 22080 - DNA, 19 bp, Homo sapiens
  siRNA target sequence for ATM (NM_000051.2,7363-7381).
cggttttcagatactcaat

SEQ ID NO: 22081 - DNA, 19 bp, Homo sapiens
  siRNA target sequence for ATM (NM_000051.2,7404-7422).
gaaatcatcggaatttgaa

SEQ ID NO: 22082 - DNA, 19 bp, Homo sapiens
  siRNA target sequence for ATM (NM_000051.2,7409-7427).
catcggaatttgaaaacaa

SEQ ID NO: 22083 - DNA, 19 bp, Homo sapiens
  siRNA target sequence for ATM (NM_000051.2,7462-7480).
ggtctccttagggaacata

SEQ ID NO: 22084 - DNA, 19 bp, Homo sapiens
  siRNA target sequence for ATM (NM_000051.2,7463-7481).
gtctccttagggaacataa

SEQ ID NO: 22085 - DNA, 19 bp, Homo sapiens
  siRNA target sequence for ATM (NM_000051.2,7465-7483).
ctccttagggaacataaaa

SEQ ID NO: 22086 - DNA, 19 bp, Homo sapiens
  siRNA target sequence for ATM (NM_000051.2,7550-7568).
cactgaaagaggatcgtaa

SEQ ID NO: 22087 - DNA, 19 bp, Homo sapiens
  siRNA target sequence for ATM (NM_000051.2,7560-7578).
ggatcgtaaacgcttctta

SEQ ID NO: 22088 - DNA, 19 bp, Homo sapiens
  siRNA target sequence for ATM (NM_000051.2,7561-7579).
gatcgtaaacgcttcttat

SEQ ID NO: 22089 - DNA, 19 bp, Homo sapiens
  siRNA target sequence for ATM (NM_000051.2,7616-7634).
gtggagaagaacatgatat

SEQ ID NO: 22090 - DNA, 19 bp, Homo sapiens
  siRNA target sequence for ATM (NM_000051.2,7804-7822).
gaagtcctcaataatctaa

SEQ ID NO: 22091 - DNA, 19 bp, Homo sapiens
  siRNA target sequence for ATM (NM_000051.2,7848-7866).
ccatcacactttgtttatt

SEQ ID NO: 22092 - DNA, 19 bp, Homo sapiens
  siRNA target sequence for ATM (NM_000051.2,7886-7904).
caaacagagatgaatttct

SEQ ID NO: 22093 - DNA, 19 bp, Homo sapiens
  siRNA target sequence for ATM (NM_000051.2,7987-8005).
gaggctgcaaatagaataa

SEQ ID NO: 22094 - DNA, 19 bp, Homo sapiens
  siRNA target sequence for ATM (NM_000051.2,7989-8007).
ggctgcaaatagaataata

SEQ ID NO: 22095 - DNA, 19 bp, Homo sapiens
  siRNA target sequence for ATM (NM_000051.2,8045-8063).
gtgttgaggcactttgtga

SEQ ID NO: 22096 - DNA, 19 bp, Homo sapiens
  siRNA target sequence for ATM (NM_000051.2,8052-8070).
ggcactttgtgatgcttat

SEQ ID NO: 22097 - DNA, 19 bp, Homo sapiens
  siRNA target sequence for ATM (NM_000051.2,8053-8071).
gcactttgtgatgcttata

SEQ ID NO: 22098 - DNA, 19 bp, Homo sapiens
  siRNA target sequence for ATM (NM_000051.2,8060-8078).
gtgatgcttatattatatt

SEQ ID NO: 22099 - DNA, 19 bp, Homo sapiens
  siRNA target sequence for ATM (NM_000051.2,8139-8157).
ccagccaattactaaactt

SEQ ID NO: 22100 - DNA, 19 bp, Homo sapiens
  siRNA target sequence for ATM (NM_000051.2,8140-8158).
cagccaattactaaactta

SEQ ID NO: 22101 - DNA, 19 bp, Homo sapiens
  siRNA target sequence for ATM (NM_000051.2,8262-8280).
cttagcaggaggtgtaaat

SEQ ID NO: 22102 - DNA, 19 bp, Homo sapiens
  siRNA target sequence for ATM (NM_000051.2,8270-8288).
gaggtgtaaatttaccaaa

SEQ ID NO: 22103 - DNA, 19 bp, Homo sapiens
  siRNA target sequence for ATM (NM_000051.2,8273-8291).
gtgtaaatttaccaaaaat

SEQ ID NO: 22104 - DNA, 19 bp, Homo sapiens
  siRNA target sequence for ATM (NM_000051.2,8379-8397).
ggtcttccagatgtgtaat

SEQ ID NO: 22105 - DNA, 19 bp, Homo sapiens
  siRNA target sequence for ATM (NM_000051.2,8382-8400).
cttccagatgtgtaataca

SEQ ID NO: 22106 - DNA, 19 bp, Homo sapiens
  siRNA target sequence for ATM (NM_000051.2,8385-8403).
ccagatgtgtaatacatta

SEQ ID NO: 22107 - DNA, 19 bp, Homo sapiens
  siRNA target sequence for ATM (NM_000051.2,8407-8425).
cagagaaacacggaaacta

SEQ ID NO: 22108 - DNA, 19 bp, Homo sapiens
  siRNA target sequence for ATM (NM_000051.2,8441-8459).
ctatctgtacttataaggt

SEQ ID NO: 22109 - DNA, 19 bp, Homo sapiens
  siRNA target sequence for ATM (NM_000051.2,8476-8494).
cgaagtggtgttcttgaat

SEQ ID NO: 22110 - DNA, 19 bp, Homo sapiens
  siRNA target sequence for ATM (NM_000051.2,8513-8531).
ccattggtgaatttcttgt

SEQ ID NO: 22111 - DNA, 19 bp, Homo sapiens
  siRNA target sequence for ATM (NM_000051.2,8518-8536).
ggtgaatttcttgttaaca

SEQ ID NO: 22112 - DNA, 19 bp, Homo sapiens
  siRNA target sequence for ATM (NM_000051.2,8572-8590).
gatttcagtgcctttcagt

SEQ ID NO: 22113 - DNA, 19 bp, Homo sapiens
  siRNA target sequence for ATM (NM_000051.2,8581-8599).
gcctttcagtgccaaaaga

SEQ ID NO: 22114 - DNA, 19 bp, Homo sapiens
  siRNA target sequence for ATM (NM_000051.2,8709-8727).
ggatccagctatttggttt

SEQ ID NO: 22115 - DNA, 19 bp, Homo sapiens
  siRNA target sequence for ATM (NM_000051.2,8728-8746).
gagaagcgattggcttata

SEQ ID NO: 22116 - DNA, 19 bp, Homo sapiens
  siRNA target sequence for ATM (NM_000051.2,8748-8766).
gcgcagtgtagctacttct

SEQ ID NO: 22117 - DNA, 19 bp, Homo sapiens
  siRNA target sequence for ATM (NM_000051.2,8749-8767).
cgcagtgtagctacttctt

SEQ ID NO: 22118 - DNA, 19 bp, Homo sapiens
  siRNA target sequence for ATM (NM_000051.2,8762-8780).
cttcttctattgttggtta

SEQ ID NO: 22119 - DNA, 19 bp, Homo sapiens
  siRNA target sequence for ATM (NM_000051.2,8768-8786).
ctattgttggttacatact

SEQ ID NO: 22120 - DNA, 19 bp, Homo sapiens
  siRNA target sequence for ATM (NM_000051.2,9005-9023).
gaaactctcaggaaactct

SEQ ID NO: 22121 - DNA, 19 bp, Homo sapiens
  siRNA target sequence for ATM (NM_000051.2,9186-9204).
ccagagtttcaacaaagta

SEQ ID NO: 22122 - DNA, 19 bp, Homo sapiens
  siRNA target sequence for ATM (NM_000051.2,9202-9220).
gtagctgaacgtgtcttaa

SEQ ID NO: 22123 - DNA, 19 bp, Homo sapiens
  siRNA target sequence for ATM (NM_000051.2,9269-9287).
gtgttggtggacaagtgaa

SEQ ID NO: 22124 - DNA, 19 bp, Homo sapiens
  siRNA target sequence for ATM (NM_000051.2,9275-9293).
gtggacaagtgaatttgct

SEQ ID NO: 22125 - DNA, 19 bp, Homo sapiens
  siRNA target sequence for ATM (NM_138292.1,3875-3893).
gtgggtattccgactttgt

SEQ ID NO: 22126 - DNA, 19 bp, Homo sapiens
  siRNA target sequence for AWP1 (NM_019006.2,476-494).
cagtagtctgtctgaatct

SEQ ID NO: 22127 - DNA, 19 bp, Homo sapiens
  siRNA target sequence for AWP1 (NM_019006.2,478-496).
gtagtctgtctgaatcttt

SEQ ID NO: 22128 - DNA, 19 bp, Homo sapiens
  siRNA target sequence for BACH2 (NM_021813.1,736-754).
cccatgtatgtgtatgagt

SEQ ID NO: 22129 - DNA, 19 bp, Homo sapiens
  siRNA target sequence for BACH2 (NM_021813.1,871-889).
ctggccgcatgcagtgaat

SEQ ID NO: 22130 - DNA, 19 bp, Homo sapiens
  siRNA target sequence for BACH2 (NM_021813.1,873-891).
ggccgcatgcagtgaatat

SEQ ID NO: 22131 - DNA, 19 bp, Homo sapiens
  siRNA target sequence for BACH2 (NM_021813.1,902-920).
cgctggttggacagacaaa

SEQ ID NO: 22132 - DNA, 19 bp, Homo sapiens
  siRNA target sequence for BACH2 (NM_021813.1,903-921).
gctggttggacagacaaaa

SEQ ID NO: 22133 - DNA, 19 bp, Homo sapiens
  siRNA target sequence for BACH2 (NM_021813.1,1003-1021).
ctgttactcagcagagaaa

SEQ ID NO: 22134 - DNA, 19 bp, Homo sapiens
  siRNA target sequence for BACH2 (NM_021813.1,1115-1133).
gtgaggatggcctgtttgt

SEQ ID NO: 22135 - DNA, 19 bp, Homo sapiens
  siRNA target sequence for BACH2 (NM_021813.1,1117-1135).
gaggatggcctgtttgtgt

SEQ ID NO: 22136 - DNA, 19 bp, Homo sapiens
  siRNA target sequence for BACH2 (NM_021813.1,1385-1403).
cgcagtaccccagatacaa

SEQ ID NO: 22137 - DNA, 19 bp, Homo sapiens
  siRNA target sequence for BACH2 (NM_021813.1,1389-1407).
gtaccccagatacaagaaa

SEQ ID NO: 22138 - DNA, 19 bp, Homo sapiens
  siRNA target sequence for BACH2 (NM_021813.1,1421-1439).
gtaccaagaatgtctataa

SEQ ID NO: 22139 - DNA, 19 bp, Homo sapiens
  siRNA target sequence for BACH2 (NM_021813.1,1452-1470).
cagtacctcaggttttgca

SEQ ID NO: 22140 - DNA, 19 bp, Homo sapiens
  siRNA target sequence for BACH2 (NM_021813.1,1472-1490).
gcacattccgggaagataa

SEQ ID NO: 22141 - DNA, 19 bp, Homo sapiens
  siRNA target sequence for BACH2 (NM_021813.1,1516-1534).
cttgccagggggcagatta

SEQ ID NO: 22142 - DNA, 19 bp, Homo sapiens
  siRNA target sequence for BACH2 (NM_021813.1,1519-1537).
gccagggggcagattaaaa

SEQ ID NO: 22143 - DNA, 19 bp, Homo sapiens
  siRNA target sequence for BACH2 (NM_021813.1,1523-1541).
gggggcagattaaaagtga

SEQ ID NO: 22144 - DNA, 19 bp, Homo sapiens
  siRNA target sequence for BACH2 (NM_021813.1,1740-1758).
gttcagcataacgaaaagt

SEQ ID NO: 22145 - DNA, 19 bp, Homo sapiens
  siRNA target sequence for BACH2 (NM_021813.1,1865-1883).
cccctttcacagggaatta

SEQ ID NO: 22146 - DNA, 19 bp, Homo sapiens
  siRNA target sequence for BACH2 (NM_021813.1,1866-1884).
ccctttcacagggaattat

SEQ ID NO: 22147 - DNA, 19 bp, Homo sapiens
  siRNA target sequence for BACH2 (NM_021813.1,1952-1970).
ggttggaggctctctgtaa

SEQ ID NO: 22148 - DNA, 19 bp, Homo sapiens
  siRNA target sequence for BACH2 (NM_021813.1,1953-1971).
gttggaggctctctgtaaa

SEQ ID NO: 22149 - DNA, 19 bp, Homo sapiens
  siRNA target sequence for BACH2 (NM_021813.1,2033-2051).
gcacctcggtgcattctta

SEQ ID NO: 22150 - DNA, 19 bp, Homo sapiens
  siRNA target sequence for BACH2 (NM_021813.1,2034-2052).
cacctcggtgcattcttat

SEQ ID NO: 22151 - DNA, 19 bp, Homo sapiens
  siRNA target sequence for BACH2 (NM_021813.1,2037-2055).
ctcggtgcattcttattct

SEQ ID NO: 22152 - DNA, 19 bp, Homo sapiens
  siRNA target sequence for BACH2 (NM_021813.1,2541-2559).
ggaggtaaaacttcctttt

SEQ ID NO: 22153 - DNA, 19 bp, Homo sapiens
  siRNA target sequence for BACH2 (NM_021813.1,2544-2562).
ggtaaaacttccttttcct

SEQ ID NO: 22154 - DNA, 19 bp, Homo sapiens
  siRNA target sequence for BACH2 (NM_021813.1,2578-2596).
gatcttccaaggaacgatt

SEQ ID NO: 22155 - DNA, 19 bp, Homo sapiens
  siRNA target sequence for BACH2 (NM_021813.1,2627-2645).
cctcagaacagttagagtt

SEQ ID NO: 22156 - DNA, 19 bp, Homo sapiens
  siRNA target sequence for BACH2 (NM_021813.1,2628-2646).
ctcagaacagttagagttt

SEQ ID NO: 22157 - DNA, 19 bp, Homo sapiens
  siRNA target sequence for BACH2 (NM_021813.1,2630-2648).
cagaacagttagagtttat

SEQ ID NO: 22158 - DNA, 19 bp, Homo sapiens
  siRNA target sequence for BACH2 (NM_021813.1,2689-2707).
cagcgctgccgcaaaagga

SEQ ID NO: 22159 - DNA, 19 bp, Homo sapiens
  siRNA target sequence for BACH2 (NM_021813.1,2705-2723).
ggaaactggactgtattca

SEQ ID NO: 22160 - DNA, 19 bp, Homo sapiens
  siRNA target sequence for BACH2 (NM_021813.1,2710-2728).
ctggactgtattcagaatt

SEQ ID NO: 22161 - DNA, 19 bp, Homo sapiens
  siRNA target sequence for BACH2 (NM_021813.1,2735-2753).
gtgaaatccgcaaattggt

SEQ ID NO: 22162 - DNA, 19 bp, Homo sapiens
  siRNA target sequence for BACH2 (NM_021813.1,2772-2790).
gttgtcagagaggaatcaa

SEQ ID NO: 22163 - DNA, 19 bp, Homo sapiens
  siRNA target sequence for BACH2 (NM_021813.1,2798-2816).
catgcatgggggaactgtt

SEQ ID NO: 22164 - DNA, 19 bp, Homo sapiens
  siRNA target sequence for BACH2 (NM_021813.1,2807-2825).
gggaactgttggacaactt

SEQ ID NO: 22165 - DNA, 19 bp, Homo sapiens
  siRNA target sequence for BACH2 (NM_021813.1,2809-2827).
gaactgttggacaacttct

SEQ ID NO: 22166 - DNA, 19 bp, Homo sapiens
  siRNA target sequence for BACH2 (NM_021813.1,2922-2940).
gcccacggcctccagtatt

SEQ ID NO: 22167 - DNA, 19 bp, Homo sapiens
  siRNA target sequence for BACH2 (NM_021813.1,2923-2941).
cccacggcctccagtatta

SEQ ID NO: 22168 - DNA, 19 bp, Homo sapiens
  siRNA target sequence for BACH2 (NM_021813.1,2924-2942).
ccacggcctccagtattaa

SEQ ID NO: 22169 - DNA, 19 bp, Homo sapiens
  siRNA target sequence for BACH2 (NM_021813.1,3060-3078).
caacacctccgagaattgt

SEQ ID NO: 22170 - DNA, 19 bp, Homo sapiens
  siRNA target sequence for BACH2 (NM_021813.1,3181-3199).
gaaatgactgataagtgta

SEQ ID NO: 22171 - DNA, 19 bp, Homo sapiens
  siRNA target sequence for BANF1 (NM_003860.2,685-703).
cgggaatggctgaaagaca

SEQ ID NO: 22172 - DNA, 19 bp, Homo sapiens
  siRNA target sequence for BAZ1A (NM_013448.2,581-599).
caccgaaagccgtttgtga

SEQ ID NO: 22173 - DNA, 19 bp, Homo sapiens
  siRNA target sequence for BAZ1A (NM_013448.2,627-645).
ccgacgaggaagttttcta

SEQ ID NO: 22174 - DNA, 19 bp, Homo sapiens
  siRNA target sequence for BAZ1A (NM_013448.2,629-647).
gacgaggaagttttctact

SEQ ID NO: 22175 - DNA, 19 bp, Homo sapiens
  siRNA target sequence for BAZ1A (NM_013448.2,632-650).
gaggaagttttctactgta

SEQ ID NO: 22176 - DNA, 19 bp, Homo sapiens
  siRNA target sequence for BAZ1A (NM_013448.2,670-688).
ccgccactacgatgacttt

SEQ ID NO: 22177 - DNA, 19 bp, Homo sapiens
  siRNA target sequence for BAZ1A (NM_013448.2,671-689).
cgccactacgatgactttt

SEQ ID NO: 22178 - DNA, 19 bp, Homo sapiens
  siRNA target sequence for BAZ1A (NM_013448.2,672-690).
gccactacgatgacttttt

SEQ ID NO: 22179 - DNA, 19 bp, Homo sapiens
  siRNA target sequence for BAZ1A (NM_013448.2,673-691).
ccactacgatgactttttt

SEQ ID NO: 22180 - DNA, 19 bp, Homo sapiens
  siRNA target sequence for BAZ1A (NM_013448.2,685-703).
cttttttgaacgaaccatt

SEQ ID NO: 22181 - DNA, 19 bp, Homo sapiens
  siRNA target sequence for BAZ1A (NM_013448.2,807-825).
gttttccagaaccactaat

SEQ ID NO: 22182 - DNA, 19 bp, Homo sapiens
  siRNA target sequence for BAZ1A (NM_013448.2,856-874).
ccatcgttcgcgcttacat

SEQ ID NO: 22183 - DNA, 19 bp, Homo sapiens
  siRNA target sequence for BAZ1A (NM_013448.2,860-878).
cgttcgcgcttacatgaaa

SEQ ID NO: 22184 - DNA, 19 bp, Homo sapiens
  siRNA target sequence for BAZ1A (NM_013448.2,861-879).
gttcgcgcttacatgaaat

SEQ ID NO: 22185 - DNA, 19 bp, Homo sapiens
  siRNA target sequence for BAZ1A (NM_013448.2,865-883).
gcgcttacatgaaatttgt

SEQ ID NO: 22186 - DNA, 19 bp, Homo sapiens
  siRNA target sequence for BAZ1A (NM_013448.2,887-905).
gatatctttgcatatgtca

SEQ ID NO: 22187 - DNA, 19 bp, Homo sapiens
  siRNA target sequence for BAZ1A (NM_013448.2,897-915).
catatgtcaaggatcgata

SEQ ID NO: 22188 - DNA, 19 bp, Homo sapiens
  siRNA target sequence for BAZ1A (NM_013448.2,964-982).
gcagtgtaggattttggaa

SEQ ID NO: 22189 - DNA, 19 bp, Homo sapiens
  siRNA target sequence for BAZ1A (NM_013448.2,998-1016).
catcaaaatggttttgcta

SEQ ID NO: 22190 - DNA, 19 bp, Homo sapiens
  siRNA target sequence for BAZ1A (NM_013448.2,1032-1050).
gtgtggatggagaaactat

SEQ ID NO: 22191 - DNA, 19 bp, Homo sapiens
  siRNA target sequence for BAZ1A (NM_013448.2,1118-1136).
gcaattgatcccttactat

SEQ ID NO: 22192 - DNA, 19 bp, Homo sapiens
  siRNA target sequence for BAZ1A (NM_013448.2,1119-1137).
caattgatcccttactatt

SEQ ID NO: 22193 - DNA, 19 bp, Homo sapiens
  siRNA target sequence for BAZ1A (NM_013448.2,1151-1169).
caacccactaaaaaagaat

SEQ ID NO: 22194 - DNA, 19 bp, Homo sapiens
  siRNA target sequence for BAZ1A (NM_013448.2,1206-1224).
gccggagaaaacacctatt

SEQ ID NO: 22195 - DNA, 19 bp, Homo sapiens
  siRNA target sequence for BAZ1A (NM_013448.2,1207-1225).
ccggagaaaacacctattt

SEQ ID NO: 22196 - DNA, 19 bp, Homo sapiens
  siRNA target sequence for BAZ1A (NM_013448.2,1219-1237).
cctattttctcgtgataaa

SEQ ID NO: 22197 - DNA, 19 bp, Homo sapiens
  siRNA target sequence for BAZ1A (NM_013448.2,1229-1247).
cgtgataaactaaagcttt

SEQ ID NO: 22198 - DNA, 19 bp, Homo sapiens
  siRNA target sequence for BAZ1A (NM_013448.2,1299-1317).
catctctttcaacgtataa

SEQ ID NO: 22199 - DNA, 19 bp, Homo sapiens
  siRNA target sequence for BAZ1A (NM_013448.2,1302-1320).
ctctttcaacgtataaaat

SEQ ID NO: 22200 - DNA, 19 bp, Homo sapiens
  siRNA target sequence for BAZ1A (NM_013448.2,1355-1373).
gatccacccacatttatct

SEQ ID NO: 22201 - DNA, 19 bp, Homo sapiens
  siRNA target sequence for BAZ1A (NM_013448.2,1358-1376).
ccacccacatttatcttca

SEQ ID NO: 22202 - DNA, 19 bp, Homo sapiens
  siRNA target sequence for BAZ1A (NM_013448.2,1397-1415).
gggagacctcccaaacgaa

SEQ ID NO: 22203 - DNA, 19 bp, Homo sapiens
  siRNA target sequence for BAZ1A (NM_013448.2,1398-1416).
ggagacctcccaaacgaat

SEQ ID NO: 22204 - DNA, 19 bp, Homo sapiens
  siRNA target sequence for BAZ1A (NM_013448.2,1399-1417).
gagacctcccaaacgaata

SEQ ID NO: 22205 - DNA, 19 bp, Homo sapiens
  siRNA target sequence for BAZ1A (NM_013448.2,1401-1419).
gacctcccaaacgaataca

SEQ ID NO: 22206 - DNA, 19 bp, Homo sapiens
  siRNA target sequence for BAZ1A (NM_013448.2,1406-1424).
cccaaacgaatacatatta

SEQ ID NO: 22207 - DNA, 19 bp, Homo sapiens
  siRNA target sequence for BAZ1A (NM_013448.2,1430-1448).
gaggacaatgttgctaata

SEQ ID NO: 22208 - DNA, 19 bp, Homo sapiens
  siRNA target sequence for BAZ1A (NM_013448.2,1451-1469).
cagactcttgcaagttata

SEQ ID NO: 22209 - DNA, 19 bp, Homo sapiens
  siRNA target sequence for BAZ1A (NM_013448.2,1470-1488).
ggagcaaagctactaaaga

SEQ ID NO: 22210 - DNA, 19 bp, Homo sapiens
  siRNA target sequence for BAZ1A (NM_013448.2,1471-1489).
gagcaaagctactaaagaa

SEQ ID NO: 22211 - DNA, 19 bp, Homo sapiens
  siRNA target sequence for BAZ1A (NM_013448.2,1858-1876).
ggttttggagttccttaat

SEQ ID NO: 22212 - DNA, 19 bp, Homo sapiens
  siRNA target sequence for BAZ1A (NM_013448.2,1884-1902).
gggaactttttgatcttca

SEQ ID NO: 22213 - DNA, 19 bp, Homo sapiens
  siRNA target sequence for BAZ1A (NM_013448.2,1885-1903).
ggaactttttgatcttcaa

SEQ ID NO: 22214 - DNA, 19 bp, Homo sapiens
  siRNA target sequence for BAZ1A (NM_013448.2,1920-1938).
gagtaaccctagaagtatt

SEQ ID NO: 22215 - DNA, 19 bp, Homo sapiens
  siRNA target sequence for BAZ1A (NM_013448.2,1972-1990).
cccactgtgtgaattgctt

SEQ ID NO: 22216 - DNA, 19 bp, Homo sapiens
  siRNA target sequence for BAZ1A (NM_013448.2,2042-2060).
gtagccaaagagcaactaa

SEQ ID NO: 22217 - DNA, 19 bp, Homo sapiens
  siRNA target sequence for BAZ1A (NM_013448.2,2198-2216).
cttgatagctgcactcttt

SEQ ID NO: 22218 - DNA, 19 bp, Homo sapiens
  siRNA target sequence for BAZ1A (NM_013448.2,2205-2223).
gctgcactctttcagaaat

SEQ ID NO: 22219 - DNA, 19 bp, Homo sapiens
  siRNA target sequence for BAZ1A (NM_013448.2,2267-2285).
gcaaatgcaaagtatagat

SEQ ID NO: 22220 - DNA, 19 bp, Homo sapiens
  siRNA target sequence for BAZ1A (NM_013448.2,2273-2291).
gcaaagtatagatatcaaa

SEQ ID NO: 22221 - DNA, 19 bp, Homo sapiens
  siRNA target sequence for BAZ1A (NM_013448.2,2274-2292).
caaagtatagatatcaaaa

SEQ ID NO: 22222 - DNA, 19 bp, Homo sapiens
  siRNA target sequence for BAZ1A (NM_013448.2,2278-2296).
gtatagatatcaaaaacga

SEQ ID NO: 22223 - DNA, 19 bp, Homo sapiens
  siRNA target sequence for BAZ1A (NM_013448.2,2310-2328).
ctacagatgatgcttgtat

SEQ ID NO: 22224 - DNA, 19 bp, Homo sapiens
  siRNA target sequence for BAZ1A (NM_013448.2,2322-2340).
cttgtatggagcttcgttt

SEQ ID NO: 22225 - DNA, 19 bp, Homo sapiens
  siRNA target sequence for BAZ1A (NM_013448.2,2349-2367).
ccagtctagtgaagaaact

SEQ ID NO: 22226 - DNA, 19 bp, Homo sapiens
  siRNA target sequence for BAZ1A (NM_013448.2,2368-2386).
gtcaagcacctcagtgtat

SEQ ID NO: 22227 - DNA, 19 bp, Homo sapiens
  siRNA target sequence for BAZ1A (NM_013448.2,2370-2388).
caagcacctcagtgtatga

SEQ ID NO: 22228 - DNA, 19 bp, Homo sapiens
  siRNA target sequence for BAZ1A (NM_013448.2,2373-2391).
gcacctcagtgtatgattt

SEQ ID NO: 22229 - DNA, 19 bp, Homo sapiens
  siRNA target sequence for BAZ1A (NM_013448.2,2377-2395).
ctcagtgtatgatttgaca

SEQ ID NO: 22230 - DNA, 19 bp, Homo sapiens
  siRNA target sequence for BAZ1A (NM_013448.2,2450-2468).
gtttcaactagggatttta

SEQ ID NO: 22231 - DNA, 19 bp, Homo sapiens
  siRNA target sequence for BAZ1A (NM_013448.2,2503-2521).
gcaggagttccgggaatta

SEQ ID NO: 22232 - DNA, 19 bp, Homo sapiens
  siRNA target sequence for BAZ1A (NM_013448.2,2504-2522).
caggagttccgggaattaa

SEQ ID NO: 22233 - DNA, 19 bp, Homo sapiens
  siRNA target sequence for BAZ1A (NM_013448.2,2509-2527).
gttccgggaattaaaagca

SEQ ID NO: 22234 - DNA, 19 bp, Homo sapiens
  siRNA target sequence for BAZ1A (NM_013448.2,2555-2573).
gcagctgccagaattcgta

SEQ ID NO: 22235 - DNA, 19 bp, Homo sapiens
  siRNA target sequence for BAZ1A (NM_013448.2,2556-2574).
cagctgccagaattcgtaa

SEQ ID NO: 22236 - DNA, 19 bp, Homo sapiens
  siRNA target sequence for BAZ1A (NM_013448.2,2558-2576).
gctgccagaattcgtaaaa

SEQ ID NO: 22237 - DNA, 19 bp, Homo sapiens
  siRNA target sequence for BAZ1A (NM_013448.2,2561-2579).
gccagaattcgtaaaagga

SEQ ID NO: 22238 - DNA, 19 bp, Homo sapiens
  siRNA target sequence for BAZ1A (NM_013448.2,2562-2580).
ccagaattcgtaaaaggaa

SEQ ID NO: 22239 - DNA, 19 bp, Homo sapiens
  siRNA target sequence for BAZ1A (NM_013448.2,2639-2657).
gaagatgagcaaagaaatt

SEQ ID NO: 22240 - DNA, 19 bp, Homo sapiens
  siRNA target sequence for BAZ1A (NM_013448.2,2652-2670).
gaaattcaacggcagatat

SEQ ID NO: 22241 - DNA, 19 bp, Homo sapiens
  siRNA target sequence for BAZ1A (NM_013448.2,2771-2789).
gatgacccaggatcacata

SEQ ID NO: 22242 - DNA, 19 bp, Homo sapiens
  siRNA target sequence for BAZ1A (NM_013448.2,2774-2792).
gacccaggatcacataaaa

SEQ ID NO: 22243 - DNA, 19 bp, Homo sapiens
  siRNA target sequence for BAZ1A (NM_013448.2,2849-2867).
cagatcaactgtgtaacaa

SEQ ID NO: 22244 - DNA, 19 bp, Homo sapiens
  siRNA target sequence for BAZ1A (NM_013448.2,2932-2950).
gctcttagaaaaaatccaa

SEQ ID NO: 22245 - DNA, 19 bp, Homo sapiens
  siRNA target sequence for BAZ1A (NM_013448.2,2954-2972).
gccatagcctgtaccaata

SEQ ID NO: 22246 - DNA, 19 bp, Homo sapiens
  siRNA target sequence for BAZ1A (NM_013448.2,2955-2973).
ccatagcctgtaccaatat

SEQ ID NO: 22247 - DNA, 19 bp, Homo sapiens
  siRNA target sequence for BAZ1A (NM_013448.2,2983-3001).
gggtcgcgaccgcatgtat

SEQ ID NO: 22248 - DNA, 19 bp, Homo sapiens
  siRNA target sequence for BAZ1A (NM_013448.2,2984-3002).
ggtcgcgaccgcatgtata

SEQ ID NO: 22249 - DNA, 19 bp, Homo sapiens
  siRNA target sequence for BAZ1A (NM_013448.2,3084-3102).
ctagaccttcatcatttca

SEQ ID NO: 22250 - DNA, 19 bp, Homo sapiens
  siRNA target sequence for BAZ1A (NM_013448.2,3125-3143).
cctcaggtatccactaaaa

SEQ ID NO: 22251 - DNA, 19 bp, Homo sapiens
  siRNA target sequence for BAZ1A (NM_013448.2,3152-3170).
cctttgatgtctgaatcta

SEQ ID NO: 22252 - DNA, 19 bp, Homo sapiens
  siRNA target sequence for BAZ1A (NM_013448.2,3233-3251).
ccaaatcggtggtgctttt

SEQ ID NO: 22253 - DNA, 19 bp, Homo sapiens
  siRNA target sequence for BAZ1A (NM_013448.2,3234-3252).
caaatcggtggtgctttta

SEQ ID NO: 22254 - DNA, 19 bp, Homo sapiens
  siRNA target sequence for BAZ1A (NM_013448.2,3239-3257).
cggtggtgcttttacagtt

SEQ ID NO: 22255 - DNA, 19 bp, Homo sapiens
  siRNA target sequence for BAZ1A (NM_013448.2,3359-3377).
gcacagctagcccgttttt

SEQ ID NO: 22256 - DNA, 19 bp, Homo sapiens
  siRNA target sequence for BAZ1A (NM_013448.2,3364-3382).
gctagcccgtttttctgaa

SEQ ID NO: 22257 - DNA, 19 bp, Homo sapiens
  siRNA target sequence for BAZ1A (NM_013448.2,3410-3428).
cagcctgatagcaaaccaa

SEQ ID NO: 22258 - DNA, 19 bp, Homo sapiens
  siRNA target sequence for BAZ1A (NM_013448.2,3414-3432).
ctgatagcaaaccaacata

SEQ ID NO: 22259 - DNA, 19 bp, Homo sapiens
  siRNA target sequence for BAZ1A (NM_013448.2,3440-3458).
ggaagatcttccaatgcat

SEQ ID NO: 22260 - DNA, 19 bp, Homo sapiens
  siRNA target sequence for BAZ1A (NM_013448.2,3494-3512).
gaactaaggctgagagatt

SEQ ID NO: 22261 - DNA, 19 bp, Homo sapiens
  siRNA target sequence for BAZ1A (NM_013448.2,3586-3604).
gagatcagcattagaaagt

SEQ ID NO: 22262 - DNA, 19 bp, Homo sapiens
  siRNA target sequence for BAZ1A (NM_013448.2,3605-3623).
ggacggtatgagctgttaa

SEQ ID NO: 22263 - DNA, 19 bp, Homo sapiens
  siRNA target sequence for BAZ1A (NM_013448.2,3785-3803).
gtgagcagtgtggttcatt

SEQ ID NO: 22264 - DNA, 19 bp, Homo sapiens
  siRNA target sequence for BAZ1A (NM_013448.2,3808-3826).
ggcaatggcactctttcaa

SEQ ID NO: 22265 - DNA, 19 bp, Homo sapiens
  siRNA target sequence for BAZ1A (NM_013448.2,3837-3855).
gcattgagcggcgttttct

SEQ ID NO: 22266 - DNA, 19 bp, Homo sapiens
  siRNA target sequence for BAZ1A (NM_013448.2,3876-3894).
gtgacagtgggcgttctta

SEQ ID NO: 22267 - DNA, 19 bp, Homo sapiens
  siRNA target sequence for BAZ1A (NM_013448.2,3880-3898).
cagtgggcgttcttataaa

SEQ ID NO: 22268 - DNA, 19 bp, Homo sapiens
  siRNA target sequence for BAZ1A (NM_013448.2,3885-3903).
ggcgttcttataaaacagt

SEQ ID NO: 22269 - DNA, 19 bp, Homo sapiens
  siRNA target sequence for BAZ1A (NM_013448.2,3886-3904).
gcgttcttataaaacagtt

SEQ ID NO: 22270 - DNA, 19 bp, Homo sapiens
  siRNA target sequence for BAZ1A (NM_013448.2,3929-3947).
ctttcttctgctagtctat

SEQ ID NO: 22271 - DNA, 19 bp, Homo sapiens
  siRNA target sequence for BAZ1A (NM_013448.2,3938-3956).
gctagtctatcccaagttt

SEQ ID NO: 22272 - DNA, 19 bp, Homo sapiens
  siRNA target sequence for BAZ1A (NM_013448.2,3939-3957).
ctagtctatcccaagtttt

SEQ ID NO: 22273 - DNA, 19 bp, Homo sapiens
  siRNA target sequence for BAZ1A (NM_013448.2,3977-3995).
gatcgtagcgtgatatggt

SEQ ID NO: 22274 - DNA, 19 bp, Homo sapiens
  siRNA target sequence for BAZ1A (NM_013448.2,3986-4004).
gtgatatggtctaaatcta

SEQ ID NO: 22275 - DNA, 19 bp, Homo sapiens
  siRNA target sequence for BAZ1A (NM_013448.2,3993-4011).
ggtctaaatctatactgaa

SEQ ID NO: 22276 - DNA, 19 bp, Homo sapiens
  siRNA target sequence for BAZ1A (NM_013448.2,4009-4027).
gaatgcgcgttgcaagata

SEQ ID NO: 22277 - DNA, 19 bp, Homo sapiens
  siRNA target sequence for BAZ1A (NM_013448.2,4020-4038).
gcaagatatgtcgaaagaa

SEQ ID NO: 22278 - DNA, 19 bp, Homo sapiens
  siRNA target sequence for BAZ1A (NM_013448.2,4021-4039).
caagatatgtcgaaagaaa

SEQ ID NO: 22279 - DNA, 19 bp, Homo sapiens
  siRNA target sequence for BAZ1A (NM_013448.2,4046-4064).
gctgaaaacatggttcttt

SEQ ID NO: 22280 - DNA, 19 bp, Homo sapiens
  siRNA target sequence for BAZ1A (NM_013448.2,4072-4090).
ctgtgataggggtcatcat

SEQ ID NO: 22281 - DNA, 19 bp, Homo sapiens
  siRNA target sequence for BAZ1A (NM_013448.2,4157-4175).
ccaaagcaacgttctagaa

SEQ ID NO: 22282 - DNA, 19 bp, Homo sapiens
  siRNA target sequence for BAZ1A (NM_013448.2,4355-4373).
cgaggaagaccacaagtta

SEQ ID NO: 22283 - DNA, 19 bp, Homo sapiens
  siRNA target sequence for BAZ1A (NM_013448.2,4394-4412).
gggaaacttagctcttctt

SEQ ID NO: 22284 - DNA, 19 bp, Homo sapiens
  siRNA target sequence for BAZ1A (NM_013448.2,4416-4434).
caagtcgtggccaacaaca

SEQ ID NO: 22285 - DNA, 19 bp, Homo sapiens
  siRNA target sequence for BAZ1A (NM_013448.2,4500-4518).
ctggtagaagcctaagaaa

SEQ ID NO: 22286 - DNA, 19 bp, Homo sapiens
  siRNA target sequence for BAZ1A (NM_013448.2,4536-4554).
ctacagaaacaaaatcttt

SEQ ID NO: 22287 - DNA, 19 bp, Homo sapiens
  siRNA target sequence for BAZ1A (NM_013448.2,4591-4609).
cccactgcaagcagatgta

SEQ ID NO: 22288 - DNA, 19 bp, Homo sapiens
  siRNA target sequence for BAZ1A (NM_013448.2,4592-4610).
ccactgcaagcagatgtat

SEQ ID NO: 22289 - DNA, 19 bp, Homo sapiens
  siRNA target sequence for BAZ1A (NM_013448.2,4593-4611).
cactgcaagcagatgtatt

SEQ ID NO: 22290 - DNA, 19 bp, Homo sapiens
  siRNA target sequence for BAZ1A (NM_013448.2,4607-4625).
gtatttgtggaattgctta

SEQ ID NO: 22291 - DNA, 19 bp, Homo sapiens
  siRNA target sequence for BAZ1A (NM_013448.2,4621-4639).
gcttagtcctcgtagaaaa

SEQ ID NO: 22292 - DNA, 19 bp, Homo sapiens
  siRNA target sequence for BAZ1A (NM_013448.2,4724-4742).
gaacagtcaagatctgtaa

SEQ ID NO: 22293 - DNA, 19 bp, Homo sapiens
  siRNA target sequence for BAZ1A (NM_013448.2,4856-4874).
ggaggagttcatgaattgt

SEQ ID NO: 22294 - DNA, 19 bp, Homo sapiens
  siRNA target sequence for BAZ1A (NM_013448.2,4883-4901).
gaacaacttgttgtagaat

SEQ ID NO: 22295 - DNA, 19 bp, Homo sapiens
  siRNA target sequence for BAZ1A (NM_013448.2,4921-4939).
ctggccttttttgaaactt

SEQ ID NO: 22296 - DNA, 19 bp, Homo sapiens
  siRNA target sequence for BAZ1A (NM_013448.2,4951-4969).
ccaggtcccagactactat

SEQ ID NO: 22297 - DNA, 19 bp, Homo sapiens
  siRNA target sequence for BAZ1A (NM_013448.2,5006-5024).
cgtgaaaaagtgaataagt

SEQ ID NO: 22298 - DNA, 19 bp, Homo sapiens
  siRNA target sequence for BAZ1A (NM_013448.2,5015-5033).
gtgaataagtgtgaatata

SEQ ID NO: 22299 - DNA, 19 bp, Homo sapiens
  siRNA target sequence for BAZ1A (NM_013448.2,5095-5113).
ccctcgtaacacaagtgaa

SEQ ID NO: 22300 - DNA, 19 bp, Homo sapiens
  siRNA target sequence for BAZ1A (NM_013448.2,5131-5149).
gcttcaagcattttttcat

SEQ ID NO: 22301 - DNA, 19 bp, Homo sapiens
  siRNA target sequence for BAZ1A (NM_013448.2,5173-5191).
ccacgtcacacccagtaat

SEQ ID NO: 22302 - DNA, 19 bp, Homo sapiens
  siRNA target sequence for BAZ1A (NM_013448.2,5210-5228).
ccaccggctgcgaaaaagt

SEQ ID NO: 22303 - DNA, 19 bp, Homo sapiens
  siRNA target sequence for BAZ2A (NM_013449.2,200-218).
gaggcaaacgaccatttta

SEQ ID NO: 22304 - DNA, 19 bp, Homo sapiens
  siRNA target sequence for BAZ2A (NM_013449.2,208-226).
cgaccattttaactttact

SEQ ID NO: 22305 - DNA, 19 bp, Homo sapiens
  siRNA target sequence for BAZ2A (NM_013449.2,279-297).
gggagggcctctacactaa

SEQ ID NO: 22306 - DNA, 19 bp, Homo sapiens
  siRNA target sequence for BAZ2A (NM_013449.2,360-378).
gcttatctactgtatctca

SEQ ID NO: 22307 - DNA, 19 bp, Homo sapiens
  siRNA target sequence for BAZ2A (NM_013449.2,588-606).
cttcatccccaagtcataa

SEQ ID NO: 22308 - DNA, 19 bp, Homo sapiens
  siRNA target sequence for BAZ2A (NM_013449.2,594-612).
ccccaagtcataacactaa

SEQ ID NO: 22309 - DNA, 19 bp, Homo sapiens
  siRNA target sequence for BAZ2A (NM_013449.2,657-675).
gtcccatggggcttaactt

SEQ ID NO: 22310 - DNA, 19 bp, Homo sapiens
  siRNA target sequence for BAZ2A (NM_013449.2,660-678).
ccatggggcttaactttga

SEQ ID NO: 22311 - DNA, 19 bp, Homo sapiens
  siRNA target sequence for BAZ2A (NM_013449.2,661-679).
catggggcttaactttgat

SEQ ID NO: 22312 - DNA, 19 bp, Homo sapiens
  siRNA target sequence for BAZ2A (NM_013449.2,664-682).
ggggcttaactttgattca

SEQ ID NO: 22313 - DNA, 19 bp, Homo sapiens
  siRNA target sequence for BAZ2A (NM_013449.2,841-859).
gaagatgtgtggctacaat

SEQ ID NO: 22314 - DNA, 19 bp, Homo sapiens
  siRNA target sequence for BAZ2A (NM_013449.2,868-886).
cccttctgtggaatcgtta

SEQ ID NO: 22315 - DNA, 19 bp, Homo sapiens
  siRNA target sequence for BAZ2A (NM_013449.2,921-939).
cagtgagctgtttagatga

SEQ ID NO: 22316 - DNA, 19 bp, Homo sapiens
  siRNA target sequence for BAZ2A (NM_013449.2,1026-1044).
cagtgagtggaggactata

SEQ ID NO: 22317 - DNA, 19 bp, Homo sapiens
  siRNA target sequence for BAZ2A (NM_013449.2,1030-1048).
gagtggaggactatatggt

SEQ ID NO: 22318 - DNA, 19 bp, Homo sapiens
  siRNA target sequence for BAZ2A (NM_013449.2,1032-1050).
gtggaggactatatggtat

SEQ ID NO: 22319 - DNA, 19 bp, Homo sapiens
  siRNA target sequence for BAZ2A (NM_013449.2,1162-1180).
ggcagatgatagtcaaaca

SEQ ID NO: 22320 - DNA, 19 bp, Homo sapiens
  siRNA target sequence for BAZ2A (NM_013449.2,1163-1181).
gcagatgatagtcaaacat

SEQ ID NO: 22321 - DNA, 19 bp, Homo sapiens
  siRNA target sequence for BAZ2A (NM_013449.2,1166-1184).
gatgatagtcaaacatcaa

SEQ ID NO: 22322 - DNA, 19 bp, Homo sapiens
  siRNA target sequence for BAZ2A (NM_013449.2,1226-1244).
gagtctgtcctgcaagata

SEQ ID NO: 22323 - DNA, 19 bp, Homo sapiens
  siRNA target sequence for BAZ2A (NM_013449.2,1531-1549).
cccagcagtctccttagaa

SEQ ID NO: 22324 - DNA, 19 bp, Homo sapiens
  siRNA target sequence for BAZ2A (NM_013449.2,1533-1551).
cagcagtctccttagaagt

SEQ ID NO: 22325 - DNA, 19 bp, Homo sapiens
  siRNA target sequence for BAZ2A (NM_013449.2,1665-1683).
ctgctgacgtggaagagat

SEQ ID NO: 22326 - DNA, 19 bp, Homo sapiens
  siRNA target sequence for BAZ2A (NM_013449.2,1723-1741).
catgaggagacgtattgct

SEQ ID NO: 22327 - DNA, 19 bp, Homo sapiens
  siRNA target sequence for BAZ2A (NM_013449.2,1820-1838).
cagggggagacctggtatt

SEQ ID NO: 22328 - DNA, 19 bp, Homo sapiens
  siRNA target sequence for BAZ2A (NM_013449.2,2056-2074).
gggtcgacctcgaaacact

SEQ ID NO: 22329 - DNA, 19 bp, Homo sapiens
  siRNA target sequence for BAZ2A (NM_013449.2,2077-2095).
gaaggctaagactaaggaa

SEQ ID NO: 22330 - DNA, 19 bp, Homo sapiens
  siRNA target sequence for BAZ2A (NM_013449.2,2123-2141).
cggccacctaaggtcaaaa

SEQ ID NO: 22331 - DNA, 19 bp, Homo sapiens
  siRNA target sequence for BAZ2A (NM_013449.2,2124-2142).
ggccacctaaggtcaaaat

SEQ ID NO: 22332 - DNA, 19 bp, Homo sapiens
  siRNA target sequence for BAZ2A (NM_013449.2,2202-2220).
cattgaatgaggaggataa

SEQ ID NO: 22333 - DNA, 19 bp, Homo sapiens
  siRNA target sequence for BAZ2A (NM_013449.2,2304-2322).
gaaataagcggaaacaaga

SEQ ID NO: 22334 - DNA, 19 bp, Homo sapiens
  siRNA target sequence for BAZ2A (NM_013449.2,2850-2868).
gtcagtccctaaagatctt

SEQ ID NO: 22335 - DNA, 19 bp, Homo sapiens
  siRNA target sequence for BAZ2A (NM_013449.2,2890-2908).
cccactgacaagagacaat

SEQ ID NO: 22336 - DNA, 19 bp, Homo sapiens
  siRNA target sequence for BAZ2A (NM_013449.2,3136-3154).
gctccggaggctgaaaact

SEQ ID NO: 22337 - DNA, 19 bp, Homo sapiens
  siRNA target sequence for BAZ2A (NM_013449.2,3171-3189).
ctgggcggtctgaagtaga

SEQ ID NO: 22338 - DNA, 19 bp, Homo sapiens
  siRNA target sequence for BAZ2A (NM_013449.2,3174-3192).
ggcggtctgaagtagagat

SEQ ID NO: 22339 - DNA, 19 bp, Homo sapiens
  siRNA target sequence for BAZ2A (NM_013449.2,3301-3319).
ccgcaggggtcgaagagat

SEQ ID NO: 22340 - DNA, 19 bp, Homo sapiens
  siRNA target sequence for BAZ2A (NM_013449.2,3381-3399).
gcaagcgtcagcttttctt

SEQ ID NO: 22341 - DNA, 19 bp, Homo sapiens
  siRNA target sequence for BAZ2A (NM_013449.2,3382-3400).
caagcgtcagcttttcttt

SEQ ID NO: 22342 - DNA, 19 bp, Homo sapiens
  siRNA target sequence for BAZ2A (NM_013449.2,3486-3504).
cgtatttggctggtatctt

SEQ ID NO: 22343 - DNA, 19 bp, Homo sapiens
  siRNA target sequence for BAZ2A (NM_013449.2,3493-3511).
ggctggtatctttgtagaa

SEQ ID NO: 22344 - DNA, 19 bp, Homo sapiens
  siRNA target sequence for BAZ2A (NM_013449.2,3533-3551).
cctgaggaggtgataaaga

SEQ ID NO: 22345 - DNA, 19 bp, Homo sapiens
  siRNA target sequence for BAZ2A (NM_013449.2,4165-4183).
ctcctccaagccaatgaat

SEQ ID NO: 22346 - DNA, 19 bp, Homo sapiens
  siRNA target sequence for BAZ2A (NM_013449.2,4168-4186).
ctccaagccaatgaataga

SEQ ID NO: 22347 - DNA, 19 bp, Homo sapiens
  siRNA target sequence for BAZ2A (NM_013449.2,4322-4340).
gggagacctcccagtaagt

SEQ ID NO: 22348 - DNA, 19 bp, Homo sapiens
  siRNA target sequence for BAZ2A (NM_013449.2,4323-4341).
ggagacctcccagtaagtt

SEQ ID NO: 22349 - DNA, 19 bp, Homo sapiens
  siRNA target sequence for BAZ2A (NM_013449.2,4329-4347).
ctcccagtaagttcttcaa

SEQ ID NO: 22350 - DNA, 19 bp, Homo sapiens
  siRNA target sequence for BAZ2A (NM_013449.2,4335-4353).
gtaagttcttcaaacagat

SEQ ID NO: 22351 - DNA, 19 bp, Homo sapiens
  siRNA target sequence for BAZ2A (NM_013449.2,4351-4369).
gatggaacagcgttaccta

SEQ ID NO: 22352 - DNA, 19 bp, Homo sapiens
  siRNA target sequence for BAZ2A (NM_013449.2,4587-4605).
cctttcaagaagggattat

SEQ ID NO: 22353 - DNA, 19 bp, Homo sapiens
  siRNA target sequence for BAZ2A (NM_013449.2,4640-4658).
gacctagcagtgcttcaat

SEQ ID NO: 22354 - DNA, 19 bp, Homo sapiens
  siRNA target sequence for BAZ2A (NM_013449.2,4673-4691).
gagcagcgggttatcatgt

SEQ ID NO: 22355 - DNA, 19 bp, Homo sapiens
  siRNA target sequence for BAZ2A (NM_013449.2,4770-4788).
ccgactcccaggaggatat

SEQ ID NO: 22356 - DNA, 19 bp, Homo sapiens
  siRNA target sequence for BAZ2A (NM_013449.2,4951-4969).
cctgcttagcacacctaat

SEQ ID NO: 22357 - DNA, 19 bp, Homo sapiens
  siRNA target sequence for BAZ2A (NM_013449.2,4954-4972).
gcttagcacacctaatggt

SEQ ID NO: 22358 - DNA, 19 bp, Homo sapiens
  siRNA target sequence for BAZ2A (NM_013449.2,4981-4999).
gggcaccactacagagata

SEQ ID NO: 22359 - DNA, 19 bp, Homo sapiens
  siRNA target sequence for BAZ2A (NM_013449.2,4982-5000).
ggcaccactacagagatat

SEQ ID NO: 22360 - DNA, 19 bp, Homo sapiens
  siRNA target sequence for BAZ2A (NM_013449.2,4986-5004).
ccactacagagatatcata

SEQ ID NO: 22361 - DNA, 19 bp, Homo sapiens
  siRNA target sequence for BAZ2A (NM_013449.2,4987-5005).
cactacagagatatcatat

SEQ ID NO: 22362 - DNA, 19 bp, Homo sapiens
  siRNA target sequence for BAZ2A (NM_013449.2,5122-5140).
caacaaagtgacatgtcta

SEQ ID NO: 22363 - DNA, 19 bp, Homo sapiens
  siRNA target sequence for BAZ2A (NM_013449.2,5253-5271).
ggttctgtactgtctgttt

SEQ ID NO: 22364 - DNA, 19 bp, Homo sapiens
  siRNA target sequence for BAZ2A (NM_013449.2,5329-5347).
gaagcggaaaagtggttat

SEQ ID NO: 22365 - DNA, 19 bp, Homo sapiens
  siRNA target sequence for BAZ2A (NM_013449.2,5340-5358).
gtggttattcgctgaactt

SEQ ID NO: 22366 - DNA, 19 bp, Homo sapiens
  siRNA target sequence for BAZ2A (NM_013449.2,5342-5360).
ggttattcgctgaacttct

SEQ ID NO: 22367 - DNA, 19 bp, Homo sapiens
  siRNA target sequence for BAZ2A (NM_013449.2,5495-5513).
ctcacattttgcgagatta

SEQ ID NO: 22368 - DNA, 19 bp, Homo sapiens
  siRNA target sequence for BAZ2A (NM_013449.2,5499-5517).
cattttgcgagattatcct

SEQ ID NO: 22369 - DNA, 19 bp, Homo sapiens
  siRNA target sequence for BAZ2A (NM_013449.2,5593-5611).
gcgcatcatcaaaaatcct

SEQ ID NO: 22370 - DNA, 19 bp, Homo sapiens
  siRNA target sequence for BAZ2A (NM_013449.2,5594-5612).
cgcatcatcaaaaatccta

SEQ ID NO: 22371 - DNA, 19 bp, Homo sapiens
  siRNA target sequence for BAZ2A (NM_013449.2,5595-5613).
gcatcatcaaaaatcctat

SEQ ID NO: 22372 - DNA, 19 bp, Homo sapiens
  siRNA target sequence for BAZ2A (NM_013449.2,5775-5793).
gccgctgggaggagtttta

SEQ ID NO: 22373 - DNA, 19 bp, Homo sapiens
  siRNA target sequence for BAZ2A (NM_013449.2,5776-5794).
ccgctgggaggagttttat

SEQ ID NO: 22374 - DNA, 19 bp, Homo sapiens
  siRNA target sequence for BAZ2B (NM_013450.1,369-387).
gggacaaactaaaagtaca

SEQ ID NO: 22375 - DNA, 19 bp, Homo sapiens
  siRNA target sequence for BAZ2B (NM_013450.1,413-431).
gtaatcaggaacaaagcaa

SEQ ID NO: 22376 - DNA, 19 bp, Homo sapiens
  siRNA target sequence for BAZ2B (NM_013450.1,444-462).
ggatgctagagttgacaaa

SEQ ID NO: 22377 - DNA, 19 bp, Homo sapiens
  siRNA target sequence for BAZ2B (NM_013450.1,486-504).
gaaagcaatggaaagttct

SEQ ID NO: 22378 - DNA, 19 bp, Homo sapiens
  siRNA target sequence for BAZ2B (NM_013450.1,503-521).
ctagcaacagtgatagtga

SEQ ID NO: 22379 - DNA, 19 bp, Homo sapiens
  siRNA target sequence for BAZ2B (NM_013450.1,507-525).
caacagtgatagtgattca

SEQ ID NO: 22380 - DNA, 19 bp, Homo sapiens
  siRNA target sequence for BAZ2B (NM_013450.1,543-561).
ctcaagtgaaggcattagt

SEQ ID NO: 22381 - DNA, 19 bp, Homo sapiens
  siRNA target sequence for BAZ2B (NM_013450.1,563-581).
gcagtgattcagatgatct

SEQ ID NO: 22382 - DNA, 19 bp, Homo sapiens
  siRNA target sequence for BAZ2B (NM_013450.1,566-584).
gtgattcagatgatctaga

SEQ ID NO: 22383 - DNA, 19 bp, Homo sapiens
  siRNA target sequence for BAZ2B (NM_013450.1,648-666).
gagtgaagcacaacataaa

SEQ ID NO: 22384 - DNA, 19 bp, Homo sapiens
  siRNA target sequence for BAZ2B (NM_013450.1,652-670).
gaagcacaacataaaagta

SEQ ID NO: 22385 - DNA, 19 bp, Homo sapiens
  siRNA target sequence for BAZ2B (NM_013450.1,668-686).
gtaacaaccaggtgctatt

SEQ ID NO: 22386 - DNA, 19 bp, Homo sapiens
  siRNA target sequence for BAZ2B (NM_013450.1,783-801).
ccagactcactcattccaa

SEQ ID NO: 22387 - DNA, 19 bp, Homo sapiens
  siRNA target sequence for BAZ2B (NM_013450.1,885-903).
caaacacaccagtgtaata

SEQ ID NO: 22388 - DNA, 19 bp, Homo sapiens
  siRNA target sequence for BAZ2B (NM_013450.1,913-931).
ggattggtgtccaatgtga

SEQ ID NO: 22389 - DNA, 19 bp, Homo sapiens
  siRNA target sequence for BAZ2B (NM_013450.1,919-937).
gtgtccaatgtgaaacctt

SEQ ID NO: 22390 - DNA, 19 bp, Homo sapiens
  siRNA target sequence for BAZ2B (NM_013450.1,924-942).
caatgtgaaacctttatct

SEQ ID NO: 22391 - DNA, 19 bp, Homo sapiens
  siRNA target sequence for BAZ2B (NM_013450.1,956-974).
ccaaaaaggaaacttacat

SEQ ID NO: 22392 - DNA, 19 bp, Homo sapiens
  siRNA target sequence for BAZ2B (NM_013450.1,988-1006).
ccttctcctgatgttctta

SEQ ID NO: 22393 - DNA, 19 bp, Homo sapiens
  siRNA target sequence for BAZ2B (NM_013450.1,1026-1044).
ctctgaagaatctagttta

SEQ ID NO: 22394 - DNA, 19 bp, Homo sapiens
  siRNA target sequence for BAZ2B (NM_013450.1,1028-1046).
ctgaagaatctagtttatt

SEQ ID NO: 22395 - DNA, 19 bp, Homo sapiens
  siRNA target sequence for BAZ2B (NM_013450.1,1061-1079).
gatccaaacgggaacaata

SEQ ID NO: 22396 - DNA, 19 bp, Homo sapiens
  siRNA target sequence for BAZ2B (NM_013450.1,1064-1082).
ccaaacgggaacaatataa

SEQ ID NO: 22397 - DNA, 19 bp, Homo sapiens
  siRNA target sequence for BAZ2B (NM_013450.1,1065-1083).
caaacgggaacaatataaa

SEQ ID NO: 22398 - DNA, 19 bp, Homo sapiens
  siRNA target sequence for BAZ2B (NM_013450.1,1230-1248).
gacaaatgcacttttaggt

SEQ ID NO: 22399 - DNA, 19 bp, Homo sapiens
  siRNA target sequence for BAZ2B (NM_013450.1,1297-1315).
ctagcacttactaccaaaa

SEQ ID NO: 22400 - DNA, 19 bp, Homo sapiens
  siRNA target sequence for BAZ2B (NM_013450.1,1300-1318).
gcacttactaccaaaacta

SEQ ID NO: 22401 - DNA, 19 bp, Homo sapiens
  siRNA target sequence for BAZ2B (NM_013450.1,1354-1372).
gcaagtagcaccccttttt

SEQ ID NO: 22402 - DNA, 19 bp, Homo sapiens
  siRNA target sequence for BAZ2B (NM_013450.1,1415-1433).
gcaatcagacacctgtaat

SEQ ID NO: 22403 - DNA, 19 bp, Homo sapiens
  siRNA target sequence for BAZ2B (NM_013450.1,1894-1912).
gctgccttatgttctgaat

SEQ ID NO: 22404 - DNA, 19 bp, Homo sapiens
  siRNA target sequence for BAZ2B (NM_013450.1,2006-2024).
gtgaactgcgtattccatt

SEQ ID NO: 22405 - DNA, 19 bp, Homo sapiens
  siRNA target sequence for BAZ2B (NM_013450.1,2011-2029).
ctgcgtattccattggaat

SEQ ID NO: 22406 - DNA, 19 bp, Homo sapiens
  siRNA target sequence for BAZ2B (NM_013450.1,2120-2138).
ggcagtaccctgaagtaat

SEQ ID NO: 22407 - DNA, 19 bp, Homo sapiens
  siRNA target sequence for BAZ2B (NM_013450.1,2122-2140).
cagtaccctgaagtaataa

SEQ ID NO: 22408 - DNA, 19 bp, Homo sapiens
  siRNA target sequence for BAZ2B (NM_013450.1,2127-2145).
ccctgaagtaataaagtat

SEQ ID NO: 22409 - DNA, 19 bp, Homo sapiens
  siRNA target sequence for BAZ2B (NM_013450.1,2129-2147).
ctgaagtaataaagtatct

SEQ ID NO: 22410 - DNA, 19 bp, Homo sapiens
  siRNA target sequence for BAZ2B (NM_013450.1,2158-2176).
ggaataatggatatctcaa

SEQ ID NO: 22411 - DNA, 19 bp, Homo sapiens
  siRNA target sequence for BAZ2B (NM_013450.1,2167-2185).
gatatctcaagggacaatt

SEQ ID NO: 22412 - DNA, 19 bp, Homo sapiens
  siRNA target sequence for BAZ2B (NM_013450.1,2373-2391).
gaaaggtcgacctccaaat

SEQ ID NO: 22413 - DNA, 19 bp, Homo sapiens
  siRNA target sequence for BAZ2B (NM_013450.1,2422-2440).
gatgcaaagttgctaagaa

SEQ ID NO: 22414 - DNA, 19 bp, Homo sapiens
  siRNA target sequence for BAZ2B (NM_013450.1,2465-2483).
ggcaagcagcacaaataaa

SEQ ID NO: 22415 - DNA, 19 bp, Homo sapiens
  siRNA target sequence for BAZ2B (NM_013450.1,2484-2502).
gcttttgagaaaacttcaa

SEQ ID NO: 22416 - DNA, 19 bp, Homo sapiens
  siRNA target sequence for BAZ2B (NM_013450.1,2485-2503).
cttttgagaaaacttcaaa

SEQ ID NO: 22417 - DNA, 19 bp, Homo sapiens
  siRNA target sequence for BAZ2B (NM_013450.1,2665-2683).
caaattctagaggctaaaa

SEQ ID NO: 22418 - DNA, 19 bp, Homo sapiens
  siRNA target sequence for BAZ2B (NM_013450.1,2701-2719).
gcggcaaatgccaaattat

SEQ ID NO: 22419 - DNA, 19 bp, Homo sapiens
  siRNA target sequence for BAZ2B (NM_013450.1,2702-2720).
cggcaaatgccaaattatt

SEQ ID NO: 22420 - DNA, 19 bp, Homo sapiens
  siRNA target sequence for BAZ2B (NM_013450.1,2722-2740).
gaggccgagaaacgaataa

SEQ ID NO: 22421 - DNA, 19 bp, Homo sapiens
  siRNA target sequence for BAZ2B (NM_013450.1,2726-2744).
ccgagaaacgaataaagga

SEQ ID NO: 22422 - DNA, 19 bp, Homo sapiens
  siRNA target sequence for BAZ2B (NM_013450.1,2803-2821).
cgacaacacatgatgctta

SEQ ID NO: 22423 - DNA, 19 bp, Homo sapiens
  siRNA target sequence for BAZ2B (NM_013450.1,2827-2845).
gctatggaagctcgtaaaa

SEQ ID NO: 22424 - DNA, 19 bp, Homo sapiens
  siRNA target sequence for BAZ2B (NM_013450.1,2828-2846).
ctatggaagctcgtaaaaa

SEQ ID NO: 22425 - DNA, 19 bp, Homo sapiens
  siRNA target sequence for BAZ2B (NM_013450.1,2865-2883).
gttgaaacaagaaaaacgt

SEQ ID NO: 22426 - DNA, 19 bp, Homo sapiens
  siRNA target sequence for BAZ2B (NM_013450.1,2919-2937).
gcagcgaagattagaatta

SEQ ID NO: 22427 - DNA, 19 bp, Homo sapiens
  siRNA target sequence for BAZ2B (NM_013450.1,3000-3018).
gccagagttgcctcgtatt

SEQ ID NO: 22428 - DNA, 19 bp, Homo sapiens
  siRNA target sequence for BAZ2B (NM_013450.1,3064-3082).
gtggtgcagttcttacgaa

SEQ ID NO: 22429 - DNA, 19 bp, Homo sapiens
  siRNA target sequence for BAZ2B (NM_013450.1,3075-3093).
cttacgaaactttggtaaa

SEQ ID NO: 22430 - DNA, 19 bp, Homo sapiens
  siRNA target sequence for BAZ2B (NM_013450.1,3079-3097).
cgaaactttggtaaagttt

SEQ ID NO: 22431 - DNA, 19 bp, Homo sapiens
  siRNA target sequence for BAZ2B (NM_013450.1,3125-3143).
caaacctgagtgttcttca

SEQ ID NO: 22432 - DNA, 19 bp, Homo sapiens
  siRNA target sequence for BAZ2B (NM_013450.1,3139-3157).
cttcaagagggattgctaa

SEQ ID NO: 22433 - DNA, 19 bp, Homo sapiens
  siRNA target sequence for BAZ2B (NM_013450.1,3165-3183).
ggacagcatgggtgaagta

SEQ ID NO: 22434 - DNA, 19 bp, Homo sapiens
  siRNA target sequence for BAZ2B (NM_013450.1,3168-3186).
cagcatgggtgaagtacaa

SEQ ID NO: 22435 - DNA, 19 bp, Homo sapiens
  siRNA target sequence for BAZ2B (NM_013450.1,3170-3188).
gcatgggtgaagtacaaga

SEQ ID NO: 22436 - DNA, 19 bp, Homo sapiens
  siRNA target sequence for BAZ2B (NM_013450.1,3230-3248).
gtctaataacaggatacaa

SEQ ID NO: 22437 - DNA, 19 bp, Homo sapiens
  siRNA target sequence for BAZ2B (NM_013450.1,3289-3307).
gtgaatcgagacaatgttt

SEQ ID NO: 22438 - DNA, 19 bp, Homo sapiens
  siRNA target sequence for BAZ2B (NM_013450.1,3350-3368).
ctgagcttactgaaagtct

SEQ ID NO: 22439 - DNA, 19 bp, Homo sapiens
  siRNA target sequence for BAZ2B (NM_013450.1,3420-3438).
ggctttcctgatcaatgaa

SEQ ID NO: 22440 - DNA, 19 bp, Homo sapiens
  siRNA target sequence for BAZ2B (NM_013450.1,3464-3482).
gtgaaatcgacaagaacat

SEQ ID NO: 22441 - DNA, 19 bp, Homo sapiens
  siRNA target sequence for BAZ2B (NM_013450.1,3471-3489).
cgacaagaacattgattat

SEQ ID NO: 22442 - DNA, 19 bp, Homo sapiens
  siRNA target sequence for BAZ2B (NM_013450.1,3472-3490).
gacaagaacattgattata

SEQ ID NO: 22443 - DNA, 19 bp, Homo sapiens
  siRNA target sequence for BAZ2B (NM_013450.1,3515-3533).
gggtggtagaaggtaaact

SEQ ID NO: 22444 - DNA, 19 bp, Homo sapiens
  siRNA target sequence for BAZ2B (NM_013450.1,3532-3550).
ctccgcaagctcagaatca

SEQ ID NO: 22445 - DNA, 19 bp, Homo sapiens
  siRNA target sequence for BAZ2B (NM_013450.1,3534-3552).
ccgcaagctcagaatcatt

SEQ ID NO: 22446 - DNA, 19 bp, Homo sapiens
  siRNA target sequence for BAZ2B (NM_013450.1,3545-3563).
gaatcattcatgctaagaa

SEQ ID NO: 22447 - DNA, 19 bp, Homo sapiens
  siRNA target sequence for BAZ2B (NM_013450.1,3762-3780).
gactgatatctgtgaagat

SEQ ID NO: 22448 - DNA, 19 bp, Homo sapiens
  siRNA target sequence for BAZ2B (NM_013450.1,3861-3879).
cagaaggaagctctttgat

SEQ ID NO: 22449 - DNA, 19 bp, Homo sapiens
  siRNA target sequence for BAZ2B (NM_013450.1,3890-3908).
cattgcgttcagtgatgtt

SEQ ID NO: 22450 - DNA, 19 bp, Homo sapiens
  siRNA target sequence for BAZ2B (NM_013450.1,3953-3971).
gtggggggatttttgtaga

SEQ ID NO: 22451 - DNA, 19 bp, Homo sapiens
  siRNA target sequence for BAZ2B (NM_013450.1,4068-4086).
gacttctggggacagttta

SEQ ID NO: 22452 - DNA, 19 bp, Homo sapiens
  siRNA target sequence for BAZ2B (NM_013450.1,4178-4196).
ccaaattaagcaagctttt

SEQ ID NO: 22453 - DNA, 19 bp, Homo sapiens
  siRNA target sequence for BAZ2B (NM_013450.1,4216-4234).
cctgagtcagaggttatga

SEQ ID NO: 22454 - DNA, 19 bp, Homo sapiens
  siRNA target sequence for BAZ2B (NM_013450.1,4262-4280).
ggtgcacgttgtcttatca

SEQ ID NO: 22455 - DNA, 19 bp, Homo sapiens
  siRNA target sequence for BAZ2B (NM_013450.1,4265-4283).
gcacgttgtcttatcagaa

SEQ ID NO: 22456 - DNA, 19 bp, Homo sapiens
  siRNA target sequence for BAZ2B (NM_013450.1,4325-4343).
cgcaaagcaatgtggaaaa

SEQ ID NO: 22457 - DNA, 19 bp, Homo sapiens
  siRNA target sequence for BAZ2B (NM_013450.1,4348-4366).
gactctaataatctgttta

SEQ ID NO: 22458 - DNA, 19 bp, Homo sapiens
  siRNA target sequence for BAZ2B (NM_013450.1,4407-4425).
ccccaatgaccagttacta

SEQ ID NO: 22459 - DNA, 19 bp, Homo sapiens
  siRNA target sequence for BAZ2B (NM_013450.1,4408-4426).
cccaatgaccagttactaa

SEQ ID NO: 22460 - DNA, 19 bp, Homo sapiens
  siRNA target sequence for BAZ2B (NM_013450.1,4409-4427).
ccaatgaccagttactaaa

SEQ ID NO: 22461 - DNA, 19 bp, Homo sapiens
  siRNA target sequence for BAZ2B (NM_013450.1,4431-4449).
gctgactgaaaagaataga

SEQ ID NO: 22462 - DNA, 19 bp, Homo sapiens
  siRNA target sequence for BAZ2B (NM_013450.1,4479-4497).
ctgtgatgacacttcactt

SEQ ID NO: 22463 - DNA, 19 bp, Homo sapiens
  siRNA target sequence for BAZ2B (NM_013450.1,4495-4513).
cttactcatgccgatatgt

SEQ ID NO: 22464 - DNA, 19 bp, Homo sapiens
  siRNA target sequence for BAZ2B (NM_013450.1,4641-4659).
ggtgaaaggtggagtatct

SEQ ID NO: 22465 - DNA, 19 bp, Homo sapiens
  siRNA target sequence for BAZ2B (NM_013450.1,4662-4680).
gatgggacttcagttttgt

SEQ ID NO: 22466 - DNA, 19 bp, Homo sapiens
  siRNA target sequence for BAZ2B (NM_013450.1,4689-4707).
cactggtgtggttacttct

SEQ ID NO: 22467 - DNA, 19 bp, Homo sapiens
  siRNA target sequence for BAZ2B (NM_013450.1,4694-4712).
gtgtggttacttctaatat

SEQ ID NO: 22468 - DNA, 19 bp, Homo sapiens
  siRNA target sequence for BAZ2B (NM_013450.1,4698-4716).
ggttacttctaatattcca

SEQ ID NO: 22469 - DNA, 19 bp, Homo sapiens
  siRNA target sequence for BAZ2B (NM_013450.1,4699-4717).
gttacttctaatattccat

SEQ ID NO: 22470 - DNA, 19 bp, Homo sapiens
  siRNA target sequence for BAZ2B (NM_013450.1,4745-4763).
cggggttagggttatcaga

SEQ ID NO: 22471 - DNA, 19 bp, Homo sapiens
  siRNA target sequence for BAZ2B (NM_013450.1,4746-4764).
ggggttagggttatcagaa

SEQ ID NO: 22472 - DNA, 19 bp, Homo sapiens
  siRNA target sequence for BAZ2B (NM_013450.1,4790-4808).
ccaatgttgcttcaagtaa

SEQ ID NO: 22473 - DNA, 19 bp, Homo sapiens
  siRNA target sequence for BAZ2B (NM_013450.1,4928-4946).
gttggtggagaattattga

SEQ ID NO: 22474 - DNA, 19 bp, Homo sapiens
  siRNA target sequence for BAZ2B (NM_013450.1,4948-4966).
ccagaggacctaaaagctt

SEQ ID NO: 22475 - DNA, 19 bp, Homo sapiens
  siRNA target sequence for BAZ2B (NM_013450.1,4949-4967).
cagaggacctaaaagcttt

SEQ ID NO: 22476 - DNA, 19 bp, Homo sapiens
  siRNA target sequence for BAZ2B (NM_013450.1,5045-5063).
ctcaagcctgcctcaagaa

SEQ ID NO: 22477 - DNA, 19 bp, Homo sapiens
  siRNA target sequence for BAZ2B (NM_013450.1,5067-5085).
ggatgttgctattattgaa

SEQ ID NO: 22478 - DNA, 19 bp, Homo sapiens
  siRNA target sequence for BAZ2B (NM_013450.1,5106-5124).
ccaagtaactcgagatatt

SEQ ID NO: 22479 - DNA, 19 bp, Homo sapiens
  siRNA target sequence for BAZ2B (NM_013450.1,5175-5193).
ccttcaacaggtagaagat

SEQ ID NO: 22480 - DNA, 19 bp, Homo sapiens
  siRNA target sequence for BAZ2B (NM_013450.1,5314-5332).
gagcatgatggagaattta

SEQ ID NO: 22481 - DNA, 19 bp, Homo sapiens
  siRNA target sequence for BAZ2B (NM_013450.1,5375-5393).
gtgacaaccccctagatat

SEQ ID NO: 22482 - DNA, 19 bp, Homo sapiens
  siRNA target sequence for BAZ2B (NM_013450.1,5419-5437).
gagcggaacattgaaagaa

SEQ ID NO: 22483 - DNA, 19 bp, Homo sapiens
  siRNA target sequence for BAZ2B (NM_013450.1,5421-5439).
gcggaacattgaaagaaga

SEQ ID NO: 22484 - DNA, 19 bp, Homo sapiens
  siRNA target sequence for BAZ2B (NM_013450.1,5516-5534).
ctctgtgcattcagcaatt

SEQ ID NO: 22485 - DNA, 19 bp, Homo sapiens
  siRNA target sequence for BAZ2B (NM_013450.1,5529-5547).
gcaattacagaaatcaata

SEQ ID NO: 22486 - DNA, 19 bp, Homo sapiens
  siRNA target sequence for BAZ2B (NM_013450.1,5588-5606).
gtcgaaagggagataatga

SEQ ID NO: 22487 - DNA, 19 bp, Homo sapiens
  siRNA target sequence for BAZ2B (NM_013450.1,5655-5673).
ctgccatagacccaagatt

SEQ ID NO: 22488 - DNA, 19 bp, Homo sapiens
  siRNA target sequence for BAZ2B (NM_013450.1,5658-5676).
ccatagacccaagattaca

SEQ ID NO: 22489 - DNA, 19 bp, Homo sapiens
  siRNA target sequence for BAZ2B (NM_013450.1,5659-5677).
catagacccaagattacaa

SEQ ID NO: 22490 - DNA, 19 bp, Homo sapiens
  siRNA target sequence for BAZ2B (NM_013450.1,5702-5720).
gtccagcttgcattgctaa

SEQ ID NO: 22491 - DNA, 19 bp, Homo sapiens
  siRNA target sequence for BAZ2B (NM_013450.1,5722-5740).
gcaagtggtcaaactctaa

SEQ ID NO: 22492 - DNA, 19 bp, Homo sapiens
  siRNA target sequence for BAZ2B (NM_013450.1,5723-5741).
caagtggtcaaactctaaa

SEQ ID NO: 22493 - DNA, 19 bp, Homo sapiens
  siRNA target sequence for BAZ2B (NM_013450.1,5728-5746).
ggtcaaactctaaaaatca

SEQ ID NO: 22494 - DNA, 19 bp, Homo sapiens
  siRNA target sequence for BAZ2B (NM_013450.1,5793-5811).
caagaaggtaactttaaca

SEQ ID NO: 22495 - DNA, 19 bp, Homo sapiens
  siRNA target sequence for BAZ2B (NM_013450.1,5840-5858).
ctacaagtagttcactaaa

SEQ ID NO: 22496 - DNA, 19 bp, Homo sapiens
  siRNA target sequence for BAZ2B (NM_013450.1,5892-5910).
ggaggaaaacacttctatt

SEQ ID NO: 22497 - DNA, 19 bp, Homo sapiens
  siRNA target sequence for BAZ2B (NM_013450.1,5893-5911).
gaggaaaacacttctatta

SEQ ID NO: 22498 - DNA, 19 bp, Homo sapiens
  siRNA target sequence for BAZ2B (NM_013450.1,5903-5921).
cttctattaacttgtcaaa

SEQ ID NO: 22499 - DNA, 19 bp, Homo sapiens
  siRNA target sequence for BAZ2B (NM_013450.1,5916-5934).
gtcaaaacaagaaagtttt

SEQ ID NO: 22500 - DNA, 19 bp, Homo sapiens
  siRNA target sequence for BAZ2B (NM_013450.1,5926-5944).
gaaagttttacttcagtta

SEQ ID NO: 22501 - DNA, 19 bp, Homo sapiens
  siRNA target sequence for BAZ2B (NM_013450.1,6093-6111).
ggatttttccacaattaga

SEQ ID NO: 22502 - DNA, 19 bp, Homo sapiens
  siRNA target sequence for BAZ2B (NM_013450.1,6122-6140).
gtagtggacagtatccaaa

SEQ ID NO: 22503 - DNA, 19 bp, Homo sapiens
  siRNA target sequence for BAZ2B (NM_013450.1,6157-6175).
ctagatgtcaggcttgttt

SEQ ID NO: 22504 - DNA, 19 bp, Homo sapiens
  siRNA target sequence for BAZ2B (NM_013450.1,6172-6190).
gtttttgacaactgtgaaa

SEQ ID NO: 22505 - DNA, 19 bp, Homo sapiens
  siRNA target sequence for BAZ2B (NM_013450.1,6217-6235).
ggcagagctggccacaata

SEQ ID NO: 22506 - DNA, 19 bp, Homo sapiens
  siRNA target sequence for BAZ2B (NM_013450.1,6218-6236).
gcagagctggccacaatat

SEQ ID NO: 22507 - DNA, 19 bp, Homo sapiens
  siRNA target sequence for BAZ2B (NM_013450.1,6250-6268).
gaaaaaaagtggacagata

SEQ ID NO: 22508 - DNA, 19 bp, Homo sapiens
  siRNA target sequence for BAZ2B (NM_013450.1,6258-6276).
gtggacagatactttcaaa

SEQ ID NO: 22509 - DNA, 19 bp, Homo sapiens
  siRNA target sequence for BBX (NM_020235.2,372-390).
ggaaaacgaccaaaacgaa

SEQ ID NO: 22510 - DNA, 19 bp, Homo sapiens
  siRNA target sequence for BBX (NM_020235.2,413-431).
gctagcaaagaaacttctt

SEQ ID NO: 22511 - DNA, 19 bp, Homo sapiens
  siRNA target sequence for BBX (NM_020235.2,461-479).
cgaagaggaggatattgat

SEQ ID NO: 22512 - DNA, 19 bp, Homo sapiens
  siRNA target sequence for BBX (NM_020235.2,641-659).
ccgaggtgctaccaagata

SEQ ID NO: 22513 - DNA, 19 bp, Homo sapiens
  siRNA target sequence for BBX (NM_020235.2,711-729).
gacatggccaaggagtata

SEQ ID NO: 22514 - DNA, 19 bp, Homo sapiens
  siRNA target sequence for BBX (NM_020235.2,716-734).
ggccaaggagtataaggat

SEQ ID NO: 22515 - DNA, 19 bp, Homo sapiens
  siRNA target sequence for BBX (NM_020235.2,723-741).
gagtataaggatgcattta

SEQ ID NO: 22516 - DNA, 19 bp, Homo sapiens
  siRNA target sequence for BBX (NM_020235.2,747-765).
gcaaatcctggctacaaat

SEQ ID NO: 22517 - DNA, 19 bp, Homo sapiens
  siRNA target sequence for BBX (NM_020235.2,766-784).
ggtgtcctaccacaaacaa

SEQ ID NO: 22518 - DNA, 19 bp, Homo sapiens
  siRNA target sequence for BBX (NM_020235.2,808-826).
ctgtcaatccacgaaagaa

SEQ ID NO: 22519 - DNA, 19 bp, Homo sapiens
  siRNA target sequence for BBX (NM_020235.2,812-830).
caatccacgaaagaaactt

SEQ ID NO: 22520 - DNA, 19 bp, Homo sapiens
  siRNA target sequence for BBX (NM_020235.2,891-909).
gaaatgcctcagcttaact

SEQ ID NO: 22521 - DNA, 19 bp, Homo sapiens
  siRNA target sequence for BBX (NM_020235.2,897-915).
cctcagcttaactttggaa

SEQ ID NO: 22522 - DNA, 19 bp, Homo sapiens
  siRNA target sequence for BBX (NM_020235.2,1006-1024).
gcaggcctgatgtttcaga

SEQ ID NO: 22523 - DNA, 19 bp, Homo sapiens
  siRNA target sequence for BBX (NM_020235.2,1065-1083).
gccgagatatcttcaagta

SEQ ID NO: 22524 - DNA, 19 bp, Homo sapiens
  siRNA target sequence for BBX (NM_020235.2,1226-1244).
gatgtgcctggcatcagaa

SEQ ID NO: 22525 - DNA, 19 bp, Homo sapiens
  siRNA target sequence for BBX (NM_020235.2,1555-1573).
ctgccagtagcaagataat

SEQ ID NO: 22526 - DNA, 19 bp, Homo sapiens
  siRNA target sequence for BBX (NM_020235.2,1558-1576).
ccagtagcaagataataat

SEQ ID NO: 22527 - DNA, 19 bp, Homo sapiens
  siRNA target sequence for BBX (NM_020235.2,1564-1582).
gcaagataataattagtga

SEQ ID NO: 22528 - DNA, 19 bp, Homo sapiens
  siRNA target sequence for BBX (NM_020235.2,1565-1583).
caagataataattagtgat

SEQ ID NO: 22529 - DNA, 19 bp, Homo sapiens
  siRNA target sequence for BBX (NM_020235.2,1611-1629).
catcctcatggaattatga

SEQ ID NO: 22530 - DNA, 19 bp, Homo sapiens
  siRNA target sequence for BBX (NM_020235.2,1635-1653).
gaggatcccgcagcattaa

SEQ ID NO: 22531 - DNA, 19 bp, Homo sapiens
  siRNA target sequence for BBX (NM_020235.2,1638-1656).
gatcccgcagcattaaaca

SEQ ID NO: 22532 - DNA, 19 bp, Homo sapiens
  siRNA target sequence for BBX (NM_020235.2,1751-1769).
gtcttcggaatctgacatt

SEQ ID NO: 22533 - DNA, 19 bp, Homo sapiens
  siRNA target sequence for BBX (NM_020235.2,1753-1771).
cttcggaatctgacattga

SEQ ID NO: 22534 - DNA, 19 bp, Homo sapiens
  siRNA target sequence for BBX (NM_020235.2,1766-1784).
cattgagagcgtcatatat

SEQ ID NO: 22535 - DNA, 19 bp, Homo sapiens
  siRNA target sequence for BBX (NM_020235.2,1770-1788).
gagagcgtcatatatacca

SEQ ID NO: 22536 - DNA, 19 bp, Homo sapiens
  siRNA target sequence for BBX (NM_020235.2,1775-1793).
cgtcatatataccattgaa

SEQ ID NO: 22537 - DNA, 19 bp, Homo sapiens
  siRNA target sequence for BBX (NM_020235.2,1974-1992).
cctccagatttcattagta

SEQ ID NO: 22538 - DNA, 19 bp, Homo sapiens
  siRNA target sequence for BBX (NM_020235.2,1975-1993).
ctccagatttcattagtat

SEQ ID NO: 22539 - DNA, 19 bp, Homo sapiens
  siRNA target sequence for BBX (NM_020235.2,2164-2182).
gcaaaggtgctctttataa

SEQ ID NO: 22540 - DNA, 19 bp, Homo sapiens
  siRNA target sequence for BBX (NM_020235.2,2209-2227).
cctctctgcgagctaatgt

SEQ ID NO: 22541 - DNA, 19 bp, Homo sapiens
  siRNA target sequence for BBX (NM_020235.2,2210-2228).
ctctctgcgagctaatgtt

SEQ ID NO: 22542 - DNA, 19 bp, Homo sapiens
  siRNA target sequence for BBX (NM_020235.2,2212-2230).
ctctgcgagctaatgttga

SEQ ID NO: 22543 - DNA, 19 bp, Homo sapiens
  siRNA target sequence for BBX (NM_020235.2,2226-2244).
gttgacagaggaaaacgaa

SEQ ID NO: 22544 - DNA, 19 bp, Homo sapiens
  siRNA target sequence for BBX (NM_020235.2,2257-2275).
gaaactcctctgatcatga

SEQ ID NO: 22545 - DNA, 19 bp, Homo sapiens
  siRNA target sequence for BBX (NM_020235.2,2378-2396).
cgcaaagctggatgaagaa

SEQ ID NO: 22546 - DNA, 19 bp, Homo sapiens
  siRNA target sequence for BBX (NM_020235.2,2411-2429).
caacagcctccctcaatat

SEQ ID NO: 22547 - DNA, 19 bp, Homo sapiens
  siRNA target sequence for BBX (NM_020235.2,2414-2432).
cagcctccctcaatatagt

SEQ ID NO: 22548 - DNA, 19 bp, Homo sapiens
  siRNA target sequence for BBX (NM_020235.2,2424-2442).
caatatagtcctgttacat

SEQ ID NO: 22549 - DNA, 19 bp, Homo sapiens
  siRNA target sequence for BBX (NM_020235.2,2440-2458).
catttgaccggaaatgtgt

SEQ ID NO: 22550 - DNA, 19 bp, Homo sapiens
  siRNA target sequence for BBX (NM_020235.2,2455-2473).
gtgtacctgtcccaagaaa

SEQ ID NO: 22551 - DNA, 19 bp, Homo sapiens
  siRNA target sequence for BBX (NM_020235.2,2495-2513).
gtcctcagaaccgactaaa

SEQ ID NO: 22552 - DNA, 19 bp, Homo sapiens
  siRNA target sequence for BBX (NM_020235.2,2606-2624).
caccatggagcctgttcat

SEQ ID NO: 22553 - DNA, 19 bp, Homo sapiens
  siRNA target sequence for BBX (NM_020235.2,2608-2626).
ccatggagcctgttcataa

SEQ ID NO: 22554 - DNA, 19 bp, Homo sapiens
  siRNA target sequence for BBX (NM_020235.2,2770-2788).
gaggtactttggatgacaa

SEQ ID NO: 22555 - DNA, 19 bp, Homo sapiens
  siRNA target sequence for BBX (NM_020235.2,2776-2794).
ctttggatgacaaaccaaa

SEQ ID NO: 22556 - DNA, 19 bp, Homo sapiens
  siRNA target sequence for BBX (NM_020235.2,2831-2849).
gacagactgcaatgacaaa

SEQ ID NO: 22557 - DNA, 19 bp, Homo sapiens
  siRNA target sequence for BBX (NM_020235.2,3019-3037).
cgcaggctcctgtacttat

SEQ ID NO: 22558 - DNA, 19 bp, Homo sapiens
  siRNA target sequence for BBX (NM_020235.2,3021-3039).
caggctcctgtacttattt

SEQ ID NO: 22559 - DNA, 19 bp, Homo sapiens
  siRNA target sequence for BDP1 (NM_018429.1,383-401).
gagcggagccccaagaaaa

SEQ ID NO: 22560 - DNA, 19 bp, Homo sapiens
  siRNA target sequence for BDP1 (NM_018429.1,411-429).
gagcagtactgaaaagact

SEQ ID NO: 22561 - DNA, 19 bp, Homo sapiens
  siRNA target sequence for BDP1 (NM_018429.1,426-444).
gactggtggtgacaatgat

SEQ ID NO: 22562 - DNA, 19 bp, Homo sapiens
  siRNA target sequence for BDP1 (NM_018429.1,493-511).
cgaatatcaagtacttcta

SEQ ID NO: 22563 - DNA, 19 bp, Homo sapiens
  siRNA target sequence for BDP1 (NM_018429.1,503-521).
gtacttctagcctggttaa

SEQ ID NO: 22564 - DNA, 19 bp, Homo sapiens
  siRNA target sequence for BDP1 (NM_018429.1,544-562).
gaatctcatcccttatcta

SEQ ID NO: 22565 - DNA, 19 bp, Homo sapiens
  siRNA target sequence for BDP1 (NM_018429.1,587-605).
caactgccacttcaacaaa

SEQ ID NO: 22566 - DNA, 19 bp, Homo sapiens
  siRNA target sequence for BDP1 (NM_018429.1,623-641).
cagacagataccgaatata

SEQ ID NO: 22567 - DNA, 19 bp, Homo sapiens
  siRNA target sequence for BDP1 (NM_018429.1,625-643).
gacagataccgaatataca

SEQ ID NO: 22568 - DNA, 19 bp, Homo sapiens
  siRNA target sequence for BDP1 (NM_018429.1,735-753).
gccaccagatcgttcaaaa

SEQ ID NO: 22569 - DNA, 19 bp, Homo sapiens
  siRNA target sequence for BDP1 (NM_018429.1,745-763).
cgttcaaaaatgactatga

SEQ ID NO: 22570 - DNA, 19 bp, Homo sapiens
  siRNA target sequence for BDP1 (NM_018429.1,758-776).
ctatgagagacttcatata

SEQ ID NO: 22571 - DNA, 19 bp, Homo sapiens
  siRNA target sequence for BDP1 (NM_018429.1,781-799).
ctaccagataataatccaa

SEQ ID NO: 22572 - DNA, 19 bp, Homo sapiens
  siRNA target sequence for BDP1 (NM_018429.1,862-880).
gagcaagaaggtaagagta

SEQ ID NO: 22573 - DNA, 19 bp, Homo sapiens
  siRNA target sequence for BDP1 (NM_018429.1,917-935).
cagatgatgggccattact

SEQ ID NO: 22574 - DNA, 19 bp, Homo sapiens
  siRNA target sequence for BDP1 (NM_018429.1,989-1007).
gtttaactgtagaagtttt

SEQ ID NO: 22575 - DNA, 19 bp, Homo sapiens
  siRNA target sequence for BDP1 (NM_018429.1,1054-1072).
gagcgcggttctacaacta

SEQ ID NO: 22576 - DNA, 19 bp, Homo sapiens
  siRNA target sequence for BDP1 (NM_018429.1,1056-1074).
gcgcggttctacaactaca

SEQ ID NO: 22577 - DNA, 19 bp, Homo sapiens
  siRNA target sequence for BDP1 (NM_018429.1,1057-1075).
cgcggttctacaactacat

SEQ ID NO: 22578 - DNA, 19 bp, Homo sapiens
  siRNA target sequence for BDP1 (NM_018429.1,1058-1076).
gcggttctacaactacata

SEQ ID NO: 22579 - DNA, 19 bp, Homo sapiens
  siRNA target sequence for BDP1 (NM_018429.1,1159-1177).
ggaactgacttttctatga

SEQ ID NO: 22580 - DNA, 19 bp, Homo sapiens
  siRNA target sequence for BDP1 (NM_018429.1,1160-1178).
gaactgacttttctatgat

SEQ ID NO: 22581 - DNA, 19 bp, Homo sapiens
  siRNA target sequence for BDP1 (NM_018429.1,1172-1190).
ctatgatcggacaactttt

SEQ ID NO: 22582 - DNA, 19 bp, Homo sapiens
  siRNA target sequence for BDP1 (NM_018429.1,1176-1194).
gatcggacaactttttcct

SEQ ID NO: 22583 - DNA, 19 bp, Homo sapiens
  siRNA target sequence for BDP1 (NM_018429.1,1276-1294).
gaaaagcgcccttttgact

SEQ ID NO: 22584 - DNA, 19 bp, Homo sapiens
  siRNA target sequence for BDP1 (NM_018429.1,1282-1300).
cgcccttttgacttcgatt

SEQ ID NO: 22585 - DNA, 19 bp, Homo sapiens
  siRNA target sequence for BDP1 (NM_018429.1,1284-1302).
cccttttgacttcgatttt

SEQ ID NO: 22586 - DNA, 19 bp, Homo sapiens
  siRNA target sequence for BDP1 (NM_018429.1,1286-1304).
cttttgacttcgatttttt

SEQ ID NO: 22587 - DNA, 19 bp, Homo sapiens
  siRNA target sequence for BDP1 (NM_018429.1,1392-1410).
caccaaaccacggaaaaat

SEQ ID NO: 22588 - DNA, 19 bp, Homo sapiens
  siRNA target sequence for BDP1 (NM_018429.1,1394-1412).
ccaaaccacggaaaaatgt

SEQ ID NO: 22589 - DNA, 19 bp, Homo sapiens
  siRNA target sequence for BDP1 (NM_018429.1,1450-1468).
gatccagatgagtctatga

SEQ ID NO: 22590 - DNA, 19 bp, Homo sapiens
  siRNA target sequence for BDP1 (NM_018429.1,1453-1471).
ccagatgagtctatgagtt

SEQ ID NO: 22591 - DNA, 19 bp, Homo sapiens
  siRNA target sequence for BDP1 (NM_018429.1,1503-1521).
ggatgctcagacagttgaa

SEQ ID NO: 22592 - DNA, 19 bp, Homo sapiens
  siRNA target sequence for BDP1 (NM_018429.1,1525-1543).
gagtctctgaccttatcaa

SEQ ID NO: 22593 - DNA, 19 bp, Homo sapiens
  siRNA target sequence for BDP1 (NM_018429.1,1553-1571).
cagagcaggttgcattaga

SEQ ID NO: 22594 - DNA, 19 bp, Homo sapiens
  siRNA target sequence for BDP1 (NM_018429.1,1565-1583).
cattagaagtagacctaaa

SEQ ID NO: 22595 - DNA, 19 bp, Homo sapiens
  siRNA target sequence for BDP1 (NM_018429.1,1629-1647).
gggagtaaacaatctttta

SEQ ID NO: 22596 - DNA, 19 bp, Homo sapiens
  siRNA target sequence for BDP1 (NM_018429.1,1631-1649).
gagtaaacaatcttttaga

SEQ ID NO: 22597 - DNA, 19 bp, Homo sapiens
  siRNA target sequence for BDP1 (NM_018429.1,1665-1683).
ggcgggtccttctaaagga

SEQ ID NO: 22598 - DNA, 19 bp, Homo sapiens
  siRNA target sequence for BDP1 (NM_018429.1,1756-1774).
ctttcctgcacacaaaaca

SEQ ID NO: 22599 - DNA, 19 bp, Homo sapiens
  siRNA target sequence for BDP1 (NM_018429.1,1760-1778).
cctgcacacaaaacataga

SEQ ID NO: 22600 - DNA, 19 bp, Homo sapiens
  siRNA target sequence for BDP1 (NM_018429.1,1761-1779).
ctgcacacaaaacatagat

SEQ ID NO: 22601 - DNA, 19 bp, Homo sapiens
  siRNA target sequence for BDP1 (NM_018429.1,1825-1843).
gaccccatcctttcattaa

SEQ ID NO: 22602 - DNA, 19 bp, Homo sapiens
  siRNA target sequence for BDP1 (NM_018429.1,1828-1846).
cccatcctttcattaagta

SEQ ID NO: 22603 - DNA, 19 bp, Homo sapiens
  siRNA target sequence for BDP1 (NM_018429.1,1833-1851).
cctttcattaagtaatcaa

SEQ ID NO: 22604 - DNA, 19 bp, Homo sapiens
  siRNA target sequence for BDP1 (NM_018429.1,1838-1856).
cattaagtaatcaacaaga

SEQ ID NO: 22605 - DNA, 19 bp, Homo sapiens
  siRNA target sequence for BDP1 (NM_018429.1,1907-1925).
cttcattcgaagttggaat

SEQ ID NO: 22606 - DNA, 19 bp, Homo sapiens
  siRNA target sequence for BDP1 (NM_018429.1,1930-1948).
gcattgtgtgaggtgaata

SEQ ID NO: 22607 - DNA, 19 bp, Homo sapiens
  siRNA target sequence for BDP1 (NM_018429.1,1931-1949).
cattgtgtgaggtgaataa

SEQ ID NO: 22608 - DNA, 19 bp, Homo sapiens
  siRNA target sequence for BDP1 (NM_018429.1,1935-1953).
gtgtgaggtgaataatgct

SEQ ID NO: 22609 - DNA, 19 bp, Homo sapiens
  siRNA target sequence for BDP1 (NM_018429.1,1952-1970).
ctgagggtagttgtataga

SEQ ID NO: 22610 - DNA, 19 bp, Homo sapiens
  siRNA target sequence for BDP1 (NM_018429.1,1981-1999).
gttgacctaaaaaataatt

SEQ ID NO: 22611 - DNA, 19 bp, Homo sapiens
  siRNA target sequence for BDP1 (NM_018429.1,2059-2077).
cctaaacccaatttgtcaa

SEQ ID NO: 22612 - DNA, 19 bp, Homo sapiens
  siRNA target sequence for BDP1 (NM_018429.1,2124-2142).
gagcaagaattcacattca

SEQ ID NO: 22613 - DNA, 19 bp, Homo sapiens
  siRNA target sequence for BDP1 (NM_018429.1,2297-2315).
ctttaagacctgtacaagt

SEQ ID NO: 22614 - DNA, 19 bp, Homo sapiens
  siRNA target sequence for BDP1 (NM_018429.1,2340-2358).
gccaaatgcaggtaaagct

SEQ ID NO: 22615 - DNA, 19 bp, Homo sapiens
  siRNA target sequence for BDP1 (NM_018429.1,2402-2420).
ccaatgtagagaagaatga

SEQ ID NO: 22616 - DNA, 19 bp, Homo sapiens
  siRNA target sequence for BDP1 (NM_018429.1,2450-2468).
ctcaacacatggaagatca

SEQ ID NO: 22617 - DNA, 19 bp, Homo sapiens
  siRNA target sequence for BDP1 (NM_018429.1,2464-2482).
gatcaatcgcgtaaagatt

SEQ ID NO: 22618 - DNA, 19 bp, Homo sapiens
  siRNA target sequence for BDP1 (NM_018429.1,2545-2563).
gatgagcccaaggttctta

SEQ ID NO: 22619 - DNA, 19 bp, Homo sapiens
  siRNA target sequence for BDP1 (NM_018429.1,2550-2568).
gcccaaggttcttaatgaa

SEQ ID NO: 22620 - DNA, 19 bp, Homo sapiens
  siRNA target sequence for BDP1 (NM_018429.1,2556-2574).
ggttcttaatgaatgtcta

SEQ ID NO: 22621 - DNA, 19 bp, Homo sapiens
  siRNA target sequence for BDP1 (NM_018429.1,2557-2575).
gttcttaatgaatgtctaa

SEQ ID NO: 22622 - DNA, 19 bp, Homo sapiens
  siRNA target sequence for BDP1 (NM_018429.1,2572-2590).
ctaagcgttcaagagaata

SEQ ID NO: 22623 - DNA, 19 bp, Homo sapiens
  siRNA target sequence for BDP1 (NM_018429.1,2576-2594).
gcgttcaagagaataataa

SEQ ID NO: 22624 - DNA, 19 bp, Homo sapiens
  siRNA target sequence for BDP1 (NM_018429.1,2623-2641).
ctaaggactcgatttcaga

SEQ ID NO: 22625 - DNA, 19 bp, Homo sapiens
  siRNA target sequence for BDP1 (NM_018429.1,2700-2718).
ggtactagagaagattctt

SEQ ID NO: 22626 - DNA, 19 bp, Homo sapiens
  siRNA target sequence for BDP1 (NM_018429.1,2794-2812).
gagattaatactaaagaaa

SEQ ID NO: 22627 - DNA, 19 bp, Homo sapiens
  siRNA target sequence for BDP1 (NM_018429.1,2877-2895).
gattgatgacaccatagaa

SEQ ID NO: 22628 - DNA, 19 bp, Homo sapiens
  siRNA target sequence for BDP1 (NM_018429.1,2919-2937).
gggaagagagatttgtcta

SEQ ID NO: 22629 - DNA, 19 bp, Homo sapiens
  siRNA target sequence for BDP1 (NM_018429.1,3928-3946).
gcagagttcagtgctataa

SEQ ID NO: 22630 - DNA, 19 bp, Homo sapiens
  siRNA target sequence for BDP1 (NM_018429.1,3938-3956).
gtgctataagggaaaagga

SEQ ID NO: 22631 - DNA, 19 bp, Homo sapiens
  siRNA target sequence for BDP1 (NM_018429.1,3991-4009).
cccatcatggagaaagtat

SEQ ID NO: 22632 - DNA, 19 bp, Homo sapiens
  siRNA target sequence for BDP1 (NM_018429.1,4216-4234).
cagagcggtagcaatgact

SEQ ID NO: 22633 - DNA, 19 bp, Homo sapiens
  siRNA target sequence for BDP1 (NM_018429.1,4279-4297).
gtactgtcgatgatgcata

SEQ ID NO: 22634 - DNA, 19 bp, Homo sapiens
  siRNA target sequence for BDP1 (NM_018429.1,4290-4308).
gatgcatacacctgtagaa

SEQ ID NO: 22635 - DNA, 19 bp, Homo sapiens
  siRNA target sequence for BDP1 (NM_018429.1,4294-4312).
catacacctgtagaagaaa

SEQ ID NO: 22636 - DNA, 19 bp, Homo sapiens
  siRNA target sequence for BDP1 (NM_018429.1,4340-4358).
gtcacttcagtcatttcaa

SEQ ID NO: 22637 - DNA, 19 bp, Homo sapiens
  siRNA target sequence for BDP1 (NM_018429.1,4369-4387).
cagactcatgaatctgata

SEQ ID NO: 22638 - DNA, 19 bp, Homo sapiens
  siRNA target sequence for BDP1 (NM_018429.1,4423-4441).
ccagagcagttttcagata

SEQ ID NO: 22639 - DNA, 19 bp, Homo sapiens
  siRNA target sequence for BDP1 (NM_018429.1,4504-4522).
gtgaggagccgattcaaaa

SEQ ID NO: 22640 - DNA, 19 bp, Homo sapiens
  siRNA target sequence for BDP1 (NM_018429.1,4506-4524).
gaggagccgattcaaaaga

SEQ ID NO: 22641 - DNA, 19 bp, Homo sapiens
  siRNA target sequence for BDP1 (NM_018429.1,4512-4530).
ccgattcaaaagaccaaaa

SEQ ID NO: 22642 - DNA, 19 bp, Homo sapiens
  siRNA target sequence for BDP1 (NM_018429.1,4540-4558).
gcaagagcagctttgaaga

SEQ ID NO: 22643 - DNA, 19 bp, Homo sapiens
  siRNA target sequence for BDP1 (NM_018429.1,4662-4680).
cccttctcaacatgatgaa

SEQ ID NO: 22644 - DNA, 19 bp, Homo sapiens
  siRNA target sequence for BDP1 (NM_018429.1,4675-4693).
gatgaagcttccctaatga

SEQ ID NO: 22645 - DNA, 19 bp, Homo sapiens
  siRNA target sequence for BDP1 (NM_018429.1,4678-4696).
gaagcttccctaatgatat

SEQ ID NO: 22646 - DNA, 19 bp, Homo sapiens
  siRNA target sequence for BDP1 (NM_018429.1,4681-4699).
gcttccctaatgatatcaa

SEQ ID NO: 22647 - DNA, 19 bp, Homo sapiens
  siRNA target sequence for BDP1 (NM_018429.1,4686-4704).
cctaatgatatcaagagaa

SEQ ID NO: 22648 - DNA, 19 bp, Homo sapiens
  siRNA target sequence for BDP1 (NM_018429.1,4817-4835).
caccagtccagaaaaatga

SEQ ID NO: 22649 - DNA, 19 bp, Homo sapiens
  siRNA target sequence for BDP1 (NM_018429.1,4847-4865).
ctgtggggactaataatgt

SEQ ID NO: 22650 - DNA, 19 bp, Homo sapiens
  siRNA target sequence for BDP1 (NM_018429.1,4856-4874).
ctaataatgtaaacacttt

SEQ ID NO: 22651 - DNA, 19 bp, Homo sapiens
  siRNA target sequence for BDP1 (NM_018429.1,4902-4920).
ccaaactgctcgacaagta

SEQ ID NO: 22652 - DNA, 19 bp, Homo sapiens
  siRNA target sequence for BDP1 (NM_018429.1,4903-4921).
caaactgctcgacaagtaa

SEQ ID NO: 22653 - DNA, 19 bp, Homo sapiens
  siRNA target sequence for BDP1 (NM_018429.1,4939-4957).
ccgagaccaaatataagaa

SEQ ID NO: 22654 - DNA, 19 bp, Homo sapiens
  siRNA target sequence for BDP1 (NM_018429.1,4994-5012).
ccaaaggcataattaagga

SEQ ID NO: 22655 - DNA, 19 bp, Homo sapiens
  siRNA target sequence for BDP1 (NM_018429.1,5014-5032).
ggaagaacgatattaccaa

SEQ ID NO: 22656 - DNA, 19 bp, Homo sapiens
  siRNA target sequence for BDP1 (NM_018429.1,5021-5039).
cgatattaccaaaagatga

SEQ ID NO: 22657 - DNA, 19 bp, Homo sapiens
  siRNA target sequence for BDP1 (NM_018429.1,5155-5173).
gtagaaaaccttcatgtta

SEQ ID NO: 22658 - DNA, 19 bp, Homo sapiens
  siRNA target sequence for BDP1 (NM_018429.1,5158-5176).
gaaaaccttcatgttaaca

SEQ ID NO: 22659 - DNA, 19 bp, Homo sapiens
  siRNA target sequence for BDP1 (NM_018429.1,5251-5269).
caaaaggctaagccaaatt

SEQ ID NO: 22660 - DNA, 19 bp, Homo sapiens
  siRNA target sequence for BDP1 (NM_018429.1,5338-5356).
ggcaagccagaagatcatt

SEQ ID NO: 22661 - DNA, 19 bp, Homo sapiens
  siRNA target sequence for BDP1 (NM_018429.1,5339-5357).
gcaagccagaagatcattt

SEQ ID NO: 22662 - DNA, 19 bp, Homo sapiens
  siRNA target sequence for BDP1 (NM_018429.1,5461-5479).
gagtctgctttggcaaaaa

SEQ ID NO: 22663 - DNA, 19 bp, Homo sapiens
  siRNA target sequence for BDP1 (NM_018429.1,5497-5515).
gaagttggaccatcaagaa

SEQ ID NO: 22664 - DNA, 19 bp, Homo sapiens
  siRNA target sequence for BDP1 (NM_018429.1,5527-5545).
gaaactgtaggagataatt

SEQ ID NO: 22665 - DNA, 19 bp, Homo sapiens
  siRNA target sequence for BDP1 (NM_018429.1,5555-5573).
cagttgttgaagagcaata

SEQ ID NO: 22666 - DNA, 19 bp, Homo sapiens
  siRNA target sequence for BDP1 (NM_018429.1,5591-5609).
gctgtccacaaccgttaaa

SEQ ID NO: 22667 - DNA, 19 bp, Homo sapiens
  siRNA target sequence for BDP1 (NM_018429.1,5594-5612).
gtccacaaccgttaaacga

SEQ ID NO: 22668 - DNA, 19 bp, Homo sapiens
  siRNA target sequence for BDP1 (NM_018429.1,5596-5614).
ccacaaccgttaaacgaaa

SEQ ID NO: 22669 - DNA, 19 bp, Homo sapiens
  siRNA target sequence for BDP1 (NM_018429.1,5599-5617).
caaccgttaaacgaaacaa

SEQ ID NO: 22670 - DNA, 19 bp, Homo sapiens
  siRNA target sequence for BDP1 (NM_018429.1,5603-5621).
cgttaaacgaaacaagtta

SEQ ID NO: 22671 - DNA, 19 bp, Homo sapiens
  siRNA target sequence for BDP1 (NM_018429.1,5657-5675).
cttctacatctgagtatga

SEQ ID NO: 22672 - DNA, 19 bp, Homo sapiens
  siRNA target sequence for BDP1 (NM_018429.1,5752-5770).
cggggtaagacctctaaga

SEQ ID NO: 22673 - DNA, 19 bp, Homo sapiens
  siRNA target sequence for BDP1 (NM_018429.1,5753-5771).
ggggtaagacctctaagaa

SEQ ID NO: 22674 - DNA, 19 bp, Homo sapiens
  siRNA target sequence for BDP1 (NM_018429.1,5841-5859).
cgattttgagtctgactat

SEQ ID NO: 22675 - DNA, 19 bp, Homo sapiens
  siRNA target sequence for BDP1 (NM_018429.1,5997-6015).
cccagatgtaggatgcata

SEQ ID NO: 22676 - DNA, 19 bp, Homo sapiens
  siRNA target sequence for BDP1 (NM_018429.1,6008-6026).
gatgcatagctgttgttga

SEQ ID NO: 22677 - DNA, 19 bp, Homo sapiens
  siRNA target sequence for BDP1 (NM_018429.1,6012-6030).
catagctgttgttgaacat

SEQ ID NO: 22678 - DNA, 19 bp, Homo sapiens
  siRNA target sequence for BDP1 (NM_018429.1,6104-6122).
ccacaagtgaacatatcca

SEQ ID NO: 22679 - DNA, 19 bp, Homo sapiens
  siRNA target sequence for BDP1 (NM_018429.1,6152-6170).
ccgaagctgcaataacttt

SEQ ID NO: 22680 - DNA, 19 bp, Homo sapiens
  siRNA target sequence for BDP1 (NM_018429.1,6160-6178).
gcaataactttacttacaa

SEQ ID NO: 22681 - DNA, 19 bp, Homo sapiens
  siRNA target sequence for BDP1 (NM_018429.1,6176-6194).
caatgggagatctagtatt

SEQ ID NO: 22682 - DNA, 19 bp, Homo sapiens
  siRNA target sequence for BDP1 (NM_018429.1,6198-6216).
gtcagagatcagtagtgaa

SEQ ID NO: 22683 - DNA, 19 bp, Homo sapiens
  siRNA target sequence for BDP1 (NM_018429.1,6219-6237).
gggtgatgtaggagtatgt

SEQ ID NO: 22684 - DNA, 19 bp, Homo sapiens
  siRNA target sequence for BDP1 (NM_018429.1,6278-6296).
cttctagcctagataatgt

SEQ ID NO: 22685 - DNA, 19 bp, Homo sapiens
  siRNA target sequence for BDP1 (NM_018429.1,6281-6299).
ctagcctagataatgtaaa

SEQ ID NO: 22686 - DNA, 19 bp, Homo sapiens
  siRNA target sequence for BDP1 (NM_018429.1,6284-6302).
gcctagataatgtaaatca

SEQ ID NO: 22687 - DNA, 19 bp, Homo sapiens
  siRNA target sequence for BDP1 (NM_018429.1,6442-6460).
gctacaccaaccaggaata

SEQ ID NO: 22688 - DNA, 19 bp, Homo sapiens
  siRNA target sequence for BDP1 (NM_018429.1,6467-6485).
ctaaagtgaccagtaattt

SEQ ID NO: 22689 - DNA, 19 bp, Homo sapiens
  siRNA target sequence for BDP1 (NM_018429.1,6472-6490).
gtgaccagtaatttgagaa

SEQ ID NO: 22690 - DNA, 19 bp, Homo sapiens
  siRNA target sequence for BDP1 (NM_018429.1,6501-6519).
gcttgctaagcctaaacca

SEQ ID NO: 22691 - DNA, 19 bp, Homo sapiens
  siRNA target sequence for BDP1 (NM_018429.1,6512-6530).
ctaaaccaaatcttgagaa

SEQ ID NO: 22692 - DNA, 19 bp, Homo sapiens
  siRNA target sequence for BDP1 (NM_018429.1,6540-6558).
gaccaacaggcttgatgat

SEQ ID NO: 22693 - DNA, 19 bp, Homo sapiens
  siRNA target sequence for BDP1 (NM_018429.1,6543-6561).
caacaggcttgatgattat

SEQ ID NO: 22694 - DNA, 19 bp, Homo sapiens
  siRNA target sequence for BDP1 (NM_018429.1,6568-6586).
gtttccagtttgtgtgtaa

SEQ ID NO: 22695 - DNA, 19 bp, Homo sapiens
  siRNA target sequence for BDP1 (NM_018429.1,6573-6591).
cagtttgtgtgtaaccaaa

SEQ ID NO: 22696 - DNA, 19 bp, Homo sapiens
  siRNA target sequence for BDP1 (NM_018429.1,6732-6750).
gaccagtatttcttcagaa

SEQ ID NO: 22697 - DNA, 19 bp, Homo sapiens
  siRNA target sequence for BDP1 (NM_018429.1,6748-6766).
gaagtaaacctaactgaaa

SEQ ID NO: 22698 - DNA, 19 bp, Homo sapiens
  siRNA target sequence for BDP1 (NM_018429.1,6788-6806).
gctctcaggaggttcacat

SEQ ID NO: 22699 - DNA, 19 bp, Homo sapiens
  siRNA target sequence for BDP1 (NM_018429.1,6791-6809).
ctcaggaggttcacatgtt

SEQ ID NO: 22700 - DNA, 19 bp, Homo sapiens
  siRNA target sequence for BDP1 (NM_018429.1,6793-6811).
caggaggttcacatgttgt

SEQ ID NO: 22701 - DNA, 19 bp, Homo sapiens
  siRNA target sequence for BDP1 (NM_018429.1,6869-6887).
gtcttggtgaaaattctgt

SEQ ID NO: 22702 - DNA, 19 bp, Homo sapiens
  siRNA target sequence for BDP1 (NM_018429.1,6886-6904).
gttgaagagccccagataa

SEQ ID NO: 22703 - DNA, 19 bp, Homo sapiens
  siRNA target sequence for BDP1 (NM_018429.1,6897-6915).
ccagataaaggactctaaa

SEQ ID NO: 22704 - DNA, 19 bp, Homo sapiens
  siRNA target sequence for BDP1 (NM_018429.1,6900-6918).
gataaaggactctaaagga

SEQ ID NO: 22705 - DNA, 19 bp, Homo sapiens
  siRNA target sequence for BDP1 (NM_018429.1,6948-6966).
ggtaaaagaatgtacagta

SEQ ID NO: 22706 - DNA, 19 bp, Homo sapiens
  siRNA target sequence for BHC80 (NM_016621.2,560-578).
cggaagaacctgatagtaa

SEQ ID NO: 22707 - DNA, 19 bp, Homo sapiens
  siRNA target sequence for BHC80 (NM_016621.2,561-579).
ggaagaacctgatagtaaa

SEQ ID NO: 22708 - DNA, 19 bp, Homo sapiens
  siRNA target sequence for BHC80 (NM_016621.2,587-605).
caaccggacaagttccaaa

SEQ ID NO: 22709 - DNA, 19 bp, Homo sapiens
  siRNA target sequence for BHC80 (NM_016621.2,591-609).
cggacaagttccaaataca

SEQ ID NO: 22710 - DNA, 19 bp, Homo sapiens
  siRNA target sequence for BHC80 (NM_016621.2,616-634).
gccacaatctgaaaacaaa

SEQ ID NO: 22711 - DNA, 19 bp, Homo sapiens
  siRNA target sequence for BHC80 (NM_016621.2,750-768).
ctgtaactacagcttctat

SEQ ID NO: 22712 - DNA, 19 bp, Homo sapiens
  siRNA target sequence for BHC80 (NM_016621.2,752-770).
gtaactacagcttctatga

SEQ ID NO: 22713 - DNA, 19 bp, Homo sapiens
  siRNA target sequence for BHC80 (NM_016621.2,783-801).
cactacctctcgtcttgaa

SEQ ID NO: 22714 - DNA, 19 bp, Homo sapiens
  siRNA target sequence for BHC80 (NM_016621.2,839-857).
cagagacctaccattgcta

SEQ ID NO: 22715 - DNA, 19 bp, Homo sapiens
  siRNA target sequence for BHC80 (NM_016621.2,957-975).
cagaggctgtccaaattgt

SEQ ID NO: 22716 - DNA, 19 bp, Homo sapiens
  siRNA target sequence for BHC80 (NM_016621.2,965-983).
gtccaaattgtggcaaaaa

SEQ ID NO: 22717 - DNA, 19 bp, Homo sapiens
  siRNA target sequence for BHC80 (NM_016621.2,1024-1042).
catcaaagtaccacagttt

SEQ ID NO: 22718 - DNA, 19 bp, Homo sapiens
  siRNA target sequence for BHC80 (NM_016621.2,1060-1078).
cactccacgtccaaacttt

SEQ ID NO: 22719 - DNA, 19 bp, Homo sapiens
  siRNA target sequence for BHC80 (NM_016621.2,1062-1080).
ctccacgtccaaactttct

SEQ ID NO: 22720 - DNA, 19 bp, Homo sapiens
  siRNA target sequence for BHC80 (NM_016621.2,1108-1126).
ccagaataacattcctatt

SEQ ID NO: 22721 - DNA, 19 bp, Homo sapiens
  siRNA target sequence for BHC80 (NM_016621.2,1152-1170).
cagctcctcagcttatcca

SEQ ID NO: 22722 - DNA, 19 bp, Homo sapiens
  siRNA target sequence for BHC80 (NM_016621.2,1262-1280).
gcaaccatagccaaaacgt

SEQ ID NO: 22723 - DNA, 19 bp, Homo sapiens
  siRNA target sequence for BHC80 (NM_016621.2,1354-1372).
gcttagcaagccaagtctt

SEQ ID NO: 22724 - DNA, 19 bp, Homo sapiens
  siRNA target sequence for BHC80 (NM_016621.2,1370-1388).
cttgaaaaacagacagtta

SEQ ID NO: 22725 - DNA, 19 bp, Homo sapiens
  siRNA target sequence for BHC80 (NM_016621.2,1443-1461).
ctgctgcacccaaaccaaa

SEQ ID NO: 22726 - DNA, 19 bp, Homo sapiens
  siRNA target sequence for BHC80 (NM_016621.2,1496-1514).
gtgtctctagggttggtaa

SEQ ID NO: 22727 - DNA, 19 bp, Homo sapiens
  siRNA target sequence for BHC80 (NM_016621.2,1500-1518).
ctctagggttggtaacaca

SEQ ID NO: 22728 - DNA, 19 bp, Homo sapiens
  siRNA target sequence for BHC80 (NM_016621.2,1585-1603).
ctacagtggagcagtcttt

SEQ ID NO: 22729 - DNA, 19 bp, Homo sapiens
  siRNA target sequence for BHC80 (NM_016621.2,1621-1639).
gagtgcagtgacataccta

SEQ ID NO: 22730 - DNA, 19 bp, Homo sapiens
  siRNA target sequence for BHC80 (NM_016621.2,1623-1641).
gtgcagtgacatacctaaa

SEQ ID NO: 22731 - DNA, 19 bp, Homo sapiens
  siRNA target sequence for BHC80 (NM_016621.2,1731-1749).
gaaaaagtggccagttact

SEQ ID NO: 22732 - DNA, 19 bp, Homo sapiens
  siRNA target sequence for BHC80 (NM_016621.2,1764-1782).
gttcccgtgtatatcattt

SEQ ID NO: 22733 - DNA, 19 bp, Homo sapiens
  siRNA target sequence for BHC80 (NM_016621.2,1789-1807).
cttagacccccctctgaaa

SEQ ID NO: 22734 - DNA, 19 bp, Homo sapiens
  siRNA target sequence for BHC80 (NM_016621.2,2250-2268).
gctgcacagcgaactgtaa

SEQ ID NO: 22735 - DNA, 19 bp, Homo sapiens
  siRNA target sequence for BLM (NM_000057.1,122-140).
ctcagccagaacacttaat

SEQ ID NO: 22736 - DNA, 19 bp, Homo sapiens
  siRNA target sequence for BLM (NM_000057.1,124-142).
cagccagaacacttaataa

SEQ ID NO: 22737 - DNA, 19 bp, Homo sapiens
  siRNA target sequence for BLM (NM_000057.1,130-148).
gaacacttaataataaatt

SEQ ID NO: 22738 - DNA, 19 bp, Homo sapiens
  siRNA target sequence for BLM (NM_000057.1,273-291).
gttaccgaagacttttcct

SEQ ID NO: 22739 - DNA, 19 bp, Homo sapiens
  siRNA target sequence for BLM (NM_000057.1,372-390).
cagagaggtggatcaaaat

SEQ ID NO: 22740 - DNA, 19 bp, Homo sapiens
  siRNA target sequence for BLM (NM_000057.1,378-396).
ggtggatcaaaatcattat

SEQ ID NO: 22741 - DNA, 19 bp, Homo sapiens
  siRNA target sequence for BLM (NM_000057.1,379-397).
gtggatcaaaatcattatt

SEQ ID NO: 22742 - DNA, 19 bp, Homo sapiens
  siRNA target sequence for BLM (NM_000057.1,440-458).
ccaaaacacaccaactgta

SEQ ID NO: 22743 - DNA, 19 bp, Homo sapiens
  siRNA target sequence for BLM (NM_000057.1,477-495).
gctctcaagaaattagaat

SEQ ID NO: 22744 - DNA, 19 bp, Homo sapiens
  siRNA target sequence for BLM (NM_000057.1,514-532).
ctttaagtaccatcaatga

SEQ ID NO: 22745 - DNA, 19 bp, Homo sapiens
  siRNA target sequence for BLM (NM_000057.1,535-553).
gggatgatatggatgactt

SEQ ID NO: 22746 - DNA, 19 bp, Homo sapiens
  siRNA target sequence for BLM (NM_000057.1,540-558).
gatatggatgactttgata

SEQ ID NO: 22747 - DNA, 19 bp, Homo sapiens
  siRNA target sequence for BLM (NM_000057.1,566-584).
gacttcaaaatcatttgtt

SEQ ID NO: 22748 - DNA, 19 bp, Homo sapiens
  siRNA target sequence for BLM (NM_000057.1,589-607).
caccccaaagtcactttgt

SEQ ID NO: 22749 - DNA, 19 bp, Homo sapiens
  siRNA target sequence for BLM (NM_000057.1,612-630).
gtaagcactgctcagaaat

SEQ ID NO: 22750 - DNA, 19 bp, Homo sapiens
  siRNA target sequence for BLM (NM_000057.1,617-635).
cactgctcagaaatcaaaa

SEQ ID NO: 22751 - DNA, 19 bp, Homo sapiens
  siRNA target sequence for BLM (NM_000057.1,660-678).
gcacagctttatacaacaa

SEQ ID NO: 22752 - DNA, 19 bp, Homo sapiens
  siRNA target sequence for BLM (NM_000057.1,661-679).
cacagctttatacaacaaa

SEQ ID NO: 22753 - DNA, 19 bp, Homo sapiens
  siRNA target sequence for BLM (NM_000057.1,749-767).
ggatgactcagaatggtta

SEQ ID NO: 22754 - DNA, 19 bp, Homo sapiens
  siRNA target sequence for BLM (NM_000057.1,750-768).
gatgactcagaatggttaa

SEQ ID NO: 22755 - DNA, 19 bp, Homo sapiens
  siRNA target sequence for BLM (NM_000057.1,764-782).
gttaagcagcgatgtgatt

SEQ ID NO: 22756 - DNA, 19 bp, Homo sapiens
  siRNA target sequence for BLM (NM_000057.1,769-787).
gcagcgatgtgatttgcat

SEQ ID NO: 22757 - DNA, 19 bp, Homo sapiens
  siRNA target sequence for BLM (NM_000057.1,838-856).
gtgactctctgaaaactca

SEQ ID NO: 22758 - DNA, 19 bp, Homo sapiens
  siRNA target sequence for BLM (NM_000057.1,840-858).
gactctctgaaaactcatt

SEQ ID NO: 22759 - DNA, 19 bp, Homo sapiens
  siRNA target sequence for BLM (NM_000057.1,934-952).
catgtattgaatttgatga

SEQ ID NO: 22760 - DNA, 19 bp, Homo sapiens
  siRNA target sequence for BLM (NM_000057.1,1027-1045).
gccttagtacgttaaagga

SEQ ID NO: 22761 - DNA, 19 bp, Homo sapiens
  siRNA target sequence for BLM (NM_000057.1,1154-1172).
ctgtgacgctagacagata

SEQ ID NO: 22762 - DNA, 19 bp, Homo sapiens
  siRNA target sequence for BLM (NM_000057.1,1160-1178).
cgctagacagataagttta

SEQ ID NO: 22763 - DNA, 19 bp, Homo sapiens
  siRNA target sequence for BLM (NM_000057.1,1162-1180).
ctagacagataagtttaca

SEQ ID NO: 22764 - DNA, 19 bp, Homo sapiens
  siRNA target sequence for BLM (NM_000057.1,1202-1220).
ggagcacatctgtaaatta

SEQ ID NO: 22765 - DNA, 19 bp, Homo sapiens
  siRNA target sequence for BLM (NM_000057.1,1274-1292).
gcttcagcagcggaacata

SEQ ID NO: 22766 - DNA, 19 bp, Homo sapiens
  siRNA target sequence for BLM (NM_000057.1,1275-1293).
cttcagcagcggaacataa

SEQ ID NO: 22767 - DNA, 19 bp, Homo sapiens
  siRNA target sequence for BLM (NM_000057.1,1278-1296).
cagcagcggaacataagaa

SEQ ID NO: 22768 - DNA, 19 bp, Homo sapiens
  siRNA target sequence for BLM (NM_000057.1,1305-1323).
ctaacggaagtagatttta

SEQ ID NO: 22769 - DNA, 19 bp, Homo sapiens
  siRNA target sequence for BLM (NM_000057.1,1309-1327).
cggaagtagattttaataa

SEQ ID NO: 22770 - DNA, 19 bp, Homo sapiens
  siRNA target sequence for BLM (NM_000057.1,1347-1365).
ggctcattgtggagataca

SEQ ID NO: 22771 - DNA, 19 bp, Homo sapiens
  siRNA target sequence for BLM (NM_000057.1,1364-1382).
caggcctgattcacttgat

SEQ ID NO: 22772 - DNA, 19 bp, Homo sapiens
  siRNA target sequence for BLM (NM_000057.1,1465-1483).
ctcctggggactgtttact

SEQ ID NO: 22773 - DNA, 19 bp, Homo sapiens
  siRNA target sequence for BLM (NM_000057.1,1467-1485).
cctggggactgtttactga

SEQ ID NO: 22774 - DNA, 19 bp, Homo sapiens
  siRNA target sequence for BLM (NM_000057.1,1714-1732).
cccaaccttcctatgatat

SEQ ID NO: 22775 - DNA, 19 bp, Homo sapiens
  siRNA target sequence for BLM (NM_000057.1,1715-1733).
ccaaccttcctatgatatt

SEQ ID NO: 22776 - DNA, 19 bp, Homo sapiens
  siRNA target sequence for BLM (NM_000057.1,1728-1746).
gatattgataattttgaca

SEQ ID NO: 22777 - DNA, 19 bp, Homo sapiens
  siRNA target sequence for BLM (NM_000057.1,1772-1790).
ctgggaagacataatgcat

SEQ ID NO: 22778 - DNA, 19 bp, Homo sapiens
  siRNA target sequence for BLM (NM_000057.1,1781-1799).
cataatgcataatttagca

SEQ ID NO: 22779 - DNA, 19 bp, Homo sapiens
  siRNA target sequence for BLM (NM_000057.1,1838-1856).
ggaaggtcggccaattaaa

SEQ ID NO: 22780 - DNA, 19 bp, Homo sapiens
  siRNA target sequence for BLM (NM_000057.1,1839-1857).
gaaggtcggccaattaaat

SEQ ID NO: 22781 - DNA, 19 bp, Homo sapiens
  siRNA target sequence for BLM (NM_000057.1,1843-1861).
gtcggccaattaaatcagt

SEQ ID NO: 22782 - DNA, 19 bp, Homo sapiens
  siRNA target sequence for BLM (NM_000057.1,1906-1924).
catctactgctcaaaatat

SEQ ID NO: 22783 - DNA, 19 bp, Homo sapiens
  siRNA target sequence for BLM (NM_000057.1,1954-1972).
ctgacaagtcagcacaaaa

SEQ ID NO: 22784 - DNA, 19 bp, Homo sapiens
  siRNA target sequence for BLM (NM_000057.1,1961-1979).
gtcagcacaaaatttagca

SEQ ID NO: 22785 - DNA, 19 bp, Homo sapiens
  siRNA target sequence for BLM (NM_000057.1,1998-2016).
gagcgtttccaaagtctta

SEQ ID NO: 22786 - DNA, 19 bp, Homo sapiens
  siRNA target sequence for BLM (NM_000057.1,2000-2018).
gcgtttccaaagtcttagt

SEQ ID NO: 22787 - DNA, 19 bp, Homo sapiens
  siRNA target sequence for BLM (NM_000057.1,2001-2019).
cgtttccaaagtcttagtt

SEQ ID NO: 22788 - DNA, 19 bp, Homo sapiens
  siRNA target sequence for BLM (NM_000057.1,2069-2087).
gcataattttagaactaat

SEQ ID NO: 22789 - DNA, 19 bp, Homo sapiens
  siRNA target sequence for BLM (NM_000057.1,2144-2162).
gactggaggtggtaagagt

SEQ ID NO: 22790 - DNA, 19 bp, Homo sapiens
  siRNA target sequence for BLM (NM_000057.1,2194-2212).
ctggggtcactgttgtcat

SEQ ID NO: 22791 - DNA, 19 bp, Homo sapiens
  siRNA target sequence for BLM (NM_000057.1,2198-2216).
ggtcactgttgtcatttct

SEQ ID NO: 22792 - DNA, 19 bp, Homo sapiens
  siRNA target sequence for BLM (NM_000057.1,2218-2236).
ccttgagatcacttatcgt

SEQ ID NO: 22793 - DNA, 19 bp, Homo sapiens
  siRNA target sequence for BLM (NM_000057.1,2227-2245).
cacttatcgtagatcaagt

SEQ ID NO: 22794 - DNA, 19 bp, Homo sapiens
  siRNA target sequence for BLM (NM_000057.1,2255-2273).
gacttccttggatattcca

SEQ ID NO: 22795 - DNA, 19 bp, Homo sapiens
  siRNA target sequence for BLM (NM_000057.1,2278-2296).
catatctgacaggtgataa

SEQ ID NO: 22796 - DNA, 19 bp, Homo sapiens
  siRNA target sequence for BLM (NM_000057.1,2381-2399).
gatctgtgcaagtaacaga

SEQ ID NO: 22797 - DNA, 19 bp, Homo sapiens
  siRNA target sequence for BLM (NM_000057.1,2432-2450).
gaagctcttggcacgtttt

SEQ ID NO: 22798 - DNA, 19 bp, Homo sapiens
  siRNA target sequence for BLM (NM_000057.1,2436-2454).
ctcttggcacgttttgtta

SEQ ID NO: 22799 - DNA, 19 bp, Homo sapiens
  siRNA target sequence for BLM (NM_000057.1,2438-2456).
cttggcacgttttgttatt

SEQ ID NO: 22800 - DNA, 19 bp, Homo sapiens
  siRNA target sequence for BLM (NM_000057.1,2441-2459).
ggcacgttttgttattgat

SEQ ID NO: 22801 - DNA, 19 bp, Homo sapiens
  siRNA target sequence for BLM (NM_000057.1,2443-2461).
cacgttttgttattgatga

SEQ ID NO: 22802 - DNA, 19 bp, Homo sapiens
  siRNA target sequence for BLM (NM_000057.1,2480-2498).
gtggggacatgattttcgt

SEQ ID NO: 22803 - DNA, 19 bp, Homo sapiens
  siRNA target sequence for BLM (NM_000057.1,2490-2508).
gattttcgtcaagattaca

SEQ ID NO: 22804 - DNA, 19 bp, Homo sapiens
  siRNA target sequence for BLM (NM_000057.1,2497-2515).
gtcaagattacaaaagaat

SEQ ID NO: 22805 - DNA, 19 bp, Homo sapiens
  siRNA target sequence for BLM (NM_000057.1,2499-2517).
caagattacaaaagaatga

SEQ ID NO: 22806 - DNA, 19 bp, Homo sapiens
  siRNA target sequence for BLM (NM_000057.1,2620-2638).
gacctcaggtgtttagcat

SEQ ID NO: 22807 - DNA, 19 bp, Homo sapiens
  siRNA target sequence for BLM (NM_000057.1,2628-2646).
gtgtttagcatgagcttta

SEQ ID NO: 22808 - DNA, 19 bp, Homo sapiens
  siRNA target sequence for BLM (NM_000057.1,2641-2659).
gctttaacagacataatct

SEQ ID NO: 22809 - DNA, 19 bp, Homo sapiens
  siRNA target sequence for BLM (NM_000057.1,2697-2715).
gcatttgattgcctagaat

SEQ ID NO: 22810 - DNA, 19 bp, Homo sapiens
  siRNA target sequence for BLM (NM_000057.1,2707-2725).
gcctagaatggatcagaaa

SEQ ID NO: 22811 - DNA, 19 bp, Homo sapiens
  siRNA target sequence for BLM (NM_000057.1,2759-2777).
cctctccaggcgagaatgt

SEQ ID NO: 22812 - DNA, 19 bp, Homo sapiens
  siRNA target sequence for BLM (NM_000057.1,2813-2831).
cgctgctcttgcttaccat

SEQ ID NO: 22813 - DNA, 19 bp, Homo sapiens
  siRNA target sequence for BLM (NM_000057.1,2897-2915).
ggttatctgtgctacaatt

SEQ ID NO: 22814 - DNA, 19 bp, Homo sapiens
  siRNA target sequence for BLM (NM_000057.1,2903-2921).
ctgtgctacaattgcattt

SEQ ID NO: 22815 - DNA, 19 bp, Homo sapiens
  siRNA target sequence for BLM (NM_000057.1,2907-2925).
gctacaattgcatttggaa

SEQ ID NO: 22816 - DNA, 19 bp, Homo sapiens
  siRNA target sequence for BLM (NM_000057.1,2908-2926).
ctacaattgcatttggaat

SEQ ID NO: 22817 - DNA, 19 bp, Homo sapiens
  siRNA target sequence for BLM (NM_000057.1,2940-2958).
ccggacgtgcgatttgtga

SEQ ID NO: 22818 - DNA, 19 bp, Homo sapiens
  siRNA target sequence for BLM (NM_000057.1,2941-2959).
cggacgtgcgatttgtgat

SEQ ID NO: 22819 - DNA, 19 bp, Homo sapiens
  siRNA target sequence for BLM (NM_000057.1,2942-2960).
ggacgtgcgatttgtgatt

SEQ ID NO: 22820 - DNA, 19 bp, Homo sapiens
  siRNA target sequence for BLM (NM_000057.1,2945-2963).
cgtgcgatttgtgattcat

SEQ ID NO: 22821 - DNA, 19 bp, Homo sapiens
  siRNA target sequence for BLM (NM_000057.1,2985-3003).
gagggttactaccaagaat

SEQ ID NO: 22822 - DNA, 19 bp, Homo sapiens
  siRNA target sequence for BLM (NM_000057.1,3040-3058).
gcctgcttttctataccta

SEQ ID NO: 22823 - DNA, 19 bp, Homo sapiens
  siRNA target sequence for BLM (NM_000057.1,3041-3059).
cctgcttttctatacctat

SEQ ID NO: 22824 - DNA, 19 bp, Homo sapiens
  siRNA target sequence for BLM (NM_000057.1,3044-3062).
gcttttctatacctatcat

SEQ ID NO: 22825 - DNA, 19 bp, Homo sapiens
  siRNA target sequence for BLM (NM_000057.1,3071-3089).
cagactgaaaagacttata

SEQ ID NO: 22826 - DNA, 19 bp, Homo sapiens
  siRNA target sequence for BLM (NM_000057.1,3123-3141).
gaaactcacttcaataatt

SEQ ID NO: 22827 - DNA, 19 bp, Homo sapiens
  siRNA target sequence for BLM (NM_000057.1,3127-3145).
ctcacttcaataatttgta

SEQ ID NO: 22828 - DNA, 19 bp, Homo sapiens
  siRNA target sequence for BLM (NM_000057.1,3152-3170).
ggtacattactgtgaaaat

SEQ ID NO: 22829 - DNA, 19 bp, Homo sapiens
  siRNA target sequence for BLM (NM_000057.1,3248-3266).
cccagatgtttcttgtgat

SEQ ID NO: 22830 - DNA, 19 bp, Homo sapiens
  siRNA target sequence for BLM (NM_000057.1,3305-3323).
gactgacgatgtgaaaagt

SEQ ID NO: 22831 - DNA, 19 bp, Homo sapiens
  siRNA target sequence for BLM (NM_000057.1,3307-3325).
ctgacgatgtgaaaagtat

SEQ ID NO: 22832 - DNA, 19 bp, Homo sapiens
  siRNA target sequence for BLM (NM_000057.1,3311-3329).
cgatgtgaaaagtattgta

SEQ ID NO: 22833 - DNA, 19 bp, Homo sapiens
  siRNA target sequence for BLM (NM_000057.1,3322-3340).
gtattgtaagatttgttca

SEQ ID NO: 22834 - DNA, 19 bp, Homo sapiens
  siRNA target sequence for BLM (NM_000057.1,3336-3354).
gttcaagaacatagttcat

SEQ ID NO: 22835 - DNA, 19 bp, Homo sapiens
  siRNA target sequence for BLM (NM_000057.1,3355-3373).
cacaaggaatgagaaatat

SEQ ID NO: 22836 - DNA, 19 bp, Homo sapiens
  siRNA target sequence for BLM (NM_000057.1,3431-3449).
ggggagtaagagtgcaaaa

SEQ ID NO: 22837 - DNA, 19 bp, Homo sapiens
  siRNA target sequence for BLM (NM_000057.1,3436-3454).
gtaagagtgcaaaaatcca

SEQ ID NO: 22838 - DNA, 19 bp, Homo sapiens
  siRNA target sequence for BLM (NM_000057.1,3452-3470).
ccagtcaggtatatttgga

SEQ ID NO: 22839 - DNA, 19 bp, Homo sapiens
  siRNA target sequence for BLM (NM_000057.1,3453-3471).
cagtcaggtatatttggaa

SEQ ID NO: 22840 - DNA, 19 bp, Homo sapiens
  siRNA target sequence for BLM (NM_000057.1,3492-3510).
cacaatgccgaaagacttt

SEQ ID NO: 22841 - DNA, 19 bp, Homo sapiens
  siRNA target sequence for BLM (NM_000057.1,3518-3536).
gctgatacttgacaagatt

SEQ ID NO: 22842 - DNA, 19 bp, Homo sapiens
  siRNA target sequence for BLM (NM_000057.1,3519-3537).
ctgatacttgacaagattt

SEQ ID NO: 22843 - DNA, 19 bp, Homo sapiens
  siRNA target sequence for BLM (NM_000057.1,3570-3588).
caggcgatcgcttatgtga

SEQ ID NO: 22844 - DNA, 19 bp, Homo sapiens
  siRNA target sequence for BLM (NM_000057.1,3612-3630).
gtactaaatggcaatttaa

SEQ ID NO: 22845 - DNA, 19 bp, Homo sapiens
  siRNA target sequence for BLM (NM_000057.1,3681-3699).
gcgttagtagcaaaagtgt

SEQ ID NO: 22846 - DNA, 19 bp, Homo sapiens
  siRNA target sequence for BLM (NM_000057.1,3713-3731).
gatggttaaaaaatgtctt

SEQ ID NO: 22847 - DNA, 19 bp, Homo sapiens
  siRNA target sequence for BLM (NM_000057.1,3774-3792).
ggtgtccattacttcaata

SEQ ID NO: 22848 - DNA, 19 bp, Homo sapiens
  siRNA target sequence for BLM (NM_000057.1,3775-3793).
gtgtccattacttcaatat

SEQ ID NO: 22849 - DNA, 19 bp, Homo sapiens
  siRNA target sequence for BLM (NM_000057.1,3818-3836).
gcttgcagaatctttatct

SEQ ID NO: 22850 - DNA, 19 bp, Homo sapiens
  siRNA target sequence for BLM (NM_000057.1,3900-3918).
gcggaagtgatttcagtat

SEQ ID NO: 22851 - DNA, 19 bp, Homo sapiens
  siRNA target sequence for BLM (NM_000057.1,3901-3919).
cggaagtgatttcagtatt

SEQ ID NO: 22852 - DNA, 19 bp, Homo sapiens
  siRNA target sequence for BLM (NM_000057.1,4023-4041).
gaggaaatacccgtatctt

SEQ ID NO: 22853 - DNA, 19 bp, Homo sapiens
  siRNA target sequence for BLM (NM_000057.1,4033-4051).
ccgtatcttcccactactt

SEQ ID NO: 22854 - DNA, 19 bp, Homo sapiens
  siRNA target sequence for BLM (NM_000057.1,4034-4052).
cgtatcttcccactacttt

SEQ ID NO: 22855 - DNA, 19 bp, Homo sapiens
  siRNA target sequence for BLM (NM_000057.1,4042-4060).
cccactactttgcaagtaa

SEQ ID NO: 22856 - DNA, 19 bp, Homo sapiens
  siRNA target sequence for BLM (NM_000057.1,4043-4061).
ccactactttgcaagtaaa

SEQ ID NO: 22857 - DNA, 19 bp, Homo sapiens
  siRNA target sequence for BLM (NM_000057.1,4151-4169).
ggggtctgccacatgtaga

SEQ ID NO: 22858 - DNA, 19 bp, Homo sapiens
  siRNA target sequence for BLM (NM_000057.1,4152-4170).
gggtctgccacatgtagaa

SEQ ID NO: 22859 - DNA, 19 bp, Homo sapiens
  siRNA target sequence for BLM (NM_000057.1,4153-4171).
ggtctgccacatgtagaaa

SEQ ID NO: 22860 - DNA, 19 bp, Homo sapiens
  siRNA target sequence for BLM (NM_000057.1,4156-4174).
ctgccacatgtagaaagat

SEQ ID NO: 22861 - DNA, 19 bp, Homo sapiens
  siRNA target sequence for BLM (NM_000057.1,4187-4205).
gaaatcctccagcatcatt

SEQ ID NO: 22862 - DNA, 19 bp, Homo sapiens
  siRNA target sequence for BLM (NM_000057.1,4272-4290).
gctccaccgaagcctataa

SEQ ID NO: 22863 - DNA, 19 bp, Homo sapiens
  siRNA target sequence for BLM (NM_000057.1,4275-4293).
ccaccgaagcctataaata

SEQ ID NO: 22864 - DNA, 19 bp, Homo sapiens
  siRNA target sequence for BOC (NM_033254.2,516-534).
ggaacctccaaggatgaat

SEQ ID NO: 22865 - DNA, 19 bp, Homo sapiens
  siRNA target sequence for BOC (NM_033254.2,539-557).
cctggcgcctgaatggaaa

SEQ ID NO: 22866 - DNA, 19 bp, Homo sapiens
  siRNA target sequence for BOC (NM_033254.2,765-783).
gggaaacacagcagtcatt

SEQ ID NO: 22867 - DNA, 19 bp, Homo sapiens
  siRNA target sequence for BOC (NM_033254.2,822-840).
ccggtacagcgtcaaacaa

SEQ ID NO: 22868 - DNA, 19 bp, Homo sapiens
  siRNA target sequence for BOC (NM_033254.2,824-842).
ggtacagcgtcaaacaaga

SEQ ID NO: 22869 - DNA, 19 bp, Homo sapiens
  siRNA target sequence for BOC (NM_033254.2,860-878).
gaggtaactacctgatcat

SEQ ID NO: 22870 - DNA, 19 bp, Homo sapiens
  siRNA target sequence for BOC (NM_033254.2,888-906).
gaacctccagattgtgaat

SEQ ID NO: 22871 - DNA, 19 bp, Homo sapiens
  siRNA target sequence for BOC (NM_033254.2,1068-1086).
caaaggccagagtctcatt

SEQ ID NO: 22872 - DNA, 19 bp, Homo sapiens
  siRNA target sequence for BOC (NM_033254.2,1268-1286).
cagcggtcatcctctacaa

SEQ ID NO: 22873 - DNA, 19 bp, Homo sapiens
  siRNA target sequence for BOC (NM_033254.2,1271-1289).
cggtcatcctctacaatgt

SEQ ID NO: 22874 - DNA, 19 bp, Homo sapiens
  siRNA target sequence for BOC (NM_033254.2,1348-1366).
ggccagagtgccaagctta

SEQ ID NO: 22875 - DNA, 19 bp, Homo sapiens
  siRNA target sequence for BOC (NM_033254.2,1787-1805).
cctccaagacagactcata

SEQ ID NO: 22876 - DNA, 19 bp, Homo sapiens
  siRNA target sequence for BOC (NM_033254.2,1847-1865).
cgccaatcctctactatgt

SEQ ID NO: 22877 - DNA, 19 bp, Homo sapiens
  siRNA target sequence for BOC (NM_033254.2,1873-1891).
caccgcaaggtcacaaatt

SEQ ID NO: 22878 - DNA, 19 bp, Homo sapiens
  siRNA target sequence for BOC (NM_033254.2,1876-1894).
cgcaaggtcacaaattcct

SEQ ID NO: 22879 - DNA, 19 bp, Homo sapiens
  siRNA target sequence for BOC (NM_033254.2,1981-1999).
gagatggcagcttacaact

SEQ ID NO: 22880 - DNA, 19 bp, Homo sapiens
  siRNA target sequence for BOC (NM_033254.2,2340-2358).
gatcacgggcctagagaaa

SEQ ID NO: 22881 - DNA, 19 bp, Homo sapiens
  siRNA target sequence for BOC (NM_033254.2,2378-2396).
gagtccgggctctgaacat

SEQ ID NO: 22882 - DNA, 19 bp, Homo sapiens
  siRNA target sequence for BOC (NM_033254.2,2472-2490).
gcccgtggcaggtccttat

SEQ ID NO: 22883 - DNA, 19 bp, Homo sapiens
  siRNA target sequence for BOC (NM_033254.2,2474-2492).
ccgtggcaggtccttatat

SEQ ID NO: 22884 - DNA, 19 bp, Homo sapiens
  siRNA target sequence for BOC (NM_033254.2,2574-2592).
ccatggcttttatatctat

SEQ ID NO: 22885 - DNA, 19 bp, Homo sapiens
  siRNA target sequence for BOC (NM_033254.2,2601-2619).
cacagacagtgacaatgat

SEQ ID NO: 22886 - DNA, 19 bp, Homo sapiens
  siRNA target sequence for BOC (NM_033254.2,2891-2909).
gcgacctgccctatctgat

SEQ ID NO: 22887 - DNA, 19 bp, Homo sapiens
  siRNA target sequence for BOC (NM_033254.2,2892-2910).
cgacctgccctatctgatt

SEQ ID NO: 22888 - DNA, 19 bp, Homo sapiens
  siRNA target sequence for BOC (NM_033254.2,2975-2993).
gggcctggtctaagcaaaa

SEQ ID NO: 22889 - DNA, 19 bp, Homo sapiens
  siRNA target sequence for BOC (NM_033254.2,2976-2994).
ggcctggtctaagcaaaaa

SEQ ID NO: 22890 - DNA, 19 bp, Homo sapiens
  siRNA target sequence for BOC (NM_033254.2,2978-2996).
cctggtctaagcaaaaaca

SEQ ID NO: 22891 - DNA, 19 bp, Homo sapiens
  siRNA target sequence for BOC (NM_033254.2,2979-2997).
ctggtctaagcaaaaacat

SEQ ID NO: 22892 - DNA, 19 bp, Homo sapiens
  siRNA target sequence for BOC (NM_033254.2,3034-3052).
ccctcctgcccgtatacta

SEQ ID NO: 22893 - DNA, 19 bp, Homo sapiens
  siRNA target sequence for BOC (NM_033254.2,3035-3053).
cctcctgcccgtatactat

SEQ ID NO: 22894 - DNA, 19 bp, Homo sapiens
  siRNA target sequence for BOC (NM_033254.2,3131-3149).
ctaatgggatccacatgaa

SEQ ID NO: 22895 - DNA, 19 bp, Homo sapiens
  siRNA target sequence for BOC (NM_033254.2,3257-3275).
cccatcttggcaatggata

SEQ ID NO: 22896 - DNA, 19 bp, Homo sapiens
  siRNA target sequence for BOC (NM_033254.2,3258-3276).
ccatcttggcaatggatat

SEQ ID NO: 22897 - DNA, 19 bp, Homo sapiens
  siRNA target sequence for BOC (NM_033254.2,3320-3338).
cggacgagggctctttctt

SEQ ID NO: 22898 - DNA, 19 bp, Homo sapiens
  siRNA target sequence for BOC (NM_033254.2,3321-3339).
ggacgagggctctttctta

SEQ ID NO: 22899 - DNA, 19 bp, Homo sapiens
  siRNA target sequence for BOC (NM_033254.2,3322-3340).
gacgagggctctttcttat

SEQ ID NO: 22900 - DNA, 19 bp, Homo sapiens
  siRNA target sequence for BOC (NM_033254.2,3325-3343).
gagggctctttcttataca

SEQ ID NO: 22901 - DNA, 19 bp, Homo sapiens
  siRNA target sequence for BRD1 (NM_014577.1,540-558).
ccccatgcagtgttaaaca

SEQ ID NO: 22902 - DNA, 19 bp, Homo sapiens
  siRNA target sequence for BRD1 (NM_014577.1,542-560).
ccatgcagtgttaaacact

SEQ ID NO: 22903 - DNA, 19 bp, Homo sapiens
  siRNA target sequence for BRD1 (NM_014577.1,626-644).
cgcttgcacaggatcagta

SEQ ID NO: 22904 - DNA, 19 bp, Homo sapiens
  siRNA target sequence for BRD1 (NM_014577.1,628-646).
cttgcacaggatcagtatt

SEQ ID NO: 22905 - DNA, 19 bp, Homo sapiens
  siRNA target sequence for BRD1 (NM_014577.1,650-668).
gatcccctggagatcatat

SEQ ID NO: 22906 - DNA, 19 bp, Homo sapiens
  siRNA target sequence for BRD1 (NM_014577.1,731-749).
cggcctcctgtctgcttaa

SEQ ID NO: 22907 - DNA, 19 bp, Homo sapiens
  siRNA target sequence for BRD1 (NM_014577.1,734-752).
cctcctgtctgcttaagaa

SEQ ID NO: 22908 - DNA, 19 bp, Homo sapiens
  siRNA target sequence for BRD1 (NM_014577.1,737-755).
cctgtctgcttaagaacta

SEQ ID NO: 22909 - DNA, 19 bp, Homo sapiens
  siRNA target sequence for BRD1 (NM_014577.1,750-768).
gaactaagcgtcacaaaaa

SEQ ID NO: 22910 - DNA, 19 bp, Homo sapiens
  siRNA target sequence for BRD1 (NM_014577.1,753-771).
ctaagcgtcacaaaaacaa

SEQ ID NO: 22911 - DNA, 19 bp, Homo sapiens
  siRNA target sequence for BRD1 (NM_014577.1,888-906).
ggaggcctcctgtgtacta

SEQ ID NO: 22912 - DNA, 19 bp, Homo sapiens
  siRNA target sequence for BRD1 (NM_014577.1,893-911).
cctcctgtgtactacaagt

SEQ ID NO: 22913 - DNA, 19 bp, Homo sapiens
  siRNA target sequence for BRD1 (NM_014577.1,894-912).
ctcctgtgtactacaagtt

SEQ ID NO: 22914 - DNA, 19 bp, Homo sapiens
  siRNA target sequence for BRD1 (NM_014577.1,896-914).
cctgtgtactacaagttca

SEQ ID NO: 22915 - DNA, 19 bp, Homo sapiens
  siRNA target sequence for BRD1 (NM_014577.1,897-915).
ctgtgtactacaagttcat

SEQ ID NO: 22916 - DNA, 19 bp, Homo sapiens
  siRNA target sequence for BRD1 (NM_014577.1,1032-1050).
cgcagagcatgtttgagtt

SEQ ID NO: 22917 - DNA, 19 bp, Homo sapiens
  siRNA target sequence for BRD1 (NM_014577.1,1445-1463).
ccagcccggtggaaactga

SEQ ID NO: 22918 - DNA, 19 bp, Homo sapiens
  siRNA target sequence for BRD1 (NM_014577.1,1624-1642).
cagaaagaccgcttactgt

SEQ ID NO: 22919 - DNA, 19 bp, Homo sapiens
  siRNA target sequence for BRD1 (NM_014577.1,1666-1684).
cacccggaggcctctgaat

SEQ ID NO: 22920 - DNA, 19 bp, Homo sapiens
  siRNA target sequence for BRD1 (NM_014577.1,1668-1686).
cccggaggcctctgaatat

SEQ ID NO: 22921 - DNA, 19 bp, Homo sapiens
  siRNA target sequence for BRD1 (NM_014577.1,1669-1687).
ccggaggcctctgaatatt

SEQ ID NO: 22922 - DNA, 19 bp, Homo sapiens
  siRNA target sequence for BRD1 (NM_014577.1,1690-1708).
cggggatgtcgaaatgaaa

SEQ ID NO: 22923 - DNA, 19 bp, Homo sapiens
  siRNA target sequence for BRD1 (NM_014577.1,1691-1709).
ggggatgtcgaaatgaaaa

SEQ ID NO: 22924 - DNA, 19 bp, Homo sapiens
  siRNA target sequence for BRD1 (NM_014577.1,1692-1710).
gggatgtcgaaatgaaaaa

SEQ ID NO: 22925 - DNA, 19 bp, Homo sapiens
  siRNA target sequence for BRD1 (NM_014577.1,1712-1730).
ggcgtctgtcgaaaagaga

SEQ ID NO: 22926 - DNA, 19 bp, Homo sapiens
  siRNA target sequence for BRD1 (NM_014577.1,1822-1840).
gaccgtgtgcgctccttat

SEQ ID NO: 22927 - DNA, 19 bp, Homo sapiens
  siRNA target sequence for BRD1 (NM_014577.1,1824-1842).
ccgtgtgcgctccttatat

SEQ ID NO: 22928 - DNA, 19 bp, Homo sapiens
  siRNA target sequence for BRD1 (NM_014577.1,1825-1843).
cgtgtgcgctccttatatt

SEQ ID NO: 22929 - DNA, 19 bp, Homo sapiens
  siRNA target sequence for BRD1 (NM_014577.1,1848-1866).
cgcagaggttaaataggat

SEQ ID NO: 22930 - DNA, 19 bp, Homo sapiens
  siRNA target sequence for BRD1 (NM_014577.1,2336-2354).
gaagctcaagggtataaaa

SEQ ID NO: 22931 - DNA, 19 bp, Homo sapiens
  siRNA target sequence for BRD1 (NM_014577.1,2340-2358).
ctcaagggtataaaaacct

SEQ ID NO: 22932 - DNA, 19 bp, Homo sapiens
  siRNA target sequence for BRD1 (NM_014577.1,2393-2411).
gataactgcatgaagtaca

SEQ ID NO: 22933 - DNA, 19 bp, Homo sapiens
  siRNA target sequence for BRD1 (NM_014577.1,2415-2433).
ccagggacaccgtgttcta

SEQ ID NO: 22934 - DNA, 19 bp, Homo sapiens
  siRNA target sequence for BRD1 (NM_014577.1,2416-2434).
cagggacaccgtgttctat

SEQ ID NO: 22935 - DNA, 19 bp, Homo sapiens
  siRNA target sequence for BRD1 (NM_014577.1,2455-2473).
cgatcagggaggtgttgtt

SEQ ID NO: 22936 - DNA, 19 bp, Homo sapiens
  siRNA target sequence for BRD1 (NM_014577.1,2705-2723).
cgggcaaagctgctcaaaa

SEQ ID NO: 22937 - DNA, 19 bp, Homo sapiens
  siRNA target sequence for BRD1 (NM_014577.1,3074-3092).
ctctgcgactcgagcttta

SEQ ID NO: 22938 - DNA, 19 bp, Homo sapiens
  siRNA target sequence for BRD1 (NM_014577.1,3076-3094).
ctgcgactcgagctttaat

SEQ ID NO: 22939 - DNA, 19 bp, Homo sapiens
  siRNA target sequence for BRD1 (NM_014577.1,3088-3106).
ctttaatgcgcccaaatgt

SEQ ID NO: 22940 - DNA, 19 bp, Homo sapiens
  siRNA target sequence for BRD1 (NM_014577.1,3312-3330).
cctacccggcactgatcat

SEQ ID NO: 22941 - DNA, 19 bp, Homo sapiens
  siRNA target sequence for BRD1 (NM_014577.1,3512-3530).
cttggtattgacgaaacta

SEQ ID NO: 22942 - DNA, 19 bp, Homo sapiens
  siRNA target sequence for BRD1 (NM_014577.1,3523-3541).
cgaaactatagacaagtta

SEQ ID NO: 22943 - DNA, 19 bp, Homo sapiens
  siRNA target sequence for BRD1 (NM_014577.1,3579-3597).
ccgtgcggatcgcttttga

SEQ ID NO: 22944 - DNA, 19 bp, Homo sapiens
  siRNA target sequence for BRIP1 (NM_032043.1,153-171).
gtggtctgaatatacaatt

SEQ ID NO: 22945 - DNA, 19 bp, Homo sapiens
  siRNA target sequence for BRIP1 (NM_032043.1,172-190).
ggtggggtgaagatttact

SEQ ID NO: 22946 - DNA, 19 bp, Homo sapiens
  siRNA target sequence for BRIP1 (NM_032043.1,173-191).
gtggggtgaagatttactt

SEQ ID NO: 22947 - DNA, 19 bp, Homo sapiens
  siRNA target sequence for BRIP1 (NM_032043.1,209-227).
cgtcacagcttgctatgat

SEQ ID NO: 22948 - DNA, 19 bp, Homo sapiens
  siRNA target sequence for BRIP1 (NM_032043.1,212-230).
cacagcttgctatgatgaa

SEQ ID NO: 22949 - DNA, 19 bp, Homo sapiens
  siRNA target sequence for BRIP1 (NM_032043.1,214-232).
cagcttgctatgatgaatt

SEQ ID NO: 22950 - DNA, 19 bp, Homo sapiens
  siRNA target sequence for BRIP1 (NM_032043.1,217-235).
cttgctatgatgaattcta

SEQ ID NO: 22951 - DNA, 19 bp, Homo sapiens
  siRNA target sequence for BRIP1 (NM_032043.1,221-239).
ctatgatgaattctattct

SEQ ID NO: 22952 - DNA, 19 bp, Homo sapiens
  siRNA target sequence for BRIP1 (NM_032043.1,254-272).
gcaagcaacattgtttgtt

SEQ ID NO: 22953 - DNA, 19 bp, Homo sapiens
  siRNA target sequence for BRIP1 (NM_032043.1,319-337).
gctttagcatggcaacaat

SEQ ID NO: 22954 - DNA, 19 bp, Homo sapiens
  siRNA target sequence for BRIP1 (NM_032043.1,358-376).
gatgagggcgtaagtgaaa

SEQ ID NO: 22955 - DNA, 19 bp, Homo sapiens
  siRNA target sequence for BRIP1 (NM_032043.1,363-381).
gggcgtaagtgaaaaagct

SEQ ID NO: 22956 - DNA, 19 bp, Homo sapiens
  siRNA target sequence for BRIP1 (NM_032043.1,401-419).
gttgtgcatgccattcaaa

SEQ ID NO: 22957 - DNA, 19 bp, Homo sapiens
  siRNA target sequence for BRIP1 (NM_032043.1,448-466).
ggaacttcacgtcatttca

SEQ ID NO: 22958 - DNA, 19 bp, Homo sapiens
  siRNA target sequence for BRIP1 (NM_032043.1,449-467).
gaacttcacgtcatttcaa

SEQ ID NO: 22959 - DNA, 19 bp, Homo sapiens
  siRNA target sequence for BRIP1 (NM_032043.1,452-470).
cttcacgtcatttcaacta

SEQ ID NO: 22960 - DNA, 19 bp, Homo sapiens
  siRNA target sequence for BRIP1 (NM_032043.1,520-538).
gactcccctgaaaaaacca

SEQ ID NO: 22961 - DNA, 19 bp, Homo sapiens
  siRNA target sequence for BRIP1 (NM_032043.1,674-692).
cagaagtacacaatttgga

SEQ ID NO: 22962 - DNA, 19 bp, Homo sapiens
  siRNA target sequence for BRIP1 (NM_032043.1,709-727).
ggaaagactgtaaaactca

SEQ ID NO: 22963 - DNA, 19 bp, Homo sapiens
  siRNA target sequence for BRIP1 (NM_032043.1,750-768).
ctccttttcgccacagaaa

SEQ ID NO: 22964 - DNA, 19 bp, Homo sapiens
  siRNA target sequence for BRIP1 (NM_032043.1,788-806).
ggtgctgttgttctactaa

SEQ ID NO: 22965 - DNA, 19 bp, Homo sapiens
  siRNA target sequence for BRIP1 (NM_032043.1,797-815).
gttctactaaacaaggaaa

SEQ ID NO: 22966 - DNA, 19 bp, Homo sapiens
  siRNA target sequence for BRIP1 (NM_032043.1,816-834).
cagtcaagagtcatcgaat

SEQ ID NO: 22967 - DNA, 19 bp, Homo sapiens
  siRNA target sequence for BRIP1 (NM_032043.1,820-838).
caagagtcatcgaatacca

SEQ ID NO: 22968 - DNA, 19 bp, Homo sapiens
  siRNA target sequence for BRIP1 (NM_032043.1,823-841).
gagtcatcgaataccatta

SEQ ID NO: 22969 - DNA, 19 bp, Homo sapiens
  siRNA target sequence for BRIP1 (NM_032043.1,827-845).
catcgaataccattaagaa

SEQ ID NO: 22970 - DNA, 19 bp, Homo sapiens
  siRNA target sequence for BRIP1 (NM_032043.1,930-948).
ccggaggacggcatattca

SEQ ID NO: 22971 - DNA, 19 bp, Homo sapiens
  siRNA target sequence for BRIP1 (NM_032043.1,947-965).
caggggttccaatgactat

SEQ ID NO: 22972 - DNA, 19 bp, Homo sapiens
  siRNA target sequence for BRIP1 (NM_032043.1,950-968).
gggttccaatgactattct

SEQ ID NO: 22973 - DNA, 19 bp, Homo sapiens
  siRNA target sequence for BRIP1 (NM_032043.1,951-969).
ggttccaatgactattctt

SEQ ID NO: 22974 - DNA, 19 bp, Homo sapiens
  siRNA target sequence for BRIP1 (NM_032043.1,972-990).
cagcagggatcatacttgt

SEQ ID NO: 22975 - DNA, 19 bp, Homo sapiens
  siRNA target sequence for BRIP1 (NM_032043.1,998-1016).
ctgaggtagtcggtaactt

SEQ ID NO: 22976 - DNA, 19 bp, Homo sapiens
  siRNA target sequence for BRIP1 (NM_032043.1,1000-1018).
gaggtagtcggtaacttca

SEQ ID NO: 22977 - DNA, 19 bp, Homo sapiens
  siRNA target sequence for BRIP1 (NM_032043.1,1003-1021).
gtagtcggtaacttcaaca

SEQ ID NO: 22978 - DNA, 19 bp, Homo sapiens
  siRNA target sequence for BRIP1 (NM_032043.1,1006-1024).
gtcggtaacttcaacagaa

SEQ ID NO: 22979 - DNA, 19 bp, Homo sapiens
  siRNA target sequence for BRIP1 (NM_032043.1,1008-1026).
cggtaacttcaacagaaat

SEQ ID NO: 22980 - DNA, 19 bp, Homo sapiens
  siRNA target sequence for BRIP1 (NM_032043.1,1059-1077).
cggaaaatcctgctatttt

SEQ ID NO: 22981 - DNA, 19 bp, Homo sapiens
  siRNA target sequence for BRIP1 (NM_032043.1,1134-1152).
gtgcaaagcctgggatata

SEQ ID NO: 22982 - DNA, 19 bp, Homo sapiens
  siRNA target sequence for BRIP1 (NM_032043.1,1136-1154).
gcaaagcctgggatataga

SEQ ID NO: 22983 - DNA, 19 bp, Homo sapiens
  siRNA target sequence for BRIP1 (NM_032043.1,1137-1155).
caaagcctgggatatagaa

SEQ ID NO: 22984 - DNA, 19 bp, Homo sapiens
  siRNA target sequence for BRIP1 (NM_032043.1,1180-1198).
ctaaaggcctgtccatatt

SEQ ID NO: 22985 - DNA, 19 bp, Homo sapiens
  siRNA target sequence for BRIP1 (NM_032043.1,1185-1203).
ggcctgtccatattacaca

SEQ ID NO: 22986 - DNA, 19 bp, Homo sapiens
  siRNA target sequence for BRIP1 (NM_032043.1,1205-1223).
cccgagaactaatacaaga

SEQ ID NO: 22987 - DNA, 19 bp, Homo sapiens
  siRNA target sequence for BRIP1 (NM_032043.1,1206-1224).
ccgagaactaatacaagat

SEQ ID NO: 22988 - DNA, 19 bp, Homo sapiens
  siRNA target sequence for BRIP1 (NM_032043.1,1255-1273).
cttctagatgcacaaataa

SEQ ID NO: 22989 - DNA, 19 bp, Homo sapiens
  siRNA target sequence for BRIP1 (NM_032043.1,1264-1282).
gcacaaataagggaaagta

SEQ ID NO: 22990 - DNA, 19 bp, Homo sapiens
  siRNA target sequence for BRIP1 (NM_032043.1,1265-1283).
cacaaataagggaaagtat

SEQ ID NO: 22991 - DNA, 19 bp, Homo sapiens
  siRNA target sequence for BRIP1 (NM_032043.1,1388-1406).
ggtttgctcgggatgaact

SEQ ID NO: 22992 - DNA, 19 bp, Homo sapiens
  siRNA target sequence for BRIP1 (NM_032043.1,1389-1407).
gtttgctcgggatgaacta

SEQ ID NO: 22993 - DNA, 19 bp, Homo sapiens
  siRNA target sequence for BRIP1 (NM_032043.1,1393-1411).
gctcgggatgaactagata

SEQ ID NO: 22994 - DNA, 19 bp, Homo sapiens
  siRNA target sequence for BRIP1 (NM_032043.1,1396-1414).
cgggatgaactagatagta

SEQ ID NO: 22995 - DNA, 19 bp, Homo sapiens
  siRNA target sequence for BRIP1 (NM_032043.1,1397-1415).
gggatgaactagatagtat

SEQ ID NO: 22996 - DNA, 19 bp, Homo sapiens
  siRNA target sequence for BRIP1 (NM_032043.1,1408-1426).
gatagtatggtcaacaata

SEQ ID NO: 22997 - DNA, 19 bp, Homo sapiens
  siRNA target sequence for BRIP1 (NM_032043.1,1412-1430).
gtatggtcaacaataatat

SEQ ID NO: 22998 - DNA, 19 bp, Homo sapiens
  siRNA target sequence for BRIP1 (NM_032043.1,1464-1482).
gtgctgtagcctcattaat

SEQ ID NO: 22999 - DNA, 19 bp, Homo sapiens
  siRNA target sequence for BRIP1 (NM_032043.1,1473-1491).
cctcattaattggttagaa

SEQ ID NO: 23000 - DNA, 19 bp, Homo sapiens
  siRNA target sequence for BRIP1 (NM_032043.1,1497-1515).
cgctgaatatcttgtagaa

SEQ ID NO: 23001 - DNA, 19 bp, Homo sapiens
  siRNA target sequence for BRIP1 (NM_032043.1,1655-1673).
caccaatttatggtaaaga

SEQ ID NO: 23002 - DNA, 19 bp, Homo sapiens
  siRNA target sequence for BRIP1 (NM_032043.1,1679-1697).
caagagaagtacctgttat

SEQ ID NO: 23003 - DNA, 19 bp, Homo sapiens
  siRNA target sequence for BRIP1 (NM_032043.1,1700-1718).
gtgcatcaactcaaataat

SEQ ID NO: 23004 - DNA, 19 bp, Homo sapiens
  siRNA target sequence for BRIP1 (NM_032043.1,1727-1745).
gactttttatggtacttga

SEQ ID NO: 23005 - DNA, 19 bp, Homo sapiens
  siRNA target sequence for BRIP1 (NM_032043.1,1766-1784).
gcagatttgcagatgatta

SEQ ID NO: 23006 - DNA, 19 bp, Homo sapiens
  siRNA target sequence for BRIP1 (NM_032043.1,1792-1810).
gcgattcaacagacttact

SEQ ID NO: 23007 - DNA, 19 bp, Homo sapiens
  siRNA target sequence for BRIP1 (NM_032043.1,1814-1832).
ggacaaatcagattgatat

SEQ ID NO: 23008 - DNA, 19 bp, Homo sapiens
  siRNA target sequence for BRIP1 (NM_032043.1,1815-1833).
gacaaatcagattgatatt

SEQ ID NO: 23009 - DNA, 19 bp, Homo sapiens
  siRNA target sequence for BRIP1 (NM_032043.1,1847-1865).
ggttgttggttctaccaaa

SEQ ID NO: 23010 - DNA, 19 bp, Homo sapiens
  siRNA target sequence for BRIP1 (NM_032043.1,1894-1912).
gcagttcatgtgctaaact

SEQ ID NO: 23011 - DNA, 19 bp, Homo sapiens
  siRNA target sequence for BRIP1 (NM_032043.1,1897-1915).
gttcatgtgctaaactttt

SEQ ID NO: 23012 - DNA, 19 bp, Homo sapiens
  siRNA target sequence for BRIP1 (NM_032043.1,1933-1951).
gtggccttttcagatatta

SEQ ID NO: 23013 - DNA, 19 bp, Homo sapiens
  siRNA target sequence for BRIP1 (NM_032043.1,1977-1995).
gacatctggtacattatca

SEQ ID NO: 23014 - DNA, 19 bp, Homo sapiens
  siRNA target sequence for BRIP1 (NM_032043.1,1985-2003).
gtacattatcaccaatgaa

SEQ ID NO: 23015 - DNA, 19 bp, Homo sapiens
  siRNA target sequence for BRIP1 (NM_032043.1,2015-2033).
cagaacttggtgttacatt

SEQ ID NO: 23016 - DNA, 19 bp, Homo sapiens
  siRNA target sequence for BRIP1 (NM_032043.1,2044-2062).
ctggaggctaatcatatca

SEQ ID NO: 23017 - DNA, 19 bp, Homo sapiens
  siRNA target sequence for BRIP1 (NM_032043.1,2047-2065).
gaggctaatcatatcatta

SEQ ID NO: 23018 - DNA, 19 bp, Homo sapiens
  siRNA target sequence for BRIP1 (NM_032043.1,2049-2067).
ggctaatcatatcattaaa

SEQ ID NO: 23019 - DNA, 19 bp, Homo sapiens
  siRNA target sequence for BRIP1 (NM_032043.1,2104-2122).
cccaagggtcggaatctct

SEQ ID NO: 23020 - DNA, 19 bp, Homo sapiens
  siRNA target sequence for BRIP1 (NM_032043.1,2126-2144).
ctaccttccagaatactga

SEQ ID NO: 23021 - DNA, 19 bp, Homo sapiens
  siRNA target sequence for BRIP1 (NM_032043.1,2167-2185).
gtgggagcacttttgttat

SEQ ID NO: 23022 - DNA, 19 bp, Homo sapiens
  siRNA target sequence for BRIP1 (NM_032043.1,2196-2214).
gactgtgagccaaggaatt

SEQ ID NO: 23023 - DNA, 19 bp, Homo sapiens
  siRNA target sequence for BRIP1 (NM_032043.1,2206-2224).
caaggaattttgtgtttct

SEQ ID NO: 23024 - DNA, 19 bp, Homo sapiens
  siRNA target sequence for BRIP1 (NM_032043.1,2223-2241).
cttgccatcttacaagtta

SEQ ID NO: 23025 - DNA, 19 bp, Homo sapiens
  siRNA target sequence for BRIP1 (NM_032043.1,2364-2382).
gtactatgacgcaatcaaa

SEQ ID NO: 23026 - DNA, 19 bp, Homo sapiens
  siRNA target sequence for BRIP1 (NM_032043.1,2419-2437).
gtttgtcgtggtaaagtga

SEQ ID NO: 23027 - DNA, 19 bp, Homo sapiens
  siRNA target sequence for BRIP1 (NM_032043.1,2448-2466).
ggatttctcagatgacaat

SEQ ID NO: 23028 - DNA, 19 bp, Homo sapiens
  siRNA target sequence for BRIP1 (NM_032043.1,2463-2481).
caatgcccgtgctgtcata

SEQ ID NO: 23029 - DNA, 19 bp, Homo sapiens
  siRNA target sequence for BRIP1 (NM_032043.1,2468-2486).
cccgtgctgtcataacaat

SEQ ID NO: 23030 - DNA, 19 bp, Homo sapiens
  siRNA target sequence for BRIP1 (NM_032043.1,2469-2487).
ccgtgctgtcataacaata

SEQ ID NO: 23031 - DNA, 19 bp, Homo sapiens
  siRNA target sequence for BRIP1 (NM_032043.1,2478-2496).
cataacaataggaattcct

SEQ ID NO: 23032 - DNA, 19 bp, Homo sapiens
  siRNA target sequence for BRIP1 (NM_032043.1,2545-2563).
gaccaccattcaaaattga

SEQ ID NO: 23033 - DNA, 19 bp, Homo sapiens
  siRNA target sequence for BRIP1 (NM_032043.1,2578-2596).
ggccgtcagtggtatgaaa

SEQ ID NO: 23034 - DNA, 19 bp, Homo sapiens
  siRNA target sequence for BRIP1 (NM_032043.1,2580-2598).
ccgtcagtggtatgaaatt

SEQ ID NO: 23035 - DNA, 19 bp, Homo sapiens
  siRNA target sequence for BRIP1 (NM_032043.1,2623-2641).
gcccttggtagatgtatta

SEQ ID NO: 23036 - DNA, 19 bp, Homo sapiens
  siRNA target sequence for BRIP1 (NM_032043.1,2625-2643).
ccttggtagatgtattaga

SEQ ID NO: 23037 - DNA, 19 bp, Homo sapiens
  siRNA target sequence for BRIP1 (NM_032043.1,2657-2675).
ggggagctcttattctagt

SEQ ID NO: 23038 - DNA, 19 bp, Homo sapiens
  siRNA target sequence for BRIP1 (NM_032043.1,2674-2692).
gtggatgatcgctttagga

SEQ ID NO: 23039 - DNA, 19 bp, Homo sapiens
  siRNA target sequence for BRIP1 (NM_032043.1,2676-2694).
ggatgatcgctttaggaat

SEQ ID NO: 23040 - DNA, 19 bp, Homo sapiens
  siRNA target sequence for BRIP1 (NM_032043.1,2677-2695).
gatgatcgctttaggaata

SEQ ID NO: 23041 - DNA, 19 bp, Homo sapiens
  siRNA target sequence for BRIP1 (NM_032043.1,2697-2715).
cccaagtcgctatatatct

SEQ ID NO: 23042 - DNA, 19 bp, Homo sapiens
  siRNA target sequence for BRIP1 (NM_032043.1,2729-2747).
gggtacggcagcagattca

SEQ ID NO: 23043 - DNA, 19 bp, Homo sapiens
  siRNA target sequence for BRIP1 (NM_032043.1,2748-2766).
gcaccattcaacctttgaa

SEQ ID NO: 23044 - DNA, 19 bp, Homo sapiens
  siRNA target sequence for BRIP1 (NM_032043.1,2840-2858).
ccaatatacaggacaatga

SEQ ID NO: 23045 - DNA, 19 bp, Homo sapiens
  siRNA target sequence for BRIP1 (NM_032043.1,2850-2868).
ggacaatgagtctacactt

SEQ ID NO: 23046 - DNA, 19 bp, Homo sapiens
  siRNA target sequence for BRIP1 (NM_032043.1,2866-2884).
cttgaagtgacctctttaa

SEQ ID NO: 23047 - DNA, 19 bp, Homo sapiens
  siRNA target sequence for BRIP1 (NM_032043.1,2910-2928).
ggaagcagcaagtcatcta

SEQ ID NO: 23048 - DNA, 19 bp, Homo sapiens
  siRNA target sequence for BRIP1 (NM_032043.1,2921-2939).
gtcatctatcaccagaaaa

SEQ ID NO: 23049 - DNA, 19 bp, Homo sapiens
  siRNA target sequence for BRIP1 (NM_032043.1,2977-2995).
ctacagtgtcctaaaatta

SEQ ID NO: 23050 - DNA, 19 bp, Homo sapiens
  siRNA target sequence for BRIP1 (NM_032043.1,2980-2998).
cagtgtcctaaaattatta

SEQ ID NO: 23051 - DNA, 19 bp, Homo sapiens
  siRNA target sequence for BRIP1 (NM_032043.1,3011-3029).
ctctaccaagtagcattat

SEQ ID NO: 23052 - DNA, 19 bp, Homo sapiens
  siRNA target sequence for BRIP1 (NM_032043.1,3101-3119).
gatccacaagcccaacttt

SEQ ID NO: 23053 - DNA, 19 bp, Homo sapiens
  siRNA target sequence for BRIP1 (NM_032043.1,3112-3130).
ccaactttcaacaaacaaa

SEQ ID NO: 23054 - DNA, 19 bp, Homo sapiens
  siRNA target sequence for BRIP1 (NM_032043.1,3139-3157).
gttagctggtcaagcttta

SEQ ID NO: 23055 - DNA, 19 bp, Homo sapiens
  siRNA target sequence for BRIP1 (NM_032043.1,3144-3162).
ctggtcaagctttaattct

SEQ ID NO: 23056 - DNA, 19 bp, Homo sapiens
  siRNA target sequence for BRIP1 (NM_032043.1,3207-3225).
gctcgggtcatcagagaat

SEQ ID NO: 23057 - DNA, 19 bp, Homo sapiens
  siRNA target sequence for BRIP1 (NM_032043.1,3282-3300).
gcccttcactgataaatgt

SEQ ID NO: 23058 - DNA, 19 bp, Homo sapiens
  siRNA target sequence for BRIP1 (NM_032043.1,3319-3337).
gtaaacacatcgtttggat

SEQ ID NO: 23059 - DNA, 19 bp, Homo sapiens
  siRNA target sequence for BRIP1 (NM_032043.1,3382-3400).
gccacccttactagaaaaa

SEQ ID NO: 23060 - DNA, 19 bp, Homo sapiens
  siRNA target sequence for BRIP1 (NM_032043.1,3387-3405).
ccttactagaaaaaatcat

SEQ ID NO: 23061 - DNA, 19 bp, Homo sapiens
  siRNA target sequence for BRIP1 (NM_032043.1,3447-3465).
cattgaattgtctctagta

SEQ ID NO: 23062 - DNA, 19 bp, Homo sapiens
  siRNA target sequence for BRIP1 (NM_032043.1,3517-3535).
gaagatgaatctatctatt

SEQ ID NO: 23063 - DNA, 19 bp, Homo sapiens
  siRNA target sequence for BRIP1 (NM_032043.1,3531-3549).
ctattttacacctgaactt

SEQ ID NO: 23064 - DNA, 19 bp, Homo sapiens
  siRNA target sequence for BRIP1 (NM_032043.1,3585-3603).
cctagctgaaactgataga

SEQ ID NO: 23065 - DNA, 19 bp, Homo sapiens
  siRNA target sequence for BRIP1 (NM_032043.1,3611-3629).
gattggctaacaattcaga

SEQ ID NO: 23066 - DNA, 19 bp, Homo sapiens
  siRNA target sequence for BRIP1 (NM_032043.1,3626-3644).
cagattgcattttagctaa

SEQ ID NO: 23067 - DNA, 19 bp, Homo sapiens
  siRNA target sequence for BRIP1 (NM_032043.1,3703-3721).
gaggattgcatagatacaa

SEQ ID NO: 23068 - DNA, 19 bp, Homo sapiens
  siRNA target sequence for BRIP1 (NM_032043.1,3706-3724).
gattgcatagatacaaagt

SEQ ID NO: 23069 - DNA, 19 bp, Homo sapiens
  siRNA target sequence for BRIP1 (NM_032043.1,3710-3728).
gcatagatacaaagttgaa

SEQ ID NO: 23070 - DNA, 19 bp, Homo sapiens
  siRNA target sequence for BRIP1 (NM_032043.1,3719-3737).
caaagttgaatggaattct

SEQ ID NO: 23071 - DNA, 19 bp, Homo sapiens
  siRNA target sequence for BRIP1 (NM_032043.1,3785-3803).
caacttggataaatgaact

SEQ ID NO: 23072 - DNA, 19 bp, Homo sapiens
  siRNA target sequence for BRIP1 (NM_032043.1,3810-3828).
gggaaaaactcatgaaata

SEQ ID NO: 23073 - DNA, 19 bp, Homo sapiens
  siRNA target sequence for BRIP1 (NM_032043.1,3812-3830).
gaaaaactcatgaaataga

SEQ ID NO: 23074 - DNA, 19 bp, Homo sapiens
  siRNA target sequence for BRPF1 (NM_004634.1,33-51).
gggtggactttgatgtgaa

SEQ ID NO: 23075 - DNA, 19 bp, Homo sapiens
  siRNA target sequence for BRPF1 (NM_004634.1,108-126).
cctgccgaaaggtctacaa

SEQ ID NO: 23076 - DNA, 19 bp, Homo sapiens
  siRNA target sequence for BRPF1 (NM_004634.1,113-131).
cgaaaggtctacaagagtt

SEQ ID NO: 23077 - DNA, 19 bp, Homo sapiens
  siRNA target sequence for BRPF1 (NM_004634.1,118-136).
ggtctacaagagttacagt

SEQ ID NO: 23078 - DNA, 19 bp, Homo sapiens
  siRNA target sequence for BRPF1 (NM_004634.1,349-367).
ccaccgcatcagcatcttt

SEQ ID NO: 23079 - DNA, 19 bp, Homo sapiens
  siRNA target sequence for BRPF1 (NM_004634.1,464-482).
cccaagtcaggcaaacata

SEQ ID NO: 23080 - DNA, 19 bp, Homo sapiens
  siRNA target sequence for BRPF1 (NM_004634.1,795-813).
cgtactttgagagtcataa

SEQ ID NO: 23081 - DNA, 19 bp, Homo sapiens
  siRNA target sequence for BRPF1 (NM_004634.1,879-897).
gccagaacagcaatgtcat

SEQ ID NO: 23082 - DNA, 19 bp, Homo sapiens
  siRNA target sequence for BRPF1 (NM_004634.1,939-957).
gctacggtgtcccctatat

SEQ ID NO: 23083 - DNA, 19 bp, Homo sapiens
  siRNA target sequence for BRPF1 (NM_004634.1,1183-1201).
ctgctacatttgcaaacaa

SEQ ID NO: 23084 - DNA, 19 bp, Homo sapiens
  siRNA target sequence for BRPF1 (NM_004634.1,1489-1507).
ggccaagtcccggatcaaa

SEQ ID NO: 23085 - DNA, 19 bp, Homo sapiens
  siRNA target sequence for BRPF1 (NM_004634.1,1490-1508).
gccaagtcccggatcaaaa

SEQ ID NO: 23086 - DNA, 19 bp, Homo sapiens
  siRNA target sequence for BRPF1 (NM_004634.1,1491-1509).
ccaagtcccggatcaaaat

SEQ ID NO: 23087 - DNA, 19 bp, Homo sapiens
  siRNA target sequence for BRPF1 (NM_004634.1,1497-1515).
cccggatcaaaatgaagaa

SEQ ID NO: 23088 - DNA, 19 bp, Homo sapiens
  siRNA target sequence for BRPF1 (NM_004634.1,1577-1595).
ccaccacacaggcttagta

SEQ ID NO: 23089 - DNA, 19 bp, Homo sapiens
  siRNA target sequence for BRPF1 (NM_004634.1,1580-1598).
ccacacaggcttagtaaaa

SEQ ID NO: 23090 - DNA, 19 bp, Homo sapiens
  siRNA target sequence for BRPF1 (NM_004634.1,1581-1599).
cacacaggcttagtaaaat

SEQ ID NO: 23091 - DNA, 19 bp, Homo sapiens
  siRNA target sequence for BRPF1 (NM_004634.1,1608-1626).
gcctgaccatccaaaggaa

SEQ ID NO: 23092 - DNA, 19 bp, Homo sapiens
  siRNA target sequence for BRPF1 (NM_004634.1,1768-1786).
gaactgggcccttaaagaa

SEQ ID NO: 23093 - DNA, 19 bp, Homo sapiens
  siRNA target sequence for BRPF1 (NM_004634.1,1830-1848).
ctcggctgctcgtggaatt

SEQ ID NO: 23094 - DNA, 19 bp, Homo sapiens
  siRNA target sequence for BRPF1 (NM_004634.1,1832-1850).
cggctgctcgtggaattga

SEQ ID NO: 23095 - DNA, 19 bp, Homo sapiens
  siRNA target sequence for BRPF1 (NM_004634.1,1833-1851).
ggctgctcgtggaattgat

SEQ ID NO: 23096 - DNA, 19 bp, Homo sapiens
  siRNA target sequence for BRPF1 (NM_004634.1,2079-2097).
cttaccgctacctgaattt

SEQ ID NO: 23097 - DNA, 19 bp, Homo sapiens
  siRNA target sequence for BRPF1 (NM_004634.1,2083-2101).
ccgctacctgaattttgat

SEQ ID NO: 23098 - DNA, 19 bp, Homo sapiens
  siRNA target sequence for BRPF1 (NM_004634.1,2133-2151).
gcaactgcctcaagtataa

SEQ ID NO: 23099 - DNA, 19 bp, Homo sapiens
  siRNA target sequence for BRPF1 (NM_004634.1,2302-2320).
cacacaccacactgaagat

SEQ ID NO: 23100 - DNA, 19 bp, Homo sapiens
  siRNA target sequence for BRPF1 (NM_004634.1,2401-2419).
gcggctggacgaagtgaat

SEQ ID NO: 23101 - DNA, 19 bp, Homo sapiens
  siRNA target sequence for BRPF1 (NM_004634.1,2442-2460).
gctcacggcgtgcaaagat

SEQ ID NO: 23102 - DNA, 19 bp, Homo sapiens
  siRNA target sequence for BRPF1 (NM_004634.1,2445-2463).
cacggcgtgcaaagatgat

SEQ ID NO: 23103 - DNA, 19 bp, Homo sapiens
  siRNA target sequence for BRPF1 (NM_004634.1,2447-2465).
cggcgtgcaaagatgatca

SEQ ID NO: 23104 - DNA, 19 bp, Homo sapiens
  siRNA target sequence for BRPF1 (NM_004634.1,2450-2468).
cgtgcaaagatgatcaaga

SEQ ID NO: 23105 - DNA, 19 bp, Homo sapiens
  siRNA target sequence for BRPF1 (NM_004634.1,2590-2608).
ggatgggcagacagatagt

SEQ ID NO: 23106 - DNA, 19 bp, Homo sapiens
  siRNA target sequence for BRPF1 (NM_004634.1,2963-2981).
caaccagtgaagaagagtt

SEQ ID NO: 23107 - DNA, 19 bp, Homo sapiens
  siRNA target sequence for BRPF1 (NM_004634.1,3306-3324).
gccgaggctatccatcata

SEQ ID NO: 23108 - DNA, 19 bp, Homo sapiens
  siRNA target sequence for BRPF1 (NM_004634.1,3651-3669).
gtgagaccagcgatagtga

SEQ ID NO: 23109 - DNA, 19 bp, Homo sapiens
  siRNA target sequence for BS69 (NM_006624.1,260-278).
ggtatgcaccctaaagaga

SEQ ID NO: 23110 - DNA, 19 bp, Homo sapiens
  siRNA target sequence for BS69 (NM_006624.1,289-307).
gctgagcttagctgtgaaa

SEQ ID NO: 23111 - DNA, 19 bp, Homo sapiens
  siRNA target sequence for BS69 (NM_006624.1,312-330).
gtcttattgtcgaaactct

SEQ ID NO: 23112 - DNA, 19 bp, Homo sapiens
  siRNA target sequence for BS69 (NM_006624.1,448-466).
gcctggagaggtgttgata

SEQ ID NO: 23113 - DNA, 19 bp, Homo sapiens
  siRNA target sequence for BS69 (NM_006624.1,554-572).
gtttgcaggagcattaaga

SEQ ID NO: 23114 - DNA, 19 bp, Homo sapiens
  siRNA target sequence for BS69 (NM_006624.1,599-617).
ggcacatacctcagattca

SEQ ID NO: 23115 - DNA, 19 bp, Homo sapiens
  siRNA target sequence for BS69 (NM_006624.1,600-618).
gcacatacctcagattcat

SEQ ID NO: 23116 - DNA, 19 bp, Homo sapiens
  siRNA target sequence for BS69 (NM_006624.1,631-649).
gaaggagagggctatagat

SEQ ID NO: 23117 - DNA, 19 bp, Homo sapiens
  siRNA target sequence for BS69 (NM_006624.1,635-653).
gagagggctatagatctta

SEQ ID NO: 23118 - DNA, 19 bp, Homo sapiens
  siRNA target sequence for BS69 (NM_006624.1,637-655).
gagggctatagatcttaat

SEQ ID NO: 23119 - DNA, 19 bp, Homo sapiens
  siRNA target sequence for BS69 (NM_006624.1,712-730).
ggacgttcccaccattcaa

SEQ ID NO: 23120 - DNA, 19 bp, Homo sapiens
  siRNA target sequence for BS69 (NM_006624.1,720-738).
ccaccattcaagagaaagt

SEQ ID NO: 23121 - DNA, 19 bp, Homo sapiens
  siRNA target sequence for BS69 (NM_006624.1,747-765).
ggaaataccgaagttatga

SEQ ID NO: 23122 - DNA, 19 bp, Homo sapiens
  siRNA target sequence for BS69 (NM_006624.1,785-803).
caattgcttctccacaata

SEQ ID NO: 23123 - DNA, 19 bp, Homo sapiens
  siRNA target sequence for BS69 (NM_006624.1,839-857).
gacattgcgaggatgctat

SEQ ID NO: 23124 - DNA, 19 bp, Homo sapiens
  siRNA target sequence for BS69 (NM_006624.1,841-859).
cattgcgaggatgctatat

SEQ ID NO: 23125 - DNA, 19 bp, Homo sapiens
  siRNA target sequence for BS69 (NM_006624.1,846-864).
cgaggatgctatataaaga

SEQ ID NO: 23126 - DNA, 19 bp, Homo sapiens
  siRNA target sequence for BS69 (NM_006624.1,929-947).
cctgacaactggttctgtt

SEQ ID NO: 23127 - DNA, 19 bp, Homo sapiens
  siRNA target sequence for BS69 (NM_006624.1,930-948).
ctgacaactggttctgtta

SEQ ID NO: 23128 - DNA, 19 bp, Homo sapiens
  siRNA target sequence for BS69 (NM_006624.1,943-961).
ctgttatccttgtatacct

SEQ ID NO: 23129 - DNA, 19 bp, Homo sapiens
  siRNA target sequence for BS69 (NM_006624.1,945-963).
gttatccttgtatacctaa

SEQ ID NO: 23130 - DNA, 19 bp, Homo sapiens
  siRNA target sequence for BS69 (NM_006624.1,971-989).
ctggtttgggctaaaatga

SEQ ID NO: 23131 - DNA, 19 bp, Homo sapiens
  siRNA target sequence for BS69 (NM_006624.1,1138-1156).
gcgcagtatgggttggaaa

SEQ ID NO: 23132 - DNA, 19 bp, Homo sapiens
  siRNA target sequence for BS69 (NM_006624.1,1139-1157).
cgcagtatgggttggaaaa

SEQ ID NO: 23133 - DNA, 19 bp, Homo sapiens
  siRNA target sequence for BS69 (NM_006624.1,1192-1210).
cctacgagaagggagattt

SEQ ID NO: 23134 - DNA, 19 bp, Homo sapiens
  siRNA target sequence for BS69 (NM_006624.1,1269-1287).
ccagtaatgagcagctaaa

SEQ ID NO: 23135 - DNA, 19 bp, Homo sapiens
  siRNA target sequence for BS69 (NM_006624.1,1282-1300).
gctaaaggtcactcaagaa

SEQ ID NO: 23136 - DNA, 19 bp, Homo sapiens
  siRNA target sequence for BS69 (NM_006624.1,1312-1330).
gaaaggacgacgtaatcaa

SEQ ID NO: 23137 - DNA, 19 bp, Homo sapiens
  siRNA target sequence for BS69 (NM_006624.1,1428-1446).
ccgtgtcaactcagacaaa

SEQ ID NO: 23138 - DNA, 19 bp, Homo sapiens
  siRNA target sequence for BS69 (NM_006624.1,1455-1473).
gtgcctcttcaccaagaat

SEQ ID NO: 23139 - DNA, 19 bp, Homo sapiens
  siRNA target sequence for BS69 (NM_006624.1,1518-1536).
gcatgtgccatgacaaata

SEQ ID NO: 23140 - DNA, 19 bp, Homo sapiens
  siRNA target sequence for BS69 (NM_006624.1,1539-1557).
ccaagatcttcaatgactt

SEQ ID NO: 23141 - DNA, 19 bp, Homo sapiens
  siRNA target sequence for BS69 (NM_006624.1,1619-1637).
gagaagctgcgttctgaaa

SEQ ID NO: 23142 - DNA, 19 bp, Homo sapiens
  siRNA target sequence for BS69 (NM_006624.1,1687-1705).
gggtgagatggacagaaaa

SEQ ID NO: 23143 - DNA, 19 bp, Homo sapiens
  siRNA target sequence for C11orf13 (NM_003475.2,148-166).
cgcactagcccaagcaata

SEQ ID NO: 23144 - DNA, 19 bp, Homo sapiens
  siRNA target sequence for C11orf13 (NM_003475.2,253-271).
ggccacctgcggacagttt

SEQ ID NO: 23145 - DNA, 19 bp, Homo sapiens
  siRNA target sequence for C11orf13 (NM_003475.2,352-370).
ggaacgctgcctaattcgt

SEQ ID NO: 23146 - DNA, 19 bp, Homo sapiens
  siRNA target sequence for C14orf106 (NM_018353.2,903-921).
cactcctaacagagttgaa

SEQ ID NO: 23147 - DNA, 19 bp, Homo sapiens
  siRNA target sequence for C14orf106 (NM_018353.2,1016-1034).
ggagttcctctagaatcat

SEQ ID NO: 23148 - DNA, 19 bp, Homo sapiens
  siRNA target sequence for C14orf106 (NM_018353.2,1019-1037).
gttcctctagaatcatcaa

SEQ ID NO: 23149 - DNA, 19 bp, Homo sapiens
  siRNA target sequence for C14orf106 (NM_018353.2,1028-1046).
gaatcatcaaataatgata

SEQ ID NO: 23150 - DNA, 19 bp, Homo sapiens
  siRNA target sequence for C14orf106 (NM_018353.2,1052-1070).
ctcccggtcaaacaaaaga

SEQ ID NO: 23151 - DNA, 19 bp, Homo sapiens
  siRNA target sequence for C14orf106 (NM_018353.2,1054-1072).
cccggtcaaacaaaagatt

SEQ ID NO: 23152 - DNA, 19 bp, Homo sapiens
  siRNA target sequence for C14orf106 (NM_018353.2,1056-1074).
cggtcaaacaaaagattca

SEQ ID NO: 23153 - DNA, 19 bp, Homo sapiens
  siRNA target sequence for C14orf106 (NM_018353.2,1102-1120).
gcacaatttaacttacgaa

SEQ ID NO: 23154 - DNA, 19 bp, Homo sapiens
  siRNA target sequence for C14orf106 (NM_018353.2,1160-1178).
gtagaagcccgaaacaaga

SEQ ID NO: 23155 - DNA, 19 bp, Homo sapiens
  siRNA target sequence for C14orf106 (NM_018353.2,1163-1181).
gaagcccgaaacaagacat

SEQ ID NO: 23156 - DNA, 19 bp, Homo sapiens
  siRNA target sequence for C14orf106 (NM_018353.2,1166-1184).
gcccgaaacaagacattaa

SEQ ID NO: 23157 - DNA, 19 bp, Homo sapiens
  siRNA target sequence for C14orf106 (NM_018353.2,1168-1186).
ccgaaacaagacattaact

SEQ ID NO: 23158 - DNA, 19 bp, Homo sapiens
  siRNA target sequence for C14orf106 (NM_018353.2,1169-1187).
cgaaacaagacattaacta

SEQ ID NO: 23159 - DNA, 19 bp, Homo sapiens
  siRNA target sequence for C14orf106 (NM_018353.2,1188-1206).
gagctcagttggctaaaca

SEQ ID NO: 23160 - DNA, 19 bp, Homo sapiens
  siRNA target sequence for C14orf106 (NM_018353.2,1193-1211).
cagttggctaaacaaattt

SEQ ID NO: 23161 - DNA, 19 bp, Homo sapiens
  siRNA target sequence for C14orf106 (NM_018353.2,1249-1267).
caaaaaggacacgtttgtt

SEQ ID NO: 23162 - DNA, 19 bp, Homo sapiens
  siRNA target sequence for C14orf106 (NM_018353.2,1255-1273).
ggacacgtttgttttagaa

SEQ ID NO: 23163 - DNA, 19 bp, Homo sapiens
  siRNA target sequence for C14orf106 (NM_018353.2,1313-1331).
gctgagactctcagtacta

SEQ ID NO: 23164 - DNA, 19 bp, Homo sapiens
  siRNA target sequence for C14orf106 (NM_018353.2,1316-1334).
gagactctcagtactaatt

SEQ ID NO: 23165 - DNA, 19 bp, Homo sapiens
  siRNA target sequence for C14orf106 (NM_018353.2,1318-1336).
gactctcagtactaattgt

SEQ ID NO: 23166 - DNA, 19 bp, Homo sapiens
  siRNA target sequence for C14orf106 (NM_018353.2,1320-1338).
ctctcagtactaattgtat

SEQ ID NO: 23167 - DNA, 19 bp, Homo sapiens
  siRNA target sequence for C14orf106 (NM_018353.2,1324-1342).
cagtactaattgtattcct

SEQ ID NO: 23168 - DNA, 19 bp, Homo sapiens
  siRNA target sequence for C14orf106 (NM_018353.2,1326-1344).
gtactaattgtattcctat

SEQ ID NO: 23169 - DNA, 19 bp, Homo sapiens
  siRNA target sequence for C14orf106 (NM_018353.2,1395-1413).
ggacttcgcaacagaaagt

SEQ ID NO: 23170 - DNA, 19 bp, Homo sapiens
  siRNA target sequence for C14orf106 (NM_018353.2,1396-1414).
gacttcgcaacagaaagtt

SEQ ID NO: 23171 - DNA, 19 bp, Homo sapiens
  siRNA target sequence for C14orf106 (NM_018353.2,1398-1416).
cttcgcaacagaaagttaa

SEQ ID NO: 23172 - DNA, 19 bp, Homo sapiens
  siRNA target sequence for C14orf106 (NM_018353.2,1401-1419).
cgcaacagaaagttaagga

SEQ ID NO: 23173 - DNA, 19 bp, Homo sapiens
  siRNA target sequence for C14orf106 (NM_018353.2,1460-1478).
ggttccatgaaagatacat

SEQ ID NO: 23174 - DNA, 19 bp, Homo sapiens
  siRNA target sequence for C14orf106 (NM_018353.2,1464-1482).
ccatgaaagatacatgtaa

SEQ ID NO: 23175 - DNA, 19 bp, Homo sapiens
  siRNA target sequence for C14orf106 (NM_018353.2,1493-1511).
gcaacaccaagacttcata

SEQ ID NO: 23176 - DNA, 19 bp, Homo sapiens
  siRNA target sequence for C14orf106 (NM_018353.2,1499-1517).
ccaagacttcatataacaa

SEQ ID NO: 23177 - DNA, 19 bp, Homo sapiens
  siRNA target sequence for C14orf106 (NM_018353.2,1500-1518).
caagacttcatataacaat

SEQ ID NO: 23178 - DNA, 19 bp, Homo sapiens
  siRNA target sequence for C14orf106 (NM_018353.2,1554-1572).
ctcctccaagaatatttca

SEQ ID NO: 23179 - DNA, 19 bp, Homo sapiens
  siRNA target sequence for C14orf106 (NM_018353.2,1556-1574).
cctccaagaatatttcaaa

SEQ ID NO: 23180 - DNA, 19 bp, Homo sapiens
  siRNA target sequence for C14orf106 (NM_018353.2,1612-1630).
gctacaggaatggatgatt

SEQ ID NO: 23181 - DNA, 19 bp, Homo sapiens
  siRNA target sequence for C14orf106 (NM_018353.2,1613-1631).
ctacaggaatggatgatta

SEQ ID NO: 23182 - DNA, 19 bp, Homo sapiens
  siRNA target sequence for C14orf106 (NM_018353.2,1675-1693).
gatagacgtcactaacata

SEQ ID NO: 23183 - DNA, 19 bp, Homo sapiens
  siRNA target sequence for C14orf106 (NM_018353.2,1679-1697).
gacgtcactaacatatatt

SEQ ID NO: 23184 - DNA, 19 bp, Homo sapiens
  siRNA target sequence for C14orf106 (NM_018353.2,1698-1716).
ggcacagtaatgtaattat

SEQ ID NO: 23185 - DNA, 19 bp, Homo sapiens
  siRNA target sequence for C14orf106 (NM_018353.2,1720-1738).
gcggattgagcacaacaaa

SEQ ID NO: 23186 - DNA, 19 bp, Homo sapiens
  siRNA target sequence for C14orf106 (NM_018353.2,1722-1740).
ggattgagcacaacaaact

SEQ ID NO: 23187 - DNA, 19 bp, Homo sapiens
  siRNA target sequence for C14orf106 (NM_018353.2,1735-1753).
caaacttaggactatatca

SEQ ID NO: 23188 - DNA, 19 bp, Homo sapiens
  siRNA target sequence for C14orf106 (NM_018353.2,1746-1764).
ctatatcaggcaacgttta

SEQ ID NO: 23189 - DNA, 19 bp, Homo sapiens
  siRNA target sequence for C14orf106 (NM_018353.2,1814-1832).
ccaaattatctcataagga

SEQ ID NO: 23190 - DNA, 19 bp, Homo sapiens
  siRNA target sequence for C14orf106 (NM_018353.2,1844-1862).
ggatttccagaaaattgga

SEQ ID NO: 23191 - DNA, 19 bp, Homo sapiens
  siRNA target sequence for C14orf106 (NM_018353.2,1950-1968).
ctgtccgtgacataaggaa

SEQ ID NO: 23192 - DNA, 19 bp, Homo sapiens
  siRNA target sequence for C14orf106 (NM_018353.2,1952-1970).
gtccgtgacataaggaaat

SEQ ID NO: 23193 - DNA, 19 bp, Homo sapiens
  siRNA target sequence for C14orf106 (NM_018353.2,1954-1972).
ccgtgacataaggaaatca

SEQ ID NO: 23194 - DNA, 19 bp, Homo sapiens
  siRNA target sequence for C14orf106 (NM_018353.2,2020-2038).
caccaccacttacgatttt

SEQ ID NO: 23195 - DNA, 19 bp, Homo sapiens
  siRNA target sequence for C14orf106 (NM_018353.2,2022-2040).
ccaccacttacgattttga

SEQ ID NO: 23196 - DNA, 19 bp, Homo sapiens
  siRNA target sequence for C14orf106 (NM_018353.2,2023-2041).
caccacttacgattttgat

SEQ ID NO: 23197 - DNA, 19 bp, Homo sapiens
  siRNA target sequence for C14orf106 (NM_018353.2,2028-2046).
cttacgattttgattgtga

SEQ ID NO: 23198 - DNA, 19 bp, Homo sapiens
  siRNA target sequence for C14orf106 (NM_018353.2,2080-2098).
gtcaccaggagctacagaa

SEQ ID NO: 23199 - DNA, 19 bp, Homo sapiens
  siRNA target sequence for C14orf106 (NM_018353.2,2155-2173).
ccaagtaaataatactatt

SEQ ID NO: 23200 - DNA, 19 bp, Homo sapiens
  siRNA target sequence for C14orf106 (NM_018353.2,2159-2177).
gtaaataatactattcaaa

SEQ ID NO: 23201 - DNA, 19 bp, Homo sapiens
  siRNA target sequence for C14orf106 (NM_018353.2,2183-2201).
ggaggagatgacttatcta

SEQ ID NO: 23202 - DNA, 19 bp, Homo sapiens
  siRNA target sequence for C14orf106 (NM_018353.2,2194-2212).
cttatctaatcaggaatta

SEQ ID NO: 23203 - DNA, 19 bp, Homo sapiens
  siRNA target sequence for C14orf106 (NM_018353.2,2317-2335).
ggatgtatccattgatatt

SEQ ID NO: 23204 - DNA, 19 bp, Homo sapiens
  siRNA target sequence for C14orf106 (NM_018353.2,2389-2407).
caatcagaagaaagcttat

SEQ ID NO: 23205 - DNA, 19 bp, Homo sapiens
  siRNA target sequence for C14orf106 (NM_018353.2,2414-2432).
gtaacaccacttaaatcta

SEQ ID NO: 23206 - DNA, 19 bp, Homo sapiens
  siRNA target sequence for C14orf106 (NM_018353.2,2418-2436).
caccacttaaatctagaaa

SEQ ID NO: 23207 - DNA, 19 bp, Homo sapiens
  siRNA target sequence for C14orf106 (NM_018353.2,2421-2439).
cacttaaatctagaaaagt

SEQ ID NO: 23208 - DNA, 19 bp, Homo sapiens
  siRNA target sequence for C14orf106 (NM_018353.2,2451-2469).
gatgcatgaggtataatct

SEQ ID NO: 23209 - DNA, 19 bp, Homo sapiens
  siRNA target sequence for C14orf106 (NM_018353.2,2470-2488).
gtccgctggcaccatcaaa

SEQ ID NO: 23210 - DNA, 19 bp, Homo sapiens
  siRNA target sequence for C14orf106 (NM_018353.2,2479-2497).
caccatcaaagcagtaaca

SEQ ID NO: 23211 - DNA, 19 bp, Homo sapiens
  siRNA target sequence for C14orf106 (NM_018353.2,2481-2499).
ccatcaaagcagtaacaga

SEQ ID NO: 23212 - DNA, 19 bp, Homo sapiens
  siRNA target sequence for C14orf106 (NM_018353.2,2542-2560).
gtccatggggactttagaa

SEQ ID NO: 23213 - DNA, 19 bp, Homo sapiens
  siRNA target sequence for C14orf106 (NM_018353.2,2601-2619).
gcgatgaacgtgacttact

SEQ ID NO: 23214 - DNA, 19 bp, Homo sapiens
  siRNA target sequence for C14orf106 (NM_018353.2,2602-2620).
cgatgaacgtgacttactt

SEQ ID NO: 23215 - DNA, 19 bp, Homo sapiens
  siRNA target sequence for C14orf106 (NM_018353.2,2603-2621).
gatgaacgtgacttactta

SEQ ID NO: 23216 - DNA, 19 bp, Homo sapiens
  siRNA target sequence for C14orf106 (NM_018353.2,2669-2687).
ctcacctctgactttaaga

SEQ ID NO: 23217 - DNA, 19 bp, Homo sapiens
  siRNA target sequence for C14orf106 (NM_018353.2,2686-2704).
gaaaaataccagactatta

SEQ ID NO: 23218 - DNA, 19 bp, Homo sapiens
  siRNA target sequence for C14orf106 (NM_018353.2,2694-2712).
ccagactattaccaaaatt

SEQ ID NO: 23219 - DNA, 19 bp, Homo sapiens
  siRNA target sequence for C14orf106 (NM_018353.2,2729-2747).
caggtagctatgtcatttt

SEQ ID NO: 23220 - DNA, 19 bp, Homo sapiens
  siRNA target sequence for C14orf106 (NM_018353.2,2731-2749).
ggtagctatgtcattttat

SEQ ID NO: 23221 - DNA, 19 bp, Homo sapiens
  siRNA target sequence for C14orf106 (NM_018353.2,2732-2750).
gtagctatgtcattttata

SEQ ID NO: 23222 - DNA, 19 bp, Homo sapiens
  siRNA target sequence for C14orf106 (NM_018353.2,3002-3020).
gttaggaaagagtttccaa

SEQ ID NO: 23223 - DNA, 19 bp, Homo sapiens
  siRNA target sequence for C14orf106 (NM_018353.2,3026-3044).
gaggcagtaggatctgata

SEQ ID NO: 23224 - DNA, 19 bp, Homo sapiens
  siRNA target sequence for C14orf106 (NM_018353.2,3032-3050).
gtaggatctgataagacaa

SEQ ID NO: 23225 - DNA, 19 bp, Homo sapiens
  siRNA target sequence for C14orf106 (NM_018353.2,3035-3053).
ggatctgataagacaaata

SEQ ID NO: 23226 - DNA, 19 bp, Homo sapiens
  siRNA target sequence for C14orf106 (NM_018353.2,3054-3072).
ggcatcccttagaatgctt

SEQ ID NO: 23227 - DNA, 19 bp, Homo sapiens
  siRNA target sequence for C14orf106 (NM_018353.2,3069-3087).
gcttacctggtttaattca

SEQ ID NO: 23228 - DNA, 19 bp, Homo sapiens
  siRNA target sequence for C14orf106 (NM_018353.2,3110-3128).
gagttacagaaacttcatt

SEQ ID NO: 23229 - DNA, 19 bp, Homo sapiens
  siRNA target sequence for C14orf106 (NM_018353.2,3252-3270).
cccagaaacatgtcactaa

SEQ ID NO: 23230 - DNA, 19 bp, Homo sapiens
  siRNA target sequence for C14orf106 (NM_018353.2,3254-3272).
cagaaacatgtcactaaga

SEQ ID NO: 23231 - DNA, 19 bp, Homo sapiens
  siRNA target sequence for C14orf106 (NM_018353.2,3347-3365).
gccaaagtgggaactctta

SEQ ID NO: 23232 - DNA, 19 bp, Homo sapiens
  siRNA target sequence for C14orf106 (NM_018353.2,3394-3412).
ggaacagttgccaaaagat

SEQ ID NO: 23233 - DNA, 19 bp, Homo sapiens
  siRNA target sequence for C14orf106 (NM_018353.2,3537-3555).
catcagttatctttccatt

SEQ ID NO: 23234 - DNA, 19 bp, Homo sapiens
  siRNA target sequence for C14orf106 (NM_018353.2,3542-3560).
gttatctttccattggtaa

SEQ ID NO: 23235 - DNA, 19 bp, Homo sapiens
  siRNA target sequence for C14orf106 (NM_018353.2,3556-3574).
ggtaaaaactcctcaatgt

SEQ ID NO: 23236 - DNA, 19 bp, Homo sapiens
  siRNA target sequence for C14orf106 (NM_018353.2,3588-3606).
ctggcatgctaggttctat

SEQ ID NO: 23237 - DNA, 19 bp, Homo sapiens
  siRNA target sequence for C14orf106 (NM_018353.2,3590-3608).
ggcatgctaggttctataa

SEQ ID NO: 23238 - DNA, 19 bp, Homo sapiens
  siRNA target sequence for C14orf106 (NM_018353.2,3623-3641).
gataaatatgtttttcgta

SEQ ID NO: 23239 - DNA, 19 bp, Homo sapiens
  siRNA target sequence for C14orf106 (NM_018353.2,3638-3656).
cgtatgcaaaaatatcata

SEQ ID NO: 23240 - DNA, 19 bp, Homo sapiens
  siRNA target sequence for C14orf106 (NM_018353.2,3678-3696).
ggggcaacatcaagaaaaa

SEQ ID NO: 23241 - DNA, 19 bp, Homo sapiens
  siRNA target sequence for C14orf106 (NM_018353.2,3732-3750).
gaaggaaaaccccatttaa

SEQ ID NO: 23242 - DNA, 19 bp, Homo sapiens
  siRNA target sequence for C14orf106 (NM_018353.2,3764-3782).
gaaaactctggtattggaa

SEQ ID NO: 23243 - DNA, 19 bp, Homo sapiens
  siRNA target sequence for C14orf146 (NM_152447.2,704-722).
gattttgtctcctaatctt

SEQ ID NO: 23244 - DNA, 19 bp, Homo sapiens
  siRNA target sequence for C14orf146 (NM_152447.2,756-774).
gttccaccaaacattgaca

SEQ ID NO: 23245 - DNA, 19 bp, Homo sapiens
  siRNA target sequence for C14orf146 (NM_152447.2,791-809).
gcggttggcagacaatttt

SEQ ID NO: 23246 - DNA, 19 bp, Homo sapiens
  siRNA target sequence for C14orf146 (NM_152447.2,793-811).
ggttggcagacaattttgt

SEQ ID NO: 23247 - DNA, 19 bp, Homo sapiens
  siRNA target sequence for C14orf146 (NM_152447.2,794-812).
gttggcagacaattttgtt

SEQ ID NO: 23248 - DNA, 19 bp, Homo sapiens
  siRNA target sequence for C14orf146 (NM_152447.2,863-881).
gactctatccaggaataca

SEQ ID NO: 23249 - DNA, 19 bp, Homo sapiens
  siRNA target sequence for C14orf146 (NM_152447.2,871-889).
ccaggaatacaataagttt

SEQ ID NO: 23250 - DNA, 19 bp, Homo sapiens
  siRNA target sequence for C14orf146 (NM_152447.2,872-890).
caggaatacaataagtttt

SEQ ID NO: 23251 - DNA, 19 bp, Homo sapiens
  siRNA target sequence for C14orf146 (NM_152447.2,904-922).
ctttcgctgacctacgaaa

SEQ ID NO: 23252 - DNA, 19 bp, Homo sapiens
  siRNA target sequence for C14orf146 (NM_152447.2,909-927).
gctgacctacgaaatttga

SEQ ID NO: 23253 - DNA, 19 bp, Homo sapiens
  siRNA target sequence for C14orf146 (NM_152447.2,941-959).
gaatagcaacagattgact

SEQ ID NO: 23254 - DNA, 19 bp, Homo sapiens
  siRNA target sequence for C14orf146 (NM_152447.2,946-964).
gcaacagattgactaaaat

SEQ ID NO: 23255 - DNA, 19 bp, Homo sapiens
  siRNA target sequence for C14orf146 (NM_152447.2,982-1000).
gtggtctttccaatcttca

SEQ ID NO: 23256 - DNA, 19 bp, Homo sapiens
  siRNA target sequence for C14orf146 (NM_152447.2,992-1010).
caatcttcatcatttgata

SEQ ID NO: 23257 - DNA, 19 bp, Homo sapiens
  siRNA target sequence for C14orf146 (NM_152447.2,1002-1020).
catttgatactgaacaaca

SEQ ID NO: 23258 - DNA, 19 bp, Homo sapiens
  siRNA target sequence for C14orf146 (NM_152447.2,1023-1041).
cagctgactttaatttcct

SEQ ID NO: 23259 - DNA, 19 bp, Homo sapiens
  siRNA target sequence for C14orf146 (NM_152447.2,1039-1057).
cctctacagcgtttgatga

SEQ ID NO: 23260 - DNA, 19 bp, Homo sapiens
  siRNA target sequence for C14orf146 (NM_152447.2,1085-1103).
gtcctataataatctagaa

SEQ ID NO: 23261 - DNA, 19 bp, Homo sapiens
  siRNA target sequence for C14orf146 (NM_152447.2,1138-1156).
gcttgcatacccttagttt

SEQ ID NO: 23262 - DNA, 19 bp, Homo sapiens
  siRNA target sequence for C14orf146 (NM_152447.2,1147-1165).
cccttagtttggatcacaa

SEQ ID NO: 23263 - DNA, 19 bp, Homo sapiens
  siRNA target sequence for C14orf146 (NM_152447.2,1149-1167).
cttagtttggatcacaata

SEQ ID NO: 23264 - DNA, 19 bp, Homo sapiens
  siRNA target sequence for C14orf146 (NM_152447.2,1157-1175).
ggatcacaatatgattgat

SEQ ID NO: 23265 - DNA, 19 bp, Homo sapiens
  siRNA target sequence for C14orf146 (NM_152447.2,1208-1226).
caagatgactcggttagat

SEQ ID NO: 23266 - DNA, 19 bp, Homo sapiens
  siRNA target sequence for C14orf146 (NM_152447.2,1218-1236).
cggttagatgtgacatcaa

SEQ ID NO: 23267 - DNA, 19 bp, Homo sapiens
  siRNA target sequence for C14orf146 (NM_152447.2,1219-1237).
ggttagatgtgacatcaaa

SEQ ID NO: 23268 - DNA, 19 bp, Homo sapiens
  siRNA target sequence for C14orf146 (NM_152447.2,1311-1329).
ccatctacttttgcattaa

SEQ ID NO: 23269 - DNA, 19 bp, Homo sapiens
  siRNA target sequence for C14orf146 (NM_152447.2,1385-1403).
gtccagagaagatgactta

SEQ ID NO: 23270 - DNA, 19 bp, Homo sapiens
  siRNA target sequence for C14orf146 (NM_152447.2,1436-1454).
ccgctacttttggtcaatt

SEQ ID NO: 23271 - DNA, 19 bp, Homo sapiens
  siRNA target sequence for C14orf146 (NM_152447.2,1487-1505).
cattactcgtcatacacat

SEQ ID NO: 23272 - DNA, 19 bp, Homo sapiens
  siRNA target sequence for C14orf146 (NM_152447.2,1569-1587).
cctgcaattcactggattt

SEQ ID NO: 23273 - DNA, 19 bp, Homo sapiens
  siRNA target sequence for C14orf146 (NM_152447.2,1590-1608).
cctgaagggaagcttattt

SEQ ID NO: 23274 - DNA, 19 bp, Homo sapiens
  siRNA target sequence for C14orf146 (NM_152447.2,1631-1649).
gtatgataacggaacactt

SEQ ID NO: 23275 - DNA, 19 bp, Homo sapiens
  siRNA target sequence for C14orf146 (NM_152447.2,1640-1658).
cggaacacttgacattctt

SEQ ID NO: 23276 - DNA, 19 bp, Homo sapiens
  siRNA target sequence for C14orf146 (NM_152447.2,1647-1665).
cttgacattcttatcacaa

SEQ ID NO: 23277 - DNA, 19 bp, Homo sapiens
  siRNA target sequence for C14orf146 (NM_152447.2,1725-1743).
caaatagtggatcttcata

SEQ ID NO: 23278 - DNA, 19 bp, Homo sapiens
  siRNA target sequence for C14orf146 (NM_152447.2,1731-1749).
gtggatcttcatataatta

SEQ ID NO: 23279 - DNA, 19 bp, Homo sapiens
  siRNA target sequence for C14orf146 (NM_152447.2,1752-1770).
ctccctcacttactaaata

SEQ ID NO: 23280 - DNA, 19 bp, Homo sapiens
  siRNA target sequence for C14orf146 (NM_152447.2,1822-1840).
ctaccaagtcaggttctaa

SEQ ID NO: 23281 - DNA, 19 bp, Homo sapiens
  siRNA target sequence for C14orf146 (NM_152447.2,1849-1867).
gtagtaatggtgatactaa

SEQ ID NO: 23282 - DNA, 19 bp, Homo sapiens
  siRNA target sequence for C14orf146 (NM_152447.2,1864-1882).
ctaaattgagtcaagataa

SEQ ID NO: 23283 - DNA, 19 bp, Homo sapiens
  siRNA target sequence for C14orf146 (NM_152447.2,1890-1908).
gtggcagaagctacatcat

SEQ ID NO: 23284 - DNA, 19 bp, Homo sapiens
  siRNA target sequence for C14orf146 (NM_152447.2,1906-1924).
catcaacggcactacttaa

SEQ ID NO: 23285 - DNA, 19 bp, Homo sapiens
  siRNA target sequence for C14orf146 (NM_152447.2,1909-1927).
caacggcactacttaaatt

SEQ ID NO: 23286 - DNA, 19 bp, Homo sapiens
  siRNA target sequence for C14orf146 (NM_152447.2,1946-1964).
ccctggaatacgtatgttt

SEQ ID NO: 23287 - DNA, 19 bp, Homo sapiens
  siRNA target sequence for C14orf146 (NM_152447.2,1951-1969).
gaatacgtatgtttcaaat

SEQ ID NO: 23288 - DNA, 19 bp, Homo sapiens
  siRNA target sequence for C14orf146 (NM_152447.2,1973-1991).
gtacaatggtacttatgat

SEQ ID NO: 23289 - DNA, 19 bp, Homo sapiens
  siRNA target sequence for C14orf146 (NM_152447.2,2017-2035).
ctcctacgagcaaaacttt

SEQ ID NO: 23290 - DNA, 19 bp, Homo sapiens
  siRNA target sequence for C14orf146 (NM_152447.2,2020-2038).
ctacgagcaaaacttttct

SEQ ID NO: 23291 - DNA, 19 bp, Homo sapiens
  siRNA target sequence for C14orf146 (NM_152447.2,2051-2069).
ggctgctggaactatgtat

SEQ ID NO: 23292 - DNA, 19 bp, Homo sapiens
  siRNA target sequence for C14orf146 (NM_152447.2,2053-2071).
ctgctggaactatgtatga

SEQ ID NO: 23293 - DNA, 19 bp, Homo sapiens
  siRNA target sequence for C14orf146 (NM_152447.2,2055-2073).
gctggaactatgtatgact

SEQ ID NO: 23294 - DNA, 19 bp, Homo sapiens
  siRNA target sequence for C14orf146 (NM_152447.2,2077-2095).
gtgtcttggccatatatga

SEQ ID NO: 23295 - DNA, 19 bp, Homo sapiens
  siRNA target sequence for C14orf146 (NM_152447.2,2081-2099).
cttggccatatatgatgat

SEQ ID NO: 23296 - DNA, 19 bp, Homo sapiens
  siRNA target sequence for C14orf146 (NM_152447.2,2130-2148).
gtgggttgcatccagttta

SEQ ID NO: 23297 - DNA, 19 bp, Homo sapiens
  siRNA target sequence for C14orf146 (NM_152447.2,2132-2150).
gggttgcatccagtttact

SEQ ID NO: 23298 - DNA, 19 bp, Homo sapiens
  siRNA target sequence for C14orf146 (NM_152447.2,2149-2167).
ctacggaacaggattatgt

SEQ ID NO: 23299 - DNA, 19 bp, Homo sapiens
  siRNA target sequence for C14orf146 (NM_152447.2,2242-2260).
ctgtgctggtattcatcat

SEQ ID NO: 23300 - DNA, 19 bp, Homo sapiens
  siRNA target sequence for C14orf146 (NM_152447.2,2246-2264).
gctggtattcatcattatt

SEQ ID NO: 23301 - DNA, 19 bp, Homo sapiens
  siRNA target sequence for C14orf146 (NM_152447.2,2267-2285).
gatgatccggtataaggtt

SEQ ID NO: 23302 - DNA, 19 bp, Homo sapiens
  siRNA target sequence for C14orf146 (NM_152447.2,2276-2294).
gtataaggtttgcaacaat

SEQ ID NO: 23303 - DNA, 19 bp, Homo sapiens
  siRNA target sequence for C14orf146 (NM_152447.2,2341-2359).
ctaacggggctcaaataca

SEQ ID NO: 23304 - DNA, 19 bp, Homo sapiens
  siRNA target sequence for C14orf146 (NM_152447.2,2437-2455).
ctaccagtgacaatgtgat

SEQ ID NO: 23305 - DNA, 19 bp, Homo sapiens
  siRNA target sequence for C14orf146 (NM_152447.2,2578-2596).
gtacagaaccacagaatga

SEQ ID NO: 23306 - DNA, 19 bp, Homo sapiens
  siRNA target sequence for C14orf146 (NM_152447.2,2591-2609).
gaatgaagccgtcacaaat

SEQ ID NO: 23307 - DNA, 19 bp, Homo sapiens
  siRNA target sequence for C14orf146 (NM_152447.2,2598-2616).
gccgtcacaaatgttgaat

SEQ ID NO: 23308 - DNA, 19 bp, Homo sapiens
  siRNA target sequence for C14orf146 (NM_152447.2,2662-2680).
gccgtcctcccgattctgt

SEQ ID NO: 23309 - DNA, 19 bp, Homo sapiens
  siRNA target sequence for C14orf146 (NM_152447.2,2695-2713).
cgtctaaaagagcacatat

SEQ ID NO: 23310 - DNA, 19 bp, Homo sapiens
  siRNA target sequence for C14orf146 (NM_152447.2,2734-2752).
ctaatgttgaccagattgt

SEQ ID NO: 23311 - DNA, 19 bp, Homo sapiens
  siRNA target sequence for C20orf100 (NM_032883.1,250-268).
gcgagaacaacgaagacta

SEQ ID NO: 23312 - DNA, 19 bp, Homo sapiens
  siRNA target sequence for C20orf100 (NM_032883.1,251-269).
cgagaacaacgaagactat

SEQ ID NO: 23313 - DNA, 19 bp, Homo sapiens
  siRNA target sequence for C20orf100 (NM_032883.1,699-717).
gagtcggaagtgcatttca

SEQ ID NO: 23314 - DNA, 19 bp, Homo sapiens
  siRNA target sequence for C20orf100 (NM_032883.1,703-721).
cggaagtgcatttcaagat

SEQ ID NO: 23315 - DNA, 19 bp, Homo sapiens
  siRNA target sequence for C20orf100 (NM_032883.1,705-723).
gaagtgcatttcaagatct

SEQ ID NO: 23316 - DNA, 19 bp, Homo sapiens
  siRNA target sequence for C20orf100 (NM_032883.1,820-838).
cggcctacgcactcttctt

SEQ ID NO: 23317 - DNA, 19 bp, Homo sapiens
  siRNA target sequence for C20orf100 (NM_032883.1,822-840).
gcctacgcactcttcttca

SEQ ID NO: 23318 - DNA, 19 bp, Homo sapiens
  siRNA target sequence for C20orf100 (NM_032883.1,889-907).
gtgacgtgtccaaaatcgt

SEQ ID NO: 23319 - DNA, 19 bp, Homo sapiens
  siRNA target sequence for C20orf104 (NM_016436.3,152-170).
cgggaccgtttaaaaaact

SEQ ID NO: 23320 - DNA, 19 bp, Homo sapiens
  siRNA target sequence for C20orf104 (NM_016436.3,169-187).
ctggtatccagctcacata

SEQ ID NO: 23321 - DNA, 19 bp, Homo sapiens
  siRNA target sequence for C20orf104 (NM_016436.3,171-189).
ggtatccagctcacataga

SEQ ID NO: 23322 - DNA, 19 bp, Homo sapiens
  siRNA target sequence for C20orf104 (NM_016436.3,177-195).
cagctcacatagaagacat

SEQ ID NO: 23323 - DNA, 19 bp, Homo sapiens
  siRNA target sequence for C20orf104 (NM_016436.3,232-250).
gcgttggaaccatcgttat

SEQ ID NO: 23324 - DNA, 19 bp, Homo sapiens
  siRNA target sequence for C20orf104 (NM_016436.3,234-252).
gttggaaccatcgttatga

SEQ ID NO: 23325 - DNA, 19 bp, Homo sapiens
  siRNA target sequence for C20orf104 (NM_016436.3,264-282).
gctgggacagtccttattt

SEQ ID NO: 23326 - DNA, 19 bp, Homo sapiens
  siRNA target sequence for C20orf104 (NM_016436.3,276-294).
cttatttacgccctttaga

SEQ ID NO: 23327 - DNA, 19 bp, Homo sapiens
  siRNA target sequence for C20orf104 (NM_016436.3,329-347).
gaggatggatcttctgaat

SEQ ID NO: 23328 - DNA, 19 bp, Homo sapiens
  siRNA target sequence for C20orf104 (NM_016436.3,368-386).
cttgcttgctggtctgatt

SEQ ID NO: 23329 - DNA, 19 bp, Homo sapiens
  siRNA target sequence for C20orf104 (NM_016436.3,376-394).
ctggtctgattgtcgtttt

SEQ ID NO: 23330 - DNA, 19 bp, Homo sapiens
  siRNA target sequence for C20orf104 (NM_016436.3,378-396).
ggtctgattgtcgttttta

SEQ ID NO: 23331 - DNA, 19 bp, Homo sapiens
  siRNA target sequence for C20orf104 (NM_016436.3,421-439).
caaggatggtacttacact

SEQ ID NO: 23332 - DNA, 19 bp, Homo sapiens
  siRNA target sequence for C20orf104 (NM_016436.3,428-446).
ggtacttacactgtgaaat

SEQ ID NO: 23333 - DNA, 19 bp, Homo sapiens
  siRNA target sequence for C20orf104 (NM_016436.3,466-484).
gactgtcaaacatattcat

SEQ ID NO: 23334 - DNA, 19 bp, Homo sapiens
  siRNA target sequence for C20orf104 (NM_016436.3,468-486).
ctgtcaaacatattcatgt

SEQ ID NO: 23335 - DNA, 19 bp, Homo sapiens
  siRNA target sequence for C20orf104 (NM_016436.3,519-537).
gtaatgctaggcctaaaga

SEQ ID NO: 23336 - DNA, 19 bp, Homo sapiens
  siRNA target sequence for C20orf104 (NM_016436.3,545-563).
cacaaaagtctttcatcat

SEQ ID NO: 23337 - DNA, 19 bp, Homo sapiens
  siRNA target sequence for C20orf104 (NM_016436.3,569-587).
gataaacgagagaagttta

SEQ ID NO: 23338 - DNA, 19 bp, Homo sapiens
  siRNA target sequence for C20orf104 (NM_016436.3,657-675).
gacccaagcagcctgataa

SEQ ID NO: 23339 - DNA, 19 bp, Homo sapiens
  siRNA target sequence for C20orf104 (NM_016436.3,763-781).
cgaaaatgacagagagtat

SEQ ID NO: 23340 - DNA, 19 bp, Homo sapiens
  siRNA target sequence for C20orf104 (NM_016436.3,899-917).
gtggattcaaactctcaaa

SEQ ID NO: 23341 - DNA, 19 bp, Homo sapiens
  siRNA target sequence for C20orf104 (NM_016436.3,914-932).
caaactttgcaaccaataa

SEQ ID NO: 23342 - DNA, 19 bp, Homo sapiens
  siRNA target sequence for C20orf104 (NM_016436.3,918-936).
ctttgcaaccaataacatt

SEQ ID NO: 23343 - DNA, 19 bp, Homo sapiens
  siRNA target sequence for C20orf104 (NM_016436.3,922-940).
gcaaccaataacattggaa

SEQ ID NO: 23344 - DNA, 19 bp, Homo sapiens
  siRNA target sequence for C20orf104 (NM_016436.3,986-1004).
cgtcctcggcttgacaaaa

SEQ ID NO: 23345 - DNA, 19 bp, Homo sapiens
  siRNA target sequence for C20orf104 (NM_016436.3,987-1005).
gtcctcggcttgacaaaaa

SEQ ID NO: 23346 - DNA, 19 bp, Homo sapiens
  siRNA target sequence for C20orf104 (NM_016436.3,989-1007).
cctcggcttgacaaaaatt

SEQ ID NO: 23347 - DNA, 19 bp, Homo sapiens
  siRNA target sequence for C20orf104 (NM_016436.3,992-1010).
cggcttgacaaaaattcat

SEQ ID NO: 23348 - DNA, 19 bp, Homo sapiens
  siRNA target sequence for C20orf104 (NM_016436.3,1033-1051).
ctcggaaaacactgacaaa

SEQ ID NO: 23349 - DNA, 19 bp, Homo sapiens
  siRNA target sequence for C20orf104 (NM_016436.3,1072-1090).
ctccaggctgtccactaat

SEQ ID NO: 23350 - DNA, 19 bp, Homo sapiens
  siRNA target sequence for C20orf104 (NM_016436.3,1109-1127).
gatcctgacttggttgtat

SEQ ID NO: 23351 - DNA, 19 bp, Homo sapiens
  siRNA target sequence for C20orf104 (NM_016436.3,1269-1287).
ctgcaggcttggagttgaa

SEQ ID NO: 23352 - DNA, 19 bp, Homo sapiens
  siRNA target sequence for C20orf104 (NM_016436.3,1290-1308).
gcccatcaatgggagaaaa

SEQ ID NO: 23353 - DNA, 19 bp, Homo sapiens
  siRNA target sequence for C20orf104 (NM_016436.3,1335-1353).
cccttgtggaattacaaga

SEQ ID NO: 23354 - DNA, 19 bp, Homo sapiens
  siRNA target sequence for C20orf104 (NM_016436.3,1343-1361).
gaattacaagagatttcga

SEQ ID NO: 23355 - DNA, 19 bp, Homo sapiens
  siRNA target sequence for C20orf104 (NM_016436.3,1394-1412).
gatgattttgggtcatcta

SEQ ID NO: 23356 - DNA, 19 bp, Homo sapiens
  siRNA target sequence for C20orf104 (NM_016436.3,1424-1442).
gtcgacctagaccataagt

SEQ ID NO: 23357 - DNA, 19 bp, Homo sapiens
  siRNA target sequence for C20orf104 (NM_016436.3,1426-1444).
cgacctagaccataagttt

SEQ ID NO: 23358 - DNA, 19 bp, Homo sapiens
  siRNA target sequence for C20orf104 (NM_016436.3,1429-1447).
cctagaccataagtttaga

SEQ ID NO: 23359 - DNA, 19 bp, Homo sapiens
  siRNA target sequence for C20orf104 (NM_016436.3,1430-1448).
ctagaccataagtttagat

SEQ ID NO: 23360 - DNA, 19 bp, Homo sapiens
  siRNA target sequence for C20orf104 (NM_016436.3,1449-1467).
gcaaagttgtggactgttt

SEQ ID NO: 23361 - DNA, 19 bp, Homo sapiens
  siRNA target sequence for C20orf104 (NM_016436.3,1450-1468).
caaagttgtggactgttta

SEQ ID NO: 23362 - DNA, 19 bp, Homo sapiens
  siRNA target sequence for C20orf104 (NM_016436.3,1485-1503).
ccaaactgttgcactatca

SEQ ID NO: 23363 - DNA, 19 bp, Homo sapiens
  siRNA target sequence for C20orf104 (NM_016436.3,1641-1659).
gttccccaactacaaaaga

SEQ ID NO: 23364 - DNA, 19 bp, Homo sapiens
  siRNA target sequence for C20orf104 (NM_016436.3,1907-1925).
gcattggaggaggataatt

SEQ ID NO: 23365 - DNA, 19 bp, Homo sapiens
  siRNA target sequence for C20orf104 (NM_016436.3,1908-1926).
cattggaggaggataattt

SEQ ID NO: 23366 - DNA, 19 bp, Homo sapiens
  siRNA target sequence for C20orf104 (NM_016436.3,2018-2036).
ggggatgaccgctatgact

SEQ ID NO: 23367 - DNA, 19 bp, Homo sapiens
  siRNA target sequence for C20orf104 (NM_016436.3,2019-2037).
gggatgaccgctatgactt

SEQ ID NO: 23368 - DNA, 19 bp, Homo sapiens
  siRNA target sequence for C20orf104 (NM_016436.3,2121-2139).
gggtctgcatgggattact

SEQ ID NO: 23369 - DNA, 19 bp, Homo sapiens
  siRNA target sequence for C20orf104 (NM_016436.3,2144-2162).
gaaaatgtgcccgagaaat

SEQ ID NO: 23370 - DNA, 19 bp, Homo sapiens
  siRNA target sequence for C20orf104 (NM_016436.3,2155-2173).
cgagaaatacacctgttat

SEQ ID NO: 23371 - DNA, 19 bp, Homo sapiens
  siRNA target sequence for C20orf104 (NM_016436.3,2236-2254).
gagcaggggacatatgcat

SEQ ID NO: 23372 - DNA, 19 bp, Homo sapiens
  siRNA target sequence for C20orf104 (NM_016436.3,2445-2463).
gggaggggagatctcattt

SEQ ID NO: 23373 - DNA, 19 bp, Homo sapiens
  siRNA target sequence for C20orf104 (NM_016436.3,2500-2518).
ggaagctccaagctataga

SEQ ID NO: 23374 - DNA, 19 bp, Homo sapiens
  siRNA target sequence for C20orf104 (NM_016436.3,2501-2519).
gaagctccaagctatagaa

SEQ ID NO: 23375 - DNA, 19 bp, Homo sapiens
  siRNA target sequence for C20orf104 (NM_016436.3,2504-2522).
gctccaagctatagaactt

SEQ ID NO: 23376 - DNA, 19 bp, Homo sapiens
  siRNA target sequence for C20orf104 (NM_016436.3,2571-2589).
gttctgtggaggaatccta

SEQ ID NO: 23377 - DNA, 19 bp, Homo sapiens
  siRNA target sequence for C20orf104 (NM_016436.3,2574-2592).
ctgtggaggaatcctatat

SEQ ID NO: 23378 - DNA, 19 bp, Homo sapiens
  siRNA target sequence for C20orf104 (NM_016436.3,2576-2594).
gtggaggaatcctatatca

SEQ ID NO: 23379 - DNA, 19 bp, Homo sapiens
  siRNA target sequence for C20orf104 (NM_016436.3,2702-2720).
catgagaacggcgatgatt

SEQ ID NO: 23380 - DNA, 19 bp, Homo sapiens
  siRNA target sequence for C20orf104 (NM_016436.3,2917-2935).
gacccatgtggaatctctt

SEQ ID NO: 23381 - DNA, 19 bp, Homo sapiens
  siRNA target sequence for C20orf104 (NM_016436.3,3047-3065).
ccgcagctcaagcattgta

SEQ ID NO: 23382 - DNA, 19 bp, Homo sapiens
  siRNA target sequence for C20orf104 (NM_016436.3,3050-3068).
cagctcaagcattgtatca

SEQ ID NO: 23383 - DNA, 19 bp, Homo sapiens
  siRNA target sequence for C20orf179 (NM_178477.1,204-222).
ccgaacccattggagaaaa

SEQ ID NO: 23384 - DNA, 19 bp, Homo sapiens
  siRNA target sequence for C20orf179 (NM_178477.1,250-268).
ccatgagctcgcgatcaat

SEQ ID NO: 23385 - DNA, 19 bp, Homo sapiens
  siRNA target sequence for C20orf179 (NM_178477.1,251-269).
catgagctcgcgatcaatt

SEQ ID NO: 23386 - DNA, 19 bp, Homo sapiens
  siRNA target sequence for C21orf127 (NM_013240.2,229-247).
gccctcaggctttgtacat

SEQ ID NO: 23387 - DNA, 19 bp, Homo sapiens
  siRNA target sequence for C21orf127 (NM_013240.2,288-306).
gagacagcacgctgtaaca

SEQ ID NO: 23388 - DNA, 19 bp, Homo sapiens
  siRNA target sequence for C21orf127 (NM_013240.2,290-308).
gacagcacgctgtaacaaa

SEQ ID NO: 23389 - DNA, 19 bp, Homo sapiens
  siRNA target sequence for C21orf127 (NM_013240.2,292-310).
cagcacgctgtaacaaagt

SEQ ID NO: 23390 - DNA, 19 bp, Homo sapiens
  siRNA target sequence for C21orf127 (NM_013240.2,295-313).
cacgctgtaacaaagttca

SEQ ID NO: 23391 - DNA, 19 bp, Homo sapiens
  siRNA target sequence for C21orf127 (NM_013240.2,298-316).
gctgtaacaaagttcacat

SEQ ID NO: 23392 - DNA, 19 bp, Homo sapiens
  siRNA target sequence for C21orf127 (NM_013240.2,299-317).
ctgtaacaaagttcacatt

SEQ ID NO: 23393 - DNA, 19 bp, Homo sapiens
  siRNA target sequence for C21orf127 (NM_013240.2,312-330).
cacattcaaccagttatta

SEQ ID NO: 23394 - DNA, 19 bp, Homo sapiens
  siRNA target sequence for C21orf127 (NM_013240.2,345-363).
ggcttgctaccaagattga

SEQ ID NO: 23395 - DNA, 19 bp, Homo sapiens
  siRNA target sequence for C21orf127 (NM_013240.2,358-376).
gattgaccgaaaaagttga

SEQ ID NO: 23396 - DNA, 19 bp, Homo sapiens
  siRNA target sequence for C21orf127 (NM_013240.2,362-380).
gaccgaaaaagttgatctt

SEQ ID NO: 23397 - DNA, 19 bp, Homo sapiens
  siRNA target sequence for C21orf127 (NM_013240.2,386-404).
gtttaatcccccctatgta

SEQ ID NO: 23398 - DNA, 19 bp, Homo sapiens
  siRNA target sequence for C21orf127 (NM_013240.2,474-492).
gaagtcatggacaggtttt

SEQ ID NO: 23399 - DNA, 19 bp, Homo sapiens
  siRNA target sequence for C21orf127 (NM_013240.2,651-669).
ctcaagttcaccaagtctt

SEQ ID NO: 23400 - DNA, 19 bp, Homo sapiens
  siRNA target sequence for C21orf66 (NM_013329.2,298-316).
gaggcctcgcgagaacaaa

SEQ ID NO: 23401 - DNA, 19 bp, Homo sapiens
  siRNA target sequence for C21orf66 (NM_013329.2,300-318).
ggcctcgcgagaacaaaga

SEQ ID NO: 23402 - DNA, 19 bp, Homo sapiens
  siRNA target sequence for C21orf66 (NM_013329.2,446-464).
cttgaaaaatcgaagatta

SEQ ID NO: 23403 - DNA, 19 bp, Homo sapiens
  siRNA target sequence for C21orf66 (NM_013329.2,478-496).
ctcatcagctgaaagtgaa

SEQ ID NO: 23404 - DNA, 19 bp, Homo sapiens
  siRNA target sequence for C21orf66 (NM_013329.2,515-533).
ggacatgttaaggatacaa

SEQ ID NO: 23405 - DNA, 19 bp, Homo sapiens
  siRNA target sequence for C21orf66 (NM_013329.2,516-534).
gacatgttaaggatacaaa

SEQ ID NO: 23406 - DNA, 19 bp, Homo sapiens
  siRNA target sequence for C21orf66 (NM_013329.2,526-544).
ggatacaaatcaagaagat

SEQ ID NO: 23407 - DNA, 19 bp, Homo sapiens
  siRNA target sequence for C21orf66 (NM_013329.2,714-732).
gccaaatggcccgagaatt

SEQ ID NO: 23408 - DNA, 19 bp, Homo sapiens
  siRNA target sequence for C21orf66 (NM_013329.2,737-755).
gatttcactcctcatgata

SEQ ID NO: 23409 - DNA, 19 bp, Homo sapiens
  siRNA target sequence for C21orf66 (NM_013329.2,824-842).
gagaaacgccggatagttt

SEQ ID NO: 23410 - DNA, 19 bp, Homo sapiens
  siRNA target sequence for C21orf66 (NM_013329.2,826-844).
gaaacgccggatagttttt

SEQ ID NO: 23411 - DNA, 19 bp, Homo sapiens
  siRNA target sequence for C21orf66 (NM_013329.2,831-849).
gccggatagttttttctgt

SEQ ID NO: 23412 - DNA, 19 bp, Homo sapiens
  siRNA target sequence for C21orf66 (NM_013329.2,1013-1031).
gcagaagtgaatatgtact

SEQ ID NO: 23413 - DNA, 19 bp, Homo sapiens
  siRNA target sequence for C21orf66 (NM_013329.2,1054-1072).
gccttacggctcatcctat

SEQ ID NO: 23414 - DNA, 19 bp, Homo sapiens
  siRNA target sequence for C21orf66 (NM_013329.2,1069-1087).
ctatggcattccttatagt

SEQ ID NO: 23415 - DNA, 19 bp, Homo sapiens
  siRNA target sequence for C21orf66 (NM_013329.2,1073-1091).
ggcattccttatagttata

SEQ ID NO: 23416 - DNA, 19 bp, Homo sapiens
  siRNA target sequence for C21orf66 (NM_013329.2,1163-1181).
gagatgactcccgttacta

SEQ ID NO: 23417 - DNA, 19 bp, Homo sapiens
  siRNA target sequence for C21orf66 (NM_013329.2,1165-1183).
gatgactcccgttactatt

SEQ ID NO: 23418 - DNA, 19 bp, Homo sapiens
  siRNA target sequence for C21orf66 (NM_013329.2,1168-1186).
gactcccgttactattgat

SEQ ID NO: 23419 - DNA, 19 bp, Homo sapiens
  siRNA target sequence for C21orf66 (NM_013329.2,1170-1188).
ctcccgttactattgattt

SEQ ID NO: 23420 - DNA, 19 bp, Homo sapiens
  siRNA target sequence for C21orf66 (NM_013329.2,1174-1192).
cgttactattgatttggta

SEQ ID NO: 23421 - DNA, 19 bp, Homo sapiens
  siRNA target sequence for C21orf66 (NM_013329.2,1285-1303).
ctctaccagggctattgaa

SEQ ID NO: 23422 - DNA, 19 bp, Homo sapiens
  siRNA target sequence for C21orf66 (NM_013329.2,1290-1308).
ccagggctattgaaagatt

SEQ ID NO: 23423 - DNA, 19 bp, Homo sapiens
  siRNA target sequence for C21orf66 (NM_013329.2,1293-1311).
gggctattgaaagattaga

SEQ ID NO: 23424 - DNA, 19 bp, Homo sapiens
  siRNA target sequence for C21orf66 (NM_013329.2,1315-1333).
gtcttctgggggtattggt

SEQ ID NO: 23425 - DNA, 19 bp, Homo sapiens
  siRNA target sequence for C21orf66 (NM_013329.2,1326-1344).
gtattggtgaacggtataa

SEQ ID NO: 23426 - DNA, 19 bp, Homo sapiens
  siRNA target sequence for C21orf66 (NM_013329.2,1331-1349).
ggtgaacggtataaatttt

SEQ ID NO: 23427 - DNA, 19 bp, Homo sapiens
  siRNA target sequence for C21orf66 (NM_013329.2,1332-1350).
gtgaacggtataaattttt

SEQ ID NO: 23428 - DNA, 19 bp, Homo sapiens
  siRNA target sequence for C21orf66 (NM_013329.2,1362-1380).
gagggtatgtccaagactt

SEQ ID NO: 23429 - DNA, 19 bp, Homo sapiens
  siRNA target sequence for C21orf66 (NM_013329.2,1376-1394).
gacttgcttgagtgtttca

SEQ ID NO: 23430 - DNA, 19 bp, Homo sapiens
  siRNA target sequence for C21orf66 (NM_013329.2,1397-1415).
gaaaaggtgccactgatta

SEQ ID NO: 23431 - DNA, 19 bp, Homo sapiens
  siRNA target sequence for C21orf66 (NM_013329.2,1402-1420).
ggtgccactgattaatgaa

SEQ ID NO: 23432 - DNA, 19 bp, Homo sapiens
  siRNA target sequence for C21orf66 (NM_013329.2,1405-1423).
gccactgattaatgaactt

SEQ ID NO: 23433 - DNA, 19 bp, Homo sapiens
  siRNA target sequence for C21orf66 (NM_013329.2,1431-1449).
caatacatcagctgtacaa

SEQ ID NO: 23434 - DNA, 19 bp, Homo sapiens
  siRNA target sequence for C21orf66 (NM_013329.2,1476-1494).
gacgacaagatgatattaa

SEQ ID NO: 23435 - DNA, 19 bp, Homo sapiens
  siRNA target sequence for C21orf66 (NM_013329.2,1496-1514).
gatgaatcttcggagtttt

SEQ ID NO: 23436 - DNA, 19 bp, Homo sapiens
  siRNA target sequence for C21orf66 (NM_013329.2,1508-1526).
gagttttcaagccattcaa

SEQ ID NO: 23437 - DNA, 19 bp, Homo sapiens
  siRNA target sequence for C21orf66 (NM_013329.2,1566-1584).
gcgatcgggcactgtatca

SEQ ID NO: 23438 - DNA, 19 bp, Homo sapiens
  siRNA target sequence for C21orf66 (NM_013329.2,1567-1585).
cgatcgggcactgtatcaa

SEQ ID NO: 23439 - DNA, 19 bp, Homo sapiens
  siRNA target sequence for C21orf66 (NM_013329.2,1579-1597).
gtatcaagagcatgcaaaa

SEQ ID NO: 23440 - DNA, 19 bp, Homo sapiens
  siRNA target sequence for C21orf66 (NM_013329.2,1624-1642).
gaggactcgtcgtagacaa

SEQ ID NO: 23441 - DNA, 19 bp, Homo sapiens
  siRNA target sequence for C21orf66 (NM_013329.2,1707-1725).
cttctacagatattactaa

SEQ ID NO: 23442 - DNA, 19 bp, Homo sapiens
  siRNA target sequence for C21orf66 (NM_013329.2,1710-1728).
ctacagatattactaattt

SEQ ID NO: 23443 - DNA, 19 bp, Homo sapiens
  siRNA target sequence for C21orf66 (NM_013329.2,1733-1751).
ctggaaaaagatcgaattt

SEQ ID NO: 23444 - DNA, 19 bp, Homo sapiens
  siRNA target sequence for C21orf66 (NM_013329.2,1778-1796).
gatgtccttgaaagtttct

SEQ ID NO: 23445 - DNA, 19 bp, Homo sapiens
  siRNA target sequence for C21orf66 (NM_013329.2,1795-1813).
ctattcaattgactgtatt

SEQ ID NO: 23446 - DNA, 19 bp, Homo sapiens
  siRNA target sequence for C21orf66 (NM_013329.2,1830-1848).
catggcgttcaaaatacta

SEQ ID NO: 23447 - DNA, 19 bp, Homo sapiens
  siRNA target sequence for C21orf66 (NM_013329.2,1835-1853).
cgttcaaaatactacacat

SEQ ID NO: 23448 - DNA, 19 bp, Homo sapiens
  siRNA target sequence for C21orf66 (NM_013329.2,1876-1894).
cctttgtttgccaaaatta

SEQ ID NO: 23449 - DNA, 19 bp, Homo sapiens
  siRNA target sequence for C21orf66 (NM_013329.2,1942-1960).
ggcaaaatgtcgtgacttt

SEQ ID NO: 23450 - DNA, 19 bp, Homo sapiens
  siRNA target sequence for C21orf66 (NM_013329.2,1944-1962).
caaaatgtcgtgactttga

SEQ ID NO: 23451 - DNA, 19 bp, Homo sapiens
  siRNA target sequence for C21orf66 (NM_013329.2,1950-1968).
gtcgtgactttgagaatat

SEQ ID NO: 23452 - DNA, 19 bp, Homo sapiens
  siRNA target sequence for C21orf66 (NM_013329.2,1987-2005).
gctgttttatggttgtgaa

SEQ ID NO: 23453 - DNA, 19 bp, Homo sapiens
  siRNA target sequence for C21orf66 (NM_013329.2,2068-2086).
gattcttcctaaactaaca

SEQ ID NO: 23454 - DNA, 19 bp, Homo sapiens
  siRNA target sequence for C21orf66 (NM_013329.2,2107-2125).
ggaccctttttctacaaca

SEQ ID NO: 23455 - DNA, 19 bp, Homo sapiens
  siRNA target sequence for C21orf66 (NM_013329.2,2136-2154).
gaatggtgggaattacact

SEQ ID NO: 23456 - DNA, 19 bp, Homo sapiens
  siRNA target sequence for C21orf66 (NM_013329.2,2239-2257).
gagaagaactttagatgat

SEQ ID NO: 23457 - DNA, 19 bp, Homo sapiens
  siRNA target sequence for C21orf66 (NM_013329.2,2244-2262).
gaactttagatgatgatgt

SEQ ID NO: 23458 - DNA, 19 bp, Homo sapiens
  siRNA target sequence for C21orf66 (NM_013329.2,2269-2287).
gcccttatatcccaaaaat

SEQ ID NO: 23459 - DNA, 19 bp, Homo sapiens
  siRNA target sequence for C21orf66 (NM_013329.2,2271-2289).
ccttatatcccaaaaatgt

SEQ ID NO: 23460 - DNA, 19 bp, Homo sapiens
  siRNA target sequence for C21orf66 (NM_013329.2,2320-2338).
gttttttcaacgacagttt

SEQ ID NO: 23461 - DNA, 19 bp, Homo sapiens
  siRNA target sequence for C21orf66 (NM_013329.2,2333-2351).
cagttttggtcttcagtta

SEQ ID NO: 23462 - DNA, 19 bp, Homo sapiens
  siRNA target sequence for C21orf66 (NM_013329.2,2437-2455).
gacggacaggccttgtgtt

SEQ ID NO: 23463 - DNA, 19 bp, Homo sapiens
  siRNA target sequence for C21orf66 (NM_016631.2,2372-2390).
cagtggtatggcattttct

SEQ ID NO: 23464 - DNA, 19 bp, Homo sapiens
  siRNA target sequence for C21orf66 (NM_016631.2,2400-2418).
ctctgcaagagttatcaat

SEQ ID NO: 23465 - DNA, 19 bp, Homo sapiens
  siRNA target sequence for C21orf66 (NM_016631.2,2415-2433).
caatagatggtttattaaa

SEQ ID NO: 23466 - DNA, 19 bp, Homo sapiens
  siRNA target sequence for C21orf66 (NM_016631.2,2420-2438).
gatggtttattaaatcgat

SEQ ID NO: 23467 - DNA, 19 bp, Homo sapiens
  siRNA target sequence for C21orf66 (NM_016631.2,2423-2441).
ggtttattaaatcgatata

SEQ ID NO: 23468 - DNA, 19 bp, Homo sapiens
  siRNA target sequence for C21orf66 (NM_016631.2,2471-2489).
ggagatgacagcatcaaaa

SEQ ID NO: 23469 - DNA, 19 bp, Homo sapiens
  siRNA target sequence for C21orf66 (NM_016631.2,2472-2490).
gagatgacagcatcaaaaa

SEQ ID NO: 23470 - DNA, 19 bp, Homo sapiens
  siRNA target sequence for C21orf66 (NM_016631.2,2506-2524).
caattgtttccccaaacaa

SEQ ID NO: 23471 - DNA, 19 bp, Homo sapiens
  siRNA target sequence for C21orf66 (NM_016631.2,2516-2534).
cccaaacaatggttcatga

SEQ ID NO: 23472 - DNA, 19 bp, Homo sapiens
  siRNA target sequence for C21orf66 (NM_016631.2,2517-2535).
ccaaacaatggttcatgaa

SEQ ID NO: 23473 - DNA, 19 bp, Homo sapiens
  siRNA target sequence for C21orf66 (NM_016631.2,2539-2557).
gaaaggagaaaggactatt

SEQ ID NO: 23474 - DNA, 19 bp, Homo sapiens
  siRNA target sequence for C21orf66 (NM_016631.2,2544-2562).
gagaaaggactatttctca

SEQ ID NO: 23475 - DNA, 19 bp, Homo sapiens
  siRNA target sequence for C21orf66 (NM_016631.2,2550-2568).
ggactatttctcagttaga

SEQ ID NO: 23476 - DNA, 19 bp, Homo sapiens
  siRNA target sequence for C21orf66 (NM_016631.2,2551-2569).
gactatttctcagttagaa

SEQ ID NO: 23477 - DNA, 19 bp, Homo sapiens
  siRNA target sequence for C21orf66 (NM_016631.2,2578-2596).
ccgataccttgtacactta

SEQ ID NO: 23478 - DNA, 19 bp, Homo sapiens
  siRNA target sequence for C21orf66 (NM_016631.2,2591-2609).
cacttagcggatacaattt

SEQ ID NO: 23479 - DNA, 19 bp, Homo sapiens
  siRNA target sequence for C21orf66 (NM_016631.2,2597-2615).
gcggatacaatttatagaa

SEQ ID NO: 23480 - DNA, 19 bp, Homo sapiens
  siRNA target sequence for C21orf66 (NM_016631.2,2697-2715).
gagctttggatcatgctat

SEQ ID NO: 23481 - DNA, 19 bp, Homo sapiens
  siRNA target sequence for C21orf66 (NM_016631.2,2723-2741).
gcaagtgaccacaatgtga

SEQ ID NO: 23482 - DNA, 19 bp, Homo sapiens
  siRNA target sequence for C21orf66 (NM_016631.2,2752-2770).
gtctttgatcgaaggaaaa

SEQ ID NO: 23483 - DNA, 19 bp, Homo sapiens
  siRNA target sequence for C21orf66 (NM_145328.1,1529-1547).
cagtccatcttgaagacaa

SEQ ID NO: 23484 - DNA, 19 bp, Homo sapiens
  siRNA target sequence for CACNA1A (NM_000068.2,419-437).
ggatgtacaagcagtcaat

SEQ ID NO: 23485 - DNA, 19 bp, Homo sapiens
  siRNA target sequence for CACNA1A (NM_000068.2,591-609).
gattttagccaccatcata

SEQ ID NO: 23486 - DNA, 19 bp, Homo sapiens
  siRNA target sequence for CACNA1A (NM_000068.2,685-703).
gacacagaaccatacttca

SEQ ID NO: 23487 - DNA, 19 bp, Homo sapiens
  siRNA target sequence for CACNA1A (NM_000068.2,687-705).
cacagaaccatacttcatt

SEQ ID NO: 23488 - DNA, 19 bp, Homo sapiens
  siRNA target sequence for CACNA1A (NM_000068.2,691-709).
gaaccatacttcattggaa

SEQ ID NO: 23489 - DNA, 19 bp, Homo sapiens
  siRNA target sequence for CACNA1A (NM_000068.2,716-734).
gtttcgaggctggaattaa

SEQ ID NO: 23490 - DNA, 19 bp, Homo sapiens
  siRNA target sequence for CACNA1A (NM_000068.2,721-739).
gaggctggaattaaaatca

SEQ ID NO: 23491 - DNA, 19 bp, Homo sapiens
  siRNA target sequence for CACNA1A (NM_000068.2,760-778).
cacaaaggctcctacttga

SEQ ID NO: 23492 - DNA, 19 bp, Homo sapiens
  siRNA target sequence for CACNA1A (NM_000068.2,833-851).
cagttgggacggagtttga

SEQ ID NO: 23493 - DNA, 19 bp, Homo sapiens
  siRNA target sequence for CACNA1A (NM_000068.2,900-918).
gtctggaatcccaagttta

SEQ ID NO: 23494 - DNA, 19 bp, Homo sapiens
  siRNA target sequence for CACNA1A (NM_000068.2,905-923).
gaatcccaagtttacaagt

SEQ ID NO: 23495 - DNA, 19 bp, Homo sapiens
  siRNA target sequence for CACNA1A (NM_000068.2,925-943).
gtcctgaagtcgatcatga

SEQ ID NO: 23496 - DNA, 19 bp, Homo sapiens
  siRNA target sequence for CACNA1A (NM_000068.2,966-984).
gatcggcctcctcctattt

SEQ ID NO: 23497 - DNA, 19 bp, Homo sapiens
  siRNA target sequence for CACNA1A (NM_000068.2,969-987).
cggcctcctcctatttttt

SEQ ID NO: 23498 - DNA, 19 bp, Homo sapiens
  siRNA target sequence for CACNA1A (NM_000068.2,978-996).
cctattttttgcaatcctt

SEQ ID NO: 23499 - DNA, 19 bp, Homo sapiens
  siRNA target sequence for CACNA1A (NM_000068.2,979-997).
ctattttttgcaatcctta

SEQ ID NO: 23500 - DNA, 19 bp, Homo sapiens
  siRNA target sequence for CACNA1A (NM_000068.2,1003-1021).
gcaatcatagggttagaat

SEQ ID NO: 23501 - DNA, 19 bp, Homo sapiens
  siRNA target sequence for CACNA1A (NM_000068.2,1004-1022).
caatcatagggttagaatt

SEQ ID NO: 23502 - DNA, 19 bp, Homo sapiens
  siRNA target sequence for CACNA1A (NM_000068.2,1125-1143).
ccccaatgggaccaaatgt

SEQ ID NO: 23503 - DNA, 19 bp, Homo sapiens
  siRNA target sequence for CACNA1A (NM_000068.2,1127-1145).
ccaatgggaccaaatgtca

SEQ ID NO: 23504 - DNA, 19 bp, Homo sapiens
  siRNA target sequence for CACNA1A (NM_000068.2,1241-1259).
ggactgatctcctctacaa

SEQ ID NO: 23505 - DNA, 19 bp, Homo sapiens
  siRNA target sequence for CACNA1A (NM_000068.2,1242-1260).
gactgatctcctctacaat

SEQ ID NO: 23506 - DNA, 19 bp, Homo sapiens
  siRNA target sequence for CACNA1A (NM_000068.2,1283-1301).
cttggaactggttgtactt

SEQ ID NO: 23507 - DNA, 19 bp, Homo sapiens
  siRNA target sequence for CACNA1A (NM_000068.2,1419-1437).
gaggcggcaacaacagatt

SEQ ID NO: 23508 - DNA, 19 bp, Homo sapiens
  siRNA target sequence for CACNA1A (NM_000068.2,1421-1439).
ggcggcaacaacagattga

SEQ ID NO: 23509 - DNA, 19 bp, Homo sapiens
  siRNA target sequence for CACNA1A (NM_000068.2,1422-1440).
gcggcaacaacagattgaa

SEQ ID NO: 23510 - DNA, 19 bp, Homo sapiens
  siRNA target sequence for CACNA1A (NM_000068.2,1543-1561).
ctgcggagaaccaccataa

SEQ ID NO: 23511 - DNA, 19 bp, Homo sapiens
  siRNA target sequence for CACNA1A (NM_000068.2,1546-1564).
cggagaaccaccataaaga

SEQ ID NO: 23512 - DNA, 19 bp, Homo sapiens
  siRNA target sequence for CACNA1A (NM_000068.2,1547-1565).
ggagaaccaccataaagaa

SEQ ID NO: 23513 - DNA, 19 bp, Homo sapiens
  siRNA target sequence for CACNA1A (NM_000068.2,1641-1659).
cgcccgagccagcattaaa

SEQ ID NO: 23514 - DNA, 19 bp, Homo sapiens
  siRNA target sequence for CACNA1A (NM_000068.2,1677-1695).
ctcgaccttttttcacaaa

SEQ ID NO: 23515 - DNA, 19 bp, Homo sapiens
  siRNA target sequence for CACNA1A (NM_000068.2,1782-1800).
cacgctgtgtgttgctatt

SEQ ID NO: 23516 - DNA, 19 bp, Homo sapiens
  siRNA target sequence for CACNA1A (NM_000068.2,1784-1802).
cgctgtgtgttgctattgt

SEQ ID NO: 23517 - DNA, 19 bp, Homo sapiens
  siRNA target sequence for CACNA1A (NM_000068.2,1867-1885).
ctctttatgtccgaaatgt

SEQ ID NO: 23518 - DNA, 19 bp, Homo sapiens
  siRNA target sequence for CACNA1A (NM_000068.2,1869-1887).
ctttatgtccgaaatgttt

SEQ ID NO: 23519 - DNA, 19 bp, Homo sapiens
  siRNA target sequence for CACNA1A (NM_000068.2,1977-1995).
ggtcatctgggctgtcata

SEQ ID NO: 23520 - DNA, 19 bp, Homo sapiens
  siRNA target sequence for CACNA1A (NM_000068.2,1978-1996).
gtcatctgggctgtcataa

SEQ ID NO: 23521 - DNA, 19 bp, Homo sapiens
  siRNA target sequence for CACNA1A (NM_000068.2,2035-2053).
ctcaggttattgcgtattt

SEQ ID NO: 23522 - DNA, 19 bp, Homo sapiens
  siRNA target sequence for CACNA1A (NM_000068.2,2039-2057).
ggttattgcgtattttcaa

SEQ ID NO: 23523 - DNA, 19 bp, Homo sapiens
  siRNA target sequence for CACNA1A (NM_000068.2,2040-2058).
gttattgcgtattttcaaa

SEQ ID NO: 23524 - DNA, 19 bp, Homo sapiens
  siRNA target sequence for CACNA1A (NM_000068.2,2166-2184).
cgcccttttgggaatgcaa

SEQ ID NO: 23525 - DNA, 19 bp, Homo sapiens
  siRNA target sequence for CACNA1A (NM_000068.2,2221-2239).
cctcccaccaacttcgata

SEQ ID NO: 23526 - DNA, 19 bp, Homo sapiens
  siRNA target sequence for CACNA1A (NM_000068.2,2226-2244).
caccaacttcgatactttt

SEQ ID NO: 23527 - DNA, 19 bp, Homo sapiens
  siRNA target sequence for CACNA1A (NM_000068.2,2252-2270).
caataatgacggtgtttca

SEQ ID NO: 23528 - DNA, 19 bp, Homo sapiens
  siRNA target sequence for CACNA1A (NM_000068.2,2347-2365).
gtgttctccatctatttca

SEQ ID NO: 23529 - DNA, 19 bp, Homo sapiens
  siRNA target sequence for CACNA1A (NM_000068.2,2655-2673).
ggaggccctgtataacgaa

SEQ ID NO: 23530 - DNA, 19 bp, Homo sapiens
  siRNA target sequence for CACNA1A (NM_000068.2,3461-3479).
cacccctggcagaggatat

SEQ ID NO: 23531 - DNA, 19 bp, Homo sapiens
  siRNA target sequence for CACNA1A (NM_000068.2,3694-3712).
cccaagacccccgagaata

SEQ ID NO: 23532 - DNA, 19 bp, Homo sapiens
  siRNA target sequence for CACNA1A (NM_000068.2,3704-3722).
ccgagaatagccttatcgt

SEQ ID NO: 23533 - DNA, 19 bp, Homo sapiens
  siRNA target sequence for CACNA1A (NM_000068.2,3735-3753).
cggcacccagaccaattca

SEQ ID NO: 23534 - DNA, 19 bp, Homo sapiens
  siRNA target sequence for CACNA1A (NM_000068.2,3744-3762).
gaccaattcagctaagact

SEQ ID NO: 23535 - DNA, 19 bp, Homo sapiens
  siRNA target sequence for CACNA1A (NM_000068.2,3827-3845).
ccgtcgtacaagtgaacaa

SEQ ID NO: 23536 - DNA, 19 bp, Homo sapiens
  siRNA target sequence for CACNA1A (NM_000068.2,3828-3846).
cgtcgtacaagtgaacaaa

SEQ ID NO: 23537 - DNA, 19 bp, Homo sapiens
  siRNA target sequence for CACNA1A (NM_000068.2,3829-3847).
gtcgtacaagtgaacaaaa

SEQ ID NO: 23538 - DNA, 19 bp, Homo sapiens
  siRNA target sequence for CACNA1A (NM_000068.2,3931-3949).
ccaatgcctccctatagct

SEQ ID NO: 23539 - DNA, 19 bp, Homo sapiens
  siRNA target sequence for CACNA1A (NM_000068.2,3940-3958).
ccctatagctccatgttca

SEQ ID NO: 23540 - DNA, 19 bp, Homo sapiens
  siRNA target sequence for CACNA1A (NM_000068.2,4104-4122).
caacgtgctgcgatacttt

SEQ ID NO: 23541 - DNA, 19 bp, Homo sapiens
  siRNA target sequence for CACNA1A (NM_000068.2,4114-4132).
cgatactttgactacgttt

SEQ ID NO: 23542 - DNA, 19 bp, Homo sapiens
  siRNA target sequence for CACNA1A (NM_000068.2,4115-4133).
gatactttgactacgtttt

SEQ ID NO: 23543 - DNA, 19 bp, Homo sapiens
  siRNA target sequence for CACNA1A (NM_000068.2,4294-4312).
gacatcaacacgattaaat

SEQ ID NO: 23544 - DNA, 19 bp, Homo sapiens
  siRNA target sequence for CACNA1A (NM_000068.2,4328-4346).
gggtgctacgacctcttaa

SEQ ID NO: 23545 - DNA, 19 bp, Homo sapiens
  siRNA target sequence for CACNA1A (NM_000068.2,4329-4347).
ggtgctacgacctcttaaa

SEQ ID NO: 23546 - DNA, 19 bp, Homo sapiens
  siRNA target sequence for CACNA1A (NM_000068.2,4330-4348).
gtgctacgacctcttaaaa

SEQ ID NO: 23547 - DNA, 19 bp, Homo sapiens
  siRNA target sequence for CACNA1A (NM_000068.2,4390-4408).
gtggtgaactcacttaaaa

SEQ ID NO: 23548 - DNA, 19 bp, Homo sapiens
  siRNA target sequence for CACNA1A (NM_000068.2,4400-4418).
cacttaaaaacgtcttcaa

SEQ ID NO: 23549 - DNA, 19 bp, Homo sapiens
  siRNA target sequence for CACNA1A (NM_000068.2,4402-4420).
cttaaaaacgtcttcaaca

SEQ ID NO: 23550 - DNA, 19 bp, Homo sapiens
  siRNA target sequence for CACNA1A (NM_000068.2,4423-4441).
ctcatcgtctacatgctat

SEQ ID NO: 23551 - DNA, 19 bp, Homo sapiens
  siRNA target sequence for CACNA1A (NM_000068.2,4502-4520).
ctgacgagtccaaagagtt

SEQ ID NO: 23552 - DNA, 19 bp, Homo sapiens
  siRNA target sequence for CACNA1A (NM_000068.2,4545-4563).
cctcctctacgagaagaat

SEQ ID NO: 23553 - DNA, 19 bp, Homo sapiens
  siRNA target sequence for CACNA1A (NM_000068.2,4585-4603).
gagtggaagaagtatgaat

SEQ ID NO: 23554 - DNA, 19 bp, Homo sapiens
  siRNA target sequence for CACNA1A (NM_000068.2,5021-5039).
ccatcgtgcttatgatgaa

SEQ ID NO: 23555 - DNA, 19 bp, Homo sapiens
  siRNA target sequence for CACNA1A (NM_000068.2,5048-5066).
gggcttctgttgcttatga

SEQ ID NO: 23556 - DNA, 19 bp, Homo sapiens
  siRNA target sequence for CACNA1A (NM_000068.2,5071-5089).
gccctgcgggtgttcaaca

SEQ ID NO: 23557 - DNA, 19 bp, Homo sapiens
  siRNA target sequence for CACNA1A (NM_000068.2,5072-5090).
ccctgcgggtgttcaacat

SEQ ID NO: 23558 - DNA, 19 bp, Homo sapiens
  siRNA target sequence for CACNA1A (NM_000068.2,5161-5179).
cgcgatgcctggaacatct

SEQ ID NO: 23559 - DNA, 19 bp, Homo sapiens
  siRNA target sequence for CACNA1A (NM_000068.2,5201-5219).
gcagcatcaccgatatcct

SEQ ID NO: 23560 - DNA, 19 bp, Homo sapiens
  siRNA target sequence for CACNA1A (NM_000068.2,5546-5564).
gggaagcttggcacaacat

SEQ ID NO: 23561 - DNA, 19 bp, Homo sapiens
  siRNA target sequence for CACNA1A (NM_000068.2,5548-5566).
gaagcttggcacaacatca

SEQ ID NO: 23562 - DNA, 19 bp, Homo sapiens
  siRNA target sequence for CACNA1A (NM_000068.2,5582-5600).
gcgggaaaccgtgtgataa

SEQ ID NO: 23563 - DNA, 19 bp, Homo sapiens
  siRNA target sequence for CACNA1A (NM_000068.2,5584-5602).
gggaaaccgtgtgataaga

SEQ ID NO: 23564 - DNA, 19 bp, Homo sapiens
  siRNA target sequence for CACNA1A (NM_000068.2,5620-5638).
cgagagtgtggcaatgaat

SEQ ID NO: 23565 - DNA, 19 bp, Homo sapiens
  siRNA target sequence for CACNA1A (NM_000068.2,5627-5645).
gtggcaatgaatttgctta

SEQ ID NO: 23566 - DNA, 19 bp, Homo sapiens
  siRNA target sequence for CACNA1A (NM_000068.2,5783-5801).
gtgtctgggccgagtatga

SEQ ID NO: 23567 - DNA, 19 bp, Homo sapiens
  siRNA target sequence for CACNA1A (NM_000068.2,5809-5827).
gcttgcggtcggattcatt

SEQ ID NO: 23568 - DNA, 19 bp, Homo sapiens
  siRNA target sequence for CACNA1A (NM_000068.2,5810-5828).
cttgcggtcggattcatta

SEQ ID NO: 23569 - DNA, 19 bp, Homo sapiens
  siRNA target sequence for CACNA1A (NM_000068.2,5813-5831).
gcggtcggattcattataa

SEQ ID NO: 23570 - DNA, 19 bp, Homo sapiens
  siRNA target sequence for CACNA1A (NM_000068.2,5816-5834).
gtcggattcattataagga

SEQ ID NO: 23571 - DNA, 19 bp, Homo sapiens
  siRNA target sequence for CACNA1A (NM_000068.2,5841-5859).
cagtttattacgagtaata

SEQ ID NO: 23572 - DNA, 19 bp, Homo sapiens
  siRNA target sequence for CACNA1A (NM_000068.2,5869-5887).
ctcggcttaggcaagaaat

SEQ ID NO: 23573 - DNA, 19 bp, Homo sapiens
  siRNA target sequence for CACNA1A (NM_000068.2,5871-5889).
cggcttaggcaagaaatgt

SEQ ID NO: 23574 - DNA, 19 bp, Homo sapiens
  siRNA target sequence for CACNA1A (NM_000068.2,5946-5964).
caacaccgtccacttcaat

SEQ ID NO: 23575 - DNA, 19 bp, Homo sapiens
  siRNA target sequence for CACNA1A (NM_000068.2,6067-6085).
gcgatttggcccaatctgt

SEQ ID NO: 23576 - DNA, 19 bp, Homo sapiens
  siRNA target sequence for CACNA1A (NM_000068.2,6453-6471).
caacagccagcctaactct

SEQ ID NO: 23577 - DNA, 19 bp, Homo sapiens
  siRNA target sequence for CACNA1A (NM_000068.2,6602-6620).
ggccacgtgggaataacct

SEQ ID NO: 23578 - DNA, 19 bp, Homo sapiens
  siRNA target sequence for CACNA1A (NM_000068.2,6680-6698).
cccgacgcctggacgatta

SEQ ID NO: 23579 - DNA, 19 bp, Homo sapiens
  siRNA target sequence for CACNA1A (NM_000068.2,6682-6700).
cgacgcctggacgattact

SEQ ID NO: 23580 - DNA, 19 bp, Homo sapiens
  siRNA target sequence for CACNA1A (NM_023035.1,7057-7075).
caccggcagggcagtagtt

SEQ ID NO: 23581 - DNA, 19 bp, Homo sapiens
  siRNA target sequence for CARHSP1 (NM_014316.1,327-345).
gaggtcacctataaaatgt

SEQ ID NO: 23582 - DNA, 19 bp, Homo sapiens
  siRNA target sequence for CARHSP1 (NM_014316.1,349-367).
ccatcccacccaagaatga

SEQ ID NO: 23583 - DNA, 19 bp, Homo sapiens
  siRNA target sequence for CARP-1 (NM_018237.1,149-167).
gccatgggctactcagttt

SEQ ID NO: 23584 - DNA, 19 bp, Homo sapiens
  siRNA target sequence for CARP-1 (NM_018237.1,150-168).
ccatgggctactcagttta

SEQ ID NO: 23585 - DNA, 19 bp, Homo sapiens
  siRNA target sequence for CARP-1 (NM_018237.1,169-187).
cagccactgcagtatcaca

SEQ ID NO: 23586 - DNA, 19 bp, Homo sapiens
  siRNA target sequence for CARP-1 (NM_018237.1,225-243).
ggagcatctcctaccattt

SEQ ID NO: 23587 - DNA, 19 bp, Homo sapiens
  siRNA target sequence for CARP-1 (NM_018237.1,232-250).
ctcctaccatttatacaca

SEQ ID NO: 23588 - DNA, 19 bp, Homo sapiens
  siRNA target sequence for CARP-1 (NM_018237.1,289-307).
ctccagcaaactatcagtt

SEQ ID NO: 23589 - DNA, 19 bp, Homo sapiens
  siRNA target sequence for CARP-1 (NM_018237.1,295-313).
caaactatcagttaacaca

SEQ ID NO: 23590 - DNA, 19 bp, Homo sapiens
  siRNA target sequence for CARP-1 (NM_018237.1,299-317).
ctatcagttaacacaaact

SEQ ID NO: 23591 - DNA, 19 bp, Homo sapiens
  siRNA target sequence for CARP-1 (NM_018237.1,352-370).
ctgcattacaacagcaata

SEQ ID NO: 23592 - DNA, 19 bp, Homo sapiens
  siRNA target sequence for CARP-1 (NM_018237.1,397-415).
gtgtgcaacaacagttaca

SEQ ID NO: 23593 - DNA, 19 bp, Homo sapiens
  siRNA target sequence for CARP-1 (NM_018237.1,420-438).
ccccagcaaaccctcttaa

SEQ ID NO: 23594 - DNA, 19 bp, Homo sapiens
  siRNA target sequence for CARP-1 (NM_018237.1,488-506).
gccaacagcacaaataact

SEQ ID NO: 23595 - DNA, 19 bp, Homo sapiens
  siRNA target sequence for CARP-1 (NM_018237.1,495-513).
gcacaaataactgtatcat

SEQ ID NO: 23596 - DNA, 19 bp, Homo sapiens
  siRNA target sequence for CARP-1 (NM_018237.1,569-587).
cacaggggtggttacaaaa

SEQ ID NO: 23597 - DNA, 19 bp, Homo sapiens
  siRNA target sequence for CARP-1 (NM_018237.1,574-592).
gggtggttacaaaactaca

SEQ ID NO: 23598 - DNA, 19 bp, Homo sapiens
  siRNA target sequence for CARP-1 (NM_018237.1,578-596).
ggttacaaaactacatgat

SEQ ID NO: 23599 - DNA, 19 bp, Homo sapiens
  siRNA target sequence for CARP-1 (NM_018237.1,609-627).
gtggatgaagatgtattct

SEQ ID NO: 23600 - DNA, 19 bp, Homo sapiens
  siRNA target sequence for CARP-1 (NM_018237.1,680-698).
ggttgaagctacttataat

SEQ ID NO: 23601 - DNA, 19 bp, Homo sapiens
  siRNA target sequence for CARP-1 (NM_018237.1,684-702).
gaagctacttataatccta

SEQ ID NO: 23602 - DNA, 19 bp, Homo sapiens
  siRNA target sequence for CARP-1 (NM_018237.1,730-748).
gaattcaaacactaccaaa

SEQ ID NO: 23603 - DNA, 19 bp, Homo sapiens
  siRNA target sequence for CARP-1 (NM_018237.1,739-757).
cactaccaaatcagaatca

SEQ ID NO: 23604 - DNA, 19 bp, Homo sapiens
  siRNA target sequence for CARP-1 (NM_018237.1,762-780).
caaacccagccattactga

SEQ ID NO: 23605 - DNA, 19 bp, Homo sapiens
  siRNA target sequence for CARP-1 (NM_018237.1,936-954).
cagcaaaaagctggtttat

SEQ ID NO: 23606 - DNA, 19 bp, Homo sapiens
  siRNA target sequence for CARP-1 (NM_018237.1,956-974).
gcagcctcctgttcgtata

SEQ ID NO: 23607 - DNA, 19 bp, Homo sapiens
  siRNA target sequence for CARP-1 (NM_018237.1,959-977).
gcctcctgttcgtatagtt

SEQ ID NO: 23608 - DNA, 19 bp, Homo sapiens
  siRNA target sequence for CARP-1 (NM_018237.1,960-978).
cctcctgttcgtatagttt

SEQ ID NO: 23609 - DNA, 19 bp, Homo sapiens
  siRNA target sequence for CARP-1 (NM_018237.1,964-982).
ctgttcgtatagtttcaca

SEQ ID NO: 23610 - DNA, 19 bp, Homo sapiens
  siRNA target sequence for CARP-1 (NM_018237.1,1005-1023).
gatcccccatcccgatttt

SEQ ID NO: 23611 - DNA, 19 bp, Homo sapiens
  siRNA target sequence for CARP-1 (NM_018237.1,1043-1061).
ggatcaagtgcctaacaga

SEQ ID NO: 23612 - DNA, 19 bp, Homo sapiens
  siRNA target sequence for CARP-1 (NM_018237.1,1044-1062).
gatcaagtgcctaacagaa

SEQ ID NO: 23613 - DNA, 19 bp, Homo sapiens
  siRNA target sequence for CARP-1 (NM_018237.1,1098-1116).
cgtagatcgagagaaagat

SEQ ID NO: 23614 - DNA, 19 bp, Homo sapiens
  siRNA target sequence for CARP-1 (NM_018237.1,1178-1196).
gagagttcgacgtgttgtt

SEQ ID NO: 23615 - DNA, 19 bp, Homo sapiens
  siRNA target sequence for CARP-1 (NM_018237.1,1198-1216).
cacgttacacagttcagtt

SEQ ID NO: 23616 - DNA, 19 bp, Homo sapiens
  siRNA target sequence for CARP-1 (NM_018237.1,1267-1285).
gccgttatcaaaatttgta

SEQ ID NO: 23617 - DNA, 19 bp, Homo sapiens
  siRNA target sequence for CARP-1 (NM_018237.1,1268-1286).
ccgttatcaaaatttgtat

SEQ ID NO: 23618 - DNA, 19 bp, Homo sapiens
  siRNA target sequence for CARP-1 (NM_018237.1,1283-1301).
gtatatacctagtgacttt

SEQ ID NO: 23619 - DNA, 19 bp, Homo sapiens
  siRNA target sequence for CARP-1 (NM_018237.1,1437-1455).
gatgctgaccacttataca

SEQ ID NO: 23620 - DNA, 19 bp, Homo sapiens
  siRNA target sequence for CARP-1 (NM_018237.1,1448-1466).
cttatacagtgcaaaggta

SEQ ID NO: 23621 - DNA, 19 bp, Homo sapiens
  siRNA target sequence for CARP-1 (NM_018237.1,1475-1493).
ggctagccctagtatggaa

SEQ ID NO: 23622 - DNA, 19 bp, Homo sapiens
  siRNA target sequence for CARP-1 (NM_018237.1,1481-1499).
ccctagtatggaagattta

SEQ ID NO: 23623 - DNA, 19 bp, Homo sapiens
  siRNA target sequence for CARP-1 (NM_018237.1,1482-1500).
cctagtatggaagatttat

SEQ ID NO: 23624 - DNA, 19 bp, Homo sapiens
  siRNA target sequence for CARP-1 (NM_018237.1,1483-1501).
ctagtatggaagatttata

SEQ ID NO: 23625 - DNA, 19 bp, Homo sapiens
  siRNA target sequence for CARP-1 (NM_018237.1,1560-1578).
cctgctagacttgttaagt

SEQ ID NO: 23626 - DNA, 19 bp, Homo sapiens
  siRNA target sequence for CARP-1 (NM_018237.1,1561-1579).
ctgctagacttgttaagtt

SEQ ID NO: 23627 - DNA, 19 bp, Homo sapiens
  siRNA target sequence for CARP-1 (NM_018237.1,1567-1585).
gacttgttaagtttttagt

SEQ ID NO: 23628 - DNA, 19 bp, Homo sapiens
  siRNA target sequence for CARP-1 (NM_018237.1,1577-1595).
gtttttagtgggcatgaaa

SEQ ID NO: 23629 - DNA, 19 bp, Homo sapiens
  siRNA target sequence for CARP-1 (NM_018237.1,1668-1686).
ccctctgtgttgattaaga

SEQ ID NO: 23630 - DNA, 19 bp, Homo sapiens
  siRNA target sequence for CARP-1 (NM_018237.1,1670-1688).
ctctgtgttgattaagact

SEQ ID NO: 23631 - DNA, 19 bp, Homo sapiens
  siRNA target sequence for CARP-1 (NM_018237.1,1676-1694).
gttgattaagactgctatt

SEQ ID NO: 23632 - DNA, 19 bp, Homo sapiens
  siRNA target sequence for CARP-1 (NM_018237.1,1679-1697).
gattaagactgctattcgt

SEQ ID NO: 23633 - DNA, 19 bp, Homo sapiens
  siRNA target sequence for CARP-1 (NM_018237.1,1685-1703).
gactgctattcgttgttgt

SEQ ID NO: 23634 - DNA, 19 bp, Homo sapiens
  siRNA target sequence for CARP-1 (NM_018237.1,1710-1728).
ctgacaggcattgatctaa

SEQ ID NO: 23635 - DNA, 19 bp, Homo sapiens
  siRNA target sequence for CARP-1 (NM_018237.1,1725-1743).
ctaagtgtgtgcacacaat

SEQ ID NO: 23636 - DNA, 19 bp, Homo sapiens
  siRNA target sequence for CARP-1 (NM_018237.1,1729-1747).
gtgtgtgcacacaatggta

SEQ ID NO: 23637 - DNA, 19 bp, Homo sapiens
  siRNA target sequence for CARP-1 (NM_018237.1,1745-1763).
gtaccgttttgcagagatt

SEQ ID NO: 23638 - DNA, 19 bp, Homo sapiens
  siRNA target sequence for CARP-1 (NM_018237.1,1787-1805).
ccacaaggggcgtacagtt

SEQ ID NO: 23639 - DNA, 19 bp, Homo sapiens
  siRNA target sequence for CARP-1 (NM_018237.1,1882-1900).
ccctctcccgaggatacaa

SEQ ID NO: 23640 - DNA, 19 bp, Homo sapiens
  siRNA target sequence for CARP-1 (NM_018237.1,2002-2020).
ctacccattggtctaaact

SEQ ID NO: 23641 - DNA, 19 bp, Homo sapiens
  siRNA target sequence for CARP-1 (NM_018237.1,2005-2023).
cccattggtctaaacttga

SEQ ID NO: 23642 - DNA, 19 bp, Homo sapiens
  siRNA target sequence for CARP-1 (NM_018237.1,2006-2024).
ccattggtctaaacttgat

SEQ ID NO: 23643 - DNA, 19 bp, Homo sapiens
  siRNA target sequence for CARP-1 (NM_018237.1,2073-2091).
gctcttagttccaaaggat

SEQ ID NO: 23644 - DNA, 19 bp, Homo sapiens
  siRNA target sequence for CARP-1 (NM_018237.1,2074-2092).
ctcttagttccaaaggatt

SEQ ID NO: 23645 - DNA, 19 bp, Homo sapiens
  siRNA target sequence for CARP-1 (NM_018237.1,2088-2106).
ggattaaaatcccagttaa

SEQ ID NO: 23646 - DNA, 19 bp, Homo sapiens
  siRNA target sequence for CARP-1 (NM_018237.1,2089-2107).
gattaaaatcccagttaat

SEQ ID NO: 23647 - DNA, 19 bp, Homo sapiens
  siRNA target sequence for CARP-1 (NM_018237.1,2102-2120).
gttaatagcccgattgaca

SEQ ID NO: 23648 - DNA, 19 bp, Homo sapiens
  siRNA target sequence for CARP-1 (NM_018237.1,2237-2255).
gaaacgtcaagaggaaata

SEQ ID NO: 23649 - DNA, 19 bp, Homo sapiens
  siRNA target sequence for CARP-1 (NM_018237.1,2259-2277).
cgccagcgtcgagaaagaa

SEQ ID NO: 23650 - DNA, 19 bp, Homo sapiens
  siRNA target sequence for CARP-1 (NM_018237.1,2261-2279).
ccagcgtcgagaaagaaga

SEQ ID NO: 23651 - DNA, 19 bp, Homo sapiens
  siRNA target sequence for CARP-1 (NM_018237.1,2265-2283).
cgtcgagaaagaagatata

SEQ ID NO: 23652 - DNA, 19 bp, Homo sapiens
  siRNA target sequence for CARP-1 (NM_018237.1,2266-2284).
gtcgagaaagaagatatat

SEQ ID NO: 23653 - DNA, 19 bp, Homo sapiens
  siRNA target sequence for CARP-1 (NM_018237.1,2370-2388).
gtcctattggactacagat

SEQ ID NO: 23654 - DNA, 19 bp, Homo sapiens
  siRNA target sequence for CARP-1 (NM_018237.1,2381-2399).
ctacagattagaggataat

SEQ ID NO: 23655 - DNA, 19 bp, Homo sapiens
  siRNA target sequence for CARP-1 (NM_018237.1,2384-2402).
cagattagaggataataaa

SEQ ID NO: 23656 - DNA, 19 bp, Homo sapiens
  siRNA target sequence for CARP-1 (NM_018237.1,2422-2440).
cattgtttgcggaactttt

SEQ ID NO: 23657 - DNA, 19 bp, Homo sapiens
  siRNA target sequence for CARP-1 (NM_018237.1,2430-2448).
gcggaacttttcaacgaaa

SEQ ID NO: 23658 - DNA, 19 bp, Homo sapiens
  siRNA target sequence for CARP-1 (NM_018237.1,2444-2462).
cgaaatgcttcaaagagat

SEQ ID NO: 23659 - DNA, 19 bp, Homo sapiens
  siRNA target sequence for CARP-1 (NM_018237.1,2460-2478).
gattttggtgtccgtatat

SEQ ID NO: 23660 - DNA, 19 bp, Homo sapiens
  siRNA target sequence for CARP-1 (NM_018237.1,2466-2484).
ggtgtccgtatatacaaat

SEQ ID NO: 23661 - DNA, 19 bp, Homo sapiens
  siRNA target sequence for CARP-1 (NM_018237.1,2469-2487).
gtccgtatatacaaatcat

SEQ ID NO: 23662 - DNA, 19 bp, Homo sapiens
  siRNA target sequence for CARP-1 (NM_018237.1,2473-2491).
gtatatacaaatcattact

SEQ ID NO: 23663 - DNA, 19 bp, Homo sapiens
  siRNA target sequence for CARP-1 (NM_018237.1,2608-2626).
gaaaatcaggcgatgataa

SEQ ID NO: 23664 - DNA, 19 bp, Homo sapiens
  siRNA target sequence for CARP-1 (NM_018237.1,2789-2807).
gaccaaacgagatgacaaa

SEQ ID NO: 23665 - DNA, 19 bp, Homo sapiens
  siRNA target sequence for CARP-1 (NM_018237.1,2828-2846).
caaggagaggccctctaaa

SEQ ID NO: 23666 - DNA, 19 bp, Homo sapiens
  siRNA target sequence for CARP-1 (NM_018237.1,2836-2854).
ggccctctaaagataagga

SEQ ID NO: 23667 - DNA, 19 bp, Homo sapiens
  siRNA target sequence for CARP-1 (NM_018237.1,2864-2882).
gactcaaatgatcacaatt

SEQ ID NO: 23668 - DNA, 19 bp, Homo sapiens
  siRNA target sequence for CARP-1 (NM_018237.1,2989-3007).
ctcgggctcaggtaaagaa

SEQ ID NO: 23669 - DNA, 19 bp, Homo sapiens
  siRNA target sequence for CARP-1 (NM_018237.1,3026-3044).
gctccgtgaatcttgcttt

SEQ ID NO: 23670 - DNA, 19 bp, Homo sapiens
  siRNA target sequence for CARP-1 (NM_018237.1,3027-3045).
ctccgtgaatcttgctttt

SEQ ID NO: 23671 - DNA, 19 bp, Homo sapiens
  siRNA target sequence for CARP-1 (NM_018237.1,3058-3076).
cagacacctcaaaagatga

SEQ ID NO: 23672 - DNA, 19 bp, Homo sapiens
  siRNA target sequence for CARP-1 (NM_018237.1,3111-3129).
gatatgctaggaaacagat

SEQ ID NO: 23673 - DNA, 19 bp, Homo sapiens
  siRNA target sequence for CARP-1 (NM_018237.1,3383-3401).
ggaccttagtcagttacaa

SEQ ID NO: 23674 - DNA, 19 bp, Homo sapiens
  siRNA target sequence for CARP-1 (NM_018237.1,3386-3404).
ccttagtcagttacaagaa

SEQ ID NO: 23675 - DNA, 19 bp, Homo sapiens
  siRNA target sequence for CARP-1 (NM_018237.1,3470-3488).
cttatctacggtaatggat

SEQ ID NO: 23676 - DNA, 19 bp, Homo sapiens
  siRNA target sequence for CARP-1 (NM_018237.1,3475-3493).
ctacggtaatggatgaaat

SEQ ID NO: 23677 - DNA, 19 bp, Homo sapiens
  siRNA target sequence for CARP-1 (NM_018237.1,3478-3496).
cggtaatggatgaaatcca

SEQ ID NO: 23678 - DNA, 19 bp, Homo sapiens
  siRNA target sequence for CARP-1 (NM_018237.1,3552-3570).
gagaatggtgccagtgtat

SEQ ID NO: 23679 - DNA, 19 bp, Homo sapiens
  siRNA target sequence for CBF2 (NM_005760.1,160-178).
gcaccaagcaagattacct

SEQ ID NO: 23680 - DNA, 19 bp, Homo sapiens
  siRNA target sequence for CBF2 (NM_005760.1,161-179).
caccaagcaagattacctt

SEQ ID NO: 23681 - DNA, 19 bp, Homo sapiens
  siRNA target sequence for CBF2 (NM_005760.1,200-218).
gaatgaggaagtgatagat

SEQ ID NO: 23682 - DNA, 19 bp, Homo sapiens
  siRNA target sequence for CBF2 (NM_005760.1,290-308).
ggcgaagtatacaaaagct

SEQ ID NO: 23683 - DNA, 19 bp, Homo sapiens
  siRNA target sequence for CBF2 (NM_005760.1,291-309).
gcgaagtatacaaaagctt

SEQ ID NO: 23684 - DNA, 19 bp, Homo sapiens
  siRNA target sequence for CBF2 (NM_005760.1,409-427).
ggacatcagttaataaggt

SEQ ID NO: 23685 - DNA, 19 bp, Homo sapiens
  siRNA target sequence for CBF2 (NM_005760.1,442-460).
ggccagaaccacattctga

SEQ ID NO: 23686 - DNA, 19 bp, Homo sapiens
  siRNA target sequence for CBF2 (NM_005760.1,472-490).
gtaccacaccgaaagtaaa

SEQ ID NO: 23687 - DNA, 19 bp, Homo sapiens
  siRNA target sequence for CBF2 (NM_005760.1,524-542).
gagacagactttgttactt

SEQ ID NO: 23688 - DNA, 19 bp, Homo sapiens
  siRNA target sequence for CBF2 (NM_005760.1,550-568).
gaggcaaatggtatgatct

SEQ ID NO: 23689 - DNA, 19 bp, Homo sapiens
  siRNA target sequence for CBF2 (NM_005760.1,567-585).
ctggagtacagcaatgaat

SEQ ID NO: 23690 - DNA, 19 bp, Homo sapiens
  siRNA target sequence for CBF2 (NM_005760.1,572-590).
gtacagcaatgaatattct

SEQ ID NO: 23691 - DNA, 19 bp, Homo sapiens
  siRNA target sequence for CBF2 (NM_005760.1,612-630).
gttgtatctaagtacaaaa

SEQ ID NO: 23692 - DNA, 19 bp, Homo sapiens
  siRNA target sequence for CBF2 (NM_005760.1,676-694).
gtaagacgaatagtcaaaa

SEQ ID NO: 23693 - DNA, 19 bp, Homo sapiens
  siRNA target sequence for CBF2 (NM_005760.1,690-708).
caaaagggagcctcttcta

SEQ ID NO: 23694 - DNA, 19 bp, Homo sapiens
  siRNA target sequence for CBF2 (NM_005760.1,752-770).
gatggcagccatgattctt

SEQ ID NO: 23695 - DNA, 19 bp, Homo sapiens
  siRNA target sequence for CBF2 (NM_005760.1,757-775).
cagccatgattcttcttat

SEQ ID NO: 23696 - DNA, 19 bp, Homo sapiens
  siRNA target sequence for CBF2 (NM_005760.1,760-778).
ccatgattcttcttattca

SEQ ID NO: 23697 - DNA, 19 bp, Homo sapiens
  siRNA target sequence for CBF2 (NM_005760.1,787-805).
ccgttcacacacttcagtt

SEQ ID NO: 23698 - DNA, 19 bp, Homo sapiens
  siRNA target sequence for CBF2 (NM_005760.1,788-806).
cgttcacacacttcagttt

SEQ ID NO: 23699 - DNA, 19 bp, Homo sapiens
  siRNA target sequence for CBF2 (NM_005760.1,878-896).
caaagagttgcttatcaca

SEQ ID NO: 23700 - DNA, 19 bp, Homo sapiens
  siRNA target sequence for CBF2 (NM_005760.1,935-953).
ccagcgtccttttgacaaa

SEQ ID NO: 23701 - DNA, 19 bp, Homo sapiens
  siRNA target sequence for CBF2 (NM_005760.1,1050-1068).
gtgcaggtcttagaaactt

SEQ ID NO: 23702 - DNA, 19 bp, Homo sapiens
  siRNA target sequence for CBF2 (NM_005760.1,1055-1073).
ggtcttagaaactttaagt

SEQ ID NO: 23703 - DNA, 19 bp, Homo sapiens
  siRNA target sequence for CBF2 (NM_005760.1,1116-1134).
gctcatgagctgctttgta

SEQ ID NO: 23704 - DNA, 19 bp, Homo sapiens
  siRNA target sequence for CBF2 (NM_005760.1,1117-1135).
ctcatgagctgctttgtaa

SEQ ID NO: 23705 - DNA, 19 bp, Homo sapiens
  siRNA target sequence for CBF2 (NM_005760.1,1210-1228).
caaaagcatcccatctgtt

SEQ ID NO: 23706 - DNA, 19 bp, Homo sapiens
  siRNA target sequence for CBF2 (NM_005760.1,1215-1233).
gcatcccatctgttagaga

SEQ ID NO: 23707 - DNA, 19 bp, Homo sapiens
  siRNA target sequence for CBF2 (NM_005760.1,1220-1238).
ccatctgttagagacatta

SEQ ID NO: 23708 - DNA, 19 bp, Homo sapiens
  siRNA target sequence for CBF2 (NM_005760.1,1243-1261).
gtaaacatcccaatatgaa

SEQ ID NO: 23709 - DNA, 19 bp, Homo sapiens
  siRNA target sequence for CBF2 (NM_005760.1,1289-1307).
gctactcttccgctcaaat

SEQ ID NO: 23710 - DNA, 19 bp, Homo sapiens
  siRNA target sequence for CBF2 (NM_005760.1,1290-1308).
ctactcttccgctcaaata

SEQ ID NO: 23711 - DNA, 19 bp, Homo sapiens
  siRNA target sequence for CBF2 (NM_005760.1,1293-1311).
ctcttccgctcaaatatca

SEQ ID NO: 23712 - DNA, 19 bp, Homo sapiens
  siRNA target sequence for CBF2 (NM_005760.1,1310-1328).
cagctccaaagctcaatat

SEQ ID NO: 23713 - DNA, 19 bp, Homo sapiens
  siRNA target sequence for CBF2 (NM_005760.1,1312-1330).
gctccaaagctcaatatta

SEQ ID NO: 23714 - DNA, 19 bp, Homo sapiens
  siRNA target sequence for CBF2 (NM_005760.1,1375-1393).
gtgaattggctaacaaatt

SEQ ID NO: 23715 - DNA, 19 bp, Homo sapiens
  siRNA target sequence for CBF2 (NM_005760.1,1382-1400).
ggctaacaaattaataact

SEQ ID NO: 23716 - DNA, 19 bp, Homo sapiens
  siRNA target sequence for CBF2 (NM_005760.1,1457-1475).
gcttagcgcccttttaaca

SEQ ID NO: 23717 - DNA, 19 bp, Homo sapiens
  siRNA target sequence for CBF2 (NM_005760.1,1501-1519).
cccagactggtgatgacaa

SEQ ID NO: 23718 - DNA, 19 bp, Homo sapiens
  siRNA target sequence for CBF2 (NM_005760.1,1521-1539).
gtaagggagcagattgaca

SEQ ID NO: 23719 - DNA, 19 bp, Homo sapiens
  siRNA target sequence for CBF2 (NM_005760.1,1536-1554).
gacacactgtttaaagtgt

SEQ ID NO: 23720 - DNA, 19 bp, Homo sapiens
  siRNA target sequence for CBF2 (NM_005760.1,1625-1643).
gacaatatcggatcgatat

SEQ ID NO: 23721 - DNA, 19 bp, Homo sapiens
  siRNA target sequence for CBF2 (NM_005760.1,1627-1645).
caatatcggatcgatatta

SEQ ID NO: 23722 - DNA, 19 bp, Homo sapiens
  siRNA target sequence for CBF2 (NM_005760.1,1638-1656).
cgatattacacagcattat

SEQ ID NO: 23723 - DNA, 19 bp, Homo sapiens
  siRNA target sequence for CBF2 (NM_005760.1,1687-1705).
cgtgttccaagcaagctat

SEQ ID NO: 23724 - DNA, 19 bp, Homo sapiens
  siRNA target sequence for CBF2 (NM_005760.1,1690-1708).
gttccaagcaagctatgtt

SEQ ID NO: 23725 - DNA, 19 bp, Homo sapiens
  siRNA target sequence for CBF2 (NM_005760.1,1833-1851).
cttgtgtctgagatcctta

SEQ ID NO: 23726 - DNA, 19 bp, Homo sapiens
  siRNA target sequence for CBF2 (NM_005760.1,1870-1888).
gaagccaactagatgatca

SEQ ID NO: 23727 - DNA, 19 bp, Homo sapiens
  siRNA target sequence for CBF2 (NM_005760.1,2010-2028).
cctgaaactgatgtagaaa

SEQ ID NO: 23728 - DNA, 19 bp, Homo sapiens
  siRNA target sequence for CBF2 (NM_005760.1,2072-2090).
gaaaggtgggaaacagtta

SEQ ID NO: 23729 - DNA, 19 bp, Homo sapiens
  siRNA target sequence for CBF2 (NM_005760.1,2076-2094).
ggtgggaaacagttaaata

SEQ ID NO: 23730 - DNA, 19 bp, Homo sapiens
  siRNA target sequence for CBF2 (NM_005760.1,2143-2161).
caagtctttgggaactcaa

SEQ ID NO: 23731 - DNA, 19 bp, Homo sapiens
  siRNA target sequence for CBF2 (NM_005760.1,2146-2164).
gtctttgggaactcaaaaa

SEQ ID NO: 23732 - DNA, 19 bp, Homo sapiens
  siRNA target sequence for CBF2 (NM_005760.1,2153-2171).
ggaactcaaaaagttatct

SEQ ID NO: 23733 - DNA, 19 bp, Homo sapiens
  siRNA target sequence for CBF2 (NM_005760.1,2186-2204).
ctccgtggccctttttgca

SEQ ID NO: 23734 - DNA, 19 bp, Homo sapiens
  siRNA target sequence for CBF2 (NM_005760.1,2250-2268).
ctgcaggatttcactctaa

SEQ ID NO: 23735 - DNA, 19 bp, Homo sapiens
  siRNA target sequence for CBF2 (NM_005760.1,2256-2274).
gatttcactctaatgagat

SEQ ID NO: 23736 - DNA, 19 bp, Homo sapiens
  siRNA target sequence for CBF2 (NM_005760.1,2270-2288).
gagatttttggatcgattt

SEQ ID NO: 23737 - DNA, 19 bp, Homo sapiens
  siRNA target sequence for CBF2 (NM_005760.1,2272-2290).
gatttttggatcgatttgt

SEQ ID NO: 23738 - DNA, 19 bp, Homo sapiens
  siRNA target sequence for CBF2 (NM_005760.1,2340-2358).
gtgatgcagccgaaaagaa

SEQ ID NO: 23739 - DNA, 19 bp, Homo sapiens
  siRNA target sequence for CBF2 (NM_005760.1,2382-2400).
catcttcctgtgaacagta

SEQ ID NO: 23740 - DNA, 19 bp, Homo sapiens
  siRNA target sequence for CBF2 (NM_005760.1,2637-2655).
ggagctaaggataacacat

SEQ ID NO: 23741 - DNA, 19 bp, Homo sapiens
  siRNA target sequence for CBF2 (NM_005760.1,2697-2715).
ctggatgacgatgaagttt

SEQ ID NO: 23742 - DNA, 19 bp, Homo sapiens
  siRNA target sequence for CBF2 (NM_005760.1,2705-2723).
cgatgaagtttctttagga

SEQ ID NO: 23743 - DNA, 19 bp, Homo sapiens
  siRNA target sequence for CBF2 (NM_005760.1,2774-2792).
catggatgtgttagatgat

SEQ ID NO: 23744 - DNA, 19 bp, Homo sapiens
  siRNA target sequence for CBF2 (NM_005760.1,2801-2819).
gagcgttccagaacttgaa

SEQ ID NO: 23745 - DNA, 19 bp, Homo sapiens
  siRNA target sequence for CBF2 (NM_005760.1,2803-2821).
gcgttccagaacttgaagt

SEQ ID NO: 23746 - DNA, 19 bp, Homo sapiens
  siRNA target sequence for CBF2 (NM_005760.1,2823-2841).
cactccaaagtcagtacta

SEQ ID NO: 23747 - DNA, 19 bp, Homo sapiens
  siRNA target sequence for CBF2 (NM_005760.1,2854-2872).
gaaaaggtacagatgattt

SEQ ID NO: 23748 - DNA, 19 bp, Homo sapiens
  siRNA target sequence for CBF2 (NM_005760.1,2925-2943).
gattccagcctatttgtat

SEQ ID NO: 23749 - DNA, 19 bp, Homo sapiens
  siRNA target sequence for CBF2 (NM_005760.1,2958-2976).
ggccatctattggatgaaa

SEQ ID NO: 23750 - DNA, 19 bp, Homo sapiens
  siRNA target sequence for CBF2 (NM_005760.1,2959-2977).
gccatctattggatgaaaa

SEQ ID NO: 23751 - DNA, 19 bp, Homo sapiens
  siRNA target sequence for CBF2 (NM_005760.1,2960-2978).
ccatctattggatgaaaat

SEQ ID NO: 23752 - DNA, 19 bp, Homo sapiens
  siRNA target sequence for CBF2 (NM_005760.1,2961-2979).
catctattggatgaaaata

SEQ ID NO: 23753 - DNA, 19 bp, Homo sapiens
  siRNA target sequence for CBF2 (NM_005760.1,2982-3000).
ggatccaagtttgataaca

SEQ ID NO: 23754 - DNA, 19 bp, Homo sapiens
  siRNA target sequence for CCNL1 (NM_020307.1,189-207).
cctgtactcggaagtttca

SEQ ID NO: 23755 - DNA, 19 bp, Homo sapiens
  siRNA target sequence for CCNL1 (NM_020307.1,213-231).
catcgaccactctctgatt

SEQ ID NO: 23756 - DNA, 19 bp, Homo sapiens
  siRNA target sequence for CCNL1 (NM_020307.1,410-428).
ctttcgtcaaacacagttt

SEQ ID NO: 23757 - DNA, 19 bp, Homo sapiens
  siRNA target sequence for CCNL1 (NM_020307.1,425-443).
gtttcgagattgttgctat

SEQ ID NO: 23758 - DNA, 19 bp, Homo sapiens
  siRNA target sequence for CCNL1 (NM_020307.1,449-467).
gtattaatcttgcatcaaa

SEQ ID NO: 23759 - DNA, 19 bp, Homo sapiens
  siRNA target sequence for CCNL1 (NM_020307.1,471-489).
cgaagaagcacctagaaga

SEQ ID NO: 23760 - DNA, 19 bp, Homo sapiens
  siRNA target sequence for CCNL1 (NM_020307.1,514-532).
caccacctccgccagttaa

SEQ ID NO: 23761 - DNA, 19 bp, Homo sapiens
  siRNA target sequence for CCNL1 (NM_020307.1,516-534).
ccacctccgccagttaaga

SEQ ID NO: 23762 - DNA, 19 bp, Homo sapiens
  siRNA target sequence for CCNL1 (NM_020307.1,554-572).
ccctgatccttgatcagaa

SEQ ID NO: 23763 - DNA, 19 bp, Homo sapiens
  siRNA target sequence for CCNL1 (NM_020307.1,573-591).
ctacattaacaccaaaaat

SEQ ID NO: 23764 - DNA, 19 bp, Homo sapiens
  siRNA target sequence for CCNL1 (NM_020307.1,605-623).
cagagaggagggtgctaaa

SEQ ID NO: 23765 - DNA, 19 bp, Homo sapiens
  siRNA target sequence for CCNL1 (NM_020307.1,619-637).
ctaaaggagttgggatttt

SEQ ID NO: 23766 - DNA, 19 bp, Homo sapiens
  siRNA target sequence for CCNL1 (NM_020307.1,632-650).
gattttgtgttcatgtcaa

SEQ ID NO: 23767 - DNA, 19 bp, Homo sapiens
  siRNA target sequence for CCNL1 (NM_020307.1,715-733).
gttcaaactgcctggaatt

SEQ ID NO: 23768 - DNA, 19 bp, Homo sapiens
  siRNA target sequence for CCNL1 (NM_020307.1,746-764).
gtcttcgaaccaatgtgtt

SEQ ID NO: 23769 - DNA, 19 bp, Homo sapiens
  siRNA target sequence for CCNL1 (NM_020307.1,755-773).
ccaatgtgtttgttcgatt

SEQ ID NO: 23770 - DNA, 19 bp, Homo sapiens
  siRNA target sequence for CCNL1 (NM_020307.1,775-793).
caaccagagactatagcat

SEQ ID NO: 23771 - DNA, 19 bp, Homo sapiens
  siRNA target sequence for CCNL1 (NM_020307.1,904-922).
gaaacacttaggctttata

SEQ ID NO: 23772 - DNA, 19 bp, Homo sapiens
  siRNA target sequence for CCNL1 (NM_020307.1,924-942).
cagaaaaaagccaaactat

SEQ ID NO: 23773 - DNA, 19 bp, Homo sapiens
  siRNA target sequence for CCNL1 (NM_020307.1,1024-1042).
ggaactccagccctttcaa

SEQ ID NO: 23774 - DNA, 19 bp, Homo sapiens
  siRNA target sequence for CCNL1 (NM_020307.1,1076-1094).
catcaccaagagaagtaaa

SEQ ID NO: 23775 - DNA, 19 bp, Homo sapiens
  siRNA target sequence for CCNL1 (NM_020307.1,1109-1127).
caccaatctccattaatgt

SEQ ID NO: 23776 - DNA, 19 bp, Homo sapiens
  siRNA target sequence for CCNL1 (NM_020307.1,1166-1184).
cttccaaaagcccttacaa

SEQ ID NO: 23777 - DNA, 19 bp, Homo sapiens
  siRNA target sequence for CCNL1 (NM_020307.1,1176-1194).
cccttacaatggtgtaaga

SEQ ID NO: 23778 - DNA, 19 bp, Homo sapiens
  siRNA target sequence for CCNL1 (NM_020307.1,1301-1319).
ggagtcgatctggaacata

SEQ ID NO: 23779 - DNA, 19 bp, Homo sapiens
  siRNA target sequence for CCNL1 (NM_020307.1,1361-1379).
gccctcgaagacatcataa

SEQ ID NO: 23780 - DNA, 19 bp, Homo sapiens
  siRNA target sequence for CCNL1 (NM_020307.1,1555-1573).
cgatctcgctcctttgaga

SEQ ID NO: 23781 - DNA, 19 bp, Homo sapiens
  siRNA target sequence for CCNL1 (NM_020307.1,1566-1584).
ctttgagaggtcccataaa

SEQ ID NO: 23782 - DNA, 19 bp, Homo sapiens
  siRNA target sequence for CCNL1 (NM_020307.1,1570-1588).
gagaggtcccataaaagca

SEQ ID NO: 23783 - DNA, 19 bp, Homo sapiens
  siRNA target sequence for CDC5L (NM_001253.2,294-312).
ggaataccgaggatgaaat

SEQ ID NO: 23784 - DNA, 19 bp, Homo sapiens
  siRNA target sequence for CDC5L (NM_001253.2,295-313).
gaataccgaggatgaaatt

SEQ ID NO: 23785 - DNA, 19 bp, Homo sapiens
  siRNA target sequence for CDC5L (NM_001253.2,314-332).
ctgaaagcagcggtaatga

SEQ ID NO: 23786 - DNA, 19 bp, Homo sapiens
  siRNA target sequence for CDC5L (NM_001253.2,316-334).
gaaagcagcggtaatgaaa

SEQ ID NO: 23787 - DNA, 19 bp, Homo sapiens
  siRNA target sequence for CDC5L (NM_001253.2,394-412).
gtgcaaagccagatggtat

SEQ ID NO: 23788 - DNA, 19 bp, Homo sapiens
  siRNA target sequence for CDC5L (NM_001253.2,397-415).
caaagccagatggtatgaa

SEQ ID NO: 23789 - DNA, 19 bp, Homo sapiens
  siRNA target sequence for CDC5L (NM_001253.2,422-440).
gatccaagcattaagaaga

SEQ ID NO: 23790 - DNA, 19 bp, Homo sapiens
  siRNA target sequence for CDC5L (NM_001253.2,507-525).
ggaccattgctccaatcat

SEQ ID NO: 23791 - DNA, 19 bp, Homo sapiens
  siRNA target sequence for CDC5L (NM_001253.2,544-562).
gtgcttagaacactatgaa

SEQ ID NO: 23792 - DNA, 19 bp, Homo sapiens
  siRNA target sequence for CDC5L (NM_001253.2,546-564).
gcttagaacactatgaatt

SEQ ID NO: 23793 - DNA, 19 bp, Homo sapiens
  siRNA target sequence for CDC5L (NM_001253.2,547-565).
cttagaacactatgaattt

SEQ ID NO: 23794 - DNA, 19 bp, Homo sapiens
  siRNA target sequence for CDC5L (NM_001253.2,579-597).
ctgcccaaagagacaatga

SEQ ID NO: 23795 - DNA, 19 bp, Homo sapiens
  siRNA target sequence for CDC5L (NM_001253.2,609-627).
cagatgatccacgaaaact

SEQ ID NO: 23796 - DNA, 19 bp, Homo sapiens
  siRNA target sequence for CDC5L (NM_001253.2,611-629).
gatgatccacgaaaactta

SEQ ID NO: 23797 - DNA, 19 bp, Homo sapiens
  siRNA target sequence for CDC5L (NM_001253.2,672-690).
ggcctgatccaattgatat

SEQ ID NO: 23798 - DNA, 19 bp, Homo sapiens
  siRNA target sequence for CDC5L (NM_001253.2,729-747).
cccgcttggctaatactca

SEQ ID NO: 23799 - DNA, 19 bp, Homo sapiens
  siRNA target sequence for CDC5L (NM_001253.2,801-819).
gtcttgctgccctccaaaa

SEQ ID NO: 23800 - DNA, 19 bp, Homo sapiens
  siRNA target sequence for CDC5L (NM_001253.2,839-857).
gctggcatagaaattcaga

SEQ ID NO: 23801 - DNA, 19 bp, Homo sapiens
  siRNA target sequence for CDC5L (NM_001253.2,840-858).
ctggcatagaaattcagaa

SEQ ID NO: 23802 - DNA, 19 bp, Homo sapiens
  siRNA target sequence for CDC5L (NM_001253.2,893-911).
gccgaaatcccatttgaaa

SEQ ID NO: 23803 - DNA, 19 bp, Homo sapiens
  siRNA target sequence for CDC5L (NM_001253.2,894-912).
ccgaaatcccatttgaaaa

SEQ ID NO: 23804 - DNA, 19 bp, Homo sapiens
  siRNA target sequence for CDC5L (NM_001253.2,895-913).
cgaaatcccatttgaaaaa

SEQ ID NO: 23805 - DNA, 19 bp, Homo sapiens
  siRNA target sequence for CDC5L (NM_001253.2,1004-1022).
ggggagctaagatctgaaa

SEQ ID NO: 23806 - DNA, 19 bp, Homo sapiens
  siRNA target sequence for CDC5L (NM_001253.2,1085-1103).
ccatcagctattcttcaaa

SEQ ID NO: 23807 - DNA, 19 bp, Homo sapiens
  siRNA target sequence for CDC5L (NM_001253.2,1104-1122).
ctagtggtgtttctgaatt

SEQ ID NO: 23808 - DNA, 19 bp, Homo sapiens
  siRNA target sequence for CDC5L (NM_001253.2,1109-1127).
ggtgtttctgaatttacta

SEQ ID NO: 23809 - DNA, 19 bp, Homo sapiens
  siRNA target sequence for CDC5L (NM_001253.2,1110-1128).
gtgtttctgaatttactaa

SEQ ID NO: 23810 - DNA, 19 bp, Homo sapiens
  siRNA target sequence for CDC5L (NM_001253.2,1132-1150).
gagaagcaaactagtactt

SEQ ID NO: 23811 - DNA, 19 bp, Homo sapiens
  siRNA target sequence for CDC5L (NM_001253.2,1175-1193).
gaactccaggaagttgtaa

SEQ ID NO: 23812 - DNA, 19 bp, Homo sapiens
  siRNA target sequence for CDC5L (NM_001253.2,1201-1219).
ccaagcgagtgaaattgca

SEQ ID NO: 23813 - DNA, 19 bp, Homo sapiens
  siRNA target sequence for CDC5L (NM_001253.2,1232-1250).
gaggaatctggcataacaa

SEQ ID NO: 23814 - DNA, 19 bp, Homo sapiens
  siRNA target sequence for CDC5L (NM_001253.2,1294-1312).
caacagcgttgctcttaga

SEQ ID NO: 23815 - DNA, 19 bp, Homo sapiens
  siRNA target sequence for CDC5L (NM_001253.2,1297-1315).
cagcgttgctcttagaaca

SEQ ID NO: 23816 - DNA, 19 bp, Homo sapiens
  siRNA target sequence for CDC5L (NM_001253.2,1392-1410).
cattgaaaggtggacttaa

SEQ ID NO: 23817 - DNA, 19 bp, Homo sapiens
  siRNA target sequence for CDC5L (NM_001253.2,1446-1464).
ctccacagcgacaagttgt

SEQ ID NO: 23818 - DNA, 19 bp, Homo sapiens
  siRNA target sequence for CDC5L (NM_001253.2,1449-1467).
cacagcgacaagttgtaca

SEQ ID NO: 23819 - DNA, 19 bp, Homo sapiens
  siRNA target sequence for CDC5L (NM_001253.2,1494-1512).
cattcaggactccttctaa

SEQ ID NO: 23820 - DNA, 19 bp, Homo sapiens
  siRNA target sequence for CDC5L (NM_001253.2,1550-1568).
cccaaaccagttattaact

SEQ ID NO: 23821 - DNA, 19 bp, Homo sapiens
  siRNA target sequence for CDC5L (NM_001253.2,1552-1570).
caaaccagttattaactct

SEQ ID NO: 23822 - DNA, 19 bp, Homo sapiens
  siRNA target sequence for CDC5L (NM_001253.2,1567-1585).
ctctactccgggtagaact

SEQ ID NO: 23823 - DNA, 19 bp, Homo sapiens
  siRNA target sequence for CDC5L (NM_001253.2,1584-1602).
ctcctcttcgagacaagtt

SEQ ID NO: 23824 - DNA, 19 bp, Homo sapiens
  siRNA target sequence for CDC5L (NM_001253.2,1586-1604).
cctcttcgagacaagttaa

SEQ ID NO: 23825 - DNA, 19 bp, Homo sapiens
  siRNA target sequence for CDC5L (NM_001253.2,1623-1641).
gaatggcagactatagtga

SEQ ID NO: 23826 - DNA, 19 bp, Homo sapiens
  siRNA target sequence for CDC5L (NM_001253.2,1668-1686).
gagaatcccgagaacatct

SEQ ID NO: 23827 - DNA, 19 bp, Homo sapiens
  siRNA target sequence for CDC5L (NM_001253.2,1704-1722).
gccttcctgcccctaagaa

SEQ ID NO: 23828 - DNA, 19 bp, Homo sapiens
  siRNA target sequence for CDC5L (NM_001253.2,1705-1723).
ccttcctgcccctaagaat

SEQ ID NO: 23829 - DNA, 19 bp, Homo sapiens
  siRNA target sequence for CDC5L (NM_001253.2,1713-1731).
cccctaagaatgattttga

SEQ ID NO: 23830 - DNA, 19 bp, Homo sapiens
  siRNA target sequence for CDC5L (NM_001253.2,1765-1783).
ggaagaacgtgaaatagat

SEQ ID NO: 23831 - DNA, 19 bp, Homo sapiens
  siRNA target sequence for CDC5L (NM_001253.2,1772-1790).
cgtgaaatagatgatactt

SEQ ID NO: 23832 - DNA, 19 bp, Homo sapiens
  siRNA target sequence for CDC5L (NM_001253.2,1773-1791).
gtgaaatagatgatactta

SEQ ID NO: 23833 - DNA, 19 bp, Homo sapiens
  siRNA target sequence for CDC5L (NM_001253.2,1836-1854).
gagatgcagagcgtgtaaa

SEQ ID NO: 23834 - DNA, 19 bp, Homo sapiens
  siRNA target sequence for CDC5L (NM_001253.2,1841-1859).
gcagagcgtgtaaaggaaa

SEQ ID NO: 23835 - DNA, 19 bp, Homo sapiens
  siRNA target sequence for CDC5L (NM_001253.2,1842-1860).
cagagcgtgtaaaggaaat

SEQ ID NO: 23836 - DNA, 19 bp, Homo sapiens
  siRNA target sequence for CDC5L (NM_001253.2,1844-1862).
gagcgtgtaaaggaaatga

SEQ ID NO: 23837 - DNA, 19 bp, Homo sapiens
  siRNA target sequence for CDC5L (NM_001253.2,1846-1864).
gcgtgtaaaggaaatgaaa

SEQ ID NO: 23838 - DNA, 19 bp, Homo sapiens
  siRNA target sequence for CDC5L (NM_001253.2,1895-1913).
ccaagaccatcagaagtaa

SEQ ID NO: 23839 - DNA, 19 bp, Homo sapiens
  siRNA target sequence for CDC5L (NM_001253.2,1943-1961).
gaaccgcctttaacagatt

SEQ ID NO: 23840 - DNA, 19 bp, Homo sapiens
  siRNA target sequence for CDC5L (NM_001253.2,1947-1965).
cgcctttaacagatttaca

SEQ ID NO: 23841 - DNA, 19 bp, Homo sapiens
  siRNA target sequence for CDC5L (NM_001253.2,1949-1967).
cctttaacagatttacaga

SEQ ID NO: 23842 - DNA, 19 bp, Homo sapiens
  siRNA target sequence for CDC5L (NM_001253.2,1996-2014).
gatcacaatgcttcattat

SEQ ID NO: 23843 - DNA, 19 bp, Homo sapiens
  siRNA target sequence for CDC5L (NM_001253.2,2066-2084).
gtagggtttggtaccaata

SEQ ID NO: 23844 - DNA, 19 bp, Homo sapiens
  siRNA target sequence for CDC5L (NM_001253.2,2069-2087).
gggtttggtaccaataatt

SEQ ID NO: 23845 - DNA, 19 bp, Homo sapiens
  siRNA target sequence for CDC5L (NM_001253.2,2071-2089).
gtttggtaccaataattca

SEQ ID NO: 23846 - DNA, 19 bp, Homo sapiens
  siRNA target sequence for CDC5L (NM_001253.2,2107-2125).
ggaacataatccttatgaa

SEQ ID NO: 23847 - DNA, 19 bp, Homo sapiens
  siRNA target sequence for CDC5L (NM_001253.2,2176-2194).
gatggaagtggttaaacaa

SEQ ID NO: 23848 - DNA, 19 bp, Homo sapiens
  siRNA target sequence for CDC5L (NM_001253.2,2212-2230).
gctctcaagtgaagcttat

SEQ ID NO: 23849 - DNA, 19 bp, Homo sapiens
  siRNA target sequence for CDC5L (NM_001253.2,2213-2231).
ctctcaagtgaagcttata

SEQ ID NO: 23850 - DNA, 19 bp, Homo sapiens
  siRNA target sequence for CDC5L (NM_001253.2,2217-2235).
caagtgaagcttataacca

SEQ ID NO: 23851 - DNA, 19 bp, Homo sapiens
  siRNA target sequence for CDC5L (NM_001253.2,2295-2313).
gggccaatctggctagtaa

SEQ ID NO: 23852 - DNA, 19 bp, Homo sapiens
  siRNA target sequence for CDC5L (NM_001253.2,2439-2457).
gtgctatggggctcatgaa

SEQ ID NO: 23853 - DNA, 19 bp, Homo sapiens
  siRNA target sequence for CDC5L (NM_001253.2,2578-2596).
cgttcagcgacaacaagaa

SEQ ID NO: 23854 - DNA, 19 bp, Homo sapiens
  siRNA target sequence for CEBPG (NM_001806.2,326-344).
gtgaacggaattagtgtta

SEQ ID NO: 23855 - DNA, 19 bp, Homo sapiens
  siRNA target sequence for CEBPG (NM_001806.2,453-471).
gttcgcccatggatcgaaa

SEQ ID NO: 23856 - DNA, 19 bp, Homo sapiens
  siRNA target sequence for CEBPG (NM_001806.2,457-475).
gcccatggatcgaaacagt

SEQ ID NO: 23857 - DNA, 19 bp, Homo sapiens
  siRNA target sequence for CEBPG (NM_001806.2,491-509).
cgccgagagaggaacaaca

SEQ ID NO: 23858 - DNA, 19 bp, Homo sapiens
  siRNA target sequence for CEBPG (NM_001806.2,517-535).
gaaaaagagccggttgaaa

SEQ ID NO: 23859 - DNA, 19 bp, Homo sapiens
  siRNA target sequence for CEBPG (NM_001806.2,593-611).
gaacggttggaagcaaaaa

SEQ ID NO: 23860 - DNA, 19 bp, Homo sapiens
  siRNA target sequence for CEBPG (NM_001806.2,596-614).
cggttggaagcaaaaatca

SEQ ID NO: 23861 - DNA, 19 bp, Homo sapiens
  siRNA target sequence for CEBPG (NM_001806.2,619-637).
gctgaccaaggaattaagt

SEQ ID NO: 23862 - DNA, 19 bp, Homo sapiens
  siRNA target sequence for CEBPG (NM_001806.2,622-640).
gaccaaggaattaagtgta

SEQ ID NO: 23863 - DNA, 19 bp, Homo sapiens
  siRNA target sequence for CEBPG (NM_001806.2,680-698).
gacaacgtacagtccatta

SEQ ID NO: 23864 - DNA, 19 bp, Homo sapiens
  siRNA target sequence for CEBPG (NM_001806.2,691-709).
gtccattagcactgaaaat

SEQ ID NO: 23865 - DNA, 19 bp, Homo sapiens
  siRNA target sequence for CENPC1 (NM_001812.1,164-182).
cgtccggtctggatcatct

SEQ ID NO: 23866 - DNA, 19 bp, Homo sapiens
  siRNA target sequence for CENPC1 (NM_001812.1,218-236).
ccagggcacgtgacattaa

SEQ ID NO: 23867 - DNA, 19 bp, Homo sapiens
  siRNA target sequence for CENPC1 (NM_001812.1,393-411).
gaaatcacatccaaagtca

SEQ ID NO: 23868 - DNA, 19 bp, Homo sapiens
  siRNA target sequence for CENPC1 (NM_001812.1,443-461).
ctctacagtttgttgtaga

SEQ ID NO: 23869 - DNA, 19 bp, Homo sapiens
  siRNA target sequence for CENPC1 (NM_001812.1,485-503).
cagttcaggcccatgaagt

SEQ ID NO: 23870 - DNA, 19 bp, Homo sapiens
  siRNA target sequence for CENPC1 (NM_001812.1,510-528).
gaaaattctggcaactgat

SEQ ID NO: 23871 - DNA, 19 bp, Homo sapiens
  siRNA target sequence for CENPC1 (NM_001812.1,517-535).
ctggcaactgatgttagtt

SEQ ID NO: 23872 - DNA, 19 bp, Homo sapiens
  siRNA target sequence for CENPC1 (NM_001812.1,625-643).
ggctcaccttctgttcttt

SEQ ID NO: 23873 - DNA, 19 bp, Homo sapiens
  siRNA target sequence for CENPC1 (NM_001812.1,696-714).
gagagagacttacactttt

SEQ ID NO: 23874 - DNA, 19 bp, Homo sapiens
  siRNA target sequence for CENPC1 (NM_001812.1,784-802).
gatgataaagttatgttaa

SEQ ID NO: 23875 - DNA, 19 bp, Homo sapiens
  siRNA target sequence for CENPC1 (NM_001812.1,878-896).
gatcatctcagaatagaat

SEQ ID NO: 23876 - DNA, 19 bp, Homo sapiens
  siRNA target sequence for CENPC1 (NM_001812.1,893-911).
gaatacgagattcagaata

SEQ ID NO: 23877 - DNA, 19 bp, Homo sapiens
  siRNA target sequence for CENPC1 (NM_001812.1,922-940).
cgacaagctaaaaaaagtt

SEQ ID NO: 23878 - DNA, 19 bp, Homo sapiens
  siRNA target sequence for CENPC1 (NM_001812.1,923-941).
gacaagctaaaaaaagttt

SEQ ID NO: 23879 - DNA, 19 bp, Homo sapiens
  siRNA target sequence for CENPC1 (NM_001812.1,979-997).
gaatccagtcccattgtta

SEQ ID NO: 23880 - DNA, 19 bp, Homo sapiens
  siRNA target sequence for CENPC1 (NM_001812.1,1028-1046).
gtcctcccgatgatacgaa

SEQ ID NO: 23881 - DNA, 19 bp, Homo sapiens
  siRNA target sequence for CENPC1 (NM_001812.1,1033-1051).
cccgatgatacgaagttga

SEQ ID NO: 23882 - DNA, 19 bp, Homo sapiens
  siRNA target sequence for CENPC1 (NM_001812.1,1034-1052).
ccgatgatacgaagttgat

SEQ ID NO: 23883 - DNA, 19 bp, Homo sapiens
  siRNA target sequence for CENPC1 (NM_001812.1,1050-1068).
gatagaggatgaatttata

SEQ ID NO: 23884 - DNA, 19 bp, Homo sapiens
  siRNA target sequence for CENPC1 (NM_001812.1,1072-1090).
gatgagtcggatcaaagtt

SEQ ID NO: 23885 - DNA, 19 bp, Homo sapiens
  siRNA target sequence for CENPC1 (NM_001812.1,1097-1115).
gtagatcttggattacaat

SEQ ID NO: 23886 - DNA, 19 bp, Homo sapiens
  siRNA target sequence for CENPC1 (NM_001812.1,1125-1143).
ggcagggtctctgaaacaa

SEQ ID NO: 23887 - DNA, 19 bp, Homo sapiens
  siRNA target sequence for CENPC1 (NM_001812.1,1135-1153).
ctgaaacaacgcacaatat

SEQ ID NO: 23888 - DNA, 19 bp, Homo sapiens
  siRNA target sequence for CENPC1 (NM_001812.1,1224-1242).
gactttggcaaatgacaaa

SEQ ID NO: 23889 - DNA, 19 bp, Homo sapiens
  siRNA target sequence for CENPC1 (NM_001812.1,1226-1244).
ctttggcaaatgacaaaca

SEQ ID NO: 23890 - DNA, 19 bp, Homo sapiens
  siRNA target sequence for CENPC1 (NM_001812.1,1278-1296).
gccctctgataaaacagta

SEQ ID NO: 23891 - DNA, 19 bp, Homo sapiens
  siRNA target sequence for CENPC1 (NM_001812.1,1297-1315).
ctggatacaagttatgctt

SEQ ID NO: 23892 - DNA, 19 bp, Homo sapiens
  siRNA target sequence for CENPC1 (NM_001812.1,1394-1412).
gcaaaaggactataaaaca

SEQ ID NO: 23893 - DNA, 19 bp, Homo sapiens
  siRNA target sequence for CENPC1 (NM_001812.1,1470-1488).
gtctaaagatgaaaacata

SEQ ID NO: 23894 - DNA, 19 bp, Homo sapiens
  siRNA target sequence for CENPC1 (NM_001812.1,1506-1524).
ccaagacgaatttcaaaga

SEQ ID NO: 23895 - DNA, 19 bp, Homo sapiens
  siRNA target sequence for CENPC1 (NM_001812.1,1507-1525).
caagacgaatttcaaagaa

SEQ ID NO: 23896 - DNA, 19 bp, Homo sapiens
  siRNA target sequence for CENPC1 (NM_001812.1,1512-1530).
cgaatttcaaagaaattca

SEQ ID NO: 23897 - DNA, 19 bp, Homo sapiens
  siRNA target sequence for CENPC1 (NM_001812.1,1562-1580).
gaaatgattgtgtttccaa

SEQ ID NO: 23898 - DNA, 19 bp, Homo sapiens
  siRNA target sequence for CENPC1 (NM_001812.1,1608-1626).
gaaaagtagcactagaaaa

SEQ ID NO: 23899 - DNA, 19 bp, Homo sapiens
  siRNA target sequence for CENPC1 (NM_001812.1,1739-1757).
ctgattggtgggtggtaaa

SEQ ID NO: 23900 - DNA, 19 bp, Homo sapiens
  siRNA target sequence for CENPC1 (NM_001812.1,1745-1763).
ggtgggtggtaaaatcaga

SEQ ID NO: 23901 - DNA, 19 bp, Homo sapiens
  siRNA target sequence for CENPC1 (NM_001812.1,1767-1785).
gagtcctgtttatagcaat

SEQ ID NO: 23902 - DNA, 19 bp, Homo sapiens
  siRNA target sequence for CENPC1 (NM_001812.1,1771-1789).
cctgtttatagcaattctt

SEQ ID NO: 23903 - DNA, 19 bp, Homo sapiens
  siRNA target sequence for CENPC1 (NM_001812.1,1782-1800).
caattcttcagtaagaaat

SEQ ID NO: 23904 - DNA, 19 bp, Homo sapiens
  siRNA target sequence for CENPC1 (NM_001812.1,1807-1825).
ccaatgcatcacaatagta

SEQ ID NO: 23905 - DNA, 19 bp, Homo sapiens
  siRNA target sequence for CENPC1 (NM_001812.1,1816-1834).
cacaatagtagccgaaaat

SEQ ID NO: 23906 - DNA, 19 bp, Homo sapiens
  siRNA target sequence for CENPC1 (NM_001812.1,1818-1836).
caatagtagccgaaaatct

SEQ ID NO: 23907 - DNA, 19 bp, Homo sapiens
  siRNA target sequence for CENPC1 (NM_001812.1,1823-1841).
gtagccgaaaatctactaa

SEQ ID NO: 23908 - DNA, 19 bp, Homo sapiens
  siRNA target sequence for CENPC1 (NM_001812.1,1852-1870).
cagtcatctaagaatatta

SEQ ID NO: 23909 - DNA, 19 bp, Homo sapiens
  siRNA target sequence for CENPC1 (NM_001812.1,1906-1924).
gcaactaaaggcaaccaaa

SEQ ID NO: 23910 - DNA, 19 bp, Homo sapiens
  siRNA target sequence for CENPC1 (NM_001812.1,1910-1928).
ctaaaggcaaccaaagagt

SEQ ID NO: 23911 - DNA, 19 bp, Homo sapiens
  siRNA target sequence for CENPC1 (NM_001812.1,1961-1979).
gtatcgttggtcatgatga

SEQ ID NO: 23912 - DNA, 19 bp, Homo sapiens
  siRNA target sequence for CENPC1 (NM_001812.1,1965-1983).
cgttggtcatgatgaaatt

SEQ ID NO: 23913 - DNA, 19 bp, Homo sapiens
  siRNA target sequence for CENPC1 (NM_001812.1,1966-1984).
gttggtcatgatgaaattt

SEQ ID NO: 23914 - DNA, 19 bp, Homo sapiens
  siRNA target sequence for CENPC1 (NM_001812.1,2047-2065).
cttgattgttctagatcta

SEQ ID NO: 23915 - DNA, 19 bp, Homo sapiens
  siRNA target sequence for CENPC1 (NM_001812.1,2050-2068).
gattgttctagatctacaa

SEQ ID NO: 23916 - DNA, 19 bp, Homo sapiens
  siRNA target sequence for CENPC1 (NM_001812.1,2122-2140).
cctcagaccagtggatata

SEQ ID NO: 23917 - DNA, 19 bp, Homo sapiens
  siRNA target sequence for CENPC1 (NM_001812.1,2127-2145).
gaccagtggatatacatgt

SEQ ID NO: 23918 - DNA, 19 bp, Homo sapiens
  siRNA target sequence for CENPC1 (NM_001812.1,2216-2234).
ccaggctcaataataatta

SEQ ID NO: 23919 - DNA, 19 bp, Homo sapiens
  siRNA target sequence for CENPC1 (NM_001812.1,2219-2237).
ggctcaataataattattt

SEQ ID NO: 23920 - DNA, 19 bp, Homo sapiens
  siRNA target sequence for CENPC1 (NM_001812.1,2282-2300).
gttcagatgactcaaaaca

SEQ ID NO: 23921 - DNA, 19 bp, Homo sapiens
  siRNA target sequence for CENPC1 (NM_001812.1,2287-2305).
gatgactcaaaacaatcta

SEQ ID NO: 23922 - DNA, 19 bp, Homo sapiens
  siRNA target sequence for CENPC1 (NM_001812.1,2299-2317).
caatctaaagtgataccaa

SEQ ID NO: 23923 - DNA, 19 bp, Homo sapiens
  siRNA target sequence for CENPC1 (NM_001812.1,2324-2342).
gaatccatcacaaactagt

SEQ ID NO: 23924 - DNA, 19 bp, Homo sapiens
  siRNA target sequence for CENPC1 (NM_001812.1,2349-2367).
ctccaacacaccaaatgtt

SEQ ID NO: 23925 - DNA, 19 bp, Homo sapiens
  siRNA target sequence for CENPC1 (NM_001812.1,2365-2383).
gttcgcaggaccaagagaa

SEQ ID NO: 23926 - DNA, 19 bp, Homo sapiens
  siRNA target sequence for CENPC1 (NM_001812.1,2375-2393).
ccaagagaacacgtttgaa

SEQ ID NO: 23927 - DNA, 19 bp, Homo sapiens
  siRNA target sequence for CENPC1 (NM_001812.1,2376-2394).
caagagaacacgtttgaaa

SEQ ID NO: 23928 - DNA, 19 bp, Homo sapiens
  siRNA target sequence for CENPC1 (NM_001812.1,2408-2426).
ggcgaggagagcgaataga

SEQ ID NO: 23929 - DNA, 19 bp, Homo sapiens
  siRNA target sequence for CENPC1 (NM_001812.1,2414-2432).
gagagcgaatagattatca

SEQ ID NO: 23930 - DNA, 19 bp, Homo sapiens
  siRNA target sequence for CENPC1 (NM_001812.1,2454-2472).
cgtgattagtggagtacta

SEQ ID NO: 23931 - DNA, 19 bp, Homo sapiens
  siRNA target sequence for CENPC1 (NM_001812.1,2455-2473).
gtgattagtggagtactat

SEQ ID NO: 23932 - DNA, 19 bp, Homo sapiens
  siRNA target sequence for CENPC1 (NM_001812.1,2457-2475).
gattagtggagtactatct

SEQ ID NO: 23933 - DNA, 19 bp, Homo sapiens
  siRNA target sequence for CENPC1 (NM_001812.1,2479-2497).
gacacaatatcgtctaaaa

SEQ ID NO: 23934 - DNA, 19 bp, Homo sapiens
  siRNA target sequence for CENPC1 (NM_001812.1,2483-2501).
caatatcgtctaaaaggaa

SEQ ID NO: 23935 - DNA, 19 bp, Homo sapiens
  siRNA target sequence for CENPC1 (NM_001812.1,2549-2567).
ggatctgtcttgataacga

SEQ ID NO: 23936 - DNA, 19 bp, Homo sapiens
  siRNA target sequence for CENPC1 (NM_001812.1,2550-2568).
gatctgtcttgataacgat

SEQ ID NO: 23937 - DNA, 19 bp, Homo sapiens
  siRNA target sequence for CENPC1 (NM_001812.1,2557-2575).
cttgataacgatgaaagaa

SEQ ID NO: 23938 - DNA, 19 bp, Homo sapiens
  siRNA target sequence for CENPC1 (NM_001812.1,2589-2607).
ggtaaatctaggtatacct

SEQ ID NO: 23939 - DNA, 19 bp, Homo sapiens
  siRNA target sequence for CENPC1 (NM_001812.1,2635-2653).
gtaaaggacccagaaacaa

SEQ ID NO: 23940 - DNA, 19 bp, Homo sapiens
  siRNA target sequence for CENPC1 (NM_001812.1,2681-2699).
ggccacaagatacatatca

SEQ ID NO: 23941 - DNA, 19 bp, Homo sapiens
  siRNA target sequence for CENPC1 (NM_001812.1,2682-2700).
gccacaagatacatatcaa

SEQ ID NO: 23942 - DNA, 19 bp, Homo sapiens
  siRNA target sequence for CENPC1 (NM_001812.1,2683-2701).
ccacaagatacatatcaat

SEQ ID NO: 23943 - DNA, 19 bp, Homo sapiens
  siRNA target sequence for CENPC1 (NM_001812.1,2716-2734).
ggtgagttgaaggtataca

SEQ ID NO: 23944 - DNA, 19 bp, Homo sapiens
  siRNA target sequence for CENPC1 (NM_001812.1,2717-2735).
gtgagttgaaggtatacaa

SEQ ID NO: 23945 - DNA, 19 bp, Homo sapiens
  siRNA target sequence for CENPC1 (NM_001812.1,2719-2737).
gagttgaaggtatacaaga

SEQ ID NO: 23946 - DNA, 19 bp, Homo sapiens
  siRNA target sequence for CENPC1 (NM_001812.1,2728-2746).
gtatacaagacattggata

SEQ ID NO: 23947 - DNA, 19 bp, Homo sapiens
  siRNA target sequence for CENPC1 (NM_001812.1,2738-2756).
cattggatacacccttttt

SEQ ID NO: 23948 - DNA, 19 bp, Homo sapiens
  siRNA target sequence for CENPC1 (NM_001812.1,2772-2790).
gatattaggaccacaagaa

SEQ ID NO: 23949 - DNA, 19 bp, Homo sapiens
  siRNA target sequence for CENPC1 (NM_001812.1,2805-2823).
gcatgttggccaggatata

SEQ ID NO: 23950 - DNA, 19 bp, Homo sapiens
  siRNA target sequence for CENPC1 (NM_001812.1,2812-2830).
ggccaggatatattggttt

SEQ ID NO: 23951 - DNA, 19 bp, Homo sapiens
  siRNA target sequence for CENPC1 (NM_001812.1,2815-2833).
caggatatattggtttttt

SEQ ID NO: 23952 - DNA, 19 bp, Homo sapiens
  siRNA target sequence for CENPC1 (NM_001812.1,2817-2835).
ggatatattggttttttat

SEQ ID NO: 23953 - DNA, 19 bp, Homo sapiens
  siRNA target sequence for CENPC1 (NM_001812.1,2845-2863).
ggtgaccttttgtgtactt

SEQ ID NO: 23954 - DNA, 19 bp, Homo sapiens
  siRNA target sequence for CENPC1 (NM_001812.1,2911-2929).
ccttcaggtaactattata

SEQ ID NO: 23955 - DNA, 19 bp, Homo sapiens
  siRNA target sequence for CENPC1 (NM_001812.1,2912-2930).
cttcaggtaactattataa

SEQ ID NO: 23956 - DNA, 19 bp, Homo sapiens
  siRNA target sequence for CENPC1 (NM_001812.1,2915-2933).
caggtaactattataacat

SEQ ID NO: 23957 - DNA, 19 bp, Homo sapiens
  siRNA target sequence for CENPC1 (NM_001812.1,2917-2935).
ggtaactattataacatca

SEQ ID NO: 23958 - DNA, 19 bp, Homo sapiens
  siRNA target sequence for CENPC1 (NM_001812.1,2943-2961).
ccggaatgaggaaagtgtt

SEQ ID NO: 23959 - DNA, 19 bp, Homo sapiens
  siRNA target sequence for CENPC1 (NM_001812.1,2962-2980).
cttctttttactcagataa

SEQ ID NO: 23960 - DNA, 19 bp, Homo sapiens
  siRNA target sequence for CENTA1 (NM_006869.1,314-332).
cgggaatccaccggaatat

SEQ ID NO: 23961 - DNA, 19 bp, Homo sapiens
  siRNA target sequence for CENTA1 (NM_006869.1,421-439).
gcgagagccaggtttgagt

SEQ ID NO: 23962 - DNA, 19 bp, Homo sapiens
  siRNA target sequence for CENTA1 (NM_006869.1,601-619).
cgggacaacgggcagtttt

SEQ ID NO: 23963 - DNA, 19 bp, Homo sapiens
  siRNA target sequence for CENTA1 (NM_006869.1,604-622).
gacaacgggcagtttttga

SEQ ID NO: 23964 - DNA, 19 bp, Homo sapiens
  siRNA target sequence for CENTA1 (NM_006869.1,652-670).
ggtgctctgaagtatttca

SEQ ID NO: 23965 - DNA, 19 bp, Homo sapiens
  siRNA target sequence for CENTA1 (NM_006869.1,791-809).
gcacccgtaacatcttcat

SEQ ID NO: 23966 - DNA, 19 bp, Homo sapiens
  siRNA target sequence for CENTA1 (NM_006869.1,794-812).
cccgtaacatcttcatcta

SEQ ID NO: 23967 - DNA, 19 bp, Homo sapiens
  siRNA target sequence for CENTA1 (NM_006869.1,1058-1076).
cccgaggggaagtcttcat

SEQ ID NO: 23968 - DNA, 19 bp, Homo sapiens
  siRNA target sequence for CENTA1 (NM_006869.1,1059-1077).
ccgaggggaagtcttcatt

SEQ ID NO: 23969 - DNA, 19 bp, Homo sapiens
  siRNA target sequence for CENTA1 (NM_006869.1,1164-1182).
cacgcccgaccgcaagttt

SEQ ID NO: 23970 - DNA, 19 bp, Homo sapiens
  siRNA target sequence for CENTA1 (NM_006869.1,1166-1184).
cgcccgaccgcaagtttct

SEQ ID NO: 23971 - DNA, 19 bp, Homo sapiens
  siRNA target sequence for CENTA1 (NM_006869.1,1168-1186).
cccgaccgcaagtttctgt

SEQ ID NO: 23972 - DNA, 19 bp, Homo sapiens
  siRNA target sequence for CENTA1 (NM_006869.1,1169-1187).
ccgaccgcaagtttctgtt

SEQ ID NO: 23973 - DNA, 19 bp, Homo sapiens
  siRNA target sequence for CENTA1 (NM_006869.1,1170-1188).
cgaccgcaagtttctgttt

SEQ ID NO: 23974 - DNA, 19 bp, Homo sapiens
  siRNA target sequence for CENTA1 (NM_006869.1,1274-1292).
cagtggaggcgcacttcaa

SEQ ID NO: 23975 - DNA, 19 bp, Homo sapiens
  siRNA target sequence for CENTA1 (NM_006869.1,1279-1297).
gaggcgcacttcaagcata

SEQ ID NO: 23976 - DNA, 19 bp, Homo sapiens
  siRNA target sequence for CENTA1 (NM_006869.1,1281-1299).
ggcgcacttcaagcataaa

SEQ ID NO: 23977 - DNA, 19 bp, Homo sapiens
  siRNA target sequence for CENTA2 (NM_018404.1,107-125).
gatcgcgagcgcaacaaga

SEQ ID NO: 23978 - DNA, 19 bp, Homo sapiens
  siRNA target sequence for CENTA2 (NM_018404.1,246-264).
gcggcgtccaccgtaactt

SEQ ID NO: 23979 - DNA, 19 bp, Homo sapiens
  siRNA target sequence for CENTA2 (NM_018404.1,266-284).
cctgacatcagcagagtta

SEQ ID NO: 23980 - DNA, 19 bp, Homo sapiens
  siRNA target sequence for CENTA2 (NM_018404.1,301-319).
cttctgggacgacagtatt

SEQ ID NO: 23981 - DNA, 19 bp, Homo sapiens
  siRNA target sequence for CENTA2 (NM_018404.1,311-329).
gacagtattgtggagttta

SEQ ID NO: 23982 - DNA, 19 bp, Homo sapiens
  siRNA target sequence for CENTA2 (NM_018404.1,315-333).
gtattgtggagtttatgat

SEQ ID NO: 23983 - DNA, 19 bp, Homo sapiens
  siRNA target sequence for CENTA2 (NM_018404.1,372-390).
ccagagtcccagctttcta

SEQ ID NO: 23984 - DNA, 19 bp, Homo sapiens
  siRNA target sequence for CENTA2 (NM_018404.1,375-393).
gagtcccagctttctacta

SEQ ID NO: 23985 - DNA, 19 bp, Homo sapiens
  siRNA target sequence for CENTA2 (NM_018404.1,412-430).
ctgcctggtcttaaaggaa

SEQ ID NO: 23986 - DNA, 19 bp, Homo sapiens
  siRNA target sequence for CENTA2 (NM_018404.1,435-453).
ggattcgagctaagtatga

SEQ ID NO: 23987 - DNA, 19 bp, Homo sapiens
  siRNA target sequence for CENTA2 (NM_018404.1,726-744).
ggaacctgtttgtgtatca

SEQ ID NO: 23988 - DNA, 19 bp, Homo sapiens
  siRNA target sequence for CENTA2 (NM_018404.1,793-811).
ccgtctgcagtacctaaaa

SEQ ID NO: 23989 - DNA, 19 bp, Homo sapiens
  siRNA target sequence for CENTA2 (NM_018404.1,794-812).
cgtctgcagtacctaaaaa

SEQ ID NO: 23990 - DNA, 19 bp, Homo sapiens
  siRNA target sequence for CENTA2 (NM_018404.1,950-968).
gagcggaggctgctctatt

SEQ ID NO: 23991 - DNA, 19 bp, Homo sapiens
  siRNA target sequence for CENTA2 (NM_018404.1,953-971).
cggaggctgctctattaca

SEQ ID NO: 23992 - DNA, 19 bp, Homo sapiens
  siRNA target sequence for CENTA2 (NM_018404.1,954-972).
ggaggctgctctattacaa

SEQ ID NO: 23993 - DNA, 19 bp, Homo sapiens
  siRNA target sequence for CENTA2 (NM_018404.1,991-1009).
cgagcagggccaggttttt

SEQ ID NO: 23994 - DNA, 19 bp, Homo sapiens
  siRNA target sequence for CENTA2 (NM_018404.1,1082-1100).
gccggactcaccattgtca

SEQ ID NO: 23995 - DNA, 19 bp, Homo sapiens
  siRNA target sequence for CENTA2 (NM_018404.1,1204-1222).
ccggcttactgcatcaaca

SEQ ID NO: 23996 - DNA, 19 bp, Homo sapiens
  siRNA target sequence for CENTB1 (NM_014716.1,233-251).
ccgtttccgagcctctatt

SEQ ID NO: 23997 - DNA, 19 bp, Homo sapiens
  siRNA target sequence for CENTB1 (NM_014716.1,235-253).
gtttccgagcctctattga

SEQ ID NO: 23998 - DNA, 19 bp, Homo sapiens
  siRNA target sequence for CENTB1 (NM_014716.1,265-283).
ccgaagtgtcagaattgga

SEQ ID NO: 23999 - DNA, 19 bp, Homo sapiens
  siRNA target sequence for CENTB1 (NM_014716.1,362-380).
cttcgttgtcggcatttgt

SEQ ID NO: 24000 - DNA, 19 bp, Homo sapiens
  siRNA target sequence for CENTB1 (NM_014716.1,416-434).
ggcggagtgtctggaaaaa

SEQ ID NO: 24001 - DNA, 19 bp, Homo sapiens
  siRNA target sequence for CENTB1 (NM_014716.1,417-435).
gcggagtgtctggaaaaat

SEQ ID NO: 24002 - DNA, 19 bp, Homo sapiens
  siRNA target sequence for CENTB1 (NM_014716.1,688-706).
ggggacgggcactggatta

SEQ ID NO: 24003 - DNA, 19 bp, Homo sapiens
  siRNA target sequence for CENTB1 (NM_014716.1,689-707).
gggacgggcactggattat

SEQ ID NO: 24004 - DNA, 19 bp, Homo sapiens
  siRNA target sequence for CENTB1 (NM_014716.1,910-928).
gacacgtgctgctgaaaca

SEQ ID NO: 24005 - DNA, 19 bp, Homo sapiens
  siRNA target sequence for CENTB1 (NM_014716.1,1011-1029).
cgggccagcaacgcattta

SEQ ID NO: 24006 - DNA, 19 bp, Homo sapiens
  siRNA target sequence for CENTB1 (NM_014716.1,1063-1081).
gcaaccaactggtttacca

SEQ ID NO: 24007 - DNA, 19 bp, Homo sapiens
  siRNA target sequence for CENTB1 (NM_014716.1,1279-1297).
gtcaggctcgccttgatga

SEQ ID NO: 24008 - DNA, 19 bp, Homo sapiens
  siRNA target sequence for CENTB1 (NM_014716.1,1579-1597).
catgggagccagaactagt

SEQ ID NO: 24009 - DNA, 19 bp, Homo sapiens
  siRNA target sequence for CENTB1 (NM_014716.1,1710-1728).
gcctggattcacgctaaat

SEQ ID NO: 24010 - DNA, 19 bp, Homo sapiens
  siRNA target sequence for CENTB1 (NM_014716.1,1711-1729).
cctggattcacgctaaata

SEQ ID NO: 24011 - DNA, 19 bp, Homo sapiens
  siRNA target sequence for CENTB1 (NM_014716.1,1714-1732).
ggattcacgctaaatacgt

SEQ ID NO: 24012 - DNA, 19 bp, Homo sapiens
  siRNA target sequence for CENTB1 (NM_014716.1,1748-1766).
gaccaagctgcctgagatt

SEQ ID NO: 24013 - DNA, 19 bp, Homo sapiens
  siRNA target sequence for CENTB1 (NM_014716.1,2030-2048).
cacagctgctaattctctt

SEQ ID NO: 24014 - DNA, 19 bp, Homo sapiens
  siRNA target sequence for CENTB1 (NM_014716.1,2117-2135).
gctgcaccacgcaaccatt

SEQ ID NO: 24015 - DNA, 19 bp, Homo sapiens
  siRNA target sequence for CENTB1 (NM_014716.1,2262-2280).
ctacgactggcaaagatga

SEQ ID NO: 24016 - DNA, 19 bp, Homo sapiens
  siRNA target sequence for CENTB2 (NM_012287.3,327-345).
gccttttgtgttgcaaata

SEQ ID NO: 24017 - DNA, 19 bp, Homo sapiens
  siRNA target sequence for CENTB2 (NM_012287.3,328-346).
ccttttgtgttgcaaataa

SEQ ID NO: 24018 - DNA, 19 bp, Homo sapiens
  siRNA target sequence for CENTB2 (NM_012287.3,329-347).
cttttgtgttgcaaataaa

SEQ ID NO: 24019 - DNA, 19 bp, Homo sapiens
  siRNA target sequence for CENTB2 (NM_012287.3,369-387).
gacctggctcagtattcta

SEQ ID NO: 24020 - DNA, 19 bp, Homo sapiens
  siRNA target sequence for CENTB2 (NM_012287.3,371-389).
cctggctcagtattctagt

SEQ ID NO: 24021 - DNA, 19 bp, Homo sapiens
  siRNA target sequence for CENTB2 (NM_012287.3,372-390).
ctggctcagtattctagta

SEQ ID NO: 24022 - DNA, 19 bp, Homo sapiens
  siRNA target sequence for CENTB2 (NM_012287.3,376-394).
ctcagtattctagtaatga

SEQ ID NO: 24023 - DNA, 19 bp, Homo sapiens
  siRNA target sequence for CENTB2 (NM_012287.3,396-414).
gctgtcgttgagacaagtt

SEQ ID NO: 24024 - DNA, 19 bp, Homo sapiens
  siRNA target sequence for CENTB2 (NM_012287.3,397-415).
ctgtcgttgagacaagttt

SEQ ID NO: 24025 - DNA, 19 bp, Homo sapiens
  siRNA target sequence for CENTB2 (NM_012287.3,399-417).
gtcgttgagacaagtttga

SEQ ID NO: 24026 - DNA, 19 bp, Homo sapiens
  siRNA target sequence for CENTB2 (NM_012287.3,407-425).
gacaagtttgaccaagttt

SEQ ID NO: 24027 - DNA, 19 bp, Homo sapiens
  siRNA target sequence for CENTB2 (NM_012287.3,422-440).
gttttctgacagtcttcaa

SEQ ID NO: 24028 - DNA, 19 bp, Homo sapiens
  siRNA target sequence for CENTB2 (NM_012287.3,500-518).
gcttcagaactttgttaaa

SEQ ID NO: 24029 - DNA, 19 bp, Homo sapiens
  siRNA target sequence for CENTB2 (NM_012287.3,506-524).
gaactttgttaaagaagat

SEQ ID NO: 24030 - DNA, 19 bp, Homo sapiens
  siRNA target sequence for CENTB2 (NM_012287.3,543-561).
gccaagaagcaattcgaaa

SEQ ID NO: 24031 - DNA, 19 bp, Homo sapiens
  siRNA target sequence for CENTB2 (NM_012287.3,579-597).
gaaaatgcgttagtaaaaa

SEQ ID NO: 24032 - DNA, 19 bp, Homo sapiens
  siRNA target sequence for CENTB2 (NM_012287.3,600-618).
gcccaagtacaaagaaaca

SEQ ID NO: 24033 - DNA, 19 bp, Homo sapiens
  siRNA target sequence for CENTB2 (NM_012287.3,676-694).
gacacatagccctcgatta

SEQ ID NO: 24034 - DNA, 19 bp, Homo sapiens
  siRNA target sequence for CENTB2 (NM_012287.3,689-707).
cgattatgtgcttcagatt

SEQ ID NO: 24035 - DNA, 19 bp, Homo sapiens
  siRNA target sequence for CENTB2 (NM_012287.3,690-708).
gattatgtgcttcagatta

SEQ ID NO: 24036 - DNA, 19 bp, Homo sapiens
  siRNA target sequence for CENTB2 (NM_012287.3,702-720).
cagattaatgttcttcaat

SEQ ID NO: 24037 - DNA, 19 bp, Homo sapiens
  siRNA target sequence for CENTB2 (NM_012287.3,782-800).
ctttcatcaaggatatgat

SEQ ID NO: 24038 - DNA, 19 bp, Homo sapiens
  siRNA target sequence for CENTB2 (NM_012287.3,810-828).
gaacttggaccctacatga

SEQ ID NO: 24039 - DNA, 19 bp, Homo sapiens
  siRNA target sequence for CENTB2 (NM_012287.3,940-958).
ctaagttagaatataacgt

SEQ ID NO: 24040 - DNA, 19 bp, Homo sapiens
  siRNA target sequence for CENTB2 (NM_012287.3,964-982).
ctgcaaatggcatagttat

SEQ ID NO: 24041 - DNA, 19 bp, Homo sapiens
  siRNA target sequence for CENTB2 (NM_012287.3,973-991).
gcatagttatggaaggata

SEQ ID NO: 24042 - DNA, 19 bp, Homo sapiens
  siRNA target sequence for CENTB2 (NM_012287.3,978-996).
gttatggaaggatatctgt

SEQ ID NO: 24043 - DNA, 19 bp, Homo sapiens
  siRNA target sequence for CENTB2 (NM_012287.3,1028-1046).
gaacaggcgctggttttca

SEQ ID NO: 24044 - DNA, 19 bp, Homo sapiens
  siRNA target sequence for CENTB2 (NM_012287.3,1031-1049).
caggcgctggttttcaata

SEQ ID NO: 24045 - DNA, 19 bp, Homo sapiens
  siRNA target sequence for CENTB2 (NM_012287.3,1033-1051).
ggcgctggttttcaataca

SEQ ID NO: 24046 - DNA, 19 bp, Homo sapiens
  siRNA target sequence for CENTB2 (NM_012287.3,1036-1054).
gctggttttcaatacagaa

SEQ ID NO: 24047 - DNA, 19 bp, Homo sapiens
  siRNA target sequence for CENTB2 (NM_012287.3,1039-1057).
ggttttcaatacagaataa

SEQ ID NO: 24048 - DNA, 19 bp, Homo sapiens
  siRNA target sequence for CENTB2 (NM_012287.3,1093-1111).
cgactgtggtagttgaaga

SEQ ID NO: 24049 - DNA, 19 bp, Homo sapiens
  siRNA target sequence for CENTB2 (NM_012287.3,1115-1133).
caggctttgcacagtgaaa

SEQ ID NO: 24050 - DNA, 19 bp, Homo sapiens
  siRNA target sequence for CENTB2 (NM_012287.3,1124-1142).
cacagtgaaacattgtgaa

SEQ ID NO: 24051 - DNA, 19 bp, Homo sapiens
  siRNA target sequence for CENTB2 (NM_012287.3,1169-1187).
ggtggtctcgccaacaaaa

SEQ ID NO: 24052 - DNA, 19 bp, Homo sapiens
  siRNA target sequence for CENTB2 (NM_012287.3,1172-1190).
ggtctcgccaacaaaaagt

SEQ ID NO: 24053 - DNA, 19 bp, Homo sapiens
  siRNA target sequence for CENTB2 (NM_012287.3,1173-1191).
gtctcgccaacaaaaagtt

SEQ ID NO: 24054 - DNA, 19 bp, Homo sapiens
  siRNA target sequence for CENTB2 (NM_012287.3,1217-1235).
gctgcgccaggcatggatt

SEQ ID NO: 24055 - DNA, 19 bp, Homo sapiens
  siRNA target sequence for CENTB2 (NM_012287.3,1238-1256).
ggctgttcagaccagtatt

SEQ ID NO: 24056 - DNA, 19 bp, Homo sapiens
  siRNA target sequence for CENTB2 (NM_012287.3,1242-1260).
gttcagaccagtattgcta

SEQ ID NO: 24057 - DNA, 19 bp, Homo sapiens
  siRNA target sequence for CENTB2 (NM_012287.3,1295-1313).
gctggataagaaatcatct

SEQ ID NO: 24058 - DNA, 19 bp, Homo sapiens
  siRNA target sequence for CENTB2 (NM_012287.3,1327-1345).
gcctagattctggaaatga

SEQ ID NO: 24059 - DNA, 19 bp, Homo sapiens
  siRNA target sequence for CENTB2 (NM_012287.3,1500-1518).
cggagccttggggttcatt

SEQ ID NO: 24060 - DNA, 19 bp, Homo sapiens
  siRNA target sequence for CENTB2 (NM_012287.3,1502-1520).
gagccttggggttcatttt

SEQ ID NO: 24061 - DNA, 19 bp, Homo sapiens
  siRNA target sequence for CENTB2 (NM_012287.3,1530-1548).
cgatctttaactttagaca

SEQ ID NO: 24062 - DNA, 19 bp, Homo sapiens
  siRNA target sequence for CENTB2 (NM_012287.3,1560-1578).
gaacttttaaagcttatgt

SEQ ID NO: 24063 - DNA, 19 bp, Homo sapiens
  siRNA target sequence for CENTB2 (NM_012287.3,1577-1595).
gtgtgagttggggaatgat

SEQ ID NO: 24064 - DNA, 19 bp, Homo sapiens
  siRNA target sequence for CENTB2 (NM_012287.3,1586-1604).
ggggaatgatgttataaat

SEQ ID NO: 24065 - DNA, 19 bp, Homo sapiens
  siRNA target sequence for CENTB2 (NM_012287.3,1589-1607).
gaatgatgttataaatcga

SEQ ID NO: 24066 - DNA, 19 bp, Homo sapiens
  siRNA target sequence for CENTB2 (NM_012287.3,1790-1808).
gctgagcatttctaaattt

SEQ ID NO: 24067 - DNA, 19 bp, Homo sapiens
  siRNA target sequence for CENTB2 (NM_012287.3,1843-1861).
gttcagtcagaagtaatga

SEQ ID NO: 24068 - DNA, 19 bp, Homo sapiens
  siRNA target sequence for CENTB2 (NM_012287.3,1910-1928).
cacggtgtcagccaatagt

SEQ ID NO: 24069 - DNA, 19 bp, Homo sapiens
  siRNA target sequence for CENTB2 (NM_012287.3,1912-1930).
cggtgtcagccaatagttt

SEQ ID NO: 24070 - DNA, 19 bp, Homo sapiens
  siRNA target sequence for CENTB2 (NM_012287.3,1914-1932).
gtgtcagccaatagtttat

SEQ ID NO: 24071 - DNA, 19 bp, Homo sapiens
  siRNA target sequence for CENTB2 (NM_012287.3,1967-1985).
gtttcttgactcgaaacat

SEQ ID NO: 24072 - DNA, 19 bp, Homo sapiens
  siRNA target sequence for CENTB2 (NM_012287.3,1971-1989).
cttgactcgaaacatctta

SEQ ID NO: 24073 - DNA, 19 bp, Homo sapiens
  siRNA target sequence for CENTB2 (NM_012287.3,1976-1994).
ctcgaaacatcttaatcca

SEQ ID NO: 24074 - DNA, 19 bp, Homo sapiens
  siRNA target sequence for CENTB2 (NM_012287.3,2003-2021).
gctttatagggcgtcatat

SEQ ID NO: 24075 - DNA, 19 bp, Homo sapiens
  siRNA target sequence for CENTB2 (NM_012287.3,2011-2029).
gggcgtcatatgaaaaaaa

SEQ ID NO: 24076 - DNA, 19 bp, Homo sapiens
  siRNA target sequence for CENTB2 (NM_012287.3,2014-2032).
cgtcatatgaaaaaaacct

SEQ ID NO: 24077 - DNA, 19 bp, Homo sapiens
  siRNA target sequence for CENTB2 (NM_012287.3,2069-2087).
cgtgaactgggccaattca

SEQ ID NO: 24078 - DNA, 19 bp, Homo sapiens
  siRNA target sequence for CENTB2 (NM_012287.3,2077-2095).
gggccaattcagaggaaaa

SEQ ID NO: 24079 - DNA, 19 bp, Homo sapiens
  siRNA target sequence for CENTB2 (NM_012287.3,2166-2184).
ggtgctaatgtcaaccaaa

(The sequence listing continues in the following parts.)
